United States Patent Application Publication US 2007/0048756 A1 - sequence listing, part 22

SEQ ID NO: 763245 - DNA, 33 bp, Homo sapien
ttcttttcaaaccttcgagagcctcatgtttcc

SEQ ID NO: 763246 - DNA, 33 bp, Homo sapien
ttcttttcaaaccttctagagcctcatgtttcc

SEQ ID NO: 763247 - DNA, 33 bp, Homo sapien
actttgatctccaggaaaataggagtacacagg

SEQ ID NO: 763248 - DNA, 33 bp, Homo sapien
actttgatctccaggacaataggagtacacagg

SEQ ID NO: 763249 - DNA, 33 bp, Homo sapien
aaagccttgcatgttaagatctgaatgcatgtt

SEQ ID NO: 763250 - DNA, 33 bp, Homo sapien
aaagccttgcatgttacgatctgaatgcatgtt

SEQ ID NO: 763251 - DNA, 33 bp, Homo sapien
gtcaactgcattctcacaagaagaaaagaaaag

SEQ ID NO: 763252 - DNA, 33 bp, Homo sapien
gtcaactgcattctcagaagaagaaaagaaaag

SEQ ID NO: 763253 - DNA, 33 bp, Homo sapien
gtacctttttctgttaaactcagtacctaaatc

SEQ ID NO: 763254 - DNA, 33 bp, Homo sapien
gtacctttttctgttagactcagtacctaaatc

SEQ ID NO: 763255 - DNA, 33 bp, Homo sapien
gaccttgaatgtggaaattacatctggtacctt

SEQ ID NO: 763256 - DNA, 33 bp, Homo sapien
gaccttgaatgtggaatttacatctggtacctt

SEQ ID NO: 763257 - DNA, 33 bp, Homo sapien
attagtccttttcatgcagctgataaagacata

SEQ ID NO: 763258 - DNA, 33 bp, Homo sapien
attagtccttttcatgtagctgataaagacata

SEQ ID NO: 763259 - DNA, 33 bp, Homo sapien
gtctccatctgtgctaacgggtcattctgttcc

SEQ ID NO: 763260 - DNA, 33 bp, Homo sapien
gtctccatctgtgctaccgggtcattctgttcc

SEQ ID NO: 763261 - DNA, 33 bp, Homo sapien
aaaatgcattcccaaaatcccagtgacaatggc

SEQ ID NO: 763262 - DNA, 33 bp, Homo sapien
aaaatgcattcccaaagtcccagtgacaatggc

SEQ ID NO: 763263 - DNA, 33 bp, Homo sapien
cactttaatcagcgaaagtaccagtttgatcct

SEQ ID NO: 763264 - DNA, 33 bp, Homo sapien
cactttaatcagcgaaggtaccagtttgatcct

SEQ ID NO: 763265 - DNA, 33 bp, Homo sapien
ccggtcctgctatatgaatgatggacattatgt

SEQ ID NO: 763266 - DNA, 33 bp, Homo sapien
ccggtcctgctatatggatgatggacattatgt

SEQ ID NO: 763267 - DNA, 33 bp, Homo sapien
tatttttcctaaagaactagagtcgataaaaaa

SEQ ID NO: 763268 - DNA, 33 bp, Homo sapien
tatttttcctaaagaattagagtcgataaaaaa

SEQ ID NO: 763269 - DNA, 33 bp, Homo sapien
ccatatcaattcagtagtaaaacttgaaacctt

SEQ ID NO: 763270 - DNA, 33 bp, Homo sapien
ccatatcaattcagtattaaaacttgaaacctt

SEQ ID NO: 763271 - DNA, 33 bp, Homo sapien
catgaaataacctttaaatacagatgacagcat

SEQ ID NO: 763272 - DNA, 33 bp, Homo sapien
catgaaataacctttacatacagatgacagcat

SEQ ID NO: 763273 - DNA, 33 bp, Homo sapien
atcaagattggtgaaacgaattaaggtaatgaa

SEQ ID NO: 763274 - DNA, 33 bp, Homo sapien
atcaagattggtgaaatgaattaaggtaatgaa

SEQ ID NO: 763275 - DNA, 33 bp, Homo sapien
tttgcagaacaagtaaaacttaatgtgaattgt

SEQ ID NO: 763276 - DNA, 33 bp, Homo sapien
tttgcagaacaagtaatacttaatgtgaattgt

SEQ ID NO: 763277 - DNA, 33 bp, Homo sapien
ttaatttggcactgacggacttttttgtacagt

SEQ ID NO: 763278 - DNA, 33 bp, Homo sapien
ttaatttggcactgactgacttttttgtacagt

SEQ ID NO: 763279 - DNA, 33 bp, Homo sapien
tttgaataaagaagaactgattttgacagaaca

SEQ ID NO: 763280 - DNA, 33 bp, Homo sapien
tttgaataaagaagaattgattttgacagaaca

SEQ ID NO: 763281 - DNA, 33 bp, Homo sapien
gttttcatgaagacacaaaagagaataaagaaa

SEQ ID NO: 763282 - DNA, 33 bp, Homo sapien
gttttcatgaagacacgaaagagaataaagaaa

SEQ ID NO: 763283 - DNA, 33 bp, Homo sapien
tatccagatgtgaaacaaaaaggggcaggctta

SEQ ID NO: 763284 - DNA, 33 bp, Homo sapien
tatccagatgtgaaacgaaaaggggcaggctta

SEQ ID NO: 763285 - DNA, 33 bp, Homo sapien
ggttttgtcctgggtacaaatgcttgggacaga

SEQ ID NO: 763286 - DNA, 33 bp, Homo sapien
ggttttgtcctgggtataaatgcttgggacaga

SEQ ID NO: 763287 - DNA, 33 bp, Homo sapien
catagcacttggcttacattgaacctcagaaaa

SEQ ID NO: 763288 - DNA, 33 bp, Homo sapien
catagcacttggcttatattgaacctcagaaaa

SEQ ID NO: 763289 - DNA, 33 bp, Homo sapien
gtgaggattgacaaataagtgtatcaagtacac

SEQ ID NO: 763290 - DNA, 33 bp, Homo sapien
gtgaggattgacaaatgagtgtatcaagtacac

SEQ ID NO: 763291 - DNA, 33 bp, Homo sapien
agagaagacatctagaactgtgctggccagcac

SEQ ID NO: 763292 - DNA, 33 bp, Homo sapien
agagaagacatctagacctgtgctggccagcac

SEQ ID NO: 763293 - DNA, 33 bp, Homo sapien
ttccaagtggaaacgaccagttggcaattgatg

SEQ ID NO: 763294 - DNA, 33 bp, Homo sapien
ttccaagtggaaacgatcagttggcaattgatg

SEQ ID NO: 763295 - DNA, 33 bp, Homo sapien
gtccttcatgccgtcacctttatgcaaagactt

SEQ ID NO: 763296 - DNA, 33 bp, Homo sapien
gtccttcatgccgtcagctttatgcaaagactt

SEQ ID NO: 763297 - DNA, 33 bp, Homo sapien
aggggcggtgtgactcactggacaaagcttcga

SEQ ID NO: 763298 - DNA, 33 bp, Homo sapien
aggggcggtgtgactcgctggacaaagcttcga

SEQ ID NO: 763299 - DNA, 33 bp, Homo sapien
aatagcattttattcacgtgatacccagaattt

SEQ ID NO: 763300 - DNA, 33 bp, Homo sapien
aatagcattttattcatgtgatacccagaattt

SEQ ID NO: 763301 - DNA, 33 bp, Homo sapien
agcaaactgcccgatgaaagcaccttgctaggc

SEQ ID NO: 763302 - DNA, 33 bp, Homo sapien
agcaaactgcccgatggaagcaccttgctaggc

SEQ ID NO: 763303 - DNA, 33 bp, Homo sapien
agagagctgctcactaagaactaaactggctgg

SEQ ID NO: 763304 - DNA, 33 bp, Homo sapien
agagagctgctcactaggaactaaactggctgg

SEQ ID NO: 763305 - DNA, 33 bp, Homo sapien
cttttaaaactgataccgctacttctcctagaa

SEQ ID NO: 763306 - DNA, 33 bp, Homo sapien
cttttaaaactgatactgctacttctcctagaa

SEQ ID NO: 763307 - DNA, 33 bp, Homo sapien
tctgaaaaccaatctcacagttatccctcaaat

SEQ ID NO: 763308 - DNA, 33 bp, Homo sapien
tctgaaaaccaatctcgcagttatccctcaaat

SEQ ID NO: 763309 - DNA, 33 bp, Homo sapien
tgttctattgtactccacctgaactggcactat

SEQ ID NO: 763310 - DNA, 33 bp, Homo sapien
tgttctattgtactccccctgaactggcactat

SEQ ID NO: 763311 - DNA, 33 bp, Homo sapien
ctcagccactttaccaactggggacctccatag

SEQ ID NO: 763312 - DNA, 33 bp, Homo sapien
ctcagccactttaccagctggggacctccatag

SEQ ID NO: 763313 - DNA, 33 bp, Homo sapien
ttatgagaatattgaaaaactgtaactctcata

SEQ ID NO: 763314 - DNA, 33 bp, Homo sapien
ttatgagaatattgaacaactgtaactctcata

SEQ ID NO: 763315 - DNA, 33 bp, Homo sapien
ggagtaactagcaagagaatgcaattagaggta

SEQ ID NO: 763316 - DNA, 33 bp, Homo sapien
ggagtaactagcaagataatgcaattagaggta

SEQ ID NO: 763317 - DNA, 33 bp, Homo sapien
acagaaaacagtctacccaaatataaccaatta

SEQ ID NO: 763318 - DNA, 33 bp, Homo sapien
acagaaaacagtctactcaaatataaccaatta

SEQ ID NO: 763319 - DNA, 33 bp, Homo sapien
ttagtgaaattttagaaggagtgaaattatatg

SEQ ID NO: 763320 - DNA, 33 bp, Homo sapien
ttagtgaaattttagagggagtgaaattatatg

SEQ ID NO: 763321 - DNA, 33 bp, Homo sapien
tttagtgacaagatgacggctggttagtagaat

SEQ ID NO: 763322 - DNA, 33 bp, Homo sapien
tttagtgacaagatgatggctggttagtagaat

SEQ ID NO: 763323 - DNA, 33 bp, Homo sapien
ttccagttgaacgctactaactcgataaaaggt

SEQ ID NO: 763324 - DNA, 33 bp, Homo sapien
ttccagttgaacgctagtaactcgataaaaggt

SEQ ID NO: 763325 - DNA, 33 bp, Homo sapien
ctattacctggagccaatagaaatcctcatgga

SEQ ID NO: 763326 - DNA, 33 bp, Homo sapien
ctattacctggagccagtagaaatcctcatgga

SEQ ID NO: 763327 - DNA, 33 bp, Homo sapien
gcattcaacagaataacggcaccaaagttaatt

SEQ ID NO: 763328 - DNA, 33 bp, Homo sapien
gcattcaacagaataatggcaccaaagttaatt

SEQ ID NO: 763329 - DNA, 33 bp, Homo sapien
cttgtgtttgctttataaatagtgtcatcaaat

SEQ ID NO: 763330 - DNA, 33 bp, Homo sapien
cttgtgtttgctttatgaatagtgtcatcaaat

SEQ ID NO: 763331 - DNA, 33 bp, Homo sapien
gcttcctacagttggccctagatttttaactct

SEQ ID NO: 763332 - DNA, 33 bp, Homo sapien
gcttcctacagttggcgctagatttttaactct

SEQ ID NO: 763333 - DNA, 33 bp, Homo sapien
caatatacctgaaatccatgatagctatgaaaa

SEQ ID NO: 763334 - DNA, 33 bp, Homo sapien
caatatacctgaaatctatgatagctatgaaaa

SEQ ID NO: 763335 - DNA, 33 bp, Homo sapien
aaagtaggttgatgcacagaaatcaaactagaa

SEQ ID NO: 763336 - DNA, 33 bp, Homo sapien
aaagtaggttgatgcatagaaatcaaactagaa

SEQ ID NO: 763337 - DNA, 33 bp, Homo sapien
ttttattgatctattacatcttcaggctcactg

SEQ ID NO: 763338 - DNA, 33 bp, Homo sapien
ttttattgatctattatatcttcaggctcactg

SEQ ID NO: 763339 - DNA, 33 bp, Homo sapien
actaaaatgcaaataaagtatgaagacgttaac

SEQ ID NO: 763340 - DNA, 33 bp, Homo sapien
actaaaatgcaaataaggtatgaagacgttaac

SEQ ID NO: 763341 - DNA, 33 bp, Homo sapien
tgattgtctgaaaatacaagtttacccttaatc

SEQ ID NO: 763342 - DNA, 33 bp, Homo sapien
tgattgtctgaaaatataagtttacccttaatc

SEQ ID NO: 763343 - DNA, 33 bp, Homo sapien
aggtattactacctgaacaaacacagagaaaga

SEQ ID NO: 763344 - DNA, 33 bp, Homo sapien
aggtattactacctgaccaaacacagagaaaga

SEQ ID NO: 763345 - DNA, 33 bp, Homo sapien
caaaaaccttccaacgaagaaaagtcttagacc

SEQ ID NO: 763346 - DNA, 33 bp, Homo sapien
caaaaaccttccaacggagaaaagtcttagacc

SEQ ID NO: 763347 - DNA, 33 bp, Homo sapien
ctattttgttgatttgaaacatagtgtcttttt

SEQ ID NO: 763348 - DNA, 33 bp, Homo sapien
ctattttgttgatttggaacatagtgtcttttt

SEQ ID NO: 763349 - DNA, 33 bp, Homo sapien
ggcaaattacagtgacagtaaaaatattagtgg

SEQ ID NO: 763350 - DNA, 33 bp, Homo sapien
ggcaaattacagtgacggtaaaaatattagtgg

SEQ ID NO: 763351 - DNA, 33 bp, Homo sapien
catagagttaatgaagaccaggaactaaacgga

SEQ ID NO: 763352 - DNA, 33 bp, Homo sapien
catagagttaatgaaggccaggaactaaacgga

SEQ ID NO: 763353 - DNA, 33 bp, Homo sapien
atttataaaatatctaaaaaagacagaagctgg

SEQ ID NO: 763354 - DNA, 33 bp, Homo sapien
atttataaaatatctacaaaagacagaagctgg

SEQ ID NO: 763355 - DNA, 33 bp, Homo sapien
tatgtaagatcccataggtatgtaactatttta

SEQ ID NO: 763356 - DNA, 33 bp, Homo sapien
tatgtaagatcccatatgtatgtaactatttta

SEQ ID NO: 763357 - DNA, 33 bp, Homo sapien
ggactaaaattagatacgtttttgacaatgagc

SEQ ID NO: 763358 - DNA, 33 bp, Homo sapien
ggactaaaattagatatgtttttgacaatgagc

SEQ ID NO: 763359 - DNA, 33 bp, Homo sapien
caagggtatgagattcaaggaaaatgacacact

SEQ ID NO: 763360 - DNA, 33 bp, Homo sapien
caagggtatgagattcgaggaaaatgacacact

SEQ ID NO: 763361 - DNA, 33 bp, Homo sapien
gtgaagactgagaccaatatattatgcaaaaaa

SEQ ID NO: 763362 - DNA, 33 bp, Homo sapien
gtgaagactgagaccagtatattatgcaaaaaa

SEQ ID NO: 763363 - DNA, 33 bp, Homo sapien
tagtgtatcatgggtaacccagctaattgtatt

SEQ ID NO: 763364 - DNA, 33 bp, Homo sapien
tagtgtatcatgggtatcccagctaattgtatt

SEQ ID NO: 763365 - DNA, 33 bp, Homo sapien
atacggcctataaatgcagttgcaaatcataat

SEQ ID NO: 763366 - DNA, 33 bp, Homo sapien
atacggcctataaatgtagttgcaaatcataat

SEQ ID NO: 763367 - DNA, 33 bp, Homo sapien
gacagatcagtggagccatgtaagtgaaacaca

SEQ ID NO: 763368 - DNA, 33 bp, Homo sapien
gacagatcagtggagctatgtaagtgaaacaca

SEQ ID NO: 763369 - DNA, 33 bp, Homo sapien
ttataattttctgcaacgtgccctacttgtcaa

SEQ ID NO: 763370 - DNA, 33 bp, Homo sapien
ttataattttctgcaatgtgccctacttgtcaa

SEQ ID NO: 763371 - DNA, 33 bp, Homo sapien
aatgcttatggttggagctactaattaacagat

SEQ ID NO: 763372 - DNA, 33 bp, Homo sapien
aatgcttatggttggatctactaattaacagat

SEQ ID NO: 763373 - DNA, 33 bp, Homo sapien
agaagtggagagaacaataggaaaaaatgctta

SEQ ID NO: 763374 - DNA, 33 bp, Homo sapien
agaagtggagagaacagtaggaaaaaatgctta

SEQ ID NO: 763375 - DNA, 33 bp, Homo sapien
agcagttgaatactcacctaagttcacacagtt

SEQ ID NO: 763376 - DNA, 33 bp, Homo sapien
agcagttgaatactcatctaagttcacacagtt

SEQ ID NO: 763377 - DNA, 33 bp, Homo sapien
atttacagataaatgcaatggcagaaaagaaat

SEQ ID NO: 763378 - DNA, 33 bp, Homo sapien
atttacagataaatgcgatggcagaaaagaaat

SEQ ID NO: 763379 - DNA, 33 bp, Homo sapien
aaccaagcagtcggaaaaggacctcattacaaa

SEQ ID NO: 763380 - DNA, 33 bp, Homo sapien
aaccaagcagtcggaacaggacctcattacaaa

SEQ ID NO: 763381 - DNA, 33 bp, Homo sapien
attcttatgtcaaaacacattcatttttcaatc

SEQ ID NO: 763382 - DNA, 33 bp, Homo sapien
attcttatgtcaaaacgcattcatttttcaatc

SEQ ID NO: 763383 - DNA, 33 bp, Homo sapien
gaaatattgtcaatgacggtgaaggtcaaatat

SEQ ID NO: 763384 - DNA, 33 bp, Homo sapien
gaaatattgtcaatgagggtgaaggtcaaatat

SEQ ID NO: 763385 - DNA, 33 bp, Homo sapien
tgggagcatctgacaaagcatttgcatcatcct

SEQ ID NO: 763386 - DNA, 33 bp, Homo sapien
tgggagcatctgacaaggcatttgcatcatcct

SEQ ID NO: 763387 - DNA, 33 bp, Homo sapien
atatgtcattgtgaataattaactttcagagcc

SEQ ID NO: 763388 - DNA, 33 bp, Homo sapien
atatgtcattgtgaatgattaactttcagagcc

SEQ ID NO: 763389 - DNA, 33 bp, Homo sapien
catggctacttaacacactgaatcctaattact

SEQ ID NO: 763390 - DNA, 33 bp, Homo sapien
catggctacttaacacgctgaatcctaattact

SEQ ID NO: 763391 - DNA, 33 bp, Homo sapien
ctaggaaagtcagtgacgtaatttatcctgtgt

SEQ ID NO: 763392 - DNA, 33 bp, Homo sapien
ctaggaaagtcagtgatgtaatttatcctgtgt

SEQ ID NO: 763393 - DNA, 33 bp, Homo sapien
attttcttaataaatcacctccacaagaaacct

SEQ ID NO: 763394 - DNA, 33 bp, Homo sapien
attttcttaataaatcgcctccacaagaaacct

SEQ ID NO: 763395 - DNA, 33 bp, Homo sapien
tttgtttgttcccttaagtcactaagacagcag

SEQ ID NO: 763396 - DNA, 33 bp, Homo sapien
tttgtttgttcccttatgtcactaagacagcag

SEQ ID NO: 763397 - DNA, 33 bp, Homo sapien
attggctaaacctcataaattgatgtataattg

SEQ ID NO: 763398 - DNA, 33 bp, Homo sapien
attggctaaacctcatgaattgatgtataattg

SEQ ID NO: 763399 - DNA, 33 bp, Homo sapien
aacttaactcacgacacagaatggaatttttta

SEQ ID NO: 763400 - DNA, 33 bp, Homo sapien
aacttaactcacgacatagaatggaatttttta

SEQ ID NO: 763401 - DNA, 33 bp, Homo sapien
attataacataaagccaaaagtgaaagtgtttg

SEQ ID NO: 763402 - DNA, 33 bp, Homo sapien
attataacataaagccgaaagtgaaagtgtttg

SEQ ID NO: 763403 - DNA, 33 bp, Homo sapien
tgcccactgatgacacagtcttgccagtcacca

SEQ ID NO: 763404 - DNA, 33 bp, Homo sapien
tgcccactgatgacacggtcttgccagtcacca

SEQ ID NO: 763405 - DNA, 33 bp, Homo sapien
aaaaagaatcataagaatctaatcaggacctgt

SEQ ID NO: 763406 - DNA, 33 bp, Homo sapien
aaaaagaatcataagagtctaatcaggacctgt

SEQ ID NO: 763407 - DNA, 33 bp, Homo sapien
atatcacaggttttcacaaggctagagtataaa

SEQ ID NO: 763408 - DNA, 33 bp, Homo sapien
atatcacaggttttcataaggctagagtataaa

SEQ ID NO: 763409 - DNA, 33 bp, Homo sapien
cttgttaagactgtcaataactgttctcccagt

SEQ ID NO: 763410 - DNA, 33 bp, Homo sapien
cttgttaagactgtcagtaactgttctcccagt

SEQ ID NO: 763411 - DNA, 33 bp, Homo sapien
tctcttaaatttaaccagaaagaatgtcacgat

SEQ ID NO: 763412 - DNA, 33 bp, Homo sapien
tctcttaaatttaaccggaaagaatgtcacgat

SEQ ID NO: 763413 - DNA, 33 bp, Homo sapien
attacagacaagaaaaaggagattagaagatgt

SEQ ID NO: 763414 - DNA, 33 bp, Homo sapien
attacagacaagaaaatggagattagaagatgt

SEQ ID NO: 763415 - DNA, 33 bp, Homo sapien
aaattggtctgaattgaattttaatcacttaca

SEQ ID NO: 763416 - DNA, 33 bp, Homo sapien
aaattggtctgaattggattttaatcacttaca

SEQ ID NO: 763417 - DNA, 33 bp, Homo sapien
tgttctatagcaacaacgataaccaaaaattac

SEQ ID NO: 763418 - DNA, 33 bp, Homo sapien
tgttctatagcaacaatgataaccaaaaattac

SEQ ID NO: 763419 - DNA, 33 bp, Homo sapien
atatatactaccagccaatcctcagaccccctc

SEQ ID NO: 763420 - DNA, 33 bp, Homo sapien
atatatactaccagcctatcctcagaccccctc

SEQ ID NO: 763421 - DNA, 33 bp, Homo sapien
gaattcacagagccagaagcttgcctgtggaaa

SEQ ID NO: 763422 - DNA, 33 bp, Homo sapien
gaattcacagagccagcagcttgcctgtggaaa

SEQ ID NO: 763423 - DNA, 33 bp, Homo sapien
aaagacaagattatcacaattacagcagctgta

SEQ ID NO: 763424 - DNA, 33 bp, Homo sapien
aaagacaagattatcataattacagcagctgta

SEQ ID NO: 763425 - DNA, 33 bp, Homo sapien
gtggactttgtaaccaatataaccagatctgat

SEQ ID NO: 763426 - DNA, 33 bp, Homo sapien
gtggactttgtaaccagtataaccagatctgat

SEQ ID NO: 763427 - DNA, 33 bp, Homo sapien
tcaccagaaactgaccactctgacactctgatc

SEQ ID NO: 763428 - DNA, 33 bp, Homo sapien
tcaccagaaactgaccgctctgacactctgatc

SEQ ID NO: 763429 - DNA, 33 bp, Homo sapien
tgcatgataaagtgatgaagttcaggcttccaa

SEQ ID NO: 763430 - DNA, 33 bp, Homo sapien
tgcatgataaagtgattaagttcaggcttccaa

SEQ ID NO: 763431 - DNA, 33 bp, Homo sapien
gaccactttttttatacgatgttcactgttgac

SEQ ID NO: 763432 - DNA, 33 bp, Homo sapien
gaccactttttttatatgatgttcactgttgac

SEQ ID NO: 763433 - DNA, 33 bp, Homo sapien
gatcactcttacgaaactggaagaaaaggtaaa

SEQ ID NO: 763434 - DNA, 33 bp, Homo sapien
gatcactcttacgaaattggaagaaaaggtaaa

SEQ ID NO: 763435 - DNA, 33 bp, Homo sapien
acgttgtttctccataaaacaccaaagtgctct

SEQ ID NO: 763436 - DNA, 33 bp, Homo sapien
acgttgtttctccatataacaccaaagtgctct

SEQ ID NO: 763437 - DNA, 33 bp, Homo sapien
cctctttctagcatctgaagccatccttttttg

SEQ ID NO: 763438 - DNA, 33 bp, Homo sapien
cctctttctagcatcttaagccatccttttttg

SEQ ID NO: 763439 - DNA, 33 bp, Homo sapien
tcatgttgggttgtcaataatcctaattctttt

SEQ ID NO: 763440 - DNA, 33 bp, Homo sapien
tcatgttgggttgtcagtaatcctaattctttt

SEQ ID NO: 763441 - DNA, 33 bp, Homo sapien
aaaactttgttcacaaatgatatgattatttaa

SEQ ID NO: 763442 - DNA, 33 bp, Homo sapien
aaaactttgttcacaattgatatgattatttaa

SEQ ID NO: 763443 - DNA, 33 bp, Homo sapien
tattttgcaccaaaccaaaaagctaaagaagaa

SEQ ID NO: 763444 - DNA, 33 bp, Homo sapien
tattttgcaccaaacctaaaagctaaagaagaa

SEQ ID NO: 763445 - DNA, 33 bp, Homo sapien
ggctttaggtgtgacaaagcatactcccagcca

SEQ ID NO: 763446 - DNA, 33 bp, Homo sapien
ggctttaggtgtgacagagcatactcccagcca

SEQ ID NO: 763447 - DNA, 33 bp, Homo sapien
ccctgaagggataaccaatgcctaagagcattc

SEQ ID NO: 763448 - DNA, 33 bp, Homo sapien
ccctgaagggataacccatgcctaagagcattc

SEQ ID NO: 763449 - DNA, 33 bp, Homo sapien
atgaatcaaagtgttaagtactggtaattagaa

SEQ ID NO: 763450 - DNA, 33 bp, Homo sapien
atgaatcaaagtgttaggtactggtaattagaa

SEQ ID NO: 763451 - DNA, 33 bp, Homo sapien
tccagccttaatctgagcatgggaaaattttcc

SEQ ID NO: 763452 - DNA, 33 bp, Homo sapien
tccagccttaatctgatcatgggaaaattttcc

SEQ ID NO: 763453 - DNA, 33 bp, Homo sapien
tgaatggaagagtaaacatacgcaacacatact

SEQ ID NO: 763454 - DNA, 33 bp, Homo sapien
tgaatggaagagtaaagatacgcaacacatact

SEQ ID NO: 763455 - DNA, 33 bp, Homo sapien
tgctaaattacacataactaaatgtcaccctta

SEQ ID NO: 763456 - DNA, 33 bp, Homo sapien
tgctaaattacacatagctaaatgtcaccctta

SEQ ID NO: 763457 - DNA, 33 bp, Homo sapien
taactagcgtatatgcagattcttagagccttt

SEQ ID NO: 763458 - DNA, 33 bp, Homo sapien
taactagcgtatatgctgattcttagagccttt

SEQ ID NO: 763459 - DNA, 33 bp, Homo sapien
atgtaaactgttttgccgaattggaagatgcac

SEQ ID NO: 763460 - DNA, 33 bp, Homo sapien
atgtaaactgttttgctgaattggaagatgcac

SEQ ID NO: 763461 - DNA, 33 bp, Homo sapien
gagatgtagaaaggaaataagtcctgtttaatg

SEQ ID NO: 763462 - DNA, 33 bp, Homo sapien
gagatgtagaaaggaagtaagtcctgtttaatg

SEQ ID NO: 763463 - DNA, 33 bp, Homo sapien
gctttattgaagtctaacctgtgtcagatgttt

SEQ ID NO: 763464 - DNA, 33 bp, Homo sapien
gctttattgaagtctaccctgtgtcagatgttt

SEQ ID NO: 763465 - DNA, 33 bp, Homo sapien
taatggctgtgcatacaaaacagatctcaacta

SEQ ID NO: 763466 - DNA, 33 bp, Homo sapien
taatggctgtgcataccaaacagatctcaacta

SEQ ID NO: 763467 - DNA, 33 bp, Homo sapien
attgtcaaaaatcaacggatcctagatgtgtag

SEQ ID NO: 763468 - DNA, 33 bp, Homo sapien
attgtcaaaaatcaactgatcctagatgtgtag

SEQ ID NO: 763469 - DNA, 33 bp, Homo sapien
cttgaagacgttttacccccagattatgaaagt

SEQ ID NO: 763470 - DNA, 33 bp, Homo sapien
cttgaagacgttttactcccagattatgaaagt

SEQ ID NO: 763471 - DNA, 33 bp, Homo sapien
atgaaagtgttacttacagtcatgtttaagttt

SEQ ID NO: 763472 - DNA, 33 bp, Homo sapien
atgaaagtgttacttatagtcatgtttaagttt

SEQ ID NO: 763473 - DNA, 33 bp, Homo sapien
attggtctcttctataccctggtatgtgtatat

SEQ ID NO: 763474 - DNA, 33 bp, Homo sapien
attggtctcttctatatcctggtatgtgtatat

SEQ ID NO: 763475 - DNA, 33 bp, Homo sapien
atagaattggattcaaacttaattcacatgatc

SEQ ID NO: 763476 - DNA, 33 bp, Homo sapien
atagaattggattcaagcttaattcacatgatc

SEQ ID NO: 763477 - DNA, 33 bp, Homo sapien
catccaaaacatatcaataatcttgtaccagca

SEQ ID NO: 763478 - DNA, 33 bp, Homo sapien
catccaaaacatatcagtaatcttgtaccagca

SEQ ID NO: 763479 - DNA, 33 bp, Homo sapien
ccacttaaattcctccccatacttgtctctcat

SEQ ID NO: 763480 - DNA, 33 bp, Homo sapien
ccacttaaattcctccgcatacttgtctctcat

SEQ ID NO: 763481 - DNA, 33 bp, Homo sapien
aacagagcaccaggtaagttcctagcattcctg

SEQ ID NO: 763482 - DNA, 33 bp, Homo sapien
aacagagcaccaggtaggttcctagcattcctg

SEQ ID NO: 763483 - DNA, 33 bp, Homo sapien
gcagctccactcctataagtctgcaggatacag

SEQ ID NO: 763484 - DNA, 33 bp, Homo sapien
gcagctccactcctatgagtctgcaggatacag

SEQ ID NO: 763485 - DNA, 33 bp, Homo sapien
ttccataagattataagggatttgctctattat

SEQ ID NO: 763486 - DNA, 33 bp, Homo sapien
ttccataagattataatggatttgctctattat

SEQ ID NO: 763487 - DNA, 33 bp, Homo sapien
aggagacctatgagtaggtgtctagaaaagaca

SEQ ID NO: 763488 - DNA, 33 bp, Homo sapien
aggagacctatgagtatgtgtctagaaaagaca

SEQ ID NO: 763489 - DNA, 33 bp, Homo sapien
aaaagtaagacataaaataacttgattcgactt

SEQ ID NO: 763490 - DNA, 33 bp, Homo sapien
aaaagtaagacataaagtaacttgattcgactt

SEQ ID NO: 763491 - DNA, 33 bp, Homo sapien
ccagaggttactttcaacaccgtcttggttttg

SEQ ID NO: 763492 - DNA, 33 bp, Homo sapien
ccagaggttactttcagcaccgtcttggttttg

SEQ ID NO: 763493 - DNA, 33 bp, Homo sapien
aatcagtaacactgcaatcaccagctgcatctc

SEQ ID NO: 763494 - DNA, 33 bp, Homo sapien
aatcagtaacactgcagtcaccagctgcatctc

SEQ ID NO: 763495 - DNA, 33 bp, Homo sapien
ttctacacaaagatgaaatgttgcttcttgcta

SEQ ID NO: 763496 - DNA, 33 bp, Homo sapien
ttctacacaaagatgagatgttgcttcttgcta

SEQ ID NO: 763497 - DNA, 33 bp, Homo sapien
tataggatagaaatcaatacttacttcatgagc

SEQ ID NO: 763498 - DNA, 33 bp, Homo sapien
tataggatagaaatcagtacttacttcatgagc

SEQ ID NO: 763499 - DNA, 33 bp, Homo sapien
actggtgagttgtttaggttttcttccatatac

SEQ ID NO: 763500 - DNA, 33 bp, Homo sapien
actggtgagttgtttatgttttcttccatatac

SEQ ID NO: 763501 - DNA, 33 bp, Homo sapien
gaatttgactacattacatactttatataagtg

SEQ ID NO: 763502 - DNA, 33 bp, Homo sapien
gaatttgactacattagatactttatataagtg

SEQ ID NO: 763503 - DNA, 33 bp, Homo sapien
aacagaactaataaagcctattcaaatataata

SEQ ID NO: 763504 - DNA, 33 bp, Homo sapien
aacagaactaataaaggctattcaaatataata

SEQ ID NO: 763505 - DNA, 33 bp, Homo sapien
caagtcatgtctaaataatctgcaacattataa

SEQ ID NO: 763506 - DNA, 33 bp, Homo sapien
caagtcatgtctaaatgatctgcaacattataa

SEQ ID NO: 763507 - DNA, 33 bp, Homo sapien
ccacctctccatgatccctttcatcaaaatgat

SEQ ID NO: 763508 - DNA, 33 bp, Homo sapien
ccacctctccatgatctctttcatcaaaatgat

SEQ ID NO: 763509 - DNA, 33 bp, Homo sapien
tacgagtttcatattacacaactagcaaaattc

SEQ ID NO: 763510 - DNA, 33 bp, Homo sapien
tacgagtttcatattatacaactagcaaaattc

SEQ ID NO: 763511 - DNA, 33 bp, Homo sapien
tggacctactacagaaaagattgctgagtaagg

SEQ ID NO: 763512 - DNA, 33 bp, Homo sapien
tggacctactacagaagagattgctgagtaagg

SEQ ID NO: 763513 - DNA, 33 bp, Homo sapien
atataaaaatcccatcccacatgtttttctcct

SEQ ID NO: 763514 - DNA, 33 bp, Homo sapien
atataaaaatcccatctcacatgtttttctcct

SEQ ID NO: 763515 - DNA, 33 bp, Homo sapien
ataaatattagaactgaaaactgaggctaacaa

SEQ ID NO: 763516 - DNA, 33 bp, Homo sapien
ataaatattagaactggaaactgaggctaacaa

SEQ ID NO: 763517 - DNA, 33 bp, Homo sapien
tactcctcaggtcagaccagtaatcagtataaa

SEQ ID NO: 763518 - DNA, 33 bp, Homo sapien
tactcctcaggtcagatcagtaatcagtataaa

SEQ ID NO: 763519 - DNA, 33 bp, Homo sapien
attattcttaggatcacggttacttggcagaaa

SEQ ID NO: 763520 - DNA, 33 bp, Homo sapien
attattcttaggatcagggttacttggcagaaa

SEQ ID NO: 763521 - DNA, 33 bp, Homo sapien
tagtgcttgggactcacacctcatatcacactt

SEQ ID NO: 763522 - DNA, 33 bp, Homo sapien
tagtgcttgggactcatacctcatatcacactt

SEQ ID NO: 763523 - DNA, 33 bp, Homo sapien
gaccagactcttaacccctaaataatgttgtgg

SEQ ID NO: 763524 - DNA, 33 bp, Homo sapien
gaccagactcttaacctctaaataatgttgtgg

SEQ ID NO: 763525 - DNA, 33 bp, Homo sapien
atgaaacaggtagccacagccctacacagtaaa

SEQ ID NO: 763526 - DNA, 33 bp, Homo sapien
atgaaacaggtagccagagccctacacagtaaa

SEQ ID NO: 763527 - DNA, 33 bp, Homo sapien
ttgacaattggaagcaaagaaatgaaaaatcat

SEQ ID NO: 763528 - DNA, 33 bp, Homo sapien
ttgacaattggaagcagagaaatgaaaaatcat

SEQ ID NO: 763529 - DNA, 33 bp, Homo sapien
attaagataaacaaaaagatccattatcataaa

SEQ ID NO: 763530 - DNA, 33 bp, Homo sapien
attaagataaacaaaaggatccattatcataaa

SEQ ID NO: 763531 - DNA, 33 bp, Homo sapien
atctcactgtctgaaacaaaatagaaagcacac

SEQ ID NO: 763532 - DNA, 33 bp, Homo sapien
atctcactgtctgaaataaaatagaaagcacac

SEQ ID NO: 763533 - DNA, 33 bp, Homo sapien
aaccatttatcgaatacaggaagaaatatgatg

SEQ ID NO: 763534 - DNA, 33 bp, Homo sapien
aaccatttatcgaatagaggaagaaatatgatg

SEQ ID NO: 763535 - DNA, 33 bp, Homo sapien
gaactgctggcggcaactcagttatggtttaat

SEQ ID NO: 763536 - DNA, 33 bp, Homo sapien
gaactgctggcggcaattcagttatggtttaat

SEQ ID NO: 763537 - DNA, 33 bp, Homo sapien
ctatcaaaatacctcaaatctggcatataagga

SEQ ID NO: 763538 - DNA, 33 bp, Homo sapien
ctatcaaaatacctcacatctggcatataagga

SEQ ID NO: 763539 - DNA, 33 bp, Homo sapien
ctaataatgccattagcaatgtaaacatgaatt

SEQ ID NO: 763540 - DNA, 33 bp, Homo sapien
ctaataatgccattagtaatgtaaacatgaatt

SEQ ID NO: 763541 - DNA, 33 bp, Homo sapien
ccagtatgatgatttcccttctaccttggtggt

SEQ ID NO: 763542 - DNA, 33 bp, Homo sapien
ccagtatgatgatttctcttctaccttggtggt

SEQ ID NO: 763543 - DNA, 33 bp, Homo sapien
caaatgaacagacaaaagagcttgacccacagg

SEQ ID NO: 763544 - DNA, 33 bp, Homo sapien
caaatgaacagacaaaggagcttgacccacagg

SEQ ID NO: 763545 - DNA, 33 bp, Homo sapien
agcaccaggattttagacaggaaggaacaggct

SEQ ID NO: 763546 - DNA, 33 bp, Homo sapien
agcaccaggattttaggcaggaaggaacaggct

SEQ ID NO: 763547 - DNA, 33 bp, Homo sapien
ttaaaaacacaggggcaacattgtttgaaataa

SEQ ID NO: 763548 - DNA, 33 bp, Homo sapien
ttaaaaacacaggggctacattgtttgaaataa

SEQ ID NO: 763549 - DNA, 33 bp, Homo sapien
ctgtagatcttagtaaactcagtatatggttat

SEQ ID NO: 763550 - DNA, 33 bp, Homo sapien
ctgtagatcttagtaacctcagtatatggttat

SEQ ID NO: 763551 - DNA, 33 bp, Homo sapien
aaaaatatctgctttccaagaatacagtttgct

SEQ ID NO: 763552 - DNA, 33 bp, Homo sapien
aaaaatatctgctttctaagaatacagtttgct

SEQ ID NO: 763553 - DNA, 33 bp, Homo sapien
cagaaatagctggttaaacttcaccttgaatga

SEQ ID NO: 763554 - DNA, 33 bp, Homo sapien
cagaaatagctggttagacttcaccttgaatga

SEQ ID NO: 763555 - DNA, 33 bp, Homo sapien
gtcagttataattagaaaaacacaatacgtgct

SEQ ID NO: 763556 - DNA, 33 bp, Homo sapien
gtcagttataattagagaaacacaatacgtgct

SEQ ID NO: 763557 - DNA, 33 bp, Homo sapien
actatgaacgtgggtaagcagaactgcacagca

SEQ ID NO: 763558 - DNA, 33 bp, Homo sapien
actatgaacgtgggtaggcagaactgcacagca

SEQ ID NO: 763559 - DNA, 33 bp, Homo sapien
tatttgctgtgcagacacctttaatttgatttc

SEQ ID NO: 763560 - DNA, 33 bp, Homo sapien
tatttgctgtgcagacgcctttaatttgatttc

SEQ ID NO: 763561 - DNA, 33 bp, Homo sapien
ctgtattttaaactaacgcctattctctcagag

SEQ ID NO: 763562 - DNA, 33 bp, Homo sapien
ctgtattttaaactaatgcctattctctcagag

SEQ ID NO: 763563 - DNA, 33 bp, Homo sapien
gaataccagttcctccagacttttgaatgctgt

SEQ ID NO: 763564 - DNA, 33 bp, Homo sapien
gaataccagttcctccggacttttgaatgctgt

SEQ ID NO: 763565 - DNA, 33 bp, Homo sapien
ccaatggaggcgtttcccactgtctaaacttat

SEQ ID NO: 763566 - DNA, 33 bp, Homo sapien
ccaatggaggcgtttctcactgtctaaacttat

SEQ ID NO: 763567 - DNA, 33 bp, Homo sapien
ttgattgccaagttaaggagtttagattcaatc

SEQ ID NO: 763568 - DNA, 33 bp, Homo sapien
ttgattgccaagttaatgagtttagattcaatc

SEQ ID NO: 763569 - DNA, 33 bp, Homo sapien
aggatccaagagtacaagtgtcagtaggagaag

SEQ ID NO: 763570 - DNA, 33 bp, Homo sapien
aggatccaagagtacaggtgtcagtaggagaag

SEQ ID NO: 763571 - DNA, 33 bp, Homo sapien
ggtaggactgtgtcataaacccccagatatact

SEQ ID NO: 763572 - DNA, 33 bp, Homo sapien
ggtaggactgtgtcatgaacccccagatatact

SEQ ID NO: 763573 - DNA, 33 bp, Homo sapien
tcaaattcttgtttagccacctattagttatgt

SEQ ID NO: 763574 - DNA, 33 bp, Homo sapien
tcaaattcttgtttagtcacctattagttatgt

SEQ ID NO: 763575 - DNA, 33 bp, Homo sapien
gtattgaaatgctaaaaaaggagtataattgaa

SEQ ID NO: 763576 - DNA, 33 bp, Homo sapien
gtattgaaatgctaaacaaggagtataattgaa

SEQ ID NO: 763577 - DNA, 33 bp, Homo sapien
aatacattactgttaacatttctgccataacaa

SEQ ID NO: 763578 - DNA, 33 bp, Homo sapien
aatacattactgttaatatttctgccataacaa

SEQ ID NO: 763579 - DNA, 33 bp, Homo sapien
tgttcttttttaccagacatcaagttagagaca

SEQ ID NO: 763580 - DNA, 33 bp, Homo sapien
tgttcttttttaccaggcatcaagttagagaca

SEQ ID NO: 763581 - DNA, 33 bp, Homo sapien
cttcaattatttagataactccagagaataggg

SEQ ID NO: 763582 - DNA, 33 bp, Homo sapien
cttcaattatttagattactccagagaataggg

SEQ ID NO: 763583 - DNA, 33 bp, Homo sapien
ccttggaggatttccaaaacagtcatgaagcca

SEQ ID NO: 763584 - DNA, 33 bp, Homo sapien
ccttggaggatttccagaacagtcatgaagcca

SEQ ID NO: 763585 - DNA, 33 bp, Homo sapien
gccatctgacctttgacaaatgtgacaaaaaca

SEQ ID NO: 763586 - DNA, 33 bp, Homo sapien
gccatctgacctttgataaatgtgacaaaaaca

SEQ ID NO: 763587 - DNA, 33 bp, Homo sapien
gcatgggactacctcacagttttacatgaggtc

SEQ ID NO: 763588 - DNA, 33 bp, Homo sapien
gcatgggactacctcagagttttacatgaggtc

SEQ ID NO: 763589 - DNA, 33 bp, Homo sapien
cacagaacattgaaacacatactgggatttaat

SEQ ID NO: 763590 - DNA, 33 bp, Homo sapien
cacagaacattgaaactcatactgggatttaat

SEQ ID NO: 763591 - DNA, 33 bp, Homo sapien
tcaggcaaagtgtacccgcatgctatacaagat

SEQ ID NO: 763592 - DNA, 33 bp, Homo sapien
tcaggcaaagtgtacctgcatgctatacaagat

SEQ ID NO: 763593 - DNA, 33 bp, Homo sapien
aagcacttactgaactaaaatcaggatccaagg

SEQ ID NO: 763594 - DNA, 33 bp, Homo sapien
aagcacttactgaactgaaatcaggatccaagg

SEQ ID NO: 763595 - DNA, 33 bp, Homo sapien
tggataacgatggagaaaagatcaacaatacat

SEQ ID NO: 763596 - DNA, 33 bp, Homo sapien
tggataacgatggagagaagatcaacaatacat

SEQ ID NO: 763597 - DNA, 33 bp, Homo sapien
ctccatcgttatccaacctacagatccttattc

SEQ ID NO: 763598 - DNA, 33 bp, Homo sapien
ctccatcgttatccaatctacagatccttattc

SEQ ID NO: 763599 - DNA, 33 bp, Homo sapien
agttagaaaccaaaggaagtgtcaataacatta

SEQ ID NO: 763600 - DNA, 33 bp, Homo sapien
agttagaaaccaaagggagtgtcaataacatta

SEQ ID NO: 763601 - DNA, 33 bp, Homo sapien
acaatagatttttctcaagacttcaattaccac

SEQ ID NO: 763602 - DNA, 33 bp, Homo sapien
acaatagatttttctcgagacttcaattaccac

SEQ ID NO: 763603 - DNA, 33 bp, Homo sapien
aactccctgccttctacatacaacaagccaaga

SEQ ID NO: 763604 - DNA, 33 bp, Homo sapien
aactccctgccttctatatacaacaagccaaga

SEQ ID NO: 763605 - DNA, 33 bp, Homo sapien
gcaccccttgaaaagacagtcaacagtattcac

SEQ ID NO: 763606 - DNA, 33 bp, Homo sapien
gcaccccttgaaaagagagtcaacagtattcac

SEQ ID NO: 763607 - DNA, 33 bp, Homo sapien
ttcggggaactatgcaaatgtctgaaatggcag

SEQ ID NO: 763608 - DNA, 33 bp, Homo sapien
ttcggggaactatgcatatgtctgaaatggcag

SEQ ID NO: 763609 - DNA, 33 bp, Homo sapien
ttgcattttatcccaaagagtttggactctgtg

SEQ ID NO: 763610 - DNA, 33 bp, Homo sapien
ttgcattttatcccaaggagtttggactctgtg

SEQ ID NO: 763611 - DNA, 33 bp, Homo sapien
taagcctaatgatcaacctaagtgacagattgg

SEQ ID NO: 763612 - DNA, 33 bp, Homo sapien
taagcctaatgatcaagctaagtgacagattgg

SEQ ID NO: 763613 - DNA, 33 bp, Homo sapien
ccaaggacaccacttacgcagttttcccacatg

SEQ ID NO: 763614 - DNA, 33 bp, Homo sapien
ccaaggacaccacttatgcagttttcccacatg

SEQ ID NO: 763615 - DNA, 33 bp, Homo sapien
tgatttttctgagtgtcaatttttttaagtaat

SEQ ID NO: 763616 - DNA, 33 bp, Homo sapien
tgatttttctgagtgtgaatttttttaagtaat

SEQ ID NO: 763617 - DNA, 33 bp, Homo sapien
ggtataatgtgaaagaggtattgattcatacgt

SEQ ID NO: 763618 - DNA, 33 bp, Homo sapien
ggtataatgtgaaagatgtattgattcatacgt

SEQ ID NO: 763619 - DNA, 33 bp, Homo sapien
ctcaccagacactaaacgtgctagtcccttgat

SEQ ID NO: 763620 - DNA, 33 bp, Homo sapien
ctcaccagacactaaatgtgctagtcccttgat

SEQ ID NO: 763621 - DNA, 33 bp, Homo sapien
ccttctgccatttgaaaatatagcaagaaagta

SEQ ID NO: 763622 - DNA, 33 bp, Homo sapien
ccttctgccatttgaagatatagcaagaaagta

SEQ ID NO: 763623 - DNA, 33 bp, Homo sapien
gaaaaacctaagagaaattcaggtctttaggat

SEQ ID NO: 763624 - DNA, 33 bp, Homo sapien
gaaaaacctaagagaatttcaggtctttaggat

SEQ ID NO: 763625 - DNA, 33 bp, Homo sapien
agagcaggaatcttagaatattagactcttagg

SEQ ID NO: 763626 - DNA, 33 bp, Homo sapien
agagcaggaatcttaggatattagactcttagg

SEQ ID NO: 763627 - DNA, 33 bp, Homo sapien
ctaagctctacatttaagatagcacaattcagc

SEQ ID NO: 763628 - DNA, 33 bp, Homo sapien
ctaagctctacatttaggatagcacaattcagc

SEQ ID NO: 763629 - DNA, 33 bp, Homo sapien
taatgaaaggtgttgaaaaagaccaaatagcaa

SEQ ID NO: 763630 - DNA, 33 bp, Homo sapien
taatgaaaggtgttgagaaagaccaaatagcaa

SEQ ID NO: 763631 - DNA, 33 bp, Homo sapien
gaagattcagcgataacgttagccaaatgttta

SEQ ID NO: 763632 - DNA, 33 bp, Homo sapien
gaagattcagcgataatgttagccaaatgttta

SEQ ID NO: 763633 - DNA, 33 bp, Homo sapien
actattgtctacattgaaacctgttaagcccag

SEQ ID NO: 763634 - DNA, 33 bp, Homo sapien
actattgtctacattggaacctgttaagcccag

SEQ ID NO: 763635 - DNA, 33 bp, Homo sapien
tattgtgtggtagaagcctaaaagtctaaaatc

SEQ ID NO: 763636 - DNA, 33 bp, Homo sapien
tattgtgtggtagaaggctaaaagtctaaaatc

SEQ ID NO: 763637 - DNA, 33 bp, Homo sapien
tctttgtactgttgtcaaaaatcagttgattga

SEQ ID NO: 763638 - DNA, 33 bp, Homo sapien
tctttgtactgttgtcgaaaatcagttgattga

SEQ ID NO: 763639 - DNA, 33 bp, Homo sapien
gtcctgccacttaaagcccttatcctcattcct

SEQ ID NO: 763640 - DNA, 33 bp, Homo sapien
gtcctgccacttaaagtccttatcctcattcct

SEQ ID NO: 763641 - DNA, 33 bp, Homo sapien
tacaatgtttagtacacgccctcacaacaaaga

SEQ ID NO: 763642 - DNA, 33 bp, Homo sapien
tacaatgtttagtacaggccctcacaacaaaga

SEQ ID NO: 763643 - DNA, 33 bp, Homo sapien
atggaagatggttaaacggggaaaattgcattc

SEQ ID NO: 763644 - DNA, 33 bp, Homo sapien
atggaagatggttaaatggggaaaattgcattc

SEQ ID NO: 763645 - DNA, 33 bp, Homo sapien
gggatactgactaaaaacaattggagaaagaac

SEQ ID NO: 763646 - DNA, 33 bp, Homo sapien
gggatactgactaaaagcaattggagaaagaac

SEQ ID NO: 763647 - DNA, 33 bp, Homo sapien
accatcctctgaaccaatgagtgggtatttaat

SEQ ID NO: 763648 - DNA, 33 bp, Homo sapien
accatcctctgaaccagtgagtgggtatttaat

SEQ ID NO: 763649 - DNA, 33 bp, Homo sapien
tcagttatctatacacagaagttatatgaaaaa

SEQ ID NO: 763650 - DNA, 33 bp, Homo sapien
tcagttatctatacaccgaagttatatgaaaaa

SEQ ID NO: 763651 - DNA, 33 bp, Homo sapien
agccatgcaaaatagacgaatacactcaagtac

SEQ ID NO: 763652 - DNA, 33 bp, Homo sapien
agccatgcaaaatagatgaatacactcaagtac

SEQ ID NO: 763653 - DNA, 33 bp, Homo sapien
atcactcaccatctccaacctgcagaatcctca

SEQ ID NO: 763654 - DNA, 33 bp, Homo sapien
atcactcaccatctccgacctgcagaatcctca

SEQ ID NO: 763655 - DNA, 33 bp, Homo sapien
actagaagaaaagtgacgaatagccaaaaattg

SEQ ID NO: 763656 - DNA, 33 bp, Homo sapien
actagaagaaaagtgatgaatagccaaaaattg

SEQ ID NO: 763657 - DNA, 33 bp, Homo sapien
ggctgttgtactgagacaagtgtttatataggg

SEQ ID NO: 763658 - DNA, 33 bp, Homo sapien
ggctgttgtactgagataagtgtttatataggg

SEQ ID NO: 763659 - DNA, 33 bp, Homo sapien
cacgtctggcagttaacggtgtgtaccgcctgg

SEQ ID NO: 763660 - DNA, 33 bp, Homo sapien
cacgtctggcagttaatggtgtgtaccgcctgg

SEQ ID NO: 763661 - DNA, 33 bp, Homo sapien
gcagacacaaattagaagaccggttatacattc

SEQ ID NO: 763662 - DNA, 33 bp, Homo sapien
gcagacacaaattagaggaccggttatacattc

SEQ ID NO: 763663 - DNA, 33 bp, Homo sapien
tgtaagttttaagccccgcaaactctggacctt

SEQ ID NO: 763664 - DNA, 33 bp, Homo sapien
tgtaagttttaagccctgcaaactctggacctt

SEQ ID NO: 763665 - DNA, 33 bp, Homo sapien
ccataagagtccttcactcatctcctagaaacc

SEQ ID NO: 763666 - DNA, 33 bp, Homo sapien
ccataagagtccttcattcatctcctagaaacc

SEQ ID NO: 763667 - DNA, 33 bp, Homo sapien
aaatgcagtgagagaaaaaacagaaagtgaact

SEQ ID NO: 763668 - DNA, 33 bp, Homo sapien
aaatgcagtgagagaacaaacagaaagtgaact

SEQ ID NO: 763669 - DNA, 33 bp, Homo sapien
ggctattcatgaggaccattgttgtggaagata

SEQ ID NO: 763670 - DNA, 33 bp, Homo sapien
ggctattcatgaggacgattgttgtggaagata

SEQ ID NO: 763671 - DNA, 33 bp, Homo sapien
taaaagtagatttaccacttgatacagaaatcc

SEQ ID NO: 763672 - DNA, 33 bp, Homo sapien
taaaagtagatttaccgcttgatacagaaatcc

SEQ ID NO: 763673 - DNA, 33 bp, Homo sapien
caaagaagcattaccacctcactcctccaagaa

SEQ ID NO: 763674 - DNA, 33 bp, Homo sapien
caaagaagcattaccatctcactcctccaagaa

SEQ ID NO: 763675 - DNA, 33 bp, Homo sapien
ttagataaggtgttcacggaaagtttctttaag

SEQ ID NO: 763676 - DNA, 33 bp, Homo sapien
ttagataaggtgttcagggaaagtttctttaag

SEQ ID NO: 763677 - DNA, 33 bp, Homo sapien
agagagagtacaggctcaactctgaagacaaca

SEQ ID NO: 763678 - DNA, 33 bp, Homo sapien
agagagagtacaggcttaactctgaagacaaca

SEQ ID NO: 763679 - DNA, 33 bp, Homo sapien
ccattaaacattttcaaagccaaagaaagtcag

SEQ ID NO: 763680 - DNA, 33 bp, Homo sapien
ccattaaacattttcagagccaaagaaagtcag

SEQ ID NO: 763681 - DNA, 33 bp, Homo sapien
acttatctcactgcacaatacctgctatatgga

SEQ ID NO: 763682 - DNA, 33 bp, Homo sapien
acttatctcactgcacgatacctgctatatgga

SEQ ID NO: 763683 - DNA, 33 bp, Homo sapien
ttatgaatgtctaagaccaaagtcaccatcatc

SEQ ID NO: 763684 - DNA, 33 bp, Homo sapien
ttatgaatgtctaagatcaaagtcaccatcatc

SEQ ID NO: 763685 - DNA, 33 bp, Homo sapien
tccatgaaatggtatcaacctgtgcatacaact

SEQ ID NO: 763686 - DNA, 33 bp, Homo sapien
tccatgaaatggtatcgacctgtgcatacaact

SEQ ID NO: 763687 - DNA, 33 bp, Homo sapien
atctgctcctttaaagccattcaagagttatac

SEQ ID NO: 763688 - DNA, 33 bp, Homo sapien
atctgctcctttaaaggcattcaagagttatac

SEQ ID NO: 763689 - DNA, 33 bp, Homo sapien
gcattagctacttagaagtgtcattactgtctg

SEQ ID NO: 763690 - DNA, 33 bp, Homo sapien
gcattagctacttagaggtgtcattactgtctg

SEQ ID NO: 763691 - DNA, 33 bp, Homo sapien
gaaaggagactggccaagcctctgtgagaatgg

SEQ ID NO: 763692 - DNA, 33 bp, Homo sapien
gaaaggagactggccacgcctctgtgagaatgg

SEQ ID NO: 763693 - DNA, 33 bp, Homo sapien
ttccggatctactgacaagagttggcattggcg

SEQ ID NO: 763694 - DNA, 33 bp, Homo sapien
ttccggatctactgacgagagttggcattggcg

SEQ ID NO: 763695 - DNA, 33 bp, Homo sapien
aggacgcacgcaagcacagtgaagagcgcctcc

SEQ ID NO: 763696 - DNA, 33 bp, Homo sapien
aggacgcacgcaagcatagtgaagagcgcctcc

SEQ ID NO: 763697 - DNA, 33 bp, Homo sapien; identical to SEQ ID NO: 763695

SEQ ID NO: 763698 - DNA, 33 bp, Homo sapien; identical to SEQ ID NO: 763696

SEQ ID NO: 763699 - DNA, 33 bp, Homo sapien
ttgtgttgtcaaaaccacttccctctttgaatt

SEQ ID NO: 763700 - DNA, 33 bp, Homo sapien
ttgtgttgtcaaaaccgcttccctctttgaatt

SEQ ID NO: 763701 - DNA, 33 bp, Homo sapien
gtcctaatgaaaagacagagctaagccttgcag

SEQ ID NO: 763702 - DNA, 33 bp, Homo sapien
gtcctaatgaaaagacggagctaagccttgcag

SEQ ID NO: 763703 - DNA, 33 bp, Homo sapien
caaactaaatggataagtgatggcttttaggct

SEQ ID NO: 763704 - DNA, 33 bp, Homo sapien
caaactaaatggataattgatggcttttaggct

SEQ ID NO: 763705 - DNA, 33 bp, Homo sapien
ggtaactcaagtgcaaacatcatcttaaagtaa

SEQ ID NO: 763706 - DNA, 33 bp, Homo sapien
ggtaactcaagtgcaatcatcatcttaaagtaa

SEQ ID NO: 763707 - DNA, 33 bp, Homo sapien
ggtggattgatttctacaatttccgcacttcca

SEQ ID NO: 763708 - DNA, 33 bp, Homo sapien
ggtggattgatttctataatttccgcacttcca

SEQ ID NO: 763709 - DNA, 33 bp, Homo sapien
gtgatcttgggcaggacatttaattctttctca

SEQ ID NO: 763710 - DNA, 33 bp, Homo sapien
gtgatcttgggcaggatatttaattctttctca

SEQ ID NO: 763711 - DNA, 33 bp, Homo sapien
tagagtcctgctattaacctaatttatgatgtt

SEQ ID NO: 763712 - DNA, 33 bp, Homo sapien
tagagtcctgctattaccctaatttatgatgtt

SEQ ID NO: 763713 - DNA, 33 bp, Homo sapien
tgcttttgaatatccaaagtttttggcgaatgg

SEQ ID NO: 763714 - DNA, 33 bp, Homo sapien
tgcttttgaatatccagagtttttggcgaatgg

SEQ ID NO: 763715 - DNA, 33 bp, Homo sapien
tctagccttctgagtgcacatatgttttctagc

SEQ ID NO: 763716 - DNA, 33 bp, Homo sapien
tctagccttctgagtgtacatatgttttctagc

SEQ ID NO: 763717 - DNA, 33 bp, Homo sapien
actcaatcattcctccacactcagatcagaact

SEQ ID NO: 763718 - DNA, 33 bp, Homo sapien
actcaatcattcctccgcactcagatcagaact

SEQ ID NO: 763719 - DNA, 33 bp, Homo sapien
ttgttttttgcttgtacctataggcaggtgcca

SEQ ID NO: 763720 - DNA, 33 bp, Homo sapien
ttgttttttgcttgtagctataggcaggtgcca

SEQ ID NO: 763721 - DNA, 33 bp, Homo sapien
tgtgtaaagtaaaccaagcatccttcccaacct

SEQ ID NO: 763722 - DNA, 33 bp, Homo sapien
tgtgtaaagtaaaccaggcatccttcccaacct

SEQ ID NO: 763723 - DNA, 33 bp, Homo sapien
aggtggttccacctcacaggaaagttggagaaa

SEQ ID NO: 763724 - DNA, 33 bp, Homo sapien
aggtggttccacctcagaggaaagttggagaaa

SEQ ID NO: 763725 - DNA, 33 bp, Homo sapien
ttttctgtgtctggctaaaaggtgaatgagaat

SEQ ID NO: 763726 - DNA, 33 bp, Homo sapien
ttttctgtgtctggctgaaaggtgaatgagaat

SEQ ID NO: 763727 - DNA, 33 bp, Homo sapien
ttcttgtattataggtaaagaaactggactcca

SEQ ID NO: 763728 - DNA, 33 bp, Homo sapien
ttcttgtattataggttaagaaactggactcca

SEQ ID NO: 763729 - DNA, 33 bp, Homo sapien
gaagacatcctgttagcaatcttaagtggtctc

SEQ ID NO: 763730 - DNA, 33 bp, Homo sapien
gaagacatcctgttagtaatcttaagtggtctc

SEQ ID NO: 763731 - DNA, 33 bp, Homo sapien
ttgaaggtcttgtcacacacccgagatgagaga

SEQ ID NO: 763732 - DNA, 33 bp, Homo sapien
ttgaaggtcttgtcacgcacccgagatgagaga

SEQ ID NO: 763733 - DNA, 33 bp, Homo sapien
gcgtgaactccagggacctgaaggccggcttgg

SEQ ID NO: 763734 - DNA, 33 bp, Homo sapien
gcgtgaactccagggatctgaaggccggcttgg

SEQ ID NO: 763735 - DNA, 33 bp, Homo sapien
gggcagtggtctaacaacaggtctgcaaccaat

SEQ ID NO: 763736 - DNA, 33 bp, Homo sapien
gggcagtggtctaacatcaggtctgcaaccaat

SEQ ID NO: 763737 - DNA, 33 bp, Homo sapien
tcattgttgtcactcacgggtagaagaagccaa

SEQ ID NO: 763738 - DNA, 33 bp, Homo sapien
tcattgttgtcactcatgggtagaagaagccaa

SEQ ID NO: 763739 - DNA, 33 bp, Homo sapien
agacccaggtatcaaaactctaacgaccaattc

SEQ ID NO: 763740 - DNA, 33 bp, Homo sapien
agacccaggtatcaaacctctaacgaccaattc

SEQ ID NO: 763741 - DNA, 33 bp, Homo sapien
aaatttaagaatgaatcagggctctatttgctt

SEQ ID NO: 763742 - DNA, 33 bp, Homo sapien
aaatttaagaatgaattagggctctatttgctt

SEQ ID NO: 763743 - DNA, 33 bp, Homo sapien
tgcattttaaaaatcaaatccattctctacgga

SEQ ID NO: 763744 - DNA, 33 bp, Homo sapien
tgcattttaaaaatcatatccattctctacgga

SEQ ID NO: 763745 - DNA, 33 bp, Homo sapien
ttgttgtagacttcacgattcaaataaagtgat

SEQ ID NO: 763746 - DNA, 33 bp, Homo sapien
ttgttgtagacttcactattcaaataaagtgat

SEQ ID NO: 763747 - DNA, 33 bp, Homo sapien
ctgacttcccttaatcactcttatctgaataat

SEQ ID NO: 763748 - DNA, 33 bp, Homo sapien
ctgacttcccttaatcgctcttatctgaataat

SEQ ID NO: 763749 - DNA, 33 bp, Homo sapien
ctttgggtaaatatcaaagagcacggttgctgg

SEQ ID NO: 763750 - DNA, 33 bp, Homo sapien
ctttgggtaaatatcagagagcacggttgctgg

SEQ ID NO: 763751 - DNA, 33 bp, Homo sapien
catgccccactagatacctctgactacaatttg

SEQ ID NO: 763752 - DNA, 33 bp, Homo sapien
catgccccactagatagctctgactacaatttg

SEQ ID NO: 763753 - DNA, 33 bp, Homo sapien
gaaacaggtgaaaaacaatttccaaacatctgg

SEQ ID NO: 763754 - DNA, 33 bp, Homo sapien
gaaacaggtgaaaaaccatttccaaacatctgg

SEQ ID NO: 763755 - DNA, 33 bp, Homo sapien
gggtcatattcatatcaaagaacagaaagtgtc

SEQ ID NO: 763756 - DNA, 33 bp, Homo sapien
gggtcatattcatatctaagaacagaaagtgtc

SEQ ID NO: 763757 - DNA, 33 bp, Homo sapien
aatcgaagtgtatggcacattaaaacccagtct

SEQ ID NO: 763758 - DNA, 33 bp, Homo sapien
aatcgaagtgtatggctcattaaaacccagtct

SEQ ID NO: 763759 - DNA, 33 bp, Homo sapien
ctatgaaatacccagactactaaaataccctgt

SEQ ID NO: 763760 - DNA, 33 bp, Homo sapien
ctatgaaatacccagagtactaaaataccctgt

SEQ ID NO: 763761 - DNA, 33 bp, Homo sapien
agtcaactataatgatcaagatgtcttaatgca

SEQ ID NO: 763762 - DNA, 33 bp, Homo sapien
agtcaactataatgatgaagatgtcttaatgca

SEQ ID NO: 763763 - DNA, 33 bp, Homo sapien
aaaagggaattccatcaaggtttcttgtctcct

SEQ ID NO: 763764 - DNA, 33 bp, Homo sapien
aaaagggaattccatcgaggtttcttgtctcct

SEQ ID NO: 763765 - DNA, 33 bp, Homo sapien
gctgatttttatggtaaaagagggttgatagtg

SEQ ID NO: 763766 - DNA, 33 bp, Homo sapien
gctgatttttatggtagaagagggttgatagtg

SEQ ID NO: 763767 - DNA, 33 bp, Homo sapien
cacatatgctaataaagtatacctgtacatata

SEQ ID NO: 763768 - DNA, 33 bp, Homo sapien
cacatatgctaataaattatacctgtacatata

SEQ ID NO: 763769 - DNA, 33 bp, Homo sapien
tttttacttactagataaagaaggacacaaaca

SEQ ID NO: 763770 - DNA, 33 bp, Homo sapien
tttttacttactagatgaagaaggacacaaaca

SEQ ID NO: 763771 - DNA, 33 bp, Homo sapien
tcttctttctattgccaccattcaaaaagtcat

SEQ ID NO: 763772 - DNA, 33 bp, Homo sapien
tcttctttctattgccgccattcaaaaagtcat

SEQ ID NO: 763773 - DNA, 33 bp, Homo sapien
ctgaacattaattgagcatatgtttgcttccca

SEQ ID NO: 763774 - DNA, 33 bp, Homo sapien
ctgaacattaattgagtatatgtttgcttccca

SEQ ID NO: 763775 - DNA, 33 bp, Homo sapien
agtaagtgattataagactgactcaaattaaag

SEQ ID NO: 763776 - DNA, 33 bp, Homo sapien
agtaagtgattataagtctgactcaaattaaag

SEQ ID NO: 763777 - DNA, 33 bp, Homo sapien
aaatccagggtctaacacagggtcatctataaa

SEQ ID NO: 763778 - DNA, 33 bp, Homo sapien
aaatccagggtctaacgcagggtcatctataaa

SEQ ID NO: 763779 - DNA, 33 bp, Homo sapien
gttagctacatactcaaaaggagcacgcaacct

SEQ ID NO: 763780 - DNA, 33 bp, Homo sapien
gttagctacatactcataaggagcacgcaacct

SEQ ID NO: 763781 - DNA, 33 bp, Homo sapien
ggtgagtggcaggtgaaccagcattgtagcctg

SEQ ID NO: 763782 - DNA, 33 bp, Homo sapien
ggtgagtggcaggtgagccagcattgtagcctg

SEQ ID NO: 763783 - DNA, 33 bp, Homo sapien
tccggagtttcttgaagtctcacaagtgttttc

SEQ ID NO: 763784 - DNA, 33 bp, Homo sapien
tccggagtttcttgaattctcacaagtgttttc

SEQ ID NO: 763785 - DNA, 33 bp, Homo sapien
agtttcttcacggagaagtcctccttgacttta

SEQ ID NO: 763786 - DNA, 33 bp, Homo sapien
agtttcttcacggagaggtcctccttgacttta

SEQ ID NO: 763787 - DNA, 33 bp, Homo sapien
aacaggttcacagccagcacactcaagttcaga

SEQ ID NO: 763788 - DNA, 33 bp, Homo sapien
aacaggttcacagccatcacactcaagttcaga

SEQ ID NO: 763789 - DNA, 33 bp, Homo sapien
tcgaataaggcagtaactgtgatgaaagacagt

SEQ ID NO: 763790 - DNA, 33 bp, Homo sapien
tcgaataaggcagtaattgtgatgaaagacagt

SEQ ID NO: 763791 - DNA, 33 bp, Homo sapien
gaccattttccccccaatatttctttgtgtgtg

SEQ ID NO: 763792 - DNA, 33 bp, Homo sapien
gaccattttccccccattatttctttgtgtgtg

SEQ ID NO: 763793 - DNA, 33 bp, Homo sapien
acttctgaatatcctaaattgccagtaagaaca

SEQ ID NO: 763794 - DNA, 33 bp, Homo sapien
acttctgaatatcctacattgccagtaagaaca

SEQ ID NO: 763795 - DNA, 33 bp, Homo sapien
tctaccaactaaggaaagcctaaaatagtcatg

SEQ ID NO: 763796 - DNA, 33 bp, Homo sapien
tctaccaactaaggaaggcctaaaatagtcatg

SEQ ID NO: 763797 - DNA, 33 bp, Homo sapien
cttatctgcagaaatcagaagaatgttatccac

SEQ ID NO: 763798 - DNA, 33 bp, Homo sapien
cttatctgcagaaatcggaagaatgttatccac

SEQ ID NO: 763799 - DNA, 33 bp, Homo sapien
taaaacttgaacgtaaatatattgctttcaaat

SEQ ID NO: 763800 - DNA, 33 bp, Homo sapien
taaaacttgaacgtaattatattgctttcaaat

SEQ ID NO: 763801 - DNA, 33 bp, Homo sapien
ccacggcttgggctgacgtaaccaggaagtatt

SEQ ID NO: 763802 - DNA, 33 bp, Homo sapien
ccacggcttgggctgatgtaaccaggaagtatt

SEQ ID NO: 763803 - DNA, 33 bp, Homo sapien
acattaataattcacagcattggaatacttcct

SEQ ID NO: 763804 - DNA, 33 bp, Homo sapien
acattaataattcacatcattggaatacttcct

SEQ ID NO: 763805 - DNA, 33 bp, Homo sapien
tataactgagtagctaagtggtcagacagtatc

SEQ ID NO: 763806 - DNA, 33 bp, Homo sapien
tataactgagtagctaggtggtcagacagtatc

SEQ ID NO: 763807 - DNA, 33 bp, Homo sapien
catgtgagcattttaaaagtagatatgcaatta

SEQ ID NO: 763808 - DNA, 33 bp, Homo sapien
catgtgagcattttaagagtagatatgcaatta

SEQ ID NO: 763809 - DNA, 33 bp, Homo sapien
gaaaattgctgctatacaagacgttttcttagt

SEQ ID NO: 763810 - DNA, 33 bp, Homo sapien
gaaaattgctgctatagaagacgttttcttagt

SEQ ID NO: 763811 - DNA, 33 bp, Homo sapien
ccttgatcataaagccaaggtaactcttaccct

SEQ ID NO: 763812 - DNA, 33 bp, Homo sapien
ccttgatcataaagcccaggtaactcttaccct

SEQ ID NO: 763813 - DNA, 33 bp, Homo sapien
gagatcttgattttgaaagaaatgtaaactagg

SEQ ID NO: 763814 - DNA, 33 bp, Homo sapien
gagatcttgattttgacagaaatgtaaactagg

SEQ ID NO: 763815 - DNA, 33 bp, Homo sapien
cagtagaaggacaaagaaatcctgtagctagga

SEQ ID NO: 763816 - DNA, 33 bp, Homo sapien
cagtagaaggacaaagcaatcctgtagctagga

SEQ ID NO: 763817 - DNA, 33 bp, Homo sapien
attacatactgaaaccaatgaaagaactagtgg

SEQ ID NO: 763818 - DNA, 33 bp, Homo sapien
attacatactgaaaccgatgaaagaactagtgg

SEQ ID NO: 763819 - DNA, 33 bp, Homo sapien
caaaacaaagttctcaaaagtcaaaataggaga

SEQ ID NO: 763820 - DNA, 33 bp, Homo sapien
caaaacaaagttctcagaagtcaaaataggaga

SEQ ID NO: 763821 - DNA, 33 bp, Homo sapien
cccatgagtaaggaaaccaatgtcaccacctgg

SEQ ID NO: 763822 - DNA, 33 bp, Homo sapien
cccatgagtaaggaaagcaatgtcaccacctgg

SEQ ID NO: 763823 - DNA, 33 bp, Homo sapien
agggaatttaggaaacaataggaaatcaacact

SEQ ID NO: 763824 - DNA, 33 bp, Homo sapien
agggaatttaggaaactataggaaatcaacact

SEQ ID NO: 763825 - DNA, 33 bp, Homo sapien
tctttgatctccttcccaaatatacagttacta

SEQ ID NO: 763826 - DNA, 33 bp, Homo sapien
tctttgatctccttcctaaatatacagttacta

SEQ ID NO: 763827 - DNA, 33 bp, Homo sapien
ggtgagtcaagtcaacaaacactcaagttctta

SEQ ID NO: 763828 - DNA, 33 bp, Homo sapien
ggtgagtcaagtcaaccaacactcaagttctta

SEQ ID NO: 763829 - DNA, 33 bp, Homo sapien
gacaatatggtaggtgaaaaattaacactagaa

SEQ ID NO: 763830 - DNA, 33 bp, Homo sapien
gacaatatggtaggtgcaaaattaacactagaa

SEQ ID NO: 763831 - DNA, 33 bp, Homo sapien
atgacccttatagtggacaccaattttcgtttt

SEQ ID NO: 763832 - DNA, 33 bp, Homo sapien
atgacccttatagtgggcaccaattttcgtttt

SEQ ID NO: 763833 - DNA, 33 bp, Homo sapien
acatgcaatcctgccacgcggaggcgctcatcc

SEQ ID NO: 763834 - DNA, 33 bp, Homo sapien
acatgcaatcctgccatgcggaggcgctcatcc

SEQ ID NO: 763835 - DNA, 33 bp, Homo sapien
acactccatgccagacacttaacaacgttttcc

SEQ ID NO: 763836 - DNA, 33 bp, Homo sapien
acactccatgccagacgcttaacaacgttttcc

SEQ ID NO: 763837 - DNA, 33 bp, Homo sapien
aataagaattacagaacaatgcctttttagtga

SEQ ID NO: 763838 - DNA, 33 bp, Homo sapien
aataagaattacagaataatgcctttttagtga

SEQ ID NO: 763839 - DNA, 33 bp, Homo sapien
gagagttcaattaaaaaatagaatcagagagcc

SEQ ID NO: 763840 - DNA, 33 bp, Homo sapien
gagagttcaattaaaacatagaatcagagagcc

SEQ ID NO: 763841 - DNA, 33 bp, Homo sapien
tgacttattggactccaattcctggctcttgtt

SEQ ID NO: 763842 - DNA, 33 bp, Homo sapien
tgacttattggactccgattcctggctcttgtt

SEQ ID NO: 763843 - DNA, 33 bp, Homo sapien
cttgaggtaagatggcaacttgaacaaagtata

SEQ ID NO: 763844 - DNA, 33 bp, Homo sapien
cttgaggtaagatggcgacttgaacaaagtata

SEQ ID NO: 763845 - DNA, 33 bp, Homo sapien
cagcagagattcaacacgtagataaatgcttag

SEQ ID NO: 763846 - DNA, 33 bp, Homo sapien
cagcagagattcaacatgtagataaatgcttag

SEQ ID NO: 763847 - DNA, 33 bp, Homo sapien
caaggtgtcaccaaagcccagatatattgatct

SEQ ID NO: 763848 - DNA, 33 bp, Homo sapien
caaggtgtcaccaaagtccagatatattgatct

SEQ ID NO: 763849 - DNA, 33 bp, Homo sapien
gtgctgtgttaggtgacggcaataaaaggggaa

SEQ ID NO: 763850 - DNA, 33 bp, Homo sapien
gtgctgtgttaggtgatggcaataaaaggggaa

SEQ ID NO: 763851 - DNA, 33 bp, Homo sapien
tggtccaatgaatgaacgatttactgaatgaat

SEQ ID NO: 763852 - DNA, 33 bp, Homo sapien
tggtccaatgaatgaatgatttactgaatgaat

SEQ ID NO: 763853 - DNA, 33 bp, Homo sapien
aaatacttttgcatgaagaagggaacagaatta

SEQ ID NO: 763854 - DNA, 33 bp, Homo sapien
aaatacttttgcatgaggaagggaacagaatta

SEQ ID NO: 763855 - DNA, 33 bp, Homo sapien
ccaaaggtgaatttaaccatgaagtgaatacaa

SEQ ID NO: 763856 - DNA, 33 bp, Homo sapien
ccaaaggtgaatttaatcatgaagtgaatacaa

SEQ ID NO: 763857 - DNA, 33 bp, Homo sapien
tctggatatggagtcacctttgatcagtaaatc

SEQ ID NO: 763858 - DNA, 33 bp, Homo sapien
tctggatatggagtcatctttgatcagtaaatc

SEQ ID NO: 763859 - DNA, 33 bp, Homo sapien
ctctctttttgagttacgtgaacttgagccaat

SEQ ID NO: 763860 - DNA, 33 bp, Homo sapien
ctctctttttgagttaggtgaacttgagccaat

SEQ ID NO: 763861 - DNA, 33 bp, Homo sapien
ccatgaatgttggaacagaagaccatccaatgt

SEQ ID NO: 763862 - DNA, 33 bp, Homo sapien
ccatgaatgttggaacggaagaccatccaatgt

SEQ ID NO: 763863 - DNA, 33 bp, Homo sapien
tcagtgtatccaagtacagcattctaatgtaat

SEQ ID NO: 763864 - DNA, 33 bp, Homo sapien
tcagtgtatccaagtagagcattctaatgtaat

SEQ ID NO: 763865 - DNA, 33 bp, Homo sapien
tatgagaaataggaaaggagtgtctccatgctc

SEQ ID NO: 763866 - DNA, 33 bp, Homo sapien
tatgagaaataggaaatgagtgtctccatgctc

SEQ ID NO: 763867 - DNA, 33 bp, Homo sapien
agggtcctcagacatcagagataccaggctttg

SEQ ID NO: 763868 - DNA, 33 bp, Homo sapien
agggtcctcagacatcggagataccaggctttg

SEQ ID NO: 763869 - DNA, 33 bp, Homo sapien
ctcgggggcaaactaaagaagtccatttgactc

SEQ ID NO: 763870 - DNA, 33 bp, Homo sapien
ctcgggggcaaactaaggaagtccatttgactc

SEQ ID NO: 763871 - DNA, 33 bp, Homo sapien
tgtgatgttaagagatcataaatggacatggta

SEQ ID NO: 763872 - DNA, 33 bp, Homo sapien
tgtgatgttaagagattataaatggacatggta

SEQ ID NO: 763873 - DNA, 33 bp, Homo sapien
gcaaagcaatctacccccaatgcttccagggtg

SEQ ID NO: 763874 - DNA, 33 bp, Homo sapien
gcaaagcaatctacccgcaatgcttccagggtg

SEQ ID NO: 763875 - DNA, 33 bp, Homo sapien
ttgtggaacagcatgaatataactgtagtgcca

SEQ ID NO: 763876 - DNA, 33 bp, Homo sapien
ttgtggaacagcatgattataactgtagtgcca

SEQ ID NO: 763877 - DNA, 33 bp, Homo sapien
aagacatttttagaaaataaatctcagctcatt

SEQ ID NO: 763878 - DNA, 33 bp, Homo sapien
aagacatttttagaaattaaatctcagctcatt

SEQ ID NO: 763879 - DNA, 33 bp, Homo sapien
ccttgaaagtatttacagaactcaaaaaagtca

SEQ ID NO: 763880 - DNA, 33 bp, Homo sapien
ccttgaaagtatttacggaactcaaaaaagtca

SEQ ID NO: 763881 - DNA, 33 bp, Homo sapien
ctgaaatgtttaatcacactaattgttcctacc

SEQ ID NO: 763882 - DNA, 33 bp, Homo sapien
ctgaaatgtttaatcatactaattgttcctacc

SEQ ID NO: 763883 - DNA, 33 bp, Homo sapien
acccatgcttaaacaaatgatggccctggaatg

SEQ ID NO: 763884 - DNA, 33 bp, Homo sapien
acccatgcttaaacaagtgatggccctggaatg

SEQ ID NO: 763885 - DNA, 33 bp, Homo sapien
agcacagttagaggacccgaaagtcatggtctg

SEQ ID NO: 763886 - DNA, 33 bp, Homo sapien
agcacagttagaggactcgaaagtcatggtctg

SEQ ID NO: 763887 - DNA, 33 bp, Homo sapien
aaaatacctctgataaatgttctaagaatatga

SEQ ID NO: 763888 - DNA, 33 bp, Homo sapien
aaaatacctctgataattgttctaagaatatga

SEQ ID NO: 763889 - DNA, 33 bp, Homo sapien
attcagaaatctcatacgcacgttatttagtat

SEQ ID NO: 763890 - DNA, 33 bp, Homo sapien
attcagaaatctcatatgcacgttatttagtat

SEQ ID NO: 763891 - DNA, 33 bp, Homo sapien
gtcaagagatgttaatgaccaaacatcaggaga

SEQ ID NO: 763892 - DNA, 33 bp, Homo sapien
gtcaagagatgttaattaccaaacatcaggaga

SEQ ID NO: 763893 - DNA, 33 bp, Homo sapien
attcagggcaagtccggagagtaaagcaaaagc

SEQ ID NO: 763894 - DNA, 33 bp, Homo sapien
attcagggcaagtccgtagagtaaagcaaaagc

SEQ ID NO: 763895 - DNA, 33 bp, Homo sapien
atctctgaaggaattaaggcataaaggttagtt

SEQ ID NO: 763896 - DNA, 33 bp, Homo sapien
atctctgaaggaattagggcataaaggttagtt

SEQ ID NO: 763897 - DNA, 33 bp, Homo sapien
atttactcaaatatcaatgagttcaggcaatcc

SEQ ID NO: 763898 - DNA, 33 bp, Homo sapien
atttactcaaatatcagtgagttcaggcaatcc

SEQ ID NO: 763899 - DNA, 33 bp, Homo sapien
gggaataagtgcccagaaccaccttgcaaataa

SEQ ID NO: 763900 - DNA, 33 bp, Homo sapien
gggaataagtgcccagcaccaccttgcaaataa

SEQ ID NO: 763901 - DNA, 33 bp, Homo sapien
gtgtcagattttgtgggagtcacatatgaatgt

SEQ ID NO: 763902 - DNA, 33 bp, Homo sapien
gtgtcagattttgtggtagtcacatatgaatgt

SEQ ID NO: 763903 - DNA, 33 bp, Homo sapien
cgagtgggagcttatcaacttcagccttacccc

SEQ ID NO: 763904 - DNA, 33 bp, Homo sapien
cgagtgggagcttatcgacttcagccttacccc

SEQ ID NO: 763905 - DNA, 33 bp, Homo sapien
tctgaatggaatcttcacctttagtttgaatac

SEQ ID NO: 763906 - DNA, 33 bp, Homo sapien
tctgaatggaatcttcgcctttagtttgaatac

SEQ ID NO: 763907 - DNA, 33 bp, Homo sapien
aaagacctgggttgcacgtcaaattctgaccct

SEQ ID NO: 763908 - DNA, 33 bp, Homo sapien
aaagacctgggttgcatgtcaaattctgaccct

SEQ ID NO: 763909 - DNA, 33 bp, Homo sapien
aaggcctgagagtgacaggacagcctcggtgtg

SEQ ID NO: 763910 - DNA, 33 bp, Homo sapien
aaggcctgagagtgacgggacagcctcggtgtg

SEQ ID NO: 763911 - DNA, 33 bp, Homo sapien
tagaactccagaaacccgaggaaaggcttagtc

SEQ ID NO: 763912 - DNA, 33 bp, Homo sapien
tagaactccagaaacctgaggaaaggcttagtc

SEQ ID NO: 763913 - DNA, 33 bp, Homo sapien
atcaagcctttctatcaaatacagatgataaag

SEQ ID NO: 763914 - DNA, 33 bp, Homo sapien
atcaagcctttctatcgaatacagatgataaag

SEQ ID NO: 763915 - DNA, 33 bp, Homo sapien
gggcattgtttttccaagctgaagacagaaaac

SEQ ID NO: 763916 - DNA, 33 bp, Homo sapien
gggcattgtttttccaggctgaagacagaaaac

SEQ ID NO: 763917 - DNA, 33 bp, Homo sapien
attatgtttcatgaaaaatgtgatgaaggtctg

SEQ ID NO: 763918 - DNA, 33 bp, Homo sapien
attatgtttcatgaaagatgtgatgaaggtctg

SEQ ID NO: 763919 - DNA, 33 bp, Homo sapien
ttgcttccctggaaagccatatcttcccccacc

SEQ ID NO: 763920 - DNA, 33 bp, Homo sapien
ttgcttccctggaaaggcatatcttcccccacc

SEQ ID NO: 763921 - DNA, 33 bp, Homo sapien
actctggtcggtcttcactccatcttcgcattc

SEQ ID NO: 763922 - DNA, 33 bp, Homo sapien
actctggtcggtcttcgctccatcttcgcattc

SEQ ID NO: 763923 - DNA, 33 bp, Homo sapien
gtggggctttcaggcacagttagaaaggcatgt

SEQ ID NO: 763924 - DNA, 33 bp, Homo sapien
gtggggctttcaggcatagttagaaaggcatgt

SEQ ID NO: 763925 - DNA, 33 bp, Homo sapien
atgacacatcttacacacacagcttgcatcaaa

SEQ ID NO: 763926 - DNA, 33 bp, Homo sapien
atgacacatcttacacgcacagcttgcatcaaa

SEQ ID NO: 763927 - DNA, 33 bp, Homo sapien
taactctgtctaggcactaagtacatggttttc

SEQ ID NO: 763928 - DNA, 33 bp, Homo sapien
taactctgtctaggcagtaagtacatggttttc

SEQ ID NO: 763929 - DNA, 33 bp, Homo sapien
gtgtcaaaagccatcacgtactttgaatatctt

SEQ ID NO: 763930 - DNA, 33 bp, Homo sapien
gtgtcaaaagccatcatgtactttgaatatctt

SEQ ID NO: 763931 - DNA, 33 bp, Homo sapien
acccctattggcttcaacttggaacttttcttc

SEQ ID NO: 763932 - DNA, 33 bp, Homo sapien
acccctattggcttcagcttggaacttttcttc

SEQ ID NO: 763933 - DNA, 33 bp, Homo sapien
aataatttgaaactaacacatgtgaataatgaa

SEQ ID NO: 763934 - DNA, 33 bp, Homo sapien
aataatttgaaactaagacatgtgaataatgaa

SEQ ID NO: 763935 - DNA, 33 bp, Homo sapien
taagcttcaagtttcacggcactgatgctaatt

SEQ ID NO: 763936 - DNA, 33 bp, Homo sapien
taagcttcaagtttcatggcactgatgctaatt

SEQ ID NO: 763937 - DNA, 33 bp, Homo sapien
aagaaacattcctgaaaacagggacgaggaaca

SEQ ID NO: 763938 - DNA, 33 bp, Homo sapien
aagaaacattcctgaacacagggacgaggaaca

SEQ ID NO: 763939 - DNA, 33 bp, Homo sapien
ttcatgcaaaacataaagcaatgcagcatcttc

SEQ ID NO: 763940 - DNA, 33 bp, Homo sapien
ttcatgcaaaacataaggcaatgcagcatcttc

SEQ ID NO: 763941 - DNA, 33 bp, Homo sapien
taagtttttgtagaaccggagaagtttcaataa

SEQ ID NO: 763942 - DNA, 33 bp, Homo sapien
taagtttttgtagaactggagaagtttcaataa

SEQ ID NO: 763943 - DNA, 33 bp, Homo sapien
taaaatctttggttacagcctcccaagctctat

SEQ ID NO: 763944 - DNA, 33 bp, Homo sapien
taaaatctttggttaccgcctcccaagctctat

SEQ ID NO: 763945 - DNA, 33 bp, Homo sapien
tttgtgtaacccttcaagtttgacccagtacat

SEQ ID NO: 763946 - DNA, 33 bp, Homo sapien
tttgtgtaacccttcatgtttgacccagtacat

SEQ ID NO: 763947 - DNA, 33 bp, Homo sapien
atgctaaagaggaaaacccatacattgtgagcc

SEQ ID NO: 763948 - DNA, 33 bp, Homo sapien
atgctaaagaggaaaatccatacattgtgagcc

SEQ ID NO: 763949 - DNA, 33 bp, Homo sapien
gaatcaataacagttacacagactcaaaccctg

SEQ ID NO: 763950 - DNA, 33 bp, Homo sapien
gaatcaataacagttatacagactcaaaccctg

SEQ ID NO: 763951 - DNA, 33 bp, Homo sapien
attcattaaatactaaccatctacatgacatca

SEQ ID NO: 763952 - DNA, 33 bp, Homo sapien
attcattaaatactaagcatctacatgacatca

SEQ ID NO: 763953 - DNA, 33 bp, Homo sapien
caaatttggctctaaactcttctgaggccaaat

SEQ ID NO: 763954 - DNA, 33 bp, Homo sapien
caaatttggctctaaagtcttctgaggccaaat

SEQ ID NO: 763955 - DNA, 33 bp, Homo sapien
attcatattggaaaaacacaaagacaataaaaa

SEQ ID NO: 763956 - DNA, 33 bp, Homo sapien
attcatattggaaaaagacaaagacaataaaaa

SEQ ID NO: 763957 - DNA, 33 bp, Homo sapien
ttctttacaaattgaacataagctctgaagcat

SEQ ID NO: 763958 - DNA, 33 bp, Homo sapien
ttctttacaaattgaatataagctctgaagcat

SEQ ID NO: 763959 - DNA, 33 bp, Homo sapien
tccttaatactatttcccaagaacacaagagaa

SEQ ID NO: 763960 - DNA, 33 bp, Homo sapien
tccttaatactatttcgcaagaacacaagagaa

SEQ ID NO: 763961 - DNA, 33 bp, Homo sapien
aagtggataaagtgccaataattcaaatcctaa

SEQ ID NO: 763962 - DNA, 33 bp, Homo sapien
aagtggataaagtgccgataattcaaatcctaa

SEQ ID NO: 763963 - DNA, 33 bp, Homo sapien
ataggacatgggttagcacatgaagactattca

SEQ ID NO: 763964 - DNA, 33 bp, Homo sapien
ataggacatgggttaggacatgaagactattca

SEQ ID NO: 763965 - DNA, 33 bp, Homo sapien
agactattcagtgcaaatgcctttctaaagcat

SEQ ID NO: 763966 - DNA, 33 bp, Homo sapien
agactattcagtgcaactgcctttctaaagcat

SEQ ID NO: 763967 - DNA, 33 bp, Homo sapien
tttgtggcataaccacaggatacagaaaattga

SEQ ID NO: 763968 - DNA, 33 bp, Homo sapien
tttgtggcataaccacgggatacagaaaattga

SEQ ID NO: 763969 - DNA, 33 bp, Homo sapien
ccacattcggttcacacataattacaagttata

SEQ ID NO: 763970 - DNA, 33 bp, Homo sapien
ccacattcggttcacatataattacaagttata

SEQ ID NO: 763971 - DNA, 33 bp, Homo sapien
ttgttgtctgttttgaagctggtgtgtgtgtgt

SEQ ID NO: 763972 - DNA, 33 bp, Homo sapien
ttgttgtctgttttgatgctggtgtgtgtgtgt

SEQ ID NO: 763973 - DNA, 33 bp, Homo sapien
tgtagcactcacctcaacctgatcttttatgta

SEQ ID NO: 763974 - DNA, 33 bp, Homo sapien
tgtagcactcacctcagcctgatcttttatgta

SEQ ID NO: 763975 - DNA, 33 bp, Homo sapien
agggagaggaggatgacggagggagtaaatata

SEQ ID NO: 763976 - DNA, 33 bp, Homo sapien
agggagaggaggatgatggagggagtaaatata

SEQ ID NO: 763977 - DNA, 33 bp, Homo sapien
gactgattacagctctaaaagtgaagaaaatat

SEQ ID NO: 763978 - DNA, 33 bp, Homo sapien
gactgattacagctctgaaagtgaagaaaatat

SEQ ID NO: 763979 - DNA, 33 bp, Homo sapien
cccctctggagtatacagtaagtggcatattgt

SEQ ID NO: 763980 - DNA, 33 bp, Homo sapien
cccctctggagtatactgtaagtggcatattgt

SEQ ID NO: 763981 - DNA, 33 bp, Homo sapien
cagcagtgagtgttaacaggaaatttaaaaagc

SEQ ID NO: 763982 - DNA, 33 bp, Homo sapien
cagcagtgagtgttaataggaaatttaaaaagc

SEQ ID NO: 763983 - DNA, 33 bp, Homo sapien
caaactaccacaaactcaaccaagcaggaactc

SEQ ID NO: 763984 - DNA, 33 bp, Homo sapien
caaactaccacaaacttaaccaagcaggaactc

SEQ ID NO: 763985 - DNA, 33 bp, Homo sapien
gggcctgccgcagccacacaatttttaggagtc

SEQ ID NO: 763986 - DNA, 33 bp, Homo sapien
gggcctgccgcagccatacaatttttaggagtc

SEQ ID NO: 763987 - DNA, 33 bp, Homo sapien
aggcatgtgcacaaacactcacaagatgccacc

SEQ ID NO: 763988 - DNA, 33 bp, Homo sapien
aggcatgtgcacaaacgctcacaagatgccacc

SEQ ID NO: 763989 - DNA, 33 bp, Homo sapien
agaaacaggtatccacagaaatcagtgtagagg

SEQ ID NO: 763990 - DNA, 33 bp, Homo sapien
agaaacaggtatccacggaaatcagtgtagagg

SEQ ID NO: 763991 - DNA, 33 bp, Homo sapien
actttaaggactaacaccttctcttgctgttat

SEQ ID NO: 763992 - DNA, 33 bp, Homo sapien
actttaaggactaacatcttctcttgctgttat

SEQ ID NO: 763993 - DNA, 33 bp, Homo sapien
tgatacagacatttcagcatgttctaaaaagaa

SEQ ID NO: 763994 - DNA, 33 bp, Homo sapien
tgatacagacatttcatcatgttctaaaaagaa

SEQ ID NO: 763995 - DNA, 33 bp, Homo sapien
ataactttgcccagtaataaaattgggagagct

SEQ ID NO: 763996 - DNA, 33 bp, Homo sapien
ataactttgcccagtagtaaaattgggagagct

SEQ ID NO: 763997 - DNA, 33 bp, Homo sapien
aggagttgtcagggctctgctgtaaatcctaaa

SEQ ID NO: 763998 - DNA, 33 bp, Homo sapien
aggagttgtcagggctttgctgtaaatcctaaa

SEQ ID NO: 763999 - DNA, 33 bp, Homo sapien
aaaatttactttaaaactgctgtcacttatatg

SEQ ID NO: 764000 - DNA, 33 bp, Homo sapien
aaaatttactttaaaattgctgtcacttatatg

SEQ ID NO: 764001 - DNA, 33 bp, Homo sapien
taatagccatgtaagaagtgatgatgtgaagta

SEQ ID NO: 764002 - DNA, 33 bp, Homo sapien
taatagccatgtaagaggtgatgatgtgaagta

SEQ ID NO: 764003 - DNA, 33 bp, Homo sapien
aagggacaagtgtacactgaaaaacagcactct

SEQ ID NO: 764004 - DNA, 33 bp, Homo sapien
aagggacaagtgtacattgaaaaacagcactct

SEQ ID NO: 764005 - DNA, 33 bp, Homo sapien
ggtcaagtctggatgaatactgtccttctgacc

SEQ ID NO: 764006 - DNA, 33 bp, Homo sapien
ggtcaagtctggatgattactgtccttctgacc

SEQ ID NO: 764007 - DNA, 33 bp, Homo sapien
ttgtgcatccaggaggccattgtagatatcaat

SEQ ID NO: 764008 - DNA, 33 bp, Homo sapien
ttgtgcatccaggaggtcattgtagatatcaat

SEQ ID NO: 764009 - DNA, 33 bp, Homo sapien
caagagtgaaaagaacggctgtgttgggactga

SEQ ID NO: 764010 - DNA, 33 bp, Homo sapien
caagagtgaaaagaactgctgtgttgggactga

SEQ ID NO: 764011 - DNA, 33 bp, Homo sapien
acattatcattgcctcacagtggatggcacctg

SEQ ID NO: 764012 - DNA, 33 bp, Homo sapien
acattatcattgcctctcagtggatggcacctg

SEQ ID NO: 764013 - DNA, 33 bp, Homo sapien
ggaccatgccagagaccggagcaacaaaaatgt

SEQ ID NO: 764014 - DNA, 33 bp, Homo sapien
ggaccatgccagagactggagcaacaaaaatgt

SEQ ID NO: 764015 - DNA, 33 bp, Homo sapien
taagaaccatgttccacaatgcatgtgtaagca

SEQ ID NO: 764016 - DNA, 33 bp, Homo sapien
taagaaccatgttccataatgcatgtgtaagca

SEQ ID NO: 764017 - DNA, 33 bp, Homo sapien
ggctgggaattaacagcctatcagcttctcaga

SEQ ID NO: 764018 - DNA, 33 bp, Homo sapien
ggctgggaattaacagtctatcagcttctcaga

SEQ ID NO: 764019 - DNA, 33 bp, Homo sapien
gaatggactaatacagaagagagtagggtgctg

SEQ ID NO: 764020 - DNA, 33 bp, Homo sapien
gaatggactaatacagcagagagtagggtgctg

SEQ ID NO: 764021 - DNA, 33 bp, Homo sapien
ctttataaattacgcactctcaagtatttcttc

SEQ ID NO: 764022 - DNA, 33 bp, Homo sapien
ctttataaattacgcagtctcaagtatttcttc

SEQ ID NO: 764023 - DNA, 33 bp, Homo sapien
ttgggtaatctgtatgaacattaaggtttaaaa

SEQ ID NO: 764024 - DNA, 33 bp, Homo sapien
ttgggtaatctgtatgcacattaaggtttaaaa

SEQ ID NO: 764025 - DNA, 33 bp, Homo sapien
acagagatcgctgaaaagagaaacagtaagtgg

SEQ ID NO: 764026 - DNA, 33 bp, Homo sapien
acagagatcgctgaaaggagaaacagtaagtgg

SEQ ID NO: 764027 - DNA, 33 bp, Homo sapien
ttgaaagttaggtacagaataggcagtacaccg

SEQ ID NO: 764028 - DNA, 33 bp, Homo sapien
ttgaaagttaggtacataataggcagtacaccg

SEQ ID NO: 764029 - DNA, 33 bp, Homo sapien
gcagacaccaccataactgttgcaggcatgatt

SEQ ID NO: 764030 - DNA, 33 bp, Homo sapien
gcagacaccaccataattgttgcaggcatgatt

SEQ ID NO: 764031 - DNA, 33 bp, Homo sapien
tgtcacgccctccaagccaaagtgaaaaagtgt

SEQ ID NO: 764032 - DNA, 33 bp, Homo sapien
tgtcacgccctccaagtcaaagtgaaaaagtgt

SEQ ID NO: 764033 - DNA, 33 bp, Homo sapien
ataatttcaactataaagttttgcatcatataa

SEQ ID NO: 764034 - DNA, 33 bp, Homo sapien
ataatttcaactataaggttttgcatcatataa

SEQ ID NO: 764035 - DNA, 33 bp, Homo sapien
aagaacactgctctaaccatcctgggagtaacc

SEQ ID NO: 764036 - DNA, 33 bp, Homo sapien
aagaacactgctctaatcatcctgggagtaacc

SEQ ID NO: 764037 - DNA, 33 bp, Homo sapien
agctgcctagagagagcaatactggaagcagcc

SEQ ID NO: 764038 - DNA, 33 bp, Homo sapien
agctgcctagagagaggaatactggaagcagcc

SEQ ID NO: 764039 - DNA, 33 bp, Homo sapien
caacagctcttggaataacaatttgtcctaaaa

SEQ ID NO: 764040 - DNA, 33 bp, Homo sapien
caacagctcttggaatgacaatttgtcctaaaa

SEQ ID NO: 764041 - DNA, 33 bp, Homo sapien
tgttttagcaggagtcaaaatggatttcagagg

SEQ ID NO: 764042 - DNA, 33 bp, Homo sapien
tgttttagcaggagtcgaaatggatttcagagg

SEQ ID NO: 764043 - DNA, 33 bp, Homo sapien
aaaaacaaaacaaaaaactgataatgtgcaatg

SEQ ID NO: 764044 - DNA, 33 bp, Homo sapien
aaaaacaaaacaaaaatctgataatgtgcaatg

SEQ ID NO: 764045 - DNA, 33 bp, Homo sapien
cctcatagattttacacggtaatggcgagaagc

SEQ ID NO: 764046 - DNA, 33 bp, Homo sapien
cctcatagattttacatggtaatggcgagaagc

SEQ ID NO: 764047 - DNA, 33 bp, Homo sapien
gaatgtccactccaaccactctaatgagatgat

SEQ ID NO: 764048 - DNA, 33 bp, Homo sapien
gaatgtccactccaactactctaatgagatgat

SEQ ID NO: 764049 - DNA, 33 bp, Homo sapien
atgattttttaaagcaactgaatacttagcttt

SEQ ID NO: 764050 - DNA, 33 bp, Homo sapien
atgattttttaaagcagctgaatacttagcttt

SEQ ID NO: 764051 - DNA, 33 bp, Homo sapien
tgggcaaatttttctacctgttgtacctgtctc

SEQ ID NO: 764052 - DNA, 33 bp, Homo sapien
tgggcaaatttttctatctgttgtacctgtctc

SEQ ID NO: 764053 - DNA, 33 bp, Homo sapien
gtgagttctctcaagagctgttagttttataag

SEQ ID NO: 764054 - DNA, 33 bp, Homo sapien
gtgagttctctcaagatctgttagttttataag

SEQ ID NO: 764055 - DNA, 33 bp, Homo sapien
gacagtttgagtaaataaaatccagcaataatc

SEQ ID NO: 764056 - DNA, 33 bp, Homo sapien
gacagtttgagtaaatgaaatccagcaataatc

SEQ ID NO: 764057 - DNA, 33 bp, Homo sapien
catttctctctcacaaacagcctagtgcagggc

SEQ ID NO: 764058 - DNA, 33 bp, Homo sapien
catttctctctcacaaccagcctagtgcagggc

SEQ ID NO: 764059 - DNA, 33 bp, Homo sapien
gcttcagcagagaggcaagccctttaaatgcaa

SEQ ID NO: 764060 - DNA, 33 bp, Homo sapien
gcttcagcagagaggcgagccctttaaatgcaa

SEQ ID NO: 764061 - DNA, 33 bp, Homo sapien
gtcctacctagaacaacaggttatggctccttg

SEQ ID NO: 764062 - DNA, 33 bp, Homo sapien
gtcctacctagaacaagaggttatggctccttg

SEQ ID NO: 764063 - DNA, 33 bp, Homo sapien
gaagccgtatgccttaaacgagtcacttgaaat

SEQ ID NO: 764064 - DNA, 33 bp, Homo sapien
gaagccgtatgccttagacgagtcacttgaaat

SEQ ID NO: 764065 - DNA, 33 bp, Homo sapien
tgggacaaaaccattcaagagtgagaccctgtc

SEQ ID NO: 764066 - DNA, 33 bp, Homo sapien
tgggacaaaaccattcgagagtgagaccctgtc

SEQ ID NO: 764067 - DNA, 33 bp, Homo sapien
aattatacatcagtaaaggtctttataaggact

SEQ ID NO: 764068 - DNA, 33 bp, Homo sapien
aattatacatcagtaagggtctttataaggact

SEQ ID NO: 764069 - DNA, 33 bp, Homo sapien
ccaggctccagaagtagcaccacaaggctctca

SEQ ID NO: 764070 - DNA, 33 bp, Homo sapien
ccaggctccagaagtatcaccacaaggctctca

SEQ ID NO: 764071 - DNA, 33 bp, Homo sapien
cacaacacagtacaacaagaagcatcttttcag

SEQ ID NO: 764072 - DNA, 33 bp, Homo sapien
cacaacacagtacaacgagaagcatcttttcag

SEQ ID NO: 764073 - DNA, 33 bp, Homo sapien
tacggccttgcccctcagacaattgctgactgt

SEQ ID NO: 764074 - DNA, 33 bp, Homo sapien
tacggccttgcccctcggacaattgctgactgt

SEQ ID NO: 764075 - DNA, 33 bp, Homo sapien
attaatttatttgcgaagtgctacactagaccc

SEQ ID NO: 764076 - DNA, 33 bp, Homo sapien
attaatttatttgcgaggtgctacactagaccc

SEQ ID NO: 764077 - DNA, 33 bp, Homo sapien
actatgtgttaagtcaactagcccttcatatgt

SEQ ID NO: 764078 - DNA, 33 bp, Homo sapien
actatgtgttaagtcagctagcccttcatatgt

SEQ ID NO: 764079 - DNA, 33 bp, Homo sapien
acacggattcttaggacacaggcagagggagga

SEQ ID NO: 764080 - DNA, 33 bp, Homo sapien
acacggattcttaggagacaggcagagggagga

SEQ ID NO: 764081 - DNA, 33 bp, Homo sapien
agtggccccccaaaaaaatatgtttgcatccta

SEQ ID NO: 764082 - DNA, 33 bp, Homo sapien
agtggccccccaaaaagatatgtttgcatccta

SEQ ID NO: 764083 - DNA, 33 bp, Homo sapien
tctcaggtgctggcaacgggccctggcctgccc

SEQ ID NO: 764084 - DNA, 33 bp, Homo sapien
tctcaggtgctggcaatgggccctggcctgccc

SEQ ID NO: 764085 - DNA, 33 bp, Homo sapien
tgtgtcttcagagaaacattttggtctgcccgt

SEQ ID NO: 764086 - DNA, 33 bp, Homo sapien
tgtgtcttcagagaaagattttggtctgcccgt

SEQ ID NO: 764087 - DNA, 33 bp, Homo sapien
ctgtgtatctataagcagcagtttcttcaggaa

SEQ ID NO: 764088 - DNA, 33 bp, Homo sapien
ctgtgtatctataagcggcagtttcttcaggaa

SEQ ID NO: 764089 - DNA, 33 bp, Homo sapien
aactccataactctcaccccctctctactccca

SEQ ID NO: 764090 - DNA, 33 bp, Homo sapien
aactccataactctcatcccctctctactccca

SEQ ID NO: 764091 - DNA, 33 bp, Homo sapien
taaaggcatttctagacaccagggtccacgcca

SEQ ID NO: 764092 - DNA, 33 bp, Homo sapien
taaaggcatttctagataccagggtccacgcca

SEQ ID NO: 764093 - DNA, 33 bp, Homo sapien
ctgctacctccctccacctctctgcactgacag

SEQ ID NO: 764094 - DNA, 33 bp, Homo sapien
ctgctacctccctccatctctctgcactgacag

SEQ ID NO: 764095 - DNA, 33 bp, Homo sapien
accctgaactagccacacttcatcgacaagcct

SEQ ID NO: 764096 - DNA, 33 bp, Homo sapien
accctgaactagccacgcttcatcgacaagcct

SEQ ID NO: 764097 - DNA, 33 bp, Homo sapien
ggaatacaaagggcaaactccccctccttctga

SEQ ID NO: 764098 - DNA, 33 bp, Homo sapien
ggaatacaaagggcaatctccccctccttctga

SEQ ID NO: 764099 - DNA, 33 bp, Homo sapien
taaagacaagcatcagaagaagatttgaaccta

SEQ ID NO: 764100 - DNA, 33 bp, Homo sapien
taaagacaagcatcaggagaagatttgaaccta

SEQ ID NO: 764101 - DNA, 33 bp, Homo sapien
catatgaaaggtgtacaaaggtaagtggttttt

SEQ ID NO: 764102 - DNA, 33 bp, Homo sapien
catatgaaaggtgtacgaaggtaagtggttttt

SEQ ID NO: 764103 - DNA, 33 bp, Homo sapien
tcccaaatgaaacctacgcgtgctgggtaatat

SEQ ID NO: 764104 - DNA, 33 bp, Homo sapien
tcccaaatgaaacctatgcgtgctgggtaatat

SEQ ID NO: 764105 - DNA, 33 bp, Homo sapien
gaaatcatgctttagaatcagagaagaaatttt

SEQ ID NO: 764106 - DNA, 33 bp, Homo sapien
gaaatcatgctttagagtcagagaagaaatttt

SEQ ID NO: 764107 - DNA, 33 bp, Homo sapien
agactcattccaagaccgtcctgaaaatactga

SEQ ID NO: 764108 - DNA, 33 bp, Homo sapien
agactcattccaagactgtcctgaaaatactga

SEQ ID NO: 764109 - DNA, 33 bp, Homo sapien
caagcatctgcagtaaaccacaggtggccaagt

SEQ ID NO: 764110 - DNA, 33 bp, Homo sapien
caagcatctgcagtaagccacaggtggccaagt

SEQ ID NO: 764111 - DNA, 33 bp, Homo sapien
ttttgctgttgttgtcacatctatttgccaaca

SEQ ID NO: 764112 - DNA, 33 bp, Homo sapien
ttttgctgttgttgtcgcatctatttgccaaca

SEQ ID NO: 764113 - DNA, 33 bp, Homo sapien
gagcctgaaggttcaacgagagcagcttgggtt

SEQ ID NO: 764114 - DNA, 33 bp, Homo sapien
gagcctgaaggttcaatgagagcagcttgggtt

SEQ ID NO: 764115 - DNA, 33 bp, Homo sapien
tggttttgagtaagagaagcatgggccaggcac

SEQ ID NO: 764116 - DNA, 33 bp, Homo sapien
tggttttgagtaagagtagcatgggccaggcac

SEQ ID NO: 764117 - DNA, 33 bp, Homo sapien
taccatcatctttccacgcaattcctgatataa

SEQ ID NO: 764118 - DNA, 33 bp, Homo sapien
taccatcatctttccatgcaattcctgatataa

SEQ ID NO: 764119 - DNA, 33 bp, Homo sapien
tccttgccttcctcatcatgactgacctttcgg

SEQ ID NO: 764120 - DNA, 33 bp, Homo sapien
tccttgccttcctcattatgactgacctttcgg

SEQ ID NO: 764121 - DNA, 33 bp, Homo sapien
gatgcacagctgtgaactgcttcaagtgtcaaa

SEQ ID NO: 764122 - DNA, 33 bp, Homo sapien
gatgcacagctgtgaagtgcttcaagtgtcaaa

SEQ ID NO: 764123 - DNA, 33 bp, Homo sapien
cagcttccaaaaacacagataatgacatctcag

SEQ ID NO: 764124 - DNA, 33 bp, Homo sapien
cagcttccaaaaacacggataatgacatctcag

SEQ ID NO: 764125 - DNA, 33 bp, Homo sapien
ctagagggaagtgtggccaccgatgttctggga

SEQ ID NO: 764126 - DNA, 33 bp, Homo sapien
ctagagggaagtgtggtcaccgatgttctggga

SEQ ID NO: 764127 - DNA, 33 bp, Homo sapien
tgaccaacacagaactaaatcacagtgatgtct

SEQ ID NO: 764128 - DNA, 33 bp, Homo sapien
tgaccaacacagaactcaatcacagtgatgtct

SEQ ID NO: 764129 - DNA, 33 bp, Homo sapien
ggtttgcaggggagacaatgctcaggacgctgg

SEQ ID NO: 764130 - DNA, 33 bp, Homo sapien
ggtttgcaggggagacgatgctcaggacgctgg

SEQ ID NO: 764131 - DNA, 33 bp, Homo sapien
aatctggcctggaccaagaaatctcacaaccct

SEQ ID NO: 764132 - DNA, 33 bp, Homo sapien
aatctggcctggaccaggaaatctcacaaccct

SEQ ID NO: 764133 - DNA, 33 bp, Homo sapien
cctgatgtaaatggaaaccagcggctgggagag

SEQ ID NO: 764134 - DNA, 33 bp, Homo sapien
cctgatgtaaatggaagccagcggctgggagag

SEQ ID NO: 764135 - DNA, 33 bp, Homo sapien
accgtgatgcaatttacgaagggaaaatccttt

SEQ ID NO: 764136 - DNA, 33 bp, Homo sapien
accgtgatgcaatttatgaagggaaaatccttt

SEQ ID NO: 764137 - DNA, 33 bp, Homo sapien
caagataaataccaaaatatactgcaacatcca

SEQ ID NO: 764138 - DNA, 33 bp, Homo sapien
caagataaataccaaagtatactgcaacatcca

SEQ ID NO: 764139 - DNA, 33 bp, Homo sapien
tccttgaccttccagacgcaacattagaatata

SEQ ID NO: 764140 - DNA, 33 bp, Homo sapien
tccttgaccttccagatgcaacattagaatata

SEQ ID NO: 764141 - DNA, 33 bp, Homo sapien
gacagagagagggagacagtctagtggaaaaaa

SEQ ID NO: 764142 - DNA, 33 bp, Homo sapien
gacagagagagggagatagtctagtggaaaaaa

SEQ ID NO: 764143 - DNA, 33 bp, Homo sapien
agtgagatcatagatgaaagagtgttgagagtg

SEQ ID NO: 764144 - DNA, 33 bp, Homo sapien
agtgagatcatagatggaagagtgttgagagtg

SEQ ID NO: 764145 - DNA, 33 bp, Homo sapien
cttggctccagggtaacgtgttggccttccaac

SEQ ID NO: 764146 - DNA, 33 bp, Homo sapien
cttggctccagggtaatgtgttggccttccaac

SEQ ID NO: 764147 - DNA, 33 bp, Homo sapien
tcatgaagccttagtcaaaaactccccatctaa

SEQ ID NO: 764148 - DNA, 33 bp, Homo sapien
tcatgaagccttagtccaaaactccccatctaa

SEQ ID NO: 764149 - DNA, 33 bp, Homo sapien
agcttctcagttgacacaaggttgaacctttgt

SEQ ID NO: 764150 - DNA, 33 bp, Homo sapien
agcttctcagttgacataaggttgaacctttgt

SEQ ID NO: 764151 - DNA, 33 bp, Homo sapien
taaacagcaacaataaaatgcgtaaagacccat

SEQ ID NO: 764152 - DNA, 33 bp, Homo sapien
taaacagcaacaataacatgcgtaaagacccat

SEQ ID NO: 764153 - DNA, 33 bp, Homo sapien
cagagaatttgatctagccttttatgcaacaag

SEQ ID NO: 764154 - DNA, 33 bp, Homo sapien
cagagaatttgatctatccttttatgcaacaag

SEQ ID NO: 764155 - DNA, 33 bp, Homo sapien
ccctggatgcctctcccaaaaacttcatgagcc

SEQ ID NO: 764156 - DNA, 33 bp, Homo sapien
ccctggatgcctctccgaaaaacttcatgagcc

SEQ ID NO: 764157 - DNA, 33 bp, Homo sapien
acccccttgtgagtaaagtcacctactgagaat

SEQ ID NO: 764158 - DNA, 33 bp, Homo sapien
acccccttgtgagtaatgtcacctactgagaat

SEQ ID NO: 764159 - DNA, 33 bp, Homo sapien
gcctggaaagtacacacggtccttctgtaacac

SEQ ID NO: 764160 - DNA, 33 bp, Homo sapien
gcctggaaagtacacatggtccttctgtaacac

SEQ ID NO: 764161 - DNA, 33 bp, Homo sapien
gacttgggtcatgtggcattagtttgacctctg

SEQ ID NO: 764162 - DNA, 33 bp, Homo sapien
gacttgggtcatgtggtattagtttgacctctg

SEQ ID NO: 764163 - DNA, 33 bp, Homo sapien
ggatgatttcctccccaacactggacactttag

SEQ ID NO: 764164 - DNA, 33 bp, Homo sapien
ggatgatttcctccccgacactggacactttag

SEQ ID NO: 764165 - DNA, 33 bp, Homo sapien
agctctgttaagtacaggtctctgttaaattcc

SEQ ID NO: 764166 - DNA, 33 bp, Homo sapien
agctctgttaagtacatgtctctgttaaattcc

SEQ ID NO: 764167 - DNA, 33 bp, Homo sapien
catagattgtgccttacggtaatacttgacgac

SEQ ID NO: 764168 - DNA, 33 bp, Homo sapien
catagattgtgccttatggtaatacttgacgac

SEQ ID NO: 764169 - DNA, 33 bp, Homo sapien
aagataggcggttgtgcaggccaaagttcttcc

SEQ ID NO: 764170 - DNA, 33 bp, Homo sapien
aagataggcggttgtggaggccaaagttcttcc

SEQ ID NO: 764171 - DNA, 33 bp, Homo sapien
ggcacatggtcacagactagatcttaacataaa

SEQ ID NO: 764172 - DNA, 33 bp, Homo sapien
ggcacatggtcacagattagatcttaacataaa

SEQ ID NO: 764173 - DNA, 33 bp, Homo sapien
acaaccagctataccccgagcctcactctgtta

SEQ ID NO: 764174 - DNA, 33 bp, Homo sapien
acaaccagctataccctgagcctcactctgtta

SEQ ID NO: 764175 - DNA, 33 bp, Homo sapien
cccccagcttggggagacaccgcattgggagct

SEQ ID NO: 764176 - DNA, 33 bp, Homo sapien
cccccagcttggggaggcaccgcattgggagct

SEQ ID NO: 764177 - DNA, 33 bp, Homo sapien
caggtgcaaaaagatcactttgaccttcatgct

SEQ ID NO: 764178 - DNA, 33 bp, Homo sapien
caggtgcaaaaagatcgctttgaccttcatgct

SEQ ID NO: 764179 - DNA, 33 bp, Homo sapien
agcaattgacagagcaacccagcaaaaaaagac

SEQ ID NO: 764180 - DNA, 33 bp, Homo sapien
agcaattgacagagcatcccagcaaaaaaagac

SEQ ID NO: 764181 - DNA, 33 bp, Homo sapien
tagagggcccaggtaactgaaatggattcacat

SEQ ID NO: 764182 - DNA, 33 bp, Homo sapien
tagagggcccaggtaattgaaatggattcacat

SEQ ID NO: 764183 - DNA, 33 bp, Homo sapien
gttcaggacaaaatagaccagatattagtaata

SEQ ID NO: 764184 - DNA, 33 bp, Homo sapien
gttcaggacaaaataggccagatattagtaata

SEQ ID NO: 764185 - DNA, 33 bp, Homo sapien
tagagtacatcattgccacttgagtcagaccgg

SEQ ID NO: 764186 - DNA, 33 bp, Homo sapien
tagagtacatcattgctacttgagtcagaccgg

SEQ ID NO: 764187 - DNA, 33 bp, Homo sapien
catatacaaaaaaaccggctaatggcacttgat

SEQ ID NO: 764188 - DNA, 33 bp, Homo sapien
catatacaaaaaaacctgctaatggcacttgat

SEQ ID NO: 764189 - DNA, 33 bp, Homo sapien
gagaaatgtgtcgtcaagtaattgtcattgtgt

SEQ ID NO: 764190 - DNA, 33 bp, Homo sapien
gagaaatgtgtcgtcaggtaattgtcattgtgt

SEQ ID NO: 764191 - DNA, 33 bp, Homo sapien
gggtctggcctttttacagggtatgaaagatag

SEQ ID NO: 764192 - DNA, 33 bp, Homo sapien
gggtctggcctttttagagggtatgaaagatag

SEQ ID NO: 764193 - DNA, 33 bp, Homo sapien
atgtagaccaaattgtaaagagctcactgttga

SEQ ID NO: 764194 - DNA, 33 bp, Homo sapien
atgtagaccaaattgtgaagagctcactgttga

SEQ ID NO: 764195 - DNA, 33 bp, Homo sapien
gaatacttcccctcaaacaattttcagtacctt

SEQ ID NO: 764196 - DNA, 33 bp, Homo sapien
gaatacttcccctcaatcaattttcagtacctt

SEQ ID NO: 764197 - DNA, 33 bp, Homo sapien
accccatacataataaacaagagctacaaaaag

SEQ ID NO: 764198 - DNA, 33 bp, Homo sapien
accccatacataataagcaagagctacaaaaag

SEQ ID NO: 764199 - DNA, 33 bp, Homo sapien
tggctaccaacccaaccacagtgtgccccaatg

SEQ ID NO: 764200 - DNA, 33 bp, Homo sapien
tggctaccaacccaactacagtgtgccccaatg

SEQ ID NO: 764201 - DNA, 33 bp, Homo sapien
ccattttcttagatgaggaaacggagacaataa

SEQ ID NO: 764202 - DNA, 33 bp, Homo sapien
ccattttcttagatgatgaaacggagacaataa

SEQ ID NO: 764203 - DNA, 33 bp, Homo sapien
ccgggtatgaggcaacaaaaagatgaacaggca

SEQ ID NO: 764204 - DNA, 33 bp, Homo sapien
ccgggtatgaggcaacgaaaagatgaacaggca

SEQ ID NO: 764205 - DNA, 33 bp, Homo sapien
ccttattccttctgcccagtagagtgtgtgttg

SEQ ID NO: 764206 - DNA, 33 bp, Homo sapien
ccttattccttctgcctagtagagtgtgtgttg

SEQ ID NO: 764207 - DNA, 33 bp, Homo sapien
cggtcattgcaggacagagataactgttcagtc

SEQ ID NO: 764208 - DNA, 33 bp, Homo sapien
cggtcattgcaggacatagataactgttcagtc

SEQ ID NO: 764209 - DNA, 33 bp, Homo sapien
gaagatcagacggctacagatgtgtggctttat

SEQ ID NO: 764210 - DNA, 33 bp, Homo sapien
gaagatcagacggctatagatgtgtggctttat

SEQ ID NO: 764211 - DNA, 33 bp, Homo sapien
tagctattcctttaaccggtgtgaccaaatctt

SEQ ID NO: 764212 - DNA, 33 bp, Homo sapien
tagctattcctttaactggtgtgaccaaatctt

SEQ ID NO: 764213 - DNA, 33 bp, Homo sapien
cttgcttagttaatgcaaggtcaggttgtgcaa

SEQ ID NO: 764214 - DNA, 33 bp, Homo sapien
cttgcttagttaatgcgaggtcaggttgtgcaa

SEQ ID NO: 764215 - DNA, 33 bp, Homo sapien
cctaaggtgtgactcaatacagcagaaggggac

SEQ ID NO: 764216 - DNA, 33 bp, Homo sapien
cctaaggtgtgactcagtacagcagaaggggac

SEQ ID NO: 764217 - DNA, 33 bp, Homo sapien
cctgccctaaaaaatccactatgcggccaggca

SEQ ID NO: 764218 - DNA, 33 bp, Homo sapien
cctgccctaaaaaatctactatgcggccaggca

SEQ ID NO: 764219 - DNA, 33 bp, Homo sapien
aaacagatctgtatacaatgaaggccccagagc

SEQ ID NO: 764220 - DNA, 33 bp, Homo sapien
aaacagatctgtatacgatgaaggccccagagc

SEQ ID NO: 764221 - DNA, 33 bp, Homo sapien
ttttctgtttaggagacatttgaaccatctaat

SEQ ID NO: 764222 - DNA, 33 bp, Homo sapien
ttttctgtttaggagatatttgaaccatctaat

SEQ ID NO: 764223 - DNA, 33 bp, Homo sapien
aaaaagacttaagtccagatactagaccaccag

SEQ ID NO: 764224 - DNA, 33 bp, Homo sapien
aaaaagacttaagtccggatactagaccaccag

SEQ ID NO: 764225 - DNA, 33 bp, Homo sapien
ggcttgactgtggctccattttcatatttcaga

SEQ ID NO: 764226 - DNA, 33 bp, Homo sapien
ggcttgactgtggctctattttcatatttcaga

SEQ ID NO: 764227 - DNA, 33 bp, Homo sapien
agagccaactacaaaggcactgcaatctttgac

SEQ ID NO: 764228 - DNA, 33 bp, Homo sapien
agagccaactacaaagtcactgcaatctttgac

SEQ ID NO: 764229 - DNA, 33 bp, Homo sapien
ggtttcacttatgtcaaaacagcttccatcaaa

SEQ ID NO: 764230 - DNA, 33 bp, Homo sapien
ggtttcacttatgtcacaacagcttccatcaaa

SEQ ID NO: 764231 - DNA, 33 bp, Homo sapien
tcttgaaacaatttccccagcttgcctcaattc

SEQ ID NO: 764232 - DNA, 33 bp, Homo sapien
tcttgaaacaatttcctcagcttgcctcaattc

SEQ ID NO: 764233 - DNA, 33 bp, Homo sapien
agtctaataaccaaaagctacctcactttactt

SEQ ID NO: 764234 - DNA, 33 bp, Homo sapien
agtctaataaccaaaatctacctcactttactt

SEQ ID NO: 764235 - DNA, 33 bp, Homo sapien
gtcctataaactcagaacctgtcataataactc

SEQ ID NO: 764236 - DNA, 33 bp, Homo sapien
gtcctataaactcagaccctgtcataataactc

SEQ ID NO: 764237 - DNA, 33 bp, Homo sapien
ctcagatgtcaacaaaacagtgcagggcataaa

SEQ ID NO: 764238 - DNA, 33 bp, Homo sapien
ctcagatgtcaacaaatcagtgcagggcataaa

SEQ ID NO: 764239 - DNA, 33 bp, Homo sapien
ccttctttgatcccagcctagaaaccatggtag

SEQ ID NO: 764240 - DNA, 33 bp, Homo sapien
ccttctttgatcccaggctagaaaccatggtag

SEQ ID NO: 764241 - DNA, 33 bp, Homo sapien
cagacagttaaccaggaatcagataataaaggg

SEQ ID NO: 764242 - DNA, 33 bp, Homo sapien
cagacagttaaccaggcatcagataataaaggg

SEQ ID NO: 764243 - DNA, 33 bp, Homo sapien
caattgtcagttttaaaggtatttgcctacagc

SEQ ID NO: 764244 - DNA, 33 bp, Homo sapien
caattgtcagttttaatggtatttgcctacagc

SEQ ID NO: 764245 - DNA, 33 bp, Homo sapien
tgttcatgggaatacaatatcagctcaaatgta

SEQ ID NO: 764246 - DNA, 33 bp, Homo sapien
tgttcatgggaatacagtatcagctcaaatgta

SEQ ID NO: 764247 - DNA, 33 bp, Homo sapien
agccatgagagacttcgaaggccagggaggatg

SEQ ID NO: 764248 - DNA, 33 bp, Homo sapien
agccatgagagacttctaaggccagggaggatg

SEQ ID NO: 764249 - DNA, 33 bp, Homo sapien
ctctgggacctgtaaccctgttgggagatagag

SEQ ID NO: 764250 - DNA, 33 bp, Homo sapien
ctctgggacctgtaactctgttgggagatagag

SEQ ID NO: 764251 - DNA, 33 bp, Homo sapien
agggaggattaagaaaagaatgactcgactctc

SEQ ID NO: 764252 - DNA, 33 bp, Homo sapien
agggaggattaagaaacgaatgactcgactctc

SEQ ID NO: 764253 - DNA, 33 bp, Homo sapien
cattgttttggaaatacagcagttactttcttg

SEQ ID NO: 764254 - DNA, 33 bp, Homo sapien
cattgttttggaaatagagcagttactttcttg

SEQ ID NO: 764255 - DNA, 33 bp, Homo sapien
tccaggcatatcaaaactaacttgtatattctg

SEQ ID NO: 764256 - DNA, 33 bp, Homo sapien
tccaggcatatcaaaattaacttgtatattctg

SEQ ID NO: 764257 - DNA, 33 bp, Homo sapien
ttcccagctggaaggacactccagttaatggat

SEQ ID NO: 764258 - DNA, 33 bp, Homo sapien
ttcccagctggaaggagactccagttaatggat

SEQ ID NO: 764259 - DNA, 33 bp, Homo sapien
caggggaagaacatgcactccccatagatgcag

SEQ ID NO: 764260 - DNA, 33 bp, Homo sapien
caggggaagaacatgcgctccccatagatgcag

SEQ ID NO: 764261 - DNA, 33 bp, Homo sapien
cgtctaagtgaactgacacctacttgggaagtc

SEQ ID NO: 764262 - DNA, 33 bp, Homo sapien
cgtctaagtgaactgagacctacttgggaagtc

SEQ ID NO: 764263 - DNA, 33 bp, Homo sapien
cttgctctggcaatccaacataaggcattgagt

SEQ ID NO: 764264 - DNA, 33 bp, Homo sapien
cttgctctggcaatccgacataaggcattgagt

SEQ ID NO: 764265 - DNA, 33 bp, Homo sapien
attggatgtatttctgcaagtaggactatgata

SEQ ID NO: 764266 - DNA, 33 bp, Homo sapien
attggatgtatttctggaagtaggactatgata

SEQ ID NO: 764267 - DNA, 33 bp, Homo sapien
gcaatcctgagtatccactgtctttctcagcca

SEQ ID NO: 764268 - DNA, 33 bp, Homo sapien
gcaatcctgagtatccgctgtctttctcagcca

SEQ ID NO: 764269 - DNA, 33 bp, Homo sapien
ttactttagattttaacatctttggattatgac

SEQ ID NO: 764270 - DNA, 33 bp, Homo sapien
ttactttagattttaagatctttggattatgac

SEQ ID NO: 764271 - DNA, 33 bp, Homo sapien
ttacagttcttgataccacctttggcaaattta

SEQ ID NO: 764272 - DNA, 33 bp, Homo sapien
ttacagttcttgatactacctttggcaaattta

SEQ ID NO: 764273 - DNA, 33 bp, Homo sapien
catttcccctttcccccgcaagtcctgtggcgg

SEQ ID NO: 764274 - DNA, 33 bp, Homo sapien
catttcccctttcccctgcaagtcctgtggcgg

SEQ ID NO: 764275 - DNA, 33 bp, Homo sapien
aagaagaaaaagaatacgcaacaaaggccattt

SEQ ID NO: 764276 - DNA, 33 bp, Homo sapien
aagaagaaaaagaatatgcaacaaaggccattt

SEQ ID NO: 764277 - DNA, 33 bp, Homo sapien
caactctttaccaaaaaaagtgaacataccaaa

SEQ ID NO: 764278 - DNA, 33 bp, Homo sapien
caactctttaccaaaagaagtgaacataccaaa

SEQ ID NO: 764279 - DNA, 33 bp, Homo sapien
ctgtggtgaaccagcactgctcgattaatagga

SEQ ID NO: 764280 - DNA, 33 bp, Homo sapien
ctgtggtgaaccagcattgctcgattaatagga

SEQ ID NO: 764281 - DNA, 33 bp, Homo sapien
gcaggttctgtaacatcaacttgagcagctagt

SEQ ID NO: 764282 - DNA, 33 bp, Homo sapien
gcaggttctgtaacatgaacttgagcagctagt

SEQ ID NO: 764283 - DNA, 33 bp, Homo sapien
cagataaagggcatcgaaagcaacagaaatact

SEQ ID NO: 764284 - DNA, 33 bp, Homo sapien
cagataaagggcatcggaagcaacagaaatact

SEQ ID NO: 764285 - DNA, 33 bp, Homo sapien
atgggctgatgagcaactgtccctgaaacatgg

SEQ ID NO: 764286 - DNA, 33 bp, Homo sapien
atgggctgatgagcaattgtccctgaaacatgg

SEQ ID NO: 764287 - DNA, 33 bp, Homo sapien
tgaccctcaacttttacctccagtgaaagaaaa

SEQ ID NO: 764288 - DNA, 33 bp, Homo sapien
tgaccctcaacttttatctccagtgaaagaaaa

SEQ ID NO: 764289 - DNA, 33 bp, Homo sapien
cggacccgagttagttcaacagtgtgtgacatc

SEQ ID NO: 764290 - DNA, 33 bp, Homo sapien
cggacccgagttagtttaacagtgtgtgacatc

SEQ ID NO: 764291 - DNA, 33 bp, Homo sapien
ataaaattgataataaggacaatgatgaaacct

SEQ ID NO: 764292 - DNA, 33 bp, Homo sapien
ataaaattgataataatgacaatgatgaaacct

SEQ ID NO: 764293 - DNA, 33 bp, Homo sapien
agagctcaaaaagccactactcagaacacagca

SEQ ID NO: 764294 - DNA, 33 bp, Homo sapien
agagctcaaaaagccagtactcagaacacagca

SEQ ID NO: 764295 - DNA, 33 bp, Homo sapien
gtttgactggatttcacgtttcttcctaggtaa

SEQ ID NO: 764296 - DNA, 33 bp, Homo sapien
gtttgactggatttcatgtttcttcctaggtaa

SEQ ID NO: 764297 - DNA, 33 bp, Homo sapien
ttatgttaagtggaagaaagtaatagaagtcca

SEQ ID NO: 764298 - DNA, 33 bp, Homo sapien
ttatgttaagtggaaggaagtaatagaagtcca

SEQ ID NO: 764299 - DNA, 33 bp, Homo sapien
tattaagacaaattgccatgcttatccaaacat

SEQ ID NO: 764300 - DNA, 33 bp, Homo sapien
tattaagacaaattgctatgcttatccaaacat

SEQ ID NO: 764301 - DNA, 33 bp, Homo sapien
gcagaaatcaaaactaacagccaagagaaagca

SEQ ID NO: 764302 - DNA, 33 bp, Homo sapien
gcagaaatcaaaactagcagccaagagaaagca

SEQ ID NO: 764303 - DNA, 33 bp, Homo sapien
atcatgcaggtagtagcatctgagttagggctt

SEQ ID NO: 764304 - DNA, 33 bp, Homo sapien
atcatgcaggtagtagtatctgagttagggctt

SEQ ID NO: 764305 - DNA, 33 bp, Homo sapien
cccaccagaatccaaaatttcaataaaggtctc

SEQ ID NO: 764306 - DNA, 33 bp, Homo sapien
cccaccagaatccaaattttcaataaaggtctc

SEQ ID NO: 764307 - DNA, 33 bp, Homo sapien
aactggacagctcctcagacctcatctcttccc

SEQ ID NO: 764308 - DNA, 33 bp, Homo sapien
aactggacagctcctcggacctcatctcttccc

SEQ ID NO: 764309 - DNA, 33 bp, Homo sapien
tgcatcgcccagggtcaccaagtgcaaggccag

SEQ ID NO: 764310 - DNA, 33 bp, Homo sapien
tgcatcgcccagggtcgccaagtgcaaggccag

SEQ ID NO: 764311 - DNA, 33 bp, Homo sapien
gacatgtggcatgatgaacaaccctgtcatttt

SEQ ID NO: 764312 - DNA, 33 bp, Homo sapien
gacatgtggcatgatgtacaaccctgtcatttt

SEQ ID NO: 764313 - DNA, 33 bp, Homo sapien
gtcatttttccatggacgtctcaatgaaaaaaa

SEQ ID NO: 764314 - DNA, 33 bp, Homo sapien
gtcatttttccatggatgtctcaatgaaaaaaa

SEQ ID NO: 764315 - DNA, 33 bp, Homo sapien
aattatgtaaaattctaaaaaacagctataaat

SEQ ID NO: 764316 - DNA, 33 bp, Homo sapien
aattatgtaaaattcttaaaaacagctataaat

SEQ ID NO: 764317 - DNA, 33 bp, Homo sapien
gtaagaaggagtaacaacagataatcttgggtt

SEQ ID NO: 764318 - DNA, 33 bp, Homo sapien
gtaagaaggagtaacagcagataatcttgggtt

SEQ ID NO: 764319 - DNA, 33 bp, Homo sapien
tagtacattgtaccaaccaggttattttaagga

SEQ ID NO: 764320 - DNA, 33 bp, Homo sapien
tagtacattgtaccaatcaggttattttaagga

SEQ ID NO: 764321 - DNA, 33 bp, Homo sapien
aacgttgtaaggtcgacattttctaatactgag

SEQ ID NO: 764322 - DNA, 33 bp, Homo sapien
aacgttgtaaggtcgagattttctaatactgag

SEQ ID NO: 764323 - DNA, 33 bp, Homo sapien
ctacattccataaaaagaatctttaacactgta

SEQ ID NO: 764324 - DNA, 33 bp, Homo sapien
ctacattccataaaaataatctttaacactgta

SEQ ID NO: 764325 - DNA, 33 bp, Homo sapien
aagaaaactcacatcacgttaatacacaaataa

SEQ ID NO: 764326 - DNA, 33 bp, Homo sapien
aagaaaactcacatcatgttaatacacaaataa

SEQ ID NO: 764327 - DNA, 33 bp, Homo sapien
atttgtacccaatggccagtagcttctgaatcc

SEQ ID NO: 764328 - DNA, 33 bp, Homo sapien
atttgtacccaatggctagtagcttctgaatcc

SEQ ID NO: 764329 - DNA, 33 bp, Homo sapien
aaaaaaataaaaatcacaagtcaagtggtactt

SEQ ID NO: 764330 - DNA, 33 bp, Homo sapien
aaaaaaataaaaatcagaagtcaagtggtactt

SEQ ID NO: 764331 - DNA, 33 bp, Homo sapien
aagcaggtggataacacgacccctttctttcct

SEQ ID NO: 764332 - DNA, 33 bp, Homo sapien
aagcaggtggataacaggacccctttctttcct

SEQ ID NO: 764333 - DNA, 33 bp, Homo sapien
gtttatggcagaaccactggaatagtgaacatt

SEQ ID NO: 764334 - DNA, 33 bp, Homo sapien
gtttatggcagaaccattggaatagtgaacatt

SEQ ID NO: 764335 - DNA, 33 bp, Homo sapien
acccactttgaggtaacatagccttagctaagt

SEQ ID NO: 764336 - DNA, 33 bp, Homo sapien
acccactttgaggtaatatagccttagctaagt

SEQ ID NO: 764337 - DNA, 33 bp, Homo sapien
taattccttccaattaataatactacagatgcg

SEQ ID NO: 764338 - DNA, 33 bp, Homo sapien
taattccttccaattagtaatactacagatgcg

SEQ ID NO: 764339 - DNA, 33 bp, Homo sapien
tctgcttctgtctggactaatcgctccaggcct

SEQ ID NO: 764340 - DNA, 33 bp, Homo sapien
tctgcttctgtctggattaatcgctccaggcct

SEQ ID NO: 764341 - DNA, 33 bp, Homo sapien
tgccattgcaggaagcactgtgaagaggggcag

SEQ ID NO: 764342 - DNA, 33 bp, Homo sapien
tgccattgcaggaagcgctgtgaagaggggcag

SEQ ID NO: 764343 - DNA, 33 bp, Homo sapien
tacctggggtaagatccgactgatgaagtggag

SEQ ID NO: 764344 - DNA, 33 bp, Homo sapien
tacctggggtaagatctgactgatgaagtggag

SEQ ID NO: 764345 - DNA, 33 bp, Homo sapien
tgcaccttatgtgccacccactaacaatttata

SEQ ID NO: 764346 - DNA, 33 bp, Homo sapien
tgcaccttatgtgccatccactaacaatttata

SEQ ID NO: 764347 - DNA, 33 bp, Homo sapien
caatccaggctccttcacaatgactgcagggcg

SEQ ID NO: 764348 - DNA, 33 bp, Homo sapien
caatccaggctccttcgcaatgactgcagggcg

SEQ ID NO: 764349 - DNA, 33 bp, Homo sapien
ggcttttcctgagaacccatttttgagcatggt

SEQ ID NO: 764350 - DNA, 33 bp, Homo sapien
ggcttttcctgagaactcatttttgagcatggt

SEQ ID NO: 764351 - DNA, 33 bp, Homo sapien
ggattaagaatactcaacttgtccattttaggg

SEQ ID NO: 764352 - DNA, 33 bp, Homo sapien
ggattaagaatactcagcttgtccattttaggg

SEQ ID NO: 764353 - DNA, 33 bp, Homo sapien
ggagcagacacctgcacgggaaaagggggcctt

SEQ ID NO: 764354 - DNA, 33 bp, Homo sapien
ggagcagacacctgcatgggaaaagggggcctt

SEQ ID NO: 764355 - DNA, 33 bp, Homo sapien
aaaaaacgacagataacgcaaagcaaaacagaa

SEQ ID NO: 764356 - DNA, 33 bp, Homo sapien
aaaaaacgacagataatgcaaagcaaaacagaa

SEQ ID NO: 764357 - DNA, 33 bp, Homo sapien
attaaattgattgtagaaactgattactctaaa

SEQ ID NO: 764358 - DNA, 33 bp, Homo sapien
attaaattgattgtaggaactgattactctaaa

SEQ ID NO: 764359 - DNA, 33 bp, Homo sapien
taggagattcagtaacacagaaagctacaaaat

SEQ ID NO: 764360 - DNA, 33 bp, Homo sapien
taggagattcagtaacgcagaaagctacaaaat

SEQ ID NO: 764361 - DNA, 33 bp, Homo sapien
tttaaggagcatttcccactctatgttgactgt

SEQ ID NO: 764362 - DNA, 33 bp, Homo sapien
tttaaggagcatttcctactctatgttgactgt

SEQ ID NO: 764363 - DNA, 33 bp, Homo sapien
ttgcctgtaagcttgaaaacatttggctgtgag

SEQ ID NO: 764364 - DNA, 33 bp, Homo sapien
ttgcctgtaagcttgacaacatttggctgtgag

SEQ ID NO: 764365 - DNA, 33 bp, Homo sapien
gagctcaagtgttccacgagcctgacctagtaa

SEQ ID NO: 764366 - DNA, 33 bp, Homo sapien
gagctcaagtgttccaggagcctgacctagtaa

SEQ ID NO: 764367 - DNA, 33 bp, Homo sapien
cctgaacacttcaaaaatatcactatcatgaga

SEQ ID NO: 764368 - DNA, 33 bp, Homo sapien
cctgaacacttcaaaagtatcactatcatgaga

SEQ ID NO: 764369 - DNA, 33 bp, Homo sapien
tgatgtaagtcaaccaactgctaaacgtactat

SEQ ID NO: 764370 - DNA, 33 bp, Homo sapien
tgatgtaagtcaaccagctgctaaacgtactat

SEQ ID NO: 764371 - DNA, 33 bp, Homo sapien
ccctggccaagtatcaacttctctaagacttgg

SEQ ID NO: 764372 - DNA, 33 bp, Homo sapien
ccctggccaagtatcagcttctctaagacttgg

SEQ ID NO: 764373 - DNA, 33 bp, Homo sapien
atattgcaacgactaacaacatcaatccttcca

SEQ ID NO: 764374 - DNA, 33 bp, Homo sapien
atattgcaacgactaataacatcaatccttcca

SEQ ID NO: 764375 - DNA, 33 bp, Homo sapien
tctcaaaatcattagaagagatgccttcttttg

SEQ ID NO: 764376 - DNA, 33 bp, Homo sapien
tctcaaaatcattagatgagatgccttcttttg

SEQ ID NO: 764377 - DNA, 33 bp, Homo sapien
ataaataaaaataaagaactgacaatcatctag

SEQ ID NO: 764378 - DNA, 33 bp, Homo sapien
ataaataaaaataaaggactgacaatcatctag

SEQ ID NO: 764379 - DNA, 33 bp, Homo sapien
agccatgttgcctagaacgggtactctagaaca

SEQ ID NO: 764380 - DNA, 33 bp, Homo sapien
agccatgttgcctagaccgggtactctagaaca

SEQ ID NO: 764381 - DNA, 33 bp, Homo sapien
gagagcagggaggtacaacacagttttaaacaa

SEQ ID NO: 764382 - DNA, 33 bp, Homo sapien
gagagcagggaggtaccacacagttttaaacaa

SEQ ID NO: 764383 - DNA, 33 bp, Homo sapien
ctgtgcacaagtggagaagtctggagtaggcag

SEQ ID NO: 764384 - DNA, 33 bp, Homo sapien
ctgtgcacaagtggaggagtctggagtaggcag

SEQ ID NO: 764385 - DNA, 33 bp, Homo sapien
tggttgcaagagacacaaaagatatgcttacga

SEQ ID NO: 764386 - DNA, 33 bp, Homo sapien
tggttgcaagagacacgaaagatatgcttacga

SEQ ID NO: 764387 - DNA, 33 bp, Homo sapien
atctaacctccaaaacaatcaatccatcaatcc

SEQ ID NO: 764388 - DNA, 33 bp, Homo sapien
atctaacctccaaaaccatcaatccatcaatcc

SEQ ID NO: 764389 - DNA, 33 bp, Homo sapien
ggtacgataagtgccccaccccatattcattat

SEQ ID NO: 764390 - DNA, 33 bp, Homo sapien
ggtacgataagtgccctaccccatattcattat

SEQ ID NO: 764391 - DNA, 33 bp, Homo sapien
agttctgtggccaggaagtcacttatgttgtgt

SEQ ID NO: 764392 - DNA, 33 bp, Homo sapien
agttctgtggccaggatgtcacttatgttgtgt

SEQ ID NO: 764393 - DNA, 33 bp, Homo sapien
gagtaaggaaacagaaaataaggagatagacat

SEQ ID NO: 764394 - DNA, 33 bp, Homo sapien
gagtaaggaaacagaacataaggagatagacat

SEQ ID NO: 764395 - DNA, 33 bp, Homo sapien
acgtatcatttaccagccacttatcttaagtag

SEQ ID NO: 764396 - DNA, 33 bp, Homo sapien
acgtatcatttaccagtcacttatcttaagtag

SEQ ID NO: 764397 - DNA, 33 bp, Homo sapien
aatttcacttacaataacatcacaaagaataaa

SEQ ID NO: 764398 - DNA, 33 bp, Homo sapien
aatttcacttacaatagcatcacaaagaataaa

SEQ ID NO: 764399 - DNA, 33 bp, Homo sapien
caaatgtaatgtatagccataagaaatcaacta

SEQ ID NO: 764400 - DNA, 33 bp, Homo sapien
caaatgtaatgtatagtcataagaaatcaacta

SEQ ID NO: 764401 - DNA, 33 bp, Homo sapien
ctctagcttccaaagaggtctgctaagcaaaca

SEQ ID NO: 764402 - DNA, 33 bp, Homo sapien
ctctagcttccaaagatgtctgctaagcaaaca

SEQ ID NO: 764403 - DNA, 33 bp, Homo sapien
cacatatacctgcaaagtcctagggtaggatca

SEQ ID NO: 764404 - DNA, 33 bp, Homo sapien
cacatatacctgcaaattcctagggtaggatca

SEQ ID NO: 764405 - DNA, 33 bp, Homo sapien
ggacagaaatgctaataaaagacaaagttcgtg

SEQ ID NO: 764406 - DNA, 33 bp, Homo sapien
ggacagaaatgctaatgaaagacaaagttcgtg

SEQ ID NO: 764407 - DNA, 33 bp, Homo sapien
ccacaacaatgagaacactattgctacatatct

SEQ ID NO: 764408 - DNA, 33 bp, Homo sapien
ccacaacaatgagaacgctattgctacatatct

SEQ ID NO: 764409 - DNA, 33 bp, Homo sapien
cacccacaggcaagaacagcttaggagattgtg

SEQ ID NO: 764410 - DNA, 33 bp, Homo sapien
cacccacaggcaagaagagcttaggagattgtg

SEQ ID NO: 764411 - DNA, 33 bp, Homo sapien
tgaggttgctgccacacgatgggagtaggggtg

SEQ ID NO: 764412 - DNA, 33 bp, Homo sapien
tgaggttgctgccacatgatgggagtaggggtg

SEQ ID NO: 764413 - DNA, 33 bp, Homo sapien
tggagagagtggttaacgtgccatgcttacaag

SEQ ID NO: 764414 - DNA, 33 bp, Homo sapien
tggagagagtggttaatgtgccatgcttacaag

SEQ ID NO: 764415 - DNA, 33 bp, Homo sapien
tatgatacgtgcattaaatgtcaataaagttgt

SEQ ID NO: 764416 - DNA, 33 bp, Homo sapien
tatgatacgtgcattatatgtcaataaagttgt

SEQ ID NO: 764417 - DNA, 33 bp, Homo sapien
tgtttataaatcatagaagttgttttccctctt

SEQ ID NO: 764418 - DNA, 33 bp, Homo sapien
tgtttataaatcatagtagttgttttccctctt

SEQ ID NO: 764419 - DNA, 33 bp, Homo sapien
gcaaatggtgaacttgaagcttacctttgcctg

SEQ ID NO: 764420 - DNA, 33 bp, Homo sapien
gcaaatggtgaacttgcagcttacctttgcctg

SEQ ID NO: 764421 - DNA, 33 bp, Homo sapien
aaaacggcgtgcaggaatcagagacattacatc

SEQ ID NO: 764422 - DNA, 33 bp, Homo sapien
aaaacggcgtgcaggagtcagagacattacatc

SEQ ID NO: 764423 - DNA, 33 bp, Homo sapien
atctatctcttcctcacgtttaccgattgatgc

SEQ ID NO: 764424 - DNA, 33 bp, Homo sapien
atctatctcttcctcatgtttaccgattgatgc

SEQ ID NO: 764425 - DNA, 33 bp, Homo sapien
actgtgactatctgcaaagcagtagggttttgc

SEQ ID NO: 764426 - DNA, 33 bp, Homo sapien
actgtgactatctgcagagcagtagggttttgc

SEQ ID NO: 764427 - DNA, 33 bp, Homo sapien
ggaaggtaatggagaacggcaccaccatttgtt

SEQ ID NO: 764428 - DNA, 33 bp, Homo sapien
ggaaggtaatggagaagggcaccaccatttgtt

SEQ ID NO: 764429 - DNA, 33 bp, Homo sapien
tatctctttcttgtcacgaagcctcctggattc

SEQ ID NO: 764430 - DNA, 33 bp, Homo sapien
tatctctttcttgtcatgaagcctcctggattc

SEQ ID NO: 764431 - DNA, 33 bp, Homo sapien
ataagcgtgggtcctacggtaagttgcaaaagc

SEQ ID NO: 764432 - DNA, 33 bp, Homo sapien
ataagcgtgggtcctatggtaagttgcaaaagc

SEQ ID NO: 764433 - DNA, 33 bp, Homo sapien
aaagtagcattttacaccaagagaacagggata

SEQ ID NO: 764434 - DNA, 33 bp, Homo sapien
aaagtagcattttacatcaagagaacagggata

SEQ ID NO: 764435 - DNA, 33 bp, Homo sapien
tgaggatgaccttctaactctggactgtatcct

SEQ ID NO: 764436 - DNA, 33 bp, Homo sapien
tgaggatgaccttctagctctggactgtatcct

SEQ ID NO: 764437 - DNA, 33 bp, Homo sapien
gtcacaaataatttgaagtttatctgttatagc

SEQ ID NO: 764438 - DNA, 33 bp, Homo sapien
gtcacaaataatttgaggtttatctgttatagc

SEQ ID NO: 764439 - DNA, 33 bp, Homo sapien
tgtccataaatggcaaagtgtactaaaaacgac

SEQ ID NO: 764440 - DNA, 33 bp, Homo sapien
tgtccataaatggcaatgtgtactaaaaacgac

SEQ ID NO: 764441 - DNA, 33 bp, Homo sapien
cttgctcttcgaattcactctgtatttattgat

SEQ ID NO: 764442 - DNA, 33 bp, Homo sapien
cttgctcttcgaattcgctctgtatttattgat

SEQ ID NO: 764443 - DNA, 33 bp, Homo sapien
tttgcgtgtgttcaaactagtgctatttataaa

SEQ ID NO: 764444 - DNA, 33 bp, Homo sapien
tttgcgtgtgttcaaagtagtgctatttataaa

SEQ ID NO: 764445 - DNA, 33 bp, Homo sapien
tctaaatcagaagtgtaaatgcccagtggactt

SEQ ID NO: 764446 - DNA, 33 bp, Homo sapien
tctaaatcagaagtgttaatgcccagtggactt

SEQ ID NO: 764447 - DNA, 33 bp, Homo sapien
aaaactatcctccagaataacagttcgaattca

SEQ ID NO: 764448 - DNA, 33 bp, Homo sapien
aaaactatcctccagagtaacagttcgaattca

SEQ ID NO: 764449 - DNA, 33 bp, Homo sapien
cctcctgctccagcaacgtaggatgtgcctgct

SEQ ID NO: 764450 - DNA, 33 bp, Homo sapien
cctcctgctccagcaatgtaggatgtgcctgct

SEQ ID NO: 764451 - DNA, 33 bp, Homo sapien
aatgttaaaagtactacgatctgataattgcct

SEQ ID NO: 764452 - DNA, 33 bp, Homo sapien
aatgttaaaagtactatgatctgataattgcct

SEQ ID NO: 764453 - DNA, 33 bp, Homo sapien
ctatctgaatataacccaagacatcccctcatc

SEQ ID NO: 764454 - DNA, 33 bp, Homo sapien
ctatctgaatataacctaagacatcccctcatc

SEQ ID NO: 764455 - DNA, 33 bp, Homo sapien
taatactacaacttgtaaatccattcaccttgg

SEQ ID NO: 764456 - DNA, 33 bp, Homo sapien
taatactacaacttgttaatccattcaccttgg

SEQ ID NO: 764457 - DNA, 33 bp, Homo sapien
ccatcggtactacttaggagattccagttgctc

SEQ ID NO: 764458 - DNA, 33 bp, Homo sapien
ccatcggtactacttatgagattccagttgctc

SEQ ID NO: 764459 - DNA, 33 bp, Homo sapien
agaacagaattctgaaaaatacctggctgatat

SEQ ID NO: 764460 - DNA, 33 bp, Homo sapien
agaacagaattctgaacaatacctggctgatat

SEQ ID NO: 764461 - DNA, 33 bp, Homo sapien
tctttaaggaacaacactaagagacatcagcct

SEQ ID NO: 764462 - DNA, 33 bp, Homo sapien
tctttaaggaacaacattaagagacatcagcct

SEQ ID NO: 764463 - DNA, 33 bp, Homo sapien
caggctgagtgcgaacccttgctgagagatgcc

SEQ ID NO: 764464 - DNA, 33 bp, Homo sapien
caggctgagtgcgaacgcttgctgagagatgcc

SEQ ID NO: 764465 - DNA, 33 bp, Homo sapien
aaaaggcatctcaacaaacagtgatagtttgaa

SEQ ID NO: 764466 - DNA, 33 bp, Homo sapien
aaaaggcatctcaacagacagtgatagtttgaa

SEQ ID NO: 764467 - DNA, 33 bp, Homo sapien
ttaaacagagaagcacaggtctttcactaatgc

SEQ ID NO: 764468 - DNA, 33 bp, Homo sapien
ttaaacagagaagcacgggtctttcactaatgc

SEQ ID NO: 764469 - DNA, 33 bp, Homo sapien
tggaatacgtagttcacgtgtcacctttttatc

SEQ ID NO: 764470 - DNA, 33 bp, Homo sapien
tggaatacgtagttcatgtgtcacctttttatc

SEQ ID NO: 764471 - DNA, 33 bp, Homo sapien
caagtgacgctctccccgctccaaaaggtttat

SEQ ID NO: 764472 - DNA, 33 bp, Homo sapien
caagtgacgctctcccggctccaaaaggtttat

SEQ ID NO: 764473 - DNA, 33 bp, Homo sapien
attgcctggaaagggaaaacctcaaggtgaatg

SEQ ID NO: 764474 - DNA, 33 bp, Homo sapien
attgcctggaaagggagaacctcaaggtgaatg

SEQ ID NO: 764475 - DNA, 33 bp, Homo sapien
tgatcattgctttcaccggcctctggctgcagc

SEQ ID NO: 764476 - DNA, 33 bp, Homo sapien
tgatcattgctttcactggcctctggctgcagc

SEQ ID NO: 764477 - DNA, 33 bp, Homo sapien
tcacatataccatgcaaaattaagtagcagaat

SEQ ID NO: 764478 - DNA, 33 bp, Homo sapien
tcacatataccatgcacaattaagtagcagaat

SEQ ID NO: 764479 - DNA, 33 bp, Homo sapien
tgtgctgtctggggaaataacacttgcaatgga

SEQ ID NO: 764480 - DNA, 33 bp, Homo sapien
tgtgctgtctggggaagtaacacttgcaatgga

SEQ ID NO: 764481 - DNA, 33 bp, Homo sapien
atggtttcaaatatgacgcttccaactcaacag

SEQ ID NO: 764482 - DNA, 33 bp, Homo sapien
atggtttcaaatatgatgcttccaactcaacag

SEQ ID NO: 764483 - DNA, 33 bp, Homo sapien
cagtcctaaagctacacagaacaagataggcat

SEQ ID NO: 764484 - DNA, 33 bp, Homo sapien
cagtcctaaagctacagagaacaagataggcat

SEQ ID NO: 764485 - DNA, 33 bp, Homo sapien
ttctgataccagtaaaaccaagtcattcctgag

SEQ ID NO: 764486 - DNA, 33 bp, Homo sapien
ttctgataccagtaaacccaagtcattcctgag

SEQ ID NO: 764487 - DNA, 33 bp, Homo sapien
ttatcagcccatgataaagtagtattatttgat

SEQ ID NO: 764488 - DNA, 33 bp, Homo sapien
ttatcagcccatgatagagtagtattatttgat

SEQ ID NO: 764489 - DNA, 33 bp, Homo sapien
actgatcagcgtcataactctgcgcataggctc

SEQ ID NO: 764490 - DNA, 33 bp, Homo sapien
actgatcagcgtcatagctctgcgcataggctc

SEQ ID NO: 764491 - DNA, 33 bp, Homo sapien
agacatattttcctcgcataaaatcctgaaggc

SEQ ID NO: 764492 - DNA, 33 bp, Homo sapien
agacatattttcctcgtataaaatcctgaaggc

SEQ ID NO: 764493 - DNA, 33 bp, Homo sapien
tcttcaatatgggagcagcagtttaatcctagt

SEQ ID NO: 764494 - DNA, 33 bp, Homo sapien
tcttcaatatgggagcggcagtttaatcctagt

SEQ ID NO: 764495 - DNA, 33 bp, Homo sapien
ctgaagcaagcattataagctccattttagaga

SEQ ID NO: 764496 - DNA, 33 bp, Homo sapien
ctgaagcaagcattatcagctccattttagaga

SEQ ID NO: 764497 - DNA, 33 bp, Homo sapien
aattgtcctgagtaaactctgctttatcatact

SEQ ID NO: 764498 - DNA, 33 bp, Homo sapien
aattgtcctgagtaaagtctgctttatcatact

SEQ ID NO: 764499 - DNA, 33 bp, Homo sapien
tggggtgctcttataaagaagggctggactcct

SEQ ID NO: 764500 - DNA, 33 bp, Homo sapien
tggggtgctcttataaggaagggctggactcct

SEQ ID NO: 764501 - DNA, 33 bp, Homo sapien
acggaggaaaatgaaagctcacaaccaggcctg

SEQ ID NO: 764502 - DNA, 33 bp, Homo sapien
acggaggaaaatgaaatctcacaaccaggcctg

SEQ ID NO: 764503 - DNA, 33 bp, Homo sapien
gctacaaacagtcaaacaggtcgttaatgcttg

SEQ ID NO: 764504 - DNA, 33 bp, Homo sapien
gctacaaacagtcaaagaggtcgttaatgcttg

SEQ ID NO: 764505 - DNA, 33 bp, Homo sapien
ccagctcagtctgaaccaagaggaggacacagt

SEQ ID NO: 764506 - DNA, 33 bp, Homo sapien
ccagctcagtctgaacgaagaggaggacacagt

SEQ ID NO: 764507 - DNA, 33 bp, Homo sapien
ggaatcaagggacagaaattggattgtcacctt

SEQ ID NO: 764508 - DNA, 33 bp, Homo sapien
ggaatcaagggacagagattggattgtcacctt

SEQ ID NO: 764509 - DNA, 33 bp, Homo sapien
tggcctatagctattcaagtttcagtgaatata

SEQ ID NO: 764510 - DNA, 33 bp, Homo sapien
tggcctatagctattccagtttcagtgaatata

SEQ ID NO: 764511 - DNA, 33 bp, Homo sapien
gttttttacttttgagaatctaagcaggtattt

SEQ ID NO: 764512 - DNA, 33 bp, Homo sapien
gttttttacttttgagcatctaagcaggtattt

SEQ ID NO: 764513 - DNA, 33 bp, Homo sapien
tacttgtttttggacactatgcatcaatttctt

SEQ ID NO: 764514 - DNA, 33 bp, Homo sapien
tacttgtttttggacattatgcatcaatttctt

SEQ ID NO: 764515 - DNA, 33 bp, Homo sapien
gtgaaagtttgcttaactgacctgtatatttta

SEQ ID NO: 764516 - DNA, 33 bp, Homo sapien
gtgaaagtttgcttaattgacctgtatatttta

SEQ ID NO: 764517 - DNA, 33 bp, Homo sapien
ttagcatgctcaggtacagggcatgttgacaca

SEQ ID NO: 764518 - DNA, 33 bp, Homo sapien
ttagcatgctcaggtatagggcatgttgacaca

SEQ ID NO: 764519 - DNA, 33 bp, Homo sapien
caccagtttctaccaccatttcaatgaactcaa

SEQ ID NO: 764520 - DNA, 33 bp, Homo sapien
caccagtttctaccactatttcaatgaactcaa

SEQ ID NO: 764521 - DNA, 33 bp, Homo sapien
tttaaatcttagaacacccaaactctgatgaaa

SEQ ID NO: 764522 - DNA, 33 bp, Homo sapien
tttaaatcttagaacatccaaactctgatgaaa

SEQ ID NO: 764523 - DNA, 33 bp, Homo sapien
agaatgtgtccaaaaaatgaatgctaagcattc

SEQ ID NO: 764524 - DNA, 33 bp, Homo sapien
agaatgtgtccaaaaactgaatgctaagcattc

SEQ ID NO: 764525 - DNA, 33 bp, Homo sapien
cacagatgacgccaaaaagaaaaggaaaacagg

SEQ ID NO: 764526 - DNA, 33 bp, Homo sapien
cacagatgacgccaaagagaaaaggaaaacagg

SEQ ID NO: 764527 - DNA, 33 bp, Homo sapien
atgcccacaaaagcaacaagtcgtagtatcagt

SEQ ID NO: 764528 - DNA, 33 bp, Homo sapien
atgcccacaaaagcaagaagtcgtagtatcagt

SEQ ID NO: 764529 - DNA, 33 bp, Homo sapien
aagttgcttcctactcacatattgtagggcttc

SEQ ID NO: 764530 - DNA, 33 bp, Homo sapien
aagttgcttcctactcgcatattgtagggcttc

SEQ ID NO: 764531 - DNA, 33 bp, Homo sapien
ccttcagtagtgctgccaaatgtagcctgggtc

SEQ ID NO: 764532 - DNA, 33 bp, Homo sapien
ccttcagtagtgctgctaaatgtagcctgggtc

SEQ ID NO: 764533 - DNA, 33 bp, Homo sapien
tactaacttttgcccaatgagaggaaaccagac

SEQ ID NO: 764534 - DNA, 33 bp, Homo sapien
tactaacttttgcccagtgagaggaaaccagac

SEQ ID NO: 764535 - DNA, 33 bp, Homo sapien
cctatcagcacacatacagttaagcctgaagat

SEQ ID NO: 764536 - DNA, 33 bp, Homo sapien
cctatcagcacacatatagttaagcctgaagat

SEQ ID NO: 764537 - DNA, 33 bp, Homo sapien
ttttgtagggttttcacggaaagtctgaggcat

SEQ ID NO: 764538 - DNA, 33 bp, Homo sapien
ttttgtagggttttcatggaaagtctgaggcat

SEQ ID NO: 764539 - DNA, 33 bp, Homo sapien
ttgaaagcactagaaactgaccaaatgcagacg

SEQ ID NO: 764540 - DNA, 33 bp, Homo sapien
ttgaaagcactagaaattgaccaaatgcagacg

SEQ ID NO: 764541 - DNA, 33 bp, Homo sapien
cattacttttaatgcaccaacctagtaacaata

SEQ ID NO: 764542 - DNA, 33 bp, Homo sapien
cattacttttaatgcagcaacctagtaacaata

SEQ ID NO: 764543 - DNA, 33 bp, Homo sapien
aagtcatcttatttcacagtgagtgctagttgg

SEQ ID NO: 764544 - DNA, 33 bp, Homo sapien
aagtcatcttatttcatagtgagtgctagttgg

SEQ ID NO: 764545 - DNA, 33 bp, Homo sapien
cacatctctaggtgacgcaaaaagttcaaggga

SEQ ID NO: 764546 - DNA, 33 bp, Homo sapien
cacatctctaggtgactcaaaaagttcaaggga

SEQ ID NO: 764547 - DNA, 33 bp, Homo sapien
ctcaaagtaagaagggaatttgatcagagcttt

SEQ ID NO: 764548 - DNA, 33 bp, Homo sapien
ctcaaagtaagaaggggatttgatcagagcttt

SEQ ID NO: 764549 - DNA, 33 bp, Homo sapien
tctgtaaaattatcaaagagaagatagacctca

SEQ ID NO: 764550 - DNA, 33 bp, Homo sapien
tctgtaaaattatcaaggagaagatagacctca

SEQ ID NO: 764551 - DNA, 33 bp, Homo sapien
cctgggaccgtggaagaaactgatagattctgg

SEQ ID NO: 764552 - DNA, 33 bp, Homo sapien
cctgggaccgtggaaggaactgatagattctgg

SEQ ID NO: 764553 - DNA, 33 bp, Homo sapien
caactggcctcctgaaagacctatattcacttt

SEQ ID NO: 764554 - DNA, 33 bp, Homo sapien
caactggcctcctgaaggacctatattcacttt

SEQ ID NO: 764555 - DNA, 33 bp, Homo sapien
ttcatactgtttcaagcccatatgattagattt

SEQ ID NO: 764556 - DNA, 33 bp, Homo sapien
ttcatactgtttcaaggccatatgattagattt

SEQ ID NO: 764557 - DNA, 33 bp, Homo sapien
tacaggaatacatcaaaattttaactcttttgc

SEQ ID NO: 764558 - DNA, 33 bp, Homo sapien
tacaggaatacatcaacattttaactcttttgc

SEQ ID NO: 764559 - DNA, 33 bp, Homo sapien
atataatcatgagagacctgaatccagggtaac

SEQ ID NO: 764560 - DNA, 33 bp, Homo sapien
atataatcatgagagatctgaatccagggtaac

SEQ ID NO: 764561 - DNA, 33 bp, Homo sapien
cccaaagagatttccacaaatagccagtgtata

SEQ ID NO: 764562 - DNA, 33 bp, Homo sapien
cccaaagagatttccataaatagccagtgtata

SEQ ID NO: 764563 - DNA, 33 bp, Homo sapien
ttcatcagaacccttacgctaacctgaccacac

SEQ ID NO: 764564 - DNA, 33 bp, Homo sapien
ttcatcagaacccttatgctaacctgaccacac

SEQ ID NO: 764565 - DNA, 33 bp, Homo sapien
gcattgacttaaatagcaactactatagtggga

SEQ ID NO: 764566 - DNA, 33 bp, Homo sapien
gcattgacttaaataggaactactatagtggga

SEQ ID NO: 764567 - DNA, 33 bp, Homo sapien
acaggcctgcaaagggaatttttttcttgactc

SEQ ID NO: 764568 - DNA, 33 bp, Homo sapien
acaggcctgcaaagggtatttttttcttgactc

SEQ ID NO: 764569 - DNA, 33 bp, Homo sapien
caggctatgaaactccaggagtctggctccaga

SEQ ID NO: 764570 - DNA, 33 bp, Homo sapien
caggctatgaaactccgggagtctggctccaga

SEQ ID NO: 764571 - DNA, 33 bp, Homo sapien
ggttttattattgataacacaatatggagcaat

SEQ ID NO: 764572 - DNA, 33 bp, Homo sapien
ggttttattattgatatcacaatatggagcaat

SEQ ID NO: 764573 - DNA, 33 bp, Homo sapien
atatgagttcaaaggcaaaagggattatttgcg

SEQ ID NO: 764574 - DNA, 33 bp, Homo sapien
atatgagttcaaaggcgaaagggattatttgcg

SEQ ID NO: 764575 - DNA, 33 bp, Homo sapien
catgtgattaattgaacactgtatgaaagtgaa

SEQ ID NO: 764576 - DNA, 33 bp, Homo sapien
catgtgattaattgaatactgtatgaaagtgaa

SEQ ID NO: 764577 - DNA, 33 bp, Homo sapien
ttgaactgaggtgaaacagaaaggaatgaagct

SEQ ID NO: 764578 - DNA, 33 bp, Homo sapien
ttgaactgaggtgaaagagaaaggaatgaagct

SEQ ID NO: 764579 - DNA, 33 bp, Homo sapien
cctaaaccaaatattcacatcctgtacttacat

SEQ ID NO: 764580 - DNA, 33 bp, Homo sapien
cctaaaccaaatattcgcatcctgtacttacat

SEQ ID NO: 764581 - DNA, 33 bp, Homo sapien
tctattattcttcatcccctaaaatctaattat

SEQ ID NO: 764582 - DNA, 33 bp, Homo sapien
tctattattcttcatctcctaaaatctaattat

SEQ ID NO: 764583 - DNA, 33 bp, Homo sapien
gagatccatattgttaaatacaggcattccttg

SEQ ID NO: 764584 - DNA, 33 bp, Homo sapien
gagatccatattgttacatacaggcattccttg

SEQ ID NO: 764585 - DNA, 33 bp, Homo sapien
tcccaaaccgtgagaaattaaattcctgttgtt

SEQ ID NO: 764586 - DNA, 33 bp, Homo sapien
tcccaaaccgtgagaagttaaattcctgttgtt

SEQ ID NO: 764587 - DNA, 33 bp, Homo sapien
tcaagatttcaaagaacttaaagcacaactacc

SEQ ID NO: 764588 - DNA, 33 bp, Homo sapien
tcaagatttcaaagaagttaaagcacaactacc

SEQ ID NO: 764589 - DNA, 33 bp, Homo sapien
tgggcttggatttggcagaaatctgagagtttc

SEQ ID NO: 764590 - DNA, 33 bp, Homo sapien
tgggcttggatttggcggaaatctgagagtttc

SEQ ID NO: 764591 - DNA, 33 bp, Homo sapien
ttcaaagggataactacgtggtatgagaaggac

SEQ ID NO: 764592 - DNA, 33 bp, Homo sapien
ttcaaagggataactatgtggtatgagaaggac

SEQ ID NO: 764593 - DNA, 33 bp, Homo sapien
aggccaagttttatcccgacaagactagggcac

SEQ ID NO: 764594 - DNA, 33 bp, Homo sapien
aggccaagttttatcctgacaagactagggcac

SEQ ID NO: 764595 - DNA, 33 bp, Homo sapien
ctcaacacggattacacacttaaacataagatc

SEQ ID NO: 764596 - DNA, 33 bp, Homo sapien
ctcaacacggattacagacttaaacataagatc

SEQ ID NO: 764597 - DNA, 33 bp, Homo sapien; identical to SEQ ID NO: 764595

SEQ ID NO: 764598 - DNA, 33 bp, Homo sapien; identical to SEQ ID NO: 764596

SEQ ID NO: 764599 - DNA, 33 bp, Homo sapien
ataattatagtctcacacaaggatgggaacttg

SEQ ID NO: 764600 - DNA, 33 bp, Homo sapien
ataattatagtctcacgcaaggatgggaacttg

SEQ ID NO: 764601 - DNA, 33 bp, Homo sapien
ttgtcaaccatgtgtacggtaagtaacagacaa

SEQ ID NO: 764602 - DNA, 33 bp, Homo sapien
ttgtcaaccatgtgtatggtaagtaacagacaa

SEQ ID NO: 764603 - DNA, 33 bp, Homo sapien
ggctggtatatttaaccgtgtatcttgtttaaa

SEQ ID NO: 764604 - DNA, 33 bp, Homo sapien
ggctggtatatttaactgtgtatcttgtttaaa

SEQ ID NO: 764605 - DNA, 33 bp, Homo sapien
acatatgtgtaggaaacgttaaaagaagtgatt

SEQ ID NO: 764606 - DNA, 33 bp, Homo sapien
acatatgtgtaggaaatgttaaaagaagtgatt

SEQ ID NO: 764607 - DNA, 33 bp, Homo sapien
atcaaatcattagctacgaaatcaagaagacag

SEQ ID NO: 764608 - DNA, 33 bp, Homo sapien
atcaaatcattagctatgaaatcaagaagacag

SEQ ID NO: 764609 - DNA, 33 bp, Homo sapien
aaccttgtatcatggagcattaattacatggct

SEQ ID NO: 764610 - DNA, 33 bp, Homo sapien
aaccttgtatcatggatcattaattacatggct

SEQ ID NO: 764611 - DNA, 33 bp, Homo sapien
atccctgattagtctacgaattatatcacatgg

SEQ ID NO: 764612 - DNA, 33 bp, Homo sapien
atccctgattagtctatgaattatatcacatgg

SEQ ID NO: 764613 - DNA, 33 bp, Homo sapien
cattatagattacccaccaggagtcaggcactg

SEQ ID NO: 764614 - DNA, 33 bp, Homo sapien
cattatagattacccatcaggagtcaggcactg

SEQ ID NO: 764615 - DNA, 33 bp, Homo sapien
atagttttattcagcacatgatgtggaccacgt

SEQ ID NO: 764616 - DNA, 33 bp, Homo sapien
atagttttattcagcatatgatgtggaccacgt

SEQ ID NO: 764617 - DNA, 33 bp, Homo sapien
tctgttattaaggagaacatgaattggtcctcc

SEQ ID NO: 764618 - DNA, 33 bp, Homo sapien
tctgttattaaggagatcatgaattggtcctcc

SEQ ID NO: 764619 - DNA, 33 bp, Homo sapien
taaagtgttgctcttacagactcggaggcatgg

SEQ ID NO: 764620 - DNA, 33 bp, Homo sapien
taaagtgttgctcttatagactcggaggcatgg

SEQ ID NO: 764621 - DNA, 33 bp, Homo sapien
ggaagcgaaactgaaacgcagcgaaattatcca

SEQ ID NO: 764622 - DNA, 33 bp, Homo sapien
ggaagcgaaactgaaatgcagcgaaattatcca

SEQ ID NO: 764623 - DNA, 33 bp, Homo sapien
atgagtggtaaggtagcaccatgcatgagggag

SEQ ID NO: 764624 - DNA, 33 bp, Homo sapien
atgagtggtaaggtaggaccatgcatgagggag

SEQ ID NO: 764625 - DNA, 33 bp, Homo sapien
agttcatatttttccaaggtagaacatgaccaa

SEQ ID NO: 764626 - DNA, 33 bp, Homo sapien
agttcatatttttccagggtagaacatgaccaa

SEQ ID NO: 764627 - DNA, 33 bp, Homo sapien
attagtgtgcctgttagaaatactaaaatgata

SEQ ID NO: 764628 - DNA, 33 bp, Homo sapien
attagtgtgcctgttataaatactaaaatgata

SEQ ID NO: 764629 - DNA, 33 bp, Homo sapien
catgtgagggcacagtaaccagggaaccatctg

SEQ ID NO: 764630 - DNA, 33 bp, Homo sapien
catgtgagggcacagtgaccagggaaccatctg

SEQ ID NO: 764631 - DNA, 33 bp, Homo sapien
tatgtgacttcttcccaaaattctggacagttc

SEQ ID NO: 764632 - DNA, 33 bp, Homo sapien
tatgtgacttcttccccaaattctggacagttc

SEQ ID NO: 764633 - DNA, 33 bp, Homo sapien
taaatatacaacctcaatccccagctatagttc

SEQ ID NO: 764634 - DNA, 33 bp, Homo sapien
taaatatacaacctcagtccccagctatagttc

SEQ ID NO: 764635 - DNA, 33 bp, Homo sapien
agggcatcagcctctacatagacttgacttttt

SEQ ID NO: 764636 - DNA, 33 bp, Homo sapien
agggcatcagcctctatatagacttgacttttt

SEQ ID NO: 764637 - DNA, 33 bp, Homo sapien
tttggttctaatagacacaacaaaggtgcagga

SEQ ID NO: 764638 - DNA, 33 bp, Homo sapien
tttggttctaatagacgcaacaaaggtgcagga

SEQ ID NO: 764639 - DNA, 33 bp, Homo sapien
tctaaaacgcaaggtaaagtattctagattttg

SEQ ID NO: 764640 - DNA, 33 bp, Homo sapien
tctaaaacgcaaggtagagtattctagattttg

SEQ ID NO: 764641 - DNA, 33 bp, Homo sapien
tactctttatttcttcacatagatccctatttt

SEQ ID NO: 764642 - DNA, 33 bp, Homo sapien
tactctttatttcttcgcatagatccctatttt

SEQ ID NO: 764643 - DNA, 33 bp, Homo sapien
tagaaaatatatagtcaacacagaagagtgcag

SEQ ID NO: 764644 - DNA, 33 bp, Homo sapien
tagaaaatatatagtcgacacagaagagtgcag

SEQ ID NO: 764645 - DNA, 33 bp, Homo sapien
ggaaagttcaacgatacgtatacaaccaacagg

SEQ ID NO: 764646 - DNA, 33 bp, Homo sapien
ggaaagttcaacgatatgtatacaaccaacagg

SEQ ID NO: 764647 - DNA, 33 bp, Homo sapien
ctatctttctgcatatcaatttttcccctgccc

SEQ ID NO: 764648 - DNA, 33 bp, Homo sapien
ctatctttctgcatattaatttttcccctgccc

SEQ ID NO: 764649 - DNA, 33 bp, Homo sapien
ctggaaaacactccaacgtcttacatcttgagg

SEQ ID NO: 764650 - DNA, 33 bp, Homo sapien
ctggaaaacactccaatgtcttacatcttgagg

SEQ ID NO: 764651 - DNA, 33 bp, Homo sapien
gtacatttactctgagacctatcactataaatg

SEQ ID NO: 764652 - DNA, 33 bp, Homo sapien
gtacatttactctgagtcctatcactataaatg

SEQ ID NO: 764653 - DNA, 33 bp, Homo sapien
gtgatcattttcttcaaatcatcctcaaacaat

SEQ ID NO: 764654 - DNA, 33 bp, Homo sapien
gtgatcattttcttcagatcatcctcaaacaat

SEQ ID NO: 764655 - DNA, 33 bp, Homo sapien
taccacgctcagtagcaagccatcatggggcaa

SEQ ID NO: 764656 - DNA, 33 bp, Homo sapien
taccacgctcagtagcgagccatcatggggcaa

SEQ ID NO: 764657 - DNA, 33 bp, Homo sapien
tgtcctggaagtttagccagtactataccacaa

SEQ ID NO: 764658 - DNA, 33 bp, Homo sapien
tgtcctggaagtttaggcagtactataccacaa

SEQ ID NO: 764659 - DNA, 33 bp, Homo sapien
atggattttgtaggtcaagtttggaccgggaac

SEQ ID NO: 764660 - DNA, 33 bp, Homo sapien
atggattttgtaggtcgagtttggaccgggaac

SEQ ID NO: 764661 - DNA, 33 bp, Homo sapien
ccattgctaatttgacaggaagattgagttatt

SEQ ID NO: 764662 - DNA, 33 bp, Homo sapien
ccattgctaatttgacgggaagattgagttatt

SEQ ID NO: 764663 - DNA, 33 bp, Homo sapien
actgtcctcaagtgtaaggtaatgttcaaactc

SEQ ID NO: 764664 - DNA, 33 bp, Homo sapien
actgtcctcaagtgtagggtaatgttcaaactc

SEQ ID NO: 764665 - DNA, 33 bp, Homo sapien
aggaaagctaatttgacggtataaaatagaatg

SEQ ID NO: 764666 - DNA, 33 bp, Homo sapien
aggaaagctaatttgatggtataaaatagaatg

SEQ ID NO: 764667 - DNA, 33 bp, Homo sapien
aatttagaaactctctcaagcagtgtgaaatgg

SEQ ID NO: 764668 - DNA, 33 bp, Homo sapien
aatttagaaactctcttaagcagtgtgaaatgg

SEQ ID NO: 764669 - DNA, 33 bp, Homo sapien
ggagatgacttaaagagtcctggcctaggcaac

SEQ ID NO: 764670 - DNA, 33 bp, Homo sapien
ggagatgacttaaagattcctggcctaggcaac

SEQ ID NO: 764671 - DNA, 33 bp, Homo sapien
ttttatactttaagcccatttattttaatgcca

SEQ ID NO: 764672 - DNA, 33 bp, Homo sapien
ttttatactttaagccgatttattttaatgcca

SEQ ID NO: 764673 - DNA, 33 bp, Homo sapien
tttattcacaaatgccaagaattctggaatgga

SEQ ID NO: 764674 - DNA, 33 bp, Homo sapien
tttattcacaaatgccgagaattctggaatgga

SEQ ID NO: 764675 - DNA, 33 bp, Homo sapien
gtaatctagggggaccaaacacatcaaatacat

SEQ ID NO: 764676 - DNA, 33 bp, Homo sapien
gtaatctagggggaccgaacacatcaaatacat

SEQ ID NO: 764677 - DNA, 33 bp, Homo sapien
agcaggtcaagttcaaactctagtgccagcaaa

SEQ ID NO: 764678 - DNA, 33 bp, Homo sapien
agcaggtcaagttcaacctctagtgccagcaaa

SEQ ID NO: 764679 - DNA, 33 bp, Homo sapien
ctaccatagctccttcacaggtagaccatgcct

SEQ ID NO: 764680 - DNA, 33 bp, Homo sapien
ctaccatagctccttcgcaggtagaccatgcct

SEQ ID NO: 764681 - DNA, 33 bp, Homo sapien
caatgcggcaagttaacaccaggattaccacag

SEQ ID NO: 764682 - DNA, 33 bp, Homo sapien
caatgcggcaagttaataccaggattaccacag

SEQ ID NO: 764683 - DNA, 33 bp, Homo sapien
tctgcttccatctgtcaaaagagattgtagagc

SEQ ID NO: 764684 - DNA, 33 bp, Homo sapien
tctgcttccatctgtcgaaagagattgtagagc

SEQ ID NO: 764685 - DNA, 33 bp, Homo sapien
gattattatgagaattgaatgaaacagcatata

SEQ ID NO: 764686 - DNA, 33 bp, Homo sapien
gattattatgagaatttaatgaaacagcatata

SEQ ID NO: 764687 - DNA, 33 bp, Homo sapien
tatcatacaactccaccagggaagtaatacatg

SEQ ID NO: 764688 - DNA, 33 bp, Homo sapien
tatcatacaactccactagggaagtaatacatg

SEQ ID NO: 764689 - DNA, 33 bp, Homo sapien
ctattccttgagcacagtatggtggatttgttt

SEQ ID NO: 764690 - DNA, 33 bp, Homo sapien
ctattccttgagcacattatggtggatttgttt

SEQ ID NO: 764691 - DNA, 33 bp, Homo sapien
tgccactcctatgaaactgtagatcacttctac

SEQ ID NO: 764692 - DNA, 33 bp, Homo sapien
tgccactcctatgaaattgtagatcacttctac

SEQ ID NO: 764693 - DNA, 33 bp, Homo sapien
tttccctgtgattatcaaaggaagtgaattctc

SEQ ID NO: 764694 - DNA, 33 bp, Homo sapien
tttccctgtgattatctaaggaagtgaattctc

SEQ ID NO: 764695 - DNA, 33 bp, Homo sapien
cgacagcacaccgtgccgacagtggtaagatgt

SEQ ID NO: 764696 - DNA, 33 bp, Homo sapien
cgacagcacaccgtgcggacagtggtaagatgt

SEQ ID NO: 764697 - DNA, 33 bp, Homo sapien
caagtggaaaaaattgcaggacatcataaactg

SEQ ID NO: 764698 - DNA, 33 bp, Homo sapien
caagtggaaaaaattgtaggacatcataaactg

SEQ ID NO: 764699 - DNA, 33 bp, Homo sapien
ggctttgttcttagcaatacagtttaagcaatt

SEQ ID NO: 764700 - DNA, 33 bp, Homo sapien
ggctttgttcttagcagtacagtttaagcaatt

SEQ ID NO: 764701 - DNA, 33 bp, Homo sapien
gtaagagtgcagtgtacgccaaaagcttgtctt

SEQ ID NO: 764702 - DNA, 33 bp, Homo sapien
gtaagagtgcagtgtatgccaaaagcttgtctt

SEQ ID NO: 764703 - DNA, 33 bp, Homo sapien
tttaaatgcaaccaggaaaataagtaccatttt

SEQ ID NO: 764704 - DNA, 33 bp, Homo sapien
tttaaatgcaaccagggaaataagtaccatttt

SEQ ID NO: 764705 - DNA, 33 bp, Homo sapien
taggtctatgatgcaactggagtaatttttgtg

SEQ ID NO: 764706 - DNA, 33 bp, Homo sapien
taggtctatgatgcaattggagtaatttttgtg

SEQ ID NO: 764707 - DNA, 33 bp, Homo sapien
actgaaactcgattacactggggcctatggggg

SEQ ID NO: 764708 - DNA, 33 bp, Homo sapien
actgaaactcgattacgctggggcctatggggg

SEQ ID NO: 764709 - DNA, 33 bp, Homo sapien
caggaatcctctattccacgcatttgaaagcta

SEQ ID NO: 764710 - DNA, 33 bp, Homo sapien
caggaatcctctattctacgcatttgaaagcta

SEQ ID NO: 764711 - DNA, 33 bp, Homo sapien
ctacacgccgaggcctaaagaagaggaaacaat

SEQ ID NO: 764712 - DNA, 33 bp, Homo sapien
ctacacgccgaggcctgaagaagaggaaacaat

SEQ ID NO: 764713 - DNA, 33 bp, Homo sapien
aaactgacccagggaccaaatactcactttata

SEQ ID NO: 764714 - DNA, 33 bp, Homo sapien
aaactgacccagggacgaaatactcactttata

SEQ ID NO: 764715 - DNA, 33 bp, Homo sapien
aatagtctcagagaaacgggctagctccctggg

SEQ ID NO: 764716 - DNA, 33 bp, Homo sapien
aatagtctcagagaaatgggctagctccctggg

SEQ ID NO: 764717 - DNA, 33 bp, Homo sapien
ataataccaaaaatgcagaaaagcaagaaagat

SEQ ID NO: 764718 - DNA, 33 bp, Homo sapien
ataataccaaaaatgcggaaaagcaagaaagat

SEQ ID NO: 764719 - DNA, 33 bp, Homo sapien
ctgttatttcaagtaacatttgatcacaaattc

SEQ ID NO: 764720 - DNA, 33 bp, Homo sapien
ctgttatttcaagtaatatttgatcacaaattc

SEQ ID NO: 764721 - DNA, 33 bp, Homo sapien
acaacataagtagtatcaatctcagcaagcaaa

SEQ ID NO: 764722 - DNA, 33 bp, Homo sapien
acaacataagtagtattaatctcagcaagcaaa

SEQ ID NO: 764723 - DNA, 33 bp, Homo sapien
atccagaagctagaggaaccagagtctgactag

SEQ ID NO: 764724 - DNA, 33 bp, Homo sapien
atccagaagctagaggcaccagagtctgactag

SEQ ID NO: 764725 - DNA, 33 bp, Homo sapien
ttcatacctgcttcaccccgctttggcccctag

SEQ ID NO: 764726 - DNA, 33 bp, Homo sapien
ttcatacctgcttcactccgctttggcccctag

SEQ ID NO: 764727 - DNA, 33 bp, Homo sapien
cccagtggattatcaacattaggtttagcaaac

SEQ ID NO: 764728 - DNA, 33 bp, Homo sapien
cccagtggattatcaagattaggtttagcaaac

SEQ ID NO: 764729 - DNA, 33 bp, Homo sapien
agagggtttgatcacacgattccccagttgccc

SEQ ID NO: 764730 - DNA, 33 bp, Homo sapien
agagggtttgatcacatgattccccagttgccc

SEQ ID NO: 764731 - DNA, 33 bp, Homo sapien
atatgccttaccccagaatgtctcatgccctta

SEQ ID NO: 764732 - DNA, 33 bp, Homo sapien
atatgccttaccccaggatgtctcatgccctta

SEQ ID NO: 764733 - DNA, 33 bp, Homo sapien
aacatacttagaaaaacatacactgctatttca

SEQ ID NO: 764734 - DNA, 33 bp, Homo sapien
aacatacttagaaaaagatacactgctatttca

SEQ ID NO: 764735 - DNA, 33 bp, Homo sapien
caaagataatgactaacagaatgaaaataacaa

SEQ ID NO: 764736 - DNA, 33 bp, Homo sapien
caaagataatgactaagagaatgaaaataacaa

SEQ ID NO: 764737 - DNA, 33 bp, Homo sapien
tgagttgctctttctaaatgtaatttattgagt

SEQ ID NO: 764738 - DNA, 33 bp, Homo sapien
tgagttgctctttctacatgtaatttattgagt

SEQ ID NO: 764739 - DNA, 33 bp, Homo sapien
tcccttgttgagatgacgagttttcctaatcct

SEQ ID NO: 764740 - DNA, 33 bp, Homo sapien
tcccttgttgagatgatgagttttcctaatcct

SEQ ID NO: 764741 - DNA, 33 bp, Homo sapien
cttctggaaaatgctcactctcttcaacacccc

SEQ ID NO: 764742 - DNA, 33 bp, Homo sapien
cttctggaaaatgctctctctcttcaacacccc

SEQ ID NO: 764743 - DNA, 33 bp, Homo sapien
aataaatagtttacacaaatttcaaatccttga

SEQ ID NO: 764744 - DNA, 33 bp, Homo sapien
aataaatagtttacacgaatttcaaatccttga

SEQ ID NO: 764745 - DNA, 33 bp, Homo sapien
atgaatagctaatgaactaagtaccactccgtt

SEQ ID NO: 764746 - DNA, 33 bp, Homo sapien
atgaatagctaatgaattaagtaccactccgtt

SEQ ID NO: 764747 - DNA, 33 bp, Homo sapien
catctgccctttattaactttcaagtcaagaaa

SEQ ID NO: 764748 - DNA, 33 bp, Homo sapien
catctgccctttattacctttcaagtcaagaaa

SEQ ID NO: 764749 - DNA, 33 bp, Homo sapien
tgtaacatatgtcatgaaagtgtgaaaaatata

SEQ ID NO: 764750 - DNA, 33 bp, Homo sapien
tgtaacatatgtcatgcaagtgtgaaaaatata

SEQ ID NO: 764751 - DNA, 33 bp, Homo sapien
cacagaagagagaagacgagatgagggcatggt

SEQ ID NO: 764752 - DNA, 33 bp, Homo sapien
cacagaagagagaagaggagatgagggcatggt

SEQ ID NO: 764753 - DNA, 33 bp, Homo sapien
tatgatgcactaatgacggagttgcagattttt

SEQ ID NO: 764754 - DNA, 33 bp, Homo sapien
tatgatgcactaatgatggagttgcagattttt

SEQ ID NO: 764755 - DNA, 33 bp, Homo sapien
tgtcatttgaaaaccactgctctataacatttt

SEQ ID NO: 764756 - DNA, 33 bp, Homo sapien
tgtcatttgaaaaccagtgctctataacatttt

SEQ ID NO: 764757 - DNA, 33 bp, Homo sapien
ctcagaaaggttaacccagatactacttgagtc

SEQ ID NO: 764758 - DNA, 33 bp, Homo sapien
ctcagaaaggttaacctagatactacttgagtc

SEQ ID NO: 764759 - DNA, 33 bp, Homo sapien
acttttttttgactcccaccactctggtctggt

SEQ ID NO: 764760 - DNA, 33 bp, Homo sapien
acttttttttgactcctaccactctggtctggt

SEQ ID NO: 764761 - DNA, 33 bp, Homo sapien
acccagactcggttgcaaggaaagcatttgctt

SEQ ID NO: 764762 - DNA, 33 bp, Homo sapien
acccagactcggttgcgaggaaagcatttgctt

SEQ ID NO: 764763 - DNA, 33 bp, Homo sapien
aagtgaagatacagcacaagtctcccctactct

SEQ ID NO: 764764 - DNA, 33 bp, Homo sapien
aagtgaagatacagcagaagtctcccctactct

SEQ ID NO: 764765 - DNA, 33 bp, Homo sapien
tttggaaatgtagtcaaatctctgctagaatag

SEQ ID NO: 764766 - DNA, 33 bp, Homo sapien
tttggaaatgtagtcagatctctgctagaatag

SEQ ID NO: 764767 - DNA, 33 bp, Homo sapien
gccagctggaactcaacgttattctgggcaccc

SEQ ID NO: 764768 - DNA, 33 bp, Homo sapien
gccagctggaactcaatgttattctgggcaccc

SEQ ID NO: 764769 - DNA, 33 bp, Homo sapien
ggttggacactcaaaaagaaataaagacaagtt

SEQ ID NO: 764770 - DNA, 33 bp, Homo sapien
ggttggacactcaaaaggaaataaagacaagtt

SEQ ID NO: 764771 - DNA, 33 bp, Homo sapien
tggtgatggctctatccacaaaattaaagattt

SEQ ID NO: 764772 - DNA, 33 bp, Homo sapien
tggtgatggctctatctacaaaattaaagattt

SEQ ID NO: 764773 - DNA, 33 bp, Homo sapien
ctactccgcacttctcccccagtagcaatcaaa

SEQ ID NO: 764774 - DNA, 33 bp, Homo sapien
ctactccgcacttctctcccagtagcaatcaaa

SEQ ID NO: 764775 - DNA, 33 bp, Homo sapien
ttttctcttcttgcataaaaaaaaagtatacac

SEQ ID NO: 764776 - DNA, 33 bp, Homo sapien
ttttctcttcttgcattaaaaaaaagtatacac

SEQ ID NO: 764777 - DNA, 33 bp, Homo sapien
agcaccaatttcctcactgagatcatgccccta

SEQ ID NO: 764778 - DNA, 33 bp, Homo sapien
agcaccaatttcctcattgagatcatgccccta

SEQ ID NO: 764779 - DNA, 33 bp, Homo sapien
gaacccacacatttatgaagtttgctattttat

SEQ ID NO: 764780 - DNA, 33 bp, Homo sapien
gaacccacacatttattaagtttgctattttat

SEQ ID NO: 764781 - DNA, 33 bp, Homo sapien
attagcaatggacttgaataactcccacttcac

SEQ ID NO: 764782 - DNA, 33 bp, Homo sapien
attagcaatggacttggataactcccacttcac

SEQ ID NO: 764783 - DNA, 33 bp, Homo sapien
ctttaaatatgaatggaatcaaggggcaccatt

SEQ ID NO: 764784 - DNA, 33 bp, Homo sapien
ctttaaatatgaatgggatcaaggggcaccatt

SEQ ID NO: 764785 - DNA, 33 bp, Homo sapien
caacttcccttttacaatcagctttttgccatt

SEQ ID NO: 764786 - DNA, 33 bp, Homo sapien
caacttcccttttacagtcagctttttgccatt

SEQ ID NO: 764787 - DNA, 33 bp, Homo sapien
tgtacaaaacaatggcaaacttatttctttgca

SEQ ID NO: 764788 - DNA, 33 bp, Homo sapien
tgtacaaaacaatggccaacttatttctttgca

SEQ ID NO: 764789 - DNA, 33 bp, Homo sapien
ccttccagaggaaacaatgtttaaggcaccatc

SEQ ID NO: 764790 - DNA, 33 bp, Homo sapien
ccttccagaggaaacagtgtttaaggcaccatc

SEQ ID NO: 764791 - DNA, 33 bp, Homo sapien
atctgtataataggacccaaaattctagactgt

SEQ ID NO: 764792 - DNA, 33 bp, Homo sapien
atctgtataataggactcaaaattctagactgt

SEQ ID NO: 764793 - DNA, 33 bp, Homo sapien
gcttaatcagaccttcaacagagttaataatcc

SEQ ID NO: 764794 - DNA, 33 bp, Homo sapien
gcttaatcagaccttcgacagagttaataatcc

SEQ ID NO: 764795 - DNA, 33 bp, Homo sapien
ggattgataatgaagaagactcttttgccccaa

SEQ ID NO: 764796 - DNA, 33 bp, Homo sapien
ggattgataatgaagacgactcttttgccccaa

SEQ ID NO: 764797 - DNA, 33 bp, Homo sapien
agagacaggaaaacagacctagtgctttgtgat

SEQ ID NO: 764798 - DNA, 33 bp, Homo sapien
agagacaggaaaacagccctagtgctttgtgat

SEQ ID NO: 764799 - DNA, 33 bp, Homo sapien
acaaatacaatcttcccgcttaagatccttcat

SEQ ID NO: 764800 - DNA, 33 bp, Homo sapien
acaaatacaatcttcctgcttaagatccttcat

SEQ ID NO: 764801 - DNA, 33 bp, Homo sapien
ctgtgatggaacagcacgtatgtttgtattgaa

SEQ ID NO: 764802 - DNA, 33 bp, Homo sapien
ctgtgatggaacagcatgtatgtttgtattgaa

SEQ ID NO: 764803 - DNA, 33 bp, Homo sapien
gctctcaacaactgaacgactaaagaaagggag

SEQ ID NO: 764804 - DNA, 33 bp, Homo sapien
gctctcaacaactgaatgactaaagaaagggag

SEQ ID NO: 764805 - DNA, 33 bp, Homo sapien
taaccctacgtaaggaaagcctgtaactacaat

SEQ ID NO: 764806 - DNA, 33 bp, Homo sapien
taaccctacgtaaggagagcctgtaactacaat

SEQ ID NO: 764807 - DNA, 33 bp, Homo sapien
ggagtttggcaaagtccgaataggtcaacctgc

SEQ ID NO: 764808 - DNA, 33 bp, Homo sapien
ggagtttggcaaagtctgaataggtcaacctgc

SEQ ID NO: 764809 - DNA, 33 bp, Homo sapien
attctatctgtgccaacctagaaaagagtaata

SEQ ID NO: 764810 - DNA, 33 bp, Homo sapien
attctatctgtgccaatctagaaaagagtaata

SEQ ID NO: 764811 - DNA, 33 bp, Homo sapien
cggttggagaaaagaaagcaactaaggcagcag

SEQ ID NO: 764812 - DNA, 33 bp, Homo sapien
cggttggagaaaagaaggcaactaaggcagcag

SEQ ID NO: 764813 - DNA, 33 bp, Homo sapien
tcaattttgcaccagaaaagaggctaaggaaag

SEQ ID NO: 764814 - DNA, 33 bp, Homo sapien
tcaattttgcaccagagaagaggctaaggaaag

SEQ ID NO: 764815 - DNA, 33 bp, Homo sapien
tgtggaacagggttgacagtcagcatggaatgg

SEQ ID NO: 764816 - DNA, 33 bp, Homo sapien
tgtggaacagggttgagagtcagcatggaatgg

SEQ ID NO: 764817 - DNA, 33 bp, Homo sapien
tcattgccaactgttaacaaatttccaattctt

SEQ ID NO: 764818 - DNA, 33 bp, Homo sapien
tcattgccaactgttaccaaatttccaattctt

SEQ ID NO: 764819 - DNA, 33 bp, Homo sapien
ttttatggggaatgtaacaaccatagttcaagg

SEQ ID NO: 764820 - DNA, 33 bp, Homo sapien
ttttatggggaatgtatcaaccatagttcaagg

SEQ ID NO: 764821 - DNA, 33 bp, Homo sapien
gctcaagagagatgggaatgcagtagaaagaaa

SEQ ID NO: 764822 - DNA, 33 bp, Homo sapien
gctcaagagagatggggatgcagtagaaagaaa

SEQ ID NO: 764823 - DNA, 33 bp, Homo sapien
gaataatggttttcgaagagaggagacacttaa

SEQ ID NO: 764824 - DNA, 33 bp, Homo sapien
gaataatggttttcgaggagaggagacacttaa

SEQ ID NO: 764825 - DNA, 33 bp, Homo sapien
cttgaatttcatcccaatcccactgttttattt

SEQ ID NO: 764826 - DNA, 33 bp, Homo sapien
cttgaatttcatcccagtcccactgttttattt

SEQ ID NO: 764827 - DNA, 33 bp, Homo sapien
ttatctttaagggagaacaaaaatacagtattt

SEQ ID NO: 764828 - DNA, 33 bp, Homo sapien
ttatctttaagggagagcaaaaatacagtattt

SEQ ID NO: 764829 - DNA, 33 bp, Homo sapien
acggttgctccaaaagccaaaagaactctaagc

SEQ ID NO: 764830 - DNA, 33 bp, Homo sapien
acggttgctccaaaagtcaaaagaactctaagc

SEQ ID NO: 764831 - DNA, 33 bp, Homo sapien
atgtattttttgctgaacatctataggtcagcc

SEQ ID NO: 764832 - DNA, 33 bp, Homo sapien
atgtattttttgctgagcatctataggtcagcc

SEQ ID NO: 764833 - DNA, 33 bp, Homo sapien
catcacacagctggtacatagatggtgccactg

SEQ ID NO: 764834 - DNA, 33 bp, Homo sapien
catcacacagctggtatatagatggtgccactg

SEQ ID NO: 764835 - DNA, 33 bp, Homo sapien
agagctcattttcagaagtgttattcatgtctt

SEQ ID NO: 764836 - DNA, 33 bp, Homo sapien
agagctcattttcagaggtgttattcatgtctt

SEQ ID NO: 764837 - DNA, 33 bp, Homo sapien
gggcacacattggacaatcctcttctgaaagcc

SEQ ID NO: 764838 - DNA, 33 bp, Homo sapien
gggcacacattggacagtcctcttctgaaagcc

SEQ ID NO: 764839 - DNA, 33 bp, Homo sapien
gccgaagtaccacgacacagatatgaaattgta

SEQ ID NO: 764840 - DNA, 33 bp, Homo sapien
gccgaagtaccacgacccagatatgaaattgta

SEQ ID NO: 764841 - DNA, 33 bp, Homo sapien
tgtccttgcagggaaaatgaacgcaatgggatg

SEQ ID NO: 764842 - DNA, 33 bp, Homo sapien
tgtccttgcagggaaagtgaacgcaatgggatg

SEQ ID NO: 764843 - DNA, 33 bp, Homo sapien
aggtgaaaaaattccacggtggagacaatgtgt

SEQ ID NO: 764844 - DNA, 33 bp, Homo sapien
aggtgaaaaaattccatggtggagacaatgtgt

SEQ ID NO: 764845 - DNA, 33 bp, Homo sapien
tttatctcctaagtcacataagttgggcattat

SEQ ID NO: 764846 - DNA, 33 bp, Homo sapien
tttatctcctaagtcatataagttgggcattat

SEQ ID NO: 764847 - DNA, 33 bp, Homo sapien
agtaatggctcgttaaatcaattaacatttgtc

SEQ ID NO: 764848 - DNA, 33 bp, Homo sapien
agtaatggctcgttaagtcaattaacatttgtc

SEQ ID NO: 764849 - DNA, 33 bp, Homo sapien
gtgttgaaattgatgcaatgaagattctttacc

SEQ ID NO: 764850 - DNA, 33 bp, Homo sapien
gtgttgaaattgatgcgatgaagattctttacc

SEQ ID NO: 764851 - DNA, 33 bp, Homo sapien
ctatgactgacttgccacctttcaagtgagttc

SEQ ID NO: 764852 - DNA, 33 bp, Homo sapien
ctatgactgacttgccgcctttcaagtgagttc

SEQ ID NO: 764853 - DNA, 33 bp, Homo sapien
gtaaatttgaaaaccacatatccatcggttggc

SEQ ID NO: 764854 - DNA, 33 bp, Homo sapien
gtaaatttgaaaaccatatatccatcggttggc

SEQ ID NO: 764855 - DNA, 33 bp, Homo sapien
tcagtgtcaagcgacactcttttggtttgggtt

SEQ ID NO: 764856 - DNA, 33 bp, Homo sapien
tcagtgtcaagcgacagtcttttggtttgggtt

SEQ ID NO: 764857 - DNA, 33 bp, Homo sapien
taactacagtgatgtgcagtcaatgttttataa

SEQ ID NO: 764858 - DNA, 33 bp, Homo sapien
taactacagtgatgtggagtcaatgttttataa

SEQ ID NO: 764859 - DNA, 33 bp, Homo sapien
cactttaatcttgtgagactaagactaagctgt

SEQ ID NO: 764860 - DNA, 33 bp, Homo sapien
cactttaatcttgtgatactaagactaagctgt

SEQ ID NO: 764861 - DNA, 33 bp, Homo sapien
tgtgtgtctgcctacaatgatgtctgactcaag

SEQ ID NO: 764862 - DNA, 33 bp, Homo sapien
tgtgtgtctgcctacagtgatgtctgactcaag

SEQ ID NO: 764863 - DNA, 33 bp, Homo sapien
gtgaggtacctgaccacgtcaacgatcatgctg

SEQ ID NO: 764864 - DNA, 33 bp, Homo sapien
gtgaggtacctgaccatgtcaacgatcatgctg

SEQ ID NO: 764865 - DNA, 33 bp, Homo sapien
cctgaaaggcagaacaatctgtacaaaggctgg

SEQ ID NO: 764866 - DNA, 33 bp, Homo sapien
cctgaaaggcagaacagtctgtacaaaggctgg

SEQ ID NO: 764867 - DNA, 33 bp, Homo sapien
gtacagaactccagaactggaaaggcccggagc

SEQ ID NO: 764868 - DNA, 33 bp, Homo sapien
gtacagaactccagaattggaaaggcccggagc

SEQ ID NO: 764869 - DNA, 33 bp, Homo sapien
gcccggagcaatccaacgagctggtcacctcct

SEQ ID NO: 764870 - DNA, 33 bp, Homo sapien
gcccggagcaatccaatgagctggtcacctcct

SEQ ID NO: 764871 - DNA, 33 bp, Homo sapien
aagtaaaccttcaaccactcaggctttcccaac

SEQ ID NO: 764872 - DNA, 33 bp, Homo sapien
aagtaaaccttcaacctctcaggctttcccaac

SEQ ID NO: 764873 - DNA, 33 bp, Homo sapien
gcttctctgatgtcaacgatccgagtctctatt

SEQ ID NO: 764874 - DNA, 33 bp, Homo sapien
gcttctctgatgtcaatgatccgagtctctatt

SEQ ID NO: 764875 - DNA, 33 bp, Homo sapien
ataagaatgcagttgccgagagaagagtaatgg

SEQ ID NO: 764876 - DNA, 33 bp, Homo sapien
ataagaatgcagttgctgagagaagagtaatgg

SEQ ID NO: 764877 - DNA, 33 bp, Homo sapien
ttgaaacgattgtcagaatgtttcaaaatgata

SEQ ID NO: 764878 - DNA, 33 bp, Homo sapien
ttgaaacgattgtcaggatgtttcaaaatgata

SEQ ID NO: 764879 - DNA, 33 bp, Homo sapien
gctcctcacttctgaacgtgacctttgccattt

SEQ ID NO: 764880 - DNA, 33 bp, Homo sapien
gctcctcacttctgaatgtgacctttgccattt

SEQ ID NO: 764881 - DNA, 33 bp, Homo sapien
cactaaactgtggaaaatcggctggctctcata

SEQ ID NO: 764882 - DNA, 33 bp, Homo sapien
cactaaactgtggaaagtcggctggctctcata

SEQ ID NO: 764883 - DNA, 33 bp, Homo sapien
tttgtttgacacgtaacgaaacattcaaacaaa

SEQ ID NO: 764884 - DNA, 33 bp, Homo sapien
tttgtttgacacgtaatgaaacattcaaacaaa

SEQ ID NO: 764885 - DNA, 33 bp, Homo sapien
ttccagcaagaatttcacaaagccaaatgcttt

SEQ ID NO: 764886 - DNA, 33 bp, Homo sapien
ttccagcaagaatttcgcaaagccaaatgcttt

SEQ ID NO: 764887 - DNA, 33 bp, Homo sapien
tcttagccttcccccaatctgttacaccagttc

SEQ ID NO: 764888 - DNA, 33 bp, Homo sapien
tcttagccttcccccagtctgttacaccagttc

SEQ ID NO: 764889 - DNA, 33 bp, Homo sapien
gccaacctgcttatcacagtgatccatcccatc

SEQ ID NO: 764890 - DNA, 33 bp, Homo sapien
gccaacctgcttatcatagtgatccatcccatc

SEQ ID NO: 764891 - DNA, 33 bp, Homo sapien
cctgcccataataaacacatccagaagagaccc

SEQ ID NO: 764892 - DNA, 33 bp, Homo sapien
cctgcccataataaacccatccagaagagaccc

SEQ ID NO: 764893 - DNA, 33 bp, Homo sapien
cacacaaatgtaaccaggagcaaaagctccaaa

SEQ ID NO: 764894 - DNA, 33 bp, Homo sapien
cacacaaatgtaaccatgagcaaaagctccaaa

SEQ ID NO: 764895 - DNA, 33 bp, Homo sapien
agctaatcgtgctaccagaaatggagctacaca

SEQ ID NO: 764896 - DNA, 33 bp, Homo sapien
agctaatcgtgctaccggaaatggagctacaca

SEQ ID NO: 764897 - DNA, 33 bp, Homo sapien
gtagatcatggcatcacggtttacctcattcct

SEQ ID NO: 764898 - DNA, 33 bp, Homo sapien
gtagatcatggcatcatggtttacctcattcct

SEQ ID NO: 764899 - DNA, 33 bp, Homo sapien
ataaatgacaccaaacaattgggggcaaggagc

SEQ ID NO: 764900 - DNA, 33 bp, Homo sapien
ataaatgacaccaaacgattgggggcaaggagc

SEQ ID NO: 764901 - DNA, 33 bp, Homo sapien
ccttcctggatttccaccagcagtaattttttt

SEQ ID NO: 764902 - DNA, 33 bp, Homo sapien
ccttcctggatttccatcagcagtaattttttt

SEQ ID NO: 764903 - DNA, 33 bp, Homo sapien
cataggaggctcttaaaagatattcaatgggtg

SEQ ID NO: 764904 - DNA, 33 bp, Homo sapien
cataggaggctcttaatagatattcaatgggtg

SEQ ID NO: 764905 - DNA, 33 bp, Homo sapien
ctgtgtccctggaatacgatttcatctggactg

SEQ ID NO: 764906 - DNA, 33 bp, Homo sapien
ctgtgtccctggaatatgatttcatctggactg

SEQ ID NO: 764907 - DNA, 33 bp, Homo sapien
tggatgccgaagctggaagggaagaaccaagca

SEQ ID NO: 764908 - DNA, 33 bp, Homo sapien
tggatgccgaagctggcagggaagaaccaagca

SEQ ID NO: 764909 - DNA, 33 bp, Homo sapien
ttgccttctgtacaaacgtggctgtctgtgagt

SEQ ID NO: 764910 - DNA, 33 bp, Homo sapien
ttgccttctgtacaaatgtggctgtctgtgagt

SEQ ID NO: 764911 - DNA, 33 bp, Homo sapien
aacactgaaggcagaactagagaaccgtctttg

SEQ ID NO: 764912 - DNA, 33 bp, Homo sapien
aacactgaaggcagaagtagagaaccgtctttg

SEQ ID NO: 764913 - DNA, 33 bp, Homo sapien
atgatatcattacaacaaacaaaagaaaagact

SEQ ID NO: 764914 - DNA, 33 bp, Homo sapien
atgatatcattacaacgaacaaaagaaaagact

SEQ ID NO: 764915 - DNA, 33 bp, Homo sapien
tatagtgatgtattccaaaaacaaatggaattc

SEQ ID NO: 764916 - DNA, 33 bp, Homo sapien
tatagtgatgtattccgaaaacaaatggaattc

SEQ ID NO: 764917 - DNA, 33 bp, Homo sapien
tacatagtgaaaaattcaaatccagataataaa

SEQ ID NO: 764918 - DNA, 33 bp, Homo sapien
tacatagtgaaaaatttaaatccagataataaa

SEQ ID NO: 764919 - DNA, 33 bp, Homo sapien
ttatttagaataagaaagacaagagtgatagaa

SEQ ID NO: 764920 - DNA, 33 bp, Homo sapien
ttatttagaataagaacgacaagagtgatagaa

SEQ ID NO: 764921 - DNA, 33 bp, Homo sapien
atgtctcttcattcccaagaaataatgtcacca

SEQ ID NO: 764922 - DNA, 33 bp, Homo sapien
atgtctcttcattcccgagaaataatgtcacca

SEQ ID NO: 764923 - DNA, 33 bp, Homo sapien
gtctactttgaataaactggtcactgagacctc

SEQ ID NO: 764924 - DNA, 33 bp, Homo sapien
gtctactttgaataaattggtcactgagacctc

SEQ ID NO: 764925 - DNA, 33 bp, Homo sapien
gtaggaagtgcgaggacatatagcagaagagtg

SEQ ID NO: 764926 - DNA, 33 bp, Homo sapien
gtaggaagtgcgaggatatatagcagaagagtg

SEQ ID NO: 764927 - DNA, 33 bp, Homo sapien
agaaggaaactagaaaatggttccagcacaaat

SEQ ID NO: 764928 - DNA, 33 bp, Homo sapien
agaaggaaactagaaagtggttccagcacaaat

SEQ ID NO: 764929 - DNA, 33 bp, Homo sapien
ttcattataaattctcaactcattcagattatt

SEQ ID NO: 764930 - DNA, 33 bp, Homo sapien
ttcattataaattctcgactcattcagattatt

SEQ ID NO: 764931 - DNA, 33 bp, Homo sapien
aaagttgtattttttcaagtgatgttcctcaga

SEQ ID NO: 764932 - DNA, 33 bp, Homo sapien
aaagttgtattttttccagtgatgttcctcaga

SEQ ID NO: 764933 - DNA, 33 bp, Homo sapien
ttgttgaaaccatccacattcaggccaggaagg

SEQ ID NO: 764934 - DNA, 33 bp, Homo sapien
ttgttgaaaccatccatattcaggccaggaagg

SEQ ID NO: 764935 - DNA, 33 bp, Homo sapien
agcccaagcccataaacgatgaacaataactga

SEQ ID NO: 764936 - DNA, 33 bp, Homo sapien
agcccaagcccataaatgatgaacaataactga

SEQ ID NO: 764937 - DNA, 33 bp, Homo sapien
gtaaagcggctaaaggaagggaagaggagggag

SEQ ID NO: 764938 - DNA, 33 bp, Homo sapien
gtaaagcggctaaaggcagggaagaggagggag

SEQ ID NO: 764939 - DNA, 33 bp, Homo sapien
tagtgaataagggattcaatcagaaatcaaaaa

SEQ ID NO: 764940 - DNA, 33 bp, Homo sapien
tagtgaataagggattgaatcagaaatcaaaaa

SEQ ID NO: 764941 - DNA, 33 bp, Homo sapien
gcaaggttacaggataacaggtcagtataaaaa

SEQ ID NO: 764942 - DNA, 33 bp, Homo sapien
gcaaggttacaggataccaggtcagtataaaaa

SEQ ID NO: 764943 - DNA, 33 bp, Homo sapien
gtcacttttcaaaccaggaaataatgtatgtcc

SEQ ID NO: 764944 - DNA, 33 bp, Homo sapien
gtcacttttcaaaccatgaaataatgtatgtcc

SEQ ID NO: 764945 - DNA, 33 bp, Homo sapien
gtccaataaatacgcacaagttcaaggtgagaa

SEQ ID NO: 764946 - DNA, 33 bp, Homo sapien
gtccaataaatacgcagaagttcaaggtgagaa

SEQ ID NO: 764947 - DNA, 33 bp, Homo sapien
cagactttgctgtacacgtaagtctgttcttgt

SEQ ID NO: 764948 - DNA, 33 bp, Homo sapien
cagactttgctgtacatgtaagtctgttcttgt

SEQ ID NO: 764949 - DNA, 33 bp, Homo sapien
taaacagacttttgccccaaataggtcccacat

SEQ ID NO: 764950 - DNA, 33 bp, Homo sapien
taaacagacttttgccgcaaataggtcccacat

SEQ ID NO: 764951 - DNA, 33 bp, Homo sapien
tgctgattatgggtaaatctccttctgagggca

SEQ ID NO: 764952 - DNA, 33 bp, Homo sapien
tgctgattatgggtaagtctccttctgagggca

SEQ ID NO: 764953 - DNA, 33 bp, Homo sapien
cgtgtacttaattgaccctctaaatgtaagctt

SEQ ID NO: 764954 - DNA, 33 bp, Homo sapien
cgtgtacttaattgactctctaaatgtaagctt

SEQ ID NO: 764955 - DNA, 33 bp, Homo sapien
gctccccaaatacttccactacctgggtcaaca

SEQ ID NO: 764956 - DNA, 33 bp, Homo sapien
gctccccaaatacttctactacctgggtcaaca

SEQ ID NO: 764957 - DNA, 33 bp, Homo sapien
aaagatagccaattccagactagaatctagttt

SEQ ID NO: 764958 - DNA, 33 bp, Homo sapien
aaagatagccaattccggactagaatctagttt

SEQ ID NO: 764959 - DNA, 33 bp, Homo sapien
cttctcagcactatgacaaacttcctgaaggca

SEQ ID NO: 764960 - DNA, 33 bp, Homo sapien
cttctcagcactatgataaacttcctgaaggca

SEQ ID NO: 764961 - DNA, 33 bp, Homo sapien
aataagaaaaagaatggaatccataggagagaa

SEQ ID NO: 764962 - DNA, 33 bp, Homo sapien
aataagaaaaagaatgtaatccataggagagaa

SEQ ID NO: 764963 - DNA, 33 bp, Homo sapien
aaaagttggccatctcagaagggaaaaggaata

SEQ ID NO: 764964 - DNA, 33 bp, Homo sapien
aaaagttggccatctcggaagggaaaaggaata

SEQ ID NO: 764965 - DNA, 33 bp, Homo sapien
aatcaagttgttatcacgttggaatatgttaaa

SEQ ID NO: 764966 - DNA, 33 bp, Homo sapien
aatcaagttgttatcatgttggaatatgttaaa

SEQ ID NO: 764967 - DNA, 33 bp, Homo sapien
agtggcatttgcacaacatctaaagacaactga

SEQ ID NO: 764968 - DNA, 33 bp, Homo sapien
agtggcatttgcacaagatctaaagacaactga

SEQ ID NO: 764969 - DNA, 33 bp, Homo sapien
gcacagctcaagaaaaatataggccgggaatgg

SEQ ID NO: 764970 - DNA, 33 bp, Homo sapien
gcacagctcaagaaaactataggccgggaatgg

SEQ ID NO: 764971 - DNA, 33 bp, Homo sapien
atgaccacttaatttgaaatgcactctcagact

SEQ ID NO: 764972 - DNA, 33 bp, Homo sapien
atgaccacttaatttggaatgcactctcagact

SEQ ID NO: 764973 - DNA, 33 bp, Homo sapien
tcaggctacttgcatgacaataatgggaaaaga

SEQ ID NO: 764974 - DNA, 33 bp, Homo sapien
tcaggctacttgcatgccaataatgggaaaaga

SEQ ID NO: 764975 - DNA, 33 bp, Homo sapien
ctgtgtagggttggaacgagaggagagctgagg

SEQ ID NO: 764976 - DNA, 33 bp, Homo sapien
ctgtgtagggttggaatgagaggagagctgagg

SEQ ID NO: 764977 - DNA, 33 bp, Homo sapien
tacttgaggttgttggaattgttgagatgtatt

SEQ ID NO: 764978 - DNA, 33 bp, Homo sapien
tacttgaggttgttgggattgttgagatgtatt

SEQ ID NO: 764979 - DNA, 33 bp, Homo sapien
tggtgattaaaatctacgtgtaacagggcagtg

SEQ ID NO: 764980 - DNA, 33 bp, Homo sapien
tggtgattaaaatctatgtgtaacagggcagtg

SEQ ID NO: 764981 - DNA, 33 bp, Homo sapien
acagatccttttccaccgagctacagcaggtcc

SEQ ID NO: 764982 - DNA, 33 bp, Homo sapien
acagatccttttccactgagctacagcaggtcc

SEQ ID NO: 764983 - DNA, 33 bp, Homo sapien
tcaatgcagttaaagacagaaaaaatagtaaca

SEQ ID NO: 764984 - DNA, 33 bp, Homo sapien
tcaatgcagttaaagatagaaaaaatagtaaca

SEQ ID NO: 764985 - DNA, 33 bp, Homo sapien
accctaacaccgaaaccaaagtcattacaagaa

SEQ ID NO: 764986 - DNA, 33 bp, Homo sapien
accctaacaccgaaactaaagtcattacaagaa

SEQ ID NO: 764987 - DNA, 33 bp, Homo sapien
aaagagagaacaactacactggatgtcagaccc

SEQ ID NO: 764988 - DNA, 33 bp, Homo sapien
aaagagagaacaactatactggatgtcagaccc

SEQ ID NO: 764989 - DNA, 33 bp, Homo sapien
ggtgtttatcgtttccccctaattagatcatag

SEQ ID NO: 764990 - DNA, 33 bp, Homo sapien
ggtgtttatcgtttcctcctaattagatcatag

SEQ ID NO: 764991 - DNA, 33 bp, Homo sapien
ttattttgatatatcaactcacacaaaaattta

SEQ ID NO: 764992 - DNA, 33 bp, Homo sapien
ttattttgatatatcatctcacacaaaaattta

SEQ ID NO: 764993 - DNA, 33 bp, Homo sapien
tttggagtgacagatcaacaggagtgttagcag

SEQ ID NO: 764994 - DNA, 33 bp, Homo sapien
tttggagtgacagatccacaggagtgttagcag

SEQ ID NO: 764995 - DNA, 33 bp, Homo sapien
tgccaaactaatcttagcttgcggagaggaggc

SEQ ID NO: 764996 - DNA, 33 bp, Homo sapien
tgccaaactaatcttatcttgcggagaggaggc

SEQ ID NO: 764997 - DNA, 33 bp, Homo sapien
cactgttgtcactttacggagatggaagtatag

SEQ ID NO: 764998 - DNA, 33 bp, Homo sapien
cactgttgtcactttatggagatggaagtatag

SEQ ID NO: 764999 - DNA, 33 bp, Homo sapien
tgtcagcccatccgatcactggcaatagccttc

SEQ ID NO: 765000 - DNA, 33 bp, Homo sapien
tgtcagcccatccgattactggcaatagccttc

SEQ ID NO: 765001 - DNA, 33 bp, Homo sapien
cacttgatttcaaagacaatatgctgtcttggg

SEQ ID NO: 765002 - DNA, 33 bp, Homo sapien
cacttgatttcaaagataatatgctgtcttggg

SEQ ID NO: 765003 - DNA, 33 bp, Homo sapien
aagttctgattatataactcctctctaatttga

SEQ ID NO: 765004 - DNA, 33 bp, Homo sapien
aagttctgattatatatctcctctctaatttga

SEQ ID NO: 765005 - DNA, 33 bp, Homo sapien
gatctggattagaagacagaaaatcactcctgg

SEQ ID NO: 765006 - DNA, 33 bp, Homo sapien
gatctggattagaagatagaaaatcactcctgg

SEQ ID NO: 765007 - DNA, 33 bp, Homo sapien
aggtagctaagctataaggacataaaggcataa

SEQ ID NO: 765008 - DNA, 33 bp, Homo sapien
aggtagctaagctatacggacataaaggcataa

SEQ ID NO: 765009 - DNA, 33 bp, Homo sapien
tccttcccttctacagcctaaggtccaaagctt

SEQ ID NO: 765010 - DNA, 33 bp, Homo sapien
tccttcccttctacagtctaaggtccaaagctt

SEQ ID NO: 765011 - DNA, 33 bp, Homo sapien
aacatctcaggttacacagtcttttcttgtgtt

SEQ ID NO: 765012 - DNA, 33 bp, Homo sapien
aacatctcaggttacatagtcttttcttgtgtt

SEQ ID NO: 765013 - DNA, 33 bp, Homo sapien
cctaatgctcctgatacagataggcacttgatc

SEQ ID NO: 765014 - DNA, 33 bp, Homo sapien
cctaatgctcctgatatagataggcacttgatc

SEQ ID NO: 765015 - DNA, 33 bp, Homo sapien
ctagactacttcagtaacatttttctaggttcc

SEQ ID NO: 765016 - DNA, 33 bp, Homo sapien
ctagactacttcagtagcatttttctaggttcc

SEQ ID NO: 765017 - DNA, 33 bp, Homo sapien
ttacaatctttcaccacacagcaattagtatga

SEQ ID NO: 765018 - DNA, 33 bp, Homo sapien
ttacaatctttcaccatacagcaattagtatga

SEQ ID NO: 765019 - DNA, 33 bp, Homo sapien
gtgtctctccctcaagcatagtctcccatgcac

SEQ ID NO: 765020 - DNA, 33 bp, Homo sapien
gtgtctctccctcaagtatagtctcccatgcac

SEQ ID NO: 765021 - DNA, 33 bp, Homo sapien
gcagatgacctgcagaagaagctgatacctttt

SEQ ID NO: 765022 - DNA, 33 bp, Homo sapien
gcagatgacctgcagaggaagctgatacctttt

SEQ ID NO: 765023 - DNA, 33 bp, Homo sapien
aaagaaagatatgcagcagaaagtggaagagct

SEQ ID NO: 765024 - DNA, 33 bp, Homo sapien
aaagaaagatatgcagtagaaagtggaagagct

SEQ ID NO: 765025 - DNA, 33 bp, Homo sapien
ccagacgatggagaaagaaatcttctcttttta

SEQ ID NO: 765026 - DNA, 33 bp, Homo sapien
ccagacgatggagaaataaatcttctcttttta

SEQ ID NO: 765027 - DNA, 33 bp, Homo sapien
gagttggaagggtgtacagagaacaacagcatg

SEQ ID NO: 765028 - DNA, 33 bp, Homo sapien
gagttggaagggtgtatagagaacaacagcatg

SEQ ID NO: 765029 - DNA, 33 bp, Homo sapien
cttagatccaaattggaaaatggagcatagatc

SEQ ID NO: 765030 - DNA, 33 bp, Homo sapien
cttagatccaaattgggaaatggagcatagatc

SEQ ID NO: 765031 - DNA, 33 bp, Homo sapien
tgtgttcctgaagccacgtgggccatgcgaagc

SEQ ID NO: 765032 - DNA, 33 bp, Homo sapien
tgtgttcctgaagccatgtgggccatgcgaagc

SEQ ID NO: 765033 - DNA, 33 bp, Homo sapien
ggcgtttttcagaccaatggaagtacattctaa

SEQ ID NO: 765034 - DNA, 33 bp, Homo sapien
ggcgtttttcagaccagtggaagtacattctaa

SEQ ID NO: 765035 - DNA, 33 bp, Homo sapien
ctcatatttttagaacaattcctcaccaaatgg

SEQ ID NO: 765036 - DNA, 33 bp, Homo sapien
ctcatatttttagaaccattcctcaccaaatgg

SEQ ID NO: 765037 - DNA, 33 bp, Homo sapien
cctagcacccgacaaaaactcaaaatgtgatag

SEQ ID NO: 765038 - DNA, 33 bp, Homo sapien
cctagcacccgacaaagactcaaaatgtgatag

SEQ ID NO: 765039 - DNA, 33 bp, Homo sapien
tttattagttagcactcagaatgagttcatttt

SEQ ID NO: 765040 - DNA, 33 bp, Homo sapien
tttattagttagcacttagaatgagttcatttt

SEQ ID NO: 765041 - DNA, 33 bp, Homo sapien
tgctcaatgtctcctacaccttggcctgaagct

SEQ ID NO: 765042 - DNA, 33 bp, Homo sapien
tgctcaatgtctcctataccttggcctgaagct

SEQ ID NO: 765043 - DNA, 33 bp, Homo sapien
atgcctctatctttcaaatttttgttcaactga

SEQ ID NO: 765044 - DNA, 33 bp, Homo sapien
atgcctctatctttcagatttttgttcaactga

SEQ ID NO: 765045 - DNA, 33 bp, Homo sapien
ttgtagctgcaagttacaatagtacaacacgac

SEQ ID NO: 765046 - DNA, 33 bp, Homo sapien
ttgtagctgcaagttagaatagtacaacacgac

SEQ ID NO: 765047 - DNA, 33 bp, Homo sapien
cttgcttcagagttccaaaagcccttaggctgc

SEQ ID NO: 765048 - DNA, 33 bp, Homo sapien
cttgcttcagagttccgaaagcccttaggctgc

SEQ ID NO: 765049 - DNA, 33 bp, Homo sapien
ccagaacgaggccaatcaatgcctgacctcctg

SEQ ID NO: 765050 - DNA, 33 bp, Homo sapien
ccagaacgaggccaattaatgcctgacctcctg

SEQ ID NO: 765051 - DNA, 33 bp, Homo sapien
ctcctttcctctgtgtaaaaggtttagtcaaag

SEQ ID NO: 765052 - DNA, 33 bp, Homo sapien
ctcctttcctctgtgttaaaggtttagtcaaag

SEQ ID NO: 765053 - DNA, 33 bp, Homo sapien
tgcctctgccggaaaacgtttgcttcaagtgga

SEQ ID NO: 765054 - DNA, 33 bp, Homo sapien
tgcctctgccggaaaatgtttgcttcaagtgga

SEQ ID NO: 765055 - DNA, 33 bp, Homo sapien
tccaccttcctcttgcaattgttgaacggcagt

SEQ ID NO: 765056 - DNA, 33 bp, Homo sapien
tccaccttcctcttgcgattgttgaacggcagt

SEQ ID NO: 765057 - DNA, 33 bp, Homo sapien
ataacagctagccacaatctataactgtattta

SEQ ID NO: 765058 - DNA, 33 bp, Homo sapien
ataacagctagccacagtctataactgtattta

SEQ ID NO: 765059 - DNA, 33 bp, Homo sapien
tcccctgatttttttacagccccctctttttgc

SEQ ID NO: 765060 - DNA, 33 bp, Homo sapien
tcccctgatttttttatagccccctctttttgc

SEQ ID NO: 765061 - DNA, 33 bp, Homo sapien
agcagggtcattgctccaaccccttaactcctg

SEQ ID NO: 765062 - DNA, 33 bp, Homo sapien
agcagggtcattgctcgaaccccttaactcctg

SEQ ID NO: 765063 - DNA, 33 bp, Homo sapien
acatcttccaattgacagcaatcaggttcagta

SEQ ID NO: 765064 - DNA, 33 bp, Homo sapien
acatcttccaattgaccgcaatcaggttcagta

SEQ ID NO: 765065 - DNA, 33 bp, Homo sapien
tattttaaaacatatacagtagtcctctcttat

SEQ ID NO: 765066 - DNA, 33 bp, Homo sapien
tattttaaaacatatatagtagtcctctcttat

SEQ ID NO: 765067 - DNA, 33 bp, Homo sapien
taagaggcttactgggcactacggatggttgct

SEQ ID NO: 765068 - DNA, 33 bp, Homo sapien
taagaggcttactgggtactacggatggttgct

SEQ ID NO: 765069 - DNA, 33 bp, Homo sapien
gtactgggagaaattacatcctgggaagaagcc

SEQ ID NO: 765070 - DNA, 33 bp, Homo sapien
gtactgggagaaattatatcctgggaagaagcc

SEQ ID NO: 765071 - DNA, 33 bp, Homo sapien
tggttagtgacaatagcacctgagagtttttaa

SEQ ID NO: 765072 - DNA, 33 bp, Homo sapien
tggttagtgacaatagtacctgagagtttttaa

SEQ ID NO: 765073 - DNA, 33 bp, Homo sapien
acaatccagtttgggaagaatgatcactaacaa

SEQ ID NO: 765074 - DNA, 33 bp, Homo sapien
acaatccagtttgggacgaatgatcactaacaa

SEQ ID NO: 765075 - DNA, 33 bp, Homo sapien
aactccttccatagctaaagtcttctttaactt

SEQ ID NO: 765076 - DNA, 33 bp, Homo sapien
aactccttccatagcttaagtcttctttaactt

SEQ ID NO: 765077 - DNA, 33 bp, Homo sapien
ggtggcttccagacaacggctagcaaagaactg

SEQ ID NO: 765078 - DNA, 33 bp, Homo sapien
ggtggcttccagacaatggctagcaaagaactg

SEQ ID NO: 765079 - DNA, 33 bp, Homo sapien
agccctttgccttctacggctgtaaaaacattc

SEQ ID NO: 765080 - DNA, 33 bp, Homo sapien
agccctttgccttctatggctgtaaaaacattc

SEQ ID NO: 765081 - DNA, 33 bp, Homo sapien
actttaaatgccatagaagtgcctggaatagca

SEQ ID NO: 765082 - DNA, 33 bp, Homo sapien
actttaaatgccataggagtgcctggaatagca

SEQ ID NO: 765083 - DNA, 33 bp, Homo sapien
tcaccaacatacaaggaatagcatgagaaatta

SEQ ID NO: 765084 - DNA, 33 bp, Homo sapien
tcaccaacatacaaggtatagcatgagaaatta

SEQ ID NO: 765085 - DNA, 33 bp, Homo sapien
gtatcctcttcatttgaaaaagaccaacatata

SEQ ID NO: 765086 - DNA, 33 bp, Homo sapien
gtatcctcttcatttggaaaagaccaacatata

SEQ ID NO: 765087 - DNA, 33 bp, Homo sapien
ttcatttgtgcgtgtacggtggtggtttgaccc

SEQ ID NO: 765088 - DNA, 33 bp, Homo sapien
ttcatttgtgcgtgtatggtggtggtttgaccc

SEQ ID NO: 765089 - DNA, 33 bp, Homo sapien
cttttgtgtaacctcacaagagttaagacctga

SEQ ID NO: 765090 - DNA, 33 bp, Homo sapien
cttttgtgtaacctcagaagagttaagacctga

SEQ ID NO: 765091 - DNA, 33 bp, Homo sapien
tcatctgtactgtgccaatgccaccaggcatag

SEQ ID NO: 765092 - DNA, 33 bp, Homo sapien
tcatctgtactgtgccgatgccaccaggcatag

SEQ ID NO: 765093 - DNA, 33 bp, Homo sapien
ggagcctcccagcctacgaacctggtattccag

SEQ ID NO: 765094 - DNA, 33 bp, Homo sapien
ggagcctcccagcctatgaacctggtattccag

SEQ ID NO: 765095 - DNA, 33 bp, Homo sapien
ttaagtgcttattaaacattggttcaaacagtg

SEQ ID NO: 765096 - DNA, 33 bp, Homo sapien
ttaagtgcttattaaatattggttcaaacagtg

SEQ ID NO: 765097 - DNA, 33 bp, Homo sapien
aggagccataatctggaaagctttaagacaacc

SEQ ID NO: 765098 - DNA, 33 bp, Homo sapien
aggagccataatctgggaagctttaagacaacc

SEQ ID NO: 765099 - DNA, 33 bp, Homo sapien
agagtgtgttcagaaaagggacattgcctatag

SEQ ID NO: 765100 - DNA, 33 bp, Homo sapien
agagtgtgttcagaaaggggacattgcctatag

SEQ ID NO: 765101 - DNA, 33 bp, Homo sapien
gagggaaataacaataccatgattatctttgta

SEQ ID NO: 765102 - DNA, 33 bp, Homo sapien
gagggaaataacaatatcatgattatctttgta

SEQ ID NO: 765103 - DNA, 33 bp, Homo sapien
tatacagcctgttctgaaactcacacatagtaa

SEQ ID NO: 765104 - DNA, 33 bp, Homo sapien
tatacagcctgttctgcaactcacacatagtaa

SEQ ID NO: 765105 - DNA, 33 bp, Homo sapien
ctcggggaaatacggtaaattgtcctgtgacac

SEQ ID NO: 765106 - DNA, 33 bp, Homo sapien
ctcggggaaatacggtcaattgtcctgtgacac

SEQ ID NO: 765107 - DNA, 33 bp, Homo sapien
gacactcaccccgtcaaaatctggaccctctct

SEQ ID NO: 765108 - DNA, 33 bp, Homo sapien
gacactcaccccgtcacaatctggaccctctct

SEQ ID NO: 765109 - DNA, 33 bp, Homo sapien
gcaccagcaaaaggcaatctcccagcagaaaga

SEQ ID NO: 765110 - DNA, 33 bp, Homo sapien
gcaccagcaaaaggcagtctcccagcagaaaga

SEQ ID NO: 765111 - DNA, 33 bp, Homo sapien
gtgtgataatgacggcaaaatttaaaataaata

SEQ ID NO: 765112 - DNA, 33 bp, Homo sapien
gtgtgataatgacggcgaaatttaaaataaata

SEQ ID NO: 765113 - DNA, 33 bp, Homo sapien
tgtaacataatttcaccattaccactttctgaa

SEQ ID NO: 765114 - DNA, 33 bp, Homo sapien
tgtaacataatttcactattaccactttctgaa

SEQ ID NO: 765115 - DNA, 33 bp, Homo sapien
aaattatatattgatacggctaaactctaaagt

SEQ ID NO: 765116 - DNA, 33 bp, Homo sapien
aaattatatattgatatggctaaactctaaagt

SEQ ID NO: 765117 - DNA, 33 bp, Homo sapien
tcagcagatagagacgcaaaagtaagaaaaatt

SEQ ID NO: 765118 - DNA, 33 bp, Homo sapien
tcagcagatagagacggaaaagtaagaaaaatt

SEQ ID NO: 765119 - DNA, 33 bp, Homo sapien
cattttattaatgctaacttctgaatgtgggtg

SEQ ID NO: 765120 - DNA, 33 bp, Homo sapien
cattttattaatgctatcttctgaatgtgggtg

SEQ ID NO: 765121 - DNA, 33 bp, Homo sapien
acattctcagttcatcgccacaaactcacgtat

SEQ ID NO: 765122 - DNA, 33 bp, Homo sapien
acattctcagttcatctccacaaactcacgtat

SEQ ID NO: 765123 - DNA, 33 bp, Homo sapien
atatgagatgttcaaaacactggctattttctt

SEQ ID NO: 765124 - DNA, 33 bp, Homo sapien
atatgagatgttcaaagcactggctattttctt

SEQ ID NO: 765125 - DNA, 33 bp, Homo sapien
tccttgagggttccacaatgagcctctgctttc

SEQ ID NO: 765126 - DNA, 33 bp, Homo sapien
tccttgagggttccacgatgagcctctgctttc

SEQ ID NO: 765127 - DNA, 33 bp, Homo sapien
tagaatattctgatcaggaaataactttataca

SEQ ID NO: 765128 - DNA, 33 bp, Homo sapien
tagaatattctgatcatgaaataactttataca

SEQ ID NO: 765129 - DNA, 33 bp, Homo sapien
tcgtttaatggagaaaactgtggaaagctgtga

SEQ ID NO: 765130 - DNA, 33 bp, Homo sapien
tcgtttaatggagaaagctgtggaaagctgtga

SEQ ID NO: 765131 - DNA, 33 bp, Homo sapien
tggcccttgaataacacgagtttaacagcatgg

SEQ ID NO: 765132 - DNA, 33 bp, Homo sapien
tggcccttgaataacatgagtttaacagcatgg

SEQ ID NO: 765133 - DNA, 33 bp, Homo sapien
tataaaactacaaatacattagcctgtacacca

SEQ ID NO: 765134 - DNA, 33 bp, Homo sapien
tataaaactacaaatagattagcctgtacacca

SEQ ID NO: 765135 - DNA, 33 bp, Homo sapien
tctttataaattacacagcttcatgtatttgta

SEQ ID NO: 765136 - DNA, 33 bp, Homo sapien
tctttataaattacacggcttcatgtatttgta

SEQ ID NO: 765137 - DNA, 33 bp, Homo sapien
aacttgtgaaggcttacagaaaggtgaacaaga

SEQ ID NO: 765138 - DNA, 33 bp, Homo sapien
aacttgtgaaggcttatagaaaggtgaacaaga

SEQ ID NO: 765139 - DNA, 33 bp, Homo sapien
cttgcttgcttgtgaacagagagaaatctccac

SEQ ID NO: 765140 - DNA, 33 bp, Homo sapien
cttgcttgcttgtgaatagagagaaatctccac

SEQ ID NO: 765141 - DNA, 33 bp, Homo sapien
tatgcaataccacttacaaacatatgtaacaaa

SEQ ID NO: 765142 - DNA, 33 bp, Homo sapien
tatgcaataccacttataaacatatgtaacaaa

SEQ ID NO: 765143 - DNA, 33 bp, Homo sapien
ttttagggtttcaacaaaacaactgatcagcat

SEQ ID NO: 765144 - DNA, 33 bp, Homo sapien
ttttagggtttcaacagaacaactgatcagcat

SEQ ID NO: 765145 - DNA, 33 bp, Homo sapien
gaaaaataatagcaacaataccctttgagattt

SEQ ID NO: 765146 - DNA, 33 bp, Homo sapien
gaaaaataatagcaacgataccctttgagattt

SEQ ID NO: 765147 - DNA, 33 bp, Homo sapien
tacttcaatttacagcaaatcatcttattccca

SEQ ID NO: 765148 - DNA, 33 bp, Homo sapien
tacttcaatttacagctaatcatcttattccca

SEQ ID NO: 765149 - DNA, 33 bp, Homo sapien
acctgataaatatgccaaggagctctgagaagc

SEQ ID NO: 765150 - DNA, 33 bp, Homo sapien
acctgataaatatgccgaggagctctgagaagc

SEQ ID NO: 765151 - DNA, 33 bp, Homo sapien
acactagtgatttattaaaaagtcagctgtctc

SEQ ID NO: 765152 - DNA, 33 bp, Homo sapien
acactagtgatttatttaaaagtcagctgtctc

SEQ ID NO: 765153 - DNA, 33 bp, Homo sapien
gattggagaagaaggcaaccttgaaacttggaa

SEQ ID NO: 765154 - DNA, 33 bp, Homo sapien
gattggagaagaaggcgaccttgaaacttggaa

SEQ ID NO: 765155 - DNA, 33 bp, Homo sapien
ggcaaggagtaacagaaacttgggattcactgt

SEQ ID NO: 765156 - DNA, 33 bp, Homo sapien
ggcaaggagtaacagagacttgggattcactgt

SEQ ID NO: 765157 - DNA, 33 bp, Homo sapien
ttttttgaaaatctacaagtgtgtcctgctgac

SEQ ID NO: 765158 - DNA, 33 bp, Homo sapien
ttttttgaaaatctacgagtgtgtcctgctgac

SEQ ID NO: 765159 - DNA, 33 bp, Homo sapien
ttactaacctctaggccactggggttactaaca

SEQ ID NO: 765160 - DNA, 33 bp, Homo sapien
ttactaacctctaggcgactggggttactaaca

SEQ ID NO: 765161 - DNA, 33 bp, Homo sapien
attttacatggctatacgcgctttgaagtaata

SEQ ID NO: 765162 - DNA, 33 bp, Homo sapien
attttacatggctatatgcgctttgaagtaata

SEQ ID NO: 765163 - DNA, 33 bp, Homo sapien
ttaccattcaagtgccacacagagttagaaagt

SEQ ID NO: 765164 - DNA, 33 bp, Homo sapien
ttaccattcaagtgccgcacagagttagaaagt

SEQ ID NO: 765165 - DNA, 33 bp, Homo sapien
atatcctggttagaaacgtgtcaatgaaaccaa

SEQ ID NO: 765166 - DNA, 33 bp, Homo sapien
atatcctggttagaaaggtgtcaatgaaaccaa

SEQ ID NO: 765167 - DNA, 33 bp, Homo sapien
gtgttccaatttccctgacgtccctctgccatg

SEQ ID NO: 765168 - DNA, 33 bp, Homo sapien
gtgttccaatttcccttacgtccctctgccatg

SEQ ID NO: 765169 - DNA, 33 bp, Homo sapien
cattttacaaatactcaatacaaactttattta

SEQ ID NO: 765170 - DNA, 33 bp, Homo sapien
cattttacaaatactcgatacaaactttattta

SEQ ID NO: 765171 - DNA, 33 bp, Homo sapien
aatgatggatccaccacagctagcactgtgcag

SEQ ID NO: 765172 - DNA, 33 bp, Homo sapien
aatgatggatccaccagagctagcactgtgcag

SEQ ID NO: 765173 - DNA, 33 bp, Homo sapien
aacaaagttgacaaagccacacactccttttct

SEQ ID NO: 765174 - DNA, 33 bp, Homo sapien
aacaaagttgacaaagtcacacactccttttct

SEQ ID NO: 765175 - DNA, 33 bp, Homo sapien
gagacagtgaaaaagacataacctaactgactc

SEQ ID NO: 765176 - DNA, 33 bp, Homo sapien
gagacagtgaaaaagatataacctaactgactc

SEQ ID NO: 765177 - DNA, 33 bp, Homo sapien
ctattttctcttcatacgacatgaaacttcaca

SEQ ID NO: 765178 - DNA, 33 bp, Homo sapien
ctattttctcttcataggacatgaaacttcaca

SEQ ID NO: 765179 - DNA, 33 bp, Homo sapien
ggggcctggggagtcacatcctacaagccatag

SEQ ID NO: 765180 - DNA, 33 bp, Homo sapien
ggggcctggggagtcatatcctacaagccatag

SEQ ID NO: 765181 - DNA, 33 bp, Homo sapien
ggtctatttcaagatacacccaagaaacatacg

SEQ ID NO: 765182 - DNA, 33 bp, Homo sapien
ggtctatttcaagatatacccaagaaacatacg

SEQ ID NO: 765183 - DNA, 33 bp, Homo sapien
ctggattaagaaagcacggcacatatacaccat

SEQ ID NO: 765184 - DNA, 33 bp, Homo sapien
ctggattaagaaagcatggcacatatacaccat

SEQ ID NO: 765185 - DNA, 33 bp, Homo sapien
gtgggaaatttggccacagacagacatgaagaa

SEQ ID NO: 765186 - DNA, 33 bp, Homo sapien
gtgggaaatttggccatagacagacatgaagaa

SEQ ID NO: 765187 - DNA, 33 bp, Homo sapien
gaagaaccctatgtgacgatagaggccaagata

SEQ ID NO: 765188 - DNA, 33 bp, Homo sapien
gaagaaccctatgtgatgatagaggccaagata

SEQ ID NO: 765189 - DNA, 33 bp, Homo sapien
ggttagaagtccaaaagaaaggagttggcaggg

SEQ ID NO: 765190 - DNA, 33 bp, Homo sapien
ggttagaagtccaaaataaaggagttggcaggg

SEQ ID NO: 765191 - DNA, 33 bp, Homo sapien
ttctatcaaaaattgaagggaaagtaaggtgtt

SEQ ID NO: 765192 - DNA, 33 bp, Homo sapien
ttctatcaaaaattgaggggaaagtaaggtgtt

SEQ ID NO: 765193 - DNA, 33 bp, Homo sapien
caacacactacactaacaaatatcactgttaaa

SEQ ID NO: 765194 - DNA, 33 bp, Homo sapien
caacacactacactaataaatatcactgttaaa

SEQ ID NO: 765195 - DNA, 33 bp, Homo sapien
cccttttgccaaatgaaataacattcaccattt

SEQ ID NO: 765196 - DNA, 33 bp, Homo sapien
cccttttgccaaatgagataacattcaccattt

SEQ ID NO: 765197 - DNA, 33 bp, Homo sapien
tattcagaataagagcagaaatcacaacaacat

SEQ ID NO: 765198 - DNA, 33 bp, Homo sapien
tattcagaataagagcggaaatcacaacaacat

SEQ ID NO: 765199 - DNA, 33 bp, Homo sapien
aagagagtgaaggtcaataatgaacattcttaa

SEQ ID NO: 765200 - DNA, 33 bp, Homo sapien
aagagagtgaaggtcactaatgaacattcttaa

SEQ ID NO: 765201 - DNA, 33 bp, Homo sapien
tgtcagtatttgaagacaagttcagaggacatg

SEQ ID NO: 765202 - DNA, 33 bp, Homo sapien
tgtcagtatttgaagagaagttcagaggacatg

SEQ ID NO: 765203 - DNA, 33 bp, Homo sapien
aaaacaccacagcaggaaacaactaacacatcc

SEQ ID NO: 765204 - DNA, 33 bp, Homo sapien
aaaacaccacagcagggaacaactaacacatcc

SEQ ID NO: 765205 - DNA, 33 bp, Homo sapien
cgagaggaacaagaaacaagccattcaggtgaa

SEQ ID NO: 765206 - DNA, 33 bp, Homo sapien
cgagaggaacaagaaagaagccattcaggtgaa

SEQ ID NO: 765207 - DNA, 33 bp, Homo sapien; identical to SEQ ID NO: 765205

SEQ ID NO: 765208 - DNA, 33 bp, Homo sapien; identical to SEQ ID NO: 765206

SEQ ID NO: 765209 - DNA, 33 bp, Homo sapien; identical to SEQ ID NO: 765205

SEQ ID NO: 765210 - DNA, 33 bp, Homo sapien; identical to SEQ ID NO: 765206

SEQ ID NO: 765211 - DNA, 33 bp, Homo sapien
attattccagggttaggatgggacaatcacagt

SEQ ID NO: 765212 - DNA, 33 bp, Homo sapien
attattccagggttagtatgggacaatcacagt

SEQ ID NO: 765213 - DNA, 33 bp, Homo sapien
actagtcttcagtctcaatggtaaggtctccgg

SEQ ID NO: 765214 - DNA, 33 bp, Homo sapien
actagtcttcagtctcgatggtaaggtctccgg

SEQ ID NO: 765215 - DNA, 33 bp, Homo sapien
agtgggacagtataagaaggcgggacctttggg

SEQ ID NO: 765216 - DNA, 33 bp, Homo sapien
agtgggacagtataaggaggcgggacctttggg

SEQ ID NO: 765217 - DNA, 33 bp, Homo sapien
ctacaggttaattcaaaaagacatttaatgtta

SEQ ID NO: 765218 - DNA, 33 bp, Homo sapien
ctacaggttaattcaagaagacatttaatgtta

SEQ ID NO: 765219 - DNA, 33 bp, Homo sapien
ctcccttgacctctcaagatggattactagcaa

SEQ ID NO: 765220 - DNA, 33 bp, Homo sapien
ctcccttgacctctcaggatggattactagcaa

SEQ ID NO: 765221 - DNA, 33 bp, Homo sapien
cacagagcactctttgaaatccactgggctgca

SEQ ID NO: 765222 - DNA, 33 bp, Homo sapien
cacagagcactctttggaatccactgggctgca

SEQ ID NO: 765223 - DNA, 33 bp, Homo sapien
ctgctggcctgataaactcagaacatgggcaag

SEQ ID NO: 765224 - DNA, 33 bp, Homo sapien
ctgctggcctgataaattcagaacatgggcaag

SEQ ID NO: 765225 - DNA, 33 bp, Homo sapien
ttccctatcatcatcaacttacttccatattaa

SEQ ID NO: 765226 - DNA, 33 bp, Homo sapien
ttccctatcatcatcaccttacttccatattaa

SEQ ID NO: 765227 - DNA, 33 bp, Homo sapien
cgcttacagggcctaaagtcagaaacggcttga

SEQ ID NO: 765228 - DNA, 33 bp, Homo sapien
cgcttacagggcctaaggtcagaaacggcttga

SEQ ID NO: 765229 - DNA, 33 bp, Homo sapien
gctgtggccaaacaaaaatatgacaaaaagctc

SEQ ID NO: 765230 - DNA, 33 bp, Homo sapien
gctgtggccaaacaaacatatgacaaaaagctc

SEQ ID NO: 765231 - DNA, 33 bp, Homo sapien
ctcatgctgtggaagaagtgaataagctcattt

SEQ ID NO: 765232 - DNA, 33 bp, Homo sapien
ctcatgctgtggaagaggtgaataagctcattt

SEQ ID NO: 765233 - DNA, 33 bp, Homo sapien
ctatgcagcttcttcaatcaatcacctctcggt

SEQ ID NO: 765234 - DNA, 33 bp, Homo sapien
ctatgcagcttcttcagtcaatcacctctcggt

SEQ ID NO: 765235 - DNA, 33 bp, Homo sapien
aggcatgacccagagacactttaaaagcaataa

SEQ ID NO: 765236 - DNA, 33 bp, Homo sapien
aggcatgacccagagagactttaaaagcaataa

SEQ ID NO: 765237 - DNA, 33 bp, Homo sapien
gggtcagggctttttaacagaatagaaaggagc

SEQ ID NO: 765238 - DNA, 33 bp, Homo sapien
gggtcagggctttttagcagaatagaaaggagc

SEQ ID NO: 765239 - DNA, 33 bp, Homo sapien
taattacatctgtaaagtcacttgatgacaata

SEQ ID NO: 765240 - DNA, 33 bp, Homo sapien
taattacatctgtaaattcacttgatgacaata

SEQ ID NO: 765241 - DNA, 33 bp, Homo sapien
ttctcaaagaatagtacgggaaatgattttagg

SEQ ID NO: 765242 - DNA, 33 bp, Homo sapien
ttctcaaagaatagtatgggaaatgattttagg

SEQ ID NO: 765243 - DNA, 33 bp, Homo sapien
acttgctctgggaaaaaccagctcctgtgatag

SEQ ID NO: 765244 - DNA, 33 bp, Homo sapien
acttgctctgggaaaagccagctcctgtgatag

SEQ ID NO: 765245 - DNA, 33 bp, Homo sapien
catagcaagaaggaaaccataatgcctttatat

SEQ ID NO: 765246 - DNA, 33 bp, Homo sapien
catagcaagaaggaaatcataatgcctttatat

SEQ ID NO: 765247 - DNA, 33 bp, Homo sapien
agatccaacaggcagcgctaattagtaagacac

SEQ ID NO: 765248 - DNA, 33 bp, Homo sapien
agatccaacaggcagctctaattagtaagacac

SEQ ID NO: 765249 - DNA, 33 bp, Homo sapien
ttttctcatctgaagcagagaagatatttgcta

SEQ ID NO: 765250 - DNA, 33 bp, Homo sapien
ttttctcatctgaagcggagaagatatttgcta

SEQ ID NO: 765251 - DNA, 33 bp, Homo sapien
tgaggaatcaaatgagaaggttatccgaaagca

SEQ ID NO: 765252 - DNA, 33 bp, Homo sapien
tgaggaatcaaatgaggaggttatccgaaagca

SEQ ID NO: 765253 - DNA, 33 bp, Homo sapien
agtgagagggggtaaaagtttccattaggatga

SEQ ID NO: 765254 - DNA, 33 bp, Homo sapien
agtgagagggggtaaaggtttccattaggatga

SEQ ID NO: 765255 - DNA, 33 bp, Homo sapien
cttctcacagggcccaatgactttcttcatgcc

SEQ ID NO: 765256 - DNA, 33 bp, Homo sapien
cttctcacagggcccagtgactttcttcatgcc

SEQ ID NO: 765257 - DNA, 33 bp, Homo sapien
aaggatttatttcagggatttatatgccttata

SEQ ID NO: 765258 - DNA, 33 bp, Homo sapien
aaggatttatttcaggtatttatatgccttata

SEQ ID NO: 765259 - DNA, 33 bp, Homo sapien
gaacccaggtacagaacaaaaacggagaaaacc

SEQ ID NO: 765260 - DNA, 33 bp, Homo sapien
gaacccaggtacagaataaaaacggagaaaacc

SEQ ID NO: 765261 - DNA, 33 bp, Homo sapien
ctcctaaacagtaagaagtaaatttcagttgtt

SEQ ID NO: 765262 - DNA, 33 bp, Homo sapien
ctcctaaacagtaagacgtaaatttcagttgtt

SEQ ID NO: 765263 - DNA, 33 bp, Homo sapien
gacagtgctccagaaccacatctatacaagtca

SEQ ID NO: 765264 - DNA, 33 bp, Homo sapien
gacagtgctccagaactacatctatacaagtca

SEQ ID NO: 765265 - DNA, 33 bp, Homo sapien
aaaggataggaaggaaatgctgagtaagcacca

SEQ ID NO: 765266 - DNA, 33 bp, Homo sapien
aaaggataggaaggaagtgctgagtaagcacca

SEQ ID NO: 765267 - DNA, 33 bp, Homo sapien
ctcaggcaatgagatcacttcaattattttagg

SEQ ID NO: 765268 - DNA, 33 bp, Homo sapien
ctcaggcaatgagatcgcttcaattattttagg

SEQ ID NO: 765269 - DNA, 33 bp, Homo sapien
ctcctcatccatgacaaggaaggagagtgcagc

SEQ ID NO: 765270 - DNA, 33 bp, Homo sapien
ctcctcatccatgacagggaaggagagtgcagc

SEQ ID NO: 765271 - DNA, 33 bp, Homo sapien
ctgcatttagtaagacacagagctgcagtatga

SEQ ID NO: 765272 - DNA, 33 bp, Homo sapien
ctgcatttagtaagacgcagagctgcagtatga

SEQ ID NO: 765273 - DNA, 33 bp, Homo sapien
ttttgctgtcacccacaaggcctcctatgacca

SEQ ID NO: 765274 - DNA, 33 bp, Homo sapien
ttttgctgtcacccacgaggcctcctatgacca

SEQ ID NO: 765275 - DNA, 33 bp, Homo sapien
ctgttggatcatctacacaagacgtgctgagtg

SEQ ID NO: 765276 - DNA, 33 bp, Homo sapien
ctgttggatcatctacgcaagacgtgctgagtg

SEQ ID NO: 765277 - DNA, 33 bp, Homo sapien
acttgactggatatgaaaaaaagcaacttgatt

SEQ ID NO: 765278 - DNA, 33 bp, Homo sapien
acttgactggatatgagaaaaagcaacttgatt

SEQ ID NO: 765279 - DNA, 33 bp, Homo sapien
acagaaaagacagggaacgtcccggcagtgcag

SEQ ID NO: 765280 - DNA, 33 bp, Homo sapien
acagaaaagacagggagcgtcccggcagtgcag

SEQ ID NO: 765281 - DNA, 33 bp, Homo sapien
tattcatttgctaccactgctataacaaagtac

SEQ ID NO: 765282 - DNA, 33 bp, Homo sapien
tattcatttgctaccattgctataacaaagtac

SEQ ID NO: 765283 - DNA, 33 bp, Homo sapien
taaggaatgtaatagagaaaacagcaggggaag

SEQ ID NO: 765284 - DNA, 33 bp, Homo sapien
taaggaatgtaatagataaaacagcaggggaag

SEQ ID NO: 765285 - DNA, 33 bp, Homo sapien
tgctggacttctagccaaaggagtttaagatga

SEQ ID NO: 765286 - DNA, 33 bp, Homo sapien
tgctggacttctagccgaaggagtttaagatga

SEQ ID NO: 765287 - DNA, 33 bp, Homo sapien
atgatcctggtttttcgccatttgcccttgcta

SEQ ID NO: 765288 - DNA, 33 bp, Homo sapien
atgatcctggtttttctccatttgcccttgcta

SEQ ID NO: 765289 - DNA, 33 bp, Homo sapien
gcctctgacccagggcacggtactccagtcttt

SEQ ID NO: 765290 - DNA, 33 bp, Homo sapien
gcctctgacccagggcgcggtactccagtcttt

SEQ ID NO: 765291 - DNA, 33 bp, Homo sapien
gagttggcaggatagacaggatgaggaagagat

SEQ ID NO: 765292 - DNA, 33 bp, Homo sapien
gagttggcaggatagagaggatgaggaagagat

SEQ ID NO: 765293 - DNA, 33 bp, Homo sapien
ggtacctggaactgcaacagtcattttaaaaca

SEQ ID NO: 765294 - DNA, 33 bp, Homo sapien
ggtacctggaactgcagcagtcattttaaaaca

SEQ ID NO: 765295 - DNA, 33 bp, Homo sapien
tagggtcacgaataaactaacttgtttgcattt

SEQ ID NO: 765296 - DNA, 33 bp, Homo sapien
tagggtcacgaataaattaacttgtttgcattt

SEQ ID NO: 765297 - DNA, 33 bp, Homo sapien
gttaagttctgaaagacgacaaagggctaaata

SEQ ID NO: 765298 - DNA, 33 bp, Homo sapien
gttaagttctgaaagatgacaaagggctaaata

SEQ ID NO: 765299 - DNA, 33 bp, Homo sapien
tgtgtgaccacttgtgcatatcaggacttgata

SEQ ID NO: 765300 - DNA, 33 bp, Homo sapien
tgtgtgaccacttgtgtatatcaggacttgata

SEQ ID NO: 765301 - DNA, 33 bp, Homo sapien
acatttacagaaccaacttcatttatgttttaa

SEQ ID NO: 765302 - DNA, 33 bp, Homo sapien
acatttacagaaccaatttcatttatgttttaa

SEQ ID NO: 765303 - DNA, 33 bp, Homo sapien
ctgctggtctgaaagcaaaagatcatccatctc

SEQ ID NO: 765304 - DNA, 33 bp, Homo sapien
ctgctggtctgaaagcgaaagatcatccatctc

SEQ ID NO: 765305 - DNA, 33 bp, Homo sapien
tgagttatttgcaacactagtactacgcaagtg

SEQ ID NO: 765306 - DNA, 33 bp, Homo sapien
tgagttatttgcaacattagtactacgcaagtg

SEQ ID NO: 765307 - DNA, 33 bp, Homo sapien
ataatgctttaagaacagtcctgctcgtgcatg

SEQ ID NO: 765308 - DNA, 33 bp, Homo sapien
ataatgctttaagaacggtcctgctcgtgcatg

SEQ ID NO: 765309 - DNA, 33 bp, Homo sapien
aatactccccccatgacctattttacgctattg

SEQ ID NO: 765310 - DNA, 33 bp, Homo sapien
aatactccccccatgatctattttacgctattg

SEQ ID NO: 765311 - DNA, 33 bp, Homo sapien
cagtgttattatgtgacgcctgactgtatgatt

SEQ ID NO: 765312 - DNA, 33 bp, Homo sapien
cagtgttattatgtgatgcctgactgtatgatt

SEQ ID NO: 765313 - DNA, 33 bp, Homo sapien
ctgggaaattcctgtcaactgatgatgtcatag

SEQ ID NO: 765314 - DNA, 33 bp, Homo sapien
ctgggaaattcctgtcgactgatgatgtcatag

SEQ ID NO: 765315 - DNA, 33 bp, Homo sapien
tctcccaggcttgatacctttggtctttgaaac

SEQ ID NO: 765316 - DNA, 33 bp, Homo sapien
tctcccaggcttgatatctttggtctttgaaac

SEQ ID NO: 765317 - DNA, 33 bp, Homo sapien
gctgcaatgaagagaaatgtcaaggcaattgga

SEQ ID NO: 765318 - DNA, 33 bp, Homo sapien
gctgcaatgaagagaactgtcaaggcaattgga

SEQ ID NO: 765319 - DNA, 33 bp, Homo sapien
ttaggaaaggaaaaagcctccggatctcatcat

SEQ ID NO: 765320 - DNA, 33 bp, Homo sapien
ttaggaaaggaaaaagtctccggatctcatcat

SEQ ID NO: 765321 - DNA, 33 bp, Homo sapien
agttaatgaacgtgaaacactgtggctgaaggg

SEQ ID NO: 765322 - DNA, 33 bp, Homo sapien
agttaatgaacgtgaagcactgtggctgaaggg

SEQ ID NO: 765323 - DNA, 33 bp, Homo sapien
tgcatggttcattaggaattttgtaaggactac

SEQ ID NO: 765324 - DNA, 33 bp, Homo sapien
tgcatggttcattagggattttgtaaggactac

SEQ ID NO: 765325 - DNA, 33 bp, Homo sapien
gttcacattttcttgcccaaaggaagactatgg

SEQ ID NO: 765326 - DNA, 33 bp, Homo sapien
gttcacattttcttgctcaaaggaagactatgg

SEQ ID NO: 765327 - DNA, 33 bp, Homo sapien
aaattgaatctcctcaacctgctcacaaatcaa

SEQ ID NO: 765328 - DNA, 33 bp, Homo sapien
aaattgaatctcctcaccctgctcacaaatcaa

SEQ ID NO: 765329 - DNA, 33 bp, Homo sapien
gccctaaatttcctacccttcacaaaaatctcc

SEQ ID NO: 765330 - DNA, 33 bp, Homo sapien
gccctaaatttcctactcttcacaaaaatctcc

SEQ ID NO: 765331 - DNA, 33 bp, Homo sapien
accaagtcataggcaacacaaataaaaacaaat

SEQ ID NO: 765332 - DNA, 33 bp, Homo sapien
accaagtcataggcaagacaaataaaaacaaat

SEQ ID NO: 765333 - DNA, 33 bp, Homo sapien
tttataagcaacacaaagctacagtagtaaaaa

SEQ ID NO: 765334 - DNA, 33 bp, Homo sapien
tttataagcaacacaaggctacagtagtaaaaa

SEQ ID NO: 765335 - DNA, 33 bp, Homo sapien
ggggttgaaagaaaacaaactcttaaatattat

SEQ ID NO: 765336 - DNA, 33 bp, Homo sapien
ggggttgaaagaaaacgaactcttaaatattat

SEQ ID NO: 765337 - DNA, 33 bp, Homo sapien
tgaatctggcctaaggcactcaaatgatgtgaa

SEQ ID NO: 765338 - DNA, 33 bp, Homo sapien
tgaatctggcctaaggtactcaaatgatgtgaa

SEQ ID NO: 765339 - DNA, 33 bp, Homo sapien
agggtccacatgggaaaggctgtacacaggcat

SEQ ID NO: 765340 - DNA, 33 bp, Homo sapien
agggtccacatgggaagggctgtacacaggcat

SEQ ID NO: 765341 - DNA, 33 bp, Homo sapien
cttgccaccaaaagacccagggatcaaggtcaa

SEQ ID NO: 765342 - DNA, 33 bp, Homo sapien
cttgccaccaaaagactcagggatcaaggtcaa

SEQ ID NO: 765343 - DNA, 33 bp, Homo sapien
tcatctttttattctgaaactcaaaccagaagt

SEQ ID NO: 765344 - DNA, 33 bp, Homo sapien
tcatctttttattctggaactcaaaccagaagt

SEQ ID NO: 765345 - DNA, 33 bp, Homo sapien
tatttttaagatgatcgctaaaatgcttgtcct

SEQ ID NO: 765346 - DNA, 33 bp, Homo sapien
tatttttaagatgatctctaaaatgcttgtcct

SEQ ID NO: 765347 - DNA, 33 bp, Homo sapien
aacaagctacctctggaatataaaaatcactct

SEQ ID NO: 765348 - DNA, 33 bp, Homo sapien
aacaagctacctctggcatataaaaatcactct

SEQ ID NO: 765349 - DNA, 33 bp, Homo sapien
gctgtttgtgtgcataactttcaaaaacaatgt

SEQ ID NO: 765350 - DNA, 33 bp, Homo sapien
gctgtttgtgtgcatagctttcaaaaacaatgt

SEQ ID NO: 765351 - DNA, 33 bp, Homo sapien
gtcaaaatataattcacggcaaagcaataaaat

SEQ ID NO: 765352 - DNA, 33 bp, Homo sapien
gtcaaaatataattcatggcaaagcaataaaat

SEQ ID NO: 765353 - DNA, 33 bp, Homo sapien
tgtaggtgaagttaaacgcttttcagtgttaga

SEQ ID NO: 765354 - DNA, 33 bp, Homo sapien
tgtaggtgaagttaaatgcttttcagtgttaga

SEQ ID NO: 765355 - DNA, 33 bp, Homo sapien
ggtcaaagattacccaagattactatctgtcag

SEQ ID NO: 765356 - DNA, 33 bp, Homo sapien
ggtcaaagattacccatgattactatctgtcag

SEQ ID NO: 765357 - DNA, 33 bp, Homo sapien
ataaagtggtaaatgccgaacagagaggggcca

SEQ ID NO: 765358 - DNA, 33 bp, Homo sapien
ataaagtggtaaatgctgaacagagaggggcca

SEQ ID NO: 765359 - DNA, 33 bp, Homo sapien
tattaggaggcattacaaaaataagaaagtggt

SEQ ID NO: 765360 - DNA, 33 bp, Homo sapien
tattaggaggcattacgaaaataagaaagtggt

SEQ ID NO: 765361 - DNA, 33 bp, Homo sapien
aaagaccattatgccacagataaaataagttgc

SEQ ID NO: 765362 - DNA, 33 bp, Homo sapien
aaagaccattatgccagagataaaataagttgc

SEQ ID NO: 765363 - DNA, 33 bp, Homo sapien
gaacacatgtcagaaactttacagtcttggcat

SEQ ID NO: 765364 - DNA, 33 bp, Homo sapien
gaacacatgtcagaaattttacagtcttggcat

SEQ ID NO: 765365 - DNA, 33 bp, Homo sapien
gaaatatgccaaatttaaaatgtgttggaagca

SEQ ID NO: 765366 - DNA, 33 bp, Homo sapien
gaaatatgccaaatttgaaatgtgttggaagca

SEQ ID NO: 765367 - DNA, 33 bp, Homo sapien
caattagattcaggaaaaaatatgtccatgaca

SEQ ID NO: 765368 - DNA, 33 bp, Homo sapien
caattagattcaggaagaaatatgtccatgaca

SEQ ID NO: 765369 - DNA, 33 bp, Homo sapien
gtctggaagagatcccaacaaaatcccattcac

SEQ ID NO: 765370 - DNA, 33 bp, Homo sapien
gtctggaagagatccccacaaaatcccattcac

SEQ ID NO: 765371 - DNA, 33 bp, Homo sapien
atctcagcactcacaccactcagcacatataga

SEQ ID NO: 765372 - DNA, 33 bp, Homo sapien
atctcagcactcacacgactcagcacatataga

SEQ ID NO: 765373 - DNA, 33 bp, Homo sapien
agaatcgtagggaatacctaaaagcattcatac

SEQ ID NO: 765374 - DNA, 33 bp, Homo sapien
agaatcgtagggaatatctaaaagcattcatac

SEQ ID NO: 765375 - DNA, 33 bp, Homo sapien
aaagacacaaggattgaaacatacaggatgtat

SEQ ID NO: 765376 - DNA, 33 bp, Homo sapien
aaagacacaaggattggaacatacaggatgtat

SEQ ID NO: 765377 - DNA, 33 bp, Homo sapien
caatccagtcaggaaactccctgcttgcccagc

SEQ ID NO: 765378 - DNA, 33 bp, Homo sapien
caatccagtcaggaaattccctgcttgcccagc

SEQ ID NO: 765379 - DNA, 33 bp, Homo sapien
ttggcatcttttctcaagaaagtcaaagaaact

SEQ ID NO: 765380 - DNA, 33 bp, Homo sapien
ttggcatcttttctcaggaaagtcaaagaaact

SEQ ID NO: 765381 - DNA, 33 bp, Homo sapien
catactctagaatcaaagaaggcttttggagac

SEQ ID NO: 765382 - DNA, 33 bp, Homo sapien
catactctagaatcaaggaaggcttttggagac

SEQ ID NO: 765383 - DNA, 33 bp, Homo sapien
ataggagaggatgagaagatgtaggaaatatct

SEQ ID NO: 765384 - DNA, 33 bp, Homo sapien
ataggagaggatgagaggatgtaggaaatatct

SEQ ID NO: 765385 - DNA, 33 bp, Homo sapien
actgatggcctctttagcactgtgcttctggaa

SEQ ID NO: 765386 - DNA, 33 bp, Homo sapien
actgatggcctctttatcactgtgcttctggaa

SEQ ID NO: 765387 - DNA, 33 bp, Homo sapien
ggaactctatcacttacgagttgtgtaatctct

SEQ ID NO: 765388 - DNA, 33 bp, Homo sapien
ggaactctatcacttatgagttgtgtaatctct

SEQ ID NO: 765389 - DNA, 33 bp, Homo sapien
cctctggctctgccccacttacctacatcctgt

SEQ ID NO: 765390 - DNA, 33 bp, Homo sapien
cctctggctctgcccctcttacctacatcctgt

SEQ ID NO: 765391 - DNA, 33 bp, Homo sapien
gtagcacctgttggaacgctctgggctaggaaa

SEQ ID NO: 765392 - DNA, 33 bp, Homo sapien
gtagcacctgttggaatgctctgggctaggaaa

SEQ ID NO: 765393 - DNA, 33 bp, Homo sapien
ttactgcttaaaggtgaacttattgtaaaatga

SEQ ID NO: 765394 - DNA, 33 bp, Homo sapien
ttactgcttaaaggtggacttattgtaaaatga

SEQ ID NO: 765395 - DNA, 33 bp, Homo sapien
ttaagctatattgaatcaggaattccatttaaa

SEQ ID NO: 765396 - DNA, 33 bp, Homo sapien
ttaagctatattgaatgaggaattccatttaaa

SEQ ID NO: 765397 - DNA, 33 bp, Homo sapien
tggctctactcacgcaactatttctgtatttgt

SEQ ID NO: 765398 - DNA, 33 bp, Homo sapien
tggctctactcacgcatctatttctgtatttgt

SEQ ID NO: 765399 - DNA, 33 bp, Homo sapien
cttcttctagtgaccaatctaaacatgctgatc

SEQ ID NO: 765400 - DNA, 33 bp, Homo sapien
cttcttctagtgaccagtctaaacatgctgatc

SEQ ID NO: 765401 - DNA, 33 bp, Homo sapien
atggagaaagtaatagaactcaccttaaagagc

SEQ ID NO: 765402 - DNA, 33 bp, Homo sapien
atggagaaagtaataggactcaccttaaagagc

SEQ ID NO: 765403 - DNA, 33 bp, Homo sapien
gcttgacccacattagacacttaccaaatattg

SEQ ID NO: 765404 - DNA, 33 bp, Homo sapien
gcttgacccacattaggcacttaccaaatattg

SEQ ID NO: 765405 - DNA, 33 bp, Homo sapien
taactaaagctgtcaacgaggaaattatcagac

SEQ ID NO: 765406 - DNA, 33 bp, Homo sapien
taactaaagctgtcaatgaggaaattatcagac

SEQ ID NO: 765407 - DNA, 33 bp, Homo sapien
gtggtatggccgtagacgcactttctcaacctt

SEQ ID NO: 765408 - DNA, 33 bp, Homo sapien
gtggtatggccgtagatgcactttctcaacctt

SEQ ID NO: 765409 - DNA, 33 bp, Homo sapien
aatcatatttgtgaaagaacaaacacaccctcc

SEQ ID NO: 765410 - DNA, 33 bp, Homo sapien
aatcatatttgtgaaataacaaacacaccctcc

SEQ ID NO: 765411 - DNA, 33 bp, Homo sapien
tgaaggccaagacaacagttcaacagaacagac

SEQ ID NO: 765412 - DNA, 33 bp, Homo sapien
tgaaggccaagacaacggttcaacagaacagac

SEQ ID NO: 765413 - DNA, 33 bp, Homo sapien
tgtgtgtgatactcaactgaaccttttatttca

SEQ ID NO: 765414 - DNA, 33 bp, Homo sapien
tgtgtgtgatactcaattgaaccttttatttca

SEQ ID NO: 765415 - DNA, 33 bp, Homo sapien
gtctcaggtcaccgaaaaaacttactagatgtt

SEQ ID NO: 765416 - DNA, 33 bp, Homo sapien
gtctcaggtcaccgaagaaacttactagatgtt

SEQ ID NO: 765417 - DNA, 33 bp, Homo sapien
agaaatgttgcttccccatctacacaacctggt

SEQ ID NO: 765418 - DNA, 33 bp, Homo sapien
agaaatgttgcttccctatctacacaacctggt

SEQ ID NO: 765419 - DNA, 33 bp, Homo sapien
ttaataactctccacactccctgatatctgggc

SEQ ID NO: 765420 - DNA, 33 bp, Homo sapien
ttaataactctccacattccctgatatctgggc

SEQ ID NO: 765421 - DNA, 33 bp, Homo sapien
aacttgaactgaagagcaaggcatttgagaggg

SEQ ID NO: 765422 - DNA, 33 bp, Homo sapien
aacttgaactgaagaggaaggcatttgagaggg

SEQ ID NO: 765423 - DNA, 33 bp, Homo sapien
aggcactgggctattcccaaagaaagcttacag

SEQ ID NO: 765424 - DNA, 33 bp, Homo sapien
aggcactgggctattctcaaagaaagcttacag

SEQ ID NO: 765425 - DNA, 33 bp, Homo sapien
agattcccagtaataacaggctgactaaagtac

SEQ ID NO: 765426 - DNA, 33 bp, Homo sapien
agattcccagtaataataggctgactaaagtac

SEQ ID NO: 765427 - DNA, 33 bp, Homo sapien
ttgtaacagagccccaatacctggaagattccc

SEQ ID NO: 765428 - DNA, 33 bp, Homo sapien
ttgtaacagagccccagtacctggaagattccc

SEQ ID NO: 765429 - DNA, 33 bp, Homo sapien
cgagatggctactttaaaccaagaaaacaaagt

SEQ ID NO: 765430 - DNA, 33 bp, Homo sapien
cgagatggctactttagaccaagaaaacaaagt

SEQ ID NO: 765431 - DNA, 33 bp, Homo sapien
ccctccttgtatcagtcaaaatcctatccactc

SEQ ID NO: 765432 - DNA, 33 bp, Homo sapien
ccctccttgtatcagtgaaaatcctatccactc

SEQ ID NO: 765433 - DNA, 33 bp, Homo sapien
agctcacaagttctggaataagaaccaagaata

SEQ ID NO: 765434 - DNA, 33 bp, Homo sapien
agctcacaagttctgggataagaaccaagaata

SEQ ID NO: 765435 - DNA, 33 bp, Homo sapien
gcaatttgaaggccacccttaacttaggacaca

SEQ ID NO: 765436 - DNA, 33 bp, Homo sapien
gcaatttgaaggccactcttaacttaggacaca

SEQ ID NO: 765437 - DNA, 33 bp, Homo sapien
ctattgacttaagtccacagggcaataaattac

SEQ ID NO: 765438 - DNA, 33 bp, Homo sapien
ctattgacttaagtccgcagggcaataaattac

SEQ ID NO: 765439 - DNA, 33 bp, Homo sapien
ttttgataaatgtgcaaaagtaattcaatatgg

SEQ ID NO: 765440 - DNA, 33 bp, Homo sapien
ttttgataaatgtgcagaagtaattcaatatgg

SEQ ID NO: 765441 - DNA, 33 bp, Homo sapien
tgccaaattgctctccagagtttttatcaaatc

SEQ ID NO: 765442 - DNA, 33 bp, Homo sapien
tgccaaattgctctccggagtttttatcaaatc

SEQ ID NO: 765443 - DNA, 33 bp, Homo sapien
ttatggtttagatttgaagccacctggcactca

SEQ ID NO: 765444 - DNA, 33 bp, Homo sapien
ttatggtttagatttggagccacctggcactca

SEQ ID NO: 765445 - DNA, 33 bp, Homo sapien
cagccaagatacccaaactttctgagcttcagt

SEQ ID NO: 765446 - DNA, 33 bp, Homo sapien
cagccaagatacccaacctttctgagcttcagt

SEQ ID NO: 765447 - DNA, 33 bp, Homo sapien
agcaggcaaggctccaaaacccattttacatgt

SEQ ID NO: 765448 - DNA, 33 bp, Homo sapien
agcaggcaaggctccagaacccattttacatgt

SEQ ID NO: 765449 - DNA, 33 bp, Homo sapien
aaatgcttataacacacgataacaagtaccata

SEQ ID NO: 765450 - DNA, 33 bp, Homo sapien
aaatgcttataacacatgataacaagtaccata

SEQ ID NO: 765451 - DNA, 33 bp, Homo sapien
cttagcaacgtgctaaccctgcagcaaatgttc

SEQ ID NO: 765452 - DNA, 33 bp, Homo sapien
cttagcaacgtgctaatcctgcagcaaatgttc

SEQ ID NO: 765453 - DNA, 33 bp, Homo sapien
ttagagtcttatattaactgcaaaactcctaaa

SEQ ID NO: 765454 - DNA, 33 bp, Homo sapien
ttagagtcttatattagctgcaaaactcctaaa

SEQ ID NO: 765455 - DNA, 33 bp, Homo sapien
gaccctgtcacaaaacaagatcagttcagtata

SEQ ID NO: 765456 - DNA, 33 bp, Homo sapien
gaccctgtcacaaaacgagatcagttcagtata

SEQ ID NO: 765457 - DNA, 33 bp, Homo sapien
ggtgggggtgaaactaaattgaataacacaact

SEQ ID NO: 765458 - DNA, 33 bp, Homo sapien
ggtgggggtgaaactacattgaataacacaact

SEQ ID NO: 765459 - DNA, 33 bp, Homo sapien
ttatgactctcacagcaccattctcatcctttg

SEQ ID NO: 765460 - DNA, 33 bp, Homo sapien
ttatgactctcacagcgccattctcatcctttg

SEQ ID NO: 765461 - DNA, 33 bp, Homo sapien
aaatggaagatgcaccaaaacaaaagtacttct

SEQ ID NO: 765462 - DNA, 33 bp, Homo sapien
aaatggaagatgcaccgaaacaaaagtacttct

SEQ ID NO: 765463 - DNA, 33 bp, Homo sapien
caaagtgggagcatgaagtgaaaatgctaacac

SEQ ID NO: 765464 - DNA, 33 bp, Homo sapien
caaagtgggagcatgacgtgaaaatgctaacac

SEQ ID NO: 765465 - DNA, 33 bp, Homo sapien
gccctctgtggtttcacgatcccagataggggc

SEQ ID NO: 765466 - DNA, 33 bp, Homo sapien
gccctctgtggtttcatgatcccagataggggc

SEQ ID NO: 765467 - DNA, 33 bp, Homo sapien
tgatccttaattacctaagaaggctcagtacat

SEQ ID NO: 765468 - DNA, 33 bp, Homo sapien
tgatccttaattaccttagaaggctcagtacat

SEQ ID NO: 765469 - DNA, 33 bp, Homo sapien
ggtgtgctactctcccaacatgtggatgtgttc

SEQ ID NO: 765470 - DNA, 33 bp, Homo sapien
ggtgtgctactctcccgacatgtggatgtgttc

SEQ ID NO: 765471 - DNA, 33 bp, Homo sapien
cttgctattgtgttacaactgtctacagtgaca

SEQ ID NO: 765472 - DNA, 33 bp, Homo sapien
cttgctattgtgttacgactgtctacagtgaca

SEQ ID NO: 765473 - DNA, 33 bp, Homo sapien
ccaaaggaccactgaacttaaaacgagtgaagt

SEQ ID NO: 765474 - DNA, 33 bp, Homo sapien
ccaaaggaccactgaatttaaaacgagtgaagt

SEQ ID NO: 765475 - DNA, 33 bp, Homo sapien
acttattagttgctgtgaaagacattattttct

SEQ ID NO: 765476 - DNA, 33 bp, Homo sapien
acttattagttgctgttaaagacattattttct

SEQ ID NO: 765477 - DNA, 33 bp, Homo sapien
gcacaaagctaggaaacgactcttgatgcctaa

SEQ ID NO: 765478 - DNA, 33 bp, Homo sapien
gcacaaagctaggaaatgactcttgatgcctaa

SEQ ID NO: 765479 - DNA, 33 bp, Homo sapien
gctgctttgtctcaccaacttcttctgtgcttc

SEQ ID NO: 765480 - DNA, 33 bp, Homo sapien
gctgctttgtctcaccgacttcttctgtgcttc

SEQ ID NO: 765481 - DNA, 33 bp, Homo sapien
gcagagtagtaattgacgcccaaaaagggaaag

SEQ ID NO: 765482 - DNA, 33 bp, Homo sapien
gcagagtagtaattgatgcccaaaaagggaaag

SEQ ID NO: 765483 - DNA, 33 bp, Homo sapien; identical to SEQ ID NO: 765481

SEQ ID NO: 765484 - DNA, 33 bp, Homo sapien; identical to SEQ ID NO: 765482

SEQ ID NO: 765485 - DNA, 33 bp, Homo sapien
gtgtcctatccctttcacatattttcaagctta

SEQ ID NO: 765486 - DNA, 33 bp, Homo sapien
gtgtcctatccctttcgcatattttcaagctta

SEQ ID NO: 765487 - DNA, 33 bp, Homo sapien
gaaatgacaagtatatcaaaccctgaaaatatg

SEQ ID NO: 765488 - DNA, 33 bp, Homo sapien
gaaatgacaagtatatgaaaccctgaaaatatg

SEQ ID NO: 765489 - DNA, 33 bp, Homo sapien
atatgtttttggcatcacttgtgttgttttgat

SEQ ID NO: 765490 - DNA, 33 bp, Homo sapien
atatgtttttggcatcgcttgtgttgttttgat

SEQ ID NO: 765491 - DNA, 33 bp, Homo sapien
gaacattgtgggggcaataggtgatgaggagtg

SEQ ID NO: 765492 - DNA, 33 bp, Homo sapien
gaacattgtgggggcagtaggtgatgaggagtg

SEQ ID NO: 765493 - DNA, 33 bp, Homo sapien
caggccctgagtttcaagtgtaatccatgacga

SEQ ID NO: 765494 - DNA, 33 bp, Homo sapien
caggccctgagtttcaggtgtaatccatgacga

SEQ ID NO: 765495 - DNA, 33 bp, Homo sapien
ctgttcccacttactgaacccacattttcagca

SEQ ID NO: 765496 - DNA, 33 bp, Homo sapien
ctgttcccacttactgtacccacattttcagca

SEQ ID NO: 765497 - DNA, 33 bp, Homo sapien
ttgacaaacgtagggacctacaagatggaactc

SEQ ID NO: 765498 - DNA, 33 bp, Homo sapien
ttgacaaacgtagggatctacaagatggaactc

SEQ ID NO: 765499 - DNA, 33 bp, Homo sapien
agggctatggaattcacactgtggttaaatgat

SEQ ID NO: 765500 - DNA, 33 bp, Homo sapien
agggctatggaattcatactgtggttaaatgat

SEQ ID NO: 765501 - DNA, 33 bp, Homo sapien
ttctaacctgtaagtaccatgtcgaataaagga

SEQ ID NO: 765502 - DNA, 33 bp, Homo sapien
ttctaacctgtaagtatcatgtcgaataaagga

SEQ ID NO: 765503 - DNA, 33 bp, Homo sapien
ttttaggctaaccagacgacagctaatgatttt

SEQ ID NO: 765504 - DNA, 33 bp, Homo sapien
ttttaggctaaccagatgacagctaatgatttt

SEQ ID NO: 765505 - DNA, 33 bp, Homo sapien
ttcaatttggagaacaacatcgcttttgcataa

SEQ ID NO: 765506 - DNA, 33 bp, Homo sapien
ttcaatttggagaacagcatcgcttttgcataa

SEQ ID NO: 765507 - DNA, 33 bp, Homo sapien
gtatcaaatgagattgaaaatgtgacaaggttt

SEQ ID NO: 765508 - DNA, 33 bp, Homo sapien
gtatcaaatgagattgcaaatgtgacaaggttt

SEQ ID NO: 765509 - DNA, 33 bp, Homo sapien
ccctcactgatattgacgtttgagacactgcct

SEQ ID NO: 765510 - DNA, 33 bp, Homo sapien
ccctcactgatattgaggtttgagacactgcct

SEQ ID NO: 765511 - DNA, 33 bp, Homo sapien
ggtgcctgcatccgctaagcaaagctgctaaga

SEQ ID NO: 765512 - DNA, 33 bp, Homo sapien
ggtgcctgcatccgctgagcaaagctgctaaga

SEQ ID NO: 765513 - DNA, 33 bp, Homo sapien
gtctcacttcctagagacatgatgaaaattcat

SEQ ID NO: 765514 - DNA, 33 bp, Homo sapien
gtctcacttcctagaggcatgatgaaaattcat

SEQ ID NO: 765515 - DNA, 33 bp, Homo sapien
attccaaagaaaagctcagagtaccaaatagct

SEQ ID NO: 765516 - DNA, 33 bp, Homo sapien
attccaaagaaaagctgagagtaccaaatagct

SEQ ID NO: 765517 - DNA, 33 bp, Homo sapien
aattagccactcattaagccaagactttaattc

SEQ ID NO: 765518 - DNA, 33 bp, Homo sapien
aattagccactcattaggccaagactttaattc

SEQ ID NO: 765519 - DNA, 33 bp, Homo sapien
gatgatctggtttagccctcatttcaaccttag

SEQ ID NO: 765520 - DNA, 33 bp, Homo sapien
gatgatctggtttagctctcatttcaaccttag

SEQ ID NO: 765521 - DNA, 33 bp, Homo sapien
ccatctttctgccatccccacacaatgaactca

SEQ ID NO: 765522 - DNA, 33 bp, Homo sapien
ccatctttctgccatctccacacaatgaactca

SEQ ID NO: 765523 - DNA, 33 bp, Homo sapien
gccaaaaagactgctcaaaaacaagcctccttg

SEQ ID NO: 765524 - DNA, 33 bp, Homo sapien
gccaaaaagactgctcgaaaacaagcctccttg

SEQ ID NO: 765525 - DNA, 33 bp, Homo sapien
gatggtggaaaacccaagttggcctgattttca

SEQ ID NO: 765526 - DNA, 33 bp, Homo sapien
gatggtggaaaacccacgttggcctgattttca

SEQ ID NO: 765527 - DNA, 33 bp, Homo sapien
aggagctccagaagtacaaaatccatgctggct

SEQ ID NO: 765528 - DNA, 33 bp, Homo sapien
aggagctccagaagtataaaatccatgctggct

SEQ ID NO: 765529 - DNA, 33 bp, Homo sapien
agagcagtgattaagacggaagcctccaacgcc

SEQ ID NO: 765530 - DNA, 33 bp, Homo sapien
agagcagtgattaagatggaagcctccaacgcc

SEQ ID NO: 765531 - DNA, 33 bp, Homo sapien
gaggacaaaaatggaaaccttctcataatgtca

SEQ ID NO: 765532 - DNA, 33 bp, Homo sapien
gaggacaaaaatggaagccttctcataatgtca

SEQ ID NO: 765533 - DNA, 33 bp, Homo sapien
gggtcagggatgcttgcatggtaggtgctcctg

SEQ ID NO: 765534 - DNA, 33 bp, Homo sapien
gggtcagggatgcttgtatggtaggtgctcctg

SEQ ID NO: 765535 - DNA, 33 bp, Homo sapien
actagagactttagagaccacaaaatgcttttc

SEQ ID NO: 765536 - DNA, 33 bp, Homo sapien
actagagactttagaggccacaaaatgcttttc

SEQ ID NO: 765537 - DNA, 33 bp, Homo sapien
aacaaatacttctttaccattcagtccgaaaaa

SEQ ID NO: 765538 - DNA, 33 bp, Homo sapien
aacaaatacttctttatcattcagtccgaaaaa

SEQ ID NO: 765539 - DNA, 33 bp, Homo sapien
ttgcctgggtaattaaactgtcactccagcaaa

SEQ ID NO: 765540 - DNA, 33 bp, Homo sapien
ttgcctgggtaattaagctgtcactccagcaaa

SEQ ID NO: 765541 - DNA, 33 bp, Homo sapien
accatttttcactcaaagtaggagttgataatc

SEQ ID NO: 765542 - DNA, 33 bp, Homo sapien
accatttttcactcaaggtaggagttgataatc

SEQ ID NO: 765543 - DNA, 33 bp, Homo sapien
acatagtagctttcagaaaacagtagctatcta

SEQ ID NO: 765544 - DNA, 33 bp, Homo sapien
acatagtagctttcagcaaacagtagctatcta

SEQ ID NO: 765545 - DNA, 33 bp, Homo sapien
cagcgtttacctgatacgattgttgcaaggatt

SEQ ID NO: 765546 - DNA, 33 bp, Homo sapien
cagcgtttacctgatatgattgttgcaaggatt

SEQ ID NO: 765547 - DNA, 33 bp, Homo sapien
gggttgcgcaggtaaccgggaatgaagccagga

SEQ ID NO: 765548 - DNA, 33 bp, Homo sapien
gggttgcgcaggtaactgggaatgaagccagga

SEQ ID NO: 765549 - DNA, 33 bp, Homo sapien
ttagccgatccaaaaaaacagtcggggcattta

SEQ ID NO: 765550 - DNA, 33 bp, Homo sapien
ttagccgatccaaaaagacagtcggggcattta

SEQ ID NO: 765551 - DNA, 33 bp, Homo sapien
tttattttccaacgtgaatctgggctgccaagc

SEQ ID NO: 765552 - DNA, 33 bp, Homo sapien
tttattttccaacgtgtatctgggctgccaagc

SEQ ID NO: 765553 - DNA, 33 bp, Homo sapien
aaattggctttaaaaaatatcacctgacaaacc

SEQ ID NO: 765554 - DNA, 33 bp, Homo sapien
aaattggctttaaaaagtatcacctgacaaacc

SEQ ID NO: 765555 - DNA, 33 bp, Homo sapien
cagagataagctggtccagttgtttcatacccc

SEQ ID NO: 765556 - DNA, 33 bp, Homo sapien
cagagataagctggtctagttgtttcatacccc

SEQ ID NO: 765557 - DNA, 33 bp, Homo sapien
caatactgttccatgactatttcagcagaactg

SEQ ID NO: 765558 - DNA, 33 bp, Homo sapien
caatactgttccatgattatttcagcagaactg

SEQ ID NO: 765559 - DNA, 33 bp, Homo sapien
atcatagaagatgttaacgcaccattctcatat

SEQ ID NO: 765560 - DNA, 33 bp, Homo sapien
atcatagaagatgttagcgcaccattctcatat

SEQ ID NO: 765561 - DNA, 33 bp, Homo sapien
tttgtgatgcaaaaaaatctcacttaagtgtgt

SEQ ID NO: 765562 - DNA, 33 bp, Homo sapien
tttgtgatgcaaaaaagtctcacttaagtgtgt

SEQ ID NO: 765563 - DNA, 33 bp, Homo sapien
tcagaaaatgtgagcacgtcccgtgagactcaa

SEQ ID NO: 765564 - DNA, 33 bp, Homo sapien
tcagaaaatgtgagcatgtcccgtgagactcaa

SEQ ID NO: 765565 - DNA, 33 bp, Homo sapien
cttcttaagcagaaaaagctcttaggagagaaa

SEQ ID NO: 765566 - DNA, 33 bp, Homo sapien
cttcttaagcagaaaaggctcttaggagagaaa

SEQ ID NO: 765567 - DNA, 33 bp, Homo sapien
taacttggcaaaagaaaatgttagggtccttca

SEQ ID NO: 765568 - DNA, 33 bp, Homo sapien
taacttggcaaaagaagatgttagggtccttca

SEQ ID NO: 765569 - DNA, 33 bp, Homo sapien
ccgactttccaggcacagctagtttcttcctag

SEQ ID NO: 765570 - DNA, 33 bp, Homo sapien
ccgactttccaggcacggctagtttcttcctag

SEQ ID NO: 765571 - DNA, 33 bp, Homo sapien
aggggcagcaccacacaacgatgaaagcagaga

SEQ ID NO: 765572 - DNA, 33 bp, Homo sapien
aggggcagcaccacacgacgatgaaagcagaga

SEQ ID NO: 765573 - DNA, 33 bp, Homo sapien
ttggggcaatgctccacagagtcaagggcatgt

SEQ ID NO: 765574 - DNA, 33 bp, Homo sapien
ttggggcaatgctccatagagtcaagggcatgt

SEQ ID NO: 765575 - DNA, 33 bp, Homo sapien
tcctgagcaagaaggacgaacaatctgcagatg

SEQ ID NO: 765576 - DNA, 33 bp, Homo sapien
tcctgagcaagaaggatgaacaatctgcagatg

SEQ ID NO: 765577 - DNA, 33 bp, Homo sapien
aggatctaagcctgcacgggttcagtcttctgc

SEQ ID NO: 765578 - DNA, 33 bp, Homo sapien
aggatctaagcctgcatgggttcagtcttctgc

SEQ ID NO: 765579 - DNA, 33 bp, Homo sapien
acctgccacttatcaaagactgaagaaaccaaa

SEQ ID NO: 765580 - DNA, 33 bp, Homo sapien
acctgccacttatcaatgactgaagaaaccaaa

SEQ ID NO: 765581 - DNA, 33 bp, Homo sapien
tcaagctagcacatcaatactaaaaagaaaagc

SEQ ID NO: 765582 - DNA, 33 bp, Homo sapien
tcaagctagcacatcagtactaaaaagaaaagc

SEQ ID NO: 765583 - DNA, 33 bp, Homo sapien
catcgttctcccctgcaatcttttttcttattt

SEQ ID NO: 765584 - DNA, 33 bp, Homo sapien
catcgttctcccctgcgatcttttttcttattt

SEQ ID NO: 765585 - DNA, 33 bp, Homo sapien
aatgctgggctccccacccctagaagaaaactg

SEQ ID NO: 765586 - DNA, 33 bp, Homo sapien
aatgctgggctccccatccctagaagaaaactg

SEQ ID NO: 765587 - DNA, 33 bp, Homo sapien
acagcttagaatagtacagtaggcattcaaata

SEQ ID NO: 765588 - DNA, 33 bp, Homo sapien
acagcttagaatagtatagtaggcattcaaata

SEQ ID NO: 765589 - DNA, 33 bp, Homo sapien
tatgtattgccggcaaataaagtatgtccagac

SEQ ID NO: 765590 - DNA, 33 bp, Homo sapien
tatgtattgccggcaagtaaagtatgtccagac

SEQ ID NO: 765591 - DNA, 33 bp, Homo sapien
caaaggcgaatgcgagacgagtgcagtttgtaa

SEQ ID NO: 765592 - DNA, 33 bp, Homo sapien
caaaggcgaatgcgagccgagtgcagtttgtaa

SEQ ID NO: 765593 - DNA, 33 bp, Homo sapien
ataacctaatacttcccgatcaataacacgtcc

SEQ ID NO: 765594 - DNA, 33 bp, Homo sapien
ataacctaatacttcctgatcaataacacgtcc

SEQ ID NO: 765595 - DNA, 33 bp, Homo sapien
aacaactattgtagaactgagtgaccctttgct

SEQ ID NO: 765596 - DNA, 33 bp, Homo sapien
aacaactattgtagaattgagtgaccctttgct

SEQ ID NO: 765597 - DNA, 33 bp, Homo sapien
gccattcttctgaggacgcttaagttgacccca

SEQ ID NO: 765598 - DNA, 33 bp, Homo sapien
gccattcttctgaggatgcttaagttgacccca

SEQ ID NO: 765599 - DNA, 33 bp, Homo sapien
ggctatataaatggcacctatagcactgaagtt

SEQ ID NO: 765600 - DNA, 33 bp, Homo sapien
ggctatataaatggcagctatagcactgaagtt

SEQ ID NO: 765601 - DNA, 33 bp, Homo sapien
ttccttgaggtataagccagtttccaaaacaaa

SEQ ID NO: 765602 - DNA, 33 bp, Homo sapien
ttccttgaggtataaggcagtttccaaaacaaa

SEQ ID NO: 765603 - DNA, 33 bp, Homo sapien
acatacataaatccacacgtgaagtatgcacac

SEQ ID NO: 765604 - DNA, 33 bp, Homo sapien
acatacataaatccacgcgtgaagtatgcacac

SEQ ID NO: 765605 - DNA, 33 bp, Homo sapien
gctacagaaatgccctaaagaatcttgagtgtg

SEQ ID NO: 765606 - DNA, 33 bp, Homo sapien
gctacagaaatgcccttaagaatcttgagtgtg

SEQ ID NO: 765607 - DNA, 33 bp, Homo sapien
tattgtgcagataaaacgtgtcaggtaatctct

SEQ ID NO: 765608 - DNA, 33 bp, Homo sapien
tattgtgcagataaaatgtgtcaggtaatctct

SEQ ID NO: 765609 - DNA, 33 bp, Homo sapien
gaataggcaggacaaacagaatttccttcttca

SEQ ID NO: 765610 - DNA, 33 bp, Homo sapien
gaataggcaggacaaagagaatttccttcttca

SEQ ID NO: 765611 - DNA, 33 bp, Homo sapien
gtaaagaactcttatgcaacacaaattacctaa

SEQ ID NO: 765612 - DNA, 33 bp, Homo sapien
gtaaagaactcttatggaacacaaattacctaa

SEQ ID NO: 765613 - DNA, 33 bp, Homo sapien
aattgggtatacttaaatcattgcaaagttccc

SEQ ID NO: 765614 - DNA, 33 bp, Homo sapien
aattgggtatacttaactcattgcaaagttccc

SEQ ID NO: 765615 - DNA, 33 bp, Homo sapien
aaatcctctactcaaccgaatccaatttacctc

SEQ ID NO: 765616 - DNA, 33 bp, Homo sapien
aaatcctctactcaactgaatccaatttacctc

SEQ ID NO: 765617 - DNA, 33 bp, Homo sapien
gtggattgactgattacgtagtccttagatttc

SEQ ID NO: 765618 - DNA, 33 bp, Homo sapien
gtggattgactgattatgtagtccttagatttc

SEQ ID NO: 765619 - DNA, 33 bp, Homo sapien
attccaggagccattaaagactagtgttcaaga

SEQ ID NO: 765620 - DNA, 33 bp, Homo sapien
attccaggagccattatagactagtgttcaaga

SEQ ID NO: 765621 - DNA, 33 bp, Homo sapien
caaatcaatgctcaaaccaagtaaaataagtaa

SEQ ID NO: 765622 - DNA, 33 bp, Homo sapien
caaatcaatgctcaaatcaagtaaaataagtaa

SEQ ID NO: 765623 - DNA, 33 bp, Homo sapien
atttttcaacagaacaagctgaacagtaaaatt

SEQ ID NO: 765624 - DNA, 33 bp, Homo sapien
atttttcaacagaacaggctgaacagtaaaatt

SEQ ID NO: 765625 - DNA, 33 bp, Homo sapien
gatgtattgtctttaaccattaaaaatctgaga

SEQ ID NO: 765626 - DNA, 33 bp, Homo sapien
gatgtattgtctttaatcattaaaaatctgaga

SEQ ID NO: 765627 - DNA, 33 bp, Homo sapien
atacaggcttgcaacacaccttgatagatgaag

SEQ ID NO: 765628 - DNA, 33 bp, Homo sapien
atacaggcttgcaacagaccttgatagatgaag

SEQ ID NO: 765629 - DNA, 33 bp, Homo sapien
tgagctgtggtgtgaacgggtcaacctggagtg

SEQ ID NO: 765630 - DNA, 33 bp, Homo sapien
tgagctgtggtgtgaatgggtcaacctggagtg

SEQ ID NO: 765631 - DNA, 33 bp, Homo sapien
tttggagaaattctaaatcccaaatgattatgt

SEQ ID NO: 765632 - DNA, 33 bp, Homo sapien
tttggagaaattctaactcccaaatgattatgt

SEQ ID NO: 765633 - DNA, 33 bp, Homo sapien
gtaggaatatcccctcaattattttactcattt

SEQ ID NO: 765634 - DNA, 33 bp, Homo sapien
gtaggaatatcccctctattattttactcattt

SEQ ID NO: 765635 - DNA, 33 bp, Homo sapien
tttcttgaagaatggaaagatgaaatgatagca

SEQ ID NO: 765636 - DNA, 33 bp, Homo sapien
tttcttgaagaatggagagatgaaatgatagca

SEQ ID NO: 765637 - DNA, 33 bp, Homo sapien
tattattaagaaacaaaatcctgagacctccat

SEQ ID NO: 765638 - DNA, 33 bp, Homo sapien
tattattaagaaacaagatcctgagacctccat

SEQ ID NO: 765639 - DNA, 33 bp, Homo sapien
tggcattaactcatcaagttcttctactgcaaa

SEQ ID NO: 765640 - DNA, 33 bp, Homo sapien
tggcattaactcatcatgttcttctactgcaaa

SEQ ID NO: 765641 - DNA, 33 bp, Homo sapien
aaggaatagaaatgaaattagttgaaagttgag

SEQ ID NO: 765642 - DNA, 33 bp, Homo sapien
aaggaatagaaatgaagttagttgaaagttgag

SEQ ID NO: 765643 - DNA, 33 bp, Homo sapien
cccagtggctccaggaaaatggatgagttgagc

SEQ ID NO: 765644 - DNA, 33 bp, Homo sapien
cccagtggctccaggagaatggatgagttgagc

SEQ ID NO: 765645 - DNA, 33 bp, Homo sapien
gaccaatggaaccaacaataacttcaggaaagg

SEQ ID NO: 765646 - DNA, 33 bp, Homo sapien
gaccaatggaaccaacgataacttcaggaaagg

SEQ ID NO: 765647 - DNA, 33 bp, Homo sapien
agataaagaaaatatggcactcctccagtagaa

SEQ ID NO: 765648 - DNA, 33 bp, Homo sapien
agataaagaaaatatgtcactcctccagtagaa

SEQ ID NO: 765649 - DNA, 33 bp, Homo sapien
gacaactatctttcaaacatcagtagtcaatag

SEQ ID NO: 765650 - DNA, 33 bp, Homo sapien
gacaactatctttcaatcatcagtagtcaatag

SEQ ID NO: 765651 - DNA, 33 bp, Homo sapien
ctcctgaaaggaaaggaagatagatcctatttg

SEQ ID NO: 765652 - DNA, 33 bp, Homo sapien
ctcctgaaaggaaaggtagatagatcctatttg

SEQ ID NO: 765653 - DNA, 33 bp, Homo sapien
ctccaacatgaggcaaagagatgtgtgtatcag

SEQ ID NO: 765654 - DNA, 33 bp, Homo sapien
ctccaacatgaggcaaggagatgtgtgtatcag

SEQ ID NO: 765655 - DNA, 33 bp, Homo sapien
ttaaagacttatacacagcaactttaattcttt

SEQ ID NO: 765656 - DNA, 33 bp, Homo sapien
ttaaagacttatacacggcaactttaattcttt

SEQ ID NO: 765657 - DNA, 33 bp, Homo sapien
cccgtgaaatcatcaccgcaaagtaatacacat

SEQ ID NO: 765658 - DNA, 33 bp, Homo sapien
cccgtgaaatcatcactgcaaagtaatacacat

SEQ ID NO: 765659 - DNA, 33 bp, Homo sapien
cttcttgttattgcaaccacagaagaaagacat

SEQ ID NO: 765660 - DNA, 33 bp, Homo sapien
cttcttgttattgcaagcacagaagaaagacat

SEQ ID NO: 765661 - DNA, 33 bp, Homo sapien
aaattgtctacagagacgggagcttagcctaaa

SEQ ID NO: 765662 - DNA, 33 bp, Homo sapien
aaattgtctacagagatgggagcttagcctaaa

SEQ ID NO: 765663 - DNA, 33 bp, Homo sapien
tacttacgtattttacagacatggataagaact

SEQ ID NO: 765664 - DNA, 33 bp, Homo sapien
tacttacgtattttaccgacatggataagaact

SEQ ID NO: 765665 - DNA, 33 bp, Homo sapien
tctgagtcagccgcacaatttcattgagaacag

SEQ ID NO: 765666 - DNA, 33 bp, Homo sapien
tctgagtcagccgcacgatttcattgagaacag

SEQ ID NO: 765667 - DNA, 33 bp, Homo sapien
aggcaggttttcccccactcacattttgggagc

SEQ ID NO: 765668 - DNA, 33 bp, Homo sapien
aggcaggttttcccccgctcacattttgggagc

SEQ ID NO: 765669 - DNA, 33 bp, Homo sapien
taaatttatagaaaacgctaccgacatcaaaat

SEQ ID NO: 765670 - DNA, 33 bp, Homo sapien
taaatttatagaaaactctaccgacatcaaaat

SEQ ID NO: 765671 - DNA, 33 bp, Homo sapien
gagctagtaattgggaaagttagaatgaactca

SEQ ID NO: 765672 - DNA, 33 bp, Homo sapien
gagctagtaattgggagagttagaatgaactca

SEQ ID NO: 765673 - DNA, 33 bp, Homo sapien
atttcctttatctcacaaaggtaactggatttc

SEQ ID NO: 765674 - DNA, 33 bp, Homo sapien
atttcctttatctcacgaaggtaactggatttc

SEQ ID NO: 765675 - DNA, 33 bp, Homo sapien
gtattggtatttttcacgatggagggtgaagtt

SEQ ID NO: 765676 - DNA, 33 bp, Homo sapien
gtattggtatttttcatgatggagggtgaagtt

SEQ ID NO: 765677 - DNA, 33 bp, Homo sapien
cactgggcctgacccacgaaactattcttctct

SEQ ID NO: 765678 - DNA, 33 bp, Homo sapien
cactgggcctgacccaggaaactattcttctct

SEQ ID NO: 765679 - DNA, 33 bp, Homo sapien
aactcatttcagcatcactcaaaagttcaaagt

SEQ ID NO: 765680 - DNA, 33 bp, Homo sapien
aactcatttcagcatcgctcaaaagttcaaagt

SEQ ID NO: 765681 - DNA, 33 bp, Homo sapien
gtgaggttttgctacactcttgagatttcattt

SEQ ID NO: 765682 - DNA, 33 bp, Homo sapien
gtgaggttttgctacattcttgagatttcattt

SEQ ID NO: 765683 - DNA, 33 bp, Homo sapien
aatgaaaaggcttgaactgattacacaagacag

SEQ ID NO: 765684 - DNA, 33 bp, Homo sapien
aatgaaaaggcttgaattgattacacaagacag

SEQ ID NO: 765685 - DNA, 33 bp, Homo sapien
agttccagacagaaaagaattattggcaataaa

SEQ ID NO: 765686 - DNA, 33 bp, Homo sapien
agttccagacagaaaataattattggcaataaa

SEQ ID NO: 765687 - DNA, 33 bp, Homo sapien
gcccactatctccagccctgggtcaatatgaga

SEQ ID NO: 765688 - DNA, 33 bp, Homo sapien
gcccactatctccagctctgggtcaatatgaga

SEQ ID NO: 765689 - DNA, 33 bp, Homo sapien
atgcacagaatcagcaaagaaatctggagactg

SEQ ID NO: 765690 - DNA, 33 bp, Homo sapien
atgcacagaatcagcagagaaatctggagactg

SEQ ID NO: 765691 - DNA, 33 bp, Homo sapien
aggaaaggcaccttaaaatgaatatataaatgg

SEQ ID NO: 765692 - DNA, 33 bp, Homo sapien
aggaaaggcaccttaagatgaatatataaatgg

SEQ ID NO: 765693 - DNA, 33 bp, Homo sapien
cagaaaactactttaactccagcattcccttag

SEQ ID NO: 765694 - DNA, 33 bp, Homo sapien
cagaaaactactttaattccagcattcccttag

SEQ ID NO: 765695 - DNA, 33 bp, Homo sapien
catgctgccttacagaaccactccactattcag

SEQ ID NO: 765696 - DNA, 33 bp, Homo sapien
catgctgccttacagacccactccactattcag

SEQ ID NO: 765697 - DNA, 33 bp, Homo sapien
ggtaatgtttcttctacagcatgacagcatctc

SEQ ID NO: 765698 - DNA, 33 bp, Homo sapien
ggtaatgtttcttctatagcatgacagcatctc

SEQ ID NO: 765699 - DNA, 33 bp, Homo sapien
gcatgtaaacttgtgaaaaactttgtcctatgt

SEQ ID NO: 765700 - DNA, 33 bp, Homo sapien
gcatgtaaacttgtgataaactttgtcctatgt

SEQ ID NO: 765701 - DNA, 33 bp, Homo sapien
gtcatgaataaaaaagaatgcttatacactgtt

SEQ ID NO: 765702 - DNA, 33 bp, Homo sapien
gtcatgaataaaaaaggatgcttatacactgtt

SEQ ID NO: 765703 - DNA, 33 bp, Homo sapien; identical to SEQ ID NO: 765701

SEQ ID NO: 765704 - DNA, 33 bp, Homo sapien; identical to SEQ ID NO: 765702

SEQ ID NO: 765705 - DNA, 33 bp, Homo sapien
atttgcacatctcaaactgagagacaggaccag

SEQ ID NO: 765706 - DNA, 33 bp, Homo sapien
atttgcacatctcaaattgagagacaggaccag

SEQ ID NO: 765707 - DNA, 33 bp, Homo sapien
ttaattaggtgagaaacgaaatgaaagaggctg

SEQ ID NO: 765708 - DNA, 33 bp, Homo sapien
ttaattaggtgagaaatgaaatgaaagaggctg

SEQ ID NO: 765709 - DNA, 33 bp, Homo sapien
caatggctccaaagtacaagagtagtaatgctg

SEQ ID NO: 765710 - DNA, 33 bp, Homo sapien
caatggctccaaagtagaagagtagtaatgctg

SEQ ID NO: 765711 - DNA, 33 bp, Homo sapien
gagattttaagaaacccaaattcctaagcctta

SEQ ID NO: 765712 - DNA, 33 bp, Homo sapien
gagattttaagaaaccgaaattcctaagcctta

SEQ ID NO: 765713 - DNA, 33 bp, Homo sapien
tactgaattcctactacgtgaagtgcactgtcc

SEQ ID NO: 765714 - DNA, 33 bp, Homo sapien
tactgaattcctactatgtgaagtgcactgtcc

SEQ ID NO: 765715 - DNA, 33 bp, Homo sapien
atatatgattagcccaaaggaaaataagaatga

SEQ ID NO: 765716 - DNA, 33 bp, Homo sapien
atatatgattagcccagaggaaaataagaatga

SEQ ID NO: 765717 - DNA, 33 bp, Homo sapien
catttctgcttaatacaacttacttcaaattct

SEQ ID NO: 765718 - DNA, 33 bp, Homo sapien
catttctgcttaatactacttacttcaaattct

SEQ ID NO: 765719 - DNA, 33 bp, Homo sapien
gtaagaacagcagtgaagtgcacaaataacaat

SEQ ID NO: 765720 - DNA, 33 bp, Homo sapien
gtaagaacagcagtgacgtgcacaaataacaat

SEQ ID NO: 765721 - DNA, 33 bp, Homo sapien
ttaaaatatttactgacccaaccatctgcatga

SEQ ID NO: 765722 - DNA, 33 bp, Homo sapien
ttaaaatatttactgatccaaccatctgcatga

SEQ ID NO: 765723 - DNA, 33 bp, Homo sapien
cacacactgttctgcccatccaagtggcagctg

SEQ ID NO: 765724 - DNA, 33 bp, Homo sapien
cacacactgttctgcctatccaagtggcagctg

SEQ ID NO: 765725 - DNA, 33 bp, Homo sapien
caaaggactggaatcaaccaataacacacacac

SEQ ID NO: 765726 - DNA, 33 bp, Homo sapien
caaaggactggaatcatccaataacacacacac

SEQ ID NO: 765727 - DNA, 33 bp, Homo sapien
catatgcagaagagtaaagctgaacagtatttc

SEQ ID NO: 765728 - DNA, 33 bp, Homo sapien
catatgcagaagagtagagctgaacagtatttc

SEQ ID NO: 765729 - DNA, 33 bp, Homo sapien
gaagtcttataacacaagtgcagcttcataaag

SEQ ID NO: 765730 - DNA, 33 bp, Homo sapien
gaagtcttataacacaggtgcagcttcataaag

SEQ ID NO: 765731 - DNA, 33 bp, Homo sapien
tttcctctgtgtactaataactcttttaacata

SEQ ID NO: 765732 - DNA, 33 bp, Homo sapien
tttcctctgtgtactagtaactcttttaacata

SEQ ID NO: 765733 - DNA, 33 bp, Homo sapien
tgcacacccagaaggtgaagtgttggctccaag

SEQ ID NO: 765734 - DNA, 33 bp, Homo sapien
tgcacacccagaaggttaagtgttggctccaag

SEQ ID NO: 765735 - DNA, 33 bp, Homo sapien
agatcagctgggaggcacaaacctccaaattat

SEQ ID NO: 765736 - DNA, 33 bp, Homo sapien
agatcagctgggaggcgcaaacctccaaattat

SEQ ID NO: 765737 - DNA, 33 bp, Homo sapien
gttttatggcaaaacaaaattttcagagaaaaa

SEQ ID NO: 765738 - DNA, 33 bp, Homo sapien
gttttatggcaaaacagaattttcagagaaaaa

SEQ ID NO: 765739 - DNA, 33 bp, Homo sapien
tatttatcaaattgtacaagcctgaaacttcag

SEQ ID NO: 765740 - DNA, 33 bp, Homo sapien
tatttatcaaattgtataagcctgaaacttcag

SEQ ID NO: 765741 - DNA, 33 bp, Homo sapien
ctggctaacaccttaaccttgggcttctcagtc

SEQ ID NO: 765742 - DNA, 33 bp, Homo sapien
ctggctaacaccttaatcttgggcttctcagtc

SEQ ID NO: 765743 - DNA, 33 bp, Homo sapien
attcttagaactggaaccaagacagtcaagata

SEQ ID NO: 765744 - DNA, 33 bp, Homo sapien
attcttagaactggaatcaagacagtcaagata

SEQ ID NO: 765745 - DNA, 33 bp, Homo sapien
taccaattcagaaaaaagatgaagaagatgctc

SEQ ID NO: 765746 - DNA, 33 bp, Homo sapien
taccaattcagaaaaatgatgaagaagatgctc

SEQ ID NO: 765747 - DNA, 33 bp, Homo sapien
gggaaaaaagaagccagagagacttggctgaca

SEQ ID NO: 765748 - DNA, 33 bp, Homo sapien
gggaaaaaagaagccatagagacttggctgaca

SEQ ID NO: 765749 - DNA, 33 bp, Homo sapien
taagggaagtccattccagatgcagagtagaac

SEQ ID NO: 765750 - DNA, 33 bp, Homo sapien
taagggaagtccattctagatgcagagtagaac

SEQ ID NO: 765751 - DNA, 33 bp, Homo sapien
catgtgatccttccaacagtgtaacaaggaagg

SEQ ID NO: 765752 - DNA, 33 bp, Homo sapien
catgtgatccttccaatagtgtaacaaggaagg

SEQ ID NO: 765753 - DNA, 33 bp, Homo sapien
gattcacaggtatctcactaaattgaaacagga

SEQ ID NO: 765754 - DNA, 33 bp, Homo sapien
gattcacaggtatctcgctaaattgaaacagga

SEQ ID NO: 765755 - DNA, 33 bp, Homo sapien
tatctacagagcaatgaaatttttttggagaca

SEQ ID NO: 765756 - DNA, 33 bp, Homo sapien
tatctacagagcaatgcaatttttttggagaca

SEQ ID NO: 765757 - DNA, 33 bp, Homo sapien
tatacttgccaaaaaacgcatacactaatatgc

SEQ ID NO: 765758 - DNA, 33 bp, Homo sapien
tatacttgccaaaaaatgcatacactaatatgc

SEQ ID NO: 765759 - DNA, 33 bp, Homo sapien
attttacctataagtactacagagaagccaaaa

SEQ ID NO: 765760 - DNA, 33 bp, Homo sapien
attttacctataagtattacagagaagccaaaa

SEQ ID NO: 765761 - DNA, 33 bp, Homo sapien
tctagcaaacctaaaccgcatgaatgaacactt

SEQ ID NO: 765762 - DNA, 33 bp, Homo sapien
tctagcaaacctaaactgcatgaatgaacactt

SEQ ID NO: 765763 - DNA, 33 bp, Homo sapien
gtatattgtggtcagaatatagaagtaccacat

SEQ ID NO: 765764 - DNA, 33 bp, Homo sapien
gtatattgtggtcagagtatagaagtaccacat

SEQ ID NO: 765765 - DNA, 33 bp, Homo sapien
atcacaaatccatttgaagcatatggctgtatt

SEQ ID NO: 765766 - DNA, 33 bp, Homo sapien
atcacaaatccatttggagcatatggctgtatt

SEQ ID NO: 765767 - DNA, 33 bp, Homo sapien
ttcatataggggccacagaatgatgtagtgggc

SEQ ID NO: 765768 - DNA, 33 bp, Homo sapien
ttcatataggggccacggaatgatgtagtgggc

SEQ ID NO: 765769 - DNA, 33 bp, Homo sapien
aagcatcattatagaaccatcgaaaatagaaat

SEQ ID NO: 765770 - DNA, 33 bp, Homo sapien
aagcatcattatagaatcatcgaaaatagaaat

SEQ ID NO: 765771 - DNA, 33 bp, Homo sapien
gggacctgccaaaatcactcagatgcaagtatg

SEQ ID NO: 765772 - DNA, 33 bp, Homo sapien
gggacctgccaaaatcgctcagatgcaagtatg

SEQ ID NO: 765773 - DNA, 33 bp, Homo sapien
ggagataaggcatacacgggtaagaggagataa

SEQ ID NO: 765774 - DNA, 33 bp, Homo sapien
ggagataaggcatacatgggtaagaggagataa

SEQ ID NO: 765775 - DNA, 33 bp, Homo sapien
acaaggactgcgtagacgaaggtatgagccttt

SEQ ID NO: 765776 - DNA, 33 bp, Homo sapien
acaaggactgcgtagatgaaggtatgagccttt

SEQ ID NO: 765777 - DNA, 33 bp, Homo sapien
cccatctatccagtagaaaaaacgaaaaggcca

SEQ ID NO: 765778 - DNA, 33 bp, Homo sapien
cccatctatccagtaggaaaaacgaaaaggcca

SEQ ID NO: 765779 - DNA, 33 bp, Homo sapien
gctttcagaatgaacacgtgacttttataaagt

SEQ ID NO: 765780 - DNA, 33 bp, Homo sapien
gctttcagaatgaacatgtgacttttataaagt

SEQ ID NO: 765781 - DNA, 33 bp, Homo sapien
acatggaagatgtgcaacacagacctctcattt

SEQ ID NO: 765782 - DNA, 33 bp, Homo sapien
acatggaagatgtgcagcacagacctctcattt

SEQ ID NO: 765783 - DNA, 33 bp, Homo sapien
ctcctctagtgctcacagctaaacccttctgct

SEQ ID NO: 765784 - DNA, 33 bp, Homo sapien
ctcctctagtgctcacggctaaacccttctgct

SEQ ID NO: 765785 - DNA, 33 bp, Homo sapien
tcaagcactgtagaaaattgtaccttcgaaaca

SEQ ID NO: 765786 - DNA, 33 bp, Homo sapien
tcaagcactgtagaaagttgtaccttcgaaaca

SEQ ID NO: 765787 - DNA, 33 bp, Homo sapien
atgaagctaaagtaagccacagaggaaacttta

SEQ ID NO: 765788 - DNA, 33 bp, Homo sapien
atgaagctaaagtaagtcacagaggaaacttta

SEQ ID NO: 765789 - DNA, 33 bp, Homo sapien
ctggacaatcatgactcactctgctgacctgcc

SEQ ID NO: 765790 - DNA, 33 bp, Homo sapien
ctggacaatcatgacttactctgctgacctgcc

SEQ ID NO: 765791 - DNA, 33 bp, Homo sapien
tagatatggcacctaaaggtaggaaaaataatt

SEQ ID NO: 765792 - DNA, 33 bp, Homo sapien
tagatatggcacctaacggtaggaaaaataatt

SEQ ID NO: 765793 - DNA, 33 bp, Homo sapien
ctccataaaatttttcaaaaactagtgagcaaa

SEQ ID NO: 765794 - DNA, 33 bp, Homo sapien
ctccataaaatttttccaaaactagtgagcaaa

SEQ ID NO: 765795 - DNA, 33 bp, Homo sapien
tgctggaaatgctccaaatgtatcaaacaaggt

SEQ ID NO: 765796 - DNA, 33 bp, Homo sapien
tgctggaaatgctccagatgtatcaaacaaggt

SEQ ID NO: 765797 - DNA, 33 bp, Homo sapien
catgaaatacttaggaatactgagccaattagg

SEQ ID NO: 765798 - DNA, 33 bp, Homo sapien
catgaaatacttaggagtactgagccaattagg

SEQ ID NO: 765799 - DNA, 33 bp, Homo sapien
ataatggtaagcaaaaatcacaaatgtcaagga

SEQ ID NO: 765800 - DNA, 33 bp, Homo sapien
ataatggtaagcaaaagtcacaaatgtcaagga

SEQ ID NO: 765801 - DNA, 33 bp, Homo sapien
tgttcctctaaaagccacagagactgagccaat

SEQ ID NO: 765802 - DNA, 33 bp, Homo sapien
tgttcctctaaaagccgcagagactgagccaat

SEQ ID NO: 765803 - DNA, 33 bp, Homo sapien
gaagttttgagcggggcatgctgtgatttgatc

SEQ ID NO: 765804 - DNA, 33 bp, Homo sapien
gaagttttgagcgggggatgctgtgatttgatc

SEQ ID NO: 765805 - DNA, 33 bp, Homo sapien
ggtcaaacttaatctcaatcttgctgtctagcc

SEQ ID NO: 765806 - DNA, 33 bp, Homo sapien
ggtcaaacttaatctcgatcttgctgtctagcc

SEQ ID NO: 765807 - DNA, 33 bp, Homo sapien
aactatgtagtgattacgaaaacacagaaaaaa

SEQ ID NO: 765808 - DNA, 33 bp, Homo sapien
aactatgtagtgattatgaaaacacagaaaaaa

SEQ ID NO: 765809 - DNA, 33 bp, Homo sapien
gtgctgatcctgataaatgaaacagaaatgggt

SEQ ID NO: 765810 - DNA, 33 bp, Homo sapien
gtgctgatcctgataagtgaaacagaaatgggt

SEQ ID NO: 765811 - DNA, 33 bp, Homo sapien
ccaggttataaccagaacttccctggcagggcg

SEQ ID NO: 765812 - DNA, 33 bp, Homo sapien
ccaggttataaccagatcttccctggcagggcg

SEQ ID NO: 765813 - DNA, 33 bp, Homo sapien
aagtgtttgctgagttaaaaataaaagcgcttt

SEQ ID NO: 765814 - DNA, 33 bp, Homo sapien
aagtgtttgctgagttgaaaataaaagcgcttt

SEQ ID NO: 765815 - DNA, 33 bp, Homo sapien
caaaaaatgacaggacaagtgcagtggtttgag

SEQ ID NO: 765816 - DNA, 33 bp, Homo sapien
caaaaaatgacaggacgagtgcagtggtttgag

SEQ ID NO: 765817 - DNA, 33 bp, Homo sapien
atactactactactaccattaggttcgtgcaaa

SEQ ID NO: 765818 - DNA, 33 bp, Homo sapien
atactactactactactattaggttcgtgcaaa

SEQ ID NO: 765819 - DNA, 33 bp, Homo sapien
agatgtttactaaagacgtgtgaaaataagtga

SEQ ID NO: 765820 - DNA, 33 bp, Homo sapien
agatgtttactaaagatgtgtgaaaataagtga

SEQ ID NO: 765821 - DNA, 33 bp, Homo sapien
aatactaagatgcatacattgctgttttttctt

SEQ ID NO: 765822 - DNA, 33 bp, Homo sapien
aatactaagatgcatatattgctgttttttctt

SEQ ID NO: 765823 - DNA, 33 bp, Homo sapien
gatagggacattaggaacacaggtgacaaaagc

SEQ ID NO: 765824 - DNA, 33 bp, Homo sapien
gatagggacattaggagcacaggtgacaaaagc

SEQ ID NO: 765825 - DNA, 33 bp, Homo sapien
gatttacacaaagctgaaccacatagtgttgtg

SEQ ID NO: 765826 - DNA, 33 bp, Homo sapien
gatttacacaaagctggaccacatagtgttgtg

SEQ ID NO: 765827 - DNA, 33 bp, Homo sapien
atttgatggccaaccacatgtttgtgaacatta

SEQ ID NO: 765828 - DNA, 33 bp, Homo sapien
atttgatggccaaccagatgtttgtgaacatta

SEQ ID NO: 765829 - DNA, 33 bp, Homo sapien
accatccgtgtgatgaagatgctccgtttctaa

SEQ ID NO: 765830 - DNA, 33 bp, Homo sapien
accatccgtgtgatgaggatgctccgtttctaa

SEQ ID NO: 765831 - DNA, 33 bp, Homo sapien
ttgagggcctagtgcaatgactcatgtctgtaa

SEQ ID NO: 765832 - DNA, 33 bp, Homo sapien
ttgagggcctagtgcagtgactcatgtctgtaa

SEQ ID NO: 765833 - DNA, 33 bp, Homo sapien
ttgttttcccaggcaacgaaaacacaataaaag

SEQ ID NO: 765834 - DNA, 33 bp, Homo sapien
ttgttttcccaggcaatgaaaacacaataaaag

SEQ ID NO: 765835 - DNA, 33 bp, Homo sapien
attcatccaaccacgcaatgatctcgttcaacc

SEQ ID NO: 765836 - DNA, 33 bp, Homo sapien
attcatccaaccacgcgatgatctcgttcaacc

SEQ ID NO: 765837 - DNA, 33 bp, Homo sapien
ccagaatttaaacgcacatctgtccagctctaa

SEQ ID NO: 765838 - DNA, 33 bp, Homo sapien
ccagaatttaaacgcagatctgtccagctctaa

SEQ ID NO: 765839 - DNA, 33 bp, Homo sapien
actccagtttaaatacagaaaagaatgtgttca

SEQ ID NO: 765840 - DNA, 33 bp, Homo sapien
actccagtttaaatacggaaaagaatgtgttca

SEQ ID NO: 765841 - DNA, 33 bp, Homo sapien
agactattattttttaagttgctgttcacattc

SEQ ID NO: 765842 - DNA, 33 bp, Homo sapien
agactattattttttaggttgctgttcacattc

SEQ ID NO: 765843 - DNA, 33 bp, Homo sapien
tcatgcatcgctggaaagagagtagaatggtat

SEQ ID NO: 765844 - DNA, 33 bp, Homo sapien
tcatgcatcgctggaaggagagtagaatggtat

SEQ ID NO: 765845 - DNA, 33 bp, Homo sapien
ttcctgctctccattccattctcaacaaggcct

SEQ ID NO: 765846 - DNA, 33 bp, Homo sapien
ttcctgctctccattctattctcaacaaggcct

SEQ ID NO: 765847 - DNA, 33 bp, Homo sapien
tctctccagaaagacgccattttacattgtgaa

SEQ ID NO: 765848 - DNA, 33 bp, Homo sapien
tctctccagaaagacgtcattttacattgtgaa

SEQ ID NO: 765849 - DNA, 33 bp, Homo sapien
ctaagaatgtaactgcactctactctctagcat

SEQ ID NO: 765850 - DNA, 33 bp, Homo sapien
ctaagaatgtaactgccctctactctctagcat

SEQ ID NO: 765851 - DNA, 33 bp, Homo sapien
gatcctatcttactaaccatcagcattttgagt

SEQ ID NO: 765852 - DNA, 33 bp, Homo sapien
gatcctatcttactaatcatcagcattttgagt

SEQ ID NO: 765853 - DNA, 33 bp, Homo sapien
aatcagagaacattgaaagatgaagtgaatggc

SEQ ID NO: 765854 - DNA, 33 bp, Homo sapien
aatcagagaacattgatagatgaagtgaatggc

SEQ ID NO: 765855 - DNA, 33 bp, Homo sapien
ccagaagcaaagagtcaattgaggaacatgctg

SEQ ID NO: 765856 - DNA, 33 bp, Homo sapien
ccagaagcaaagagtccattgaggaacatgctg

SEQ ID NO: 765857 - DNA, 33 bp, Homo sapien
tgacttctaatgactaactcaaagtcaaggcaa

SEQ ID NO: 765858 - DNA, 33 bp, Homo sapien
tgacttctaatgactagctcaaagtcaaggcaa

SEQ ID NO: 765859 - DNA, 33 bp, Homo sapien
ttatttagggggactaagtgtttctgatatttt

SEQ ID NO: 765860 - DNA, 33 bp, Homo sapien
ttatttagggggactaggtgtttctgatatttt

SEQ ID NO: 765861 - DNA, 33 bp, Homo sapien
cttaaaggactggtaaaatcagaccatcttatt

SEQ ID NO: 765862 - DNA, 33 bp, Homo sapien
cttaaaggactggtaagatcagaccatcttatt

SEQ ID NO: 765863 - DNA, 33 bp, Homo sapien
aattgcaaaacctaataaaagtgactgcttggt

SEQ ID NO: 765864 - DNA, 33 bp, Homo sapien
aattgcaaaacctaatgaaagtgactgcttggt

SEQ ID NO: 765865 - DNA, 33 bp, Homo sapien
atctcttcatttcttcaagagattgtctattta

SEQ ID NO: 765866 - DNA, 33 bp, Homo sapien
atctcttcatttcttcgagagattgtctattta

SEQ ID NO: 765867 - DNA, 33 bp, Homo sapien
ctgaaaggagattgggaagaaccaattagtaat

SEQ ID NO: 765868 - DNA, 33 bp, Homo sapien
ctgaaaggagattgggcagaaccaattagtaat

SEQ ID NO: 765869 - DNA, 33 bp, Homo sapien
gaaggaagaggcaaagcctggtaggaaatcagc

SEQ ID NO: 765870 - DNA, 33 bp, Homo sapien
gaaggaagaggcaaaggctggtaggaaatcagc

SEQ ID NO: 765871 - DNA, 33 bp, Homo sapien
tgagactcactataaccctggaaggagcaagtc

SEQ ID NO: 765872 - DNA, 33 bp, Homo sapien
tgagactcactataactctggaaggagcaagtc

SEQ ID NO: 765873 - DNA, 33 bp, Homo sapien
ctaacttgatcaaaggaaaacccatgcaagaat

SEQ ID NO: 765874 - DNA, 33 bp, Homo sapien
ctaacttgatcaaaggcaaacccatgcaagaat

SEQ ID NO: 765875 - DNA, 33 bp, Homo sapien
tcagccacaggagtaccatgaacaggcgtggat

SEQ ID NO: 765876 - DNA, 33 bp, Homo sapien
tcagccacaggagtactatgaacaggcgtggat

SEQ ID NO: 765877 - DNA, 33 bp, Homo sapien
ccaggccctgggacagacatgtggctccaaatg

SEQ ID NO: 765878 - DNA, 33 bp, Homo sapien
ccaggccctgggacagccatgtggctccaaatg

SEQ ID NO: 765879 - DNA, 33 bp, Homo sapien
aggaactgatctaaaaaaaaagaacaagtgaag

SEQ ID NO: 765880 - DNA, 33 bp, Homo sapien
aggaactgatctaaaacaaaagaacaagtgaag

SEQ ID NO: 765881 - DNA, 33 bp, Homo sapien
atggagttcctctacaacaacaatttcttgtgc

SEQ ID NO: 765882 - DNA, 33 bp, Homo sapien
atggagttcctctacatcaacaatttcttgtgc

SEQ ID NO: 765883 - DNA, 33 bp, Homo sapien
aagtgctataactgctaaaaacctcaataacct

SEQ ID NO: 765884 - DNA, 33 bp, Homo sapien
aagtgctataactgctgaaaacctcaataacct

SEQ ID NO: 765885 - DNA, 33 bp, Homo sapien
tggtgccgggagtcaacgcttcacagaatgcta

SEQ ID NO: 765886 - DNA, 33 bp, Homo sapien
tggtgccgggagtcaatgcttcacagaatgcta

SEQ ID NO: 765887 - DNA, 33 bp, Homo sapien
aatgttgtgcaggggggatgatggcagagccta

SEQ ID NO: 765888 - DNA, 33 bp, Homo sapien
aatgttgtgcagggggtatgatggcagagccta

SEQ ID NO: 765889 - DNA, 33 bp, Homo sapien
gatgcccttctaagacaggatttatgggaaaga

SEQ ID NO: 765890 - DNA, 33 bp, Homo sapien
gatgcccttctaagaccggatttatgggaaaga

SEQ ID NO: 765891 - DNA, 33 bp, Homo sapien
aagggtttgcactaagaacaatgatgtggaccc

SEQ ID NO: 765892 - DNA, 33 bp, Homo sapien
aagggtttgcactaaggacaatgatgtggaccc

SEQ ID NO: 765893 - DNA, 33 bp, Homo sapien
ggaaggcttcacttccagcaaggtactgagtgc

SEQ ID NO: 765894 - DNA, 33 bp, Homo sapien
ggaaggcttcacttccggcaaggtactgagtgc

SEQ ID NO: 765895 - DNA, 33 bp, Homo sapien
ggtttctcagtccttaaaactattcacactcag

SEQ ID NO: 765896 - DNA, 33 bp, Homo sapien
ggtttctcagtccttacaactattcacactcag

SEQ ID NO: 765897 - DNA, 33 bp, Homo sapien
tggagaaatgattgcccgagagcaaaattccaa

SEQ ID NO: 765898 - DNA, 33 bp, Homo sapien
tggagaaatgattgcctgagagcaaaattccaa

SEQ ID NO: 765899 - DNA, 33 bp, Homo sapien
gagtatagagaaattgcacttcttttatggatg

SEQ ID NO: 765900 - DNA, 33 bp, Homo sapien
gagtatagagaaattggacttcttttatggatg

SEQ ID NO: 765901 - DNA, 33 bp, Homo sapien
gattctggctgttaataaggggacagttagtgc

SEQ ID NO: 765902 - DNA, 33 bp, Homo sapien
gattctggctgttaatgaggggacagttagtgc

SEQ ID NO: 765903 - DNA, 33 bp, Homo sapien
tggctcaggcaaggatgagtaagacagcaggac

SEQ ID NO: 765904 - DNA, 33 bp, Homo sapien
tggctcaggcaaggattagtaagacagcaggac

SEQ ID NO: 765905 - DNA, 33 bp, Homo sapien
taacaccctttctctcaatggctataaatctaa

SEQ ID NO: 765906 - DNA, 33 bp, Homo sapien
taacaccctttctctcgatggctataaatctaa

SEQ ID NO: 765907 - DNA, 33 bp, Homo sapien
ctgtttcctgaagcaaagagtaaggaagatagg

SEQ ID NO: 765908 - DNA, 33 bp, Homo sapien
ctgtttcctgaagcaaggagtaaggaagatagg

SEQ ID NO: 765909 - DNA, 33 bp, Homo sapien
caggatagattttgaacggatggagaattacta

SEQ ID NO: 765910 - DNA, 33 bp, Homo sapien
caggatagattttgaatggatggagaattacta

SEQ ID NO: 765911 - DNA, 33 bp, Homo sapien
aacaaagggtggcctacgctaaatgaagctgaa

SEQ ID NO: 765912 - DNA, 33 bp, Homo sapien
aacaaagggtggcctatgctaaatgaagctgaa

SEQ ID NO: 765913 - DNA, 33 bp, Homo sapien
tggactggatttatcacgcaagacctgattact

SEQ ID NO: 765914 - DNA, 33 bp, Homo sapien
tggactggatttatcatgcaagacctgattact

SEQ ID NO: 765915 - DNA, 33 bp, Homo sapien
aagggggtgcacggtagctgtcaatagaaattg

SEQ ID NO: 765916 - DNA, 33 bp, Homo sapien
aagggggtgcacggtatctgtcaatagaaattg

SEQ ID NO: 765917 - DNA, 33 bp, Homo sapien
caccctctctgtctccaccaacaggtacaagtc

SEQ ID NO: 765918 - DNA, 33 bp, Homo sapien
caccctctctgtctccgccaacaggtacaagtc

SEQ ID NO: 765919 - DNA, 33 bp, Homo sapien
gagggtgtgttactgacgtagcctcacaagtct

SEQ ID NO: 765920 - DNA, 33 bp, Homo sapien
gagggtgtgttactgatgtagcctcacaagtct

SEQ ID NO: 765921 - DNA, 33 bp, Homo sapien
tagagagtcagcttcacaagtacagcaatgtct

SEQ ID NO: 765922 - DNA, 33 bp, Homo sapien
tagagagtcagcttcataagtacagcaatgtct

SEQ ID NO: 765923 - DNA, 33 bp, Homo sapien
caactcctaaagcccaagtgagcatggtgtgtg

SEQ ID NO: 765924 - DNA, 33 bp, Homo sapien
caactcctaaagcccacgtgagcatggtgtgtg

SEQ ID NO: 765925 - DNA, 33 bp, Homo sapien
tcctgaaccactgagacggctttgaccctcaga

SEQ ID NO: 765926 - DNA, 33 bp, Homo sapien
tcctgaaccactgagatggctttgaccctcaga

SEQ ID NO: 765927 - DNA, 33 bp, Homo sapien
ctgagcactgggttcccattttacagaagttat

SEQ ID NO: 765928 - DNA, 33 bp, Homo sapien
ctgagcactgggttcctattttacagaagttat

SEQ ID NO: 765929 - DNA, 33 bp, Homo sapien
ccctgcttaccccgaaaccacagtgttgtctgt

SEQ ID NO: 765930 - DNA, 33 bp, Homo sapien
ccctgcttaccccgaatccacagtgttgtctgt

SEQ ID NO: 765931 - DNA, 33 bp, Homo sapien
agggaagagtcttaaccaggtgtcagtaaaact

SEQ ID NO: 765932 - DNA, 33 bp, Homo sapien
agggaagagtcttaactaggtgtcagtaaaact

SEQ ID NO: 765933 - DNA, 33 bp, Homo sapien
ctgaaagagcagcattcaagccaccagcaccaa

SEQ ID NO: 765934 - DNA, 33 bp, Homo sapien
ctgaaagagcagcattgaagccaccagcaccaa

SEQ ID NO: 765935 - DNA, 33 bp, Homo sapien
aagctgtgctgccaaaccttgtggctttaaata

SEQ ID NO: 765936 - DNA, 33 bp, Homo sapien
aagctgtgctgccaaatcttgtggctttaaata

SEQ ID NO: 765937 - DNA, 33 bp, Homo sapien
taagtccaagtctaccagggatcaacaaaccct

SEQ ID NO: 765938 - DNA, 33 bp, Homo sapien
taagtccaagtctaccggggatcaacaaaccct

SEQ ID NO: 765939 - DNA, 33 bp, Homo sapien
ggtttcccagatgtaacttacagctggccagcc

SEQ ID NO: 765940 - DNA, 33 bp, Homo sapien
ggtttcccagatgtaatttacagctggccagcc

SEQ ID NO: 765941 - DNA, 33 bp, Homo sapien
caaccaagtgactgaaatattaaaggacctctg

SEQ ID NO: 765942 - DNA, 33 bp, Homo sapien
caaccaagtgactgaactattaaaggacctctg

SEQ ID NO: 765943 - DNA, 33 bp, Homo sapien
tccttgttgcttaacccagacctgtcagcctct

SEQ ID NO: 765944 - DNA, 33 bp, Homo sapien
tccttgttgcttaacctagacctgtcagcctct

SEQ ID NO: 765945 - DNA, 33 bp, Homo sapien
agatctggttgttgtcaagtgtggcgcctccct

SEQ ID NO: 765946 - DNA, 33 bp, Homo sapien
agatctggttgttgtcgagtgtggcgcctccct

SEQ ID NO: 765947 - DNA, 33 bp, Homo sapien
ggtcatgacattttgccaccttaggccagttaa

SEQ ID NO: 765948 - DNA, 33 bp, Homo sapien
ggtcatgacattttgctaccttaggccagttaa

SEQ ID NO: 765949 - DNA, 33 bp, Homo sapien
tagcaaagagtgggtaagcttcacaaggaaaca

SEQ ID NO: 765950 - DNA, 33 bp, Homo sapien
tagcaaagagtgggtaggcttcacaaggaaaca

SEQ ID NO: 765951 - DNA, 33 bp, Homo sapien
aacatggatgctaagactaattctaacacctat

SEQ ID NO: 765952 - DNA, 33 bp, Homo sapien
aacatggatgctaagattaattctaacacctat

SEQ ID NO: 765953 - DNA, 33 bp, Homo sapien
tcattgaaaaatccaacgaaagctacaaacaca

SEQ ID NO: 765954 - DNA, 33 bp, Homo sapien
tcattgaaaaatccaatgaaagctacaaacaca

SEQ ID NO: 765955 - DNA, 33 bp, Homo sapien
gtttatgtttatttgcagaaatagatattttat

SEQ ID NO: 765956 - DNA, 33 bp, Homo sapien
gtttatgtttatttgcggaaatagatattttat

SEQ ID NO: 765957 - DNA, 33 bp, Homo sapien
tttctctacaagacaacaggatacactgctttc

SEQ ID NO: 765958 - DNA, 33 bp, Homo sapien
tttctctacaagacaataggatacactgctttc

SEQ ID NO: 765959 - DNA, 33 bp, Homo sapien
agacagggacttgcagaaactaacagggaccac

SEQ ID NO: 765960 - DNA, 33 bp, Homo sapien
agacagggacttgcaggaactaacagggaccac

SEQ ID NO: 765961 - DNA, 33 bp, Homo sapien
agagcatggccgcccaaatttttacctgtggct

SEQ ID NO: 765962 - DNA, 33 bp, Homo sapien
agagcatggccgcccatatttttacctgtggct

SEQ ID NO: 765963 - DNA, 33 bp, Homo sapien
acctgtatttccaccaatgccgtgatttctttt

SEQ ID NO: 765964 - DNA, 33 bp, Homo sapien
acctgtatttccaccagtgccgtgatttctttt

SEQ ID NO: 765965 - DNA, 33 bp, Homo sapien
cagtcctatttcaggacactcattcagaatgat

SEQ ID NO: 765966 - DNA, 33 bp, Homo sapien
cagtcctatttcaggatactcattcagaatgat

SEQ ID NO: 765967 - DNA, 33 bp, Homo sapien
aagtacaagaataagacgaactggagccttgtg

SEQ ID NO: 765968 - DNA, 33 bp, Homo sapien
aagtacaagaataagatgaactggagccttgtg

SEQ ID NO: 765969 - DNA, 33 bp, Homo sapien
ggtctaaaatactaaactcttcaaagaaagcca

SEQ ID NO: 765970 - DNA, 33 bp, Homo sapien
ggtctaaaatactaaagtcttcaaagaaagcca

SEQ ID NO: 765971 - DNA, 33 bp, Homo sapien
ctgcttcctatgtacaatatttccagactcatt

SEQ ID NO: 765972 - DNA, 33 bp, Homo sapien
ctgcttcctatgtacagtatttccagactcatt

SEQ ID NO: 765973 - DNA, 33 bp, Homo sapien
taaacacaacattaacagcagtcaaaccctcaa

SEQ ID NO: 765974 - DNA, 33 bp, Homo sapien
taaacacaacattaaccgcagtcaaaccctcaa

SEQ ID NO: 765975 - DNA, 33 bp, Homo sapien
atggatcctaactagacggaaatgtctgaaatg

SEQ ID NO: 765976 - DNA, 33 bp, Homo sapien
atggatcctaactagatggaaatgtctgaaatg

SEQ ID NO: 765977 - DNA, 33 bp, Homo sapien
aagcggtgtaataacaatatacctctaattcac

SEQ ID NO: 765978 - DNA, 33 bp, Homo sapien
aagcggtgtaataacagtatacctctaattcac

SEQ ID NO: 765979 - DNA, 33 bp, Homo sapien
ggtgcactccagtctgcagtcacctcagatttt

SEQ ID NO: 765980 - DNA, 33 bp, Homo sapien
ggtgcactccagtctgtagtcacctcagatttt

SEQ ID NO: 765981 - DNA, 33 bp, Homo sapien
ctgatgaggagatatcagaaagggcacccatat

SEQ ID NO: 765982 - DNA, 33 bp, Homo sapien
ctgatgaggagatatcggaaagggcacccatat

SEQ ID NO: 765983 - DNA, 33 bp, Homo sapien
ttaatatggtgtttggaaactttggttaagtca

SEQ ID NO: 765984 - DNA, 33 bp, Homo sapien
ttaatatggtgtttgggaactttggttaagtca

SEQ ID NO: 765985 - DNA, 33 bp, Homo sapien
aacttctcaaagtctacgttaagcaatatcttt

SEQ ID NO: 765986 - DNA, 33 bp, Homo sapien
aacttctcaaagtctatgttaagcaatatcttt

SEQ ID NO: 765987 - DNA, 33 bp, Homo sapien
aagggaaagccaagcaacagttgtgacaatttc

SEQ ID NO: 765988 - DNA, 33 bp, Homo sapien
aagggaaagccaagcatcagttgtgacaatttc

SEQ ID NO: 765989 - DNA, 33 bp, Homo sapien
cttagaaatacagttacagtggaaggactttaa

SEQ ID NO: 765990 - DNA, 33 bp, Homo sapien
cttagaaatacagttatagtggaaggactttaa

SEQ ID NO: 765991 - DNA, 33 bp, Homo sapien
gtctatttatgcagtcacattttatctttccat

SEQ ID NO: 765992 - DNA, 33 bp, Homo sapien
gtctatttatgcagtcgcattttatctttccat

SEQ ID NO: 765993 - DNA, 33 bp, Homo sapien
ttaaaattgagattcacatatttctggcacttt

SEQ ID NO: 765994 - DNA, 33 bp, Homo sapien
ttaaaattgagattcatatatttctggcacttt

SEQ ID NO: 765995 - DNA, 33 bp, Homo sapien
tagcctcttagcagataactactttccatccag

SEQ ID NO: 765996 - DNA, 33 bp, Homo sapien
tagcctcttagcagatgactactttccatccag

SEQ ID NO: 765997 - DNA, 33 bp, Homo sapien
ctccatatcgatgaagcagaaataatgccagaa

SEQ ID NO: 765998 - DNA, 33 bp, Homo sapien
ctccatatcgatgaagtagaaataatgccagaa

SEQ ID NO: 765999 - DNA, 33 bp, Homo sapien
gccaccaccacagagaatatcagttctggaaat

SEQ ID NO: 766000 - DNA, 33 bp, Homo sapien
gccaccaccacagagactatcagttctggaaat

SEQ ID NO: 766001 - DNA, 33 bp, Homo sapien
agagggttgtagtgaactcagatctgggtttga

SEQ ID NO: 766002 - DNA, 33 bp, Homo sapien
agagggttgtagtgaagtcagatctgggtttga

SEQ ID NO: 766003 - DNA, 33 bp, Homo sapien
tatgaaagaaaactgcgcttcctgcatccacct

SEQ ID NO: 766004 - DNA, 33 bp, Homo sapien
tatgaaagaaaactgctcttcctgcatccacct

SEQ ID NO: 766005 - DNA, 33 bp, Homo sapien
ggaatacacagtactacgcatatgtgtgttttt

SEQ ID NO: 766006 - DNA, 33 bp, Homo sapien
ggaatacacagtactaggcatatgtgtgttttt

SEQ ID NO: 766007 - DNA, 33 bp, Homo sapien
acatgcactggattaaatgagaaaacttatgtg

SEQ ID NO: 766008 - DNA, 33 bp, Homo sapien
acatgcactggattaactgagaaaacttatgtg

SEQ ID NO: 766009 - DNA, 33 bp, Homo sapien
attcaagacatgttggacacctgatcaactcta

SEQ ID NO: 766010 - DNA, 33 bp, Homo sapien
attcaagacatgttgggcacctgatcaactcta

SEQ ID NO: 766011 - DNA, 33 bp, Homo sapien
atccatgctgtacatactactggcccattagtc

SEQ ID NO: 766012 - DNA, 33 bp, Homo sapien
atccatgctgtacatattactggcccattagtc

SEQ ID NO: 766013 - DNA, 33 bp, Homo sapien
tcctttttgatttttaccatgtttttagaatta

SEQ ID NO: 766014 - DNA, 33 bp, Homo sapien
tcctttttgatttttagcatgtttttagaatta

SEQ ID NO: 766015 - DNA, 33 bp, Homo sapien
gcagcacaagtagtaaggacagtgaaaagggca

SEQ ID NO: 766016 - DNA, 33 bp, Homo sapien
gcagcacaagtagtaatgacagtgaaaagggca

SEQ ID NO: 766017 - DNA, 33 bp, Homo sapien
attataccactttgcccattttttatggtaaga

SEQ ID NO: 766018 - DNA, 33 bp, Homo sapien
attataccactttgcctattttttatggtaaga

SEQ ID NO: 766019 - DNA, 33 bp, Homo sapien
cttagtacattccacacaaatgcctcccaaaca

SEQ ID NO: 766020 - DNA, 33 bp, Homo sapien
cttagtacattccacataaatgcctcccaaaca

SEQ ID NO: 766021 - DNA, 33 bp, Homo sapien
ttgagcactaggtttgcaaaggaaaggaaatga

SEQ ID NO: 766022 - DNA, 33 bp, Homo sapien
ttgagcactaggtttgtaaaggaaaggaaatga

SEQ ID NO: 766023 - DNA, 33 bp, Homo sapien
ttgtattatgcaaaacccttacaaattaagagc

SEQ ID NO: 766024 - DNA, 33 bp, Homo sapien
ttgtattatgcaaaactcttacaaattaagagc

SEQ ID NO: 766025 - DNA, 33 bp, Homo sapien
aaggaacctaaacttacacctgtaatgaaggcc

SEQ ID NO: 766026 - DNA, 33 bp, Homo sapien
aaggaacctaaacttatacctgtaatgaaggcc

SEQ ID NO: 766027 - DNA, 33 bp, Homo sapien
tccattcgatagagaaaaaaaaatgcgtaggga

SEQ ID NO: 766028 - DNA, 33 bp, Homo sapien
tccattcgatagagaagaaaaaatgcgtaggga

SEQ ID NO: 766029 - DNA, 33 bp, Homo sapien
ctggctccagcagtgactaactagtgaccttga

SEQ ID NO: 766030 - DNA, 33 bp, Homo sapien
ctggctccagcagtgattaactagtgaccttga

SEQ ID NO: 766031 - DNA, 33 bp, Homo sapien
gagttctgtggggatcagagaagcagttacctc

SEQ ID NO: 766032 - DNA, 33 bp, Homo sapien
gagttctgtggggatcggagaagcagttacctc

SEQ ID NO: 766033 - DNA, 33 bp, Homo sapien
ggaaatgatagcagtacgtttccataaatagat

SEQ ID NO: 766034 - DNA, 33 bp, Homo sapien
ggaaatgatagcagtatgtttccataaatagat

SEQ ID NO: 766035 - DNA, 33 bp, Homo sapien
atttaaaagttgtataagtctggtagtttcttg

SEQ ID NO: 766036 - DNA, 33 bp, Homo sapien
atttaaaagttgtatatgtctggtagtttcttg

SEQ ID NO: 766037 - DNA, 33 bp, Homo sapien
ccttgtgcactgtctcaccccaatctccaggac

SEQ ID NO: 766038 - DNA, 33 bp, Homo sapien
ccttgtgcactgtctctccccaatctccaggac

SEQ ID NO: 766039 - DNA, 33 bp, Homo sapien
ttcaagcagaatatccaaatgactaattttaat

SEQ ID NO: 766040 - DNA, 33 bp, Homo sapien
ttcaagcagaatatccgaatgactaattttaat

SEQ ID NO: 766041 - DNA, 33 bp, Homo sapien
cccagaggcctcgttaccttaccttcaaattgg

SEQ ID NO: 766042 - DNA, 33 bp, Homo sapien
cccagaggcctcgttatcttaccttcaaattgg

SEQ ID NO: 766043 - DNA, 33 bp, Homo sapien
attgtgagttaaacgactattttacagcttctt

SEQ ID NO: 766044 - DNA, 33 bp, Homo sapien
attgtgagttaaacgattattttacagcttctt

SEQ ID NO: 766045 - DNA, 33 bp, Homo sapien
aaacaaagtgaaaaaactgtcccaccagtggta

SEQ ID NO: 766046 - DNA, 33 bp, Homo sapien
aaacaaagtgaaaaaagtgtcccaccagtggta

SEQ ID NO: 766047 - DNA, 33 bp, Homo sapien
tttaaatgtatttctcaaaagggctggcttaca

SEQ ID NO: 766048 - DNA, 33 bp, Homo sapien
tttaaatgtatttctcgaaagggctggcttaca

SEQ ID NO: 766049 - DNA, 33 bp, Homo sapien
acgtggctgttggatagccatctatagtgtcta

SEQ ID NO: 766050 - DNA, 33 bp, Homo sapien
acgtggctgttggatatccatctatagtgtcta

SEQ ID NO: 766051 - DNA, 33 bp, Homo sapien
gtttcttgtagcaacacatcattgggtcttgtt

SEQ ID NO: 766052 - DNA, 33 bp, Homo sapien
gtttcttgtagcaacagatcattgggtcttgtt

SEQ ID NO: 766053 - DNA, 33 bp, Homo sapien
actggtgattcaagacggtcctacttcttcagt

SEQ ID NO: 766054 - DNA, 33 bp, Homo sapien
actggtgattcaagactgtcctacttcttcagt

SEQ ID NO: 766055 - DNA, 33 bp, Homo sapien
aatagaatgtgaaccacaaatatatatcaccta

SEQ ID NO: 766056 - DNA, 33 bp, Homo sapien
aatagaatgtgaaccagaaatatatatcaccta

SEQ ID NO: 766057 - DNA, 33 bp, Homo sapien
ccagactgggtgatgacattggcagctggaatc

SEQ ID NO: 766058 - DNA, 33 bp, Homo sapien
ccagactgggtgatgatattggcagctggaatc

SEQ ID NO: 766059 - DNA, 33 bp, Homo sapien
gtttaatgttttgagagagagtccagtctgtag

SEQ ID NO: 766060 - DNA, 33 bp, Homo sapien
gtttaatgttttgagatagagtccagtctgtag

SEQ ID NO: 766061 - DNA, 33 bp, Homo sapien
tacctgaggccaggaacagaatcacctggaagg

SEQ ID NO: 766062 - DNA, 33 bp, Homo sapien
tacctgaggccaggaatagaatcacctggaagg

SEQ ID NO: 766063 - DNA, 33 bp, Homo sapien
aaagtctcttgtgtcactgaagaacataggagc

SEQ ID NO: 766064 - DNA, 33 bp, Homo sapien
aaagtctcttgtgtcattgaagaacataggagc

SEQ ID NO: 766065 - DNA, 33 bp, Homo sapien
aaacaggtttctcacacacctctcaaagaagtc

SEQ ID NO: 766066 - DNA, 33 bp, Homo sapien
aaacaggtttctcacagacctctcaaagaagtc

SEQ ID NO: 766067 - DNA, 33 bp, Homo sapien
taacatagctataatcacagcagaaatgcaatt

SEQ ID NO: 766068 - DNA, 33 bp, Homo sapien
taacatagctataatcgcagcagaaatgcaatt

SEQ ID NO: 766069 - DNA, 33 bp, Homo sapien
aatcaaaagcagcttaacagtttaacaattaaa

SEQ ID NO: 766070 - DNA, 33 bp, Homo sapien
aatcaaaagcagcttaccagtttaacaattaaa

SEQ ID NO: 766071 - DNA, 33 bp, Homo sapien
gctgaatgttctctccaacacgattacccccag

SEQ ID NO: 766072 - DNA, 33 bp, Homo sapien
gctgaatgttctctcccacacgattacccccag

SEQ ID NO: 766073 - DNA, 33 bp, Homo sapien
gtaagaagaaaatatgccagtcatcacttttga

SEQ ID NO: 766074 - DNA, 33 bp, Homo sapien
gtaagaagaaaatatggcagtcatcacttttga

SEQ ID NO: 766075 - DNA, 33 bp, Homo sapien
agatccaaacatgaacaattgaatattccccaa

SEQ ID NO: 766076 - DNA, 33 bp, Homo sapien
agatccaaacatgaaccattgaatattccccaa

SEQ ID NO: 766077 - DNA, 33 bp, Homo sapien
actgcactttggagacactcttgactcttgcct

SEQ ID NO: 766078 - DNA, 33 bp, Homo sapien
actgcactttggagacgctcttgactcttgcct

SEQ ID NO: 766079 - DNA, 33 bp, Homo sapien
atttgctttagcattaggttatcctgtagttta

SEQ ID NO: 766080 - DNA, 33 bp, Homo sapien
atttgctttagcattatgttatcctgtagttta

SEQ ID NO: 766081 - DNA, 33 bp, Homo sapien
ttaagttccttatagcaaatttcatcttgattc

SEQ ID NO: 766082 - DNA, 33 bp, Homo sapien
ttaagttccttatagcgaatttcatcttgattc

SEQ ID NO: 766083 - DNA, 33 bp, Homo sapien
gtatgttatttttgcaacgtcagccagaggatg

SEQ ID NO: 766084 - DNA, 33 bp, Homo sapien
gtatgttatttttgcagcgtcagccagaggatg

SEQ ID NO: 766085 - DNA, 33 bp, Homo sapien
ccacaccatcttccaaatccctccttccagatg

SEQ ID NO: 766086 - DNA, 33 bp, Homo sapien
ccacaccatcttccaagtccctccttccagatg

SEQ ID NO: 766087 - DNA, 33 bp, Homo sapien
acgggctgctccagggacaaataggcctcatgg

SEQ ID NO: 766088 - DNA, 33 bp, Homo sapien
acgggctgctccaggggcaaataggcctcatgg

SEQ ID NO: 766089 - DNA, 33 bp, Homo sapien
tacctatttgggaggccaatctagagaagaatg

SEQ ID NO: 766090 - DNA, 33 bp, Homo sapien
tacctatttgggaggcgaatctagagaagaatg

SEQ ID NO: 766091 - DNA, 33 bp, Homo sapien
aggttctggcaaggaaacttagcagcaatcaca

SEQ ID NO: 766092 - DNA, 33 bp, Homo sapien
aggttctggcaaggaagcttagcagcaatcaca

SEQ ID NO: 766093 - DNA, 33 bp, Homo sapien
agtgatgccttgggaactctgctctgagagctg

SEQ ID NO: 766094 - DNA, 33 bp, Homo sapien
agtgatgccttgggaattctgctctgagagctg

SEQ ID NO: 766095 - DNA, 33 bp, Homo sapien
gggatgtgttacaggcacaaggaagttcatgag

SEQ ID NO: 766096 - DNA, 33 bp, Homo sapien
gggatgtgttacaggcgcaaggaagttcatgag

SEQ ID NO: 766097 - DNA, 33 bp, Homo sapien
gatggctcaacaaaaacgagagttctcaggcct

SEQ ID NO: 766098 - DNA, 33 bp, Homo sapien
gatggctcaacaaaaatgagagttctcaggcct

SEQ ID NO: 766099 - DNA, 33 bp, Homo sapien
gatatataaatagaacaaactcctgatataagc

SEQ ID NO: 766100 - DNA, 33 bp, Homo sapien
gatatataaatagaacgaactcctgatataagc

SEQ ID NO: 766101 - DNA, 33 bp, Homo sapien
ggaagcaaagtcctctaaataagacctatatag

SEQ ID NO: 766102 - DNA, 33 bp, Homo sapien
ggaagcaaagtcctctgaataagacctatatag

SEQ ID NO: 766103 - DNA, 33 bp, Homo sapien
catttcaccttattacagcaaatgcctgcttcc

SEQ ID NO: 766104 - DNA, 33 bp, Homo sapien
catttcaccttattaccgcaaatgcctgcttcc

SEQ ID NO: 766105 - DNA, 33 bp, Homo sapien
ataataaattggtaaccgtaagtgctttcctga

SEQ ID NO: 766106 - DNA, 33 bp, Homo sapien
ataataaattggtaacggtaagtgctttcctga

SEQ ID NO: 766107 - DNA, 33 bp, Homo sapien
atgcccttcaacggtaagctagataaagagagt

SEQ ID NO: 766108 - DNA, 33 bp, Homo sapien
atgcccttcaacggtaggctagataaagagagt

SEQ ID NO: 766109 - DNA, 33 bp, Homo sapien
ctagaggtgaaacttcaacccaggccaactaac

SEQ ID NO: 766110 - DNA, 33 bp, Homo sapien
ctagaggtgaaacttcgacccaggccaactaac

SEQ ID NO: 766111 - DNA, 33 bp, Homo sapien
atcactggcaggattgcaccaggatgagtagaa

SEQ ID NO: 766112 - DNA, 33 bp, Homo sapien
atcactggcaggattgtaccaggatgagtagaa

SEQ ID NO: 766113 - DNA, 33 bp, Homo sapien
ccctgacaccttagggacattttcctggcatct

SEQ ID NO: 766114 - DNA, 33 bp, Homo sapien
ccctgacaccttaggggcattttcctggcatct

SEQ ID NO: 766115 - DNA, 33 bp, Homo sapien
gtccccatgcaggttcaagttagccgccttgcc

SEQ ID NO: 766116 - DNA, 33 bp, Homo sapien
gtccccatgcaggttcgagttagccgccttgcc

SEQ ID NO: 766117 - DNA, 33 bp, Homo sapien
gtagtagatttcaccaacccagccttgagacaa

SEQ ID NO: 766118 - DNA, 33 bp, Homo sapien
gtagtagatttcaccatcccagccttgagacaa

SEQ ID NO: 766119 - DNA, 33 bp, Homo sapien
tgcatactaagacaccaaaaatgcgatttggaa

SEQ ID NO: 766120 - DNA, 33 bp, Homo sapien
tgcatactaagacaccgaaaatgcgatttggaa

SEQ ID NO: 766121 - DNA, 33 bp, Homo sapien
accagtttgtgtttcacgcgtgggctttggcca

SEQ ID NO: 766122 - DNA, 33 bp, Homo sapien
accagtttgtgtttcatgcgtgggctttggcca

SEQ ID NO: 766123 - DNA, 33 bp, Homo sapien
cttgtcaatgcccatcactgctactcactcata

SEQ ID NO: 766124 - DNA, 33 bp, Homo sapien
cttgtcaatgcccatcgctgctactcactcata

SEQ ID NO: 766125 - DNA, 33 bp, Homo sapien
ataattgttctctagacgactgctatgtgaaag

SEQ ID NO: 766126 - DNA, 33 bp, Homo sapien
ataattgttctctagatgactgctatgtgaaag

SEQ ID NO: 766127 - DNA, 33 bp, Homo sapien
ggagtggttttatatgcaaaaacacagacattg

SEQ ID NO: 766128 - DNA, 33 bp, Homo sapien
ggagtggttttatatggaaaaacacagacattg

SEQ ID NO: 766129 - DNA, 33 bp, Homo sapien
tggaaaaaagaaaatgaaattcttgcctcaagt

SEQ ID NO: 766130 - DNA, 33 bp, Homo sapien
tggaaaaaagaaaatggaattcttgcctcaagt

SEQ ID NO: 766131 - DNA, 33 bp, Homo sapien
tccctctaaacaggaaaggcattcaaatagcag

SEQ ID NO: 766132 - DNA, 33 bp, Homo sapien
tccctctaaacaggaagggcattcaaatagcag

SEQ ID NO: 766133 - DNA, 33 bp, Homo sapien
cttgcaattcctttccccaaattctctgcttat

SEQ ID NO: 766134 - DNA, 33 bp, Homo sapien
cttgcaattcctttcctcaaattctctgcttat

SEQ ID NO: 766135 - DNA, 33 bp, Homo sapien
ccaatcagcaaatatccctacacactctggatc

SEQ ID NO: 766136 - DNA, 33 bp, Homo sapien
ccaatcagcaaatatctctacacactctggatc

SEQ ID NO: 766137 - DNA, 33 bp, Homo sapien
aagtgttagatggttggatggttcattagggat

SEQ ID NO: 766138 - DNA, 33 bp, Homo sapien
aagtgttagatggttgtatggttcattagggat

SEQ ID NO: 766139 - DNA, 33 bp, Homo sapien
attgtgaaactgaaaccatactttgagaaacag

SEQ ID NO: 766140 - DNA, 33 bp, Homo sapien
attgtgaaactgaaactatactttgagaaacag

SEQ ID NO: 766141 - DNA, 33 bp, Homo sapien
cccaatccttttccacagcgccactctgacctt

SEQ ID NO: 766142 - DNA, 33 bp, Homo sapien
cccaatccttttccacggcgccactctgacctt

SEQ ID NO: 766143 - DNA, 33 bp, Homo sapien
ccacagaattcaaaccaagatctgaagcataat

SEQ ID NO: 766144 - DNA, 33 bp, Homo sapien
ccacagaattcaaaccgagatctgaagcataat

SEQ ID NO: 766145 - DNA, 33 bp, Homo sapien
aggagacagggtagcaagagaggaaaggttgaa

SEQ ID NO: 766146 - DNA, 33 bp, Homo sapien
aggagacagggtagcacgagaggaaaggttgaa

SEQ ID NO: 766147 - DNA, 33 bp, Homo sapien
aggggtacgactttaacagaatggctaaaggag

SEQ ID NO: 766148 - DNA, 33 bp, Homo sapien
aggggtacgactttaatagaatggctaaaggag

SEQ ID NO: 766149 - DNA, 33 bp, Homo sapien
catgtacaagccataactgtaaagtttttacat

SEQ ID NO: 766150 - DNA, 33 bp, Homo sapien
catgtacaagccataattgtaaagtttttacat

SEQ ID NO: 766151 - DNA, 33 bp, Homo sapien
ttgattccaggtagtaggtataagagtgtacac

SEQ ID NO: 766152 - DNA, 33 bp, Homo sapien
ttgattccaggtagtatgtataagagtgtacac

SEQ ID NO: 766153 - DNA, 33 bp, Homo sapien
catggcggctcccccccaactggtcagggccac

SEQ ID NO: 766154 - DNA, 33 bp, Homo sapien
catggcggctccccccgaactggtcagggccac

SEQ ID NO: 766155 - DNA, 33 bp, Homo sapien
ttaactccagcagagactcaataccatgagcca

SEQ ID NO: 766156 - DNA, 33 bp, Homo sapien
ttaactccagcagagagtcaataccatgagcca

SEQ ID NO: 766157 - DNA, 33 bp, Homo sapien
gtaagaagccaagataaagagttctggacaagc

SEQ ID NO: 766158 - DNA, 33 bp, Homo sapien
gtaagaagccaagatagagagttctggacaagc

SEQ ID NO: 766159 - DNA, 33 bp, Homo sapien
cagctgggtacggccaatggaatgcgattgcag

SEQ ID NO: 766160 - DNA, 33 bp, Homo sapien
cagctgggtacggccagtggaatgcgattgcag

SEQ ID NO: 766161 - DNA, 33 bp, Homo sapien
aactgctttttggcaacgtgacatgggtcagct

SEQ ID NO: 766162 - DNA, 33 bp, Homo sapien
aactgctttttggcaatgtgacatgggtcagct

SEQ ID NO: 766163 - DNA, 33 bp, Homo sapien
ctttctgcctgcccagaattcctgtggtttcca

SEQ ID NO: 766164 - DNA, 33 bp, Homo sapien
ctttctgcctgcccaggattcctgtggtttcca

SEQ ID NO: 766165 - DNA, 33 bp, Homo sapien
acagtttgctgacggaactgtggttaaaccttc

SEQ ID NO: 766166 - DNA, 33 bp, Homo sapien
acagtttgctgacggagctgtggttaaaccttc

SEQ ID NO: 766167 - DNA, 33 bp, Homo sapien
gaaagtcccaggaatgaataatttctaacatca

SEQ ID NO: 766168 - DNA, 33 bp, Homo sapien
gaaagtcccaggaatgtataatttctaacatca

SEQ ID NO: 766169 - DNA, 33 bp, Homo sapien
gctgtatgtgtaataaacattggagtcagtgcc

SEQ ID NO: 766170 - DNA, 33 bp, Homo sapien
gctgtatgtgtaataaccattggagtcagtgcc

SEQ ID NO: 766171 - DNA, 33 bp, Homo sapien
tctgctcacctccccacataaccctgagctgta

SEQ ID NO: 766172 - DNA, 33 bp, Homo sapien
tctgctcacctccccatataaccctgagctgta

SEQ ID NO: 766173 - DNA, 33 bp, Homo sapien
cttattttcagcatctgtgagattatttcatta

SEQ ID NO: 766174 - DNA, 33 bp, Homo sapien
cttattttcagcatctttgagattatttcatta

SEQ ID NO: 766175 - DNA, 33 bp, Homo sapien
gatccttggtcagttacactccctgtacttgga

SEQ ID NO: 766176 - DNA, 33 bp, Homo sapien
gatccttggtcagttatactccctgtacttgga

SEQ ID NO: 766177 - DNA, 33 bp, Homo sapien
attacacctgtcagtacaacagctttcttcttg

SEQ ID NO: 766178 - DNA, 33 bp, Homo sapien
attacacctgtcagtataacagctttcttcttg

SEQ ID NO: 766179 - DNA, 33 bp, Homo sapien
cacatgaatacaaagaaggaaacgacagatact

SEQ ID NO: 766180 - DNA, 33 bp, Homo sapien
cacatgaatacaaagagggaaacgacagatact

SEQ ID NO: 766181 - DNA, 33 bp, Homo sapien
atccatgacaaggaaacaaaccataaggagaga

SEQ ID NO: 766182 - DNA, 33 bp, Homo sapien
atccatgacaaggaaataaaccataaggagaga

SEQ ID NO: 766183 - DNA, 33 bp, Homo sapien
accaataagcgcagccacatggacctacccacc

SEQ ID NO: 766184 - DNA, 33 bp, Homo sapien
accaataagcgcagccgcatggacctacccacc

SEQ ID NO: 766185 - DNA, 33 bp, Homo sapien
gagttgcaacatctcaactggcttcatggatca

SEQ ID NO: 766186 - DNA, 33 bp, Homo sapien
gagttgcaacatctcagctggcttcatggatca

SEQ ID NO: 766187 - DNA, 33 bp, Homo sapien
ggaagctgcaatccacagatggaagtttttctt

SEQ ID NO: 766188 - DNA, 33 bp, Homo sapien
ggaagctgcaatccacggatggaagtttttctt

SEQ ID NO: 766189 - DNA, 33 bp, Homo sapien
aatcatgtaaatttcaacataggatagacaaca

SEQ ID NO: 766190 - DNA, 33 bp, Homo sapien
aatcatgtaaatttcatcataggatagacaaca

SEQ ID NO: 766191 - DNA, 33 bp, Homo sapien
agagaagactgaaaaaatgtctactggtactat

SEQ ID NO: 766192 - DNA, 33 bp, Homo sapien
agagaagactgaaaaactgtctactggtactat

SEQ ID NO: 766193 - DNA, 33 bp, Homo sapien
agatattgatgacttccgaacggcacaaaaaga

SEQ ID NO: 766194 - DNA, 33 bp, Homo sapien
agatattgatgacttctgaacggcacaaaaaga

SEQ ID NO: 766195 - DNA, 33 bp, Homo sapien
gtcacaataaaaataaaagacagcaaatggaga

SEQ ID NO: 766196 - DNA, 33 bp, Homo sapien
gtcacaataaaaataagagacagcaaatggaga

SEQ ID NO: 766197 - DNA, 33 bp, Homo sapien
tctattcggccacacaaaaacatagttccaact

SEQ ID NO: 766198 - DNA, 33 bp, Homo sapien
tctattcggccacacataaacatagttccaact

SEQ ID NO: 766199 - DNA, 33 bp, Homo sapien
gatggaagaaaactggaaaatatgaggagttca

SEQ ID NO: 766200 - DNA, 33 bp, Homo sapien
gatggaagaaaactgggaaatatgaggagttca

SEQ ID NO: 766201 - DNA, 33 bp, Homo sapien
taagaaactcctgccaaaccagtagcattgatg

SEQ ID NO: 766202 - DNA, 33 bp, Homo sapien
taagaaactcctgccagaccagtagcattgatg

SEQ ID NO: 766203 - DNA, 33 bp, Homo sapien
aaggccagatcatcaaagaaagagctggctggg

SEQ ID NO: 766204 - DNA, 33 bp, Homo sapien
aaggccagatcatcaaggaaagagctggctggg

SEQ ID NO: 766205 - DNA, 33 bp, Homo sapien
ctcacatcactcagaaaggcgattattaaaaag

SEQ ID NO: 766206 - DNA, 33 bp, Homo sapien
ctcacatcactcagaatggcgattattaaaaag

SEQ ID NO: 766207 - DNA, 33 bp, Homo sapien
aaattggtaaaacaccaaaatctgcttggaggc

SEQ ID NO: 766208 - DNA, 33 bp, Homo sapien
aaattggtaaaacaccgaaatctgcttggaggc

SEQ ID NO: 766209 - DNA, 33 bp, Homo sapien
cccttctgcgctttgacgctgctgtctctactg

SEQ ID NO: 766210 - DNA, 33 bp, Homo sapien
cccttctgcgctttgatgctgctgtctctactg

SEQ ID NO: 766211 - DNA, 33 bp, Homo sapien
gattaaatgaaccagaatctctgcttgaaatag

SEQ ID NO: 766212 - DNA, 33 bp, Homo sapien
gattaaatgaaccagattctctgcttgaaatag

SEQ ID NO: 766213 - DNA, 33 bp, Homo sapien
cccaggggggctataccgcttgattggactttc

SEQ ID NO: 766214 - DNA, 33 bp, Homo sapien
cccaggggggctatactgcttgattggactttc

SEQ ID NO: 766215 - DNA, 33 bp, Homo sapien
ggactgggagtgccaactctagactctggtctg

SEQ ID NO: 766216 - DNA, 33 bp, Homo sapien
ggactgggagtgccaattctagactctggtctg

SEQ ID NO: 766217 - DNA, 33 bp, Homo sapien
actgaggcctggggtacgagtcaactagtcatc

SEQ ID NO: 766218 - DNA, 33 bp, Homo sapien
actgaggcctggggtaggagtcaactagtcatc

SEQ ID NO: 766219 - DNA, 33 bp, Homo sapien
ccaaatcttgaatgtaggttttaacgcttaaac

SEQ ID NO: 766220 - DNA, 33 bp, Homo sapien
ccaaatcttgaatgtatgttttaacgcttaaac

SEQ ID NO: 766221 - DNA, 33 bp, Homo sapien
attacaatgtaaaataaatccaagtgtggctgc

SEQ ID NO: 766222 - DNA, 33 bp, Homo sapien
attacaatgtaaaatagatccaagtgtggctgc

SEQ ID NO: 766223 - DNA, 33 bp, Homo sapien
aaagtggactagaagcgcaagttaccttctcaa

SEQ ID NO: 766224 - DNA, 33 bp, Homo sapien
aaagtggactagaagctcaagttaccttctcaa

SEQ ID NO: 766225 - DNA, 33 bp, Homo sapien
atcttttgaatcaccaaatctcaagtgtacttt

SEQ ID NO: 766226 - DNA, 33 bp, Homo sapien
atcttttgaatcaccacatctcaagtgtacttt

SEQ ID NO: 766227 - DNA, 33 bp, Homo sapien
ctctatttcagcagttgaaacttcaaaacttca

SEQ ID NO: 766228 - DNA, 33 bp, Homo sapien
ctctatttcagcagtttaaacttcaaaacttca

SEQ ID NO: 766229 - DNA, 33 bp, Homo sapien
tgtgcctaagcgttgaaactcagcttcaagtca

SEQ ID NO: 766230 - DNA, 33 bp, Homo sapien
tgtgcctaagcgttgatactcagcttcaagtca

SEQ ID NO: 766231 - DNA, 33 bp, Homo sapien
gcgtatatgtttgtcaatctaaggatttctgta

SEQ ID NO: 766232 - DNA, 33 bp, Homo sapien
gcgtatatgtttgtcagtctaaggatttctgta

SEQ ID NO: 766233 - DNA, 33 bp, Homo sapien
atggtcccttcttttacacacatcgcattactt

SEQ ID NO: 766234 - DNA, 33 bp, Homo sapien
atggtcccttcttttatacacatcgcattactt

SEQ ID NO: 766235 - DNA, 33 bp, Homo sapien
gaactgtctttctacaacatcacacttgctctc

SEQ ID NO: 766236 - DNA, 33 bp, Homo sapien
gaactgtctttctacagcatcacacttgctctc

SEQ ID NO: 766237 - DNA, 33 bp, Homo sapien
ccacgtggtcaatgacaaggagctgttgctgtt

SEQ ID NO: 766238 - DNA, 33 bp, Homo sapien
ccacgtggtcaatgactaggagctgttgctgtt

SEQ ID NO: 766239 - DNA, 33 bp, Homo sapien
ccagtgcaaagcaaacacagtacacccattcca

SEQ ID NO: 766240 - DNA, 33 bp, Homo sapien
ccagtgcaaagcaaacgcagtacacccattcca

SEQ ID NO: 766241 - DNA, 33 bp, Homo sapien
ttctgacattcaaaccggagttcaaatattggt

SEQ ID NO: 766242 - DNA, 33 bp, Homo sapien
ttctgacattcaaacctgagttcaaatattggt

SEQ ID NO: 766243 - DNA, 33 bp, Homo sapien
ggtggagaggcaatcaagatggtggaagtcctg

SEQ ID NO: 766244 - DNA, 33 bp, Homo sapien
ggtggagaggcaatcaggatggtggaagtcctg

SEQ ID NO: 766245 - DNA, 33 bp, Homo sapien
tattaatctttcacacactttgttaaaagctta

SEQ ID NO: 766246 - DNA, 33 bp, Homo sapien
tattaatctttcacacgctttgttaaaagctta

SEQ ID NO: 766247 - DNA, 33 bp, Homo sapien
cctttcctcaaaaataactctttgaacattatt

SEQ ID NO: 766248 - DNA, 33 bp, Homo sapien
cctttcctcaaaaatagctctttgaacattatt

SEQ ID NO: 766249 - DNA, 33 bp, Homo sapien
tgaagtaactctgcaaatcttggtaacttgaaa

SEQ ID NO: 766250 - DNA, 33 bp, Homo sapien
tgaagtaactctgcaagtcttggtaacttgaaa

SEQ ID NO: 766251 - DNA, 33 bp, Homo sapien
aataaccctttctgaaaaatgttatgcagcata

SEQ ID NO: 766252 - DNA, 33 bp, Homo sapien
aataaccctttctgaagaatgttatgcagcata

SEQ ID NO: 766253 - DNA, 33 bp, Homo sapien
acaccgccacacattaaaggcctaaaagctgtt

SEQ ID NO: 766254 - DNA, 33 bp, Homo sapien
acaccgccacacattagaggcctaaaagctgtt

SEQ ID NO: 766255 - DNA, 33 bp, Homo sapien
gagataaactgtgttaagaagtcaagtgattgg

SEQ ID NO: 766256 - DNA, 33 bp, Homo sapien
gagataaactgtgttacgaagtcaagtgattgg

SEQ ID NO: 766257 - DNA, 33 bp, Homo sapien
ttttggcttctttgccagagagtatcaggtgta

SEQ ID NO: 766258 - DNA, 33 bp, Homo sapien
ttttggcttctttgccggagagtatcaggtgta

SEQ ID NO: 766259 - DNA, 33 bp, Homo sapien
tgactctccagttcaacgagagatgtcaaacta

SEQ ID NO: 766260 - DNA, 33 bp, Homo sapien
tgactctccagttcaatgagagatgtcaaacta

SEQ ID NO: 766261 - DNA, 33 bp, Homo sapien
tcccgcgatcttcccaatatgtggtttgccaga

SEQ ID NO: 766262 - DNA, 33 bp, Homo sapien
tcccgcgatcttcccagtatgtggtttgccaga

SEQ ID NO: 766263 - DNA, 33 bp, Homo sapien
aattagtgagtcagaactaaagagtgttttaaa

SEQ ID NO: 766264 - DNA, 33 bp, Homo sapien
aattagtgagtcagaattaaagagtgttttaaa

SEQ ID NO: 766265 - DNA, 33 bp, Homo sapien
gaaaagccttaattaactgtatgaactaaataa

SEQ ID NO: 766266 - DNA, 33 bp, Homo sapien
gaaaagccttaattaattgtatgaactaaataa

SEQ ID NO: 766267 - DNA, 33 bp, Homo sapien
ctattataccatagcacgatccccacagaaaag

SEQ ID NO: 766268 - DNA, 33 bp, Homo sapien
ctattataccatagcatgatccccacagaaaag

SEQ ID NO: 766269 - DNA, 33 bp, Homo sapien
taaacaatgtgtctgacgccatggagactctta

SEQ ID NO: 766270 - DNA, 33 bp, Homo sapien
taaacaatgtgtctgaggccatggagactctta

SEQ ID NO: 766271 - DNA, 33 bp, Homo sapien
gggtattatcattatccaggtggtccgggatga

SEQ ID NO: 766272 - DNA, 33 bp, Homo sapien
gggtattatcattatctaggtggtccgggatga

SEQ ID NO: 766273 - DNA, 33 bp, Homo sapien
gggtgaggctgagctacgccgacactgggaaga

SEQ ID NO: 766274 - DNA, 33 bp, Homo sapien
gggtgaggctgagctatgccgacactgggaaga

SEQ ID NO: 766275 - DNA, 33 bp, Homo sapien
taactttccctagatccgaaactcaattccact

SEQ ID NO: 766276 - DNA, 33 bp, Homo sapien
taactttccctagatctgaaactcaattccact

SEQ ID NO: 766277 - DNA, 33 bp, Homo sapien
tatttgccccctgtgaaacgttctgggaagtgc

SEQ ID NO: 766278 - DNA, 33 bp, Homo sapien
tatttgccccctgtgagacgttctgggaagtgc

SEQ ID NO: 766279 - DNA, 33 bp, Homo sapien
ggaggtctgtggaaagccccttatggttaaggg

SEQ ID NO: 766280 - DNA, 33 bp, Homo sapien
ggaggtctgtggaaaggcccttatggttaaggg

SEQ ID NO: 766281 - DNA, 33 bp, Homo sapien
ttaagcacttttacacacatcatttaatcctcg

SEQ ID NO: 766282 - DNA, 33 bp, Homo sapien
ttaagcacttttacacgcatcatttaatcctcg

SEQ ID NO: 766283 - DNA, 33 bp, Homo sapien
aaaataatttagaacaagtaatggctgcagaac

SEQ ID NO: 766284 - DNA, 33 bp, Homo sapien
aaaataatttagaacacgtaatggctgcagaac

SEQ ID NO: 766285 - DNA, 33 bp, Homo sapien
actggaataattgccccatctttagtggagatt

SEQ ID NO: 766286 - DNA, 33 bp, Homo sapien
actggaataattgccctatctttagtggagatt

SEQ ID NO: 766287 - DNA, 33 bp, Homo sapien
ctgcctcatgtcatcaacctctgtacttttcct

SEQ ID NO: 766288 - DNA, 33 bp, Homo sapien
ctgcctcatgtcatcatcctctgtacttttcct

SEQ ID NO: 766289 - DNA, 33 bp, Homo sapien
aagaaagaatcagaaacatttaagccttctgca

SEQ ID NO: 766290 - DNA, 33 bp, Homo sapien
aagaaagaatcagaaatatttaagccttctgca

SEQ ID NO: 766291 - DNA, 33 bp, Homo sapien
ttgggactctaagcaacgtttcctaaactgcgg

SEQ ID NO: 766292 - DNA, 33 bp, Homo sapien
ttgggactctaagcaatgtttcctaaactgcgg

SEQ ID NO: 766293 - DNA, 33 bp, Homo sapien
tccaaatgtttccttcacgtcatctctcatgtc

SEQ ID NO: 766294 - DNA, 33 bp, Homo sapien
tccaaatgtttccttcccgtcatctctcatgtc

SEQ ID NO: 766295 - DNA, 33 bp, Homo sapien
tcagcctctatggggaatactttgggaactgtc

SEQ ID NO: 766296 - DNA, 33 bp, Homo sapien
tcagcctctatggggagtactttgggaactgtc

SEQ ID NO: 766297 - DNA, 33 bp, Homo sapien
ctgatggtgatacacacggtatttggagggcaa

SEQ ID NO: 766298 - DNA, 33 bp, Homo sapien
ctgatggtgatacacatggtatttggagggcaa

SEQ ID NO: 766299 - DNA, 33 bp, Homo sapien
gcccaagtagctctaaagtcccttctctcatct

SEQ ID NO: 766300 - DNA, 33 bp, Homo sapien
gcccaagtagctctaaggtcccttctctcatct

SEQ ID NO: 766301 - DNA, 33 bp, Homo sapien
aagaacagtatggtcccgatggtaccaacggag

SEQ ID NO: 766302 - DNA, 33 bp, Homo sapien
aagaacagtatggtcctgatggtaccaacggag

SEQ ID NO: 766303 - DNA, 33 bp, Homo sapien
tttgctactgttctgactagtgacgttagctct

SEQ ID NO: 766304 - DNA, 33 bp, Homo sapien
tttgctactgttctgattagtgacgttagctct

SEQ ID NO: 766305 - DNA, 33 bp, Homo sapien
gaatctcaaacagaaaagatgagatgggctgtg

SEQ ID NO: 766306 - DNA, 33 bp, Homo sapien
gaatctcaaacagaaacgatgagatgggctgtg

SEQ ID NO: 766307 - DNA, 33 bp, Homo sapien
agtccctgatagcaagcaactatgatggggaca

SEQ ID NO: 766308 - DNA, 33 bp, Homo sapien
agtccctgatagcaaggaactatgatggggaca

SEQ ID NO: 766309 - DNA, 33 bp, Homo sapien
aaaatgaagggccccacgctctccaccaccacc

SEQ ID NO: 766310 - DNA, 33 bp, Homo sapien
aaaatgaagggccccatgctctccaccaccacc

SEQ ID NO: 766311 - DNA, 33 bp, Homo sapien
cttgcccgtaagtgagccaatcctgcagatttg

SEQ ID NO: 766312 - DNA, 33 bp, Homo sapien
cttgcccgtaagtgagtcaatcctgcagatttg

SEQ ID NO: 766313 - DNA, 33 bp, Homo sapien
tgtacaaagcccctgacacgtagcagaagtcaa

SEQ ID NO: 766314 - DNA, 33 bp, Homo sapien
tgtacaaagcccctgagacgtagcagaagtcaa

SEQ ID NO: 766315 - DNA, 33 bp, Homo sapien
acatgcatggttccaaccaccctttaagtccta

SEQ ID NO: 766316 - DNA, 33 bp, Homo sapien
acatgcatggttccaatcaccctttaagtccta

SEQ ID NO: 766317 - DNA, 33 bp, Homo sapien
agccgctgctacaacccaactgggccaattgct

SEQ ID NO: 766318 - DNA, 33 bp, Homo sapien
agccgctgctacaaccgaactgggccaattgct

SEQ ID NO: 766319 - DNA, 33 bp, Homo sapien
gctaaacatcctataacgtgtaggacaaccccc

SEQ ID NO: 766320 - DNA, 33 bp, Homo sapien
gctaaacatcctataatgtgtaggacaaccccc

SEQ ID NO: 766321 - DNA, 33 bp, Homo sapien
gaactgaatgagagacacaaatgcaggcatacc

SEQ ID NO: 766322 - DNA, 33 bp, Homo sapien
gaactgaatgagagacgcaaatgcaggcatacc

SEQ ID NO: 766323 - DNA, 33 bp, Homo sapien
tgataatcaccttcaaccaaaaagcaaatgact

SEQ ID NO: 766324 - DNA, 33 bp, Homo sapien
tgataatcaccttcaatcaaaaagcaaatgact

SEQ ID NO: 766325 - DNA, 33 bp, Homo sapien
actagttgttacctaacgctaccagagaaatta

SEQ ID NO: 766326 - DNA, 33 bp, Homo sapien
actagttgttacctaatgctaccagagaaatta

SEQ ID NO: 766327 - DNA, 33 bp, Homo sapien
aaggacttaggccagaatagcagacagacaaca

SEQ ID NO: 766328 - DNA, 33 bp, Homo sapien
aaggacttaggccagattagcagacagacaaca

SEQ ID NO: 766329 - DNA, 33 bp, Homo sapien
ttcgtttcgtgcatgaataacagaccagtgaac

SEQ ID NO: 766330 - DNA, 33 bp, Homo sapien
ttcgtttcgtgcatgagtaacagaccagtgaac

SEQ ID NO: 766331 - DNA, 33 bp, Homo sapien
gaactagagtatcagcaaaacagaacgcacaac

SEQ ID NO: 766332 - DNA, 33 bp, Homo sapien
gaactagagtatcagcgaaacagaacgcacaac

SEQ ID NO: 766333 - DNA, 33 bp, Homo sapien
acctaccatactgaccgcttgattttgaacttc

SEQ ID NO: 766334 - DNA, 33 bp, Homo sapien
acctaccatactgacctcttgattttgaacttc

SEQ ID NO: 766335 - DNA, 33 bp, Homo sapien
actatttaataaaataagaaccttagcactcta

SEQ ID NO: 766336 - DNA, 33 bp, Homo sapien
actatttaataaaataggaaccttagcactcta

SEQ ID NO: 766337 - DNA, 33 bp, Homo sapien
tcaacaggggctagaaagaagctgttacatagt

SEQ ID NO: 766338 - DNA, 33 bp, Homo sapien
tcaacaggggctagaaggaagctgttacatagt

SEQ ID NO: 766339 - DNA, 33 bp, Homo sapien
taacaagggtcataaaaaagattcaagtaagat

SEQ ID NO: 766340 - DNA, 33 bp, Homo sapien
taacaagggtcataaacaagattcaagtaagat

SEQ ID NO: 766341 - DNA, 33 bp, Homo sapien
tcacattacttatccaacagtttgtcaggaaat

SEQ ID NO: 766342 - DNA, 33 bp, Homo sapien
tcacattacttatccagcagtttgtcaggaaat

SEQ ID NO: 766343 - DNA, 33 bp, Homo sapien
ttgtagcttaaattcaaaggtcatttaatcatt

SEQ ID NO: 766344 - DNA, 33 bp, Homo sapien
ttgtagcttaaattcagaggtcatttaatcatt

SEQ ID NO: 766345 - DNA, 33 bp, Homo sapien
tccattagccttctaccctgggatatatggcta

SEQ ID NO: 766346 - DNA, 33 bp, Homo sapien
tccattagccttctactctgggatatatggcta

SEQ ID NO: 766347 - DNA, 33 bp, Homo sapien
tggccagaaaagtcaactggagcctgcaaggga

SEQ ID NO: 766348 - DNA, 33 bp, Homo sapien
tggccagaaaagtcaattggagcctgcaaggga

SEQ ID NO: 766349 - DNA, 33 bp, Homo sapien
atttagtccttcatgacgcatccaattaatatt

SEQ ID NO: 766350 - DNA, 33 bp, Homo sapien
atttagtccttcatgaggcatccaattaatatt

SEQ ID NO: 766351 - DNA, 33 bp, Homo sapien
ttatgtaacctgatacagcattttaaactgtta

SEQ ID NO: 766352 - DNA, 33 bp, Homo sapien
ttatgtaacctgatacggcattttaaactgtta

SEQ ID NO: 766353 - DNA, 33 bp, Homo sapien
gccagtaggatcataaaccaagtgaaatatcta

SEQ ID NO: 766354 - DNA, 33 bp, Homo sapien
gccagtaggatcataacccaagtgaaatatcta

SEQ ID NO: 766355 - DNA, 33 bp, Homo sapien
tcatacttaagatacaaaacgacataggtctca

SEQ ID NO: 766356 - DNA, 33 bp, Homo sapien
tcatacttaagatacacaacgacataggtctca

SEQ ID NO: 766357 - DNA, 33 bp, Homo sapien
acccttctttacaaggacctgatgtgaaattaa

SEQ ID NO: 766358 - DNA, 33 bp, Homo sapien
acccttctttacaagggcctgatgtgaaattaa

SEQ ID NO: 766359 - DNA, 33 bp, Homo sapien
aatgcttgcaacttaacgttctcataatagttt

SEQ ID NO: 766360 - DNA, 33 bp, Homo sapien
aatgcttgcaacttaatgttctcataatagttt

SEQ ID NO: 766361 - DNA, 33 bp, Homo sapien
cgagtaactgagactacaagtgcacatcaccac

SEQ ID NO: 766362 - DNA, 33 bp, Homo sapien
cgagtaactgagactataagtgcacatcaccac

SEQ ID NO: 766363 - DNA, 33 bp, Homo sapien
gtatctttaatgataaaggaggactactataca

SEQ ID NO: 766364 - DNA, 33 bp, Homo sapien
gtatctttaatgataagggaggactactataca

SEQ ID NO: 766365 - DNA, 33 bp, Homo sapien
gaaaaagggaggatgcaataaaactggggacaa

SEQ ID NO: 766366 - DNA, 33 bp, Homo sapien
gaaaaagggaggatgccataaaactggggacaa

SEQ ID NO: 766367 - DNA, 33 bp, Homo sapien
tttggagaaatgcctgaaagggaaaaagggagg

SEQ ID NO: 766368 - DNA, 33 bp, Homo sapien
tttggagaaatgcctgtaagggaaaaagggagg

SEQ ID NO: 766369 - DNA, 33 bp, Homo sapien
ggagaccattatcctaagtgaaataactcagga

SEQ ID NO: 766370 - DNA, 33 bp, Homo sapien
ggagaccattatcctacgtgaaataactcagga

SEQ ID NO: 766371 - DNA, 33 bp, Homo sapien
gctcttaaaaatgcaccatgggttgtagaatat

SEQ ID NO: 766372 - DNA, 33 bp, Homo sapien
gctcttaaaaatgcactatgggttgtagaatat

SEQ ID NO: 766373 - DNA, 33 bp, Homo sapien
aagctaaacgacactaaatgaagaaacgatcag

SEQ ID NO: 766374 - DNA, 33 bp, Homo sapien
aagctaaacgacactacatgaagaaacgatcag

SEQ ID NO: 766375 - DNA, 33 bp, Homo sapien
tccccctcgtcttggccctacagccccagctgg

SEQ ID NO: 766376 - DNA, 33 bp, Homo sapien
tccccctcgtcttggctctacagccccagctgg

SEQ ID NO: 766377 - DNA, 33 bp, Homo sapien
ataggctgtttagaaagatcactttggtacagt

SEQ ID NO: 766378 - DNA, 33 bp, Homo sapien
ataggctgtttagaaatatcactttggtacagt

SEQ ID NO: 766379 - DNA, 33 bp, Homo sapien
ataatatgccatcgtaccaaacattcttttccg

SEQ ID NO: 766380 - DNA, 33 bp, Homo sapien
ataatatgccatcgtatcaaacattcttttccg

SEQ ID NO: 766381 - DNA, 33 bp, Homo sapien
cgatctttcgagtaaaataaagagtttctttgc

SEQ ID NO: 766382 - DNA, 33 bp, Homo sapien
cgatctttcgagtaaagtaaagagtttctttgc

SEQ ID NO: 766383 - DNA, 33 bp, Homo sapien
agattgttctccttggcaaaatttatgctggca

SEQ ID NO: 766384 - DNA, 33 bp, Homo sapien
agattgttctccttggtaaaatttatgctggca

SEQ ID NO: 766385 - DNA, 33 bp, Homo sapien
gagcatgcattctatccgaggagctcaatgtca

SEQ ID NO: 766386 - DNA, 33 bp, Homo sapien
gagcatgcattctatctgaggagctcaatgtca

SEQ ID NO: 766387 - DNA, 33 bp, Homo sapien
aggaaggaactgctcacaaaattacagagagag

SEQ ID NO: 766388 - DNA, 33 bp, Homo sapien
aggaaggaactgctcagaaaattacagagagag

SEQ ID NO: 766389 - DNA, 33 bp, Homo sapien
ttaacacaactgcaataaaaaaagatttacctg

SEQ ID NO: 766390 - DNA, 33 bp, Homo sapien
ttaacacaactgcaatgaaaaaagatttacctg

SEQ ID NO: 766391 - DNA, 33 bp, Homo sapien
ctaccttatatttccaactatcaaacataagaa

SEQ ID NO: 766392 - DNA, 33 bp, Homo sapien
ctaccttatatttccagctatcaaacataagaa

SEQ ID NO: 766393 - DNA, 33 bp, Homo sapien
ctgttctcacttccacaggccatcaagaatatg

SEQ ID NO: 766394 - DNA, 33 bp, Homo sapien
ctgttctcacttccacgggccatcaagaatatg

SEQ ID NO: 766395 - DNA, 33 bp, Homo sapien
aagctgttagcccgtaataaaaatagatgttgg

SEQ ID NO: 766396 - DNA, 33 bp, Homo sapien
aagctgttagcccgtagtaaaaatagatgttgg

SEQ ID NO: 766397 - DNA, 33 bp, Homo sapien
aaaagaactaccagtgcaataaagaaagagaac

SEQ ID NO: 766398 - DNA, 33 bp, Homo sapien
aaaagaactaccagtggaataaagaaagagaac

SEQ ID NO: 766399 - DNA, 33 bp, Homo sapien
ggcaagcagaatgagcaaacttggttttttatg

SEQ ID NO: 766400 - DNA, 33 bp, Homo sapien
ggcaagcagaatgagctaacttggttttttatg

SEQ ID NO: 766401 - DNA, 33 bp, Homo sapien
tcacagattacagtcccgacttaacccccaaag

SEQ ID NO: 766402 - DNA, 33 bp, Homo sapien
tcacagattacagtcctgacttaacccccaaag

SEQ ID NO: 766403 - DNA, 33 bp, Homo sapien
gtgataggaagaaaccagacgtttggagcagag

SEQ ID NO: 766404 - DNA, 33 bp, Homo sapien
gtgataggaagaaaccggacgtttggagcagag

SEQ ID NO: 766405 - DNA, 33 bp, Homo sapien
tcttcctatcacttcaagttctttgccttggcc

SEQ ID NO: 766406 - DNA, 33 bp, Homo sapien
tcttcctatcacttcaggttctttgccttggcc

SEQ ID NO: 766407 - DNA, 33 bp, Homo sapien
tagcctgtaattctaaaactttcagagaccaag

SEQ ID NO: 766408 - DNA, 33 bp, Homo sapien
tagcctgtaattctaagactttcagagaccaag

SEQ ID NO: 766409 - DNA, 33 bp, Homo sapien
aacagcaatgaatataaccagagtaccaaatct

SEQ ID NO: 766410 - DNA, 33 bp, Homo sapien
aacagcaatgaatatatccagagtaccaaatct

SEQ ID NO: 766411 - DNA, 33 bp, Homo sapien
aaggtagccactctcaagttaattcctgtcatc

SEQ ID NO: 766412 - DNA, 33 bp, Homo sapien
aaggtagccactctcaggttaattcctgtcatc

SEQ ID NO: 766413 - DNA, 33 bp, Homo sapien
ttggttggagttgctaccaaaaatcggacaaat

SEQ ID NO: 766414 - DNA, 33 bp, Homo sapien
ttggttggagttgctatcaaaaatcggacaaat

SEQ ID NO: 766415 - DNA, 33 bp, Homo sapien
tcatcacatggtagcactccataaaagttagtt

SEQ ID NO: 766416 - DNA, 33 bp, Homo sapien
tcatcacatggtagcagtccataaaagttagtt

SEQ ID NO: 766417 - DNA, 33 bp, Homo sapien
agtcagagaagccttacagtgattttccttaga

SEQ ID NO: 766418 - DNA, 33 bp, Homo sapien
agtcagagaagccttatagtgattttccttaga

SEQ ID NO: 766419 - DNA, 33 bp, Homo sapien
tcccatctgcttaacaaacgacagctatggcat

SEQ ID NO: 766420 - DNA, 33 bp, Homo sapien
tcccatctgcttaacacacgacagctatggcat

SEQ ID NO: 766421 - DNA, 33 bp, Homo sapien
ctaagtagtgagaccaacaaatgtcaaacatcc

SEQ ID NO: 766422 - DNA, 33 bp, Homo sapien
ctaagtagtgagaccatcaaatgtcaaacatcc

SEQ ID NO: 766423 - DNA, 33 bp, Homo sapien
gatttggccttaaaaaatggacaaggaggctgg

SEQ ID NO: 766424 - DNA, 33 bp, Homo sapien
gatttggccttaaaaagtggacaaggaggctgg

SEQ ID NO: 766425 - DNA, 33 bp, Homo sapien
gggagagaaggtaacactcgatttggctcctaa

SEQ ID NO: 766426 - DNA, 33 bp, Homo sapien
gggagagaaggtaacattcgatttggctcctaa

SEQ ID NO: 766427 - DNA, 33 bp, Homo sapien
cttgaaaaggctacgaaggattctacccagttc

SEQ ID NO: 766428 - DNA, 33 bp, Homo sapien
cttgaaaaggctacgagggattctacccagttc

SEQ ID NO: 766429 - DNA, 33 bp, Homo sapien
atgtgagagagggggaaagaatagtgggagatg

SEQ ID NO: 766430 - DNA, 33 bp, Homo sapien
atgtgagagagggggacagaatagtgggagatg

SEQ ID NO: 766431 - DNA, 33 bp, Homo sapien
gggtatgaagtagaatgaaagcgagagacgcaa

SEQ ID NO: 766432 - DNA, 33 bp, Homo sapien
gggtatgaagtagaattaaagcgagagacgcaa

SEQ ID NO: 766433 - DNA, 33 bp, Homo sapien
cagaggataatcataacggaacaaagtataatc

SEQ ID NO: 766434 - DNA, 33 bp, Homo sapien
cagaggataatcataagggaacaaagtataatc

SEQ ID NO: 766435 - DNA, 33 bp, Homo sapien
caaatagctggaatgacgatactgaaaattccc

SEQ ID NO: 766436 - DNA, 33 bp, Homo sapien
caaatagctggaatgatgatactgaaaattccc

SEQ ID NO: 766437 - DNA, 33 bp, Homo sapien
gccattcacagtaacagggattgaagtggaagg

SEQ ID NO: 766438 - DNA, 33 bp, Homo sapien
gccattcacagtaacatggattgaagtggaagg

SEQ ID NO: 766439 - DNA, 33 bp, Homo sapien
cagagctttgctcaaccaattttagcatccatt

SEQ ID NO: 766440 - DNA, 33 bp, Homo sapien
cagagctttgctcaactaattttagcatccatt

SEQ ID NO: 766441 - DNA, 33 bp, Homo sapien
cagttagctgatctcaaaagaaacacttgttaa

SEQ ID NO: 766442 - DNA, 33 bp, Homo sapien
cagttagctgatctcagaagaaacacttgttaa

SEQ ID NO: 766443 - DNA, 33 bp, Homo sapien
tgtgttggatagtcccaaggatgtctgtaactc

SEQ ID NO: 766444 - DNA, 33 bp, Homo sapien
tgtgttggatagtcccgaggatgtctgtaactc

SEQ ID NO: 766445 - DNA, 33 bp, Homo sapien
tgaaaacgtaactagaagttcagtcatttcctc

SEQ ID NO: 766446 - DNA, 33 bp, Homo sapien
tgaaaacgtaactagaggttcagtcatttcctc

SEQ ID NO: 766447 - DNA, 33 bp, Homo sapien
ccactcagtggtggaaatggacaaacccaggcc

SEQ ID NO: 766448 - DNA, 33 bp, Homo sapien
ccactcagtggtggaactggacaaacccaggcc

SEQ ID NO: 766449 - DNA, 33 bp, Homo sapien
tgatttcagtcctgtaccacaggttccctaact

SEQ ID NO: 766450 - DNA, 33 bp, Homo sapien
tgatttcagtcctgtatcacaggttccctaact

SEQ ID NO: 766451 - DNA, 33 bp, Homo sapien
taatgtatatgccagaactgaacaaataagagc

SEQ ID NO: 766452 - DNA, 33 bp, Homo sapien
taatgtatatgccagacctgaacaaataagagc

SEQ ID NO: 766453 - DNA, 33 bp, Homo sapien
cattgcccagtaatgcaaaaaggatttgaggca

SEQ ID NO: 766454 - DNA, 33 bp, Homo sapien
cattgcccagtaatgctaaaaggatttgaggca

SEQ ID NO: 766455 - DNA, 33 bp, Homo sapien
tgatatttcaaggcatcacatctaacttgaaag

SEQ ID NO: 766456 - DNA, 33 bp, Homo sapien
tgatatttcaaggcatgacatctaacttgaaag

SEQ ID NO: 766457 - DNA, 33 bp, Homo sapien
agctcccttgtctctacagattctgaggtggca

SEQ ID NO: 766458 - DNA, 33 bp, Homo sapien
agctcccttgtctctatagattctgaggtggca

SEQ ID NO: 766459 - DNA, 33 bp, Homo sapien
tcctttactgaggatcacagagctgtaaataat

SEQ ID NO: 766460 - DNA, 33 bp, Homo sapien
tcctttactgaggatcgcagagctgtaaataat

SEQ ID NO: 766461 - DNA, 33 bp, Homo sapien
ggtcaaatttatgttacagtggagtgatttatg

SEQ ID NO: 766462 - DNA, 33 bp, Homo sapien
ggtcaaatttatgttatagtggagtgatttatg

SEQ ID NO: 766463 - DNA, 33 bp, Homo sapien
gtttaaaaagagaacacagagagtacattcaag

SEQ ID NO: 766464 - DNA, 33 bp, Homo sapien
gtttaaaaagagaacagagagagtacattcaag

SEQ ID NO: 766465 - DNA, 33 bp, Homo sapien
ataaatatcttgttaaccctcaaatacaggatc

SEQ ID NO: 766466 - DNA, 33 bp, Homo sapien
ataaatatcttgttaatcctcaaatacaggatc

SEQ ID NO: 766467 - DNA, 33 bp, Homo sapien
ctctggataaagacacactatggattcagtctt

SEQ ID NO: 766468 - DNA, 33 bp, Homo sapien
ctctggataaagacacgctatggattcagtctt

SEQ ID NO: 766469 - DNA, 33 bp, Homo sapien
ttccccccagatgaccaatgcaagctaacattt

SEQ ID NO: 766470 - DNA, 33 bp, Homo sapien
ttccccccagatgaccgatgcaagctaacattt

SEQ ID NO: 766471 - DNA, 33 bp, Homo sapien
ttggcacccagtaggcacaaaaacagaaagaag

SEQ ID NO: 766472 - DNA, 33 bp, Homo sapien
ttggcacccagtaggcgcaaaaacagaaagaag

SEQ ID NO: 766473 - DNA, 33 bp, Homo sapien
cgctgtacagaagccaatgaataattgtcagtg

SEQ ID NO: 766474 - DNA, 33 bp, Homo sapien
cgctgtacagaagccagtgaataattgtcagtg

SEQ ID NO: 766475 - DNA, 33 bp, Homo sapien
ggaggggaagaagaagaaagcaattctcacttt

SEQ ID NO: 766476 - DNA, 33 bp, Homo sapien
ggaggggaagaagaaggaagcaattctcacttt

SEQ ID NO: 766477 - DNA, 33 bp, Homo sapien
gagaagtggccatgcaaccagagaaaagtgggg

SEQ ID NO: 766478 - DNA, 33 bp, Homo sapien
gagaagtggccatgcagccagagaaaagtgggg

SEQ ID NO: 766479 - DNA, 33 bp, Homo sapien
ctaatcttgacctgtacgcccctgtatgatttg

SEQ ID NO: 766480 - DNA, 33 bp, Homo sapien
ctaatcttgacctgtatgcccctgtatgatttg

SEQ ID NO: 766481 - DNA, 33 bp, Homo sapien
ggctgctatggaggtcaatgaagcaatagaaat

SEQ ID NO: 766482 - DNA, 33 bp, Homo sapien
ggctgctatggaggtcgatgaagcaatagaaat

SEQ ID NO: 766483 - DNA, 33 bp, Homo sapien
cagccttgagaaaaagacattgtttatcctcat

SEQ ID NO: 766484 - DNA, 33 bp, Homo sapien
cagccttgagaaaaaggcattgtttatcctcat

SEQ ID NO: 766485 - DNA, 33 bp, Homo sapien
ggcttacaggtaacagaaactcaactcaaagtg

SEQ ID NO: 766486 - DNA, 33 bp, Homo sapien
ggcttacaggtaacaggaactcaactcaaagtg

SEQ ID NO: 766487 - DNA, 33 bp, Homo sapien
gtttggtttttgtccccgaaatcttccttttac

SEQ ID NO: 766488 - DNA, 33 bp, Homo sapien
gtttggtttttgtccctgaaatcttccttttac

SEQ ID NO: 766489 - DNA, 33 bp, Homo sapien
aacagtgcgacccaaaatgtcaaaagggcaggg

SEQ ID NO: 766490 - DNA, 33 bp, Homo sapien
aacagtgcgacccaaagtgtcaaaagggcaggg

SEQ ID NO: 766491 - DNA, 33 bp, Homo sapien
agacttggtggagtcacgggtaccaacctgtgg

SEQ ID NO: 766492 - DNA, 33 bp, Homo sapien
agacttggtggagtcatgggtaccaacctgtgg

SEQ ID NO: 766493 - DNA, 33 bp, Homo sapien
tattacagcttgttacacatttcataaaaggga

SEQ ID NO: 766494 - DNA, 33 bp, Homo sapien
tattacagcttgttacgcatttcataaaaggga

SEQ ID NO: 766495 - DNA, 33 bp, Homo sapien
acatgtgttggctgccagataaattcacaatct

SEQ ID NO: 766496 - DNA, 33 bp, Homo sapien
acatgtgttggctgcccgataaattcacaatct

SEQ ID NO: 766497 - DNA, 33 bp, Homo sapien
actcagtattccagataaaggtagccatagtgg

SEQ ID NO: 766498 - DNA, 33 bp, Homo sapien
actcagtattccagatgaaggtagccatagtgg

SEQ ID NO: 766499 - DNA, 33 bp, Homo sapien
tcacagaagtttaaatcatgctggtttagagac

SEQ ID NO: 766500 - DNA, 33 bp, Homo sapien
tcacagaagtttaaattatgctggtttagagac

SEQ ID NO: 766501 - DNA, 33 bp, Homo sapien
tgcagaggagtatggcgcctaatgcccccaggt

SEQ ID NO: 766502 - DNA, 33 bp, Homo sapien
tgcagaggagtatggctcctaatgcccccaggt

SEQ ID NO: 766503 - DNA, 33 bp, Homo sapien
gtaaattcccatctgccgcaagacttgaagagc

SEQ ID NO: 766504 - DNA, 33 bp, Homo sapien
gtaaattcccatctgctgcaagacttgaagagc

SEQ ID NO: 766505 - DNA, 33 bp, Homo sapien
tgggaaaatttgtgacaatgatgtggggaaggg

SEQ ID NO: 766506 - DNA, 33 bp, Homo sapien
tgggaaaatttgtgaccatgatgtggggaaggg

SEQ ID NO: 766507 - DNA, 33 bp, Homo sapien
ttaaccagttgcaccacgtacagtgcaggatat

SEQ ID NO: 766508 - DNA, 33 bp, Homo sapien
ttaaccagttgcaccatgtacagtgcaggatat

SEQ ID NO: 766509 - DNA, 33 bp, Homo sapien
tgagtctctaactgaaagttgtctaaatgatcg

SEQ ID NO: 766510 - DNA, 33 bp, Homo sapien
tgagtctctaactgaaggttgtctaaatgatcg

SEQ ID NO: 766511 - DNA, 33 bp, Homo sapien
caatcacttatcactgaaaatacctttgcacct

SEQ ID NO: 766512 - DNA, 33 bp, Homo sapien
caatcacttatcactggaaatacctttgcacct

SEQ ID NO: 766513 - DNA, 33 bp, Homo sapien
tacctattccaaaaatcaagttatacacaaatt

SEQ ID NO: 766514 - DNA, 33 bp, Homo sapien
tacctattccaaaaatgaagttatacacaaatt

SEQ ID NO: 766515 - DNA, 33 bp, Homo sapien
accacatacgagcttaaaaaatgaatgaacaaa

SEQ ID NO: 766516 - DNA, 33 bp, Homo sapien
accacatacgagcttacaaaatgaatgaacaaa

SEQ ID NO: 766517 - DNA, 33 bp, Homo sapien
agcgtggctcttctcacgcattttagtcttcac

SEQ ID NO: 766518 - DNA, 33 bp, Homo sapien
agcgtggctcttctcatgcattttagtcttcac

SEQ ID NO: 766519 - DNA, 33 bp, Homo sapien
tagcataaaggatctcaatggtttaaatcctcc

SEQ ID NO: 766520 - DNA, 33 bp, Homo sapien
tagcataaaggatctcgatggtttaaatcctcc

SEQ ID NO: 766521 - DNA, 33 bp, Homo sapien
aagaggttcccggtcaagctgtgtttaaaactt

SEQ ID NO: 766522 - DNA, 33 bp, Homo sapien
aagaggttcccggtcatgctgtgtttaaaactt

SEQ ID NO: 766523 - DNA, 33 bp, Homo sapien
tgcttaaaatagtgcccagtacatagtaagttt

SEQ ID NO: 766524 - DNA, 33 bp, Homo sapien
tgcttaaaatagtgcctagtacatagtaagttt

SEQ ID NO: 766525 - DNA, 33 bp, Homo sapien
cacacagttgggaaaacggcatagcagagcaca

SEQ ID NO: 766526 - DNA, 33 bp, Homo sapien
cacacagttgggaaaagggcatagcagagcaca

SEQ ID NO: 766527 - DNA, 33 bp, Homo sapien
ggagaattaaatgtcacctagtccaataatttt

SEQ ID NO: 766528 - DNA, 33 bp, Homo sapien
ggagaattaaatgtcatctagtccaataatttt

SEQ ID NO: 766529 - DNA, 33 bp, Homo sapien
accaaaaaattaagacacagcagggccagtagg

SEQ ID NO: 766530 - DNA, 33 bp, Homo sapien
accaaaaaattaagactcagcagggccagtagg

SEQ ID NO: 766531 - DNA, 33 bp, Homo sapien
gtgtgcaacattgcaacagtgcagtgctaagct

SEQ ID NO: 766532 - DNA, 33 bp, Homo sapien
gtgtgcaacattgcaagagtgcagtgctaagct

SEQ ID NO: 766533 - DNA, 33 bp, Homo sapien
tggtctcatttcaacaccaatttttatccattc

SEQ ID NO: 766534 - DNA, 33 bp, Homo sapien
tggtctcatttcaacatcaatttttatccattc

SEQ ID NO: 766535 - DNA, 33 bp, Homo sapien
cttgctccctgtgacaatcttgaaccattgtag

SEQ ID NO: 766536 - DNA, 33 bp, Homo sapien
cttgctccctgtgacattcttgaaccattgtag

SEQ ID NO: 766537 - DNA, 33 bp, Homo sapien
gtccctctatatgccaaggtccctacaatggtt

SEQ ID NO: 766538 - DNA, 33 bp, Homo sapien
gtccctctatatgccatggtccctacaatggtt

SEQ ID NO: 766539 - DNA, 33 bp, Homo sapien
taagccctgctgacccaaagaaacgtcaagccc

SEQ ID NO: 766540 - DNA, 33 bp, Homo sapien
taagccctgctgacccgaagaaacgtcaagccc

SEQ ID NO: 766541 - DNA, 33 bp, Homo sapien
agagaaatctgtgagaagattggaaggcagaag

SEQ ID NO: 766542 - DNA, 33 bp, Homo sapien
agagaaatctgtgagaggattggaaggcagaag

SEQ ID NO: 766543 - DNA, 33 bp, Homo sapien
tagaacaggggagttacggtctgctccaagagg

SEQ ID NO: 766544 - DNA, 33 bp, Homo sapien
tagaacaggggagttatggtctgctccaagagg

SEQ ID NO: 766545 - DNA, 33 bp, Homo sapien
ccacctgctgaaggccaaggaacaatgtggtag

SEQ ID NO: 766546 - DNA, 33 bp, Homo sapien
ccacctgctgaaggccgaggaacaatgtggtag

SEQ ID NO: 766547 - DNA, 33 bp, Homo sapien
ggttgaaggtaatagaagtcatccacacaatac

SEQ ID NO: 766548 - DNA, 33 bp, Homo sapien
ggttgaaggtaatagatgtcatccacacaatac

SEQ ID NO: 766549 - DNA, 33 bp, Homo sapien
ggtacaggtgagagatgataatggttaagacca

SEQ ID NO: 766550 - DNA, 33 bp, Homo sapien
ggtacaggtgagagattataatggttaagacca

SEQ ID NO: 766551 - DNA, 33 bp, Homo sapien
tcatgtcttgaggagaaaagatctcagtggccc

SEQ ID NO: 766552 - DNA, 33 bp, Homo sapien
tcatgtcttgaggagagaagatctcagtggccc

SEQ ID NO: 766553 - DNA, 33 bp, Homo sapien
gcaaagcctcctaaacagcaggctcaatttgtt

SEQ ID NO: 766554 - DNA, 33 bp, Homo sapien
gcaaagcctcctaaacggcaggctcaatttgtt

SEQ ID NO: 766555 - DNA, 33 bp, Homo sapien
gcagatgggattctcactgaacacacaggatgt

SEQ ID NO: 766556 - DNA, 33 bp, Homo sapien
gcagatgggattctcattgaacacacaggatgt

SEQ ID NO: 766557 - DNA, 33 bp, Homo sapien
ctaatagctgcctgagaacctagctgacacact

SEQ ID NO: 766558 - DNA, 33 bp, Homo sapien
ctaatagctgcctgaggacctagctgacacact

SEQ ID NO: 766559 - DNA, 33 bp, Homo sapien
ctaattcctacagataacaaacaacttgccttt

SEQ ID NO: 766560 - DNA, 33 bp, Homo sapien
ctaattcctacagataccaaacaacttgccttt

SEQ ID NO: 766561 - DNA, 33 bp, Homo sapien
cagcaattctgctttcaaagtgcaatctaaaat

SEQ ID NO: 766562 - DNA, 33 bp, Homo sapien
cagcaattctgctttccaagtgcaatctaaaat

SEQ ID NO: 766563 - DNA, 33 bp, Homo sapien
atacatccctcagcaaccctatgcagcaagggt

SEQ ID NO: 766564 - DNA, 33 bp, Homo sapien
atacatccctcagcaatcctatgcagcaagggt

SEQ ID NO: 766565 - DNA, 33 bp, Homo sapien; identical to SEQ ID NO: 766563

SEQ ID NO: 766566 - DNA, 33 bp, Homo sapien; identical to SEQ ID NO: 766564

SEQ ID NO: 766567 - DNA, 33 bp, Homo sapien
gctagtgagactgtacagggagagaacccatca

SEQ ID NO: 766568 - DNA, 33 bp, Homo sapien
gctagtgagactgtacggggagagaacccatca

SEQ ID NO: 766569 - DNA, 33 bp, Homo sapien
gggtaatggatcaggaaacctgtgtggaaatca

SEQ ID NO: 766570 - DNA, 33 bp, Homo sapien
gggtaatggatcaggagacctgtgtggaaatca

SEQ ID NO: 766571 - DNA, 33 bp, Homo sapien
ttttttcaatagactaaatttgcttcagtccac

SEQ ID NO: 766572 - DNA, 33 bp, Homo sapien
ttttttcaatagactacatttgcttcagtccac

SEQ ID NO: 766573 - DNA, 33 bp, Homo sapien
aacactgtttgtgcaacgcgtgtttccatgata

SEQ ID NO: 766574 - DNA, 33 bp, Homo sapien
aacactgtttgtgcaatgcgtgtttccatgata

SEQ ID NO: 766575 - DNA, 33 bp, Homo sapien
ggatatgtctttggcacatatccttgctgggta

SEQ ID NO: 766576 - DNA, 33 bp, Homo sapien
ggatatgtctttggcatatatccttgctgggta

SEQ ID NO: 766577 - DNA, 33 bp, Homo sapien
acgtcacggacaaatagctagaggtatgcagcc

SEQ ID NO: 766578 - DNA, 33 bp, Homo sapien
acgtcacggacaaatatctagaggtatgcagcc

SEQ ID NO: 766579 - DNA, 33 bp, Homo sapien
gaatttttaaatcatacagtgatagtgctatga

SEQ ID NO: 766580 - DNA, 33 bp, Homo sapien
gaatttttaaatcatatagtgatagtgctatga

SEQ ID NO: 766581 - DNA, 33 bp, Homo sapien
gggcagggattagtacaacagaaggtcattcgt

SEQ ID NO: 766582 - DNA, 33 bp, Homo sapien
gggcagggattagtaccacagaaggtcattcgt

SEQ ID NO: 766583 - DNA, 33 bp, Homo sapien
ttttgtctaaagctacactttccgattaggaca

SEQ ID NO: 766584 - DNA, 33 bp, Homo sapien
ttttgtctaaagctaccctttccgattaggaca

SEQ ID NO: 766585 - DNA, 33 bp, Homo sapien
acagaaagaggtctcaatctctcactaaaacag

SEQ ID NO: 766586 - DNA, 33 bp, Homo sapien
acagaaagaggtctcagtctctcactaaaacag

SEQ ID NO: 766587 - DNA, 33 bp, Homo sapien
ctgtccttgtatttcaaatttccaaaagtctgt

SEQ ID NO: 766588 - DNA, 33 bp, Homo sapien
ctgtccttgtatttcagatttccaaaagtctgt

SEQ ID NO: 766589 - DNA, 33 bp, Homo sapien
gactaaaccagagcaacttctcgtcatgcaatt

SEQ ID NO: 766590 - DNA, 33 bp, Homo sapien
gactaaaccagagcaatttctcgtcatgcaatt

SEQ ID NO: 766591 - DNA, 33 bp, Homo sapien
gtttgtgaataaaacaatgggatgtaggaatgc

SEQ ID NO: 766592 - DNA, 33 bp, Homo sapien
gtttgtgaataaaacagtgggatgtaggaatgc

SEQ ID NO: 766593 - DNA, 33 bp, Homo sapien
gatatttactcagcatcaaactttttggagata

SEQ ID NO: 766594 - DNA, 33 bp, Homo sapien
gatatttactcagcattaaactttttggagata

SEQ ID NO: 766595 - DNA, 33 bp, Homo sapien
tcagaagtgattacaacgaagttctctaattgc

SEQ ID NO: 766596 - DNA, 33 bp, Homo sapien
tcagaagtgattacaatgaagttctctaattgc

SEQ ID NO: 766597 - DNA, 33 bp, Homo sapien
ttttccttattatgaaagaactgtccctttgcc

SEQ ID NO: 766598 - DNA, 33 bp, Homo sapien
ttttccttattatgaaggaactgtccctttgcc

SEQ ID NO: 766599 - DNA, 33 bp, Homo sapien
tggaaggactccataaagtgttttaaactggtg

SEQ ID NO: 766600 - DNA, 33 bp, Homo sapien
tggaaggactccataacgtgttttaaactggtg

SEQ ID NO: 766601 - DNA, 33 bp, Homo sapien
actcaagtactgactccgaccgattgacagagg

SEQ ID NO: 766602 - DNA, 33 bp, Homo sapien
actcaagtactgactctgaccgattgacagagg

SEQ ID NO: 766603 - DNA, 33 bp, Homo sapien
ttatacatttctaagaccaattattcatggtta

SEQ ID NO: 766604 - DNA, 33 bp, Homo sapien
ttatacatttctaagagcaattattcatggtta

SEQ ID NO: 766605 - DNA, 33 bp, Homo sapien
acctgagttttccaaaagagcataaaaacaaat

SEQ ID NO: 766606 - DNA, 33 bp, Homo sapien
acctgagttttccaaatgagcataaaaacaaat

SEQ ID NO: 766607 - DNA, 33 bp, Homo sapien
atggtaaagtccctgccatttgtagggctcacc

SEQ ID NO: 766608 - DNA, 33 bp, Homo sapien
atggtaaagtccctgctatttgtagggctcacc

SEQ ID NO: 766609 - DNA, 33 bp, Homo sapien
aatcatgtctctgttaaggaacccaactgaggg

SEQ ID NO: 766610 - DNA, 33 bp, Homo sapien
aatcatgtctctgttatggaacccaactgaggg

SEQ ID NO: 766611 - DNA, 33 bp, Homo sapien
ccttttaatgaaggtcgatatcctccatccctt

SEQ ID NO: 766612 - DNA, 33 bp, Homo sapien
ccttttaatgaaggtctatatcctccatccctt

SEQ ID NO: 766613 - DNA, 33 bp, Homo sapien
tgtgtgtgacttaggcactgagaaaactgtgtg

SEQ ID NO: 766614 - DNA, 33 bp, Homo sapien
tgtgtgtgacttaggcgctgagaaaactgtgtg

SEQ ID NO: 766615 - DNA, 33 bp, Homo sapien
tggccgcaaggtaggcactgttttgcagatgag

SEQ ID NO: 766616 - DNA, 33 bp, Homo sapien
tggccgcaaggtaggcgctgttttgcagatgag

SEQ ID NO: 766617 - DNA, 33 bp, Homo sapien
ttttaaaaggtgaggcaacttgttcaaggtcaa

SEQ ID NO: 766618 - DNA, 33 bp, Homo sapien
ttttaaaaggtgaggcgacttgttcaaggtcaa

SEQ ID NO: 766619 - DNA, 33 bp, Homo sapien
ctcacagacctcttcacaagtcattcccaacct

SEQ ID NO: 766620 - DNA, 33 bp, Homo sapien
ctcacagacctcttcataagtcattcccaacct

SEQ ID NO: 766621 - DNA, 33 bp, Homo sapien
atgagatacctctttccaaaacactcaggaggc

SEQ ID NO: 766622 - DNA, 33 bp, Homo sapien
atgagatacctctttctaaaacactcaggaggc

SEQ ID NO: 766623 - DNA, 33 bp, Homo sapien
aagggttacagacccaatcctcaaaagcagatc

SEQ ID NO: 766624 - DNA, 33 bp, Homo sapien
aagggttacagacccagtcctcaaaagcagatc

SEQ ID NO: 766625 - DNA, 33 bp, Homo sapien
caaactgagatcgatagcctaagctcaaccctc

SEQ ID NO: 766626 - DNA, 33 bp, Homo sapien
caaactgagatcgatatcctaagctcaaccctc

SEQ ID NO: 766627 - DNA, 33 bp, Homo sapien
agtaaatttcccatgaacctacccattctcaac

SEQ ID NO: 766628 - DNA, 33 bp, Homo sapien
agtaaatttcccatgatcctacccattctcaac

SEQ ID NO: 766629 - DNA, 33 bp, Homo sapien
attctcaacaataaaacactccccttgctcttc

SEQ ID NO: 766630 - DNA, 33 bp, Homo sapien
attctcaacaataaaagactccccttgctcttc

SEQ ID NO: 766631 - DNA, 33 bp, Homo sapien
actcccaacctggaaccggctattgatattcaa

SEQ ID NO: 766632 - DNA, 33 bp, Homo sapien
actcccaacctggaactggctattgatattcaa

SEQ ID NO: 766633 - DNA, 33 bp, Homo sapien
gtatatagtggaaaggaactagaaccaaaagag

SEQ ID NO: 766634 - DNA, 33 bp, Homo sapien
gtatatagtggaaagggactagaaccaaaagag

SEQ ID NO: 766635 - DNA, 33 bp, Homo sapien
gttgactttttctttcaccatcacacattgctt

SEQ ID NO: 766636 - DNA, 33 bp, Homo sapien
gttgactttttctttctccatcacacattgctt

SEQ ID NO: 766637 - DNA, 33 bp, Homo sapien
agaatgcctttaagaactcagaatgttataatc

SEQ ID NO: 766638 - DNA, 33 bp, Homo sapien
agaatgcctttaagaagtcagaatgttataatc

SEQ ID NO: 766639 - DNA, 33 bp, Homo sapien
catggcaagtattcaggaagttaggttcaacac

SEQ ID NO: 766640 - DNA, 33 bp, Homo sapien
catggcaagtattcagtaagttaggttcaacac

SEQ ID NO: 766641 - DNA, 33 bp, Homo sapien
ctgtatgcaggttaccaggaagaataagtcagt

SEQ ID NO: 766642 - DNA, 33 bp, Homo sapien
ctgtatgcaggttaccgggaagaataagtcagt

SEQ ID NO: 766643 - DNA, 33 bp, Homo sapien
gaagcctattactacacgacggaaagtagactg

SEQ ID NO: 766644 - DNA, 33 bp, Homo sapien
gaagcctattactacatgacggaaagtagactg

SEQ ID NO: 766645 - DNA, 33 bp, Homo sapien
atggcatatggtggtcagaatgatttaaaaatg

SEQ ID NO: 766646 - DNA, 33 bp, Homo sapien
atggcatatggtggtcggaatgatttaaaaatg

SEQ ID NO: 766647 - DNA, 33 bp, Homo sapien
agatgcagcaaaacgaaacaatgaacttgcctt

SEQ ID NO: 766648 - DNA, 33 bp, Homo sapien
agatgcagcaaaacgagacaatgaacttgcctt

SEQ ID NO: 766649 - DNA, 33 bp, Homo sapien
tagagagggaataccacaaaagtctgagataaa

SEQ ID NO: 766650 - DNA, 33 bp, Homo sapien
tagagagggaataccataaaagtctgagataaa

SEQ ID NO: 766651 - DNA, 33 bp, Homo sapien
tctgatcttagcaaaacgaaaatggttcagcat

SEQ ID NO: 766652 - DNA, 33 bp, Homo sapien
tctgatcttagcaaaatgaaaatggttcagcat

SEQ ID NO: 766653 - DNA, 33 bp, Homo sapien
tcataattcctatcacagcttctaataatcgat

SEQ ID NO: 766654 - DNA, 33 bp, Homo sapien
tcataattcctatcacggcttctaataatcgat

SEQ ID NO: 766655 - DNA, 33 bp, Homo sapien
actcttttctccttcacagctatttccatcata

SEQ ID NO: 766656 - DNA, 33 bp, Homo sapien
actcttttctccttcagagctatttccatcata

SEQ ID NO: 766657 - DNA, 33 bp, Homo sapien
gattgaatgattataccggcatatgaaaggtat

SEQ ID NO: 766658 - DNA, 33 bp, Homo sapien
gattgaatgattatactggcatatgaaaggtat

SEQ ID NO: 766659 - DNA, 33 bp, Homo sapien
ttctcacttactaggcaaacttggacaagtcat

SEQ ID NO: 766660 - DNA, 33 bp, Homo sapien
ttctcacttactaggcgaacttggacaagtcat

SEQ ID NO: 766661 - DNA, 33 bp, Homo sapien
gatggatcttgggaaacttaactcaccatttaa

SEQ ID NO: 766662 - DNA, 33 bp, Homo sapien
gatggatcttgggaaatttaactcaccatttaa

SEQ ID NO: 766663 - DNA, 33 bp, Homo sapien
ttggcactgggcagaacgggctgtgtatttcca

SEQ ID NO: 766664 - DNA, 33 bp, Homo sapien
ttggcactgggcagaatgggctgtgtatttcca

SEQ ID NO: 766665 - DNA, 33 bp, Homo sapien
accttgattttgtttacagatagcagcctttat

SEQ ID NO: 766666 - DNA, 33 bp, Homo sapien
accttgattttgtttatagatagcagcctttat

SEQ ID NO: 766667 - DNA, 33 bp, Homo sapien
tatgtggcctgcactcactcaatgggacactgt

SEQ ID NO: 766668 - DNA, 33 bp, Homo sapien
tatgtggcctgcactcgctcaatgggacactgt

SEQ ID NO: 766669 - DNA, 33 bp, Homo sapien
atgtgagtgggactgacgactcaagactgggtc

SEQ ID NO: 766670 - DNA, 33 bp, Homo sapien
atgtgagtgggactgatgactcaagactgggtc

SEQ ID NO: 766671 - DNA, 33 bp, Homo sapien
atgatgatcgccaagacgttgagccactgtggt

SEQ ID NO: 766672 - DNA, 33 bp, Homo sapien
atgatgatcgccaagatgttgagccactgtggt

SEQ ID NO: 766673 - DNA, 33 bp, Homo sapien
ttctggaggctaaaaaaccaaaatctgggtgtg

SEQ ID NO: 766674 - DNA, 33 bp, Homo sapien
ttctggaggctaaaaatccaaaatctgggtgtg

SEQ ID NO: 766675 - DNA, 33 bp, Homo sapien
atttgctcttcctgaccgaaataattaaactag

SEQ ID NO: 766676 - DNA, 33 bp, Homo sapien
atttgctcttcctgactgaaataattaaactag

SEQ ID NO: 766677 - DNA, 33 bp, Homo sapien
gctgatttcttccaaaggatgttttaaaggata

SEQ ID NO: 766678 - DNA, 33 bp, Homo sapien
gctgatttcttccaaatgatgttttaaaggata

SEQ ID NO: 766679 - DNA, 33 bp, Homo sapien
tccagtgtgcaattaccggcaatgaaaatggta

SEQ ID NO: 766680 - DNA, 33 bp, Homo sapien
tccagtgtgcaattactggcaatgaaaatggta

SEQ ID NO: 766681 - DNA, 33 bp, Homo sapien
aatattcactagttcaacaatttcttgagcacc

SEQ ID NO: 766682 - DNA, 33 bp, Homo sapien
aatattcactagttcagcaatttcttgagcacc

SEQ ID NO: 766683 - DNA, 33 bp, Homo sapien
ggaggtagatttagacgaggattagcagctgtc

SEQ ID NO: 766684 - DNA, 33 bp, Homo sapien
ggaggtagatttagactaggattagcagctgtc

SEQ ID NO: 766685 - DNA, 33 bp, Homo sapien
gtggcctagaacgcataaacatttacttcatct

SEQ ID NO: 766686 - DNA, 33 bp, Homo sapien
gtggcctagaacgcatgaacatttacttcatct

SEQ ID NO: 766687 - DNA, 33 bp, Homo sapien
tccctgtttcacagacaatctgaaattaacggg

SEQ ID NO: 766688 - DNA, 33 bp, Homo sapien
tccctgtttcacagaccatctgaaattaacggg

SEQ ID NO: 766689 - DNA, 33 bp, Homo sapien
ctcctacagtgtggccgaaacgtctactcattc

SEQ ID NO: 766690 - DNA, 33 bp, Homo sapien
ctcctacagtgtggcctaaacgtctactcattc

SEQ ID NO: 766691 - DNA, 33 bp, Homo sapien
tgctcatgaccaattaagttgatttaaaaatat

SEQ ID NO: 766692 - DNA, 33 bp, Homo sapien
tgctcatgaccaattatgttgatttaaaaatat

SEQ ID NO: 766693 - DNA, 33 bp, Homo sapien
aacaacacattttctacatgcaatgccctctgg

SEQ ID NO: 766694 - DNA, 33 bp, Homo sapien
aacaacacattttctatatgcaatgccctctgg

SEQ ID NO: 766695 - DNA, 33 bp, Homo sapien
aggacctggtggagaactattaagaatttccat

SEQ ID NO: 766696 - DNA, 33 bp, Homo sapien
aggacctggtggagaattattaagaatttccat

SEQ ID NO: 766697 - DNA, 33 bp, Homo sapien
gtcaatatataaaaaccacttacacctttgtat

SEQ ID NO: 766698 - DNA, 33 bp, Homo sapien
gtcaatatataaaaactacttacacctttgtat

SEQ ID NO: 766699 - DNA, 33 bp, Homo sapien
aatcatagacatataccgatttttctccctcca

SEQ ID NO: 766700 - DNA, 33 bp, Homo sapien
aatcatagacatatacggatttttctccctcca

SEQ ID NO: 766701 - DNA, 33 bp, Homo sapien
ctggggagcctaaaagaaagatcgctggacaat

SEQ ID NO: 766702 - DNA, 33 bp, Homo sapien
ctggggagcctaaaaggaagatcgctggacaat

SEQ ID NO: 766703 - DNA, 33 bp, Homo sapien
ggagaactagcaaagaataatttcagaaaaata

SEQ ID NO: 766704 - DNA, 33 bp, Homo sapien
ggagaactagcaaagattaatttcagaaaaata

SEQ ID NO: 766705 - DNA, 33 bp, Homo sapien
acccttgtttttgcaactcgagaacagaacaaa

SEQ ID NO: 766706 - DNA, 33 bp, Homo sapien
acccttgtttttgcaattcgagaacagaacaaa

SEQ ID NO: 766707 - DNA, 33 bp, Homo sapien
agaaaagtgagactcacagagggtaagagatca

SEQ ID NO: 766708 - DNA, 33 bp, Homo sapien
agaaaagtgagactcagagagggtaagagatca

SEQ ID NO: 766709 - DNA, 33 bp, Homo sapien
cttaccccactcaccaatgacttgttctttccc

SEQ ID NO: 766710 - DNA, 33 bp, Homo sapien
cttaccccactcaccagtgacttgttctttccc

SEQ ID NO: 766711 - DNA, 33 bp, Homo sapien
ttaattctggggtttacagggagtttatgaatt

SEQ ID NO: 766712 - DNA, 33 bp, Homo sapien
ttaattctggggtttatagggagtttatgaatt

SEQ ID NO: 766713 - DNA, 33 bp, Homo sapien
caattgagggagcaaaccctaccttcctggtct

SEQ ID NO: 766714 - DNA, 33 bp, Homo sapien
caattgagggagcaaatcctaccttcctggtct

SEQ ID NO: 766715 - DNA, 33 bp, Homo sapien
tggttcccgtggttcaacaacgtcaccaaatgc

SEQ ID NO: 766716 - DNA, 33 bp, Homo sapien
tggttcccgtggttcatcaacgtcaccaaatgc

SEQ ID NO: 766717 - DNA, 33 bp, Homo sapien
ggagtgtgtgatgtgaaccttattgcaaggaaa

SEQ ID NO: 766718 - DNA, 33 bp, Homo sapien
ggagtgtgtgatgtgacccttattgcaaggaaa

SEQ ID NO: 766719 - DNA, 33 bp, Homo sapien
ctcaaaggatcctaaacggacagagtcaagagt

SEQ ID NO: 766720 - DNA, 33 bp, Homo sapien
ctcaaaggatcctaaatggacagagtcaagagt

SEQ ID NO: 766721 - DNA, 33 bp, Homo sapien
tatttaagactttgaaaaacagctctctgtacc

SEQ ID NO: 766722 - DNA, 33 bp, Homo sapien
tatttaagactttgaagaacagctctctgtacc

SEQ ID NO: 766723 - DNA, 33 bp, Homo sapien
aatgaaaatgatcacgaagcactagttggacat

SEQ ID NO: 766724 - DNA, 33 bp, Homo sapien
aatgaaaatgatcacgtagcactagttggacat

SEQ ID NO: 766725 - DNA, 33 bp, Homo sapien
agagtgggccgtgaacaactctaaaatgcagat

SEQ ID NO: 766726 - DNA, 33 bp, Homo sapien
agagtgggccgtgaacgactctaaaatgcagat

SEQ ID NO: 766727 - DNA, 33 bp, Homo sapien
ggagagcattaagacaagtacctaaggcatgtg

SEQ ID NO: 766728 - DNA, 33 bp, Homo sapien
ggagagcattaagacacgtacctaaggcatgtg

SEQ ID NO: 766729 - DNA, 33 bp, Homo sapien
ttacagctggaatccaaccaagttaattgcctg

SEQ ID NO: 766730 - DNA, 33 bp, Homo sapien
ttacagctggaatccacccaagttaattgcctg

SEQ ID NO: 766731 - DNA, 33 bp, Homo sapien
ataaaagggaatcaaaacaacagtatctgaaat

SEQ ID NO: 766732 - DNA, 33 bp, Homo sapien
ataaaagggaatcaaagcaacagtatctgaaat

SEQ ID NO: 766733 - DNA, 33 bp, Homo sapien
cgactagaggaaagtggcacgttatatacaaga

SEQ ID NO: 766734 - DNA, 33 bp, Homo sapien
cgactagaggaaagtgtcacgttatatacaaga

SEQ ID NO: 766735 - DNA, 33 bp, Homo sapien
tgggataaaggcacaaagtctgaaatatatttg

SEQ ID NO: 766736 - DNA, 33 bp, Homo sapien
tgggataaaggcacaaggtctgaaatatatttg

SEQ ID NO: 766737 - DNA, 33 bp, Homo sapien
agaatcccaaagatgacgtacagtcctgcccct

SEQ ID NO: 766738 - DNA, 33 bp, Homo sapien
agaatcccaaagatgatgtacagtcctgcccct

SEQ ID NO: 766739 - DNA, 33 bp, Homo sapien
catttaattatcgaaagttatcttctccataag

SEQ ID NO: 766740 - DNA, 33 bp, Homo sapien
catttaattatcgaaatttatcttctccataag

SEQ ID NO: 766741 - DNA, 33 bp, Homo sapien
gtggtgaaggcggagaaatgctgccccacacgg

SEQ ID NO: 766742 - DNA, 33 bp, Homo sapien
gtggtgaaggcggagacatgctgccccacacgg

SEQ ID NO: 766743 - DNA, 33 bp, Homo sapien
caaataataagcgccactactaggttttaaaca

SEQ ID NO: 766744 - DNA, 33 bp, Homo sapien
caaataataagcgccagtactaggttttaaaca

SEQ ID NO: 766745 - DNA, 33 bp, Homo sapien
gatgacactcaacaaacgggtaccgactgaaat

SEQ ID NO: 766746 - DNA, 33 bp, Homo sapien
gatgacactcaacaaatgggtaccgactgaaat

SEQ ID NO: 766747 - DNA, 33 bp, Homo sapien
cctgggcacctctcctcaacatctgggtgaagg

SEQ ID NO: 766748 - DNA, 33 bp, Homo sapien
cctgggcacctctcctgaacatctgggtgaagg

SEQ ID NO: 766749 - DNA, 33 bp, Homo sapien
tcaaataacaagtctacgtgtttattgtctcat

SEQ ID NO: 766750 - DNA, 33 bp, Homo sapien
tcaaataacaagtctatgtgtttattgtctcat

SEQ ID NO: 766751 - DNA, 33 bp, Homo sapien
tacaattccgagaagcaatcaaaaagtgactgc

SEQ ID NO: 766752 - DNA, 33 bp, Homo sapien
tacaattccgagaagccatcaaaaagtgactgc

SEQ ID NO: 766753 - DNA, 33 bp, Homo sapien
ttggaaatggactgtaggacctcagaagatttc

SEQ ID NO: 766754 - DNA, 33 bp, Homo sapien
ttggaaatggactgtatgacctcagaagatttc

SEQ ID NO: 766755 - DNA, 33 bp, Homo sapien
aagtggagagttgaaaagaatctgaagaggaca

SEQ ID NO: 766756 - DNA, 33 bp, Homo sapien
aagtggagagttgaaaggaatctgaagaggaca

SEQ ID NO: 766757 - DNA, 33 bp, Homo sapien
gatgaattaggatagcaatacttactttgcaag

SEQ ID NO: 766758 - DNA, 33 bp, Homo sapien
gatgaattaggatagccatacttactttgcaag

SEQ ID NO: 766759 - DNA, 33 bp, Homo sapien
aaaatgcaaggagaaaagctggttaaggatgga

SEQ ID NO: 766760 - DNA, 33 bp, Homo sapien
aaaatgcaaggagaaaggctggttaaggatgga

SEQ ID NO: 766761 - DNA, 33 bp, Homo sapien
cctcaattggtgacaaactttctcttttttttt

SEQ ID NO: 766762 - DNA, 33 bp, Homo sapien
cctcaattggtgacaatctttctcttttttttt

SEQ ID NO: 766763 - DNA, 33 bp, Homo sapien
atgtgtatttaccaaacgcttgtactcccattc

SEQ ID NO: 766764 - DNA, 33 bp, Homo sapien
atgtgtatttaccaaatgcttgtactcccattc

SEQ ID NO: 766765 - DNA, 33 bp, Homo sapien; identical to SEQ ID NO: 766763

SEQ ID NO: 766766 - DNA, 33 bp, Homo sapien; identical to SEQ ID NO: 766764

SEQ ID NO: 766767 - DNA, 33 bp, Homo sapien
gaaagttagaaagaagcccttcactgaaatcct

SEQ ID NO: 766768 - DNA, 33 bp, Homo sapien
gaaagttagaaagaagtccttcactgaaatcct

SEQ ID NO: 766769 - DNA, 33 bp, Homo sapien
aaatgggatctgcccacgcctgctaagacaaca

SEQ ID NO: 766770 - DNA, 33 bp, Homo sapien
aaatgggatctgcccatgcctgctaagacaaca

SEQ ID NO: 766771 - DNA, 33 bp, Homo sapien
acaaagggacacaagggaatatttaaggatgat

SEQ ID NO: 766772 - DNA, 33 bp, Homo sapien
acaaagggacacaaggtaatatttaaggatgat

SEQ ID NO: 766773 - DNA, 33 bp, Homo sapien
caggtactctgtgttacgctgatcttcactgct

SEQ ID NO: 766774 - DNA, 33 bp, Homo sapien
caggtactctgtgttatgctgatcttcactgct

SEQ ID NO: 766775 - DNA, 33 bp, Homo sapien
cctctttcaccggtcaacttagagtctaaggac

SEQ ID NO: 766776 - DNA, 33 bp, Homo sapien
cctctttcaccggtcagcttagagtctaaggac

SEQ ID NO: 766777 - DNA, 33 bp, Homo sapien
ctggctggaagagtacacgaagacttcatagaa

SEQ ID NO: 766778 - DNA, 33 bp, Homo sapien
ctggctggaagagtacccgaagacttcatagaa

SEQ ID NO: 766779 - DNA, 33 bp, Homo sapien
tgccaacatttttgcacaacatatgcagacatt

SEQ ID NO: 766780 - DNA, 33 bp, Homo sapien
tgccaacatttttgcagaacatatgcagacatt

SEQ ID NO: 766781 - DNA, 33 bp, Homo sapien
tgtctttaaaaccaaaagaaagagaggcttgtg

SEQ ID NO: 766782 - DNA, 33 bp, Homo sapien
tgtctttaaaaccaaaggaaagagaggcttgtg

SEQ ID NO: 766783 - DNA, 33 bp, Homo sapien
tgaatgtttcagtcaactggttgctttcaatag

SEQ ID NO: 766784 - DNA, 33 bp, Homo sapien
tgaatgtttcagtcaattggttgctttcaatag

SEQ ID NO: 766785 - DNA, 33 bp, Homo sapien
actgtggtgagcccagaattagagtgcaaagca

SEQ ID NO: 766786 - DNA, 33 bp, Homo sapien
actgtggtgagcccagtattagagtgcaaagca

SEQ ID NO: 766787 - DNA, 33 bp, Homo sapien
acttgagtccatcttgaaggggctatgtgttcc

SEQ ID NO: 766788 - DNA, 33 bp, Homo sapien
acttgagtccatcttgcaggggctatgtgttcc

SEQ ID NO: 766789 - DNA, 33 bp, Homo sapien
gctggctccgtgacaccactctccagttgcact

SEQ ID NO: 766790 - DNA, 33 bp, Homo sapien
gctggctccgtgacactactctccagttgcact

SEQ ID NO: 766791 - DNA, 33 bp, Homo sapien
cacctggctcttcctcacttacatgtttctgaa

SEQ ID NO: 766792 - DNA, 33 bp, Homo sapien
cacctggctcttcctcgcttacatgtttctgaa

SEQ ID NO: 766793 - DNA, 33 bp, Homo sapien
gatcccctcttatctacgttgtcaagcttggag

SEQ ID NO: 766794 - DNA, 33 bp, Homo sapien
gatcccctcttatctatgttgtcaagcttggag

SEQ ID NO: 766795 - DNA, 33 bp, Homo sapien
caggaaggtgttggagaatgactgtcacgaaaa

SEQ ID NO: 766796 - DNA, 33 bp, Homo sapien
caggaaggtgttggaggatgactgtcacgaaaa

SEQ ID NO: 766797 - DNA, 33 bp, Homo sapien
agatcactggcaagagaataatatgcaaagagt

SEQ ID NO: 766798 - DNA, 33 bp, Homo sapien
agatcactggcaagaggataatatgcaaagagt

SEQ ID NO: 766799 - DNA, 33 bp, Homo sapien
caccctcatccatggaaaaaaactgtcttccag

SEQ ID NO: 766800 - DNA, 33 bp, Homo sapien
caccctcatccatggataaaaactgtcttccag

SEQ ID NO: 766801 - DNA, 33 bp, Homo sapien
ttctgtggccttttagaaaccgggcaacacaca

SEQ ID NO: 766802 - DNA, 33 bp, Homo sapien
ttctgtggccttttaggaaccgggcaacacaca

SEQ ID NO: 766803 - DNA, 33 bp, Homo sapien
tactagagtcagtcaacgcagttatgttagaga

SEQ ID NO: 766804 - DNA, 33 bp, Homo sapien
tactagagtcagtcaatgcagttatgttagaga

SEQ ID NO: 766805 - DNA, 33 bp, Homo sapien
tggttcctgtttagacccagttggaaatcccag

SEQ ID NO: 766806 - DNA, 33 bp, Homo sapien
tggttcctgtttagactcagttggaaatcccag

SEQ ID NO: 766807 - DNA, 33 bp, Homo sapien
tacctgtggattaaagaagttgccagtcactaa

SEQ ID NO: 766808 - DNA, 33 bp, Homo sapien
tacctgtggattaaaggagttgccagtcactaa

SEQ ID NO: 766809 - DNA, 33 bp, Homo sapien
ctgtcaactgaaccacagactttatttaatttt

SEQ ID NO: 766810 - DNA, 33 bp, Homo sapien
ctgtcaactgaaccacggactttatttaatttt

SEQ ID NO: 766811 - DNA, 33 bp, Homo sapien
cctcctgctctggccaagtaagacattgcctgc

SEQ ID NO: 766812 - DNA, 33 bp, Homo sapien
cctcctgctctggccacgtaagacattgcctgc

SEQ ID NO: 766813 - DNA, 33 bp, Homo sapien
gagctatcaagccacgaaaaggaagcttttcct

SEQ ID NO: 766814 - DNA, 33 bp, Homo sapien
gagctatcaagccacggaaaggaagcttttcct

SEQ ID NO: 766815 - DNA, 33 bp, Homo sapien
ccaaaagaaatgtctaactgttccatttattaa

SEQ ID NO: 766816 - DNA, 33 bp, Homo sapien
ccaaaagaaatgtctacctgttccatttattaa

SEQ ID NO: 766817 - DNA, 33 bp, Homo sapien
ttcagtaagataggaccgattaccttaaaaggt

SEQ ID NO: 766818 - DNA, 33 bp, Homo sapien
ttcagtaagataggactgattaccttaaaaggt

SEQ ID NO: 766819 - DNA, 33 bp, Homo sapien
ggttttctcctctgtaaatgaaaataagagtga

SEQ ID NO: 766820 - DNA, 33 bp, Homo sapien
ggttttctcctctgtagatgaaaataagagtga

SEQ ID NO: 766821 - DNA, 33 bp, Homo sapien
tgttcatgaaacagagaaaacacccatcactgg

SEQ ID NO: 766822 - DNA, 33 bp, Homo sapien
tgttcatgaaacagaggaaacacccatcactgg

SEQ ID NO: 766823 - DNA, 33 bp, Homo sapien
aggaggggacacggtacgggatgatgctggaag

SEQ ID NO: 766824 - DNA, 33 bp, Homo sapien
aggaggggacacggtatgggatgatgctggaag

SEQ ID NO: 766825 - DNA, 33 bp, Homo sapien
ttacaatcatgcaagacggttatatgtcatgcc

SEQ ID NO: 766826 - DNA, 33 bp, Homo sapien
ttacaatcatgcaagatggttatatgtcatgcc

SEQ ID NO: 766827 - DNA, 33 bp, Homo sapien
ctgtccacttggtgtcacctcaataaacattag

SEQ ID NO: 766828 - DNA, 33 bp, Homo sapien
ctgtccacttggtgtcccctcaataaacattag

SEQ ID NO: 766829 - DNA, 33 bp, Homo sapien
tctgctcgtctagtatcaagacgtaggggaggc

SEQ ID NO: 766830 - DNA, 33 bp, Homo sapien
tctgctcgtctagtatgaagacgtaggggaggc

SEQ ID NO: 766831 - DNA, 33 bp, Homo sapien
gctaagtaaggaggtacaatagctgtcctgaca

SEQ ID NO: 766832 - DNA, 33 bp, Homo sapien
gctaagtaaggaggtagaatagctgtcctgaca

SEQ ID NO: 766833 - DNA, 33 bp, Homo sapien
ccaagaggaagacagaccttgaagaagtaatta

SEQ ID NO: 766834 - DNA, 33 bp, Homo sapien
ccaagaggaagacagatcttgaagaagtaatta

SEQ ID NO: 766835 - DNA, 33 bp, Homo sapien
tgttggactaagaggcccagtggtttcttacag

SEQ ID NO: 766836 - DNA, 33 bp, Homo sapien
tgttggactaagaggctcagtggtttcttacag

SEQ ID NO: 766837 - DNA, 33 bp, Homo sapien
aaaatggaactgtgctcacacttccgtggagcc

SEQ ID NO: 766838 - DNA, 33 bp, Homo sapien
aaaatggaactgtgcttacacttccgtggagcc

SEQ ID NO: 766839 - DNA, 33 bp, Homo sapien
agagtctcttcaggtacaaaagtacaaaggtga

SEQ ID NO: 766840 - DNA, 33 bp, Homo sapien
agagtctcttcaggtagaaaagtacaaaggtga

SEQ ID NO: 766841 - DNA, 33 bp, Homo sapien
ggcaaggaaatagagactcattttgctaaaaga

SEQ ID NO: 766842 - DNA, 33 bp, Homo sapien
ggcaaggaaatagagagtcattttgctaaaaga

SEQ ID NO: 766843 - DNA, 33 bp, Homo sapien
cgagaatggggtaagcccgacatgtggaaattc

SEQ ID NO: 766844 - DNA, 33 bp, Homo sapien
cgagaatggggtaagctcgacatgtggaaattc

SEQ ID NO: 766845 - DNA, 33 bp, Homo sapien
tcaagaaaaccagaagcctatctgagaaagtga

SEQ ID NO: 766846 - DNA, 33 bp, Homo sapien
tcaagaaaaccagaaggctatctgagaaagtga

SEQ ID NO: 766847 - DNA, 33 bp, Homo sapien
aagagagactaaagcaaatgataaggaaatata

SEQ ID NO: 766848 - DNA, 33 bp, Homo sapien
aagagagactaaagcagatgataaggaaatata

SEQ ID NO: 766849 - DNA, 33 bp, Homo sapien
acatatccacacacaaatatcttacccattttc

SEQ ID NO: 766850 - DNA, 33 bp, Homo sapien
acatatccacacacaattatcttacccattttc

SEQ ID NO: 766851 - DNA, 33 bp, Homo sapien
tgttaagctgatttcacagacctcctctctttg

SEQ ID NO: 766852 - DNA, 33 bp, Homo sapien
tgttaagctgatttcatagacctcctctctttg

SEQ ID NO: 766853 - DNA, 33 bp, Homo sapien
tggaagcagtaggtccacatttctgaaggaggg

SEQ ID NO: 766854 - DNA, 33 bp, Homo sapien
tggaagcagtaggtcctcatttctgaaggaggg

SEQ ID NO: 766855 - DNA, 33 bp, Homo sapien
atatgcctccaatcagcataaatgcccattgct

SEQ ID NO: 766856 - DNA, 33 bp, Homo sapien
atatgcctccaatcagtataaatgcccattgct

SEQ ID NO: 766857 - DNA, 33 bp, Homo sapien
ctggcacactaagaatcatcaacatatggtaat

SEQ ID NO: 766858 - DNA, 33 bp, Homo sapien
ctggcacactaagaatgatcaacatatggtaat

SEQ ID NO: 766859 - DNA, 33 bp, Homo sapien
gagaaaaagaaaagaaaatgatgggcaactaag

SEQ ID NO: 766860 - DNA, 33 bp, Homo sapien
gagaaaaagaaaagaagatgatgggcaactaag

SEQ ID NO: 766861 - DNA, 33 bp, Homo sapien
ctagccatctgagcataaacaatctccctggat

SEQ ID NO: 766862 - DNA, 33 bp, Homo sapien
ctagccatctgagcatgaacaatctccctggat

SEQ ID NO: 766863 - DNA, 33 bp, Homo sapien
cagtcaactggtgtcaagactggaaagagaacg

SEQ ID NO: 766864 - DNA, 33 bp, Homo sapien
cagtcaactggtgtcaggactggaaagagaacg

SEQ ID NO: 766865 - DNA, 33 bp, Homo sapien
agttggtagatgcagacgcttttatttgtttat

SEQ ID NO: 766866 - DNA, 33 bp, Homo sapien
agttggtagatgcagatgcttttatttgtttat

SEQ ID NO: 766867 - DNA, 33 bp, Homo sapien
ggtatattaataagcaaatagactagtagaaaa

SEQ ID NO: 766868 - DNA, 33 bp, Homo sapien
ggtatattaataagcagatagactagtagaaaa

SEQ ID NO: 766869 - DNA, 33 bp, Homo sapien
ttcaggatgatcttgacagagaaaaacataaag

SEQ ID NO: 766870 - DNA, 33 bp, Homo sapien
ttcaggatgatcttgagagagaaaaacataaag

SEQ ID NO: 766871 - DNA, 33 bp, Homo sapien
ttggacaaaagggatacgattgtgtctcttctg

SEQ ID NO: 766872 - DNA, 33 bp, Homo sapien
ttggacaaaagggatatgattgtgtctcttctg

SEQ ID NO: 766873 - DNA, 33 bp, Homo sapien
tcgtgaacagtggaggaaactattatctaggct

SEQ ID NO: 766874 - DNA, 33 bp, Homo sapien
tcgtgaacagtggagggaactattatctaggct

SEQ ID NO: 766875 - DNA, 33 bp, Homo sapien
tgggtgttaccgataacgcagtgccagaagttc

SEQ ID NO: 766876 - DNA, 33 bp, Homo sapien
tgggtgttaccgataaggcagtgccagaagttc

SEQ ID NO: 766877 - DNA, 33 bp, Homo sapien
attattaaaggaatgacctatggtgctttctct

SEQ ID NO: 766878 - DNA, 33 bp, Homo sapien
attattaaaggaatgatctatggtgctttctct

SEQ ID NO: 766879 - DNA, 33 bp, Homo sapien
accctgctgtgaatgacgtaggacttgctgggg

SEQ ID NO: 766880 - DNA, 33 bp, Homo sapien
accctgctgtgaatgatgtaggacttgctgggg

SEQ ID NO: 766881 - DNA, 33 bp, Homo sapien
gaggcgaggtccatgaggttctcagtgcccagc

SEQ ID NO: 766882 - DNA, 33 bp, Homo sapien
gaggcgaggtccatgatgttctcagtgcccagc

SEQ ID NO: 766883 - DNA, 33 bp, Homo sapien
tgaataactctccaaaccttatcctgatagtga

SEQ ID NO: 766884 - DNA, 33 bp, Homo sapien
tgaataactctccaaagcttatcctgatagtga

SEQ ID NO: 766885 - DNA, 33 bp, Homo sapien
ttccctgggaccagcacaacgaatattttcaat

SEQ ID NO: 766886 - DNA, 33 bp, Homo sapien
ttccctgggaccagcataacgaatattttcaat

SEQ ID NO: 766887 - DNA, 33 bp, Homo sapien
ttccaccaagtatacacatgagaaaaccacaaa

SEQ ID NO: 766888 - DNA, 33 bp, Homo sapien
ttccaccaagtatacatatgagaaaaccacaaa

SEQ ID NO: 766889 - DNA, 33 bp, Homo sapien
taaaacaaatcccgccacaactgttttctgttc

SEQ ID NO: 766890 - DNA, 33 bp, Homo sapien
taaaacaaatcccgccgcaactgttttctgttc

SEQ ID NO: 766891 - DNA, 33 bp, Homo sapien
gctaactttagtgaccaatctaccatgtctcac

SEQ ID NO: 766892 - DNA, 33 bp, Homo sapien
gctaactttagtgacccatctaccatgtctcac

SEQ ID NO: 766893 - DNA, 33 bp, Homo sapien
ccctgcatcagggttaagtggtaaggggttcac

SEQ ID NO: 766894 - DNA, 33 bp, Homo sapien
ccctgcatcagggttaggtggtaaggggttcac

SEQ ID NO: 766895 - DNA, 33 bp, Homo sapien
tcatagtgagttttcaaaaggtatgccactggg

SEQ ID NO: 766896 - DNA, 33 bp, Homo sapien
tcatagtgagttttcagaaggtatgccactggg

SEQ ID NO: 766897 - DNA, 33 bp, Homo sapien
tatctcatgagtattaccatttctgtgttggga

SEQ ID NO: 766898 - DNA, 33 bp, Homo sapien
tatctcatgagtattatcatttctgtgttggga

SEQ ID NO: 766899 - DNA, 33 bp, Homo sapien
tcccagtcgcattgtacaagagcttcccatgct

SEQ ID NO: 766900 - DNA, 33 bp, Homo sapien
tcccagtcgcattgtataagagcttcccatgct

SEQ ID NO: 766901 - DNA, 33 bp, Homo sapien
aattcttgagcgtccaagtggcttgcttggatg

SEQ ID NO: 766902 - DNA, 33 bp, Homo sapien
aattcttgagcgtccaggtggcttgcttggatg

SEQ ID NO: 766903 - DNA, 33 bp, Homo sapien
accctctgggtcttgaacagtgcactctggtgc

SEQ ID NO: 766904 - DNA, 33 bp, Homo sapien
accctctgggtcttgagcagtgcactctggtgc

SEQ ID NO: 766905 - DNA, 33 bp, Homo sapien
taccactacactcaatcagttccttttaagtct

SEQ ID NO: 766906 - DNA, 33 bp, Homo sapien
taccactacactcaatgagttccttttaagtct

SEQ ID NO: 766907 - DNA, 33 bp, Homo sapien
ggaaacatggaagaaaatccaagtctctctgat

SEQ ID NO: 766908 - DNA, 33 bp, Homo sapien
ggaaacatggaagaaagtccaagtctctctgat

SEQ ID NO: 766909 - DNA, 33 bp, Homo sapien
acatgataggttgtaccgcattttaagactgaa

SEQ ID NO: 766910 - DNA, 33 bp, Homo sapien
acatgataggttgtactgcattttaagactgaa

SEQ ID NO: 766911 - DNA, 33 bp, Homo sapien
atctttcgggactcacgctatcatactttagag

SEQ ID NO: 766912 - DNA, 33 bp, Homo sapien
atctttcgggactcactctatcatactttagag

SEQ ID NO: 766913 - DNA, 33 bp, Homo sapien
cctcagcctgcacaaaggcaatgcttctaaccg

SEQ ID NO: 766914 - DNA, 33 bp, Homo sapien
cctcagcctgcacaaatgcaatgcttctaaccg

SEQ ID NO: 766915 - DNA, 33 bp, Homo sapien
tggggtgtgcttataaggagaatccactagacg

SEQ ID NO: 766916 - DNA, 33 bp, Homo sapien
tggggtgtgcttataatgagaatccactagacg

SEQ ID NO: 766917 - DNA, 33 bp, Homo sapien
cattaattgtgcagcacgtaatctattcacact

SEQ ID NO: 766918 - DNA, 33 bp, Homo sapien
cattaattgtgcagcaggtaatctattcacact

SEQ ID NO: 766919 - DNA, 33 bp, Homo sapien
gcgatactcacatatccaagttaagagggacac

SEQ ID NO: 766920 - DNA, 33 bp, Homo sapien
gcgatactcacatatctaagttaagagggacac

SEQ ID NO: 766921 - DNA, 33 bp, Homo sapien
gttgcttgaatctgaaatgttgtctttccactc

SEQ ID NO: 766922 - DNA, 33 bp, Homo sapien
gttgcttgaatctgaagtgttgtctttccactc

SEQ ID NO: 766923 - DNA, 33 bp, Homo sapien
acaaagataataaaaacacttatggcatcatct

SEQ ID NO: 766924 - DNA, 33 bp, Homo sapien
acaaagataataaaaagacttatggcatcatct

SEQ ID NO: 766925 - DNA, 33 bp, Homo sapien
ttttgtacattggaacagcagaagcaaggttta

SEQ ID NO: 766926 - DNA, 33 bp, Homo sapien
ttttgtacattggaactgcagaagcaaggttta

SEQ ID NO: 766927 - DNA, 33 bp, Homo sapien
aggcttctaagcgaaacgatttgctaatggcaa

SEQ ID NO: 766928 - DNA, 33 bp, Homo sapien
aggcttctaagcgaaatgatttgctaatggcaa

SEQ ID NO: 766929 - DNA, 33 bp, Homo sapien
ttttgtaggacaaagaagtaaggtcagagccct

SEQ ID NO: 766930 - DNA, 33 bp, Homo sapien
ttttgtaggacaaagaggtaaggtcagagccct

SEQ ID NO: 766931 - DNA, 33 bp, Homo sapien
atggattcctttcacactgacatctgaaacaca

SEQ ID NO: 766932 - DNA, 33 bp, Homo sapien
atggattcctttcacattgacatctgaaacaca

SEQ ID NO: 766933 - DNA, 33 bp, Homo sapien
tactatttttaggctgacaactcccaaatatgt

SEQ ID NO: 766934 - DNA, 33 bp, Homo sapien
tactatttttaggctggcaactcccaaatatgt

SEQ ID NO: 766935 - DNA, 33 bp, Homo sapien
tttcaaccaatcaccaatcagaatacgcttaaa

SEQ ID NO: 766936 - DNA, 33 bp, Homo sapien
tttcaaccaatcaccagtcagaatacgcttaaa

SEQ ID NO: 766937 - DNA, 33 bp, Homo sapien
tttgcatagaggcaggcaccacatagagactaa

SEQ ID NO: 766938 - DNA, 33 bp, Homo sapien
tttgcatagaggcaggtaccacatagagactaa

SEQ ID NO: 766939 - DNA, 33 bp, Homo sapien
tgaaattcaagaccaaactcaatcaaatgctaa

SEQ ID NO: 766940 - DNA, 33 bp, Homo sapien
tgaaattcaagaccaagctcaatcaaatgctaa

SEQ ID NO: 766941 - DNA, 33 bp, Homo sapien
atgatcctataaactcgcttctcaatgggagct

SEQ ID NO: 766942 - DNA, 33 bp, Homo sapien
atgatcctataaactctcttctcaatgggagct

SEQ ID NO: 766943 - DNA, 33 bp, Homo sapien
aagagcaaaaacatggccagttgagtcaatctc

SEQ ID NO: 766944 - DNA, 33 bp, Homo sapien
aagagcaaaaacatggtcagttgagtcaatctc

SEQ ID NO: 766945 - DNA, 33 bp, Homo sapien
ttgttttcagttgctaaattttggaataattcg

SEQ ID NO: 766946 - DNA, 33 bp, Homo sapien
ttgttttcagttgctacattttggaataattcg

SEQ ID NO: 766947 - DNA, 33 bp, Homo sapien
attctctttggtttcaatagttacctggttttg

SEQ ID NO: 766948 - DNA, 33 bp, Homo sapien
attctctttggtttcagtagttacctggttttg

SEQ ID NO: 766949 - DNA, 33 bp, Homo sapien
ccctgaatgagataagcaactgagcatggtgcc

SEQ ID NO: 766950 - DNA, 33 bp, Homo sapien
ccctgaatgagataagtaactgagcatggtgcc

SEQ ID NO: 766951 - DNA, 33 bp, Homo sapien
tagcatttatgtaaatcaaaaccactgacacta

SEQ ID NO: 766952 - DNA, 33 bp, Homo sapien
tagcatttatgtaaatgaaaaccactgacacta

SEQ ID NO: 766953 - DNA, 33 bp, Homo sapien
ctcacaagagggagaacttactaccaccagaat

SEQ ID NO: 766954 - DNA, 33 bp, Homo sapien
ctcacaagagggagaatttactaccaccagaat

SEQ ID NO: 766955 - DNA, 33 bp, Homo sapien
tgcaacaaagtagctacggaaacaatttcatga

SEQ ID NO: 766956 - DNA, 33 bp, Homo sapien
tgcaacaaagtagctatggaaacaatttcatga

SEQ ID NO: 766957 - DNA, 33 bp, Homo sapien
taaagaacgtatggaaagggcacaatttaggaa

SEQ ID NO: 766958 - DNA, 33 bp, Homo sapien
taaagaacgtatggaaggggcacaatttaggaa

SEQ ID NO: 766959 - DNA, 33 bp, Homo sapien
ggaaataggttagttaagttgaggcttaaagat

SEQ ID NO: 766960 - DNA, 33 bp, Homo sapien
ggaaataggttagttaggttgaggcttaaagat

SEQ ID NO: 766961 - DNA, 33 bp, Homo sapien
agatgtttaactacataaggtttcaaggaaata

SEQ ID NO: 766962 - DNA, 33 bp, Homo sapien
agatgtttaactacatgaggtttcaaggaaata

SEQ ID NO: 766963 - DNA, 33 bp, Homo sapien
atgaattagacataggacaacataatttaaaga

SEQ ID NO: 766964 - DNA, 33 bp, Homo sapien
atgaattagacatagggcaacataatttaaaga

SEQ ID NO: 766965 - DNA, 33 bp, Homo sapien
tccagctttgcaaataacagtcaaccactctca

SEQ ID NO: 766966 - DNA, 33 bp, Homo sapien
tccagctttgcaaatagcagtcaaccactctca

SEQ ID NO: 766967 - DNA, 33 bp, Homo sapien
tgtgttctgtcttttccaagattgcttcatcag

SEQ ID NO: 766968 - DNA, 33 bp, Homo sapien
tgtgttctgtcttttctaagattgcttcatcag

SEQ ID NO: 766969 - DNA, 33 bp, Homo sapien
ctgtccagaactaaaacgagatccctgctctgc

SEQ ID NO: 766970 - DNA, 33 bp, Homo sapien
ctgtccagaactaaaatgagatccctgctctgc

SEQ ID NO: 766971 - DNA, 33 bp, Homo sapien
ctgggaccacaaacaacgtagatgaaaacaggt

SEQ ID NO: 766972 - DNA, 33 bp, Homo sapien
ctgggaccacaaacaaggtagatgaaaacaggt

SEQ ID NO: 766973 - DNA, 33 bp, Homo sapien
gcaattaattcatcctcactgctcagtctttgg

SEQ ID NO: 766974 - DNA, 33 bp, Homo sapien
gcaattaattcatccttactgctcagtctttgg

SEQ ID NO: 766975 - DNA, 33 bp, Homo sapien
gagacttggagcagagaaaagcaggtccctgga

SEQ ID NO: 766976 - DNA, 33 bp, Homo sapien
gagacttggagcagaggaaagcaggtccctgga

SEQ ID NO: 766977 - DNA, 33 bp, Homo sapien
acttgcaagaaacaaacgcctgcaaaaatcagg

SEQ ID NO: 766978 - DNA, 33 bp, Homo sapien
acttgcaagaaacaaatgcctgcaaaaatcagg

SEQ ID NO: 766979 - DNA, 33 bp, Homo sapien
aacaataatgataatacaacactttctgtgact

SEQ ID NO: 766980 - DNA, 33 bp, Homo sapien
aacaataatgataatagaacactttctgtgact

SEQ ID NO: 766981 - DNA, 33 bp, Homo sapien
aacctcatgaatgacgaactaggtcaggcttcc

SEQ ID NO: 766982 - DNA, 33 bp, Homo sapien
aacctcatgaatgacggactaggtcaggcttcc

SEQ ID NO: 766983 - DNA, 33 bp, Homo sapien
aggaggcaaagagagacgccacttgggaacagg

SEQ ID NO: 766984 - DNA, 33 bp, Homo sapien
aggaggcaaagagagaggccacttgggaacagg

SEQ ID NO: 766985 - DNA, 33 bp, Homo sapien
aggttttgctcacttaaagtgcctcaaaggtat

SEQ ID NO: 766986 - DNA, 33 bp, Homo sapien
aggttttgctcacttacagtgcctcaaaggtat

SEQ ID NO: 766987 - DNA, 33 bp, Homo sapien
tacaatgcaaatacccaagagagagtcacatgg

SEQ ID NO: 766988 - DNA, 33 bp, Homo sapien
tacaatgcaaatacccgagagagagtcacatgg

SEQ ID NO: 766989 - DNA, 33 bp, Homo sapien
aggcttcccttcctacaagctccacactcctag

SEQ ID NO: 766990 - DNA, 33 bp, Homo sapien
aggcttcccttcctacgagctccacactcctag

SEQ ID NO: 766991 - DNA, 33 bp, Homo sapien
tcagccatggcctttacgttcaggtgacaataa

SEQ ID NO: 766992 - DNA, 33 bp, Homo sapien
tcagccatggcctttatgttcaggtgacaataa

SEQ ID NO: 766993 - DNA, 33 bp, Homo sapien
gaataatctgggtcaacctgtcaatttctgggc

SEQ ID NO: 766994 - DNA, 33 bp, Homo sapien
gaataatctgggtcaatctgtcaatttctgggc

SEQ ID NO: 766995 - DNA, 33 bp, Homo sapien
ccagtttgagcaaataatatgcagaatgaagtg

SEQ ID NO: 766996 - DNA, 33 bp, Homo sapien
ccagtttgagcaaatactatgcagaatgaagtg

SEQ ID NO: 766997 - DNA, 33 bp, Homo sapien
gatgaatcaggccaaaccaggattctgctctca

SEQ ID NO: 766998 - DNA, 33 bp, Homo sapien
gatgaatcaggccaaatcaggattctgctctca

SEQ ID NO: 766999 - DNA, 33 bp, Homo sapien
agataatatgggggacacaaagatgaatcaggc

SEQ ID NO: 767000 - DNA, 33 bp, Homo sapien
agataatatgggggacgcaaagatgaatcaggc

SEQ ID NO: 767001 - DNA, 33 bp, Homo sapien
tggcaactgtgggttaactaaaaagcagatctg

SEQ ID NO: 767002 - DNA, 33 bp, Homo sapien
tggcaactgtgggttatctaaaaagcagatctg

SEQ ID NO: 767003 - DNA, 33 bp, Homo sapien
gagagatactgaataacggagatctagatttaa

SEQ ID NO: 767004 - DNA, 33 bp, Homo sapien
gagagatactgaataatggagatctagatttaa

SEQ ID NO: 767005 - DNA, 33 bp, Homo sapien
tccattcagaactatccatttccatggctttaa

SEQ ID NO: 767006 - DNA, 33 bp, Homo sapien
tccattcagaactatctatttccatggctttaa

SEQ ID NO: 767007 - DNA, 33 bp, Homo sapien
ttaagcgcacctctgacgtgtccctagctgctg

SEQ ID NO: 767008 - DNA, 33 bp, Homo sapien
ttaagcgcacctctgatgtgtccctagctgctg

SEQ ID NO: 767009 - DNA, 33 bp, Homo sapien
tttctgcattttcttaccaagttaaatctgtct

SEQ ID NO: 767010 - DNA, 33 bp, Homo sapien
tttctgcattttcttatcaagttaaatctgtct

SEQ ID NO: 767011 - DNA, 33 bp, Homo sapien
tggtgggataaagttcaaactccttctcaggtc

SEQ ID NO: 767012 - DNA, 33 bp, Homo sapien
tggtgggataaagttccaactccttctcaggtc

SEQ ID NO: 767013 - DNA, 33 bp, Homo sapien
agatgtttaagccaacaaattggccagataaag

SEQ ID NO: 767014 - DNA, 33 bp, Homo sapien
agatgtttaagccaaccaattggccagataaag

SEQ ID NO: 767015 - DNA, 33 bp, Homo sapien
ttaatcattgttatacagcttcacatattcaga

SEQ ID NO: 767016 - DNA, 33 bp, Homo sapien
ttaatcattgttatactgcttcacatattcaga

SEQ ID NO: 767017 - DNA, 33 bp, Homo sapien
tgctccaagtgatgtacggctttggggtctcta

SEQ ID NO: 767018 - DNA, 33 bp, Homo sapien
tgctccaagtgatgtatggctttggggtctcta

SEQ ID NO: 767019 - DNA, 33 bp, Homo sapien
ggattaatactaataacaggctggccactgtag

SEQ ID NO: 767020 - DNA, 33 bp, Homo sapien
ggattaatactaataataggctggccactgtag

SEQ ID NO: 767021 - DNA, 33 bp, Homo sapien
tgattcactccaggcacgaatattcttcctttc

SEQ ID NO: 767022 - DNA, 33 bp, Homo sapien
tgattcactccaggcatgaatattcttcctttc

SEQ ID NO: 767023 - DNA, 33 bp, Homo sapien
ggttatccaggtaaatcatggatagataggttg

SEQ ID NO: 767024 - DNA, 33 bp, Homo sapien
ggttatccaggtaaattatggatagataggttg

SEQ ID NO: 767025 - DNA, 33 bp, Homo sapien
acctaaaataagataacgaccaaggatgtaaag

SEQ ID NO: 767026 - DNA, 33 bp, Homo sapien
acctaaaataagataatgaccaaggatgtaaag

SEQ ID NO: 767027 - DNA, 33 bp, Homo sapien
attatgatgcctataaaattgctaggcattagg

SEQ ID NO: 767028 - DNA, 33 bp, Homo sapien
attatgatgcctataacattgctaggcattagg

SEQ ID NO: 767029 - DNA, 33 bp, Homo sapien
tttggccaccgtgtgacgactccttccctcttt

SEQ ID NO: 767030 - DNA, 33 bp, Homo sapien
tttggccaccgtgtgatgactccttccctcttt

SEQ ID NO: 767031 - DNA, 33 bp, Homo sapien
caggtgaaagggatgacgtaagaggaacgtttg

SEQ ID NO: 767032 - DNA, 33 bp, Homo sapien
caggtgaaagggatgatgtaagaggaacgtttg

SEQ ID NO: 767033 - DNA, 33 bp, Homo sapien
aattgggagcaaattaactctttgcattgacat

SEQ ID NO: 767034 - DNA, 33 bp, Homo sapien
aattgggagcaaattacctctttgcattgacat

SEQ ID NO: 767035 - DNA, 33 bp, Homo sapien
tgatgtgccttattgcacttttgacaggggttt

SEQ ID NO: 767036 - DNA, 33 bp, Homo sapien
tgatgtgccttattgcgcttttgacaggggttt

SEQ ID NO: 767037 - DNA, 33 bp, Homo sapien
aggaaggcatcatcttaaaaccagagaccaaac

SEQ ID NO: 767038 - DNA, 33 bp, Homo sapien
aggaaggcatcatcttgaaaccagagaccaaac

SEQ ID NO: 767039 - DNA, 33 bp, Homo sapien
atggtcttttctctgccaagtggtaactcagga

SEQ ID NO: 767040 - DNA, 33 bp, Homo sapien
atggtcttttctctgctaagtggtaactcagga

SEQ ID NO: 767041 - DNA, 33 bp, Homo sapien
gaacatcactttagaaggaaggcttaaataaat

SEQ ID NO: 767042 - DNA, 33 bp, Homo sapien
gaacatcactttagaatgaaggcttaaataaat

SEQ ID NO: 767043 - DNA, 33 bp, Homo sapien
ctctaagacttggaaactgaaaaagcaagctgt

SEQ ID NO: 767044 - DNA, 33 bp, Homo sapien
ctctaagacttggaaagtgaaaaagcaagctgt

SEQ ID NO: 767045 - DNA, 33 bp, Homo sapien
ttccaagacccaagaagtcctcagttctatacc

SEQ ID NO: 767046 - DNA, 33 bp, Homo sapien
ttccaagacccaagaattcctcagttctatacc

SEQ ID NO: 767047 - DNA, 33 bp, Homo sapien
aacagggaatctgagcacaaaagctaaccttct

SEQ ID NO: 767048 - DNA, 33 bp, Homo sapien
aacagggaatctgagcgcaaaagctaaccttct

SEQ ID NO: 767049 - DNA, 33 bp, Homo sapien
aggcaataaaggctccaatacttctcccttccc

SEQ ID NO: 767050 - DNA, 33 bp, Homo sapien
aggcaataaaggctcccatacttctcccttccc

SEQ ID NO: 767051 - DNA, 33 bp, Homo sapien
tttgttcttctttaagaatcagcagtgacttaa

SEQ ID NO: 767052 - DNA, 33 bp, Homo sapien
tttgttcttctttaaggatcagcagtgacttaa

SEQ ID NO: 767053 - DNA, 33 bp, Homo sapien
ccatgtctacagataagacatgctcccacattg

SEQ ID NO: 767054 - DNA, 33 bp, Homo sapien
ccatgtctacagataatacatgctcccacattg

SEQ ID NO: 767055 - DNA, 33 bp, Homo sapien
attctcgttttggaaacatattagcagctcaaa

SEQ ID NO: 767056 - DNA, 33 bp, Homo sapien
attctcgttttggaaatatattagcagctcaaa

SEQ ID NO: 767057 - DNA, 33 bp, Homo sapien
taacccagcaatagcaatcatgcaattatcaga

SEQ ID NO: 767058 - DNA, 33 bp, Homo sapien
taacccagcaatagcagtcatgcaattatcaga

SEQ ID NO: 767059 - DNA, 33 bp, Homo sapien
tagtagtaaagaaatgaacaacaatcagtatca

SEQ ID NO: 767060 - DNA, 33 bp, Homo sapien
tagtagtaaagaaatggacaacaatcagtatca

SEQ ID NO: 767061 - DNA, 33 bp, Homo sapien
tcagttttacataaaaaagtatggcaccaagaa

SEQ ID NO: 767062 - DNA, 33 bp, Homo sapien
tcagttttacataaaagagtatggcaccaagaa

SEQ ID NO: 767063 - DNA, 33 bp, Homo sapien
aggtcatctttccccaaagtctgcttgctctaa

SEQ ID NO: 767064 - DNA, 33 bp, Homo sapien
aggtcatctttccccagagtctgcttgctctaa

SEQ ID NO: 767065 - DNA, 33 bp, Homo sapien
ccccaacacagctaaggatttaagccataacag

SEQ ID NO: 767066 - DNA, 33 bp, Homo sapien
ccccaacacagctaagtatttaagccataacag

SEQ ID NO: 767067 - DNA, 33 bp, Homo sapien
catctctgcagaccccaaaaacagtgagtttgt

SEQ ID NO: 767068 - DNA, 33 bp, Homo sapien
catctctgcagaccccgaaaacagtgagtttgt

SEQ ID NO: 767069 - DNA, 33 bp, Homo sapien
gatctgcttcaaaaaaaacctgttgaatgaata

SEQ ID NO: 767070 - DNA, 33 bp, Homo sapien
gatctgcttcaaaaaatacctgttgaatgaata

SEQ ID NO: 767071 - DNA, 33 bp, Homo sapien
gaaaccccaacctggaaatgttataggctatgt

SEQ ID NO: 767072 - DNA, 33 bp, Homo sapien
gaaaccccaacctggagatgttataggctatgt

SEQ ID NO: 767073 - DNA, 33 bp, Homo sapien
cgtggggatgaaatacaaaattcctgaaagcca

SEQ ID NO: 767074 - DNA, 33 bp, Homo sapien
cgtggggatgaaatacgaaattcctgaaagcca

SEQ ID NO: 767075 - DNA, 33 bp, Homo sapien
aagccaattattagggaagcacaaatttatttt

SEQ ID NO: 767076 - DNA, 33 bp, Homo sapien
aagccaattattaggggagcacaaatttatttt

SEQ ID NO: 767077 - DNA, 33 bp, Homo sapien
ttcagatgcttctaaaaataccaagtcatattg

SEQ ID NO: 767078 - DNA, 33 bp, Homo sapien
ttcagatgcttctaaagataccaagtcatattg

SEQ ID NO: 767079 - DNA, 33 bp, Homo sapien
tgtgtttttatatttgaacatttggcactacat

SEQ ID NO: 767080 - DNA, 33 bp, Homo sapien
tgtgtttttatatttggacatttggcactacat

SEQ ID NO: 767081 - DNA, 33 bp, Homo sapien
agttttggcaggggtgaaaaagcataattttaa

SEQ ID NO: 767082 - DNA, 33 bp, Homo sapien
agttttggcaggggtggaaaagcataattttaa

SEQ ID NO: 767083 - DNA, 33 bp, Homo sapien
tgcttaataagttacaacgcaaggattagaagc

SEQ ID NO: 767084 - DNA, 33 bp, Homo sapien
tgcttaataagttacaccgcaaggattagaagc

SEQ ID NO: 767085 - DNA, 33 bp, Homo sapien
cagtctcccaacaaacccagtagaggcaccaca

SEQ ID NO: 767086 - DNA, 33 bp, Homo sapien
cagtctcccaacaaactcagtagaggcaccaca

SEQ ID NO: 767087 - DNA, 33 bp, Homo sapien
ttcatgcttgtttagaaatgtgacggctaggcg

SEQ ID NO: 767088 - DNA, 33 bp, Homo sapien
ttcatgcttgtttagatatgtgacggctaggcg

SEQ ID NO: 767089 - DNA, 33 bp, Homo sapien
cttcacatcctctctaacatttgttggttcctg

SEQ ID NO: 767090 - DNA, 33 bp, Homo sapien
cttcacatcctctctagcatttgttggttcctg

SEQ ID NO: 767091 - DNA, 33 bp, Homo sapien
ttcctaattagagaacggtggaagcctaatgat

SEQ ID NO: 767092 - DNA, 33 bp, Homo sapien
ttcctaattagagaactgtggaagcctaatgat

SEQ ID NO: 767093 - DNA, 33 bp, Homo sapien
tgtcagtctaccttaaccatccattcagtctac

SEQ ID NO: 767094 - DNA, 33 bp, Homo sapien
tgtcagtctaccttaagcatccattcagtctac

SEQ ID NO: 767095 - DNA, 33 bp, Homo sapien
cataaagaggtagcaaatacaacaaaagaaaaa

SEQ ID NO: 767096 - DNA, 33 bp, Homo sapien
cataaagaggtagcaagtacaacaaaagaaaaa

SEQ ID NO: 767097 - DNA, 33 bp, Homo sapien
ggaaatacctacgcaaagtcaagcgaatattaa

SEQ ID NO: 767098 - DNA, 33 bp, Homo sapien
ggaaatacctacgcaaggtcaagcgaatattaa

SEQ ID NO: 767099 - DNA, 33 bp, Homo sapien
aagtggaggatgtgcaaacctgcgtaccctacc

SEQ ID NO: 767100 - DNA, 33 bp, Homo sapien
aagtggaggatgtgcagacctgcgtaccctacc

SEQ ID NO: 767101 - DNA, 33 bp, Homo sapien
ccttcactcaaaggccacagctctgtcggacag

SEQ ID NO: 767102 - DNA, 33 bp, Homo sapien
ccttcactcaaaggccgcagctctgtcggacag

SEQ ID NO: 767103 - DNA, 33 bp, Homo sapien
agagatgactttagagaaatcgtagcagagatc

SEQ ID NO: 767104 - DNA, 33 bp, Homo sapien
agagatgactttagagtaatcgtagcagagatc

SEQ ID NO: 767105 - DNA, 33 bp, Homo sapien
ccaattagtgacttcacagtaggtgctaatatc

SEQ ID NO: 767106 - DNA, 33 bp, Homo sapien
ccaattagtgacttcatagtaggtgctaatatc

SEQ ID NO: 767107 - DNA, 33 bp, Homo sapien
gtccaatttcagtggaaaatgctcatagtataa

SEQ ID NO: 767108 - DNA, 33 bp, Homo sapien
gtccaatttcagtggagaatgctcatagtataa

SEQ ID NO: 767109 - DNA, 33 bp, Homo sapien
tatcctgagtaacaagaatgttatgatctcatc

SEQ ID NO: 767110 - DNA, 33 bp, Homo sapien
tatcctgagtaacaaggatgttatgatctcatc

SEQ ID NO: 767111 - DNA, 33 bp, Homo sapien
ggtatggtagaagaaaatcttgccatagtgacc

SEQ ID NO: 767112 - DNA, 33 bp, Homo sapien
ggtatggtagaagaaattcttgccatagtgacc

SEQ ID NO: 767113 - DNA, 33 bp, Homo sapien
gtagagcaggtttttaaagtcgtggtatgtatg

SEQ ID NO: 767114 - DNA, 33 bp, Homo sapien
gtagagcaggtttttagagtcgtggtatgtatg

SEQ ID NO: 767115 - DNA, 33 bp, Homo sapien
tccatgtaaatatgcgcaaataatgtaactgga

SEQ ID NO: 767116 - DNA, 33 bp, Homo sapien
tccatgtaaatatgcgtaaataatgtaactgga

SEQ ID NO: 767117 - DNA, 33 bp, Homo sapien
cctagtgtgagtcagtaaatgccagttttgagg

SEQ ID NO: 767118 - DNA, 33 bp, Homo sapien
cctagtgtgagtcagttaatgccagttttgagg

SEQ ID NO: 767119 - DNA, 33 bp, Homo sapien
gattagaggctttaaactgacatccataaattc

SEQ ID NO: 767120 - DNA, 33 bp, Homo sapien
gattagaggctttaaattgacatccataaattc

SEQ ID NO: 767121 - DNA, 33 bp, Homo sapien
ctttgctttgcaaaacaggtggtcactttcaaa

SEQ ID NO: 767122 - DNA, 33 bp, Homo sapien
ctttgctttgcaaaacgggtggtcactttcaaa

SEQ ID NO: 767123 - DNA, 33 bp, Homo sapien
tgtaaatgttccagaggattctgtgttagggat

SEQ ID NO: 767124 - DNA, 33 bp, Homo sapien
tgtaaatgttccagagtattctgtgttagggat

SEQ ID NO: 767125 - DNA, 33 bp, Homo sapien
actttattgtggagtaaaatttttgccttttta

SEQ ID NO: 767126 - DNA, 33 bp, Homo sapien
actttattgtggagtagaatttttgccttttta

SEQ ID NO: 767127 - DNA, 33 bp, Homo sapien
atgggttacaatcaggaaaactaattgtattta

SEQ ID NO: 767128 - DNA, 33 bp, Homo sapien
atgggttacaatcagggaaactaattgtattta

SEQ ID NO: 767129 - DNA, 33 bp, Homo sapien
tttgtaattggacaaacgaggaagtgacaagca

SEQ ID NO: 767130 - DNA, 33 bp, Homo sapien
tttgtaattggacaaatgaggaagtgacaagca

SEQ ID NO: 767131 - DNA, 33 bp, Homo sapien
cccaaaagcaattgcaacagtaacaaaaacaga

SEQ ID NO: 767132 - DNA, 33 bp, Homo sapien
cccaaaagcaattgcagcagtaacaaaaacaga

SEQ ID NO: 767133 - DNA, 33 bp, Homo sapien
ttgtcaaactccctacacctaccaactgggctc

SEQ ID NO: 767134 - DNA, 33 bp, Homo sapien
ttgtcaaactccctacgcctaccaactgggctc

SEQ ID NO: 767135 - DNA, 33 bp, Homo sapien
gcttttggtcattacaatagtgaataacctagt

SEQ ID NO: 767136 - DNA, 33 bp, Homo sapien
gcttttggtcattacagtagtgaataacctagt

SEQ ID NO: 767137 - DNA, 33 bp, Homo sapien
caggggcctgcacatgaaagtctattcacccct

SEQ ID NO: 767138 - DNA, 33 bp, Homo sapien
caggggcctgcacatgcaagtctattcacccct

SEQ ID NO: 767139 - DNA, 33 bp, Homo sapien
aagaggtctgggatggaactcaggaattggaat

SEQ ID NO: 767140 - DNA, 33 bp, Homo sapien
aagaggtctgggatggtactcaggaattggaat

SEQ ID NO: 767141 - DNA, 33 bp, Homo sapien
aagtagctagaactaacgtactcctgaataaca

SEQ ID NO: 767142 - DNA, 33 bp, Homo sapien
aagtagctagaactaatgtactcctgaataaca

SEQ ID NO: 767143 - DNA, 33 bp, Homo sapien
tgaaataagccagtcacgaaacaacaagtattg

SEQ ID NO: 767144 - DNA, 33 bp, Homo sapien
tgaaataagccagtcatgaaacaacaagtattg

SEQ ID NO: 767145 - DNA, 33 bp, Homo sapien
taagaagtgattgttggaatgctctctattggt

SEQ ID NO: 767146 - DNA, 33 bp, Homo sapien
taagaagtgattgttgtaatgctctctattggt

SEQ ID NO: 767147 - DNA, 33 bp, Homo sapien
aatatttggaagctaactgcacctgaggtcagg

SEQ ID NO: 767148 - DNA, 33 bp, Homo sapien
aatatttggaagctaattgcacctgaggtcagg

SEQ ID NO: 767149 - DNA, 33 bp, Homo sapien
atttgtcctggatttccagcttgtagtacattg

SEQ ID NO: 767150 - DNA, 33 bp, Homo sapien
atttgtcctggatttctagcttgtagtacattg

SEQ ID NO: 767151 - DNA, 33 bp, Homo sapien
tgcactaaactctaagaatgataaatgaaagtc

SEQ ID NO: 767152 - DNA, 33 bp, Homo sapien
tgcactaaactctaaggatgataaatgaaagtc

SEQ ID NO: 767153 - DNA, 33 bp, Homo sapien
ttttgtgcaaaccagaatccaaccaagagttat

SEQ ID NO: 767154 - DNA, 33 bp, Homo sapien
ttttgtgcaaaccagagtccaaccaagagttat

SEQ ID NO: 767155 - DNA, 33 bp, Homo sapien
tttcaactccttaataacacgcataaagctttc

SEQ ID NO: 767156 - DNA, 33 bp, Homo sapien
tttcaactccttaatagcacgcataaagctttc

SEQ ID NO: 767157 - DNA, 33 bp, Homo sapien
ttactctgagagctaacaaagcaagatctctga

SEQ ID NO: 767158 - DNA, 33 bp, Homo sapien
ttactctgagagctaataaagcaagatctctga

SEQ ID NO: 767159 - DNA, 33 bp, Homo sapien
aaaaatcccaaaggggccatcaactgtaatact

SEQ ID NO: 767160 - DNA, 33 bp, Homo sapien
aaaaatcccaaaggggtcatcaactgtaatact

SEQ ID NO: 767161 - DNA, 33 bp, Homo sapien
ctcccttactaaaggacccatgtaaaacacagt

SEQ ID NO: 767162 - DNA, 33 bp, Homo sapien
ctcccttactaaaggatccatgtaaaacacagt

SEQ ID NO: 767163 - DNA, 33 bp, Homo sapien
tggctgggcaaataaacggtttggtttacaagg

SEQ ID NO: 767164 - DNA, 33 bp, Homo sapien
tggctgggcaaataaatggtttggtttacaagg

SEQ ID NO: 767165 - DNA, 33 bp, Homo sapien
ctctttggtttcaagaacattgaatgcttaaaa

SEQ ID NO: 767166 - DNA, 33 bp, Homo sapien
ctctttggtttcaagaccattgaatgcttaaaa

SEQ ID NO: 767167 - DNA, 33 bp, Homo sapien
tgcagaaaatataggccattaatgtagatccaa

SEQ ID NO: 767168 - DNA, 33 bp, Homo sapien
tgcagaaaatataggcgattaatgtagatccaa

SEQ ID NO: 767169 - DNA, 33 bp, Homo sapien
acagagctgtagccataacattactcaatttca

SEQ ID NO: 767170 - DNA, 33 bp, Homo sapien
acagagctgtagccatcacattactcaatttca

SEQ ID NO: 767171 - DNA, 33 bp, Homo sapien
cagccaggcactggataaggagctttttaagca

SEQ ID NO: 767172 - DNA, 33 bp, Homo sapien
cagccaggcactggattaggagctttttaagca

SEQ ID NO: 767173 - DNA, 33 bp, Homo sapien
cttctccttcatcactaaaatttctcttggcca

SEQ ID NO: 767174 - DNA, 33 bp, Homo sapien
cttctccttcatcactgaaatttctcttggcca

SEQ ID NO: 767175 - DNA, 33 bp, Homo sapien
attcaaaggatactgaaaaggacttgttagaga

SEQ ID NO: 767176 - DNA, 33 bp, Homo sapien
attcaaaggatactgagaaggacttgttagaga

SEQ ID NO: 767177 - DNA, 33 bp, Homo sapien
ttgtattgcagaaatcaaggaaagactatcaaa

SEQ ID NO: 767178 - DNA, 33 bp, Homo sapien
ttgtattgcagaaatcgaggaaagactatcaaa

SEQ ID NO: 767179 - DNA, 33 bp, Homo sapien
ttgtctctctgctttcaagtaatcctgccattt

SEQ ID NO: 767180 - DNA, 33 bp, Homo sapien
ttgtctctctgctttcgagtaatcctgccattt

SEQ ID NO: 767181 - DNA, 33 bp, Homo sapien
aaacatttgtatgtatcaagaatggttattgca

SEQ ID NO: 767182 - DNA, 33 bp, Homo sapien
aaacatttgtatgtatgaagaatggttattgca

SEQ ID NO: 767183 - DNA, 33 bp, Homo sapien
ttaaaaaattccacagccatagctatttccctt

SEQ ID NO: 767184 - DNA, 33 bp, Homo sapien
ttaaaaaattccacagtcatagctatttccctt

SEQ ID NO: 767185 - DNA, 33 bp, Homo sapien
ccaatatgttttccacaaggcttgcaattttac

SEQ ID NO: 767186 - DNA, 33 bp, Homo sapien
ccaatatgttttccacgaggcttgcaattttac

SEQ ID NO: 767187 - DNA, 33 bp, Homo sapien
ctaaacagactttgaccggatgtttcaatcatt

SEQ ID NO: 767188 - DNA, 33 bp, Homo sapien
ctaaacagactttgactggatgtttcaatcatt

SEQ ID NO: 767189 - DNA, 33 bp, Homo sapien
gcatactcgttactaaatcaaccagcctactgg

SEQ ID NO: 767190 - DNA, 33 bp, Homo sapien
gcatactcgttactaagtcaaccagcctactgg

SEQ ID NO: 767191 - DNA, 33 bp, Homo sapien
atatatcttcttgcacaggtacacataactctt

SEQ ID NO: 767192 - DNA, 33 bp, Homo sapien
atatatcttcttgcacgggtacacataactctt

SEQ ID NO: 767193 - DNA, 33 bp, Homo sapien
gaaacacataatacaaaaaatgctcatatactc

SEQ ID NO: 767194 - DNA, 33 bp, Homo sapien
gaaacacataatacaacaaatgctcatatactc

SEQ ID NO: 767195 - DNA, 33 bp, Homo sapien
aagagagtttccaccaaattttaatggaacgag

SEQ ID NO: 767196 - DNA, 33 bp, Homo sapien
aagagagtttccaccacattttaatggaacgag

SEQ ID NO: 767197 - DNA, 33 bp, Homo sapien
agctgaggaaaaaacactggaattcagatcaac

SEQ ID NO: 767198 - DNA, 33 bp, Homo sapien
agctgaggaaaaaacattggaattcagatcaac

SEQ ID NO: 767199 - DNA, 33 bp, Homo sapien
agagagaggataaaaaccgaagacaatactaga

SEQ ID NO: 767200 - DNA, 33 bp, Homo sapien
agagagaggataaaaatcgaagacaatactaga

SEQ ID NO: 767201 - DNA, 33 bp, Homo sapien
ttacattccactcccccccgggaaagcttctct

SEQ ID NO: 767202 - DNA, 33 bp, Homo sapien
ttacattccactccccgccgggaaagcttctct

SEQ ID NO: 767203 - DNA, 33 bp, Homo sapien
aaaaatccatccatgcaaaaagaagtctaggct

SEQ ID NO: 767204 - DNA, 33 bp, Homo sapien
aaaaatccatccatgcgaaaagaagtctaggct

SEQ ID NO: 767205 - DNA, 33 bp, Homo sapien
tccttttaatggtggaaggctacagtctgtcat

SEQ ID NO: 767206 - DNA, 33 bp, Homo sapien
tccttttaatggtggagggctacagtctgtcat

SEQ ID NO: 767207 - DNA, 33 bp, Homo sapien
tcacattagtcaagcaagctcttcataggcgga

SEQ ID NO: 767208 - DNA, 33 bp, Homo sapien
tcacattagtcaagcaggctcttcataggcgga

SEQ ID NO: 767209 - DNA, 33 bp, Homo sapien
caatgagacagctggaagaaaaggcttaagttt

SEQ ID NO: 767210 - DNA, 33 bp, Homo sapien
caatgagacagctggaggaaaaggcttaagttt

SEQ ID NO: 767211 - DNA, 33 bp, Homo sapien
atgaacaaatcatgcaccatccctgattacaca

SEQ ID NO: 767212 - DNA, 33 bp, Homo sapien
atgaacaaatcatgcatcatccctgattacaca

SEQ ID NO: 767213 - DNA, 33 bp, Homo sapien
agacttgttctttggacgtcagaaagacataaa

SEQ ID NO: 767214 - DNA, 33 bp, Homo sapien
agacttgttctttggatgtcagaaagacataaa

SEQ ID NO: 767215 - DNA, 33 bp, Homo sapien
tccttatcttactgacggcttcatggcattcaa

SEQ ID NO: 767216 - DNA, 33 bp, Homo sapien
tccttatcttactgactgcttcatggcattcaa

SEQ ID NO: 767217 - DNA, 33 bp, Homo sapien
aaaagaaatgaaagaaagaccctataatccaag

SEQ ID NO: 767218 - DNA, 33 bp, Homo sapien
aaaagaaatgaaagaaggaccctataatccaag

SEQ ID NO: 767219 - DNA, 33 bp, Homo sapien
aggaagtccagccccacgatttaatcactttcc

SEQ ID NO: 767220 - DNA, 33 bp, Homo sapien
aggaagtccagccccatgatttaatcactttcc

SEQ ID NO: 767221 - DNA, 33 bp, Homo sapien
taaaagtatgactcacacttgggacttaataga

SEQ ID NO: 767222 - DNA, 33 bp, Homo sapien
taaaagtatgactcacgcttgggacttaataga

SEQ ID NO: 767223 - DNA, 33 bp, Homo sapien
atacctgagacctctacgtgtgtcattcccact

SEQ ID NO: 767224 - DNA, 33 bp, Homo sapien
atacctgagacctctatgtgtgtcattcccact

SEQ ID NO: 767225 - DNA, 33 bp, Homo sapien
tttacaagttagagagaaaaggtaatgatagct

SEQ ID NO: 767226 - DNA, 33 bp, Homo sapien
tttacaagttagagaggaaaggtaatgatagct

SEQ ID NO: 767227 - DNA, 33 bp, Homo sapien
ctggccatgagggggacatcatctcttatgttt

SEQ ID NO: 767228 - DNA, 33 bp, Homo sapien
ctggccatgagggggatatcatctcttatgttt

SEQ ID NO: 767229 - DNA, 33 bp, Homo sapien
tagcaaagtgaaagcacaggaaggttattattt

SEQ ID NO: 767230 - DNA, 33 bp, Homo sapien
tagcaaagtgaaagcagaggaaggttattattt

SEQ ID NO: 767231 - DNA, 33 bp, Homo sapien
tccagagacaagcagaaaagtaactgactcacc

SEQ ID NO: 767232 - DNA, 33 bp, Homo sapien
tccagagacaagcagagaagtaactgactcacc

SEQ ID NO: 767233 - DNA, 33 bp, Homo sapien
tgagcacttgcgctaagcattttattagatgct

SEQ ID NO: 767234 - DNA, 33 bp, Homo sapien
tgagcacttgcgctaatcattttattagatgct

SEQ ID NO: 767235 - DNA, 33 bp, Homo sapien
aaaatacttatcaggaatcaagcttgaagaaga

SEQ ID NO: 767236 - DNA, 33 bp, Homo sapien
aaaatacttatcaggagtcaagcttgaagaaga

SEQ ID NO: 767237 - DNA, 33 bp, Homo sapien
ttaggagtgatggagcacaagattatatcttcg

SEQ ID NO: 767238 - DNA, 33 bp, Homo sapien
ttaggagtgatggagcccaagattatatcttcg

SEQ ID NO: 767239 - DNA, 33 bp, Homo sapien
tttatcagacagctaggatgcattgacgctctt

SEQ ID NO: 767240 - DNA, 33 bp, Homo sapien
tttatcagacagctagtatgcattgacgctctt

SEQ ID NO: 767241 - DNA, 33 bp, Homo sapien
ctctgggtagcatagtgaagtatttaatggatc

SEQ ID NO: 767242 - DNA, 33 bp, Homo sapien
ctctgggtagcatagttaagtatttaatggatc

SEQ ID NO: 767243 - DNA, 33 bp, Homo sapien
tctaggggataccacacagtttgcaacatgagc

SEQ ID NO: 767244 - DNA, 33 bp, Homo sapien
tctaggggataccacatagtttgcaacatgagc

SEQ ID NO: 767245 - DNA, 33 bp, Homo sapien
tagagtagagttatgaactgtatcttattcaca

SEQ ID NO: 767246 - DNA, 33 bp, Homo sapien
tagagtagagttatgacctgtatcttattcaca

SEQ ID NO: 767247 - DNA, 33 bp, Homo sapien
cttggtccttcagttaaaatgttcacttaaatg

SEQ ID NO: 767248 - DNA, 33 bp, Homo sapien
cttggtccttcagttacaatgttcacttaaatg

SEQ ID NO: 767249 - DNA, 33 bp, Homo sapien
ctttcaacttttcctccgacagccacacaagtg

SEQ ID NO: 767250 - DNA, 33 bp, Homo sapien
ctttcaacttttcctctgacagccacacaagtg

SEQ ID NO: 767251 - DNA, 33 bp, Homo sapien
tgagctgccttctacccactgcatgttaaatga

SEQ ID NO: 767252 - DNA, 33 bp, Homo sapien
tgagctgccttctacctactgcatgttaaatga

SEQ ID NO: 767253 - DNA, 33 bp, Homo sapien
gctcactggtatatcccaagctctagaagaatg

SEQ ID NO: 767254 - DNA, 33 bp, Homo sapien
gctcactggtatatcctaagctctagaagaatg

SEQ ID NO: 767255 - DNA, 33 bp, Homo sapien
ctccacaaatgttggccgcatgaagtgtaagag

SEQ ID NO: 767256 - DNA, 33 bp, Homo sapien
ctccacaaatgttggctgcatgaagtgtaagag

SEQ ID NO: 767257 - DNA, 33 bp, Homo sapien
tggtctgaagttcccaatgactaaaagttgata

SEQ ID NO: 767258 - DNA, 33 bp, Homo sapien
tggtctgaagttcccagtgactaaaagttgata

SEQ ID NO: 767259 - DNA, 33 bp, Homo sapien
aatgttggtgcaggaaccttgatttacttctgt

SEQ ID NO: 767260 - DNA, 33 bp, Homo sapien
aatgttggtgcaggaagcttgatttacttctgt

SEQ ID NO: 767261 - DNA, 33 bp, Homo sapien
ggaccacaatgatcagaaaataatgactttttt

SEQ ID NO: 767262 - DNA, 33 bp, Homo sapien
ggaccacaatgatcaggaaataatgactttttt

SEQ ID NO: 767263 - DNA, 33 bp, Homo sapien
agttcttcagtgacgacggtaagggggaagaga

SEQ ID NO: 767264 - DNA, 33 bp, Homo sapien
agttcttcagtgacgagggtaagggggaagaga

SEQ ID NO: 767265 - DNA, 33 bp, Homo sapien
ctgtagatgcagtttaacataccattctcttgt

SEQ ID NO: 767266 - DNA, 33 bp, Homo sapien
ctgtagatgcagtttagcataccattctcttgt

SEQ ID NO: 767267 - DNA, 33 bp, Homo sapien
tccagataataaataaaccctgcttggagaaag

SEQ ID NO: 767268 - DNA, 33 bp, Homo sapien
tccagataataaataatccctgcttggagaaag

SEQ ID NO: 767269 - DNA, 33 bp, Homo sapien
gattgaatttgctctacggtctatatcagcata

SEQ ID NO: 767270 - DNA, 33 bp, Homo sapien
gattgaatttgctctatggtctatatcagcata

SEQ ID NO: 767271 - DNA, 33 bp, Homo sapien
tcttctgacaccctaaaataaatagtcctcttt

SEQ ID NO: 767272 - DNA, 33 bp, Homo sapien
tcttctgacaccctaacataaatagtcctcttt

SEQ ID NO: 767273 - DNA, 33 bp, Homo sapien
aataatgaatattttccatacttgcagacagac

SEQ ID NO: 767274 - DNA, 33 bp, Homo sapien
aataatgaatattttctatacttgcagacagac

SEQ ID NO: 767275 - DNA, 33 bp, Homo sapien
caccttctcccacttcactgtatcctgacccca

SEQ ID NO: 767276 - DNA, 33 bp, Homo sapien
caccttctcccacttcgctgtatcctgacccca

SEQ ID NO: 767277 - DNA, 33 bp, Homo sapien
cccagagagccattcccaaaggtcctgatttag

SEQ ID NO: 767278 - DNA, 33 bp, Homo sapien
cccagagagccattcctaaaggtcctgatttag

SEQ ID NO: 767279 - DNA, 33 bp, Homo sapien
aagagggaagcaattcaacctatagcaaggtta

SEQ ID NO: 767280 - DNA, 33 bp, Homo sapien
aagagggaagcaattcgacctatagcaaggtta

SEQ ID NO: 767281 - DNA, 33 bp, Homo sapien
gatttgttataggagacactctggaacgccatg

SEQ ID NO: 767282 - DNA, 33 bp, Homo sapien
gatttgttataggagagactctggaacgccatg

SEQ ID NO: 767283 - DNA, 33 bp, Homo sapien
aggacagctgtgtgaaccaggccagagacggag

SEQ ID NO: 767284 - DNA, 33 bp, Homo sapien
aggacagctgtgtgaagcaggccagagacggag

SEQ ID NO: 767285 - DNA, 33 bp, Homo sapien
ggcatcctcaaaaataaaggaaggctaaagatt

SEQ ID NO: 767286 - DNA, 33 bp, Homo sapien
ggcatcctcaaaaatagaggaaggctaaagatt

SEQ ID NO: 767287 - DNA, 33 bp, Homo sapien
acatcaaatatggaccaaaagttgtgctagaag

SEQ ID NO: 767288 - DNA, 33 bp, Homo sapien
acatcaaatatggaccgaaagttgtgctagaag

SEQ ID NO: 767289 - DNA, 33 bp, Homo sapien
acttcagtatatagcaacaaaatgtcactgact

SEQ ID NO: 767290 - DNA, 33 bp, Homo sapien
acttcagtatatagcagcaaaatgtcactgact

SEQ ID NO: 767291 - DNA, 33 bp, Homo sapien
agggacttttgggaaacggacttggaagacaaa

SEQ ID NO: 767292 - DNA, 33 bp, Homo sapien
agggacttttgggaaatggacttggaagacaaa

SEQ ID NO: 767293 - DNA, 33 bp, Homo sapien
gctctttttttgtcaacagaaaactgagtggtg

SEQ ID NO: 767294 - DNA, 33 bp, Homo sapien
gctctttttttgtcaagagaaaactgagtggtg

SEQ ID NO: 767295 - DNA, 33 bp, Homo sapien
acaacgaagtctaccaacttatttcagcccatc

SEQ ID NO: 767296 - DNA, 33 bp, Homo sapien
acaacgaagtctaccaccttatttcagcccatc

SEQ ID NO: 767297 - DNA, 33 bp, Homo sapien
gttgtattcctcttcagggtatcgagctgagag

SEQ ID NO: 767298 - DNA, 33 bp, Homo sapien
gttgtattcctcttcatggtatcgagctgagag

SEQ ID NO: 767299 - DNA, 33 bp, Homo sapien
ctagcctctccagttaggtttctgtgccttgtt

SEQ ID NO: 767300 - DNA, 33 bp, Homo sapien
ctagcctctccagttatgtttctgtgccttgtt

SEQ ID NO: 767301 - DNA, 33 bp, Homo sapien
catccattcatggtaaaagtctgagtggagtca

SEQ ID NO: 767302 - DNA, 33 bp, Homo sapien
catccattcatggtaacagtctgagtggagtca

SEQ ID NO: 767303 - DNA, 33 bp, Homo sapien
caaagcactgcactcccgatcaataatgtgagc

SEQ ID NO: 767304 - DNA, 33 bp, Homo sapien
caaagcactgcactcctgatcaataatgtgagc

SEQ ID NO: 767305 - DNA, 33 bp, Homo sapien
aatagacagatgcaaagaagagagtgggctcca

SEQ ID NO: 767306 - DNA, 33 bp, Homo sapien
aatagacagatgcaaataagagagtgggctcca

SEQ ID NO: 767307 - DNA, 33 bp, Homo sapien
gatccatactcaccaacatataatacaaatgag

SEQ ID NO: 767308 - DNA, 33 bp, Homo sapien
gatccatactcaccaatatataatacaaatgag

SEQ ID NO: 767309 - DNA, 33 bp, Homo sapien
cgtcctggaccctcaaagatttcaggctgatta

SEQ ID NO: 767310 - DNA, 33 bp, Homo sapien
cgtcctggaccctcaacgatttcaggctgatta

SEQ ID NO: 767311 - DNA, 33 bp, Homo sapien
actcccaatgtccaaacgaggtgaatcacaaca

SEQ ID NO: 767312 - DNA, 33 bp, Homo sapien
actcccaatgtccaaatgaggtgaatcacaaca

SEQ ID NO: 767313 - DNA, 33 bp, Homo sapien
cctcttccgtgaacacccctgaccactctggct

SEQ ID NO: 767314 - DNA, 33 bp, Homo sapien
cctcttccgtgaacactcctgaccactctggct

SEQ ID NO: 767315 - DNA, 33 bp, Homo sapien
tttgaagactgggtgaagtaaggctaaatagat

SEQ ID NO: 767316 - DNA, 33 bp, Homo sapien
tttgaagactgggtgaggtaaggctaaatagat

SEQ ID NO: 767317 - DNA, 33 bp, Homo sapien
ccttgacgaggtacctaaattaccttgaacaga

SEQ ID NO: 767318 - DNA, 33 bp, Homo sapien
ccttgacgaggtacctgaattaccttgaacaga

SEQ ID NO: 767319 - DNA, 33 bp, Homo sapien
aaatccaaggatactccagatgcttgagaaggt

SEQ ID NO: 767320 - DNA, 33 bp, Homo sapien
aaatccaaggatactctagatgcttgagaaggt

SEQ ID NO: 767321 - DNA, 33 bp, Homo sapien
tagaagaggaggggaaaaaacatagtgctgaaa

SEQ ID NO: 767322 - DNA, 33 bp, Homo sapien
tagaagaggaggggaataaacatagtgctgaaa

SEQ ID NO: 767323 - DNA, 33 bp, Homo sapien
gtggaaagctaacacaaactgatgatactgttt

SEQ ID NO: 767324 - DNA, 33 bp, Homo sapien
gtggaaagctaacacatactgatgatactgttt

SEQ ID NO: 767325 - DNA, 33 bp, Homo sapien
ggacctctggtgacgaaagataataaatgcctt

SEQ ID NO: 767326 - DNA, 33 bp, Homo sapien
ggacctctggtgacgagagataataaatgcctt

SEQ ID NO: 767327 - DNA, 33 bp, Homo sapien
ggtagcagacttaacactgaaatcataattttg

SEQ ID NO: 767328 - DNA, 33 bp, Homo sapien
ggtagcagacttaacagtgaaatcataattttg

SEQ ID NO: 767329 - DNA, 33 bp, Homo sapien
tgtggtacgtttaagcgctcaagtaactctgaa

SEQ ID NO: 767330 - DNA, 33 bp, Homo sapien
tgtggtacgtttaagctctcaagtaactctgaa

SEQ ID NO: 767331 - DNA, 33 bp, Homo sapien
tttagttctcccatggaaactttacccaggaaa

SEQ ID NO: 767332 - DNA, 33 bp, Homo sapien
tttagttctcccatggtaactttacccaggaaa

SEQ ID NO: 767333 - DNA, 33 bp, Homo sapien
cattgggactgactagacagttggtgcaaccca

SEQ ID NO: 767334 - DNA, 33 bp, Homo sapien
cattgggactgactaggcagttggtgcaaccca

SEQ ID NO: 767335 - DNA, 33 bp, Homo sapien
taaagattaggagaagcaaggcataaatcaaca

SEQ ID NO: 767336 - DNA, 33 bp, Homo sapien
taaagattaggagaaggaaggcataaatcaaca

SEQ ID NO: 767337 - DNA, 33 bp, Homo sapien
ggagtcaaatgtaacaaagtcacactgtaatga

SEQ ID NO: 767338 - DNA, 33 bp, Homo sapien
ggagtcaaatgtaacagagtcacactgtaatga

SEQ ID NO: 767339 - DNA, 33 bp, Homo sapien
ttctatgtatcacaagcagttatgacaatattc

SEQ ID NO: 767340 - DNA, 33 bp, Homo sapien
ttctatgtatcacaagtagttatgacaatattc

SEQ ID NO: 767341 - DNA, 33 bp, Homo sapien
aatcctcacaacattagattacaacaaaatgag

SEQ ID NO: 767342 - DNA, 33 bp, Homo sapien
aatcctcacaacattatattacaacaaaatgag

SEQ ID NO: 767343 - DNA, 33 bp, Homo sapien
ttcctacctcccccaccaaatacgagacttgaa

SEQ ID NO: 767344 - DNA, 33 bp, Homo sapien
ttcctacctcccccactaaatacgagacttgaa

SEQ ID NO: 767345 - DNA, 33 bp, Homo sapien
atcagggtctggtcatgaacaggaaccactgaa

SEQ ID NO: 767346 - DNA, 33 bp, Homo sapien
atcagggtctggtcattaacaggaaccactgaa

SEQ ID NO: 767347 - DNA, 33 bp, Homo sapien
tcttcctgttgtatgaactaaaaataatccaag

SEQ ID NO: 767348 - DNA, 33 bp, Homo sapien
tcttcctgttgtatgagctaaaaataatccaag

SEQ ID NO: 767349 - DNA, 33 bp, Homo sapien
aatatccaggaaaaaggcagttacattcgttta

SEQ ID NO: 767350 - DNA, 33 bp, Homo sapien
aatatccaggaaaaagtcagttacattcgttta

SEQ ID NO: 767351 - DNA, 33 bp, Homo sapien
tctttgaggacactcaagattaatcacattcct

SEQ ID NO: 767352 - DNA, 33 bp, Homo sapien
tctttgaggacactcaggattaatcacattcct

SEQ ID NO: 767353 - DNA, 33 bp, Homo sapien
agcgacaaattgatcacaaattttagagtaaat

SEQ ID NO: 767354 - DNA, 33 bp, Homo sapien
agcgacaaattgatcagaaattttagagtaaat

SEQ ID NO: 767355 - DNA, 33 bp, Homo sapien
tttgtttgttgcttttaaaaaatatgtacagct

SEQ ID NO: 767356 - DNA, 33 bp, Homo sapien
tttgtttgttgctttttaaaaatatgtacagct

SEQ ID NO: 767357 - DNA, 33 bp, Homo sapien
ccaacatttgcataccaaagaagatatttatta

SEQ ID NO: 767358 - DNA, 33 bp, Homo sapien
ccaacatttgcataccgaagaagatatttatta

SEQ ID NO: 767359 - DNA, 33 bp, Homo sapien
cataatatagtcaaaacggtccagattatgaaa

SEQ ID NO: 767360 - DNA, 33 bp, Homo sapien
cataatatagtcaaaatggtccagattatgaaa

SEQ ID NO: 767361 - DNA, 33 bp, Homo sapien
tatcaattcatcctaaaattctttcaacaagta

SEQ ID NO: 767362 - DNA, 33 bp, Homo sapien
tatcaattcatcctaacattctttcaacaagta

SEQ ID NO: 767363 - DNA, 33 bp, Homo sapien
tataaaaatcatggaactggccattggtgtcgc

SEQ ID NO: 767364 - DNA, 33 bp, Homo sapien
tataaaaatcatggaattggccattggtgtcgc

SEQ ID NO: 767365 - DNA, 33 bp, Homo sapien
gcatattaaaatgctaaggtgagagggccagct

SEQ ID NO: 767366 - DNA, 33 bp, Homo sapien
gcatattaaaatgctagggtgagagggccagct

SEQ ID NO: 767367 - DNA, 33 bp, Homo sapien
aaaccaatcccctaagccctgtgtaaatcagac

SEQ ID NO: 767368 - DNA, 33 bp, Homo sapien
aaaccaatcccctaagtcctgtgtaaatcagac

SEQ ID NO: 767369 - DNA, 33 bp, Homo sapien
ggtttcttatgaaaaactctgtcccagtgtaat

SEQ ID NO: 767370 - DNA, 33 bp, Homo sapien
ggtttcttatgaaaaagtctgtcccagtgtaat

SEQ ID NO: 767371 - DNA, 33 bp, Homo sapien
atataggtaactatcacatcaagctgatcaatt

SEQ ID NO: 767372 - DNA, 33 bp, Homo sapien
atataggtaactatcatatcaagctgatcaatt

SEQ ID NO: 767373 - DNA, 33 bp, Homo sapien
tcatagttatatgctacacagacatttttaacg

SEQ ID NO: 767374 - DNA, 33 bp, Homo sapien
tcatagttatatgctagacagacatttttaacg

SEQ ID NO: 767375 - DNA, 33 bp, Homo sapien
gatcatttctgtatgacagctagagaaaatgag

SEQ ID NO: 767376 - DNA, 33 bp, Homo sapien
gatcatttctgtatgatagctagagaaaatgag

SEQ ID NO: 767377 - DNA, 33 bp, Homo sapien
ccctgagttttcaaaaatacagccggtggccaa

SEQ ID NO: 767378 - DNA, 33 bp, Homo sapien
ccctgagttttcaaaactacagccggtggccaa

SEQ ID NO: 767379 - DNA, 33 bp, Homo sapien
ggtatattagttaacacgatgtcttgctgctta

SEQ ID NO: 767380 - DNA, 33 bp, Homo sapien
ggtatattagttaacatgatgtcttgctgctta

SEQ ID NO: 767381 - DNA, 33 bp, Homo sapien
aggacccaagtaatgacattaggcccacatgga

SEQ ID NO: 767382 - DNA, 33 bp, Homo sapien
aggacccaagtaatgatattaggcccacatgga

SEQ ID NO: 767383 - DNA, 33 bp, Homo sapien
tcttcctgtccaaagacgtacacaccctaatct

SEQ ID NO: 767384 - DNA, 33 bp, Homo sapien
tcttcctgtccaaagatgtacacaccctaatct

SEQ ID NO: 767385 - DNA, 33 bp, Homo sapien
cattaaatattttataacatttcagcattctaa

SEQ ID NO: 767386 - DNA, 33 bp, Homo sapien
cattaaatattttatatcatttcagcattctaa

SEQ ID NO: 767387 - DNA, 33 bp, Homo sapien
aaaaatgtttatcaccactttcaagttttgagt

SEQ ID NO: 767388 - DNA, 33 bp, Homo sapien
aaaaatgtttatcaccgctttcaagttttgagt

SEQ ID NO: 767389 - DNA, 33 bp, Homo sapien
gcagcaggtgaaaagcactagaatgttggacag

SEQ ID NO: 767390 - DNA, 33 bp, Homo sapien
gcagcaggtgaaaagcgctagaatgttggacag

SEQ ID NO: 767391 - DNA, 33 bp, Homo sapien
atggcatagtttacagacaggctttttagcaaa

SEQ ID NO: 767392 - DNA, 33 bp, Homo sapien
atggcatagtttacaggcaggctttttagcaaa

SEQ ID NO: 767393 - DNA, 33 bp, Homo sapien
acttcagtgggatagtaaaacataaattgcaac

SEQ ID NO: 767394 - DNA, 33 bp, Homo sapien
acttcagtgggatagtcaaacataaattgcaac

SEQ ID NO: 767395 - DNA, 33 bp, Homo sapien
tacaaagtacagacccaaaagtaagttaaaatg

SEQ ID NO: 767396 - DNA, 33 bp, Homo sapien
tacaaagtacagacccgaaagtaagttaaaatg

SEQ ID NO: 767397 - DNA, 33 bp, Homo sapien
cagttatgttctcataccaacaggacccattgc

SEQ ID NO: 767398 - DNA, 33 bp, Homo sapien
cagttatgttctcatatcaacaggacccattgc

SEQ ID NO: 767399 - DNA, 33 bp, Homo sapien
agtaccctactgggataagtttcaaaatcagtt

SEQ ID NO: 767400 - DNA, 33 bp, Homo sapien
agtaccctactgggatgagtttcaaaatcagtt

SEQ ID NO: 767401 - DNA, 33 bp, Homo sapien
accttatttgttttgcaccatgcggtataggag

SEQ ID NO: 767402 - DNA, 33 bp, Homo sapien
accttatttgttttgcgccatgcggtataggag

SEQ ID NO: 767403 - DNA, 33 bp, Homo sapien
acataagagagaaattaaaccacacagaaatcc

SEQ ID NO: 767404 - DNA, 33 bp, Homo sapien
acataagagagaaatttaaccacacagaaatcc

SEQ ID NO: 767405 - DNA, 33 bp, Homo sapien
tgttaatgtttagtagaactgcactgttcctat

SEQ ID NO: 767406 - DNA, 33 bp, Homo sapien
tgttaatgtttagtagtactgcactgttcctat

SEQ ID NO: 767407 - DNA, 33 bp, Homo sapien
atcagtagcccatctacggccagggtgacctca

SEQ ID NO: 767408 - DNA, 33 bp, Homo sapien
atcagtagcccatctatggccagggtgacctca

SEQ ID NO: 767409 - DNA, 33 bp, Homo sapien
taatttaccatctcagaaacataaacaatgtcc

SEQ ID NO: 767410 - DNA, 33 bp, Homo sapien
taatttaccatctcaggaacataaacaatgtcc

SEQ ID NO: 767411 - DNA, 33 bp, Homo sapien
gaaacattacttaagcaaaagctcagagctcag

SEQ ID NO: 767412 - DNA, 33 bp, Homo sapien
gaaacattacttaagcgaaagctcagagctcag

SEQ ID NO: 767413 - DNA, 33 bp, Homo sapien
atagtgctttcttcaacggcttaaattattcac

SEQ ID NO: 767414 - DNA, 33 bp, Homo sapien
atagtgctttcttcaatggcttaaattattcac

SEQ ID NO: 767415 - DNA, 33 bp, Homo sapien
ggtattaatccaagaaagtatagtgaaactcca

SEQ ID NO: 767416 - DNA, 33 bp, Homo sapien
ggtattaatccaagaaggtatagtgaaactcca

SEQ ID NO: 767417 - DNA, 33 bp, Homo sapien
aagtacaattcattccacaatgctcaaacctag

SEQ ID NO: 767418 - DNA, 33 bp, Homo sapien
aagtacaattcattccccaatgctcaaacctag

SEQ ID NO: 767419 - DNA, 33 bp, Homo sapien
gtgtgtgtcttctggaaaggtgctttcgagggg

SEQ ID NO: 767420 - DNA, 33 bp, Homo sapien
gtgtgtgtcttctggagaggtgctttcgagggg

SEQ ID NO: 767421 - DNA, 33 bp, Homo sapien
ccattgcctcaataaaaccattttcttctaccc

SEQ ID NO: 767422 - DNA, 33 bp, Homo sapien
ccattgcctcaataaagccattttcttctaccc

SEQ ID NO: 767423 - DNA, 33 bp, Homo sapien
gaaagtagtactgtaactattaaaatgtccacc

SEQ ID NO: 767424 - DNA, 33 bp, Homo sapien
gaaagtagtactgtaattattaaaatgtccacc

SEQ ID NO: 767425 - DNA, 33 bp, Homo sapien
gtacttctggttgctaaagagctggccacccgg

SEQ ID NO: 767426 - DNA, 33 bp, Homo sapien
gtacttctggttgctagagagctggccacccgg

SEQ ID NO: 767427 - DNA, 33 bp, Homo sapien
tgagttcccttttatccacatccaacatttgta

SEQ ID NO: 767428 - DNA, 33 bp, Homo sapien
tgagttcccttttatctacatccaacatttgta

SEQ ID NO: 767429 - DNA, 33 bp, Homo sapien
gtcctaaagctatccaatgattgttagggagct

SEQ ID NO: 767430 - DNA, 33 bp, Homo sapien
gtcctaaagctatccactgattgttagggagct

SEQ ID NO: 767431 - DNA, 33 bp, Homo sapien
tttaaaatgtgatagaagaatgaaaaacaatac

SEQ ID NO: 767432 - DNA, 33 bp, Homo sapien
tttaaaatgtgatagaggaatgaaaaacaatac

SEQ ID NO: 767433 - DNA, 33 bp, Homo sapien
tcacaatgattggctacggaatccaagaacagc

SEQ ID NO: 767434 - DNA, 33 bp, Homo sapien
tcacaatgattggctatggaatccaagaacagc

SEQ ID NO: 767435 - DNA, 33 bp, Homo sapien
cctttatatgagccaactcattgttattgtcac

SEQ ID NO: 767436 - DNA, 33 bp, Homo sapien
cctttatatgagccaattcattgttattgtcac

SEQ ID NO: 767437 - DNA, 33 bp, Homo sapien
gtacacccaggggaggcatgctctaagttccaa

SEQ ID NO: 767438 - DNA, 33 bp, Homo sapien
gtacacccaggggaggtatgctctaagttccaa

SEQ ID NO: 767439 - DNA, 33 bp, Homo sapien
ccattatcaaaagtgaagcacacattggaactt

SEQ ID NO: 767440 - DNA, 33 bp, Homo sapien
ccattatcaaaagtgaggcacacattggaactt

SEQ ID NO: 767441 - DNA, 33 bp, Homo sapien
tttttttaattatttacattcacagggtacatg

SEQ ID NO: 767442 - DNA, 33 bp, Homo sapien
tttttttaattatttagattcacagggtacatg

SEQ ID NO: 767443 - DNA, 33 bp, Homo sapien
taggtctgaggatctccgaagtcctgggaagaa

SEQ ID NO: 767444 - DNA, 33 bp, Homo sapien
taggtctgaggatctctgaagtcctgggaagaa

SEQ ID NO: 767445 - DNA, 33 bp, Homo sapien
tcaagttatttctttaagggatcttcagggcaa

SEQ ID NO: 767446 - DNA, 33 bp, Homo sapien
tcaagttatttctttaggggatcttcagggcaa

SEQ ID NO: 767447 - DNA, 33 bp, Homo sapien
tttcctgttctgctaaatatcttcctcccttcc

SEQ ID NO: 767448 - DNA, 33 bp, Homo sapien
tttcctgttctgctaagtatcttcctcccttcc

SEQ ID NO: 767449 - DNA, 33 bp, Homo sapien
cttcccatctcaaaacccttaaggcaatcacat

SEQ ID NO: 767450 - DNA, 33 bp, Homo sapien
cttcccatctcaaaactcttaaggcaatcacat

SEQ ID NO: 767451 - DNA, 33 bp, Homo sapien
tacacattccatgacaatatttaattttttctt

SEQ ID NO: 767452 - DNA, 33 bp, Homo sapien
tacacattccatgacattatttaattttttctt

SEQ ID NO: 767453 - DNA, 33 bp, Homo sapien
gaaatttaggtcacaaatcatcaagtgatggtt

SEQ ID NO: 767454 - DNA, 33 bp, Homo sapien
gaaatttaggtcacaactcatcaagtgatggtt

SEQ ID NO: 767455 - DNA, 33 bp, Homo sapien
ttgttatgatgaattacctatctgtccattgaa

SEQ ID NO: 767456 - DNA, 33 bp, Homo sapien
ttgttatgatgaattagctatctgtccattgaa

SEQ ID NO: 767457 - DNA, 33 bp, Homo sapien
gctgtgctattgtatcacctttatctgtaaagt

SEQ ID NO: 767458 - DNA, 33 bp, Homo sapien
gctgtgctattgtatcccctttatctgtaaagt

SEQ ID NO: 767459 - DNA, 33 bp, Homo sapien
tgatgctcttgtttccaaactcattattgacag

SEQ ID NO: 767460 - DNA, 33 bp, Homo sapien
tgatgctcttgtttcccaactcattattgacag

SEQ ID NO: 767461 - DNA, 33 bp, Homo sapien
aatcatttttctagataaggacaatgttaaaag

SEQ ID NO: 767462 - DNA, 33 bp, Homo sapien
aatcatttttctagattaggacaatgttaaaag

SEQ ID NO: 767463 - DNA, 33 bp, Homo sapien
ctgagcaaatccatgacaagttgagcacccaaa

SEQ ID NO: 767464 - DNA, 33 bp, Homo sapien
ctgagcaaatccatgagaagttgagcacccaaa

SEQ ID NO: 767465 - DNA, 33 bp, Homo sapien
ttttggatcccttctccccattagtcagttctc

SEQ ID NO: 767466 - DNA, 33 bp, Homo sapien
ttttggatcccttctctccattagtcagttctc

SEQ ID NO: 767467 - DNA, 33 bp, Homo sapien
cacatccaacattatagaggaggttagagttcc

SEQ ID NO: 767468 - DNA, 33 bp, Homo sapien
cacatccaacattatataggaggttagagttcc

SEQ ID NO: 767469 - DNA, 33 bp, Homo sapien
gtcctaaacaaatgaaggcatagtcatcctacc

SEQ ID NO: 767470 - DNA, 33 bp, Homo sapien
gtcctaaacaaatgaatgcatagtcatcctacc

SEQ ID NO: 767471 - DNA, 33 bp, Homo sapien
ctttgtctttcgaactaacatacgacttctact

SEQ ID NO: 767472 - DNA, 33 bp, Homo sapien
ctttgtctttcgaacttacatacgacttctact

SEQ ID NO: 767473 - DNA, 33 bp, Homo sapien
cctttctgcaagtacaaaagttctcatttctct

SEQ ID NO: 767474 - DNA, 33 bp, Homo sapien
cctttctgcaagtacagaagttctcatttctct

SEQ ID NO: 767475 - DNA, 33 bp, Homo sapien
atatgacaatcttaaacgaatcaaaacatggca

SEQ ID NO: 767476 - DNA, 33 bp, Homo sapien
atatgacaatcttaaatgaatcaaaacatggca

SEQ ID NO: 767477 - DNA, 33 bp, Homo sapien
tttttaaatgaaggacagatcacatcacataga

SEQ ID NO: 767478 - DNA, 33 bp, Homo sapien
tttttaaatgaaggacggatcacatcacataga

SEQ ID NO: 767479 - DNA, 33 bp, Homo sapien
agtctatgagtctgtacatccagccaattttac

SEQ ID NO: 767480 - DNA, 33 bp, Homo sapien
agtctatgagtctgtatatccagccaattttac

SEQ ID NO: 767481 - DNA, 33 bp, Homo sapien
gacatttcaagacacactaaagtctccctggag

SEQ ID NO: 767482 - DNA, 33 bp, Homo sapien
gacatttcaagacacattaaagtctccctggag

SEQ ID NO: 767483 - DNA, 33 bp, Homo sapien
ggaattttctacaatcacattgctaatatgggc

SEQ ID NO: 767484 - DNA, 33 bp, Homo sapien
ggaattttctacaatcgcattgctaatatgggc

SEQ ID NO: 767485 - DNA, 33 bp, Homo sapien
cacagtctgattccaccgatagaaggagtaaat

SEQ ID NO: 767486 - DNA, 33 bp, Homo sapien
cacagtctgattccactgatagaaggagtaaat

SEQ ID NO: 767487 - DNA, 33 bp, Homo sapien
aaaccaggccacacaacaggagtacagagacca

SEQ ID NO: 767488 - DNA, 33 bp, Homo sapien
aaaccaggccacacaataggagtacagagacca

SEQ ID NO: 767489 - DNA, 33 bp, Homo sapien
aatgcatctgaattccaaaaagctgtacttgaa

SEQ ID NO: 767490 - DNA, 33 bp, Homo sapien
aatgcatctgaattcccaaaagctgtacttgaa

SEQ ID NO: 767491 - DNA, 33 bp, Homo sapien
acagattttctaagaacagaatgtgaggtaggg

SEQ ID NO: 767492 - DNA, 33 bp, Homo sapien
acagattttctaagaagagaatgtgaggtaggg

SEQ ID NO: 767493 - DNA, 33 bp, Homo sapien
aagggaacaaagaaaactggttgtggatattca

SEQ ID NO: 767494 - DNA, 33 bp, Homo sapien
aagggaacaaagaaaattggttgtggatattca

SEQ ID NO: 767495 - DNA, 33 bp, Homo sapien
tctgtttagggatataaatgtacttggtgaaac

SEQ ID NO: 767496 - DNA, 33 bp, Homo sapien
tctgtttagggatatagatgtacttggtgaaac

SEQ ID NO: 767497 - DNA, 33 bp, Homo sapien
ttcatctacccccagaatattaacaaagtgttg

SEQ ID NO: 767498 - DNA, 33 bp, Homo sapien
ttcatctacccccagactattaacaaagtgttg

SEQ ID NO: 767499 - DNA, 33 bp, Homo sapien
tcctatctctgctataaaaagacttgaatattt

SEQ ID NO: 767500 - DNA, 33 bp, Homo sapien
tcctatctctgctatagaaagacttgaatattt

SEQ ID NO: 767501 - DNA, 33 bp, Homo sapien
aatataatcctagagacatgagataattttaat

SEQ ID NO: 767502 - DNA, 33 bp, Homo sapien
aatataatcctagagagatgagataattttaat

SEQ ID NO: 767503 - DNA, 33 bp, Homo sapien
gagagggaaagttctaaccttttaatcacttgc

SEQ ID NO: 767504 - DNA, 33 bp, Homo sapien
gagagggaaagttctagccttttaatcacttgc

SEQ ID NO: 767505 - DNA, 33 bp, Homo sapien
gtttcaaatatagagacgtggtaggttaaaatt

SEQ ID NO: 767506 - DNA, 33 bp, Homo sapien
gtttcaaatatagagaggtggtaggttaaaatt

SEQ ID NO: 767507 - DNA, 33 bp, Homo sapien
tcaactaaatatccaacttcatcacaaataaat

SEQ ID NO: 767508 - DNA, 33 bp, Homo sapien
tcaactaaatatccaagttcatcacaaataaat

SEQ ID NO: 767509 - DNA, 33 bp, Homo sapien
gacttgaccactgagaatatgtcatgaacctgt

SEQ ID NO: 767510 - DNA, 33 bp, Homo sapien
gacttgaccactgagactatgtcatgaacctgt

SEQ ID NO: 767511 - DNA, 33 bp, Homo sapien
actgaagaattggccgcaccctctgaaaccaag

SEQ ID NO: 767512 - DNA, 33 bp, Homo sapien
actgaagaattggccgtaccctctgaaaccaag

SEQ ID NO: 767513 - DNA, 33 bp, Homo sapien
tactcagcatcaaaaagaaaacatgtggtactt

SEQ ID NO: 767514 - DNA, 33 bp, Homo sapien
tactcagcatcaaaaataaaacatgtggtactt

SEQ ID NO: 767515 - DNA, 33 bp, Homo sapien
ggccaacaaacacatgaataaatgttcatcacc

SEQ ID NO: 767516 - DNA, 33 bp, Homo sapien
ggccaacaaacacatggataaatgttcatcacc

SEQ ID NO: 767517 - DNA, 33 bp, Homo sapien
ttcacaattatatttacactcaggtaaacccac

SEQ ID NO: 767518 - DNA, 33 bp, Homo sapien
ttcacaattatatttatactcaggtaaacccac

SEQ ID NO: 767519 - DNA, 33 bp, Homo sapien
acaacccataatttaccgcctatttcctagaaa

SEQ ID NO: 767520 - DNA, 33 bp, Homo sapien
acaacccataatttactgcctatttcctagaaa

SEQ ID NO: 767521 - DNA, 33 bp, Homo sapien
cttaagaggaagagtacgcttgtcataagtaaa

SEQ ID NO: 767522 - DNA, 33 bp, Homo sapien
cttaagaggaagagtatgcttgtcataagtaaa

SEQ ID NO: 767523 - DNA, 33 bp, Homo sapien
gaacttcagttctgccactgtttaatgtctgac

SEQ ID NO: 767524 - DNA, 33 bp, Homo sapien
gaacttcagttctgccgctgtttaatgtctgac

SEQ ID NO: 767525 - DNA, 33 bp, Homo sapien
caaataccagtgaccaaaaggagttgcgctgtg

SEQ ID NO: 767526 - DNA, 33 bp, Homo sapien
caaataccagtgaccagaaggagttgcgctgtg

SEQ ID NO: 767527 - DNA, 33 bp, Homo sapien
tttatgaactagcaaaatcaggtgaaaattcat

SEQ ID NO: 767528 - DNA, 33 bp, Homo sapien
tttatgaactagcaaagtcaggtgaaaattcat

SEQ ID NO: 767529 - DNA, 33 bp, Homo sapien
aaccagccaactcttgacaaatggatagagaac

SEQ ID NO: 767530 - DNA, 33 bp, Homo sapien
aaccagccaactcttgtcaaatggatagagaac

SEQ ID NO: 767531 - DNA, 33 bp, Homo sapien
ccaaaaggaagagccaatgaaagtgatggaagc

SEQ ID NO: 767532 - DNA, 33 bp, Homo sapien
ccaaaaggaagagccagtgaaagtgatggaagc

SEQ ID NO: 767533 - DNA, 33 bp, Homo sapien
cagtagtaatttcttacgataaggaaactatga

SEQ ID NO: 767534 - DNA, 33 bp, Homo sapien
cagtagtaatttcttaggataaggaaactatga

SEQ ID NO: 767535 - DNA, 33 bp, Homo sapien
atgaaatgctagctctcaatggtagttttaaac

SEQ ID NO: 767536 - DNA, 33 bp, Homo sapien
atgaaatgctagctctgaatggtagttttaaac

SEQ ID NO: 767537 - DNA, 33 bp, Homo sapien
aactatggattgtgtacgtgcatttgatttcca

SEQ ID NO: 767538 - DNA, 33 bp, Homo sapien
aactatggattgtgtatgtgcatttgatttcca

SEQ ID NO: 767539 - DNA, 33 bp, Homo sapien
ctactgtgcttggccaagtgttttctaattagc

SEQ ID NO: 767540 - DNA, 33 bp, Homo sapien
ctactgtgcttggccaggtgttttctaattagc

SEQ ID NO: 767541 - DNA, 33 bp, Homo sapien
caatttagtaagccacaggtaccaataattact

SEQ ID NO: 767542 - DNA, 33 bp, Homo sapien
caatttagtaagccacgggtaccaataattact

SEQ ID NO: 767543 - DNA, 33 bp, Homo sapien
aattgtctggggttagaagaaaaacagtgagaa

SEQ ID NO: 767544 - DNA, 33 bp, Homo sapien
aattgtctggggttaggagaaaaacagtgagaa

SEQ ID NO: 767545 - DNA, 33 bp, Homo sapien
ctagtgaacaatgaggcaatctatttttagcac

SEQ ID NO: 767546 - DNA, 33 bp, Homo sapien
ctagtgaacaatgaggtaatctatttttagcac

SEQ ID NO: 767547 - DNA, 33 bp, Homo sapien
agagaaacagaactaactggagatacacagtca

SEQ ID NO: 767548 - DNA, 33 bp, Homo sapien
agagaaacagaactaattggagatacacagtca

SEQ ID NO: 767549 - DNA, 33 bp, Homo sapien
actaagggcatggtacactcaccatttgataaa

SEQ ID NO: 767550 - DNA, 33 bp, Homo sapien
actaagggcatggtacgctcaccatttgataaa

SEQ ID NO: 767551 - DNA, 33 bp, Homo sapien
ttcaaataaagttaaaaagtgcatctatgtata

SEQ ID NO: 767552 - DNA, 33 bp, Homo sapien
ttcaaataaagttaaagagtgcatctatgtata

SEQ ID NO: 767553 - DNA, 33 bp, Homo sapien
ctttgatcctgtctcaactggcctgagagtgat

SEQ ID NO: 767554 - DNA, 33 bp, Homo sapien
ctttgatcctgtctcatctggcctgagagtgat

SEQ ID NO: 767555 - DNA, 33 bp, Homo sapien
tatcagactcaagcagaatctagtctcattcat

SEQ ID NO: 767556 - DNA, 33 bp, Homo sapien
tatcagactcaagcaggatctagtctcattcat

SEQ ID NO: 767557 - DNA, 33 bp, Homo sapien
tatctctgtgtaaaagccttatgtcattatgta

SEQ ID NO: 767558 - DNA, 33 bp, Homo sapien
tatctctgtgtaaaagtcttatgtcattatgta

SEQ ID NO: 767559 - DNA, 33 bp, Homo sapien
caagggtcaggtgaatcagcacagaaatggggg

SEQ ID NO: 767560 - DNA, 33 bp, Homo sapien
caagggtcaggtgaattagcacagaaatggggg

SEQ ID NO: 767561 - DNA, 33 bp, Homo sapien
atactatagttgtgtacagtgcaatcatgcaat

SEQ ID NO: 767562 - DNA, 33 bp, Homo sapien
atactatagttgtgtagagtgcaatcatgcaat

SEQ ID NO: 767563 - DNA, 33 bp, Homo sapien
ttcttgcttactctaaaggtgccattgatgtta

SEQ ID NO: 767564 - DNA, 33 bp, Homo sapien
ttcttgcttactctaagggtgccattgatgtta

SEQ ID NO: 767565 - DNA, 33 bp, Homo sapien
ggaaggccaccgatagcagaacgaagcagatga

SEQ ID NO: 767566 - DNA, 33 bp, Homo sapien
ggaaggccaccgatagtagaacgaagcagatga

SEQ ID NO: 767567 - DNA, 33 bp, Homo sapien
cagtttccagggagtcaaatacacatttctgtg

SEQ ID NO: 767568 - DNA, 33 bp, Homo sapien
cagtttccagggagtcgaatacacatttctgtg

SEQ ID NO: 767569 - DNA, 33 bp, Homo sapien
gctgtgtgtcggggccacaggagttacacgtac

SEQ ID NO: 767570 - DNA, 33 bp, Homo sapien
gctgtgtgtcggggccgcaggagttacacgtac

SEQ ID NO: 767571 - DNA, 33 bp, Homo sapien
atttacactgtaaaggaataggatcaggaggtg

SEQ ID NO: 767572 - DNA, 33 bp, Homo sapien
atttacactgtaaaggtataggatcaggaggtg

SEQ ID NO: 767573 - DNA, 33 bp, Homo sapien
gcggttttgactgatgcagttgccagattgact

SEQ ID NO: 767574 - DNA, 33 bp, Homo sapien
gcggttttgactgatgtagttgccagattgact

SEQ ID NO: 767575 - DNA, 33 bp, Homo sapien
atgcaattcacaacaacgtggtttccatctttt

SEQ ID NO: 767576 - DNA, 33 bp, Homo sapien
atgcaattcacaacaatgtggtttccatctttt

SEQ ID NO: 767577 - DNA, 33 bp, Homo sapien
tttcaaaaaagaaagaccttaggcagcagggta

SEQ ID NO: 767578 - DNA, 33 bp, Homo sapien
tttcaaaaaagaaagagcttaggcagcagggta

SEQ ID NO: 767579 - DNA, 33 bp, Homo sapien
ttttccttgtgtctaggatcaggaatcatttcc

SEQ ID NO: 767580 - DNA, 33 bp, Homo sapien
ttttccttgtgtctagtatcaggaatcatttcc

SEQ ID NO: 767581 - DNA, 33 bp, Homo sapien
gttcttactgccagcacatcagtctgaagtcaa

SEQ ID NO: 767582 - DNA, 33 bp, Homo sapien
gttcttactgccagcatatcagtctgaagtcaa

SEQ ID NO: 767583 - DNA, 33 bp, Homo sapien
tgtggcctcctcaatgccatgcagaagtaaaag

SEQ ID NO: 767584 - DNA, 33 bp, Homo sapien
tgtggcctcctcaatgtcatgcagaagtaaaag

SEQ ID NO: 767585 - DNA, 33 bp, Homo sapien
atccagaagagtcaagaaaattcttcagaaagg

SEQ ID NO: 767586 - DNA, 33 bp, Homo sapien
atccagaagagtcaaggaaattcttcagaaagg

SEQ ID NO: 767587 - DNA, 33 bp, Homo sapien
atatagttggtttgggaatgcaagtttttgtca

SEQ ID NO: 767588 - DNA, 33 bp, Homo sapien
atatagttggtttggggatgcaagtttttgtca

SEQ ID NO: 767589 - DNA, 33 bp, Homo sapien
tattgtttctcaatcacaaaaccagctgagaaa

SEQ ID NO: 767590 - DNA, 33 bp, Homo sapien
tattgtttctcaatcataaaaccagctgagaaa

SEQ ID NO: 767591 - DNA, 33 bp, Homo sapien
tccttctcttacaaaactgtttttatcacgaaa

SEQ ID NO: 767592 - DNA, 33 bp, Homo sapien
tccttctcttacaaaattgtttttatcacgaaa

SEQ ID NO: 767593 - DNA, 33 bp, Homo sapien
tcttttgccatcttacaatagtactaataactt

SEQ ID NO: 767594 - DNA, 33 bp, Homo sapien
tcttttgccatcttacgatagtactaataactt

SEQ ID NO: 767595 - DNA, 33 bp, Homo sapien
aaagataagcttcataacaactccaaatgataa

SEQ ID NO: 767596 - DNA, 33 bp, Homo sapien
aaagataagcttcataccaactccaaatgataa

SEQ ID NO: 767597 - DNA, 33 bp, Homo sapien
gaaatttctcaatcaccgcgaagaattcacagc

SEQ ID NO: 767598 - DNA, 33 bp, Homo sapien
gaaatttctcaatcactgcgaagaattcacagc

SEQ ID NO: 767599 - DNA, 33 bp, Homo sapien
atatctcttattgacgaagtagctgtgatggac

SEQ ID NO: 767600 - DNA, 33 bp, Homo sapien
atatctcttattgacggagtagctgtgatggac

SEQ ID NO: 767601 - DNA, 33 bp, Homo sapien
gcataaatgcttctacaatgacttatttcacaa

SEQ ID NO: 767602 - DNA, 33 bp, Homo sapien
gcataaatgcttctaccatgacttatttcacaa

SEQ ID NO: 767603 - DNA, 33 bp, Homo sapien
aggtgcagaaagacttaaagaattccattgtgg

SEQ ID NO: 767604 - DNA, 33 bp, Homo sapien
aggtgcagaaagacttgaagaattccattgtgg

SEQ ID NO: 767605 - DNA, 33 bp, Homo sapien
cattgttgtcaatcagaaactgaaagctcttct

SEQ ID NO: 767606 - DNA, 33 bp, Homo sapien
cattgttgtcaatcagcaactgaaagctcttct

SEQ ID NO: 767607 - DNA, 33 bp, Homo sapien
aaatttatgttgtttaaaagacaagcagtccat

SEQ ID NO: 767608 - DNA, 33 bp, Homo sapien
aaatttatgttgtttataagacaagcagtccat

SEQ ID NO: 767609 - DNA, 33 bp, Homo sapien
catgaagactgatccaagaatggcatgacctca

SEQ ID NO: 767610 - DNA, 33 bp, Homo sapien
catgaagactgatccaggaatggcatgacctca

SEQ ID NO: 767611 - DNA, 33 bp, Homo sapien
gtcttgaggggcagaaaattgtggaaagactgt

SEQ ID NO: 767612 - DNA, 33 bp, Homo sapien
gtcttgaggggcagaatattgtggaaagactgt

SEQ ID NO: 767613 - DNA, 33 bp, Homo sapien
gagctccttctatgcaatgatttccagtacttg

SEQ ID NO: 767614 - DNA, 33 bp, Homo sapien
gagctccttctatgcactgatttccagtacttg

SEQ ID NO: 767615 - DNA, 33 bp, Homo sapien
gctgagatctgtggcccgagttcaagcaggaaa

SEQ ID NO: 767616 - DNA, 33 bp, Homo sapien
gctgagatctgtggcctgagttcaagcaggaaa

SEQ ID NO: 767617 - DNA, 33 bp, Homo sapien
atgagctcccacaaataagaaggaatcactgca

SEQ ID NO: 767618 - DNA, 33 bp, Homo sapien
atgagctcccacaaatgagaaggaatcactgca

SEQ ID NO: 767619 - DNA, 33 bp, Homo sapien
tgtttttaaggcttccaattgtatgttcaggtt

SEQ ID NO: 767620 - DNA, 33 bp, Homo sapien
tgtttttaaggcttccgattgtatgttcaggtt

SEQ ID NO: 767621 - DNA, 33 bp, Homo sapien
agaaatcaacatgaaaattcaagaaattcagag

SEQ ID NO: 767622 - DNA, 33 bp, Homo sapien
agaaatcaacatgaaagttcaagaaattcagag

SEQ ID NO: 767623 - DNA, 33 bp, Homo sapien
atacaaagataaatgacgcagagttcttgtcct

SEQ ID NO: 767624 - DNA, 33 bp, Homo sapien
atacaaagataaatgaggcagagttcttgtcct

SEQ ID NO: 767625 - DNA, 33 bp, Homo sapien
aaaaggaaagagaaacaacactaaaggcaagta

SEQ ID NO: 767626 - DNA, 33 bp, Homo sapien
aaaaggaaagagaaacgacactaaaggcaagta

SEQ ID NO: 767627 - DNA, 33 bp, Homo sapien
gaattttggaaatcagaacacaaaatagaggat

SEQ ID NO: 767628 - DNA, 33 bp, Homo sapien
gaattttggaaatcaggacacaaaatagaggat

SEQ ID NO: 767629 - DNA, 33 bp, Homo sapien
ttttgccatgtgcctagccaatgttgacacaaa

SEQ ID NO: 767630 - DNA, 33 bp, Homo sapien
ttttgccatgtgcctatccaatgttgacacaaa

SEQ ID NO: 767631 - DNA, 33 bp, Homo sapien
tgaatgctcttttttcccattagattagagttg

SEQ ID NO: 767632 - DNA, 33 bp, Homo sapien
tgaatgctcttttttctcattagattagagttg

SEQ ID NO: 767633 - DNA, 33 bp, Homo sapien
aaacccaaatgttttagggcttagagacaggga

SEQ ID NO: 767634 - DNA, 33 bp, Homo sapien
aaacccaaatgttttatggcttagagacaggga

SEQ ID NO: 767635 - DNA, 33 bp, Homo sapien
aatggctattttaccacaatggtagagctgaat

SEQ ID NO: 767636 - DNA, 33 bp, Homo sapien
aatggctattttaccagaatggtagagctgaat

SEQ ID NO: 767637 - DNA, 33 bp, Homo sapien
gaaagaattacatggaacacaagaatgttagtc

SEQ ID NO: 767638 - DNA, 33 bp, Homo sapien
gaaagaattacatggagcacaagaatgttagtc

SEQ ID NO: 767639 - DNA, 33 bp, Homo sapien
atgaactccttctctgcagtatataaaaacctc

SEQ ID NO: 767640 - DNA, 33 bp, Homo sapien
atgaactccttctctgtagtatataaaaacctc

SEQ ID NO: 767641 - DNA, 33 bp, Homo sapien
ttataatttcacgttacgtctcttggtttcgtt

SEQ ID NO: 767642 - DNA, 33 bp, Homo sapien
ttataatttcacgttatgtctcttggtttcgtt

SEQ ID NO: 767643 - DNA, 33 bp, Homo sapien
attactaagtgcagacagcgtcacaaatgtatg

SEQ ID NO: 767644 - DNA, 33 bp, Homo sapien
attactaagtgcagacggcgtcacaaatgtatg

SEQ ID NO: 767645 - DNA, 33 bp, Homo sapien
gagatatcacctcacacgtgttagaatggctac

SEQ ID NO: 767646 - DNA, 33 bp, Homo sapien
gagatatcacctcacatgtgttagaatggctac

SEQ ID NO: 767647 - DNA, 33 bp, Homo sapien
aacaccaatatttaaaacacctgtgatcctttt

SEQ ID NO: 767648 - DNA, 33 bp, Homo sapien
aacaccaatatttaaaccacctgtgatcctttt

SEQ ID NO: 767649 - DNA, 33 bp, Homo sapien
aagaaataatgtgggcacttttcctgcttgttc

SEQ ID NO: 767650 - DNA, 33 bp, Homo sapien
aagaaataatgtgggctcttttcctgcttgttc

SEQ ID NO: 767651 - DNA, 33 bp, Homo sapien
atttggaatactgcgacgaaatctctcatcatc

SEQ ID NO: 767652 - DNA, 33 bp, Homo sapien
atttggaatactgcgatgaaatctctcatcatc

SEQ ID NO: 767653 - DNA, 33 bp, Homo sapien
tgtgcatatattgctaagtggtgaaatcttggc

SEQ ID NO: 767654 - DNA, 33 bp, Homo sapien
tgtgcatatattgctacgtggtgaaatcttggc

SEQ ID NO: 767655 - DNA, 33 bp, Homo sapien
ttgtaggtttcccaaaaaagaaccacagccagg

SEQ ID NO: 767656 - DNA, 33 bp, Homo sapien
ttgtaggtttcccaaataagaaccacagccagg

SEQ ID NO: 767657 - DNA, 33 bp, Homo sapien
tcagcttgaacagttaagaaaggtgacactgag

SEQ ID NO: 767658 - DNA, 33 bp, Homo sapien
tcagcttgaacagttaggaaaggtgacactgag

SEQ ID NO: 767659 - DNA, 33 bp, Homo sapien
taaacatacctcattccaagcctgtttagatca

SEQ ID NO: 767660 - DNA, 33 bp, Homo sapien
taaacatacctcattctaagcctgtttagatca

SEQ ID NO: 767661 - DNA, 33 bp, Homo sapien
agaactaaaataccaacctatcaatgaggcttg

SEQ ID NO: 767662 - DNA, 33 bp, Homo sapien
agaactaaaataccaatctatcaatgaggcttg

SEQ ID NO: 767663 - DNA, 33 bp, Homo sapien
tgtctagaaggctctaccaacctaaggaattta

SEQ ID NO: 767664 - DNA, 33 bp, Homo sapien
tgtctagaaggctctatcaacctaaggaattta

SEQ ID NO: 767665 - DNA, 33 bp, Homo sapien
cagcccaaatgatttaggagatacttcataaat

SEQ ID NO: 767666 - DNA, 33 bp, Homo sapien
cagcccaaatgatttatgagatacttcataaat

SEQ ID NO: 767667 - DNA, 33 bp, Homo sapien
cttagtggcccccaaactgatagatggccatgt

SEQ ID NO: 767668 - DNA, 33 bp, Homo sapien
cttagtggcccccaaattgatagatggccatgt

SEQ ID NO: 767669 - DNA, 33 bp, Homo sapien
gatgtaaacgaaattccgaatgtctcatagttt

SEQ ID NO: 767670 - DNA, 33 bp, Homo sapien
gatgtaaacgaaattctgaatgtctcatagttt

SEQ ID NO: 767671 - DNA, 33 bp, Homo sapien
gatgtgagctttcagacgtgacatgagagtgaa

SEQ ID NO: 767672 - DNA, 33 bp, Homo sapien
gatgtgagctttcagatgtgacatgagagtgaa

SEQ ID NO: 767673 - DNA, 33 bp, Homo sapien
tcaacaattttaggtcacaaacctctgtaaaaa

SEQ ID NO: 767674 - DNA, 33 bp, Homo sapien
tcaacaattttaggtcccaaacctctgtaaaaa

SEQ ID NO: 767675 - DNA, 33 bp, Homo sapien
aatgagtagagaatcacgtggaaatgtgccgga

SEQ ID NO: 767676 - DNA, 33 bp, Homo sapien
aatgagtagagaatcaggtggaaatgtgccgga

SEQ ID NO: 767677 - DNA, 33 bp, Homo sapien
caatggcctcctttagacacaaattgatgaccc

SEQ ID NO: 767678 - DNA, 33 bp, Homo sapien
caatggcctcctttaggcacaaattgatgaccc

SEQ ID NO: 767679 - DNA, 33 bp, Homo sapien
aggaactctaaacacaatccaaagggaagttca

SEQ ID NO: 767680 - DNA, 33 bp, Homo sapien
aggaactctaaacacagtccaaagggaagttca

SEQ ID NO: 767681 - DNA, 33 bp, Homo sapien
cctctaagtaagcacaaccctgagccaggaaca

SEQ ID NO: 767682 - DNA, 33 bp, Homo sapien
cctctaagtaagcacagccctgagccaggaaca

SEQ ID NO: 767683 - DNA, 33 bp, Homo sapien
agaaaaggatagaaaaactgaaatgaggcagaa

SEQ ID NO: 767684 - DNA, 33 bp, Homo sapien
agaaaaggatagaaaagctgaaatgaggcagaa

SEQ ID NO: 767685 - DNA, 33 bp, Homo sapien
aagaacaggagagcaaaagttgtatttaatgaa

SEQ ID NO: 767686 - DNA, 33 bp, Homo sapien
aagaacaggagagcaacagttgtatttaatgaa

SEQ ID NO: 767687 - DNA, 33 bp, Homo sapien
tgttttatgaaagctacacaaagtcctaacaac

SEQ ID NO: 767688 - DNA, 33 bp, Homo sapien
tgttttatgaaagctatacaaagtcctaacaac

SEQ ID NO: 767689 - DNA, 33 bp, Homo sapien
caaagtcatcacactcaacaccttatagactgg

SEQ ID NO: 767690 - DNA, 33 bp, Homo sapien
caaagtcatcacactcgacaccttatagactgg

SEQ ID NO: 767691 - DNA, 33 bp, Homo sapien
acttttcaaacgaaacagaaaatagtggcaaaa

SEQ ID NO: 767692 - DNA, 33 bp, Homo sapien
acttttcaaacgaaacggaaaatagtggcaaaa

SEQ ID NO: 767693 - DNA, 33 bp, Homo sapien
tcaagtggcaataccacgtagaccatgaccaca

SEQ ID NO: 767694 - DNA, 33 bp, Homo sapien
tcaagtggcaataccaggtagaccatgaccaca

SEQ ID NO: 767695 - DNA, 33 bp, Homo sapien
catctgactttccctacagcaagctggaacaaa

SEQ ID NO: 767696 - DNA, 33 bp, Homo sapien
catctgactttccctatagcaagctggaacaaa

SEQ ID NO: 767697 - DNA, 33 bp, Homo sapien
ttgatcaagttgcttcaatctcctgtttcatga

SEQ ID NO: 767698 - DNA, 33 bp, Homo sapien
ttgatcaagttgcttccatctcctgtttcatga

SEQ ID NO: 767699 - DNA, 33 bp, Homo sapien
tttaagtaattggtcacgaaatagacttgcatg

SEQ ID NO: 767700 - DNA, 33 bp, Homo sapien
tttaagtaattggtcatgaaatagacttgcatg

SEQ ID NO: 767701 - DNA, 33 bp, Homo sapien
tttttcatataaaccaaattaggaaatgcagag

SEQ ID NO: 767702 - DNA, 33 bp, Homo sapien
tttttcatataaaccagattaggaaatgcagag

SEQ ID NO: 767703 - DNA, 33 bp, Homo sapien
aggcagattattccaaagagaatagcagttgac

SEQ ID NO: 767704 - DNA, 33 bp, Homo sapien
aggcagattattccaaggagaatagcagttgac

SEQ ID NO: 767705 - DNA, 33 bp, Homo sapien
tggcagttcctgccaaatgcctcaccccagact

SEQ ID NO: 767706 - DNA, 33 bp, Homo sapien
tggcagttcctgccaagtgcctcaccccagact

SEQ ID NO: 767707 - DNA, 33 bp, Homo sapien
ctctgccacagaggtcaaatctagataggcagt

SEQ ID NO: 767708 - DNA, 33 bp, Homo sapien
ctctgccacagaggtcgaatctagataggcagt

SEQ ID NO: 767709 - DNA, 33 bp, Homo sapien
ttttacttttgtcaaaacccagttgatcatatg

SEQ ID NO: 767710 - DNA, 33 bp, Homo sapien
ttttacttttgtcaaagcccagttgatcatatg

SEQ ID NO: 767711 - DNA, 33 bp, Homo sapien
gcttacatagaacaaacgactatctatctatct

SEQ ID NO: 767712 - DNA, 33 bp, Homo sapien
gcttacatagaacaaaggactatctatctatct

SEQ ID NO: 767713 - DNA, 33 bp, Homo sapien
ctggcacagctttaggaacagactgtttcgtga

SEQ ID NO: 767714 - DNA, 33 bp, Homo sapien
ctggcacagctttagggacagactgtttcgtga

SEQ ID NO: 767715 - DNA, 33 bp, Homo sapien
cctttagcaattctacaggcagtgccagaacat

SEQ ID NO: 767716 - DNA, 33 bp, Homo sapien
cctttagcaattctacgggcagtgccagaacat

SEQ ID NO: 767717 - DNA, 33 bp, Homo sapien
tggggccaccatggaaatgtgaaacagtattgg

SEQ ID NO: 767718 - DNA, 33 bp, Homo sapien
tggggccaccatggaagtgtgaaacagtattgg

SEQ ID NO: 767719 - DNA, 33 bp, Homo sapien
ccccattcaaaacaccagacattaagccaacag

SEQ ID NO: 767720 - DNA, 33 bp, Homo sapien
ccccattcaaaacaccggacattaagccaacag

SEQ ID NO: 767721 - DNA, 33 bp, Homo sapien
tggaaatatgtttgaagcattgaaagcaaatta

SEQ ID NO: 767722 - DNA, 33 bp, Homo sapien
tggaaatatgtttgaatcattgaaagcaaatta

SEQ ID NO: 767723 - DNA, 33 bp, Homo sapien
aacatcaggaattcaaagatagataatgttttt

SEQ ID NO: 767724 - DNA, 33 bp, Homo sapien
aacatcaggaattcaatgatagataatgttttt

SEQ ID NO: 767725 - DNA, 33 bp, Homo sapien
ttggctagtgacaacacgtgattacaaatttcc

SEQ ID NO: 767726 - DNA, 33 bp, Homo sapien
ttggctagtgacaacatgtgattacaaatttcc

SEQ ID NO: 767727 - DNA, 33 bp, Homo sapien
atgagaagctatttgaaaacgtgactgggagga

SEQ ID NO: 767728 - DNA, 33 bp, Homo sapien
atgagaagctatttgacaacgtgactgggagga

SEQ ID NO: 767729 - DNA, 33 bp, Homo sapien
aggggccttgaatttaagttgttcaggcagatg

SEQ ID NO: 767730 - DNA, 33 bp, Homo sapien
aggggccttgaatttaggttgttcaggcagatg

SEQ ID NO: 767731 - DNA, 33 bp, Homo sapien
tttgctttctctttcacatgacagaaccatgtg

SEQ ID NO: 767732 - DNA, 33 bp, Homo sapien
tttgctttctctttcatatgacagaaccatgtg

SEQ ID NO: 767733 - DNA, 33 bp, Homo sapien
ttcctaatctgactagccatctctgacttactt

SEQ ID NO: 767734 - DNA, 33 bp, Homo sapien
ttcctaatctgactaggcatctctgacttactt

SEQ ID NO: 767735 - DNA, 33 bp, Homo sapien
aacctgctagaaaacaactacccagggcaccag

SEQ ID NO: 767736 - DNA, 33 bp, Homo sapien
aacctgctagaaaacacctacccagggcaccag

SEQ ID NO: 767737 - DNA, 33 bp, Homo sapien
aaagaaagtaaggtgaaagctcagagatttctg

SEQ ID NO: 767738 - DNA, 33 bp, Homo sapien
aaagaaagtaaggtgagagctcagagatttctg

SEQ ID NO: 767739 - DNA, 33 bp, Homo sapien
agatgaaaatcatcaaatggttagagtgcaact

SEQ ID NO: 767740 - DNA, 33 bp, Homo sapien
agatgaaaatcatcaagtggttagagtgcaact

SEQ ID NO: 767741 - DNA, 33 bp, Homo sapien
cccgtaggttccccaacatatcagttacatttt

SEQ ID NO: 767742 - DNA, 33 bp, Homo sapien
cccgtaggttccccaatatatcagttacatttt

SEQ ID NO: 767743 - DNA, 33 bp, Homo sapien
tagtatggcagctacaatggacatcatgctgga

SEQ ID NO: 767744 - DNA, 33 bp, Homo sapien
tagtatggcagctacactggacatcatgctgga

SEQ ID NO: 767745 - DNA, 33 bp, Homo sapien
cctaggcaatctgctaatacaaactccaaaatt

SEQ ID NO: 767746 - DNA, 33 bp, Homo sapien
cctaggcaatctgctagtacaaactccaaaatt

SEQ ID NO: 767747 - DNA, 33 bp, Homo sapien
tacattatggaatgacacgagctaattagcgta

SEQ ID NO: 767748 - DNA, 33 bp, Homo sapien
tacattatggaatgacgcgagctaattagcgta

SEQ ID NO: 767749 - DNA, 33 bp, Homo sapien
gtgaggagcctatgcaacatgtgaaatatatgt

SEQ ID NO: 767750 - DNA, 33 bp, Homo sapien
gtgaggagcctatgcagcatgtgaaatatatgt

SEQ ID NO: 767751 - DNA, 33 bp, Homo sapien
ccctggctctccaaaacgtatgttcttctcaca

SEQ ID NO: 767752 - DNA, 33 bp, Homo sapien
ccctggctctccaaaatgtatgttcttctcaca

SEQ ID NO: 767753 - DNA, 33 bp, Homo sapien
atttttggtgatgctacagttactggaggagag

SEQ ID NO: 767754 - DNA, 33 bp, Homo sapien
atttttggtgatgctatagttactggaggagag

SEQ ID NO: 767755 - DNA, 33 bp, Homo sapien
atattagcttgaggaacatcacagatgaccttc

SEQ ID NO: 767756 - DNA, 33 bp, Homo sapien
atattagcttgaggaatatcacagatgaccttc

SEQ ID NO: 767757 - DNA, 33 bp, Homo sapien
tcataacaattgataaagacggaccaggggata

SEQ ID NO: 767758 - DNA, 33 bp, Homo sapien
tcataacaattgataatgacggaccaggggata

SEQ ID NO: 767759 - DNA, 33 bp, Homo sapien
gattctgaagttagtacagttaatggtgatgac

SEQ ID NO: 767760 - DNA, 33 bp, Homo sapien
gattctgaagttagtatagttaatggtgatgac

SEQ ID NO: 767761 - DNA, 33 bp, Homo sapien
agcacatagcaaatcaaatcaggccaaagtttt

SEQ ID NO: 767762 - DNA, 33 bp, Homo sapien
agcacatagcaaatcatatcaggccaaagtttt

SEQ ID NO: 767763 - DNA, 33 bp, Homo sapien
accaagattcagatatcaaaaatgcagctgctc

SEQ ID NO: 767764 - DNA, 33 bp, Homo sapien
accaagattcagatattaaaaatgcagctgctc

SEQ ID NO: 767765 - DNA, 33 bp, Homo sapien
taattgttaaaagcaaagtgtatgtagttacca

SEQ ID NO: 767766 - DNA, 33 bp, Homo sapien
taattgttaaaagcaaggtgtatgtagttacca

SEQ ID NO: 767767 - DNA, 33 bp, Homo sapien
atgaattcctgagctacgttgaatgacttgggt

SEQ ID NO: 767768 - DNA, 33 bp, Homo sapien
atgaattcctgagctatgttgaatgacttgggt

SEQ ID NO: 767769 - DNA, 33 bp, Homo sapien
tgttcagatttcccccagaatgcaaaatgtgag

SEQ ID NO: 767770 - DNA, 33 bp, Homo sapien
tgttcagatttcccccggaatgcaaaatgtgag

SEQ ID NO: 767771 - DNA, 33 bp, Homo sapien
agttgttacagtgagaaagaatgaaggcctgag

SEQ ID NO: 767772 - DNA, 33 bp, Homo sapien
agttgttacagtgagagagaatgaaggcctgag

SEQ ID NO: 767773 - DNA, 33 bp, Homo sapien
aggacacaaagtaaccaatatttccatagactc

SEQ ID NO: 767774 - DNA, 33 bp, Homo sapien
aggacacaaagtaaccgatatttccatagactc

SEQ ID NO: 767775 - DNA, 33 bp, Homo sapien
gttgatatgcttctgcaaaaaatatttgttttg

SEQ ID NO: 767776 - DNA, 33 bp, Homo sapien
gttgatatgcttctgccaaaaatatttgttttg

SEQ ID NO: 767777 - DNA, 33 bp, Homo sapien
aagttaacagagtacaagatttccaaatgtggg

SEQ ID NO: 767778 - DNA, 33 bp, Homo sapien
aagttaacagagtacaggatttccaaatgtggg

SEQ ID NO: 767779 - DNA, 33 bp, Homo sapien
ttcaaaacatttctgtaaacatctttcaatagt

SEQ ID NO: 767780 - DNA, 33 bp, Homo sapien
ttcaaaacatttctgtgaacatctttcaatagt

SEQ ID NO: 767781 - DNA, 33 bp, Homo sapien
attcaagtacaccctacaaagagcagttactta

SEQ ID NO: 767782 - DNA, 33 bp, Homo sapien
attcaagtacaccctagaaagagcagttactta

SEQ ID NO: 767783 - DNA, 33 bp, Homo sapien
tgacaaatgggaaatccagaaattggaagttag

SEQ ID NO: 767784 - DNA, 33 bp, Homo sapien
tgacaaatgggaaatctagaaattggaagttag

SEQ ID NO: 767785 - DNA, 33 bp, Homo sapien
gagtctaccacaggtacgtgtggccccttccaa

SEQ ID NO: 767786 - DNA, 33 bp, Homo sapien
gagtctaccacaggtatgtgtggccccttccaa

SEQ ID NO: 767787 - DNA, 33 bp, Homo sapien
gatggttacactaaaagctgatctcaccactag

SEQ ID NO: 767788 - DNA, 33 bp, Homo sapien
gatggttacactaaaatctgatctcaccactag

SEQ ID NO: 767789 - DNA, 33 bp, Homo sapien
aagcacttaggatataccactccaattttttta

SEQ ID NO: 767790 - DNA, 33 bp, Homo sapien
aagcacttaggatatatcactccaattttttta

SEQ ID NO: 767791 - DNA, 33 bp, Homo sapien
agtattctggtattcaatctcccctttggtttc

SEQ ID NO: 767792 - DNA, 33 bp, Homo sapien
agtattctggtattcagtctcccctttggtttc

SEQ ID NO: 767793 - DNA, 33 bp, Homo sapien
aagccagatggtcacacgctaaggaatgaatgg

SEQ ID NO: 767794 - DNA, 33 bp, Homo sapien
aagccagatggtcacatgctaaggaatgaatgg

SEQ ID NO: 767795 - DNA, 33 bp, Homo sapien
caaaatgagagaaaagaactcaactacatcttt

SEQ ID NO: 767796 - DNA, 33 bp, Homo sapien
caaaatgagagaaaaggactcaactacatcttt

SEQ ID NO: 767797 - DNA, 33 bp, Homo sapien
aaatttgtcttttcaaatcatcaaacagttaat

SEQ ID NO: 767798 - DNA, 33 bp, Homo sapien
aaatttgtcttttcaagtcatcaaacagttaat

SEQ ID NO: 767799 - DNA, 33 bp, Homo sapien
gacagaatctagggaaatggaacataggacaag

SEQ ID NO: 767800 - DNA, 33 bp, Homo sapien
gacagaatctagggaagtggaacataggacaag

SEQ ID NO: 767801 - DNA, 33 bp, Homo sapien
atcatagtcatttcaccctccagcacacactta

SEQ ID NO: 767802 - DNA, 33 bp, Homo sapien
atcatagtcatttcactctccagcacacactta

SEQ ID NO: 767803 - DNA, 33 bp, Homo sapien
ttttcatctactggtcacgctgttcacaacaat

SEQ ID NO: 767804 - DNA, 33 bp, Homo sapien
ttttcatctactggtctcgctgttcacaacaat

SEQ ID NO: 767805 - DNA, 33 bp, Homo sapien
tttgtaatatcatacaatagtggctggacaact

SEQ ID NO: 767806 - DNA, 33 bp, Homo sapien
tttgtaatatcatacagtagtggctggacaact

SEQ ID NO: 767807 - DNA, 33 bp, Homo sapien
atggagacacaatcctaaaactgccttgttgcc

SEQ ID NO: 767808 - DNA, 33 bp, Homo sapien
atggagacacaatcctgaaactgccttgttgcc

SEQ ID NO: 767809 - DNA, 33 bp, Homo sapien
atagcccaggctgaagcacacagaaggagttta

SEQ ID NO: 767810 - DNA, 33 bp, Homo sapien
atagcccaggctgaaggacacagaaggagttta

SEQ ID NO: 767811 - DNA, 33 bp, Homo sapien
agagacaagaaggaaaaagatacagttcaggct

SEQ ID NO: 767812 - DNA, 33 bp, Homo sapien
agagacaagaaggaaagagatacagttcaggct

SEQ ID NO: 767813 - DNA, 33 bp, Homo sapien
actagagttctttctcaattatcaaaacccaaa

SEQ ID NO: 767814 - DNA, 33 bp, Homo sapien
actagagttctttctccattatcaaaacccaaa

SEQ ID NO: 767815 - DNA, 33 bp, Homo sapien
tttcttactgttagagccatctttgtttcatgg

SEQ ID NO: 767816 - DNA, 33 bp, Homo sapien
tttcttactgttagagtcatctttgtttcatgg

SEQ ID NO: 767817 - DNA, 33 bp, Homo sapien
atggataaatacggtacagtactggaaatgtat

SEQ ID NO: 767818 - DNA, 33 bp, Homo sapien
atggataaatacggtatagtactggaaatgtat

SEQ ID NO: 767819 - DNA, 33 bp, Homo sapien
aaaagaggaatgggaggatcgccaagagtaaca

SEQ ID NO: 767820 - DNA, 33 bp, Homo sapien
aaaagaggaatgggagtatcgccaagagtaaca

SEQ ID NO: 767821 - DNA, 33 bp, Homo sapien
ttccacaaacatccaaaagctgtcttgtgaatg

SEQ ID NO: 767822 - DNA, 33 bp, Homo sapien
ttccacaaacatccaagagctgtcttgtgaatg

SEQ ID NO: 767823 - DNA, 33 bp, Homo sapien
ggctgtagtgccttaaatatagctttactacac

SEQ ID NO: 767824 - DNA, 33 bp, Homo sapien
ggctgtagtgccttaagtatagctttactacac

SEQ ID NO: 767825 - DNA, 33 bp, Homo sapien
atagagtgtctactgaatagagttaagttttaa

SEQ ID NO: 767826 - DNA, 33 bp, Homo sapien
atagagtgtctactgagtagagttaagttttaa

SEQ ID NO: 767827 - DNA, 33 bp, Homo sapien
ctctccatttggcttccaaaattttattgcagt

SEQ ID NO: 767828 - DNA, 33 bp, Homo sapien
ctctccatttggcttctaaaattttattgcagt

SEQ ID NO: 767829 - DNA, 33 bp, Homo sapien
catccttagttgcataagcaaagaagttctcat

SEQ ID NO: 767830 - DNA, 33 bp, Homo sapien
catccttagttgcataggcaaagaagttctcat

SEQ ID NO: 767831 - DNA, 33 bp, Homo sapien
atcttgaaggagtggcacaaagacgtaagagca

SEQ ID NO: 767832 - DNA, 33 bp, Homo sapien
atcttgaaggagtggcgcaaagacgtaagagca

SEQ ID NO: 767833 - DNA, 33 bp, Homo sapien
ccatttcacagatgagaaaatcaaagtttggtt

SEQ ID NO: 767834 - DNA, 33 bp, Homo sapien
ccatttcacagatgagcaaatcaaagtttggtt

SEQ ID NO: 767835 - DNA, 33 bp, Homo sapien
gagggagtgaatgatacgcttaaaataatccag

SEQ ID NO: 767836 - DNA, 33 bp, Homo sapien
gagggagtgaatgatatgcttaaaataatccag

SEQ ID NO: 767837 - DNA, 33 bp, Homo sapien
agccaattagacaatcagaactttcctgtgtag

SEQ ID NO: 767838 - DNA, 33 bp, Homo sapien
agccaattagacaatcggaactttcctgtgtag

SEQ ID NO: 767839 - DNA, 33 bp, Homo sapien
gtgagccgctgtacctgactgtatattcattat

SEQ ID NO: 767840 - DNA, 33 bp, Homo sapien
gtgagccgctgtaccttactgtatattcattat

SEQ ID NO: 767841 - DNA, 33 bp, Homo sapien
atagctggtatcaaaaagaacctaacaggtctg

SEQ ID NO: 767842 - DNA, 33 bp, Homo sapien
atagctggtatcaaaacgaacctaacaggtctg

SEQ ID NO: 767843 - DNA, 33 bp, Homo sapien
acagggcaggatgagacaatgccctatactgag

SEQ ID NO: 767844 - DNA, 33 bp, Homo sapien
acagggcaggatgagataatgccctatactgag

SEQ ID NO: 767845 - DNA, 33 bp, Homo sapien
aaatgacaacagagaaatgatgactggatttga

SEQ ID NO: 767846 - DNA, 33 bp, Homo sapien
aaatgacaacagagaagtgatgactggatttga

SEQ ID NO: 767847 - DNA, 33 bp, Homo sapien
tataggcacaaatacaataaggttggaagatgt

SEQ ID NO: 767848 - DNA, 33 bp, Homo sapien
tataggcacaaatacagtaaggttggaagatgt

SEQ ID NO: 767849 - DNA, 33 bp, Homo sapien
gaggaatgggaacaccaatttgatatttgatga

SEQ ID NO: 767850 - DNA, 33 bp, Homo sapien
gaggaatgggaacaccgatttgatatttgatga

SEQ ID NO: 767851 - DNA, 33 bp, Homo sapien
cacacgagctggaacactataggctgggagcaa

SEQ ID NO: 767852 - DNA, 33 bp, Homo sapien
cacacgagctggaacattataggctgggagcaa

SEQ ID NO: 767853 - DNA, 33 bp, Homo sapien
aatacccatgagccaccatcagcttaagcaata

SEQ ID NO: 767854 - DNA, 33 bp, Homo sapien
aatacccatgagccactatcagcttaagcaata

SEQ ID NO: 767855 - DNA, 33 bp, Homo sapien
ggttaaatttgttcataatcacatttgttgatg

SEQ ID NO: 767856 - DNA, 33 bp, Homo sapien
ggttaaatttgttcatgatcacatttgttgatg

SEQ ID NO: 767857 - DNA, 33 bp, Homo sapien
tgggagcaaaaccagacgtgttttctgccctct

SEQ ID NO: 767858 - DNA, 33 bp, Homo sapien
tgggagcaaaaccagatgtgttttctgccctct

SEQ ID NO: 767859 - DNA, 33 bp, Homo sapien
ttgcccccagctgtcaaagcagactacctgttt

SEQ ID NO: 767860 - DNA, 33 bp, Homo sapien
ttgcccccagctgtcagagcagactacctgttt

SEQ ID NO: 767861 - DNA, 33 bp, Homo sapien
atacaaaaagaattagccgagtgaatctccatc

SEQ ID NO: 767862 - DNA, 33 bp, Homo sapien
atacaaaaagaattagtcgagtgaatctccatc

SEQ ID NO: 767863 - DNA, 33 bp, Homo sapien
cctgtcaataaaccacaaaaactaggaaggcac

SEQ ID NO: 767864 - DNA, 33 bp, Homo sapien
cctgtcaataaaccacgaaaactaggaaggcac

SEQ ID NO: 767865 - DNA, 33 bp, Homo sapien
aggagcaccagctttaaagttaagtctgcatca

SEQ ID NO: 767866 - DNA, 33 bp, Homo sapien
aggagcaccagctttatagttaagtctgcatca

SEQ ID NO: 767867 - DNA, 33 bp, Homo sapien
ctgagatttcaaagccaatgggaaaaaagtgtt

SEQ ID NO: 767868 - DNA, 33 bp, Homo sapien
ctgagatttcaaagccgatgggaaaaaagtgtt

SEQ ID NO: 767869 - DNA, 33 bp, Homo sapien
aattatcgattcagtaaaccaataagatgttaa

SEQ ID NO: 767870 - DNA, 33 bp, Homo sapien
aattatcgattcagtagaccaataagatgttaa

SEQ ID NO: 767871 - DNA, 33 bp, Homo sapien
aatatccacgaattcacctacttgaaaaacaaa

SEQ ID NO: 767872 - DNA, 33 bp, Homo sapien
aatatccacgaattcatctacttgaaaaacaaa

SEQ ID NO: 767873 - DNA, 33 bp, Homo sapien
tgaatccaaaatgacccagatgttagatttagc

SEQ ID NO: 767874 - DNA, 33 bp, Homo sapien
tgaatccaaaatgacctagatgttagatttagc

SEQ ID NO: 767875 - DNA, 33 bp, Homo sapien
ggagacaaaaacagaccaaaataatattcagac

SEQ ID NO: 767876 - DNA, 33 bp, Homo sapien
ggagacaaaaacagactaaaataatattcagac

SEQ ID NO: 767877 - DNA, 33 bp, Homo sapien
gaaagatatacatgaccgaattggatatctttg

SEQ ID NO: 767878 - DNA, 33 bp, Homo sapien
gaaagatatacatgactgaattggatatctttg

SEQ ID NO: 767879 - DNA, 33 bp, Homo sapien
aaagacatggcagtataaaatcaagccccaagc

SEQ ID NO: 767880 - DNA, 33 bp, Homo sapien
aaagacatggcagtatcaaatcaagccccaagc

SEQ ID NO: 767881 - DNA, 33 bp, Homo sapien
ggcaatcatttgggccaaaaaaagcggggtcag

SEQ ID NO: 767882 - DNA, 33 bp, Homo sapien
ggcaatcatttgggccgaaaaaagcggggtcag

SEQ ID NO: 767883 - DNA, 33 bp, Homo sapien
catgacctgaatcagcagcgtgaagacaattta

SEQ ID NO: 767884 - DNA, 33 bp, Homo sapien
catgacctgaatcagcggcgtgaagacaattta

SEQ ID NO: 767885 - DNA, 33 bp, Homo sapien
tatttataacttcccccgctactcctatagata

SEQ ID NO: 767886 - DNA, 33 bp, Homo sapien
tatttataacttcccctgctactcctatagata

SEQ ID NO: 767887 - DNA, 33 bp, Homo sapien
ctttccataattctaacctgagacctattgtta

SEQ ID NO: 767888 - DNA, 33 bp, Homo sapien
ctttccataattctaatctgagacctattgtta

SEQ ID NO: 767889 - DNA, 33 bp, Homo sapien
tttgatagccctattaaaattctgctatacaga

SEQ ID NO: 767890 - DNA, 33 bp, Homo sapien
tttgatagccctattacaattctgctatacaga

SEQ ID NO: 767891 - DNA, 33 bp, Homo sapien
tcttgttaagattgatgagtattttcaagtcaa

SEQ ID NO: 767892 - DNA, 33 bp, Homo sapien
tcttgttaagattgattagtattttcaagtcaa

SEQ ID NO: 767893 - DNA, 33 bp, Homo sapien
taaataataatctcaacgtgaatgatacctgga

SEQ ID NO: 767894 - DNA, 33 bp, Homo sapien
taaataataatctcaatgtgaatgatacctgga

SEQ ID NO: 767895 - DNA, 33 bp, Homo sapien
tgatgtggcccattccaagaaagcttattatat

SEQ ID NO: 767896 - DNA, 33 bp, Homo sapien
tgatgtggcccattccgagaaagcttattatat

SEQ ID NO: 767897 - DNA, 33 bp, Homo sapien
tggattctttcagtctaacctacccttgttaat

SEQ ID NO: 767898 - DNA, 33 bp, Homo sapien
tggattctttcagtctgacctacccttgttaat

SEQ ID NO: 767899 - DNA, 33 bp, Homo sapien
ttgcatatacaaattacgtgtaagaggagaaat

SEQ ID NO: 767900 - DNA, 33 bp, Homo sapien
ttgcatatacaaattatgtgtaagaggagaaat

SEQ ID NO: 767901 - DNA, 33 bp, Homo sapien
actttcgattctcacccatgcctgcttcctggg

SEQ ID NO: 767902 - DNA, 33 bp, Homo sapien
actttcgattctcacctatgcctgcttcctggg

SEQ ID NO: 767903 - DNA, 33 bp, Homo sapien
gctcagggtgatgtgacagcacagcaggaaggt

SEQ ID NO: 767904 - DNA, 33 bp, Homo sapien
gctcagggtgatgtgagagcacagcaggaaggt

SEQ ID NO: 767905 - DNA, 33 bp, Homo sapien
cctaaatacttttgacccttgaacaatctgaac

SEQ ID NO: 767906 - DNA, 33 bp, Homo sapien
cctaaatacttttgactcttgaacaatctgaac

SEQ ID NO: 767907 - DNA, 33 bp, Homo sapien
ggttttcgtatggtaccaatgatcaaaatacct

SEQ ID NO: 767908 - DNA, 33 bp, Homo sapien
ggttttcgtatggtactaatgatcaaaatacct

SEQ ID NO: 767909 - DNA, 33 bp, Homo sapien
ccctgtaaaagcagccaaggcacacactataga

SEQ ID NO: 767910 - DNA, 33 bp, Homo sapien
ccctgtaaaagcagccgaggcacacactataga

SEQ ID NO: 767911 - DNA, 33 bp, Homo sapien
aatgctcacattctggccatgtcatatggaaaa

SEQ ID NO: 767912 - DNA, 33 bp, Homo sapien
aatgctcacattctggtcatgtcatatggaaaa

SEQ ID NO: 767913 - DNA, 33 bp, Homo sapien
agagttgactctcataaaatgctcacattctgg

SEQ ID NO: 767914 - DNA, 33 bp, Homo sapien
agagttgactctcatacaatgctcacattctgg

SEQ ID NO: 767915 - DNA, 33 bp, Homo sapien
actgacagacccaaaaagttcttgacagtgtat

SEQ ID NO: 767916 - DNA, 33 bp, Homo sapien
actgacagacccaaaacgttcttgacagtgtat

SEQ ID NO: 767917 - DNA, 33 bp, Homo sapien
aaattggaagacggtacgtttgctatttataat

SEQ ID NO: 767918 - DNA, 33 bp, Homo sapien
aaattggaagacggtatgtttgctatttataat

SEQ ID NO: 767919 - DNA, 33 bp, Homo sapien
aaagtcaccaaattaaaaagtagtagagcttag

SEQ ID NO: 767920 - DNA, 33 bp, Homo sapien
aaagtcaccaaattaagaagtagtagagcttag

SEQ ID NO: 767921 - DNA, 33 bp, Homo sapien
tagaattgaaaaataaatgaaacacatggggag

SEQ ID NO: 767922 - DNA, 33 bp, Homo sapien
tagaattgaaaaataagtgaaacacatggggag

SEQ ID NO: 767923 - DNA, 33 bp, Homo sapien
acatgatagcaggtcacctaggcaaggaagtta

SEQ ID NO: 767924 - DNA, 33 bp, Homo sapien
acatgatagcaggtcatctaggcaaggaagtta

SEQ ID NO: 767925 - DNA, 33 bp, Homo sapien
ttcctctgaaatcccaaattcaaccatcctata

SEQ ID NO: 767926 - DNA, 33 bp, Homo sapien
ttcctctgaaatcccagattcaaccatcctata

SEQ ID NO: 767927 - DNA, 33 bp, Homo sapien
aggtactatgcaaaacagtagacaggcttttct

SEQ ID NO: 767928 - DNA, 33 bp, Homo sapien
aggtactatgcaaaactgtagacaggcttttct

SEQ ID NO: 767929 - DNA, 33 bp, Homo sapien
gaaaagtgctgcacaccgataacatatttataa

SEQ ID NO: 767930 - DNA, 33 bp, Homo sapien
gaaaagtgctgcacactgataacatatttataa

SEQ ID NO: 767931 - DNA, 33 bp, Homo sapien
aatcgttttagacactcaagatatagccgtgaa

SEQ ID NO: 767932 - DNA, 33 bp, Homo sapien
aatcgttttagacacttaagatatagccgtgaa

SEQ ID NO: 767933 - DNA, 33 bp, Homo sapien
taatacagggatgggacgtgattcactgcatta

SEQ ID NO: 767934 - DNA, 33 bp, Homo sapien
taatacagggatgggatgtgattcactgcatta

SEQ ID NO: 767935 - DNA, 33 bp, Homo sapien
ttgttaaaactattaacatttacagtcacagaa

SEQ ID NO: 767936 - DNA, 33 bp, Homo sapien
ttgttaaaactattaagatttacagtcacagaa

SEQ ID NO: 767937 - DNA, 33 bp, Homo sapien
acaaggaaatgaaaaccactcaaaatccgatct

SEQ ID NO: 767938 - DNA, 33 bp, Homo sapien
acaaggaaatgaaaacgactcaaaatccgatct

SEQ ID NO: 767939 - DNA, 33 bp, Homo sapien
gtccagctctaggtaactaaggccagatatgaa

SEQ ID NO: 767940 - DNA, 33 bp, Homo sapien
gtccagctctaggtaagtaaggccagatatgaa

SEQ ID NO: 767941 - DNA, 33 bp, Homo sapien
gtaggagatttaatgtcaaaacagcaaacgcat

SEQ ID NO: 767942 - DNA, 33 bp, Homo sapien
gtaggagatttaatgtgaaaacagcaaacgcat

SEQ ID NO: 767943 - DNA, 33 bp, Homo sapien
tgaggggatggcagtcacattatgctcttgtaa

SEQ ID NO: 767944 - DNA, 33 bp, Homo sapien
tgaggggatggcagtctcattatgctcttgtaa

SEQ ID NO: 767945 - DNA, 33 bp, Homo sapien
tagagagtttctagagccacattacaaataact

SEQ ID NO: 767946 - DNA, 33 bp, Homo sapien
tagagagtttctagagtcacattacaaataact

SEQ ID NO: 767947 - DNA, 33 bp, Homo sapien
taaaaaatgtggtttccagtttagcagtgggcc

SEQ ID NO: 767948 - DNA, 33 bp, Homo sapien
taaaaaatgtggtttctagtttagcagtgggcc

SEQ ID NO: 767949 - DNA, 33 bp, Homo sapien
catgctctctctcaaagcaagttaagttctctt

SEQ ID NO: 767950 - DNA, 33 bp, Homo sapien
catgctctctctcaaatcaagttaagttctctt

SEQ ID NO: 767951 - DNA, 33 bp, Homo sapien
cacaagtattgagtacactttaactagtccatc

SEQ ID NO: 767952 - DNA, 33 bp, Homo sapien
cacaagtattgagtacgctttaactagtccatc

SEQ ID NO: 767953 - DNA, 33 bp, Homo sapien
cccttctaattgactacgcattctctatttcta

SEQ ID NO: 767954 - DNA, 33 bp, Homo sapien
cccttctaattgactatgcattctctatttcta

SEQ ID NO: 767955 - DNA, 33 bp, Homo sapien
tctggacactaatacacggatcttgacgaagtg

SEQ ID NO: 767956 - DNA, 33 bp, Homo sapien
tctggacactaatacatggatcttgacgaagtg

SEQ ID NO: 767957 - DNA, 33 bp, Homo sapien
ggttttcaggttcagcactaaggggtgacttta

SEQ ID NO: 767958 - DNA, 33 bp, Homo sapien
ggttttcaggttcagcgctaaggggtgacttta

SEQ ID NO: 767959 - DNA, 33 bp, Homo sapien
gacaaaagtagagccacaactataaactggagt

SEQ ID NO: 767960 - DNA, 33 bp, Homo sapien
gacaaaagtagagccataactataaactggagt

SEQ ID NO: 767961 - DNA, 33 bp, Homo sapien
gggtatgagagaagaaagaggtgtcattaatgt

SEQ ID NO: 767962 - DNA, 33 bp, Homo sapien
gggtatgagagaagaaggaggtgtcattaatgt

SEQ ID NO: 767963 - DNA, 33 bp, Homo sapien
atctttggtaaattccaacaatggcaaacacag

SEQ ID NO: 767964 - DNA, 33 bp, Homo sapien
atctttggtaaattccgacaatggcaaacacag

SEQ ID NO: 767965 - DNA, 33 bp, Homo sapien
cttgtcagaaagaagaacacagataaagatgta

SEQ ID NO: 767966 - DNA, 33 bp, Homo sapien
cttgtcagaaagaagatcacagataaagatgta

SEQ ID NO: 767967 - DNA, 33 bp, Homo sapien
agttaaaagacatgagaataggtggagcacaga

SEQ ID NO: 767968 - DNA, 33 bp, Homo sapien
agttaaaagacatgagtataggtggagcacaga

SEQ ID NO: 767969 - DNA, 33 bp, Homo sapien
aaaagagaggcatttccatttggagctcttaac

SEQ ID NO: 767970 - DNA, 33 bp, Homo sapien
aaaagagaggcatttctatttggagctcttaac

SEQ ID NO: 767971 - DNA, 33 bp, Homo sapien
aacacaaccagacttaaatttctgaggggccac

SEQ ID NO: 767972 - DNA, 33 bp, Homo sapien
aacacaaccagacttacatttctgaggggccac

SEQ ID NO: 767973 - DNA, 33 bp, Homo sapien
attactgatcatttcacatagtgggaaactttg

SEQ ID NO: 767974 - DNA, 33 bp, Homo sapien
attactgatcatttcagatagtgggaaactttg

SEQ ID NO: 767975 - DNA, 33 bp, Homo sapien
ttacatcgacattttcaccgatggaagaaacaa

SEQ ID NO: 767976 - DNA, 33 bp, Homo sapien
ttacatcgacattttcgccgatggaagaaacaa

SEQ ID NO: 767977 - DNA, 33 bp, Homo sapien
ctcctagatctgaaacaggtatatctttcctca

SEQ ID NO: 767978 - DNA, 33 bp, Homo sapien
ctcctagatctgaaaccggtatatctttcctca

SEQ ID NO: 767979 - DNA, 33 bp, Homo sapien
gttctgccctggattaagatcatggattctgac

SEQ ID NO: 767980 - DNA, 33 bp, Homo sapien
gttctgccctggattaggatcatggattctgac

SEQ ID NO: 767981 - DNA, 33 bp, Homo sapien
gatttggatgggaaaggctcataacacacagta

SEQ ID NO: 767982 - DNA, 33 bp, Homo sapien
gatttggatgggaaagtctcataacacacagta

SEQ ID NO: 767983 - DNA, 33 bp, Homo sapien
ttatagcagaactaacggtaccctgaaagtgta

SEQ ID NO: 767984 - DNA, 33 bp, Homo sapien
ttatagcagaactaactgtaccctgaaagtgta

SEQ ID NO: 767985 - DNA, 33 bp, Homo sapien
tcccacctgtctttgaacccccagttggttggg

SEQ ID NO: 767986 - DNA, 33 bp, Homo sapien
tcccacctgtctttgatcccccagttggttggg

SEQ ID NO: 767987 - DNA, 33 bp, Homo sapien
tatgagagaacaagaacaacagaaatcagctgt

SEQ ID NO: 767988 - DNA, 33 bp, Homo sapien
tatgagagaacaagaagaacagaaatcagctgt

SEQ ID NO: 767989 - DNA, 33 bp, Homo sapien
aaattgctctgcctaccggtaccaccattattc

SEQ ID NO: 767990 - DNA, 33 bp, Homo sapien
aaattgctctgcctacgggtaccaccattattc

SEQ ID NO: 767991 - DNA, 33 bp, Homo sapien
acaaatggagaacaaactcatgtctttattctt

SEQ ID NO: 767992 - DNA, 33 bp, Homo sapien
acaaatggagaacaaattcatgtctttattctt

SEQ ID NO: 767993 - DNA, 33 bp, Homo sapien
cttacctagtggaaggaactagctagctctcca

SEQ ID NO: 767994 - DNA, 33 bp, Homo sapien
cttacctagtggaagggactagctagctctcca

SEQ ID NO: 767995 - DNA, 33 bp, Homo sapien
ttaaaatcctttaaaaacaccatatagaaagga

SEQ ID NO: 767996 - DNA, 33 bp, Homo sapien
ttaaaatcctttaaaagcaccatatagaaagga

SEQ ID NO: 767997 - DNA, 33 bp, Homo sapien
ctccttgcttcaacaactgcagctctcacagca

SEQ ID NO: 767998 - DNA, 33 bp, Homo sapien
ctccttgcttcaacaattgcagctctcacagca

SEQ ID NO: 767999 - DNA, 33 bp, Homo sapien
gatacccaaatctataagtccaatttttgctct

SEQ ID NO: 768000 - DNA, 33 bp, Homo sapien
gatacccaaatctatatgtccaatttttgctct

SEQ ID NO: 768001 - DNA, 33 bp, Homo sapien
ctgctggtagaagggcaaattggttcaagcact

SEQ ID NO: 768002 - DNA, 33 bp, Homo sapien
ctgctggtagaagggcgaattggttcaagcact

SEQ ID NO: 768003 - DNA, 33 bp, Homo sapien
aacagctactgacctccaagtttactagaactc

SEQ ID NO: 768004 - DNA, 33 bp, Homo sapien
aacagctactgacctcgaagtttactagaactc

SEQ ID NO: 768005 - DNA, 33 bp, Homo sapien
attgcaagggaaaaggaaatcttcatactgggt

SEQ ID NO: 768006 - DNA, 33 bp, Homo sapien
attgcaagggaaaaggtaatcttcatactgggt

SEQ ID NO: 768007 - DNA, 33 bp, Homo sapien
agggggtatagagtggcattttgtaagagtagt

SEQ ID NO: 768008 - DNA, 33 bp, Homo sapien
agggggtatagagtgggattttgtaagagtagt

SEQ ID NO: 768009 - DNA, 33 bp, Homo sapien
gattgaatattgtctccatacacagtttaggaa

SEQ ID NO: 768010 - DNA, 33 bp, Homo sapien
gattgaatattgtctctatacacagtttaggaa

SEQ ID NO: 768011 - DNA, 33 bp, Homo sapien
actggattctaaccacgcttaatacacaatatc

SEQ ID NO: 768012 - DNA, 33 bp, Homo sapien
actggattctaaccactcttaatacacaatatc

SEQ ID NO: 768013 - DNA, 33 bp, Homo sapien
tactactgtcaaacttaaagatctaaaagatgc

SEQ ID NO: 768014 - DNA, 33 bp, Homo sapien
tactactgtcaaactttaagatctaaaagatgc

SEQ ID NO: 768015 - DNA, 33 bp, Homo sapien
gctaaaggatacaaatcaagaacacaggtagcg

SEQ ID NO: 768016 - DNA, 33 bp, Homo sapien
gctaaaggatacaaatgaagaacacaggtagcg

SEQ ID NO: 768017 - DNA, 33 bp, Homo sapien
acagagctatttacacagcaagcaatcaaaata

SEQ ID NO: 768018 - DNA, 33 bp, Homo sapien
acagagctatttacacggcaagcaatcaaaata

SEQ ID NO: 768019 - DNA, 33 bp, Homo sapien
tcttctccatttcaaaatgaaggaaattaatca

SEQ ID NO: 768020 - DNA, 33 bp, Homo sapien
tcttctccatttcaaagtgaaggaaattaatca

SEQ ID NO: 768021 - DNA, 33 bp, Homo sapien
ctgtgccagagctaagaagaatggaatctggca

SEQ ID NO: 768022 - DNA, 33 bp, Homo sapien
ctgtgccagagctaaggagaatggaatctggca

SEQ ID NO: 768023 - DNA, 33 bp, Homo sapien
gacattaagcattctcacaattagaaataagaa

SEQ ID NO: 768024 - DNA, 33 bp, Homo sapien
gacattaagcattctcgcaattagaaataagaa

SEQ ID NO: 768025 - DNA, 33 bp, Homo sapien
acttctgaggcccttacgtagcctgtgacatta

SEQ ID NO: 768026 - DNA, 33 bp, Homo sapien
acttctgaggcccttatgtagcctgtgacatta

SEQ ID NO: 768027 - DNA, 33 bp, Homo sapien
tgaacaggagaatttacgagactgctgtggaag

SEQ ID NO: 768028 - DNA, 33 bp, Homo sapien
tgaacaggagaatttatgagactgctgtggaag

SEQ ID NO: 768029 - DNA, 33 bp, Homo sapien
ctctttaacataactccatatcacatttgtttc

SEQ ID NO: 768030 - DNA, 33 bp, Homo sapien
ctctttaacataactctatatcacatttgtttc

SEQ ID NO: 768031 - DNA, 33 bp, Homo sapien
ttccacagctagataaaggaaatacatagccta

SEQ ID NO: 768032 - DNA, 33 bp, Homo sapien
ttccacagctagataatggaaatacatagccta

SEQ ID NO: 768033 - DNA, 33 bp, Homo sapien
tgtgagaatttgcaagcaagatctggctatttc

SEQ ID NO: 768034 - DNA, 33 bp, Homo sapien
tgtgagaatttgcaagtaagatctggctatttc

SEQ ID NO: 768035 - DNA, 33 bp, Homo sapien
agttgttagactaaaggatagcagattgcttgg

SEQ ID NO: 768036 - DNA, 33 bp, Homo sapien
agttgttagactaaagtatagcagattgcttgg

SEQ ID NO: 768037 - DNA, 33 bp, Homo sapien
gtacttttaaagtcaacaggagattattcgaat

SEQ ID NO: 768038 - DNA, 33 bp, Homo sapien
gtacttttaaagtcaataggagattattcgaat

SEQ ID NO: 768039 - DNA, 33 bp, Homo sapien
tttattttttcatgtaaacaataaatctggttt

SEQ ID NO: 768040 - DNA, 33 bp, Homo sapien
tttattttttcatgtatacaataaatctggttt

SEQ ID NO: 768041 - DNA, 33 bp, Homo sapien
aaagtactactcaaggaaagtttgagcattttt

SEQ ID NO: 768042 - DNA, 33 bp, Homo sapien
aaagtactactcaaggcaagtttgagcattttt

SEQ ID NO: 768043 - DNA, 33 bp, Homo sapien
caagggttccctaaagcctgaagaaggtgagaa

SEQ ID NO: 768044 - DNA, 33 bp, Homo sapien
caagggttccctaaagtctgaagaaggtgagaa

SEQ ID NO: 768045 - DNA, 33 bp, Homo sapien
tggactcgaatcaggaaaacctggccctgaatc

SEQ ID NO: 768046 - DNA, 33 bp, Homo sapien
tggactcgaatcaggacaacctggccctgaatc

SEQ ID NO: 768047 - DNA, 33 bp, Homo sapien
agtctttagtgttctcgctataaaagataatgt

SEQ ID NO: 768048 - DNA, 33 bp, Homo sapien
agtctttagtgttctctctataaaagataatgt

SEQ ID NO: 768049 - DNA, 33 bp, Homo sapien
tagccttggctctaataagaaattatagtactt

SEQ ID NO: 768050 - DNA, 33 bp, Homo sapien
tagccttggctctaatgagaaattatagtactt

SEQ ID NO: 768051 - DNA, 33 bp, Homo sapien
gaggtaaggactggaaaaaatgtacatgtgaga

SEQ ID NO: 768052 - DNA, 33 bp, Homo sapien
gaggtaaggactggaagaaatgtacatgtgaga

SEQ ID NO: 768053 - DNA, 33 bp, Homo sapien
gttcttccaggagaaaagttgtctcagtcaaat

SEQ ID NO: 768054 - DNA, 33 bp, Homo sapien
gttcttccaggagaaaggttgtctcagtcaaat

SEQ ID NO: 768055 - DNA, 33 bp, Homo sapien
gtctcacagtaacaaaatgtcaacatctactga

SEQ ID NO: 768056 - DNA, 33 bp, Homo sapien
gtctcacagtaacaaattgtcaacatctactga

SEQ ID NO: 768057 - DNA, 33 bp, Homo sapien
cagtcttaggcactaccaatctactttctgtgt

SEQ ID NO: 768058 - DNA, 33 bp, Homo sapien
cagtcttaggcactacgaatctactttctgtgt

SEQ ID NO: 768059 - DNA, 33 bp, Homo sapien
atcagtctcaaaagaccacgtattatattattt

SEQ ID NO: 768060 - DNA, 33 bp, Homo sapien
atcagtctcaaaagacgacgtattatattattt

SEQ ID NO: 768061 - DNA, 33 bp, Homo sapien
tagaaagtgattgaatcagcactgagtgtagaa

SEQ ID NO: 768062 - DNA, 33 bp, Homo sapien
tagaaagtgattgaattagcactgagtgtagaa

SEQ ID NO: 768063 - DNA, 33 bp, Homo sapien
atatcacaaaattcaaggagtgaatgtagaaag

SEQ ID NO: 768064 - DNA, 33 bp, Homo sapien
atatcacaaaattcaatgagtgaatgtagaaag

SEQ ID NO: 768065 - DNA, 33 bp, Homo sapien
attaggaagattccaccgacatattcccttttt

SEQ ID NO: 768066 - DNA, 33 bp, Homo sapien
attaggaagattccactgacatattcccttttt

SEQ ID NO: 768067 - DNA, 33 bp, Homo sapien
ttatggagtcagataactattcacgggacttat

SEQ ID NO: 768068 - DNA, 33 bp, Homo sapien
ttatggagtcagataattattcacgggacttat

SEQ ID NO: 768069 - DNA, 33 bp, Homo sapien
taatagaaaaagaacaacattcaaagcttttca

SEQ ID NO: 768070 - DNA, 33 bp, Homo sapien
taatagaaaaagaacagcattcaaagcttttca

SEQ ID NO: 768071 - DNA, 33 bp, Homo sapien
tcatgttactgtggaaaagtaggatgcaaccaa

SEQ ID NO: 768072 - DNA, 33 bp, Homo sapien
tcatgttactgtggaagagtaggatgcaaccaa

SEQ ID NO: 768073 - DNA, 33 bp, Homo sapien
tcactcttgtcggtgacatttgccaagatttcc

SEQ ID NO: 768074 - DNA, 33 bp, Homo sapien
tcactcttgtcggtgagatttgccaagatttcc

SEQ ID NO: 768075 - DNA, 33 bp, Homo sapien
tcaaaattgtttgctcaaaaaattccttgagcc

SEQ ID NO: 768076 - DNA, 33 bp, Homo sapien
tcaaaattgtttgctctaaaaattccttgagcc

SEQ ID NO: 768077 - DNA, 33 bp, Homo sapien
ctcttatttataaggacgttttattctcgagtg

SEQ ID NO: 768078 - DNA, 33 bp, Homo sapien
ctcttatttataaggatgttttattctcgagtg

SEQ ID NO: 768079 - DNA, 33 bp, Homo sapien
gtatttctccctgaaaattcagagaaagaaaag

SEQ ID NO: 768080 - DNA, 33 bp, Homo sapien
gtatttctccctgaaagttcagagaaagaaaag

SEQ ID NO: 768081 - DNA, 33 bp, Homo sapien
agtaagacaaatgcccaagcaggagaaactgct

SEQ ID NO: 768082 - DNA, 33 bp, Homo sapien
agtaagacaaatgcccgagcaggagaaactgct

SEQ ID NO: 768083 - DNA, 33 bp, Homo sapien
gtactgaggtagaaaccgtggaaattgtgaggc

SEQ ID NO: 768084 - DNA, 33 bp, Homo sapien
gtactgaggtagaaactgtggaaattgtgaggc

SEQ ID NO: 768085 - DNA, 33 bp, Homo sapien
ttgatgcatagtcttacattcttttggccttct

SEQ ID NO: 768086 - DNA, 33 bp, Homo sapien
ttgatgcatagtcttatattcttttggccttct

SEQ ID NO: 768087 - DNA, 33 bp, Homo sapien
ttaaaagagaacacaactgcccaacattaagat

SEQ ID NO: 768088 - DNA, 33 bp, Homo sapien
ttaaaagagaacacaattgcccaacattaagat

SEQ ID NO: 768089 - DNA, 33 bp, Homo sapien
acacattaatcattgaatatcaaacttaaatgt

SEQ ID NO: 768090 - DNA, 33 bp, Homo sapien
acacattaatcattgagtatcaaacttaaatgt

SEQ ID NO: 768091 - DNA, 33 bp, Homo sapien
ttttcaagggaacatacacattgaatcaattaa

SEQ ID NO: 768092 - DNA, 33 bp, Homo sapien
ttttcaagggaacatatacattgaatcaattaa

SEQ ID NO: 768093 - DNA, 33 bp, Homo sapien
aagcatggacgactctaagaaaacttgatttga

SEQ ID NO: 768094 - DNA, 33 bp, Homo sapien
aagcatggacgactctcagaaaacttgatttga

SEQ ID NO: 768095 - DNA, 33 bp, Homo sapien
agttcgtccttcaaaaagcatttgcaggaccta

SEQ ID NO: 768096 - DNA, 33 bp, Homo sapien
agttcgtccttcaaaacgcatttgcaggaccta

SEQ ID NO: 768097 - DNA, 33 bp, Homo sapien
aatgaacttaaatgtagcacatatggcttaatc

SEQ ID NO: 768098 - DNA, 33 bp, Homo sapien
aatgaacttaaatgtatcacatatggcttaatc

SEQ ID NO: 768099 - DNA, 33 bp, Homo sapien
acaaacatttggatcacagcaaagaaaaactgg

SEQ ID NO: 768100 - DNA, 33 bp, Homo sapien
acaaacatttggatcatagcaaagaaaaactgg

SEQ ID NO: 768101 - DNA, 33 bp, Homo sapien
gtgagagtccacggaacatttcctttagaattg

SEQ ID NO: 768102 - DNA, 33 bp, Homo sapien
gtgagagtccacggaatatttcctttagaattg

SEQ ID NO: 768103 - DNA, 33 bp, Homo sapien
tctggaagagtcaacaatagtttgctagcatat

SEQ ID NO: 768104 - DNA, 33 bp, Homo sapien
tctggaagagtcaacagtagtttgctagcatat

SEQ ID NO: 768105 - DNA, 33 bp, Homo sapien
aagaagttattcttctcaaagtagcagtcctcc

SEQ ID NO: 768106 - DNA, 33 bp, Homo sapien
aagaagttattcttctgaaagtagcagtcctcc

SEQ ID NO: 768107 - DNA, 33 bp, Homo sapien
tacaaaaaaatccctaagcatagtcttccagct

SEQ ID NO: 768108 - DNA, 33 bp, Homo sapien
tacaaaaaaatccctaggcatagtcttccagct

SEQ ID NO: 768109 - DNA, 33 bp, Homo sapien
acttctctaaaaaaaaaccatgatcattgggag

SEQ ID NO: 768110 - DNA, 33 bp, Homo sapien
acttctctaaaaaaaacccatgatcattgggag

SEQ ID NO: 768111 - DNA, 33 bp, Homo sapien
gcttctctaatccctgaacagttggtatcatct

SEQ ID NO: 768112 - DNA, 33 bp, Homo sapien
gcttctctaatccctggacagttggtatcatct

SEQ ID NO: 768113 - DNA, 33 bp, Homo sapien
cttcaccaaaggatacaaaattgtcacaaaggt

SEQ ID NO: 768114 - DNA, 33 bp, Homo sapien
cttcaccaaaggatacgaaattgtcacaaaggt

SEQ ID NO: 768115 - DNA, 33 bp, Homo sapien
gaaagtaatataatccacttgatactaggatgg

SEQ ID NO: 768116 - DNA, 33 bp, Homo sapien
gaaagtaatataatccgcttgatactaggatgg

SEQ ID NO: 768117 - DNA, 33 bp, Homo sapien
aaagcactaaaggaaaacatgaggttcagagca

SEQ ID NO: 768118 - DNA, 33 bp, Homo sapien
aaagcactaaaggaaagcatgaggttcagagca

SEQ ID NO: 768119 - DNA, 33 bp, Homo sapien
aaagaacaaagaaaaaacacatggacagactaa

SEQ ID NO: 768120 - DNA, 33 bp, Homo sapien
aaagaacaaagaaaaagcacatggacagactaa

SEQ ID NO: 768121 - DNA, 33 bp, Homo sapien
tgcatcatgaacccaacggactcttttttttct

SEQ ID NO: 768122 - DNA, 33 bp, Homo sapien
tgcatcatgaacccaatggactcttttttttct

SEQ ID NO: 768123 - DNA, 33 bp, Homo sapien
aaatcagggttggttacagaaacagagtgatgt

SEQ ID NO: 768124 - DNA, 33 bp, Homo sapien
aaatcagggttggttagagaaacagagtgatgt

SEQ ID NO: 768125 - DNA, 33 bp, Homo sapien
taagaccccttcaacaatgaatgataacacaga

SEQ ID NO: 768126 - DNA, 33 bp, Homo sapien
taagaccccttcaacagtgaatgataacacaga

SEQ ID NO: 768127 - DNA, 33 bp, Homo sapien
gatctgtggtccacaaaaatacacgttaaagtc

SEQ ID NO: 768128 - DNA, 33 bp, Homo sapien
gatctgtggtccacaagaatacacgttaaagtc

SEQ ID NO: 768129 - DNA, 33 bp, Homo sapien
tcatatggcaagacaaaagggtaagcttcactc

SEQ ID NO: 768130 - DNA, 33 bp, Homo sapien
tcatatggcaagacaagagggtaagcttcactc

SEQ ID NO: 768131 - DNA, 33 bp, Homo sapien
actgttagaaacaaataatggaaaagtggaata

SEQ ID NO: 768132 - DNA, 33 bp, Homo sapien
actgttagaaacaaatgatggaaaagtggaata

SEQ ID NO: 768133 - DNA, 33 bp, Homo sapien
aactgtgactctaaaaaatgtgcatttctgggc

SEQ ID NO: 768134 - DNA, 33 bp, Homo sapien
aactgtgactctaaaagatgtgcatttctgggc

SEQ ID NO: 768135 - DNA, 33 bp, Homo sapien
ttgctctttcctataaataacttccttatccct

SEQ ID NO: 768136 - DNA, 33 bp, Homo sapien
ttgctctttcctataagtaacttccttatccct

SEQ ID NO: 768137 - DNA, 33 bp, Homo sapien
tctgaatttcctcataagtaagaatgggggtag

SEQ ID NO: 768138 - DNA, 33 bp, Homo sapien
tctgaatttcctcataggtaagaatgggggtag

SEQ ID NO: 768139 - DNA, 33 bp, Homo sapien
tttccttagttaatgacgaaaaggcaataagaa

SEQ ID NO: 768140 - DNA, 33 bp, Homo sapien
tttccttagttaatgatgaaaaggcaataagaa

SEQ ID NO: 768141 - DNA, 33 bp, Homo sapien
cgggagcctgttagcaagactctctctcccttt

SEQ ID NO: 768142 - DNA, 33 bp, Homo sapien
cgggagcctgttagcaggactctctctcccttt

SEQ ID NO: 768143 - DNA, 33 bp, Homo sapien
agaatttaatcccaacaattgagacctctacaa

SEQ ID NO: 768144 - DNA, 33 bp, Homo sapien
agaatttaatcccaacgattgagacctctacaa

SEQ ID NO: 768145 - DNA, 33 bp, Homo sapien
gggattggccatttgacaatgcatttctattaa

SEQ ID NO: 768146 - DNA, 33 bp, Homo sapien
gggattggccatttgataatgcatttctattaa

SEQ ID NO: 768147 - DNA, 33 bp, Homo sapien
acaaaataacttaggcacggctttgctatgagt

SEQ ID NO: 768148 - DNA, 33 bp, Homo sapien
acaaaataacttaggcgcggctttgctatgagt

SEQ ID NO: 768149 - DNA, 33 bp, Homo sapien
ataacagctcttaaacaccataaagagttaaga

SEQ ID NO: 768150 - DNA, 33 bp, Homo sapien
ataacagctcttaaacgccataaagagttaaga

SEQ ID NO: 768151 - DNA, 33 bp, Homo sapien
gcccttactctccaaccacaggaccttgcatta

SEQ ID NO: 768152 - DNA, 33 bp, Homo sapien
gcccttactctccaactacaggaccttgcatta

SEQ ID NO: 768153 - DNA, 33 bp, Homo sapien
tctcttaatggaaacagaggaatataggactaa

SEQ ID NO: 768154 - DNA, 33 bp, Homo sapien
tctcttaatggaaacataggaatataggactaa

SEQ ID NO: 768155 - DNA, 33 bp, Homo sapien
agatttacagtaataaatgcctatattaaaaaa

SEQ ID NO: 768156 - DNA, 33 bp, Homo sapien
agatttacagtaataattgcctatattaaaaaa

SEQ ID NO: 768157 - DNA, 33 bp, Homo sapien
tctgacatttacataaaagccctctttagagat

SEQ ID NO: 768158 - DNA, 33 bp, Homo sapien
tctgacatttacataagagccctctttagagat

SEQ ID NO: 768159 - DNA, 33 bp, Homo sapien
cttttcttgatgaatcaaatcctcgactattgt

SEQ ID NO: 768160 - DNA, 33 bp, Homo sapien
cttttcttgatgaatcgaatcctcgactattgt

SEQ ID NO: 768161 - DNA, 33 bp, Homo sapien
gaaaatgcaaacaccaatgaaaaacaacaggtt

SEQ ID NO: 768162 - DNA, 33 bp, Homo sapien
gaaaatgcaaacaccagtgaaaaacaacaggtt

SEQ ID NO: 768163 - DNA, 33 bp, Homo sapien
tgggcaagctatcctgaattgaaaccccacaga

SEQ ID NO: 768164 - DNA, 33 bp, Homo sapien
tgggcaagctatcctgtattgaaaccccacaga

SEQ ID NO: 768165 - DNA, 33 bp, Homo sapien
gattttttgttacatcacaacagcacacgacaa

SEQ ID NO: 768166 - DNA, 33 bp, Homo sapien
gattttttgttacatctcaacagcacacgacaa

SEQ ID NO: 768167 - DNA, 33 bp, Homo sapien
gctggcaatgtgaacagggagcttgactgtcaa

SEQ ID NO: 768168 - DNA, 33 bp, Homo sapien
gctggcaatgtgaacatggagcttgactgtcaa

SEQ ID NO: 768169 - DNA, 33 bp, Homo sapien
tctggctaagggaaaacatcaacttgtaaatga

SEQ ID NO: 768170 - DNA, 33 bp, Homo sapien
tctggctaagggaaaatatcaacttgtaaatga

SEQ ID NO: 768171 - DNA, 33 bp, Homo sapien
ttgtgtcacactgccacgaactctactgcgttc

SEQ ID NO: 768172 - DNA, 33 bp, Homo sapien
ttgtgtcacactgccatgaactctactgcgttc

SEQ ID NO: 768173 - DNA, 33 bp, Homo sapien
aaaactcaagaggatacgtgtgtaggtaggagg

SEQ ID NO: 768174 - DNA, 33 bp, Homo sapien
aaaactcaagaggatatgtgtgtaggtaggagg

SEQ ID NO: 768175 - DNA, 33 bp, Homo sapien
gttttccacagtagctgactagtttatattccc

SEQ ID NO: 768176 - DNA, 33 bp, Homo sapien
gttttccacagtagcttactagtttatattccc

SEQ ID NO: 768177 - DNA, 33 bp, Homo sapien
actgaccccagaaaaaaaaacttcagtggatta

SEQ ID NO: 768178 - DNA, 33 bp, Homo sapien
actgaccccagaaaaagaaacttcagtggatta

SEQ ID NO: 768179 - DNA, 33 bp, Homo sapien
ctacaagagtcacaacaattatcagtacctacc

SEQ ID NO: 768180 - DNA, 33 bp, Homo sapien
ctacaagagtcacaaccattatcagtacctacc

SEQ ID NO: 768181 - DNA, 33 bp, Homo sapien
agaaatgtgagaaaaccattttagaggtgcaag

SEQ ID NO: 768182 - DNA, 33 bp, Homo sapien
agaaatgtgagaaaactattttagaggtgcaag

SEQ ID NO: 768183 - DNA, 33 bp, Homo sapien
tgttaaataattgaacagcctatatggtaggac

SEQ ID NO: 768184 - DNA, 33 bp, Homo sapien
tgttaaataattgaacggcctatatggtaggac

SEQ ID NO: 768185 - DNA, 33 bp, Homo sapien
taaatatacctccaaccaattccattttctgca

SEQ ID NO: 768186 - DNA, 33 bp, Homo sapien
taaatatacctccaactaattccattttctgca

SEQ ID NO: 768187 - DNA, 33 bp, Homo sapien
acctctcctttcccaacggactgtttttcagca

SEQ ID NO: 768188 - DNA, 33 bp, Homo sapien
acctctcctttcccaatggactgtttttcagca

SEQ ID NO: 768189 - DNA, 33 bp, Homo sapien
cgatgtctatcatcaaccttttttttcctaatt

SEQ ID NO: 768190 - DNA, 33 bp, Homo sapien
cgatgtctatcatcaatcttttttttcctaatt

SEQ ID NO: 768191 - DNA, 33 bp, Homo sapien
ccttattagcagctaaagatcattaacagttta

SEQ ID NO: 768192 - DNA, 33 bp, Homo sapien
ccttattagcagctaaggatcattaacagttta

SEQ ID NO: 768193 - DNA, 33 bp, Homo sapien
cagaatattaacagaactggctggatagcgagg

SEQ ID NO: 768194 - DNA, 33 bp, Homo sapien
cagaatattaacagaattggctggatagcgagg

SEQ ID NO: 768195 - DNA, 33 bp, Homo sapien
cctaaagaaggtacaaaaagggatgctgagggt

SEQ ID NO: 768196 - DNA, 33 bp, Homo sapien
cctaaagaaggtacaagaagggatgctgagggt

SEQ ID NO: 768197 - DNA, 33 bp, Homo sapien
gagatcatagcttctccctggcttttaagatca

SEQ ID NO: 768198 - DNA, 33 bp, Homo sapien
gagatcatagcttctctctggcttttaagatca

SEQ ID NO: 768199 - DNA, 33 bp, Homo sapien
tcatggcttcaaataccatctatatactggcaa

SEQ ID NO: 768200 - DNA, 33 bp, Homo sapien
tcatggcttcaaatactatctatatactggcaa

SEQ ID NO: 768201 - DNA, 33 bp, Homo sapien
ttattgttgaattttcacaaaagtaagttattt

SEQ ID NO: 768202 - DNA, 33 bp, Homo sapien
ttattgttgaattttcgcaaaagtaagttattt

SEQ ID NO: 768203 - DNA, 33 bp, Homo sapien
actaagcttaaacataccatgtagtgaaacaaa

SEQ ID NO: 768204 - DNA, 33 bp, Homo sapien
actaagcttaaacatatcatgtagtgaaacaaa

SEQ ID NO: 768205 - DNA, 33 bp, Homo sapien
caatatatattgattaaaccttggatctatata

SEQ ID NO: 768206 - DNA, 33 bp, Homo sapien
caatatatattgattagaccttggatctatata

SEQ ID NO: 768207 - DNA, 33 bp, Homo sapien
aacatttaatttttcactcattaattcactatt

SEQ ID NO: 768208 - DNA, 33 bp, Homo sapien
aacatttaatttttcattcattaattcactatt

SEQ ID NO: 768209 - DNA, 33 bp, Homo sapien
cctcaatgaccaaaacccagagagggacaatcc

SEQ ID NO: 768210 - DNA, 33 bp, Homo sapien
cctcaatgaccaaaactcagagagggacaatcc

SEQ ID NO: 768211 - DNA, 33 bp, Homo sapien
ttgccccaacctgaagaaaccagctaaaattta

SEQ ID NO: 768212 - DNA, 33 bp, Homo sapien
ttgccccaacctgaagtaaccagctaaaattta

SEQ ID NO: 768213 - DNA, 33 bp, Homo sapien
ccacacactcagtaaaaaaagaaatccgttggg

SEQ ID NO: 768214 - DNA, 33 bp, Homo sapien
ccacacactcagtaaagaaagaaatccgttggg

SEQ ID NO: 768215 - DNA, 33 bp, Homo sapien
gcatgagaaccaattacgtatgtctcttcctga

SEQ ID NO: 768216 - DNA, 33 bp, Homo sapien
gcatgagaaccaattatgtatgtctcttcctga

SEQ ID NO: 768217 - DNA, 33 bp, Homo sapien
agcagatgctgcaaatcagactttctttttagg

SEQ ID NO: 768218 - DNA, 33 bp, Homo sapien
agcagatgctgcaaattagactttctttttagg

SEQ ID NO: 768219 - DNA, 33 bp, Homo sapien
tatttaatttcagttcaccaccagttacaaatg

SEQ ID NO: 768220 - DNA, 33 bp, Homo sapien
tatttaatttcagttcgccaccagttacaaatg

SEQ ID NO: 768221 - DNA, 33 bp, Homo sapien
caaagggaaatttctgaaactgagagtataata

SEQ ID NO: 768222 - DNA, 33 bp, Homo sapien
caaagggaaatttctggaactgagagtataata

SEQ ID NO: 768223 - DNA, 33 bp, Homo sapien
ctgtgctaaacatgtacggacttcttttcttgc

SEQ ID NO: 768224 - DNA, 33 bp, Homo sapien
ctgtgctaaacatgtatggacttcttttcttgc

SEQ ID NO: 768225 - DNA, 33 bp, Homo sapien
tatttttctaaaaacagtgcatctgtgctaaac

SEQ ID NO: 768226 - DNA, 33 bp, Homo sapien
tatttttctaaaaacattgcatctgtgctaaac

SEQ ID NO: 768227 - DNA, 33 bp, Homo sapien
aactatctccatgaacaaggacattttgcactt

SEQ ID NO: 768228 - DNA, 33 bp, Homo sapien
aactatctccatgaacgaggacattttgcactt

SEQ ID NO: 768229 - DNA, 33 bp, Homo sapien
atctcagagttatttaaaacagtgacactataa

SEQ ID NO: 768230 - DNA, 33 bp, Homo sapien
atctcagagttatttagaacagtgacactataa

SEQ ID NO: 768231 - DNA, 33 bp, Homo sapien
cctacctatttatgaacactgctggttccgttt

SEQ ID NO: 768232 - DNA, 33 bp, Homo sapien
cctacctatttatgaagactgctggttccgttt

SEQ ID NO: 768233 - DNA, 33 bp, Homo sapien
ttgaaccatcgattgaaccggtcaccatctgga

SEQ ID NO: 768234 - DNA, 33 bp, Homo sapien
ttgaaccatcgattgatccggtcaccatctgga

SEQ ID NO: 768235 - DNA, 33 bp, Homo sapien
ttaaacaatacctccactagaagtcataagatt

SEQ ID NO: 768236 - DNA, 33 bp, Homo sapien
ttaaacaatacctccagtagaagtcataagatt

SEQ ID NO: 768237 - DNA, 33 bp, Homo sapien
tagtcagtggataaaacttaaaaatgcagctca

SEQ ID NO: 768238 - DNA, 33 bp, Homo sapien
tagtcagtggataaaagttaaaaatgcagctca

SEQ ID NO: 768239 - DNA, 33 bp, Homo sapien
tctagcattctcaatcacaaatagcttttattg

SEQ ID NO: 768240 - DNA, 33 bp, Homo sapien
tctagcattctcaatcgcaaatagcttttattg

SEQ ID NO: 768241 - DNA, 33 bp, Homo sapien
gagagattcagttgaagagataaaaacagtgga

SEQ ID NO: 768242 - DNA, 33 bp, Homo sapien
gagagattcagttgaatagataaaaacagtgga

SEQ ID NO: 768243 - DNA, 33 bp, Homo sapien
acagcatgagaaaaggccatggcaggagtgata

SEQ ID NO: 768244 - DNA, 33 bp, Homo sapien
acagcatgagaaaaggtcatggcaggagtgata

SEQ ID NO: 768245 - DNA, 33 bp, Homo sapien
acacacagttaaagtccgaagcacaaatagata

SEQ ID NO: 768246 - DNA, 33 bp, Homo sapien
acacacagttaaagtctgaagcacaaatagata

SEQ ID NO: 768247 - DNA, 33 bp, Homo sapien
aataagttgctatttcacatttcttgtccatga

SEQ ID NO: 768248 - DNA, 33 bp, Homo sapien
aataagttgctatttcgcatttcttgtccatga

SEQ ID NO: 768249 - DNA, 33 bp, Homo sapien
tttgcaggaactttcaatctggatttcaacttc

SEQ ID NO: 768250 - DNA, 33 bp, Homo sapien
tttgcaggaactttcagtctggatttcaacttc

SEQ ID NO: 768251 - DNA, 33 bp, Homo sapien
aagaaaaatgtgtaacccttaaagagcatttgt

SEQ ID NO: 768252 - DNA, 33 bp, Homo sapien
aagaaaaatgtgtaacgcttaaagagcatttgt

SEQ ID NO: 768253 - DNA, 33 bp, Homo sapien
aacagtggtggtgaaggcagtaccaatctttca

SEQ ID NO: 768254 - DNA, 33 bp, Homo sapien
aacagtggtggtgaagtcagtaccaatctttca

SEQ ID NO: 768255 - DNA, 33 bp, Homo sapien
aacatttcctgaggctcaactgtatgctagcca

SEQ ID NO: 768256 - DNA, 33 bp, Homo sapien
aacatttcctgaggcttaactgtatgctagcca

SEQ ID NO: 768257 - DNA, 33 bp, Homo sapien
aactaaagtgacagaaacctagaaatctattag

SEQ ID NO: 768258 - DNA, 33 bp, Homo sapien
aactaaagtgacagaagcctagaaatctattag

SEQ ID NO: 768259 - DNA, 33 bp, Homo sapien
ttccttttactcaaacaaggctttctggatttt

SEQ ID NO: 768260 - DNA, 33 bp, Homo sapien
ttccttttactcaaacgaggctttctggatttt

SEQ ID NO: 768261 - DNA, 33 bp, Homo sapien
taataagtgtccatgaaatctttgcagtttgtg

SEQ ID NO: 768262 - DNA, 33 bp, Homo sapien
taataagtgtccatgatatctttgcagtttgtg

SEQ ID NO: 768263 - DNA, 33 bp, Homo sapien
ttgaatgttgagtgtacactatcttatttaatc

SEQ ID NO: 768264 - DNA, 33 bp, Homo sapien
ttgaatgttgagtgtatactatcttatttaatc

SEQ ID NO: 768265 - DNA, 33 bp, Homo sapien
tctatttatagccaaaagatggctgctttccat

SEQ ID NO: 768266 - DNA, 33 bp, Homo sapien
tctatttatagccaaaggatggctgctttccat

SEQ ID NO: 768267 - DNA, 33 bp, Homo sapien
atgtatggaaagataaaagaactgggtggaagg

SEQ ID NO: 768268 - DNA, 33 bp, Homo sapien
atgtatggaaagataagagaactgggtggaagg

SEQ ID NO: 768269 - DNA, 33 bp, Homo sapien
tacagggagagttgctcagagagttgctttttg

SEQ ID NO: 768270 - DNA, 33 bp, Homo sapien
tacagggagagttgcttagagagttgctttttg

SEQ ID NO: 768271 - DNA, 33 bp, Homo sapien
tttatgtttcaaaaagcctttttcattgccaag

SEQ ID NO: 768272 - DNA, 33 bp, Homo sapien
tttatgtttcaaaaagtctttttcattgccaag

SEQ ID NO: 768273 - DNA, 33 bp, Homo sapien
cgccatgggtcttgcaatcgccacaatgtccaa

SEQ ID NO: 768274 - DNA, 33 bp, Homo sapien
cgccatgggtcttgcagtcgccacaatgtccaa

SEQ ID NO: 768275 - DNA, 33 bp, Homo sapien
ttttgcttggaaactaactcaggggaggccatc

SEQ ID NO: 768276 - DNA, 33 bp, Homo sapien
ttttgcttggaaactacctcaggggaggccatc

SEQ ID NO: 768277 - DNA, 33 bp, Homo sapien
tccacctgatggaacacagttgatttattcaga

SEQ ID NO: 768278 - DNA, 33 bp, Homo sapien
tccacctgatggaacatagttgatttattcaga

SEQ ID NO: 768279 - DNA, 33 bp, Homo sapien
ttctatttttgttccactgacctatgtggctgt

SEQ ID NO: 768280 - DNA, 33 bp, Homo sapien
ttctatttttgttccattgacctatgtggctgt

SEQ ID NO: 768281 - DNA, 33 bp, Homo sapien
ttgggatacaattctacggaaggatgttattgc

SEQ ID NO: 768282 - DNA, 33 bp, Homo sapien
ttgggatacaattctatggaaggatgttattgc

SEQ ID NO: 768283 - DNA, 33 bp, Homo sapien
tctatttacccttctcccatcatttgtgctatt

SEQ ID NO: 768284 - DNA, 33 bp, Homo sapien
tctatttacccttctctcatcatttgtgctatt

SEQ ID NO: 768285 - DNA, 33 bp, Homo sapien
gattcaatggtattcccatgaaactactgatga

SEQ ID NO: 768286 - DNA, 33 bp, Homo sapien
gattcaatggtattcctatgaaactactgatga

SEQ ID NO: 768287 - DNA, 33 bp, Homo sapien
aagggactgccttttcaagttcttttgatattg

SEQ ID NO: 768288 - DNA, 33 bp, Homo sapien
aagggactgccttttccagttcttttgatattg

SEQ ID NO: 768289 - DNA, 33 bp, Homo sapien
agtcttctgggaagctcgtcccattttagttga

SEQ ID NO: 768290 - DNA, 33 bp, Homo sapien
agtcttctgggaagcttgtcccattttagttga

SEQ ID NO: 768291 - DNA, 33 bp, Homo sapien
ataaatcataccctatagttaaaaaatgtacaa

SEQ ID NO: 768292 - DNA, 33 bp, Homo sapien
ataaatcataccctatggttaaaaaatgtacaa

SEQ ID NO: 768293 - DNA, 33 bp, Homo sapien
cacacacacacacaaacgtttgagggcatcaaa

SEQ ID NO: 768294 - DNA, 33 bp, Homo sapien
cacacacacacacaaatgtttgagggcatcaaa

SEQ ID NO: 768295 - DNA, 33 bp, Homo sapien
cagcaaacaagcaaaactggcccagagatacca

SEQ ID NO: 768296 - DNA, 33 bp, Homo sapien
cagcaaacaagcaaaattggcccagagatacca

SEQ ID NO: 768297 - DNA, 33 bp, Homo sapien
agacttgtaattacccaatgtgcttacatgaaa

SEQ ID NO: 768298 - DNA, 33 bp, Homo sapien
agacttgtaattacccgatgtgcttacatgaaa

SEQ ID NO: 768299 - DNA, 33 bp, Homo sapien
gctgcttccttttatcacacctttatctgtctt

SEQ ID NO: 768300 - DNA, 33 bp, Homo sapien
gctgcttccttttatcgcacctttatctgtctt

SEQ ID NO: 768301 - DNA, 33 bp, Homo sapien
ctagaatactttttcccagctatccacatggct

SEQ ID NO: 768302 - DNA, 33 bp, Homo sapien
ctagaatactttttcctagctatccacatggct

SEQ ID NO: 768303 - DNA, 33 bp, Homo sapien
aggcacatcctctgtaacctttccctgtcttcc

SEQ ID NO: 768304 - DNA, 33 bp, Homo sapien
aggcacatcctctgtatcctttccctgtcttcc

SEQ ID NO: 768305 - DNA, 33 bp, Homo sapien
ataaaagaaagcaagacagggcttgaaaagtca

SEQ ID NO: 768306 - DNA, 33 bp, Homo sapien
ataaaagaaagcaagatagggcttgaaaagtca

SEQ ID NO: 768307 - DNA, 33 bp, Homo sapien
cagctggagatcaacactgaacatcaaaggaca

SEQ ID NO: 768308 - DNA, 33 bp, Homo sapien
cagctggagatcaacagtgaacatcaaaggaca

SEQ ID NO: 768309 - DNA, 33 bp, Homo sapien
ctgattatctagccaacggaaagagatgactct

SEQ ID NO: 768310 - DNA, 33 bp, Homo sapien
ctgattatctagccaatggaaagagatgactct

SEQ ID NO: 768311 - DNA, 33 bp, Homo sapien
gtctatagactaatgaaatagcatacttttata

SEQ ID NO: 768312 - DNA, 33 bp, Homo sapien
gtctatagactaatgatatagcatacttttata

SEQ ID NO: 768313 - DNA, 33 bp, Homo sapien
tttccaggtcatcagtaaattcaaagatctgat

SEQ ID NO: 768314 - DNA, 33 bp, Homo sapien
tttccaggtcatcagtgaattcaaagatctgat

SEQ ID NO: 768315 - DNA, 33 bp, Homo sapien
aggtgccatagaaccaatgaggtgcctgaaagg

SEQ ID NO: 768316 - DNA, 33 bp, Homo sapien
aggtgccatagaaccattgaggtgcctgaaagg

SEQ ID NO: 768317 - DNA, 33 bp, Homo sapien
gagaaattatttgcttcaaagagtatccaggac

SEQ ID NO: 768318 - DNA, 33 bp, Homo sapien
gagaaattatttgcttgaaagagtatccaggac

SEQ ID NO: 768319 - DNA, 33 bp, Homo sapien
aaaagggaatttcagccaagtctgttcctttag

SEQ ID NO: 768320 - DNA, 33 bp, Homo sapien
aaaagggaatttcagctaagtctgttcctttag

SEQ ID NO: 768321 - DNA, 33 bp, Homo sapien
cccatggcacagttaaaaagataggctgaaagc

SEQ ID NO: 768322 - DNA, 33 bp, Homo sapien
cccatggcacagttaacaagataggctgaaagc

SEQ ID NO: 768323 - DNA, 33 bp, Homo sapien
tttatgtagaagagcaataaagactgaggtaaa

SEQ ID NO: 768324 - DNA, 33 bp, Homo sapien
tttatgtagaagagcagtaaagactgaggtaaa

SEQ ID NO: 768325 - DNA, 33 bp, Homo sapien
attattcgaccagctaaaaaagttttaatatgt

SEQ ID NO: 768326 - DNA, 33 bp, Homo sapien
attattcgaccagctacaaaagttttaatatgt

SEQ ID NO: 768327 - DNA, 33 bp, Homo sapien
ctgaagaagtctgttcaccctgaaattcctcct

SEQ ID NO: 768328 - DNA, 33 bp, Homo sapien
ctgaagaagtctgttcgccctgaaattcctcct

SEQ ID NO: 768329 - DNA, 33 bp, Homo sapien; identical to SEQ ID NO: 768327

SEQ ID NO: 768330 - DNA, 33 bp, Homo sapien; identical to SEQ ID NO: 768328

SEQ ID NO: 768331 - DNA, 33 bp, Homo sapien
gatgccatctagcttagaggaggatgtaaagag

SEQ ID NO: 768332 - DNA, 33 bp, Homo sapien
gatgccatctagcttataggaggatgtaaagag

SEQ ID NO: 768333 - DNA, 33 bp, Homo sapien
cagcaaatctagaggacaaataacaagaaatga

SEQ ID NO: 768334 - DNA, 33 bp, Homo sapien
cagcaaatctagaggagaaataacaagaaatga

SEQ ID NO: 768335 - DNA, 33 bp, Homo sapien
agacaaagaactcacaatcttcacaataatgaa

SEQ ID NO: 768336 - DNA, 33 bp, Homo sapien
agacaaagaactcacactcttcacaataatgaa

SEQ ID NO: 768337 - DNA, 33 bp, Homo sapien
ctaagcaaccaaaaaaagtggttagataacctg

SEQ ID NO: 768338 - DNA, 33 bp, Homo sapien
ctaagcaaccaaaaaacgtggttagataacctg

SEQ ID NO: 768339 - DNA, 33 bp, Homo sapien
ttgaaaaattggttgaacaatcgaggggttgct

SEQ ID NO: 768340 - DNA, 33 bp, Homo sapien
ttgaaaaattggttgagcaatcgaggggttgct

SEQ ID NO: 768341 - DNA, 33 bp, Homo sapien
ctgccagctgcacacccctaagaaaggaaatca

SEQ ID NO: 768342 - DNA, 33 bp, Homo sapien
ctgccagctgcacacctctaagaaaggaaatca

SEQ ID NO: 768343 - DNA, 33 bp, Homo sapien
tacagtcataatagagaacagtatggagtttcc

SEQ ID NO: 768344 - DNA, 33 bp, Homo sapien
tacagtcataatagagtacagtatggagtttcc

SEQ ID NO: 768345 - DNA, 33 bp, Homo sapien
acttggcaataggtgacggtccctttggggtca

SEQ ID NO: 768346 - DNA, 33 bp, Homo sapien
acttggcaataggtgatggtccctttggggtca

SEQ ID NO: 768347 - DNA, 33 bp, Homo sapien
ataataaggagtcttccattccagttgtggaat

SEQ ID NO: 768348 - DNA, 33 bp, Homo sapien
ataataaggagtcttctattccagttgtggaat

SEQ ID NO: 768349 - DNA, 33 bp, Homo sapien
agcctcagatgccataagggaaaccaattagtc

SEQ ID NO: 768350 - DNA, 33 bp, Homo sapien
agcctcagatgccataggggaaaccaattagtc

SEQ ID NO: 768351 - DNA, 33 bp, Homo sapien
ttgggatgaaatttcaacaggtgcttttggggg

SEQ ID NO: 768352 - DNA, 33 bp, Homo sapien
ttgggatgaaatttcagcaggtgcttttggggg

SEQ ID NO: 768353 - DNA, 33 bp, Homo sapien
acaagaacacttagcccatctactactgtcacc

SEQ ID NO: 768354 - DNA, 33 bp, Homo sapien
acaagaacacttagcctatctactactgtcacc

SEQ ID NO: 768355 - DNA, 33 bp, Homo sapien
attattaaaatgaccacgcaactcaaaacaacc

SEQ ID NO: 768356 - DNA, 33 bp, Homo sapien
attattaaaatgaccatgcaactcaaaacaacc

SEQ ID NO: 768357 - DNA, 33 bp, Homo sapien
ttctttcctaaatgtaagttcttggtgacttta

SEQ ID NO: 768358 - DNA, 33 bp, Homo sapien
ttctttcctaaatgtatgttcttggtgacttta

SEQ ID NO: 768359 - DNA, 33 bp, Homo sapien
tgtgctgcagatttctaaaagtttcacaatata

SEQ ID NO: 768360 - DNA, 33 bp, Homo sapien
tgtgctgcagatttctgaaagtttcacaatata

SEQ ID NO: 768361 - DNA, 33 bp, Homo sapien
cctcttctcactactcaactagggcagtacccc

SEQ ID NO: 768362 - DNA, 33 bp, Homo sapien
cctcttctcactactcgactagggcagtacccc

SEQ ID NO: 768363 - DNA, 33 bp, Homo sapien
atttgcagtactgatacgtaacaactttgcaga

SEQ ID NO: 768364 - DNA, 33 bp, Homo sapien
atttgcagtactgatatgtaacaactttgcaga

SEQ ID NO: 768365 - DNA, 33 bp, Homo sapien
ttaatatagtccaataccatactgttcttttaa

SEQ ID NO: 768366 - DNA, 33 bp, Homo sapien
ttaatatagtccaatatcatactgttcttttaa

SEQ ID NO: 768367 - DNA, 33 bp, Homo sapien
agagacattggttaacaggtacaaacatagagt

SEQ ID NO: 768368 - DNA, 33 bp, Homo sapien
agagacattggttaacgggtacaaacatagagt

SEQ ID NO: 768369 - DNA, 33 bp, Homo sapien
atgtacatattccgtgaaattgctatcaaaata

SEQ ID NO: 768370 - DNA, 33 bp, Homo sapien
atgtacatattccgtgcaattgctatcaaaata

SEQ ID NO: 768371 - DNA, 33 bp, Homo sapien
ccacattgaaagaccactcatttttgtatgttg

SEQ ID NO: 768372 - DNA, 33 bp, Homo sapien
ccacattgaaagaccattcatttttgtatgttg

SEQ ID NO: 768373 - DNA, 33 bp, Homo sapien
gtgatccagaagtgccaagaacattgaagtgct

SEQ ID NO: 768374 - DNA, 33 bp, Homo sapien
gtgatccagaagtgccgagaacattgaagtgct

SEQ ID NO: 768375 - DNA, 33 bp, Homo sapien
aacagaaacaaccacaacaaatctcaaaacctg

SEQ ID NO: 768376 - DNA, 33 bp, Homo sapien
aacagaaacaaccacatcaaatctcaaaacctg

SEQ ID NO: 768377 - DNA, 33 bp, Homo sapien
taagattataaaagaccgattccagttatagta

SEQ ID NO: 768378 - DNA, 33 bp, Homo sapien
taagattataaaagacggattccagttatagta

SEQ ID NO: 768379 - DNA, 33 bp, Homo sapien
cacgcagtgggtttaggaagttgtattcatgcc

SEQ ID NO: 768380 - DNA, 33 bp, Homo sapien
cacgcagtgggtttagtaagttgtattcatgcc

SEQ ID NO: 768381 - DNA, 33 bp, Homo sapien
atactgcttttaccaaaccatagagtcaacctc

SEQ ID NO: 768382 - DNA, 33 bp, Homo sapien
atactgcttttaccaacccatagagtcaacctc

SEQ ID NO: 768383 - DNA, 33 bp, Homo sapien
atccttcatagttctgaatcaactgatgttgga

SEQ ID NO: 768384 - DNA, 33 bp, Homo sapien
atccttcatagttctgcatcaactgatgttgga

SEQ ID NO: 768385 - DNA, 33 bp, Homo sapien
taatacttcgttattccacctctaatgaagaaa

SEQ ID NO: 768386 - DNA, 33 bp, Homo sapien
taatacttcgttattctacctctaatgaagaaa

SEQ ID NO: 768387 - DNA, 33 bp, Homo sapien
ggtgtgctgtagtagcccaacattcacagccat

SEQ ID NO: 768388 - DNA, 33 bp, Homo sapien
ggtgtgctgtagtagctcaacattcacagccat

SEQ ID NO: 768389 - DNA, 33 bp, Homo sapien
tacatgagctaattaacgttctgcagtaaattt

SEQ ID NO: 768390 - DNA, 33 bp, Homo sapien
tacatgagctaattaatgttctgcagtaaattt

SEQ ID NO: 768391 - DNA, 33 bp, Homo sapien
acacagcactctagtacacatcactctagtaca

SEQ ID NO: 768392 - DNA, 33 bp, Homo sapien
acacagcactctagtatacatcactctagtaca

SEQ ID NO: 768393 - DNA, 33 bp, Homo sapien
aaaacagcatggtttacataacagacagataca

SEQ ID NO: 768394 - DNA, 33 bp, Homo sapien
aaaacagcatggtttagataacagacagataca

SEQ ID NO: 768395 - DNA, 33 bp, Homo sapien
attatgaatttgtctcaagaacattccaaatct

SEQ ID NO: 768396 - DNA, 33 bp, Homo sapien
attatgaatttgtctcgagaacattccaaatct

SEQ ID NO: 768397 - DNA, 33 bp, Homo sapien
tgatgaaagtttcagactaagacttgttcttag

SEQ ID NO: 768398 - DNA, 33 bp, Homo sapien
tgatgaaagtttcagattaagacttgttcttag

SEQ ID NO: 768399 - DNA, 33 bp, Homo sapien
gccctccttcaccaaaatatcctaaacagaggt

SEQ ID NO: 768400 - DNA, 33 bp, Homo sapien
gccctccttcaccaaagtatcctaaacagaggt

SEQ ID NO: 768401 - DNA, 33 bp, Homo sapien
acctactactacctaaccaaaacctactgctgg

SEQ ID NO: 768402 - DNA, 33 bp, Homo sapien
acctactactacctaatcaaaacctactgctgg

SEQ ID NO: 768403 - DNA, 33 bp, Homo sapien
gagggcttgaaatataactagagtgagggattt

SEQ ID NO: 768404 - DNA, 33 bp, Homo sapien
gagggcttgaaatatagctagagtgagggattt

SEQ ID NO: 768405 - DNA, 33 bp, Homo sapien
aattgagagactattaaatttttgtcatgttat

SEQ ID NO: 768406 - DNA, 33 bp, Homo sapien
aattgagagactattacatttttgtcatgttat

SEQ ID NO: 768407 - DNA, 33 bp, Homo sapien
gaattctatctcagtacgctttatcagactgag

SEQ ID NO: 768408 - DNA, 33 bp, Homo sapien
gaattctatctcagtatgctttatcagactgag

SEQ ID NO: 768409 - DNA, 33 bp, Homo sapien
tcaccatcttgcttcaggttacctaggagatga

SEQ ID NO: 768410 - DNA, 33 bp, Homo sapien
tcaccatcttgcttcatgttacctaggagatga

SEQ ID NO: 768411 - DNA, 33 bp, Homo sapien
ttctcacagtcaaccaacaacctttctgctgta

SEQ ID NO: 768412 - DNA, 33 bp, Homo sapien
ttctcacagtcaaccagcaacctttctgctgta

SEQ ID NO: 768413 - DNA, 33 bp, Homo sapien
tgccaatcttttcttccctcttaaacctagctt

SEQ ID NO: 768414 - DNA, 33 bp, Homo sapien
tgccaatcttttcttcgctcttaaacctagctt

SEQ ID NO: 768415 - DNA, 33 bp, Homo sapien
gacaggacacacctcaatacttgcaatggtaga

SEQ ID NO: 768416 - DNA, 33 bp, Homo sapien
gacaggacacacctcagtacttgcaatggtaga

SEQ ID NO: 768417 - DNA, 33 bp, Homo sapien
tggttctatgctatccacaattttggggcctcc

SEQ ID NO: 768418 - DNA, 33 bp, Homo sapien
tggttctatgctatccgcaattttggggcctcc

SEQ ID NO: 768419 - DNA, 33 bp, Homo sapien
caatgcagtgaaacagcagtttgttccttaaag

SEQ ID NO: 768420 - DNA, 33 bp, Homo sapien
caatgcagtgaaacagtagtttgttccttaaag

SEQ ID NO: 768421 - DNA, 33 bp, Homo sapien
aatagaaaggacacaactatccatcaaaattag

SEQ ID NO: 768422 - DNA, 33 bp, Homo sapien
aatagaaaggacacaattatccatcaaaattag

SEQ ID NO: 768423 - DNA, 33 bp, Homo sapien
aaggtcatgaacgccaagtaatttatactgtgt

SEQ ID NO: 768424 - DNA, 33 bp, Homo sapien
aaggtcatgaacgccacgtaatttatactgtgt

SEQ ID NO: 768425 - DNA, 33 bp, Homo sapien
accctggtagtggaagcccagctcacagtgagc

SEQ ID NO: 768426 - DNA, 33 bp, Homo sapien
accctggtagtggaagtccagctcacagtgagc

SEQ ID NO: 768427 - DNA, 33 bp, Homo sapien
ccctctgaattaaccaccaccttcatgctaaag

SEQ ID NO: 768428 - DNA, 33 bp, Homo sapien
ccctctgaattaaccatcaccttcatgctaaag

SEQ ID NO: 768429 - DNA, 33 bp, Homo sapien
ctgttatgtttcttaggatgctgatctctatgg

SEQ ID NO: 768430 - DNA, 33 bp, Homo sapien
ctgttatgtttcttagtatgctgatctctatgg

SEQ ID NO: 768431 - DNA, 33 bp, Homo sapien
aggcagaggacttttaaggagcaacagaacagc

SEQ ID NO: 768432 - DNA, 33 bp, Homo sapien
aggcagaggacttttacggagcaacagaacagc

SEQ ID NO: 768433 - DNA, 33 bp, Homo sapien
gaatgctgtgattattaaaagaggcaatacctg

SEQ ID NO: 768434 - DNA, 33 bp, Homo sapien
gaatgctgtgattattgaaagaggcaatacctg

SEQ ID NO: 768435 - DNA, 33 bp, Homo sapien
gtttcagggattgagcaaaatgcatccagataa

SEQ ID NO: 768436 - DNA, 33 bp, Homo sapien
gtttcagggattgagcgaaatgcatccagataa

SEQ ID NO: 768437 - DNA, 33 bp, Homo sapien
aggtatgaaattaatcaagagcgtaatgaaatg

SEQ ID NO: 768438 - DNA, 33 bp, Homo sapien
aggtatgaaattaatctagagcgtaatgaaatg

SEQ ID NO: 768439 - DNA, 33 bp, Homo sapien
ttctgtaaagaccgtggagatagagcctctgca

SEQ ID NO: 768440 - DNA, 33 bp, Homo sapien
ttctgtaaagaccgtgtagatagagcctctgca

SEQ ID NO: 768441 - DNA, 33 bp, Homo sapien
attaaatttatcacagcaacaagaacaaagttt

SEQ ID NO: 768442 - DNA, 33 bp, Homo sapien
attaaatttatcacaggaacaagaacaaagttt

SEQ ID NO: 768443 - DNA, 33 bp, Homo sapien
taaagactgagaaatacaggtcaactatccaaa

SEQ ID NO: 768444 - DNA, 33 bp, Homo sapien
taaagactgagaaatagaggtcaactatccaaa

SEQ ID NO: 768445 - DNA, 33 bp, Homo sapien
ttcagataaagcaaaaagacactttcatttaga

SEQ ID NO: 768446 - DNA, 33 bp, Homo sapien
ttcagataaagcaaaaggacactttcatttaga

SEQ ID NO: 768447 - DNA, 33 bp, Homo sapien
ctttttgtccaccagaaaattcacagtggagat

SEQ ID NO: 768448 - DNA, 33 bp, Homo sapien
ctttttgtccaccagagaattcacagtggagat

SEQ ID NO: 768449 - DNA, 33 bp, Homo sapien
tctggcaaagcctttacgcagattgcaaatctt

SEQ ID NO: 768450 - DNA, 33 bp, Homo sapien
tctggcaaagcctttatgcagattgcaaatctt

SEQ ID NO: 768451 - DNA, 33 bp, Homo sapien
taaaggctttgccagaatcgttacaggcagagg

SEQ ID NO: 768452 - DNA, 33 bp, Homo sapien
taaaggctttgccagagtcgttacaggcagagg

SEQ ID NO: 768453 - DNA, 33 bp, Homo sapien
gaagaccagaaatgtaagaaatctgtgggaaaa

SEQ ID NO: 768454 - DNA, 33 bp, Homo sapien
gaagaccagaaatgtaggaaatctgtgggaaaa

SEQ ID NO: 768455 - DNA, 33 bp, Homo sapien
tattgatgaaatgataacccaagattctgcggg

SEQ ID NO: 768456 - DNA, 33 bp, Homo sapien
tattgatgaaatgataccccaagattctgcggg

SEQ ID NO: 768457 - DNA, 33 bp, Homo sapien
accacaagatccttccaatagtaaattttccag

SEQ ID NO: 768458 - DNA, 33 bp, Homo sapien
accacaagatccttccgatagtaaattttccag

SEQ ID NO: 768459 - DNA, 33 bp, Homo sapien
agctataaaggaataaactcctcaaggacatgg

SEQ ID NO: 768460 - DNA, 33 bp, Homo sapien
agctataaaggaataagctcctcaaggacatgg

SEQ ID NO: 768461 - DNA, 33 bp, Homo sapien
taggttgccagagaaaaggtaactgtatggtca

SEQ ID NO: 768462 - DNA, 33 bp, Homo sapien
taggttgccagagaaagggtaactgtatggtca

SEQ ID NO: 768463 - DNA, 33 bp, Homo sapien
cctgacatggatattacgggtacttctagagcc

SEQ ID NO: 768464 - DNA, 33 bp, Homo sapien
cctgacatggatattatgggtacttctagagcc

SEQ ID NO: 768465 - DNA, 33 bp, Homo sapien
tctatcttactagataaactaagtggcctgaat

SEQ ID NO: 768466 - DNA, 33 bp, Homo sapien
tctatcttactagatagactaagtggcctgaat

SEQ ID NO: 768467 - DNA, 33 bp, Homo sapien
gaggcgatgcaattggaaacctctctagtttgt

SEQ ID NO: 768468 - DNA, 33 bp, Homo sapien
gaggcgatgcaattgggaacctctctagtttgt

SEQ ID NO: 768469 - DNA, 33 bp, Homo sapien
aagttgtatatattcaaggtgtatgacatgatg

SEQ ID NO: 768470 - DNA, 33 bp, Homo sapien
aagttgtatatattcatggtgtatgacatgatg

SEQ ID NO: 768471 - DNA, 33 bp, Homo sapien
ggtagaagaaaaatacagaaaaggagcatgtat

SEQ ID NO: 768472 - DNA, 33 bp, Homo sapien
ggtagaagaaaaatacggaaaaggagcatgtat

SEQ ID NO: 768473 - DNA, 33 bp, Homo sapien
tcagagtgcggacacacgaagtttggaacttta

SEQ ID NO: 768474 - DNA, 33 bp, Homo sapien
tcagagtgcggacacatgaagtttggaacttta

SEQ ID NO: 768475 - DNA, 33 bp, Homo sapien
ttgctgggcccttgaaaaatcggtagcatttgg

SEQ ID NO: 768476 - DNA, 33 bp, Homo sapien
ttgctgggcccttgaagaatcggtagcatttgg

SEQ ID NO: 768477 - DNA, 33 bp, Homo sapien
gtatgccatatccagcaagtaatagtcctcaat

SEQ ID NO: 768478 - DNA, 33 bp, Homo sapien
gtatgccatatccagccagtaatagtcctcaat

SEQ ID NO: 768479 - DNA, 33 bp, Homo sapien
aactcagatttcactacgtacagcaataaatat

SEQ ID NO: 768480 - DNA, 33 bp, Homo sapien
aactcagatttcactatgtacagcaataaatat

SEQ ID NO: 768481 - DNA, 33 bp, Homo sapien
gaccatatgccctccccggagctgaaccgtgtt

SEQ ID NO: 768482 - DNA, 33 bp, Homo sapien
gaccatatgccctccctggagctgaaccgtgtt

SEQ ID NO: 768483 - DNA, 33 bp, Homo sapien
acaccacatttgtaagaagatgaattggttatt

SEQ ID NO: 768484 - DNA, 33 bp, Homo sapien
acaccacatttgtaagcagatgaattggttatt

SEQ ID NO: 768485 - DNA, 33 bp, Homo sapien
ctcaaaggagtaagaaatgaaagctcctggcct

SEQ ID NO: 768486 - DNA, 33 bp, Homo sapien
ctcaaaggagtaagaagtgaaagctcctggcct

SEQ ID NO: 768487 - DNA, 33 bp, Homo sapien
agccttagctgtcaagcccctttcatgcctcct

SEQ ID NO: 768488 - DNA, 33 bp, Homo sapien
agccttagctgtcaaggccctttcatgcctcct

SEQ ID NO: 768489 - DNA, 33 bp, Homo sapien
ttcatgtctttctagaaccttcctgagagcctt

SEQ ID NO: 768490 - DNA, 33 bp, Homo sapien
ttcatgtctttctagacccttcctgagagcctt

SEQ ID NO: 768491 - DNA, 33 bp, Homo sapien
gaaataaacttatgaactgttcaccatgtcaga

SEQ ID NO: 768492 - DNA, 33 bp, Homo sapien
gaaataaacttatgaattgttcaccatgtcaga

SEQ ID NO: 768493 - DNA, 33 bp, Homo sapien
gctgtatttcaacaagacacaatgtttacgctt

SEQ ID NO: 768494 - DNA, 33 bp, Homo sapien
gctgtatttcaacaaggcacaatgtttacgctt

SEQ ID NO: 768495 - DNA, 33 bp, Homo sapien
cagaacccagtatcaaatctgctctctactgct

SEQ ID NO: 768496 - DNA, 33 bp, Homo sapien
cagaacccagtatcaattctgctctctactgct

SEQ ID NO: 768497 - DNA, 33 bp, Homo sapien
cataaagggttgataaggaaatacttgctttcc

SEQ ID NO: 768498 - DNA, 33 bp, Homo sapien
cataaagggttgataatgaaatacttgctttcc

SEQ ID NO: 768499 - DNA, 33 bp, Homo sapien
ttatatgagcttgaacaactatattacttgtaa

SEQ ID NO: 768500 - DNA, 33 bp, Homo sapien
ttatatgagcttgaacgactatattacttgtaa

SEQ ID NO: 768501 - DNA, 33 bp, Homo sapien
agctccagccttgtcaacattcctgaaagtctc

SEQ ID NO: 768502 - DNA, 33 bp, Homo sapien
agctccagccttgtcagcattcctgaaagtctc

SEQ ID NO: 768503 - DNA, 33 bp, Homo sapien
caacatcacctctaaaacctatctttgcactcc

SEQ ID NO: 768504 - DNA, 33 bp, Homo sapien
caacatcacctctaaagcctatctttgcactcc

SEQ ID NO: 768505 - DNA, 33 bp, Homo sapien
agttaatttgccatgaaaaactagtgtgttagg

SEQ ID NO: 768506 - DNA, 33 bp, Homo sapien
agttaatttgccatgataaactagtgtgttagg

SEQ ID NO: 768507 - DNA, 33 bp, Homo sapien
tgactgtccaatagagactaaaaagaaaactaa

SEQ ID NO: 768508 - DNA, 33 bp, Homo sapien
tgactgtccaatagaggctaaaaagaaaactaa

SEQ ID NO: 768509 - DNA, 33 bp, Homo sapien
gaacattgctaatttgaaatttcatcctgtaac

SEQ ID NO: 768510 - DNA, 33 bp, Homo sapien
gaacattgctaatttggaatttcatcctgtaac

SEQ ID NO: 768511 - DNA, 33 bp, Homo sapien
aaaatcctgagttgcaaatatgtctttagccct

SEQ ID NO: 768512 - DNA, 33 bp, Homo sapien
aaaatcctgagttgcagatatgtctttagccct

SEQ ID NO: 768513 - DNA, 33 bp, Homo sapien
tcaacagctatacccactgatgttaggacacat

SEQ ID NO: 768514 - DNA, 33 bp, Homo sapien
tcaacagctatacccagtgatgttaggacacat

SEQ ID NO: 768515 - DNA, 33 bp, Homo sapien
aaaagcacattgaataactgctttgagtatttg

SEQ ID NO: 768516 - DNA, 33 bp, Homo sapien
aaaagcacattgaatacctgctttgagtatttg

SEQ ID NO: 768517 - DNA, 33 bp, Homo sapien
ctccttacaatgataactcacagtatacagagt

SEQ ID NO: 768518 - DNA, 33 bp, Homo sapien
ctccttacaatgataattcacagtatacagagt

SEQ ID NO: 768519 - DNA, 33 bp, Homo sapien
aatactgacttgtcaccatatcacaaggatttg

SEQ ID NO: 768520 - DNA, 33 bp, Homo sapien
aatactgacttgtcactatatcacaaggatttg

SEQ ID NO: 768521 - DNA, 33 bp, Homo sapien
caataaaatttctgtccgaagatatgagtttgg

SEQ ID NO: 768522 - DNA, 33 bp, Homo sapien
caataaaatttctgtctgaagatatgagtttgg

SEQ ID NO: 768523 - DNA, 33 bp, Homo sapien
aatttggcagcacttacattagtaacaatatga

SEQ ID NO: 768524 - DNA, 33 bp, Homo sapien
aatttggcagcacttatattagtaacaatatga

SEQ ID NO: 768525 - DNA, 33 bp, Homo sapien
ctcttaaaacacagtgaacacaatagcgaagac

SEQ ID NO: 768526 - DNA, 33 bp, Homo sapien
ctcttaaaacacagtggacacaatagcgaagac

SEQ ID NO: 768527 - DNA, 33 bp, Homo sapien
cttgcattcaaagagactcatcttacattatag

SEQ ID NO: 768528 - DNA, 33 bp, Homo sapien
cttgcattcaaagagattcatcttacattatag

SEQ ID NO: 768529 - DNA, 33 bp, Homo sapien
atattctaaaccctggcaatgagtatccagaaa

SEQ ID NO: 768530 - DNA, 33 bp, Homo sapien
atattctaaaccctggtaatgagtatccagaaa

SEQ ID NO: 768531 - DNA, 33 bp, Homo sapien
tctctcttttttctcaccttcatttagacagaa

SEQ ID NO: 768532 - DNA, 33 bp, Homo sapien
tctctcttttttctcatcttcatttagacagaa

SEQ ID NO: 768533 - DNA, 33 bp, Homo sapien
tatttatttaaaagcaatcgaaagtttcacttc

SEQ ID NO: 768534 - DNA, 33 bp, Homo sapien
tatttatttaaaagcagtcgaaagtttcacttc

SEQ ID NO: 768535 - DNA, 33 bp, Homo sapien
ttctgattgcagatagaccaataatgtagcagg

SEQ ID NO: 768536 - DNA, 33 bp, Homo sapien
ttctgattgcagataggccaataatgtagcagg

SEQ ID NO: 768537 - DNA, 33 bp, Homo sapien
gtgctgggcaacctggaaccagtcagcattttc

SEQ ID NO: 768538 - DNA, 33 bp, Homo sapien
gtgctgggcaacctggcaccagtcagcattttc

SEQ ID NO: 768539 - DNA, 33 bp, Homo sapien
actattcttcaaaagaactcatttgctagtctt

SEQ ID NO: 768540 - DNA, 33 bp, Homo sapien
actattcttcaaaagacctcatttgctagtctt

SEQ ID NO: 768541 - DNA, 33 bp, Homo sapien
ttatttcaatttcaggaccgacgcagttcatgt

SEQ ID NO: 768542 - DNA, 33 bp, Homo sapien
ttatttcaatttcaggtccgacgcagttcatgt

SEQ ID NO: 768543 - DNA, 33 bp, Homo sapien
aaatactgtgagaactcagtctaagccaagtct

SEQ ID NO: 768544 - DNA, 33 bp, Homo sapien
aaatactgtgagaacttagtctaagccaagtct

SEQ ID NO: 768545 - DNA, 33 bp, Homo sapien
gtatgtgtatagtgctcagaaaattgggattct

SEQ ID NO: 768546 - DNA, 33 bp, Homo sapien
gtatgtgtatagtgcttagaaaattgggattct

SEQ ID NO: 768547 - DNA, 33 bp, Homo sapien
cagttctaatacatccaatccttgagtaagagt

SEQ ID NO: 768548 - DNA, 33 bp, Homo sapien
cagttctaatacatccgatccttgagtaagagt

SEQ ID NO: 768549 - DNA, 33 bp, Homo sapien
agtgagatcataatggaaaaagacacagaattt

SEQ ID NO: 768550 - DNA, 33 bp, Homo sapien
agtgagatcataatgggaaaagacacagaattt

SEQ ID NO: 768551 - DNA, 33 bp, Homo sapien
tttgggccatgggcagaatgtcaacatagcagg

SEQ ID NO: 768552 - DNA, 33 bp, Homo sapien
tttgggccatgggcaggatgtcaacatagcagg

SEQ ID NO: 768553 - DNA, 33 bp, Homo sapien
cattcttgtgtcccaaatactgtttctctttat

SEQ ID NO: 768554 - DNA, 33 bp, Homo sapien
cattcttgtgtcccaagtactgtttctctttat

SEQ ID NO: 768555 - DNA, 33 bp, Homo sapien
ctgtcttccacactaaatggacttttagctgaa

SEQ ID NO: 768556 - DNA, 33 bp, Homo sapien
ctgtcttccacactaattggacttttagctgaa

SEQ ID NO: 768557 - DNA, 33 bp, Homo sapien
gttttgtgtaagcaacactcacaaagctagtta

SEQ ID NO: 768558 - DNA, 33 bp, Homo sapien
gttttgtgtaagcaacgctcacaaagctagtta

SEQ ID NO: 768559 - DNA, 33 bp, Homo sapien
tcaatctacttttttaagctgatagaccacgat

SEQ ID NO: 768560 - DNA, 33 bp, Homo sapien
tcaatctacttttttaggctgatagaccacgat

SEQ ID NO: 768561 - DNA, 33 bp, Homo sapien
gaaccctgtcattccaagttgcattttttccct

SEQ ID NO: 768562 - DNA, 33 bp, Homo sapien
gaaccctgtcattccaggttgcattttttccct

SEQ ID NO: 768563 - DNA, 33 bp, Homo sapien
gagggctcattactcaataagtacaagaaaaaa

SEQ ID NO: 768564 - DNA, 33 bp, Homo sapien
gagggctcattactcagtaagtacaagaaaaaa

SEQ ID NO: 768565 - DNA, 33 bp, Homo sapien
cccagaagaggaaaaacgattactacagcttgg

SEQ ID NO: 768566 - DNA, 33 bp, Homo sapien
cccagaagaggaaaaatgattactacagcttgg

SEQ ID NO: 768567 - DNA, 33 bp, Homo sapien
agaagaaggaaatggggaatgagtgctttggag

SEQ ID NO: 768568 - DNA, 33 bp, Homo sapien
agaagaaggaaatgggtaatgagtgctttggag

SEQ ID NO: 768569 - DNA, 33 bp, Homo sapien
agaacttgataaaacaaccaagagggactcaaa

SEQ ID NO: 768570 - DNA, 33 bp, Homo sapien
agaacttgataaaacagccaagagggactcaaa

SEQ ID NO: 768571 - DNA, 33 bp, Homo sapien
acaaacactacggttaaacagaaaccagatgtc

SEQ ID NO: 768572 - DNA, 33 bp, Homo sapien
acaaacactacggttacacagaaaccagatgtc

SEQ ID NO: 768573 - DNA, 33 bp, Homo sapien
ttgtgtgtatactttacgcagtagaaatttaca

SEQ ID NO: 768574 - DNA, 33 bp, Homo sapien
ttgtgtgtatactttatgcagtagaaatttaca

SEQ ID NO: 768575 - DNA, 33 bp, Homo sapien
ttataaacgtttctcaacacacttaagatctgt

SEQ ID NO: 768576 - DNA, 33 bp, Homo sapien
ttataaacgtttctcatcacacttaagatctgt

SEQ ID NO: 768577 - DNA, 33 bp, Homo sapien
tgtaaccatcattgtaacaggttatcacctcct

SEQ ID NO: 768578 - DNA, 33 bp, Homo sapien
tgtaaccatcattgtagcaggttatcacctcct

SEQ ID NO: 768579 - DNA, 33 bp, Homo sapien
ctgtgggtttttgtagcattctgtcttgtacag

SEQ ID NO: 768580 - DNA, 33 bp, Homo sapien
ctgtgggtttttgtagtattctgtcttgtacag

SEQ ID NO: 768581 - DNA, 33 bp, Homo sapien
accccagccatgctcaagttcatagggtttggg

SEQ ID NO: 768582 - DNA, 33 bp, Homo sapien
accccagccatgctcatgttcatagggtttggg

SEQ ID NO: 768583 - DNA, 33 bp, Homo sapien
tgtacaggaagtcggacaccagaatccaatcat

SEQ ID NO: 768584 - DNA, 33 bp, Homo sapien
tgtacaggaagtcggataccagaatccaatcat

SEQ ID NO: 768585 - DNA, 33 bp, Homo sapien
gacttaacatttttaacagtgctttgtgcaggc

SEQ ID NO: 768586 - DNA, 33 bp, Homo sapien
gacttaacatttttaatagtgctttgtgcaggc

SEQ ID NO: 768587 - DNA, 33 bp, Homo sapien
aggatgctaggtccccaagacacaggtcacagt

SEQ ID NO: 768588 - DNA, 33 bp, Homo sapien
aggatgctaggtccccgagacacaggtcacagt

SEQ ID NO: 768589 - DNA, 33 bp, Homo sapien
ccaggagctgaatcaccggcgctttcatcttgg

SEQ ID NO: 768590 - DNA, 33 bp, Homo sapien
ccaggagctgaatcactggcgctttcatcttgg

SEQ ID NO: 768591 - DNA, 33 bp, Homo sapien
tttacctcttttcctagctcaactatattgctg

SEQ ID NO: 768592 - DNA, 33 bp, Homo sapien
tttacctcttttcctatctcaactatattgctg

SEQ ID NO: 768593 - DNA, 33 bp, Homo sapien
acatatagatcccaataaagagttgcacagcca

SEQ ID NO: 768594 - DNA, 33 bp, Homo sapien
acatatagatcccaatgaagagttgcacagcca

SEQ ID NO: 768595 - DNA, 33 bp, Homo sapien
gttaaaaaatgaagaactgatggctttcacaag

SEQ ID NO: 768596 - DNA, 33 bp, Homo sapien
gttaaaaaatgaagaattgatggctttcacaag

SEQ ID NO: 768597 - DNA, 33 bp, Homo sapien
tattgtgaatagtgcacatgcatgtatggtctt

SEQ ID NO: 768598 - DNA, 33 bp, Homo sapien
tattgtgaatagtgcatatgcatgtatggtctt

SEQ ID NO: 768599 - DNA, 33 bp, Homo sapien
gtaataaaatgtactacattgatttgccaaagt

SEQ ID NO: 768600 - DNA, 33 bp, Homo sapien
gtaataaaatgtactatattgatttgccaaagt

SEQ ID NO: 768601 - DNA, 33 bp, Homo sapien
ataatgcaaattgaagcctattggaaaggtgtt

SEQ ID NO: 768602 - DNA, 33 bp, Homo sapien
ataatgcaaattgaaggctattggaaaggtgtt

SEQ ID NO: 768603 - DNA, 33 bp, Homo sapien
tcctctcttttggaatgaatgatagaacagact

SEQ ID NO: 768604 - DNA, 33 bp, Homo sapien
tcctctcttttggaattaatgatagaacagact

SEQ ID NO: 768605 - DNA, 33 bp, Homo sapien
cagaggatagcagttaagttctaatgagagaat

SEQ ID NO: 768606 - DNA, 33 bp, Homo sapien
cagaggatagcagttaggttctaatgagagaat

SEQ ID NO: 768607 - DNA, 33 bp, Homo sapien
aggtacagcatttaccaagaccattcatggatt

SEQ ID NO: 768608 - DNA, 33 bp, Homo sapien
aggtacagcatttaccgagaccattcatggatt

SEQ ID NO: 768609 - DNA, 33 bp, Homo sapien
tgaccaatattgcaccaaagcatagatgcagaa

SEQ ID NO: 768610 - DNA, 33 bp, Homo sapien
tgaccaatattgcacctaagcatagatgcagaa

SEQ ID NO: 768611 - DNA, 33 bp, Homo sapien
aaatatttggtaaaaaatagtcaatgaaattgt

SEQ ID NO: 768612 - DNA, 33 bp, Homo sapien
aaatatttggtaaaaattagtcaatgaaattgt

SEQ ID NO: 768613 - DNA, 33 bp, Homo sapien
atcataaatactttccacttcttgcctcatctt

SEQ ID NO: 768614 - DNA, 33 bp, Homo sapien
atcataaatactttccgcttcttgcctcatctt

SEQ ID NO: 768615 - DNA, 33 bp, Homo sapien
aaaatggaaatgagaaccaagcccagtacaaag

SEQ ID NO: 768616 - DNA, 33 bp, Homo sapien
aaaatggaaatgagaagcaagcccagtacaaag

SEQ ID NO: 768617 - DNA, 33 bp, Homo sapien
tgataaaaccagaaaaccagtgtagttaaataa

SEQ ID NO: 768618 - DNA, 33 bp, Homo sapien
tgataaaaccagaaaatcagtgtagttaaataa

SEQ ID NO: 768619 - DNA, 33 bp, Homo sapien
tttgtaatgtggctcacaaaatcattccctgac

SEQ ID NO: 768620 - DNA, 33 bp, Homo sapien
tttgtaatgtggctcagaaaatcattccctgac

SEQ ID NO: 768621 - DNA, 33 bp, Homo sapien
ttaaaatctgatagaaaggtgtagacacagatt

SEQ ID NO: 768622 - DNA, 33 bp, Homo sapien
ttaaaatctgatagaatggtgtagacacagatt

SEQ ID NO: 768623 - DNA, 33 bp, Homo sapien
tcaggagaggaagaacaaattaaggaatgatct

SEQ ID NO: 768624 - DNA, 33 bp, Homo sapien
tcaggagaggaagaaccaattaaggaatgatct

SEQ ID NO: 768625 - DNA, 33 bp, Homo sapien
tggaatcctcaaaatcagacagtcatttcaaac

SEQ ID NO: 768626 - DNA, 33 bp, Homo sapien
tggaatcctcaaaatcggacagtcatttcaaac

SEQ ID NO: 768627 - DNA, 33 bp, Homo sapien
tttttactgaacattacattgttatggtgcaac

SEQ ID NO: 768628 - DNA, 33 bp, Homo sapien
tttttactgaacattatattgttatggtgcaac

SEQ ID NO: 768629 - DNA, 33 bp, Homo sapien
ctctaagccctggtgcaacagacatcaccacac

SEQ ID NO: 768630 - DNA, 33 bp, Homo sapien
ctctaagccctggtgcgacagacatcaccacac

SEQ ID NO: 768631 - DNA, 33 bp, Homo sapien
cctacacctaagggaaacttaccacctcagcac

SEQ ID NO: 768632 - DNA, 33 bp, Homo sapien
cctacacctaagggaaccttaccacctcagcac

SEQ ID NO: 768633 - DNA, 33 bp, Homo sapien
ctggtgaaagagctaaagaacgccaggtgctgc

SEQ ID NO: 768634 - DNA, 33 bp, Homo sapien
ctggtgaaagagctaacgaacgccaggtgctgc

SEQ ID NO: 768635 - DNA, 33 bp, Homo sapien
tacaagtattgccaaaagaagcaattctgtgat

SEQ ID NO: 768636 - DNA, 33 bp, Homo sapien
tacaagtattgccaaatgaagcaattctgtgat

SEQ ID NO: 768637 - DNA, 33 bp, Homo sapien
tccagttcttgcaaaccactattctactttgtt

SEQ ID NO: 768638 - DNA, 33 bp, Homo sapien
tccagttcttgcaaactactattctactttgtt

SEQ ID NO: 768639 - DNA, 33 bp, Homo sapien
atgtacaacaccttaaatgtattgatctcatga

SEQ ID NO: 768640 - DNA, 33 bp, Homo sapien
atgtacaacaccttaattgtattgatctcatga

SEQ ID NO: 768641 - DNA, 33 bp, Homo sapien
agccactttatcaaacagaagagcagtctggag

SEQ ID NO: 768642 - DNA, 33 bp, Homo sapien
agccactttatcaaacggaagagcagtctggag

SEQ ID NO: 768643 - DNA, 33 bp, Homo sapien
caaaatactatacgcaatcatttaacccatttc

SEQ ID NO: 768644 - DNA, 33 bp, Homo sapien
caaaatactatacgcagtcatttaacccatttc

SEQ ID NO: 768645 - DNA, 33 bp, Homo sapien
tctattcagccacagacagagctatatgcactc

SEQ ID NO: 768646 - DNA, 33 bp, Homo sapien
tctattcagccacagatagagctatatgcactc

SEQ ID NO: 768647 - DNA, 33 bp, Homo sapien
ccctggctatgctggcaatttttcactcatgta

SEQ ID NO: 768648 - DNA, 33 bp, Homo sapien
ccctggctatgctggcgatttttcactcatgta

SEQ ID NO: 768649 - DNA, 33 bp, Homo sapien
cccaacttctggtgggaaaccatcctcgaatcc

SEQ ID NO: 768650 - DNA, 33 bp, Homo sapien
cccaacttctggtggggaaccatcctcgaatcc

SEQ ID NO: 768651 - DNA, 33 bp, Homo sapien
tgcatgaggaagaagcagagagaaccaagcagt

SEQ ID NO: 768652 - DNA, 33 bp, Homo sapien
tgcatgaggaagaagcggagagaaccaagcagt

SEQ ID NO: 768653 - DNA, 33 bp, Homo sapien
cattgtttcagtttcccgaatgctataatcttg

SEQ ID NO: 768654 - DNA, 33 bp, Homo sapien
cattgtttcagtttcctgaatgctataatcttg

SEQ ID NO: 768655 - DNA, 33 bp, Homo sapien
agtatagcacatgcaaaggcaccaagattatag

SEQ ID NO: 768656 - DNA, 33 bp, Homo sapien
agtatagcacatgcaatggcaccaagattatag

SEQ ID NO: 768657 - DNA, 33 bp, Homo sapien
gagtatctaaggaaaacgttaaagtgaacaact

SEQ ID NO: 768658 - DNA, 33 bp, Homo sapien
gagtatctaaggaaaatgttaaagtgaacaact

SEQ ID NO: 768659 - DNA, 33 bp, Homo sapien
agtaccaaagcaagacaggccacaaaaaagaaa

SEQ ID NO: 768660 - DNA, 33 bp, Homo sapien
agtaccaaagcaagacgggccacaaaaaagaaa

SEQ ID NO: 768661 - DNA, 33 bp, Homo sapien
agccactgtgactggccgaataaaagttttttt

SEQ ID NO: 768662 - DNA, 33 bp, Homo sapien
agccactgtgactggctgaataaaagttttttt

SEQ ID NO: 768663 - DNA, 33 bp, Homo sapien
gtttatatcctcagaacgcatctctattttgac

SEQ ID NO: 768664 - DNA, 33 bp, Homo sapien
gtttatatcctcagaatgcatctctattttgac

SEQ ID NO: 768665 - DNA, 33 bp, Homo sapien
tttcggtgtcgttcagaaagtttacactacatt

SEQ ID NO: 768666 - DNA, 33 bp, Homo sapien
tttcggtgtcgttcaggaagtttacactacatt

SEQ ID NO: 768667 - DNA, 33 bp, Homo sapien
acaaccatttttgaaaaagagactgacagtatc

SEQ ID NO: 768668 - DNA, 33 bp, Homo sapien
acaaccatttttgaaagagagactgacagtatc

SEQ ID NO: 768669 - DNA, 33 bp, Homo sapien
agtcctcgaatactgacagtaagtttggacagt

SEQ ID NO: 768670 - DNA, 33 bp, Homo sapien
agtcctcgaatactgatagtaagtttggacagt

SEQ ID NO: 768671 - DNA, 33 bp, Homo sapien
atagaaattggttgaaattaaaaaacaatgaag

SEQ ID NO: 768672 - DNA, 33 bp, Homo sapien
atagaaattggttgaagttaaaaaacaatgaag

SEQ ID NO: 768673 - DNA, 33 bp, Homo sapien
tagatggcatcttccaatacaaggctgttttgt

SEQ ID NO: 768674 - DNA, 33 bp, Homo sapien
tagatggcatcttccagtacaaggctgttttgt

SEQ ID NO: 768675 - DNA, 33 bp, Homo sapien
aaagagcgatggaatacgtattgcagtagcaca

SEQ ID NO: 768676 - DNA, 33 bp, Homo sapien
aaagagcgatggaatatgtattgcagtagcaca

SEQ ID NO: 768677 - DNA, 33 bp, Homo sapien
tgcaacacagctttccactcagacaaatgagag

SEQ ID NO: 768678 - DNA, 33 bp, Homo sapien
tgcaacacagctttccgctcagacaaatgagag

SEQ ID NO: 768679 - DNA, 33 bp, Homo sapien
ctccaaacattcaaaccgaagatctaccaaaac

SEQ ID NO: 768680 - DNA, 33 bp, Homo sapien
ctccaaacattcaaactgaagatctaccaaaac

SEQ ID NO: 768681 - DNA, 33 bp, Homo sapien
acattcaggactccatcaaatctcagggaagca

SEQ ID NO: 768682 - DNA, 33 bp, Homo sapien
acattcaggactccatgaaatctcagggaagca

SEQ ID NO: 768683 - DNA, 33 bp, Homo sapien; identical to SEQ ID NO: 768681

SEQ ID NO: 768684 - DNA, 33 bp, Homo sapien; identical to SEQ ID NO: 768682

SEQ ID NO: 768685 - DNA, 33 bp, Homo sapien
atcaaggttctatgccagatatcataagtggcc

SEQ ID NO: 768686 - DNA, 33 bp, Homo sapien
atcaaggttctatgccggatatcataagtggcc

SEQ ID NO: 768687 - DNA, 33 bp, Homo sapien; identical to SEQ ID NO: 768685

SEQ ID NO: 768688 - DNA, 33 bp, Homo sapien; identical to SEQ ID NO: 768686

SEQ ID NO: 768689 - DNA, 33 bp, Homo sapien
ttaccaaaaacgcttgcactagaatgttcacat

SEQ ID NO: 768690 - DNA, 33 bp, Homo sapien
ttaccaaaaacgcttgtactagaatgttcacat

SEQ ID NO: 768691 - DNA, 33 bp, Homo sapien
attttttagcatttcaatacataataccaaagt

SEQ ID NO: 768692 - DNA, 33 bp, Homo sapien
attttttagcatttcagtacataataccaaagt

SEQ ID NO: 768693 - DNA, 33 bp, Homo sapien
ttgggggaacatgccacaagatcccatcacttt

SEQ ID NO: 768694 - DNA, 33 bp, Homo sapien
ttgggggaacatgccataagatcccatcacttt

SEQ ID NO: 768695 - DNA, 33 bp, Homo sapien
gtatatatgatgtacaaacccagaatttttcag

SEQ ID NO: 768696 - DNA, 33 bp, Homo sapien
gtatatatgatgtacatacccagaatttttcag

SEQ ID NO: 768697 - DNA, 33 bp, Homo sapien
cttaaatgtcagaggcaaggtggacacaatata

SEQ ID NO: 768698 - DNA, 33 bp, Homo sapien
cttaaatgtcagaggccaggtggacacaatata

SEQ ID NO: 768699 - DNA, 33 bp, Homo sapien
ggtaaaccgacctaaagatttttgcagagatac

SEQ ID NO: 768700 - DNA, 33 bp, Homo sapien
ggtaaaccgacctaaatatttttgcagagatac

SEQ ID NO: 768701 - DNA, 33 bp, Homo sapien
ctaggtatctttggtaagcaactactttgtggg

SEQ ID NO: 768702 - DNA, 33 bp, Homo sapien
ctaggtatctttggtaggcaactactttgtggg

SEQ ID NO: 768703 - DNA, 33 bp, Homo sapien
ttttgcagtagacagaatagcagcggtctaatg

SEQ ID NO: 768704 - DNA, 33 bp, Homo sapien
ttttgcagtagacagagtagcagcggtctaatg

SEQ ID NO: 768705 - DNA, 33 bp, Homo sapien
tttccaactccggaataaatttagtggatggca

SEQ ID NO: 768706 - DNA, 33 bp, Homo sapien
tttccaactccggaatcaatttagtggatggca

SEQ ID NO: 768707 - DNA, 33 bp, Homo sapien
caaatggaaagtgaaacacaattctgactttga

SEQ ID NO: 768708 - DNA, 33 bp, Homo sapien
caaatggaaagtgaaatacaattctgactttga

SEQ ID NO: 768709 - DNA, 33 bp, Homo sapien
gcagctcatctcaaaactgatagcaggctactc

SEQ ID NO: 768710 - DNA, 33 bp, Homo sapien
gcagctcatctcaaaagtgatagcaggctactc

SEQ ID NO: 768711 - DNA, 33 bp, Homo sapien
acatccagaccatcaccaataattctatatgac

SEQ ID NO: 768712 - DNA, 33 bp, Homo sapien
acatccagaccatcactaataattctatatgac

SEQ ID NO: 768713 - DNA, 33 bp, Homo sapien
aatttctgatccagtgaagcttagtggtggaag

SEQ ID NO: 768714 - DNA, 33 bp, Homo sapien
aatttctgatccagtgtagcttagtggtggaag

SEQ ID NO: 768715 - DNA, 33 bp, Homo sapien
ggtacagaaaaaaacaatgcaacctactctagg

SEQ ID NO: 768716 - DNA, 33 bp, Homo sapien
ggtacagaaaaaaacattgcaacctactctagg

SEQ ID NO: 768717 - DNA, 33 bp, Homo sapien
agcatcctgcagagggaataggtctttcctgac

SEQ ID NO: 768718 - DNA, 33 bp, Homo sapien
agcatcctgcagaggggataggtctttcctgac

SEQ ID NO: 768719 - DNA, 33 bp, Homo sapien
ctgattggattcagacggagagaagaagaaaaa

SEQ ID NO: 768720 - DNA, 33 bp, Homo sapien
ctgattggattcagactgagagaagaagaaaaa

SEQ ID NO: 768721 - DNA, 33 bp, Homo sapien
gttttcatttgtgcagcattacccggtagtgta

SEQ ID NO: 768722 - DNA, 33 bp, Homo sapien
gttttcatttgtgcaggattacccggtagtgta

SEQ ID NO: 768723 - DNA, 33 bp, Homo sapien
tatactagaaattaacaaactaatgagcctggt

SEQ ID NO: 768724 - DNA, 33 bp, Homo sapien
tatactagaaattaaccaactaatgagcctggt

SEQ ID NO: 768725 - DNA, 33 bp, Homo sapien
taggtatatgactagacagtgaagacagttctc

SEQ ID NO: 768726 - DNA, 33 bp, Homo sapien
taggtatatgactagatagtgaagacagttctc

SEQ ID NO: 768727 - DNA, 33 bp, Homo sapien
agctgaaaaagattcaacttgcgtcatctagaa

SEQ ID NO: 768728 - DNA, 33 bp, Homo sapien
agctgaaaaagattcaccttgcgtcatctagaa

SEQ ID NO: 768729 - DNA, 33 bp, Homo sapien
atcttaatgtacaataaaacagccaggcccaca

SEQ ID NO: 768730 - DNA, 33 bp, Homo sapien
atcttaatgtacaatagaacagccaggcccaca

SEQ ID NO: 768731 - DNA, 33 bp, Homo sapien
acagttctagaggaagcatggcatgactttgga

SEQ ID NO: 768732 - DNA, 33 bp, Homo sapien
acagttctagaggaagtatggcatgactttgga

SEQ ID NO: 768733 - DNA, 33 bp, Homo sapien
ccctgccagcaggaagacatagggacagaatcc

SEQ ID NO: 768734 - DNA, 33 bp, Homo sapien
ccctgccagcaggaaggcatagggacagaatcc

SEQ ID NO: 768735 - DNA, 33 bp, Homo sapien
ctccagatactttatgacaggctgctgagttac

SEQ ID NO: 768736 - DNA, 33 bp, Homo sapien
ctccagatactttatggcaggctgctgagttac

SEQ ID NO: 768737 - DNA, 33 bp, Homo sapien
tgcaagatgctgggaagatgtggaaagtgttgc

SEQ ID NO: 768738 - DNA, 33 bp, Homo sapien
tgcaagatgctgggaatatgtggaaagtgttgc

SEQ ID NO: 768739 - DNA, 33 bp, Homo sapien
caattatcacctctagaaagaaaggcaagcctg

SEQ ID NO: 768740 - DNA, 33 bp, Homo sapien
caattatcacctctaggaagaaaggcaagcctg

SEQ ID NO: 768741 - DNA, 33 bp, Homo sapien
ctacttcaaagacataaggcctaaagtagaact

SEQ ID NO: 768742 - DNA, 33 bp, Homo sapien
ctacttcaaagacatatggcctaaagtagaact

SEQ ID NO: 768743 - DNA, 33 bp, Homo sapien
gaaagaatttgtgtcaatacaatgttgtgattg

SEQ ID NO: 768744 - DNA, 33 bp, Homo sapien
gaaagaatttgtgtcagtacaatgttgtgattg

SEQ ID NO: 768745 - DNA, 33 bp, Homo sapien
acctgcacttgtatgactatgacagcactatac

SEQ ID NO: 768746 - DNA, 33 bp, Homo sapien
acctgcacttgtatgattatgacagcactatac

SEQ ID NO: 768747 - DNA, 33 bp, Homo sapien
agggggatggttttgcaatgattcaagtgcatt

SEQ ID NO: 768748 - DNA, 33 bp, Homo sapien
agggggatggttttgcgatgattcaagtgcatt

SEQ ID NO: 768749 - DNA, 33 bp, Homo sapien
cttgtacttggatagcaatatctaagtttgaga

SEQ ID NO: 768750 - DNA, 33 bp, Homo sapien
cttgtacttggatagcgatatctaagtttgaga

SEQ ID NO: 768751 - DNA, 33 bp, Homo sapien
acctcccacaattccagaggtctttagctcaca

SEQ ID NO: 768752 - DNA, 33 bp, Homo sapien
acctcccacaattccataggtctttagctcaca

SEQ ID NO: 768753 - DNA, 33 bp, Homo sapien
cttagccaatgtaaaacacccaactgacaggga

SEQ ID NO: 768754 - DNA, 33 bp, Homo sapien
cttagccaatgtaaaagacccaactgacaggga

SEQ ID NO: 768755 - DNA, 33 bp, Homo sapien
ttttttttgccagaacacaagactatatttact

SEQ ID NO: 768756 - DNA, 33 bp, Homo sapien
ttttttttgccagaacgcaagactatatttact

SEQ ID NO: 768757 - DNA, 33 bp, Homo sapien
gccaacaattgtggacaggggcaactcttcctt

SEQ ID NO: 768758 - DNA, 33 bp, Homo sapien
gccaacaattgtggacgggggcaactcttcctt

SEQ ID NO: 768759 - DNA, 33 bp, Homo sapien
aaggcttgtcattcaaaagtttcctacttacat

SEQ ID NO: 768760 - DNA, 33 bp, Homo sapien
aaggcttgtcattcaacagtttcctacttacat

SEQ ID NO: 768761 - DNA, 33 bp, Homo sapien
agatccagccatacaaatatctaaggaaagata

SEQ ID NO: 768762 - DNA, 33 bp, Homo sapien
agatccagccatacaactatctaaggaaagata

SEQ ID NO: 768763 - DNA, 33 bp, Homo sapien
cagtgtttccagagtacacctcactacaaagat

SEQ ID NO: 768764 - DNA, 33 bp, Homo sapien
cagtgtttccagagtatacctcactacaaagat

SEQ ID NO: 768765 - DNA, 33 bp, Homo sapien
agggcaattagagatcacattcgttgccatctt

SEQ ID NO: 768766 - DNA, 33 bp, Homo sapien
agggcaattagagatctcattcgttgccatctt

SEQ ID NO: 768767 - DNA, 33 bp, Homo sapien
gcacatttaagtggtaaaataattgagaatgag

SEQ ID NO: 768768 - DNA, 33 bp, Homo sapien
gcacatttaagtggtagaataattgagaatgag

SEQ ID NO: 768769 - DNA, 33 bp, Homo sapien
gggaagctggtgaggaatagaagctatgttagt

SEQ ID NO: 768770 - DNA, 33 bp, Homo sapien
gggaagctggtgaggagtagaagctatgttagt

SEQ ID NO: 768771 - DNA, 33 bp, Homo sapien
attgtgtccttgctggcatgtctcgcttttaaa

SEQ ID NO: 768772 - DNA, 33 bp, Homo sapien
attgtgtccttgctggtatgtctcgcttttaaa

SEQ ID NO: 768773 - DNA, 33 bp, Homo sapien
ctgctggaaagaaggcaatcctaaactgtctgt

SEQ ID NO: 768774 - DNA, 33 bp, Homo sapien
ctgctggaaagaaggcgatcctaaactgtctgt

SEQ ID NO: 768775 - DNA, 33 bp, Homo sapien
gctaagatttatagacggagatccctggaaggc

SEQ ID NO: 768776 - DNA, 33 bp, Homo sapien
gctaagatttatagactgagatccctggaaggc

SEQ ID NO: 768777 - DNA, 33 bp, Homo sapien
ctggcccaagcttaaacagtcaagcagagtact

SEQ ID NO: 768778 - DNA, 33 bp, Homo sapien
ctggcccaagcttaaatagtcaagcagagtact

SEQ ID NO: 768779 - DNA, 33 bp, Homo sapien
atgtttagctttaaaacatctggactcacatgg

SEQ ID NO: 768780 - DNA, 33 bp, Homo sapien
atgtttagctttaaaatatctggactcacatgg

SEQ ID NO: 768781 - DNA, 33 bp, Homo sapien
gaagagaaaggctgacaaaagaagagaaagcaa

SEQ ID NO: 768782 - DNA, 33 bp, Homo sapien
gaagagaaaggctgacgaaagaagagaaagcaa

SEQ ID NO: 768783 - DNA, 33 bp, Homo sapien
gttatcctaattcaaagtatcgagcaaatacaa

SEQ ID NO: 768784 - DNA, 33 bp, Homo sapien
gttatcctaattcaaattatcgagcaaatacaa

SEQ ID NO: 768785 - DNA, 33 bp, Homo sapien
gtcctgcagaagatcacagcagtagatgtaccg

SEQ ID NO: 768786 - DNA, 33 bp, Homo sapien
gtcctgcagaagatcatagcagtagatgtaccg

SEQ ID NO: 768787 - DNA, 33 bp, Homo sapien
gagaaaaggaaatacaatggacccttgaacaat

SEQ ID NO: 768788 - DNA, 33 bp, Homo sapien
gagaaaaggaaatacagtggacccttgaacaat

SEQ ID NO: 768789 - DNA, 33 bp, Homo sapien
tgtgataaaccaaagaaacttgccttttcaggg

SEQ ID NO: 768790 - DNA, 33 bp, Homo sapien
tgtgataaaccaaagagacttgccttttcaggg

SEQ ID NO: 768791 - DNA, 33 bp, Homo sapien
agattcctgtcagctaccctagtgatatggttt

SEQ ID NO: 768792 - DNA, 33 bp, Homo sapien
agattcctgtcagctatcctagtgatatggttt

SEQ ID NO: 768793 - DNA, 33 bp, Homo sapien
atcaaaggtcacttcaaatatacacacagaact

SEQ ID NO: 768794 - DNA, 33 bp, Homo sapien
atcaaaggtcacttcagatatacacacagaact

SEQ ID NO: 768795 - DNA, 33 bp, Homo sapien
tggtctttatagagaaaaagcactaagaagaaa

SEQ ID NO: 768796 - DNA, 33 bp, Homo sapien
tggtctttatagagaagaagcactaagaagaaa

SEQ ID NO: 768797 - DNA, 33 bp, Homo sapien
ctaaattgaagaacaaacagcaattatccctag

SEQ ID NO: 768798 - DNA, 33 bp, Homo sapien
ctaaattgaagaacaagcagcaattatccctag

SEQ ID NO: 768799 - DNA, 33 bp, Homo sapien
actttaggtagaaacaactgtgtatattgaact

SEQ ID NO: 768800 - DNA, 33 bp, Homo sapien
actttaggtagaaacatctgtgtatattgaact

SEQ ID NO: 768801 - DNA, 33 bp, Homo sapien
gttctagagttgaggaaattggggtctggagag

SEQ ID NO: 768802 - DNA, 33 bp, Homo sapien
gttctagagttgaggagattggggtctggagag

SEQ ID NO: 768803 - DNA, 33 bp, Homo sapien
ttaaaagtgttctttgaattattgctgttttga

SEQ ID NO: 768804 - DNA, 33 bp, Homo sapien
ttaaaagtgttctttggattattgctgttttga

SEQ ID NO: 768805 - DNA, 33 bp, Homo sapien
atgatgtgtgattcccaattccctagtctatta

SEQ ID NO: 768806 - DNA, 33 bp, Homo sapien
atgatgtgtgattccccattccctagtctatta

SEQ ID NO: 768807 - DNA, 33 bp, Homo sapien
attctgttgttatcagaaccttatttgacttag

SEQ ID NO: 768808 - DNA, 33 bp, Homo sapien
attctgttgttatcaggaccttatttgacttag

SEQ ID NO: 768809 - DNA, 33 bp, Homo sapien
gtccctatagttagcaatccattagagcattcc

SEQ ID NO: 768810 - DNA, 33 bp, Homo sapien
gtccctatagttagcattccattagagcattcc

SEQ ID NO: 768811 - DNA, 33 bp, Homo sapien
acactagatgggtagacctcaacatgaggacac

SEQ ID NO: 768812 - DNA, 33 bp, Homo sapien
acactagatgggtagatctcaacatgaggacac

SEQ ID NO: 768813 - DNA, 33 bp, Homo sapien
taacagtcgccccttccaattatttggatttgc

SEQ ID NO: 768814 - DNA, 33 bp, Homo sapien
taacagtcgccccttctaattatttggatttgc

SEQ ID NO: 768815 - DNA, 33 bp, Homo sapien
cagaaccatgtaacagaatttttatgatgtgtt

SEQ ID NO: 768816 - DNA, 33 bp, Homo sapien
cagaaccatgtaacagtatttttatgatgtgtt

SEQ ID NO: 768817 - DNA, 33 bp, Homo sapien
tgttatacaggaaaaaatagtgaatcataaggg

SEQ ID NO: 768818 - DNA, 33 bp, Homo sapien
tgttatacaggaaaaagtagtgaatcataaggg

SEQ ID NO: 768819 - DNA, 33 bp, Homo sapien
acatttgcctaatttagcacctttctatgtcta

SEQ ID NO: 768820 - DNA, 33 bp, Homo sapien
acatttgcctaatttatcacctttctatgtcta

SEQ ID NO: 768821 - DNA, 33 bp, Homo sapien
cagagggaaaaatgaaatgaatttggaagaaga

SEQ ID NO: 768822 - DNA, 33 bp, Homo sapien
cagagggaaaaatgaattgaatttggaagaaga

SEQ ID NO: 768823 - DNA, 33 bp, Homo sapien
tgttctcgatgcaaagcacatagcagtgaacaa

SEQ ID NO: 768824 - DNA, 33 bp, Homo sapien
tgttctcgatgcaaaggacatagcagtgaacaa

SEQ ID NO: 768825 - DNA, 33 bp, Homo sapien
gaactttgctgctttacgaaagaatgcaggact

SEQ ID NO: 768826 - DNA, 33 bp, Homo sapien
gaactttgctgctttaggaaagaatgcaggact

SEQ ID NO: 768827 - DNA, 33 bp, Homo sapien
tagttatagagaacaacgaaaaacaaattgatt

SEQ ID NO: 768828 - DNA, 33 bp, Homo sapien
tagttatagagaacaatgaaaaacaaattgatt

SEQ ID NO: 768829 - DNA, 33 bp, Homo sapien
tacaaggaaggaaaaggaaatatccatttagtg

SEQ ID NO: 768830 - DNA, 33 bp, Homo sapien
tacaaggaaggaaaagtaaatatccatttagtg

SEQ ID NO: 768831 - DNA, 33 bp, Homo sapien
tttatctcatcaccaacgtataagtactattaa

SEQ ID NO: 768832 - DNA, 33 bp, Homo sapien
tttatctcatcaccaatgtataagtactattaa

SEQ ID NO: 768833 - DNA, 33 bp, Homo sapien
gatgctgtggccaagaagttcaacttattattc

SEQ ID NO: 768834 - DNA, 33 bp, Homo sapien
gatgctgtggccaagaggttcaacttattattc

SEQ ID NO: 768835 - DNA, 33 bp, Homo sapien
tggttgttatacagcaccactctttttagtgca

SEQ ID NO: 768836 - DNA, 33 bp, Homo sapien
tggttgttatacagcatcactctttttagtgca

SEQ ID NO: 768837 - DNA, 33 bp, Homo sapien
aataaaatcaaggcaagttagagaactgtttta

SEQ ID NO: 768838 - DNA, 33 bp, Homo sapien
aataaaatcaaggcaatttagagaactgtttta

SEQ ID NO: 768839 - DNA, 33 bp, Homo sapien
gccatggcataatgaggagggtagagaaggaat

SEQ ID NO: 768840 - DNA, 33 bp, Homo sapien
gccatggcataatgagtagggtagagaaggaat

SEQ ID NO: 768841 - DNA, 33 bp, Homo sapien
ctctgtggagctaacaaagactttttcagataa

SEQ ID NO: 768842 - DNA, 33 bp, Homo sapien
ctctgtggagctaacagagactttttcagataa

SEQ ID NO: 768843 - DNA, 33 bp, Homo sapien
tgcaaggaatttgcttaaacaacttccaactct

SEQ ID NO: 768844 - DNA, 33 bp, Homo sapien
tgcaaggaatttgcttgaacaacttccaactct

SEQ ID NO: 768845 - DNA, 33 bp, Homo sapien
ttccttgcagttaggcaacatgtcctttcttgc

SEQ ID NO: 768846 - DNA, 33 bp, Homo sapien
ttccttgcagttaggccacatgtcctttcttgc

SEQ ID NO: 768847 - DNA, 33 bp, Homo sapien
attatattgactagataagagtttagaatttca

SEQ ID NO: 768848 - DNA, 33 bp, Homo sapien
attatattgactagattagagtttagaatttca

SEQ ID NO: 768849 - DNA, 33 bp, Homo sapien
aagatttatagtaggcaactttaacttattata

SEQ ID NO: 768850 - DNA, 33 bp, Homo sapien
aagatttatagtaggcgactttaacttattata

SEQ ID NO: 768851 - DNA, 33 bp, Homo sapien
gatgctgagtttaatacccaggtgatggtttga

SEQ ID NO: 768852 - DNA, 33 bp, Homo sapien
gatgctgagtttaatatccaggtgatggtttga

SEQ ID NO: 768853 - DNA, 33 bp, Homo sapien; identical to SEQ ID NO: 768851

SEQ ID NO: 768854 - DNA, 33 bp, Homo sapien; identical to SEQ ID NO: 768852

SEQ ID NO: 768855 - DNA, 33 bp, Homo sapien
tagaagagatttagaaagtttccaaaacaaaga

SEQ ID NO: 768856 - DNA, 33 bp, Homo sapien
tagaagagatttagaatgtttccaaaacaaaga

SEQ ID NO: 768857 - DNA, 33 bp, Homo sapien
tgaataagtgaataaaaaatgaatgaacatcct

SEQ ID NO: 768858 - DNA, 33 bp, Homo sapien
tgaataagtgaataaagaatgaatgaacatcct

SEQ ID NO: 768859 - DNA, 33 bp, Homo sapien
gtcctgtaaaattcacagattcaaatctaaatg

SEQ ID NO: 768860 - DNA, 33 bp, Homo sapien
gtcctgtaaaattcacggattcaaatctaaatg

SEQ ID NO: 768861 - DNA, 33 bp, Homo sapien
ttgtaacataaataaacggacttacaataaaag

SEQ ID NO: 768862 - DNA, 33 bp, Homo sapien
ttgtaacataaataaatggacttacaataaaag

SEQ ID NO: 768863 - DNA, 33 bp, Homo sapien
ggtagtggtcagaacaaattggcccagggaata

SEQ ID NO: 768864 - DNA, 33 bp, Homo sapien
ggtagtggtcagaacagattggcccagggaata

SEQ ID NO: 768865 - DNA, 33 bp, Homo sapien
ttctaagaataaggaccgagtaacttaatccaa

SEQ ID NO: 768866 - DNA, 33 bp, Homo sapien
ttctaagaataaggacggagtaacttaatccaa

SEQ ID NO: 768867 - DNA, 33 bp, Homo sapien
tctggttatccataaaatatatcggctataata

SEQ ID NO: 768868 - DNA, 33 bp, Homo sapien
tctggttatccataaactatatcggctataata

SEQ ID NO: 768869 - DNA, 33 bp, Homo sapien
ttcatcatggcttcaccgataaaataataataa

SEQ ID NO: 768870 - DNA, 33 bp, Homo sapien
ttcatcatggcttcactgataaaataataataa

SEQ ID NO: 768871 - DNA, 33 bp, Homo sapien
tccactgtgttgttgaagcaaagaaggggctag

SEQ ID NO: 768872 - DNA, 33 bp, Homo sapien
tccactgtgttgttgatgcaaagaaggggctag

SEQ ID NO: 768873 - DNA, 33 bp, Homo sapien
tgatctacctggcagaacatttttttttcattg

SEQ ID NO: 768874 - DNA, 33 bp, Homo sapien
tgatctacctggcagagcatttttttttcattg

SEQ ID NO: 768875 - DNA, 33 bp, Homo sapien
aagaactacctttggaaatacttcatgcactca

SEQ ID NO: 768876 - DNA, 33 bp, Homo sapien
aagaactacctttggagatacttcatgcactca

SEQ ID NO: 768877 - DNA, 33 bp, Homo sapien
tatagtttaacttctcactaataaaaatgactc

SEQ ID NO: 768878 - DNA, 33 bp, Homo sapien
tatagtttaacttctcgctaataaaaatgactc

SEQ ID NO: 768879 - DNA, 33 bp, Homo sapien
atctctgtacgcaggaagacactgatccaggtg

SEQ ID NO: 768880 - DNA, 33 bp, Homo sapien
atctctgtacgcaggaggacactgatccaggtg

SEQ ID NO: 768881 - DNA, 33 bp, Homo sapien
ctactgtaatttaggaactgtcagagggttatt

SEQ ID NO: 768882 - DNA, 33 bp, Homo sapien
ctactgtaatttaggatctgtcagagggttatt

SEQ ID NO: 768883 - DNA, 33 bp, Homo sapien
tggctataaaagtgagcataagcaaatctgatg

SEQ ID NO: 768884 - DNA, 33 bp, Homo sapien
tggctataaaagtgagtataagcaaatctgatg

SEQ ID NO: 768885 - DNA, 33 bp, Homo sapien
actataccacgcaatagatgacaaaaactgcaa

SEQ ID NO: 768886 - DNA, 33 bp, Homo sapien
actataccacgcaatatatgacaaaaactgcaa

SEQ ID NO: 768887 - DNA, 33 bp, Homo sapien
tgttttgcttaaatgagagaagagattaacttt

SEQ ID NO: 768888 - DNA, 33 bp, Homo sapien
tgttttgcttaaatgatagaagagattaacttt

SEQ ID NO: 768889 - DNA, 33 bp, Homo sapien
gagaacatcacataccaggaccagttgggtggt

SEQ ID NO: 768890 - DNA, 33 bp, Homo sapien
gagaacatcacataccgggaccagttgggtggt

SEQ ID NO: 768891 - DNA, 33 bp, Homo sapien
cttataagtgagaacacgtaatgtttggttttc

SEQ ID NO: 768892 - DNA, 33 bp, Homo sapien
cttataagtgagaacatgtaatgtttggttttc

SEQ ID NO: 768893 - DNA, 33 bp, Homo sapien
tttttttttatttcaaacattgtgtcaagtatt

SEQ ID NO: 768894 - DNA, 33 bp, Homo sapien
tttttttttatttcaagcattgtgtcaagtatt

SEQ ID NO: 768895 - DNA, 33 bp, Homo sapien
gctctgagaaagaaaacgtagatgagggacagc

SEQ ID NO: 768896 - DNA, 33 bp, Homo sapien
gctctgagaaagaaaatgtagatgagggacagc

SEQ ID NO: 768897 - DNA, 33 bp, Homo sapien
atctgcatctttagtaacaatgtgttttccaat

SEQ ID NO: 768898 - DNA, 33 bp, Homo sapien
atctgcatctttagtagcaatgtgttttccaat

SEQ ID NO: 768899 - DNA, 33 bp, Homo sapien
ctagggccaaattgtaccacagattatgttctt

SEQ ID NO: 768900 - DNA, 33 bp, Homo sapien
ctagggccaaattgtagcacagattatgttctt

SEQ ID NO: 768901 - DNA, 33 bp, Homo sapien
attttagaggtctgtacagcaatgaggaggaag

SEQ ID NO: 768902 - DNA, 33 bp, Homo sapien
attttagaggtctgtagagcaatgaggaggaag

SEQ ID NO: 768903 - DNA, 33 bp, Homo sapien
cacatccacactgttgaaaagagtttgctcctc

SEQ ID NO: 768904 - DNA, 33 bp, Homo sapien
cacatccacactgttgcaaagagtttgctcctc

SEQ ID NO: 768905 - DNA, 33 bp, Homo sapien
atttcacaataaaaacaaggtatcattctttcc

SEQ ID NO: 768906 - DNA, 33 bp, Homo sapien
atttcacaataaaaacgaggtatcattctttcc

SEQ ID NO: 768907 - DNA, 33 bp, Homo sapien
agagaaaagaaaaagacaagtccatgaagtaga

SEQ ID NO: 768908 - DNA, 33 bp, Homo sapien
agagaaaagaaaaagagaagtccatgaagtaga

SEQ ID NO: 768909 - DNA, 33 bp, Homo sapien
tatatatttgattctacggtcttcttgctggca

SEQ ID NO: 768910 - DNA, 33 bp, Homo sapien
tatatatttgattctatggtcttcttgctggca

SEQ ID NO: 768911 - DNA, 33 bp, Homo sapien
ttgacttatgattccaagtgtgaaagaccaatt

SEQ ID NO: 768912 - DNA, 33 bp, Homo sapien
ttgacttatgattccaggtgtgaaagaccaatt

SEQ ID NO: 768913 - DNA, 33 bp, Homo sapien
tggactcttttgtggcagataataaaaatgtgt

SEQ ID NO: 768914 - DNA, 33 bp, Homo sapien
tggactcttttgtggcggataataaaaatgtgt

SEQ ID NO: 768915 - DNA, 33 bp, Homo sapien
ttttaattgatcatcaaagccactttttgaaag

SEQ ID NO: 768916 - DNA, 33 bp, Homo sapien
ttttaattgatcatcatagccactttttgaaag

SEQ ID NO: 768917 - DNA, 33 bp, Homo sapien
gagaaccgctggtctggatgtagagtagccttg

SEQ ID NO: 768918 - DNA, 33 bp, Homo sapien
gagaaccgctggtctgtatgtagagtagccttg

SEQ ID NO: 768919 - DNA, 33 bp, Homo sapien
atgccagattacctcaatctctaaaaacagtga

SEQ ID NO: 768920 - DNA, 33 bp, Homo sapien
atgccagattacctcagtctctaaaaacagtga

SEQ ID NO: 768921 - DNA, 33 bp, Homo sapien
gtaataatggatgttaacacttaagcctctgac

SEQ ID NO: 768922 - DNA, 33 bp, Homo sapien
gtaataatggatgttagcacttaagcctctgac

SEQ ID NO: 768923 - DNA, 33 bp, Homo sapien
catgatttctgctctcaatgatctttggttatg

SEQ ID NO: 768924 - DNA, 33 bp, Homo sapien
catgatttctgctctcgatgatctttggttatg

SEQ ID NO: 768925 - DNA, 33 bp, Homo sapien
tcatgaatgttgggagaaaatcatgagtaagca

SEQ ID NO: 768926 - DNA, 33 bp, Homo sapien
tcatgaatgttgggaggaaatcatgagtaagca

SEQ ID NO: 768927 - DNA, 33 bp, Homo sapien
tctagctttaatataccgctttccactttattg

SEQ ID NO: 768928 - DNA, 33 bp, Homo sapien
tctagctttaatatactgctttccactttattg

SEQ ID NO: 768929 - DNA, 33 bp, Homo sapien
gtattttctacaaccaatatttagtacttgttt

SEQ ID NO: 768930 - DNA, 33 bp, Homo sapien
gtattttctacaaccagtatttagtacttgttt

SEQ ID NO: 768931 - DNA, 33 bp, Homo sapien
ctataagggcagataaaattacaacaatttgtc

SEQ ID NO: 768932 - DNA, 33 bp, Homo sapien
ctataagggcagataagattacaacaatttgtc

SEQ ID NO: 768933 - DNA, 33 bp, Homo sapien
cttcattaccatgtgaaccagggctatcttatt

SEQ ID NO: 768934 - DNA, 33 bp, Homo sapien
cttcattaccatgtgatccagggctatcttatt

SEQ ID NO: 768935 - DNA, 33 bp, Homo sapien
cagaaagtttagatccacaaatgtaaggataca

SEQ ID NO: 768936 - DNA, 33 bp, Homo sapien
cagaaagtttagatccgcaaatgtaaggataca

SEQ ID NO: 768937 - DNA, 33 bp, Homo sapien
gtcattgagctcttaaggaatcatctaacccta

SEQ ID NO: 768938 - DNA, 33 bp, Homo sapien
gtcattgagctcttaatgaatcatctaacccta

SEQ ID NO: 768939 - DNA, 33 bp, Homo sapien
agatgagcattaggaaggattgctcaattaagt

SEQ ID NO: 768940 - DNA, 33 bp, Homo sapien
agatgagcattaggaatgattgctcaattaagt

SEQ ID NO: 768941 - DNA, 33 bp, Homo sapien
ctgtctttagttgaaacgaaaatgttcaaacaa

SEQ ID NO: 768942 - DNA, 33 bp, Homo sapien
ctgtctttagttgaaatgaaaatgttcaaacaa

SEQ ID NO: 768943 - DNA, 33 bp, Homo sapien
ataggttatatggcaaagtgctgatctatttga

SEQ ID NO: 768944 - DNA, 33 bp, Homo sapien
ataggttatatggcaacgtgctgatctatttga

SEQ ID NO: 768945 - DNA, 33 bp, Homo sapien
ctttcttgctacatcactcaatggcagaaggta

SEQ ID NO: 768946 - DNA, 33 bp, Homo sapien
ctttcttgctacatcattcaatggcagaaggta

SEQ ID NO: 768947 - DNA, 33 bp, Homo sapien
agaagtccagtctgaaactctcattggaaaaag

SEQ ID NO: 768948 - DNA, 33 bp, Homo sapien
agaagtccagtctgaagctctcattggaaaaag

SEQ ID NO: 768949 - DNA, 33 bp, Homo sapien
aggacactatcctaagaaaactaatgaaggaat

SEQ ID NO: 768950 - DNA, 33 bp, Homo sapien
aggacactatcctaagcaaactaatgaaggaat

SEQ ID NO: 768951 - DNA, 33 bp, Homo sapien
aatctttcttcttgaaagcattgatgaacaaaa

SEQ ID NO: 768952 - DNA, 33 bp, Homo sapien
aatctttcttcttgaacgcattgatgaacaaaa

SEQ ID NO: 768953 - DNA, 33 bp, Homo sapien
ctagagctttggctaacaagagcagaaatctga

SEQ ID NO: 768954 - DNA, 33 bp, Homo sapien
ctagagctttggctaataagagcagaaatctga

SEQ ID NO: 768955 - DNA, 33 bp, Homo sapien
cttttatagtatttgagctgaacatgagcctta

SEQ ID NO: 768956 - DNA, 33 bp, Homo sapien
cttttatagtatttgatctgaacatgagcctta

SEQ ID NO: 768957 - DNA, 33 bp, Homo sapien
aaacttagattttctgaaccaaattattctaca

SEQ ID NO: 768958 - DNA, 33 bp, Homo sapien
aaacttagattttctgtaccaaattattctaca

SEQ ID NO: 768959 - DNA, 33 bp, Homo sapien
ctattcatgaaaacaacggaagcatgaccccaa

SEQ ID NO: 768960 - DNA, 33 bp, Homo sapien
ctattcatgaaaacaatggaagcatgaccccaa

SEQ ID NO: 768961 - DNA, 33 bp, Homo sapien
tcaatgctgaaggaaacgtatggtgctgaaagg

SEQ ID NO: 768962 - DNA, 33 bp, Homo sapien
tcaatgctgaaggaaatgtatggtgctgaaagg

SEQ ID NO: 768963 - DNA, 33 bp, Homo sapien
tggagatatctggaaacccccacctttactacg

SEQ ID NO: 768964 - DNA, 33 bp, Homo sapien
tggagatatctggaaatccccacctttactacg

SEQ ID NO: 768965 - DNA, 33 bp, Homo sapien
tgggtacaggttgagaataagagtgttccagaa

SEQ ID NO: 768966 - DNA, 33 bp, Homo sapien
tgggtacaggttgagagtaagagtgttccagaa

SEQ ID NO: 768967 - DNA, 33 bp, Homo sapien
aatgagaaccagatcacaaacagtgaggccaag

SEQ ID NO: 768968 - DNA, 33 bp, Homo sapien
aatgagaaccagatcagaaacagtgaggccaag

SEQ ID NO: 768969 - DNA, 33 bp, Homo sapien
gaaaagaaaagttgaacacaaatatagataact

SEQ ID NO: 768970 - DNA, 33 bp, Homo sapien
gaaaagaaaagttgaagacaaatatagataact

SEQ ID NO: 768971 - DNA, 33 bp, Homo sapien
tgtataggattgtttccatatgagcttcccaag

SEQ ID NO: 768972 - DNA, 33 bp, Homo sapien
tgtataggattgtttctatatgagcttcccaag

SEQ ID NO: 768973 - DNA, 33 bp, Homo sapien
gtttgagtttcttgtacattccggatattagtc

SEQ ID NO: 768974 - DNA, 33 bp, Homo sapien
gtttgagtttcttgtagattccggatattagtc

SEQ ID NO: 768975 - DNA, 33 bp, Homo sapien
acagtcagaatacaaaatgataatggattgggt

SEQ ID NO: 768976 - DNA, 33 bp, Homo sapien
acagtcagaatacaaactgataatggattgggt

SEQ ID NO: 768977 - DNA, 33 bp, Homo sapien
gtgcagatagaaaactaaggcaacaatgaacta

SEQ ID NO: 768978 - DNA, 33 bp, Homo sapien
gtgcagatagaaaactcaggcaacaatgaacta

SEQ ID NO: 768979 - DNA, 33 bp, Homo sapien
ggcagactacagtgtgaatttgaatttcctctc

SEQ ID NO: 768980 - DNA, 33 bp, Homo sapien
ggcagactacagtgtggatttgaatttcctctc

SEQ ID NO: 768981 - DNA, 33 bp, Homo sapien
aatttgcatttggtagaattgttttggttacaa

SEQ ID NO: 768982 - DNA, 33 bp, Homo sapien
aatttgcatttggtaggattgttttggttacaa

SEQ ID NO: 768983 - DNA, 33 bp, Homo sapien
agaaacatgtttgggaaacaagctctataatag

SEQ ID NO: 768984 - DNA, 33 bp, Homo sapien
agaaacatgtttgggagacaagctctataatag

SEQ ID NO: 768985 - DNA, 33 bp, Homo sapien
catattccagggctacactgttttacaaaatca

SEQ ID NO: 768986 - DNA, 33 bp, Homo sapien
catattccagggctacgctgttttacaaaatca

SEQ ID NO: 768987 - DNA, 33 bp, Homo sapien
tgcataggacttaaaaagcttataaaatattca

SEQ ID NO: 768988 - DNA, 33 bp, Homo sapien
tgcataggacttaaaaggcttataaaatattca

SEQ ID NO: 768989 - DNA, 33 bp, Homo sapien
ccggaagcactatttagatacactatgccacca

SEQ ID NO: 768990 - DNA, 33 bp, Homo sapien
ccggaagcactatttatatacactatgccacca

SEQ ID NO: 768991 - DNA, 33 bp, Homo sapien
cacgtggcttccactacgggcacctgtgtttag

SEQ ID NO: 768992 - DNA, 33 bp, Homo sapien
cacgtggcttccactatgggcacctgtgtttag

SEQ ID NO: 768993 - DNA, 33 bp, Homo sapien
taaaataaaaccagtccacccatttatatcatt

SEQ ID NO: 768994 - DNA, 33 bp, Homo sapien
taaaataaaaccagtcgacccatttatatcatt

SEQ ID NO: 768995 - DNA, 33 bp, Homo sapien
ctgaattttcaaccaaatattcgactacccatt

SEQ ID NO: 768996 - DNA, 33 bp, Homo sapien
ctgaattttcaaccaagtattcgactacccatt

SEQ ID NO: 768997 - DNA, 33 bp, Homo sapien
aaaatcaaacaggctacaaagtctgaacaatga

SEQ ID NO: 768998 - DNA, 33 bp, Homo sapien
aaaatcaaacaggctataaagtctgaacaatga

SEQ ID NO: 768999 - DNA, 33 bp, Homo sapien
cattttctgcttaataagtccagtgctggtttc

SEQ ID NO: 769000 - DNA, 33 bp, Homo sapien
cattttctgcttaataggtccagtgctggtttc

SEQ ID NO: 769001 - DNA, 33 bp, Homo sapien
ctatgtttctctttccactttgatgtaagatac

SEQ ID NO: 769002 - DNA, 33 bp, Homo sapien
ctatgtttctctttccgctttgatgtaagatac

SEQ ID NO: 769003 - DNA, 33 bp, Homo sapien
agatctcagaattctagccttatacacatcctc

SEQ ID NO: 769004 - DNA, 33 bp, Homo sapien
agatctcagaattctatccttatacacatcctc

SEQ ID NO: 769005 - DNA, 33 bp, Homo sapien
tgtagatctgtgaactaaagttatctattaccc

SEQ ID NO: 769006 - DNA, 33 bp, Homo sapien
tgtagatctgtgaactgaagttatctattaccc

SEQ ID NO: 769007 - DNA, 33 bp, Homo sapien
actctacttatgcatacctggttgacaatatga

SEQ ID NO: 769008 - DNA, 33 bp, Homo sapien
actctacttatgcatatctggttgacaatatga

SEQ ID NO: 769009 - DNA, 33 bp, Homo sapien
tccactaatctgaaaaagagatgctgctggatc

SEQ ID NO: 769010 - DNA, 33 bp, Homo sapien
tccactaatctgaaaaggagatgctgctggatc

SEQ ID NO: 769011 - DNA, 33 bp, Homo sapien
tgggtagatctcattacatcgctcagactggtc

SEQ ID NO: 769012 - DNA, 33 bp, Homo sapien
tgggtagatctcattatatcgctcagactggtc

SEQ ID NO: 769013 - DNA, 33 bp, Homo sapien
aactacggtgttatgagatctgtcccagtgtag

SEQ ID NO: 769014 - DNA, 33 bp, Homo sapien
aactacggtgttatgatatctgtcccagtgtag

SEQ ID NO: 769015 - DNA, 33 bp, Homo sapien
atataaaattctaacacgttgagtttgagctgt

SEQ ID NO: 769016 - DNA, 33 bp, Homo sapien
atataaaattctaacatgttgagtttgagctgt

SEQ ID NO: 769017 - DNA, 33 bp, Homo sapien
gggaaagaaaaagatcacaaagatgttaaggag

SEQ ID NO: 769018 - DNA, 33 bp, Homo sapien
gggaaagaaaaagatcgcaaagatgttaaggag

SEQ ID NO: 769019 - DNA, 33 bp, Homo sapien
tctgcattattctgaacggtagctaacaaccct

SEQ ID NO: 769020 - DNA, 33 bp, Homo sapien
tctgcattattctgaatggtagctaacaaccct

SEQ ID NO: 769021 - DNA, 33 bp, Homo sapien
catgtctgtagtagcggactatgaattttcccc

SEQ ID NO: 769022 - DNA, 33 bp, Homo sapien
catgtctgtagtagcgtactatgaattttcccc

SEQ ID NO: 769023 - DNA, 33 bp, Homo sapien
ttcagctgagcttcgccgccctaatccatgcca

SEQ ID NO: 769024 - DNA, 33 bp, Homo sapien
ttcagctgagcttcgctgccctaatccatgcca

SEQ ID NO: 769025 - DNA, 33 bp, Homo sapien
aattaagcataattcaaaacacattgggctttt

SEQ ID NO: 769026 - DNA, 33 bp, Homo sapien
aattaagcataattcataacacattgggctttt

SEQ ID NO: 769027 - DNA, 33 bp, Homo sapien
tgtgcatttgtgcataactaagttaaggttatc

SEQ ID NO: 769028 - DNA, 33 bp, Homo sapien
tgtgcatttgtgcatagctaagttaaggttatc

SEQ ID NO: 769029 - DNA, 33 bp, Homo sapien
atgtattttgaagataaattcagagtgaaaaag

SEQ ID NO: 769030 - DNA, 33 bp, Homo sapien
atgtattttgaagatatattcagagtgaaaaag

SEQ ID NO: 769031 - DNA, 33 bp, Homo sapien
aggtcagaggatatccagagaactgtgaaggac

SEQ ID NO: 769032 - DNA, 33 bp, Homo sapien
aggtcagaggatatccggagaactgtgaaggac

SEQ ID NO: 769033 - DNA, 33 bp, Homo sapien
tgatgttctaatacagacatacaaagtgtgata

SEQ ID NO: 769034 - DNA, 33 bp, Homo sapien
tgatgttctaatacaggcatacaaagtgtgata

SEQ ID NO: 769035 - DNA, 33 bp, Homo sapien
gtagcagtagaaaatgacataactgtagagaga

SEQ ID NO: 769036 - DNA, 33 bp, Homo sapien
gtagcagtagaaaatggcataactgtagagaga

SEQ ID NO: 769037 - DNA, 33 bp, Homo sapien
gcaggaggaaagtagaccaaggtagtaacatgg

SEQ ID NO: 769038 - DNA, 33 bp, Homo sapien
gcaggaggaaagtagatcaaggtagtaacatgg

SEQ ID NO: 769039 - DNA, 33 bp, Homo sapien
gaggtatgatgggaagaattctaagatagcttt

SEQ ID NO: 769040 - DNA, 33 bp, Homo sapien
gaggtatgatgggaaggattctaagatagcttt

SEQ ID NO: 769041 - DNA, 33 bp, Homo sapien
tagtctagctccagaaactatcttttaaccacc

SEQ ID NO: 769042 - DNA, 33 bp, Homo sapien
tagtctagctccagaatctatcttttaaccacc

SEQ ID NO: 769043 - DNA, 33 bp, Homo sapien
gatctttcagttttccaaaacacaggtttccat

SEQ ID NO: 769044 - DNA, 33 bp, Homo sapien
gatctttcagttttccgaaacacaggtttccat

SEQ ID NO: 769045 - DNA, 33 bp, Homo sapien
ttactggctttgaagacagaagaaaagccatgt

SEQ ID NO: 769046 - DNA, 33 bp, Homo sapien
ttactggctttgaagatagaagaaaagccatgt

SEQ ID NO: 769047 - DNA, 33 bp, Homo sapien
aagaaacttcaagaacacttgtggaagaatgct

SEQ ID NO: 769048 - DNA, 33 bp, Homo sapien
aagaaacttcaagaacgcttgtggaagaatgct

SEQ ID NO: 769049 - DNA, 33 bp, Homo sapien
cattagctctttgagaagatgaactacagaaac

SEQ ID NO: 769050 - DNA, 33 bp, Homo sapien
cattagctctttgagaggatgaactacagaaac

SEQ ID NO: 769051 - DNA, 33 bp, Homo sapien
caagacagaattggaaaataaggctctcttctt

SEQ ID NO: 769052 - DNA, 33 bp, Homo sapien
caagacagaattggaagataaggctctcttctt

SEQ ID NO: 769053 - DNA, 33 bp, Homo sapien
tgccttcacatccatactacttgaaagtgttct

SEQ ID NO: 769054 - DNA, 33 bp, Homo sapien
tgccttcacatccatattacttgaaagtgttct

SEQ ID NO: 769055 - DNA, 33 bp, Homo sapien
gttatattgcttgctaaaatcgactcaggaaag

SEQ ID NO: 769056 - DNA, 33 bp, Homo sapien
gttatattgcttgctacaatcgactcaggaaag

SEQ ID NO: 769057 - DNA, 33 bp, Homo sapien
tcagacattaaaaaaaattagctaagctgcaaa

SEQ ID NO: 769058 - DNA, 33 bp, Homo sapien
tcagacattaaaaaaagttagctaagctgcaaa

SEQ ID NO: 769059 - DNA, 33 bp, Homo sapien
tcgagggcatcaggcccattttgtccttttatt

SEQ ID NO: 769060 - DNA, 33 bp, Homo sapien
tcgagggcatcaggcctattttgtccttttatt

SEQ ID NO: 769061 - DNA, 33 bp, Homo sapien
tattctctatgcctaaccaaatacttatgatcc

SEQ ID NO: 769062 - DNA, 33 bp, Homo sapien
tattctctatgcctaatcaaatacttatgatcc

SEQ ID NO: 769063 - DNA, 33 bp, Homo sapien
tgaggacaaagggacacaggggctaattggaag

SEQ ID NO: 769064 - DNA, 33 bp, Homo sapien
tgaggacaaagggacagaggggctaattggaag

SEQ ID NO: 769065 - DNA, 33 bp, Homo sapien
gtgcatcattattcaaatcaaaatacacacttg

SEQ ID NO: 769066 - DNA, 33 bp, Homo sapien
gtgcatcattattcaagtcaaaatacacacttg

SEQ ID NO: 769067 - DNA, 33 bp, Homo sapien
aaggtcttctttaacacagtcgtgaatgaaaat

SEQ ID NO: 769068 - DNA, 33 bp, Homo sapien
aaggtcttctttaacagagtcgtgaatgaaaat

SEQ ID NO: 769069 - DNA, 33 bp, Homo sapien
tcatttagctttagagaaaatgaactttaaggc

SEQ ID NO: 769070 - DNA, 33 bp, Homo sapien
tcatttagctttagaggaaatgaactttaaggc

SEQ ID NO: 769071 - DNA, 33 bp, Homo sapien
atcaaagaaagtctcacgacaaagtggtatttc

SEQ ID NO: 769072 - DNA, 33 bp, Homo sapien
atcaaagaaagtctcatgacaaagtggtatttc

SEQ ID NO: 769073 - DNA, 33 bp, Homo sapien
tttctgagggctgctacctgtacatctgcacaa

SEQ ID NO: 769074 - DNA, 33 bp, Homo sapien
tttctgagggctgctatctgtacatctgcacaa

SEQ ID NO: 769075 - DNA, 33 bp, Homo sapien
ggaggaacaacttggacgaacctatattcacaa

SEQ ID NO: 769076 - DNA, 33 bp, Homo sapien
ggaggaacaacttggatgaacctatattcacaa

SEQ ID NO: 769077 - DNA, 33 bp, Homo sapien
actggcacaaaagacaatccattaatttagaat

SEQ ID NO: 769078 - DNA, 33 bp, Homo sapien
actggcacaaaagacattccattaatttagaat

SEQ ID NO: 769079 - DNA, 33 bp, Homo sapien
aaatctgtgtgtccaaactgaattcatttaacc

SEQ ID NO: 769080 - DNA, 33 bp, Homo sapien
aaatctgtgtgtccaagctgaattcatttaacc

SEQ ID NO: 769081 - DNA, 33 bp, Homo sapien
atacatatggaatctgaatatgcttttgtagtt

SEQ ID NO: 769082 - DNA, 33 bp, Homo sapien
atacatatggaatctggatatgcttttgtagtt

SEQ ID NO: 769083 - DNA, 33 bp, Homo sapien
tctccttcaggaaaaactgtttgcctaaaagta

SEQ ID NO: 769084 - DNA, 33 bp, Homo sapien
tctccttcaggaaaaattgtttgcctaaaagta

SEQ ID NO: 769085 - DNA, 33 bp, Homo sapien
tactaggtgatatacacatattccaaagactga

SEQ ID NO: 769086 - DNA, 33 bp, Homo sapien
tactaggtgatatacagatattccaaagactga

SEQ ID NO: 769087 - DNA, 33 bp, Homo sapien
acttctcccaaaggttaaaattctctgctctat

SEQ ID NO: 769088 - DNA, 33 bp, Homo sapien
acttctcccaaaggttgaaattctctgctctat

SEQ ID NO: 769089 - DNA, 33 bp, Homo sapien
ggctaattaagaaggcagaatgttttaatctta

SEQ ID NO: 769090 - DNA, 33 bp, Homo sapien
ggctaattaagaaggctgaatgttttaatctta

SEQ ID NO: 769091 - DNA, 33 bp, Homo sapien
ttacctaccatctgtcaatcagctatcatctag

SEQ ID NO: 769092 - DNA, 33 bp, Homo sapien
ttacctaccatctgtcgatcagctatcatctag

SEQ ID NO: 769093 - DNA, 33 bp, Homo sapien
taatctcatgtggtctaagaagaaatatatatt

SEQ ID NO: 769094 - DNA, 33 bp, Homo sapien
taatctcatgtggtcttagaagaaatatatatt

SEQ ID NO: 769095 - DNA, 33 bp, Homo sapien
ttttctccatcaagacactcctaatttttcatt

SEQ ID NO: 769096 - DNA, 33 bp, Homo sapien
ttttctccatcaagactctcctaatttttcatt

SEQ ID NO: 769097 - DNA, 33 bp, Homo sapien
gtctcctttatatctaagctcttgtcctcctac

SEQ ID NO: 769098 - DNA, 33 bp, Homo sapien
gtctcctttatatctacgctcttgtcctcctac

SEQ ID NO: 769099 - DNA, 33 bp, Homo sapien
tgccacagtgcattgcccctatattacaggaaa

SEQ ID NO: 769100 - DNA, 33 bp, Homo sapien
tgccacagtgcattgctcctatattacaggaaa

SEQ ID NO: 769101 - DNA, 33 bp, Homo sapien
ctctggaggctaacgaggtctcataccacttgc

SEQ ID NO: 769102 - DNA, 33 bp, Homo sapien
ctctggaggctaacgatgtctcataccacttgc

SEQ ID NO: 769103 - DNA, 33 bp, Homo sapien
cagactgtcaataccaacatcagaatagggaag

SEQ ID NO: 769104 - DNA, 33 bp, Homo sapien
cagactgtcaataccagcatcagaatagggaag

SEQ ID NO: 769105 - DNA, 33 bp, Homo sapien
tggccagctttcaggacgtttatgataatacat

SEQ ID NO: 769106 - DNA, 33 bp, Homo sapien
tggccagctttcaggatgtttatgataatacat

SEQ ID NO: 769107 - DNA, 33 bp, Homo sapien
ctcatgaacagagaagaagtttagacaaaagag

SEQ ID NO: 769108 - DNA, 33 bp, Homo sapien
ctcatgaacagagaaggagtttagacaaaagag

SEQ ID NO: 769109 - DNA, 33 bp, Homo sapien
ggtctgttctttatcccggaaaatatgttactt

SEQ ID NO: 769110 - DNA, 33 bp, Homo sapien
ggtctgttctttatcctggaaaatatgttactt

SEQ ID NO: 769111 - DNA, 33 bp, Homo sapien
tctcttaatgcacatacccaggaagttgcttct

SEQ ID NO: 769112 - DNA, 33 bp, Homo sapien
tctcttaatgcacatatccaggaagttgcttct

SEQ ID NO: 769113 - DNA, 33 bp, Homo sapien
aagttgttcagcaaaaccggatttaaaatagat

SEQ ID NO: 769114 - DNA, 33 bp, Homo sapien
aagttgttcagcaaaatcggatttaaaatagat

SEQ ID NO: 769115 - DNA, 33 bp, Homo sapien
aaaactcataaaagcaaagaagaggtctgttcc

SEQ ID NO: 769116 - DNA, 33 bp, Homo sapien
aaaactcataaaagcagagaagaggtctgttcc

SEQ ID NO: 769117 - DNA, 33 bp, Homo sapien
aagatgacctaaggaacgggagcaaatatttgc

SEQ ID NO: 769118 - DNA, 33 bp, Homo sapien
aagatgacctaaggaatgggagcaaatatttgc

SEQ ID NO: 769119 - DNA, 33 bp, Homo sapien
gtaccatttattgaacacagagtcccttcccca

SEQ ID NO: 769120 - DNA, 33 bp, Homo sapien
gtaccatttattgaacgcagagtcccttcccca

SEQ ID NO: 769121 - DNA, 33 bp, Homo sapien
atatctatgtgggaccagattttcttcatatag

SEQ ID NO: 769122 - DNA, 33 bp, Homo sapien
atatctatgtgggacccgattttcttcatatag

SEQ ID NO: 769123 - DNA, 33 bp, Homo sapien
gatcaatcccaagcaacgatttgtatgaacatt

SEQ ID NO: 769124 - DNA, 33 bp, Homo sapien
gatcaatcccaagcaatgatttgtatgaacatt

SEQ ID NO: 769125 - DNA, 33 bp, Homo sapien
aaatgataggcctgtaacaaatatctagcatcc

SEQ ID NO: 769126 - DNA, 33 bp, Homo sapien
aaatgataggcctgtaccaaatatctagcatcc

SEQ ID NO: 769127 - DNA, 33 bp, Homo sapien
gggttgatagctcataacttttcagcactgaat

SEQ ID NO: 769128 - DNA, 33 bp, Homo sapien
gggttgatagctcatatcttttcagcactgaat

SEQ ID NO: 769129 - DNA, 33 bp, Homo sapien
cagtgttttggaaacactatctttgtccattct

SEQ ID NO: 769130 - DNA, 33 bp, Homo sapien
cagtgttttggaaacattatctttgtccattct

SEQ ID NO: 769131 - DNA, 33 bp, Homo sapien
gttgaatattgaaccccactctcttctggtttg

SEQ ID NO: 769132 - DNA, 33 bp, Homo sapien
gttgaatattgaaccctactctcttctggtttg

SEQ ID NO: 769133 - DNA, 33 bp, Homo sapien
ccaccgaaggcatcaaagagctcaaaatatcca

SEQ ID NO: 769134 - DNA, 33 bp, Homo sapien
ccaccgaaggcatcaacgagctcaaaatatcca

SEQ ID NO: 769135 - DNA, 33 bp, Homo sapien
tccgatgaaggcctcaaagcagtccaaatatcc

SEQ ID NO: 769136 - DNA, 33 bp, Homo sapien
tccgatgaaggcctcagagcagtccaaatatcc

SEQ ID NO: 769137 - DNA, 33 bp, Homo sapien
agatttttgtgaaccaaatatgctgctgtctga

SEQ ID NO: 769138 - DNA, 33 bp, Homo sapien
agatttttgtgaaccacatatgctgctgtctga

SEQ ID NO: 769139 - DNA, 33 bp, Homo sapien
aaagccagctgtttgacgctcaatggatccagt

SEQ ID NO: 769140 - DNA, 33 bp, Homo sapien
aaagccagctgtttgatgctcaatggatccagt

SEQ ID NO: 769141 - DNA, 33 bp, Homo sapien
cagcaaactgaggaaaacatcaatgaccttgaa

SEQ ID NO: 769142 - DNA, 33 bp, Homo sapien
cagcaaactgaggaaagcatcaatgaccttgaa

SEQ ID NO: 769143 - DNA, 33 bp, Homo sapien
tcaaaagctcactatactaaaattgtgcttatt

SEQ ID NO: 769144 - DNA, 33 bp, Homo sapien
tcaaaagctcactatagtaaaattgtgcttatt

SEQ ID NO: 769145 - DNA, 33 bp, Homo sapien
ctgtttattgcagaaggagctttcaggagaatt

SEQ ID NO: 769146 - DNA, 33 bp, Homo sapien
ctgtttattgcagaagtagctttcaggagaatt

SEQ ID NO: 769147 - DNA, 33 bp, Homo sapien
ttagtgagataaccacggactatctgtgcagac

SEQ ID NO: 769148 - DNA, 33 bp, Homo sapien
ttagtgagataaccactgactatctgtgcagac

SEQ ID NO: 769149 - DNA, 33 bp, Homo sapien
aaggccaagttaatcaacctagggaaggcattt

SEQ ID NO: 769150 - DNA, 33 bp, Homo sapien
aaggccaagttaatcaccctagggaaggcattt

SEQ ID NO: 769151 - DNA, 33 bp, Homo sapien
tgtcatgtgcattttacgttttgtatatctgag

SEQ ID NO: 769152 - DNA, 33 bp, Homo sapien
tgtcatgtgcattttaggttttgtatatctgag

SEQ ID NO: 769153 - DNA, 33 bp, Homo sapien
taaggagagttcaaataaaattcaatgcttctc

SEQ ID NO: 769154 - DNA, 33 bp, Homo sapien
taaggagagttcaaatgaaattcaatgcttctc

SEQ ID NO: 769155 - DNA, 33 bp, Homo sapien
acagttacttgggagaaataaccaactgctcat

SEQ ID NO: 769156 - DNA, 33 bp, Homo sapien
acagttacttgggagatataaccaactgctcat

SEQ ID NO: 769157 - DNA, 33 bp, Homo sapien
cagaaatagtaccaaacgatgtgagggcatagc

SEQ ID NO: 769158 - DNA, 33 bp, Homo sapien
cagaaatagtaccaaatgatgtgagggcatagc

SEQ ID NO: 769159 - DNA, 33 bp, Homo sapien
acacttttaatgcaaaacagaaatggattattg

SEQ ID NO: 769160 - DNA, 33 bp, Homo sapien
acacttttaatgcaaagcagaaatggattattg

SEQ ID NO: 769161 - DNA, 33 bp, Homo sapien
gttacacattttctaccggctattgctttaaat

SEQ ID NO: 769162 - DNA, 33 bp, Homo sapien
gttacacattttctactggctattgctttaaat

SEQ ID NO: 769163 - DNA, 33 bp, Homo sapien
catcttgtgggcatcactctttccaagtttatt

SEQ ID NO: 769164 - DNA, 33 bp, Homo sapien
catcttgtgggcatcagtctttccaagtttatt

SEQ ID NO: 769165 - DNA, 33 bp, Homo sapien
tttattcatttgctggaatttttctataaagag

SEQ ID NO: 769166 - DNA, 33 bp, Homo sapien
tttattcatttgctgggatttttctataaagag

SEQ ID NO: 769167 - DNA, 33 bp, Homo sapien
atgggcaccaacatttaaaaggtagttggaata

SEQ ID NO: 769168 - DNA, 33 bp, Homo sapien
atgggcaccaacatttcaaaggtagttggaata

SEQ ID NO: 769169 - DNA, 33 bp, Homo sapien
ctgtaaagtaggtaaacaatacagtctgccagt

SEQ ID NO: 769170 - DNA, 33 bp, Homo sapien
ctgtaaagtaggtaaataatacagtctgccagt

SEQ ID NO: 769171 - DNA, 33 bp, Homo sapien
taggcatagaaggaagcactaattactgagaac

SEQ ID NO: 769172 - DNA, 33 bp, Homo sapien
taggcatagaaggaaggactaattactgagaac

SEQ ID NO: 769173 - DNA, 33 bp, Homo sapien; identical to SEQ ID NO: 769171

SEQ ID NO: 769174 - DNA, 33 bp, Homo sapien; identical to SEQ ID NO: 769172

SEQ ID NO: 769175 - DNA, 33 bp, Homo sapien
atatggaaagttctacaaggataatttgataat

SEQ ID NO: 769176 - DNA, 33 bp, Homo sapien
atatggaaagttctacgaggataatttgataat

SEQ ID NO: 769177 - DNA, 33 bp, Homo sapien
ttagactatgagttcaatgaaagtaggaaacat

SEQ ID NO: 769178 - DNA, 33 bp, Homo sapien
ttagactatgagttcagtgaaagtaggaaacat

SEQ ID NO: 769179 - DNA, 33 bp, Homo sapien; identical to SEQ ID NO: 769177

SEQ ID NO: 769180 - DNA, 33 bp, Homo sapien; identical to SEQ ID NO: 769178

SEQ ID NO: 769181 - DNA, 33 bp, Homo sapien
ttctaaaatgaaatgtaaatgaatcatacagta

SEQ ID NO: 769182 - DNA, 33 bp, Homo sapien
ttctaaaatgaaatgtgaatgaatcatacagta

SEQ ID NO: 769183 - DNA, 33 bp, Homo sapien
gtgttttaagccatcaagaagaattgtgttcca

SEQ ID NO: 769184 - DNA, 33 bp, Homo sapien
gtgttttaagccatcaggaagaattgtgttcca

SEQ ID NO: 769185 - DNA, 33 bp, Homo sapien
ttttctggctcttctaataaagtggctttcctt

SEQ ID NO: 769186 - DNA, 33 bp, Homo sapien
ttttctggctcttctagtaaagtggctttcctt

SEQ ID NO: 769187 - DNA, 33 bp, Homo sapien
gtgaaaggcagaattaagttattgcaccttctt

SEQ ID NO: 769188 - DNA, 33 bp, Homo sapien
gtgaaaggcagaattatgttattgcaccttctt

SEQ ID NO: 769189 - DNA, 33 bp, Homo sapien; identical to SEQ ID NO: 769187

SEQ ID NO: 769190 - DNA, 33 bp, Homo sapien; identical to SEQ ID NO: 769188

SEQ ID NO: 769191 - DNA, 33 bp, Homo sapien
attcctataaagagtaaagatgtgagtagattt

SEQ ID NO: 769192 - DNA, 33 bp, Homo sapien
attcctataaagagtacagatgtgagtagattt

SEQ ID NO: 769193 - DNA, 33 bp, Homo sapien
atacctcaaagttcccaagagcagtcagtattt

SEQ ID NO: 769194 - DNA, 33 bp, Homo sapien
atacctcaaagttcccgagagcagtcagtattt

SEQ ID NO: 769195 - DNA, 33 bp, Homo sapien; identical to SEQ ID NO: 769193

SEQ ID NO: 769196 - DNA, 33 bp, Homo sapien; identical to SEQ ID NO: 769194

SEQ ID NO: 769197 - DNA, 33 bp, Homo sapien; identical to SEQ ID NO: 769193

SEQ ID NO: 769198 - DNA, 33 bp, Homo sapien; identical to SEQ ID NO: 769194

SEQ ID NO: 769199 - DNA, 33 bp, Homo sapien
cctcactcagaaaaagaaagccagaaagaagag

SEQ ID NO: 769200 - DNA, 33 bp, Homo sapien
cctcactcagaaaaaggaagccagaaagaagag

SEQ ID NO: 769201 - DNA, 33 bp, Homo sapien
aaaaatgataccattcactacccactttggatc

SEQ ID NO: 769202 - DNA, 33 bp, Homo sapien
aaaaatgataccattcgctacccactttggatc

SEQ ID NO: 769203 - DNA, 33 bp, Homo sapien
tctgggacgaagagtgaaattaggggtcaggat

SEQ ID NO: 769204 - DNA, 33 bp, Homo sapien
tctgggacgaagagtggaattaggggtcaggat

SEQ ID NO: 769205 - DNA, 33 bp, Homo sapien
accattacaaaaattccctgcctactaattttc

SEQ ID NO: 769206 - DNA, 33 bp, Homo sapien
accattacaaaaattctctgcctactaattttc

SEQ ID NO: 769207 - DNA, 33 bp, Homo sapien
aaagaaataaagactcgacttctaaattagcat

SEQ ID NO: 769208 - DNA, 33 bp, Homo sapien
aaagaaataaagactctacttctaaattagcat

SEQ ID NO: 769209 - DNA, 33 bp, Homo sapien
agacccatccgagtcaatctgggtgggtaccat

SEQ ID NO: 769210 - DNA, 33 bp, Homo sapien
agacccatccgagtcagtctgggtgggtaccat

SEQ ID NO: 769211 - DNA, 33 bp, Homo sapien
aaggacaaaggacagacatcagagcaaagggaa

SEQ ID NO: 769212 - DNA, 33 bp, Homo sapien
aaggacaaaggacagatatcagagcaaagggaa

SEQ ID NO: 769213 - DNA, 33 bp, Homo sapien
ttctgtttgtttcacgacatccctaatcacttc

SEQ ID NO: 769214 - DNA, 33 bp, Homo sapien
ttctgtttgtttcacgccatccctaatcacttc

SEQ ID NO: 769215 - DNA, 33 bp, Homo sapien
ataaactatgccagccaaaatgatctttaactt

SEQ ID NO: 769216 - DNA, 33 bp, Homo sapien
ataaactatgccagccgaaatgatctttaactt

SEQ ID NO: 769217 - DNA, 33 bp, Homo sapien
aataaagtgcaactcaagcatattgttctaaaa

SEQ ID NO: 769218 - DNA, 33 bp, Homo sapien
aataaagtgcaactcacgcatattgttctaaaa

SEQ ID NO: 769219 - DNA, 33 bp, Homo sapien
ctttatttccttttaaatgacacagtgtatgtg

SEQ ID NO: 769220 - DNA, 33 bp, Homo sapien
ctttatttccttttaagtgacacagtgtatgtg

SEQ ID NO: 769221 - DNA, 33 bp, Homo sapien
gatggatataataaaacgggctttcctctctcc

SEQ ID NO: 769222 - DNA, 33 bp, Homo sapien
gatggatataataaaatgggctttcctctctcc

SEQ ID NO: 769223 - DNA, 33 bp, Homo sapien
gccatgtgggtaagaacagaaattgagaaaata

SEQ ID NO: 769224 - DNA, 33 bp, Homo sapien
gccatgtgggtaagaagagaaattgagaaaata

SEQ ID NO: 769225 - DNA, 33 bp, Homo sapien
tattgttccagttatccagtgttacatttaaaa

SEQ ID NO: 769226 - DNA, 33 bp, Homo sapien
tattgttccagttatctagtgttacatttaaaa

SEQ ID NO: 769227 - DNA, 33 bp, Homo sapien
ctattgtgctggcaccaaaaggaactactacca

SEQ ID NO: 769228 - DNA, 33 bp, Homo sapien
ctattgtgctggcaccgaaaggaactactacca

SEQ ID NO: 769229 - DNA, 33 bp, Homo sapien
atcatatatgtggtaaagataaagtattcagaa

SEQ ID NO: 769230 - DNA, 33 bp, Homo sapien
atcatatatgtggtaaggataaagtattcagaa

SEQ ID NO: 769231 - DNA, 33 bp, Homo sapien
gcctaaataaataaaacgatctggtgtacatga

SEQ ID NO: 769232 - DNA, 33 bp, Homo sapien
gcctaaataaataaaatgatctggtgtacatga

SEQ ID NO: 769233 - DNA, 33 bp, Homo sapien
cattcctgcttgtacaaagtggtaagatcagcc

SEQ ID NO: 769234 - DNA, 33 bp, Homo sapien
cattcctgcttgtacagagtggtaagatcagcc

SEQ ID NO: 769235 - DNA, 33 bp, Homo sapien
ttctatgtgtccttgactaatagactttctcat

SEQ ID NO: 769236 - DNA, 33 bp, Homo sapien
ttctatgtgtccttgattaatagactttctcat

SEQ ID NO: 769237 - DNA, 33 bp, Homo sapien
gagcttattcctgttgcagcacatgtgtacagc

SEQ ID NO: 769238 - DNA, 33 bp, Homo sapien
gagcttattcctgttggagcacatgtgtacagc

SEQ ID NO: 769239 - DNA, 33 bp, Homo sapien
tagctatgtatttatgaagagaaaagcatggtg

SEQ ID NO: 769240 - DNA, 33 bp, Homo sapien
tagctatgtatttatgtagagaaaagcatggtg

SEQ ID NO: 769241 - DNA, 33 bp, Homo sapien
cacttataccatgctacgaccaggaagttttaa

SEQ ID NO: 769242 - DNA, 33 bp, Homo sapien
cacttataccatgctatgaccaggaagttttaa

SEQ ID NO: 769243 - DNA, 33 bp, Homo sapien
ctaacatccaggatcacataatgtatcaaaaaa

SEQ ID NO: 769244 - DNA, 33 bp, Homo sapien
ctaacatccaggatcatataatgtatcaaaaaa

SEQ ID NO: 769245 - DNA, 33 bp, Homo sapien
ttaactcatatcctagccattaggcaaagcttc

SEQ ID NO: 769246 - DNA, 33 bp, Homo sapien
ttaactcatatcctagtcattaggcaaagcttc

SEQ ID NO: 769247 - DNA, 33 bp, Homo sapien
ctttgtctggcataaaaggtgagaaaaaggtca

SEQ ID NO: 769248 - DNA, 33 bp, Homo sapien
ctttgtctggcataaagggtgagaaaaaggtca

SEQ ID NO: 769249 - DNA, 33 bp, Homo sapien
tgaccaacactatgtacaaggcattgttctcac

SEQ ID NO: 769250 - DNA, 33 bp, Homo sapien
tgaccaacactatgtataaggcattgttctcac

SEQ ID NO: 769251 - DNA, 33 bp, Homo sapien
ggcaagaaaaaaatcaatcttatgaaagcaaac

SEQ ID NO: 769252 - DNA, 33 bp, Homo sapien
ggcaagaaaaaaatcagtcttatgaaagcaaac

SEQ ID NO: 769253 - DNA, 33 bp, Homo sapien
tgtaatgtgtgcctcacaaataagattcagtca

SEQ ID NO: 769254 - DNA, 33 bp, Homo sapien
tgtaatgtgtgcctcataaataagattcagtca

SEQ ID NO: 769255 - DNA, 33 bp, Homo sapien
gtagttacagaaaaacaagcacatttaatttgt

SEQ ID NO: 769256 - DNA, 33 bp, Homo sapien
gtagttacagaaaaacgagcacatttaatttgt

SEQ ID NO: 769257 - DNA, 33 bp, Homo sapien
tagtgacatttactctcacttcaaaatctcctt

SEQ ID NO: 769258 - DNA, 33 bp, Homo sapien
tagtgacatttactcttacttcaaaatctcctt

SEQ ID NO: 769259 - DNA, 33 bp, Homo sapien
tttaggaagtattaaaatagccatgttcttagg

SEQ ID NO: 769260 - DNA, 33 bp, Homo sapien
tttaggaagtattaaagtagccatgttcttagg

SEQ ID NO: 769261 - DNA, 33 bp, Homo sapien
tgccgcggataacaagccgtactggccatttcc

SEQ ID NO: 769262 - DNA, 33 bp, Homo sapien
tgccgcggataacaagtcgtactggccatttcc

SEQ ID NO: 769263 - DNA, 33 bp, Homo sapien
tcccattaaaaaagacaacattgaatgctgaga

SEQ ID NO: 769264 - DNA, 33 bp, Homo sapien
tcccattaaaaaagactacattgaatgctgaga

SEQ ID NO: 769265 - DNA, 33 bp, Homo sapien
gtcttcatgaaaagtaaagtgttattcaattgt

SEQ ID NO: 769266 - DNA, 33 bp, Homo sapien
gtcttcatgaaaagtagagtgttattcaattgt

SEQ ID NO: 769267 - DNA, 33 bp, Homo sapien
accaagaatatgcaataaggaaagcatagtctc

SEQ ID NO: 769268 - DNA, 33 bp, Homo sapien
accaagaatatgcaatgaggaaagcatagtctc

SEQ ID NO: 769269 - DNA, 33 bp, Homo sapien
aggcttccaagtaccaaaattagagtttcacct

SEQ ID NO: 769270 - DNA, 33 bp, Homo sapien
aggcttccaagtaccagaattagagtttcacct

SEQ ID NO: 769271 - DNA, 33 bp, Homo sapien
ttaccaatagcctataataagcagtccacacat

SEQ ID NO: 769272 - DNA, 33 bp, Homo sapien
ttaccaatagcctatagtaagcagtccacacat

SEQ ID NO: 769273 - DNA, 33 bp, Homo sapien
tttcaaatacaacgacaataaaacacttgaggc

SEQ ID NO: 769274 - DNA, 33 bp, Homo sapien
tttcaaatacaacgactataaaacacttgaggc

SEQ ID NO: 769275 - DNA, 33 bp, Homo sapien
accagaaatgatgcaacggctttttctccttat

SEQ ID NO: 769276 - DNA, 33 bp, Homo sapien
accagaaatgatgcaatggctttttctccttat

SEQ ID NO: 769277 - DNA, 33 bp, Homo sapien
gtcagaccaagttagtaaaaaggtcatttgata

SEQ ID NO: 769278 - DNA, 33 bp, Homo sapien
gtcagaccaagttagtgaaaaggtcatttgata

SEQ ID NO: 769279 - DNA, 33 bp, Homo sapien
ttcaggacagagatccaatttcctccccagtat

SEQ ID NO: 769280 - DNA, 33 bp, Homo sapien
ttcaggacagagatccgatttcctccccagtat

SEQ ID NO: 769281 - DNA, 33 bp, Homo sapien
gaggttattgtgtcacaagttcttcgccctcgt

SEQ ID NO: 769282 - DNA, 33 bp, Homo sapien
gaggttattgtgtcacgagttcttcgccctcgt

SEQ ID NO: 769283 - DNA, 33 bp, Homo sapien
ctgcaataatactactaaagaagttccaccttc

SEQ ID NO: 769284 - DNA, 33 bp, Homo sapien
ctgcaataatactacttaagaagttccaccttc

SEQ ID NO: 769285 - DNA, 33 bp, Homo sapien
agcctacatttatgaaagctgtcaatgctatcc

SEQ ID NO: 769286 - DNA, 33 bp, Homo sapien
agcctacatttatgaacgctgtcaatgctatcc

SEQ ID NO: 769287 - DNA, 33 bp, Homo sapien
acaccccaagtcagtaagagagctttgcaactc

SEQ ID NO: 769288 - DNA, 33 bp, Homo sapien
acaccccaagtcagtaggagagctttgcaactc

SEQ ID NO: 769289 - DNA, 33 bp, Homo sapien
ggctgggcaaaaatgaccttgtaatgcattgag

SEQ ID NO: 769290 - DNA, 33 bp, Homo sapien
ggctgggcaaaaatgatcttgtaatgcattgag

SEQ ID NO: 769291 - DNA, 33 bp, Homo sapien
caccatatggccagaaatgaagtgactacgtat

SEQ ID NO: 769292 - DNA, 33 bp, Homo sapien
caccatatggccagaactgaagtgactacgtat

SEQ ID NO: 769293 - DNA, 33 bp, Homo sapien
gtgtacacatcttttcaaatcttggaagttgac

SEQ ID NO: 769294 - DNA, 33 bp, Homo sapien
gtgtacacatcttttcgaatcttggaagttgac

SEQ ID NO: 769295 - DNA, 33 bp, Homo sapien
gaggtttcccaaccaactgctctggtatatgcc

SEQ ID NO: 769296 - DNA, 33 bp, Homo sapien
gaggtttcccaaccaagtgctctggtatatgcc

SEQ ID NO: 769297 - DNA, 33 bp, Homo sapien
tctttaaattgtaataggcaggctgggcataat

SEQ ID NO: 769298 - DNA, 33 bp, Homo sapien
tctttaaattgtaatatgcaggctgggcataat

SEQ ID NO: 769299 - DNA, 33 bp, Homo sapien
ctaagaactgcaatcaagtggaaatcattagta

SEQ ID NO: 769300 - DNA, 33 bp, Homo sapien
ctaagaactgcaatcaggtggaaatcattagta

SEQ ID NO: 769301 - DNA, 33 bp, Homo sapien
gaataaacatgagttacccagatgaaaatgcag

SEQ ID NO: 769302 - DNA, 33 bp, Homo sapien
gaataaacatgagttatccagatgaaaatgcag

SEQ ID NO: 769303 - DNA, 33 bp, Homo sapien
agaggaccaccagtaaataattttggttctggt

SEQ ID NO: 769304 - DNA, 33 bp, Homo sapien
agaggaccaccagtaagtaattttggttctggt

SEQ ID NO: 769305 - DNA, 33 bp, Homo sapien
tcaccactcgttccacagagaatttaaggaaaa

SEQ ID NO: 769306 - DNA, 33 bp, Homo sapien
tcaccactcgttccacggagaatttaaggaaaa

SEQ ID NO: 769307 - DNA, 33 bp, Homo sapien
tttcaccatgaaaaaaattagtgacatattcag

SEQ ID NO: 769308 - DNA, 33 bp, Homo sapien
tttcaccatgaaaaaacttagtgacatattcag

SEQ ID NO: 769309 - DNA, 33 bp, Homo sapien
actcctgaatatagaacgaatgaagacaatgga

SEQ ID NO: 769310 - DNA, 33 bp, Homo sapien
actcctgaatatagaatgaatgaagacaatgga

SEQ ID NO: 769311 - DNA, 33 bp, Homo sapien
tgatgctaacagcgtaagtttcttagaaaaccc

SEQ ID NO: 769312 - DNA, 33 bp, Homo sapien
tgatgctaacagcgtacgtttcttagaaaaccc

SEQ ID NO: 769313 - DNA, 33 bp, Homo sapien
catggtcagatttcaacgttacttcccggaaag

SEQ ID NO: 769314 - DNA, 33 bp, Homo sapien
catggtcagatttcaatgttacttcccggaaag

SEQ ID NO: 769315 - DNA, 33 bp, Homo sapien
aatgaggaggaatagtcaagccaatatgaagag

SEQ ID NO: 769316 - DNA, 33 bp, Homo sapien
aatgaggaggaatagtgaagccaatatgaagag

SEQ ID NO: 769317 - DNA, 33 bp, Homo sapien
atgtccatggtaataaaattctgaccttaagtt

SEQ ID NO: 769318 - DNA, 33 bp, Homo sapien
atgtccatggtaataacattctgaccttaagtt

SEQ ID NO: 769319 - DNA, 33 bp, Homo sapien
actatttcaatatttccaaaaggagcataacat

SEQ ID NO: 769320 - DNA, 33 bp, Homo sapien
actatttcaatatttcgaaaaggagcataacat

SEQ ID NO: 769321 - DNA, 33 bp, Homo sapien
tggtatgttgggggtaaatcaaagtgcaagaca

SEQ ID NO: 769322 - DNA, 33 bp, Homo sapien
tggtatgttgggggtacatcaaagtgcaagaca

SEQ ID NO: 769323 - DNA, 33 bp, Homo sapien
caggttattttatacaactcagtctcaaatgta

SEQ ID NO: 769324 - DNA, 33 bp, Homo sapien
caggttattttatacacctcagtctcaaatgta

SEQ ID NO: 769325 - DNA, 33 bp, Homo sapien
catgacagtaaagtcaatcagagagagagaatg

SEQ ID NO: 769326 - DNA, 33 bp, Homo sapien
catgacagtaaagtcagtcagagagagagaatg

SEQ ID NO: 769327 - DNA, 33 bp, Homo sapien
tgaaaaccaaatatacaaaacatggaaatgctt

SEQ ID NO: 769328 - DNA, 33 bp, Homo sapien
tgaaaaccaaatatacgaaacatggaaatgctt

SEQ ID NO: 769329 - DNA, 33 bp, Homo sapien
ccattagcagttttccaatccatccctagaatt

SEQ ID NO: 769330 - DNA, 33 bp, Homo sapien
ccattagcagttttcccatccatccctagaatt

SEQ ID NO: 769331 - DNA, 33 bp, Homo sapien
ttctgacaaccttgtaaagcggctgccaagtgt

SEQ ID NO: 769332 - DNA, 33 bp, Homo sapien
ttctgacaaccttgtagagcggctgccaagtgt

SEQ ID NO: 769333 - DNA, 33 bp, Homo sapien
tgtctgtgagtctacaaaagtattgcccaatag

SEQ ID NO: 769334 - DNA, 33 bp, Homo sapien
tgtctgtgagtctacagaagtattgcccaatag

SEQ ID NO: 769335 - DNA, 33 bp, Homo sapien
gcacatagcgtttctccaatttgaatatgctgt

SEQ ID NO: 769336 - DNA, 33 bp, Homo sapien
gcacatagcgtttctctaatttgaatatgctgt

SEQ ID NO: 769337 - DNA, 33 bp, Homo sapien
aagacattaagtttcagagctctcagtgggatg

SEQ ID NO: 769338 - DNA, 33 bp, Homo sapien
aagacattaagtttcatagctctcagtgggatg

SEQ ID NO: 769339 - DNA, 33 bp, Homo sapien
atttatgaaatatttaagttggagaaatacaga

SEQ ID NO: 769340 - DNA, 33 bp, Homo sapien
atttatgaaatatttaggttggagaaatacaga

SEQ ID NO: 769341 - DNA, 33 bp, Homo sapien
ttcttgcacacactacgctgtttctagtctcca

SEQ ID NO: 769342 - DNA, 33 bp, Homo sapien
ttcttgcacacactactctgtttctagtctcca

SEQ ID NO: 769343 - DNA, 33 bp, Homo sapien
gggaacactgatttggaatcatccatactctta

SEQ ID NO: 769344 - DNA, 33 bp, Homo sapien
gggaacactgatttggtatcatccatactctta

SEQ ID NO: 769345 - DNA, 33 bp, Homo sapien
ccaagaacagcaaaaacggaatgtctttccttt

SEQ ID NO: 769346 - DNA, 33 bp, Homo sapien
ccaagaacagcaaaaatggaatgtctttccttt

SEQ ID NO: 769347 - DNA, 33 bp, Homo sapien
gagagaatgaaattaaaccggcagttccaggga

SEQ ID NO: 769348 - DNA, 33 bp, Homo sapien
gagagaatgaaattaagccggcagttccaggga

SEQ ID NO: 769349 - DNA, 33 bp, Homo sapien
catgaaactgattacccgcaacataactattac

SEQ ID NO: 769350 - DNA, 33 bp, Homo sapien
catgaaactgattacctgcaacataactattac

SEQ ID NO: 769351 - DNA, 33 bp, Homo sapien
agggagaaaacattgacaacactgagtgagatc

SEQ ID NO: 769352 - DNA, 33 bp, Homo sapien
agggagaaaacattgagaacactgagtgagatc

SEQ ID NO: 769353 - DNA, 33 bp, Homo sapien
tgttgatatcctctccacaggtatttatgttca

SEQ ID NO: 769354 - DNA, 33 bp, Homo sapien
tgttgatatcctctccgcaggtatttatgttca

SEQ ID NO: 769355 - DNA, 33 bp, Homo sapien
gaatagtaatctaagacataatgcactcattaa

SEQ ID NO: 769356 - DNA, 33 bp, Homo sapien
gaatagtaatctaagatataatgcactcattaa

SEQ ID NO: 769357 - DNA, 33 bp, Homo sapien
ctgcatggttattaatcagcttacctagacaat

SEQ ID NO: 769358 - DNA, 33 bp, Homo sapien
ctgcatggttattaatgagcttacctagacaat

SEQ ID NO: 769359 - DNA, 33 bp, Homo sapien
aaacatcattttagagacaagatattgtaccta

SEQ ID NO: 769360 - DNA, 33 bp, Homo sapien
aaacatcattttagagccaagatattgtaccta

SEQ ID NO: 769361 - DNA, 33 bp, Homo sapien
atacattctgagaaacagaccattaggcaattt

SEQ ID NO: 769362 - DNA, 33 bp, Homo sapien
atacattctgagaaacggaccattaggcaattt

SEQ ID NO: 769363 - DNA, 33 bp, Homo sapien
ggatcacagaaagtcacatacccaatttcctgt

SEQ ID NO: 769364 - DNA, 33 bp, Homo sapien
ggatcacagaaagtcatatacccaatttcctgt

SEQ ID NO: 769365 - DNA, 33 bp, Homo sapien
attgctgacaattggggatctctgctctccagc

SEQ ID NO: 769366 - DNA, 33 bp, Homo sapien
attgctgacaattgggtatctctgctctccagc

SEQ ID NO: 769367 - DNA, 33 bp, Homo sapien
gcattcccctatacatcacatatccaaaaagca

SEQ ID NO: 769368 - DNA, 33 bp, Homo sapien
gcattcccctatacattacatatccaaaaagca

SEQ ID NO: 769369 - DNA, 33 bp, Homo sapien
aagcaacttctgaaaggcaaacgcatgcaggct

SEQ ID NO: 769370 - DNA, 33 bp, Homo sapien
aagcaacttctgaaagtcaaacgcatgcaggct

SEQ ID NO: 769371 - DNA, 33 bp, Homo sapien
ctttcctcgaacaccaactttgtaatagacatt

SEQ ID NO: 769372 - DNA, 33 bp, Homo sapien
ctttcctcgaacaccacctttgtaatagacatt

SEQ ID NO: 769373 - DNA, 33 bp, Homo sapien
tcatgaagagttcaagaatttttaagagatagt

SEQ ID NO: 769374 - DNA, 33 bp, Homo sapien
tcatgaagagttcaagcatttttaagagatagt

SEQ ID NO: 769375 - DNA, 33 bp, Homo sapien
catttacaaaagttgcagaccaccattagctgt

SEQ ID NO: 769376 - DNA, 33 bp, Homo sapien
catttacaaaagttgcggaccaccattagctgt

SEQ ID NO: 769377 - DNA, 33 bp, Homo sapien
aaatgccaaagatgtgaatcagtcttcagataa

SEQ ID NO: 769378 - DNA, 33 bp, Homo sapien
aaatgccaaagatgtgtatcagtcttcagataa

SEQ ID NO: 769379 - DNA, 33 bp, Homo sapien
taactctagttcccagcatttgagtagccccag

SEQ ID NO: 769380 - DNA, 33 bp, Homo sapien
taactctagttcccaggatttgagtagccccag

SEQ ID NO: 769381 - DNA, 33 bp, Homo sapien
ggacagtgtttccaaacctgacttcctgccatg

SEQ ID NO: 769382 - DNA, 33 bp, Homo sapien
ggacagtgtttccaaatctgacttcctgccatg

SEQ ID NO: 769383 - DNA, 33 bp, Homo sapien
gagatttatagtcaagaattttgtggctcgaat

SEQ ID NO: 769384 - DNA, 33 bp, Homo sapien
gagatttatagtcaaggattttgtggctcgaat

SEQ ID NO: 769385 - DNA, 33 bp, Homo sapien
cacaagtaacattttgcaaatcatatctttact

SEQ ID NO: 769386 - DNA, 33 bp, Homo sapien
cacaagtaacattttgtaaatcatatctttact

SEQ ID NO: 769387 - DNA, 33 bp, Homo sapien
ttggagatatttcaaccagcaatttctttgtag

SEQ ID NO: 769388 - DNA, 33 bp, Homo sapien
ttggagatatttcaacgagcaatttctttgtag

SEQ ID NO: 769389 - DNA, 33 bp, Homo sapien
aaccaatcaggactgacgaccaagtatgaagca

SEQ ID NO: 769390 - DNA, 33 bp, Homo sapien
aaccaatcaggactgaggaccaagtatgaagca

SEQ ID NO: 769391 - DNA, 33 bp, Homo sapien
gcattcagaatgtcaacaaaagaactgcaagaa

SEQ ID NO: 769392 - DNA, 33 bp, Homo sapien
gcattcagaatgtcaataaaagaactgcaagaa

SEQ ID NO: 769393 - DNA, 33 bp, Homo sapien
gaacagacttctggatcaaatttttccctactt

SEQ ID NO: 769394 - DNA, 33 bp, Homo sapien
gaacagacttctggatgaaatttttccctactt

SEQ ID NO: 769395 - DNA, 33 bp, Homo sapien
tttaagttgtgaagtacccatcacagtgcccga

SEQ ID NO: 769396 - DNA, 33 bp, Homo sapien
tttaagttgtgaagtatccatcacagtgcccga

SEQ ID NO: 769397 - DNA, 33 bp, Homo sapien
gacatatgcaaatggaaatctttaatattatca

SEQ ID NO: 769398 - DNA, 33 bp, Homo sapien
gacatatgcaaatggacatctttaatattatca

SEQ ID NO: 769399 - DNA, 33 bp, Homo sapien
ttttggaaaacatttaagtcattttggaatcta

SEQ ID NO: 769400 - DNA, 33 bp, Homo sapien
ttttggaaaacatttatgtcattttggaatcta

SEQ ID NO: 769401 - DNA, 33 bp, Homo sapien
tgcatcacaggcagtaactaccgtgtatatgat

SEQ ID NO: 769402 - DNA, 33 bp, Homo sapien
tgcatcacaggcagtatctaccgtgtatatgat

SEQ ID NO: 769403 - DNA, 33 bp, Homo sapien
acaagcggtttaggaaaaggctgccattttcca

SEQ ID NO: 769404 - DNA, 33 bp, Homo sapien
acaagcggtttaggaataggctgccattttcca

SEQ ID NO: 769405 - DNA, 33 bp, Homo sapien
catagcctagcgagaaagtacgtgatagagtgt

SEQ ID NO: 769406 - DNA, 33 bp, Homo sapien
catagcctagcgagaaggtacgtgatagagtgt

SEQ ID NO: 769407 - DNA, 33 bp, Homo sapien
tcagtatagaatcatggatttaaccacacttgg

SEQ ID NO: 769408 - DNA, 33 bp, Homo sapien
tcagtatagaatcatgtatttaaccacacttgg

SEQ ID NO: 769409 - DNA, 33 bp, Homo sapien
catttcagatccacgcagaaaaacaatgataat

SEQ ID NO: 769410 - DNA, 33 bp, Homo sapien
catttcagatccacgcggaaaaacaatgataat

SEQ ID NO: 769411 - DNA, 33 bp, Homo sapien
tgtcaacgtgaaataacctttcttaccctgttc

SEQ ID NO: 769412 - DNA, 33 bp, Homo sapien
tgtcaacgtgaaataatctttcttaccctgttc

SEQ ID NO: 769413 - DNA, 33 bp, Homo sapien
tttgggattgggttgcaaattaagcatactgat

SEQ ID NO: 769414 - DNA, 33 bp, Homo sapien
tttgggattgggttgccaattaagcatactgat

SEQ ID NO: 769415 - DNA, 33 bp, Homo sapien
cttttgtgaaaacttcccttccctgctgttagt

SEQ ID NO: 769416 - DNA, 33 bp, Homo sapien
cttttgtgaaaacttctcttccctgctgttagt

SEQ ID NO: 769417 - DNA, 33 bp, Homo sapien
tgctcaacgccagggccactgtttacattttag

SEQ ID NO: 769418 - DNA, 33 bp, Homo sapien
tgctcaacgccagggctactgtttacattttag

SEQ ID NO: 769419 - DNA, 33 bp, Homo sapien
gcagagattggagagacgcagctgtaagtcaag

SEQ ID NO: 769420 - DNA, 33 bp, Homo sapien
gcagagattggagagatgcagctgtaagtcaag

SEQ ID NO: 769421 - DNA, 33 bp, Homo sapien
aatatatgtatagaaaacatttgacaaattcca

SEQ ID NO: 769422 - DNA, 33 bp, Homo sapien
aatatatgtatagaaagcatttgacaaattcca

SEQ ID NO: 769423 - DNA, 33 bp, Homo sapien
atcatgtgtgtacaaagactgaggtacagatga

SEQ ID NO: 769424 - DNA, 33 bp, Homo sapien
atcatgtgtgtacaaatactgaggtacagatga

SEQ ID NO: 769425 - DNA, 33 bp, Homo sapien
gtaggtttttcttcaaatatatatggagcagct

SEQ ID NO: 769426 - DNA, 33 bp, Homo sapien
gtaggtttttcttcaactatatatggagcagct

SEQ ID NO: 769427 - DNA, 33 bp, Homo sapien
tttatctaattcttacccttctctaacctgtta

SEQ ID NO: 769428 - DNA, 33 bp, Homo sapien
tttatctaattcttacgcttctctaacctgtta

SEQ ID NO: 769429 - DNA, 33 bp, Homo sapien
tcatcttctcctagacaaccaccaatttacatt

SEQ ID NO: 769430 - DNA, 33 bp, Homo sapien
tcatcttctcctagacgaccaccaatttacatt

SEQ ID NO: 769431 - DNA, 33 bp, Homo sapien
gagaccaggcagcaaacggtggatttgtagtta

SEQ ID NO: 769432 - DNA, 33 bp, Homo sapien
gagaccaggcagcaaatggtggatttgtagtta

SEQ ID NO: 769433 - DNA, 33 bp, Homo sapien
atatgaggatagaggtcaatgtgtctgaacaat

SEQ ID NO: 769434 - DNA, 33 bp, Homo sapien
atatgaggatagaggtgaatgtgtctgaacaat

SEQ ID NO: 769435 - DNA, 33 bp, Homo sapien
acgtgctaggctcttacgcaactgccattgcca

SEQ ID NO: 769436 - DNA, 33 bp, Homo sapien
acgtgctaggctcttatgcaactgccattgcca

SEQ ID NO: 769437 - DNA, 33 bp, Homo sapien
gtcagtttcttttcgagagcttattctaacttg

SEQ ID NO: 769438 - DNA, 33 bp, Homo sapien
gtcagtttcttttcgatagcttattctaacttg

SEQ ID NO: 769439 - DNA, 33 bp, Homo sapien
actagaagcataacaaaagcgagatgatggccc

SEQ ID NO: 769440 - DNA, 33 bp, Homo sapien
actagaagcataacaagagcgagatgatggccc

SEQ ID NO: 769441 - DNA, 33 bp, Homo sapien
tgatatattagccaacaggatttctgcttgttt

SEQ ID NO: 769442 - DNA, 33 bp, Homo sapien
tgatatattagccaacgggatttctgcttgttt

SEQ ID NO: 769443 - DNA, 33 bp, Homo sapien
cagagcagatgcaacacgaagcttgtaaaagcc

SEQ ID NO: 769444 - DNA, 33 bp, Homo sapien
cagagcagatgcaacatgaagcttgtaaaagcc

SEQ ID NO: 769445 - DNA, 33 bp, Homo sapien
ggcaataggggagaaaaatcattcctgtgatgc

SEQ ID NO: 769446 - DNA, 33 bp, Homo sapien
ggcaataggggagaaacatcattcctgtgatgc

SEQ ID NO: 769447 - DNA, 33 bp, Homo sapien
caaaagatagaaaaaaagcagatactacaattc

SEQ ID NO: 769448 - DNA, 33 bp, Homo sapien
caaaagatagaaaaaaggcagatactacaattc

SEQ ID NO: 769449 - DNA, 33 bp, Homo sapien
cccaaatgtatacagaggtaaagcaatgtaaca

SEQ ID NO: 769450 - DNA, 33 bp, Homo sapien
cccaaatgtatacagatgtaaagcaatgtaaca

SEQ ID NO: 769451 - DNA, 33 bp, Homo sapien
atagactattacaaaacggtctgtagtccaaga

SEQ ID NO: 769452 - DNA, 33 bp, Homo sapien
atagactattacaaaatggtctgtagtccaaga

SEQ ID NO: 769453 - DNA, 33 bp, Homo sapien
cagtctgttttcaagcagaaaataaatttcact

SEQ ID NO: 769454 - DNA, 33 bp, Homo sapien
cagtctgttttcaagcggaaaataaatttcact

SEQ ID NO: 769455 - DNA, 33 bp, Homo sapien
tataagatataagaaaagcttccagtttcagtt

SEQ ID NO: 769456 - DNA, 33 bp, Homo sapien
tataagatataagaaaggcttccagtttcagtt

SEQ ID NO: 769457 - DNA, 33 bp, Homo sapien
tcttagtcagacactgcaacaatcagcataaca

SEQ ID NO: 769458 - DNA, 33 bp, Homo sapien
tcttagtcagacactgtaacaatcagcataaca

SEQ ID NO: 769459 - DNA, 33 bp, Homo sapien
tctgaataaatttgtaagaggtatagtcaaaag

SEQ ID NO: 769460 - DNA, 33 bp, Homo sapien
tctgaataaatttgtaggaggtatagtcaaaag

SEQ ID NO: 769461 - DNA, 33 bp, Homo sapien
tttaatttaggcaaacaactctcttacttggtc

SEQ ID NO: 769462 - DNA, 33 bp, Homo sapien
tttaatttaggcaaacgactctcttacttggtc

SEQ ID NO: 769463 - DNA, 33 bp, Homo sapien
caataaaagattagtgaatcaggatagggcatg

SEQ ID NO: 769464 - DNA, 33 bp, Homo sapien
caataaaagattagtggatcaggatagggcatg

SEQ ID NO: 769465 - DNA, 33 bp, Homo sapien
gttcttcacattaaccactgtcatagatatatg

SEQ ID NO: 769466 - DNA, 33 bp, Homo sapien
gttcttcacattaaccgctgtcatagatatatg

SEQ ID NO: 769467 - DNA, 33 bp, Homo sapien
atgtactggcagacaacatttgagtaactgtgc

SEQ ID NO: 769468 - DNA, 33 bp, Homo sapien
atgtactggcagacaatatttgagtaactgtgc

SEQ ID NO: 769469 - DNA, 33 bp, Homo sapien
gcagtgcttgtcataaatgaatttgatcaactt

SEQ ID NO: 769470 - DNA, 33 bp, Homo sapien
gcagtgcttgtcataagtgaatttgatcaactt

SEQ ID NO: 769471 - DNA, 33 bp, Homo sapien
taccctaaatcccttacctgctcctgacttgct

SEQ ID NO: 769472 - DNA, 33 bp, Homo sapien
taccctaaatcccttatctgctcctgacttgct

SEQ ID NO: 769473 - DNA, 33 bp, Homo sapien
atgtcttccagccacaatcagaaatatatatac

SEQ ID NO: 769474 - DNA, 33 bp, Homo sapien
atgtcttccagccacagtcagaaatatatatac

SEQ ID NO: 769475 - DNA, 33 bp, Homo sapien
tttgataatttctgcccctgaataacgctaaat

SEQ ID NO: 769476 - DNA, 33 bp, Homo sapien
tttgataatttctgcctctgaataacgctaaat

SEQ ID NO: 769477 - DNA, 33 bp, Homo sapien
tcaagatttctaacaacattacaagcaagtttt

SEQ ID NO: 769478 - DNA, 33 bp, Homo sapien
tcaagatttctaacaatattacaagcaagtttt

SEQ ID NO: 769479 - DNA, 33 bp, Homo sapien
gaatgccaacaacatcaatactcagagcacctc

SEQ ID NO: 769480 - DNA, 33 bp, Homo sapien
gaatgccaacaacatcgatactcagagcacctc

SEQ ID NO: 769481 - DNA, 33 bp, Homo sapien
gaagaagttatgtggactaagatttacaatgat

SEQ ID NO: 769482 - DNA, 33 bp, Homo sapien
gaagaagttatgtggagtaagatttacaatgat

SEQ ID NO: 769483 - DNA, 33 bp, Homo sapien
actgtacagtgatacaagataaaattcattgag

SEQ ID NO: 769484 - DNA, 33 bp, Homo sapien
actgtacagtgatacaggataaaattcattgag

SEQ ID NO: 769485 - DNA, 33 bp, Homo sapien
caagttttgcaagattaaaatattgttacaata

SEQ ID NO: 769486 - DNA, 33 bp, Homo sapien
caagttttgcaagattgaaatattgttacaata

SEQ ID NO: 769487 - DNA, 33 bp, Homo sapien
taatttagactactgaaaaaacagctttacctg

SEQ ID NO: 769488 - DNA, 33 bp, Homo sapien
taatttagactactgagaaaacagctttacctg

SEQ ID NO: 769489 - DNA, 33 bp, Homo sapien
ccttattcaatatatcaagtgtatctccagcag

SEQ ID NO: 769490 - DNA, 33 bp, Homo sapien
ccttattcaatatatcgagtgtatctccagcag

SEQ ID NO: 769491 - DNA, 33 bp, Homo sapien
atatatttactctgcaaatcctaataagaacag

SEQ ID NO: 769492 - DNA, 33 bp, Homo sapien
atatatttactctgcagatcctaataagaacag

SEQ ID NO: 769493 - DNA, 33 bp, Homo sapien
ccagtgtacgataactcagctttccatcgatgt

SEQ ID NO: 769494 - DNA, 33 bp, Homo sapien
ccagtgtacgataactgagctttccatcgatgt

SEQ ID NO: 769495 - DNA, 33 bp, Homo sapien
gtgctgtctgctgccccatttaggctgcatgac

SEQ ID NO: 769496 - DNA, 33 bp, Homo sapien
gtgctgtctgctgccctatttaggctgcatgac

SEQ ID NO: 769497 - DNA, 33 bp, Homo sapien
catcaaaattctgcaacatgtcgtggacaacct

SEQ ID NO: 769498 - DNA, 33 bp, Homo sapien
catcaaaattctgcaatatgtcgtggacaacct

SEQ ID NO: 769499 - DNA, 33 bp, Homo sapien
cactatgttaaatgaacgtacacattacatcta

SEQ ID NO: 769500 - DNA, 33 bp, Homo sapien
cactatgttaaatgaaggtacacattacatcta

SEQ ID NO: 769501 - DNA, 33 bp, Homo sapien
cagcccactctcagaagggaataaagcccaagg

SEQ ID NO: 769502 - DNA, 33 bp, Homo sapien
cagcccactctcagaatggaataaagcccaagg

SEQ ID NO: 769503 - DNA, 33 bp, Homo sapien
tccttatgtagaaaatgagtgttgaaaggagat

SEQ ID NO: 769504 - DNA, 33 bp, Homo sapien
tccttatgtagaaaattagtgttgaaaggagat

SEQ ID NO: 769505 - DNA, 33 bp, Homo sapien
ggtgggctcagtataacgattttaagtctttaa

SEQ ID NO: 769506 - DNA, 33 bp, Homo sapien
ggtgggctcagtataatgattttaagtctttaa

SEQ ID NO: 769507 - DNA, 33 bp, Homo sapien
gctgcaaagaacaagacctattttttattattg

SEQ ID NO: 769508 - DNA, 33 bp, Homo sapien
gctgcaaagaacaagagctattttttattattg

SEQ ID NO: 769509 - DNA, 33 bp, Homo sapien
gcacttagaaaacactcaaaattactagattta

SEQ ID NO: 769510 - DNA, 33 bp, Homo sapien
gcacttagaaaacactgaaaattactagattta

SEQ ID NO: 769511 - DNA, 33 bp, Homo sapien
tctgttaagtcttatgcagtttagcgctgcttt

SEQ ID NO: 769512 - DNA, 33 bp, Homo sapien
tctgttaagtcttatgtagtttagcgctgcttt

SEQ ID NO: 769513 - DNA, 33 bp, Homo sapien
tcttccctcaattttccaagactgcaaaaataa

SEQ ID NO: 769514 - DNA, 33 bp, Homo sapien
tcttccctcaattttctaagactgcaaaaataa

SEQ ID NO: 769515 - DNA, 33 bp, Homo sapien
gattgcttggttcaaactctaccttccccactt

SEQ ID NO: 769516 - DNA, 33 bp, Homo sapien
gattgcttggttcaaagtctaccttccccactt

SEQ ID NO: 769517 - DNA, 33 bp, Homo sapien
tgctatagactataaacaccgaatacttatgct

SEQ ID NO: 769518 - DNA, 33 bp, Homo sapien
tgctatagactataaataccgaatacttatgct

SEQ ID NO: 769519 - DNA, 33 bp, Homo sapien
ctctatacaggtgtgccattttaaatcttttac

SEQ ID NO: 769520 - DNA, 33 bp, Homo sapien
ctctatacaggtgtgcgattttaaatcttttac

SEQ ID NO: 769521 - DNA, 33 bp, Homo sapien
gattgctgtatccttgcagtatagttaaacttg

SEQ ID NO: 769522 - DNA, 33 bp, Homo sapien
gattgctgtatccttgtagtatagttaaacttg

SEQ ID NO: 769523 - DNA, 33 bp, Homo sapien
gtcattcaaataggaacgtagtggtatctcttt

SEQ ID NO: 769524 - DNA, 33 bp, Homo sapien
gtcattcaaataggaatgtagtggtatctcttt

SEQ ID NO: 769525 - DNA, 33 bp, Homo sapien
ctggtgagtctgtgaacgaattcctactgagag

SEQ ID NO: 769526 - DNA, 33 bp, Homo sapien
ctggtgagtctgtgaatgaattcctactgagag

SEQ ID NO: 769527 - DNA, 33 bp, Homo sapien
cccccagaaatgccacagatagtacagtcaaga

SEQ ID NO: 769528 - DNA, 33 bp, Homo sapien
cccccagaaatgccacggatagtacagtcaaga

SEQ ID NO: 769529 - DNA, 33 bp, Homo sapien
tgtccacactgggtcaatgaacattcaggttac

SEQ ID NO: 769530 - DNA, 33 bp, Homo sapien
tgtccacactgggtcactgaacattcaggttac

SEQ ID NO: 769531 - DNA, 33 bp, Homo sapien
gacacttggaaaataaactcagccttatgaatg

SEQ ID NO: 769532 - DNA, 33 bp, Homo sapien
gacacttggaaaataatctcagccttatgaatg

SEQ ID NO: 769533 - DNA, 33 bp, Homo sapien
aagtggccaggactcaaccaggaatttataaca

SEQ ID NO: 769534 - DNA, 33 bp, Homo sapien
aagtggccaggactcagccaggaatttataaca

SEQ ID NO: 769535 - DNA, 33 bp, Homo sapien
aacctgcagccctagaaaaagtggccaggactc

SEQ ID NO: 769536 - DNA, 33 bp, Homo sapien
aacctgcagccctagacaaagtggccaggactc

SEQ ID NO: 769537 - DNA, 33 bp, Homo sapien
tgatcatgtccctgcactaaaaaagggcaacaa

SEQ ID NO: 769538 - DNA, 33 bp, Homo sapien
tgatcatgtccctgcattaaaaaagggcaacaa

SEQ ID NO: 769539 - DNA, 33 bp, Homo sapien
gttcagacagtagagacggcccttcttagaaca

SEQ ID NO: 769540 - DNA, 33 bp, Homo sapien
gttcagacagtagagatggcccttcttagaaca

SEQ ID NO: 769541 - DNA, 33 bp, Homo sapien
tgtgaggatgcagagaaaagtccccttatatga

SEQ ID NO: 769542 - DNA, 33 bp, Homo sapien
tgtgaggatgcagagagaagtccccttatatga

SEQ ID NO: 769543 - DNA, 33 bp, Homo sapien
acatagtgaatttttaaatgttttcagcaatct

SEQ ID NO: 769544 - DNA, 33 bp, Homo sapien
acatagtgaatttttagatgttttcagcaatct

SEQ ID NO: 769545 - DNA, 33 bp, Homo sapien
aaaaggcatgtctaccaattttagttgcttttc

SEQ ID NO: 769546 - DNA, 33 bp, Homo sapien
aaaaggcatgtctaccgattttagttgcttttc

SEQ ID NO: 769547 - DNA, 33 bp, Homo sapien
aattctgaatccattgaagacttttggcttcta

SEQ ID NO: 769548 - DNA, 33 bp, Homo sapien
aattctgaatccattggagacttttggcttcta

SEQ ID NO: 769549 - DNA, 33 bp, Homo sapien
cctatgctcattgaataaagattttcttaaatc

SEQ ID NO: 769550 - DNA, 33 bp, Homo sapien
cctatgctcattgaattaagattttcttaaatc

SEQ ID NO: 769551 - DNA, 33 bp, Homo sapien
tagttaatggttttgaagccagactatgtctga

SEQ ID NO: 769552 - DNA, 33 bp, Homo sapien
tagttaatggttttgatgccagactatgtctga

SEQ ID NO: 769553 - DNA, 33 bp, Homo sapien
aataaaaacaaggtaccggatgtcctagtaggt

SEQ ID NO: 769554 - DNA, 33 bp, Homo sapien
aataaaaacaaggtactggatgtcctagtaggt

SEQ ID NO: 769555 - DNA, 33 bp, Homo sapien
tatagattccaaaaaacttaacagagagtttgt

SEQ ID NO: 769556 - DNA, 33 bp, Homo sapien
tatagattccaaaaaatttaacagagagtttgt

SEQ ID NO: 769557 - DNA, 33 bp, Homo sapien
gagactatgagataataagagacataatctgta

SEQ ID NO: 769558 - DNA, 33 bp, Homo sapien
gagactatgagataatgagagacataatctgta

SEQ ID NO: 769559 - DNA, 33 bp, Homo sapien
cttttcattgcttctacattcttggtgaattag

SEQ ID NO: 769560 - DNA, 33 bp, Homo sapien
cttttcattgcttctagattcttggtgaattag

SEQ ID NO: 769561 - DNA, 33 bp, Homo sapien
tctttgttcaacacagaataactccaaagaacc

SEQ ID NO: 769562 - DNA, 33 bp, Homo sapien
tctttgttcaacacagtataactccaaagaacc

SEQ ID NO: 769563 - DNA, 33 bp, Homo sapien
acagataaggaactagaccttaacaattttatg

SEQ ID NO: 769564 - DNA, 33 bp, Homo sapien
acagataaggaactaggccttaacaattttatg

SEQ ID NO: 769565 - DNA, 33 bp, Homo sapien
tattaagcaactcctacgtgtttttatacttct

SEQ ID NO: 769566 - DNA, 33 bp, Homo sapien
tattaagcaactcctatgtgtttttatacttct

SEQ ID NO: 769567 - DNA, 33 bp, Homo sapien
taaaggcacagaactacgaatatccaaaggaaa

SEQ ID NO: 769568 - DNA, 33 bp, Homo sapien
taaaggcacagaactatgaatatccaaaggaaa

SEQ ID NO: 769569 - DNA, 33 bp, Homo sapien
taattattcaacagacaatcgtaaatggacttg

SEQ ID NO: 769570 - DNA, 33 bp, Homo sapien
taattattcaacagaccatcgtaaatggacttg

SEQ ID NO: 769571 - DNA, 33 bp, Homo sapien
tttgtgtcagactacagctttagagaaaaataa

SEQ ID NO: 769572 - DNA, 33 bp, Homo sapien
tttgtgtcagactacatctttagagaaaaataa

SEQ ID NO: 769573 - DNA, 33 bp, Homo sapien
tttcaaggatttggaacgatagagcagtttctg

SEQ ID NO: 769574 - DNA, 33 bp, Homo sapien
tttcaaggatttggaatgatagagcagtttctg

SEQ ID NO: 769575 - DNA, 33 bp, Homo sapien
tcagaggtaagctaaaatgtgcatgaagagtta

SEQ ID NO: 769576 - DNA, 33 bp, Homo sapien
tcagaggtaagctaaagtgtgcatgaagagtta

SEQ ID NO: 769577 - DNA, 33 bp, Homo sapien
ttacattaactataccaaccttggttcagacag

SEQ ID NO: 769578 - DNA, 33 bp, Homo sapien
ttacattaactatacccaccttggttcagacag

SEQ ID NO: 769579 - DNA, 33 bp, Homo sapien
tattccttcaacaaagcctaacacagggaccag

SEQ ID NO: 769580 - DNA, 33 bp, Homo sapien
tattccttcaacaaaggctaacacagggaccag

SEQ ID NO: 769581 - DNA, 33 bp, Homo sapien; identical to SEQ ID NO: 769579

SEQ ID NO: 769582 - DNA, 33 bp, Homo sapien; identical to SEQ ID NO: 769580

SEQ ID NO: 769583 - DNA, 33 bp, Homo sapien
agatgactttttatccaatctattcattgtgat

SEQ ID NO: 769584 - DNA, 33 bp, Homo sapien
agatgactttttatcccatctattcattgtgat

SEQ ID NO: 769585 - DNA, 33 bp, Homo sapien
ccccgaaaaacactaaaagattagagattgatg

SEQ ID NO: 769586 - DNA, 33 bp, Homo sapien
ccccgaaaaacactaagagattagagattgatg

SEQ ID NO: 769587 - DNA, 33 bp, Homo sapien
atacttctcattcttcaaagaggaaaatattca

SEQ ID NO: 769588 - DNA, 33 bp, Homo sapien
atacttctcattcttccaagaggaaaatattca

SEQ ID NO: 769589 - DNA, 33 bp, Homo sapien
gagtgtcatcaagaccgagaaaatatttttgcc

SEQ ID NO: 769590 - DNA, 33 bp, Homo sapien
gagtgtcatcaagacctagaaaatatttttgcc

SEQ ID NO: 769591 - DNA, 33 bp, Homo sapien
ttaggaatgcaaacacaacatacaaacaaaatt

SEQ ID NO: 769592 - DNA, 33 bp, Homo sapien
ttaggaatgcaaacaccacatacaaacaaaatt

SEQ ID NO: 769593 - DNA, 33 bp, Homo sapien
tgggttgtaacaaaagaatagtaaagagatgtg

SEQ ID NO: 769594 - DNA, 33 bp, Homo sapien
tgggttgtaacaaaaggatagtaaagagatgtg

SEQ ID NO: 769595 - DNA, 33 bp, Homo sapien
aatgaatgtcttacgcagccatatcttaatgga

SEQ ID NO: 769596 - DNA, 33 bp, Homo sapien
aatgaatgtcttacgcggccatatcttaatgga

SEQ ID NO: 769597 - DNA, 33 bp, Homo sapien
agagagtaaacaatgaccagaagaggatagggt

SEQ ID NO: 769598 - DNA, 33 bp, Homo sapien
agagagtaaacaatgagcagaagaggatagggt

SEQ ID NO: 769599 - DNA, 33 bp, Homo sapien
taacatctttaacacaacatctccgataaaaag

SEQ ID NO: 769600 - DNA, 33 bp, Homo sapien
taacatctttaacacagcatctccgataaaaag

SEQ ID NO: 769601 - DNA, 33 bp, Homo sapien
acatcctttgttcgacacgttagtaagtccttt

SEQ ID NO: 769602 - DNA, 33 bp, Homo sapien
acatcctttgttcgactcgttagtaagtccttt

SEQ ID NO: 769603 - DNA, 33 bp, Homo sapien
ggttttctagatctctaaaaacaagcatggtga

SEQ ID NO: 769604 - DNA, 33 bp, Homo sapien
ggttttctagatctctgaaaacaagcatggtga

SEQ ID NO: 769605 - DNA, 33 bp, Homo sapien
tattcctgtttcattacgttgtagagctaaatg

SEQ ID NO: 769606 - DNA, 33 bp, Homo sapien
tattcctgtttcattatgttgtagagctaaatg

SEQ ID NO: 769607 - DNA, 33 bp, Homo sapien
gaattgagctgtacaaatgctcaaatcaattat

SEQ ID NO: 769608 - DNA, 33 bp, Homo sapien
gaattgagctgtacaagtgctcaaatcaattat

SEQ ID NO: 769609 - DNA, 33 bp, Homo sapien
gtatttatgatcaacaatgggagcagagatcac

SEQ ID NO: 769610 - DNA, 33 bp, Homo sapien
gtatttatgatcaacagtgggagcagagatcac

SEQ ID NO: 769611 - DNA, 33 bp, Homo sapien
gagagaaagccctgaacgtatggtacaataagc

SEQ ID NO: 769612 - DNA, 33 bp, Homo sapien
gagagaaagccctgaatgtatggtacaataagc

SEQ ID NO: 769613 - DNA, 33 bp, Homo sapien
acaaactgtaaactcaatgaatttcaaattagt

SEQ ID NO: 769614 - DNA, 33 bp, Homo sapien
acaaactgtaaactcagtgaatttcaaattagt

SEQ ID NO: 769615 - DNA, 33 bp, Homo sapien
atattaaaactaaagaagtatagaagcatttga

SEQ ID NO: 769616 - DNA, 33 bp, Homo sapien
atattaaaactaaagatgtatagaagcatttga

SEQ ID NO: 769617 - DNA, 33 bp, Homo sapien
catgtcatgtttagacagtagtacctccaatgc

SEQ ID NO: 769618 - DNA, 33 bp, Homo sapien
catgtcatgtttagacggtagtacctccaatgc

SEQ ID NO: 769619 - DNA, 33 bp, Homo sapien
tcagaattttccacaagtgccgtgagggggtaa

SEQ ID NO: 769620 - DNA, 33 bp, Homo sapien
tcagaattttccacaattgccgtgagggggtaa

SEQ ID NO: 769621 - DNA, 33 bp, Homo sapien
actgattgcaaaagtccataatgtctctatgaa

SEQ ID NO: 769622 - DNA, 33 bp, Homo sapien
actgattgcaaaagtctataatgtctctatgaa

SEQ ID NO: 769623 - DNA, 33 bp, Homo sapien
gtcctggcagtgcgtacagaactgtcaatcgaa

SEQ ID NO: 769624 - DNA, 33 bp, Homo sapien
gtcctggcagtgcgtatagaactgtcaatcgaa

SEQ ID NO: 769625 - DNA, 33 bp, Homo sapien
taaacagacccaataaattaaggaacatagaag

SEQ ID NO: 769626 - DNA, 33 bp, Homo sapien
taaacagacccaataagttaaggaacatagaag

SEQ ID NO: 769627 - DNA, 33 bp, Homo sapien
tccctgatgatgctcaatgaaggtagtaattag

SEQ ID NO: 769628 - DNA, 33 bp, Homo sapien
tccctgatgatgctcagtgaaggtagtaattag

SEQ ID NO: 769629 - DNA, 33 bp, Homo sapien
tagtgcttagcttacacatgttcaattatggac

SEQ ID NO: 769630 - DNA, 33 bp, Homo sapien
tagtgcttagcttacatatgttcaattatggac

SEQ ID NO: 769631 - DNA, 33 bp, Homo sapien
aaagtcacaaacacacacaatttttgctttgtg

SEQ ID NO: 769632 - DNA, 33 bp, Homo sapien
aaagtcacaaacacacccaatttttgctttgtg

SEQ ID NO: 769633 - DNA, 33 bp, Homo sapien
aaaacataagacccaaagcttctcagtttctgt

SEQ ID NO: 769634 - DNA, 33 bp, Homo sapien
aaaacataagacccaacgcttctcagtttctgt

SEQ ID NO: 769635 - DNA, 33 bp, Homo sapien
cactgtgatggctgaaaggtaatctaagaaagg

SEQ ID NO: 769636 - DNA, 33 bp, Homo sapien
cactgtgatggctgaagggtaatctaagaaagg

SEQ ID NO: 769637 - DNA, 33 bp, Homo sapien
attttacaaagcaataatagagcgttgctgaat

SEQ ID NO: 769638 - DNA, 33 bp, Homo sapien
attttacaaagcaatagtagagcgttgctgaat

SEQ ID NO: 769639 - DNA, 33 bp, Homo sapien
acaaagtaaactttcaaaacatgtcaactgctg

SEQ ID NO: 769640 - DNA, 33 bp, Homo sapien
acaaagtaaactttcagaacatgtcaactgctg

SEQ ID NO: 769641 - DNA, 33 bp, Homo sapien
atctagctgaagtcccaaaacagtaacagcaac

SEQ ID NO: 769642 - DNA, 33 bp, Homo sapien
atctagctgaagtcccgaaacagtaacagcaac

SEQ ID NO: 769643 - DNA, 33 bp, Homo sapien
tgctcctggctttggacagatggccattctcat

SEQ ID NO: 769644 - DNA, 33 bp, Homo sapien
tgctcctggctttggagagatggccattctcat

SEQ ID NO: 769645 - DNA, 33 bp, Homo sapien
cagcgagaattggatacgcaaattccactaggg

SEQ ID NO: 769646 - DNA, 33 bp, Homo sapien
cagcgagaattggatatgcaaattccactaggg

SEQ ID NO: 769647 - DNA, 33 bp, Homo sapien
ccatttgttgggtacaaattctaagcaatgccc

SEQ ID NO: 769648 - DNA, 33 bp, Homo sapien
ccatttgttgggtacagattctaagcaatgccc

SEQ ID NO: 769649 - DNA, 33 bp, Homo sapien
tagtggacatcaaaaaataggcaattgcactaa

SEQ ID NO: 769650 - DNA, 33 bp, Homo sapien
tagtggacatcaaaaattaggcaattgcactaa

SEQ ID NO: 769651 - DNA, 33 bp, Homo sapien
tttaaataaatctccaaccaaccattgcacatg

SEQ ID NO: 769652 - DNA, 33 bp, Homo sapien
tttaaataaatctccacccaaccattgcacatg

SEQ ID NO: 769653 - DNA, 33 bp, Homo sapien
ttttctggctctaataactgtgattgtatgatt

SEQ ID NO: 769654 - DNA, 33 bp, Homo sapien
ttttctggctctaatatctgtgattgtatgatt

SEQ ID NO: 769655 - DNA, 33 bp, Homo sapien
acatcttctgcgcacagcattgaccaaatggtt

SEQ ID NO: 769656 - DNA, 33 bp, Homo sapien
acatcttctgcgcacatcattgaccaaatggtt

SEQ ID NO: 769657 - DNA, 33 bp, Homo sapien
aaaaagctaaccaagacggtgttctgcttgatg

SEQ ID NO: 769658 - DNA, 33 bp, Homo sapien
aaaaagctaaccaagatggtgttctgcttgatg

SEQ ID NO: 769659 - DNA, 33 bp, Homo sapien
cagacaggtatattaacggatgactagtgagaa

SEQ ID NO: 769660 - DNA, 33 bp, Homo sapien
cagacaggtatattaatggatgactagtgagaa

SEQ ID NO: 769661 - DNA, 33 bp, Homo sapien
attcaaatactgatagacgagtagggaatattg

SEQ ID NO: 769662 - DNA, 33 bp, Homo sapien
attcaaatactgataggcgagtagggaatattg

SEQ ID NO: 769663 - DNA, 33 bp, Homo sapien
tttgaaacatatttatcagtaccaccaagttat

SEQ ID NO: 769664 - DNA, 33 bp, Homo sapien
tttgaaacatatttattagtaccaccaagttat

SEQ ID NO: 769665 - DNA, 33 bp, Homo sapien
gcactctccaatgacactcttaacaagtatagt

SEQ ID NO: 769666 - DNA, 33 bp, Homo sapien
gcactctccaatgacattcttaacaagtatagt

SEQ ID NO: 769667 - DNA, 33 bp, Homo sapien
ttgtctaaattggaaaaaggattctaatatcta

SEQ ID NO: 769668 - DNA, 33 bp, Homo sapien
ttgtctaaattggaaagaggattctaatatcta

SEQ ID NO: 769669 - DNA, 33 bp, Homo sapien
aggtttcaaggatcccacaaacactctgtaaag

SEQ ID NO: 769670 - DNA, 33 bp, Homo sapien
aggtttcaaggatcccgcaaacactctgtaaag

SEQ ID NO: 769671 - DNA, 33 bp, Homo sapien
gaaatactttttgaccaagtaatctcattacag

SEQ ID NO: 769672 - DNA, 33 bp, Homo sapien
gaaatactttttgaccgagtaatctcattacag

SEQ ID NO: 769673 - DNA, 33 bp, Homo sapien
aacacattgagcaggacaagtgaataaactaag

SEQ ID NO: 769674 - DNA, 33 bp, Homo sapien
aacacattgagcaggataagtgaataaactaag

SEQ ID NO: 769675 - DNA, 33 bp, Homo sapien
ttacactttttctccaatgcatgtttcaacatg

SEQ ID NO: 769676 - DNA, 33 bp, Homo sapien
ttacactttttctccattgcatgtttcaacatg

SEQ ID NO: 769677 - DNA, 33 bp, Homo sapien
tatctgtgagaacacgaaaaatttgcgacctat

SEQ ID NO: 769678 - DNA, 33 bp, Homo sapien
tatctgtgagaacacggaaaatttgcgacctat

SEQ ID NO: 769679 - DNA, 33 bp, Homo sapien
ttaatgaaaatgaagaccttattgactaaatat

SEQ ID NO: 769680 - DNA, 33 bp, Homo sapien
ttaatgaaaatgaagagcttattgactaaatat

SEQ ID NO: 769681 - DNA, 33 bp, Homo sapien
tacttttgttctgtaaatggcaccctgaaatat

SEQ ID NO: 769682 - DNA, 33 bp, Homo sapien
tacttttgttctgtaagtggcaccctgaaatat

SEQ ID NO: 769683 - DNA, 33 bp, Homo sapien
actttacttccaaaaccgacttgtaactgaatt

SEQ ID NO: 769684 - DNA, 33 bp, Homo sapien
actttacttccaaaactgacttgtaactgaatt

SEQ ID NO: 769685 - DNA, 33 bp, Homo sapien
tgctacaattctaactcaaagtgcttaggttct

SEQ ID NO: 769686 - DNA, 33 bp, Homo sapien
tgctacaattctaacttaaagtgcttaggttct

SEQ ID NO: 769687 - DNA, 33 bp, Homo sapien
gaaagaaggtacatgacgggtttgagaaattaa

SEQ ID NO: 769688 - DNA, 33 bp, Homo sapien
gaaagaaggtacatgatgggtttgagaaattaa

SEQ ID NO: 769689 - DNA, 33 bp, Homo sapien
gtgatttatccagctaaaaaagcttcttgtaga

SEQ ID NO: 769690 - DNA, 33 bp, Homo sapien
gtgatttatccagctagaaaagcttcttgtaga

SEQ ID NO: 769691 - DNA, 33 bp, Homo sapien
ctacaacttgaaataaatgaccccactgtggta

SEQ ID NO: 769692 - DNA, 33 bp, Homo sapien
ctacaacttgaaataagtgaccccactgtggta

SEQ ID NO: 769693 - DNA, 33 bp, Homo sapien
gtgaaagaagacagacagaaagacttcatattg

SEQ ID NO: 769694 - DNA, 33 bp, Homo sapien
gtgaaagaagacagacggaaagacttcatattg

SEQ ID NO: 769695 - DNA, 33 bp, Homo sapien
aagtaaaaccatattgaaacctatagaccagcc

SEQ ID NO: 769696 - DNA, 33 bp, Homo sapien
aagtaaaaccatattggaacctatagaccagcc

SEQ ID NO: 769697 - DNA, 33 bp, Homo sapien
ttcactcctggagttcaaatggagtggaagagg

SEQ ID NO: 769698 - DNA, 33 bp, Homo sapien
ttcactcctggagttcgaatggagtggaagagg

SEQ ID NO: 769699 - DNA, 33 bp, Homo sapien
taacccgctctgtgcaaggtttattgtagcatt

SEQ ID NO: 769700 - DNA, 33 bp, Homo sapien
taacccgctctgtgcacggtttattgtagcatt

SEQ ID NO: 769701 - DNA, 33 bp, Homo sapien
gcaatgacaaaaccaaatcttgaaaataatgct

SEQ ID NO: 769702 - DNA, 33 bp, Homo sapien
gcaatgacaaaaccaactcttgaaaataatgct

SEQ ID NO: 769703 - DNA, 33 bp, Homo sapien
ggaagagtaacacataacctcttggtaaaacaa

SEQ ID NO: 769704 - DNA, 33 bp, Homo sapien
ggaagagtaacacatatcctcttggtaaaacaa

SEQ ID NO: 769705 - DNA, 33 bp, Homo sapien
ctggaactgcagtaaaataatgcttcttattgt

SEQ ID NO: 769706 - DNA, 33 bp, Homo sapien
ctggaactgcagtaaagtaatgcttcttattgt

SEQ ID NO: 769707 - DNA, 33 bp, Homo sapien
taggaaaacattagaaaaattcagatccagcca

SEQ ID NO: 769708 - DNA, 33 bp, Homo sapien
taggaaaacattagaacaattcagatccagcca

SEQ ID NO: 769709 - DNA, 33 bp, Homo sapien
ggtctctgactttatcaatatccctttaacctt

SEQ ID NO: 769710 - DNA, 33 bp, Homo sapien
ggtctctgactttatcgatatccctttaacctt

SEQ ID NO: 769711 - DNA, 33 bp, Homo sapien
tgattcaggaatttgccgaccgagatgaaattt

SEQ ID NO: 769712 - DNA, 33 bp, Homo sapien
tgattcaggaatttgcggaccgagatgaaattt

SEQ ID NO: 769713 - DNA, 33 bp, Homo sapien
gttgtagaaatttacccgagtcccttgatctgt

SEQ ID NO: 769714 - DNA, 33 bp, Homo sapien
gttgtagaaatttacctgagtcccttgatctgt

SEQ ID NO: 769715 - DNA, 33 bp, Homo sapien
agataaaacctccctgaagctacacagataaat

SEQ ID NO: 769716 - DNA, 33 bp, Homo sapien
agataaaacctccctggagctacacagataaat

SEQ ID NO: 769717 - DNA, 33 bp, Homo sapien
tcttatgaaggaatcacgtaaactgcagaatat

SEQ ID NO: 769718 - DNA, 33 bp, Homo sapien
tcttatgaaggaatcatgtaaactgcagaatat

SEQ ID NO: 769719 - DNA, 33 bp, Homo sapien
aggcactctggttgaacactgccacagccagtg

SEQ ID NO: 769720 - DNA, 33 bp, Homo sapien
aggcactctggttgaatactgccacagccagtg

SEQ ID NO: 769721 - DNA, 33 bp, Homo sapien; identical to SEQ ID NO: 769719

SEQ ID NO: 769722 - DNA, 33 bp, Homo sapien; identical to SEQ ID NO: 769720

SEQ ID NO: 769723 - DNA, 33 bp, Homo sapien
ttttgcaatgttcagacattccgacttcctaat

SEQ ID NO: 769724 - DNA, 33 bp, Homo sapien
ttttgcaatgttcagatattccgacttcctaat

SEQ ID NO: 769725 - DNA, 33 bp, Homo sapien
gccagtctagtgggtaacatttttttctaaaag

SEQ ID NO: 769726 - DNA, 33 bp, Homo sapien
gccagtctagtgggtagcatttttttctaaaag

SEQ ID NO: 769727 - DNA, 33 bp, Homo sapien
cacattcagaaggacgaagctgaatcctgagtg

SEQ ID NO: 769728 - DNA, 33 bp, Homo sapien
cacattcagaaggacgcagctgaatcctgagtg

SEQ ID NO: 769729 - DNA, 33 bp, Homo sapien
agagcctagagcatgactaagggcttaggagag

SEQ ID NO: 769730 - DNA, 33 bp, Homo sapien
agagcctagagcatgattaagggcttaggagag

SEQ ID NO: 769731 - DNA, 33 bp, Homo sapien
atcaagttaattctccaaacatttattaagcat

SEQ ID NO: 769732 - DNA, 33 bp, Homo sapien
atcaagttaattctccgaacatttattaagcat

SEQ ID NO: 769733 - DNA, 33 bp, Homo sapien
ttctatcctgtgaaaaatcctatttaagggtac

SEQ ID NO: 769734 - DNA, 33 bp, Homo sapien
ttctatcctgtgaaaagtcctatttaagggtac

SEQ ID NO: 769735 - DNA, 33 bp, Homo sapien
gtccagagtttacacaaatcccaaaccataatt

SEQ ID NO: 769736 - DNA, 33 bp, Homo sapien
gtccagagtttacacagatcccaaaccataatt

SEQ ID NO: 769737 - DNA, 33 bp, Homo sapien
cttcatagttgcattcgctaagtcctgtgagaa

SEQ ID NO: 769738 - DNA, 33 bp, Homo sapien
cttcatagttgcattctctaagtcctgtgagaa

SEQ ID NO: 769739 - DNA, 33 bp, Homo sapien
gtttgtagtaaaataaccagtctgtcacacctg

SEQ ID NO: 769740 - DNA, 33 bp, Homo sapien
gtttgtagtaaaataagcagtctgtcacacctg

SEQ ID NO: 769741 - DNA, 33 bp, Homo sapien
caaagcaaacacacataaagtaaagaacaaaaa

SEQ ID NO: 769742 - DNA, 33 bp, Homo sapien
caaagcaaacacacattaagtaaagaacaaaaa

SEQ ID NO: 769743 - DNA, 33 bp, Homo sapien
ttagagtctgatcttacggtgatattggtctct

SEQ ID NO: 769744 - DNA, 33 bp, Homo sapien
ttagagtctgatcttatggtgatattggtctct

SEQ ID NO: 769745 - DNA, 33 bp, Homo sapien
actctgccaattttgacgggaaaccaaagtaca

SEQ ID NO: 769746 - DNA, 33 bp, Homo sapien
actctgccaattttgatgggaaaccaaagtaca

SEQ ID NO: 769747 - DNA, 33 bp, Homo sapien
actcattttatcattaactcaaaagtccacagt

SEQ ID NO: 769748 - DNA, 33 bp, Homo sapien
actcattttatcattagctcaaaagtccacagt

SEQ ID NO: 769749 - DNA, 33 bp, Homo sapien
attttgttctaccagtcaatttgatgtaggcag

SEQ ID NO: 769750 - DNA, 33 bp, Homo sapien
attttgttctaccagtgaatttgatgtaggcag

SEQ ID NO: 769751 - DNA, 33 bp, Homo sapien
ttgggatactgtggcacactaaatataaagtgt

SEQ ID NO: 769752 - DNA, 33 bp, Homo sapien
ttgggatactgtggcatactaaatataaagtgt

SEQ ID NO: 769753 - DNA, 33 bp, Homo sapien
aagcctcattttaagacgcaatgttgggcacac

SEQ ID NO: 769754 - DNA, 33 bp, Homo sapien
aagcctcattttaagatgcaatgttgggcacac

SEQ ID NO: 769755 - DNA, 33 bp, Homo sapien
aaatcagatagagataaaagtgccctgttagaa

SEQ ID NO: 769756 - DNA, 33 bp, Homo sapien
aaatcagatagagatagaagtgccctgttagaa

SEQ ID NO: 769757 - DNA, 33 bp, Homo sapien
agaagacagcacaaaaattcaagccacaaaagg

SEQ ID NO: 769758 - DNA, 33 bp, Homo sapien
agaagacagcacaaaacttcaagccacaaaagg

SEQ ID NO: 769759 - DNA, 33 bp, Homo sapien
gactatatatgagatacggaacaccctcagttc

SEQ ID NO: 769760 - DNA, 33 bp, Homo sapien
gactatatatgagatatggaacaccctcagttc

SEQ ID NO: 769761 - DNA, 33 bp, Homo sapien
gagaatactgtgaaagaaccctccagaaataac

SEQ ID NO: 769762 - DNA, 33 bp, Homo sapien
gagaatactgtgaaaggaccctccagaaataac

SEQ ID NO: 769763 - DNA, 33 bp, Homo sapien
ttagtttgttctctgacagcagaaggaggggtt

SEQ ID NO: 769764 - DNA, 33 bp, Homo sapien
ttagtttgttctctgatagcagaaggaggggtt

SEQ ID NO: 769765 - DNA, 33 bp, Homo sapien
tgaaaaaaagttcctacatgagcctgagccagg

SEQ ID NO: 769766 - DNA, 33 bp, Homo sapien
tgaaaaaaagttcctatatgagcctgagccagg

SEQ ID NO: 769767 - DNA, 33 bp, Homo sapien
ggggaacctggataacaagctacaggatccacc

SEQ ID NO: 769768 - DNA, 33 bp, Homo sapien
ggggaacctggataacgagctacaggatccacc

SEQ ID NO: 769769 - DNA, 33 bp, Homo sapien
cttagaatagttgaaacacttttgagttagaca

SEQ ID NO: 769770 - DNA, 33 bp, Homo sapien
cttagaatagttgaaagacttttgagttagaca

SEQ ID NO: 769771 - DNA, 33 bp, Homo sapien
tggtcatcaggctgttaaaaatatttcctgttc

SEQ ID NO: 769772 - DNA, 33 bp, Homo sapien
tggtcatcaggctgttgaaaatatttcctgttc

SEQ ID NO: 769773 - DNA, 33 bp, Homo sapien
gactatctactcctataagttcaccatcctcct

SEQ ID NO: 769774 - DNA, 33 bp, Homo sapien
gactatctactcctatgagttcaccatcctcct

SEQ ID NO: 769775 - DNA, 33 bp, Homo sapien
ttattatcctctgaaacgaagagggaacaacgg

SEQ ID NO: 769776 - DNA, 33 bp, Homo sapien
ttattatcctctgaaatgaagagggaacaacgg

SEQ ID NO: 769777 - DNA, 33 bp, Homo sapien
ttccactaaaactgtacgatatctggaaagagc

SEQ ID NO: 769778 - DNA, 33 bp, Homo sapien
ttccactaaaactgtatgatatctggaaagagc

SEQ ID NO: 769779 - DNA, 33 bp, Homo sapien
tccagataccatcacaatggaaattaagatttc

SEQ ID NO: 769780 - DNA, 33 bp, Homo sapien
tccagataccatcacactggaaattaagatttc

SEQ ID NO: 769781 - DNA, 33 bp, Homo sapien
aaggcccagttatagacgaagttctcaagttac

SEQ ID NO: 769782 - DNA, 33 bp, Homo sapien
aaggcccagttatagaggaagttctcaagttac

SEQ ID NO: 769783 - DNA, 33 bp, Homo sapien
acctttgttcaagaagactggtgaatatgtata

SEQ ID NO: 769784 - DNA, 33 bp, Homo sapien
acctttgttcaagaaggctggtgaatatgtata

SEQ ID NO: 769785 - DNA, 33 bp, Homo sapien
atcttatttaatactcaagaatggcttcaggta

SEQ ID NO: 769786 - DNA, 33 bp, Homo sapien
atcttatttaatactcgagaatggcttcaggta

SEQ ID NO: 769787 - DNA, 33 bp, Homo sapien
ggcttttgttataatgcagtgcgacactaaata

SEQ ID NO: 769788 - DNA, 33 bp, Homo sapien
ggcttttgttataatgtagtgcgacactaaata

SEQ ID NO: 769789 - DNA, 33 bp, Homo sapien
catagcgtggcagtccaaaactttttcagcagg

SEQ ID NO: 769790 - DNA, 33 bp, Homo sapien
catagcgtggcagtcccaaactttttcagcagg

SEQ ID NO: 769791 - DNA, 33 bp, Homo sapien
gcttagcaaagttgggcattaaaatgcttagaa

SEQ ID NO: 769792 - DNA, 33 bp, Homo sapien
gcttagcaaagttgggtattaaaatgcttagaa

SEQ ID NO: 769793 - DNA, 33 bp, Homo sapien
ctagcacttcaacatccctgattccccaggatc

SEQ ID NO: 769794 - DNA, 33 bp, Homo sapien
ctagcacttcaacatctctgattccccaggatc

SEQ ID NO: 769795 - DNA, 33 bp, Homo sapien
gatctaggagagaagacaaaaaatggtcacatt

SEQ ID NO: 769796 - DNA, 33 bp, Homo sapien
gatctaggagagaagataaaaaatggtcacatt

SEQ ID NO: 769797 - DNA, 33 bp, Homo sapien
ctttaatacaaaataaatgcatcaagggaaggg

SEQ ID NO: 769798 - DNA, 33 bp, Homo sapien
ctttaatacaaaataagtgcatcaagggaaggg

SEQ ID NO: 769799 - DNA, 33 bp, Homo sapien
ttctctgtgtggattgaaaaggggaactaacca

SEQ ID NO: 769800 - DNA, 33 bp, Homo sapien
ttctctgtgtggattggaaaggggaactaacca

SEQ ID NO: 769801 - DNA, 33 bp, Homo sapien
cagaaagctgcaagaagggcactttttgattca

SEQ ID NO: 769802 - DNA, 33 bp, Homo sapien
cagaaagctgcaagaatggcactttttgattca

SEQ ID NO: 769803 - DNA, 33 bp, Homo sapien
tattttgctaaattgaagtttgcaaaaggtcaa

SEQ ID NO: 769804 - DNA, 33 bp, Homo sapien
tattttgctaaattgaggtttgcaaaaggtcaa

SEQ ID NO: 769805 - DNA, 33 bp, Homo sapien
taactgctggatcagcaacgcctatttcaagta

SEQ ID NO: 769806 - DNA, 33 bp, Homo sapien
taactgctggatcagcgacgcctatttcaagta

SEQ ID NO: 769807 - DNA, 33 bp, Homo sapien
acaattagtaccaaaaccgatcaatttgtgaat

SEQ ID NO: 769808 - DNA, 33 bp, Homo sapien
acaattagtaccaaaatcgatcaatttgtgaat

SEQ ID NO: 769809 - DNA, 33 bp, Homo sapien
gtcctgatgcatcacgaaagtacggaaactcag

SEQ ID NO: 769810 - DNA, 33 bp, Homo sapien
gtcctgatgcatcacggaagtacggaaactcag

SEQ ID NO: 769811 - DNA, 33 bp, Homo sapien
tcttttctaacactccactatttctggagagta

SEQ ID NO: 769812 - DNA, 33 bp, Homo sapien
tcttttctaacactccgctatttctggagagta

SEQ ID NO: 769813 - DNA, 33 bp, Homo sapien
gattagcatcttactagatttaagccagactaa

SEQ ID NO: 769814 - DNA, 33 bp, Homo sapien
gattagcatcttactatatttaagccagactaa

SEQ ID NO: 769815 - DNA, 33 bp, Homo sapien
ctaaaacaatcacatactaggaggtcataaata

SEQ ID NO: 769816 - DNA, 33 bp, Homo sapien
ctaaaacaatcacatattaggaggtcataaata

SEQ ID NO: 769817 - DNA, 33 bp, Homo sapien
acatcttgtattctcaatcgaacttctgctaaa

SEQ ID NO: 769818 - DNA, 33 bp, Homo sapien
acatcttgtattctcagtcgaacttctgctaaa

SEQ ID NO: 769819 - DNA, 33 bp, Homo sapien
gcagaaattagaacaaacgaaccaataacaaca

SEQ ID NO: 769820 - DNA, 33 bp, Homo sapien
gcagaaattagaacaaccgaaccaataacaaca

SEQ ID NO: 769821 - DNA, 33 bp, Homo sapien
tatttttgttagtatgaacaataggtagtttca

SEQ ID NO: 769822 - DNA, 33 bp, Homo sapien
tatttttgttagtatgcacaataggtagtttca

SEQ ID NO: 769823 - DNA, 33 bp, Homo sapien
ccctgtccttgtaataaacttgcaacccttaaa

SEQ ID NO: 769824 - DNA, 33 bp, Homo sapien
ccctgtccttgtaatagacttgcaacccttaaa

SEQ ID NO: 769825 - DNA, 33 bp, Homo sapien
catgtggcttctgagcaaaagatataaattaca

SEQ ID NO: 769826 - DNA, 33 bp, Homo sapien
catgtggcttctgagccaaagatataaattaca

SEQ ID NO: 769827 - DNA, 33 bp, Homo sapien
aaatatatatctttacagcagactcctccccat

SEQ ID NO: 769828 - DNA, 33 bp, Homo sapien
aaatatatatctttacggcagactcctccccat

SEQ ID NO: 769829 - DNA, 33 bp, Homo sapien
gccacagaagcatatacagaggaggagataatt

SEQ ID NO: 769830 - DNA, 33 bp, Homo sapien
gccacagaagcatatagagaggaggagataatt

SEQ ID NO: 769831 - DNA, 33 bp, Homo sapien
tatcaaagtgaacaaacactgttgtggaagtta

SEQ ID NO: 769832 - DNA, 33 bp, Homo sapien
tatcaaagtgaacaaatactgttgtggaagtta

SEQ ID NO: 769833 - DNA, 33 bp, Homo sapien
tacacagtttcccctgcatggacgctctgccct

SEQ ID NO: 769834 - DNA, 33 bp, Homo sapien
tacacagtttcccctgtatggacgctctgccct

SEQ ID NO: 769835 - DNA, 33 bp, Homo sapien
gagattaaacacgtgaacattcaaatacatgaa

SEQ ID NO: 769836 - DNA, 33 bp, Homo sapien
gagattaaacacgtgatcattcaaatacatgaa

SEQ ID NO: 769837 - DNA, 33 bp, Homo sapien
cgttttccaaaggcaaccatttaagaatgaata

SEQ ID NO: 769838 - DNA, 33 bp, Homo sapien
cgttttccaaaggcaatcatttaagaatgaata

SEQ ID NO: 769839 - DNA, 33 bp, Homo sapien
ctgaaggagatgattaaaaggcctttcataaat

SEQ ID NO: 769840 - DNA, 33 bp, Homo sapien
ctgaaggagatgattagaaggcctttcataaat

SEQ ID NO: 769841 - DNA, 33 bp, Homo sapien
atatcagggttacaaaagaattgaatgaacatc

SEQ ID NO: 769842 - DNA, 33 bp, Homo sapien
atatcagggttacaaatgaattgaatgaacatc

SEQ ID NO: 769843 - DNA, 33 bp, Homo sapien
taggaagttttagtgacctaaggaatttgaatt

SEQ ID NO: 769844 - DNA, 33 bp, Homo sapien
taggaagttttagtgatctaaggaatttgaatt

SEQ ID NO: 769845 - DNA, 33 bp, Homo sapien
aaaggaaaagtcatcacatagaatccttttccc

SEQ ID NO: 769846 - DNA, 33 bp, Homo sapien
aaaggaaaagtcatcatatagaatccttttccc

SEQ ID NO: 769847 - DNA, 33 bp, Homo sapien
cagacactaactacaccgaggaagaaatactat

SEQ ID NO: 769848 - DNA, 33 bp, Homo sapien
cagacactaactacactgaggaagaaatactat

SEQ ID NO: 769849 - DNA, 33 bp, Homo sapien
ctcagctgaaggcagaatagcggcagggcaggt

SEQ ID NO: 769850 - DNA, 33 bp, Homo sapien
ctcagctgaaggcagagtagcggcagggcaggt

SEQ ID NO: 769851 - DNA, 33 bp, Homo sapien
ctcaacccaaaatttccaggtaggcctgggtag

SEQ ID NO: 769852 - DNA, 33 bp, Homo sapien
ctcaacccaaaatttctaggtaggcctgggtag

SEQ ID NO: 769853 - DNA, 33 bp, Homo sapien
taacaatgccttttcacgcactactgacttgca

SEQ ID NO: 769854 - DNA, 33 bp, Homo sapien
taacaatgccttttcatgcactactgacttgca

SEQ ID NO: 769855 - DNA, 33 bp, Homo sapien
taagaagcttgtgaaaggatattttcctatttg

SEQ ID NO: 769856 - DNA, 33 bp, Homo sapien
taagaagcttgtgaaatgatattttcctatttg

SEQ ID NO: 769857 - DNA, 33 bp, Homo sapien
caagtctcactctctccaaaacttaaagaaatt

SEQ ID NO: 769858 - DNA, 33 bp, Homo sapien
caagtctcactctctcgaaaacttaaagaaatt

SEQ ID NO: 769859 - DNA, 33 bp, Homo sapien
gcccctgtggcatagaacacccttttcatattt

SEQ ID NO: 769860 - DNA, 33 bp, Homo sapien
gcccctgtggcatagaccacccttttcatattt

SEQ ID NO: 769861 - DNA, 33 bp, Homo sapien
aagacaatgacctcagaatccatatattctcca

SEQ ID NO: 769862 - DNA, 33 bp, Homo sapien
aagacaatgacctcagtatccatatattctcca

SEQ ID NO: 769863 - DNA, 33 bp, Homo sapien
ttcatggtcactttaactacggccacatctcgg

SEQ ID NO: 769864 - DNA, 33 bp, Homo sapien
ttcatggtcactttaattacggccacatctcgg

SEQ ID NO: 769865 - DNA, 33 bp, Homo sapien
atgatgaagtccagtaagatattgtattttccc

SEQ ID NO: 769866 - DNA, 33 bp, Homo sapien
atgatgaagtccagtaggatattgtattttccc

SEQ ID NO: 769867 - DNA, 33 bp, Homo sapien
atctgggaaaattctgaaagaacacgtatcaat

SEQ ID NO: 769868 - DNA, 33 bp, Homo sapien
atctgggaaaattctggaagaacacgtatcaat

SEQ ID NO: 769869 - DNA, 33 bp, Homo sapien
cagatcatacaaaataaatgtagaaattgaata

SEQ ID NO: 769870 - DNA, 33 bp, Homo sapien
cagatcatacaaaatacatgtagaaattgaata

SEQ ID NO: 769871 - DNA, 33 bp, Homo sapien
aagtgtttgaaagagaagcttatcctggcaact

SEQ ID NO: 769872 - DNA, 33 bp, Homo sapien
aagtgtttgaaagagacgcttatcctggcaact

SEQ ID NO: 769873 - DNA, 33 bp, Homo sapien
ttatagctgatacatacggctactgaccattaa

SEQ ID NO: 769874 - DNA, 33 bp, Homo sapien
ttatagctgatacatatggctactgaccattaa

SEQ ID NO: 769875 - DNA, 33 bp, Homo sapien
caccagaagctaggaaaacagcatgagaaagag

SEQ ID NO: 769876 - DNA, 33 bp, Homo sapien
caccagaagctaggaagacagcatgagaaagag

SEQ ID NO: 769877 - DNA, 33 bp, Homo sapien
aaaaactctcattatcactaatcattacagaaa

SEQ ID NO: 769878 - DNA, 33 bp, Homo sapien
aaaaactctcattatcgctaatcattacagaaa

SEQ ID NO: 769879 - DNA, 33 bp, Homo sapien
ctacggtaatcaaaacagtatgatactggtaca

SEQ ID NO: 769880 - DNA, 33 bp, Homo sapien
ctacggtaatcaaaacggtatgatactggtaca

SEQ ID NO: 769881 - DNA, 33 bp, Homo sapien
cctgaacttacagatacggaaaccggaatctag

SEQ ID NO: 769882 - DNA, 33 bp, Homo sapien
cctgaacttacagatatggaaaccggaatctag

SEQ ID NO: 769883 - DNA, 33 bp, Homo sapien
gcctttaacagtaacacctcaatttctttacct

SEQ ID NO: 769884 - DNA, 33 bp, Homo sapien
gcctttaacagtaacatctcaatttctttacct

SEQ ID NO: 769885 - DNA, 33 bp, Homo sapien
gctctaaatgcaaaacccttttatactgaaaaa

SEQ ID NO: 769886 - DNA, 33 bp, Homo sapien
gctctaaatgcaaaactcttttatactgaaaaa

SEQ ID NO: 769887 - DNA, 33 bp, Homo sapien
tatgtgacccaaagaaagagttgtctcaactcc

SEQ ID NO: 769888 - DNA, 33 bp, Homo sapien
tatgtgacccaaagaaggagttgtctcaactcc

SEQ ID NO: 769889 - DNA, 33 bp, Homo sapien
aaactcaaaccaacagaaagatatcacaccttt

SEQ ID NO: 769890 - DNA, 33 bp, Homo sapien
aaactcaaaccaacaggaagatatcacaccttt

SEQ ID NO: 769891 - DNA, 33 bp, Homo sapien
atgttgtgtctatataaatatccaatgacacac

SEQ ID NO: 769892 - DNA, 33 bp, Homo sapien
atgttgtgtctatatacatatccaatgacacac

SEQ ID NO: 769893 - DNA, 33 bp, Homo sapien
gggttaaactgtaacactgtaatcggacgaaca

SEQ ID NO: 769894 - DNA, 33 bp, Homo sapien
gggttaaactgtaacattgtaatcggacgaaca

SEQ ID NO: 769895 - DNA, 33 bp, Homo sapien
agaatttcagtgctatcagactgggcagtagga

SEQ ID NO: 769896 - DNA, 33 bp, Homo sapien
agaatttcagtgctatgagactgggcagtagga

SEQ ID NO: 769897 - DNA, 33 bp, Homo sapien
ctaaagccaaatgtaaacatagttatgagtgtc

SEQ ID NO: 769898 - DNA, 33 bp, Homo sapien
ctaaagccaaatgtaatcatagttatgagtgtc

SEQ ID NO: 769899 - DNA, 33 bp, Homo sapien
gaagagaaatgaaaacacagaggtagaggagaa

SEQ ID NO: 769900 - DNA, 33 bp, Homo sapien
gaagagaaatgaaaacccagaggtagaggagaa

SEQ ID NO: 769901 - DNA, 33 bp, Homo sapien
tttttgcatccattcagcaataaacaaatattt

SEQ ID NO: 769902 - DNA, 33 bp, Homo sapien
tttttgcatccattcatcaataaacaaatattt

SEQ ID NO: 769903 - DNA, 33 bp, Homo sapien
ggagaacatggtaagactagtgaagtctatgag

SEQ ID NO: 769904 - DNA, 33 bp, Homo sapien
ggagaacatggtaagattagtgaagtctatgag

SEQ ID NO: 769905 - DNA, 33 bp, Homo sapien
tttaggccaaattcaccagttcactggcctgcc

SEQ ID NO: 769906 - DNA, 33 bp, Homo sapien
tttaggccaaattcacgagttcactggcctgcc

SEQ ID NO: 769907 - DNA, 33 bp, Homo sapien
acttttgtgaaggaaccaactgttttcataaat

SEQ ID NO: 769908 - DNA, 33 bp, Homo sapien
acttttgtgaaggaacgaactgttttcataaat

SEQ ID NO: 769909 - DNA, 33 bp, Homo sapien
gtcacagtctatgtcacggtgtaatgtagacag

SEQ ID NO: 769910 - DNA, 33 bp, Homo sapien
gtcacagtctatgtcatggtgtaatgtagacag

SEQ ID NO: 769911 - DNA, 33 bp, Homo sapien
atgggacttaggccgccctctgataaagtaact

SEQ ID NO: 769912 - DNA, 33 bp, Homo sapien
atgggacttaggccgctctctgataaagtaact

SEQ ID NO: 769913 - DNA, 33 bp, Homo sapien
gcaactgcgatgtcaactagcttaaggataaag

SEQ ID NO: 769914 - DNA, 33 bp, Homo sapien
gcaactgcgatgtcaattagcttaaggataaag

SEQ ID NO: 769915 - DNA, 33 bp, Homo sapien
taccatctacactcaaaggtttaattttgctag

SEQ ID NO: 769916 - DNA, 33 bp, Homo sapien
taccatctacactcaagggtttaattttgctag

SEQ ID NO: 769917 - DNA, 33 bp, Homo sapien
tgtctaatggttaggaagatgacacgttgctgc

SEQ ID NO: 769918 - DNA, 33 bp, Homo sapien
tgtctaatggttaggaggatgacacgttgctgc

SEQ ID NO: 769919 - DNA, 33 bp, Homo sapien
aagccagtagtatatcacagtgcctaagagctt

SEQ ID NO: 769920 - DNA, 33 bp, Homo sapien
aagccagtagtatatcgcagtgcctaagagctt

SEQ ID NO: 769921 - DNA, 33 bp, Homo sapien
attattcatcataaacacaatgctaagaaatgg

SEQ ID NO: 769922 - DNA, 33 bp, Homo sapien
attattcatcataaacgcaatgctaagaaatgg

SEQ ID NO: 769923 - DNA, 33 bp, Homo sapien
agtggcatgaatcctgaattacctacataagaa

SEQ ID NO: 769924 - DNA, 33 bp, Homo sapien
agtggcatgaatcctgcattacctacataagaa

SEQ ID NO: 769925 - DNA, 33 bp, Homo sapien
cagtaataaagaggcaaggccactaaggaggaa

SEQ ID NO: 769926 - DNA, 33 bp, Homo sapien
cagtaataaagaggcagggccactaaggaggaa

SEQ ID NO: 769927 - DNA, 33 bp, Homo sapien
tgactgtacataaaacaacctcattttccccca

SEQ ID NO: 769928 - DNA, 33 bp, Homo sapien
tgactgtacataaaacgacctcattttccccca

SEQ ID NO: 769929 - DNA, 33 bp, Homo sapien
aattaggtattttaaaagtgaaagcagtttggc

SEQ ID NO: 769930 - DNA, 33 bp, Homo sapien
aattaggtattttaaaggtgaaagcagtttggc

SEQ ID NO: 769931 - DNA, 33 bp, Homo sapien
tctctattaaaaacctaaaaatcagctggatat

SEQ ID NO: 769932 - DNA, 33 bp, Homo sapien
tctctattaaaaacctgaaaatcagctggatat

SEQ ID NO: 769933 - DNA, 33 bp, Homo sapien
tcataagaagaggctaggacatcaccaagaggc

SEQ ID NO: 769934 - DNA, 33 bp, Homo sapien
tcataagaagaggctatgacatcaccaagaggc

SEQ ID NO: 769935 - DNA, 33 bp, Homo sapien
actctttcttctctaaacctggctttttctatg

SEQ ID NO: 769936 - DNA, 33 bp, Homo sapien
actctttcttctctaaccctggctttttctatg

SEQ ID NO: 769937 - DNA, 33 bp, Homo sapien
ttctgcttagctgataaagagctttgatcaatg

SEQ ID NO: 769938 - DNA, 33 bp, Homo sapien
ttctgcttagctgatagagagctttgatcaatg

SEQ ID NO: 769939 - DNA, 33 bp, Homo sapien
caagctagataaaacaagtgctttccttccaga

SEQ ID NO: 769940 - DNA, 33 bp, Homo sapien
caagctagataaaacaggtgctttccttccaga

SEQ ID NO: 769941 - DNA, 33 bp, Homo sapien
cacttctgctttccccaaaggcattactgactc

SEQ ID NO: 769942 - DNA, 33 bp, Homo sapien
cacttctgctttccccgaaggcattactgactc

SEQ ID NO: 769943 - DNA, 33 bp, Homo sapien
gacacaggtatggctaacagaaatgcataacta

SEQ ID NO: 769944 - DNA, 33 bp, Homo sapien
gacacaggtatggctagcagaaatgcataacta

SEQ ID NO: 769945 - DNA, 33 bp, Homo sapien
ttttgggtaattccaacggataatcaaatcaag

SEQ ID NO: 769946 - DNA, 33 bp, Homo sapien
ttttgggtaattccaatggataatcaaatcaag

SEQ ID NO: 769947 - DNA, 33 bp, Homo sapien
gtgatcaaaatggctacgtttcactaatcttca

SEQ ID NO: 769948 - DNA, 33 bp, Homo sapien
gtgatcaaaatggctatgtttcactaatcttca

SEQ ID NO: 769949 - DNA, 33 bp, Homo sapien
gggacatcctcaaaaaagatgaaatgtaaacca

SEQ ID NO: 769950 - DNA, 33 bp, Homo sapien
gggacatcctcaaaaatgatgaaatgtaaacca

SEQ ID NO: 769951 - DNA, 33 bp, Homo sapien
ggtggatcagattatacatgcaatccctagtga

SEQ ID NO: 769952 - DNA, 33 bp, Homo sapien
ggtggatcagattatatatgcaatccctagtga

SEQ ID NO: 769953 - DNA, 33 bp, Homo sapien
gatattgaaaacttcccctaagtatgcagctag

SEQ ID NO: 769954 - DNA, 33 bp, Homo sapien
gatattgaaaacttccgctaagtatgcagctag

SEQ ID NO: 769955 - DNA, 33 bp, Homo sapien
tatcatcaatttggagccctgatcaatcacttt

SEQ ID NO: 769956 - DNA, 33 bp, Homo sapien
tatcatcaatttggaggcctgatcaatcacttt

SEQ ID NO: 769957 - DNA, 33 bp, Homo sapien
ggccctgaacctttcaccttgttatatcacatc

SEQ ID NO: 769958 - DNA, 33 bp, Homo sapien
ggccctgaacctttcagcttgttatatcacatc

SEQ ID NO: 769959 - DNA, 33 bp, Homo sapien
ggaatatgttttatcgaagcagcagcaaatgca

SEQ ID NO: 769960 - DNA, 33 bp, Homo sapien
ggaatatgttttatcgtagcagcagcaaatgca

SEQ ID NO: 769961 - DNA, 33 bp, Homo sapien
tcccaggcttttagaaatggaatgccatcacag

SEQ ID NO: 769962 - DNA, 33 bp, Homo sapien
tcccaggcttttagaagtggaatgccatcacag

SEQ ID NO: 769963 - DNA, 33 bp, Homo sapien
ttcttgtatgaatactcacctttgcttaaaagt

SEQ ID NO: 769964 - DNA, 33 bp, Homo sapien
ttcttgtatgaatacttacctttgcttaaaagt

SEQ ID NO: 769965 - DNA, 33 bp, Homo sapien
gaaagtttctcggcagcaaagtttataacatct

SEQ ID NO: 769966 - DNA, 33 bp, Homo sapien
gaaagtttctcggcagtaaagtttataacatct

SEQ ID NO: 769967 - DNA, 33 bp, Homo sapien
agaatctcttgtcagacatgtatctcaatgcta

SEQ ID NO: 769968 - DNA, 33 bp, Homo sapien
agaatctcttgtcagatatgtatctcaatgcta

SEQ ID NO: 769969 - DNA, 33 bp, Homo sapien
ctcggtaaggaagccacatctaccttttattag

SEQ ID NO: 769970 - DNA, 33 bp, Homo sapien
ctcggtaaggaagccagatctaccttttattag

SEQ ID NO: 769971 - DNA, 33 bp, Homo sapien
atagacttggaagacaacctccattagccaaac

SEQ ID NO: 769972 - DNA, 33 bp, Homo sapien
atagacttggaagacatcctccattagccaaac

SEQ ID NO: 769973 - DNA, 33 bp, Homo sapien
catatgtttgtgtgagaagatctttgtaagttt

SEQ ID NO: 769974 - DNA, 33 bp, Homo sapien
catatgtttgtgtgagcagatctttgtaagttt

SEQ ID NO: 769975 - DNA, 33 bp, Homo sapien
agataaaaatgtgcccaaatcagtaatcaaaga

SEQ ID NO: 769976 - DNA, 33 bp, Homo sapien
agataaaaatgtgccccaatcagtaatcaaaga

SEQ ID NO: 769977 - DNA, 33 bp, Homo sapien
tttatatttcacttcaaaaggttgaactagata

SEQ ID NO: 769978 - DNA, 33 bp, Homo sapien
tttatatttcacttcacaaggttgaactagata

SEQ ID NO: 769979 - DNA, 33 bp, Homo sapien
tagttgatataaaaaagaaatctctcaagcata

SEQ ID NO: 769980 - DNA, 33 bp, Homo sapien
tagttgatataaaaaataaatctctcaagcata

SEQ ID NO: 769981 - DNA, 33 bp, Homo sapien
attcattgatcatttcccaaaagtaacacagga

SEQ ID NO: 769982 - DNA, 33 bp, Homo sapien
attcattgatcatttctcaaaagtaacacagga

SEQ ID NO: 769983 - DNA, 33 bp, Homo sapien
atgaagtggagctaggaaccaggagatgtcctt

SEQ ID NO: 769984 - DNA, 33 bp, Homo sapien
atgaagtggagctagggaccaggagatgtcctt

SEQ ID NO: 769985 - DNA, 33 bp, Homo sapien
gttcaacatcttgttacactcttctctttaggc

SEQ ID NO: 769986 - DNA, 33 bp, Homo sapien
gttcaacatcttgttatactcttctctttaggc

SEQ ID NO: 769987 - DNA, 33 bp, Homo sapien
ctaagcagatgtttaaccaggacatccatccat

SEQ ID NO: 769988 - DNA, 33 bp, Homo sapien
ctaagcagatgtttaatcaggacatccatccat

SEQ ID NO: 769989 - DNA, 33 bp, Homo sapien
ggagactgagttccaaataaagccagaactgac

SEQ ID NO: 769990 - DNA, 33 bp, Homo sapien
ggagactgagttccaactaaagccagaactgac

SEQ ID NO: 769991 - DNA, 33 bp, Homo sapien
tagcagtgaagtgacacgatcagatttaagttt

SEQ ID NO: 769992 - DNA, 33 bp, Homo sapien
tagcagtgaagtgacatgatcagatttaagttt

SEQ ID NO: 769993 - DNA, 33 bp, Homo sapien
tatagaattatgtgcccagttcccattaaatgt

SEQ ID NO: 769994 - DNA, 33 bp, Homo sapien
tatagaattatgtgccgagttcccattaaatgt

SEQ ID NO: 769995 - DNA, 33 bp, Homo sapien
atagataggcatggcacgaaaaggaggaaagga

SEQ ID NO: 769996 - DNA, 33 bp, Homo sapien
atagataggcatggcatgaaaaggaggaaagga

SEQ ID NO: 769997 - DNA, 33 bp, Homo sapien
atggaatctagtcctccaacccttcaccctgca

SEQ ID NO: 769998 - DNA, 33 bp, Homo sapien
atggaatctagtcctctaacccttcaccctgca

SEQ ID NO: 769999 - DNA, 33 bp, Homo sapien
aatagtctttgataaagaatttgcaggctcaca

SEQ ID NO: 770000 - DNA, 33 bp, Homo sapien
aatagtctttgataaataatttgcaggctcaca

SEQ ID NO: 770001 - DNA, 33 bp, Homo sapien
gctacctagctacaaactatacagtaagaggtt

SEQ ID NO: 770002 - DNA, 33 bp, Homo sapien
gctacctagctacaaattatacagtaagaggtt

SEQ ID NO: 770003 - DNA, 33 bp, Homo sapien
aaagctgtattttaaactcatctattccagaag

SEQ ID NO: 770004 - DNA, 33 bp, Homo sapien
aaagctgtattttaaattcatctattccagaag

SEQ ID NO: 770005 - DNA, 33 bp, Homo sapien
tgaaggagtatagaaacgctcagctatgattca

SEQ ID NO: 770006 - DNA, 33 bp, Homo sapien
tgaaggagtatagaaaggctcagctatgattca

SEQ ID NO: 770007 - DNA, 33 bp, Homo sapien
tctaatgttgatgaagcaaagctttattaaggc

SEQ ID NO: 770008 - DNA, 33 bp, Homo sapien
tctaatgttgatgaagtaaagctttattaaggc

SEQ ID NO: 770009 - DNA, 33 bp, Homo sapien
ccaaaaccacttcgaaattagacacacttaaaa

SEQ ID NO: 770010 - DNA, 33 bp, Homo sapien
ccaaaaccacttcgaagttagacacacttaaaa

SEQ ID NO: 770011 - DNA, 33 bp, Homo sapien
aaaggacaagtagggcaaataagagaaatgcga

SEQ ID NO: 770012 - DNA, 33 bp, Homo sapien
aaaggacaagtagggccaataagagaaatgcga

SEQ ID NO: 770013 - DNA, 33 bp, Homo sapien
tagaatatgccattagacatcaagcctaaagcc

SEQ ID NO: 770014 - DNA, 33 bp, Homo sapien
tagaatatgccattagccatcaagcctaaagcc

SEQ ID NO: 770015 - DNA, 33 bp, Homo sapien
cgttaacatctgtcaccacaactcttttcatct

SEQ ID NO: 770016 - DNA, 33 bp, Homo sapien
cgttaacatctgtcactacaactcttttcatct

SEQ ID NO: 770017 - DNA, 33 bp, Homo sapien
gttttttcaatgcaaacaataccagtgcctacc

SEQ ID NO: 770018 - DNA, 33 bp, Homo sapien
gttttttcaatgcaaagaataccagtgcctacc

SEQ ID NO: 770019 - DNA, 33 bp, Homo sapien
aagtttgtgcaatcaaatcagattattttaatt

SEQ ID NO: 770020 - DNA, 33 bp, Homo sapien
aagtttgtgcaatcaagtcagattattttaatt

SEQ ID NO: 770021 - DNA, 33 bp, Homo sapien
cactataatcacctcaaatcagattttgaatga

SEQ ID NO: 770022 - DNA, 33 bp, Homo sapien
cactataatcacctcagatcagattttgaatga

SEQ ID NO: 770023 - DNA, 33 bp, Homo sapien
tttatttcaggaataacgtgctaaagtaaccat

SEQ ID NO: 770024 - DNA, 33 bp, Homo sapien
tttatttcaggaataatgtgctaaagtaaccat

SEQ ID NO: 770025 - DNA, 33 bp, Homo sapien
atttggcaaggactgaactagatatcagtgata

SEQ ID NO: 770026 - DNA, 33 bp, Homo sapien
atttggcaaggactgagctagatatcagtgata

SEQ ID NO: 770027 - DNA, 33 bp, Homo sapien
accctttccaaaatgcaccctagctcaataaac

SEQ ID NO: 770028 - DNA, 33 bp, Homo sapien
accctttccaaaatgcgccctagctcaataaac

SEQ ID NO: 770029 - DNA, 33 bp, Homo sapien
gaatgttctaaaggtcacattggctgatgtaca

SEQ ID NO: 770030 - DNA, 33 bp, Homo sapien
gaatgttctaaaggtctcattggctgatgtaca

SEQ ID NO: 770031 - DNA, 33 bp, Homo sapien
aatctatggtagtgtacaataaagtcccaggcc

SEQ ID NO: 770032 - DNA, 33 bp, Homo sapien
aatctatggtagtgtataataaagtcccaggcc

SEQ ID NO: 770033 - DNA, 33 bp, Homo sapien
aaccaaactgtacctgaaggacctatagttcca

SEQ ID NO: 770034 - DNA, 33 bp, Homo sapien
aaccaaactgtacctggaggacctatagttcca

SEQ ID NO: 770035 - DNA, 33 bp, Homo sapien
gaaagctaagagcacaaatataaccagtagttt

SEQ ID NO: 770036 - DNA, 33 bp, Homo sapien
gaaagctaagagcacagatataaccagtagttt

SEQ ID NO: 770037 - DNA, 33 bp, Homo sapien
tattgccttttcattcactttgtattgatatat

SEQ ID NO: 770038 - DNA, 33 bp, Homo sapien
tattgccttttcattcgctttgtattgatatat

SEQ ID NO: 770039 - DNA, 33 bp, Homo sapien
ttggagtgtactctcacctctgtgcttacaaca

SEQ ID NO: 770040 - DNA, 33 bp, Homo sapien
ttggagtgtactctcatctctgtgcttacaaca

SEQ ID NO: 770041 - DNA, 33 bp, Homo sapien
tctgtttttagtcccaatgcctttgatattcaa

SEQ ID NO: 770042 - DNA, 33 bp, Homo sapien
tctgtttttagtcccagtgcctttgatattcaa

SEQ ID NO: 770043 - DNA, 33 bp, Homo sapien
tatttggaaattgtggaaccaacattaaattag

SEQ ID NO: 770044 - DNA, 33 bp, Homo sapien
tatttggaaattgtgggaccaacattaaattag

SEQ ID NO: 770045 - DNA, 33 bp, Homo sapien
tgaagccatgagaaagcataccaacctagaccc

SEQ ID NO: 770046 - DNA, 33 bp, Homo sapien
tgaagccatgagaaagtataccaacctagaccc

SEQ ID NO: 770047 - DNA, 33 bp, Homo sapien
gcatgacaacaggactaaaaaagagtgagtgaa

SEQ ID NO: 770048 - DNA, 33 bp, Homo sapien
gcatgacaacaggactgaaaaagagtgagtgaa

SEQ ID NO: 770049 - DNA, 33 bp, Homo sapien
tttctggcaatgtctacagaaacaagttgaagt

SEQ ID NO: 770050 - DNA, 33 bp, Homo sapien
tttctggcaatgtctatagaaacaagttgaagt

SEQ ID NO: 770051 - DNA, 33 bp, Homo sapien
aacctatgaagtgcccaaaagtgggttattctc

SEQ ID NO: 770052 - DNA, 33 bp, Homo sapien
aacctatgaagtgcccgaaagtgggttattctc

SEQ ID NO: 770053 - DNA, 33 bp, Homo sapien
agctgccccttactaaaacatacattttttcat

SEQ ID NO: 770054 - DNA, 33 bp, Homo sapien
agctgccccttactaagacatacattttttcat

SEQ ID NO: 770055 - DNA, 33 bp, Homo sapien
cctggagctgtagttcacaaatcctttcagaat

SEQ ID NO: 770056 - DNA, 33 bp, Homo sapien
cctggagctgtagttcgcaaatcctttcagaat

SEQ ID NO: 770057 - DNA, 33 bp, Homo sapien
aatagaaaatgagagaaatattctgcataaggt

SEQ ID NO: 770058 - DNA, 33 bp, Homo sapien
aatagaaaatgagagagatattctgcataaggt

SEQ ID NO: 770059 - DNA, 33 bp, Homo sapien
tttgaatccttcactcaaatggttaagaactca

SEQ ID NO: 770060 - DNA, 33 bp, Homo sapien
tttgaatccttcactcgaatggttaagaactca

SEQ ID NO: 770061 - DNA, 33 bp, Homo sapien
atcccagccagagtaactcttcctgatgggttt

SEQ ID NO: 770062 - DNA, 33 bp, Homo sapien
atcccagccagagtaagtcttcctgatgggttt

SEQ ID NO: 770063 - DNA, 33 bp, Homo sapien
aactaccaacttagtcaaggacataacttcttt

SEQ ID NO: 770064 - DNA, 33 bp, Homo sapien
aactaccaacttagtcgaggacataacttcttt

SEQ ID NO: 770065 - DNA, 33 bp, Homo sapien
atggcctaccatcttacccatagcattattaag

SEQ ID NO: 770066 - DNA, 33 bp, Homo sapien
atggcctaccatcttatccatagcattattaag

SEQ ID NO: 770067 - DNA, 33 bp, Homo sapien
ggctagctactgagaaaggaaaggtgctcatac

SEQ ID NO: 770068 - DNA, 33 bp, Homo sapien
ggctagctactgagaagggaaaggtgctcatac

SEQ ID NO: 770069 - DNA, 33 bp, Homo sapien
ctgtcgcttatgctggcagttgtagaatggagc

SEQ ID NO: 770070 - DNA, 33 bp, Homo sapien
ctgtcgcttatgctgggagttgtagaatggagc

SEQ ID NO: 770071 - DNA, 33 bp, Homo sapien
gcctccaaagagccaaaagaccccattggccca

SEQ ID NO: 770072 - DNA, 33 bp, Homo sapien
gcctccaaagagccaagagaccccattggccca

SEQ ID NO: 770073 - DNA, 33 bp, Homo sapien
ttcataagtagatatacgctgcagtttcatttg

SEQ ID NO: 770074 - DNA, 33 bp, Homo sapien
ttcataagtagatatatgctgcagtttcatttg

SEQ ID NO: 770075 - DNA, 33 bp, Homo sapien
tactcacaatttcacaagccaagagaatgataa

SEQ ID NO: 770076 - DNA, 33 bp, Homo sapien
tactcacaatttcacacgccaagagaatgataa

SEQ ID NO: 770077 - DNA, 33 bp, Homo sapien
ttaaaccttgagcacaaccttatgtctttagga

SEQ ID NO: 770078 - DNA, 33 bp, Homo sapien
ttaaaccttgagcacatccttatgtctttagga

SEQ ID NO: 770079 - DNA, 33 bp, Homo sapien
ttcaataactagaaggccaaaatacaattacat

SEQ ID NO: 770080 - DNA, 33 bp, Homo sapien
ttcaataactagaaggtcaaaatacaattacat

SEQ ID NO: 770081 - DNA, 33 bp, Homo sapien
tgtcatttgttctccaactgcagggactgttct

SEQ ID NO: 770082 - DNA, 33 bp, Homo sapien
tgtcatttgttctccacctgcagggactgttct

SEQ ID NO: 770083 - DNA, 33 bp, Homo sapien
aaccgtgggaaaagaaataatggtgttgggaaa

SEQ ID NO: 770084 - DNA, 33 bp, Homo sapien
aaccgtgggaaaagaagtaatggtgttgggaaa

SEQ ID NO: 770085 - DNA, 33 bp, Homo sapien
tttatgccatctgccaaagagtattacacacca

SEQ ID NO: 770086 - DNA, 33 bp, Homo sapien
tttatgccatctgccacagagtattacacacca

SEQ ID NO: 770087 - DNA, 33 bp, Homo sapien
tcaggattcccaggcactatgtccttgttcctg

SEQ ID NO: 770088 - DNA, 33 bp, Homo sapien
tcaggattcccaggcattatgtccttgttcctg

SEQ ID NO: 770089 - DNA, 33 bp, Homo sapien
actccagaatttcttacaaatcaaaggaagctg

SEQ ID NO: 770090 - DNA, 33 bp, Homo sapien
actccagaatttcttataaatcaaaggaagctg

SEQ ID NO: 770091 - DNA, 33 bp, Homo sapien
taaaactgagctcagacgagtaaagtgttgtag

SEQ ID NO: 770092 - DNA, 33 bp, Homo sapien
taaaactgagctcagatgagtaaagtgttgtag

SEQ ID NO: 770093 - DNA, 33 bp, Homo sapien
ctactttgaatttccaagagtaatagtattatg

SEQ ID NO: 770094 - DNA, 33 bp, Homo sapien
ctactttgaatttccaggagtaatagtattatg

SEQ ID NO: 770095 - DNA, 33 bp, Homo sapien
ctaagggacacagctgaatgacataatgtggac

SEQ ID NO: 770096 - DNA, 33 bp, Homo sapien
ctaagggacacagctggatgacataatgtggac

SEQ ID NO: 770097 - DNA, 33 bp, Homo sapien
gtagaattgacaggaactgactaagggacacag

SEQ ID NO: 770098 - DNA, 33 bp, Homo sapien
gtagaattgacaggaagtgactaagggacacag

SEQ ID NO: 770099 - DNA, 33 bp, Homo sapien
agaccaaactgattgcagagttacattccttag

SEQ ID NO: 770100 - DNA, 33 bp, Homo sapien
agaccaaactgattgccgagttacattccttag

SEQ ID NO: 770101 - DNA, 33 bp, Homo sapien
ccactgacagcttgcaacgagtgcctggaaaag

SEQ ID NO: 770102 - DNA, 33 bp, Homo sapien
ccactgacagcttgcaccgagtgcctggaaaag

SEQ ID NO: 770103 - DNA, 33 bp, Homo sapien
gaacacaagccagtggcatcggatggatcctgg

SEQ ID NO: 770104 - DNA, 33 bp, Homo sapien
gaacacaagccagtgggatcggatggatcctgg

SEQ ID NO: 770105 - DNA, 33 bp, Homo sapien
ttcaggtttattgatactaagttgcacagagtg

SEQ ID NO: 770106 - DNA, 33 bp, Homo sapien
ttcaggtttattgatattaagttgcacagagtg

SEQ ID NO: 770107 - DNA, 33 bp, Homo sapien
tactgtgtcccctaaaaagagatgttgaagtcc

SEQ ID NO: 770108 - DNA, 33 bp, Homo sapien
tactgtgtcccctaaagagagatgttgaagtcc

SEQ ID NO: 770109 - DNA, 33 bp, Homo sapien
gggcaaacaatcattcccagagatagtgcagtt

SEQ ID NO: 770110 - DNA, 33 bp, Homo sapien
gggcaaacaatcattctcagagatagtgcagtt

SEQ ID NO: 770111 - DNA, 33 bp, Homo sapien
tatgaaatcaggaccaataatgcccaccttcta

SEQ ID NO: 770112 - DNA, 33 bp, Homo sapien
tatgaaatcaggaccagtaatgcccaccttcta

SEQ ID NO: 770113 - DNA, 33 bp, Homo sapien
acatgaggtattaagaaatggtgagtaggaagg

SEQ ID NO: 770114 - DNA, 33 bp, Homo sapien
acatgaggtattaagacatggtgagtaggaagg

SEQ ID NO: 770115 - DNA, 33 bp, Homo sapien
agatccagctttgtaacctcattttagcctcta

SEQ ID NO: 770116 - DNA, 33 bp, Homo sapien
agatccagctttgtaatctcattttagcctcta

SEQ ID NO: 770117 - DNA, 33 bp, Homo sapien
agtaattattgtctacagcagctttgacactcc

SEQ ID NO: 770118 - DNA, 33 bp, Homo sapien
agtaattattgtctactgcagctttgacactcc

SEQ ID NO: 770119 - DNA, 33 bp, Homo sapien
ccagtgtcactattcaataacatcatcaaagaa

SEQ ID NO: 770120 - DNA, 33 bp, Homo sapien
ccagtgtcactattcagtaacatcatcaaagaa

SEQ ID NO: 770121 - DNA, 33 bp, Homo sapien
tatacagacaacttgccagaaaaaaagtaaaaa

SEQ ID NO: 770122 - DNA, 33 bp, Homo sapien
tatacagacaacttgctagaaaaaaagtaaaaa

SEQ ID NO: 770123 - DNA, 33 bp, Homo sapien
actaagaggtgacaagcctaagggccaaaggcc

SEQ ID NO: 770124 - DNA, 33 bp, Homo sapien
actaagaggtgacaagtctaagggccaaaggcc

SEQ ID NO: 770125 - DNA, 33 bp, Homo sapien
agatatcatgtccttacgtagtagcatctaaac

SEQ ID NO: 770126 - DNA, 33 bp, Homo sapien
agatatcatgtccttatgtagtagcatctaaac

SEQ ID NO: 770127 - DNA, 33 bp, Homo sapien
atttgtgtattttaaaaaacaggacttctgagg

SEQ ID NO: 770128 - DNA, 33 bp, Homo sapien
atttgtgtattttaaagaacaggacttctgagg

SEQ ID NO: 770129 - DNA, 33 bp, Homo sapien
ttccataacttcccacagaataagcactcacca

SEQ ID NO: 770130 - DNA, 33 bp, Homo sapien
ttccataacttcccacggaataagcactcacca

SEQ ID NO: 770131 - DNA, 33 bp, Homo sapien
aaccatattaatgcccaagtgctcaaagctagg

SEQ ID NO: 770132 - DNA, 33 bp, Homo sapien
aaccatattaatgcccgagtgctcaaagctagg

SEQ ID NO: 770133 - DNA, 33 bp, Homo sapien
gcagaagttggagcatcatgaatggatttccat

SEQ ID NO: 770134 - DNA, 33 bp, Homo sapien
gcagaagttggagcattatgaatggatttccat

SEQ ID NO: 770135 - DNA, 33 bp, Homo sapien
attaaaaagagtcagaaaaatgagtttcagcca

SEQ ID NO: 770136 - DNA, 33 bp, Homo sapien
attaaaaagagtcagacaaatgagtttcagcca

SEQ ID NO: 770137 - DNA, 33 bp, Homo sapien
gaagagtcttctaatccatcaaaaaaccattct

SEQ ID NO: 770138 - DNA, 33 bp, Homo sapien
gaagagtcttctaatctatcaaaaaaccattct

SEQ ID NO: 770139 - DNA, 33 bp, Homo sapien
tattttgccatattgccagttaggaggctatgg

SEQ ID NO: 770140 - DNA, 33 bp, Homo sapien
tattttgccatattgctagttaggaggctatgg

SEQ ID NO: 770141 - DNA, 33 bp, Homo sapien
gagcaaaagagatttcaacgttcatcaaagtat

SEQ ID NO: 770142 - DNA, 33 bp, Homo sapien
gagcaaaagagatttccacgttcatcaaagtat

SEQ ID NO: 770143 - DNA, 33 bp, Homo sapien
tttctgaacctaagataaaccttgaggatggtg

SEQ ID NO: 770144 - DNA, 33 bp, Homo sapien
tttctgaacctaagatcaaccttgaggatggtg

SEQ ID NO: 770145 - DNA, 33 bp, Homo sapien
gtagtcattttcttggacaacattactctgttt

SEQ ID NO: 770146 - DNA, 33 bp, Homo sapien
gtagtcattttcttgggcaacattactctgttt

SEQ ID NO: 770147 - DNA, 33 bp, Homo sapien
acttcttgttatgacaaacagagtggtgacttg

SEQ ID NO: 770148 - DNA, 33 bp, Homo sapien
acttcttgttatgacagacagagtggtgacttg

SEQ ID NO: 770149 - DNA, 33 bp, Homo sapien
ggaaaaggaagcattccatagtccgatgagtaa

SEQ ID NO: 770150 - DNA, 33 bp, Homo sapien
ggaaaaggaagcattctatagtccgatgagtaa

SEQ ID NO: 770151 - DNA, 33 bp, Homo sapien
ctatatttttgcaatgaagagttggtgccactt

SEQ ID NO: 770152 - DNA, 33 bp, Homo sapien
ctatatttttgcaatggagagttggtgccactt

SEQ ID NO: 770153 - DNA, 33 bp, Homo sapien
actctgaaatgctcacacttaacctctacaact

SEQ ID NO: 770154 - DNA, 33 bp, Homo sapien
actctgaaatgctcacgcttaacctctacaact

SEQ ID NO: 770155 - DNA, 33 bp, Homo sapien
agatgtggagcctttgaaggggggcagtaatta

SEQ ID NO: 770156 - DNA, 33 bp, Homo sapien
agatgtggagcctttggaggggggcagtaatta

SEQ ID NO: 770157 - DNA, 33 bp, Homo sapien
ccagaaaaagctttggaatttctgtctttcaaa

SEQ ID NO: 770158 - DNA, 33 bp, Homo sapien
ccagaaaaagctttgggatttctgtctttcaaa

SEQ ID NO: 770159 - DNA, 33 bp, Homo sapien
gaagtaatttaacacaacagtgctgcagtttaa

SEQ ID NO: 770160 - DNA, 33 bp, Homo sapien
gaagtaatttaacacatcagtgctgcagtttaa

SEQ ID NO: 770161 - DNA, 33 bp, Homo sapien
tttcaaattttggatcaatttcttagtaatttt

SEQ ID NO: 770162 - DNA, 33 bp, Homo sapien
tttcaaattttggatccatttcttagtaatttt

SEQ ID NO: 770163 - DNA, 33 bp, Homo sapien
tgtctactttcctacacctctacccctagctac

SEQ ID NO: 770164 - DNA, 33 bp, Homo sapien
tgtctactttcctacatctctacccctagctac

SEQ ID NO: 770165 - DNA, 33 bp, Homo sapien
aaacgtgagtttggacacataagtaatattatt

SEQ ID NO: 770166 - DNA, 33 bp, Homo sapien
aaacgtgagtttggacgcataagtaatattatt

SEQ ID NO: 770167 - DNA, 33 bp, Homo sapien
cctaaaatgcttcccacgtggatttttaaaaag

SEQ ID NO: 770168 - DNA, 33 bp, Homo sapien
cctaaaatgcttcccatgtggatttttaaaaag

SEQ ID NO: 770169 - DNA, 33 bp, Homo sapien
agagacacagcaaataccctaaagctcctcctt

SEQ ID NO: 770170 - DNA, 33 bp, Homo sapien
agagacacagcaaatatcctaaagctcctcctt

SEQ ID NO: 770171 - DNA, 33 bp, Homo sapien
gtttagctaggagggacgtatgacaggaataaa

SEQ ID NO: 770172 - DNA, 33 bp, Homo sapien
gtttagctaggagggatgtatgacaggaataaa

SEQ ID NO: 770173 - DNA, 33 bp, Homo sapien
tatatgcaataaaaaccctggaccagttatgta

SEQ ID NO: 770174 - DNA, 33 bp, Homo sapien
tatatgcaataaaaactctggaccagttatgta

SEQ ID NO: 770175 - DNA, 33 bp, Homo sapien
gatggaaagtatgtgacgctgaaggtatctaac

SEQ ID NO: 770176 - DNA, 33 bp, Homo sapien
gatggaaagtatgtgatgctgaaggtatctaac

SEQ ID NO: 770177 - DNA, 33 bp, Homo sapien
aatagcccccgtgataaatatatttgagcagag

SEQ ID NO: 770178 - DNA, 33 bp, Homo sapien
aatagcccccgtgatacatatatttgagcagag

SEQ ID NO: 770179 - DNA, 33 bp, Homo sapien
atcacacactccaatcaacagcttacatttgac

SEQ ID NO: 770180 - DNA, 33 bp, Homo sapien
atcacacactccaatctacagcttacatttgac

SEQ ID NO: 770181 - DNA, 33 bp, Homo sapien
aacacacatcacaaggaaagctgacaacagata

SEQ ID NO: 770182 - DNA, 33 bp, Homo sapien
aacacacatcacaagggaagctgacaacagata

SEQ ID NO: 770183 - DNA, 33 bp, Homo sapien
tctagaaatcagaataccagctgcagaagtaga

SEQ ID NO: 770184 - DNA, 33 bp, Homo sapien
tctagaaatcagaatatcagctgcagaagtaga

SEQ ID NO: 770185 - DNA, 33 bp, Homo sapien
aacaataagcgaatctcaataaaagttataggg

SEQ ID NO: 770186 - DNA, 33 bp, Homo sapien
aacaataagcgaatctgaataaaagttataggg

SEQ ID NO: 770187 - DNA, 33 bp, Homo sapien
aatgagagaattcctaacacctaaaccataccc

SEQ ID NO: 770188 - DNA, 33 bp, Homo sapien
aatgagagaattcctatcacctaaaccataccc

SEQ ID NO: 770189 - DNA, 33 bp, Homo sapien
tagagtcagtgccccacgagaagtcatcaaatc

SEQ ID NO: 770190 - DNA, 33 bp, Homo sapien
tagagtcagtgccccaggagaagtcatcaaatc

SEQ ID NO: 770191 - DNA, 33 bp, Homo sapien
accattgcctggagcccatgtttctagtgcagc

SEQ ID NO: 770192 - DNA, 33 bp, Homo sapien
accattgcctggagcctatgtttctagtgcagc

SEQ ID NO: 770193 - DNA, 33 bp, Homo sapien
ttacatcacaacagtcaagtccttttgaatacc

SEQ ID NO: 770194 - DNA, 33 bp, Homo sapien
ttacatcacaacagtcgagtccttttgaatacc

SEQ ID NO: 770195 - DNA, 33 bp, Homo sapien; identical to SEQ ID NO: 770193

SEQ ID NO: 770196 - DNA, 33 bp, Homo sapien; identical to SEQ ID NO: 770194

SEQ ID NO: 770197 - DNA, 33 bp, Homo sapien
ggattttttacatggacgctgagtttcaggata

SEQ ID NO: 770198 - DNA, 33 bp, Homo sapien
ggattttttacatggatgctgagtttcaggata

SEQ ID NO: 770199 - DNA, 33 bp, Homo sapien
ggtgaatagtgatccacgtaaatacagctaaga

SEQ ID NO: 770200 - DNA, 33 bp, Homo sapien
ggtgaatagtgatccaggtaaatacagctaaga

SEQ ID NO: 770201 - DNA, 33 bp, Homo sapien
tcactattcaccataacggtcaaggaagcaaag

SEQ ID NO: 770202 - DNA, 33 bp, Homo sapien
tcactattcaccataagggtcaaggaagcaaag

SEQ ID NO: 770203 - DNA, 33 bp, Homo sapien
aagaggtctgaagaacagagctaaattttaaaa

SEQ ID NO: 770204 - DNA, 33 bp, Homo sapien
aagaggtctgaagaactgagctaaattttaaaa

SEQ ID NO: 770205 - DNA, 33 bp, Homo sapien
ttactgatgctccactaactgagatatttggga

SEQ ID NO: 770206 - DNA, 33 bp, Homo sapien
ttactgatgctccactgactgagatatttggga

SEQ ID NO: 770207 - DNA, 33 bp, Homo sapien
aaaattgtaagctctcaatcttcacccctacca

SEQ ID NO: 770208 - DNA, 33 bp, Homo sapien
aaaattgtaagctctccatcttcacccctacca

SEQ ID NO: 770209 - DNA, 33 bp, Homo sapien
aatctttcatggataccaagagacaattacatt

SEQ ID NO: 770210 - DNA, 33 bp, Homo sapien
aatctttcatggatacgaagagacaattacatt

SEQ ID NO: 770211 - DNA, 33 bp, Homo sapien
ggacattcagatacaagattttatgtcaacata

SEQ ID NO: 770212 - DNA, 33 bp, Homo sapien
ggacattcagatacaatattttatgtcaacata

SEQ ID NO: 770213 - DNA, 33 bp, Homo sapien
aatcagctcttttataactatgaaatcctgcta

SEQ ID NO: 770214 - DNA, 33 bp, Homo sapien
aatcagctcttttatatctatgaaatcctgcta

SEQ ID NO: 770215 - DNA, 33 bp, Homo sapien
cactgaagagaaaatacatgctcatctggagaa

SEQ ID NO: 770216 - DNA, 33 bp, Homo sapien
cactgaagagaaaatatatgctcatctggagaa

SEQ ID NO: 770217 - DNA, 33 bp, Homo sapien
aatttaccttaaaaaactgaagtattgccaggc

SEQ ID NO: 770218 - DNA, 33 bp, Homo sapien
aatttaccttaaaaaagtgaagtattgccaggc

SEQ ID NO: 770219 - DNA, 33 bp, Homo sapien
agttgatttaatccacaatacagaaggcacaga

SEQ ID NO: 770220 - DNA, 33 bp, Homo sapien
agttgatttaatccacgatacagaaggcacaga

SEQ ID NO: 770221 - DNA, 33 bp, Homo sapien
aaatgctcttaccttacatactcacacagctgc

SEQ ID NO: 770222 - DNA, 33 bp, Homo sapien
aaatgctcttaccttagatactcacacagctgc

SEQ ID NO: 770223 - DNA, 33 bp, Homo sapien
tctgttatgaactgaacgtttgtattctcccaa

SEQ ID NO: 770224 - DNA, 33 bp, Homo sapien
tctgttatgaactgaatgtttgtattctcccaa

SEQ ID NO: 770225 - DNA, 33 bp, Homo sapien
atggatcaatgctgaaaagttttagtagagcac

SEQ ID NO: 770226 - DNA, 33 bp, Homo sapien
atggatcaatgctgaacagttttagtagagcac

SEQ ID NO: 770227 - DNA, 33 bp, Homo sapien
tatatgcatcacagtacagaagtaggtaaagta

SEQ ID NO: 770228 - DNA, 33 bp, Homo sapien
tatatgcatcacagtatagaagtaggtaaagta

SEQ ID NO: 770229 - DNA, 33 bp, Homo sapien
tatgctcttctggaacgccagttaaagtagtga

SEQ ID NO: 770230 - DNA, 33 bp, Homo sapien
tatgctcttctggaactccagttaaagtagtga

SEQ ID NO: 770231 - DNA, 33 bp, Homo sapien
tatataattataggaacctcagagtagcaacca

SEQ ID NO: 770232 - DNA, 33 bp, Homo sapien
tatataattataggaatctcagagtagcaacca

SEQ ID NO: 770233 - DNA, 33 bp, Homo sapien
atgagaacagtattaacgaggttgtagagggag

SEQ ID NO: 770234 - DNA, 33 bp, Homo sapien
atgagaacagtattaatgaggttgtagagggag

SEQ ID NO: 770235 - DNA, 33 bp, Homo sapien
tacttagaattatcccagaagtgaacaacatca

SEQ ID NO: 770236 - DNA, 33 bp, Homo sapien
tacttagaattatcccggaagtgaacaacatca

SEQ ID NO: 770237 - DNA, 33 bp, Homo sapien
tgactcccctctcaacccagtcctggaaaaatc

SEQ ID NO: 770238 - DNA, 33 bp, Homo sapien
tgactcccctctcaactcagtcctggaaaaatc

SEQ ID NO: 770239 - DNA, 33 bp, Homo sapien
tatatctgaaaatcagccattagaaatttagaa

SEQ ID NO: 770240 - DNA, 33 bp, Homo sapien
tatatctgaaaatcagtcattagaaatttagaa

SEQ ID NO: 770241 - DNA, 33 bp, Homo sapien
gtataccccatctaaaatgttttctcctaggtt

SEQ ID NO: 770242 - DNA, 33 bp, Homo sapien
gtataccccatctaaagtgttttctcctaggtt

SEQ ID NO: 770243 - DNA, 33 bp, Homo sapien
tttacatctttaacaacttgagatatggtaaat

SEQ ID NO: 770244 - DNA, 33 bp, Homo sapien
tttacatctttaacaatttgagatatggtaaat

SEQ ID NO: 770245 - DNA, 33 bp, Homo sapien
gaactgtatacttaaaacttgacagaatggtag

SEQ ID NO: 770246 - DNA, 33 bp, Homo sapien
gaactgtatacttaaaccttgacagaatggtag

SEQ ID NO: 770247 - DNA, 33 bp, Homo sapien
cccaccatctggagaaactatgcaattcccctt

SEQ ID NO: 770248 - DNA, 33 bp, Homo sapien
cccaccatctggagaatctatgcaattcccctt

SEQ ID NO: 770249 - DNA, 33 bp, Homo sapien
aaagaagctaatctgacgatgtacacagtttgt

SEQ ID NO: 770250 - DNA, 33 bp, Homo sapien
aaagaagctaatctgatgatgtacacagtttgt

SEQ ID NO: 770251 - DNA, 33 bp, Homo sapien
gagattattttctcagccacacctgataagatt

SEQ ID NO: 770252 - DNA, 33 bp, Homo sapien
gagattattttctcagtcacacctgataagatt

SEQ ID NO: 770253 - DNA, 33 bp, Homo sapien
gctttgtcctcaggtgaaaacacatggagacaa

SEQ ID NO: 770254 - DNA, 33 bp, Homo sapien
gctttgtcctcaggtggaaacacatggagacaa

SEQ ID NO: 770255 - DNA, 33 bp, Homo sapien
agccatagtgaccagaaagttgaactctctatg

SEQ ID NO: 770256 - DNA, 33 bp, Homo sapien
agccatagtgaccagacagttgaactctctatg

SEQ ID NO: 770257 - DNA, 33 bp, Homo sapien
ccttagcccaccaggacactgtttttcagtccc

SEQ ID NO: 770258 - DNA, 33 bp, Homo sapien
ccttagcccaccaggatactgtttttcagtccc

SEQ ID NO: 770259 - DNA, 33 bp, Homo sapien
ttatagattgtgacaactgcccttcgtttatag

SEQ ID NO: 770260 - DNA, 33 bp, Homo sapien
ttatagattgtgacaattgcccttcgtttatag

SEQ ID NO: 770261 - DNA, 33 bp, Homo sapien
agatagaaaacagtaacgaaggtggtagatact

SEQ ID NO: 770262 - DNA, 33 bp, Homo sapien
agatagaaaacagtaatgaaggtggtagatact

SEQ ID NO: 770263 - DNA, 33 bp, Homo sapien
agagaaaaatataccacgctaacatactcaaaa

SEQ ID NO: 770264 - DNA, 33 bp, Homo sapien
agagaaaaatataccatgctaacatactcaaaa

SEQ ID NO: 770265 - DNA, 33 bp, Homo sapien
atatagaatatcaatgaaaccaaagctggttta

SEQ ID NO: 770266 - DNA, 33 bp, Homo sapien
atatagaatatcaatggaaccaaagctggttta

SEQ ID NO: 770267 - DNA, 33 bp, Homo sapien
attgtaggaacaaatacctatgtgagttgaaga

SEQ ID NO: 770268 - DNA, 33 bp, Homo sapien
attgtaggaacaaatatctatgtgagttgaaga

SEQ ID NO: 770269 - DNA, 33 bp, Homo sapien
tgatgaaggagaattcagaatagggaaatttgt

SEQ ID NO: 770270 - DNA, 33 bp, Homo sapien
tgatgaaggagaattcggaatagggaaatttgt

SEQ ID NO: 770271 - DNA, 33 bp, Homo sapien
gagtctgtattttaacaaactccccaggcaatt

SEQ ID NO: 770272 - DNA, 33 bp, Homo sapien
gagtctgtattttaacgaactccccaggcaatt

SEQ ID NO: 770273 - DNA, 33 bp, Homo sapien
cattatactcttgacagtgaaatagcattactc

SEQ ID NO: 770274 - DNA, 33 bp, Homo sapien
cattatactcttgacattgaaatagcattactc

SEQ ID NO: 770275 - DNA, 33 bp, Homo sapien
accttcctgatccccaatagacatcaaaatcat

SEQ ID NO: 770276 - DNA, 33 bp, Homo sapien
accttcctgatccccagtagacatcaaaatcat

SEQ ID NO: 770277 - DNA, 33 bp, Homo sapien
ggaagttctgaggccactggaacgaggtgtatt

SEQ ID NO: 770278 - DNA, 33 bp, Homo sapien
ggaagttctgaggccattggaacgaggtgtatt

SEQ ID NO: 770279 - DNA, 33 bp, Homo sapien
atgaagccaggcacgaatattagatttccattc

SEQ ID NO: 770280 - DNA, 33 bp, Homo sapien
atgaagccaggcacgactattagatttccattc

SEQ ID NO: 770281 - DNA, 33 bp, Homo sapien
attattccatttttcgaagctaggacaccgaag

SEQ ID NO: 770282 - DNA, 33 bp, Homo sapien
attattccatttttcggagctaggacaccgaag

SEQ ID NO: 770283 - DNA, 33 bp, Homo sapien
aacaaagcatttcaaaccacagaatcctttcaa

SEQ ID NO: 770284 - DNA, 33 bp, Homo sapien
aacaaagcatttcaaatcacagaatcctttcaa

SEQ ID NO: 770285 - DNA, 33 bp, Homo sapien
tgttttgttttgttgacacagaatatcactctg

SEQ ID NO: 770286 - DNA, 33 bp, Homo sapien
tgttttgttttgttgagacagaatatcactctg

SEQ ID NO: 770287 - DNA, 33 bp, Homo sapien
tatatgaatagagtgactactgaatatcggagg

SEQ ID NO: 770288 - DNA, 33 bp, Homo sapien
tatatgaatagagtgattactgaatatcggagg

SEQ ID NO: 770289 - DNA, 33 bp, Homo sapien
ttgtttatagaaagcaataggctgatctttttt

SEQ ID NO: 770290 - DNA, 33 bp, Homo sapien
ttgtttatagaaagcactaggctgatctttttt

SEQ ID NO: 770291 - DNA, 33 bp, Homo sapien
aatgactgcctcttcaagattcgggctctggtc

SEQ ID NO: 770292 - DNA, 33 bp, Homo sapien
aatgactgcctcttcacgattcgggctctggtc

SEQ ID NO: 770293 - DNA, 33 bp, Homo sapien
gacatattagacacaagaaagaattcaactcct

SEQ ID NO: 770294 - DNA, 33 bp, Homo sapien
gacatattagacacaataaagaattcaactcct

SEQ ID NO: 770295 - DNA, 33 bp, Homo sapien
caattatatattgttacgaacctctatgtcctt

SEQ ID NO: 770296 - DNA, 33 bp, Homo sapien
caattatatattgttatgaacctctatgtcctt

SEQ ID NO: 770297 - DNA, 33 bp, Homo sapien
agtctcaaccaagatactaaagccattcagaga

SEQ ID NO: 770298 - DNA, 33 bp, Homo sapien
agtctcaaccaagatagtaaagccattcagaga

SEQ ID NO: 770299 - DNA, 33 bp, Homo sapien
atgaggaagatgaagcccggggtggttaaggga

SEQ ID NO: 770300 - DNA, 33 bp, Homo sapien
atgaggaagatgaagctcggggtggttaaggga

SEQ ID NO: 770301 - DNA, 33 bp, Homo sapien
ccctgtaattccttgaactccttcgtctttgag

SEQ ID NO: 770302 - DNA, 33 bp, Homo sapien
ccctgtaattccttgagctccttcgtctttgag

SEQ ID NO: 770303 - DNA, 33 bp, Homo sapien
tgtcctttgccccagcgcttctacattttcccc

SEQ ID NO: 770304 - DNA, 33 bp, Homo sapien
tgtcctttgccccagctcttctacattttcccc

SEQ ID NO: 770305 - DNA, 33 bp, Homo sapien
gataactatggccttacattttcatgcttatat

SEQ ID NO: 770306 - DNA, 33 bp, Homo sapien
gataactatggccttatattttcatgcttatat

SEQ ID NO: 770307 - DNA, 33 bp, Homo sapien
caagaatacttagtgaccaattaaactacagca

SEQ ID NO: 770308 - DNA, 33 bp, Homo sapien
caagaatacttagtgagcaattaaactacagca

SEQ ID NO: 770309 - DNA, 33 bp, Homo sapien
gcatactgtaaacaccaataagaattgcatttt

SEQ ID NO: 770310 - DNA, 33 bp, Homo sapien
gcatactgtaaacaccgataagaattgcatttt

SEQ ID NO: 770311 - DNA, 33 bp, Homo sapien
tctgcatagtgtaactgaattgggctacttcta

SEQ ID NO: 770312 - DNA, 33 bp, Homo sapien
tctgcatagtgtaacttaattgggctacttcta

SEQ ID NO: 770313 - DNA, 33 bp, Homo sapien
gcatcagggtttgctccacatattcacagatat

SEQ ID NO: 770314 - DNA, 33 bp, Homo sapien
gcatcagggtttgctctacatattcacagatat

SEQ ID NO: 770315 - DNA, 33 bp, Homo sapien
gcaaagatcctaccaacaactgggattgtagga

SEQ ID NO: 770316 - DNA, 33 bp, Homo sapien
gcaaagatcctaccaataactgggattgtagga

SEQ ID NO: 770317 - DNA, 33 bp, Homo sapien
tcttttacttgtaacaaggtactcctcagccag

SEQ ID NO: 770318 - DNA, 33 bp, Homo sapien
tcttttacttgtaacagggtactcctcagccag

SEQ ID NO: 770319 - DNA, 33 bp, Homo sapien
actcctgaaggtaagcaacttattccattgtgc

SEQ ID NO: 770320 - DNA, 33 bp, Homo sapien
actcctgaaggtaagcgacttattccattgtgc

SEQ ID NO: 770321 - DNA, 33 bp, Homo sapien
attcattgtgtgtacacggaagtctaagccagc

SEQ ID NO: 770322 - DNA, 33 bp, Homo sapien
attcattgtgtgtacatggaagtctaagccagc

SEQ ID NO: 770323 - DNA, 33 bp, Homo sapien
atagtgaacttgataaaatttagaaactggata

SEQ ID NO: 770324 - DNA, 33 bp, Homo sapien
atagtgaacttgataacatttagaaactggata

SEQ ID NO: 770325 - DNA, 33 bp, Homo sapien
tatcctcattcatttacacacagctatttctta

SEQ ID NO: 770326 - DNA, 33 bp, Homo sapien
tatcctcattcatttatacacagctatttctta

SEQ ID NO: 770327 - DNA, 33 bp, Homo sapien
ccaatgtcaaataaagccagcaagtattgccaa

SEQ ID NO: 770328 - DNA, 33 bp, Homo sapien
ccaatgtcaaataaagtcagcaagtattgccaa

SEQ ID NO: 770329 - DNA, 33 bp, Homo sapien
ggccccaattttaagcactaaactatacctacc

SEQ ID NO: 770330 - DNA, 33 bp, Homo sapien
ggccccaattttaagcgctaaactatacctacc

SEQ ID NO: 770331 - DNA, 33 bp, Homo sapien
tgtagataataaacagcggtcagtttttgttaa

SEQ ID NO: 770332 - DNA, 33 bp, Homo sapien
tgtagataataaacagtggtcagtttttgttaa

SEQ ID NO: 770333 - DNA, 33 bp, Homo sapien
attctcttaaatcaagaatgcagagtagtcaaa

SEQ ID NO: 770334 - DNA, 33 bp, Homo sapien
attctcttaaatcaagtatgcagagtagtcaaa

SEQ ID NO: 770335 - DNA, 33 bp, Homo sapien
cgaaaactacaaagttcaaactctgtctctgtg

SEQ ID NO: 770336 - DNA, 33 bp, Homo sapien
cgaaaactacaaagttgaaactctgtctctgtg

SEQ ID NO: 770337 - DNA, 33 bp, Homo sapien
tgacagagtcctttgccaatgaggctgagagtc

SEQ ID NO: 770338 - DNA, 33 bp, Homo sapien
tgacagagtcctttgctaatgaggctgagagtc

SEQ ID NO: 770339 - DNA, 33 bp, Homo sapien
actcacctgattcttccaataacttaagtgggg

SEQ ID NO: 770340 - DNA, 33 bp, Homo sapien
actcacctgattcttctaataacttaagtgggg

SEQ ID NO: 770341 - DNA, 33 bp, Homo sapien
ccagaggtgctgccgacagatgagttccctaga

SEQ ID NO: 770342 - DNA, 33 bp, Homo sapien
ccagaggtgctgccgatagatgagttccctaga

SEQ ID NO: 770343 - DNA, 33 bp, Homo sapien
agctgagataaatatgcaacatctattgagcat

SEQ ID NO: 770344 - DNA, 33 bp, Homo sapien
agctgagataaatatggaacatctattgagcat

SEQ ID NO: 770345 - DNA, 33 bp, Homo sapien
tcataacacttcaatacctgctcagtatacata

SEQ ID NO: 770346 - DNA, 33 bp, Homo sapien
tcataacacttcaatagctgctcagtatacata

SEQ ID NO: 770347 - DNA, 33 bp, Homo sapien
acctcaatagggtgaacaatacatttctcatct

SEQ ID NO: 770348 - DNA, 33 bp, Homo sapien
acctcaatagggtgaagaatacatttctcatct

SEQ ID NO: 770349 - DNA, 33 bp, Homo sapien
ttttacctaaccttcaaatggacaatgcactca

SEQ ID NO: 770350 - DNA, 33 bp, Homo sapien
ttttacctaaccttcacatggacaatgcactca

SEQ ID NO: 770351 - DNA, 33 bp, Homo sapien
tatccatcttgaaaacacaaagagtattacaaa

SEQ ID NO: 770352 - DNA, 33 bp, Homo sapien
tatccatcttgaaaacgcaaagagtattacaaa

SEQ ID NO: 770353 - DNA, 33 bp, Homo sapien
aagttatcaaaatggaagagaaatgataaaaag

SEQ ID NO: 770354 - DNA, 33 bp, Homo sapien
aagttatcaaaatggatgagaaatgataaaaag

SEQ ID NO: 770355 - DNA, 33 bp, Homo sapien
gtttctgagccccaacagtataatgtgtacata

SEQ ID NO: 770356 - DNA, 33 bp, Homo sapien
gtttctgagccccaacggtataatgtgtacata

SEQ ID NO: 770357 - DNA, 33 bp, Homo sapien
taatgctgaatttttagactgactagcttgttt

SEQ ID NO: 770358 - DNA, 33 bp, Homo sapien
taatgctgaatttttatactgactagcttgttt

SEQ ID NO: 770359 - DNA, 33 bp, Homo sapien
ttctactttataaacaatgaccatgaaacttgg

SEQ ID NO: 770360 - DNA, 33 bp, Homo sapien
ttctactttataaacagtgaccatgaaacttgg

SEQ ID NO: 770361 - DNA, 33 bp, Homo sapien
ttcactataaccagtacgcactgaagttacact

SEQ ID NO: 770362 - DNA, 33 bp, Homo sapien
ttcactataaccagtatgcactgaagttacact

SEQ ID NO: 770363 - DNA, 33 bp, Homo sapien
gtttatggtcttcaaccgtggaagaatttatcc

SEQ ID NO: 770364 - DNA, 33 bp, Homo sapien
gtttatggtcttcaactgtggaagaatttatcc

SEQ ID NO: 770365 - DNA, 33 bp, Homo sapien
tatttgatacatacaaaagaatacatgtaacaa

SEQ ID NO: 770366 - DNA, 33 bp, Homo sapien
tatttgatacatacaacagaatacatgtaacaa

SEQ ID NO: 770367 - DNA, 33 bp, Homo sapien
aaaagcaaaaatatagaagtcaaggtctgtgga

SEQ ID NO: 770368 - DNA, 33 bp, Homo sapien
aaaagcaaaaatatagcagtcaaggtctgtgga

SEQ ID NO: 770369 - DNA, 33 bp, Homo sapien
tagttttctgctattaaaaaagagaaggttaag

SEQ ID NO: 770370 - DNA, 33 bp, Homo sapien
tagttttctgctattataaaagagaaggttaag

SEQ ID NO: 770371 - DNA, 33 bp, Homo sapien
tttgtcttaattcacaatcttctcattccacac

SEQ ID NO: 770372 - DNA, 33 bp, Homo sapien
tttgtcttaattcacagtcttctcattccacac

SEQ ID NO: 770373 - DNA, 33 bp, Homo sapien
cagtttgtcttttaacacattatactaccttat

SEQ ID NO: 770374 - DNA, 33 bp, Homo sapien
cagtttgtcttttaacccattatactaccttat

SEQ ID NO: 770375 - DNA, 33 bp, Homo sapien
tttaaatgtcacaacaaaggagtgaggacaatt

SEQ ID NO: 770376 - DNA, 33 bp, Homo sapien
tttaaatgtcacaacagaggagtgaggacaatt

SEQ ID NO: 770377 - DNA, 33 bp, Homo sapien
gccacatgggagagacaaggaatttatatatgc

SEQ ID NO: 770378 - DNA, 33 bp, Homo sapien
gccacatgggagagacgaggaatttatatatgc

SEQ ID NO: 770379 - DNA, 33 bp, Homo sapien
ctaggaactatccattaaaattttcctgttaag

SEQ ID NO: 770380 - DNA, 33 bp, Homo sapien
ctaggaactatccattgaaattttcctgttaag

SEQ ID NO: 770381 - DNA, 33 bp, Homo sapien
cagggattctggaaaacgagacatcccaagtca

SEQ ID NO: 770382 - DNA, 33 bp, Homo sapien
cagggattctggaaaatgagacatcccaagtca

SEQ ID NO: 770383 - DNA, 33 bp, Homo sapien
atgagaagttaaaccaatggagccttatgggaa

SEQ ID NO: 770384 - DNA, 33 bp, Homo sapien
atgagaagttaaaccagtggagccttatgggaa

SEQ ID NO: 770385 - DNA, 33 bp, Homo sapien
gatatggtctgaaaatgattctaaacttgtgta

SEQ ID NO: 770386 - DNA, 33 bp, Homo sapien
gatatggtctgaaaattattctaaacttgtgta

SEQ ID NO: 770387 - DNA, 33 bp, Homo sapien
aaaattagtttcaaagccttagtcaattatact

SEQ ID NO: 770388 - DNA, 33 bp, Homo sapien
aaaattagtttcaaaggcttagtcaattatact

SEQ ID NO: 770389 - DNA, 33 bp, Homo sapien
atttgatgttgagtaacgttaagtatgtgaaga

SEQ ID NO: 770390 - DNA, 33 bp, Homo sapien
atttgatgttgagtaatgttaagtatgtgaaga

SEQ ID NO: 770391 - DNA, 33 bp, Homo sapien
aaaccaaaacacaaaaagattatgtaacttgcc

SEQ ID NO: 770392 - DNA, 33 bp, Homo sapien
aaaccaaaacacaaaacgattatgtaacttgcc

SEQ ID NO: 770393 - DNA, 33 bp, Homo sapien
tggagctgtgcaaagaaccgttggaaggtcatc

SEQ ID NO: 770394 - DNA, 33 bp, Homo sapien
tggagctgtgcaaagagccgttggaaggtcatc

SEQ ID NO: 770395 - DNA, 33 bp, Homo sapien
gaggtagatgaaacaacgtgagtaaagactttc

SEQ ID NO: 770396 - DNA, 33 bp, Homo sapien
gaggtagatgaaacaatgtgagtaaagactttc

SEQ ID NO: 770397 - DNA, 33 bp, Homo sapien
tgtatcaagagccttacgatgttttaatcctga

SEQ ID NO: 770398 - DNA, 33 bp, Homo sapien
tgtatcaagagccttatgatgttttaatcctga

SEQ ID NO: 770399 - DNA, 33 bp, Homo sapien
acagtttacctgaataacaaggtgatgtttctg

SEQ ID NO: 770400 - DNA, 33 bp, Homo sapien
acagtttacctgaatatcaaggtgatgtttctg

SEQ ID NO: 770401 - DNA, 33 bp, Homo sapien
gggcaggtcaccagagaaggacacaaggggcaa

SEQ ID NO: 770402 - DNA, 33 bp, Homo sapien
gggcaggtcaccagaggaggacacaaggggcaa

SEQ ID NO: 770403 - DNA, 33 bp, Homo sapien
gaaggaaaatatggcaataagtgaaagagagag

SEQ ID NO: 770404 - DNA, 33 bp, Homo sapien
gaaggaaaatatggcagtaagtgaaagagagag

SEQ ID NO: 770405 - DNA, 33 bp, Homo sapien
tgaaagtggtgtcttcacaattgacattgagaa

SEQ ID NO: 770406 - DNA, 33 bp, Homo sapien
tgaaagtggtgtcttcgcaattgacattgagaa

SEQ ID NO: 770407 - DNA, 33 bp, Homo sapien
tgacttgtttcaaagcccagaaattctgtatga

SEQ ID NO: 770408 - DNA, 33 bp, Homo sapien
tgacttgtttcaaagctcagaaattctgtatga

SEQ ID NO: 770409 - DNA, 33 bp, Homo sapien
cattgatcataaaacacataactctctcctccc

SEQ ID NO: 770410 - DNA, 33 bp, Homo sapien
cattgatcataaaacatataactctctcctccc

SEQ ID NO: 770411 - DNA, 33 bp, Homo sapien
agctattaaagttgagaaagtaaaagaatctat

SEQ ID NO: 770412 - DNA, 33 bp, Homo sapien
agctattaaagttgaggaagtaaaagaatctat

SEQ ID NO: 770413 - DNA, 33 bp, Homo sapien
tcagttcttcaaacatcatatactatgtactgc

SEQ ID NO: 770414 - DNA, 33 bp, Homo sapien
tcagttcttcaaacattatatactatgtactgc

SEQ ID NO: 770415 - DNA, 33 bp, Homo sapien
attgatggtacatggaaaataacctagagaaaa

SEQ ID NO: 770416 - DNA, 33 bp, Homo sapien
attgatggtacatggagaataacctagagaaaa

SEQ ID NO: 770417 - DNA, 33 bp, Homo sapien
aggaaagaatcaatacacagttcaagtccaaag

SEQ ID NO: 770418 - DNA, 33 bp, Homo sapien
aggaaagaatcaatacgcagttcaagtccaaag

SEQ ID NO: 770419 - DNA, 33 bp, Homo sapien
ttggatgtggtgacaacgtggtaattaataact

SEQ ID NO: 770420 - DNA, 33 bp, Homo sapien
ttggatgtggtgacaatgtggtaattaataact

SEQ ID NO: 770421 - DNA, 33 bp, Homo sapien
tcagactttagacttacgtttaccttatttgac

SEQ ID NO: 770422 - DNA, 33 bp, Homo sapien
tcagactttagacttatgtttaccttatttgac

SEQ ID NO: 770423 - DNA, 33 bp, Homo sapien
agaaagaaagaaaaacaagaggatttgggagac

SEQ ID NO: 770424 - DNA, 33 bp, Homo sapien
agaaagaaagaaaaacgagaggatttgggagac

SEQ ID NO: 770425 - DNA, 33 bp, Homo sapien
atggatatgggataaggagaaagatcaaaagct

SEQ ID NO: 770426 - DNA, 33 bp, Homo sapien
atggatatgggataagtagaaagatcaaaagct

SEQ ID NO: 770427 - DNA, 33 bp, Homo sapien
agattttgagtcaacaagataaaactttcaaca

SEQ ID NO: 770428 - DNA, 33 bp, Homo sapien
agattttgagtcaacacgataaaactttcaaca

SEQ ID NO: 770429 - DNA, 33 bp, Homo sapien
ctggtagcagcaaatacagaacagagccagtct

SEQ ID NO: 770430 - DNA, 33 bp, Homo sapien
ctggtagcagcaaatagagaacagagccagtct

SEQ ID NO: 770431 - DNA, 33 bp, Homo sapien
caggcaccaaaacagaacagcaaagttgtccta

SEQ ID NO: 770432 - DNA, 33 bp, Homo sapien
caggcaccaaaacagagcagcaaagttgtccta

SEQ ID NO: 770433 - DNA, 33 bp, Homo sapien
gtattttatagaaaagcacattaggcctcattt

SEQ ID NO: 770434 - DNA, 33 bp, Homo sapien
gtattttatagaaaaggacattaggcctcattt

SEQ ID NO: 770435 - DNA, 33 bp, Homo sapien
tgggacccacacaagaagaataagacatcacca

SEQ ID NO: 770436 - DNA, 33 bp, Homo sapien
tgggacccacacaagaggaataagacatcacca

SEQ ID NO: 770437 - DNA, 33 bp, Homo sapien
tcactggcaaagtcaacgtgcaaaaatcagttg

SEQ ID NO: 770438 - DNA, 33 bp, Homo sapien
tcactggcaaagtcaatgtgcaaaaatcagttg

SEQ ID NO: 770439 - DNA, 33 bp, Homo sapien
ggcaaggatatggagaaattagaacccttgtac

SEQ ID NO: 770440 - DNA, 33 bp, Homo sapien
ggcaaggatatggagagattagaacccttgtac

SEQ ID NO: 770441 - DNA, 33 bp, Homo sapien
ccctgggagactatggcagtgaacactaaaatc

SEQ ID NO: 770442 - DNA, 33 bp, Homo sapien
ccctgggagactatggtagtgaacactaaaatc

SEQ ID NO: 770443 - DNA, 33 bp, Homo sapien
agaggacttctagtcacgctccttcaaatccca

SEQ ID NO: 770444 - DNA, 33 bp, Homo sapien
agaggacttctagtcatgctccttcaaatccca

SEQ ID NO: 770445 - DNA, 33 bp, Homo sapien
attgatttcctctctcaaaaagaaaattgtata

SEQ ID NO: 770446 - DNA, 33 bp, Homo sapien
attgatttcctctctcgaaaagaaaattgtata

SEQ ID NO: 770447 - DNA, 33 bp, Homo sapien
gttctgaacattgtgccgattttggagcaaaca

SEQ ID NO: 770448 - DNA, 33 bp, Homo sapien
gttctgaacattgtgctgattttggagcaaaca

SEQ ID NO: 770449 - DNA, 33 bp, Homo sapien
tttctcaaagcacccaagttcctctagcagaga

SEQ ID NO: 770450 - DNA, 33 bp, Homo sapien
tttctcaaagcacccacgttcctctagcagaga

SEQ ID NO: 770451 - DNA, 33 bp, Homo sapien
gcatagcttatgctgactatgtggaaatttggg

SEQ ID NO: 770452 - DNA, 33 bp, Homo sapien
gcatagcttatgctgagtatgtggaaatttggg

SEQ ID NO: 770453 - DNA, 33 bp, Homo sapien
tcagcataagctatgcacaaattcccaccagca

SEQ ID NO: 770454 - DNA, 33 bp, Homo sapien
tcagcataagctatgcgcaaattcccaccagca

SEQ ID NO: 770455 - DNA, 33 bp, Homo sapien
cagaggaccacgtcaaacaactgtttaatgaat

SEQ ID NO: 770456 - DNA, 33 bp, Homo sapien
cagaggaccacgtcaatcaactgtttaatgaat

SEQ ID NO: 770457 - DNA, 33 bp, Homo sapien
aattccctgaagtgacagcaagtgaaagaaaca

SEQ ID NO: 770458 - DNA, 33 bp, Homo sapien
aattccctgaagtgacggcaagtgaaagaaaca

SEQ ID NO: 770459 - DNA, 33 bp, Homo sapien
acaggtaagtatggaaacattcacttatctgtc

SEQ ID NO: 770460 - DNA, 33 bp, Homo sapien
acaggtaagtatggaagcattcacttatctgtc

SEQ ID NO: 770461 - DNA, 33 bp, Homo sapien
tcgcttcccctttcacaactactctattttcag

SEQ ID NO: 770462 - DNA, 33 bp, Homo sapien
tcgcttcccctttcacgactactctattttcag

SEQ ID NO: 770463 - DNA, 33 bp, Homo sapien
cctgtctttgagctagcctagaaaacagacgga

SEQ ID NO: 770464 - DNA, 33 bp, Homo sapien
cctgtctttgagctagtctagaaaacagacgga

SEQ ID NO: 770465 - DNA, 33 bp, Homo sapien
caaggtacatgggaacactaaagtgccgcgtgg

SEQ ID NO: 770466 - DNA, 33 bp, Homo sapien
caaggtacatgggaacgctaaagtgccgcgtgg

SEQ ID NO: 770467 - DNA, 33 bp, Homo sapien
tactcagaaaggattccacccacgcggcacttt

SEQ ID NO: 770468 - DNA, 33 bp, Homo sapien
tactcagaaaggattcgacccacgcggcacttt

SEQ ID NO: 770469 - DNA, 33 bp, Homo sapien
ccacctacttcagaaccggcatctccttctgtt

SEQ ID NO: 770470 - DNA, 33 bp, Homo sapien
ccacctacttcagaactggcatctccttctgtt

SEQ ID NO: 770471 - DNA, 33 bp, Homo sapien
cttcttcaaattaggaaaaaggatgatgataat

SEQ ID NO: 770472 - DNA, 33 bp, Homo sapien
cttcttcaaattaggagaaaggatgatgataat

SEQ ID NO: 770473 - DNA, 33 bp, Homo sapien
tgagcgctgagtgagacgacagtataaaaatac

SEQ ID NO: 770474 - DNA, 33 bp, Homo sapien
tgagcgctgagtgagatgacagtataaaaatac

SEQ ID NO: 770475 - DNA, 33 bp, Homo sapien
tcctacctaatggtacagatttgctcaaaacat

SEQ ID NO: 770476 - DNA, 33 bp, Homo sapien
tcctacctaatggtacggatttgctcaaaacat

SEQ ID NO: 770477 - DNA, 33 bp, Homo sapien
ggatgtctgatctccgaataactgaggcgtttc

SEQ ID NO: 770478 - DNA, 33 bp, Homo sapien
ggatgtctgatctccggataactgaggcgtttc

SEQ ID NO: 770479 - DNA, 33 bp, Homo sapien
cccgtgtgtttggggaatacaagtgactactgc

SEQ ID NO: 770480 - DNA, 33 bp, Homo sapien
cccgtgtgtttggggagtacaagtgactactgc

SEQ ID NO: 770481 - DNA, 33 bp, Homo sapien
tgcaaaaaacacaacaatatttgtgacccggta

SEQ ID NO: 770482 - DNA, 33 bp, Homo sapien
tgcaaaaaacacaacagtatttgtgacccggta

SEQ ID NO: 770483 - DNA, 33 bp, Homo sapien
gtgcttgacaagtacaaaattaagcgagttaaa

SEQ ID NO: 770484 - DNA, 33 bp, Homo sapien
gtgcttgacaagtacagaattaagcgagttaaa

SEQ ID NO: 770485 - DNA, 33 bp, Homo sapien
ctgataatagaaaccaactccacacaaattgtt

SEQ ID NO: 770486 - DNA, 33 bp, Homo sapien
ctgataatagaaaccacctccacacaaattgtt

SEQ ID NO: 770487 - DNA, 33 bp, Homo sapien
gagtttaagtaacaatcagcttcttggcatcaa

SEQ ID NO: 770488 - DNA, 33 bp, Homo sapien
gagtttaagtaacaattagcttcttggcatcaa

SEQ ID NO: 770489 - DNA, 33 bp, Homo sapien
tgcctcatcagactgactaacttttcaatggcc

SEQ ID NO: 770490 - DNA, 33 bp, Homo sapien
tgcctcatcagactgattaacttttcaatggcc

SEQ ID NO: 770491 - DNA, 33 bp, Homo sapien
ctcttttattctttgacatcgaatatttttgaa

SEQ ID NO: 770492 - DNA, 33 bp, Homo sapien
ctcttttattctttgagatcgaatatttttgaa

SEQ ID NO: 770493 - DNA, 33 bp, Homo sapien
ttgggtgtacagttgcacaatggacatataaag

SEQ ID NO: 770494 - DNA, 33 bp, Homo sapien
ttgggtgtacagttgctcaatggacatataaag

SEQ ID NO: 770495 - DNA, 33 bp, Homo sapien
caacctaagacagctgcaagtgggaattcatat

SEQ ID NO: 770496 - DNA, 33 bp, Homo sapien
caacctaagacagctggaagtgggaattcatat

SEQ ID NO: 770497 - DNA, 33 bp, Homo sapien
aggaatttctcaataaatcacttgtataagaat

SEQ ID NO: 770498 - DNA, 33 bp, Homo sapien
aggaatttctcaataagtcacttgtataagaat

SEQ ID NO: 770499 - DNA, 33 bp, Homo sapien
taagaacagctttaaaaattattggcaaaattt

SEQ ID NO: 770500 - DNA, 33 bp, Homo sapien
taagaacagctttaaagattattggcaaaattt

SEQ ID NO: 770501 - DNA, 33 bp, Homo sapien
tttgtagtttgcattgcattgctgttgaacagc

SEQ ID NO: 770502 - DNA, 33 bp, Homo sapien
tttgtagtttgcattgtattgctgttgaacagc

SEQ ID NO: 770503 - DNA, 33 bp, Homo sapien
ggtaagaagttgttcaaaatctagatataattg

SEQ ID NO: 770504 - DNA, 33 bp, Homo sapien
ggtaagaagttgttcagaatctagatataattg

SEQ ID NO: 770505 - DNA, 33 bp, Homo sapien
atcaatctaggtgctcaaatcaaaaaccttgga

SEQ ID NO: 770506 - DNA, 33 bp, Homo sapien
atcaatctaggtgctccaatcaaaaaccttgga

SEQ ID NO: 770507 - DNA, 33 bp, Homo sapien
tacatacaagacaactcaggtataatgtagtaa

SEQ ID NO: 770508 - DNA, 33 bp, Homo sapien
tacatacaagacaactgaggtataatgtagtaa

SEQ ID NO: 770509 - DNA, 33 bp, Homo sapien
ttgaatatgccttatcaaaaatgcctgggacca

SEQ ID NO: 770510 - DNA, 33 bp, Homo sapien
ttgaatatgccttatcgaaaatgcctgggacca

SEQ ID NO: 770511 - DNA, 33 bp, Homo sapien
gaacagtgcctagtacactgtaatcactgaaat

SEQ ID NO: 770512 - DNA, 33 bp, Homo sapien
gaacagtgcctagtactctgtaatcactgaaat

SEQ ID NO: 770513 - DNA, 33 bp, Homo sapien
gctagctcaaagaaagccaaactgtaaactgta

SEQ ID NO: 770514 - DNA, 33 bp, Homo sapien
gctagctcaaagaaaggcaaactgtaaactgta

SEQ ID NO: 770515 - DNA, 33 bp, Homo sapien
actaacaataattagccgaaatccctaacatcc

SEQ ID NO: 770516 - DNA, 33 bp, Homo sapien
actaacaataattagctgaaatccctaacatcc

SEQ ID NO: 770517 - DNA, 33 bp, Homo sapien
cagctgcagagaaaagcccagagccatacagat

SEQ ID NO: 770518 - DNA, 33 bp, Homo sapien
cagctgcagagaaaagtccagagccatacagat

SEQ ID NO: 770519 - DNA, 33 bp, Homo sapien
atggagaggctagaaaacataaaaacaagttac

SEQ ID NO: 770520 - DNA, 33 bp, Homo sapien
atggagaggctagaaagcataaaaacaagttac

SEQ ID NO: 770521 - DNA, 33 bp, Homo sapien
acaaaaaatttccaaagcagtagcaaggatcaa

SEQ ID NO: 770522 - DNA, 33 bp, Homo sapien
acaaaaaatttccaaatcagtagcaaggatcaa

SEQ ID NO: 770523 - DNA, 33 bp, Homo sapien
ttatgttctattgttacgttccaagggacattg

SEQ ID NO: 770524 - DNA, 33 bp, Homo sapien
ttatgttctattgttatgttccaagggacattg

SEQ ID NO: 770525 - DNA, 33 bp, Homo sapien
gtgattgggctgcttacctttaacccttcagtg

SEQ ID NO: 770526 - DNA, 33 bp, Homo sapien
gtgattgggctgcttatctttaacccttcagtg

SEQ ID NO: 770527 - DNA, 33 bp, Homo sapien
acacgttatgatgttacagtcaagtccacaaat

SEQ ID NO: 770528 - DNA, 33 bp, Homo sapien
acacgttatgatgttagagtcaagtccacaaat

SEQ ID NO: 770529 - DNA, 33 bp, Homo sapien
aatcatgttttcagataaaactgctcagaagga

SEQ ID NO: 770530 - DNA, 33 bp, Homo sapien
aatcatgttttcagattaaactgctcagaagga

SEQ ID NO: 770531 - DNA, 33 bp, Homo sapien
gtgcctgaagaagattaaagaggcatagtaggt

SEQ ID NO: 770532 - DNA, 33 bp, Homo sapien
gtgcctgaagaagattgaagaggcatagtaggt

SEQ ID NO: 770533 - DNA, 33 bp, Homo sapien
aaggagctaaacttaaagaactgctcttaagaa

SEQ ID NO: 770534 - DNA, 33 bp, Homo sapien
aaggagctaaacttaaggaactgctcttaagaa

SEQ ID NO: 770535 - DNA, 33 bp, Homo sapien
aggtaactggacagggaaagtcttcacaccatg

SEQ ID NO: 770536 - DNA, 33 bp, Homo sapien
aggtaactggacaggggaagtcttcacaccatg

SEQ ID NO: 770537 - DNA, 33 bp, Homo sapien
accatgatgcatactgaacacctattaaaggaa

SEQ ID NO: 770538 - DNA, 33 bp, Homo sapien
accatgatgcatactggacacctattaaaggaa

SEQ ID NO: 770539 - DNA, 33 bp, Homo sapien
aggagtggagctgggaagtgcgagagcggagtt

SEQ ID NO: 770540 - DNA, 33 bp, Homo sapien
aggagtggagctgggaggtgcgagagcggagtt

SEQ ID NO: 770541 - DNA, 33 bp, Homo sapien
tgaatagaatggataacaagaatcttggaaaaa

SEQ ID NO: 770542 - DNA, 33 bp, Homo sapien
tgaatagaatggataagaagaatcttggaaaaa

SEQ ID NO: 770543 - DNA, 33 bp, Homo sapien
tagcgttcggacataacatttcactgtaggaga

SEQ ID NO: 770544 - DNA, 33 bp, Homo sapien
tagcgttcggacataatatttcactgtaggaga

SEQ ID NO: 770545 - DNA, 33 bp, Homo sapien
acacagatgaggttcagaccaagctagcacttg

SEQ ID NO: 770546 - DNA, 33 bp, Homo sapien
acacagatgaggttcataccaagctagcacttg

SEQ ID NO: 770547 - DNA, 33 bp, Homo sapien
atgtagaaagaaccagcataatttgtgctttgt

SEQ ID NO: 770548 - DNA, 33 bp, Homo sapien
atgtagaaagaaccagtataatttgtgctttgt

SEQ ID NO: 770549 - DNA, 33 bp, Homo sapien
tgttagtttcagacttaaaagaagcagagatgt

SEQ ID NO: 770550 - DNA, 33 bp, Homo sapien
tgttagtttcagacttgaaagaagcagagatgt

SEQ ID NO: 770551 - DNA, 33 bp, Homo sapien
cctttaagttgcaggcaaaaaagaaaggcatga

SEQ ID NO: 770552 - DNA, 33 bp, Homo sapien
cctttaagttgcaggcgaaaaagaaaggcatga

SEQ ID NO: 770553 - DNA, 33 bp, Homo sapien
ccacccctcaaaatagaaccaatacaagcatct

SEQ ID NO: 770554 - DNA, 33 bp, Homo sapien
ccacccctcaaaataggaccaatacaagcatct

SEQ ID NO: 770555 - DNA, 33 bp, Homo sapien
ttggcaacccagttaacatctacacatacccaa

SEQ ID NO: 770556 - DNA, 33 bp, Homo sapien
ttggcaacccagttaatatctacacatacccaa

SEQ ID NO: 770557 - DNA, 33 bp, Homo sapien
attaggattatatctgcatggagtttgatatcc

SEQ ID NO: 770558 - DNA, 33 bp, Homo sapien
attaggattatatctgtatggagtttgatatcc

SEQ ID NO: 770559 - DNA, 33 bp, Homo sapien
agtctcatttttaccacgttactgagtttatct

SEQ ID NO: 770560 - DNA, 33 bp, Homo sapien
agtctcatttttaccatgttactgagtttatct

SEQ ID NO: 770561 - DNA, 33 bp, Homo sapien
aacaaagtcatattcacaggtactcaggattag

SEQ ID NO: 770562 - DNA, 33 bp, Homo sapien
aacaaagtcatattcataggtactcaggattag

SEQ ID NO: 770563 - DNA, 33 bp, Homo sapien
aaagatttcctccaaaccagtataaactcatga

SEQ ID NO: 770564 - DNA, 33 bp, Homo sapien
aaagatttcctccaaatcagtataaactcatga

SEQ ID NO: 770565 - DNA, 33 bp, Homo sapien
tatgtgcaagatggtacagatacaatgatgaat

SEQ ID NO: 770566 - DNA, 33 bp, Homo sapien
tatgtgcaagatggtagagatacaatgatgaat

SEQ ID NO: 770567 - DNA, 33 bp, Homo sapien
gctaggcatgctgtccccttacctctaacagcc

SEQ ID NO: 770568 - DNA, 33 bp, Homo sapien
gctaggcatgctgtcctcttacctctaacagcc

SEQ ID NO: 770569 - DNA, 33 bp, Homo sapien
tcttcagtaagagaaccgtgatagtccctggca

SEQ ID NO: 770570 - DNA, 33 bp, Homo sapien
tcttcagtaagagaactgtgatagtccctggca

SEQ ID NO: 770571 - DNA, 33 bp, Homo sapien
attctacttgaaggaactaagaacatgctactc

SEQ ID NO: 770572 - DNA, 33 bp, Homo sapien
attctacttgaaggaattaagaacatgctactc

SEQ ID NO: 770573 - DNA, 33 bp, Homo sapien
gatctcctatccttgacgataagaataatacct

SEQ ID NO: 770574 - DNA, 33 bp, Homo sapien
gatctcctatccttgatgataagaataatacct

SEQ ID NO: 770575 - DNA, 33 bp, Homo sapien
agatgcagaattgaacacttatactgaattaga

SEQ ID NO: 770576 - DNA, 33 bp, Homo sapien
agatgcagaattgaacgcttatactgaattaga

SEQ ID NO: 770577 - DNA, 33 bp, Homo sapien
ctcaggcctctctcccaggctttggatttattc

SEQ ID NO: 770578 - DNA, 33 bp, Homo sapien
ctcaggcctctctcccgggctttggatttattc

SEQ ID NO: 770579 - DNA, 33 bp, Homo sapien
gggagagaggcctgagaccttgcaaagccagta

SEQ ID NO: 770580 - DNA, 33 bp, Homo sapien
gggagagaggcctgagtccttgcaaagccagta

SEQ ID NO: 770581 - DNA, 33 bp, Homo sapien
aaacagagttgaagagaaatactattaacaact

SEQ ID NO: 770582 - DNA, 33 bp, Homo sapien
aaacagagttgaagaggaatactattaacaact

SEQ ID NO: 770583 - DNA, 33 bp, Homo sapien
catgggctcttcgcacacctcctactctcctga

SEQ ID NO: 770584 - DNA, 33 bp, Homo sapien
catgggctcttcgcacgcctcctactctcctga

SEQ ID NO: 770585 - DNA, 33 bp, Homo sapien
gttggaattagtcaaaaacaggattggtattcc

SEQ ID NO: 770586 - DNA, 33 bp, Homo sapien
gttggaattagtcaaagacaggattggtattcc

SEQ ID NO: 770587 - DNA, 33 bp, Homo sapien
tatgattgcacaaaaaacgaattcaatattaga

SEQ ID NO: 770588 - DNA, 33 bp, Homo sapien
tatgattgcacaaaaagcgaattcaatattaga

SEQ ID NO: 770589 - DNA, 33 bp, Homo sapien
aggtttccttgttcagaaatgttgtcctgtctg

SEQ ID NO: 770590 - DNA, 33 bp, Homo sapien
aggtttccttgttcagcaatgttgtcctgtctg

SEQ ID NO: 770591 - DNA, 33 bp, Homo sapien
atataatcttgtcaaacagagctcagcattact

SEQ ID NO: 770592 - DNA, 33 bp, Homo sapien
atataatcttgtcaaagagagctcagcattact

SEQ ID NO: 770593 - DNA, 33 bp, Homo sapien
attttaacctgcgtaacgctcacttatctttgg

SEQ ID NO: 770594 - DNA, 33 bp, Homo sapien
attttaacctgcgtaatgctcacttatctttgg

SEQ ID NO: 770595 - DNA, 33 bp, Homo sapien
ttatgtgactgttttacgggagcatgaaaagcc

SEQ ID NO: 770596 - DNA, 33 bp, Homo sapien
ttatgtgactgttttatgggagcatgaaaagcc

SEQ ID NO: 770597 - DNA, 33 bp, Homo sapien
agtgtaggtggaaagcacactcctgatcttgaa

SEQ ID NO: 770598 - DNA, 33 bp, Homo sapien
agtgtaggtggaaagcgcactcctgatcttgaa

SEQ ID NO: 770599 - DNA, 33 bp, Homo sapien
atattgattccatcataaaaaatgtgtagtcct

SEQ ID NO: 770600 - DNA, 33 bp, Homo sapien
atattgattccatcatgaaaaatgtgtagtcct

SEQ ID NO: 770601 - DNA, 33 bp, Homo sapien
ttttaaagcattctcacggctgtactgcattgt

SEQ ID NO: 770602 - DNA, 33 bp, Homo sapien
ttttaaagcattctcatggctgtactgcattgt

SEQ ID NO: 770603 - DNA, 33 bp, Homo sapien
gtctccactcctggaacgatagagattccatca

SEQ ID NO: 770604 - DNA, 33 bp, Homo sapien
gtctccactcctggaatgatagagattccatca

SEQ ID NO: 770605 - DNA, 33 bp, Homo sapien
tctctcactcttcataacaatactggaaggtaa

SEQ ID NO: 770606 - DNA, 33 bp, Homo sapien
tctctcactcttcatagcaatactggaaggtaa

SEQ ID NO: 770607 - DNA, 33 bp, Homo sapien
catgggcaggaaaccaaaaaaacccagcagtgg

SEQ ID NO: 770608 - DNA, 33 bp, Homo sapien
catgggcaggaaaccagaaaaacccagcagtgg

SEQ ID NO: 770609 - DNA, 33 bp, Homo sapien
acctttgagttggtgaacgagaagcctgaacag

SEQ ID NO: 770610 - DNA, 33 bp, Homo sapien
acctttgagttggtgagcgagaagcctgaacag

SEQ ID NO: 770611 - DNA, 33 bp, Homo sapien
gaactaattattaagtgaatcggtgtattagaa

SEQ ID NO: 770612 - DNA, 33 bp, Homo sapien
gaactaattattaagttaatcggtgtattagaa

SEQ ID NO: 770613 - DNA, 33 bp, Homo sapien
acgtagagcagtacaaaccatgttgaggtaact

SEQ ID NO: 770614 - DNA, 33 bp, Homo sapien
acgtagagcagtacaacccatgttgaggtaact

SEQ ID NO: 770615 - DNA, 33 bp, Homo sapien
acttaggctccttaaagttcatgtacttgggca

SEQ ID NO: 770616 - DNA, 33 bp, Homo sapien
acttaggctccttaaatttcatgtacttgggca

SEQ ID NO: 770617 - DNA, 33 bp, Homo sapien
aaccatgactctcactcaatttcggcatggcat

SEQ ID NO: 770618 - DNA, 33 bp, Homo sapien
aaccatgactctcactgaatttcggcatggcat

SEQ ID NO: 770619 - DNA, 33 bp, Homo sapien
tcttcagcaagtttacaggttggaaatacattc

SEQ ID NO: 770620 - DNA, 33 bp, Homo sapien
tcttcagcaagtttacgggttggaaatacattc

SEQ ID NO: 770621 - DNA, 33 bp, Homo sapien
gagggaaccaggctggaaattgagtagccacca

SEQ ID NO: 770622 - DNA, 33 bp, Homo sapien
gagggaaccaggctggtaattgagtagccacca

SEQ ID NO: 770623 - DNA, 33 bp, Homo sapien
gactggaaatagtctaagttcattacgactccc

SEQ ID NO: 770624 - DNA, 33 bp, Homo sapien
gactggaaatagtctacgttcattacgactccc

SEQ ID NO: 770625 - DNA, 33 bp, Homo sapien
tacgactccccatcccaacttcagagaaagtct

SEQ ID NO: 770626 - DNA, 33 bp, Homo sapien
tacgactccccatcccgacttcagagaaagtct

SEQ ID NO: 770627 - DNA, 33 bp, Homo sapien
aatcgctctttcagacggaagtttttaactgtt

SEQ ID NO: 770628 - DNA, 33 bp, Homo sapien
aatcgctctttcagactgaagtttttaactgtt

SEQ ID NO: 770629 - DNA, 33 bp, Homo sapien
acgaagacttcagagaacaattcttaccacaat

SEQ ID NO: 770630 - DNA, 33 bp, Homo sapien
acgaagacttcagagagcaattcttaccacaat

SEQ ID NO: 770631 - DNA, 33 bp, Homo sapien
taccatacgtgccacccgagttcctgtgttcaa

SEQ ID NO: 770632 - DNA, 33 bp, Homo sapien
taccatacgtgccacctgagttcctgtgttcaa

SEQ ID NO: 770633 - DNA, 33 bp, Homo sapien
agcatctgttcctccacattctattcctcacac

SEQ ID NO: 770634 - DNA, 33 bp, Homo sapien
agcatctgttcctccatattctattcctcacac

SEQ ID NO: 770635 - DNA, 33 bp, Homo sapien
tgaagattcagagtaaaacattctgtccttagt

SEQ ID NO: 770636 - DNA, 33 bp, Homo sapien
tgaagattcagagtaagacattctgtccttagt

SEQ ID NO: 770637 - DNA, 33 bp, Homo sapien
gctcttccagccacatcaagatgaacaatgtaa

SEQ ID NO: 770638 - DNA, 33 bp, Homo sapien
gctcttccagccacatgaagatgaacaatgtaa

SEQ ID NO: 770639 - DNA, 33 bp, Homo sapien
gacaggagatagaatccgaatgtgcttttacca

SEQ ID NO: 770640 - DNA, 33 bp, Homo sapien
gacaggagatagaatctgaatgtgcttttacca

SEQ ID NO: 770641 - DNA, 33 bp, Homo sapien
ggatccttaggataaacttcccttcacttctgt

SEQ ID NO: 770642 - DNA, 33 bp, Homo sapien
ggatccttaggataaatttcccttcacttctgt

SEQ ID NO: 770643 - DNA, 33 bp, Homo sapien
gaccttgctatgcctaacctcttgggaaccttc

SEQ ID NO: 770644 - DNA, 33 bp, Homo sapien
gaccttgctatgcctatcctcttgggaaccttc

SEQ ID NO: 770645 - DNA, 33 bp, Homo sapien
caagagagagagctcccagttaagcacttcctg

SEQ ID NO: 770646 - DNA, 33 bp, Homo sapien
caagagagagagctcctagttaagcacttcctg

SEQ ID NO: 770647 - DNA, 33 bp, Homo sapien
taagcacttcctgatagggactttcaaattcgt

SEQ ID NO: 770648 - DNA, 33 bp, Homo sapien
taagcacttcctgatatggactttcaaattcgt

SEQ ID NO: 770649 - DNA, 33 bp, Homo sapien
caagtgtgtaaaactaaatttgtctgcaaatga

SEQ ID NO: 770650 - DNA, 33 bp, Homo sapien
caagtgtgtaaaactagatttgtctgcaaatga

SEQ ID NO: 770651 - DNA, 33 bp, Homo sapien
ctgcagtcacagaattaaaaggtgcagcacaac

SEQ ID NO: 770652 - DNA, 33 bp, Homo sapien
ctgcagtcacagaattcaaaggtgcagcacaac

SEQ ID NO: 770653 - DNA, 33 bp, Homo sapien
tgacacagcttctccaaatagcaaggcctgggt

SEQ ID NO: 770654 - DNA, 33 bp, Homo sapien
tgacacagcttctccagatagcaaggcctgggt

SEQ ID NO: 770655 - DNA, 33 bp, Homo sapien
taatccgtgtcttgcacgctcatattccttctg

SEQ ID NO: 770656 - DNA, 33 bp, Homo sapien
taatccgtgtcttgcatgctcatattccttctg

SEQ ID NO: 770657 - DNA, 33 bp, Homo sapien
gttcatacaaagcaacactactcagcattacca

SEQ ID NO: 770658 - DNA, 33 bp, Homo sapien
gttcatacaaagcaaccctactcagcattacca

SEQ ID NO: 770659 - DNA, 33 bp, Homo sapien
ctttctaagaatagcaacctcagattggctgtg

SEQ ID NO: 770660 - DNA, 33 bp, Homo sapien
ctttctaagaatagcagcctcagattggctgtg

SEQ ID NO: 770661 - DNA, 33 bp, Homo sapien
ctggaattttggtacacgttaggcaaaggtgcc

SEQ ID NO: 770662 - DNA, 33 bp, Homo sapien
ctggaattttggtacatgttaggcaaaggtgcc

SEQ ID NO: 770663 - DNA, 33 bp, Homo sapien
aatataacacaaatgaacttatggtggtgtcct

SEQ ID NO: 770664 - DNA, 33 bp, Homo sapien
aatataacacaaatgagcttatggtggtgtcct

SEQ ID NO: 770665 - DNA, 33 bp, Homo sapien
catttgttcagcattcacctgctttgctaattt

SEQ ID NO: 770666 - DNA, 33 bp, Homo sapien
catttgttcagcattcgcctgctttgctaattt

SEQ ID NO: 770667 - DNA, 33 bp, Homo sapien
gtaccaggcactctgaagccctttgtatctcta

SEQ ID NO: 770668 - DNA, 33 bp, Homo sapien
gtaccaggcactctgaggccctttgtatctcta

SEQ ID NO: 770669 - DNA, 33 bp, Homo sapien
atggagttagcaaagaaaaatgcccagtgtagc

SEQ ID NO: 770670 - DNA, 33 bp, Homo sapien
atggagttagcaaagacaaatgcccagtgtagc

SEQ ID NO: 770671 - DNA, 33 bp, Homo sapien
ttcttcaactggacaaagatgtattgagtacct

SEQ ID NO: 770672 - DNA, 33 bp, Homo sapien
ttcttcaactggacaaggatgtattgagtacct

SEQ ID NO: 770673 - DNA, 33 bp, Homo sapien
agactgaagctcttgacagatgtgacacaaggg

SEQ ID NO: 770674 - DNA, 33 bp, Homo sapien
agactgaagctcttgatagatgtgacacaaggg

SEQ ID NO: 770675 - DNA, 33 bp, Homo sapien
ccttctagatcatgctcaagaattttctcttta

SEQ ID NO: 770676 - DNA, 33 bp, Homo sapien
ccttctagatcatgcttaagaattttctcttta

SEQ ID NO: 770677 - DNA, 33 bp, Homo sapien
gagaggagacaggctagaattgtagctgggaac

SEQ ID NO: 770678 - DNA, 33 bp, Homo sapien
gagaggagacaggctataattgtagctgggaac

SEQ ID NO: 770679 - DNA, 33 bp, Homo sapien
gaacatccttacagagaagatgacccaagctgg

SEQ ID NO: 770680 - DNA, 33 bp, Homo sapien
gaacatccttacagaggagatgacccaagctgg

SEQ ID NO: 770681 - DNA, 33 bp, Homo sapien
tcctttggagtagaaaattactaaatgaaactg

SEQ ID NO: 770682 - DNA, 33 bp, Homo sapien
tcctttggagtagaaagttactaaatgaaactg

SEQ ID NO: 770683 - DNA, 33 bp, Homo sapien
ctgaggtaatctgttaaagaggtgtcagttgag

SEQ ID NO: 770684 - DNA, 33 bp, Homo sapien
ctgaggtaatctgttagagaggtgtcagttgag

SEQ ID NO: 770685 - DNA, 33 bp, Homo sapien
tgtcagaggaatccatcagtgaacagctattga

SEQ ID NO: 770686 - DNA, 33 bp, Homo sapien
tgtcagaggaatccattagtgaacagctattga

SEQ ID NO: 770687 - DNA, 33 bp, Homo sapien
acatctcaataaaccaggtgacaatcagtacta

SEQ ID NO: 770688 - DNA, 33 bp, Homo sapien
acatctcaataaaccatgtgacaatcagtacta

SEQ ID NO: 770689 - DNA, 33 bp, Homo sapien
ttgtccctgttaaagaaagtcaatgtttagtgt

SEQ ID NO: 770690 - DNA, 33 bp, Homo sapien
ttgtccctgttaaagacagtcaatgtttagtgt

SEQ ID NO: 770691 - DNA, 33 bp, Homo sapien
aaaaaaggagccgtgcaatgtcctgcatgcagc

SEQ ID NO: 770692 - DNA, 33 bp, Homo sapien
aaaaaaggagccgtgcgatgtcctgcatgcagc

SEQ ID NO: 770693 - DNA, 33 bp, Homo sapien
tcagagaagcgatttgcagattttctgaagggg

SEQ ID NO: 770694 - DNA, 33 bp, Homo sapien
tcagagaagcgatttggagattttctgaagggg

SEQ ID NO: 770695 - DNA, 33 bp, Homo sapien
acagtggggaattgtaacagtgaaacagcaaaa

SEQ ID NO: 770696 - DNA, 33 bp, Homo sapien
acagtggggaattgtagcagtgaaacagcaaaa

SEQ ID NO: 770697 - DNA, 33 bp, Homo sapien
ctggctacttcttgccaaacagggtcaacgtgg

SEQ ID NO: 770698 - DNA, 33 bp, Homo sapien
ctggctacttcttgccgaacagggtcaacgtgg

SEQ ID NO: 770699 - DNA, 33 bp, Homo sapien
atgatagctttagtcaataagtacagtcaagga

SEQ ID NO: 770700 - DNA, 33 bp, Homo sapien
atgatagctttagtcagtaagtacagtcaagga

SEQ ID NO: 770701 - DNA, 33 bp, Homo sapien
tgtggcagaactgccaaacaagctctggactgc

SEQ ID NO: 770702 - DNA, 33 bp, Homo sapien
tgtggcagaactgccatacaagctctggactgc

SEQ ID NO: 770703 - DNA, 33 bp, Homo sapien
tttagttgttttatccaatggttatatcattct

SEQ ID NO: 770704 - DNA, 33 bp, Homo sapien
tttagttgttttatcctatggttatatcattct

SEQ ID NO: 770705 - DNA, 33 bp, Homo sapien
caggaaatttggacaccgaatagagagtgaatt

SEQ ID NO: 770706 - DNA, 33 bp, Homo sapien
caggaaatttggacactgaatagagagtgaatt

SEQ ID NO: 770707 - DNA, 33 bp, Homo sapien
tcaaccactactaaccagaaggtattgccaacc

SEQ ID NO: 770708 - DNA, 33 bp, Homo sapien
tcaaccactactaaccggaaggtattgccaacc

SEQ ID NO: 770709 - DNA, 33 bp, Homo sapien
atctccagccgatgacaaattgctcttgagaca

SEQ ID NO: 770710 - DNA, 33 bp, Homo sapien
atctccagccgatgacgaattgctcttgagaca

SEQ ID NO: 770711 - DNA, 33 bp, Homo sapien
atctgtaaaaattgaaactttctcagggcagaa

SEQ ID NO: 770712 - DNA, 33 bp, Homo sapien
atctgtaaaaattgaacctttctcagggcagaa

SEQ ID NO: 770713 - DNA, 33 bp, Homo sapien
cacaggtgtgattaagacatgagttacgtgtcc

SEQ ID NO: 770714 - DNA, 33 bp, Homo sapien
cacaggtgtgattaagtcatgagttacgtgtcc

SEQ ID NO: 770715 - DNA, 33 bp, Homo sapien
gtcacaacccagaggcagattcagcacacgagg

SEQ ID NO: 770716 - DNA, 33 bp, Homo sapien
gtcacaacccagaggccgattcagcacacgagg

SEQ ID NO: 770717 - DNA, 33 bp, Homo sapien
taagtccaagtgaatacagggcaaatagatggc

SEQ ID NO: 770718 - DNA, 33 bp, Homo sapien
taagtccaagtgaatatagggcaaatagatggc

SEQ ID NO: 770719 - DNA, 33 bp, Homo sapien
cctagataagatggataaatttcttgagagata

SEQ ID NO: 770720 - DNA, 33 bp, Homo sapien
cctagataagatggatcaatttcttgagagata

SEQ ID NO: 770721 - DNA, 33 bp, Homo sapien
tgtgctgggtaaaggaaactatggtaggtaggt

SEQ ID NO: 770722 - DNA, 33 bp, Homo sapien
tgtgctgggtaaaggagactatggtaggtaggt

SEQ ID NO: 770723 - DNA, 33 bp, Homo sapien
agaaatcctcttcttcccccagaaatcctgcac

SEQ ID NO: 770724 - DNA, 33 bp, Homo sapien
agaaatcctcttcttctcccagaaatcctgcac

SEQ ID NO: 770725 - DNA, 33 bp, Homo sapien
ggtgccactgccttcaaaatccctttctaggca

SEQ ID NO: 770726 - DNA, 33 bp, Homo sapien
ggtgccactgccttcacaatccctttctaggca

SEQ ID NO: 770727 - DNA, 33 bp, Homo sapien
ggcatgacttgccttcaacgaatgctgcatttt

SEQ ID NO: 770728 - DNA, 33 bp, Homo sapien
ggcatgacttgccttccacgaatgctgcatttt

SEQ ID NO: 770729 - DNA, 33 bp, Homo sapien
gacgtcccaaacagtaagatccagaatacatgg

SEQ ID NO: 770730 - DNA, 33 bp, Homo sapien
gacgtcccaaacagtaggatccagaatacatgg

SEQ ID NO: 770731 - DNA, 33 bp, Homo sapien
gggctctgcattaaaacggttcccacagctgag

SEQ ID NO: 770732 - DNA, 33 bp, Homo sapien
gggctctgcattaaaatggttcccacagctgag

SEQ ID NO: 770733 - DNA, 33 bp, Homo sapien
acagtaataacgtcatcagaaccctaaaggcaa

SEQ ID NO: 770734 - DNA, 33 bp, Homo sapien
acagtaataacgtcatgagaaccctaaaggcaa

SEQ ID NO: 770735 - DNA, 33 bp, Homo sapien
accttacctggaaaaagaactttgtgtgtttaa

SEQ ID NO: 770736 - DNA, 33 bp, Homo sapien
accttacctggaaaaataactttgtgtgtttaa

SEQ ID NO: 770737 - DNA, 33 bp, Homo sapien
cttgcacagagcctaacgtatggaagatggtgt

SEQ ID NO: 770738 - DNA, 33 bp, Homo sapien
cttgcacagagcctaatgtatggaagatggtgt

SEQ ID NO: 770739 - DNA, 33 bp, Homo sapien
aatcacaatataatatcacctctcacctgttag

SEQ ID NO: 770740 - DNA, 33 bp, Homo sapien
aatcacaatataatattacctctcacctgttag

SEQ ID NO: 770741 - DNA, 33 bp, Homo sapien
ccacattgtggctttcaaaagcagtccctggcc

SEQ ID NO: 770742 - DNA, 33 bp, Homo sapien
ccacattgtggctttccaaagcagtccctggcc

SEQ ID NO: 770743 - DNA, 33 bp, Homo sapien
gagttaagaaggtgagaacaatattgaagtgaa

SEQ ID NO: 770744 - DNA, 33 bp, Homo sapien
gagttaagaaggtgaggacaatattgaagtgaa

SEQ ID NO: 770745 - DNA, 33 bp, Homo sapien
tctttcctgactatcacctttctacaaacttcc

SEQ ID NO: 770746 - DNA, 33 bp, Homo sapien
tctttcctgactatcatctttctacaaacttcc

SEQ ID NO: 770747 - DNA, 33 bp, Homo sapien
catggcagaacatttacctgatccaaaagctta

SEQ ID NO: 770748 - DNA, 33 bp, Homo sapien
catggcagaacatttatctgatccaaaagctta

SEQ ID NO: 770749 - DNA, 33 bp, Homo sapien
tgtctactgattctacaagttgtggcatttctg

SEQ ID NO: 770750 - DNA, 33 bp, Homo sapien
tgtctactgattctaccagttgtggcatttctg

SEQ ID NO: 770751 - DNA, 33 bp, Homo sapien
actgttctcggtaagcaaatgagtaaataaact

SEQ ID NO: 770752 - DNA, 33 bp, Homo sapien
actgttctcggtaagccaatgagtaaataaact

SEQ ID NO: 770753 - DNA, 33 bp, Homo sapien
acaggtaaatgtgtgaagtatattaatgttaaa

SEQ ID NO: 770754 - DNA, 33 bp, Homo sapien
acaggtaaatgtgtgaggtatattaatgttaaa

SEQ ID NO: 770755 - DNA, 33 bp, Homo sapien
cttgcagtctttagaaaaaaccaactctgccaa

SEQ ID NO: 770756 - DNA, 33 bp, Homo sapien
cttgcagtctttagaagaaaccaactctgccaa

SEQ ID NO: 770757 - DNA, 33 bp, Homo sapien
tgacagctcaggattccaaccacgtgtgtgttc

SEQ ID NO: 770758 - DNA, 33 bp, Homo sapien
tgacagctcaggattctaaccacgtgtgtgttc

SEQ ID NO: 770759 - DNA, 33 bp, Homo sapien
ccattgtagacgaccacgtgagatgagagatat

SEQ ID NO: 770760 - DNA, 33 bp, Homo sapien
ccattgtagacgaccatgtgagatgagagatat

SEQ ID NO: 770761 - DNA, 33 bp, Homo sapien
gagatgacctctgcccgctaagttcaagttata

SEQ ID NO: 770762 - DNA, 33 bp, Homo sapien
gagatgacctctgccctctaagttcaagttata

SEQ ID NO: 770763 - DNA, 33 bp, Homo sapien
taatcaacactaatcccgatacaagtctcaatc

SEQ ID NO: 770764 - DNA, 33 bp, Homo sapien
taatcaacactaatcctgatacaagtctcaatc

SEQ ID NO: 770765 - DNA, 33 bp, Homo sapien
gcacaaacttgttaagactctgttagttacctc

SEQ ID NO: 770766 - DNA, 33 bp, Homo sapien
gcacaaacttgttaagcctctgttagttacctc

SEQ ID NO: 770767 - DNA, 33 bp, Homo sapien
aaacctcatgtcgagaatacaaacagatcctcc

SEQ ID NO: 770768 - DNA, 33 bp, Homo sapien
aaacctcatgtcgagagtacaaacagatcctcc

SEQ ID NO: 770769 - DNA, 33 bp, Homo sapien
gataattcagattagaaagaatccgagaagact

SEQ ID NO: 770770 - DNA, 33 bp, Homo sapien
gataattcagattagagagaatccgagaagact

SEQ ID NO: 770771 - DNA, 33 bp, Homo sapien
agctggagtgtatgtacgtgaaggatataaaga

SEQ ID NO: 770772 - DNA, 33 bp, Homo sapien
agctggagtgtatgtatgtgaaggatataaaga

SEQ ID NO: 770773 - DNA, 33 bp, Homo sapien
acatcattactgaggaaatgagggattgggatc

SEQ ID NO: 770774 - DNA, 33 bp, Homo sapien
acatcattactgaggagatgagggattgggatc

SEQ ID NO: 770775 - DNA, 33 bp, Homo sapien
aaaatcagaatgaacacggtaaaaaaggaaaga

SEQ ID NO: 770776 - DNA, 33 bp, Homo sapien
aaaatcagaatgaacatggtaaaaaaggaaaga

SEQ ID NO: 770777 - DNA, 33 bp, Homo sapien
gcctgagggtcattgacgcagactgagcggagc

SEQ ID NO: 770778 - DNA, 33 bp, Homo sapien
gcctgagggtcattgatgcagactgagcggagc

SEQ ID NO: 770779 - DNA, 33 bp, Homo sapien
agggaatgtggtagtacaaaacaatctagggaa

SEQ ID NO: 770780 - DNA, 33 bp, Homo sapien
agggaatgtggtagtagaaaacaatctagggaa

SEQ ID NO: 770781 - DNA, 33 bp, Homo sapien
cacatttgtttccatacgaggagtgatttgttg

SEQ ID NO: 770782 - DNA, 33 bp, Homo sapien
cacatttgtttccatatgaggagtgatttgttg

SEQ ID NO: 770783 - DNA, 33 bp, Homo sapien
ttgctggaaatccaaaaagagtgtgcggtttag

SEQ ID NO: 770784 - DNA, 33 bp, Homo sapien
ttgctggaaatccaaatagagtgtgcggtttag

SEQ ID NO: 770785 - DNA, 33 bp, Homo sapien
taagttcatatggaaactaaaggaatccagaat

SEQ ID NO: 770786 - DNA, 33 bp, Homo sapien
taagttcatatggaaattaaaggaatccagaat

SEQ ID NO: 770787 - DNA, 33 bp, Homo sapien
attgtgttttcctaaaaagcagttaaaattgag

SEQ ID NO: 770788 - DNA, 33 bp, Homo sapien
attgtgttttcctaaagagcagttaaaattgag

SEQ ID NO: 770789 - DNA, 33 bp, Homo sapien
ttcaaatataccgtggaattttcactttaccat

SEQ ID NO: 770790 - DNA, 33 bp, Homo sapien
ttcaaatataccgtgggattttcactttaccat

SEQ ID NO: 770791 - DNA, 33 bp, Homo sapien
caatacaactacattcaaaggcaggaatcatag

SEQ ID NO: 770792 - DNA, 33 bp, Homo sapien
caatacaactacattcgaaggcaggaatcatag

SEQ ID NO: 770793 - DNA, 33 bp, Homo sapien
tacttgagataattcaacacatctattacctac

SEQ ID NO: 770794 - DNA, 33 bp, Homo sapien
tacttgagataattcagcacatctattacctac

SEQ ID NO: 770795 - DNA, 33 bp, Homo sapien
ctattacctacatcaacgattggcaaactatgg

SEQ ID NO: 770796 - DNA, 33 bp, Homo sapien
ctattacctacatcaatgattggcaaactatgg

SEQ ID NO: 770797 - DNA, 33 bp, Homo sapien
gagctgtgatatacgagattctgtctcacaaag

SEQ ID NO: 770798 - DNA, 33 bp, Homo sapien
gagctgtgatatacgatattctgtctcacaaag

SEQ ID NO: 770799 - DNA, 33 bp, Homo sapien
ttgttgaatgtttttacgatgcctcaatttggc

SEQ ID NO: 770800 - DNA, 33 bp, Homo sapien
ttgttgaatgtttttatgatgcctcaatttggc

SEQ ID NO: 770801 - DNA, 33 bp, Homo sapien
acataaagacatgggacaattaaacgctacgtt

SEQ ID NO: 770802 - DNA, 33 bp, Homo sapien
acataaagacatgggagaattaaacgctacgtt

SEQ ID NO: 770803 - DNA, 33 bp, Homo sapien
ggtattatggctgagaaaaaagcactcttggcc

SEQ ID NO: 770804 - DNA, 33 bp, Homo sapien
ggtattatggctgagagaaaagcactcttggcc

SEQ ID NO: 770805 - DNA, 33 bp, Homo sapien
tttttcaaatctccataaagggcatacagagtg

SEQ ID NO: 770806 - DNA, 33 bp, Homo sapien
tttttcaaatctccatgaagggcatacagagtg

SEQ ID NO: 770807 - DNA, 33 bp, Homo sapien
tgatagagctgttgcacagactgagtgacttaa

SEQ ID NO: 770808 - DNA, 33 bp, Homo sapien
tgatagagctgttgcatagactgagtgacttaa

SEQ ID NO: 770809 - DNA, 33 bp, Homo sapien
ctctcactccttactccaggtcaaaggtgaagc

SEQ ID NO: 770810 - DNA, 33 bp, Homo sapien
ctctcactccttactctaggtcaaaggtgaagc

SEQ ID NO: 770811 - DNA, 33 bp, Homo sapien
agagtaaatttgggtacaagtgaacaaatgctc

SEQ ID NO: 770812 - DNA, 33 bp, Homo sapien
agagtaaatttgggtagaagtgaacaaatgctc

SEQ ID NO: 770813 - DNA, 33 bp, Homo sapien
attactggagagaaaaccagttgagagagaaag

SEQ ID NO: 770814 - DNA, 33 bp, Homo sapien
attactggagagaaaagcagttgagagagaaag

SEQ ID NO: 770815 - DNA, 33 bp, Homo sapien
cctatggaggggaaagaagcattctggggtaga

SEQ ID NO: 770816 - DNA, 33 bp, Homo sapien
cctatggaggggaaaggagcattctggggtaga

SEQ ID NO: 770817 - DNA, 33 bp, Homo sapien
gtaatgagtaggaaagaatggaaatgagtattt

SEQ ID NO: 770818 - DNA, 33 bp, Homo sapien
gtaatgagtaggaaaggatggaaatgagtattt

SEQ ID NO: 770819 - DNA, 33 bp, Homo sapien
gctaaagaactactgcaactgtccttgcaaccc

SEQ ID NO: 770820 - DNA, 33 bp, Homo sapien
gctaaagaactactgcgactgtccttgcaaccc

SEQ ID NO: 770821 - DNA, 33 bp, Homo sapien
tgcaagcaaactactaaggtggagtaatatttt

SEQ ID NO: 770822 - DNA, 33 bp, Homo sapien
tgcaagcaaactactatggtggagtaatatttt

SEQ ID NO: 770823 - DNA, 33 bp, Homo sapien
cctaagtccatatagaacttgtggctgggtttg

SEQ ID NO: 770824 - DNA, 33 bp, Homo sapien
cctaagtccatatagaccttgtggctgggtttg

SEQ ID NO: 770825 - DNA, 33 bp, Homo sapien
gggattagtttccttactgggagagaccagaga

SEQ ID NO: 770826 - DNA, 33 bp, Homo sapien
gggattagtttccttattgggagagaccagaga

SEQ ID NO: 770827 - DNA, 33 bp, Homo sapien
acattctgaatgacacagggtttctctcattct

SEQ ID NO: 770828 - DNA, 33 bp, Homo sapien
acattctgaatgacaccgggtttctctcattct

SEQ ID NO: 770829 - DNA, 33 bp, Homo sapien
aggcttttgaacaaaacgtcttcaccagctccc

SEQ ID NO: 770830 - DNA, 33 bp, Homo sapien
aggcttttgaacaaaatgtcttcaccagctccc

SEQ ID NO: 770831 - DNA, 33 bp, Homo sapien
ccttagctgcacaatcaccccttacatgaaagg

SEQ ID NO: 770832 - DNA, 33 bp, Homo sapien
ccttagctgcacaatcgccccttacatgaaagg

SEQ ID NO: 770833 - DNA, 33 bp, Homo sapien
agacttggcatttgacaaacagtaactaatatt

SEQ ID NO: 770834 - DNA, 33 bp, Homo sapien
agacttggcatttgacgaacagtaactaatatt

SEQ ID NO: 770835 - DNA, 33 bp, Homo sapien
gagtcaagccctgatgcaagtgaatccagagat

SEQ ID NO: 770836 - DNA, 33 bp, Homo sapien
gagtcaagccctgatgtaagtgaatccagagat

SEQ ID NO: 770837 - DNA, 33 bp, Homo sapien
aggaaaagcacaaatcagagtcagcatccactg

SEQ ID NO: 770838 - DNA, 33 bp, Homo sapien
aggaaaagcacaaatcggagtcagcatccactg

SEQ ID NO: 770839 - DNA, 33 bp, Homo sapien
attaataaaatgaaccacgtataattgccattt

SEQ ID NO: 770840 - DNA, 33 bp, Homo sapien
attaataaaatgaaccgcgtataattgccattt

SEQ ID NO: 770841 - DNA, 33 bp, Homo sapien
attctcagcaagctatcaaaagatcagaaaaca

SEQ ID NO: 770842 - DNA, 33 bp, Homo sapien
attctcagcaagctatgaaaagatcagaaaaca

SEQ ID NO: 770843 - DNA, 33 bp, Homo sapien
ctaattgttacccatcacctcaggcagacgtga

SEQ ID NO: 770844 - DNA, 33 bp, Homo sapien
ctaattgttacccatcgcctcaggcagacgtga

SEQ ID NO: 770845 - DNA, 33 bp, Homo sapien
ttatgttcaaggaatcgccgaagttcaggaaga

SEQ ID NO: 770846 - DNA, 33 bp, Homo sapien
ttatgttcaaggaatctccgaagttcaggaaga

SEQ ID NO: 770847 - DNA, 33 bp, Homo sapien
ccactcattatgtccacgttgagtacccccatc

SEQ ID NO: 770848 - DNA, 33 bp, Homo sapien
ccactcattatgtccatgttgagtacccccatc

SEQ ID NO: 770849 - DNA, 33 bp, Homo sapien
ttccatattaaagacacaatgccagcctcacat

SEQ ID NO: 770850 - DNA, 33 bp, Homo sapien
ttccatattaaagacataatgccagcctcacat

SEQ ID NO: 770851 - DNA, 33 bp, Homo sapien
cactctcctactagaaaataaacccttggagag

SEQ ID NO: 770852 - DNA, 33 bp, Homo sapien
cactctcctactagaacataaacccttggagag

SEQ ID NO: 770853 - DNA, 33 bp, Homo sapien
gatggaactctttacaataagtaatgctagcta

SEQ ID NO: 770854 - DNA, 33 bp, Homo sapien
gatggaactctttacagtaagtaatgctagcta

SEQ ID NO: 770855 - DNA, 33 bp, Homo sapien
gaaaatcctgatccacagtgacaagaatcttta

SEQ ID NO: 770856 - DNA, 33 bp, Homo sapien
gaaaatcctgatccacggtgacaagaatcttta

SEQ ID NO: 770857 - DNA, 33 bp, Homo sapien
ttgcacattcaatcaaggcttattaaattgaat

SEQ ID NO: 770858 - DNA, 33 bp, Homo sapien
ttgcacattcaatcaatgcttattaaattgaat

SEQ ID NO: 770859 - DNA, 33 bp, Homo sapien
gcattgaatgttgtgcacactttagaccttata

SEQ ID NO: 770860 - DNA, 33 bp, Homo sapien
gcattgaatgttgtgcgcactttagaccttata

SEQ ID NO: 770861 - DNA, 33 bp, Homo sapien
agagcctggcaggtcaagaatctagcacaggga

SEQ ID NO: 770862 - DNA, 33 bp, Homo sapien
agagcctggcaggtcaggaatctagcacaggga

SEQ ID NO: 770863 - DNA, 33 bp, Homo sapien
caaagctttcttggacaatagtccctggcagag

SEQ ID NO: 770864 - DNA, 33 bp, Homo sapien
caaagctttcttggaccatagtccctggcagag

SEQ ID NO: 770865 - DNA, 33 bp, Homo sapien
gatggataaccacagaaaacaaaataatacagt

SEQ ID NO: 770866 - DNA, 33 bp, Homo sapien
gatggataaccacagataacaaaataatacagt

SEQ ID NO: 770867 - DNA, 33 bp, Homo sapien
cacataataaatagccggacagctcaaatttcc

SEQ ID NO: 770868 - DNA, 33 bp, Homo sapien
cacataataaatagcctgacagctcaaatttcc

SEQ ID NO: 770869 - DNA, 33 bp, Homo sapien
ccctcctgttgatatacgtctgggtgatgagct

SEQ ID NO: 770870 - DNA, 33 bp, Homo sapien
ccctcctgttgatatatgtctgggtgatgagct

SEQ ID NO: 770871 - DNA, 33 bp, Homo sapien
attttaaggagaaatgaaacacaaatctcaagt

SEQ ID NO: 770872 - DNA, 33 bp, Homo sapien
attttaaggagaaatggaacacaaatctcaagt

SEQ ID NO: 770873 - DNA, 33 bp, Homo sapien
agtgtcacagcctacaaactcagtttctgagcc

SEQ ID NO: 770874 - DNA, 33 bp, Homo sapien
agtgtcacagcctacagactcagtttctgagcc

SEQ ID NO: 770875 - DNA, 33 bp, Homo sapien
cttatcctgctgaaatcacacatgaaccctttc

SEQ ID NO: 770876 - DNA, 33 bp, Homo sapien
cttatcctgctgaaattacacatgaaccctttc

SEQ ID NO: 770877 - DNA, 33 bp, Homo sapien
gtgacatgccatttaaagaacagacaccagaga

SEQ ID NO: 770878 - DNA, 33 bp, Homo sapien
gtgacatgccatttaacgaacagacaccagaga

SEQ ID NO: 770879 - DNA, 33 bp, Homo sapien
gagtctttgggtcttgaaatatgcttacagtta

SEQ ID NO: 770880 - DNA, 33 bp, Homo sapien
gagtctttgggtcttgcaatatgcttacagtta

SEQ ID NO: 770881 - DNA, 33 bp, Homo sapien
acattgtggcacctgaccttaggaggaagaaat

SEQ ID NO: 770882 - DNA, 33 bp, Homo sapien
acattgtggcacctgagcttaggaggaagaaat

SEQ ID NO: 770883 - DNA, 33 bp, Homo sapien
tattcttccttgtagacggatttcatttttgga

SEQ ID NO: 770884 - DNA, 33 bp, Homo sapien
tattcttccttgtagatggatttcatttttgga

SEQ ID NO: 770885 - DNA, 33 bp, Homo sapien
caggaaatatttaccaacttcacaggtgtcagg

SEQ ID NO: 770886 - DNA, 33 bp, Homo sapien
caggaaatatttaccagcttcacaggtgtcagg

SEQ ID NO: 770887 - DNA, 33 bp, Homo sapien
caaatttatattcctaccaacagcttataaatt

SEQ ID NO: 770888 - DNA, 33 bp, Homo sapien
caaatttatattcctatcaacagcttataaatt

SEQ ID NO: 770889 - DNA, 33 bp, Homo sapien
ggttgacctgtctccacgtaagattacctaaat

SEQ ID NO: 770890 - DNA, 33 bp, Homo sapien
ggttgacctgtctccatgtaagattacctaaat

SEQ ID NO: 770891 - DNA, 33 bp, Homo sapien
ggctgtgtgttgaacaatcacgaaaatagagcc

SEQ ID NO: 770892 - DNA, 33 bp, Homo sapien
ggctgtgtgttgaacagtcacgaaaatagagcc

SEQ ID NO: 770893 - DNA, 33 bp, Homo sapien
gtggaaagttggagaaaacaagctcgtgctctg

SEQ ID NO: 770894 - DNA, 33 bp, Homo sapien
gtggaaagttggagaagacaagctcgtgctctg

SEQ ID NO: 770895 - DNA, 33 bp, Homo sapien
tgggcttcactcctgacacaggcttcacatcac

SEQ ID NO: 770896 - DNA, 33 bp, Homo sapien
tgggcttcactcctgatacaggcttcacatcac

SEQ ID NO: 770897 - DNA, 33 bp, Homo sapien
taaagttttagttttcaatatcgctgcaggcac

SEQ ID NO: 770898 - DNA, 33 bp, Homo sapien
taaagttttagttttccatatcgctgcaggcac

SEQ ID NO: 770899 - DNA, 33 bp, Homo sapien
attaatgagattagcaaaatactggataaatat

SEQ ID NO: 770900 - DNA, 33 bp, Homo sapien
attaatgagattagcacaatactggataaatat

SEQ ID NO: 770901 - DNA, 33 bp, Homo sapien
tatccttcagtctctacccatgacaatacctgt

SEQ ID NO: 770902 - DNA, 33 bp, Homo sapien
tatccttcagtctctagccatgacaatacctgt

SEQ ID NO: 770903 - DNA, 33 bp, Homo sapien
agatgaggcagagcggacattggatgtaacttg

SEQ ID NO: 770904 - DNA, 33 bp, Homo sapien
agatgaggcagagcgggcattggatgtaacttg

SEQ ID NO: 770905 - DNA, 33 bp, Homo sapien
caaacaagagcaaatgacaaagtagtccacaca

SEQ ID NO: 770906 - DNA, 33 bp, Homo sapien
caaacaagagcaaatggcaaagtagtccacaca

SEQ ID NO: 770907 - DNA, 33 bp, Homo sapien
cccacgtagagcaatgaacagggagtcaaacag

SEQ ID NO: 770908 - DNA, 33 bp, Homo sapien
cccacgtagagcaatgcacagggagtcaaacag

SEQ ID NO: 770909 - DNA, 33 bp, Homo sapien
gtgtcccatttctgatcacaccagggaaggagc

SEQ ID NO: 770910 - DNA, 33 bp, Homo sapien
gtgtcccatttctgatgacaccagggaaggagc

SEQ ID NO: 770911 - DNA, 33 bp, Homo sapien
gtcataagcactggcgcatctaggcttccatgg

SEQ ID NO: 770912 - DNA, 33 bp, Homo sapien
gtcataagcactggcgtatctaggcttccatgg

SEQ ID NO: 770913 - DNA, 33 bp, Homo sapien
gtgattggctgttctcccctgaaaagatgggcc

SEQ ID NO: 770914 - DNA, 33 bp, Homo sapien
gtgattggctgttctcgcctgaaaagatgggcc

SEQ ID NO: 770915 - DNA, 33 bp, Homo sapien
ggtagtctgagaaacactgctctgtagacataa

SEQ ID NO: 770916 - DNA, 33 bp, Homo sapien
ggtagtctgagaaacagtgctctgtagacataa

SEQ ID NO: 770917 - DNA, 33 bp, Homo sapien
attgcaaaatcaggaccgggtggaaatttctca

SEQ ID NO: 770918 - DNA, 33 bp, Homo sapien
attgcaaaatcaggacggggtggaaatttctca

SEQ ID NO: 770919 - DNA, 33 bp, Homo sapien
tctctttaccttaggaaatttttgaatcaggtc

SEQ ID NO: 770920 - DNA, 33 bp, Homo sapien
tctctttaccttaggatatttttgaatcaggtc

SEQ ID NO: 770921 - DNA, 33 bp, Homo sapien
taacatttggtattaaaatatgttctggcatgg

SEQ ID NO: 770922 - DNA, 33 bp, Homo sapien
taacatttggtattaagatatgttctggcatgg

SEQ ID NO: 770923 - DNA, 33 bp, Homo sapien
aaataatcaaaatgccaccaaacaaggaattag

SEQ ID NO: 770924 - DNA, 33 bp, Homo sapien
aaataatcaaaatgccgccaaacaaggaattag

SEQ ID NO: 770925 - DNA, 33 bp, Homo sapien
gtctacagcaaaaatacgaaagcatcgactata

SEQ ID NO: 770926 - DNA, 33 bp, Homo sapien
gtctacagcaaaaatatgaaagcatcgactata

SEQ ID NO: 770927 - DNA, 33 bp, Homo sapien
tcacacagctaataaacggcaaagtggtgttct

SEQ ID NO: 770928 - DNA, 33 bp, Homo sapien
tcacacagctaataaatggcaaagtggtgttct

SEQ ID NO: 770929 - DNA, 33 bp, Homo sapien
ttatccagagagattagggaaaattgtagaagc

SEQ ID NO: 770930 - DNA, 33 bp, Homo sapien
ttatccagagagattatggaaaattgtagaagc

SEQ ID NO: 770931 - DNA, 33 bp, Homo sapien
aaaattgtagaagctcaaataaacctaacctga

SEQ ID NO: 770932 - DNA, 33 bp, Homo sapien
aaaattgtagaagctcgaataaacctaacctga

SEQ ID NO: 770933 - DNA, 33 bp, Homo sapien
ctgattcagaggacaggacattgagagtctgtt

SEQ ID NO: 770934 - DNA, 33 bp, Homo sapien
ctgattcagaggacagtacattgagagtctgtt

SEQ ID NO: 770935 - DNA, 33 bp, Homo sapien
ttctcagctcctctcactctcaaggttatttca

SEQ ID NO: 770936 - DNA, 33 bp, Homo sapien
ttctcagctcctctcattctcaaggttatttca

SEQ ID NO: 770937 - DNA, 33 bp, Homo sapien
taaacactctcatggaacatcagtgtcagacca

SEQ ID NO: 770938 - DNA, 33 bp, Homo sapien
taaacactctcatggagcatcagtgtcagacca

SEQ ID NO: 770939 - DNA, 33 bp, Homo sapien
ggcaaaccatacatgcagatagagagaacctta

SEQ ID NO: 770940 - DNA, 33 bp, Homo sapien
ggcaaaccatacatgctgatagagagaacctta

SEQ ID NO: 770941 - DNA, 33 bp, Homo sapien
gcagcacctgtacccaatggctcagtggagatg

SEQ ID NO: 770942 - DNA, 33 bp, Homo sapien
gcagcacctgtacccagtggctcagtggagatg

SEQ ID NO: 770943 - DNA, 33 bp, Homo sapien
gcgtgaccaggtagaactagcctcagcatggaa

SEQ ID NO: 770944 - DNA, 33 bp, Homo sapien
gcgtgaccaggtagaattagcctcagcatggaa

SEQ ID NO: 770945 - DNA, 33 bp, Homo sapien
ttggggatacatgtgaccatttaagtgagacta

SEQ ID NO: 770946 - DNA, 33 bp, Homo sapien
ttggggatacatgtgatcatttaagtgagacta

SEQ ID NO: 770947 - DNA, 33 bp, Homo sapien
agccttacctgaagaaaggtgtgcagtatgcat

SEQ ID NO: 770948 - DNA, 33 bp, Homo sapien
agccttacctgaagaagggtgtgcagtatgcat

SEQ ID NO: 770949 - DNA, 33 bp, Homo sapien
ggataatacatattcaaaccaataacatacagc

SEQ ID NO: 770950 - DNA, 33 bp, Homo sapien
ggataatacatattcagaccaataacatacagc

SEQ ID NO: 770951 - DNA, 33 bp, Homo sapien
taattgagagaagtgccctttggtcatgacata

SEQ ID NO: 770952 - DNA, 33 bp, Homo sapien
taattgagagaagtgctctttggtcatgacata

SEQ ID NO: 770953 - DNA, 33 bp, Homo sapien
acttgaaaaacacttactaaaatctcactatat

SEQ ID NO: 770954 - DNA, 33 bp, Homo sapien
acttgaaaaacacttattaaaatctcactatat

SEQ ID NO: 770955 - DNA, 33 bp, Homo sapien
gagtccagaccagacccgggtgttttctgctgc

SEQ ID NO: 770956 - DNA, 33 bp, Homo sapien
gagtccagaccagacctgggtgttttctgctgc

SEQ ID NO: 770957 - DNA, 33 bp, Homo sapien
tttccacgttttaatagacttttcacaattata

SEQ ID NO: 770958 - DNA, 33 bp, Homo sapien
tttccacgttttaatatacttttcacaattata

SEQ ID NO: 770959 - DNA, 33 bp, Homo sapien
atatgtgtaagtagagccaggtcttagaagcag

SEQ ID NO: 770960 - DNA, 33 bp, Homo sapien
atatgtgtaagtagagtcaggtcttagaagcag

SEQ ID NO: 770961 - DNA, 33 bp, Homo sapien
gaggtgatttggagaggaaagactatgcttgaa

SEQ ID NO: 770962 - DNA, 33 bp, Homo sapien
gaggtgatttggagagtaaagactatgcttgaa

SEQ ID NO: 770963 - DNA, 33 bp, Homo sapien
ttgtatataactgtgacgattgtcagtactagc

SEQ ID NO: 770964 - DNA, 33 bp, Homo sapien
ttgtatataactgtgatgattgtcagtactagc

SEQ ID NO: 770965 - DNA, 33 bp, Homo sapien
ttctccactggtaaacacttagtctctgtctca

SEQ ID NO: 770966 - DNA, 33 bp, Homo sapien
ttctccactggtaaactcttagtctctgtctca

SEQ ID NO: 770967 - DNA, 33 bp, Homo sapien
taagaaggtgcagacaacccaaacactcatcaa

SEQ ID NO: 770968 - DNA, 33 bp, Homo sapien
taagaaggtgcagacagcccaaacactcatcaa

SEQ ID NO: 770969 - DNA, 33 bp, Homo sapien
aaggcccgtatatcaaccctggctcaaccactc

SEQ ID NO: 770970 - DNA, 33 bp, Homo sapien
aaggcccgtatatcaatcctggctcaaccactc

SEQ ID NO: 770971 - DNA, 33 bp, Homo sapien
gtgccagattaatgtacgctccgtgcttcaaat

SEQ ID NO: 770972 - DNA, 33 bp, Homo sapien
gtgccagattaatgtatgctccgtgcttcaaat

SEQ ID NO: 770973 - DNA, 33 bp, Homo sapien
tcctttttcacaagaacgacagctgaatactct

SEQ ID NO: 770974 - DNA, 33 bp, Homo sapien
tcctttttcacaagaatgacagctgaatactct

SEQ ID NO: 770975 - DNA, 33 bp, Homo sapien
actgtcatctcttaaaatcagagctaattccta

SEQ ID NO: 770976 - DNA, 33 bp, Homo sapien
actgtcatctcttaaagtcagagctaattccta

SEQ ID NO: 770977 - DNA, 33 bp, Homo sapien
aaacattcagaacataacgctaatgtaactttt

SEQ ID NO: 770978 - DNA, 33 bp, Homo sapien
aaacattcagaacatagcgctaatgtaactttt

SEQ ID NO: 770979 - DNA, 33 bp, Homo sapien
aaactggagtgtgggaagagaatcattcacata

SEQ ID NO: 770980 - DNA, 33 bp, Homo sapien
aaactggagtgtgggacgagaatcattcacata

SEQ ID NO: 770981 - DNA, 33 bp, Homo sapien
ttacagatatgttgacactttttcaaatctttt

SEQ ID NO: 770982 - DNA, 33 bp, Homo sapien
ttacagatatgttgactctttttcaaatctttt

SEQ ID NO: 770983 - DNA, 33 bp, Homo sapien
attttggattttgataccatggaattaatgctt

SEQ ID NO: 770984 - DNA, 33 bp, Homo sapien
attttggattttgatatcatggaattaatgctt

SEQ ID NO: 770985 - DNA, 33 bp, Homo sapien
gttgggccaagtacctaaagatcaggtgtgtta

SEQ ID NO: 770986 - DNA, 33 bp, Homo sapien
gttgggccaagtacctgaagatcaggtgtgtta

SEQ ID NO: 770987 - DNA, 33 bp, Homo sapien
ttcacagctctgtcccaacttgtcctgtctccc

SEQ ID NO: 770988 - DNA, 33 bp, Homo sapien
ttcacagctctgtcccgacttgtcctgtctccc

SEQ ID NO: 770989 - DNA, 33 bp, Homo sapien
ggtgatacagtttttcccaagcagactgtgagc

SEQ ID NO: 770990 - DNA, 33 bp, Homo sapien
ggtgatacagtttttctcaagcagactgtgagc

SEQ ID NO: 770991 - DNA, 33 bp, Homo sapien
atgttgaataagtggaataaaggagtcaaatgc

SEQ ID NO: 770992 - DNA, 33 bp, Homo sapien
atgttgaataagtggagtaaaggagtcaaatgc

SEQ ID NO: 770993 - DNA, 33 bp, Homo sapien
tgtcattctcctgttaaacaggtggctttagat

SEQ ID NO: 770994 - DNA, 33 bp, Homo sapien
tgtcattctcctgttatacaggtggctttagat

SEQ ID NO: 770995 - DNA, 33 bp, Homo sapien
gactacctactatcgcactgagctatttttgtt

SEQ ID NO: 770996 - DNA, 33 bp, Homo sapien
gactacctactatcgcgctgagctatttttgtt

SEQ ID NO: 770997 - DNA, 33 bp, Homo sapien
actttatcacttaggggattttatggaggtttc

SEQ ID NO: 770998 - DNA, 33 bp, Homo sapien
actttatcacttagggtattttatggaggtttc

SEQ ID NO: 770999 - DNA, 33 bp, Homo sapien
ttggccattgggataactcaatctctagcccct

SEQ ID NO: 771000 - DNA, 33 bp, Homo sapien
ttggccattgggataattcaatctctagcccct

SEQ ID NO: 771001 - DNA, 33 bp, Homo sapien
tgattcattcctttgcactcatcatactgttat

SEQ ID NO: 771002 - DNA, 33 bp, Homo sapien
tgattcattcctttgcgctcatcatactgttat

SEQ ID NO: 771003 - DNA, 33 bp, Homo sapien
atgacagattttccccaaaaaaattatcacttt

SEQ ID NO: 771004 - DNA, 33 bp, Homo sapien
atgacagattttcccccaaaaaattatcacttt

SEQ ID NO: 771005 - DNA, 33 bp, Homo sapien
ggaccatctcattagaactatacttccacccta

SEQ ID NO: 771006 - DNA, 33 bp, Homo sapien
ggaccatctcattagagctatacttccacccta

SEQ ID NO: 771007 - DNA, 33 bp, Homo sapien
gttggcagttaaaacaatgaaacctgtcagtct

SEQ ID NO: 771008 - DNA, 33 bp, Homo sapien
gttggcagttaaaacagtgaaacctgtcagtct

SEQ ID NO: 771009 - DNA, 33 bp, Homo sapien
attatagttgcaaagaagctactattcatatta

SEQ ID NO: 771010 - DNA, 33 bp, Homo sapien
attatagttgcaaagaggctactattcatatta

SEQ ID NO: 771011 - DNA, 33 bp, Homo sapien
caagactgccagatataagaatttgcactcttt

SEQ ID NO: 771012 - DNA, 33 bp, Homo sapien
caagactgccagatatgagaatttgcactcttt

SEQ ID NO: 771013 - DNA, 33 bp, Homo sapien
aatggaaaatatctgtcaatgctgtaaacagat

SEQ ID NO: 771014 - DNA, 33 bp, Homo sapien
aatggaaaatatctgttaatgctgtaaacagat

SEQ ID NO: 771015 - DNA, 33 bp, Homo sapien
ctgttatcagtaagccaattacctgaggttatt

SEQ ID NO: 771016 - DNA, 33 bp, Homo sapien
ctgttatcagtaagccgattacctgaggttatt

SEQ ID NO: 771017 - DNA, 33 bp, Homo sapien
tctactttggctcctgaattccaatcatctctt

SEQ ID NO: 771018 - DNA, 33 bp, Homo sapien
tctactttggctcctggattccaatcatctctt

SEQ ID NO: 771019 - DNA, 33 bp, Homo sapien
catctgatctgatttgcaaaccgtctcctaggg

SEQ ID NO: 771020 - DNA, 33 bp, Homo sapien
catctgatctgatttgtaaaccgtctcctaggg

SEQ ID NO: 771021 - DNA, 33 bp, Homo sapien
actgcccagatgtacaagttaatttcaagtagt

SEQ ID NO: 771022 - DNA, 33 bp, Homo sapien
actgcccagatgtacaggttaatttcaagtagt

SEQ ID NO: 771023 - DNA, 33 bp, Homo sapien
gttttgtagtagtttcaactttaaaaagtacac

SEQ ID NO: 771024 - DNA, 33 bp, Homo sapien
gttttgtagtagtttcgactttaaaaagtacac

SEQ ID NO: 771025 - DNA, 33 bp, Homo sapien
cagggaatgcttcattcaaaggcagtccttaaa

SEQ ID NO: 771026 - DNA, 33 bp, Homo sapien
cagggaatgcttcattgaaaggcagtccttaaa

SEQ ID NO: 771027 - DNA, 33 bp, Homo sapien
aatggtgtagtacttgaaggccaaaacctctgg

SEQ ID NO: 771028 - DNA, 33 bp, Homo sapien
aatggtgtagtacttgcaggccaaaacctctgg

SEQ ID NO: 771029 - DNA, 33 bp, Homo sapien
gccagtgaattagccaatatttcccagaagctg

SEQ ID NO: 771030 - DNA, 33 bp, Homo sapien
gccagtgaattagccagtatttcccagaagctg

SEQ ID NO: 771031 - DNA, 33 bp, Homo sapien
tatttgttagcggttaagtattatatttttcca

SEQ ID NO: 771032 - DNA, 33 bp, Homo sapien
tatttgttagcggttaggtattatatttttcca

SEQ ID NO: 771033 - DNA, 33 bp, Homo sapien
taaaatactgtttgccaaatgtgtagctctctg

SEQ ID NO: 771034 - DNA, 33 bp, Homo sapien
taaaatactgtttgccgaatgtgtagctctctg

SEQ ID NO: 771035 - DNA, 33 bp, Homo sapien
gagttacacgaaaatgaagactgcacactgaaa

SEQ ID NO: 771036 - DNA, 33 bp, Homo sapien
gagttacacgaaaatggagactgcacactgaaa

SEQ ID NO: 771037 - DNA, 33 bp, Homo sapien
atctgacaaaatagaccgaaaaccaatacaact

SEQ ID NO: 771038 - DNA, 33 bp, Homo sapien
atctgacaaaatagactgaaaaccaatacaact

SEQ ID NO: 771039 - DNA, 33 bp, Homo sapien
ttacatgtgcttctaactgaatgtaaaatatgg

SEQ ID NO: 771040 - DNA, 33 bp, Homo sapien
ttacatgtgcttctaattgaatgtaaaatatgg

SEQ ID NO: 771041 - DNA, 33 bp, Homo sapien
ttctcctgcaaagctacaatgttgtaagatcta

SEQ ID NO: 771042 - DNA, 33 bp, Homo sapien
ttctcctgcaaagctataatgttgtaagatcta

SEQ ID NO: 771043 - DNA, 33 bp, Homo sapien
aaatgagtaaagtgtgcattctgtattgagggg

SEQ ID NO: 771044 - DNA, 33 bp, Homo sapien
aaatgagtaaagtgtggattctgtattgagggg

SEQ ID NO: 771045 - DNA, 33 bp, Homo sapien
aatactaccaatagtgacaattatttttcataa

SEQ ID NO: 771046 - DNA, 33 bp, Homo sapien
aatactaccaatagtggcaattatttttcataa

SEQ ID NO: 771047 - DNA, 33 bp, Homo sapien
tttatgttctcactagcaatttgcaagataact

SEQ ID NO: 771048 - DNA, 33 bp, Homo sapien
tttatgttctcactagtaatttgcaagataact

SEQ ID NO: 771049 - DNA, 33 bp, Homo sapien
gtaacacaaccacttaaagttttcctttcagtc

SEQ ID NO: 771050 - DNA, 33 bp, Homo sapien
gtaacacaaccacttatagttttcctttcagtc

SEQ ID NO: 771051 - DNA, 33 bp, Homo sapien
atctctggtgcttagacctgtacactgcccaca

SEQ ID NO: 771052 - DNA, 33 bp, Homo sapien
atctctggtgcttagatctgtacactgcccaca

SEQ ID NO: 771053 - DNA, 33 bp, Homo sapien
agtttgttccctcatcactcctataggcctcaa

SEQ ID NO: 771054 - DNA, 33 bp, Homo sapien
agtttgttccctcatctctcctataggcctcaa

SEQ ID NO: 771055 - DNA, 33 bp, Homo sapien
acaattaacctcctcacatcaggactggtgcct

SEQ ID NO: 771056 - DNA, 33 bp, Homo sapien
acaattaacctcctcatatcaggactggtgcct

SEQ ID NO: 771057 - DNA, 33 bp, Homo sapien
ctctattattatcagcaagaatacttttaaaag

SEQ ID NO: 771058 - DNA, 33 bp, Homo sapien
ctctattattatcagcgagaatacttttaaaag

SEQ ID NO: 771059 - DNA, 33 bp, Homo sapien
tgggtgaaggctgcaaagatgacataatctgtg

SEQ ID NO: 771060 - DNA, 33 bp, Homo sapien
tgggtgaaggctgcaaggatgacataatctgtg

SEQ ID NO: 771061 - DNA, 33 bp, Homo sapien
aaggcaggagaacacacgataattaatagtact

SEQ ID NO: 771062 - DNA, 33 bp, Homo sapien
aaggcaggagaacacaggataattaatagtact

SEQ ID NO: 771063 - DNA, 33 bp, Homo sapien
aagctatttgctgaaggcataacaaagcaactc

SEQ ID NO: 771064 - DNA, 33 bp, Homo sapien
aagctatttgctgaagtcataacaaagcaactc

SEQ ID NO: 771065 - DNA, 33 bp, Homo sapien
atatgactcgtagactaaattaaatgcagtcct

SEQ ID NO: 771066 - DNA, 33 bp, Homo sapien
atatgactcgtagacttaattaaatgcagtcct

SEQ ID NO: 771067 - DNA, 33 bp, Homo sapien
tttatgaaaggataaacgaaatcgacaagagaa

SEQ ID NO: 771068 - DNA, 33 bp, Homo sapien
tttatgaaaggataaatgaaatcgacaagagaa

SEQ ID NO: 771069 - DNA, 33 bp, Homo sapien
tgatagccaaaacttccctgtcaattcctgaca

SEQ ID NO: 771070 - DNA, 33 bp, Homo sapien
tgatagccaaaacttctctgtcaattcctgaca

SEQ ID NO: 771071 - DNA, 33 bp, Homo sapien
gaccaagtaatcaatcaatcaatacagcatggg

SEQ ID NO: 771072 - DNA, 33 bp, Homo sapien
gaccaagtaatcaatccatcaatacagcatggg

SEQ ID NO: 771073 - DNA, 33 bp, Homo sapien
tggaaagaggtactgacctttaagtcacattcc

SEQ ID NO: 771074 - DNA, 33 bp, Homo sapien
tggaaagaggtactgatctttaagtcacattcc

SEQ ID NO: 771075 - DNA, 33 bp, Homo sapien
tggataactgaaattgaagagctatatatgttg

SEQ ID NO: 771076 - DNA, 33 bp, Homo sapien
tggataactgaaattgcagagctatatatgttg

SEQ ID NO: 771077 - DNA, 33 bp, Homo sapien
atgacatgatgaacaacttgatgccaataaact

SEQ ID NO: 771078 - DNA, 33 bp, Homo sapien
atgacatgatgaacaatttgatgccaataaact

SEQ ID NO: 771079 - DNA, 33 bp, Homo sapien
gctgccacaggggtcaaagtttgccgaaccctg

SEQ ID NO: 771080 - DNA, 33 bp, Homo sapien
gctgccacaggggtcatagtttgccgaaccctg

SEQ ID NO: 771081 - DNA, 33 bp, Homo sapien
ctctcatttattttcacggcaaatgcattttta

SEQ ID NO: 771082 - DNA, 33 bp, Homo sapien
ctctcatttattttcatggcaaatgcattttta

SEQ ID NO: 771083 - DNA, 33 bp, Homo sapien
ctgtgagatcaagtaccacctcaatagtttgga

SEQ ID NO: 771084 - DNA, 33 bp, Homo sapien
ctgtgagatcaagtactacctcaatagtttgga

SEQ ID NO: 771085 - DNA, 33 bp, Homo sapien
aaaaggacagagtacaatgagagagtttgagat

SEQ ID NO: 771086 - DNA, 33 bp, Homo sapien
aaaaggacagagtacagtgagagagtttgagat

SEQ ID NO: 771087 - DNA, 33 bp, Homo sapien
cctaacaaatccgtgaagtagacagtattcgct

SEQ ID NO: 771088 - DNA, 33 bp, Homo sapien
cctaacaaatccgtgacgtagacagtattcgct

SEQ ID NO: 771089 - DNA, 33 bp, Homo sapien
atcctgatacttcttacaagatttgcaatgaag

SEQ ID NO: 771090 - DNA, 33 bp, Homo sapien
atcctgatacttcttagaagatttgcaatgaag

SEQ ID NO: 771091 - DNA, 33 bp, Homo sapien
aatctaccaaagaaacagtgatgatttgtcatg

SEQ ID NO: 771092 - DNA, 33 bp, Homo sapien
aatctaccaaagaaacggtgatgatttgtcatg

SEQ ID NO: 771093 - DNA, 33 bp, Homo sapien
ttttctagttttatgacaatttatactactgat

SEQ ID NO: 771094 - DNA, 33 bp, Homo sapien
ttttctagttttatgagaatttatactactgat

SEQ ID NO: 771095 - DNA, 33 bp, Homo sapien
cctaacatttgtggaacgcagggcaagaataca

SEQ ID NO: 771096 - DNA, 33 bp, Homo sapien
cctaacatttgtggaatgcagggcaagaataca

SEQ ID NO: 771097 - DNA, 33 bp, Homo sapien
ggagttcttcagcagcacattgtgtactaatgc

SEQ ID NO: 771098 - DNA, 33 bp, Homo sapien
ggagttcttcagcagctcattgtgtactaatgc

SEQ ID NO: 771099 - DNA, 33 bp, Homo sapien
aaatggaatttgagataagttcaccaagatagg

SEQ ID NO: 771100 - DNA, 33 bp, Homo sapien
aaatggaatttgagatcagttcaccaagatagg

SEQ ID NO: 771101 - DNA, 33 bp, Homo sapien
gtaagctctctagagcaaaaatataaattaagc

SEQ ID NO: 771102 - DNA, 33 bp, Homo sapien
gtaagctctctagagcgaaaatataaattaagc

SEQ ID NO: 771103 - DNA, 33 bp, Homo sapien
tttatttttaggtgaaagagtcctaatattcct

SEQ ID NO: 771104 - DNA, 33 bp, Homo sapien
tttatttttaggtgaaggagtcctaatattcct

SEQ ID NO: 771105 - DNA, 33 bp, Homo sapien
aaaatactgggctggacggtatttggtcttatt

SEQ ID NO: 771106 - DNA, 33 bp, Homo sapien
aaaatactgggctggatggtatttggtcttatt

SEQ ID NO: 771107 - DNA, 33 bp, Homo sapien
gagacaccaaggagaaaaggagactcgaccact

SEQ ID NO: 771108 - DNA, 33 bp, Homo sapien
gagacaccaaggagaagaggagactcgaccact

SEQ ID NO: 771109 - DNA, 33 bp, Homo sapien
ccagaatttgtagatacgagtagaggtaaggtg

SEQ ID NO: 771110 - DNA, 33 bp, Homo sapien
ccagaatttgtagatatgagtagaggtaaggtg

SEQ ID NO: 771111 - DNA, 33 bp, Homo sapien
tcaaaacaagtcaccactaactgacaggaagca

SEQ ID NO: 771112 - DNA, 33 bp, Homo sapien
tcaaaacaagtcaccattaactgacaggaagca

SEQ ID NO: 771113 - DNA, 33 bp, Homo sapien
aatttataggccagtacggtgactcttgccttt

SEQ ID NO: 771114 - DNA, 33 bp, Homo sapien
aatttataggccagtatggtgactcttgccttt

SEQ ID NO: 771115 - DNA, 33 bp, Homo sapien
gatgtcaaaataaatcacaaattgtctcaatct

SEQ ID NO: 771116 - DNA, 33 bp, Homo sapien
gatgtcaaaataaatcgcaaattgtctcaatct

SEQ ID NO: 771117 - DNA, 33 bp, Homo sapien
gttctggttgtaccagcagtggaatgaggccat

SEQ ID NO: 771118 - DNA, 33 bp, Homo sapien
gttctggttgtaccaggagtggaatgaggccat

SEQ ID NO: 771119 - DNA, 33 bp, Homo sapien
taataagacaatgtagaataccgaggtctaaat

SEQ ID NO: 771120 - DNA, 33 bp, Homo sapien
taataagacaatgtagtataccgaggtctaaat

SEQ ID NO: 771121 - DNA, 33 bp, Homo sapien
ctctctcctaagacctcaagtaccaaaaagagt

SEQ ID NO: 771122 - DNA, 33 bp, Homo sapien
ctctctcctaagaccttaagtaccaaaaagagt

SEQ ID NO: 771123 - DNA, 33 bp, Homo sapien
caggaaaaatgagtccaaatagcctaatctgtt

SEQ ID NO: 771124 - DNA, 33 bp, Homo sapien
caggaaaaatgagtccgaatagcctaatctgtt

SEQ ID NO: 771125 - DNA, 33 bp, Homo sapien
actgagataggtcccaatagggaatgaacagct

SEQ ID NO: 771126 - DNA, 33 bp, Homo sapien
actgagataggtcccagtagggaatgaacagct

SEQ ID NO: 771127 - DNA, 33 bp, Homo sapien
atggaacatttaccagcatagactatacgttag

SEQ ID NO: 771128 - DNA, 33 bp, Homo sapien
atggaacatttaccaggatagactatacgttag

SEQ ID NO: 771129 - DNA, 33 bp, Homo sapien
atttttactgggcaaacaagagtagctatctcc

SEQ ID NO: 771130 - DNA, 33 bp, Homo sapien
atttttactgggcaaataagagtagctatctcc

SEQ ID NO: 771131 - DNA, 33 bp, Homo sapien
atgtaatgtgactaagcaaaggttaaaaataaa

SEQ ID NO: 771132 - DNA, 33 bp, Homo sapien
atgtaatgtgactaagtaaaggttaaaaataaa

SEQ ID NO: 771133 - DNA, 33 bp, Homo sapien
ttatacagaataacaaattcaaatatggaaaca

SEQ ID NO: 771134 - DNA, 33 bp, Homo sapien
ttatacagaataacaagttcaaatatggaaaca

SEQ ID NO: 771135 - DNA, 33 bp, Homo sapien
gttcacaaaatctcacaaatctccactaaagaa

SEQ ID NO: 771136 - DNA, 33 bp, Homo sapien
gttcacaaaatctcacgaatctccactaaagaa

SEQ ID NO: 771137 - DNA, 33 bp, Homo sapien
agagtttaactgtccaacctttttcagatgctg

SEQ ID NO: 771138 - DNA, 33 bp, Homo sapien
agagtttaactgtccaccctttttcagatgctg

SEQ ID NO: 771139 - DNA, 33 bp, Homo sapien
aataaaaggcttgaagcaacccagggaattttt

SEQ ID NO: 771140 - DNA, 33 bp, Homo sapien
aataaaaggcttgaagtaacccagggaattttt

SEQ ID NO: 771141 - DNA, 33 bp, Homo sapien
atatacacagattccaaaattgaaaatcaaaag

SEQ ID NO: 771142 - DNA, 33 bp, Homo sapien
atatacacagattccagaattgaaaatcaaaag

SEQ ID NO: 771143 - DNA, 33 bp, Homo sapien
gcaggtcattgataacactaggtactacacaag

SEQ ID NO: 771144 - DNA, 33 bp, Homo sapien
gcaggtcattgataacgctaggtactacacaag

SEQ ID NO: 771145 - DNA, 33 bp, Homo sapien
ttcccagtctctcttaaagttacatgtgactaa

SEQ ID NO: 771146 - DNA, 33 bp, Homo sapien
ttcccagtctctcttacagttacatgtgactaa

SEQ ID NO: 771147 - DNA, 33 bp, Homo sapien
aatcccacactggtaaatgcaatcttttccttc

SEQ ID NO: 771148 - DNA, 33 bp, Homo sapien
aatcccacactggtaactgcaatcttttccttc

SEQ ID NO: 771149 - DNA, 33 bp, Homo sapien
cctctgctcctcaaacactccttctccactgtg

SEQ ID NO: 771150 - DNA, 33 bp, Homo sapien
cctctgctcctcaaaccctccttctccactgtg

SEQ ID NO: 771151 - DNA, 33 bp, Homo sapien
aacagcaggtccttcaaaatgcctactacatcc

SEQ ID NO: 771152 - DNA, 33 bp, Homo sapien
aacagcaggtccttcagaatgcctactacatcc

SEQ ID NO: 771153 - DNA, 33 bp, Homo sapien
actcagttttgcttccacagtgtcaagcacagg

SEQ ID NO: 771154 - DNA, 33 bp, Homo sapien
actcagttttgcttccgcagtgtcaagcacagg

SEQ ID NO: 771155 - DNA, 33 bp, Homo sapien
gagcaggaactcactgacaatatgtaagatctg

SEQ ID NO: 771156 - DNA, 33 bp, Homo sapien
gagcaggaactcactggcaatatgtaagatctg

SEQ ID NO: 771157 - DNA, 33 bp, Homo sapien
ataagtcacatacaaaagatcaaggatgagaat

SEQ ID NO: 771158 - DNA, 33 bp, Homo sapien
ataagtcacatacaaaggatcaaggatgagaat

SEQ ID NO: 771159 - DNA, 33 bp, Homo sapien
tgaatttgcagagtgaagggagcatccacagtg

SEQ ID NO: 771160 - DNA, 33 bp, Homo sapien
tgaatttgcagagtgaggggagcatccacagtg

SEQ ID NO: 771161 - DNA, 33 bp, Homo sapien
atcaataattcaaatggaggaactaagacttca

SEQ ID NO: 771162 - DNA, 33 bp, Homo sapien
atcaataattcaaatgtaggaactaagacttca

SEQ ID NO: 771163 - DNA, 33 bp, Homo sapien
tacaacttctgcactgaaaactgtaacaaatta

SEQ ID NO: 771164 - DNA, 33 bp, Homo sapien
tacaacttctgcactggaaactgtaacaaatta

SEQ ID NO: 771165 - DNA, 33 bp, Homo sapien
gtttatagccagtagactatcccagaagtttct

SEQ ID NO: 771166 - DNA, 33 bp, Homo sapien
gtttatagccagtagattatcccagaagtttct

SEQ ID NO: 771167 - DNA, 33 bp, Homo sapien
atgtgggtgagtttgtcaaagatacggggtaca

SEQ ID NO: 771168 - DNA, 33 bp, Homo sapien
atgtgggtgagtttgttaaagatacggggtaca

SEQ ID NO: 771169 - DNA, 33 bp, Homo sapien
tcctcacgtcatccacaagacccaggaaagtta

SEQ ID NO: 771170 - DNA, 33 bp, Homo sapien
tcctcacgtcatccacgagacccaggaaagtta

SEQ ID NO: 771171 - DNA, 33 bp, Homo sapien
tattaattttgctaagcccttgagtgacagaga

SEQ ID NO: 771172 - DNA, 33 bp, Homo sapien
tattaattttgctaagtccttgagtgacagaga

SEQ ID NO: 771173 - DNA, 33 bp, Homo sapien
gagagaggggaagataagctttgtatggggaga

SEQ ID NO: 771174 - DNA, 33 bp, Homo sapien
gagagaggggaagataggctttgtatggggaga

SEQ ID NO: 771175 - DNA, 33 bp, Homo sapien
acagtctctttatgaacagagtggggttaatac

SEQ ID NO: 771176 - DNA, 33 bp, Homo sapien
acagtctctttatgaatagagtggggttaatac

SEQ ID NO: 771177 - DNA, 33 bp, Homo sapien
tctgtaaagaaatatacacttgagtggtgtgtg

SEQ ID NO: 771178 - DNA, 33 bp, Homo sapien
tctgtaaagaaatatatacttgagtggtgtgtg

SEQ ID NO: 771179 - DNA, 33 bp, Homo sapien
ttttccagttataaatgaaagttgattttacat

SEQ ID NO: 771180 - DNA, 33 bp, Homo sapien
ttttccagttataaattaaagttgattttacat

SEQ ID NO: 771181 - DNA, 33 bp, Homo sapien
aggtgattaaatcataagggtggatttctcact

SEQ ID NO: 771182 - DNA, 33 bp, Homo sapien
aggtgattaaatcataggggtggatttctcact

SEQ ID NO: 771183 - DNA, 33 bp, Homo sapien
gctctgacctctgtcaacaaacaccgtagactt

SEQ ID NO: 771184 - DNA, 33 bp, Homo sapien
gctctgacctctgtcaccaaacaccgtagactt

SEQ ID NO: 771185 - DNA, 33 bp, Homo sapien
gttgaaaattgctagccaaaaatgtccaaaagt

SEQ ID NO: 771186 - DNA, 33 bp, Homo sapien
gttgaaaattgctagctaaaaatgtccaaaagt

SEQ ID NO: 771187 - DNA, 33 bp, Homo sapien
agttcccaatgcgaaaagcaacctgtaatctta

SEQ ID NO: 771188 - DNA, 33 bp, Homo sapien
agttcccaatgcgaaacgcaacctgtaatctta

SEQ ID NO: 771189 - DNA, 33 bp, Homo sapien
gatagctagttagcagaagatcactttccctct

SEQ ID NO: 771190 - DNA, 33 bp, Homo sapien
gatagctagttagcagtagatcactttccctct

SEQ ID NO: 771191 - DNA, 33 bp, Homo sapien
ggcaatggcaatgttaagtaaataaacagccta

SEQ ID NO: 771192 - DNA, 33 bp, Homo sapien
ggcaatggcaatgttaggtaaataaacagccta

SEQ ID NO: 771193 - DNA, 33 bp, Homo sapien
tatagccatgtgactacgagttaacggaaagtg

SEQ ID NO: 771194 - DNA, 33 bp, Homo sapien
tatagccatgtgactatgagttaacggaaagtg

SEQ ID NO: 771195 - DNA, 33 bp, Homo sapien
tgcttatatgaaacaagaggtgcccttttcttt

SEQ ID NO: 771196 - DNA, 33 bp, Homo sapien
tgcttatatgaaacaataggtgcccttttcttt

SEQ ID NO: 771197 - DNA, 33 bp, Homo sapien
ttgcattcgaacgtgagtaagaagagaaagtta

SEQ ID NO: 771198 - DNA, 33 bp, Homo sapien
ttgcattcgaacgtgattaagaagagaaagtta

SEQ ID NO: 771199 - DNA, 33 bp, Homo sapien
gagaacctggagtctacagatttccacagtaga

SEQ ID NO: 771200 - DNA, 33 bp, Homo sapien
gagaacctggagtctatagatttccacagtaga

SEQ ID NO: 771201 - DNA, 33 bp, Homo sapien
ggtcagaaatggtccactacacaaagtcctact

SEQ ID NO: 771202 - DNA, 33 bp, Homo sapien
ggtcagaaatggtccagtacacaaagtcctact

SEQ ID NO: 771203 - DNA, 33 bp, Homo sapien
actgaattgataaaagaacagcagcttcaaagt

SEQ ID NO: 771204 - DNA, 33 bp, Homo sapien
actgaattgataaaagtacagcagcttcaaagt

SEQ ID NO: 771205 - DNA, 33 bp, Homo sapien
tgagagctctctggtcaaagttatctcccactc

SEQ ID NO: 771206 - DNA, 33 bp, Homo sapien
tgagagctctctggtcgaagttatctcccactc

SEQ ID NO: 771207 - DNA, 33 bp, Homo sapien
ccatctggaagaaataatagctcccagtctcat

SEQ ID NO: 771208 - DNA, 33 bp, Homo sapien
ccatctggaagaaatactagctcccagtctcat

SEQ ID NO: 771209 - DNA, 33 bp, Homo sapien
aagatgatttctattcaccttcagagaacattt

SEQ ID NO: 771210 - DNA, 33 bp, Homo sapien
aagatgatttctattcgccttcagagaacattt

SEQ ID NO: 771211 - DNA, 33 bp, Homo sapien
ctctttggaattcttaaagacaagcaacctggg

SEQ ID NO: 771212 - DNA, 33 bp, Homo sapien
ctctttggaattcttagagacaagcaacctggg

SEQ ID NO: 771213 - DNA, 33 bp, Homo sapien
cctgctcttgttatcactccctgcaccctatga

SEQ ID NO: 771214 - DNA, 33 bp, Homo sapien
cctgctcttgttatcattccctgcaccctatga

SEQ ID NO: 771215 - DNA, 33 bp, Homo sapien
gatggtccttgacttaggatcattcaacttatg

SEQ ID NO: 771216 - DNA, 33 bp, Homo sapien
gatggtccttgacttatgatcattcaacttatg

SEQ ID NO: 771217 - DNA, 33 bp, Homo sapien
ccttctgttatgaaaaccatgtgaaaatctgaa

SEQ ID NO: 771218 - DNA, 33 bp, Homo sapien
ccttctgttatgaaaatcatgtgaaaatctgaa

SEQ ID NO: 771219 - DNA, 33 bp, Homo sapien
ttctaggaaattgttaaaaaggccagagagtgt

SEQ ID NO: 771220 - DNA, 33 bp, Homo sapien
ttctaggaaattgttagaaaggccagagagtgt

SEQ ID NO: 771221 - DNA, 33 bp, Homo sapien
ataaaatctttcagaacggaacaataagaaaat

SEQ ID NO: 771222 - DNA, 33 bp, Homo sapien
ataaaatctttcagaatggaacaataagaaaat

SEQ ID NO: 771223 - DNA, 33 bp, Homo sapien
aacaacttgctcattacgtctgatcatttgtgt

SEQ ID NO: 771224 - DNA, 33 bp, Homo sapien
aacaacttgctcattaggtctgatcatttgtgt

SEQ ID NO: 771225 - DNA, 33 bp, Homo sapien
ggtctggggctaactaaagaaagaaacgtgcct

SEQ ID NO: 771226 - DNA, 33 bp, Homo sapien
ggtctggggctaactagagaaagaaacgtgcct

SEQ ID NO: 771227 - DNA, 33 bp, Homo sapien
tttcctctcaagctcacgtaatcttggctctaa

SEQ ID NO: 771228 - DNA, 33 bp, Homo sapien
tttcctctcaagctcaggtaatcttggctctaa

SEQ ID NO: 771229 - DNA, 33 bp, Homo sapien
ggcatggagtcctgggaagagactggcagcgat

SEQ ID NO: 771230 - DNA, 33 bp, Homo sapien
ggcatggagtcctgggcagagactggcagcgat

SEQ ID NO: 771231 - DNA, 33 bp, Homo sapien
gaggttcacaatctgccgacatggactccgcca

SEQ ID NO: 771232 - DNA, 33 bp, Homo sapien
gaggttcacaatctgctgacatggactccgcca

SEQ ID NO: 771233 - DNA, 33 bp, Homo sapien
cattcctctgtgtctacatggcctcggtcccca

SEQ ID NO: 771234 - DNA, 33 bp, Homo sapien
cattcctctgtgtctatatggcctcggtcccca

SEQ ID NO: 771235 - DNA, 33 bp, Homo sapien
aaacatagcaatgggaaacctttggaaggtgct

SEQ ID NO: 771236 - DNA, 33 bp, Homo sapien
aaacatagcaatgggatacctttggaaggtgct

SEQ ID NO: 771237 - DNA, 33 bp, Homo sapien
acaggaagatcccaaaatgaatgaaaaaataat

SEQ ID NO: 771238 - DNA, 33 bp, Homo sapien
acaggaagatcccaaactgaatgaaaaaataat

SEQ ID NO: 771239 - DNA, 33 bp, Homo sapien
cttttgtgccactaaaaataatctcatagaaag

SEQ ID NO: 771240 - DNA, 33 bp, Homo sapien
cttttgtgccactaaagataatctcatagaaag

SEQ ID NO: 771241 - DNA, 33 bp, Homo sapien
gggacagtaacatgcaaaaaactgtcatctcct

SEQ ID NO: 771242 - DNA, 33 bp, Homo sapien
gggacagtaacatgcacaaaactgtcatctcct

SEQ ID NO: 771243 - DNA, 33 bp, Homo sapien
ttctgacacctagcacaagaaggaaaaggtgat

SEQ ID NO: 771244 - DNA, 33 bp, Homo sapien
ttctgacacctagcacgagaaggaaaaggtgat

SEQ ID NO: 771245 - DNA, 33 bp, Homo sapien
ttctgacagtccacccaatcaacccctttctga

SEQ ID NO: 771246 - DNA, 33 bp, Homo sapien
ttctgacagtccacccgatcaacccctttctga

SEQ ID NO: 771247 - DNA, 33 bp, Homo sapien
attgggtaggtcataacctttttgaatttcctc

SEQ ID NO: 771248 - DNA, 33 bp, Homo sapien
attgggtaggtcataatctttttgaatttcctc

SEQ ID NO: 771249 - DNA, 33 bp, Homo sapien
tataatcctcatatcaacttcacatatgacccc

SEQ ID NO: 771250 - DNA, 33 bp, Homo sapien
tataatcctcatatcagcttcacatatgacccc

SEQ ID NO: 771251 - DNA, 33 bp, Homo sapien
tgctccataaacattccctcttgtcaatatgta

SEQ ID NO: 771252 - DNA, 33 bp, Homo sapien
tgctccataaacattcgctcttgtcaatatgta

SEQ ID NO: 771253 - DNA, 33 bp, Homo sapien
ttctcatttaagctagaagaaaaattggcaagt

SEQ ID NO: 771254 - DNA, 33 bp, Homo sapien
ttctcatttaagctaggagaaaaattggcaagt

SEQ ID NO: 771255 - DNA, 33 bp, Homo sapien
atggtggccctaaagacatgttctaacctctaa

SEQ ID NO: 771256 - DNA, 33 bp, Homo sapien
atggtggccctaaagatatgttctaacctctaa

SEQ ID NO: 771257 - DNA, 33 bp, Homo sapien
ggcaagagagtgactacgaccttatatctgaaa

SEQ ID NO: 771258 - DNA, 33 bp, Homo sapien
ggcaagagagtgactatgaccttatatctgaaa

SEQ ID NO: 771259 - DNA, 33 bp, Homo sapien
aggcagaggaactttgaaacaggtacacagagg

SEQ ID NO: 771260 - DNA, 33 bp, Homo sapien
aggcagaggaactttggaacaggtacacagagg

SEQ ID NO: 771261 - DNA, 33 bp, Homo sapien
cactggcaaagaagacccctcagagtttagatg

SEQ ID NO: 771262 - DNA, 33 bp, Homo sapien
cactggcaaagaagactcctcagagtttagatg

SEQ ID NO: 771263 - DNA, 33 bp, Homo sapien
aaaggtgaggtgcaaaatgtgacccatgaagta

SEQ ID NO: 771264 - DNA, 33 bp, Homo sapien
aaaggtgaggtgcaaagtgtgacccatgaagta

SEQ ID NO: 771265 - DNA, 33 bp, Homo sapien
tcacttaaggactttacatgttcttccggggaa

SEQ ID NO: 771266 - DNA, 33 bp, Homo sapien
tcacttaaggactttatatgttcttccggggaa

SEQ ID NO: 771267 - DNA, 33 bp, Homo sapien
gtgagtgttacagcccaaaaagccagtgtggac

SEQ ID NO: 771268 - DNA, 33 bp, Homo sapien
gtgagtgttacagcccgaaaagccagtgtggac

SEQ ID NO: 771269 - DNA, 33 bp, Homo sapien
tatacagtcaaattggcagaatagcctctcttc

SEQ ID NO: 771270 - DNA, 33 bp, Homo sapien
tatacagtcaaattggtagaatagcctctcttc

SEQ ID NO: 771271 - DNA, 33 bp, Homo sapien
tcatatatgtgtaatccagaatgtttttgtgac

SEQ ID NO: 771272 - DNA, 33 bp, Homo sapien
tcatatatgtgtaatctagaatgtttttgtgac

SEQ ID NO: 771273 - DNA, 33 bp, Homo sapien
gaggaataatggctcgcgtccacggttctggtt

SEQ ID NO: 771274 - DNA, 33 bp, Homo sapien
gaggaataatggctcgtgtccacggttctggtt

SEQ ID NO: 771275 - DNA, 33 bp, Homo sapien
aataactggaatgtacaactaatgtttggtttt

SEQ ID NO: 771276 - DNA, 33 bp, Homo sapien
aataactggaatgtactactaatgtttggtttt

SEQ ID NO: 771277 - DNA, 33 bp, Homo sapien
agggaccgcaagagagcatgcgcttcagatgat

SEQ ID NO: 771278 - DNA, 33 bp, Homo sapien
agggaccgcaagagagtatgcgcttcagatgat

SEQ ID NO: 771279 - DNA, 33 bp, Homo sapien
agcctgcaaatcctgcgcacaggagaccagctg

SEQ ID NO: 771280 - DNA, 33 bp, Homo sapien
agcctgcaaatcctgctcacaggagaccagctg

SEQ ID NO: 771281 - DNA, 33 bp, Homo sapien
atgctttaccacaagcgcacttttgacttcaag

SEQ ID NO: 771282 - DNA, 33 bp, Homo sapien
atgctttaccacaagctcacttttgacttcaag

SEQ ID NO: 771283 - DNA, 33 bp, Homo sapien
agggttcaggaaacaggctatagtccttgattt

SEQ ID NO: 771284 - DNA, 33 bp, Homo sapien
agggttcaggaaacagtctatagtccttgattt

SEQ ID NO: 771285 - DNA, 33 bp, Homo sapien
atgtcatgttcatgtacaactcatggatttaaa

SEQ ID NO: 771286 - DNA, 33 bp, Homo sapien
atgtcatgttcatgtataactcatggatttaaa

SEQ ID NO: 771287 - DNA, 33 bp, Homo sapien
aataaacataggaaagaagaaagctagaatgaa

SEQ ID NO: 771288 - DNA, 33 bp, Homo sapien
aataaacataggaaaggagaaagctagaatgaa

SEQ ID NO: 771289 - DNA, 33 bp, Homo sapien
atatctttttgtcccaatggcttcaatttcatc

SEQ ID NO: 771290 - DNA, 33 bp, Homo sapien
atatctttttgtcccagtggcttcaatttcatc

SEQ ID NO: 771291 - DNA, 33 bp, Homo sapien; identical to SEQ ID NO: 771289

SEQ ID NO: 771292 - DNA, 33 bp, Homo sapien; identical to SEQ ID NO: 771290

SEQ ID NO: 771293 - DNA, 33 bp, Homo sapien
gctggggatgaaagcccgaatacgatgggttaa

SEQ ID NO: 771294 - DNA, 33 bp, Homo sapien
gctggggatgaaagcctgaatacgatgggttaa

SEQ ID NO: 771295 - DNA, 33 bp, Homo sapien
taagtgaataacagggaaagagttgggactaga

SEQ ID NO: 771296 - DNA, 33 bp, Homo sapien
taagtgaataacagggtaagagttgggactaga

SEQ ID NO: 771297 - DNA, 33 bp, Homo sapien
agatcttgaagtcatcagacacgtttctagtcc

SEQ ID NO: 771298 - DNA, 33 bp, Homo sapien
agatcttgaagtcatcggacacgtttctagtcc

SEQ ID NO: 771299 - DNA, 33 bp, Homo sapien
cttcatgcagttaaaaatgcaggaccatcgaga

SEQ ID NO: 771300 - DNA, 33 bp, Homo sapien
cttcatgcagttaaaagtgcaggaccatcgaga

SEQ ID NO: 771301 - DNA, 33 bp, Homo sapien
caacttgggtaacagcccttaaattgacattgt

SEQ ID NO: 771302 - DNA, 33 bp, Homo sapien
caacttgggtaacagctcttaaattgacattgt

SEQ ID NO: 771303 - DNA, 33 bp, Homo sapien
caaggtcctagtcctagcccaaccacagactca

SEQ ID NO: 771304 - DNA, 33 bp, Homo sapien
caaggtcctagtcctatcccaaccacagactca

SEQ ID NO: 771305 - DNA, 33 bp, Homo sapien
ttgaaacaaggaagaactgcaagagtaaaacca

SEQ ID NO: 771306 - DNA, 33 bp, Homo sapien
ttgaaacaaggaagaattgcaagagtaaaacca

SEQ ID NO: 771307 - DNA, 33 bp, Homo sapien
ttatgacagtcacatcccaaaacatgaagttcc

SEQ ID NO: 771308 - DNA, 33 bp, Homo sapien
ttatgacagtcacatctcaaaacatgaagttcc

SEQ ID NO: 771309 - DNA, 33 bp, Homo sapien
aggtgccgaaataacaacatttagctcagtgtc

SEQ ID NO: 771310 - DNA, 33 bp, Homo sapien
aggtgccgaaataacatcatttagctcagtgtc

SEQ ID NO: 771311 - DNA, 33 bp, Homo sapien
gcggaccctcacatgacggaacttaatgagggc

SEQ ID NO: 771312 - DNA, 33 bp, Homo sapien
gcggaccctcacatgatggaacttaatgagggc

SEQ ID NO: 771313 - DNA, 33 bp, Homo sapien
caggtgttcagggacacggagctttagctgcta

SEQ ID NO: 771314 - DNA, 33 bp, Homo sapien
caggtgttcagggacatggagctttagctgcta

SEQ ID NO: 771315 - DNA, 33 bp, Homo sapien
aggagagaagtcaccacggaaaaattaccaatt

SEQ ID NO: 771316 - DNA, 33 bp, Homo sapien
aggagagaagtcaccatggaaaaattaccaatt

SEQ ID NO: 771317 - DNA, 33 bp, Homo sapien
aagtacggcatgggctcaaaggaagagtgctct

SEQ ID NO: 771318 - DNA, 33 bp, Homo sapien
aagtacggcatgggctgaaaggaagagtgctct

SEQ ID NO: 771319 - DNA, 33 bp, Homo sapien
gctgattgtatcagaaaatcttcagcccagaat

SEQ ID NO: 771320 - DNA, 33 bp, Homo sapien
gctgattgtatcagaacatcttcagcccagaat

SEQ ID NO: 771321 - DNA, 33 bp, Homo sapien
tgctgggattttgagacgttaatgatttgccag

SEQ ID NO: 771322 - DNA, 33 bp, Homo sapien
tgctgggattttgagatgttaatgatttgccag

SEQ ID NO: 771323 - DNA, 33 bp, Homo sapien
gggataattacagttaacatttctgtagtgtag

SEQ ID NO: 771324 - DNA, 33 bp, Homo sapien
gggataattacagttagcatttctgtagtgtag

SEQ ID NO: 771325 - DNA, 33 bp, Homo sapien
gagatggaagtgataaagccacaagtaaagaaa

SEQ ID NO: 771326 - DNA, 33 bp, Homo sapien
gagatggaagtgataaggccacaagtaaagaaa

SEQ ID NO: 771327 - DNA, 33 bp, Homo sapien
tgcccctcaaaacctcccagaggctgaatggcc

SEQ ID NO: 771328 - DNA, 33 bp, Homo sapien
tgcccctcaaaacctctcagaggctgaatggcc

SEQ ID NO: 771329 - DNA, 33 bp, Homo sapien
tggggcatggcaagacaagttattggaggaaga

SEQ ID NO: 771330 - DNA, 33 bp, Homo sapien
tggggcatggcaagaccagttattggaggaaga

SEQ ID NO: 771331 - DNA, 33 bp, Homo sapien
atacatatatttattaaaagtacgcaacatgag

SEQ ID NO: 771332 - DNA, 33 bp, Homo sapien
atacatatatttattagaagtacgcaacatgag

SEQ ID NO: 771333 - DNA, 33 bp, Homo sapien
ggctctgagccacatcaacatagaacctagaga

SEQ ID NO: 771334 - DNA, 33 bp, Homo sapien
ggctctgagccacatcgacatagaacctagaga

SEQ ID NO: 771335 - DNA, 33 bp, Homo sapien
gaatgggagctgagaaagtctgggaagattcat

SEQ ID NO: 771336 - DNA, 33 bp, Homo sapien
gaatgggagctgagaaggtctgggaagattcat

SEQ ID NO: 771337 - DNA, 33 bp, Homo sapien
agattctactgtaaaaccatactctggctgcat

SEQ ID NO: 771338 - DNA, 33 bp, Homo sapien
agattctactgtaaaatcatactctggctgcat

SEQ ID NO: 771339 - DNA, 33 bp, Homo sapien
tgtgtttctaaactgacactctttccaagattg

SEQ ID NO: 771340 - DNA, 33 bp, Homo sapien
tgtgtttctaaactgatactctttccaagattg

SEQ ID NO: 771341 - DNA, 33 bp, Homo sapien
cttcattatatcagcagtcaaaatacatagatt

SEQ ID NO: 771342 - DNA, 33 bp, Homo sapien
cttcattatatcagcattcaaaatacatagatt

SEQ ID NO: 771343 - DNA, 33 bp, Homo sapien
aaaagaatcttgcaaaggtatacagagaaaatt

SEQ ID NO: 771344 - DNA, 33 bp, Homo sapien
aaaagaatcttgcaaatgtatacagagaaaatt

SEQ ID NO: 771345 - DNA, 33 bp, Homo sapien
taaatattcctatttacggtggctattctatta

SEQ ID NO: 771346 - DNA, 33 bp, Homo sapien
taaatattcctatttatggtggctattctatta

SEQ ID NO: 771347 - DNA, 33 bp, Homo sapien
tatccattgtttacaaatccatagaattattag

SEQ ID NO: 771348 - DNA, 33 bp, Homo sapien
tatccattgtttacaagtccatagaattattag

SEQ ID NO: 771349 - DNA, 33 bp, Homo sapien
gtaagtggatgataaacagtcctacatatttag

SEQ ID NO: 771350 - DNA, 33 bp, Homo sapien
gtaagtggatgataaagagtcctacatatttag

SEQ ID NO: 771351 - DNA, 33 bp, Homo sapien
ccatgagttgcccccaaaccaattcttctgaag

SEQ ID NO: 771352 - DNA, 33 bp, Homo sapien
ccatgagttgcccccagaccaattcttctgaag

SEQ ID NO: 771353 - DNA, 33 bp, Homo sapien
tattcattcattgatacatttggttacttcaga

SEQ ID NO: 771354 - DNA, 33 bp, Homo sapien
tattcattcattgatagatttggttacttcaga

SEQ ID NO: 771355 - DNA, 33 bp, Homo sapien
tcctcttatccaacggcaattccgtaattgtta

SEQ ID NO: 771356 - DNA, 33 bp, Homo sapien
tcctcttatccaacggtaattccgtaattgtta

SEQ ID NO: 771357 - DNA, 33 bp, Homo sapien
cttattcatttttgagacagagttttattcttg

SEQ ID NO: 771358 - DNA, 33 bp, Homo sapien
cttattcatttttgagtcagagttttattcttg

SEQ ID NO: 771359 - DNA, 33 bp, Homo sapien
ataattcattttccaaaagcaccagaactacag

SEQ ID NO: 771360 - DNA, 33 bp, Homo sapien
ataattcattttccaatagcaccagaactacag

SEQ ID NO: 771361 - DNA, 33 bp, Homo sapien
aagttttaaaagtcaacgatgcactctgtaaaa

SEQ ID NO: 771362 - DNA, 33 bp, Homo sapien
aagttttaaaagtcaatgatgcactctgtaaaa

SEQ ID NO: 771363 - DNA, 33 bp, Homo sapien
tgtcaaagaaccaaagaaatctatgaaatccca

SEQ ID NO: 771364 - DNA, 33 bp, Homo sapien
tgtcaaagaaccaaaggaatctatgaaatccca

SEQ ID NO: 771365 - DNA, 33 bp, Homo sapien
tctggcccttggagaacattgtataagggagat

SEQ ID NO: 771366 - DNA, 33 bp, Homo sapien
tctggcccttggagaatattgtataagggagat

SEQ ID NO: 771367 - DNA, 33 bp, Homo sapien
ggtcaccatgcccaaaccccttaaggaatgagg

SEQ ID NO: 771368 - DNA, 33 bp, Homo sapien
ggtcaccatgcccaaatcccttaaggaatgagg

SEQ ID NO: 771369 - DNA, 33 bp, Homo sapien
ttcctacattgtagtccgacaatacagcaggaa

SEQ ID NO: 771370 - DNA, 33 bp, Homo sapien
ttcctacattgtagtctgacaatacagcaggaa

SEQ ID NO: 771371 - DNA, 33 bp, Homo sapien
catgacccttaacttaacgtggtctagccaaat

SEQ ID NO: 771372 - DNA, 33 bp, Homo sapien
catgacccttaacttatcgtggtctagccaaat

SEQ ID NO: 771373 - DNA, 33 bp, Homo sapien
gtgaaaaattatctcaagcttccagcctgggaa

SEQ ID NO: 771374 - DNA, 33 bp, Homo sapien
gtgaaaaattatctcatgcttccagcctgggaa

SEQ ID NO: 771375 - DNA, 33 bp, Homo sapien
ctatcactaaaagacactctatgacatagggtg

SEQ ID NO: 771376 - DNA, 33 bp, Homo sapien
ctatcactaaaagacagtctatgacatagggtg

SEQ ID NO: 771377 - DNA, 33 bp, Homo sapien
ccattactcacagcacagagctattttatgtat

SEQ ID NO: 771378 - DNA, 33 bp, Homo sapien
ccattactcacagcacggagctattttatgtat

SEQ ID NO: 771379 - DNA, 33 bp, Homo sapien
gctcttctcaaatgaaacattttgacaatatac

SEQ ID NO: 771380 - DNA, 33 bp, Homo sapien
gctcttctcaaatgaagcattttgacaatatac

SEQ ID NO: 771381 - DNA, 33 bp, Homo sapien
catctgctctcactgcactactttaaagccttc

SEQ ID NO: 771382 - DNA, 33 bp, Homo sapien
catctgctctcactgcgctactttaaagccttc

SEQ ID NO: 771383 - DNA, 33 bp, Homo sapien
ggaggtagaagcttacaattctgtgtggacaag

SEQ ID NO: 771384 - DNA, 33 bp, Homo sapien
ggaggtagaagcttacgattctgtgtggacaag

SEQ ID NO: 771385 - DNA, 33 bp, Homo sapien
ttgctctggattaaagactcagaaacccaggga

SEQ ID NO: 771386 - DNA, 33 bp, Homo sapien
ttgctctggattaaaggctcagaaacccaggga

SEQ ID NO: 771387 - DNA, 33 bp, Homo sapien
atggcagccctcactcacccccataggccacaa

SEQ ID NO: 771388 - DNA, 33 bp, Homo sapien
atggcagccctcactcgcccccataggccacaa

SEQ ID NO: 771389 - DNA, 33 bp, Homo sapien
gggctaaaacgatggacagaaatatatcatatt

SEQ ID NO: 771390 - DNA, 33 bp, Homo sapien
gggctaaaacgatggagagaaatatatcatatt

SEQ ID NO: 771391 - DNA, 33 bp, Homo sapien
ctgctgtttgtcatggaaaatggggtgatggct

SEQ ID NO: 771392 - DNA, 33 bp, Homo sapien
ctgctgtttgtcatgggaaatggggtgatggct

SEQ ID NO: 771393 - DNA, 33 bp, Homo sapien
gaccccgaaagctgcaggtttgaagaggttgtt

SEQ ID NO: 771394 - DNA, 33 bp, Homo sapien
gaccccgaaagctgcatgtttgaagaggttgtt

SEQ ID NO: 771395 - DNA, 33 bp, Homo sapien
tagccaagagcaaatagcctctataaattgcat

SEQ ID NO: 771396 - DNA, 33 bp, Homo sapien
tagccaagagcaaatatcctctataaattgcat

SEQ ID NO: 771397 - DNA, 33 bp, Homo sapien
gtaatttgggaatctactaatcaattcaaatgt

SEQ ID NO: 771398 - DNA, 33 bp, Homo sapien
gtaatttgggaatctattaatcaattcaaatgt

SEQ ID NO: 771399 - DNA, 33 bp, Homo sapien
aaagatcttacccaaacttgcttctcgatttaa

SEQ ID NO: 771400 - DNA, 33 bp, Homo sapien
aaagatcttacccaaatttgcttctcgatttaa

SEQ ID NO: 771401 - DNA, 33 bp, Homo sapien
tgaggtgacctcctataagcaggatttttaaga

SEQ ID NO: 771402 - DNA, 33 bp, Homo sapien
tgaggtgacctcctatgagcaggatttttaaga

SEQ ID NO: 771403 - DNA, 33 bp, Homo sapien
tgcttatgcccataaacaacccatgtggtggtt

SEQ ID NO: 771404 - DNA, 33 bp, Homo sapien
tgcttatgcccataaagaacccatgtggtggtt

SEQ ID NO: 771405 - DNA, 33 bp, Homo sapien
tactcaccatcaagatcacataaatgctacctc

SEQ ID NO: 771406 - DNA, 33 bp, Homo sapien
tactcaccatcaagattacataaatgctacctc

SEQ ID NO: 771407 - DNA, 33 bp, Homo sapien
acccaggcacactcagaaaacattgcttctgtc

SEQ ID NO: 771408 - DNA, 33 bp, Homo sapien
acccaggcacactcagcaaacattgcttctgtc

SEQ ID NO: 771409 - DNA, 33 bp, Homo sapien
tgggcaaaacgctaagcagcacaaaaagtgcga

SEQ ID NO: 771410 - DNA, 33 bp, Homo sapien
tgggcaaaacgctaagtagcacaaaaagtgcga

SEQ ID NO: 771411 - DNA, 33 bp, Homo sapien
actttgcaattcaaaacgttgaagaaggtgcga

SEQ ID NO: 771412 - DNA, 33 bp, Homo sapien
actttgcaattcaaaatgttgaagaaggtgcga

SEQ ID NO: 771413 - DNA, 33 bp, Homo sapien
aagctcccgccagcaacttcagtgtccctggcc

SEQ ID NO: 771414 - DNA, 33 bp, Homo sapien
aagctcccgccagcaatttcagtgtccctggcc

SEQ ID NO: 771415 - DNA, 33 bp, Homo sapien
tgtcagcaaacctcccactccctgtttgtgttg

SEQ ID NO: 771416 - DNA, 33 bp, Homo sapien
tgtcagcaaacctcccgctccctgtttgtgttg

SEQ ID NO: 771417 - DNA, 33 bp, Homo sapien
gcttcagaaaacgccacgagtgtatgatcatga

SEQ ID NO: 771418 - DNA, 33 bp, Homo sapien
gcttcagaaaacgccatgagtgtatgatcatga

SEQ ID NO: 771419 - DNA, 33 bp, Homo sapien
acatacttgttaaaagactacattttggagtta

SEQ ID NO: 771420 - DNA, 33 bp, Homo sapien
acatacttgttaaaagcctacattttggagtta

SEQ ID NO: 771421 - DNA, 33 bp, Homo sapien
agtgtctttcacttgacgtaatccctatgtcaa

SEQ ID NO: 771422 - DNA, 33 bp, Homo sapien
agtgtctttcacttgatgtaatccctatgtcaa

SEQ ID NO: 771423 - DNA, 33 bp, Homo sapien
tcaagtagccggggataaggtcacagaatatca

SEQ ID NO: 771424 - DNA, 33 bp, Homo sapien
tcaagtagccggggatgaggtcacagaatatca

SEQ ID NO: 771425 - DNA, 33 bp, Homo sapien
ttctgcagaacatcaacagtttccaattccttt

SEQ ID NO: 771426 - DNA, 33 bp, Homo sapien
ttctgcagaacatcaagagtttccaattccttt

SEQ ID NO: 771427 - DNA, 33 bp, Homo sapien
tctccctcaattgtgccatctcctgcatctcac

SEQ ID NO: 771428 - DNA, 33 bp, Homo sapien
tctccctcaattgtgctatctcctgcatctcac

SEQ ID NO: 771429 - DNA, 33 bp, Homo sapien
actcagcttctcaaccagcgtggcaatgtttca

SEQ ID NO: 771430 - DNA, 33 bp, Homo sapien
actcagcttctcaaccggcgtggcaatgtttca

SEQ ID NO: 771431 - DNA, 33 bp, Homo sapien
aagagaaaagagaatcaagaacgtagataaatt

SEQ ID NO: 771432 - DNA, 33 bp, Homo sapien
aagagaaaagagaatcgagaacgtagataaatt

SEQ ID NO: 771433 - DNA, 33 bp, Homo sapien
gtttttttctaagtccaatatcagactgtggtt

SEQ ID NO: 771434 - DNA, 33 bp, Homo sapien
gtttttttctaagtcccatatcagactgtggtt

SEQ ID NO: 771435 - DNA, 33 bp, Homo sapien
agtcaagaaggatttagggtaactggaatcaca

SEQ ID NO: 771436 - DNA, 33 bp, Homo sapien
agtcaagaaggatttatggtaactggaatcaca

SEQ ID NO: 771437 - DNA, 33 bp, Homo sapien
gtcactatgaaggctacgtagaaaacaactata

SEQ ID NO: 771438 - DNA, 33 bp, Homo sapien
gtcactatgaaggctatgtagaaaacaactata

SEQ ID NO: 771439 - DNA, 33 bp, Homo sapien
aaactcaatatcccagaaaaactgcacttccca

SEQ ID NO: 771440 - DNA, 33 bp, Homo sapien
aaactcaatatcccaggaaaactgcacttccca

SEQ ID NO: 771441 - DNA, 33 bp, Homo sapien
ctttacagcaacacaaatgaacggagacactat

SEQ ID NO: 771442 - DNA, 33 bp, Homo sapien
ctttacagcaacacaagtgaacggagacactat

SEQ ID NO: 771443 - DNA, 33 bp, Homo sapien
gataaacacagaatttgaaaacgtgatggttcc

SEQ ID NO: 771444 - DNA, 33 bp, Homo sapien
gataaacacagaattttaaaacgtgatggttcc

SEQ ID NO: 771445 - DNA, 33 bp, Homo sapien
acgtgtggctaataccaactgagtccccaactt

SEQ ID NO: 771446 - DNA, 33 bp, Homo sapien
acgtgtggctaatacccactgagtccccaactt

SEQ ID NO: 771447 - DNA, 33 bp, Homo sapien
caatctgtatgtaaaacctgtgctcttttctct

SEQ ID NO: 771448 - DNA, 33 bp, Homo sapien
caatctgtatgtaaaatctgtgctcttttctct

SEQ ID NO: 771449 - DNA, 33 bp, Homo sapien
cactggggagatgcaacagtgagcccaagaaag

SEQ ID NO: 771450 - DNA, 33 bp, Homo sapien
cactggggagatgcaagagtgagcccaagaaag

SEQ ID NO: 771451 - DNA, 33 bp, Homo sapien
ggcgggctagctcaagaccatacatgatggtga

SEQ ID NO: 771452 - DNA, 33 bp, Homo sapien
ggcgggctagctcaaggccatacatgatggtga

SEQ ID NO: 771453 - DNA, 33 bp, Homo sapien
ggaatcttgttaaatgcagatattgatcccgta

SEQ ID NO: 771454 - DNA, 33 bp, Homo sapien
ggaatcttgttaaatgtagatattgatcccgta

SEQ ID NO: 771455 - DNA, 33 bp, Homo sapien
tggccttatctttgtacgatgcagcatgctggt

SEQ ID NO: 771456 - DNA, 33 bp, Homo sapien
tggccttatctttgtatgatgcagcatgctggt

SEQ ID NO: 771457 - DNA, 33 bp, Homo sapien
tattcatgcattgaagaagtaacaattgttatg

SEQ ID NO: 771458 - DNA, 33 bp, Homo sapien
tattcatgcattgaagcagtaacaattgttatg

SEQ ID NO: 771459 - DNA, 33 bp, Homo sapien
tctgtttctgcggcacaacatagagtatttgcc

SEQ ID NO: 771460 - DNA, 33 bp, Homo sapien
tctgtttctgcggcacgacatagagtatttgcc

SEQ ID NO: 771461 - DNA, 33 bp, Homo sapien
atgagctcagagatgaaagagccatttgtcact

SEQ ID NO: 771462 - DNA, 33 bp, Homo sapien
atgagctcagagatgagagagccatttgtcact

SEQ ID NO: 771463 - DNA, 33 bp, Homo sapien
tctcccctttctccaactgttgcaccaagcttg

SEQ ID NO: 771464 - DNA, 33 bp, Homo sapien
tctcccctttctccaattgttgcaccaagcttg

SEQ ID NO: 771465 - DNA, 33 bp, Homo sapien
tgcatggtgacaggtcaaggtctagctctgagc

SEQ ID NO: 771466 - DNA, 33 bp, Homo sapien
tgcatggtgacaggtcgaggtctagctctgagc

SEQ ID NO: 771467 - DNA, 33 bp, Homo sapien
tgaagaaattgtgccccagcaggtgacttatcc

SEQ ID NO: 771468 - DNA, 33 bp, Homo sapien
tgaagaaattgtgccctagcaggtgacttatcc

SEQ ID NO: 771469 - DNA, 33 bp, Homo sapien
atggcatgggtcgagacgggaaacgtggccagg

SEQ ID NO: 771470 - DNA, 33 bp, Homo sapien
atggcatgggtcgagatgggaaacgtggccagg

SEQ ID NO: 771471 - DNA, 33 bp, Homo sapien
gaagaagtcgttctaacagtccctagctagaac

SEQ ID NO: 771472 - DNA, 33 bp, Homo sapien
gaagaagtcgttctaatagtccctagctagaac

SEQ ID NO: 771473 - DNA, 33 bp, Homo sapien
tcctgcttgccacacaaggagtaattttgcaaa

SEQ ID NO: 771474 - DNA, 33 bp, Homo sapien
tcctgcttgccacacagggagtaattttgcaaa

SEQ ID NO: 771475 - DNA, 33 bp, Homo sapien
agtccaaaaatagtcacgaggtggacaatccac

SEQ ID NO: 771476 - DNA, 33 bp, Homo sapien
agtccaaaaatagtcatgaggtggacaatccac

SEQ ID NO: 771477 - DNA, 33 bp, Homo sapien
acctttaaatcctgaccacactttagtcagcct

SEQ ID NO: 771478 - DNA, 33 bp, Homo sapien
acctttaaatcctgacgacactttagtcagcct

SEQ ID NO: 771479 - DNA, 33 bp, Homo sapien
ctaagagttacagcagaaatggagagacagaga

SEQ ID NO: 771480 - DNA, 33 bp, Homo sapien
ctaagagttacagcagcaatggagagacagaga

SEQ ID NO: 771481 - DNA, 33 bp, Homo sapien
aaaatttctgaggtcacggaagaaagaagatat

SEQ ID NO: 771482 - DNA, 33 bp, Homo sapien
aaaatttctgaggtcatggaagaaagaagatat

SEQ ID NO: 771483 - DNA, 33 bp, Homo sapien
agagaagccacggttaaagctaactgaacccag

SEQ ID NO: 771484 - DNA, 33 bp, Homo sapien
agagaagccacggttagagctaactgaacccag

SEQ ID NO: 771485 - DNA, 33 bp, Homo sapien
cctttcaatgtacaagcaattctatgcttctgt

SEQ ID NO: 771486 - DNA, 33 bp, Homo sapien
cctttcaatgtacaagtaattctatgcttctgt

SEQ ID NO: 771487 - DNA, 33 bp, Homo sapien
atgcatataaagaaacaagcctagaactcacta

SEQ ID NO: 771488 - DNA, 33 bp, Homo sapien
atgcatataaagaaacgagcctagaactcacta

SEQ ID NO: 771489 - DNA, 33 bp, Homo sapien
tccttcattcatcaaacattggcgcatactaca

SEQ ID NO: 771490 - DNA, 33 bp, Homo sapien
tccttcattcatcaaatattggcgcatactaca

SEQ ID NO: 771491 - DNA, 33 bp, Homo sapien
tgctggaaaaacaggacaacatgtggctggcca

SEQ ID NO: 771492 - DNA, 33 bp, Homo sapien
tgctggaaaaacaggagaacatgtggctggcca

SEQ ID NO: 771493 - DNA, 33 bp, Homo sapien
agacttttgaaagaaaagaaagatctgagtttg

SEQ ID NO: 771494 - DNA, 33 bp, Homo sapien
agacttttgaaagaaaggaaagatctgagtttg

SEQ ID NO: 771495 - DNA, 33 bp, Homo sapien
acccagattctcaaacactcagagatttaaaat

SEQ ID NO: 771496 - DNA, 33 bp, Homo sapien
acccagattctcaaacgctcagagatttaaaat

SEQ ID NO: 771497 - DNA, 33 bp, Homo sapien
attggcaaaaaggcccaagtcaggctgccattc

SEQ ID NO: 771498 - DNA, 33 bp, Homo sapien
attggcaaaaaggccccagtcaggctgccattc

SEQ ID NO: 771499 - DNA, 33 bp, Homo sapien
atcttgtcacaaacacacttaactccatggcct

SEQ ID NO: 771500 - DNA, 33 bp, Homo sapien
atcttgtcacaaacacccttaactccatggcct

SEQ ID NO: 771501 - DNA, 33 bp, Homo sapien
tctcaactcctttgaaagtgatttgtcagcgtt

SEQ ID NO: 771502 - DNA, 33 bp, Homo sapien
tctcaactcctttgaaggtgatttgtcagcgtt

SEQ ID NO: 771503 - DNA, 33 bp, Homo sapien
ttttattttgtaactcaatcaaaacaatttttt

SEQ ID NO: 771504 - DNA, 33 bp, Homo sapien
ttttattttgtaactcgatcaaaacaatttttt

SEQ ID NO: 771505 - DNA, 33 bp, Homo sapien
taaaaacacataccaaccttaagtgaatatcat

SEQ ID NO: 771506 - DNA, 33 bp, Homo sapien
taaaaacacataccaatcttaagtgaatatcat

SEQ ID NO: 771507 - DNA, 33 bp, Homo sapien
gtcagacttcaagtaacagtttccaaatatatg

SEQ ID NO: 771508 - DNA, 33 bp, Homo sapien
gtcagacttcaagtaatagtttccaaatatatg

SEQ ID NO: 771509 - DNA, 33 bp, Homo sapien
agaatctaggtgactaaaagtatccatgagaat

SEQ ID NO: 771510 - DNA, 33 bp, Homo sapien
agaatctaggtgactataagtatccatgagaat

SEQ ID NO: 771511 - DNA, 33 bp, Homo sapien
ccactgatggaaacaccagatgatgtgactact

SEQ ID NO: 771512 - DNA, 33 bp, Homo sapien
ccactgatggaaacactagatgatgtgactact

SEQ ID NO: 771513 - DNA, 33 bp, Homo sapien
aactgtgaaggagaggaataatgggacaatata

SEQ ID NO: 771514 - DNA, 33 bp, Homo sapien
aactgtgaaggagaggtataatgggacaatata

SEQ ID NO: 771515 - DNA, 33 bp, Homo sapien
gttccaccagtcagaagtgcctttcctagactt

SEQ ID NO: 771516 - DNA, 33 bp, Homo sapien
gttccaccagtcagaattgcctttcctagactt

SEQ ID NO: 771517 - DNA, 33 bp, Homo sapien
tcatagaaaagctgaacgtggcagacctgtgtt

SEQ ID NO: 771518 - DNA, 33 bp, Homo sapien
tcatagaaaagctgaatgtggcagacctgtgtt

SEQ ID NO: 771519 - DNA, 33 bp, Homo sapien
aattaaggacttagtcaatgaggctagcacggg

SEQ ID NO: 771520 - DNA, 33 bp, Homo sapien
aattaaggacttagtcgatgaggctagcacggg

SEQ ID NO: 771521 - DNA, 33 bp, Homo sapien
actttactgtgcatagaaataaacttgctaaaa

SEQ ID NO: 771522 - DNA, 33 bp, Homo sapien
actttactgtgcataggaataaacttgctaaaa

SEQ ID NO: 771523 - DNA, 33 bp, Homo sapien
ttatctcatctggaaaacactcatagctgggag

SEQ ID NO: 771524 - DNA, 33 bp, Homo sapien
ttatctcatctggaaagcactcatagctgggag

SEQ ID NO: 771525 - DNA, 33 bp, Homo sapien
cacattagcaacactgacaaggtgaagatgaag

SEQ ID NO: 771526 - DNA, 33 bp, Homo sapien
cacattagcaacactggcaaggtgaagatgaag

SEQ ID NO: 771527 - DNA, 33 bp, Homo sapien
gctttattgtgatgctaactttattgggatagt

SEQ ID NO: 771528 - DNA, 33 bp, Homo sapien
gctttattgtgatgctcactttattgggatagt

SEQ ID NO: 771529 - DNA, 33 bp, Homo sapien
ggctgttttagaacatcagaaaccaaagcagtt

SEQ ID NO: 771530 - DNA, 33 bp, Homo sapien
ggctgttttagaacattagaaaccaaagcagtt

SEQ ID NO: 771531 - DNA, 33 bp, Homo sapien
tggggccattaatttaggtgagtaggagtgtgt

SEQ ID NO: 771532 - DNA, 33 bp, Homo sapien
tggggccattaatttatgtgagtaggagtgtgt

SEQ ID NO: 771533 - DNA, 33 bp, Homo sapien
ctttcagagaccagccagaaaaatcacaacatt

SEQ ID NO: 771534 - DNA, 33 bp, Homo sapien
ctttcagagaccagccggaaaaatcacaacatt

SEQ ID NO: 771535 - DNA, 33 bp, Homo sapien
cctgtagtgaggaggacggttaagttccacaga

SEQ ID NO: 771536 - DNA, 33 bp, Homo sapien
cctgtagtgaggaggatggttaagttccacaga

SEQ ID NO: 771537 - DNA, 33 bp, Homo sapien
gttgctcaactccaagaaagctgcataacctca

SEQ ID NO: 771538 - DNA, 33 bp, Homo sapien
gttgctcaactccaaggaagctgcataacctca

SEQ ID NO: 771539 - DNA, 33 bp, Homo sapien
aaataaatgtttattccagtctgaaaccacagt

SEQ ID NO: 771540 - DNA, 33 bp, Homo sapien
aaataaatgtttattctagtctgaaaccacagt

SEQ ID NO: 771541 - DNA, 33 bp, Homo sapien
gacattacatacgaaaacaaatggactaatttg

SEQ ID NO: 771542 - DNA, 33 bp, Homo sapien
gacattacatacgaaatcaaatggactaatttg

SEQ ID NO: 771543 - DNA, 33 bp, Homo sapien
gttggaagctggcccacgaataaaattccctgc

SEQ ID NO: 771544 - DNA, 33 bp, Homo sapien
gttggaagctggcccatgaataaaattccctgc

SEQ ID NO: 771545 - DNA, 33 bp, Homo sapien
aattatatgtgtgagacgatctgccatgaacta

SEQ ID NO: 771546 - DNA, 33 bp, Homo sapien
aattatatgtgtgagatgatctgccatgaacta

SEQ ID NO: 771547 - DNA, 33 bp, Homo sapien
gctggggtttgttggaagaatctcaagctttca

SEQ ID NO: 771548 - DNA, 33 bp, Homo sapien
gctggggtttgttggatgaatctcaagctttca

SEQ ID NO: 771549 - DNA, 33 bp, Homo sapien
ggcctggaaacaagaaagcctttgcagtcagtc

SEQ ID NO: 771550 - DNA, 33 bp, Homo sapien
ggcctggaaacaagaaggcctttgcagtcagtc

SEQ ID NO: 771551 - DNA, 33 bp, Homo sapien
ctgacttggagcacaacccattaaatattcaga

SEQ ID NO: 771552 - DNA, 33 bp, Homo sapien
ctgacttggagcacaatccattaaatattcaga

SEQ ID NO: 771553 - DNA, 33 bp, Homo sapien
tgcttctcccagtagaagaaaatatatgtaaaa

SEQ ID NO: 771554 - DNA, 33 bp, Homo sapien
tgcttctcccagtagatgaaaatatatgtaaaa

SEQ ID NO: 771555 - DNA, 33 bp, Homo sapien
caaaataaaggccccagaagcttcacacaggag

SEQ ID NO: 771556 - DNA, 33 bp, Homo sapien
caaaataaaggccccataagcttcacacaggag

SEQ ID NO: 771557 - DNA, 33 bp, Homo sapien
aatctcaaataagatacggtatgtgaaagtgaa

SEQ ID NO: 771558 - DNA, 33 bp, Homo sapien
aatctcaaataagatatggtatgtgaaagtgaa

SEQ ID NO: 771559 - DNA, 33 bp, Homo sapien
aagttttgatcagtaacatcttccttctacctg

SEQ ID NO: 771560 - DNA, 33 bp, Homo sapien
aagttttgatcagtaatatcttccttctacctg

SEQ ID NO: 771561 - DNA, 33 bp, Homo sapien
tctccagaaatggtcaaaatgaaggtttttcta

SEQ ID NO: 771562 - DNA, 33 bp, Homo sapien
tctccagaaatggtcagaatgaaggtttttcta

SEQ ID NO: 771563 - DNA, 33 bp, Homo sapien
ctgtgcataaacctgcaagctcattttctcaga

SEQ ID NO: 771564 - DNA, 33 bp, Homo sapien
ctgtgcataaacctgcgagctcattttctcaga

SEQ ID NO: 771565 - DNA, 33 bp, Homo sapien
aaattgatttgttaggaaatggaaaaccacaaa

SEQ ID NO: 771566 - DNA, 33 bp, Homo sapien
aaattgatttgttagggaatggaaaaccacaaa

SEQ ID NO: 771567 - DNA, 33 bp, Homo sapien
agactgctttactgtgcagctctattcctcctt

SEQ ID NO: 771568 - DNA, 33 bp, Homo sapien
agactgctttactgtggagctctattcctcctt

SEQ ID NO: 771569 - DNA, 33 bp, Homo sapien
ttcacttccttggtgaactcaaccttcagcctc

SEQ ID NO: 771570 - DNA, 33 bp, Homo sapien
ttcacttccttggtgagctcaaccttcagcctc

SEQ ID NO: 771571 - DNA, 33 bp, Homo sapien
tttactgatcctcttacgtcctcccagtagcaa

SEQ ID NO: 771572 - DNA, 33 bp, Homo sapien
tttactgatcctcttatgtcctcccagtagcaa

SEQ ID NO: 771573 - DNA, 33 bp, Homo sapien
gaaggttctaccactcccatcctaattggcagt

SEQ ID NO: 771574 - DNA, 33 bp, Homo sapien
gaaggttctaccactctcatcctaattggcagt

SEQ ID NO: 771575 - DNA, 33 bp, Homo sapien
gtctcagggtccaccaatggataatgtatttta

SEQ ID NO: 771576 - DNA, 33 bp, Homo sapien
gtctcagggtccaccagtggataatgtatttta

SEQ ID NO: 771577 - DNA, 33 bp, Homo sapien
ggtccaagtcacagtcaatcctgaaatattttg

SEQ ID NO: 771578 - DNA, 33 bp, Homo sapien
ggtccaagtcacagtccatcctgaaatattttg

SEQ ID NO: 771579 - DNA, 33 bp, Homo sapien
gagattcccagattacagcttatccaatcaata

SEQ ID NO: 771580 - DNA, 33 bp, Homo sapien
gagattcccagattaccgcttatccaatcaata

SEQ ID NO: 771581 - DNA, 33 bp, Homo sapien
gtacatagctgagaaagtcttcatagtggagaa

SEQ ID NO: 771582 - DNA, 33 bp, Homo sapien
gtacatagctgagaaattcttcatagtggagaa

SEQ ID NO: 771583 - DNA, 33 bp, Homo sapien
gaagctgaacttttaaatcaaagccagaaaatg

SEQ ID NO: 771584 - DNA, 33 bp, Homo sapien
gaagctgaacttttaagtcaaagccagaaaatg

SEQ ID NO: 771585 - DNA, 33 bp, Homo sapien
acgcctcagacagtccacattaatttcacatcc

SEQ ID NO: 771586 - DNA, 33 bp, Homo sapien
acgcctcagacagtccgcattaatttcacatcc

SEQ ID NO: 771587 - DNA, 33 bp, Homo sapien
ttggtttacactggaacgtctcttctgggactt

SEQ ID NO: 771588 - DNA, 33 bp, Homo sapien
ttggtttacactggaatgtctcttctgggactt

SEQ ID NO: 771589 - DNA, 33 bp, Homo sapien
tgtgaaactacagtaaactcatgtgacaaaaaa

SEQ ID NO: 771590 - DNA, 33 bp, Homo sapien
tgtgaaactacagtaacctcatgtgacaaaaaa

SEQ ID NO: 771591 - DNA, 33 bp, Homo sapien
gatcaacatcaaatgcactgattcctttaggct

SEQ ID NO: 771592 - DNA, 33 bp, Homo sapien
gatcaacatcaaatgcgctgattcctttaggct

SEQ ID NO: 771593 - DNA, 33 bp, Homo sapien
tagcatgatggtaacaaaggtcataaccaccct

SEQ ID NO: 771594 - DNA, 33 bp, Homo sapien
tagcatgatggtaacacaggtcataaccaccct

SEQ ID NO: 771595 - DNA, 33 bp, Homo sapien
ctaactaagcatctcacaaaaaagtgcaaaata

SEQ ID NO: 771596 - DNA, 33 bp, Homo sapien
ctaactaagcatctcataaaaaagtgcaaaata

SEQ ID NO: 771597 - DNA, 33 bp, Homo sapien
gttcaagctttggccagggaaaacaacagatct

SEQ ID NO: 771598 - DNA, 33 bp, Homo sapien
gttcaagctttggccatggaaaacaacagatct

SEQ ID NO: 771599 - DNA, 33 bp, Homo sapien
gtgtggctaaagatcaacaggcccaagtggtag

SEQ ID NO: 771600 - DNA, 33 bp, Homo sapien
gtgtggctaaagatcagcaggcccaagtggtag

SEQ ID NO: 771601 - DNA, 33 bp, Homo sapien
aaatagtgtagtgcaacggaaaaagtacagaaa

SEQ ID NO: 771602 - DNA, 33 bp, Homo sapien
aaatagtgtagtgcaatggaaaaagtacagaaa

SEQ ID NO: 771603 - DNA, 33 bp, Homo sapien
tggatggattttggtgacaatcttgaattagaa

SEQ ID NO: 771604 - DNA, 33 bp, Homo sapien
tggatggattttggtgtcaatcttgaattagaa

SEQ ID NO: 771605 - DNA, 33 bp, Homo sapien
actgatgtaaagaaagccatgacttctagattg

SEQ ID NO: 771606 - DNA, 33 bp, Homo sapien
actgatgtaaagaaaggcatgacttctagattg

SEQ ID NO: 771607 - DNA, 33 bp, Homo sapien
ccaaaacccaagtccaagttcctgtaatgcctg

SEQ ID NO: 771608 - DNA, 33 bp, Homo sapien
ccaaaacccaagtccaggttcctgtaatgcctg

SEQ ID NO: 771609 - DNA, 33 bp, Homo sapien
aagcctactctgaattaaaatgaggtagaaaaa

SEQ ID NO: 771610 - DNA, 33 bp, Homo sapien
aagcctactctgaattgaaatgaggtagaaaaa

SEQ ID NO: 771611 - DNA, 33 bp, Homo sapien
ttttgccttatcaaaaatgtgatagcaaaaatg

SEQ ID NO: 771612 - DNA, 33 bp, Homo sapien
ttttgccttatcaaaactgtgatagcaaaaatg

SEQ ID NO: 771613 - DNA, 33 bp, Homo sapien
gcacaataacgccggccgcaatgtgaggctccg

SEQ ID NO: 771614 - DNA, 33 bp, Homo sapien
gcacaataacgccggctgcaatgtgaggctccg

SEQ ID NO: 771615 - DNA, 33 bp, Homo sapien
ccaacagcgcctagtacgaaaatttgcccatac

SEQ ID NO: 771616 - DNA, 33 bp, Homo sapien
ccaacagcgcctagtatgaaaatttgcccatac

SEQ ID NO: 771617 - DNA, 33 bp, Homo sapien
caaggctacacaaagagataagcaggaatggaa

SEQ ID NO: 771618 - DNA, 33 bp, Homo sapien
caaggctacacaaagatataagcaggaatggaa

SEQ ID NO: 771619 - DNA, 33 bp, Homo sapien
attcataataatgccacattacttttctagctt

SEQ ID NO: 771620 - DNA, 33 bp, Homo sapien
attcataataatgccagattacttttctagctt

SEQ ID NO: 771621 - DNA, 33 bp, Homo sapien
caaatagtccagtaagccctcaaataaatcagg

SEQ ID NO: 771622 - DNA, 33 bp, Homo sapien
caaatagtccagtaaggcctcaaataaatcagg

SEQ ID NO: 771623 - DNA, 33 bp, Homo sapien
ccctctggtttaaactaagacgtctactcagag

SEQ ID NO: 771624 - DNA, 33 bp, Homo sapien
ccctctggtttaaactgagacgtctactcagag

SEQ ID NO: 771625 - DNA, 33 bp, Homo sapien
tttctatgtatttgacacgtctccgcacactct

SEQ ID NO: 771626 - DNA, 33 bp, Homo sapien
tttctatgtatttgacgcgtctccgcacactct

SEQ ID NO: 771627 - DNA, 33 bp, Homo sapien
gtgcatgaagaagccacgttgaatgtccaacca

SEQ ID NO: 771628 - DNA, 33 bp, Homo sapien
gtgcatgaagaagccatgttgaatgtccaacca

SEQ ID NO: 771629 - DNA, 33 bp, Homo sapien
gaaagatttagcagaaagtttcttcactcagta

SEQ ID NO: 771630 - DNA, 33 bp, Homo sapien
gaaagatttagcagaatgtttcttcactcagta

SEQ ID NO: 771631 - DNA, 33 bp, Homo sapien
ggaaggtgctgtcttacgaaagaggaaaccgag

SEQ ID NO: 771632 - DNA, 33 bp, Homo sapien
ggaaggtgctgtcttatgaaagaggaaaccgag

SEQ ID NO: 771633 - DNA, 33 bp, Homo sapien
aactttaatagcaatgcatgcaatatgagaagc

SEQ ID NO: 771634 - DNA, 33 bp, Homo sapien
aactttaatagcaatgtatgcaatatgagaagc

SEQ ID NO: 771635 - DNA, 33 bp, Homo sapien
cataagtttgtcagaaattccattgcagagata

SEQ ID NO: 771636 - DNA, 33 bp, Homo sapien
cataagtttgtcagaacttccattgcagagata

SEQ ID NO: 771637 - DNA, 33 bp, Homo sapien
ctgtgatccttgacgacaggatttgaaacccaa

SEQ ID NO: 771638 - DNA, 33 bp, Homo sapien
ctgtgatccttgacgataggatttgaaacccaa

SEQ ID NO: 771639 - DNA, 33 bp, Homo sapien
tacaaaccttggaaaaccacctaattgattgcc

SEQ ID NO: 771640 - DNA, 33 bp, Homo sapien
tacaaaccttggaaaatcacctaattgattgcc

SEQ ID NO: 771641 - DNA, 33 bp, Homo sapien
taggtatgtatgtatacgaaaaggcagtatata

SEQ ID NO: 771642 - DNA, 33 bp, Homo sapien
taggtatgtatgtatatgaaaaggcagtatata

SEQ ID NO: 771643 - DNA, 33 bp, Homo sapien
tcataagtggtataaggcaagtgatttattatg

SEQ ID NO: 771644 - DNA, 33 bp, Homo sapien
tcataagtggtataagtcaagtgatttattatg

SEQ ID NO: 771645 - DNA, 33 bp, Homo sapien
acatttcagtccaagaaaaccttcctcaaattt

SEQ ID NO: 771646 - DNA, 33 bp, Homo sapien
acatttcagtccaagataaccttcctcaaattt

SEQ ID NO: 771647 - DNA, 33 bp, Homo sapien
tgaaaacagcaatatcacagctaacactttagg

SEQ ID NO: 771648 - DNA, 33 bp, Homo sapien
tgaaaacagcaatatcgcagctaacactttagg

SEQ ID NO: 771649 - DNA, 33 bp, Homo sapien
cctatacctaccagcagcataagggagcctgga

SEQ ID NO: 771650 - DNA, 33 bp, Homo sapien
cctatacctaccagcatcataagggagcctgga

SEQ ID NO: 771651 - DNA, 33 bp, Homo sapien
gaagttaactctgtaaggtagtcttgtgagatc

SEQ ID NO: 771652 - DNA, 33 bp, Homo sapien
gaagttaactctgtaatgtagtcttgtgagatc

SEQ ID NO: 771653 - DNA, 33 bp, Homo sapien
ggtgagatgatgaaaacgaaatggtctctgctc

SEQ ID NO: 771654 - DNA, 33 bp, Homo sapien
ggtgagatgatgaaaatgaaatggtctctgctc

SEQ ID NO: 771655 - DNA, 33 bp, Homo sapien
aatcctgacctaatcaagcatttaacaatccat

SEQ ID NO: 771656 - DNA, 33 bp, Homo sapien
aatcctgacctaatcaggcatttaacaatccat

SEQ ID NO: 771657 - DNA, 33 bp, Homo sapien
attttaaagactaaagacttacagccaaatatt

SEQ ID NO: 771658 - DNA, 33 bp, Homo sapien
attttaaagactaaagccttacagccaaatatt

SEQ ID NO: 771659 - DNA, 33 bp, Homo sapien
ctctgccatatgttaacagaagtttctgagtct

SEQ ID NO: 771660 - DNA, 33 bp, Homo sapien
ctctgccatatgttaatagaagtttctgagtct

SEQ ID NO: 771661 - DNA, 33 bp, Homo sapien
atgggaaaactatagaagtacataactcttgta

SEQ ID NO: 771662 - DNA, 33 bp, Homo sapien
atgggaaaactatagaggtacataactcttgta

SEQ ID NO: 771663 - DNA, 33 bp, Homo sapien
aattacagtgttactcgccattgaacagcctat

SEQ ID NO: 771664 - DNA, 33 bp, Homo sapien
aattacagtgttactctccattgaacagcctat

SEQ ID NO: 771665 - DNA, 33 bp, Homo sapien
atatctgattttggcaagagtgactggttaacc

SEQ ID NO: 771666 - DNA, 33 bp, Homo sapien
atatctgattttggcaggagtgactggttaacc

SEQ ID NO: 771667 - DNA, 33 bp, Homo sapien
catctgagatggtaaaacctcatgattacacaa

SEQ ID NO: 771668 - DNA, 33 bp, Homo sapien
catctgagatggtaaagcctcatgattacacaa

SEQ ID NO: 771669 - DNA, 33 bp, Homo sapien
acctcgtcagattcagaccatccttaggtgctg

SEQ ID NO: 771670 - DNA, 33 bp, Homo sapien
acctcgtcagattcagtccatccttaggtgctg

SEQ ID NO: 771671 - DNA, 33 bp, Homo sapien
atgatcactctggccacctaatacagattggaa

SEQ ID NO: 771672 - DNA, 33 bp, Homo sapien
atgatcactctggccatctaatacagattggaa

SEQ ID NO: 771673 - DNA, 33 bp, Homo sapien
aagattttaacaacgaggagctgactttatgga

SEQ ID NO: 771674 - DNA, 33 bp, Homo sapien
aagattttaacaacgatgagctgactttatgga

SEQ ID NO: 771675 - DNA, 33 bp, Homo sapien
aaactgagcacgatgccgaaatgacgggagcag

SEQ ID NO: 771676 - DNA, 33 bp, Homo sapien
aaactgagcacgatgctgaaatgacgggagcag

SEQ ID NO: 771677 - DNA, 33 bp, Homo sapien
ataaaaacaaaaaaatcatggcagagcatggtg

SEQ ID NO: 771678 - DNA, 33 bp, Homo sapien
ataaaaacaaaaaaatgatggcagagcatggtg

SEQ ID NO: 771679 - DNA, 33 bp, Homo sapien
caattactgcttttaacgtatgtgcacaccaag

SEQ ID NO: 771680 - DNA, 33 bp, Homo sapien
caattactgcttttaatgtatgtgcacaccaag

SEQ ID NO: 771681 - DNA, 33 bp, Homo sapien
ataagagcttagtgacagagagaattcagtaat

SEQ ID NO: 771682 - DNA, 33 bp, Homo sapien
ataagagcttagtgactgagagaattcagtaat

SEQ ID NO: 771683 - DNA, 33 bp, Homo sapien
tcatttcattgtaaagaccctggaactctgcac

SEQ ID NO: 771684 - DNA, 33 bp, Homo sapien
tcatttcattgtaaaggccctggaactctgcac

SEQ ID NO: 771685 - DNA, 33 bp, Homo sapien
gacagcaagggaggaacgaccttccaaaacaat

SEQ ID NO: 771686 - DNA, 33 bp, Homo sapien
gacagcaagggaggaatgaccttccaaaacaat

SEQ ID NO: 771687 - DNA, 33 bp, Homo sapien
atatcgctggttgttgacaaacataatatttcc

SEQ ID NO: 771688 - DNA, 33 bp, Homo sapien
atatcgctggttgttggcaaacataatatttcc

SEQ ID NO: 771689 - DNA, 33 bp, Homo sapien
cagtttgcaaactgcagtaaccatgttaaagga

SEQ ID NO: 771690 - DNA, 33 bp, Homo sapien
cagtttgcaaactgcattaaccatgttaaagga

SEQ ID NO: 771691 - DNA, 33 bp, Homo sapien
caaagcatcaagctcacgaaaatcactaatttt

SEQ ID NO: 771692 - DNA, 33 bp, Homo sapien
caaagcatcaagctcatgaaaatcactaatttt

SEQ ID NO: 771693 - DNA, 33 bp, Homo sapien
gaatgtagggcagacaatcacttggcaggggtg

SEQ ID NO: 771694 - DNA, 33 bp, Homo sapien
gaatgtagggcagacagtcacttggcaggggtg

SEQ ID NO: 771695 - DNA, 33 bp, Homo sapien
tgttttctgaactagacgtagaagtactagatg

SEQ ID NO: 771696 - DNA, 33 bp, Homo sapien
tgttttctgaactagatgtagaagtactagatg

SEQ ID NO: 771697 - DNA, 33 bp, Homo sapien
tctttatattataatgaaaatacggctattgat

SEQ ID NO: 771698 - DNA, 33 bp, Homo sapien
tctttatattataatggaaatacggctattgat

SEQ ID NO: 771699 - DNA, 33 bp, Homo sapien
caaaatgctctgggtccataagcttttctttac

SEQ ID NO: 771700 - DNA, 33 bp, Homo sapien
caaaatgctctgggtcgataagcttttctttac

SEQ ID NO: 771701 - DNA, 33 bp, Homo sapien
gaaggtatttgtgaccaacagcaaatgcaaaag

SEQ ID NO: 771702 - DNA, 33 bp, Homo sapien
gaaggtatttgtgaccgacagcaaatgcaaaag

SEQ ID NO: 771703 - DNA, 33 bp, Homo sapien
gatttccttgtatcagcaatggcaccagcgttc

SEQ ID NO: 771704 - DNA, 33 bp, Homo sapien
gatttccttgtatcagtaatggcaccagcgttc

SEQ ID NO: 771705 - DNA, 33 bp, Homo sapien
tgtcaataaatgcagaaccctcataacttggtc

SEQ ID NO: 771706 - DNA, 33 bp, Homo sapien
tgtcaataaatgcagacccctcataacttggtc

SEQ ID NO: 771707 - DNA, 33 bp, Homo sapien
agtgtcacaaagtatacgatgttgaatttgtct

SEQ ID NO: 771708 - DNA, 33 bp, Homo sapien
agtgtcacaaagtatatgatgttgaatttgtct

SEQ ID NO: 771709 - DNA, 33 bp, Homo sapien
gattctggaagcatagacaagatttctgattgt

SEQ ID NO: 771710 - DNA, 33 bp, Homo sapien
gattctggaagcatagtcaagatttctgattgt

SEQ ID NO: 771711 - DNA, 33 bp, Homo sapien
aaccattgagtggcaacatcctaggctttgtag

SEQ ID NO: 771712 - DNA, 33 bp, Homo sapien
aaccattgagtggcaatatcctaggctttgtag

SEQ ID NO: 771713 - DNA, 33 bp, Homo sapien
gattctcagtgataaaagcatatgaaagaagca

SEQ ID NO: 771714 - DNA, 33 bp, Homo sapien
gattctcagtgataaaggcatatgaaagaagca

SEQ ID NO: 771715 - DNA, 33 bp, Homo sapien
atgataatcagtgcaaacatatactaaaacaat

SEQ ID NO: 771716 - DNA, 33 bp, Homo sapien
atgataatcagtgcaaccatatactaaaacaat

SEQ ID NO: 771717 - DNA, 33 bp, Homo sapien
cgtaaagcaaacaacacgaaaacactaaagcag

SEQ ID NO: 771718 - DNA, 33 bp, Homo sapien
cgtaaagcaaacaacatgaaaacactaaagcag

SEQ ID NO: 771719 - DNA, 33 bp, Homo sapien
tcagcattttctctggaacatgattgggtcact

SEQ ID NO: 771720 - DNA, 33 bp, Homo sapien
tcagcattttctctgggacatgattgggtcact

SEQ ID NO: 771721 - DNA, 33 bp, Homo sapien
aaccccattatctgcaacccctattttctagtg

SEQ ID NO: 771722 - DNA, 33 bp, Homo sapien
aaccccattatctgcagcccctattttctagtg

SEQ ID NO: 771723 - DNA, 33 bp, Homo sapien
aagatagataaatctcaaaaacattaggctaca

SEQ ID NO: 771724 - DNA, 33 bp, Homo sapien
aagatagataaatctcgaaaacattaggctaca

SEQ ID NO: 771725 - DNA, 33 bp, Homo sapien
gaggggactgtcctgaatactgttagatgttta

SEQ ID NO: 771726 - DNA, 33 bp, Homo sapien
gaggggactgtcctgagtactgttagatgttta

SEQ ID NO: 771727 - DNA, 33 bp, Homo sapien
gaacatgaaccttataagtgcctattcataatt

SEQ ID NO: 771728 - DNA, 33 bp, Homo sapien
gaacatgaaccttatatgtgcctattcataatt

SEQ ID NO: 771729 - DNA, 33 bp, Homo sapien
tgcaagaaatgggacacgggaaagaagactgag

SEQ ID NO: 771730 - DNA, 33 bp, Homo sapien
tgcaagaaatgggacatgggaaagaagactgag

SEQ ID NO: 771731 - DNA, 33 bp, Homo sapien
catatggaaactcgctcaactttctggaaccca

SEQ ID NO: 771732 - DNA, 33 bp, Homo sapien
catatggaaactcgcttaactttctggaaccca

SEQ ID NO: 771733 - DNA, 33 bp, Homo sapien
ttcataagatgggagaagctagggcctttttaa

SEQ ID NO: 771734 - DNA, 33 bp, Homo sapien
ttcataagatgggagatgctagggcctttttaa

SEQ ID NO: 771735 - DNA, 33 bp, Homo sapien
cataactgagaaagtgaaaagttgaacttcata

SEQ ID NO: 771736 - DNA, 33 bp, Homo sapien
cataactgagaaagtggaaagttgaacttcata

SEQ ID NO: 771737 - DNA, 33 bp, Homo sapien
tccacgtgaactaaagaagtcacctgccatagc

SEQ ID NO: 771738 - DNA, 33 bp, Homo sapien
tccacgtgaactaaaggagtcacctgccatagc

SEQ ID NO: 771739 - DNA, 33 bp, Homo sapien
taccataggttttatacgggtatccttgaacag

SEQ ID NO: 771740 - DNA, 33 bp, Homo sapien
taccataggttttatatgggtatccttgaacag

SEQ ID NO: 771741 - DNA, 33 bp, Homo sapien
taaaaggaatggatgactacactaactcccctc

SEQ ID NO: 771742 - DNA, 33 bp, Homo sapien
taaaaggaatggatgattacactaactcccctc

SEQ ID NO: 771743 - DNA, 33 bp, Homo sapien
ataagatgctatgcagaaaaggactatagattt

SEQ ID NO: 771744 - DNA, 33 bp, Homo sapien
ataagatgctatgcaggaaaggactatagattt

SEQ ID NO: 771745 - DNA, 33 bp, Homo sapien
gatgaggtaatacagcactcacaaactgagaaa

SEQ ID NO: 771746 - DNA, 33 bp, Homo sapien
gatgaggtaatacagcgctcacaaactgagaaa

SEQ ID NO: 771747 - DNA, 33 bp, Homo sapien
ctgctgtccttagaaacgtctgcttgcaaggta

SEQ ID NO: 771748 - DNA, 33 bp, Homo sapien
ctgctgtccttagaaatgtctgcttgcaaggta

SEQ ID NO: 771749 - DNA, 33 bp, Homo sapien
aggaggctgttgaaacaccacaaactgatagta

SEQ ID NO: 771750 - DNA, 33 bp, Homo sapien
aggaggctgttgaaacgccacaaactgatagta

SEQ ID NO: 771751 - DNA, 33 bp, Homo sapien
agaaactgaattgctacagtgtggagatcaaaa

SEQ ID NO: 771752 - DNA, 33 bp, Homo sapien
agaaactgaattgctatagtgtggagatcaaaa

SEQ ID NO: 771753 - DNA, 33 bp, Homo sapien
ttgtttaccaatgtctaacactcacaggatttg

SEQ ID NO: 771754 - DNA, 33 bp, Homo sapien
ttgtttaccaatgtctgacactcacaggatttg

SEQ ID NO: 771755 - DNA, 33 bp, Homo sapien
ttgaatatacacattagctattcaagttaaaag

SEQ ID NO: 771756 - DNA, 33 bp, Homo sapien
ttgaatatacacattatctattcaagttaaaag

SEQ ID NO: 771757 - DNA, 33 bp, Homo sapien
gacttgtgatcccaacacttggcttaagcctca

SEQ ID NO: 771758 - DNA, 33 bp, Homo sapien
gacttgtgatcccaacgcttggcttaagcctca

SEQ ID NO: 771759 - DNA, 33 bp, Homo sapien; identical to SEQ ID NO: 771757

SEQ ID NO: 771760 - DNA, 33 bp, Homo sapien; identical to SEQ ID NO: 771758

SEQ ID NO: 771761 - DNA, 33 bp, Homo sapien
attggcaaatactacaaccaaaatagccctcct

SEQ ID NO: 771762 - DNA, 33 bp, Homo sapien
attggcaaatactacagccaaaatagccctcct

SEQ ID NO: 771763 - DNA, 33 bp, Homo sapien
ctcagctatcaacatcactgaaccacaagttgg

SEQ ID NO: 771764 - DNA, 33 bp, Homo sapien
ctcagctatcaacatcgctgaaccacaagttgg

SEQ ID NO: 771765 - DNA, 33 bp, Homo sapien
agatgctgcatgtaaaatataaagtgcttagaa

SEQ ID NO: 771766 - DNA, 33 bp, Homo sapien
agatgctgcatgtaaagtataaagtgcttagaa

SEQ ID NO: 771767 - DNA, 33 bp, Homo sapien
cagtacatttattgcaagtttattttatgctta

SEQ ID NO: 771768 - DNA, 33 bp, Homo sapien
cagtacatttattgcaggtttattttatgctta

SEQ ID NO: 771769 - DNA, 33 bp, Homo sapien
ggtttccagaatacaacggctacagactggagg

SEQ ID NO: 771770 - DNA, 33 bp, Homo sapien
ggtttccagaatacaatggctacagactggagg

SEQ ID NO: 771771 - DNA, 33 bp, Homo sapien
tacaaatgattatagaatacgcgaacaaatgaa

SEQ ID NO: 771772 - DNA, 33 bp, Homo sapien
tacaaatgattatagagtacgcgaacaaatgaa

SEQ ID NO: 771773 - DNA, 33 bp, Homo sapien
atgtggtaagaatttccaggcgttaaaattgat

SEQ ID NO: 771774 - DNA, 33 bp, Homo sapien
atgtggtaagaatttcgaggcgttaaaattgat

SEQ ID NO: 771775 - DNA, 33 bp, Homo sapien
atgcttatatgtaaatgaatggcagcaatggta

SEQ ID NO: 771776 - DNA, 33 bp, Homo sapien
atgcttatatgtaaattaatggcagcaatggta

SEQ ID NO: 771777 - DNA, 33 bp, Homo sapien
gactcatgaatggaaactactgccaggaaccag

SEQ ID NO: 771778 - DNA, 33 bp, Homo sapien
gactcatgaatggaaattactgccaggaaccag

SEQ ID NO: 771779 - DNA, 33 bp, Homo sapien
gcccttccaggtcctggacgaaaaactgcttcc

SEQ ID NO: 771780 - DNA, 33 bp, Homo sapien
gcccttccaggtcctgtacgaaaaactgcttcc

SEQ ID NO: 771781 - DNA, 33 bp, Homo sapien
aagacagacaatagctcaactagtaacatcccc

SEQ ID NO: 771782 - DNA, 33 bp, Homo sapien
aagacagacaatagcttaactagtaacatcccc

SEQ ID NO: 771783 - DNA, 33 bp, Homo sapien
aataggtaggagtgtgcagccctatagaatgga

SEQ ID NO: 771784 - DNA, 33 bp, Homo sapien
aataggtaggagtgtggagccctatagaatgga

SEQ ID NO: 771785 - DNA, 33 bp, Homo sapien
ctcttccccctcaaaaaaagtggatgcagaaaa

SEQ ID NO: 771786 - DNA, 33 bp, Homo sapien
ctcttccccctcaaaacaagtggatgcagaaaa

SEQ ID NO: 771787 - DNA, 33 bp, Homo sapien
cttggactagatgaccagataacattccaattt

SEQ ID NO: 771788 - DNA, 33 bp, Homo sapien
cttggactagatgaccggataacattccaattt

SEQ ID NO: 771789 - DNA, 33 bp, Homo sapien
tgggctgtgggtggacagtagcggagaagaagg

SEQ ID NO: 771790 - DNA, 33 bp, Homo sapien
tgggctgtgggtggactgtagcggagaagaagg

SEQ ID NO: 771791 - DNA, 33 bp, Homo sapien
cagtccataaagtcgcacctaaaagatatgtca

SEQ ID NO: 771792 - DNA, 33 bp, Homo sapien
cagtccataaagtcgcgcctaaaagatatgtca

SEQ ID NO: 771793 - DNA, 33 bp, Homo sapien
aagcaagctaactctaagtagtttgtgtctgaa

SEQ ID NO: 771794 - DNA, 33 bp, Homo sapien
aagcaagctaactctaggtagtttgtgtctgaa

SEQ ID NO: 771795 - DNA, 33 bp, Homo sapien
tccatgccactaacccaaaactaagttgtttat

SEQ ID NO: 771796 - DNA, 33 bp, Homo sapien
tccatgccactaacccgaaactaagttgtttat

SEQ ID NO: 771797 - DNA, 33 bp, Homo sapien
gtttcccataaaaggaagtacgattcttcagtt

SEQ ID NO: 771798 - DNA, 33 bp, Homo sapien
gtttcccataaaaggacgtacgattcttcagtt

SEQ ID NO: 771799 - DNA, 33 bp, Homo sapien
gatgagttcttgctgacagttcaccagagagct

SEQ ID NO: 771800 - DNA, 33 bp, Homo sapien
gatgagttcttgctgatagttcaccagagagct

SEQ ID NO: 771801 - DNA, 33 bp, Homo sapien
ctgcaatctagcgctacccccaaacagactact

SEQ ID NO: 771802 - DNA, 33 bp, Homo sapien
ctgcaatctagcgctatccccaaacagactact

SEQ ID NO: 771803 - DNA, 33 bp, Homo sapien
agacatataaaccagaaataagcccacacattt

SEQ ID NO: 771804 - DNA, 33 bp, Homo sapien
agacatataaaccagagataagcccacacattt

SEQ ID NO: 771805 - DNA, 33 bp, Homo sapien
cctaagaagatctacaaatggccagctcactgt

SEQ ID NO: 771806 - DNA, 33 bp, Homo sapien
cctaagaagatctacacatggccagctcactgt

SEQ ID NO: 771807 - DNA, 33 bp, Homo sapien
ttacagaaaaattgacccagtgtacagtcatat

SEQ ID NO: 771808 - DNA, 33 bp, Homo sapien
ttacagaaaaattgactcagtgtacagtcatat

SEQ ID NO: 771809 - DNA, 33 bp, Homo sapien
gcccttactcttaccaagtttctgttctctaag

SEQ ID NO: 771810 - DNA, 33 bp, Homo sapien
gcccttactcttaccaggtttctgttctctaag

SEQ ID NO: 771811 - DNA, 33 bp, Homo sapien
ttgaaaactttaactgaaaatacttctgatcat

SEQ ID NO: 771812 - DNA, 33 bp, Homo sapien
ttgaaaactttaactggaaatacttctgatcat

SEQ ID NO: 771813 - DNA, 33 bp, Homo sapien
atctcaaacaggctgcacgtgatggcttaagcc

SEQ ID NO: 771814 - DNA, 33 bp, Homo sapien
atctcaaacaggctgcgcgtgatggcttaagcc

SEQ ID NO: 771815 - DNA, 33 bp, Homo sapien
ttgaaaatcacctcttaaaatttggaagaaaat

SEQ ID NO: 771816 - DNA, 33 bp, Homo sapien
ttgaaaatcacctcttgaaatttggaagaaaat

SEQ ID NO: 771817 - DNA, 33 bp, Homo sapien
catttaatcaatggccactatattggaatgaac

SEQ ID NO: 771818 - DNA, 33 bp, Homo sapien
catttaatcaatggccgctatattggaatgaac

SEQ ID NO: 771819 - DNA, 33 bp, Homo sapien
gccaagtacagcacagacatccttaacatcttc

SEQ ID NO: 771820 - DNA, 33 bp, Homo sapien
gccaagtacagcacaggcatccttaacatcttc

SEQ ID NO: 771821 - DNA, 33 bp, Homo sapien
catccaaggagcataaggcaagttttttgagca

SEQ ID NO: 771822 - DNA, 33 bp, Homo sapien
catccaaggagcataatgcaagttttttgagca

SEQ ID NO: 771823 - DNA, 33 bp, Homo sapien
gtagtttcaatctttacgcggtctttacttttc

SEQ ID NO: 771824 - DNA, 33 bp, Homo sapien
gtagtttcaatctttaggcggtctttacttttc

SEQ ID NO: 771825 - DNA, 33 bp, Homo sapien
ggaagtgagctgttcaagccgcctgttccccga

SEQ ID NO: 771826 - DNA, 33 bp, Homo sapien
ggaagtgagctgttcaggccgcctgttccccga

SEQ ID NO: 771827 - DNA, 33 bp, Homo sapien
accagtggaaaagcacagaaagggagtaagacc

SEQ ID NO: 771828 - DNA, 33 bp, Homo sapien
accagtggaaaagcacggaaagggagtaagacc

SEQ ID NO: 771829 - DNA, 33 bp, Homo sapien
gtctcaggatatggagaaaatctgtagcacaac

SEQ ID NO: 771830 - DNA, 33 bp, Homo sapien
gtctcaggatatggagcaaatctgtagcacaac

SEQ ID NO: 771831 - DNA, 33 bp, Homo sapien
ggggtagtgagagaaacgatctttatgagggtg

SEQ ID NO: 771832 - DNA, 33 bp, Homo sapien
ggggtagtgagagaaatgatctttatgagggtg

SEQ ID NO: 771833 - DNA, 33 bp, Homo sapien
catactaggccaagaacactgtgccactgtttt

SEQ ID NO: 771834 - DNA, 33 bp, Homo sapien
catactaggccaagaatactgtgccactgtttt

SEQ ID NO: 771835 - DNA, 33 bp, Homo sapien
tgctttggcctcatcagtaaggataaaacaaat

SEQ ID NO: 771836 - DNA, 33 bp, Homo sapien
tgctttggcctcatcattaaggataaaacaaat

SEQ ID NO: 771837 - DNA, 33 bp, Homo sapien
aacaaggcaggataaaaaccctcattccctgtg

SEQ ID NO: 771838 - DNA, 33 bp, Homo sapien
aacaaggcaggataaacaccctcattccctgtg

SEQ ID NO: 771839 - DNA, 33 bp, Homo sapien
gagctggatcatttccactctgcaaaggtaatg

SEQ ID NO: 771840 - DNA, 33 bp, Homo sapien
gagctggatcatttccgctctgcaaaggtaatg

SEQ ID NO: 771841 - DNA, 33 bp, Homo sapien
tggagaggctgaatatgagcatttggatgctgt

SEQ ID NO: 771842 - DNA, 33 bp, Homo sapien
tggagaggctgaatattagcatttggatgctgt

SEQ ID NO: 771843 - DNA, 33 bp, Homo sapien
cctatgctccccaagaccaacctgctacactcc

SEQ ID NO: 771844 - DNA, 33 bp, Homo sapien
cctatgctccccaagatcaacctgctacactcc

SEQ ID NO: 771845 - DNA, 33 bp, Homo sapien
agagaggacagataagaaagacacagagaactt

SEQ ID NO: 771846 - DNA, 33 bp, Homo sapien
agagaggacagataaggaagacacagagaactt

SEQ ID NO: 771847 - DNA, 33 bp, Homo sapien
ggccgatattggaagacgttgcttatattgcaa

SEQ ID NO: 771848 - DNA, 33 bp, Homo sapien
ggccgatattggaagatgttgcttatattgcaa

SEQ ID NO: 771849 - DNA, 33 bp, Homo sapien
agagagcagaacagtaaaaagatcatacgcttt

SEQ ID NO: 771850 - DNA, 33 bp, Homo sapien
agagagcagaacagtagaaagatcatacgcttt

SEQ ID NO: 771851 - DNA, 33 bp, Homo sapien
tgtggatcccatcaccaaacaagtgacagttaa

SEQ ID NO: 771852 - DNA, 33 bp, Homo sapien
tgtggatcccatcaccgaacaagtgacagttaa

SEQ ID NO: 771853 - DNA, 33 bp, Homo sapien
atcactatattccaaacagaggaaactgaaact

SEQ ID NO: 771854 - DNA, 33 bp, Homo sapien
atcactatattccaaagagaggaaactgaaact

SEQ ID NO: 771855 - DNA, 33 bp, Homo sapien
tgataccattgacataagagtacagaagcaaga

SEQ ID NO: 771856 - DNA, 33 bp, Homo sapien
tgataccattgacataggagtacagaagcaaga

SEQ ID NO: 771857 - DNA, 33 bp, Homo sapien
ctctgaggaactagaacggaataggctctgtag

SEQ ID NO: 771858 - DNA, 33 bp, Homo sapien
ctctgaggaactagaatggaataggctctgtag

SEQ ID NO: 771859 - DNA, 33 bp, Homo sapien
cacttttagctcagaactgaataacccaccaga

SEQ ID NO: 771860 - DNA, 33 bp, Homo sapien
cacttttagctcagaattgaataacccaccaga

SEQ ID NO: 771861 - DNA, 33 bp, Homo sapien
atgtcacaagcagacaatgatatgaacaattgc

SEQ ID NO: 771862 - DNA, 33 bp, Homo sapien
atgtcacaagcagacagtgatatgaacaattgc

SEQ ID NO: 771863 - DNA, 33 bp, Homo sapien
atgtgcatgaaatctcactctttccccttcctc

SEQ ID NO: 771864 - DNA, 33 bp, Homo sapien
atgtgcatgaaatctctctctttccccttcctc

SEQ ID NO: 771865 - DNA, 33 bp, Homo sapien
gggtctttaaaaagccaaaatccatttgtctgt

SEQ ID NO: 771866 - DNA, 33 bp, Homo sapien
gggtctttaaaaagccgaaatccatttgtctgt

SEQ ID NO: 771867 - DNA, 33 bp, Homo sapien
aaaaaaaaaggaataacagcaagggataagcag

SEQ ID NO: 771868 - DNA, 33 bp, Homo sapien
aaaaaaaaaggaataatagcaagggataagcag

SEQ ID NO: 771869 - DNA, 33 bp, Homo sapien
aacaagagtgcagccagatttaggttaaggaga

SEQ ID NO: 771870 - DNA, 33 bp, Homo sapien
aacaagagtgcagccatatttaggttaaggaga

SEQ ID NO: 771871 - DNA, 33 bp, Homo sapien
tgcactcttgttcttgaaattttcttctccata

SEQ ID NO: 771872 - DNA, 33 bp, Homo sapien
tgcactcttgttcttgcaattttcttctccata

SEQ ID NO: 771873 - DNA, 33 bp, Homo sapien
aagccacaaaagcaacaatatgctaaaaggaaa

SEQ ID NO: 771874 - DNA, 33 bp, Homo sapien
aagccacaaaagcaacgatatgctaaaaggaaa

SEQ ID NO: 771875 - DNA, 33 bp, Homo sapien
agcttcctatcccataaagcctcgcacacaggg

SEQ ID NO: 771876 - DNA, 33 bp, Homo sapien
agcttcctatcccatagagcctcgcacacaggg

SEQ ID NO: 771877 - DNA, 33 bp, Homo sapien
ggaagatgttatcagcactctcattttacggat

SEQ ID NO: 771878 - DNA, 33 bp, Homo sapien
ggaagatgttatcagcgctctcattttacggat

SEQ ID NO: 771879 - DNA, 33 bp, Homo sapien
ccattcttgtctctaaacttgtgctttcaaagc

SEQ ID NO: 771880 - DNA, 33 bp, Homo sapien
ccattcttgtctctaagcttgtgctttcaaagc

SEQ ID NO: 771881 - DNA, 33 bp, Homo sapien
atggattttcatatacagagacttggtatgagt

SEQ ID NO: 771882 - DNA, 33 bp, Homo sapien
atggattttcatatacggagacttggtatgagt

SEQ ID NO: 771883 - DNA, 33 bp, Homo sapien
tttgaagagtttttaaatggacattctctctgt

SEQ ID NO: 771884 - DNA, 33 bp, Homo sapien
tttgaagagtttttaagtggacattctctctgt

SEQ ID NO: 771885 - DNA, 33 bp, Homo sapien
agatgataccactggaacagaagataaaacaga

SEQ ID NO: 771886 - DNA, 33 bp, Homo sapien
agatgataccactggagcagaagataaaacaga

SEQ ID NO: 771887 - DNA, 33 bp, Homo sapien
actgagttctgaggacacaaatttacatggtca

SEQ ID NO: 771888 - DNA, 33 bp, Homo sapien
actgagttctgaggacgcaaatttacatggtca

SEQ ID NO: 771889 - DNA, 33 bp, Homo sapien
tcaaccaggtactaagcatagcacagtacatga

SEQ ID NO: 771890 - DNA, 33 bp, Homo sapien
tcaaccaggtactaagtatagcacagtacatga

SEQ ID NO: 771891 - DNA, 33 bp, Homo sapien
cttgaacatctgagaaagaagactgacagtcca

SEQ ID NO: 771892 - DNA, 33 bp, Homo sapien
cttgaacatctgagaaggaagactgacagtcca

SEQ ID NO: 771893 - DNA, 33 bp, Homo sapien
ttgttctttaagcacagtctggcataggacatt

SEQ ID NO: 771894 - DNA, 33 bp, Homo sapien
ttgttctttaagcacattctggcataggacatt

SEQ ID NO: 771895 - DNA, 33 bp, Homo sapien
aatcccagcacattacaggctccatggacagga

SEQ ID NO: 771896 - DNA, 33 bp, Homo sapien
aatcccagcacattacgggctccatggacagga

SEQ ID NO: 771897 - DNA, 33 bp, Homo sapien
tgattattattgttgacgttgtctctgcctatt

SEQ ID NO: 771898 - DNA, 33 bp, Homo sapien
tgattattattgttgatgttgtctctgcctatt

SEQ ID NO: 771899 - DNA, 33 bp, Homo sapien
aaactagttcaggccactataggaaggagagtc

SEQ ID NO: 771900 - DNA, 33 bp, Homo sapien
aaactagttcaggccattataggaaggagagtc

SEQ ID NO: 771901 - DNA, 33 bp, Homo sapien
gataatccatgtgaccccttttatagccgtcag

SEQ ID NO: 771902 - DNA, 33 bp, Homo sapien
gataatccatgtgacctcttttatagccgtcag

SEQ ID NO: 771903 - DNA, 33 bp, Homo sapien
ctgcaaggcaacgcacactaagtgaggcacata

SEQ ID NO: 771904 - DNA, 33 bp, Homo sapien
ctgcaaggcaacgcaccctaagtgaggcacata

SEQ ID NO: 771905 - DNA, 33 bp, Homo sapien
atatgaatgtacccagacgaaaccaagcagaag

SEQ ID NO: 771906 - DNA, 33 bp, Homo sapien
atatgaatgtacccaggcgaaaccaagcagaag

SEQ ID NO: 771907 - DNA, 33 bp, Homo sapien
ccatcaaaaacctaaggatatgttaagagaggc

SEQ ID NO: 771908 - DNA, 33 bp, Homo sapien
ccatcaaaaacctaagtatatgttaagagaggc

SEQ ID NO: 771909 - DNA, 33 bp, Homo sapien
acaaaaagctacaaaaagacataatgtgaaaag

SEQ ID NO: 771910 - DNA, 33 bp, Homo sapien
acaaaaagctacaaaaggacataatgtgaaaag

SEQ ID NO: 771911 - DNA, 33 bp, Homo sapien
agggtaataatgatgaactctggagtgggaaac

SEQ ID NO: 771912 - DNA, 33 bp, Homo sapien
agggtaataatgatgagctctggagtgggaaac

SEQ ID NO: 771913 - DNA, 33 bp, Homo sapien
aaatctttaaagtaaagagcattcatacacata

SEQ ID NO: 771914 - DNA, 33 bp, Homo sapien
aaatctttaaagtaaatagcattcatacacata

SEQ ID NO: 771915 - DNA, 33 bp, Homo sapien
atcttggatatcaggcagactctaactataatc

SEQ ID NO: 771916 - DNA, 33 bp, Homo sapien
atcttggatatcaggcggactctaactataatc

SEQ ID NO: 771917 - DNA, 33 bp, Homo sapien
tcacattggtatgtagaaacagggttgttactg

SEQ ID NO: 771918 - DNA, 33 bp, Homo sapien
tcacattggtatgtaggaacagggttgttactg

SEQ ID NO: 771919 - DNA, 33 bp, Homo sapien
atcctaggcccagcacaaaccattccttaaact

SEQ ID NO: 771920 - DNA, 33 bp, Homo sapien
atcctaggcccagcacgaaccattccttaaact

SEQ ID NO: 771921 - DNA, 33 bp, Homo sapien
aaagagattgataaatcattctgtaccatagaa

SEQ ID NO: 771922 - DNA, 33 bp, Homo sapien
aaagagattgataaattattctgtaccatagaa

SEQ ID NO: 771923 - DNA, 33 bp, Homo sapien
tgagagtatttacagcagaaaaggaatatttga

SEQ ID NO: 771924 - DNA, 33 bp, Homo sapien
tgagagtatttacagcggaaaaggaatatttga

SEQ ID NO: 771925 - DNA, 33 bp, Homo sapien
cttgctccctctcttaccatatgacacacttgc

SEQ ID NO: 771926 - DNA, 33 bp, Homo sapien
cttgctccctctcttagcatatgacacacttgc

SEQ ID NO: 771927 - DNA, 33 bp, Homo sapien
gaaatgcaaaatggacaaatgcaatatatttac

SEQ ID NO: 771928 - DNA, 33 bp, Homo sapien
gaaatgcaaaatggacgaatgcaatatatttac

SEQ ID NO: 771929 - DNA, 33 bp, Homo sapien
atttccaagaagcagaaaaatagatacgtttag

SEQ ID NO: 771930 - DNA, 33 bp, Homo sapien
atttccaagaagcagagaaatagatacgtttag

SEQ ID NO: 771931 - DNA, 33 bp, Homo sapien
tcatatataccagtaactgttggttttcaatag

SEQ ID NO: 771932 - DNA, 33 bp, Homo sapien
tcatatataccagtaagtgttggttttcaatag

SEQ ID NO: 771933 - DNA, 33 bp, Homo sapien
ctgcttatagcccatgcattcactcaatacact

SEQ ID NO: 771934 - DNA, 33 bp, Homo sapien
ctgcttatagcccatgtattcactcaatacact

SEQ ID NO: 771935 - DNA, 33 bp, Homo sapien
tgtactcaatcaagacaaaacaattaagaagga

SEQ ID NO: 771936 - DNA, 33 bp, Homo sapien
tgtactcaatcaagaccaaacaattaagaagga

SEQ ID NO: 771937 - DNA, 33 bp, Homo sapien
aaaagagtagcaggtacagtacaaagaaccctt

SEQ ID NO: 771938 - DNA, 33 bp, Homo sapien
aaaagagtagcaggtatagtacaaagaaccctt

SEQ ID NO: 771939 - DNA, 33 bp, Homo sapien
tctaaggactgagaatgacgaaattttctcctc

SEQ ID NO: 771940 - DNA, 33 bp, Homo sapien
tctaaggactgagaattacgaaattttctcctc

SEQ ID NO: 771941 - DNA, 33 bp, Homo sapien
acgttgccagcagttacgcccttttccataaga

SEQ ID NO: 771942 - DNA, 33 bp, Homo sapien
acgttgccagcagttatgcccttttccataaga

SEQ ID NO: 771943 - DNA, 33 bp, Homo sapien
gatacaagggaaatgacagcaagtccccagctt

SEQ ID NO: 771944 - DNA, 33 bp, Homo sapien
gatacaagggaaatgatagcaagtccccagctt

SEQ ID NO: 771945 - DNA, 33 bp, Homo sapien
cttagtgttaggcacacgtaactctcacaaccc

SEQ ID NO: 771946 - DNA, 33 bp, Homo sapien
cttagtgttaggcacatgtaactctcacaaccc

SEQ ID NO: 771947 - DNA, 33 bp, Homo sapien
gctcctattcaggataagaatgaattttaagcc

SEQ ID NO: 771948 - DNA, 33 bp, Homo sapien
gctcctattcaggataggaatgaattttaagcc

SEQ ID NO: 771949 - DNA, 33 bp, Homo sapien
gaaagtgcagcagtacagatagccattaatgtt

SEQ ID NO: 771950 - DNA, 33 bp, Homo sapien
gaaagtgcagcagtacggatagccattaatgtt

SEQ ID NO: 771951 - DNA, 33 bp, Homo sapien
tttcatcatcaaagaaacttgtatggtattagt

SEQ ID NO: 771952 - DNA, 33 bp, Homo sapien
tttcatcatcaaagaagcttgtatggtattagt

SEQ ID NO: 771953 - DNA, 33 bp, Homo sapien
ataatggaggacattaaatttcagaggagaaaa

SEQ ID NO: 771954 - DNA, 33 bp, Homo sapien
ataatggaggacattacatttcagaggagaaaa

SEQ ID NO: 771955 - DNA, 33 bp, Homo sapien
catcttgaactttactaacaattgccaaattgc

SEQ ID NO: 771956 - DNA, 33 bp, Homo sapien
catcttgaactttactgacaattgccaaattgc

SEQ ID NO: 771957 - DNA, 33 bp, Homo sapien
cagatataaacctgcccaatagatgcaatgagg

SEQ ID NO: 771958 - DNA, 33 bp, Homo sapien
cagatataaacctgccgaatagatgcaatgagg

SEQ ID NO: 771959 - DNA, 33 bp, Homo sapien
ctgctctgacaacatgcatttcttgccaagtgg

SEQ ID NO: 771960 - DNA, 33 bp, Homo sapien
ctgctctgacaacatgtatttcttgccaagtgg

SEQ ID NO: 771961 - DNA, 33 bp, Homo sapien
actaataaaggaggacccagtttcagatatggc

SEQ ID NO: 771962 - DNA, 33 bp, Homo sapien
actaataaaggaggactcagtttcagatatggc

SEQ ID NO: 771963 - DNA, 33 bp, Homo sapien
gcgatccaaggagcgaaccagtgcgccaacagt

SEQ ID NO: 771964 - DNA, 33 bp, Homo sapien
gcgatccaaggagcgagccagtgcgccaacagt

SEQ ID NO: 771965 - DNA, 33 bp, Homo sapien
aactcatgcttttaaaatgaaatcatgtgtttg

SEQ ID NO: 771966 - DNA, 33 bp, Homo sapien
aactcatgcttttaaagtgaaatcatgtgtttg

SEQ ID NO: 771967 - DNA, 33 bp, Homo sapien
ccatagttgaatgatacatcctgttgaatttta

SEQ ID NO: 771968 - DNA, 33 bp, Homo sapien
ccatagttgaatgatatatcctgttgaatttta

SEQ ID NO: 771969 - DNA, 33 bp, Homo sapien
ggggtgcaaggacagagcatagagaaggaactc

SEQ ID NO: 771970 - DNA, 33 bp, Homo sapien
ggggtgcaaggacagatcatagagaaggaactc

SEQ ID NO: 771971 - DNA, 33 bp, Homo sapien
gactagataggtccagcatgctaggctttactt

SEQ ID NO: 771972 - DNA, 33 bp, Homo sapien
gactagataggtccaggatgctaggctttactt

SEQ ID NO: 771973 - DNA, 33 bp, Homo sapien
tatgtcaaattctcagccaggtcccaaacacct

SEQ ID NO: 771974 - DNA, 33 bp, Homo sapien
tatgtcaaattctcaggcaggtcccaaacacct

SEQ ID NO: 771975 - DNA, 33 bp, Homo sapien
tgagatcttctagggcagattttttctgtgttt

SEQ ID NO: 771976 - DNA, 33 bp, Homo sapien
tgagatcttctagggctgattttttctgtgttt

SEQ ID NO: 771977 - DNA, 33 bp, Homo sapien
aaccttgaatgtgaacagatgaaatcaggagtg

SEQ ID NO: 771978 - DNA, 33 bp, Homo sapien
aaccttgaatgtgaacggatgaaatcaggagtg

SEQ ID NO: 771979 - DNA, 33 bp, Homo sapien
agtttttgtctttaggaagtctgaaaataggac

SEQ ID NO: 771980 - DNA, 33 bp, Homo sapien
agtttttgtctttagggagtctgaaaataggac

SEQ ID NO: 771981 - DNA, 33 bp, Homo sapien
aaagtcaatatgaaggaaaaacttctaaaatca

SEQ ID NO: 771982 - DNA, 33 bp, Homo sapien
aaagtcaatatgaagggaaaacttctaaaatca

SEQ ID NO: 771983 - DNA, 33 bp, Homo sapien
aagtggaagctctcaaacacaggaaagaatgtg

SEQ ID NO: 771984 - DNA, 33 bp, Homo sapien
aagtggaagctctcaagcacaggaaagaatgtg

SEQ ID NO: 771985 - DNA, 33 bp, Homo sapien
gatcactaaataatgcaaagatacattttcaaa

SEQ ID NO: 771986 - DNA, 33 bp, Homo sapien
gatcactaaataatgcgaagatacattttcaaa

SEQ ID NO: 771987 - DNA, 33 bp, Homo sapien
atcggcaccatatttccaacagcacgtgctcac

SEQ ID NO: 771988 - DNA, 33 bp, Homo sapien
atcggcaccatatttctaacagcacgtgctcac

SEQ ID NO: 771989 - DNA, 33 bp, Homo sapien
agccaggtcttcagaaaagagctgtctcttgta

SEQ ID NO: 771990 - DNA, 33 bp, Homo sapien
agccaggtcttcagaatagagctgtctcttgta

SEQ ID NO: 771991 - DNA, 33 bp, Homo sapien
gatatttgccctttgacctacttggcaccagac

SEQ ID NO: 771992 - DNA, 33 bp, Homo sapien
gatatttgccctttgatctacttggcaccagac

SEQ ID NO: 771993 - DNA, 33 bp, Homo sapien
aaaataaaggcattggcattttaaagtgatcag

SEQ ID NO: 771994 - DNA, 33 bp, Homo sapien
aaaataaaggcattgggattttaaagtgatcag

SEQ ID NO: 771995 - DNA, 33 bp, Homo sapien
cagtggctgattcaacaggtggatttctctccc

SEQ ID NO: 771996 - DNA, 33 bp, Homo sapien
cagtggctgattcaacgggtggatttctctccc

SEQ ID NO: 771997 - DNA, 33 bp, Homo sapien
agcttactcgcaataaagtttggggatgttaca

SEQ ID NO: 771998 - DNA, 33 bp, Homo sapien
agcttactcgcaataaggtttggggatgttaca

SEQ ID NO: 771999 - DNA, 33 bp, Homo sapien
ctactaaagttcatgaaataaagagatataaac

SEQ ID NO: 772000 - DNA, 33 bp, Homo sapien
ctactaaagttcatgatataaagagatataaac

SEQ ID NO: 772001 - DNA, 33 bp, Homo sapien
ccatccacattagccaggcaattttgtttactt

SEQ ID NO: 772002 - DNA, 33 bp, Homo sapien
ccatccacattagccatgcaattttgtttactt

SEQ ID NO: 772003 - DNA, 33 bp, Homo sapien
ttactatgcttttaaaggttctttcattattgt

SEQ ID NO: 772004 - DNA, 33 bp, Homo sapien
ttactatgcttttaaatgttctttcattattgt

SEQ ID NO: 772005 - DNA, 33 bp, Homo sapien
aagaatgtctggaaaactgtaggataggtggac

SEQ ID NO: 772006 - DNA, 33 bp, Homo sapien
aagaatgtctggaaaagtgtaggataggtggac

SEQ ID NO: 772007 - DNA, 33 bp, Homo sapien
tttgcggacactcttaacaatgtttctagatca

SEQ ID NO: 772008 - DNA, 33 bp, Homo sapien
tttgcggacactcttagcaatgtttctagatca

SEQ ID NO: 772009 - DNA, 33 bp, Homo sapien
tttctaatcaatttgcagagaaggtttcagaac

SEQ ID NO: 772010 - DNA, 33 bp, Homo sapien
tttctaatcaatttgcggagaaggtttcagaac

SEQ ID NO: 772011 - DNA, 33 bp, Homo sapien
ggtgcgtataccctgcactggagattcctcctt

SEQ ID NO: 772012 - DNA, 33 bp, Homo sapien
ggtgcgtataccctgctctggagattcctcctt

SEQ ID NO: 772013 - DNA, 33 bp, Homo sapien
gaaaaataaaactgtacggtacttggagaaaat

SEQ ID NO: 772014 - DNA, 33 bp, Homo sapien
gaaaaataaaactgtatggtacttggagaaaat

SEQ ID NO: 772015 - DNA, 33 bp, Homo sapien
taacacaattcagctacaatcatttgggtattt

SEQ ID NO: 772016 - DNA, 33 bp, Homo sapien
taacacaattcagctagaatcatttgggtattt

SEQ ID NO: 772017 - DNA, 33 bp, Homo sapien
gatgggcatagggaaaggttttgtagaagaact

SEQ ID NO: 772018 - DNA, 33 bp, Homo sapien
gatgggcatagggaaatgttttgtagaagaact

SEQ ID NO: 772019 - DNA, 33 bp, Homo sapien
gtaaaacgccatagcgcccaattgtctttgcct

SEQ ID NO: 772020 - DNA, 33 bp, Homo sapien
gtaaaacgccatagcgtccaattgtctttgcct

SEQ ID NO: 772021 - DNA, 33 bp, Homo sapien
aatatacatcagctaccgaaaatgtattagtaa

SEQ ID NO: 772022 - DNA, 33 bp, Homo sapien
aatatacatcagctactgaaaatgtattagtaa

SEQ ID NO: 772023 - DNA, 33 bp, Homo sapien
ccatcttgaggctagaagctgcatctcgtatca

SEQ ID NO: 772024 - DNA, 33 bp, Homo sapien
ccatcttgaggctagaggctgcatctcgtatca

SEQ ID NO: 772025 - DNA, 33 bp, Homo sapien
tagggtgagtccatacagtaaagtgagagcaaa

SEQ ID NO: 772026 - DNA, 33 bp, Homo sapien
tagggtgagtccatacggtaaagtgagagcaaa

SEQ ID NO: 772027 - DNA, 33 bp, Homo sapien
gagagagagatactatcagagaacacaatagga

SEQ ID NO: 772028 - DNA, 33 bp, Homo sapien
gagagagagatactatgagagaacacaatagga

SEQ ID NO: 772029 - DNA, 33 bp, Homo sapien
ctctacatgacttgcactagttacagtctgata

SEQ ID NO: 772030 - DNA, 33 bp, Homo sapien
ctctacatgacttgcagtagttacagtctgata

SEQ ID NO: 772031 - DNA, 33 bp, Homo sapien
caaagagaccctagacacaagtatgatgcacat

SEQ ID NO: 772032 - DNA, 33 bp, Homo sapien
caaagagaccctagacgcaagtatgatgcacat

SEQ ID NO: 772033 - DNA, 33 bp, Homo sapien
attgcaggttttattacatctaggagttattct

SEQ ID NO: 772034 - DNA, 33 bp, Homo sapien
attgcaggttttattatatctaggagttattct

SEQ ID NO: 772035 - DNA, 33 bp, Homo sapien
attccactacagtgaaaatagttggtgtgtaca

SEQ ID NO: 772036 - DNA, 33 bp, Homo sapien
attccactacagtgaacatagttggtgtgtaca

SEQ ID NO: 772037 - DNA, 33 bp, Homo sapien
aattcaaaaggagtcacaaagtatttcttagag

SEQ ID NO: 772038 - DNA, 33 bp, Homo sapien
aattcaaaaggagtcataaagtatttcttagag

SEQ ID NO: 772039 - DNA, 33 bp, Homo sapien
tgtgtgtcactctcataaaaacaaaaaccagct

SEQ ID NO: 772040 - DNA, 33 bp, Homo sapien
tgtgtgtcactctcatgaaaacaaaaaccagct

SEQ ID NO: 772041 - DNA, 33 bp, Homo sapien
tgtatccaaacaccagactattatttggcaata

SEQ ID NO: 772042 - DNA, 33 bp, Homo sapien
tgtatccaaacaccaggctattatttggcaata

SEQ ID NO: 772043 - DNA, 33 bp, Homo sapien
gccttcaggatagatcaaacatcctaccagcta

SEQ ID NO: 772044 - DNA, 33 bp, Homo sapien
gccttcaggatagatcgaacatcctaccagcta

SEQ ID NO: 772045 - DNA, 33 bp, Homo sapien
tatcctggagatattaaagccatgaccacccag

SEQ ID NO: 772046 - DNA, 33 bp, Homo sapien
tatcctggagatattacagccatgaccacccag

SEQ ID NO: 772047 - DNA, 33 bp, Homo sapien
tgtttatgaaagcaagactctaaggaacaggaa

SEQ ID NO: 772048 - DNA, 33 bp, Homo sapien
tgtttatgaaagcaagcctctaaggaacaggaa

SEQ ID NO: 772049 - DNA, 33 bp, Homo sapien
cttgtgctcccttcaaagtgttaaagcatggga

SEQ ID NO: 772050 - DNA, 33 bp, Homo sapien
cttgtgctcccttcaaggtgttaaagcatggga

SEQ ID NO: 772051 - DNA, 33 bp, Homo sapien
tttatatgacggaaatgattgagcaatcgcatt

SEQ ID NO: 772052 - DNA, 33 bp, Homo sapien
tttatatgacggaaattattgagcaatcgcatt

SEQ ID NO: 772053 - DNA, 33 bp, Homo sapien
aagccctggcatggaaattaaaatacttgctat

SEQ ID NO: 772054 - DNA, 33 bp, Homo sapien
aagccctggcatggaagttaaaatacttgctat

SEQ ID NO: 772055 - DNA, 33 bp, Homo sapien
gaaaaaggattcaaagacttattctggaacccc

SEQ ID NO: 772056 - DNA, 33 bp, Homo sapien
gaaaaaggattcaaagtcttattctggaacccc

SEQ ID NO: 772057 - DNA, 33 bp, Homo sapien
cctcgaaagaattgccaagatgacaagatctat

SEQ ID NO: 772058 - DNA, 33 bp, Homo sapien
cctcgaaagaattgcccagatgacaagatctat

SEQ ID NO: 772059 - DNA, 33 bp, Homo sapien
ggctgttttatttgcacgtattttactccagga

SEQ ID NO: 772060 - DNA, 33 bp, Homo sapien
ggctgttttatttgcatgtattttactccagga

SEQ ID NO: 772061 - DNA, 33 bp, Homo sapien
aatccaatctatggataaaggacattgagcatt

SEQ ID NO: 772062 - DNA, 33 bp, Homo sapien
aatccaatctatggattaaggacattgagcatt

SEQ ID NO: 772063 - DNA, 33 bp, Homo sapien
gatttataggatgaaggctaacaaaagccgtcc

SEQ ID NO: 772064 - DNA, 33 bp, Homo sapien
gatttataggatgaagtctaacaaaagccgtcc

SEQ ID NO: 772065 - DNA, 33 bp, Homo sapien
atgactcctattatgacaaatttgcttatatcc

SEQ ID NO: 772066 - DNA, 33 bp, Homo sapien
atgactcctattatgataaatttgcttatatcc

SEQ ID NO: 772067 - DNA, 33 bp, Homo sapien
aacgccatgaacattgaaggatggtgcccctgt

SEQ ID NO: 772068 - DNA, 33 bp, Homo sapien
aacgccatgaacattggaggatggtgcccctgt

SEQ ID NO: 772069 - DNA, 33 bp, Homo sapien
gtcaggatcaatgaaaacaggatttaagaaatg

SEQ ID NO: 772070 - DNA, 33 bp, Homo sapien
gtcaggatcaatgaaagcaggatttaagaaatg

SEQ ID NO: 772071 - DNA, 33 bp, Homo sapien
agtgataaaatgatcacgctagttccatgggaa

SEQ ID NO: 772072 - DNA, 33 bp, Homo sapien
agtgataaaatgatcaggctagttccatgggaa

SEQ ID NO: 772073 - DNA, 33 bp, Homo sapien
aatataactagccatcctgtattttatccagca

SEQ ID NO: 772074 - DNA, 33 bp, Homo sapien
aatataactagccatcttgtattttatccagca

SEQ ID NO: 772075 - DNA, 33 bp, Homo sapien
tctgagtcagcagaccaatgggagactgtcagc

SEQ ID NO: 772076 - DNA, 33 bp, Homo sapien
tctgagtcagcagaccgatgggagactgtcagc

SEQ ID NO: 772077 - DNA, 33 bp, Homo sapien
ttctctgactgcttgaaaataaatgtttgtagt

SEQ ID NO: 772078 - DNA, 33 bp, Homo sapien
ttctctgactgcttgataataaatgtttgtagt

SEQ ID NO: 772079 - DNA, 33 bp, Homo sapien
cacatctctcttacaacaggacatgtctacccc

SEQ ID NO: 772080 - DNA, 33 bp, Homo sapien
cacatctctcttacaataggacatgtctacccc

SEQ ID NO: 772081 - DNA, 33 bp, Homo sapien
ctcatcaaggtttacagattgaatcaccaacaa

SEQ ID NO: 772082 - DNA, 33 bp, Homo sapien
ctcatcaaggtttacatattgaatcaccaacaa

SEQ ID NO: 772083 - DNA, 33 bp, Homo sapien
ataacctcctggcagaaattcaaatagttgttc

SEQ ID NO: 772084 - DNA, 33 bp, Homo sapien
ataacctcctggcagagattcaaatagttgttc

SEQ ID NO: 772085 - DNA, 33 bp, Homo sapien
cacctatctcactacccagttactaagttgaag

SEQ ID NO: 772086 - DNA, 33 bp, Homo sapien
cacctatctcactacctagttactaagttgaag

SEQ ID NO: 772087 - DNA, 33 bp, Homo sapien
aaatgaatgaattgcccattgtgacttgaagca

SEQ ID NO: 772088 - DNA, 33 bp, Homo sapien
aaatgaatgaattgcctattgtgacttgaagca

SEQ ID NO: 772089 - DNA, 33 bp, Homo sapien
aaggaactctgttctaggaaacaataagtctga

SEQ ID NO: 772090 - DNA, 33 bp, Homo sapien
aaggaactctgttctatgaaacaataagtctga

SEQ ID NO: 772091 - DNA, 33 bp, Homo sapien
gtttgaatggcatgaaaaagataatgtttttaa

SEQ ID NO: 772092 - DNA, 33 bp, Homo sapien
gtttgaatggcatgaagaagataatgtttttaa

SEQ ID NO: 772093 - DNA, 33 bp, Homo sapien
gaagtaccccttaagaagcctcaggaatgaggt

SEQ ID NO: 772094 - DNA, 33 bp, Homo sapien
gaagtaccccttaagacgcctcaggaatgaggt

SEQ ID NO: 772095 - DNA, 33 bp, Homo sapien
agcctgacttcaaaccgcaaataacaggtttaa

SEQ ID NO: 772096 - DNA, 33 bp, Homo sapien
agcctgacttcaaacctcaaataacaggtttaa

SEQ ID NO: 772097 - DNA, 33 bp, Homo sapien
aaaacagtagataccacgtattcacaaagtcta

SEQ ID NO: 772098 - DNA, 33 bp, Homo sapien
aaaacagtagataccatgtattcacaaagtcta

SEQ ID NO: 772099 - DNA, 33 bp, Homo sapien
tccctgcccttaaggaaacacaggtcaggtgag

SEQ ID NO: 772100 - DNA, 33 bp, Homo sapien
tccctgcccttaaggagacacaggtcaggtgag

SEQ ID NO: 772101 - DNA, 33 bp, Homo sapien
actgcaactgtcattaaaagttaggtttcagct

SEQ ID NO: 772102 - DNA, 33 bp, Homo sapien
actgcaactgtcattagaagttaggtttcagct

SEQ ID NO: 772103 - DNA, 33 bp, Homo sapien
ttttgaaagcatacaacgtatatcaatctttga

SEQ ID NO: 772104 - DNA, 33 bp, Homo sapien
ttttgaaagcatacaatgtatatcaatctttga

SEQ ID NO: 772105 - DNA, 33 bp, Homo sapien
attggaacaaatatacaacaatcagcagcaatt

SEQ ID NO: 772106 - DNA, 33 bp, Homo sapien
attggaacaaatatacgacaatcagcagcaatt

SEQ ID NO: 772107 - DNA, 33 bp, Homo sapien
gaatgacagcattttgaaatatgtatgcagggc

SEQ ID NO: 772108 - DNA, 33 bp, Homo sapien
gaatgacagcattttggaatatgtatgcagggc

SEQ ID NO: 772109 - DNA, 33 bp, Homo sapien
gggtactggggacgtaaaaagcatggacacaat

SEQ ID NO: 772110 - DNA, 33 bp, Homo sapien
gggtactggggacgtataaagcatggacacaat

SEQ ID NO: 772111 - DNA, 33 bp, Homo sapien
cggcattaagtaataaaggaaagtgtcattagt

SEQ ID NO: 772112 - DNA, 33 bp, Homo sapien
cggcattaagtaataacggaaagtgtcattagt

SEQ ID NO: 772113 - DNA, 33 bp, Homo sapien
atacatagtgcacagggaaagtgatggtatgaa

SEQ ID NO: 772114 - DNA, 33 bp, Homo sapien
atacatagtgcacaggtaaagtgatggtatgaa

SEQ ID NO: 772115 - DNA, 33 bp, Homo sapien
attccaaaatattctacaaaaaaggcatctaca

SEQ ID NO: 772116 - DNA, 33 bp, Homo sapien
attccaaaatattctagaaaaaaggcatctaca

SEQ ID NO: 772117 - DNA, 33 bp, Homo sapien
ttcacactggctaagaactacaaaactatatca

SEQ ID NO: 772118 - DNA, 33 bp, Homo sapien
ttcacactggctaagagctacaaaactatatca

SEQ ID NO: 772119 - DNA, 33 bp, Homo sapien
gctgcttccaaattccggactcccagaggatat

SEQ ID NO: 772120 - DNA, 33 bp, Homo sapien
gctgcttccaaattcctgactcccagaggatat

SEQ ID NO: 772121 - DNA, 33 bp, Homo sapien
catacacaatacactacgaaacaatgaatttta

SEQ ID NO: 772122 - DNA, 33 bp, Homo sapien
catacacaatacactatgaaacaatgaatttta

SEQ ID NO: 772123 - DNA, 33 bp, Homo sapien
ttattaaagcccatacacataaacaaagatgcc

SEQ ID NO: 772124 - DNA, 33 bp, Homo sapien
ttattaaagcccatacgcataaacaaagatgcc

SEQ ID NO: 772125 - DNA, 33 bp, Homo sapien
tcactcacaatggaagcagttactttttgagga

SEQ ID NO: 772126 - DNA, 33 bp, Homo sapien
tcactcacaatggaaggagttactttttgagga

SEQ ID NO: 772127 - DNA, 33 bp, Homo sapien
tttgttgtcaggtaccaattaaggaagaagcca

SEQ ID NO: 772128 - DNA, 33 bp, Homo sapien
tttgttgtcaggtaccgattaaggaagaagcca

SEQ ID NO: 772129 - DNA, 33 bp, Homo sapien
agcaggcagcttccccggaaagaccatatgttc

SEQ ID NO: 772130 - DNA, 33 bp, Homo sapien
agcaggcagcttcccctgaaagaccatatgttc

SEQ ID NO: 772131 - DNA, 33 bp, Homo sapien
catgtccaagtaattcacgtatcacagtataat

SEQ ID NO: 772132 - DNA, 33 bp, Homo sapien
catgtccaagtaattcgcgtatcacagtataat

SEQ ID NO: 772133 - DNA, 33 bp, Homo sapien
ttgttcaggctgtcaacaagattccatgaggtg

SEQ ID NO: 772134 - DNA, 33 bp, Homo sapien
ttgttcaggctgtcaagaagattccatgaggtg

SEQ ID NO: 772135 - DNA, 33 bp, Homo sapien
tacaagcatcattctcaaggaaatggttccacc

SEQ ID NO: 772136 - DNA, 33 bp, Homo sapien
tacaagcatcattctcgaggaaatggttccacc

SEQ ID NO: 772137 - DNA, 33 bp, Homo sapien
aatcttggatacataaaccaaacgcaaaatgga

SEQ ID NO: 772138 - DNA, 33 bp, Homo sapien
aatcttggatacataagccaaacgcaaaatgga

SEQ ID NO: 772139 - DNA, 33 bp, Homo sapien
agtgataatagaagtccctgaaaagtcaaatgg

SEQ ID NO: 772140 - DNA, 33 bp, Homo sapien
agtgataatagaagtctctgaaaagtcaaatgg

SEQ ID NO: 772141 - DNA, 33 bp, Homo sapien
ctaaaaaatcaacacacggaaggccaatcttct

SEQ ID NO: 772142 - DNA, 33 bp, Homo sapien
ctaaaaaatcaacacagggaaggccaatcttct

SEQ ID NO: 772143 - DNA, 33 bp, Homo sapien
ttactgattactgtaacaaattcatgacagccc

SEQ ID NO: 772144 - DNA, 33 bp, Homo sapien
ttactgattactgtaataaattcatgacagccc

SEQ ID NO: 772145 - DNA, 33 bp, Homo sapien
tagataagtgtagcaaatagtagaaaatgtgtt

SEQ ID NO: 772146 - DNA, 33 bp, Homo sapien
tagataagtgtagcaattagtagaaaatgtgtt

SEQ ID NO: 772147 - DNA, 33 bp, Homo sapien
agaaaggagtgtgaaaagtagtcagcagtagat

SEQ ID NO: 772148 - DNA, 33 bp, Homo sapien
agaaaggagtgtgaaaggtagtcagcagtagat

SEQ ID NO: 772149 - DNA, 33 bp, Homo sapien
atatactgcagacttgcaagaaaaatggccatt

SEQ ID NO: 772150 - DNA, 33 bp, Homo sapien
atatactgcagacttgtaagaaaaatggccatt

SEQ ID NO: 772151 - DNA, 33 bp, Homo sapien
atatttgacaagaggcaaaggacactgacacca

SEQ ID NO: 772152 - DNA, 33 bp, Homo sapien
atatttgacaagaggcgaaggacactgacacca

SEQ ID NO: 772153 - DNA, 33 bp, Homo sapien
gtatgggcaaaggaaagctccctgcctctattc

SEQ ID NO: 772154 - DNA, 33 bp, Homo sapien
gtatgggcaaaggaaatctccctgcctctattc

SEQ ID NO: 772155 - DNA, 33 bp, Homo sapien
tccaggctgttggatactatcaaggcagcctta

SEQ ID NO: 772156 - DNA, 33 bp, Homo sapien
tccaggctgttggatattatcaaggcagcctta

SEQ ID NO: 772157 - DNA, 33 bp, Homo sapien
taaaatatgcaaatggaacagaaatagattccc

SEQ ID NO: 772158 - DNA, 33 bp, Homo sapien
taaaatatgcaaatggcacagaaatagattccc

SEQ ID NO: 772159 - DNA, 33 bp, Homo sapien
gaaacagactggaacgacaaagctgaatagaga

SEQ ID NO: 772160 - DNA, 33 bp, Homo sapien
gaaacagactggaacggcaaagctgaatagaga

SEQ ID NO: 772161 - DNA, 33 bp, Homo sapien
tcaacctgatgatgtgaaattcaatacaacttg

SEQ ID NO: 772162 - DNA, 33 bp, Homo sapien
tcaacctgatgatgtgcaattcaatacaacttg

SEQ ID NO: 772163 - DNA, 33 bp, Homo sapien
tacaacagccagcaaaagattaaattcagttat

SEQ ID NO: 772164 - DNA, 33 bp, Homo sapien
tacaacagccagcaaaggattaaattcagttat

SEQ ID NO: 772165 - DNA, 33 bp, Homo sapien
agtattgccagagataaagattgattattgcaa

SEQ ID NO: 772166 - DNA, 33 bp, Homo sapien
agtattgccagagatagagattgattattgcaa

SEQ ID NO: 772167 - DNA, 33 bp, Homo sapien
atggctggagaagaaacattgcagtgaatattg

SEQ ID NO: 772168 - DNA, 33 bp, Homo sapien
atggctggagaagaaatattgcagtgaatattg

SEQ ID NO: 772169 - DNA, 33 bp, Homo sapien
ttgttgtaaacacgtgcatcaatcataaatgta

SEQ ID NO: 772170 - DNA, 33 bp, Homo sapien
ttgttgtaaacacgtggatcaatcataaatgta

SEQ ID NO: 772171 - DNA, 33 bp, Homo sapien
ccaccagggctgtctacatttctgacttcttgt

SEQ ID NO: 772172 - DNA, 33 bp, Homo sapien
ccaccagggctgtctatatttctgacttcttgt

SEQ ID NO: 772173 - DNA, 33 bp, Homo sapien
cagggctaagctaaagcctaatgaactgggcaa

SEQ ID NO: 772174 - DNA, 33 bp, Homo sapien
cagggctaagctaaaggctaatgaactgggcaa

SEQ ID NO: 772175 - DNA, 33 bp, Homo sapien
acagaaacacatcttaactttatggattggaag

SEQ ID NO: 772176 - DNA, 33 bp, Homo sapien
acagaaacacatcttatctttatggattggaag

SEQ ID NO: 772177 - DNA, 33 bp, Homo sapien
acctctttaactcaaccgtctgcattcctggat

SEQ ID NO: 772178 - DNA, 33 bp, Homo sapien
acctctttaactcaactgtctgcattcctggat

SEQ ID NO: 772179 - DNA, 33 bp, Homo sapien
tgactctggagagaaactgttaccagcccatgg

SEQ ID NO: 772180 - DNA, 33 bp, Homo sapien
tgactctggagagaaattgttaccagcccatgg

SEQ ID NO: 772181 - DNA, 33 bp, Homo sapien
caatgactccttaaaaataaagcttcgcaagtg

SEQ ID NO: 772182 - DNA, 33 bp, Homo sapien
caatgactccttaaaagtaaagcttcgcaagtg

SEQ ID NO: 772183 - DNA, 33 bp, Homo sapien
catcacttttagactgaacaagagacttagtgt

SEQ ID NO: 772184 - DNA, 33 bp, Homo sapien
catcacttttagactggacaagagacttagtgt

SEQ ID NO: 772185 - DNA, 33 bp, Homo sapien
caaattcgccagtataagttctgaaaagtttca

SEQ ID NO: 772186 - DNA, 33 bp, Homo sapien
caaattcgccagtatacgttctgaaaagtttca

SEQ ID NO: 772187 - DNA, 33 bp, Homo sapien
ttctaccgtgactaccacttaatgctaagggct

SEQ ID NO: 772188 - DNA, 33 bp, Homo sapien
ttctaccgtgactaccgcttaatgctaagggct

SEQ ID NO: 772189 - DNA, 33 bp, Homo sapien
ggaataatttgtcggaaggaaatctggcttcaa

SEQ ID NO: 772190 - DNA, 33 bp, Homo sapien
ggaataatttgtcggagggaaatctggcttcaa

SEQ ID NO: 772191 - DNA, 33 bp, Homo sapien
ggcagccgcagctcaccgcttaaaccgaaatga

SEQ ID NO: 772192 - DNA, 33 bp, Homo sapien
ggcagccgcagctcactgcttaaaccgaaatga

SEQ ID NO: 772193 - DNA, 33 bp, Homo sapien
atacgtgcatcatgacaagctcgaggccaaggc

SEQ ID NO: 772194 - DNA, 33 bp, Homo sapien
atacgtgcatcatgacgagctcgaggccaaggc

SEQ ID NO: 772195 - DNA, 33 bp, Homo sapien
tcatggcaaaattatacgaagttaagtaggtca

SEQ ID NO: 772196 - DNA, 33 bp, Homo sapien
tcatggcaaaattatatgaagttaagtaggtca

SEQ ID NO: 772197 - DNA, 33 bp, Homo sapien
gtgcaggtgttcctcacgctctattcttatgac

SEQ ID NO: 772198 - DNA, 33 bp, Homo sapien
gtgcaggtgttcctcatgctctattcttatgac

SEQ ID NO: 772199 - DNA, 33 bp, Homo sapien
cctgagccttttatgactcagaagtttgaggaa

SEQ ID NO: 772200 - DNA, 33 bp, Homo sapien
cctgagccttttatgattcagaagtttgaggaa

SEQ ID NO: 772201 - DNA, 33 bp, Homo sapien
atattctttacaactaagtgcacaccaggagaa

SEQ ID NO: 772202 - DNA, 33 bp, Homo sapien
atattctttacaactaggtgcacaccaggagaa

SEQ ID NO: 772203 - DNA, 33 bp, Homo sapien
tcaggagctttccagacagcctcttccttacct

SEQ ID NO: 772204 - DNA, 33 bp, Homo sapien
tcaggagctttccagatagcctcttccttacct

SEQ ID NO: 772205 - DNA, 33 bp, Homo sapien
ctttggttggaagaaactcaggagcagaacaat

SEQ ID NO: 772206 - DNA, 33 bp, Homo sapien
ctttggttggaagaaattcaggagcagaacaat

SEQ ID NO: 772207 - DNA, 33 bp, Homo sapien
tctaacccttgcacgcactaccagtaacaccta

SEQ ID NO: 772208 - DNA, 33 bp, Homo sapien
tctaacccttgcacgcgctaccagtaacaccta

SEQ ID NO: 772209 - DNA, 33 bp, Homo sapien
catataattcttacaacgctctgaggtggataa

SEQ ID NO: 772210 - DNA, 33 bp, Homo sapien
catataattcttacaatgctctgaggtggataa

SEQ ID NO: 772211 - DNA, 33 bp, Homo sapien
acattaattcatgtccaacaaatccatagtttt

SEQ ID NO: 772212 - DNA, 33 bp, Homo sapien
acattaattcatgtccgacaaatccatagtttt

SEQ ID NO: 772213 - DNA, 33 bp, Homo sapien
gagaaaacaaattgcaatacaaatttctcatca

SEQ ID NO: 772214 - DNA, 33 bp, Homo sapien
gagaaaacaaattgcagtacaaatttctcatca

SEQ ID NO: 772215 - DNA, 33 bp, Homo sapien
atattatctgactataacatggaaatctgaggg

SEQ ID NO: 772216 - DNA, 33 bp, Homo sapien
atattatctgactatagcatggaaatctgaggg

SEQ ID NO: 772217 - DNA, 33 bp, Homo sapien
ttgttgctatcaccccaagtattttgactgtgc

SEQ ID NO: 772218 - DNA, 33 bp, Homo sapien
ttgttgctatcaccccgagtattttgactgtgc

SEQ ID NO: 772219 - DNA, 33 bp, Homo sapien
gaccaaagagttcaggaataaggttgaactatt

SEQ ID NO: 772220 - DNA, 33 bp, Homo sapien
gaccaaagagttcaggcataaggttgaactatt

SEQ ID NO: 772221 - DNA, 33 bp, Homo sapien
catatataattgcacacgaaaattaaagcagta

SEQ ID NO: 772222 - DNA, 33 bp, Homo sapien
catatataattgcacatgaaaattaaagcagta

SEQ ID NO: 772223 - DNA, 33 bp, Homo sapien
tatagatcgcaaaactgaatcttagaaaagtca

SEQ ID NO: 772224 - DNA, 33 bp, Homo sapien
tatagatcgcaaaacttaatcttagaaaagtca

SEQ ID NO: 772225 - DNA, 33 bp, Homo sapien
gtaattccgtaagtcaagaaagtgggcaaagat

SEQ ID NO: 772226 - DNA, 33 bp, Homo sapien
gtaattccgtaagtcaggaaagtgggcaaagat

SEQ ID NO: 772227 - DNA, 33 bp, Homo sapien
atgtgactaagcaatgaacagctgagttttcaa

SEQ ID NO: 772228 - DNA, 33 bp, Homo sapien
atgtgactaagcaatgcacagctgagttttcaa

SEQ ID NO: 772229 - DNA, 33 bp, Homo sapien
gagcatttactggccaccgtgtactactcaagt

SEQ ID NO: 772230 - DNA, 33 bp, Homo sapien
gagcatttactggccatcgtgtactactcaagt

SEQ ID NO: 772231 - DNA, 33 bp, Homo sapien
gaaggagtatagactcccccatgaattgaaggt

SEQ ID NO: 772232 - DNA, 33 bp, Homo sapien
gaaggagtatagactctcccatgaattgaaggt

SEQ ID NO: 772233 - DNA, 33 bp, Homo sapien
gtacctacatgttgatcagttggtagtgccaca

SEQ ID NO: 772234 - DNA, 33 bp, Homo sapien
gtacctacatgttgatgagttggtagtgccaca

SEQ ID NO: 772235 - DNA, 33 bp, Homo sapien
gttatatacataagcaaatcttcccagagatgt

SEQ ID NO: 772236 - DNA, 33 bp, Homo sapien
gttatatacataagcacatcttcccagagatgt

SEQ ID NO: 772237 - DNA, 33 bp, Homo sapien
ttttaatagaaagaaacggagagtgcactttat

SEQ ID NO: 772238 - DNA, 33 bp, Homo sapien
ttttaatagaaagaaatggagagtgcactttat

SEQ ID NO: 772239 - DNA, 33 bp, Homo sapien
taaatacaggttaaccaaagaccagactggatt

SEQ ID NO: 772240 - DNA, 33 bp, Homo sapien
taaatacaggttaaccgaagaccagactggatt

SEQ ID NO: 772241 - DNA, 33 bp, Homo sapien
gatgctaagtaaaacacggctcatgcttggagt

SEQ ID NO: 772242 - DNA, 33 bp, Homo sapien
gatgctaagtaaaacatggctcatgcttggagt

SEQ ID NO: 772243 - DNA, 33 bp, Homo sapien
tctctcaaatgtttaccctgtaagattgcattt

SEQ ID NO: 772244 - DNA, 33 bp, Homo sapien
tctctcaaatgtttactctgtaagattgcattt

SEQ ID NO: 772245 - DNA, 33 bp, Homo sapien
ctacttctcattaaagacatggtgttgtgtcaa

SEQ ID NO: 772246 - DNA, 33 bp, Homo sapien
ctacttctcattaaaggcatggtgttgtgtcaa

SEQ ID NO: 772247 - DNA, 33 bp, Homo sapien
ttattaagtcttcaaacgatttgttaatctaac

SEQ ID NO: 772248 - DNA, 33 bp, Homo sapien
ttattaagtcttcaaatgatttgttaatctaac

SEQ ID NO: 772249 - DNA, 33 bp, Homo sapien
tagagctgtatgattgaagatggaagaaaaggt

SEQ ID NO: 772250 - DNA, 33 bp, Homo sapien
tagagctgtatgattggagatggaagaaaaggt

SEQ ID NO: 772251 - DNA, 33 bp, Homo sapien
tgcagtggtggtacaacacctttatgaagacta

SEQ ID NO: 772252 - DNA, 33 bp, Homo sapien
tgcagtggtggtacaatacctttatgaagacta

SEQ ID NO: 772253 - DNA, 33 bp, Homo sapien
cctgcctgtccctaaaaccgagagatgaccatt

SEQ ID NO: 772254 - DNA, 33 bp, Homo sapien
cctgcctgtccctaaagccgagagatgaccatt

SEQ ID NO: 772255 - DNA, 33 bp, Homo sapien
caacaaaaagcaatcaaaaacaggttcttttta

SEQ ID NO: 772256 - DNA, 33 bp, Homo sapien
caacaaaaagcaatcacaaacaggttcttttta

SEQ ID NO: 772257 - DNA, 33 bp, Homo sapien
tggttgtagatgatgacgaagagaaaaagaagg

SEQ ID NO: 772258 - DNA, 33 bp, Homo sapien
tggttgtagatgatgatgaagagaaaaagaagg

SEQ ID NO: 772259 - DNA, 33 bp, Homo sapien
aagatggaggcattaacgatacacctggttgta

SEQ ID NO: 772260 - DNA, 33 bp, Homo sapien
aagatggaggcattaaggatacacctggttgta

SEQ ID NO: 772261 - DNA, 33 bp, Homo sapien
caacattgctacaagacgaaagaagcttctttg

SEQ ID NO: 772262 - DNA, 33 bp, Homo sapien
caacattgctacaagatgaaagaagcttctttg

SEQ ID NO: 772263 - DNA, 33 bp, Homo sapien
gttaaatttctttctaagcaaaactgagtaaaa

SEQ ID NO: 772264 - DNA, 33 bp, Homo sapien
gttaaatttctttctaggcaaaactgagtaaaa

SEQ ID NO: 772265 - DNA, 33 bp, Homo sapien
caaaaatggataaaaaccaatgagctaaaaatt

SEQ ID NO: 772266 - DNA, 33 bp, Homo sapien
caaaaatggataaaaatcaatgagctaaaaatt

SEQ ID NO: 772267 - DNA, 33 bp, Homo sapien
actgacaataatataacaagattggttcatcag

SEQ ID NO: 772268 - DNA, 33 bp, Homo sapien
actgacaataatataataagattggttcatcag

SEQ ID NO: 772269 - DNA, 33 bp, Homo sapien
attgaaattgaagggcagaaatgtattataaca

SEQ ID NO: 772270 - DNA, 33 bp, Homo sapien
attgaaattgaagggcggaaatgtattataaca

SEQ ID NO: 772271 - DNA, 33 bp, Homo sapien
taatttgatgtgataactgtcagaatgtggtcc

SEQ ID NO: 772272 - DNA, 33 bp, Homo sapien
taatttgatgtgataattgtcagaatgtggtcc

SEQ ID NO: 772273 - DNA, 33 bp, Homo sapien
atgattgtgtgggtaacgatggagcatgaacaa

SEQ ID NO: 772274 - DNA, 33 bp, Homo sapien
atgattgtgtgggtaatgatggagcatgaacaa

SEQ ID NO: 772275 - DNA, 33 bp, Homo sapien
actggtatagttggctcagattctggtcaagct

SEQ ID NO: 772276 - DNA, 33 bp, Homo sapien
actggtatagttggcttagattctggtcaagct

SEQ ID NO: 772277 - DNA, 33 bp, Homo sapien
cccaaaaatgtttactaagcaccaattatgcac

SEQ ID NO: 772278 - DNA, 33 bp, Homo sapien
cccaaaaatgtttactgagcaccaattatgcac

SEQ ID NO: 772279 - DNA, 33 bp, Homo sapien
tgttataagcattccaagtgccaagtgccaaca

SEQ ID NO: 772280 - DNA, 33 bp, Homo sapien
tgttataagcattccaggtgccaagtgccaaca

SEQ ID NO: 772281 - DNA, 33 bp, Homo sapien
tcaaattctggctccacagcttgccaaatatgt

SEQ ID NO: 772282 - DNA, 33 bp, Homo sapien
tcaaattctggctccatagcttgccaaatatgt

SEQ ID NO: 772283 - DNA, 33 bp, Homo sapien
tagttgtgcaatagaaaacttttggccatgcct

SEQ ID NO: 772284 - DNA, 33 bp, Homo sapien
tagttgtgcaatagaagacttttggccatgcct

SEQ ID NO: 772285 - DNA, 33 bp, Homo sapien
ccctaagaacagggtggattggaagttggctga

SEQ ID NO: 772286 - DNA, 33 bp, Homo sapien
ccctaagaacagggtgtattggaagttggctga

SEQ ID NO: 772287 - DNA, 33 bp, Homo sapien
gaatatgttgaaggaaagcaaaatatctgcaag

SEQ ID NO: 772288 - DNA, 33 bp, Homo sapien
gaatatgttgaaggaacgcaaaatatctgcaag

SEQ ID NO: 772289 - DNA, 33 bp, Homo sapien
caattagataccactacacatctttgagaagag

SEQ ID NO: 772290 - DNA, 33 bp, Homo sapien
caattagataccactatacatctttgagaagag

SEQ ID NO: 772291 - DNA, 33 bp, Homo sapien
atttacgtgagctcttaaaaatgatctatgtca

SEQ ID NO: 772292 - DNA, 33 bp, Homo sapien
atttacgtgagctcttgaaaatgatctatgtca

SEQ ID NO: 772293 - DNA, 33 bp, Homo sapien
aacctcagtttactacacaatggtaataataca

SEQ ID NO: 772294 - DNA, 33 bp, Homo sapien
aacctcagtttactactcaatggtaataataca

SEQ ID NO: 772295 - DNA, 33 bp, Homo sapien
acttaaattatttgcaccttataacccttcaac

SEQ ID NO: 772296 - DNA, 33 bp, Homo sapien
acttaaattatttgcatcttataacccttcaac

SEQ ID NO: 772297 - DNA, 33 bp, Homo sapien
aagaataaatccgtcaatccatctcagagagaa

SEQ ID NO: 772298 - DNA, 33 bp, Homo sapien
aagaataaatccgtcattccatctcagagagaa

SEQ ID NO: 772299 - DNA, 33 bp, Homo sapien
atgcctttatacaacaaccatattatttctgat

SEQ ID NO: 772300 - DNA, 33 bp, Homo sapien
atgcctttatacaacagccatattatttctgat

SEQ ID NO: 772301 - DNA, 33 bp, Homo sapien
tttgaagaccataaaaaggaaatagcagtctgt

SEQ ID NO: 772302 - DNA, 33 bp, Homo sapien
tttgaagaccataaaatggaaatagcagtctgt

SEQ ID NO: 772303 - DNA, 33 bp, Homo sapien
tactgagtcctaaatacgaagatggacagtatg

SEQ ID NO: 772304 - DNA, 33 bp, Homo sapien
tactgagtcctaaatatgaagatggacagtatg

SEQ ID NO: 772305 - DNA, 33 bp, Homo sapien
atatatcacagtgaagactccatagtgaactaa

SEQ ID NO: 772306 - DNA, 33 bp, Homo sapien
atatatcacagtgaaggctccatagtgaactaa

SEQ ID NO: 772307 - DNA, 33 bp, Homo sapien
aatttgtagtgcatgacggcctttaataaatat

SEQ ID NO: 772308 - DNA, 33 bp, Homo sapien
aatttgtagtgcatgatggcctttaataaatat

SEQ ID NO: 772309 - DNA, 33 bp, Homo sapien
aaaagtccaatatactaaacaatgtagcagaat

SEQ ID NO: 772310 - DNA, 33 bp, Homo sapien
aaaagtccaatatactgaacaatgtagcagaat

SEQ ID NO: 772311 - DNA, 33 bp, Homo sapien
aactaacaggattaaaatgtacagataaaagag

SEQ ID NO: 772312 - DNA, 33 bp, Homo sapien
aactaacaggattaaagtgtacagataaaagag

SEQ ID NO: 772313 - DNA, 33 bp, Homo sapien
ttgcaacttggaaatcactaaaccatgatggaa

SEQ ID NO: 772314 - DNA, 33 bp, Homo sapien
ttgcaacttggaaatcgctaaaccatgatggaa

SEQ ID NO: 772315 - DNA, 33 bp, Homo sapien
cgaagtaaaaatcccaagcactctgtgttttgt

SEQ ID NO: 772316 - DNA, 33 bp, Homo sapien
cgaagtaaaaatcccaggcactctgtgttttgt

SEQ ID NO: 772317 - DNA, 33 bp, Homo sapien
caactctagccatctcactgaagaaacttgatt

SEQ ID NO: 772318 - DNA, 33 bp, Homo sapien
caactctagccatctccctgaagaaacttgatt

SEQ ID NO: 772319 - DNA, 33 bp, Homo sapien
tctgtccagatctacaaatggctgaggcagtag

SEQ ID NO: 772320 - DNA, 33 bp, Homo sapien
tctgtccagatctacagatggctgaggcagtag

SEQ ID NO: 772321 - DNA, 33 bp, Homo sapien
gaaaacactctttgccggattacaatttgcctg

SEQ ID NO: 772322 - DNA, 33 bp, Homo sapien
gaaaacactctttgcctgattacaatttgcctg

SEQ ID NO: 772323 - DNA, 33 bp, Homo sapien
gatcagctttaaaatgcagttctctataaaaag

SEQ ID NO: 772324 - DNA, 33 bp, Homo sapien
gatcagctttaaaatgtagttctctataaaaag

SEQ ID NO: 772325 - DNA, 33 bp, Homo sapien
tggaaccacaagtctaaggatgtcagtttaatc

SEQ ID NO: 772326 - DNA, 33 bp, Homo sapien
tggaaccacaagtctagggatgtcagtttaatc

SEQ ID NO: 772327 - DNA, 33 bp, Homo sapien
tttctgccctgtgagaatacaatgagaagatgc

SEQ ID NO: 772328 - DNA, 33 bp, Homo sapien
tttctgccctgtgagagtacaatgagaagatgc

SEQ ID NO: 772329 - DNA, 33 bp, Homo sapien
tcaatgatttctcaaccctgattatatatcatt

SEQ ID NO: 772330 - DNA, 33 bp, Homo sapien
tcaatgatttctcaactctgattatatatcatt

SEQ ID NO: 772331 - DNA, 33 bp, Homo sapien
aaagtaaacatttcaaacttgttgcaaaaattt

SEQ ID NO: 772332 - DNA, 33 bp, Homo sapien
aaagtaaacatttcaaccttgttgcaaaaattt

SEQ ID NO: 772333 - DNA, 33 bp, Homo sapien
agacaccttgattgtacaacacctagctaacct

SEQ ID NO: 772334 - DNA, 33 bp, Homo sapien
agacaccttgattgtagaacacctagctaacct

SEQ ID NO: 772335 - DNA, 33 bp, Homo sapien
tatcttatcatctcagacacttcagatcatctc

SEQ ID NO: 772336 - DNA, 33 bp, Homo sapien
tatcttatcatctcaggcacttcagatcatctc

SEQ ID NO: 772337 - DNA, 33 bp, Homo sapien
gttttacaaatggcccaacttagtttagccttt

SEQ ID NO: 772338 - DNA, 33 bp, Homo sapien
gttttacaaatggcccgacttagtttagccttt

SEQ ID NO: 772339 - DNA, 33 bp, Homo sapien
aagaaacctgaagaaaattaagtagttagacaa

SEQ ID NO: 772340 - DNA, 33 bp, Homo sapien
aagaaacctgaagaaagttaagtagttagacaa

SEQ ID NO: 772341 - DNA, 33 bp, Homo sapien
gccctaatgaacaagaagtttggaaataccttt

SEQ ID NO: 772342 - DNA, 33 bp, Homo sapien
gccctaatgaacaagaggtttggaaataccttt

SEQ ID NO: 772343 - DNA, 33 bp, Homo sapien
ttagttccgtcagtaaataatggtgaaatcttg

SEQ ID NO: 772344 - DNA, 33 bp, Homo sapien
ttagttccgtcagtaagtaatggtgaaatcttg

SEQ ID NO: 772345 - DNA, 33 bp, Homo sapien
cagactatctcacttagctatcttatttaaaat

SEQ ID NO: 772346 - DNA, 33 bp, Homo sapien
cagactatctcacttatctatcttatttaaaat

SEQ ID NO: 772347 - DNA, 33 bp, Homo sapien
tttgcaatagcaaacccgaatgttcttatccct

SEQ ID NO: 772348 - DNA, 33 bp, Homo sapien
tttgcaatagcaaacctgaatgttcttatccct

SEQ ID NO: 772349 - DNA, 33 bp, Homo sapien
gtatttttaaatatcaacccttcctggaacccc

SEQ ID NO: 772350 - DNA, 33 bp, Homo sapien
gtatttttaaatatcagcccttcctggaacccc

SEQ ID NO: 772351 - DNA, 33 bp, Homo sapien
ctgaattcctataacacgatgggcttcttgtca

SEQ ID NO: 772352 - DNA, 33 bp, Homo sapien
ctgaattcctataacatgatgggcttcttgtca

SEQ ID NO: 772353 - DNA, 33 bp, Homo sapien
tttcttgctgatagtccaacacaggtgttcctg

SEQ ID NO: 772354 - DNA, 33 bp, Homo sapien
tttcttgctgatagtctaacacaggtgttcctg

SEQ ID NO: 772355 - DNA, 33 bp, Homo sapien
gagacggggtttcaccaaaatactacctcattt

SEQ ID NO: 772356 - DNA, 33 bp, Homo sapien
gagacggggtttcaccgaaatactacctcattt

SEQ ID NO: 772357 - DNA, 33 bp, Homo sapien
tccatggtttacaatgcagtgcagtcagagaac

SEQ ID NO: 772358 - DNA, 33 bp, Homo sapien
tccatggtttacaatgtagtgcagtcagagaac

SEQ ID NO: 772359 - DNA, 33 bp, Homo sapien
atttgtaattgcagtaacacctgtggttgaatt

SEQ ID NO: 772360 - DNA, 33 bp, Homo sapien
atttgtaattgcagtaccacctgtggttgaatt

SEQ ID NO: 772361 - DNA, 33 bp, Homo sapien
gctaagaacttcaagagtatgaacacaggttat

SEQ ID NO: 772362 - DNA, 33 bp, Homo sapien
gctaagaacttcaagattatgaacacaggttat

SEQ ID NO: 772363 - DNA, 33 bp, Homo sapien
gccctaaagaatacataagcagctcatcttgga

SEQ ID NO: 772364 - DNA, 33 bp, Homo sapien
gccctaaagaatacattagcagctcatcttgga

SEQ ID NO: 772365 - DNA, 33 bp, Homo sapien
gaaaattgagactgtacatttccccatgtatga

SEQ ID NO: 772366 - DNA, 33 bp, Homo sapien
gaaaattgagactgtagatttccccatgtatga

SEQ ID NO: 772367 - DNA, 33 bp, Homo sapien
ggctccatcttgtatacgggctgagtaaaataa

SEQ ID NO: 772368 - DNA, 33 bp, Homo sapien
ggctccatcttgtatatgggctgagtaaaataa

SEQ ID NO: 772369 - DNA, 33 bp, Homo sapien
gtcatctgacaatctcacccattacttccagtc

SEQ ID NO: 772370 - DNA, 33 bp, Homo sapien
gtcatctgacaatctctcccattacttccagtc

SEQ ID NO: 772371 - DNA, 33 bp, Homo sapien
tagtgaacaaaattagaagctatcataaggatc

SEQ ID NO: 772372 - DNA, 33 bp, Homo sapien
tagtgaacaaaattaggagctatcataaggatc

SEQ ID NO: 772373 - DNA, 33 bp, Homo sapien
tccaaaccaggtgataatactccacattcaccc

SEQ ID NO: 772374 - DNA, 33 bp, Homo sapien
tccaaaccaggtgatagtactccacattcaccc

SEQ ID NO: 772375 - DNA, 33 bp, Homo sapien
aggttagtgaagagaaacaataattcagaaaat

SEQ ID NO: 772376 - DNA, 33 bp, Homo sapien
aggttagtgaagagaagcaataattcagaaaat

SEQ ID NO: 772377 - DNA, 33 bp, Homo sapien
tgatcttgtcataaagccaagaggagggcttct

SEQ ID NO: 772378 - DNA, 33 bp, Homo sapien
tgatcttgtcataaagtcaagaggagggcttct

SEQ ID NO: 772379 - DNA, 33 bp, Homo sapien
agtcaactatatctcaaaaacagcccaagtgat

SEQ ID NO: 772380 - DNA, 33 bp, Homo sapien
agtcaactatatctcagaaacagcccaagtgat

SEQ ID NO: 772381 - DNA, 33 bp, Homo sapien
gctgtgaagctcatcaaaagtttgattatcaag

SEQ ID NO: 772382 - DNA, 33 bp, Homo sapien
gctgtgaagctcatcagaagtttgattatcaag

SEQ ID NO: 772383 - DNA, 33 bp, Homo sapien
aatagttatgttgcagaataagaaacaaaaaga

SEQ ID NO: 772384 - DNA, 33 bp, Homo sapien
aatagttatgttgcaggataagaaacaaaaaga

SEQ ID NO: 772385 - DNA, 33 bp, Homo sapien
cttcttgtgccaaaccaaggtaaccacgtttgc

SEQ ID NO: 772386 - DNA, 33 bp, Homo sapien
cttcttgtgccaaacccaggtaaccacgtttgc

SEQ ID NO: 772387 - DNA, 33 bp, Homo sapien
tgcttgctgcctaaccccaacagtcacttgtcc

SEQ ID NO: 772388 - DNA, 33 bp, Homo sapien
tgcttgctgcctaaccgcaacagtcacttgtcc

SEQ ID NO: 772389 - DNA, 33 bp, Homo sapien
ggctatagtgatacaaacctcaatatcctctca

SEQ ID NO: 772390 - DNA, 33 bp, Homo sapien
ggctatagtgatacaaccctcaatatcctctca

SEQ ID NO: 772391 - DNA, 33 bp, Homo sapien
gtctccataacttaaactgcttgaatggatttt

SEQ ID NO: 772392 - DNA, 33 bp, Homo sapien
gtctccataacttaaattgcttgaatggatttt

SEQ ID NO: 772393 - DNA, 33 bp, Homo sapien
atccccatgataggaaatgggttgcaaggaaat

SEQ ID NO: 772394 - DNA, 33 bp, Homo sapien
atccccatgataggaagtgggttgcaaggaaat

SEQ ID NO: 772395 - DNA, 33 bp, Homo sapien
aactgacattctctggccatgaacttattctgc

SEQ ID NO: 772396 - DNA, 33 bp, Homo sapien
aactgacattctctggtcatgaacttattctgc

SEQ ID NO: 772397 - DNA, 33 bp, Homo sapien
ataggaaaaaatattaaagaagcagctgtaaat

SEQ ID NO: 772398 - DNA, 33 bp, Homo sapien
ataggaaaaaatattagagaagcagctgtaaat

SEQ ID NO: 772399 - DNA, 33 bp, Homo sapien
taatatagttgtagaaaagtaagcttcaattga

SEQ ID NO: 772400 - DNA, 33 bp, Homo sapien
taatatagttgtagaagagtaagcttcaattga

SEQ ID NO: 772401 - DNA, 33 bp, Homo sapien
gtggccatgacagtgaacttgatcttaggttat

SEQ ID NO: 772402 - DNA, 33 bp, Homo sapien
gtggccatgacagtgaccttgatcttaggttat

SEQ ID NO: 772403 - DNA, 33 bp, Homo sapien
gtgaagccagattaaacagatctctgttattca

SEQ ID NO: 772404 - DNA, 33 bp, Homo sapien
gtgaagccagattaaatagatctctgttattca

SEQ ID NO: 772405 - DNA, 33 bp, Homo sapien
ttatcaaaaaatgtaacgatgtggtgaagagtt

SEQ ID NO: 772406 - DNA, 33 bp, Homo sapien
ttatcaaaaaatgtaatgatgtggtgaagagtt

SEQ ID NO: 772407 - DNA, 33 bp, Homo sapien
ctgagagctggtacccaaagccatatttgttag

SEQ ID NO: 772408 - DNA, 33 bp, Homo sapien
ctgagagctggtacccgaagccatatttgttag

SEQ ID NO: 772409 - DNA, 33 bp, Homo sapien
gtacttggttagaacgcattttcaaagggattc

SEQ ID NO: 772410 - DNA, 33 bp, Homo sapien
gtacttggttagaacgtattttcaaagggattc

SEQ ID NO: 772411 - DNA, 33 bp, Homo sapien
tcttcacagtaataataaagctgagctgcaatg

SEQ ID NO: 772412 - DNA, 33 bp, Homo sapien
tcttcacagtaataattaagctgagctgcaatg

SEQ ID NO: 772413 - DNA, 33 bp, Homo sapien
gcattagaattttaagactatctctgtgttgtc

SEQ ID NO: 772414 - DNA, 33 bp, Homo sapien
gcattagaattttaagtctatctctgtgttgtc

SEQ ID NO: 772415 - DNA, 33 bp, Homo sapien
acttttctcccacagacagcgtcaatcactatt

SEQ ID NO: 772416 - DNA, 33 bp, Homo sapien
acttttctcccacagagagcgtcaatcactatt

SEQ ID NO: 772417 - DNA, 33 bp, Homo sapien
tttgtgtaatactcagaaaatcttggcaacaac

SEQ ID NO: 772418 - DNA, 33 bp, Homo sapien
tttgtgtaatactcagcaaatcttggcaacaac

SEQ ID NO: 772419 - DNA, 33 bp, Homo sapien
agtacaataccagaaaatgatcatgtaaggtaa

SEQ ID NO: 772420 - DNA, 33 bp, Homo sapien
agtacaataccagaaagtgatcatgtaaggtaa

SEQ ID NO: 772421 - DNA, 33 bp, Homo sapien
atctgaaggacaagtaagagatagccaggtaga

SEQ ID NO: 772422 - DNA, 33 bp, Homo sapien
atctgaaggacaagtaggagatagccaggtaga

SEQ ID NO: 772423 - DNA, 33 bp, Homo sapien
tgaatttaaattaaaacctgcagaggcttaaag

SEQ ID NO: 772424 - DNA, 33 bp, Homo sapien
tgaatttaaattaaaagctgcagaggcttaaag

SEQ ID NO: 772425 - DNA, 33 bp, Homo sapien
gtacttaattgtttccgccattcctaatgcacc

SEQ ID NO: 772426 - DNA, 33 bp, Homo sapien
gtacttaattgtttcctccattcctaatgcacc

SEQ ID NO: 772427 - DNA, 33 bp, Homo sapien
tctggtgtgaacttaaatatgttgaggcagtgt

SEQ ID NO: 772428 - DNA, 33 bp, Homo sapien
tctggtgtgaacttaactatgttgaggcagtgt

SEQ ID NO: 772429 - DNA, 33 bp, Homo sapien
tcctgtattacttgacacagttacattacctac

SEQ ID NO: 772430 - DNA, 33 bp, Homo sapien
tcctgtattacttgacgcagttacattacctac

SEQ ID NO: 772431 - DNA, 33 bp, Homo sapien
gaaaaactcagtaggacagcaatatagattatg

SEQ ID NO: 772432 - DNA, 33 bp, Homo sapien
gaaaaactcagtaggagagcaatatagattatg

SEQ ID NO: 772433 - DNA, 33 bp, Homo sapien
agcaggcaaatatttaaagaattcatgataggc

SEQ ID NO: 772434 - DNA, 33 bp, Homo sapien
agcaggcaaatatttagagaattcatgataggc

SEQ ID NO: 772435 - DNA, 33 bp, Homo sapien
aactccctctgtatcaaatgtgtttgtttgcca

SEQ ID NO: 772436 - DNA, 33 bp, Homo sapien
aactccctctgtatcatatgtgtttgtttgcca

SEQ ID NO: 772437 - DNA, 33 bp, Homo sapien
caacctgtagagtaaacatagcactgacatctg

SEQ ID NO: 772438 - DNA, 33 bp, Homo sapien
caacctgtagagtaaatatagcactgacatctg

SEQ ID NO: 772439 - DNA, 33 bp, Homo sapien
atccttttgattgttacagcatccccccaaact

SEQ ID NO: 772440 - DNA, 33 bp, Homo sapien
atccttttgattgttatagcatccccccaaact

SEQ ID NO: 772441 - DNA, 33 bp, Homo sapien
agctattgtaacttcccacatcttaaataacat

SEQ ID NO: 772442 - DNA, 33 bp, Homo sapien
agctattgtaacttcctacatcttaaataacat

SEQ ID NO: 772443 - DNA, 33 bp, Homo sapien
atctttattttctctcaatcaattctccacatt

SEQ ID NO: 772444 - DNA, 33 bp, Homo sapien
atctttattttctctctatcaattctccacatt

SEQ ID NO: 772445 - DNA, 33 bp, Homo sapien
tcattcatgaggctataaaacataaagtacaca

SEQ ID NO: 772446 - DNA, 33 bp, Homo sapien
tcattcatgaggctatgaaacataaagtacaca

SEQ ID NO: 772447 - DNA, 33 bp, Homo sapien
tcagctagaagtcagcaaaacagctctgcttct

SEQ ID NO: 772448 - DNA, 33 bp, Homo sapien
tcagctagaagtcagcgaaacagctctgcttct

SEQ ID NO: 772449 - DNA, 33 bp, Homo sapien
gccttgatttgtgtcacgtatgcatctgtagtc

SEQ ID NO: 772450 - DNA, 33 bp, Homo sapien
gccttgatttgtgtcatgtatgcatctgtagtc

SEQ ID NO: 772451 - DNA, 33 bp, Homo sapien
gtggctagcaagtaacacccattgatctttgat

SEQ ID NO: 772452 - DNA, 33 bp, Homo sapien
gtggctagcaagtaacgcccattgatctttgat

SEQ ID NO: 772453 - DNA, 33 bp, Homo sapien
cttataaatcacagtgcagtaagaagtaggaaa

SEQ ID NO: 772454 - DNA, 33 bp, Homo sapien
cttataaatcacagtgtagtaagaagtaggaaa

SEQ ID NO: 772455 - DNA, 33 bp, Homo sapien
tttgatactagtaggaacagttttcacatggtt

SEQ ID NO: 772456 - DNA, 33 bp, Homo sapien
tttgatactagtaggaccagttttcacatggtt

SEQ ID NO: 772457 - DNA, 33 bp, Homo sapien
acatctgtttctggcaaggccaataatgagtat

SEQ ID NO: 772458 - DNA, 33 bp, Homo sapien
acatctgtttctggcagggccaataatgagtat

SEQ ID NO: 772459 - DNA, 33 bp, Homo sapien
taaggagatcgaattccactgctgctataaatg

SEQ ID NO: 772460 - DNA, 33 bp, Homo sapien
taaggagatcgaattctactgctgctataaatg

SEQ ID NO: 772461 - DNA, 33 bp, Homo sapien
tatttgtgagactcaacgtacaaatagacaaca

SEQ ID NO: 772462 - DNA, 33 bp, Homo sapien
tatttgtgagactcaatgtacaaatagacaaca

SEQ ID NO: 772463 - DNA, 33 bp, Homo sapien
tgatgctattctccagacacatataccctctgt

SEQ ID NO: 772464 - DNA, 33 bp, Homo sapien
tgatgctattctccaggcacatataccctctgt

SEQ ID NO: 772465 - DNA, 33 bp, Homo sapien
caggctaggaagcatacggtttcatttcttcaa

SEQ ID NO: 772466 - DNA, 33 bp, Homo sapien
caggctaggaagcatagggtttcatttcttcaa

SEQ ID NO: 772467 - DNA, 33 bp, Homo sapien
tctccttttcgttcccaaagaacattgttgcaa

SEQ ID NO: 772468 - DNA, 33 bp, Homo sapien
tctccttttcgttcccgaagaacattgttgcaa

SEQ ID NO: 772469 - DNA, 33 bp, Homo sapien
atttagaacattttgaccaatatgaaaataaat

SEQ ID NO: 772470 - DNA, 33 bp, Homo sapien
atttagaacattttgagcaatatgaaaataaat

SEQ ID NO: 772471 - DNA, 33 bp, Homo sapien
agttaattcaggttcacgtgagattgtgtgcat

SEQ ID NO: 772472 - DNA, 33 bp, Homo sapien
agttaattcaggttcatgtgagattgtgtgcat

SEQ ID NO: 772473 - DNA, 33 bp, Homo sapien
atcatcaggtccaaagaaagagatctgaaatta

SEQ ID NO: 772474 - DNA, 33 bp, Homo sapien
atcatcaggtccaaaggaagagatctgaaatta

SEQ ID NO: 772475 - DNA, 33 bp, Homo sapien
ccacctgaagaaattacgccagcaaggtgatga

SEQ ID NO: 772476 - DNA, 33 bp, Homo sapien
ccacctgaagaaattaggccagcaaggtgatga

SEQ ID NO: 772477 - DNA, 33 bp, Homo sapien
caaataaaccatctacaacttaagttctcatca

SEQ ID NO: 772478 - DNA, 33 bp, Homo sapien
caaataaaccatctaccacttaagttctcatca

SEQ ID NO: 772479 - DNA, 33 bp, Homo sapien
ttcattgcttttctaaatagcagatactgtatc

SEQ ID NO: 772480 - DNA, 33 bp, Homo sapien
ttcattgcttttctaagtagcagatactgtatc

SEQ ID NO: 772481 - DNA, 33 bp, Homo sapien
gatgattgcctaagcccatgatattttagcagt

SEQ ID NO: 772482 - DNA, 33 bp, Homo sapien
gatgattgcctaagcctatgatattttagcagt

SEQ ID NO: 772483 - DNA, 33 bp, Homo sapien
cactatgatgctaccaagaagatagaaaatgag

SEQ ID NO: 772484 - DNA, 33 bp, Homo sapien
cactatgatgctaccacgaagatagaaaatgag

SEQ ID NO: 772485 - DNA, 33 bp, Homo sapien
acagtcaagcctacttaaagagattgtcataaa

SEQ ID NO: 772486 - DNA, 33 bp, Homo sapien
acagtcaagcctactttaagagattgtcataaa

SEQ ID NO: 772487 - DNA, 33 bp, Homo sapien
ttatgtttgcttagaacggcctttcccactcta

SEQ ID NO: 772488 - DNA, 33 bp, Homo sapien
ttatgtttgcttagaatggcctttcccactcta

SEQ ID NO: 772489 - DNA, 33 bp, Homo sapien
ctaggaatgaaacttacgtaggtccatgttcgg

SEQ ID NO: 772490 - DNA, 33 bp, Homo sapien
ctaggaatgaaacttatgtaggtccatgttcgg

SEQ ID NO: 772491 - DNA, 33 bp, Homo sapien
caagataagtcactgacatcaggaaagtcatta

SEQ ID NO: 772492 - DNA, 33 bp, Homo sapien
caagataagtcactgatatcaggaaagtcatta

SEQ ID NO: 772493 - DNA, 33 bp, Homo sapien
ttagggaagattttaccgccatgtgggctcctg

SEQ ID NO: 772494 - DNA, 33 bp, Homo sapien
ttagggaagattttactgccatgtgggctcctg

SEQ ID NO: 772495 - DNA, 33 bp, Homo sapien
ttctggacactggaaaacacaagacaggagatt

SEQ ID NO: 772496 - DNA, 33 bp, Homo sapien
ttctggacactggaaagcacaagacaggagatt

SEQ ID NO: 772497 - DNA, 33 bp, Homo sapien
ccagaaactgcctgcaacctttggttcatggcc

SEQ ID NO: 772498 - DNA, 33 bp, Homo sapien
ccagaaactgcctgcatcctttggttcatggcc

SEQ ID NO: 772499 - DNA, 33 bp, Homo sapien
cattgaggtgataataacacttcattcaaatag

SEQ ID NO: 772500 - DNA, 33 bp, Homo sapien
cattgaggtgataatagcacttcattcaaatag

SEQ ID NO: 772501 - DNA, 33 bp, Homo sapien
agtatctctaacattcaagcttcttatctttcc

SEQ ID NO: 772502 - DNA, 33 bp, Homo sapien
agtatctctaacattcgagcttcttatctttcc

SEQ ID NO: 772503 - DNA, 33 bp, Homo sapien
tccaaaaaacaagtcagtgaaaagccagggttt

SEQ ID NO: 772504 - DNA, 33 bp, Homo sapien
tccaaaaaacaagtcattgaaaagccagggttt

SEQ ID NO: 772505 - DNA, 33 bp, Homo sapien
tggcctgtttgattaacgtcgtgtttaaaattc

SEQ ID NO: 772506 - DNA, 33 bp, Homo sapien
tggcctgtttgattaatgtcgtgtttaaaattc

SEQ ID NO: 772507 - DNA, 33 bp, Homo sapien
actcgaatagatctcacagtatttccagtcatt

SEQ ID NO: 772508 - DNA, 33 bp, Homo sapien
actcgaatagatctcatagtatttccagtcatt

SEQ ID NO: 772509 - DNA, 33 bp, Homo sapien
cccacctttattcataacagacaacactatcca

SEQ ID NO: 772510 - DNA, 33 bp, Homo sapien
cccacctttattcatagcagacaacactatcca

SEQ ID NO: 772511 - DNA, 33 bp, Homo sapien
tcagcaagcttcctcaaccacaaccaccattca

SEQ ID NO: 772512 - DNA, 33 bp, Homo sapien
tcagcaagcttcctcacccacaaccaccattca

SEQ ID NO: 772513 - DNA, 33 bp, Homo sapien
aagtgcattttgttggaaagagtagctgaaact

SEQ ID NO: 772514 - DNA, 33 bp, Homo sapien
aagtgcattttgttgggaagagtagctgaaact

SEQ ID NO: 772515 - DNA, 33 bp, Homo sapien
gaccacaagaactctacgtgcttggattatatt

SEQ ID NO: 772516 - DNA, 33 bp, Homo sapien
gaccacaagaactctatgtgcttggattatatt

SEQ ID NO: 772517 - DNA, 33 bp, Homo sapien
ttaggtgctgacacacaagggtgcaagaggtgt

SEQ ID NO: 772518 - DNA, 33 bp, Homo sapien
ttaggtgctgacacacgagggtgcaagaggtgt

SEQ ID NO: 772519 - DNA, 33 bp, Homo sapien
atggtcctgaaaataactgtaaggttcaagtaa

SEQ ID NO: 772520 - DNA, 33 bp, Homo sapien
atggtcctgaaaataattgtaaggttcaagtaa

SEQ ID NO: 772521 - DNA, 33 bp, Homo sapien
atgtacaaggacaagacctgcagtggaaccagc

SEQ ID NO: 772522 - DNA, 33 bp, Homo sapien
atgtacaaggacaagatctgcagtggaaccagc

SEQ ID NO: 772523 - DNA, 33 bp, Homo sapien
ctataaagaacattacgggatcaaatgacaata

SEQ ID NO: 772524 - DNA, 33 bp, Homo sapien
ctataaagaacattactggatcaaatgacaata

SEQ ID NO: 772525 - DNA, 33 bp, Homo sapien
ttgtttgtatccttcaatgaaatgtacattcca

SEQ ID NO: 772526 - DNA, 33 bp, Homo sapien
ttgtttgtatccttcactgaaatgtacattcca

SEQ ID NO: 772527 - DNA, 33 bp, Homo sapien
ctctctgacatctaaactgaactctaaagggtg

SEQ ID NO: 772528 - DNA, 33 bp, Homo sapien
ctctctgacatctaaattgaactctaaagggtg

SEQ ID NO: 772529 - DNA, 33 bp, Homo sapien
gaggctgcgacttgaacctacacaagatgtggt

SEQ ID NO: 772530 - DNA, 33 bp, Homo sapien
gaggctgcgacttgaatctacacaagatgtggt

SEQ ID NO: 772531 - DNA, 33 bp, Homo sapien
ataaaattatacactaaaagactgtcagaattt

SEQ ID NO: 772532 - DNA, 33 bp, Homo sapien
ataaaattatacactagaagactgtcagaattt

SEQ ID NO: 772533 - DNA, 33 bp, Homo sapien
tgagaacaaagaagacaagagagaaggctcatc

SEQ ID NO: 772534 - DNA, 33 bp, Homo sapien
tgagaacaaagaagacgagagagaaggctcatc

SEQ ID NO: 772535 - DNA, 33 bp, Homo sapien
gtaacatgaatcttaccataagtgagttagcag

SEQ ID NO: 772536 - DNA, 33 bp, Homo sapien
gtaacatgaatcttactataagtgagttagcag

SEQ ID NO: 772537 - DNA, 33 bp, Homo sapien
gtaaaactgtgttttacgtgtatttgcatcctc

SEQ ID NO: 772538 - DNA, 33 bp, Homo sapien
gtaaaactgtgttttatgtgtatttgcatcctc

SEQ ID NO: 772539 - DNA, 33 bp, Homo sapien
agacctgccagtactacattaatgacaaaaata

SEQ ID NO: 772540 - DNA, 33 bp, Homo sapien
agacctgccagtactatattaatgacaaaaata

SEQ ID NO: 772541 - DNA, 33 bp, Homo sapien
taaagcacaaatgctccccaatcataaagaaaa

SEQ ID NO: 772542 - DNA, 33 bp, Homo sapien
taaagcacaaatgctctccaatcataaagaaaa

SEQ ID NO: 772543 - DNA, 33 bp, Homo sapien
aaaaagcagcaatacacgtaaaccgagtgatat

SEQ ID NO: 772544 - DNA, 33 bp, Homo sapien
aaaaagcagcaatacatgtaaaccgagtgatat

SEQ ID NO: 772545 - DNA, 33 bp, Homo sapien
aaatagtcattaaaagccatgagagaaggaaaa

SEQ ID NO: 772546 - DNA, 33 bp, Homo sapien
aaatagtcattaaaaggcatgagagaaggaaaa

SEQ ID NO: 772547 - DNA, 33 bp, Homo sapien
ctctagataaatgagacacttccaataaaacag

SEQ ID NO: 772548 - DNA, 33 bp, Homo sapien
ctctagataaatgagatacttccaataaaacag

SEQ ID NO: 772549 - DNA, 33 bp, Homo sapien
cttggcccttcacccagaatgaagtacaacatg

SEQ ID NO: 772550 - DNA, 33 bp, Homo sapien
cttggcccttcacccataatgaagtacaacatg

SEQ ID NO: 772551 - DNA, 33 bp, Homo sapien
ccaagtggtataaataactttaggaatctcctc

SEQ ID NO: 772552 - DNA, 33 bp, Homo sapien
ccaagtggtataaatacctttaggaatctcctc

SEQ ID NO: 772553 - DNA, 33 bp, Homo sapien
atcccacatgagtcaaaggaagagaattgtaaa

SEQ ID NO: 772554 - DNA, 33 bp, Homo sapien
atcccacatgagtcaatggaagagaattgtaaa

SEQ ID NO: 772555 - DNA, 33 bp, Homo sapien
attcattccatgtcaaacattaaggcctaatgt

SEQ ID NO: 772556 - DNA, 33 bp, Homo sapien
attcattccatgtcaatcattaaggcctaatgt

SEQ ID NO: 772557 - DNA, 33 bp, Homo sapien
gcactagactacatagcacctgtatgacatgag

SEQ ID NO: 772558 - DNA, 33 bp, Homo sapien
gcactagactacataggacctgtatgacatgag

SEQ ID NO: 772559 - DNA, 33 bp, Homo sapien
ttttcttaaataatcacgtatccagggagcttg

SEQ ID NO: 772560 - DNA, 33 bp, Homo sapien
ttttcttaaataatcatgtatccagggagcttg

SEQ ID NO: 772561 - DNA, 33 bp, Homo sapien
gaaagagcatccaccacgtagcagaaaataact

SEQ ID NO: 772562 - DNA, 33 bp, Homo sapien
gaaagagcatccaccatgtagcagaaaataact

SEQ ID NO: 772563 - DNA, 33 bp, Homo sapien
aaaaccaataataatacaagttcttgcaaatag

SEQ ID NO: 772564 - DNA, 33 bp, Homo sapien
aaaaccaataataatataagttcttgcaaatag

SEQ ID NO: 772565 - DNA, 33 bp, Homo sapien
cctgattgccttcccactaacctaagaaggaag

SEQ ID NO: 772566 - DNA, 33 bp, Homo sapien
cctgattgccttcccattaacctaagaaggaag

SEQ ID NO: 772567 - DNA, 33 bp, Homo sapien
tcagaatataagcacaaaataaattaccatctt

SEQ ID NO: 772568 - DNA, 33 bp, Homo sapien
tcagaatataagcacagaataaattaccatctt

SEQ ID NO: 772569 - DNA, 33 bp, Homo sapien
ctctaatacttagtgaatatggggaagtcactc

SEQ ID NO: 772570 - DNA, 33 bp, Homo sapien
ctctaatacttagtgagtatggggaagtcactc

SEQ ID NO: 772571 - DNA, 33 bp, Homo sapien
ttcccatcccttccaactcagactcaacaattt

SEQ ID NO: 772572 - DNA, 33 bp, Homo sapien
ttcccatcccttccaattcagactcaacaattt

SEQ ID NO: 772573 - DNA, 33 bp, Homo sapien
attagagtgttaaaaaatttagccagttgcctg

SEQ ID NO: 772574 - DNA, 33 bp, Homo sapien
attagagtgttaaaaattttagccagttgcctg

SEQ ID NO: 772575 - DNA, 33 bp, Homo sapien
gatggaaatgcatcaacagggtgactttcccac

SEQ ID NO: 772576 - DNA, 33 bp, Homo sapien
gatggaaatgcatcaatagggtgactttcccac

SEQ ID NO: 772577 - DNA, 33 bp, Homo sapien
tctgtgtcaccaagcacaagagtttgggtgtat

SEQ ID NO: 772578 - DNA, 33 bp, Homo sapien
tctgtgtcaccaagcataagagtttgggtgtat

SEQ ID NO: 772579 - DNA, 33 bp, Homo sapien
attataacctagccagaaaagtggattttaaga

SEQ ID NO: 772580 - DNA, 33 bp, Homo sapien
attataacctagccagcaaagtggattttaaga

SEQ ID NO: 772581 - DNA, 33 bp, Homo sapien
tctggccataagcaacaaatttctatttataca

SEQ ID NO: 772582 - DNA, 33 bp, Homo sapien
tctggccataagcaaccaatttctatttataca

SEQ ID NO: 772583 - DNA, 33 bp, Homo sapien
tctggagggatctaagcctggaaaagttgacat

SEQ ID NO: 772584 - DNA, 33 bp, Homo sapien
tctggagggatctaagtctggaaaagttgacat

SEQ ID NO: 772585 - DNA, 33 bp, Homo sapien
tggctaagtattcccaagaggtataaactaaac

SEQ ID NO: 772586 - DNA, 33 bp, Homo sapien
tggctaagtattcccaggaggtataaactaaac

SEQ ID NO: 772587 - DNA, 33 bp, Homo sapien
actcagtttggagaacaaatggtatggttatcc

SEQ ID NO: 772588 - DNA, 33 bp, Homo sapien
actcagtttggagaacgaatggtatggttatcc

SEQ ID NO: 772589 - DNA, 33 bp, Homo sapien
tttcctgtctggatgacccaatgctgatggtgg

SEQ ID NO: 772590 - DNA, 33 bp, Homo sapien
tttcctgtctggatgatccaatgctgatggtgg

SEQ ID NO: 772591 - DNA, 33 bp, Homo sapien
atagtattccaagtgaaaaaagcctgacataaa

SEQ ID NO: 772592 - DNA, 33 bp, Homo sapien
atagtattccaagtgataaaagcctgacataaa

SEQ ID NO: 772593 - DNA, 33 bp, Homo sapien
cagaagtagtctgagaacaaatttgaaacaaaa

SEQ ID NO: 772594 - DNA, 33 bp, Homo sapien
cagaagtagtctgagagcaaatttgaaacaaaa

SEQ ID NO: 772595 - DNA, 33 bp, Homo sapien
aaggttgtatatacccaaaagtctatcgtcagc

SEQ ID NO: 772596 - DNA, 33 bp, Homo sapien
aaggttgtatatacccgaaagtctatcgtcagc

SEQ ID NO: 772597 - DNA, 33 bp, Homo sapien
ctgattgagcattccaatagtactatgaagatt

SEQ ID NO: 772598 - DNA, 33 bp, Homo sapien
ctgattgagcattccagtagtactatgaagatt

SEQ ID NO: 772599 - DNA, 33 bp, Homo sapien
agtttgaactgaagataaagagtgaacacattt

SEQ ID NO: 772600 - DNA, 33 bp, Homo sapien
agtttgaactgaagatgaagagtgaacacattt

SEQ ID NO: 772601 - DNA, 33 bp, Homo sapien
gtcaacagagaaaacacgtggatgggatgtgtg

SEQ ID NO: 772602 - DNA, 33 bp, Homo sapien
gtcaacagagaaaacatgtggatgggatgtgtg

SEQ ID NO: 772603 - DNA, 33 bp, Homo sapien
aaataaagagaaggaacgtagaatccaggcaaa

SEQ ID NO: 772604 - DNA, 33 bp, Homo sapien
aaataaagagaaggaaggtagaatccaggcaaa

SEQ ID NO: 772605 - DNA, 33 bp, Homo sapien
gctggggattctgcaggagcaaaatagccaatg

SEQ ID NO: 772606 - DNA, 33 bp, Homo sapien
gctggggattctgcagtagcaaaatagccaatg

SEQ ID NO: 772607 - DNA, 33 bp, Homo sapien
gatcagggtcccatcacgaaaatatggcacacc

SEQ ID NO: 772608 - DNA, 33 bp, Homo sapien
gatcagggtcccatcaggaaaatatggcacacc

SEQ ID NO: 772609 - DNA, 33 bp, Homo sapien
atcccgtaactcttgaagcctgactgattcttc

SEQ ID NO: 772610 - DNA, 33 bp, Homo sapien
atcccgtaactcttgatgcctgactgattcttc

SEQ ID NO: 772611 - DNA, 33 bp, Homo sapien
ggaatggaaatcagtaaggcgaagagatgcttc

SEQ ID NO: 772612 - DNA, 33 bp, Homo sapien
ggaatggaaatcagtatggcgaagagatgcttc

SEQ ID NO: 772613 - DNA, 33 bp, Homo sapien
ccatgaaggaagaagaaaccaatgcaaagccgg

SEQ ID NO: 772614 - DNA, 33 bp, Homo sapien
ccatgaaggaagaagagaccaatgcaaagccgg

SEQ ID NO: 772615 - DNA, 33 bp, Homo sapien
ttataattacctacccactatgcacagggtact

SEQ ID NO: 772616 - DNA, 33 bp, Homo sapien
ttataattacctacccgctatgcacagggtact

SEQ ID NO: 772617 - DNA, 33 bp, Homo sapien
tggtaataacaaatgacggctaaatgcccaagg

SEQ ID NO: 772618 - DNA, 33 bp, Homo sapien
tggtaataacaaatgatggctaaatgcccaagg

SEQ ID NO: 772619 - DNA, 33 bp, Homo sapien
gaatggcacaaccctaagtgacaattataaaca

SEQ ID NO: 772620 - DNA, 33 bp, Homo sapien
gaatggcacaaccctacgtgacaattataaaca

SEQ ID NO: 772621 - DNA, 33 bp, Homo sapien
ggtcacacatttctaccgcatgaagggtggaat

SEQ ID NO: 772622 - DNA, 33 bp, Homo sapien
ggtcacacatttctactgcatgaagggtggaat

SEQ ID NO: 772623 - DNA, 33 bp, Homo sapien
cacattagtgtaatcacgcagtatgtagccttt

SEQ ID NO: 772624 - DNA, 33 bp, Homo sapien
cacattagtgtaatcatgcagtatgtagccttt

SEQ ID NO: 772625 - DNA, 33 bp, Homo sapien
aaggaactattgatccaagcaacaacagaagaa

SEQ ID NO: 772626 - DNA, 33 bp, Homo sapien
aaggaactattgatccgagcaacaacagaagaa

SEQ ID NO: 772627 - DNA, 33 bp, Homo sapien
gaattgtatttggaacacttaatatttgatcct

SEQ ID NO: 772628 - DNA, 33 bp, Homo sapien
gaattgtatttggaactcttaatatttgatcct

SEQ ID NO: 772629 - DNA, 33 bp, Homo sapien
aaacaagccataaacacagcaagatcattgagg

SEQ ID NO: 772630 - DNA, 33 bp, Homo sapien
aaacaagccataaacatagcaagatcattgagg

SEQ ID NO: 772631 - DNA, 33 bp, Homo sapien
gttggaaggagtaagacattaacaattacattc

SEQ ID NO: 772632 - DNA, 33 bp, Homo sapien
gttggaaggagtaagatattaacaattacattc

SEQ ID NO: 772633 - DNA, 33 bp, Homo sapien
aggacagaatccagaaaatcactttatttattt

SEQ ID NO: 772634 - DNA, 33 bp, Homo sapien
aggacagaatccagaagatcactttatttattt

SEQ ID NO: 772635 - DNA, 33 bp, Homo sapien
ttggttttctagctaaataggcttcttcttcac

SEQ ID NO: 772636 - DNA, 33 bp, Homo sapien
ttggttttctagctaagtaggcttcttcttcac

SEQ ID NO: 772637 - DNA, 33 bp, Homo sapien
aggtgacaactatgaacacttttagtctgtttg

SEQ ID NO: 772638 - DNA, 33 bp, Homo sapien
aggtgacaactatgaatacttttagtctgtttg

SEQ ID NO: 772639 - DNA, 33 bp, Homo sapien
tggatattgccagcaacgggttaaatagaaagt

SEQ ID NO: 772640 - DNA, 33 bp, Homo sapien
tggatattgccagcaatgggttaaatagaaagt

SEQ ID NO: 772641 - DNA, 33 bp, Homo sapien
cataatctgagacctaggcttaagacaattatc

SEQ ID NO: 772642 - DNA, 33 bp, Homo sapien
cataatctgagacctatgcttaagacaattatc

SEQ ID NO: 772643 - DNA, 33 bp, Homo sapien
gacttaagagatgttaagcaaggagaagcaata

SEQ ID NO: 772644 - DNA, 33 bp, Homo sapien
gacttaagagatgttacgcaaggagaagcaata

SEQ ID NO: 772645 - DNA, 33 bp, Homo sapien
acatttaggtataaacgcaaagtcatttcaacc

SEQ ID NO: 772646 - DNA, 33 bp, Homo sapien
acatttaggtataaactcaaagtcatttcaacc

SEQ ID NO: 772647 - DNA, 33 bp, Homo sapien
aatattcctactgccaatcaagctcccaaattt

SEQ ID NO: 772648 - DNA, 33 bp, Homo sapien
aatattcctactgccattcaagctcccaaattt

SEQ ID NO: 772649 - DNA, 33 bp, Homo sapien
aatcagtgtaacaacaacagctacttaaagaag

SEQ ID NO: 772650 - DNA, 33 bp, Homo sapien
aatcagtgtaacaacatcagctacttaaagaag

SEQ ID NO: 772651 - DNA, 33 bp, Homo sapien
tctgttttttagacacggctctacccagctcaa

SEQ ID NO: 772652 - DNA, 33 bp, Homo sapien
tctgttttttagacactgctctacccagctcaa

SEQ ID NO: 772653 - DNA, 33 bp, Homo sapien
tccttgatggacggaacgcttttattcttctta

SEQ ID NO: 772654 - DNA, 33 bp, Homo sapien
tccttgatggacggaatgcttttattcttctta

SEQ ID NO: 772655 - DNA, 33 bp, Homo sapien
tgagacctagttcctggcaaggtaagtttgtgt

SEQ ID NO: 772656 - DNA, 33 bp, Homo sapien
tgagacctagttcctgtcaaggtaagtttgtgt

SEQ ID NO: 772657 - DNA, 33 bp, Homo sapien
accagaaaacttgggaacattcaaagacaaatg

SEQ ID NO: 772658 - DNA, 33 bp, Homo sapien
accagaaaacttgggagcattcaaagacaaatg

SEQ ID NO: 772659 - DNA, 33 bp, Homo sapien
atccctgcaagaccatcaatgtaatgaacagaa

SEQ ID NO: 772660 - DNA, 33 bp, Homo sapien
atccctgcaagaccattaatgtaatgaacagaa

SEQ ID NO: 772661 - DNA, 33 bp, Homo sapien
cctgggattaggagtcaccatcaggcatcatgg

SEQ ID NO: 772662 - DNA, 33 bp, Homo sapien
cctgggattaggagtcgccatcaggcatcatgg

SEQ ID NO: 772663 - DNA, 33 bp, Homo sapien
agggccttatgtgttacgttaagcaccaggaac

SEQ ID NO: 772664 - DNA, 33 bp, Homo sapien
agggccttatgtgttatgttaagcaccaggaac

SEQ ID NO: 772665 - DNA, 33 bp, Homo sapien
atgcattctctattcactcctgttccttttttt

SEQ ID NO: 772666 - DNA, 33 bp, Homo sapien
atgcattctctattcattcctgttccttttttt

SEQ ID NO: 772667 - DNA, 33 bp, Homo sapien
ctgtaaacttctatacgactttgtaccacccat

SEQ ID NO: 772668 - DNA, 33 bp, Homo sapien
ctgtaaacttctatactactttgtaccacccat

SEQ ID NO: 772669 - DNA, 33 bp, Homo sapien
tggctttgagtttgtaaaggtatgcatggcctc

SEQ ID NO: 772670 - DNA, 33 bp, Homo sapien
tggctttgagtttgtagaggtatgcatggcctc

SEQ ID NO: 772671 - DNA, 33 bp, Homo sapien
gaaatgggactgttaccactcataattaccccc

SEQ ID NO: 772672 - DNA, 33 bp, Homo sapien
gaaatgggactgttacgactcataattaccccc

SEQ ID NO: 772673 - DNA, 33 bp, Homo sapien
ggggtggctagggaaccaagttgactagtatct

SEQ ID NO: 772674 - DNA, 33 bp, Homo sapien
ggggtggctagggaacgaagttgactagtatct

SEQ ID NO: 772675 - DNA, 33 bp, Homo sapien
ttccttctaagtccctcactatccagacaaatc

SEQ ID NO: 772676 - DNA, 33 bp, Homo sapien
ttccttctaagtccctgactatccagacaaatc

SEQ ID NO: 772677 - DNA, 33 bp, Homo sapien
tgctgagtgaacacaaacagtaacctatgttct

SEQ ID NO: 772678 - DNA, 33 bp, Homo sapien
tgctgagtgaacacaagcagtaacctatgttct

SEQ ID NO: 772679 - DNA, 33 bp, Homo sapien
tgttgaatggtaggaaagagtcatagattccat

SEQ ID NO: 772680 - DNA, 33 bp, Homo sapien
tgttgaatggtaggaacgagtcatagattccat

SEQ ID NO: 772681 - DNA, 33 bp, Homo sapien
actctggtactgagaaaaagaattgcaagttta

SEQ ID NO: 772682 - DNA, 33 bp, Homo sapien
actctggtactgagaacaagaattgcaagttta

SEQ ID NO: 772683 - DNA, 33 bp, Homo sapien
gtatctttggagactacctgccacagtaatcca

SEQ ID NO: 772684 - DNA, 33 bp, Homo sapien
gtatctttggagactagctgccacagtaatcca

SEQ ID NO: 772685 - DNA, 33 bp, Homo sapien
ggctatgctacaagaaatccatgttaacttcac

SEQ ID NO: 772686 - DNA, 33 bp, Homo sapien
ggctatgctacaagaagtccatgttaacttcac

SEQ ID NO: 772687 - DNA, 33 bp, Homo sapien
atattcaataacttgcgccataggtgacaggat

SEQ ID NO: 772688 - DNA, 33 bp, Homo sapien
atattcaataacttgctccataggtgacaggat

SEQ ID NO: 772689 - DNA, 33 bp, Homo sapien
atggtgatagtaaccacgattctttaattcaag

SEQ ID NO: 772690 - DNA, 33 bp, Homo sapien
atggtgatagtaaccatgattctttaattcaag

SEQ ID NO: 772691 - DNA, 33 bp, Homo sapien
tttctcagtccttaccagatacccaagcaatta

SEQ ID NO: 772692 - DNA, 33 bp, Homo sapien
tttctcagtccttaccggatacccaagcaatta

SEQ ID NO: 772693 - DNA, 33 bp, Homo sapien
ttatgttggagaggtccaagagctaatacactt

SEQ ID NO: 772694 - DNA, 33 bp, Homo sapien
ttatgttggagaggtctaagagctaatacactt

SEQ ID NO: 772695 - DNA, 33 bp, Homo sapien
tctcaaatctccataaaacttacaagagatgtt

SEQ ID NO: 772696 - DNA, 33 bp, Homo sapien
tctcaaatctccataacacttacaagagatgtt

SEQ ID NO: 772697 - DNA, 33 bp, Homo sapien
aaatctttacaacacaataagaggacaatccag

SEQ ID NO: 772698 - DNA, 33 bp, Homo sapien
aaatctttacaacacagtaagaggacaatccag

SEQ ID NO: 772699 - DNA, 33 bp, Homo sapien
atgggctaaatgttccaattaaaaaacacagac

SEQ ID NO: 772700 - DNA, 33 bp, Homo sapien
atgggctaaatgttccgattaaaaaacacagac

SEQ ID NO: 772701 - DNA, 33 bp, Homo sapien
tttaacttagcatttccgaaacctatcttacta

SEQ ID NO: 772702 - DNA, 33 bp, Homo sapien
tttaacttagcatttctgaaacctatcttacta

SEQ ID NO: 772703 - DNA, 33 bp, Homo sapien
caacaggtgaagctgacgccaactattagtgct

SEQ ID NO: 772704 - DNA, 33 bp, Homo sapien
caacaggtgaagctgatgccaactattagtgct

SEQ ID NO: 772705 - DNA, 33 bp, Homo sapien
caacacaacctcttaacaggctaattttaaaat

SEQ ID NO: 772706 - DNA, 33 bp, Homo sapien
caacacaacctcttaataggctaattttaaaat

SEQ ID NO: 772707 - DNA, 33 bp, Homo sapien
catagatcttataaaactttaactgagcattag

SEQ ID NO: 772708 - DNA, 33 bp, Homo sapien
catagatcttataaaagtttaactgagcattag

SEQ ID NO: 772709 - DNA, 33 bp, Homo sapien
acattatgcaactacaatgtaactcaacagata

SEQ ID NO: 772710 - DNA, 33 bp, Homo sapien
acattatgcaactacagtgtaactcaacagata

SEQ ID NO: 772711 - DNA, 33 bp, Homo sapien
gtcagtgtaagagttcaaaagaatatatacaaa

SEQ ID NO: 772712 - DNA, 33 bp, Homo sapien
gtcagtgtaagagttccaaagaatatatacaaa

SEQ ID NO: 772713 - DNA, 33 bp, Homo sapien
gaagcctgagtctgaaaagctttgggaacttgg

SEQ ID NO: 772714 - DNA, 33 bp, Homo sapien
gaagcctgagtctgaacagctttgggaacttgg

SEQ ID NO: 772715 - DNA, 33 bp, Homo sapien
tagctttatttctgagaatacctcaatttcaaa

SEQ ID NO: 772716 - DNA, 33 bp, Homo sapien
tagctttatttctgaggatacctcaatttcaaa

SEQ ID NO: 772717 - DNA, 33 bp, Homo sapien
ttatttacatctaagactatcccatccaagact

SEQ ID NO: 772718 - DNA, 33 bp, Homo sapien
ttatttacatctaagattatcccatccaagact

SEQ ID NO: 772719 - DNA, 33 bp, Homo sapien
taaatggcttatttcacataatacaactagaac

SEQ ID NO: 772720 - DNA, 33 bp, Homo sapien
taaatggcttatttcagataatacaactagaac

SEQ ID NO: 772721 - DNA, 33 bp, Homo sapien
agtgcagaaactcaaccgactggacgctgagac

SEQ ID NO: 772722 - DNA, 33 bp, Homo sapien
agtgcagaaactcaactgactggacgctgagac

SEQ ID NO: 772723 - DNA, 33 bp, Homo sapien
ggtgccaagctagtcaatcagtggcaaagctca

SEQ ID NO: 772724 - DNA, 33 bp, Homo sapien
ggtgccaagctagtcagtcagtggcaaagctca

SEQ ID NO: 772725 - DNA, 33 bp, Homo sapien
tggggtttatggaagcaccaaaacatgatgtag

SEQ ID NO: 772726 - DNA, 33 bp, Homo sapien
tggggtttatggaagcgccaaaacatgatgtag

SEQ ID NO: 772727 - DNA, 33 bp, Homo sapien
agatgcaatctttaacactggaaatctcttgct

SEQ ID NO: 772728 - DNA, 33 bp, Homo sapien
agatgcaatctttaacgctggaaatctcttgct

SEQ ID NO: 772729 - DNA, 33 bp, Homo sapien
ttaacctcggactgccaactttcagattttaca

SEQ ID NO: 772730 - DNA, 33 bp, Homo sapien
ttaacctcggactgcctactttcagattttaca

SEQ ID NO: 772731 - DNA, 33 bp, Homo sapien
gttggatctctattaaacctctctaaaatgtca

SEQ ID NO: 772732 - DNA, 33 bp, Homo sapien
gttggatctctattaatcctctctaaaatgtca

SEQ ID NO: 772733 - DNA, 33 bp, Homo sapien
attgacttgaggtccagggcttaaaactgccta

SEQ ID NO: 772734 - DNA, 33 bp, Homo sapien
attgacttgaggtccatggcttaaaactgccta

SEQ ID NO: 772735 - DNA, 33 bp, Homo sapien
caatcatgttaaatcaaatgaaatctatatcct

SEQ ID NO: 772736 - DNA, 33 bp, Homo sapien
caatcatgttaaatcagatgaaatctatatcct

SEQ ID NO: 772737 - DNA, 33 bp, Homo sapien
aaatgagtgaacaaaagaacaaatgaataaaaa

SEQ ID NO: 772738 - DNA, 33 bp, Homo sapien
aaatgagtgaacaaaataacaaatgaataaaaa

SEQ ID NO: 772739 - DNA, 33 bp, Homo sapien
agcaaattagaattgaaactccattatgtctct

SEQ ID NO: 772740 - DNA, 33 bp, Homo sapien
agcaaattagaattgacactccattatgtctct

SEQ ID NO: 772741 - DNA, 33 bp, Homo sapien
aagcaaatcacaccaaagcataatcattgaaga

SEQ ID NO: 772742 - DNA, 33 bp, Homo sapien
aagcaaatcacaccaaggcataatcattgaaga

SEQ ID NO: 772743 - DNA, 33 bp, Homo sapien
tactacacaaacgggaagaggagtaaaagtgag

SEQ ID NO: 772744 - DNA, 33 bp, Homo sapien
tactacacaaacgggaggaggagtaaaagtgag

SEQ ID NO: 772745 - DNA, 33 bp, Homo sapien
gcgcaaacagaggaaacggcaaggaataagact

SEQ ID NO: 772746 - DNA, 33 bp, Homo sapien
gcgcaaacagaggaaatggcaaggaataagact

SEQ ID NO: 772747 - DNA, 33 bp, Homo sapien
gcctctaaaatccagacatgtttttataatcaa

SEQ ID NO: 772748 - DNA, 33 bp, Homo sapien
gcctctaaaatccagatatgtttttataatcaa

SEQ ID NO: 772749 - DNA, 33 bp, Homo sapien
gaactatgtcaaaaagcccatttgttcctaaac

SEQ ID NO: 772750 - DNA, 33 bp, Homo sapien
gaactatgtcaaaaagtccatttgttcctaaac

SEQ ID NO: 772751 - DNA, 33 bp, Homo sapien
ctcctgtactagactggaaactaccatgtggaa

SEQ ID NO: 772752 - DNA, 33 bp, Homo sapien
ctcctgtactagactgtaaactaccatgtggaa

SEQ ID NO: 772753 - DNA, 33 bp, Homo sapien
tggtcttctttttaacacttctttctctcattc

SEQ ID NO: 772754 - DNA, 33 bp, Homo sapien
tggtcttctttttaactcttctttctctcattc

SEQ ID NO: 772755 - DNA, 33 bp, Homo sapien
gatgtgtttttgataacagagtaggcaaaaaac

SEQ ID NO: 772756 - DNA, 33 bp, Homo sapien
gatgtgtttttgataatagagtaggcaaaaaac

SEQ ID NO: 772757 - DNA, 33 bp, Homo sapien
caccaactgagatatacaaggaggcacaaattt

SEQ ID NO: 772758 - DNA, 33 bp, Homo sapien
caccaactgagatatataaggaggcacaaattt

SEQ ID NO: 772759 - DNA, 33 bp, Homo sapien
atcaacacacatttaaagcatatcagttttacc

SEQ ID NO: 772760 - DNA, 33 bp, Homo sapien
atcaacacacatttaaggcatatcagttttacc

SEQ ID NO: 772761 - DNA, 33 bp, Homo sapien
cattccatcatcaagcgaaatgaccttgactct

SEQ ID NO: 772762 - DNA, 33 bp, Homo sapien
cattccatcatcaagctaaatgaccttgactct

SEQ ID NO: 772763 - DNA, 33 bp, Homo sapien
cagtctgatttgacaacggtaacaagtcaacac

SEQ ID NO: 772764 - DNA, 33 bp, Homo sapien
cagtctgatttgacaatggtaacaagtcaacac

SEQ ID NO: 772765 - DNA, 33 bp, Homo sapien
aacattagcattatgaccagtgtatgtcaaaga

SEQ ID NO: 772766 - DNA, 33 bp, Homo sapien
aacattagcattatgatcagtgtatgtcaaaga

SEQ ID NO: 772767 - DNA, 33 bp, Homo sapien
cagaggccattgcccacgctaagcccgcaagga

SEQ ID NO: 772768 - DNA, 33 bp, Homo sapien
cagaggccattgcccaggctaagcccgcaagga

SEQ ID NO: 772769 - DNA, 33 bp, Homo sapien
ggagaagaaagggtgaacaatttttctgtgcat

SEQ ID NO: 772770 - DNA, 33 bp, Homo sapien
ggagaagaaagggtgagcaatttttctgtgcat

SEQ ID NO: 772771 - DNA, 33 bp, Homo sapien
taggttataattgaaagtggactctgtggaaca

SEQ ID NO: 772772 - DNA, 33 bp, Homo sapien
taggttataattgaaattggactctgtggaaca

SEQ ID NO: 772773 - DNA, 33 bp, Homo sapien
agttgaaggaagatagcagtcaggagcattggt

SEQ ID NO: 772774 - DNA, 33 bp, Homo sapien
agttgaaggaagatagtagtcaggagcattggt

SEQ ID NO: 772775 - DNA, 33 bp, Homo sapien
taaagaaagctcttagaccaggcatcatctcaa

SEQ ID NO: 772776 - DNA, 33 bp, Homo sapien
taaagaaagctcttagcccaggcatcatctcaa

SEQ ID NO: 772777 - DNA, 33 bp, Homo sapien
ctgattttaaaagtagaacttgtatgcatatat

SEQ ID NO: 772778 - DNA, 33 bp, Homo sapien
ctgattttaaaagtagcacttgtatgcatatat

SEQ ID NO: 772779 - DNA, 33 bp, Homo sapien
aataacctatcatctacggagttcctatttaaa

SEQ ID NO: 772780 - DNA, 33 bp, Homo sapien
aataacctatcatctatggagttcctatttaaa

SEQ ID NO: 772781 - DNA, 33 bp, Homo sapien
gcttgaatgatactggaatggagatttaggaga

SEQ ID NO: 772782 - DNA, 33 bp, Homo sapien
gcttgaatgatactgggatggagatttaggaga

SEQ ID NO: 772783 - DNA, 33 bp, Homo sapien
gagcctacaaatttacaaatacaatgaggtaac

SEQ ID NO: 772784 - DNA, 33 bp, Homo sapien
gagcctacaaatttacgaatacaatgaggtaac

SEQ ID NO: 772785 - DNA, 33 bp, Homo sapien
gtaatgtagtactttgaactcatattactcagg

SEQ ID NO: 772786 - DNA, 33 bp, Homo sapien
gtaatgtagtactttggactcatattactcagg

SEQ ID NO: 772787 - DNA, 33 bp, Homo sapien
tctgagtcacttatacaatcgagtccctgaaca

SEQ ID NO: 772788 - DNA, 33 bp, Homo sapien
tctgagtcacttataccatcgagtccctgaaca

SEQ ID NO: 772789 - DNA, 33 bp, Homo sapien
ccgtgcctggccaatcgaattgatttttaaatg

SEQ ID NO: 772790 - DNA, 33 bp, Homo sapien
ccgtgcctggccaatctaattgatttttaaatg

SEQ ID NO: 772791 - DNA, 33 bp, Homo sapien
atttagtcaattggcaagtagaaaattaaaaag

SEQ ID NO: 772792 - DNA, 33 bp, Homo sapien
atttagtcaattggcacgtagaaaattaaaaag

SEQ ID NO: 772793 - DNA, 33 bp, Homo sapien
aaatcgataccaataaccttaggagcaatgaaa

SEQ ID NO: 772794 - DNA, 33 bp, Homo sapien
aaatcgataccaataatcttaggagcaatgaaa

SEQ ID NO: 772795 - DNA, 33 bp, Homo sapien
tcatctgtcattagaggaggtatcgaggcaacc

SEQ ID NO: 772796 - DNA, 33 bp, Homo sapien
tcatctgtcattagagtaggtatcgaggcaacc

SEQ ID NO: 772797 - DNA, 33 bp, Homo sapien
ctgacttgttaacacactactgcttcttgtcac

SEQ ID NO: 772798 - DNA, 33 bp, Homo sapien
ctgacttgttaacacattactgcttcttgtcac

SEQ ID NO: 772799 - DNA, 33 bp, Homo sapien
tgggtaccagcatttaaatctgtggcaggtaaa

SEQ ID NO: 772800 - DNA, 33 bp, Homo sapien
tgggtaccagcatttatatctgtggcaggtaaa

SEQ ID NO: 772801 - DNA, 33 bp, Homo sapien
acttccatcagagagtaaaatccaagttcttgt

SEQ ID NO: 772802 - DNA, 33 bp, Homo sapien
acttccatcagagagtgaaatccaagttcttgt

SEQ ID NO: 772803 - DNA, 33 bp, Homo sapien
cggtgttctaccaacaggctgaatttaatcctg

SEQ ID NO: 772804 - DNA, 33 bp, Homo sapien
cggtgttctaccaacatgctgaatttaatcctg

SEQ ID NO: 772805 - DNA, 33 bp, Homo sapien
caagggcatgactgccaatgagtaacttaagtt

SEQ ID NO: 772806 - DNA, 33 bp, Homo sapien
caagggcatgactgccgatgagtaacttaagtt

SEQ ID NO: 772807 - DNA, 33 bp, Homo sapien
ttttgaaacatggaaacatgagatctgcatgta

SEQ ID NO: 772808 - DNA, 33 bp, Homo sapien
ttttgaaacatggaaatatgagatctgcatgta

SEQ ID NO: 772809 - DNA, 33 bp, Homo sapien
caagtaaggaatatcaaccactgggctttgctt

SEQ ID NO: 772810 - DNA, 33 bp, Homo sapien
caagtaaggaatatcatccactgggctttgctt

SEQ ID NO: 772811 - DNA, 33 bp, Homo sapien
aagctaagactgacaaccaaaagtaaatattta

SEQ ID NO: 772812 - DNA, 33 bp, Homo sapien
aagctaagactgacaagcaaaagtaaatattta

SEQ ID NO: 772813 - DNA, 33 bp, Homo sapien
tctttctacattggagaagagtgatacagttga

SEQ ID NO: 772814 - DNA, 33 bp, Homo sapien
tctttctacattggaggagagtgatacagttga

SEQ ID NO: 772815 - DNA, 33 bp, Homo sapien
acttaaacatatcagaacagctttgcaaaacaa

SEQ ID NO: 772816 - DNA, 33 bp, Homo sapien
acttaaacatatcagaccagctttgcaaaacaa

SEQ ID NO: 772817 - DNA, 33 bp, Homo sapien
gagagtgagaacagtacgaccagaagtatcttt

SEQ ID NO: 772818 - DNA, 33 bp, Homo sapien
gagagtgagaacagtatgaccagaagtatcttt

SEQ ID NO: 772819 - DNA, 33 bp, Homo sapien
ttgctgagcacctgtcaatgtcttgtaaatcag

SEQ ID NO: 772820 - DNA, 33 bp, Homo sapien
ttgctgagcacctgtcgatgtcttgtaaatcag

SEQ ID NO: 772821 - DNA, 33 bp, Homo sapien
caagcatagaccagagaccattatttgagacca

SEQ ID NO: 772822 - DNA, 33 bp, Homo sapien
caagcatagaccagaggccattatttgagacca

SEQ ID NO: 772823 - DNA, 33 bp, Homo sapien
gatacaatgttctccaaagtccagagcagggtc

SEQ ID NO: 772824 - DNA, 33 bp, Homo sapien
gatacaatgttctccagagtccagagcagggtc

SEQ ID NO: 772825 - DNA, 33 bp, Homo sapien
cctatacctggtgtgagaattatgctagatatt

SEQ ID NO: 772826 - DNA, 33 bp, Homo sapien
cctatacctggtgtgataattatgctagatatt

SEQ ID NO: 772827 - DNA, 33 bp, Homo sapien
ctgaggcttgcagagagaaaatcacctgcacac

SEQ ID NO: 772828 - DNA, 33 bp, Homo sapien
ctgaggcttgcagagataaaatcacctgcacac

SEQ ID NO: 772829 - DNA, 33 bp, Homo sapien
gggtagattcaggtagacagataatagaaaggg

SEQ ID NO: 772830 - DNA, 33 bp, Homo sapien
gggtagattcaggtagtcagataatagaaaggg

SEQ ID NO: 772831 - DNA, 33 bp, Homo sapien
catcatgggcattcaacatctgtcctttgcatg

SEQ ID NO: 772832 - DNA, 33 bp, Homo sapien
catcatgggcattcaatatctgtcctttgcatg

SEQ ID NO: 772833 - DNA, 33 bp, Homo sapien
ctgctacattacctacaagtttatcccaatcca

SEQ ID NO: 772834 - DNA, 33 bp, Homo sapien
ctgctacattacctacgagtttatcccaatcca

SEQ ID NO: 772835 - DNA, 33 bp, Homo sapien
tccgtctatcagtcaaatattagacacatctat

SEQ ID NO: 772836 - DNA, 33 bp, Homo sapien
tccgtctatcagtcaagtattagacacatctat

SEQ ID NO: 772837 - DNA, 33 bp, Homo sapien
aagaaatggcaagtaacgttaagagacaaaatc

SEQ ID NO: 772838 - DNA, 33 bp, Homo sapien
aagaaatggcaagtaatgttaagagacaaaatc

SEQ ID NO: 772839 - DNA, 33 bp, Homo sapien
ttgtaagtctcagcaactgacgaggctaggctg

SEQ ID NO: 772840 - DNA, 33 bp, Homo sapien
ttgtaagtctcagcaattgacgaggctaggctg

SEQ ID NO: 772841 - DNA, 33 bp, Homo sapien
atttctatcaacaggcaaatagataaagaaaat

SEQ ID NO: 772842 - DNA, 33 bp, Homo sapien
atttctatcaacaggcgaatagataaagaaaat

SEQ ID NO: 772843 - DNA, 33 bp, Homo sapien
aagattatgtagaatgcattgtttggcaaaaag

SEQ ID NO: 772844 - DNA, 33 bp, Homo sapien
aagattatgtagaatgtattgtttggcaaaaag

SEQ ID NO: 772845 - DNA, 33 bp, Homo sapien
ctattctggtgaattaaacgtataagcagcctg

SEQ ID NO: 772846 - DNA, 33 bp, Homo sapien
ctattctggtgaattagacgtataagcagcctg

SEQ ID NO: 772847 - DNA, 33 bp, Homo sapien
ttagctttcttaaacaatggcatttatagatat

SEQ ID NO: 772848 - DNA, 33 bp, Homo sapien
ttagctttcttaaacagtggcatttatagatat

SEQ ID NO: 772849 - DNA, 33 bp, Homo sapien
tgaagataacaagctacggggctttgcaataat

SEQ ID NO: 772850 - DNA, 33 bp, Homo sapien
tgaagataacaagctatggggctttgcaataat

SEQ ID NO: 772851 - DNA, 33 bp, Homo sapien
aactgaatggtctctgaatctggtagctaaaag

SEQ ID NO: 772852 - DNA, 33 bp, Homo sapien
aactgaatggtctctggatctggtagctaaaag

SEQ ID NO: 772853 - DNA, 33 bp, Homo sapien
gtatccattaaactaacctttaaaagcacaggg

SEQ ID NO: 772854 - DNA, 33 bp, Homo sapien
gtatccattaaactaatctttaaaagcacaggg

SEQ ID NO: 772855 - DNA, 33 bp, Homo sapien
ggaaagttggcttcaactatatatttcacttct

SEQ ID NO: 772856 - DNA, 33 bp, Homo sapien
ggaaagttggcttcaattatatatttcacttct

SEQ ID NO: 772857 - DNA, 33 bp, Homo sapien
gtgataacggagctctcaagactggaaactggg

SEQ ID NO: 772858 - DNA, 33 bp, Homo sapien
gtgataacggagctctgaagactggaaactggg

SEQ ID NO: 772859 - DNA, 33 bp, Homo sapien
agatagagtggaaagacggttatcagaacctag

SEQ ID NO: 772860 - DNA, 33 bp, Homo sapien
agatagagtggaaagatggttatcagaacctag

SEQ ID NO: 772861 - DNA, 33 bp, Homo sapien
ccatcagccaattaacagataaagaaaatatgg

SEQ ID NO: 772862 - DNA, 33 bp, Homo sapien
ccatcagccaattaacggataaagaaaatatgg

SEQ ID NO: 772863 - DNA, 33 bp, Homo sapien
acattgataattgagcagattcttttgaatgtt

SEQ ID NO: 772864 - DNA, 33 bp, Homo sapien
acattgataattgagcggattcttttgaatgtt

SEQ ID NO: 772865 - DNA, 33 bp, Homo sapien
tgccttactgaaagcactgaattagatggcata

SEQ ID NO: 772866 - DNA, 33 bp, Homo sapien
tgccttactgaaagcattgaattagatggcata

SEQ ID NO: 772867 - DNA, 33 bp, Homo sapien
aaaaggaagcagagtaacctcacacttgccatg

SEQ ID NO: 772868 - DNA, 33 bp, Homo sapien
aaaaggaagcagagtatcctcacacttgccatg

SEQ ID NO: 772869 - DNA, 33 bp, Homo sapien
atggagttgacctctcgagctcagagaatcttc

SEQ ID NO: 772870 - DNA, 33 bp, Homo sapien
atggagttgacctctctagctcagagaatcttc

SEQ ID NO: 772871 - DNA, 33 bp, Homo sapien
tcttgtaaaatcttcaaatgtgcctattgtagt

SEQ ID NO: 772872 - DNA, 33 bp, Homo sapien
tcttgtaaaatcttcagatgtgcctattgtagt

SEQ ID NO: 772873 - DNA, 33 bp, Homo sapien
gaataattgacctttcaatcaagtagactcata

SEQ ID NO: 772874 - DNA, 33 bp, Homo sapien
gaataattgacctttcgatcaagtagactcata

SEQ ID NO: 772875 - DNA, 33 bp, Homo sapien
actttcacaggaaaaacaattggtgtcaggtat

SEQ ID NO: 772876 - DNA, 33 bp, Homo sapien
actttcacaggaaaaagaattggtgtcaggtat

SEQ ID NO: 772877 - DNA, 33 bp, Homo sapien
gagaggttttcgtgaccgtaccttcaccccaag

SEQ ID NO: 772878 - DNA, 33 bp, Homo sapien
gagaggttttcgtgactgtaccttcaccccaag

SEQ ID NO: 772879 - DNA, 33 bp, Homo sapien
cactcccttgttcagaaaaacttggtaagtttt

SEQ ID NO: 772880 - DNA, 33 bp, Homo sapien
cactcccttgttcagagaaacttggtaagtttt

SEQ ID NO: 772881 - DNA, 33 bp, Homo sapien
ctttcaaattagttcaaaaatcaatgtaacaga

SEQ ID NO: 772882 - DNA, 33 bp, Homo sapien
ctttcaaattagttcataaatcaatgtaacaga

SEQ ID NO: 772883 - DNA, 33 bp, Homo sapien
tattatgattttataaaagattgacacaacata

SEQ ID NO: 772884 - DNA, 33 bp, Homo sapien
tattatgattttataagagattgacacaacata

SEQ ID NO: 772885 - DNA, 33 bp, Homo sapien
cagactgacctggactgaaatcctagttctact

SEQ ID NO: 772886 - DNA, 33 bp, Homo sapien
cagactgacctggacttaaatcctagttctact

SEQ ID NO: 772887 - DNA, 33 bp, Homo sapien
aaaaaatattgccttcacaccatcctgtaagct

SEQ ID NO: 772888 - DNA, 33 bp, Homo sapien
aaaaaatattgccttcgcaccatcctgtaagct

SEQ ID NO: 772889 - DNA, 33 bp, Homo sapien
caattaactgagagtacggcagtctttagcacg

SEQ ID NO: 772890 - DNA, 33 bp, Homo sapien
caattaactgagagtatggcagtctttagcacg

SEQ ID NO: 772891 - DNA, 33 bp, Homo sapien
ggaacaatgcctggtaaatagaagctattcaaa

SEQ ID NO: 772892 - DNA, 33 bp, Homo sapien
ggaacaatgcctggtatatagaagctattcaaa

SEQ ID NO: 772893 - DNA, 33 bp, Homo sapien
atttgaattaggatcacgtaatgtaaaaaaatc

SEQ ID NO: 772894 - DNA, 33 bp, Homo sapien
atttgaattaggatcatgtaatgtaaaaaaatc

SEQ ID NO: 772895 - DNA, 33 bp, Homo sapien
atgtcccttcataaaaaccatttctctgtgtca

SEQ ID NO: 772896 - DNA, 33 bp, Homo sapien
atgtcccttcataaaatccatttctctgtgtca

SEQ ID NO: 772897 - DNA, 33 bp, Homo sapien
cagcagtgaatgaaacagacaaaaattctaccc

SEQ ID NO: 772898 - DNA, 33 bp, Homo sapien
cagcagtgaatgaaaccgacaaaaattctaccc

SEQ ID NO: 772899 - DNA, 33 bp, Homo sapien
tgtaggattaatttaacgagtctggaggttgat

SEQ ID NO: 772900 - DNA, 33 bp, Homo sapien
tgtaggattaatttaatgagtctggaggttgat

SEQ ID NO: 772901 - DNA, 33 bp, Homo sapien
aaataccaggctgtcaaaacatcttggcccaga

SEQ ID NO: 772902 - DNA, 33 bp, Homo sapien
aaataccaggctgtcagaacatcttggcccaga

SEQ ID NO: 772903 - DNA, 33 bp, Homo sapien
atcgctggagcccaaaagttcaaggttacagtg

SEQ ID NO: 772904 - DNA, 33 bp, Homo sapien
atcgctggagcccaaacgttcaaggttacagtg

SEQ ID NO: 772905 - DNA, 33 bp, Homo sapien
tctcttgcattattaaaggagtgatctccccca

SEQ ID NO: 772906 - DNA, 33 bp, Homo sapien
tctcttgcattattaatggagtgatctccccca

SEQ ID NO: 772907 - DNA, 33 bp, Homo sapien
ctctggggtattacaccgaaatgttaggggttc

SEQ ID NO: 772908 - DNA, 33 bp, Homo sapien
ctctggggtattacactgaaatgttaggggttc

SEQ ID NO: 772909 - DNA, 33 bp, Homo sapien
tcagctctcactctaaagatgatttataactag

SEQ ID NO: 772910 - DNA, 33 bp, Homo sapien
tcagctctcactctaaggatgatttataactag

SEQ ID NO: 772911 - DNA, 33 bp, Homo sapien
agctgaagtgagataacttaacctgaacagcac

SEQ ID NO: 772912 - DNA, 33 bp, Homo sapien
agctgaagtgagataatttaacctgaacagcac

SEQ ID NO: 772913 - DNA, 33 bp, Homo sapien
aataaagttgcaagacacaaattcaacatataa

SEQ ID NO: 772914 - DNA, 33 bp, Homo sapien
aataaagttgcaagacgcaaattcaacatataa

SEQ ID NO: 772915 - DNA, 33 bp, Homo sapien
tgacagggatgtccatcaccccttgagcaatca

SEQ ID NO: 772916 - DNA, 33 bp, Homo sapien
tgacagggatgtccattaccccttgagcaatca

SEQ ID NO: 772917 - DNA, 33 bp, Homo sapien
tgtcttctattctttaccgtcatttgacaagag

SEQ ID NO: 772918 - DNA, 33 bp, Homo sapien
tgtcttctattctttatcgtcatttgacaagag

SEQ ID NO: 772919 - DNA, 33 bp, Homo sapien
cattaatggattcgctcacttattaaatatcaa

SEQ ID NO: 772920 - DNA, 33 bp, Homo sapien
cattaatggattcgctgacttattaaatatcaa

SEQ ID NO: 772921 - DNA, 33 bp, Homo sapien
acacatccacaattaccctctgcttagggcaag

SEQ ID NO: 772922 - DNA, 33 bp, Homo sapien
acacatccacaattacgctctgcttagggcaag

SEQ ID NO: 772923 - DNA, 33 bp, Homo sapien
agtccttcccaaatcaatccaactcttaaagtg

SEQ ID NO: 772924 - DNA, 33 bp, Homo sapien
agtccttcccaaatcagtccaactcttaaagtg

SEQ ID NO: 772925 - DNA, 33 bp, Homo sapien
attttcaacttcctccaagaatgatgctttctt

SEQ ID NO: 772926 - DNA, 33 bp, Homo sapien
attttcaacttcctcctagaatgatgctttctt

SEQ ID NO: 772927 - DNA, 33 bp, Homo sapien
gaaaaaaagcagggtacgaagatccagaagaca

SEQ ID NO: 772928 - DNA, 33 bp, Homo sapien
gaaaaaaagcagggtatgaagatccagaagaca

SEQ ID NO: 772929 - DNA, 33 bp, Homo sapien
ttttgcgacaccttaacagtagttttatttcat

SEQ ID NO: 772930 - DNA, 33 bp, Homo sapien
ttttgcgacaccttaatagtagttttatttcat

SEQ ID NO: 772931 - DNA, 33 bp, Homo sapien
tcttcagactctcaaacgaaggagtatgtccaa

SEQ ID NO: 772932 - DNA, 33 bp, Homo sapien
tcttcagactctcaaatgaaggagtatgtccaa

SEQ ID NO: 772933 - DNA, 33 bp, Homo sapien
cttgaaggaaaaacaaatatctggttctggcat

SEQ ID NO: 772934 - DNA, 33 bp, Homo sapien
cttgaaggaaaaacaagtatctggttctggcat

SEQ ID NO: 772935 - DNA, 33 bp, Homo sapien
attaagactggatttaaactatgcttacaagtt

SEQ ID NO: 772936 - DNA, 33 bp, Homo sapien
attaagactggatttagactatgcttacaagtt

SEQ ID NO: 772937 - DNA, 33 bp, Homo sapien
gtatggtgcattataacccaagtggtggaaaaa

SEQ ID NO: 772938 - DNA, 33 bp, Homo sapien
gtatggtgcattataatccaagtggtggaaaaa

SEQ ID NO: 772939 - DNA, 33 bp, Homo sapien
cttttgtatgtactggaaaaccaaaatgtgtgt

SEQ ID NO: 772940 - DNA, 33 bp, Homo sapien
cttttgtatgtactgggaaaccaaaatgtgtgt

SEQ ID NO: 772941 - DNA, 33 bp, Homo sapien
cctccattacttaatccgactatcatagaatag

SEQ ID NO: 772942 - DNA, 33 bp, Homo sapien
cctccattacttaatctgactatcatagaatag

SEQ ID NO: 772943 - DNA, 33 bp, Homo sapien
tgtggtctccttcctaaataactgtaataagga

SEQ ID NO: 772944 - DNA, 33 bp, Homo sapien
tgtggtctccttcctagataactgtaataagga

SEQ ID NO: 772945 - DNA, 33 bp, Homo sapien
tatgcattcctgatagacaactcttaggctgga

SEQ ID NO: 772946 - DNA, 33 bp, Homo sapien
tatgcattcctgataggcaactcttaggctgga

SEQ ID NO: 772947 - DNA, 33 bp, Homo sapien
gaaatttgtttctcccccatctccatactgact

SEQ ID NO: 772948 - DNA, 33 bp, Homo sapien
gaaatttgtttctcccgcatctccatactgact

SEQ ID NO: 772949 - DNA, 33 bp, Homo sapien
tggcacttaagagtgaacgccagaaggtagggg

SEQ ID NO: 772950 - DNA, 33 bp, Homo sapien
tggcacttaagagtgagcgccagaaggtagggg

SEQ ID NO: 772951 - DNA, 33 bp, Homo sapien
actcacttctccactccgacttcactggtgttc

SEQ ID NO: 772952 - DNA, 33 bp, Homo sapien
actcacttctccactctgacttcactggtgttc

SEQ ID NO: 772953 - DNA, 33 bp, Homo sapien
agcttgatgtactttaacacatattatcttttt

SEQ ID NO: 772954 - DNA, 33 bp, Homo sapien
agcttgatgtactttatcacatattatcttttt

SEQ ID NO: 772955 - DNA, 33 bp, Homo sapien
tgttgctaaatttcagacactattctttaagtc

SEQ ID NO: 772956 - DNA, 33 bp, Homo sapien
tgttgctaaatttcaggcactattctttaagtc

SEQ ID NO: 772957 - DNA, 33 bp, Homo sapien
tatttatgagaataaacaggcctaagggattgc

SEQ ID NO: 772958 - DNA, 33 bp, Homo sapien
tatttatgagaataaagaggcctaagggattgc

SEQ ID NO: 772959 - DNA, 33 bp, Homo sapien
agtattcactgccaagccctctggtgccatgtc

SEQ ID NO: 772960 - DNA, 33 bp, Homo sapien
agtattcactgccaagtcctctggtgccatgtc

SEQ ID NO: 772961 - DNA, 33 bp, Homo sapien
gtgcttagctgtgaccccagaggaatttcagca

SEQ ID NO: 772962 - DNA, 33 bp, Homo sapien
gtgcttagctgtgaccgcagaggaatttcagca

SEQ ID NO: 772963 - DNA, 33 bp, Homo sapien
tgagaggaacagcataaaaaatgatccgcaaaa

SEQ ID NO: 772964 - DNA, 33 bp, Homo sapien
tgagaggaacagcatacaaaatgatccgcaaaa

SEQ ID NO: 772965 - DNA, 33 bp, Homo sapien
tgctaacctcattcacagtaatcacagataatg

SEQ ID NO: 772966 - DNA, 33 bp, Homo sapien
tgctaacctcattcacggtaatcacagataatg

SEQ ID NO: 772967 - DNA, 33 bp, Homo sapien
ccataaaggatttagaccaaaacagaataaaac

SEQ ID NO: 772968 - DNA, 33 bp, Homo sapien
ccataaaggatttagatcaaaacagaataaaac

SEQ ID NO: 772969 - DNA, 33 bp, Homo sapien
ctgaggacaccagaggaagatttgggattaatg

SEQ ID NO: 772970 - DNA, 33 bp, Homo sapien
ctgaggacaccagagggagatttgggattaatg

SEQ ID NO: 772971 - DNA, 33 bp, Homo sapien
gaccgatcagaagttggcaacaggccagtgcta

SEQ ID NO: 772972 - DNA, 33 bp, Homo sapien
gaccgatcagaagttgtcaacaggccagtgcta

SEQ ID NO: 772973 - DNA, 33 bp, Homo sapien
gcctcacagttaaggacattttagctattcaag

SEQ ID NO: 772974 - DNA, 33 bp, Homo sapien
gcctcacagttaaggatattttagctattcaag

SEQ ID NO: 772975 - DNA, 33 bp, Homo sapien
catctggtacctgtcacggaatttgataattct

SEQ ID NO: 772976 - DNA, 33 bp, Homo sapien
catctggtacctgtcatggaatttgataattct

SEQ ID NO: 772977 - DNA, 33 bp, Homo sapien
agtgaaatccaccaaactctatcatttgcaaat

SEQ ID NO: 772978 - DNA, 33 bp, Homo sapien
agtgaaatccaccaaagtctatcatttgcaaat

SEQ ID NO: 772979 - DNA, 33 bp, Homo sapien
gcttatatcattgcccacaaatggaaatgtagc

SEQ ID NO: 772980 - DNA, 33 bp, Homo sapien
gcttatatcattgcccgcaaatggaaatgtagc

SEQ ID NO: 772981 - DNA, 33 bp, Homo sapien
ttcccttgattcctcaaatgtttgccatttaac

SEQ ID NO: 772982 - DNA, 33 bp, Homo sapien
ttcccttgattcctcagatgtttgccatttaac

SEQ ID NO: 772983 - DNA, 33 bp, Homo sapien
atgcaacgtaagctggcagggtcgactgtaaac

SEQ ID NO: 772984 - DNA, 33 bp, Homo sapien
atgcaacgtaagctgggagggtcgactgtaaac

SEQ ID NO: 772985 - DNA, 33 bp, Homo sapien
aattttagcctataataacggtgctttctacac

SEQ ID NO: 772986 - DNA, 33 bp, Homo sapien
aattttagcctataatgacggtgctttctacac

SEQ ID NO: 772987 - DNA, 33 bp, Homo sapien
aggcccaagaattatactaacaggagtttgaac

SEQ ID NO: 772988 - DNA, 33 bp, Homo sapien
aggcccaagaattatagtaacaggagtttgaac

SEQ ID NO: 772989 - DNA, 33 bp, Homo sapien
gggaagactttgtgcactgagacttagacaagt

SEQ ID NO: 772990 - DNA, 33 bp, Homo sapien
gggaagactttgtgcattgagacttagacaagt

SEQ ID NO: 772991 - DNA, 33 bp, Homo sapien
atcatagtgatattcaaattaactacatatata

SEQ ID NO: 772992 - DNA, 33 bp, Homo sapien
atcatagtgatattcagattaactacatatata

SEQ ID NO: 772993 - DNA, 33 bp, Homo sapien
tgcttctggagctctcaaattctaggaatctag

SEQ ID NO: 772994 - DNA, 33 bp, Homo sapien
tgcttctggagctctcgaattctaggaatctag

SEQ ID NO: 772995 - DNA, 33 bp, Homo sapien
ttcttgcccaaaggagccaggtttatgcttgct

SEQ ID NO: 772996 - DNA, 33 bp, Homo sapien
ttcttgcccaaaggagtcaggtttatgcttgct

SEQ ID NO: 772997 - DNA, 33 bp, Homo sapien
cttgctcatgaaagaacggaaaaactggacaaa

SEQ ID NO: 772998 - DNA, 33 bp, Homo sapien
cttgctcatgaaagaatggaaaaactggacaaa

SEQ ID NO: 772999 - DNA, 33 bp, Homo sapien
ctctttgtgtaagcacagtacaattagcatcga

SEQ ID NO: 773000 - DNA, 33 bp, Homo sapien
ctctttgtgtaagcacggtacaattagcatcga

SEQ ID NO: 773001 - DNA, 33 bp, Homo sapien
tgttatgcacttcaagaagagaagtatgccaag

SEQ ID NO: 773002 - DNA, 33 bp, Homo sapien
tgttatgcacttcaagcagagaagtatgccaag

SEQ ID NO: 773003 - DNA, 33 bp, Homo sapien
gtaataatgcatgagacagagtctagagaattt

SEQ ID NO: 773004 - DNA, 33 bp, Homo sapien
gtaataatgcatgagatagagtctagagaattt

SEQ ID NO: 773005 - DNA, 33 bp, Homo sapien
aaaccttcagcttccaaccttcttcagtcttat

SEQ ID NO: 773006 - DNA, 33 bp, Homo sapien
aaaccttcagcttccatccttcttcagtcttat

SEQ ID NO: 773007 - DNA, 33 bp, Homo sapien
tgttggtcccaagaacagtctcatatatgcctc

SEQ ID NO: 773008 - DNA, 33 bp, Homo sapien
tgttggtcccaagaacggtctcatatatgcctc

SEQ ID NO: 773009 - DNA, 33 bp, Homo sapien
ctcaaacaaatatacaatcataaggaaagttta

SEQ ID NO: 773010 - DNA, 33 bp, Homo sapien
ctcaaacaaatatacagtcataaggaaagttta

SEQ ID NO: 773011 - DNA, 33 bp, Homo sapien
atgagtaaacaataaaatcttgagatctctcaa

SEQ ID NO: 773012 - DNA, 33 bp, Homo sapien
atgagtaaacaataaagtcttgagatctctcaa

SEQ ID NO: 773013 - DNA, 33 bp, Homo sapien
tgtaggtgcctagaccaacatgacaacttgatt

SEQ ID NO: 773014 - DNA, 33 bp, Homo sapien
tgtaggtgcctagaccgacatgacaacttgatt

SEQ ID NO: 773015 - DNA, 33 bp, Homo sapien
gaaaactgagaaacaaataatctagtctgtact

SEQ ID NO: 773016 - DNA, 33 bp, Homo sapien
gaaaactgagaaacaagtaatctagtctgtact

SEQ ID NO: 773017 - DNA, 33 bp, Homo sapien
tcaacttgatgtaatacaaaaagtccagagtgt

SEQ ID NO: 773018 - DNA, 33 bp, Homo sapien
tcaacttgatgtaatataaaaagtccagagtgt

SEQ ID NO: 773019 - DNA, 33 bp, Homo sapien
taacaaggagatttcaatagtgtaacacataag

SEQ ID NO: 773020 - DNA, 33 bp, Homo sapien
taacaaggagatttcagtagtgtaacacataag

SEQ ID NO: 773021 - DNA, 33 bp, Homo sapien
aatgatcaaagctaaaattgtcagtaatggtac

SEQ ID NO: 773022 - DNA, 33 bp, Homo sapien
aatgatcaaagctaaatttgtcagtaatggtac

SEQ ID NO: 773023 - DNA, 33 bp, Homo sapien
acagtagggatgctaactccttatatccagagg

SEQ ID NO: 773024 - DNA, 33 bp, Homo sapien
acagtagggatgctaagtccttatatccagagg

SEQ ID NO: 773025 - DNA, 33 bp, Homo sapien
aactgtcaactcctaacgagctagtcaccctcc

SEQ ID NO: 773026 - DNA, 33 bp, Homo sapien
aactgtcaactcctaatgagctagtcaccctcc

SEQ ID NO: 773027 - DNA, 33 bp, Homo sapien
tatgattggcatgtgaactgaatgcaactggag

SEQ ID NO: 773028 - DNA, 33 bp, Homo sapien
tatgattggcatgtgatctgaatgcaactggag

SEQ ID NO: 773029 - DNA, 33 bp, Homo sapien
taaggcaatatatccacgtgcaattatggtcaa

SEQ ID NO: 773030 - DNA, 33 bp, Homo sapien
taaggcaatatatccatgtgcaattatggtcaa

SEQ ID NO: 773031 - DNA, 33 bp, Homo sapien
atgccacacaatattacgtaggtgacaagctaa

SEQ ID NO: 773032 - DNA, 33 bp, Homo sapien
atgccacacaatattatgtaggtgacaagctaa

SEQ ID NO: 773033 - DNA, 33 bp, Homo sapien
aggatataaacaattaaacaacgaaccagaact

SEQ ID NO: 773034 - DNA, 33 bp, Homo sapien
aggatataaacaattatacaacgaaccagaact

SEQ ID NO: 773035 - DNA, 33 bp, Homo sapien
gcccatgtggggctagaccatgtggcaagacct

SEQ ID NO: 773036 - DNA, 33 bp, Homo sapien
gcccatgtggggctaggccatgtggcaagacct

SEQ ID NO: 773037 - DNA, 33 bp, Homo sapien
agagaaaagctaagcacatggagcaccccatgt

SEQ ID NO: 773038 - DNA, 33 bp, Homo sapien
agagaaaagctaagcatatggagcaccccatgt

SEQ ID NO: 773039 - DNA, 33 bp, Homo sapien
catatgccctttattaccaagctacactgcttc

SEQ ID NO: 773040 - DNA, 33 bp, Homo sapien
catatgccctttattagcaagctacactgcttc

SEQ ID NO: 773041 - DNA, 33 bp, Homo sapien
ctcccttttggataacaaaacagcagaagacac

SEQ ID NO: 773042 - DNA, 33 bp, Homo sapien
ctcccttttggataacgaaacagcagaagacac

SEQ ID NO: 773043 - DNA, 33 bp, Homo sapien
taaggcaagaaagcacaactttaggacaatgcc

SEQ ID NO: 773044 - DNA, 33 bp, Homo sapien
taaggcaagaaagcacgactttaggacaatgcc

SEQ ID NO: 773045 - DNA, 33 bp, Homo sapien
gaattctccattgtgcaatttctagctcactgt

SEQ ID NO: 773046 - DNA, 33 bp, Homo sapien
gaattctccattgtgcgatttctagctcactgt

SEQ ID NO: 773047 - DNA, 33 bp, Homo sapien
ttagatgccatgttaaaggtgtgaactttatcc

SEQ ID NO: 773048 - DNA, 33 bp, Homo sapien
ttagatgccatgttaagggtgtgaactttatcc

SEQ ID NO: 773049 - DNA, 33 bp, Homo sapien
ttcaccagagattccactgactttgtagttcct

SEQ ID NO: 773050 - DNA, 33 bp, Homo sapien
ttcaccagagattccattgactttgtagttcct

SEQ ID NO: 773051 - DNA, 33 bp, Homo sapien
cataaatgggatttaaatctgtgtctatgaggt

SEQ ID NO: 773052 - DNA, 33 bp, Homo sapien
cataaatgggatttaattctgtgtctatgaggt

SEQ ID NO: 773053 - DNA, 33 bp, Homo sapien
aatgtgccatacaaaactgctattagttttaaa

SEQ ID NO: 773054 - DNA, 33 bp, Homo sapien
aatgtgccatacaaaattgctattagttttaaa

SEQ ID NO: 773055 - DNA, 33 bp, Homo sapien
atcctgcccctatacacgcagcaaaagaaagct

SEQ ID NO: 773056 - DNA, 33 bp, Homo sapien
atcctgcccctatacatgcagcaaaagaaagct

SEQ ID NO: 773057 - DNA, 33 bp, Homo sapien
tttaaatacgatttgaaatcaagagaaaaatta

SEQ ID NO: 773058 - DNA, 33 bp, Homo sapien
tttaaatacgatttgagatcaagagaaaaatta

SEQ ID NO: 773059 - DNA, 33 bp, Homo sapien
agattcagagtcagagaaccagagttagtgctc

SEQ ID NO: 773060 - DNA, 33 bp, Homo sapien
agattcagagtcagaggaccagagttagtgctc

SEQ ID NO: 773061 - DNA, 33 bp, Homo sapien
tatatgctgggtcaccactatggactgtattgc

SEQ ID NO: 773062 - DNA, 33 bp, Homo sapien
tatatgctgggtcaccgctatggactgtattgc

SEQ ID NO: 773063 - DNA, 33 bp, Homo sapien
gtaatttactgtggtccccaatgttgacacaag

SEQ ID NO: 773064 - DNA, 33 bp, Homo sapien
gtaatttactgtggtctccaatgttgacacaag

SEQ ID NO: 773065 - DNA, 33 bp, Homo sapien
tatcagattaaataaacagtagcctgtcattcc

SEQ ID NO: 773066 - DNA, 33 bp, Homo sapien
tatcagattaaataaagagtagcctgtcattcc

SEQ ID NO: 773067 - DNA, 33 bp, Homo sapien
gaatctggagggataactaggagccaggtaaga

SEQ ID NO: 773068 - DNA, 33 bp, Homo sapien
gaatctggagggataagtaggagccaggtaaga

SEQ ID NO: 773069 - DNA, 33 bp, Homo sapien
attaggttattatgtacggagaaggtggaggga

SEQ ID NO: 773070 - DNA, 33 bp, Homo sapien
attaggttattatgtatggagaaggtggaggga

SEQ ID NO: 773071 - DNA, 33 bp, Homo sapien
tgcttcagtagtattacctgaaattggtttcag

SEQ ID NO: 773072 - DNA, 33 bp, Homo sapien
tgcttcagtagtattatctgaaattggtttcag

SEQ ID NO: 773073 - DNA, 33 bp, Homo sapien
aggagtgctatgaagacaatgaaacaggtgagt

SEQ ID NO: 773074 - DNA, 33 bp, Homo sapien
aggagtgctatgaagataatgaaacaggtgagt

SEQ ID NO: 773075 - DNA, 33 bp, Homo sapien
aaactctgtatctgaaccttatcttgaaataat

SEQ ID NO: 773076 - DNA, 33 bp, Homo sapien
aaactctgtatctgaatcttatcttgaaataat

SEQ ID NO: 773077 - DNA, 33 bp, Homo sapien
ttccatcctaaaacaaagtcaaacttcttaagc

SEQ ID NO: 773078 - DNA, 33 bp, Homo sapien
ttccatcctaaaacaaggtcaaacttcttaagc

SEQ ID NO: 773079 - DNA, 33 bp, Homo sapien
ataaataaaggcaataacaaagtcattaacaag

SEQ ID NO: 773080 - DNA, 33 bp, Homo sapien
ataaataaaggcaatagcaaagtcattaacaag

SEQ ID NO: 773081 - DNA, 33 bp, Homo sapien
ctcttcgcctgtattgcaagtatgaacatcaga

SEQ ID NO: 773082 - DNA, 33 bp, Homo sapien
ctcttcgcctgtattgtaagtatgaacatcaga

SEQ ID NO: 773083 - DNA, 33 bp, Homo sapien
tgtctttaagaaaacaactaagtggcaatttct

SEQ ID NO: 773084 - DNA, 33 bp, Homo sapien
tgtctttaagaaaacatctaagtggcaatttct

SEQ ID NO: 773085 - DNA, 33 bp, Homo sapien
gaaaccaccctctatacacctacactgcctatt

SEQ ID NO: 773086 - DNA, 33 bp, Homo sapien
gaaaccaccctctatatacctacactgcctatt

SEQ ID NO: 773087 - DNA, 33 bp, Homo sapien
ttcttcaaaaagcacaacattagacatactttt

SEQ ID NO: 773088 - DNA, 33 bp, Homo sapien
ttcttcaaaaagcacatcattagacatactttt

SEQ ID NO: 773089 - DNA, 33 bp, Homo sapien
aagttaatcttagtccagaagtcctaatagccc

SEQ ID NO: 773090 - DNA, 33 bp, Homo sapien
aagttaatcttagtccggaagtcctaatagccc

SEQ ID NO: 773091 - DNA, 33 bp, Homo sapien
tcaaggatgaaagggacgatgcagcttcaaaac

SEQ ID NO: 773092 - DNA, 33 bp, Homo sapien
tcaaggatgaaagggatgatgcagcttcaaaac

SEQ ID NO: 773093 - DNA, 33 bp, Homo sapien
agggcacgctccacagacatctaagggtgaaag

SEQ ID NO: 773094 - DNA, 33 bp, Homo sapien
agggcacgctccacaggcatctaagggtgaaag

SEQ ID NO: 773095 - DNA, 33 bp, Homo sapien
gtgtgcttgtatcatcaagtcaacccaattaat

SEQ ID NO: 773096 - DNA, 33 bp, Homo sapien
gtgtgcttgtatcatcgagtcaacccaattaat

SEQ ID NO: 773097 - DNA, 33 bp, Homo sapien
ttttatttcatccatagcagcttatgagatttt

SEQ ID NO: 773098 - DNA, 33 bp, Homo sapien
ttttatttcatccatatcagcttatgagatttt

SEQ ID NO: 773099 - DNA, 33 bp, Homo sapien
tgttggcatgtttaccagatgcaagatgaggtg

SEQ ID NO: 773100 - DNA, 33 bp, Homo sapien
tgttggcatgtttaccggatgcaagatgaggtg

SEQ ID NO: 773101 - DNA, 33 bp, Homo sapien
ttatgctagatgcaagcccacctcatcttgcat

SEQ ID NO: 773102 - DNA, 33 bp, Homo sapien
ttatgctagatgcaaggccacctcatcttgcat

SEQ ID NO: 773103 - DNA, 33 bp, Homo sapien
aaaacttttagaaccaaaggattggagggatgc

SEQ ID NO: 773104 - DNA, 33 bp, Homo sapien
aaaacttttagaaccagaggattggagggatgc

SEQ ID NO: 773105 - DNA, 33 bp, Homo sapien
tttatattaatttatgaaagtctgcagtctttg

SEQ ID NO: 773106 - DNA, 33 bp, Homo sapien
tttatattaatttatggaagtctgcagtctttg

SEQ ID NO: 773107 - DNA, 33 bp, Homo sapien
tcagcaagaacagtccacgaaatgtgcaagtgg

SEQ ID NO: 773108 - DNA, 33 bp, Homo sapien
tcagcaagaacagtccccgaaatgtgcaagtgg

SEQ ID NO: 773109 - DNA, 33 bp, Homo sapien
gtgaaagtctcctttaaatcttcctcccattga

SEQ ID NO: 773110 - DNA, 33 bp, Homo sapien
gtgaaagtctcctttatatcttcctcccattga

SEQ ID NO: 773111 - DNA, 33 bp, Homo sapien
tatctcaggttcttcaaactgttctgatgtata

SEQ ID NO: 773112 - DNA, 33 bp, Homo sapien
tatctcaggttcttcacactgttctgatgtata

SEQ ID NO: 773113 - DNA, 33 bp, Homo sapien
agaatcaactttgcaacgttactgtaaagatta

SEQ ID NO: 773114 - DNA, 33 bp, Homo sapien
agaatcaactttgcaatgttactgtaaagatta

SEQ ID NO: 773115 - DNA, 33 bp, Homo sapien
ctgacaagtgttcttcaagctgagaactgaatg

SEQ ID NO: 773116 - DNA, 33 bp, Homo sapien
ctgacaagtgttcttcgagctgagaactgaatg

SEQ ID NO: 773117 - DNA, 33 bp, Homo sapien
gaataaaaactggtaaccagacaaagcacactg

SEQ ID NO: 773118 - DNA, 33 bp, Homo sapien
gaataaaaactggtaatcagacaaagcacactg

SEQ ID NO: 773119 - DNA, 33 bp, Homo sapien
gccttgaagtttcagacagtggcagatatttgc

SEQ ID NO: 773120 - DNA, 33 bp, Homo sapien
gccttgaagtttcagatagtggcagatatttgc

SEQ ID NO: 773121 - DNA, 33 bp, Homo sapien
gatagggagaaagacactcatggcatatattaa

SEQ ID NO: 773122 - DNA, 33 bp, Homo sapien
gatagggagaaagacattcatggcatatattaa

SEQ ID NO: 773123 - DNA, 33 bp, Homo sapien
tacctcaagtccatgaagggttagtgctgaagg

SEQ ID NO: 773124 - DNA, 33 bp, Homo sapien
tacctcaagtccatgaggggttagtgctgaagg

SEQ ID NO: 773125 - DNA, 33 bp, Homo sapien
aaacatattctgcaaaataagcccctcactgtt

SEQ ID NO: 773126 - DNA, 33 bp, Homo sapien
aaacatattctgcaaagtaagcccctcactgtt

SEQ ID NO: 773127 - DNA, 33 bp, Homo sapien
tcatatctcagacaaccacctgatacagagctt

SEQ ID NO: 773128 - DNA, 33 bp, Homo sapien
tcatatctcagacaactacctgatacagagctt

SEQ ID NO: 773129 - DNA, 33 bp, Homo sapien
aatttacaaagtttaaagcaaagacagataaga

SEQ ID NO: 773130 - DNA, 33 bp, Homo sapien
aatttacaaagtttaaggcaaagacagataaga

SEQ ID NO: 773131 - DNA, 33 bp, Homo sapien
ttgtctgcttagtatgcatcttcaagattattg

SEQ ID NO: 773132 - DNA, 33 bp, Homo sapien
ttgtctgcttagtatgtatcttcaagattattg

SEQ ID NO: 773133 - DNA, 33 bp, Homo sapien
cccagcataggagttgcagtttttgatgttata

SEQ ID NO: 773134 - DNA, 33 bp, Homo sapien
cccagcataggagttgtagtttttgatgttata

SEQ ID NO: 773135 - DNA, 33 bp, Homo sapien
ttgtctactcactacccggccatcagccaccat

SEQ ID NO: 773136 - DNA, 33 bp, Homo sapien
ttgtctactcactacctggccatcagccaccat

SEQ ID NO: 773137 - DNA, 33 bp, Homo sapien
attcatgcatactcaagtcttgcaattggccct

SEQ ID NO: 773138 - DNA, 33 bp, Homo sapien
attcatgcatactcaattcttgcaattggccct

SEQ ID NO: 773139 - DNA, 33 bp, Homo sapien
tcaattagctttggtacctcaaaaattttggtt

SEQ ID NO: 773140 - DNA, 33 bp, Homo sapien
tcaattagctttggtatctcaaaaattttggtt

SEQ ID NO: 773141 - DNA, 33 bp, Homo sapien
gttgatgtaagtgagaagttattaagaggtttt

SEQ ID NO: 773142 - DNA, 33 bp, Homo sapien
gttgatgtaagtgagatgttattaagaggtttt

SEQ ID NO: 773143 - DNA, 33 bp, Homo sapien
cttgagctatgcaagcactgatttctgattaca

SEQ ID NO: 773144 - DNA, 33 bp, Homo sapien
cttgagctatgcaagcgctgatttctgattaca

SEQ ID NO: 773145 - DNA, 33 bp, Homo sapien
agaaataaatttgtcaacttcttgtacctttta

SEQ ID NO: 773146 - DNA, 33 bp, Homo sapien
agaaataaatttgtcatcttcttgtacctttta

SEQ ID NO: 773147 - DNA, 33 bp, Homo sapien
taatctcatctaaaaaatagtttcacggcaata

SEQ ID NO: 773148 - DNA, 33 bp, Homo sapien
taatctcatctaaaaagtagtttcacggcaata

SEQ ID NO: 773149 - DNA, 33 bp, Homo sapien
tttaatagttgaatgacagtgttctgactttga

SEQ ID NO: 773150 - DNA, 33 bp, Homo sapien
tttaatagttgaatgagagtgttctgactttga

SEQ ID NO: 773151 - DNA, 33 bp, Homo sapien
ttattttaaatgccacagcaaatcattgagggt

SEQ ID NO: 773152 - DNA, 33 bp, Homo sapien
ttattttaaatgccacggcaaatcattgagggt

SEQ ID NO: 773153 - DNA, 33 bp, Homo sapien
gaaattacgacttggacatcttttgaggaccat

SEQ ID NO: 773154 - DNA, 33 bp, Homo sapien
gaaattacgacttggatatcttttgaggaccat

SEQ ID NO: 773155 - DNA, 33 bp, Homo sapien
caaaaagcaactcaacaaatataaagagataac

SEQ ID NO: 773156 - DNA, 33 bp, Homo sapien
caaaaagcaactcaacgaatataaagagataac

SEQ ID NO: 773157 - DNA, 33 bp, Homo sapien
ctgaattccaggcatacgtaccttcaaatacct

SEQ ID NO: 773158 - DNA, 33 bp, Homo sapien
ctgaattccaggcatatgtaccttcaaatacct

SEQ ID NO: 773159 - DNA, 33 bp, Homo sapien
gatggaaaataggaatcaaaaacatgtgaagga

SEQ ID NO: 773160 - DNA, 33 bp, Homo sapien
gatggaaaataggaatgaaaaacatgtgaagga

SEQ ID NO: 773161 - DNA, 33 bp, Homo sapien
ggcaaggctgaattgacccaagtgattaagtca

SEQ ID NO: 773162 - DNA, 33 bp, Homo sapien
ggcaaggctgaattgatccaagtgattaagtca

SEQ ID NO: 773163 - DNA, 33 bp, Homo sapien
cagtcagcataagtaaacctcaacttaaacagt

SEQ ID NO: 773164 - DNA, 33 bp, Homo sapien
cagtcagcataagtaatcctcaacttaaacagt

SEQ ID NO: 773165 - DNA, 33 bp, Homo sapien
ctctactatccaggaactacacacacaggccca

SEQ ID NO: 773166 - DNA, 33 bp, Homo sapien
ctctactatccaggaagtacacacacaggccca

SEQ ID NO: 773167 - DNA, 33 bp, Homo sapien
agggagctacacccaagaagaagccctaataac

SEQ ID NO: 773168 - DNA, 33 bp, Homo sapien
agggagctacacccaataagaagccctaataac

SEQ ID NO: 773169 - DNA, 33 bp, Homo sapien
acactttatctctagaatactgctaataactaa

SEQ ID NO: 773170 - DNA, 33 bp, Homo sapien
acactttatctctagattactgctaataactaa

SEQ ID NO: 773171 - DNA, 33 bp, Homo sapien
aaatctgttgaaacaaacaaattcagtaaactt

SEQ ID NO: 773172 - DNA, 33 bp, Homo sapien
aaatctgttgaaacaagcaaattcagtaaactt

SEQ ID NO: 773173 - DNA, 33 bp, Homo sapien
gtaaatacataaatcaaggacgtaatctattat

SEQ ID NO: 773174 - DNA, 33 bp, Homo sapien
gtaaatacataaatcagggacgtaatctattat

SEQ ID NO: 773175 - DNA, 33 bp, Homo sapien
tcctcactggaaataacttattggctattttct

SEQ ID NO: 773176 - DNA, 33 bp, Homo sapien
tcctcactggaaataagttattggctattttct

SEQ ID NO: 773177 - DNA, 33 bp, Homo sapien
cataacatctacacaacatttcccaaactagat

SEQ ID NO: 773178 - DNA, 33 bp, Homo sapien
cataacatctacacaatatttcccaaactagat

SEQ ID NO: 773179 - DNA, 33 bp, Homo sapien
atcccttagtgaaaaactgtcgaatccttagct

SEQ ID NO: 773180 - DNA, 33 bp, Homo sapien
atcccttagtgaaaaattgtcgaatccttagct

SEQ ID NO: 773181 - DNA, 33 bp, Homo sapien
accagttgaaggtccaagaataaacagacagca

SEQ ID NO: 773182 - DNA, 33 bp, Homo sapien
accagttgaaggtccaggaataaacagacagca

SEQ ID NO: 773183 - DNA, 33 bp, Homo sapien
gtaattgaagtataggcaacataagtagtctgc

SEQ ID NO: 773184 - DNA, 33 bp, Homo sapien
gtaattgaagtatagggaacataagtagtctgc

SEQ ID NO: 773185 - DNA, 33 bp, Homo sapien
gatgtttaataccacaatgactatatttttact

SEQ ID NO: 773186 - DNA, 33 bp, Homo sapien
gatgtttaataccacagtgactatatttttact

SEQ ID NO: 773187 - DNA, 33 bp, Homo sapien
tatataatgacaaagaactactatgaatttagt

SEQ ID NO: 773188 - DNA, 33 bp, Homo sapien
tatataatgacaaagagctactatgaatttagt

SEQ ID NO: 773189 - DNA, 33 bp, Homo sapien
ttgagtcaaggaataaacctacttcttgcaact

SEQ ID NO: 773190 - DNA, 33 bp, Homo sapien
ttgagtcaaggaataatcctacttcttgcaact

SEQ ID NO: 773191 - DNA, 33 bp, Homo sapien
tctttacattcagtgccccaaaaatatacattt

SEQ ID NO: 773192 - DNA, 33 bp, Homo sapien
tctttacattcagtgctccaaaaatatacattt

SEQ ID NO: 773193 - DNA, 33 bp, Homo sapien
agaagaaaattgaggaagcaaatgtcgaaagaa

SEQ ID NO: 773194 - DNA, 33 bp, Homo sapien
agaagaaaattgaggaggcaaatgtcgaaagaa

SEQ ID NO: 773195 - DNA, 33 bp, Homo sapien
cagacaagctgttatcaatttgctcaagtgagg

SEQ ID NO: 773196 - DNA, 33 bp, Homo sapien
cagacaagctgttatcgatttgctcaagtgagg

SEQ ID NO: 773197 - DNA, 33 bp, Homo sapien
ctaacaatttttgggcaagaaaatagcaaaatc

SEQ ID NO: 773198 - DNA, 33 bp, Homo sapien
ctaacaatttttgggcgagaaaatagcaaaatc

SEQ ID NO: 773199 - DNA, 33 bp, Homo sapien
gcttctctgtttatcacagtgctcagtttcttg

SEQ ID NO: 773200 - DNA, 33 bp, Homo sapien
gcttctctgtttatcatagtgctcagtttcttg

SEQ ID NO: 773201 - DNA, 33 bp, Homo sapien
acactaaggataagaaaagggcatgtaactcac

SEQ ID NO: 773202 - DNA, 33 bp, Homo sapien
acactaaggataagaagagggcatgtaactcac

SEQ ID NO: 773203 - DNA, 33 bp, Homo sapien
ccacagatcctaacaacaagttccatttggggt

SEQ ID NO: 773204 - DNA, 33 bp, Homo sapien
ccacagatcctaacaataagttccatttggggt

SEQ ID NO: 773205 - DNA, 33 bp, Homo sapien
ttcagtgtgcccagacgagaactcatcttccct

SEQ ID NO: 773206 - DNA, 33 bp, Homo sapien
ttcagtgtgcccagactagaactcatcttccct

SEQ ID NO: 773207 - DNA, 33 bp, Homo sapien
tagaccagttgttttcaccttggctgcattccc

SEQ ID NO: 773208 - DNA, 33 bp, Homo sapien
tagaccagttgttttcgccttggctgcattccc

SEQ ID NO: 773209 - DNA, 33 bp, Homo sapien
aaataacatcgttttaaacaacattactcaaca

SEQ ID NO: 773210 - DNA, 33 bp, Homo sapien
aaataacatcgttttagacaacattactcaaca

SEQ ID NO: 773211 - DNA, 33 bp, Homo sapien
ggttgaggtgccatgaaaataaactccaccctc

SEQ ID NO: 773212 - DNA, 33 bp, Homo sapien
ggttgaggtgccatgagaataaactccaccctc

SEQ ID NO: 773213 - DNA, 33 bp, Homo sapien
ttcttcaaaccctttaaatttcagagtattttc

SEQ ID NO: 773214 - DNA, 33 bp, Homo sapien
ttcttcaaaccctttagatttcagagtattttc

SEQ ID NO: 773215 - DNA, 33 bp, Homo sapien
aaccttcccttctccaagtgagacactgttagt

SEQ ID NO: 773216 - DNA, 33 bp, Homo sapien
aaccttcccttctccaggtgagacactgttagt

SEQ ID NO: 773217 - DNA, 33 bp, Homo sapien
ccagtctctgctacacacccactggaactttgc

SEQ ID NO: 773218 - DNA, 33 bp, Homo sapien
ccagtctctgctacacgcccactggaactttgc

SEQ ID NO: 773219 - DNA, 33 bp, Homo sapien
aaggagcaagaatcacaaccactatcctgtagc

SEQ ID NO: 773220 - DNA, 33 bp, Homo sapien
aaggagcaagaatcacgaccactatcctgtagc

SEQ ID NO: 773221 - DNA, 33 bp, Homo sapien
gcagtcaaccgtgtccaaaaatattgagtggaa

SEQ ID NO: 773222 - DNA, 33 bp, Homo sapien
gcagtcaaccgtgtccgaaaatattgagtggaa

SEQ ID NO: 773223 - DNA, 33 bp, Homo sapien
atagtgtcaattatcacgtagatacaaagcaat

SEQ ID NO: 773224 - DNA, 33 bp, Homo sapien
atagtgtcaattatcatgtagatacaaagcaat

SEQ ID NO: 773225 - DNA, 33 bp, Homo sapien
acaattatatgagtaaccacagagtttcagggt

SEQ ID NO: 773226 - DNA, 33 bp, Homo sapien
acaattatatgagtaatcacagagtttcagggt

SEQ ID NO: 773227 - DNA, 33 bp, Homo sapien
agtttccctgaacagcaaaggcttagagcaggc

SEQ ID NO: 773228 - DNA, 33 bp, Homo sapien
agtttccctgaacagcgaaggcttagagcaggc

SEQ ID NO: 773229 - DNA, 33 bp, Homo sapien
taaagagcttagcttacatataaaaaccctgag

SEQ ID NO: 773230 - DNA, 33 bp, Homo sapien
taaagagcttagcttagatataaaaaccctgag

SEQ ID NO: 773231 - DNA, 33 bp, Homo sapien
tgtttgtgactgaagaggtgagttcagcacaga

SEQ ID NO: 773232 - DNA, 33 bp, Homo sapien
tgtttgtgactgaagatgtgagttcagcacaga

SEQ ID NO: 773233 - DNA, 33 bp, Homo sapien
ctcacagaatgacctcaattcacgtctggtctg

SEQ ID NO: 773234 - DNA, 33 bp, Homo sapien
ctcacagaatgacctcgattcacgtctggtctg

SEQ ID NO: 773235 - DNA, 33 bp, Homo sapien
tacccaaaaatgggaaagaaaacacagattata

SEQ ID NO: 773236 - DNA, 33 bp, Homo sapien
tacccaaaaatgggaacgaaaacacagattata

SEQ ID NO: 773237 - DNA, 33 bp, Homo sapien
gggtgcctgataataacagcataagggacatac

SEQ ID NO: 773238 - DNA, 33 bp, Homo sapien
gggtgcctgataataagagcataagggacatac

SEQ ID NO: 773239 - DNA, 33 bp, Homo sapien
ttttatcagcaatgaaaattataccagtgcatg

SEQ ID NO: 773240 - DNA, 33 bp, Homo sapien
ttttatcagcaatgaagattataccagtgcatg

SEQ ID NO: 773241 - DNA, 33 bp, Homo sapien
ctccagatggagtaagcctctctaaaaagatat

SEQ ID NO: 773242 - DNA, 33 bp, Homo sapien
ctccagatggagtaaggctctctaaaaagatat

SEQ ID NO: 773243 - DNA, 33 bp, Homo sapien
tgatgcagggctgaaaaaacccaatgtaagtca

SEQ ID NO: 773244 - DNA, 33 bp, Homo sapien
tgatgcagggctgaaacaacccaatgtaagtca

SEQ ID NO: 773245 - DNA, 33 bp, Homo sapien
taaaaagtttgacaaaatgaacctgaactctga

SEQ ID NO: 773246 - DNA, 33 bp, Homo sapien
taaaaagtttgacaaagtgaacctgaactctga

SEQ ID NO: 773247 - DNA, 33 bp, Homo sapien
acccaggcacattgtaataaaactgcagcacat

SEQ ID NO: 773248 - DNA, 33 bp, Homo sapien
acccaggcacattgtagtaaaactgcagcacat

SEQ ID NO: 773249 - DNA, 33 bp, Homo sapien
aaagaagcagggagaaatacttggaaatgcctt

SEQ ID NO: 773250 - DNA, 33 bp, Homo sapien
aaagaagcagggagaagtacttggaaatgcctt

SEQ ID NO: 773251 - DNA, 33 bp, Homo sapien
tcttttgtcaggagtacaatcaagcaccttcct

SEQ ID NO: 773252 - DNA, 33 bp, Homo sapien
tcttttgtcaggagtataatcaagcaccttcct

SEQ ID NO: 773253 - DNA, 33 bp, Homo sapien
acctaaatgtccaccaggaaggaactggctatg

SEQ ID NO: 773254 - DNA, 33 bp, Homo sapien
acctaaatgtccaccatgaaggaactggctatg

SEQ ID NO: 773255 - DNA, 33 bp, Homo sapien
tgactgcccatgtttaaagtgttaattgaaaaa

SEQ ID NO: 773256 - DNA, 33 bp, Homo sapien
tgactgcccatgtttacagtgttaattgaaaaa

SEQ ID NO: 773257 - DNA, 33 bp, Homo sapien
atacctcatcctgacacgcccgagttatcctct

SEQ ID NO: 773258 - DNA, 33 bp, Homo sapien
atacctcatcctgacatgcccgagttatcctct

SEQ ID NO: 773259 - DNA, 33 bp, Homo sapien
tgcacgtctggattgcactgactagtcctgatt

SEQ ID NO: 773260 - DNA, 33 bp, Homo sapien
tgcacgtctggattgcgctgactagtcctgatt

SEQ ID NO: 773261 - DNA, 33 bp, Homo sapien
ttaggcaccttctatacgacatttcactcagct

SEQ ID NO: 773262 - DNA, 33 bp, Homo sapien
ttaggcaccttctatatgacatttcactcagct

SEQ ID NO: 773263 - DNA, 33 bp, Homo sapien
tttggccatggagataaatttgcaatcaccagc

SEQ ID NO: 773264 - DNA, 33 bp, Homo sapien
tttggccatggagatacatttgcaatcaccagc

SEQ ID NO: 773265 - DNA, 33 bp, Homo sapien
ctccctctctataaaaccctgcatcatgaaact

SEQ ID NO: 773266 - DNA, 33 bp, Homo sapien
ctccctctctataaaatcctgcatcatgaaact

SEQ ID NO: 773267 - DNA, 33 bp, Homo sapien
atgcagactgaattaaaatggcaccctaaggga

SEQ ID NO: 773268 - DNA, 33 bp, Homo sapien
atgcagactgaattaagatggcaccctaaggga

SEQ ID NO: 773269 - DNA, 33 bp, Homo sapien
gtaaatcatagttcaactgggacaaaatatggt

SEQ ID NO: 773270 - DNA, 33 bp, Homo sapien
gtaaatcatagttcaagtgggacaaaatatggt

SEQ ID NO: 773271 - DNA, 33 bp, Homo sapien
gaaacacctctagtcccattagcaaaagataac

SEQ ID NO: 773272 - DNA, 33 bp, Homo sapien
gaaacacctctagtcctattagcaaaagataac

SEQ ID NO: 773273 - DNA, 33 bp, Homo sapien
agttcgagcgcatagagcctgtatggtttagtg

SEQ ID NO: 773274 - DNA, 33 bp, Homo sapien
agttcgagcgcatagatcctgtatggtttagtg

SEQ ID NO: 773275 - DNA, 33 bp, Homo sapien
tgagtaagttaggtaaagttgacctagacacag

SEQ ID NO: 773276 - DNA, 33 bp, Homo sapien
tgagtaagttaggtaatgttgacctagacacag

SEQ ID NO: 773277 - DNA, 33 bp, Homo sapien
tgtagccaagaagcagaaggtgaagtcaaaggt

SEQ ID NO: 773278 - DNA, 33 bp, Homo sapien
tgtagccaagaagcaggaggtgaagtcaaaggt

SEQ ID NO: 773279 - DNA, 33 bp, Homo sapien
tacagaatttattataagctgttgactcccatg

SEQ ID NO: 773280 - DNA, 33 bp, Homo sapien
tacagaatttattatatgctgttgactcccatg

SEQ ID NO: 773281 - DNA, 33 bp, Homo sapien
aattctaaggaaattacgtaggcagaaactaaa

SEQ ID NO: 773282 - DNA, 33 bp, Homo sapien
aattctaaggaaattatgtaggcagaaactaaa

SEQ ID NO: 773283 - DNA, 33 bp, Homo sapien
ttacagccctctgagacggtataaaagaatgaa

SEQ ID NO: 773284 - DNA, 33 bp, Homo sapien
ttacagccctctgagatggtataaaagaatgaa

SEQ ID NO: 773285 - DNA, 33 bp, Homo sapien
aaaggaagaaaggttacaaggctgaaatttctt

SEQ ID NO: 773286 - DNA, 33 bp, Homo sapien
aaaggaagaaaggttataaggctgaaatttctt

SEQ ID NO: 773287 - DNA, 33 bp, Homo sapien
cctgtcctgcaccaaaacaggccaaccagcact

SEQ ID NO: 773288 - DNA, 33 bp, Homo sapien
cctgtcctgcaccaaatcaggccaaccagcact

SEQ ID NO: 773289 - DNA, 33 bp, Homo sapien; identical to SEQ ID NO: 773287

SEQ ID NO: 773290 - DNA, 33 bp, Homo sapien; identical to SEQ ID NO: 773288

SEQ ID NO: 773291 - DNA, 33 bp, Homo sapien
aggctttttgaaacaaccagagttttctttcaa

SEQ ID NO: 773292 - DNA, 33 bp, Homo sapien
aggctttttgaaacaatcagagttttctttcaa

SEQ ID NO: 773293 - DNA, 33 bp, Homo sapien
ctaaaaagcttctgcgcaggaaaggaaacaatc

SEQ ID NO: 773294 - DNA, 33 bp, Homo sapien
ctaaaaagcttctgcgtaggaaaggaaacaatc

SEQ ID NO: 773295 - DNA, 33 bp, Homo sapien
aaaagggaactctttaagcattgttgggaatgt

SEQ ID NO: 773296 - DNA, 33 bp, Homo sapien
aaaagggaactctttatgcattgttgggaatgt

SEQ ID NO: 773297 - DNA, 33 bp, Homo sapien
gctttagttctgtctgcatacttcatgaaatgt

SEQ ID NO: 773298 - DNA, 33 bp, Homo sapien
gctttagttctgtctgtatacttcatgaaatgt

SEQ ID NO: 773299 - DNA, 33 bp, Homo sapien
caaattgttttgagaacatctgaaaggatagtg

SEQ ID NO: 773300 - DNA, 33 bp, Homo sapien
caaattgttttgagaatatctgaaaggatagtg

SEQ ID NO: 773301 - DNA, 33 bp, Homo sapien
atagaaaaggtgagaaaaaagaatacagcagaa

SEQ ID NO: 773302 - DNA, 33 bp, Homo sapien
atagaaaaggtgagaagaaagaatacagcagaa

SEQ ID NO: 773303 - DNA, 33 bp, Homo sapien
taatgctggcaatgagaaaagcttgactttgtc

SEQ ID NO: 773304 - DNA, 33 bp, Homo sapien
taatgctggcaatgaggaaagcttgactttgtc

SEQ ID NO: 773305 - DNA, 33 bp, Homo sapien
cttcctgggataagtgcaggatatattaagtac

SEQ ID NO: 773306 - DNA, 33 bp, Homo sapien
cttcctgggataagtggaggatatattaagtac

SEQ ID NO: 773307 - DNA, 33 bp, Homo sapien
ctaagaccacgttaataaacagaatttgctact

SEQ ID NO: 773308 - DNA, 33 bp, Homo sapien
ctaagaccacgttaatgaacagaatttgctact

SEQ ID NO: 773309 - DNA, 33 bp, Homo sapien
tgtttttttcctaatacgtagacaatgccaaag

SEQ ID NO: 773310 - DNA, 33 bp, Homo sapien
tgtttttttcctaatatgtagacaatgccaaag

SEQ ID NO: 773311 - DNA, 33 bp, Homo sapien
aaggaagattgtcagcaataaaagtagtaggaa

SEQ ID NO: 773312 - DNA, 33 bp, Homo sapien
aaggaagattgtcagcgataaaagtagtaggaa

SEQ ID NO: 773313 - DNA, 33 bp, Homo sapien
atggtctgaatggggacgtagcggttgaactgg

SEQ ID NO: 773314 - DNA, 33 bp, Homo sapien
atggtctgaatggggatgtagcggttgaactgg

SEQ ID NO: 773315 - DNA, 33 bp, Homo sapien
ttctcatcctgataagactcatttgcatcatat

SEQ ID NO: 773316 - DNA, 33 bp, Homo sapien
ttctcatcctgataagtctcatttgcatcatat

SEQ ID NO: 773317 - DNA, 33 bp, Homo sapien
aaatagatagtacaggacacccctttacattcg

SEQ ID NO: 773318 - DNA, 33 bp, Homo sapien
aaatagatagtacagggcacccctttacattcg

SEQ ID NO: 773319 - DNA, 33 bp, Homo sapien; identical to SEQ ID NO: 773317

SEQ ID NO: 773320 - DNA, 33 bp, Homo sapien; identical to SEQ ID NO: 773318

SEQ ID NO: 773321 - DNA, 33 bp, Homo sapien
agactcaagtgtcacccctacagcaaactattc

SEQ ID NO: 773322 - DNA, 33 bp, Homo sapien
agactcaagtgtcacctctacagcaaactattc

SEQ ID NO: 773323 - DNA, 33 bp, Homo sapien
tatttctcttgggaaactttaattgcttgtacc

SEQ ID NO: 773324 - DNA, 33 bp, Homo sapien
tatttctcttgggaaagtttaattgcttgtacc

SEQ ID NO: 773325 - DNA, 33 bp, Homo sapien
gaaaatgagaatatgaatatgaattttaaggac

SEQ ID NO: 773326 - DNA, 33 bp, Homo sapien
gaaaatgagaatatgactatgaattttaaggac

SEQ ID NO: 773327 - DNA, 33 bp, Homo sapien
ggtcaattagtggatacacctagtgatatttgg

SEQ ID NO: 773328 - DNA, 33 bp, Homo sapien
ggtcaattagtggatatacctagtgatatttgg

SEQ ID NO: 773329 - DNA, 33 bp, Homo sapien
ctgcagatagagggagaaaaggccaactaggtc

SEQ ID NO: 773330 - DNA, 33 bp, Homo sapien
ctgcagatagagggaggaaaggccaactaggtc

SEQ ID NO: 773331 - DNA, 33 bp, Homo sapien
tgtgcacataaaactaataaaatgtgtatactt

SEQ ID NO: 773332 - DNA, 33 bp, Homo sapien
tgtgcacataaaactactaaaatgtgtatactt

SEQ ID NO: 773333 - DNA, 33 bp, Homo sapien
tttcattctccctgtcacttttagtacaccaat

SEQ ID NO: 773334 - DNA, 33 bp, Homo sapien
tttcattctccctgtcgcttttagtacaccaat

SEQ ID NO: 773335 - DNA, 33 bp, Homo sapien; identical to SEQ ID NO: 773333

SEQ ID NO: 773336 - DNA, 33 bp, Homo sapien; identical to SEQ ID NO: 773334

SEQ ID NO: 773337 - DNA, 33 bp, Homo sapien
ctcagccaatgtccacagcagaagcattcagac

SEQ ID NO: 773338 - DNA, 33 bp, Homo sapien
ctcagccaatgtccacggcagaagcattcagac

SEQ ID NO: 773339 - DNA, 33 bp, Homo sapien
agagttctgtgtggtcacatagagttcctttgg

SEQ ID NO: 773340 - DNA, 33 bp, Homo sapien
agagttctgtgtggtctcatagagttcctttgg

SEQ ID NO: 773341 - DNA, 33 bp, Homo sapien
aaattccatatccagtaaaaatcattttgatcc

SEQ ID NO: 773342 - DNA, 33 bp, Homo sapien
aaattccatatccagtgaaaatcattttgatcc

SEQ ID NO: 773343 - DNA, 33 bp, Homo sapien
gacacgggcttatccacgtcctcccatgctctg

SEQ ID NO: 773344 - DNA, 33 bp, Homo sapien
gacacgggcttatccatgtcctcccatgctctg

SEQ ID NO: 773345 - DNA, 33 bp, Homo sapien
cagtttccttacggaacctggaactgagaacat

SEQ ID NO: 773346 - DNA, 33 bp, Homo sapien
cagtttccttacggaagctggaactgagaacat

SEQ ID NO: 773347 - DNA, 33 bp, Homo sapien
aattccaacacacccacaaagtgatccaaggct

SEQ ID NO: 773348 - DNA, 33 bp, Homo sapien
aattccaacacacccataaagtgatccaaggct

SEQ ID NO: 773349 - DNA, 33 bp, Homo sapien
gtgtcagtttcaggaaatacctgccaaatataa

SEQ ID NO: 773350 - DNA, 33 bp, Homo sapien
gtgtcagtttcaggaactacctgccaaatataa

SEQ ID NO: 773351 - DNA, 33 bp, Homo sapien
taataaactcatttgaagatctcagtataatct

SEQ ID NO: 773352 - DNA, 33 bp, Homo sapien
taataaactcatttgaggatctcagtataatct

SEQ ID NO: 773353 - DNA, 33 bp, Homo sapien
tgtctgacagtctataacccaatgattaccaaa

SEQ ID NO: 773354 - DNA, 33 bp, Homo sapien
tgtctgacagtctataccccaatgattaccaaa

SEQ ID NO: 773355 - DNA, 33 bp, Homo sapien
aacttctttgccatcaaatattctaaattgtct

SEQ ID NO: 773356 - DNA, 33 bp, Homo sapien
aacttctttgccatcagatattctaaattgtct

SEQ ID NO: 773357 - DNA, 33 bp, Homo sapien
gtctgggcaaaaaaaactgtagcagtattatcc

SEQ ID NO: 773358 - DNA, 33 bp, Homo sapien
gtctgggcaaaaaaaattgtagcagtattatcc

SEQ ID NO: 773359 - DNA, 33 bp, Homo sapien
atgtccattccacctactacacaggattttgtg

SEQ ID NO: 773360 - DNA, 33 bp, Homo sapien
atgtccattccacctattacacaggattttgtg

SEQ ID NO: 773361 - DNA, 33 bp, Homo sapien
agaaacaacatacatcccttcagatctgcaagc

SEQ ID NO: 773362 - DNA, 33 bp, Homo sapien
agaaacaacatacatctcttcagatctgcaagc

SEQ ID NO: 773363 - DNA, 33 bp, Homo sapien
ttaccttgatactacagaagcttttttaacttg

SEQ ID NO: 773364 - DNA, 33 bp, Homo sapien
ttaccttgatactacataagcttttttaacttg

SEQ ID NO: 773365 - DNA, 33 bp, Homo sapien
aaacctttagctgcacaaaggaaaaaaaagagt

SEQ ID NO: 773366 - DNA, 33 bp, Homo sapien
aaacctttagctgcacgaaggaaaaaaaagagt

SEQ ID NO: 773367 - DNA, 33 bp, Homo sapien
gagacttcagaatgagaccttatcttgctggca

SEQ ID NO: 773368 - DNA, 33 bp, Homo sapien
gagacttcagaatgaggccttatcttgctggca

SEQ ID NO: 773369 - DNA, 33 bp, Homo sapien
gactcttctcagataaccatcttgcttggttaa

SEQ ID NO: 773370 - DNA, 33 bp, Homo sapien
gactcttctcagataatcatcttgcttggttaa

SEQ ID NO: 773371 - DNA, 33 bp, Homo sapien
tagtggtcttttaacaagtgttctctgaagtaa

SEQ ID NO: 773372 - DNA, 33 bp, Homo sapien
tagtggtcttttaacatgtgttctctgaagtaa

SEQ ID NO: 773373 - DNA, 33 bp, Homo sapien
ttaggagaaatatcataaagatggcatacacca

SEQ ID NO: 773374 - DNA, 33 bp, Homo sapien
ttaggagaaatatcatgaagatggcatacacca

SEQ ID NO: 773375 - DNA, 33 bp, Homo sapien
ccacacaaagacggaaatgaactaggcagtaat

SEQ ID NO: 773376 - DNA, 33 bp, Homo sapien
ccacacaaagacggaagtgaactaggcagtaat

SEQ ID NO: 773377 - DNA, 33 bp, Homo sapien
agatgaagctagagagacacgtggggttgagat

SEQ ID NO: 773378 - DNA, 33 bp, Homo sapien
agatgaagctagagagtcacgtggggttgagat

SEQ ID NO: 773379 - DNA, 33 bp, Homo sapien
gggagataatcctagacagtaccagaagttggg

SEQ ID NO: 773380 - DNA, 33 bp, Homo sapien
gggagataatcctagatagtaccagaagttggg

SEQ ID NO: 773381 - DNA, 33 bp, Homo sapien
ttatttgcagataggcactttcttttatgcaca

SEQ ID NO: 773382 - DNA, 33 bp, Homo sapien
ttatttgcagataggcgctttcttttatgcaca

SEQ ID NO: 773383 - DNA, 33 bp, Homo sapien
tttatgcacatttgaaaaccctatggcaggttg

SEQ ID NO: 773384 - DNA, 33 bp, Homo sapien
tttatgcacatttgaagaccctatggcaggttg

SEQ ID NO: 773385 - DNA, 33 bp, Homo sapien
attgagaaccataaaaatgaccatacttgctga

SEQ ID NO: 773386 - DNA, 33 bp, Homo sapien
attgagaaccataaaattgaccatacttgctga

SEQ ID NO: 773387 - DNA, 33 bp, Homo sapien
attttacaagttgggactcatttcctaatgata

SEQ ID NO: 773388 - DNA, 33 bp, Homo sapien
attttacaagttgggattcatttcctaatgata

SEQ ID NO: 773389 - DNA, 33 bp, Homo sapien
ccaccgtgccgggcctcacttcgacttctcttt

SEQ ID NO: 773390 - DNA, 33 bp, Homo sapien
ccaccgtgccgggcctgacttcgacttctcttt

SEQ ID NO: 773391 - DNA, 33 bp, Homo sapien
aatatagtacagttccaagtcttcactaataaa

SEQ ID NO: 773392 - DNA, 33 bp, Homo sapien
aatatagtacagttcccagtcttcactaataaa

SEQ ID NO: 773393 - DNA, 33 bp, Homo sapien
caagttctttgacatcaaggataccgagcaagt

SEQ ID NO: 773394 - DNA, 33 bp, Homo sapien
caagttctttgacatcgaggataccgagcaagt

SEQ ID NO: 773395 - DNA, 33 bp, Homo sapien
ttccagaatcacatcacagtattctaccacctc

SEQ ID NO: 773396 - DNA, 33 bp, Homo sapien
ttccagaatcacatcagagtattctaccacctc

SEQ ID NO: 773397 - DNA, 33 bp, Homo sapien
ggtttacttcctgataataattttgataagctt

SEQ ID NO: 773398 - DNA, 33 bp, Homo sapien
ggtttacttcctgatagtaattttgataagctt

SEQ ID NO: 773399 - DNA, 33 bp, Homo sapien
aatataggaaaagaaaacaggatcacttaactc

SEQ ID NO: 773400 - DNA, 33 bp, Homo sapien
aatataggaaaagaaagcaggatcacttaactc

SEQ ID NO: 773401 - DNA, 33 bp, Homo sapien
ggtgggagtggttagacgatgaatagatgcttg

SEQ ID NO: 773402 - DNA, 33 bp, Homo sapien
ggtgggagtggttagatgatgaatagatgcttg

SEQ ID NO: 773403 - DNA, 33 bp, Homo sapien
tttgtatttctaatgcaaaacaccagagccaac

SEQ ID NO: 773404 - DNA, 33 bp, Homo sapien
tttgtatttctaatgcgaaacaccagagccaac

SEQ ID NO: 773405 - DNA, 33 bp, Homo sapien
acctgatactaatggaagaaaaaggtttagata

SEQ ID NO: 773406 - DNA, 33 bp, Homo sapien
acctgatactaatggaggaaaaaggtttagata

SEQ ID NO: 773407 - DNA, 33 bp, Homo sapien
gcagaggtaagctttcccacttagtatgggatt

SEQ ID NO: 773408 - DNA, 33 bp, Homo sapien
gcagaggtaagctttctcacttagtatgggatt

SEQ ID NO: 773409 - DNA, 33 bp, Homo sapien
ttacagattaaaagagaaaattggccaaaagaa

SEQ ID NO: 773410 - DNA, 33 bp, Homo sapien
ttacagattaaaagaggaaattggccaaaagaa

SEQ ID NO: 773411 - DNA, 33 bp, Homo sapien
catatgtaaccttttgaacctggcttcttctat

SEQ ID NO: 773412 - DNA, 33 bp, Homo sapien
catatgtaaccttttggacctggcttcttctat

SEQ ID NO: 773413 - DNA, 33 bp, Homo sapien
acctcgtttgctgagcactttctcttatgaatc

SEQ ID NO: 773414 - DNA, 33 bp, Homo sapien
acctcgtttgctgagcgctttctcttatgaatc

SEQ ID NO: 773415 - DNA, 33 bp, Homo sapien
tagtaataaacccacaaatgaggacaagtgagt

SEQ ID NO: 773416 - DNA, 33 bp, Homo sapien
tagtaataaacccacacatgaggacaagtgagt

SEQ ID NO: 773417 - DNA, 33 bp, Homo sapien
atgaagagtttaacagcctacatattgaacttt

SEQ ID NO: 773418 - DNA, 33 bp, Homo sapien
atgaagagtttaacaggctacatattgaacttt

SEQ ID NO: 773419 - DNA, 33 bp, Homo sapien
aaatgcaaaatctaaaactataataccctggaa

SEQ ID NO: 773420 - DNA, 33 bp, Homo sapien
aaatgcaaaatctaaacctataataccctggaa

SEQ ID NO: 773421 - DNA, 33 bp, Homo sapien
ctctaattattactgacgtacagcattttttca

SEQ ID NO: 773422 - DNA, 33 bp, Homo sapien
ctctaattattactgatgtacagcattttttca

SEQ ID NO: 773423 - DNA, 33 bp, Homo sapien
tcctttgtctatcagccacttttgttagtctta

SEQ ID NO: 773424 - DNA, 33 bp, Homo sapien
tcctttgtctatcagctacttttgttagtctta

SEQ ID NO: 773425 - DNA, 33 bp, Homo sapien
aaattatattgattccaatgtccttgaacttac

SEQ ID NO: 773426 - DNA, 33 bp, Homo sapien
aaattatattgattcccatgtccttgaacttac

SEQ ID NO: 773427 - DNA, 33 bp, Homo sapien
tttgggtaagaaaagccgaacacttcactgaat

SEQ ID NO: 773428 - DNA, 33 bp, Homo sapien
tttgggtaagaaaagctgaacacttcactgaat

SEQ ID NO: 773429 - DNA, 33 bp, Homo sapien
tttctaaagtacggaacgatcaataaaaatcag

SEQ ID NO: 773430 - DNA, 33 bp, Homo sapien
tttctaaagtacggaatgatcaataaaaatcag

SEQ ID NO: 773431 - DNA, 33 bp, Homo sapien
ggggcatcatgattagaataagataactaattt

SEQ ID NO: 773432 - DNA, 33 bp, Homo sapien
ggggcatcatgattaggataagataactaattt

SEQ ID NO: 773433 - DNA, 33 bp, Homo sapien
tttgtagtaacatcaactatcaaggtttgagag

SEQ ID NO: 773434 - DNA, 33 bp, Homo sapien
tttgtagtaacatcaattatcaaggtttgagag

SEQ ID NO: 773435 - DNA, 33 bp, Homo sapien
agtgtgaatggtaaaacgagaataaggaagaaa

SEQ ID NO: 773436 - DNA, 33 bp, Homo sapien
agtgtgaatggtaaaatgagaataaggaagaaa

SEQ ID NO: 773437 - DNA, 33 bp, Homo sapien
tgacttcatattgacaaactgacttgggatatc

SEQ ID NO: 773438 - DNA, 33 bp, Homo sapien
tgacttcatattgacagactgacttgggatatc

SEQ ID NO: 773439 - DNA, 33 bp, Homo sapien
tctctcctacactaccggatattctattagctg

SEQ ID NO: 773440 - DNA, 33 bp, Homo sapien
tctctcctacactacctgatattctattagctg

SEQ ID NO: 773441 - DNA, 33 bp, Homo sapien
cctacaaggccccccacattcacaatcctatta

SEQ ID NO: 773442 - DNA, 33 bp, Homo sapien
cctacaaggccccccagattcacaatcctatta

SEQ ID NO: 773443 - DNA, 33 bp, Homo sapien
attttgcctatgttcccctaagtctatttgcaa

SEQ ID NO: 773444 - DNA, 33 bp, Homo sapien
attttgcctatgttcctctaagtctatttgcaa

SEQ ID NO: 773445 - DNA, 33 bp, Homo sapien
agggtagagtagggtacagaagagtagggtagc

SEQ ID NO: 773446 - DNA, 33 bp, Homo sapien
agggtagagtagggtagagaagagtagggtagc

SEQ ID NO: 773447 - DNA, 33 bp, Homo sapien
tttgcaatttaagtcaacaggaagtaggattct

SEQ ID NO: 773448 - DNA, 33 bp, Homo sapien
tttgcaatttaagtcatcaggaagtaggattct

SEQ ID NO: 773449 - DNA, 33 bp, Homo sapien
tcaacatcccactttaagtactggaaagaacat

SEQ ID NO: 773450 - DNA, 33 bp, Homo sapien
tcaacatcccactttaggtactggaaagaacat

SEQ ID NO: 773451 - DNA, 33 bp, Homo sapien
catctgaaggtaacaaactcactagtaatagta

SEQ ID NO: 773452 - DNA, 33 bp, Homo sapien
catctgaaggtaacaagctcactagtaatagta

SEQ ID NO: 773453 - DNA, 33 bp, Homo sapien
agatataccattctgaaaaacagaggaattaaa

SEQ ID NO: 773454 - DNA, 33 bp, Homo sapien
agatataccattctgagaaacagaggaattaaa

SEQ ID NO: 773455 - DNA, 33 bp, Homo sapien
tgttgctttcatgataaccaagagtgcatccaa

SEQ ID NO: 773456 - DNA, 33 bp, Homo sapien
tgttgctttcatgatagccaagagtgcatccaa

SEQ ID NO: 773457 - DNA, 33 bp, Homo sapien
ataatatagccaactaactgggtggaggtggat

SEQ ID NO: 773458 - DNA, 33 bp, Homo sapien
ataatatagccaactatctgggtggaggtggat

SEQ ID NO: 773459 - DNA, 33 bp, Homo sapien
aactgaacacacatgaaagtgcctaatacgtta

SEQ ID NO: 773460 - DNA, 33 bp, Homo sapien
aactgaacacacatgagagtgcctaatacgtta

SEQ ID NO: 773461 - DNA, 33 bp, Homo sapien
aaagaatgatcaataccggcccagagtaaactt

SEQ ID NO: 773462 - DNA, 33 bp, Homo sapien
aaagaatgatcaatactggcccagagtaaactt

SEQ ID NO: 773463 - DNA, 33 bp, Homo sapien
gtaactgggaaaaccacctatcatgattaaaat

SEQ ID NO: 773464 - DNA, 33 bp, Homo sapien
gtaactgggaaaaccatctatcatgattaaaat

SEQ ID NO: 773465 - DNA, 33 bp, Homo sapien
aaaggaatcccaactgcactgtcttaaaattag

SEQ ID NO: 773466 - DNA, 33 bp, Homo sapien
aaaggaatcccaactggactgtcttaaaattag

SEQ ID NO: 773467 - DNA, 33 bp, Homo sapien
gcctttcacagtaagaaccagttgtatttccct

SEQ ID NO: 773468 - DNA, 33 bp, Homo sapien
gcctttcacagtaagatccagttgtatttccct

SEQ ID NO: 773469 - DNA, 33 bp, Homo sapien
taactgggattcaaaccgaaagcccgctgattc

SEQ ID NO: 773470 - DNA, 33 bp, Homo sapien
taactgggattcaaactgaaagcccgctgattc

SEQ ID NO: 773471 - DNA, 33 bp, Homo sapien
tgcgtgttatttgagaacttcaaagacttatgt

SEQ ID NO: 773472 - DNA, 33 bp, Homo sapien
tgcgtgttatttgagagcttcaaagacttatgt

SEQ ID NO: 773473 - DNA, 33 bp, Homo sapien
ataactatattcacagcaacattatctgtaatg

SEQ ID NO: 773474 - DNA, 33 bp, Homo sapien
ataactatattcacaggaacattatctgtaatg

SEQ ID NO: 773475 - DNA, 33 bp, Homo sapien
tttctcagtcctctaacagattaaggtgataca

SEQ ID NO: 773476 - DNA, 33 bp, Homo sapien
tttctcagtcctctaagagattaaggtgataca

SEQ ID NO: 773477 - DNA, 33 bp, Homo sapien
gctttgtgggaagaacagagcattaagaagcta

SEQ ID NO: 773478 - DNA, 33 bp, Homo sapien
gctttgtgggaagaacggagcattaagaagcta

SEQ ID NO: 773479 - DNA, 33 bp, Homo sapien
agcaaactgaatgtaggagagacagtaatagtg

SEQ ID NO: 773480 - DNA, 33 bp, Homo sapien
agcaaactgaatgtagtagagacagtaatagtg

SEQ ID NO: 773481 - DNA, 33 bp, Homo sapien
aatttcttcctacctacgtgacatttcactatt

SEQ ID NO: 773482 - DNA, 33 bp, Homo sapien
aatttcttcctacctatgtgacatttcactatt

SEQ ID NO: 773483 - DNA, 33 bp, Homo sapien
ttccagcaatcccccaatctagatgctgacagc

SEQ ID NO: 773484 - DNA, 33 bp, Homo sapien
ttccagcaatcccccattctagatgctgacagc

SEQ ID NO: 773485 - DNA, 33 bp, Homo sapien
gtaataaatcctcacaatacctcaaaaccttgg

SEQ ID NO: 773486 - DNA, 33 bp, Homo sapien
gtaataaatcctcacagtacctcaaaaccttgg

SEQ ID NO: 773487 - DNA, 33 bp, Homo sapien
cagctaagtgagaacccgagcagaaagcccacc

SEQ ID NO: 773488 - DNA, 33 bp, Homo sapien
cagctaagtgagaacctgagcagaaagcccacc

SEQ ID NO: 773489 - DNA, 33 bp, Homo sapien
gtggtcacagccttgcaaacttagctcccttcc

SEQ ID NO: 773490 - DNA, 33 bp, Homo sapien
gtggtcacagccttgcgaacttagctcccttcc

SEQ ID NO: 773491 - DNA, 33 bp, Homo sapien
gctgggaaaagctaccaaaaggcactgctgcca

SEQ ID NO: 773492 - DNA, 33 bp, Homo sapien
gctgggaaaagctaccgaaaggcactgctgcca

SEQ ID NO: 773493 - DNA, 33 bp, Homo sapien
gacaatctgattgccaaagacagtgttaataaa

SEQ ID NO: 773494 - DNA, 33 bp, Homo sapien
gacaatctgattgccacagacagtgttaataaa

SEQ ID NO: 773495 - DNA, 33 bp, Homo sapien
caagttccttctctccgaaattctttctcaaaa

SEQ ID NO: 773496 - DNA, 33 bp, Homo sapien
caagttccttctctcctaaattctttctcaaaa

SEQ ID NO: 773497 - DNA, 33 bp, Homo sapien
ggtagcaggcgttttacctgcgatgaatagctt

SEQ ID NO: 773498 - DNA, 33 bp, Homo sapien
ggtagcaggcgttttatctgcgatgaatagctt

SEQ ID NO: 773499 - DNA, 33 bp, Homo sapien
agaaccaatagtaccaactttcctcactgcgcc

SEQ ID NO: 773500 - DNA, 33 bp, Homo sapien
agaaccaatagtaccacctttcctcactgcgcc

SEQ ID NO: 773501 - DNA, 33 bp, Homo sapien
agacaggagggaatagaaagtggcatctaatcg

SEQ ID NO: 773502 - DNA, 33 bp, Homo sapien
agacaggagggaataggaagtggcatctaatcg

SEQ ID NO: 773503 - DNA, 33 bp, Homo sapien
tgttgagattgcagaaacatttactttctctgt

SEQ ID NO: 773504 - DNA, 33 bp, Homo sapien
tgttgagattgcagaagcatttactttctctgt

SEQ ID NO: 773505 - DNA, 33 bp, Homo sapien
aaactattacgggagtgacagtgattacttcaa

SEQ ID NO: 773506 - DNA, 33 bp, Homo sapien
aaactattacgggagttacagtgattacttcaa

SEQ ID NO: 773507 - DNA, 33 bp, Homo sapien
gcagcctctacggttaagagaaatagatatgat

SEQ ID NO: 773508 - DNA, 33 bp, Homo sapien
gcagcctctacggttaggagaaatagatatgat

SEQ ID NO: 773509 - DNA, 33 bp, Homo sapien
aatgaaagatgattaaccaatgcgtaagccctg

SEQ ID NO: 773510 - DNA, 33 bp, Homo sapien
aatgaaagatgattaagcaatgcgtaagccctg

SEQ ID NO: 773511 - DNA, 33 bp, Homo sapien
gagacaaaattggccactaaatatttttaaaat

SEQ ID NO: 773512 - DNA, 33 bp, Homo sapien
gagacaaaattggccagtaaatatttttaaaat

SEQ ID NO: 773513 - DNA, 33 bp, Homo sapien
ccaaataatcattgtacgaactgatgaatgcac

SEQ ID NO: 773514 - DNA, 33 bp, Homo sapien
ccaaataatcattgtatgaactgatgaatgcac

SEQ ID NO: 773515 - DNA, 33 bp, Homo sapien
aataattagctcatcaaaattggctgggtgccc

SEQ ID NO: 773516 - DNA, 33 bp, Homo sapien
aataattagctcatcagaattggctgggtgccc

SEQ ID NO: 773517 - DNA, 33 bp, Homo sapien
agccacattctgttaagtgggacctttgcaaag

SEQ ID NO: 773518 - DNA, 33 bp, Homo sapien
agccacattctgttaattgggacctttgcaaag

SEQ ID NO: 773519 - DNA, 33 bp, Homo sapien
ttcaggtgaaaggcaactgtaatttcaggcttt

SEQ ID NO: 773520 - DNA, 33 bp, Homo sapien
ttcaggtgaaaggcaattgtaatttcaggcttt

SEQ ID NO: 773521 - DNA, 33 bp, Homo sapien
accagacaaagaacaaatgatttttaagtatta

SEQ ID NO: 773522 - DNA, 33 bp, Homo sapien
accagacaaagaacaagtgatttttaagtatta

SEQ ID NO: 773523 - DNA, 33 bp, Homo sapien
ccactctagccacatacagaaaacatagaagag

SEQ ID NO: 773524 - DNA, 33 bp, Homo sapien
ccactctagccacatatagaaaacatagaagag

SEQ ID NO: 773525 - DNA, 33 bp, Homo sapien
ataacaacaaaagaaaaagcgaaagagtaatta

SEQ ID NO: 773526 - DNA, 33 bp, Homo sapien
ataacaacaaaagaaagagcgaaagagtaatta

SEQ ID NO: 773527 - DNA, 33 bp, Homo sapien
gtcattgcagagctaacaataagacctcatgaa

SEQ ID NO: 773528 - DNA, 33 bp, Homo sapien
gtcattgcagagctaataataagacctcatgaa

SEQ ID NO: 773529 - DNA, 33 bp, Homo sapien
tcaagaacttgaaagcgaaagagtctcttgaaa

SEQ ID NO: 773530 - DNA, 33 bp, Homo sapien
tcaagaacttgaaagctaaagagtctcttgaaa

SEQ ID NO: 773531 - DNA, 33 bp, Homo sapien
tagcaagcctgggttacaggtatgcaaatacat

SEQ ID NO: 773532 - DNA, 33 bp, Homo sapien
tagcaagcctgggttataggtatgcaaatacat

SEQ ID NO: 773533 - DNA, 33 bp, Homo sapien
acggaatcacgttgcaataaaaccatggttatg

SEQ ID NO: 773534 - DNA, 33 bp, Homo sapien
acggaatcacgttgcagtaaaaccatggttatg

SEQ ID NO: 773535 - DNA, 33 bp, Homo sapien
tgcatagaacattgtaaagtactggatgttagt

SEQ ID NO: 773536 - DNA, 33 bp, Homo sapien
tgcatagaacattgtagagtactggatgttagt

SEQ ID NO: 773537 - DNA, 33 bp, Homo sapien
atctggaccacaaagacgtggaagaaatggaat

SEQ ID NO: 773538 - DNA, 33 bp, Homo sapien
atctggaccacaaagatgtggaagaaatggaat

SEQ ID NO: 773539 - DNA, 33 bp, Homo sapien
acatgaaactcacaaacggcaaaataagtgtca

SEQ ID NO: 773540 - DNA, 33 bp, Homo sapien
acatgaaactcacaaatggcaaaataagtgtca

SEQ ID NO: 773541 - DNA, 33 bp, Homo sapien
ctagtacaacacgttacctacaaccaaattcat

SEQ ID NO: 773542 - DNA, 33 bp, Homo sapien
ctagtacaacacgttagctacaaccaaattcat

SEQ ID NO: 773543 - DNA, 33 bp, Homo sapien
ttagtaattttctcaacgaagtcacatattagg

SEQ ID NO: 773544 - DNA, 33 bp, Homo sapien
ttagtaattttctcaatgaagtcacatattagg

SEQ ID NO: 773545 - DNA, 33 bp, Homo sapien
gttaatgtatatgctgaattctacctcagaagg

SEQ ID NO: 773546 - DNA, 33 bp, Homo sapien
gttaatgtatatgctgcattctacctcagaagg

SEQ ID NO: 773547 - DNA, 33 bp, Homo sapien
aattttagacactctaacagtagtttccaggag

SEQ ID NO: 773548 - DNA, 33 bp, Homo sapien
aattttagacactctagcagtagtttccaggag

SEQ ID NO: 773549 - DNA, 33 bp, Homo sapien
ctgatttaaagcaaaaccacatctgtttatgag

SEQ ID NO: 773550 - DNA, 33 bp, Homo sapien
ctgatttaaagcaaaagcacatctgtttatgag

SEQ ID NO: 773551 - DNA, 33 bp, Homo sapien
agttttacatttgtcagatacttaacatttacc

SEQ ID NO: 773552 - DNA, 33 bp, Homo sapien
agttttacatttgtcatatacttaacatttacc

SEQ ID NO: 773553 - DNA, 33 bp, Homo sapien
tgatattcacagatcacaaagtagttagcaagg

SEQ ID NO: 773554 - DNA, 33 bp, Homo sapien
tgatattcacagatcataaagtagttagcaagg

SEQ ID NO: 773555 - DNA, 33 bp, Homo sapien
ctcctctctatacttcaagctaaacgggaagct

SEQ ID NO: 773556 - DNA, 33 bp, Homo sapien
ctcctctctatacttcgagctaaacgggaagct

SEQ ID NO: 773557 - DNA, 33 bp, Homo sapien
gggcttggggccagagaatttagttatttgtga

SEQ ID NO: 773558 - DNA, 33 bp, Homo sapien
gggcttggggccagagcatttagttatttgtga

SEQ ID NO: 773559 - DNA, 33 bp, Homo sapien
tatttgagagaaaaacaatggcaaattaatgca

SEQ ID NO: 773560 - DNA, 33 bp, Homo sapien
tatttgagagaaaaaccatggcaaattaatgca

SEQ ID NO: 773561 - DNA, 33 bp, Homo sapien
ctcatctactttaccaaggttacataatcaagt

SEQ ID NO: 773562 - DNA, 33 bp, Homo sapien
ctcatctactttaccagggttacataatcaagt

SEQ ID NO: 773563 - DNA, 33 bp, Homo sapien
agatcatcaaagattacggtgttttatgaatgt

SEQ ID NO: 773564 - DNA, 33 bp, Homo sapien
agatcatcaaagattatggtgttttatgaatgt

SEQ ID NO: 773565 - DNA, 33 bp, Homo sapien
catttatttgtgaacgcatttatcgagtattta

SEQ ID NO: 773566 - DNA, 33 bp, Homo sapien
catttatttgtgaacgtatttatcgagtattta

SEQ ID NO: 773567 - DNA, 33 bp, Homo sapien
actaggcctatcaaaaatgaacaaggacaaata

SEQ ID NO: 773568 - DNA, 33 bp, Homo sapien
actaggcctatcaaaagtgaacaaggacaaata

SEQ ID NO: 773569 - DNA, 33 bp, Homo sapien
cctttgttttaccaaccgtcaacaccagaatgt

SEQ ID NO: 773570 - DNA, 33 bp, Homo sapien
cctttgttttaccaactgtcaacaccagaatgt

SEQ ID NO: 773571 - DNA, 33 bp, Homo sapien
ctcagaatatgaaccacgctgtccacagtggct

SEQ ID NO: 773572 - DNA, 33 bp, Homo sapien
ctcagaatatgaaccatgctgtccacagtggct

SEQ ID NO: 773573 - DNA, 33 bp, Homo sapien
ccaccatttttatcccaagcaaagattctgatt

SEQ ID NO: 773574 - DNA, 33 bp, Homo sapien
ccaccatttttatccccagcaaagattctgatt

SEQ ID NO: 773575 - DNA, 33 bp, Homo sapien
aaggaaatggaggcccaaagagcttaagttatt

SEQ ID NO: 773576 - DNA, 33 bp, Homo sapien
aaggaaatggaggcccgaagagcttaagttatt

SEQ ID NO: 773577 - DNA, 33 bp, Homo sapien
aaggcactcagtctgaccctgcttcttttctcc

SEQ ID NO: 773578 - DNA, 33 bp, Homo sapien
aaggcactcagtctgatcctgcttcttttctcc

SEQ ID NO: 773579 - DNA, 33 bp, Homo sapien
ccgagtagagagactaactggaagagaggcata

SEQ ID NO: 773580 - DNA, 33 bp, Homo sapien
ccgagtagagagactacctggaagagaggcata

SEQ ID NO: 773581 - DNA, 33 bp, Homo sapien
agggacagcagaatgaagtgtttaatcatcaaa

SEQ ID NO: 773582 - DNA, 33 bp, Homo sapien
agggacagcagaatgaggtgtttaatcatcaaa

SEQ ID NO: 773583 - DNA, 33 bp, Homo sapien
ttagaaacaaggtcccaaattgtatcacctagg

SEQ ID NO: 773584 - DNA, 33 bp, Homo sapien
ttagaaacaaggtcccgaattgtatcacctagg

SEQ ID NO: 773585 - DNA, 33 bp, Homo sapien
acaattgaatagccaccgacattcaagatttta

SEQ ID NO: 773586 - DNA, 33 bp, Homo sapien
acaattgaatagccactgacattcaagatttta

SEQ ID NO: 773587 - DNA, 33 bp, Homo sapien
acccaggtgtcatgtaaccgccaataatttgga

SEQ ID NO: 773588 - DNA, 33 bp, Homo sapien
acccaggtgtcatgtagccgccaataatttgga

SEQ ID NO: 773589 - DNA, 33 bp, Homo sapien
tcttgcctttgaattaaccaagcttgtcacttc

SEQ ID NO: 773590 - DNA, 33 bp, Homo sapien
tcttgcctttgaattatccaagcttgtcacttc

SEQ ID NO: 773591 - DNA, 33 bp, Homo sapien
cagtgtagtagcaaagcagaactgaactttttc

SEQ ID NO: 773592 - DNA, 33 bp, Homo sapien
cagtgtagtagcaaaggagaactgaactttttc

SEQ ID NO: 773593 - DNA, 33 bp, Homo sapien
aaaacacatagaaacaaggtctggcacataata

SEQ ID NO: 773594 - DNA, 33 bp, Homo sapien
aaaacacatagaaacagggtctggcacataata

SEQ ID NO: 773595 - DNA, 33 bp, Homo sapien
ctgacaggatactcataaaaacccggtgggacc

SEQ ID NO: 773596 - DNA, 33 bp, Homo sapien
ctgacaggatactcatgaaaacccggtgggacc

SEQ ID NO: 773597 - DNA, 33 bp, Homo sapien
atgcagtaaagaacctgacaagccctcagatgc

SEQ ID NO: 773598 - DNA, 33 bp, Homo sapien
atgcagtaaagaaccttacaagccctcagatgc

SEQ ID NO: 773599 - DNA, 33 bp, Homo sapien
attctttgtttcagtaacttattgttgaacggt

SEQ ID NO: 773600 - DNA, 33 bp, Homo sapien
attctttgtttcagtagcttattgttgaacggt

SEQ ID NO: 773601 - DNA, 33 bp, Homo sapien
agagtttgacaagaaaagtgaaaataatagcta

SEQ ID NO: 773602 - DNA, 33 bp, Homo sapien
agagtttgacaagaaatgtgaaaataatagcta

SEQ ID NO: 773603 - DNA, 33 bp, Homo sapien
gccaagttcaaccagaaaatctagcaacaagtt

SEQ ID NO: 773604 - DNA, 33 bp, Homo sapien
gccaagttcaaccagacaatctagcaacaagtt

SEQ ID NO: 773605 - DNA, 33 bp, Homo sapien
ttcagggcttgcggtcaacaatctgggcctgag

SEQ ID NO: 773606 - DNA, 33 bp, Homo sapien
ttcagggcttgcggtcgacaatctgggcctgag

SEQ ID NO: 773607 - DNA, 33 bp, Homo sapien
actgtgagatcatgacaagtaaaacagacccag

SEQ ID NO: 773608 - DNA, 33 bp, Homo sapien
actgtgagatcatgacgagtaaaacagacccag

SEQ ID NO: 773609 - DNA, 33 bp, Homo sapien
tagaaaggactgttaaaaaatagtggtgtcagg

SEQ ID NO: 773610 - DNA, 33 bp, Homo sapien
tagaaaggactgttaataaatagtggtgtcagg

SEQ ID NO: 773611 - DNA, 33 bp, Homo sapien
cctcccctaatcactacgttcacatcatgctcc

SEQ ID NO: 773612 - DNA, 33 bp, Homo sapien
cctcccctaatcactatgttcacatcatgctcc

SEQ ID NO: 773613 - DNA, 33 bp, Homo sapien
agaaacttcattaaaacggcaaatggagaaaat

SEQ ID NO: 773614 - DNA, 33 bp, Homo sapien
agaaacttcattaaaatggcaaatggagaaaat

SEQ ID NO: 773615 - DNA, 33 bp, Homo sapien
tacctgaggttcctgacctatatgcctgcactc

SEQ ID NO: 773616 - DNA, 33 bp, Homo sapien
tacctgaggttcctgatctatatgcctgcactc

SEQ ID NO: 773617 - DNA, 33 bp, Homo sapien
tcaattcagttctggcacttgctcactagattg

SEQ ID NO: 773618 - DNA, 33 bp, Homo sapien
tcaattcagttctggcgcttgctcactagattg

SEQ ID NO: 773619 - DNA, 33 bp, Homo sapien
gggagataattacagcaaaacaagatagccagg

SEQ ID NO: 773620 - DNA, 33 bp, Homo sapien
gggagataattacagccaaacaagatagccagg

SEQ ID NO: 773621 - DNA, 33 bp, Homo sapien
ctgtcacattctcctcaagaagtaaagcttaag

SEQ ID NO: 773622 - DNA, 33 bp, Homo sapien
ctgtcacattctcctccagaagtaaagcttaag

SEQ ID NO: 773623 - DNA, 33 bp, Homo sapien
gaaatggtaaaatacaatgagagacgtcagaat

SEQ ID NO: 773624 - DNA, 33 bp, Homo sapien
gaaatggtaaaatacagtgagagacgtcagaat

SEQ ID NO: 773625 - DNA, 33 bp, Homo sapien
cctccctgtggcagaaaacctaagccaggcagg

SEQ ID NO: 773626 - DNA, 33 bp, Homo sapien
cctccctgtggcagaagacctaagccaggcagg

SEQ ID NO: 773627 - DNA, 33 bp, Homo sapien
attttcccttattccaccagtgccactgggaga

SEQ ID NO: 773628 - DNA, 33 bp, Homo sapien
attttcccttattccatcagtgccactgggaga

SEQ ID NO: 773629 - DNA, 33 bp, Homo sapien
ctgttgcaagatgaaaaaaacatttgcctaact

SEQ ID NO: 773630 - DNA, 33 bp, Homo sapien
ctgttgcaagatgaaagaaacatttgcctaact

SEQ ID NO: 773631 - DNA, 33 bp, Homo sapien
agggagcaattttaccactgagaagttcaaatg

SEQ ID NO: 773632 - DNA, 33 bp, Homo sapien
agggagcaattttacctctgagaagttcaaatg

SEQ ID NO: 773633 - DNA, 33 bp, Homo sapien
catctttctcatgtacactcctgaggaccacct

SEQ ID NO: 773634 - DNA, 33 bp, Homo sapien
catctttctcatgtacgctcctgaggaccacct

SEQ ID NO: 773635 - DNA, 33 bp, Homo sapien
aaaaggagtgattgtaagaagtcatataaatgg

SEQ ID NO: 773636 - DNA, 33 bp, Homo sapien
aaaaggagtgattgtaggaagtcatataaatgg

SEQ ID NO: 773637 - DNA, 33 bp, Homo sapien
tgctggtgtctttcaacggatgtctctgttaac

SEQ ID NO: 773638 - DNA, 33 bp, Homo sapien
tgctggtgtctttcaatggatgtctctgttaac

SEQ ID NO: 773639 - DNA, 33 bp, Homo sapien
cagagattctgatgccaaaggtgcagcaagctg

SEQ ID NO: 773640 - DNA, 33 bp, Homo sapien
cagagattctgatgccgaaggtgcagcaagctg

SEQ ID NO: 773641 - DNA, 33 bp, Homo sapien
cctttcttgtatatcccgagtacaaacacggtt

SEQ ID NO: 773642 - DNA, 33 bp, Homo sapien
cctttcttgtatatcctgagtacaaacacggtt

SEQ ID NO: 773643 - DNA, 33 bp, Homo sapien
aggaaataattaaggacatgcatagtgacccag

SEQ ID NO: 773644 - DNA, 33 bp, Homo sapien
aggaaataattaaggatatgcatagtgacccag

SEQ ID NO: 773645 - DNA, 33 bp, Homo sapien
agggatcctgaccacacgaaaaccataaccacc

SEQ ID NO: 773646 - DNA, 33 bp, Homo sapien
agggatcctgaccacatgaaaaccataaccacc

SEQ ID NO: 773647 - DNA, 33 bp, Homo sapien
tgttaatggatggggagcatctgattaaatgtt

SEQ ID NO: 773648 - DNA, 33 bp, Homo sapien
tgttaatggatggggatcatctgattaaatgtt

SEQ ID NO: 773649 - DNA, 33 bp, Homo sapien
tgttactcgtcagtcactcatttttgctaaatt

SEQ ID NO: 773650 - DNA, 33 bp, Homo sapien
tgttactcgtcagtcattcatttttgctaaatt

SEQ ID NO: 773651 - DNA, 33 bp, Homo sapien
cagaaactgggcttaaactgcatcatgagcaaa

SEQ ID NO: 773652 - DNA, 33 bp, Homo sapien
cagaaactgggcttaacctgcatcatgagcaaa

SEQ ID NO: 773653 - DNA, 33 bp, Homo sapien
ccaagatgaggctgcacaacacatgtgaagacg

SEQ ID NO: 773654 - DNA, 33 bp, Homo sapien
ccaagatgaggctgcataacacatgtgaagacg

SEQ ID NO: 773655 - DNA, 33 bp, Homo sapien
taacgacaagcatgataaatactccaagtggga

SEQ ID NO: 773656 - DNA, 33 bp, Homo sapien
taacgacaagcatgatgaatactccaagtggga

SEQ ID NO: 773657 - DNA, 33 bp, Homo sapien
taaagcaggattatcggatctcttggtcttcat

SEQ ID NO: 773658 - DNA, 33 bp, Homo sapien
taaagcaggattatcgtatctcttggtcttcat

SEQ ID NO: 773659 - DNA, 33 bp, Homo sapien
ataacctacagcttaaacgaggaaggcaaccta

SEQ ID NO: 773660 - DNA, 33 bp, Homo sapien
ataacctacagcttaatcgaggaaggcaaccta

SEQ ID NO: 773661 - DNA, 33 bp, Homo sapien
acagcaacatacaaaaagtagtccttgttctgg

SEQ ID NO: 773662 - DNA, 33 bp, Homo sapien
acagcaacatacaaaacgtagtccttgttctgg

SEQ ID NO: 773663 - DNA, 33 bp, Homo sapien
tgtagtccttagatataaggctggctaacactg

SEQ ID NO: 773664 - DNA, 33 bp, Homo sapien
tgtagtccttagatatgaggctggctaacactg

SEQ ID NO: 773665 - DNA, 33 bp, Homo sapien
ttgtttctgaaagctcaaaccagaatctgcttg

SEQ ID NO: 773666 - DNA, 33 bp, Homo sapien
ttgtttctgaaagctccaaccagaatctgcttg

SEQ ID NO: 773667 - DNA, 33 bp, Homo sapien
taacttcctcagggaaccagtctatactgtaga

SEQ ID NO: 773668 - DNA, 33 bp, Homo sapien
taacttcctcagggaagcagtctatactgtaga

SEQ ID NO: 773669 - DNA, 33 bp, Homo sapien
attgagaagaatccccaaaaaagttactattaa

SEQ ID NO: 773670 - DNA, 33 bp, Homo sapien
attgagaagaatcccccaaaaagttactattaa

SEQ ID NO: 773671 - DNA, 33 bp, Homo sapien
agaagtttccaaatgacgttatagacagggaag

SEQ ID NO: 773672 - DNA, 33 bp, Homo sapien
agaagtttccaaatgatgttatagacagggaag

SEQ ID NO: 773673 - DNA, 33 bp, Homo sapien
atgtacttcagtgaacggcaaacaaacagatca

SEQ ID NO: 773674 - DNA, 33 bp, Homo sapien
atgtacttcagtgaactgcaaacaaacagatca

SEQ ID NO: 773675 - DNA, 33 bp, Homo sapien
ttctcttgtcaactaaagcaagactgggtaagg

SEQ ID NO: 773676 - DNA, 33 bp, Homo sapien
ttctcttgtcaactaaggcaagactgggtaagg

SEQ ID NO: 773677 - DNA, 33 bp, Homo sapien
ctgtgatgctataaaccccagctactaacaaat

SEQ ID NO: 773678 - DNA, 33 bp, Homo sapien
ctgtgatgctataaactccagctactaacaaat

SEQ ID NO: 773679 - DNA, 33 bp, Homo sapien
attaccagacaaatgacgttttgagaattatgg

SEQ ID NO: 773680 - DNA, 33 bp, Homo sapien
attaccagacaaatgatgttttgagaattatgg

SEQ ID NO: 773681 - DNA, 33 bp, Homo sapien
aggaccttgaaggtgaagttgagagatttgaac

SEQ ID NO: 773682 - DNA, 33 bp, Homo sapien
aggaccttgaaggtgaggttgagagatttgaac

SEQ ID NO: 773683 - DNA, 33 bp, Homo sapien
agaagtccaaacaaaacaggtttcagaaagagg

SEQ ID NO: 773684 - DNA, 33 bp, Homo sapien
agaagtccaaacaaaataggtttcagaaagagg

SEQ ID NO: 773685 - DNA, 33 bp, Homo sapien
ttgatcgcaagcaaagaaaaagtacacatagaa

SEQ ID NO: 773686 - DNA, 33 bp, Homo sapien
ttgatcgcaagcaaaggaaaagtacacatagaa

SEQ ID NO: 773687 - DNA, 33 bp, Homo sapien
tgagtttttcaatccacgaatggggtatgcctc

SEQ ID NO: 773688 - DNA, 33 bp, Homo sapien
tgagtttttcaatccatgaatggggtatgcctc

SEQ ID NO: 773689 - DNA, 33 bp, Homo sapien
caaggacttgtatctacaataggtaaagattat

SEQ ID NO: 773690 - DNA, 33 bp, Homo sapien
caaggacttgtatctagaataggtaaagattat

SEQ ID NO: 773691 - DNA, 33 bp, Homo sapien
cattgaagcacactcaaagtatttccagattgg

SEQ ID NO: 773692 - DNA, 33 bp, Homo sapien
cattgaagcacactcacagtatttccagattgg

SEQ ID NO: 773693 - DNA, 33 bp, Homo sapien
ctcgtctccctgcttccacttcttccctgctat

SEQ ID NO: 773694 - DNA, 33 bp, Homo sapien
ctcgtctccctgcttctacttcttccctgctat

SEQ ID NO: 773695 - DNA, 33 bp, Homo sapien
atttgagggcacattaaccttgcctgagtgtca

SEQ ID NO: 773696 - DNA, 33 bp, Homo sapien
atttgagggcacattacccttgcctgagtgtca

SEQ ID NO: 773697 - DNA, 33 bp, Homo sapien
gtgattatatagttaacgctcccatgaggggga

SEQ ID NO: 773698 - DNA, 33 bp, Homo sapien
gtgattatatagttaatgctcccatgaggggga

SEQ ID NO: 773699 - DNA, 33 bp, Homo sapien
gagacaaatagaggaacggaaagttttgcctac

SEQ ID NO: 773700 - DNA, 33 bp, Homo sapien
gagacaaatagaggaatggaaagttttgcctac

SEQ ID NO: 773701 - DNA, 33 bp, Homo sapien
tcctaatagtctcttccaaaaagcactttaggt

SEQ ID NO: 773702 - DNA, 33 bp, Homo sapien
tcctaatagtctcttctaaaaagcactttaggt

SEQ ID NO: 773703 - DNA, 33 bp, Homo sapien
gtcttcactggtgtctaacaaagcctgtgatgc

SEQ ID NO: 773704 - DNA, 33 bp, Homo sapien
gtcttcactggtgtctgacaaagcctgtgatgc

SEQ ID NO: 773705 - DNA, 33 bp, Homo sapien
gggaaggcactccattaaactggtccctattgt

SEQ ID NO: 773706 - DNA, 33 bp, Homo sapien
gggaaggcactccattgaactggtccctattgt

SEQ ID NO: 773707 - DNA, 33 bp, Homo sapien
ttagccgtattgtggcactttacatcagtaagt

SEQ ID NO: 773708 - DNA, 33 bp, Homo sapien
ttagccgtattgtggcgctttacatcagtaagt

SEQ ID NO: 773709 - DNA, 33 bp, Homo sapien
acatttttaggagtccaataatctgaggcatgc

SEQ ID NO: 773710 - DNA, 33 bp, Homo sapien
acatttttaggagtccgataatctgaggcatgc

SEQ ID NO: 773711 - DNA, 33 bp, Homo sapien
cacactgcttaattggaataggtgccaccttcc

SEQ ID NO: 773712 - DNA, 33 bp, Homo sapien
cacactgcttaattggcataggtgccaccttcc

SEQ ID NO: 773713 - DNA, 33 bp, Homo sapien
ggatggcacaaagaagcattgcaccggagagta

SEQ ID NO: 773714 - DNA, 33 bp, Homo sapien
ggatggcacaaagaagtattgcaccggagagta

SEQ ID NO: 773715 - DNA, 33 bp, Homo sapien
gtttcttctagagcaaatccttcactcatgtat

SEQ ID NO: 773716 - DNA, 33 bp, Homo sapien
gtttcttctagagcaagtccttcactcatgtat

SEQ ID NO: 773717 - DNA, 33 bp, Homo sapien
taacttcagcaaaaaagggaaaatacacagatg

SEQ ID NO: 773718 - DNA, 33 bp, Homo sapien
taacttcagcaaaaaatggaaaatacacagatg

SEQ ID NO: 773719 - DNA, 33 bp, Homo sapien
tgagaatagtgtctacggctatgtcttaaagtt

SEQ ID NO: 773720 - DNA, 33 bp, Homo sapien
tgagaatagtgtctactgctatgtcttaaagtt

SEQ ID NO: 773721 - DNA, 33 bp, Homo sapien
ctgtacagagaaagaacgccagtgatctaccaa

SEQ ID NO: 773722 - DNA, 33 bp, Homo sapien
ctgtacagagaaagaatgccagtgatctaccaa

SEQ ID NO: 773723 - DNA, 33 bp, Homo sapien
caactacagaacgaagccaagaacacggtcagg

SEQ ID NO: 773724 - DNA, 33 bp, Homo sapien
caactacagaacgaagtcaagaacacggtcagg

SEQ ID NO: 773725 - DNA, 33 bp, Homo sapien
tgctgcctcatgataccataggaggtttaaaaa

SEQ ID NO: 773726 - DNA, 33 bp, Homo sapien
tgctgcctcatgatactataggaggtttaaaaa

SEQ ID NO: 773727 - DNA, 33 bp, Homo sapien
actggacatgagaggaactaattgaggagattc

SEQ ID NO: 773728 - DNA, 33 bp, Homo sapien
actggacatgagaggagctaattgaggagattc

SEQ ID NO: 773729 - DNA, 33 bp, Homo sapien
tgaggctgaagcatcacgtatgttacggagaag

SEQ ID NO: 773730 - DNA, 33 bp, Homo sapien
tgaggctgaagcatcatgtatgttacggagaag

SEQ ID NO: 773731 - DNA, 33 bp, Homo sapien
tatgttacggagaagcaaaaggcaggaggaaaa

SEQ ID NO: 773732 - DNA, 33 bp, Homo sapien
tatgttacggagaagcgaaaggcaggaggaaaa

SEQ ID NO: 773733 - DNA, 33 bp, Homo sapien
aacacacatgaaaagcagaaagtcaaaatctcc

SEQ ID NO: 773734 - DNA, 33 bp, Homo sapien
aacacacatgaaaagcggaaagtcaaaatctcc

SEQ ID NO: 773735 - DNA, 33 bp, Homo sapien
gcccaggctgcctgcaccgttgtctgagtaaat

SEQ ID NO: 773736 - DNA, 33 bp, Homo sapien
gcccaggctgcctgcatcgttgtctgagtaaat

SEQ ID NO: 773737 - DNA, 33 bp, Homo sapien
catagtcaatgcacagcagttctgaaaagcagt

SEQ ID NO: 773738 - DNA, 33 bp, Homo sapien
catagtcaatgcacaggagttctgaaaagcagt

SEQ ID NO: 773739 - DNA, 33 bp, Homo sapien
agcagaggaaaatgaagtggagcccgttgaata

SEQ ID NO: 773740 - DNA, 33 bp, Homo sapien
agcagaggaaaatgaattggagcccgttgaata

SEQ ID NO: 773741 - DNA, 33 bp, Homo sapien
ctgagatggctaaaggaattaaaaatggtatct

SEQ ID NO: 773742 - DNA, 33 bp, Homo sapien
ctgagatggctaaagggattaaaaatggtatct

SEQ ID NO: 773743 - DNA, 33 bp, Homo sapien
acagtttgctttaagactccaaacattagcatg

SEQ ID NO: 773744 - DNA, 33 bp, Homo sapien
acagtttgctttaagagtccaaacattagcatg

SEQ ID NO: 773745 - DNA, 33 bp, Homo sapien
atttctacgattaaagcaagtacatataagctg

SEQ ID NO: 773746 - DNA, 33 bp, Homo sapien
atttctacgattaaagtaagtacatataagctg

SEQ ID NO: 773747 - DNA, 33 bp, Homo sapien
ttgaagggctgacacacaagggtatgctataat

SEQ ID NO: 773748 - DNA, 33 bp, Homo sapien
ttgaagggctgacacagaagggtatgctataat

SEQ ID NO: 773749 - DNA, 33 bp, Homo sapien
tgtttctttaccctacagactatcttcattgtc

SEQ ID NO: 773750 - DNA, 33 bp, Homo sapien
tgtttctttaccctactgactatcttcattgtc

SEQ ID NO: 773751 - DNA, 33 bp, Homo sapien
actgccgctactttgccaatgatagatctatcc

SEQ ID NO: 773752 - DNA, 33 bp, Homo sapien
actgccgctactttgctaatgatagatctatcc

SEQ ID NO: 773753 - DNA, 33 bp, Homo sapien
ccttcctagacattccgattctcttcactccta

SEQ ID NO: 773754 - DNA, 33 bp, Homo sapien
ccttcctagacattcctattctcttcactccta

SEQ ID NO: 773755 - DNA, 33 bp, Homo sapien
ttcactcattcattcacccgtagaaaaaatatt

SEQ ID NO: 773756 - DNA, 33 bp, Homo sapien
ttcactcattcattcatccgtagaaaaaatatt

SEQ ID NO: 773757 - DNA, 33 bp, Homo sapien
ctacaacaggaaagaacgtgggactttgctgag

SEQ ID NO: 773758 - DNA, 33 bp, Homo sapien
ctacaacaggaaagaatgtgggactttgctgag

SEQ ID NO: 773759 - DNA, 33 bp, Homo sapien
agtgggattgttggcacatatggtaaatgtatg

SEQ ID NO: 773760 - DNA, 33 bp, Homo sapien
agtgggattgttggcatatatggtaaatgtatg

SEQ ID NO: 773761 - DNA, 33 bp, Homo sapien
ccagaatagtcagagacgggacattacacaaat

SEQ ID NO: 773762 - DNA, 33 bp, Homo sapien
ccagaatagtcagagatgggacattacacaaat

SEQ ID NO: 773763 - DNA, 33 bp, Homo sapien
agatggggaagcttccaagaatagtcgtggcaa

SEQ ID NO: 773764 - DNA, 33 bp, Homo sapien
agatggggaagcttccgagaatagtcgtggcaa

SEQ ID NO: 773765 - DNA, 33 bp, Homo sapien
ttgacactgacaaggacggagacattttgattg

SEQ ID NO: 773766 - DNA, 33 bp, Homo sapien
ttgacactgacaaggagggagacattttgattg

SEQ ID NO: 773767 - DNA, 33 bp, Homo sapien
ttgagactgcaacatacggattttggagggaca

SEQ ID NO: 773768 - DNA, 33 bp, Homo sapien
ttgagactgcaacatatggattttggagggaca

SEQ ID NO: 773769 - DNA, 33 bp, Homo sapien
ttaaactattgtctataaagagctgcaatttat

SEQ ID NO: 773770 - DNA, 33 bp, Homo sapien
ttaaactattgtctatgaagagctgcaatttat

SEQ ID NO: 773771 - DNA, 33 bp, Homo sapien
ctacaccttatgattacgatagtgattattccc

SEQ ID NO: 773772 - DNA, 33 bp, Homo sapien
ctacaccttatgattatgatagtgattattccc

SEQ ID NO: 773773 - DNA, 33 bp, Homo sapien
gaagaaacaaaactataactcttcatagctgct

SEQ ID NO: 773774 - DNA, 33 bp, Homo sapien
gaagaaacaaaactatcactcttcatagctgct

SEQ ID NO: 773775 - DNA, 33 bp, Homo sapien
gaaagggaccaaaaaaaaatgcaagagcttttc

SEQ ID NO: 773776 - DNA, 33 bp, Homo sapien
gaaagggaccaaaaaataatgcaagagcttttc

SEQ ID NO: 773777 - DNA, 33 bp, Homo sapien
ggctagggcctgttgaagactattgacatgaag

SEQ ID NO: 773778 - DNA, 33 bp, Homo sapien
ggctagggcctgttgaggactattgacatgaag

SEQ ID NO: 773779 - DNA, 33 bp, Homo sapien
tcaagcgaagttattacactggggaccaacaca

SEQ ID NO: 773780 - DNA, 33 bp, Homo sapien
tcaagcgaagttattagactggggaccaacaca

SEQ ID NO: 773781 - DNA, 33 bp, Homo sapien
atttcaaatgagctaccattttattgaatatct

SEQ ID NO: 773782 - DNA, 33 bp, Homo sapien
atttcaaatgagctacgattttattgaatatct

SEQ ID NO: 773783 - DNA, 33 bp, Homo sapien
taacattagcagacaacttagcaggctttgagc

SEQ ID NO: 773784 - DNA, 33 bp, Homo sapien
taacattagcagacaatttagcaggctttgagc

SEQ ID NO: 773785 - DNA, 33 bp, Homo sapien
tgatgctaagaaatataaactctctcgtacagt

SEQ ID NO: 773786 - DNA, 33 bp, Homo sapien
tgatgctaagaaatatgaactctctcgtacagt

SEQ ID NO: 773787 - DNA, 33 bp, Homo sapien
ttgcagggctgatatccatctgcagcggtatgc

SEQ ID NO: 773788 - DNA, 33 bp, Homo sapien
ttgcagggctgatatctatctgcagcggtatgc

SEQ ID NO: 773789 - DNA, 33 bp, Homo sapien
ccatttactcttaaacaagttcccagtatctta

SEQ ID NO: 773790 - DNA, 33 bp, Homo sapien
ccatttactcttaaacgagttcccagtatctta

SEQ ID NO: 773791 - DNA, 33 bp, Homo sapien
aacaaaaataagacccaattccctcatcactcc

SEQ ID NO: 773792 - DNA, 33 bp, Homo sapien
aacaaaaataagacccgattccctcatcactcc

SEQ ID NO: 773793 - DNA, 33 bp, Homo sapien
ttctgccttagagaaacttccaaaatgatgtct

SEQ ID NO: 773794 - DNA, 33 bp, Homo sapien
ttctgccttagagaaagttccaaaatgatgtct

SEQ ID NO: 773795 - DNA, 33 bp, Homo sapien
taataatttaatcaccactatgtgatctgctga

SEQ ID NO: 773796 - DNA, 33 bp, Homo sapien
taataatttaatcaccgctatgtgatctgctga

SEQ ID NO: 773797 - DNA, 33 bp, Homo sapien
ctaaggacaatagcaacgcaagaaatcaggtca

SEQ ID NO: 773798 - DNA, 33 bp, Homo sapien
ctaaggacaatagcaatgcaagaaatcaggtca

SEQ ID NO: 773799 - DNA, 33 bp, Homo sapien
tacagtccaaaggcaaacttacaaaaagactga

SEQ ID NO: 773800 - DNA, 33 bp, Homo sapien
tacagtccaaaggcaatcttacaaaaagactga

SEQ ID NO: 773801 - DNA, 33 bp, Homo sapien
tctctagggattcatcactgaaagttgcctctg

SEQ ID NO: 773802 - DNA, 33 bp, Homo sapien
tctctagggattcatcgctgaaagttgcctctg

SEQ ID NO: 773803 - DNA, 33 bp, Homo sapien
gtgtacatagagctgaactgacaggccaaagag

SEQ ID NO: 773804 - DNA, 33 bp, Homo sapien
gtgtacatagagctgagctgacaggccaaagag

SEQ ID NO: 773805 - DNA, 33 bp, Homo sapien
caaaaagagaaagtgacgaatcaagtttccaaa

SEQ ID NO: 773806 - DNA, 33 bp, Homo sapien
caaaaagagaaagtgatgaatcaagtttccaaa

SEQ ID NO: 773807 - DNA, 33 bp, Homo sapien
cccacttgaccttagactatcttcaaactcata

SEQ ID NO: 773808 - DNA, 33 bp, Homo sapien
cccacttgaccttagagtatcttcaaactcata

SEQ ID NO: 773809 - DNA, 33 bp, Homo sapien
acatcactgcctggcacatatctaataattagt

SEQ ID NO: 773810 - DNA, 33 bp, Homo sapien
acatcactgcctggcatatatctaataattagt

SEQ ID NO: 773811 - DNA, 33 bp, Homo sapien
aacattctgcagctagaaaaataagtaccttga

SEQ ID NO: 773812 - DNA, 33 bp, Homo sapien
aacattctgcagctaggaaaataagtaccttga

SEQ ID NO: 773813 - DNA, 33 bp, Homo sapien
agaagacaatttggaactaaaagacttgagaat

SEQ ID NO: 773814 - DNA, 33 bp, Homo sapien
agaagacaatttggaattaaaagacttgagaat

SEQ ID NO: 773815 - DNA, 33 bp, Homo sapien
gtatcagttttaggaaacaactcttctataccc

SEQ ID NO: 773816 - DNA, 33 bp, Homo sapien
gtatcagttttaggaagcaactcttctataccc

SEQ ID NO: 773817 - DNA, 33 bp, Homo sapien
attgttgtgcagttgccaaataacctcattgtt

SEQ ID NO: 773818 - DNA, 33 bp, Homo sapien
attgttgtgcagttgctaaataacctcattgtt

SEQ ID NO: 773819 - DNA, 33 bp, Homo sapien
ccctgccatgctattgaaaagctactagatcac

SEQ ID NO: 773820 - DNA, 33 bp, Homo sapien
ccctgccatgctattggaaagctactagatcac

SEQ ID NO: 773821 - DNA, 33 bp, Homo sapien
atcagggttagactgacgtgtttaactccaaag

SEQ ID NO: 773822 - DNA, 33 bp, Homo sapien
atcagggttagactgatgtgtttaactccaaag

SEQ ID NO: 773823 - DNA, 33 bp, Homo sapien
tagattttgagtacagcagattgccttcaaaat

SEQ ID NO: 773824 - DNA, 33 bp, Homo sapien
tagattttgagtacagtagattgccttcaaaat

SEQ ID NO: 773825 - DNA, 33 bp, Homo sapien
cattctttgttcttggaatgcatgtatgtatgt

SEQ ID NO: 773826 - DNA, 33 bp, Homo sapien
cattctttgttcttgggatgcatgtatgtatgt

SEQ ID NO: 773827 - DNA, 33 bp, Homo sapien
taaatatattctcccaactatttgcatggctgg

SEQ ID NO: 773828 - DNA, 33 bp, Homo sapien
taaatatattctcccagctatttgcatggctgg

SEQ ID NO: 773829 - DNA, 33 bp, Homo sapien
tataagcaagaatgaactgtgaattagcagaat

SEQ ID NO: 773830 - DNA, 33 bp, Homo sapien
tataagcaagaatgaattgtgaattagcagaat

SEQ ID NO: 773831 - DNA, 33 bp, Homo sapien
aggaaaaaccaacataagcaatgaggttaagca

SEQ ID NO: 773832 - DNA, 33 bp, Homo sapien
aggaaaaaccaacataggcaatgaggttaagca

SEQ ID NO: 773833 - DNA, 33 bp, Homo sapien
actacagctggtcatacacttaagcaaggttta

SEQ ID NO: 773834 - DNA, 33 bp, Homo sapien
actacagctggtcatatacttaagcaaggttta

SEQ ID NO: 773835 - DNA, 33 bp, Homo sapien
agatattttctgttcacagctcagtgccactta

SEQ ID NO: 773836 - DNA, 33 bp, Homo sapien
agatattttctgttcatagctcagtgccactta

SEQ ID NO: 773837 - DNA, 33 bp, Homo sapien
ttgagacagactcctacctgtgtgggctactgg

SEQ ID NO: 773838 - DNA, 33 bp, Homo sapien
ttgagacagactcctagctgtgtgggctactgg

SEQ ID NO: 773839 - DNA, 33 bp, Homo sapien
ataatctcaatcttgtaaatgaaatcaaaagcc

SEQ ID NO: 773840 - DNA, 33 bp, Homo sapien
ataatctcaatcttgtgaatgaaatcaaaagcc

SEQ ID NO: 773841 - DNA, 33 bp, Homo sapien
tcatgaatgaaaaccgcattttgaatatcatat

SEQ ID NO: 773842 - DNA, 33 bp, Homo sapien
tcatgaatgaaaaccgtattttgaatatcatat

SEQ ID NO: 773843 - DNA, 33 bp, Homo sapien
gtgagcatctctattacaggggacatcctggac

SEQ ID NO: 773844 - DNA, 33 bp, Homo sapien
gtgagcatctctattagaggggacatcctggac

SEQ ID NO: 773845 - DNA, 33 bp, Homo sapien
gcctcaagtttcagcaagcatttgttaatctgg

SEQ ID NO: 773846 - DNA, 33 bp, Homo sapien
gcctcaagtttcagcaggcatttgttaatctgg

SEQ ID NO: 773847 - DNA, 33 bp, Homo sapien
aatagatttagatcaactgaatcacggcttaaa

SEQ ID NO: 773848 - DNA, 33 bp, Homo sapien
aatagatttagatcaattgaatcacggcttaaa

SEQ ID NO: 773849 - DNA, 33 bp, Homo sapien
tagttgcagcaggcagaaattttgttaccatga

SEQ ID NO: 773850 - DNA, 33 bp, Homo sapien
tagttgcagcaggcaggaattttgttaccatga

SEQ ID NO: 773851 - DNA, 33 bp, Homo sapien
cacatttctgtgaaaaacattcccccaaatgcc

SEQ ID NO: 773852 - DNA, 33 bp, Homo sapien
cacatttctgtgaaaagcattcccccaaatgcc

SEQ ID NO: 773853 - DNA, 33 bp, Homo sapien
ttgtgtaggtcatagaaaaaagaacaaatcagt

SEQ ID NO: 773854 - DNA, 33 bp, Homo sapien
ttgtgtaggtcatagataaaagaacaaatcagt

SEQ ID NO: 773855 - DNA, 33 bp, Homo sapien
ctaatgtagagcgggtcaagcccaggctctcag

SEQ ID NO: 773856 - DNA, 33 bp, Homo sapien
ctaatgtagagcgggtgaagcccaggctctcag

SEQ ID NO: 773857 - DNA, 33 bp, Homo sapien
tgatgtcaaatttcccaaaggtatccaataaat

SEQ ID NO: 773858 - DNA, 33 bp, Homo sapien
tgatgtcaaatttcccgaaggtatccaataaat

SEQ ID NO: 773859 - DNA, 33 bp, Homo sapien
gtggattcctcattaacggtttagcaccaaccc

SEQ ID NO: 773860 - DNA, 33 bp, Homo sapien
gtggattcctcattaatggtttagcaccaaccc

SEQ ID NO: 773861 - DNA, 33 bp, Homo sapien
agaagggagaccatgacgagcttgaaagcaatt

SEQ ID NO: 773862 - DNA, 33 bp, Homo sapien
agaagggagaccatgatgagcttgaaagcaatt

SEQ ID NO: 773863 - DNA, 33 bp, Homo sapien
tgcaaactatgcatccaataatggtctgatatc

SEQ ID NO: 773864 - DNA, 33 bp, Homo sapien
tgcaaactatgcatccgataatggtctgatatc

SEQ ID NO: 773865 - DNA, 33 bp, Homo sapien
gtcatttcctcattgagtacgttttaattatat

SEQ ID NO: 773866 - DNA, 33 bp, Homo sapien
gtcatttcctcattgattacgttttaattatat

SEQ ID NO: 773867 - DNA, 33 bp, Homo sapien
tgatcaactaacctaggatgcctacatccctca

SEQ ID NO: 773868 - DNA, 33 bp, Homo sapien
tgatcaactaacctagtatgcctacatccctca

SEQ ID NO: 773869 - DNA, 33 bp, Homo sapien
agagaaagagaatgaacgataagacaaatgtgt

SEQ ID NO: 773870 - DNA, 33 bp, Homo sapien
agagaaagagaatgaatgataagacaaatgtgt

SEQ ID NO: 773871 - DNA, 33 bp, Homo sapien
cagcagcagcttttaaaaaagtatgaccttctc

SEQ ID NO: 773872 - DNA, 33 bp, Homo sapien
cagcagcagcttttaataaagtatgaccttctc

SEQ ID NO: 773873 - DNA, 33 bp, Homo sapien
tggaactaattaaatacacggacagacaaacaa

SEQ ID NO: 773874 - DNA, 33 bp, Homo sapien
tggaactaattaaatatacggacagacaaacaa

SEQ ID NO: 773875 - DNA, 33 bp, Homo sapien
ccctggcatcttacaaattatggtagcaataaa

SEQ ID NO: 773876 - DNA, 33 bp, Homo sapien
ccctggcatcttacaacttatggtagcaataaa

SEQ ID NO: 773877 - DNA, 33 bp, Homo sapien
agtgcatgcatgaagactaagaagttcctctca

SEQ ID NO: 773878 - DNA, 33 bp, Homo sapien
agtgcatgcatgaagattaagaagttcctctca

SEQ ID NO: 773879 - DNA, 33 bp, Homo sapien
ttttggagaaggataacgggctaaggtggagag

SEQ ID NO: 773880 - DNA, 33 bp, Homo sapien
ttttggagaaggataatgggctaaggtggagag

SEQ ID NO: 773881 - DNA, 33 bp, Homo sapien
actagttttcctaagaatccagctcaacttacc

SEQ ID NO: 773882 - DNA, 33 bp, Homo sapien
actagttttcctaagactccagctcaacttacc

SEQ ID NO: 773883 - DNA, 33 bp, Homo sapien
cttaggaaaactagtaaggaagctcttgctcat

SEQ ID NO: 773884 - DNA, 33 bp, Homo sapien
cttaggaaaactagtatggaagctcttgctcat

SEQ ID NO: 773885 - DNA, 33 bp, Homo sapien
acatggtacaaaagacagattaagttactacct

SEQ ID NO: 773886 - DNA, 33 bp, Homo sapien
acatggtacaaaagacggattaagttactacct

SEQ ID NO: 773887 - DNA, 33 bp, Homo sapien
tgagtacaatccggaacatcagtcagggccctg

SEQ ID NO: 773888 - DNA, 33 bp, Homo sapien
tgagtacaatccggaatatcagtcagggccctg

SEQ ID NO: 773889 - DNA, 33 bp, Homo sapien
cagagaaacaagcacaagtaccaggcacaccac

SEQ ID NO: 773890 - DNA, 33 bp, Homo sapien
cagagaaacaagcacaggtaccaggcacaccac

SEQ ID NO: 773891 - DNA, 33 bp, Homo sapien
atggagcagatattacacctattttacagctgg

SEQ ID NO: 773892 - DNA, 33 bp, Homo sapien
atggagcagatattacgcctattttacagctgg

SEQ ID NO: 773893 - DNA, 33 bp, Homo sapien
agacaggacttgaggacggatgggatgactgta

SEQ ID NO: 773894 - DNA, 33 bp, Homo sapien
agacaggacttgaggatggatgggatgactgta

SEQ ID NO: 773895 - DNA, 33 bp, Homo sapien
acattggagtccctcaataatcaacacatgccc

SEQ ID NO: 773896 - DNA, 33 bp, Homo sapien
acattggagtccctcagtaatcaacacatgccc

SEQ ID NO: 773897 - DNA, 33 bp, Homo sapien
gcctatttgcaccaccagggacaattagagcaa

SEQ ID NO: 773898 - DNA, 33 bp, Homo sapien
gcctatttgcaccaccggggacaattagagcaa

SEQ ID NO: 773899 - DNA, 33 bp, Homo sapien
aacacaaaattctatcaataagcatagcctaat

SEQ ID NO: 773900 - DNA, 33 bp, Homo sapien
aacacaaaattctatcgataagcatagcctaat

SEQ ID NO: 773901 - DNA, 33 bp, Homo sapien
tactctaaatgtttaacgacaaaggtactggta

SEQ ID NO: 773902 - DNA, 33 bp, Homo sapien
tactctaaatgtttaatgacaaaggtactggta

SEQ ID NO: 773903 - DNA, 33 bp, Homo sapien
atcatcctgaagagtcaaggagatgagaagtgg

SEQ ID NO: 773904 - DNA, 33 bp, Homo sapien
atcatcctgaagagtcgaggagatgagaagtgg

SEQ ID NO: 773905 - DNA, 33 bp, Homo sapien
acaggtgattgtaatacgcaacaagttgagagc

SEQ ID NO: 773906 - DNA, 33 bp, Homo sapien
acaggtgattgtaatatgcaacaagttgagagc

SEQ ID NO: 773907 - DNA, 33 bp, Homo sapien
atcactcactcttccccgacttctttcaatttg

SEQ ID NO: 773908 - DNA, 33 bp, Homo sapien
atcactcactcttccctgacttctttcaatttg

SEQ ID NO: 773909 - DNA, 33 bp, Homo sapien
cacaaggacatgtcaaagagaaagaaaagaggg

SEQ ID NO: 773910 - DNA, 33 bp, Homo sapien
cacaaggacatgtcaaggagaaagaaaagaggg

SEQ ID NO: 773911 - DNA, 33 bp, Homo sapien
gagaccagagtaatagaagaggtgacaatggaa

SEQ ID NO: 773912 - DNA, 33 bp, Homo sapien
gagaccagagtaataggagaggtgacaatggaa

SEQ ID NO: 773913 - DNA, 33 bp, Homo sapien
gagtatttatagaaaggctacagagatgttttc

SEQ ID NO: 773914 - DNA, 33 bp, Homo sapien
gagtatttatagaaagtctacagagatgttttc

SEQ ID NO: 773915 - DNA, 33 bp, Homo sapien
ctagagatgaggctaacattgccatcttctaaa

SEQ ID NO: 773916 - DNA, 33 bp, Homo sapien
ctagagatgaggctaatattgccatcttctaaa

SEQ ID NO: 773917 - DNA, 33 bp, Homo sapien
caattagctgaagacccggatagaacaaaaaac

SEQ ID NO: 773918 - DNA, 33 bp, Homo sapien
caattagctgaagacctggatagaacaaaaaac

SEQ ID NO: 773919 - DNA, 33 bp, Homo sapien
cttggtgtctggacataaggtgctaagtctcca

SEQ ID NO: 773920 - DNA, 33 bp, Homo sapien
cttggtgtctggacatgaggtgctaagtctcca

SEQ ID NO: 773921 - DNA, 33 bp, Homo sapien
ggcagctgaagtaaacaagtgaaatggatgaag

SEQ ID NO: 773922 - DNA, 33 bp, Homo sapien
ggcagctgaagtaaacgagtgaaatggatgaag

SEQ ID NO: 773923 - DNA, 33 bp, Homo sapien
tttgtaacttagaaacaaattatgactttgaat

SEQ ID NO: 773924 - DNA, 33 bp, Homo sapien
tttgtaacttagaaaccaattatgactttgaat

SEQ ID NO: 773925 - DNA, 33 bp, Homo sapien
atcaggatcttctgagaaagagattaggaaatc

SEQ ID NO: 773926 - DNA, 33 bp, Homo sapien
atcaggatcttctgagtaagagattaggaaatc

SEQ ID NO: 773927 - DNA, 33 bp, Homo sapien
tctctgatgcccaccacatccgtgtcagttagg

SEQ ID NO: 773928 - DNA, 33 bp, Homo sapien
tctctgatgcccaccatatccgtgtcagttagg

SEQ ID NO: 773929 - DNA, 33 bp, Homo sapien; identical to SEQ ID NO: 773927

SEQ ID NO: 773930 - DNA, 33 bp, Homo sapien; identical to SEQ ID NO: 773928

SEQ ID NO: 773931 - DNA, 33 bp, Homo sapien
atgttctgttttccaactcaagatcagggcatt

SEQ ID NO: 773932 - DNA, 33 bp, Homo sapien
atgttctgttttccaattcaagatcagggcatt

SEQ ID NO: 773933 - DNA, 33 bp, Homo sapien
actatttctcattataacaaaaaaggcaatatg

SEQ ID NO: 773934 - DNA, 33 bp, Homo sapien
actatttctcattataccaaaaaaggcaatatg

SEQ ID NO: 773935 - DNA, 33 bp, Homo sapien
catattcttagatgcacagaaaaggactagaag

SEQ ID NO: 773936 - DNA, 33 bp, Homo sapien
catattcttagatgcatagaaaaggactagaag

SEQ ID NO: 773937 - DNA, 33 bp, Homo sapien
gtgaacccaaaatagcagccaatgaaagcaaac

SEQ ID NO: 773938 - DNA, 33 bp, Homo sapien
gtgaacccaaaatagcggccaatgaaagcaaac

SEQ ID NO: 773939 - DNA, 33 bp, Homo sapien
actgtttaccacaacacagatggacctgaagga

SEQ ID NO: 773940 - DNA, 33 bp, Homo sapien
actgtttaccacaacatagatggacctgaagga

SEQ ID NO: 773941 - DNA, 33 bp, Homo sapien
aaggaattgaatcagaaaaataggaagacacat

SEQ ID NO: 773942 - DNA, 33 bp, Homo sapien
aaggaattgaatcagagaaataggaagacacat

SEQ ID NO: 773943 - DNA, 33 bp, Homo sapien
ctcagaattcttggaacggaatgagaaggaaaa

SEQ ID NO: 773944 - DNA, 33 bp, Homo sapien
ctcagaattcttggaatggaatgagaaggaaaa

SEQ ID NO: 773945 - DNA, 33 bp, Homo sapien
tgaatactgaaatggcacttagaatcctaaggg

SEQ ID NO: 773946 - DNA, 33 bp, Homo sapien
tgaatactgaaatggctcttagaatcctaaggg

SEQ ID NO: 773947 - DNA, 33 bp, Homo sapien
atcaatatttacagagaccatagtaaacacagc

SEQ ID NO: 773948 - DNA, 33 bp, Homo sapien
atcaatatttacagagcccatagtaaacacagc

SEQ ID NO: 773949 - DNA, 33 bp, Homo sapien
cctcattccttgaggacgtttgctcctggccca

SEQ ID NO: 773950 - DNA, 33 bp, Homo sapien
cctcattccttgaggatgtttgctcctggccca

SEQ ID NO: 773951 - DNA, 33 bp, Homo sapien
ttgaatttgcattctacagtggcaattggttta

SEQ ID NO: 773952 - DNA, 33 bp, Homo sapien
ttgaatttgcattctatagtggcaattggttta

SEQ ID NO: 773953 - DNA, 33 bp, Homo sapien
cctcagaacacattgacggtaaaacctttgcca

SEQ ID NO: 773954 - DNA, 33 bp, Homo sapien
cctcagaacacattgatggtaaaacctttgcca

SEQ ID NO: 773955 - DNA, 33 bp, Homo sapien
tacttatctcctccccaagtgtccagctggtga

SEQ ID NO: 773956 - DNA, 33 bp, Homo sapien
tacttatctcctccccgagtgtccagctggtga

SEQ ID NO: 773957 - DNA, 33 bp, Homo sapien
tgcattgttcttttcaggttttattggtatgtg

SEQ ID NO: 773958 - DNA, 33 bp, Homo sapien
tgcattgttcttttcatgttttattggtatgtg

SEQ ID NO: 773959 - DNA, 33 bp, Homo sapien
acacaatgtttactaaatcatacacacagaaac

SEQ ID NO: 773960 - DNA, 33 bp, Homo sapien
acacaatgtttactaagtcatacacacagaaac

SEQ ID NO: 773961 - DNA, 33 bp, Homo sapien
ttcagaaattcaacaactgagactcatctccaa

SEQ ID NO: 773962 - DNA, 33 bp, Homo sapien
ttcagaaattcaacaattgagactcatctccaa

SEQ ID NO: 773963 - DNA, 33 bp, Homo sapien
gataagctatctttcaataacagtggctctcaa

SEQ ID NO: 773964 - DNA, 33 bp, Homo sapien
gataagctatctttcagtaacagtggctctcaa

SEQ ID NO: 773965 - DNA, 33 bp, Homo sapien
gaagaggaaggatggacaactgttacaattgac

SEQ ID NO: 773966 - DNA, 33 bp, Homo sapien
gaagaggaaggatggagaactgttacaattgac

SEQ ID NO: 773967 - DNA, 33 bp, Homo sapien
cttaaaactaagcaccaggtatatgaaaaagga

SEQ ID NO: 773968 - DNA, 33 bp, Homo sapien
cttaaaactaagcaccgggtatatgaaaaagga

SEQ ID NO: 773969 - DNA, 33 bp, Homo sapien
tgggaacctgtagttacgggaaatggctgtttt

SEQ ID NO: 773970 - DNA, 33 bp, Homo sapien
tgggaacctgtagttatgggaaatggctgtttt

SEQ ID NO: 773971 - DNA, 33 bp, Homo sapien
ggactctgttaaaggcacaccaaagaaaggctt

SEQ ID NO: 773972 - DNA, 33 bp, Homo sapien
ggactctgttaaaggcgcaccaaagaaaggctt

SEQ ID NO: 773973 - DNA, 33 bp, Homo sapien
tatggccgccaattctcaagctcagcgactcct

SEQ ID NO: 773974 - DNA, 33 bp, Homo sapien
tatggccgccaattctgaagctcagcgactcct

SEQ ID NO: 773975 - DNA, 33 bp, Homo sapien
acagagacttggagacaatacgtgaacatcttt

SEQ ID NO: 773976 - DNA, 33 bp, Homo sapien
acagagacttggagacgatacgtgaacatcttt

SEQ ID NO: 773977 - DNA, 33 bp, Homo sapien
aaatatagacatcttcaattggtagtttccatt

SEQ ID NO: 773978 - DNA, 33 bp, Homo sapien
aaatatagacatcttcgattggtagtttccatt

SEQ ID NO: 773979 - DNA, 33 bp, Homo sapien
agaagcagtgctgtaaagaagttcttaggtgtc

SEQ ID NO: 773980 - DNA, 33 bp, Homo sapien
agaagcagtgctgtaaggaagttcttaggtgtc

SEQ ID NO: 773981 - DNA, 33 bp, Homo sapien
gctgagctcctgagagaaagaaatgaatgggag

SEQ ID NO: 773982 - DNA, 33 bp, Homo sapien
gctgagctcctgagagcaagaaatgaatgggag

SEQ ID NO: 773983 - DNA, 33 bp, Homo sapien
attacagggtttaggaagatagagcaaagaatg

SEQ ID NO: 773984 - DNA, 33 bp, Homo sapien
attacagggtttaggaggatagagcaaagaatg

SEQ ID NO: 773985 - DNA, 33 bp, Homo sapien
caaaaactgacaactcaaatatccatcatgtga

SEQ ID NO: 773986 - DNA, 33 bp, Homo sapien
caaaaactgacaactcgaatatccatcatgtga

SEQ ID NO: 773987 - DNA, 33 bp, Homo sapien
gtatacagatattcaccgcaacattattcataa

SEQ ID NO: 773988 - DNA, 33 bp, Homo sapien
gtatacagatattcactgcaacattattcataa

SEQ ID NO: 773989 - DNA, 33 bp, Homo sapien
ggtgcaaatgtaaaacagcgactttggaaaagt

SEQ ID NO: 773990 - DNA, 33 bp, Homo sapien
ggtgcaaatgtaaaacggcgactttggaaaagt

SEQ ID NO: 773991 - DNA, 33 bp, Homo sapien
agcatgattcagaacacacctgaaatagtttct

SEQ ID NO: 773992 - DNA, 33 bp, Homo sapien
agcatgattcagaacagacctgaaatagtttct

SEQ ID NO: 773993 - DNA, 33 bp, Homo sapien
ttacgcctctcttcagccacttaatgcctacac

SEQ ID NO: 773994 - DNA, 33 bp, Homo sapien
ttacgcctctcttcagtcacttaatgcctacac

SEQ ID NO: 773995 - DNA, 33 bp, Homo sapien
attcgctatagatgccaaaatctgcttagcctg

SEQ ID NO: 773996 - DNA, 33 bp, Homo sapien
attcgctatagatgcccaaatctgcttagcctg

SEQ ID NO: 773997 - DNA, 33 bp, Homo sapien
agtgatgatgtcatgaagactcaaagttactca

SEQ ID NO: 773998 - DNA, 33 bp, Homo sapien
agtgatgatgtcatgacgactcaaagttactca

SEQ ID NO: 773999 - DNA, 33 bp, Homo sapien
ttacatacatgcactccgaaagtatatctctat

SEQ ID NO: 774000 - DNA, 33 bp, Homo sapien
ttacatacatgcactctgaaagtatatctctat

SEQ ID NO: 774001 - DNA, 33 bp, Homo sapien
aaacatatgcaaaacaagtaaacgtgagatgta

SEQ ID NO: 774002 - DNA, 33 bp, Homo sapien
aaacatatgcaaaacatgtaaacgtgagatgta

SEQ ID NO: 774003 - DNA, 33 bp, Homo sapien
caagttgagcttaaaaatacatcttggaggccg

SEQ ID NO: 774004 - DNA, 33 bp, Homo sapien
caagttgagcttaaaagtacatcttggaggccg

SEQ ID NO: 774005 - DNA, 33 bp, Homo sapien
caatttgaaactagaaagaagacattttcgcac

SEQ ID NO: 774006 - DNA, 33 bp, Homo sapien
caatttgaaactagaatgaagacattttcgcac

SEQ ID NO: 774007 - DNA, 33 bp, Homo sapien
aaaaaaaaccactacactagagcacttacctaa

SEQ ID NO: 774008 - DNA, 33 bp, Homo sapien
aaaaaaaaccactacattagagcacttacctaa

SEQ ID NO: 774009 - DNA, 33 bp, Homo sapien
gttctgtagaagtctacgaaaagaaaaacctag

SEQ ID NO: 774010 - DNA, 33 bp, Homo sapien
gttctgtagaagtctatgaaaagaaaaacctag

SEQ ID NO: 774011 - DNA, 33 bp, Homo sapien
caatgggaaatgctcacagtcaatgtttctctg

SEQ ID NO: 774012 - DNA, 33 bp, Homo sapien
caatgggaaatgctcagagtcaatgtttctctg

SEQ ID NO: 774013 - DNA, 33 bp, Homo sapien
ccataactccaagatacgtggacatcactacag

SEQ ID NO: 774014 - DNA, 33 bp, Homo sapien
ccataactccaagataggtggacatcactacag

SEQ ID NO: 774015 - DNA, 33 bp, Homo sapien
gtaagtctgaattttgcatagcaggctggaaac

SEQ ID NO: 774016 - DNA, 33 bp, Homo sapien
gtaagtctgaattttgtatagcaggctggaaac

SEQ ID NO: 774017 - DNA, 33 bp, Homo sapien
ccctcccacaaaaaataatcatctggacccaaa

SEQ ID NO: 774018 - DNA, 33 bp, Homo sapien
ccctcccacaaaaaattatcatctggacccaaa

SEQ ID NO: 774019 - DNA, 33 bp, Homo sapien
aaaataggtatcttacgcaaattatgctggaaa

SEQ ID NO: 774020 - DNA, 33 bp, Homo sapien
aaaataggtatcttactcaaattatgctggaaa

SEQ ID NO: 774021 - DNA, 33 bp, Homo sapien
cgcactgtgcagtaaccatatatctcctcctct

SEQ ID NO: 774022 - DNA, 33 bp, Homo sapien
cgcactgtgcagtaactatatatctcctcctct

SEQ ID NO: 774023 - DNA, 33 bp, Homo sapien
attttcttggcttaataaaaactctagctaaaa

SEQ ID NO: 774024 - DNA, 33 bp, Homo sapien
attttcttggcttaatgaaaactctagctaaaa

SEQ ID NO: 774025 - DNA, 33 bp, Homo sapien
ctccaggtagagtggaactaagctttttttaga

SEQ ID NO: 774026 - DNA, 33 bp, Homo sapien
ctccaggtagagtggagctaagctttttttaga

SEQ ID NO: 774027 - DNA, 33 bp, Homo sapien
ttcagtaattacgtcaatcttgaactgtattgt

SEQ ID NO: 774028 - DNA, 33 bp, Homo sapien
ttcagtaattacgtcattcttgaactgtattgt

SEQ ID NO: 774029 - DNA, 33 bp, Homo sapien
gatctctattttataccacatggaggtttatct

SEQ ID NO: 774030 - DNA, 33 bp, Homo sapien
gatctctattttatactacatggaggtttatct

SEQ ID NO: 774031 - DNA, 33 bp, Homo sapien
tctgcacccttgattacaacccagcaaataaca

SEQ ID NO: 774032 - DNA, 33 bp, Homo sapien
tctgcacccttgattataacccagcaaataaca

SEQ ID NO: 774033 - DNA, 33 bp, Homo sapien
taaagcctaactatgacgatattgaaaatactt

SEQ ID NO: 774034 - DNA, 33 bp, Homo sapien
taaagcctaactatgatgatattgaaaatactt

SEQ ID NO: 774035 - DNA, 33 bp, Homo sapien
tgcctcatcagaaaagaatgtacttgctgaatg

SEQ ID NO: 774036 - DNA, 33 bp, Homo sapien
tgcctcatcagaaaaggatgtacttgctgaatg

SEQ ID NO: 774037 - DNA, 33 bp, Homo sapien
atttaaaacacaaaaaggcatatctattcacca

SEQ ID NO: 774038 - DNA, 33 bp, Homo sapien
atttaaaacacaaaaatgcatatctattcacca

SEQ ID NO: 774039 - DNA, 33 bp, Homo sapien
caagacttgagaataaatccctgtgaaatcaaa

SEQ ID NO: 774040 - DNA, 33 bp, Homo sapien
caagacttgagaataagtccctgtgaaatcaaa

SEQ ID NO: 774041 - DNA, 33 bp, Homo sapien
tcatcaaaattaataaaagtagcggatcagtct

SEQ ID NO: 774042 - DNA, 33 bp, Homo sapien
tcatcaaaattaataatagtagcggatcagtct

SEQ ID NO: 774043 - DNA, 33 bp, Homo sapien
tagcttggctgacttacgtgacttcaggcagct

SEQ ID NO: 774044 - DNA, 33 bp, Homo sapien
tagcttggctgacttatgtgacttcaggcagct

SEQ ID NO: 774045 - DNA, 33 bp, Homo sapien
gcgttgggattagtaacgctggagaaagattaa

SEQ ID NO: 774046 - DNA, 33 bp, Homo sapien
gcgttgggattagtaaggctggagaaagattaa

SEQ ID NO: 774047 - DNA, 33 bp, Homo sapien
atgttaggttctacacactaggcagtaggtata

SEQ ID NO: 774048 - DNA, 33 bp, Homo sapien
atgttaggttctacacgctaggcagtaggtata

SEQ ID NO: 774049 - DNA, 33 bp, Homo sapien
ttaaccccctccgcaccacagattttctcctga

SEQ ID NO: 774050 - DNA, 33 bp, Homo sapien
ttaaccccctccgcactacagattttctcctga

SEQ ID NO: 774051 - DNA, 33 bp, Homo sapien
tgcccaatagaaatacaacgtaagccccatctg

SEQ ID NO: 774052 - DNA, 33 bp, Homo sapien
tgcccaatagaaatacgacgtaagccccatctg

SEQ ID NO: 774053 - DNA, 33 bp, Homo sapien
gactggttccagagtaaaatgaggaaacattac

SEQ ID NO: 774054 - DNA, 33 bp, Homo sapien
gactggttccagagtagaatgaggaaacattac

SEQ ID NO: 774055 - DNA, 33 bp, Homo sapien
tggcctactcgggacaactcaattgactactta

SEQ ID NO: 774056 - DNA, 33 bp, Homo sapien
tggcctactcgggacagctcaattgactactta

SEQ ID NO: 774057 - DNA, 33 bp, Homo sapien
aggatctttggagttacacaatgctggctatga

SEQ ID NO: 774058 - DNA, 33 bp, Homo sapien
aggatctttggagttatacaatgctggctatga

SEQ ID NO: 774059 - DNA, 33 bp, Homo sapien
tgaaagccactcagaaaaaaacatgattcaata

SEQ ID NO: 774060 - DNA, 33 bp, Homo sapien
tgaaagccactcagaagaaaacatgattcaata

SEQ ID NO: 774061 - DNA, 33 bp, Homo sapien
ccttttgtttgctggacgtcaatgcccagaaca

SEQ ID NO: 774062 - DNA, 33 bp, Homo sapien
ccttttgtttgctggatgtcaatgcccagaaca

SEQ ID NO: 774063 - DNA, 33 bp, Homo sapien
gtttaaggaatactaaagtaaagcgatatcata

SEQ ID NO: 774064 - DNA, 33 bp, Homo sapien
gtttaaggaatactaatgtaaagcgatatcata

SEQ ID NO: 774065 - DNA, 33 bp, Homo sapien
tactattccaattgggaaaacaactgttaatgg

SEQ ID NO: 774066 - DNA, 33 bp, Homo sapien
tactattccaattggggaaacaactgttaatgg

SEQ ID NO: 774067 - DNA, 33 bp, Homo sapien
tttctgttcagtaatgcacttctctgtgtacat

SEQ ID NO: 774068 - DNA, 33 bp, Homo sapien
tttctgttcagtaatggacttctctgtgtacat

SEQ ID NO: 774069 - DNA, 33 bp, Homo sapien
gagtctctcacgttcacgtatggcttgagagta

SEQ ID NO: 774070 - DNA, 33 bp, Homo sapien
gagtctctcacgttcatgtatggcttgagagta

SEQ ID NO: 774071 - DNA, 33 bp, Homo sapien
gggctttttccagtggaatgaataaagaatatc

SEQ ID NO: 774072 - DNA, 33 bp, Homo sapien
gggctttttccagtgggatgaataaagaatatc

SEQ ID NO: 774073 - DNA, 33 bp, Homo sapien
agtccaagtccgatagcccaaaaaccaggggag

SEQ ID NO: 774074 - DNA, 33 bp, Homo sapien
agtccaagtccgatagtccaaaaaccaggggag

SEQ ID NO: 774075 - DNA, 33 bp, Homo sapien
gcagggtctacagaacagatacactggatgagg

SEQ ID NO: 774076 - DNA, 33 bp, Homo sapien
gcagggtctacagaacggatacactggatgagg

SEQ ID NO: 774077 - DNA, 33 bp, Homo sapien
agtgactataccgcagaatttcagactctggag

SEQ ID NO: 774078 - DNA, 33 bp, Homo sapien
agtgactataccgcagcatttcagactctggag

SEQ ID NO: 774079 - DNA, 33 bp, Homo sapien
cttgagattaccatgactaaaaatggagatgtc

SEQ ID NO: 774080 - DNA, 33 bp, Homo sapien
cttgagattaccatgattaaaaatggagatgtc

SEQ ID NO: 774081 - DNA, 33 bp, Homo sapien
actattttgctaatgaaaggcacaatttaaaag

SEQ ID NO: 774082 - DNA, 33 bp, Homo sapien
actattttgctaatgagaggcacaatttaaaag

SEQ ID NO: 774083 - DNA, 33 bp, Homo sapien
gactagcaattttttacgcagattgtacttgcc

SEQ ID NO: 774084 - DNA, 33 bp, Homo sapien
gactagcaattttttatgcagattgtacttgcc

SEQ ID NO: 774085 - DNA, 33 bp, Homo sapien
aaccacgacctcagcaatcgtgagcaaaatgtc

SEQ ID NO: 774086 - DNA, 33 bp, Homo sapien
aaccacgacctcagcactcgtgagcaaaatgtc

SEQ ID NO: 774087 - DNA, 33 bp, Homo sapien
tacataaaatttgctaacttacagtcaaactgg

SEQ ID NO: 774088 - DNA, 33 bp, Homo sapien
tacataaaatttgctagcttacagtcaaactgg

SEQ ID NO: 774089 - DNA, 33 bp, Homo sapien
gtttgcctggaggatccccttagcaaatccctc

SEQ ID NO: 774090 - DNA, 33 bp, Homo sapien
gtttgcctggaggatctccttagcaaatccctc

SEQ ID NO: 774091 - DNA, 33 bp, Homo sapien
cctaaccattataaacccagtgtttgcctggag

SEQ ID NO: 774092 - DNA, 33 bp, Homo sapien
cctaaccattataaactcagtgtttgcctggag

SEQ ID NO: 774093 - DNA, 33 bp, Homo sapien
gtgtcttgccacagtaaagatgatcagatactt

SEQ ID NO: 774094 - DNA, 33 bp, Homo sapien
gtgtcttgccacagtagagatgatcagatactt

SEQ ID NO: 774095 - DNA, 33 bp, Homo sapien
caaactatttcgctgacgagaggtacaatgtaa

SEQ ID NO: 774096 - DNA, 33 bp, Homo sapien
caaactatttcgctgatgagaggtacaatgtaa

SEQ ID NO: 774097 - DNA, 33 bp, Homo sapien
tccaaatcctcagttacgctcctctgatatacc

SEQ ID NO: 774098 - DNA, 33 bp, Homo sapien
tccaaatcctcagttatgctcctctgatatacc

SEQ ID NO: 774099 - DNA, 33 bp, Homo sapien
ctctgatataccattaacttttagaaaacctga

SEQ ID NO: 774100 - DNA, 33 bp, Homo sapien
ctctgatataccattagcttttagaaaacctga

SEQ ID NO: 774101 - DNA, 33 bp, Homo sapien
atttcagatagttctgcaagaagaaggcagtcc

SEQ ID NO: 774102 - DNA, 33 bp, Homo sapien
atttcagatagttctggaagaagaaggcagtcc

SEQ ID NO: 774103 - DNA, 33 bp, Homo sapien
caagagctgtcatagacaacaacagcagccaca

SEQ ID NO: 774104 - DNA, 33 bp, Homo sapien
caagagctgtcatagagaacaacagcagccaca

SEQ ID NO: 774105 - DNA, 33 bp, Homo sapien
acccactatgacccaaatactgtgctagcctga

SEQ ID NO: 774106 - DNA, 33 bp, Homo sapien
acccactatgacccaagtactgtgctagcctga

SEQ ID NO: 774107 - DNA, 33 bp, Homo sapien
cataaatacgtttgaacgcttaggtgtgctctc

SEQ ID NO: 774108 - DNA, 33 bp, Homo sapien
cataaatacgtttgaatgcttaggtgtgctctc

SEQ ID NO: 774109 - DNA, 33 bp, Homo sapien
tctctaatctgttctacatttcatggacaaaac

SEQ ID NO: 774110 - DNA, 33 bp, Homo sapien
tctctaatctgttctatatttcatggacaaaac

SEQ ID NO: 774111 - DNA, 33 bp, Homo sapien
caaaactgtgttgacaagcctttgaggcagaaa

SEQ ID NO: 774112 - DNA, 33 bp, Homo sapien
caaaactgtgttgacacgcctttgaggcagaaa

SEQ ID NO: 774113 - DNA, 33 bp, Homo sapien
cttgtaaattgctggacaatggaagcaatctgt

SEQ ID NO: 774114 - DNA, 33 bp, Homo sapien
cttgtaaattgctggataatggaagcaatctgt

SEQ ID NO: 774115 - DNA, 33 bp, Homo sapien
ggaaataaaataattgaaatgccaagtaaaaaa

SEQ ID NO: 774116 - DNA, 33 bp, Homo sapien
ggaaataaaataattggaatgccaagtaaaaaa

SEQ ID NO: 774117 - DNA, 33 bp, Homo sapien
ctcggtctcaagaaacaagcaaaaatacagatt

SEQ ID NO: 774118 - DNA, 33 bp, Homo sapien
ctcggtctcaagaaaccagcaaaaatacagatt

SEQ ID NO: 774119 - DNA, 33 bp, Homo sapien
tgtgtagtgagcaaaccgaatgtgggaaaatag

SEQ ID NO: 774120 - DNA, 33 bp, Homo sapien
tgtgtagtgagcaaactgaatgtgggaaaatag

SEQ ID NO: 774121 - DNA, 33 bp, Homo sapien
ctcatttatcttattcacgcttcatgatgtaat

SEQ ID NO: 774122 - DNA, 33 bp, Homo sapien
ctcatttatcttattcgcgcttcatgatgtaat

SEQ ID NO: 774123 - DNA, 33 bp, Homo sapien
atgagtagaaccactaatagcaatgaagaataa

SEQ ID NO: 774124 - DNA, 33 bp, Homo sapien
atgagtagaaccactagtagcaatgaagaataa

SEQ ID NO: 774125 - DNA, 33 bp, Homo sapien
tatggccaatatagtacggtagaggtgacagtg

SEQ ID NO: 774126 - DNA, 33 bp, Homo sapien
tatggccaatatagtatggtagaggtgacagtg

SEQ ID NO: 774127 - DNA, 33 bp, Homo sapien
gagaagcagaggaatacagcgagagagaaagat

SEQ ID NO: 774128 - DNA, 33 bp, Homo sapien
gagaagcagaggaatatagcgagagagaaagat

SEQ ID NO: 774129 - DNA, 33 bp, Homo sapien
gatagcaaaagggaaaaaagagcaatgtgagac

SEQ ID NO: 774130 - DNA, 33 bp, Homo sapien
gatagcaaaagggaaacaagagcaatgtgagac

SEQ ID NO: 774131 - DNA, 33 bp, Homo sapien
tggaagcagcaaatcacagccaggaatgaccct

SEQ ID NO: 774132 - DNA, 33 bp, Homo sapien
tggaagcagcaaatcagagccaggaatgaccct

SEQ ID NO: 774133 - DNA, 33 bp, Homo sapien
ttttgtggtcactataacttttccttgatggct

SEQ ID NO: 774134 - DNA, 33 bp, Homo sapien
ttttgtggtcactatatcttttccttgatggct

SEQ ID NO: 774135 - DNA, 33 bp, Homo sapien
tttgacacagagaccacatcagagccatggtgt

SEQ ID NO: 774136 - DNA, 33 bp, Homo sapien
tttgacacagagaccatatcagagccatggtgt

SEQ ID NO: 774137 - DNA, 33 bp, Homo sapien
ctatgctgctagttaccatgtgctagctactgt

SEQ ID NO: 774138 - DNA, 33 bp, Homo sapien
ctatgctgctagttactatgtgctagctactgt

SEQ ID NO: 774139 - DNA, 33 bp, Homo sapien
agagaagataaaattaaatgtcccagctcaaac

SEQ ID NO: 774140 - DNA, 33 bp, Homo sapien
agagaagataaaattagatgtcccagctcaaac

SEQ ID NO: 774141 - DNA, 33 bp, Homo sapien
atataatatctttgtaactccattttctcattg

SEQ ID NO: 774142 - DNA, 33 bp, Homo sapien
atataatatctttgtacctccattttctcattg

SEQ ID NO: 774143 - DNA, 33 bp, Homo sapien
atcagttctgctattaagagattttgatgaatt

SEQ ID NO: 774144 - DNA, 33 bp, Homo sapien
atcagttctgctattaggagattttgatgaatt

SEQ ID NO: 774145 - DNA, 33 bp, Homo sapien
cacttaaggagagaaacatgaagagtaaagagg

SEQ ID NO: 774146 - DNA, 33 bp, Homo sapien
cacttaaggagagaaatatgaagagtaaagagg

SEQ ID NO: 774147 - DNA, 33 bp, Homo sapien
tctctccttaagtggacggaaggagtcactttt

SEQ ID NO: 774148 - DNA, 33 bp, Homo sapien
tctctccttaagtggatggaaggagtcactttt

SEQ ID NO: 774149 - DNA, 33 bp, Homo sapien
taaagagaggatcaaacagtttatcttcacatg

SEQ ID NO: 774150 - DNA, 33 bp, Homo sapien
taaagagaggatcaaatagtttatcttcacatg

SEQ ID NO: 774151 - DNA, 33 bp, Homo sapien
ttatctgttaatgagccctgttcccctctggtc

SEQ ID NO: 774152 - DNA, 33 bp, Homo sapien
ttatctgttaatgagcgctgttcccctctggtc

SEQ ID NO: 774153 - DNA, 33 bp, Homo sapien
tctgaggagttggctacaaaacagagctctgaa

SEQ ID NO: 774154 - DNA, 33 bp, Homo sapien
tctgaggagttggctagaaaacagagctctgaa

SEQ ID NO: 774155 - DNA, 33 bp, Homo sapien
attgagttctgtggagacacgtttcacttggta

SEQ ID NO: 774156 - DNA, 33 bp, Homo sapien
attgagttctgtggagccacgtttcacttggta

SEQ ID NO: 774157 - DNA, 33 bp, Homo sapien
cagggaagcttatggaaatatcatttttaactc

SEQ ID NO: 774158 - DNA, 33 bp, Homo sapien
cagggaagcttatggagatatcatttttaactc

SEQ ID NO: 774159 - DNA, 33 bp, Homo sapien
gagaagaattaaggataacttgtaagacttttg

SEQ ID NO: 774160 - DNA, 33 bp, Homo sapien
gagaagaattaaggatgacttgtaagacttttg

SEQ ID NO: 774161 - DNA, 33 bp, Homo sapien
atgtcctaccagtccacagatgagcacttggct

SEQ ID NO: 774162 - DNA, 33 bp, Homo sapien
atgtcctaccagtccagagatgagcacttggct

SEQ ID NO: 774163 - DNA, 33 bp, Homo sapien
ttcccatgcctatggaagactggaatttctatc

SEQ ID NO: 774164 - DNA, 33 bp, Homo sapien
ttcccatgcctatggaggactggaatttctatc

SEQ ID NO: 774165 - DNA, 33 bp, Homo sapien
caagagaatttccagaactgtcagctgaatctc

SEQ ID NO: 774166 - DNA, 33 bp, Homo sapien
caagagaatttccagagctgtcagctgaatctc

SEQ ID NO: 774167 - DNA, 33 bp, Homo sapien
tgtagatgtgacttcaacacagaaagtgagaaa

SEQ ID NO: 774168 - DNA, 33 bp, Homo sapien
tgtagatgtgacttcagcacagaaagtgagaaa

SEQ ID NO: 774169 - DNA, 33 bp, Homo sapien
cactaacaactgttgcacttattaaacatgaag

SEQ ID NO: 774170 - DNA, 33 bp, Homo sapien
cactaacaactgttgcgcttattaaacatgaag

SEQ ID NO: 774171 - DNA, 33 bp, Homo sapien
actggtgccaggctgacgctgtgttcctggagc

SEQ ID NO: 774172 - DNA, 33 bp, Homo sapien
actggtgccaggctgatgctgtgttcctggagc

SEQ ID NO: 774173 - DNA, 33 bp, Homo sapien
tcctgttacatgaaataaaaacaacctttccag

SEQ ID NO: 774174 - DNA, 33 bp, Homo sapien
tcctgttacatgaaatgaaaacaacctttccag

SEQ ID NO: 774175 - DNA, 33 bp, Homo sapien
atctcagtttttggaagtatttttggaagcagg

SEQ ID NO: 774176 - DNA, 33 bp, Homo sapien
atctcagtttttggaattatttttggaagcagg

SEQ ID NO: 774177 - DNA, 33 bp, Homo sapien
ttacatgctttgaaccgctcctcaccactccat

SEQ ID NO: 774178 - DNA, 33 bp, Homo sapien
ttacatgctttgaacctctcctcaccactccat

SEQ ID NO: 774179 - DNA, 33 bp, Homo sapien
attgaaggttattttgcagctacacagaaaaaa

SEQ ID NO: 774180 - DNA, 33 bp, Homo sapien
attgaaggttattttggagctacacagaaaaaa

SEQ ID NO: 774181 - DNA, 33 bp, Homo sapien
tttggaaattcactgacactgtttggttctacg

SEQ ID NO: 774182 - DNA, 33 bp, Homo sapien
tttggaaattcactgagactgtttggttctacg

SEQ ID NO: 774183 - DNA, 33 bp, Homo sapien
aggtggattgctacaactcagtactaggaacat

SEQ ID NO: 774184 - DNA, 33 bp, Homo sapien
aggtggattgctacaagtcagtactaggaacat

SEQ ID NO: 774185 - DNA, 33 bp, Homo sapien
ggaatggtgagctttcaagaggaatgaggagaa

SEQ ID NO: 774186 - DNA, 33 bp, Homo sapien
ggaatggtgagctttcgagaggaatgaggagaa

SEQ ID NO: 774187 - DNA, 33 bp, Homo sapien
caaataccataagtgcccaaactgtggaagcag

SEQ ID NO: 774188 - DNA, 33 bp, Homo sapien
caaataccataagtgcgcaaactgtggaagcag

SEQ ID NO: 774189 - DNA, 33 bp, Homo sapien
tctaagaaggaaaacaagtccacattaaaaaaa

SEQ ID NO: 774190 - DNA, 33 bp, Homo sapien
tctaagaaggaaaacaggtccacattaaaaaaa

SEQ ID NO: 774191 - DNA, 33 bp, Homo sapien
gtgactcaagtcttccgctagtctatcaaaatc

SEQ ID NO: 774192 - DNA, 33 bp, Homo sapien
gtgactcaagtcttcctctagtctatcaaaatc

SEQ ID NO: 774193 - DNA, 33 bp, Homo sapien
cagggatgccacaaaacttctatttgtaaaaac

SEQ ID NO: 774194 - DNA, 33 bp, Homo sapien
cagggatgccacaaaagttctatttgtaaaaac

SEQ ID NO: 774195 - DNA, 33 bp, Homo sapien
attcaggaaggaaagggatataaaggcagtgtg

SEQ ID NO: 774196 - DNA, 33 bp, Homo sapien
attcaggaaggaaaggtatataaaggcagtgtg

SEQ ID NO: 774197 - DNA, 33 bp, Homo sapien
gtgcaagatgaggcaaactattaagcaagagag

SEQ ID NO: 774198 - DNA, 33 bp, Homo sapien
gtgcaagatgaggcaatctattaagcaagagag

SEQ ID NO: 774199 - DNA, 33 bp, Homo sapien
atggtggtgcagtacaaattataatggatctga

SEQ ID NO: 774200 - DNA, 33 bp, Homo sapien
atggtggtgcagtacagattataatggatctga

SEQ ID NO: 774201 - DNA, 33 bp, Homo sapien
ggacatgagtgtccaaaagatgttaaaccaaac

SEQ ID NO: 774202 - DNA, 33 bp, Homo sapien
ggacatgagtgtccaagagatgttaaaccaaac

SEQ ID NO: 774203 - DNA, 33 bp, Homo sapien
ccgctcaccatgctgacatcgtcttagcatcca

SEQ ID NO: 774204 - DNA, 33 bp, Homo sapien
ccgctcaccatgctgatatcgtcttagcatcca

SEQ ID NO: 774205 - DNA, 33 bp, Homo sapien
ttccaagatacttgccaaatatccctgggtgtc

SEQ ID NO: 774206 - DNA, 33 bp, Homo sapien
ttccaagatacttgccgaatatccctgggtgtc

SEQ ID NO: 774207 - DNA, 33 bp, Homo sapien
catgtaaaagggttaactgataaggaccaggca

SEQ ID NO: 774208 - DNA, 33 bp, Homo sapien
catgtaaaagggttaattgataaggaccaggca

SEQ ID NO: 774209 - DNA, 33 bp, Homo sapien
tctcatcaagttttggaaaataactcaagatag

SEQ ID NO: 774210 - DNA, 33 bp, Homo sapien
tctcatcaagttttgggaaataactcaagatag

SEQ ID NO: 774211 - DNA, 33 bp, Homo sapien
aggcttgcaatagagactaaattcagttacagg

SEQ ID NO: 774212 - DNA, 33 bp, Homo sapien
aggcttgcaatagagattaaattcagttacagg

SEQ ID NO: 774213 - DNA, 33 bp, Homo sapien
gacacgcattgtaaaacttaagagctagactgc

SEQ ID NO: 774214 - DNA, 33 bp, Homo sapien
gacacgcattgtaaaagttaagagctagactgc

SEQ ID NO: 774215 - DNA, 33 bp, Homo sapien
ctaattgtatttatcacggaggactctgaaaat

SEQ ID NO: 774216 - DNA, 33 bp, Homo sapien
ctaattgtatttatcatggaggactctgaaaat

SEQ ID NO: 774217 - DNA, 33 bp, Homo sapien
gtgaaatgactcttcccaagcactcaccactgg

SEQ ID NO: 774218 - DNA, 33 bp, Homo sapien
gtgaaatgactcttccgaagcactcaccactgg

SEQ ID NO: 774219 - DNA, 33 bp, Homo sapien
gtatacagaggtggtgcataatagttaagcctt

SEQ ID NO: 774220 - DNA, 33 bp, Homo sapien
gtatacagaggtggtggataatagttaagcctt

SEQ ID NO: 774221 - DNA, 33 bp, Homo sapien
gatgctttttaagaagaaaatgtcatggctcac

SEQ ID NO: 774222 - DNA, 33 bp, Homo sapien
gatgctttttaagaagtaaatgtcatggctcac

SEQ ID NO: 774223 - DNA, 33 bp, Homo sapien
cttctgttaaccgtgacgtaccattcaggaaca

SEQ ID NO: 774224 - DNA, 33 bp, Homo sapien
cttctgttaaccgtgatgtaccattcaggaaca

SEQ ID NO: 774225 - DNA, 33 bp, Homo sapien
atcacataacgaatataaacctgtgacatttta

SEQ ID NO: 774226 - DNA, 33 bp, Homo sapien
atcacataacgaatatcaacctgtgacatttta

SEQ ID NO: 774227 - DNA, 33 bp, Homo sapien
tctattccactcttgcaatctgccttttgagat

SEQ ID NO: 774228 - DNA, 33 bp, Homo sapien
tctattccactcttgcgatctgccttttgagat

SEQ ID NO: 774229 - DNA, 33 bp, Homo sapien
agcaaattaacataccacactaaagcatctgag

SEQ ID NO: 774230 - DNA, 33 bp, Homo sapien
agcaaattaacataccgcactaaagcatctgag

SEQ ID NO: 774231 - DNA, 33 bp, Homo sapien
tgatttatcagttcacaattattcaaaagaaaa

SEQ ID NO: 774232 - DNA, 33 bp, Homo sapien
tgatttatcagttcacgattattcaaaagaaaa

SEQ ID NO: 774233 - DNA, 33 bp, Homo sapien
gacagtgcatgattaaatgtcaaaagatgggcc

SEQ ID NO: 774234 - DNA, 33 bp, Homo sapien
gacagtgcatgattaagtgtcaaaagatgggcc

SEQ ID NO: 774235 - DNA, 33 bp, Homo sapien
cctctctggcccttaacgtattagcagttttca

SEQ ID NO: 774236 - DNA, 33 bp, Homo sapien
cctctctggcccttaatgtattagcagttttca

SEQ ID NO: 774237 - DNA, 33 bp, Homo sapien
ctttgatgaagaaattaaaaaaagtctatataa

SEQ ID NO: 774238 - DNA, 33 bp, Homo sapien
ctttgatgaagaaatttaaaaaagtctatataa

SEQ ID NO: 774239 - DNA, 33 bp, Homo sapien
gagcagagaatctagaaatgattttactccttc

SEQ ID NO: 774240 - DNA, 33 bp, Homo sapien
gagcagagaatctagagatgattttactccttc

SEQ ID NO: 774241 - DNA, 33 bp, Homo sapien
tcttgatgtttggaacaaattgctctatggatg

SEQ ID NO: 774242 - DNA, 33 bp, Homo sapien
tcttgatgtttggaacgaattgctctatggatg

SEQ ID NO: 774243 - DNA, 33 bp, Homo sapien
cttgcaacactttccaataaaactcatttcaca

SEQ ID NO: 774244 - DNA, 33 bp, Homo sapien
cttgcaacactttccagtaaaactcatttcaca

SEQ ID NO: 774245 - DNA, 33 bp, Homo sapien
aggcgtgggcactaacacgtttccagctgaaag

SEQ ID NO: 774246 - DNA, 33 bp, Homo sapien
aggcgtgggcactaacccgtttccagctgaaag

SEQ ID NO: 774247 - DNA, 33 bp, Homo sapien
attttaactatgttcccgactcattagaatagc

SEQ ID NO: 774248 - DNA, 33 bp, Homo sapien
attttaactatgttcctgactcattagaatagc

SEQ ID NO: 774249 - DNA, 33 bp, Homo sapien
actaagcaattcattaaagatacagcaagtttg

SEQ ID NO: 774250 - DNA, 33 bp, Homo sapien
actaagcaattcattagagatacagcaagtttg

SEQ ID NO: 774251 - DNA, 33 bp, Homo sapien
tggtgacctatcaaagaatcagcagtcaagttg

SEQ ID NO: 774252 - DNA, 33 bp, Homo sapien
tggtgacctatcaaaggatcagcagtcaagttg

SEQ ID NO: 774253 - DNA, 33 bp, Homo sapien
tgctcttagtttcaccaactttagtgagatcag

SEQ ID NO: 774254 - DNA, 33 bp, Homo sapien
tgctcttagtttcaccgactttagtgagatcag

SEQ ID NO: 774255 - DNA, 33 bp, Homo sapien
actttgaacttgggaaagatgatttaggatatc

SEQ ID NO: 774256 - DNA, 33 bp, Homo sapien
actttgaacttgggaacgatgatttaggatatc

SEQ ID NO: 774257 - DNA, 33 bp, Homo sapien
tcctcaagtttcctagaagtgggtgccagtgcc

SEQ ID NO: 774258 - DNA, 33 bp, Homo sapien
tcctcaagtttcctagcagtgggtgccagtgcc

SEQ ID NO: 774259 - DNA, 33 bp, Homo sapien
taccttgtgtttacagccaaacagcaaacaatc

SEQ ID NO: 774260 - DNA, 33 bp, Homo sapien
taccttgtgtttacaggcaaacagcaaacaatc

SEQ ID NO: 774261 - DNA, 33 bp, Homo sapien
atttttttcaaaaccaagaagttgcctgttgta

SEQ ID NO: 774262 - DNA, 33 bp, Homo sapien
atttttttcaaaaccaggaagttgcctgttgta

SEQ ID NO: 774263 - DNA, 33 bp, Homo sapien
caaatttagtctactacatggactcctctgcag

SEQ ID NO: 774264 - DNA, 33 bp, Homo sapien
caaatttagtctactagatggactcctctgcag

SEQ ID NO: 774265 - DNA, 33 bp, Homo sapien
ctttatgaagcccttagctaatgttggtagaag

SEQ ID NO: 774266 - DNA, 33 bp, Homo sapien
ctttatgaagcccttatctaatgttggtagaag

SEQ ID NO: 774267 - DNA, 33 bp, Homo sapien
gcctgcgctatatgggccactcagaaagttcac

SEQ ID NO: 774268 - DNA, 33 bp, Homo sapien
gcctgcgctatatgggtcactcagaaagttcac

SEQ ID NO: 774269 - DNA, 33 bp, Homo sapien
tctaaaattggcttagaaaaagagcacttatat

SEQ ID NO: 774270 - DNA, 33 bp, Homo sapien
tctaaaattggcttaggaaaagagcacttatat

SEQ ID NO: 774271 - DNA, 33 bp, Homo sapien
accatgtgcaaagcaaaaggggtttataactgg

SEQ ID NO: 774272 - DNA, 33 bp, Homo sapien
accatgtgcaaagcaagaggggtttataactgg

SEQ ID NO: 774273 - DNA, 33 bp, Homo sapien
catcctaagaaatgcaacattagacctcattgt

SEQ ID NO: 774274 - DNA, 33 bp, Homo sapien
catcctaagaaatgcaccattagacctcattgt

SEQ ID NO: 774275 - DNA, 33 bp, Homo sapien
ctgagtggtaatttccaattggatctcagacat

SEQ ID NO: 774276 - DNA, 33 bp, Homo sapien
ctgagtggtaatttccgattggatctcagacat

SEQ ID NO: 774277 - DNA, 33 bp, Homo sapien
aaagcctttttaaggacatgtatgttgtagtct

SEQ ID NO: 774278 - DNA, 33 bp, Homo sapien
aaagcctttttaaggatatgtatgttgtagtct

SEQ ID NO: 774279 - DNA, 33 bp, Homo sapien
tctttatctactaatccatcctattccttcacc

SEQ ID NO: 774280 - DNA, 33 bp, Homo sapien
tctttatctactaatctatcctattccttcacc

SEQ ID NO: 774281 - DNA, 33 bp, Homo sapien
tgactttcatttgaaactgtggaaagactatac

SEQ ID NO: 774282 - DNA, 33 bp, Homo sapien
tgactttcatttgaaattgtggaaagactatac

SEQ ID NO: 774283 - DNA, 33 bp, Homo sapien
tgattgaccattcccaaaatcctacagccttta

SEQ ID NO: 774284 - DNA, 33 bp, Homo sapien
tgattgaccattcccataatcctacagccttta

SEQ ID NO: 774285 - DNA, 33 bp, Homo sapien
gcaatttgtctaggagaacttgggaatctacag

SEQ ID NO: 774286 - DNA, 33 bp, Homo sapien
gcaatttgtctaggagcacttgggaatctacag

SEQ ID NO: 774287 - DNA, 33 bp, Homo sapien
gttttggtagagcaacggatcccttccatcccc

SEQ ID NO: 774288 - DNA, 33 bp, Homo sapien
gttttggtagagcaactgatcccttccatcccc

SEQ ID NO: 774289 - DNA, 33 bp, Homo sapien
tttataaatggatggacggtaaaataatgaaaa

SEQ ID NO: 774290 - DNA, 33 bp, Homo sapien
tttataaatggatggatggtaaaataatgaaaa

SEQ ID NO: 774291 - DNA, 33 bp, Homo sapien
tggctagccatatgtacgtagaaagctgaaact

SEQ ID NO: 774292 - DNA, 33 bp, Homo sapien
tggctagccatatgtatgtagaaagctgaaact

SEQ ID NO: 774293 - DNA, 33 bp, Homo sapien
ttttagagttgtacaaccatcataacaatttta

SEQ ID NO: 774294 - DNA, 33 bp, Homo sapien
ttttagagttgtacaatcatcataacaatttta

SEQ ID NO: 774295 - DNA, 33 bp, Homo sapien
gaatggataaatcaaacgtggtgtatccatata

SEQ ID NO: 774296 - DNA, 33 bp, Homo sapien
gaatggataaatcaaatgtggtgtatccatata

SEQ ID NO: 774297 - DNA, 33 bp, Homo sapien
ttcacactactagtcgaaatgtaaagtgatgca

SEQ ID NO: 774298 - DNA, 33 bp, Homo sapien
ttcacactactagtcggaatgtaaagtgatgca

SEQ ID NO: 774299 - DNA, 33 bp, Homo sapien
aaaataatttcacaacaaatgataatcagcagc

SEQ ID NO: 774300 - DNA, 33 bp, Homo sapien
aaaataatttcacaacgaatgataatcagcagc

SEQ ID NO: 774301 - DNA, 33 bp, Homo sapien
ggctcacagccttaggcaagatacatgaccact

SEQ ID NO: 774302 - DNA, 33 bp, Homo sapien
ggctcacagccttagggaagatacatgaccact

SEQ ID NO: 774303 - DNA, 33 bp, Homo sapien
cttgttggtttatccacattcagaccacatctt

SEQ ID NO: 774304 - DNA, 33 bp, Homo sapien
cttgttggtttatccatattcagaccacatctt

SEQ ID NO: 774305 - DNA, 33 bp, Homo sapien
atgtacagccacgcaaaggattattatttggct

SEQ ID NO: 774306 - DNA, 33 bp, Homo sapien
atgtacagccacgcaatggattattatttggct

SEQ ID NO: 774307 - DNA, 33 bp, Homo sapien
ttttcatatgttctgaaggtatgtctacaggat

SEQ ID NO: 774308 - DNA, 33 bp, Homo sapien
ttttcatatgttctgagggtatgtctacaggat

SEQ ID NO: 774309 - DNA, 33 bp, Homo sapien
atgaagctaacatagaaaggaatcaagagatgg

SEQ ID NO: 774310 - DNA, 33 bp, Homo sapien
atgaagctaacatagacaggaatcaagagatgg

SEQ ID NO: 774311 - DNA, 33 bp, Homo sapien
cttgtatgcagaagataagaatgaagctaacat

SEQ ID NO: 774312 - DNA, 33 bp, Homo sapien
cttgtatgcagaagatgagaatgaagctaacat

SEQ ID NO: 774313 - DNA, 33 bp, Homo sapien
gttctgctttgattaaaagattgtcgccagaga

SEQ ID NO: 774314 - DNA, 33 bp, Homo sapien
gttctgctttgattaagagattgtcgccagaga

SEQ ID NO: 774315 - DNA, 33 bp, Homo sapien
agtacctccttaataccagtgccttattctttc

SEQ ID NO: 774316 - DNA, 33 bp, Homo sapien
agtacctccttaatactagtgccttattctttc

SEQ ID NO: 774317 - DNA, 33 bp, Homo sapien
gagtgggagttaaacaccaggtattcatggaca

SEQ ID NO: 774318 - DNA, 33 bp, Homo sapien
gagtgggagttaaacatcaggtattcatggaca

SEQ ID NO: 774319 - DNA, 33 bp, Homo sapien
cccatttagaaccccaacaaaatagctgtctaa

SEQ ID NO: 774320 - DNA, 33 bp, Homo sapien
cccatttagaaccccagcaaaatagctgtctaa

SEQ ID NO: 774321 - DNA, 33 bp, Homo sapien
atgcaatgctaacttcaaaaccaattcctgaat

SEQ ID NO: 774322 - DNA, 33 bp, Homo sapien
atgcaatgctaacttcgaaaccaattcctgaat

SEQ ID NO: 774323 - DNA, 33 bp, Homo sapien
aattactagtaagctgcattactggtattagaa

SEQ ID NO: 774324 - DNA, 33 bp, Homo sapien
aattactagtaagctgtattactggtattagaa

SEQ ID NO: 774325 - DNA, 33 bp, Homo sapien
acctcatgaactaatgaagagaacaaagaagta

SEQ ID NO: 774326 - DNA, 33 bp, Homo sapien
acctcatgaactaatggagagaacaaagaagta

SEQ ID NO: 774327 - DNA, 33 bp, Homo sapien
atgaggtcttcttactaaagataaacatttgtg

SEQ ID NO: 774328 - DNA, 33 bp, Homo sapien
atgaggtcttcttacttaagataaacatttgtg

SEQ ID NO: 774329 - DNA, 33 bp, Homo sapien
aatctatatacacacaaaacttatttagaacgg

SEQ ID NO: 774330 - DNA, 33 bp, Homo sapien
aatctatatacacacagaacttatttagaacgg

SEQ ID NO: 774331 - DNA, 33 bp, Homo sapien
accctcataaatcaaggagtataatgaatgtgt

SEQ ID NO: 774332 - DNA, 33 bp, Homo sapien
accctcataaatcaagtagtataatgaatgtgt

SEQ ID NO: 774333 - DNA, 33 bp, Homo sapien
attttctttctcataaactccaactctaatggt

SEQ ID NO: 774334 - DNA, 33 bp, Homo sapien
attttctttctcataatctccaactctaatggt

SEQ ID NO: 774335 - DNA, 33 bp, Homo sapien
ggctcacaagtatgtacaaactccaacttcagc

SEQ ID NO: 774336 - DNA, 33 bp, Homo sapien
ggctcacaagtatgtataaactccaacttcagc

SEQ ID NO: 774337 - DNA, 33 bp, Homo sapien
aaacttgctggggtaacgtcctggatcccagta

SEQ ID NO: 774338 - DNA, 33 bp, Homo sapien
aaacttgctggggtaatgtcctggatcccagta

SEQ ID NO: 774339 - DNA, 33 bp, Homo sapien
gcctattgtgaacagaaatgatattaatgaaac

SEQ ID NO: 774340 - DNA, 33 bp, Homo sapien
gcctattgtgaacagagatgatattaatgaaac

SEQ ID NO: 774341 - DNA, 33 bp, Homo sapien
tcctgcctgtggtccaatgcttagggatgataa

SEQ ID NO: 774342 - DNA, 33 bp, Homo sapien
tcctgcctgtggtccagtgcttagggatgataa

SEQ ID NO: 774343 - DNA, 33 bp, Homo sapien
aagcatttgcaaggccacctctcaagatcctat

SEQ ID NO: 774344 - DNA, 33 bp, Homo sapien
aagcatttgcaaggccgcctctcaagatcctat

SEQ ID NO: 774345 - DNA, 33 bp, Homo sapien
gtaatgtaacagaatcacaattttaaagtcctt

SEQ ID NO: 774346 - DNA, 33 bp, Homo sapien
gtaatgtaacagaatcgcaattttaaagtcctt

SEQ ID NO: 774347 - DNA, 33 bp, Homo sapien
gtacccatacccataacggcagaaggacaaggt

SEQ ID NO: 774348 - DNA, 33 bp, Homo sapien
gtacccatacccataatggcagaaggacaaggt

SEQ ID NO: 774349 - DNA, 33 bp, Homo sapien
tcatctgattcccaaactttaaaccataaagag

SEQ ID NO: 774350 - DNA, 33 bp, Homo sapien
tcatctgattcccaaagtttaaaccataaagag

SEQ ID NO: 774351 - DNA, 33 bp, Homo sapien
gaaacttgatgtaagtcaccactgcatatagaa

SEQ ID NO: 774352 - DNA, 33 bp, Homo sapien
gaaacttgatgtaagtgaccactgcatatagaa

SEQ ID NO: 774353 - DNA, 33 bp, Homo sapien
tatgtcctaaatatcacctttctacatatgtgt

SEQ ID NO: 774354 - DNA, 33 bp, Homo sapien
tatgtcctaaatatcagctttctacatatgtgt

SEQ ID NO: 774355 - DNA, 33 bp, Homo sapien
tgcagaaatgtttcacagtcagaacaatattat

SEQ ID NO: 774356 - DNA, 33 bp, Homo sapien
tgcagaaatgtttcacggtcagaacaatattat

SEQ ID NO: 774357 - DNA, 33 bp, Homo sapien
acactccatcactaacaagaggagctgcagatt

SEQ ID NO: 774358 - DNA, 33 bp, Homo sapien
acactccatcactaacgagaggagctgcagatt

SEQ ID NO: 774359 - DNA, 33 bp, Homo sapien
gggatacaagtagaaagttgaaacacatctttt

SEQ ID NO: 774360 - DNA, 33 bp, Homo sapien
gggatacaagtagaaatttgaaacacatctttt

SEQ ID NO: 774361 - DNA, 33 bp, Homo sapien
atggaattcatagcaacgtttaggtcaatgaga

SEQ ID NO: 774362 - DNA, 33 bp, Homo sapien
atggaattcatagcaatgtttaggtcaatgaga

SEQ ID NO: 774363 - DNA, 33 bp, Homo sapien
aaccaaggtagtcttacagaagtgaattaaaat

SEQ ID NO: 774364 - DNA, 33 bp, Homo sapien
aaccaaggtagtcttatagaagtgaattaaaat

SEQ ID NO: 774365 - DNA, 33 bp, Homo sapien
gctccatccatataccagcaaaatacatgatag

SEQ ID NO: 774366 - DNA, 33 bp, Homo sapien
gctccatccatataccggcaaaatacatgatag

SEQ ID NO: 774367 - DNA, 33 bp, Homo sapien
ctactaaaatgctacaagctttacggaaaatgc

SEQ ID NO: 774368 - DNA, 33 bp, Homo sapien
ctactaaaatgctacaggctttacggaaaatgc

SEQ ID NO: 774369 - DNA, 33 bp, Homo sapien
aaaaatgttcaccgtggataaacctgtaatgag

SEQ ID NO: 774370 - DNA, 33 bp, Homo sapien
aaaaatgttcaccgtgtataaacctgtaatgag

SEQ ID NO: 774371 - DNA, 33 bp, Homo sapien
agcagcgcagaacagactaaaatgaggggtcag

SEQ ID NO: 774372 - DNA, 33 bp, Homo sapien
agcagcgcagaacagagtaaaatgaggggtcag

SEQ ID NO: 774373 - DNA, 33 bp, Homo sapien
ccttgagcaaataagacgtgtagattaatgttt

SEQ ID NO: 774374 - DNA, 33 bp, Homo sapien
ccttgagcaaataagatgtgtagattaatgttt

SEQ ID NO: 774375 - DNA, 33 bp, Homo sapien
ggggaaagattccctaccgaataaatagtgctg

SEQ ID NO: 774376 - DNA, 33 bp, Homo sapien
ggggaaagattccctatcgaataaatagtgctg

SEQ ID NO: 774377 - DNA, 33 bp, Homo sapien
agactcaatattcttcacaaagttgcatgaatc

SEQ ID NO: 774378 - DNA, 33 bp, Homo sapien
agactcaatattcttcccaaagttgcatgaatc

SEQ ID NO: 774379 - DNA, 33 bp, Homo sapien
agtttatgtggatagactcagagttgtgcagct

SEQ ID NO: 774380 - DNA, 33 bp, Homo sapien
agtttatgtggatagattcagagttgtgcagct

SEQ ID NO: 774381 - DNA, 33 bp, Homo sapien
aagcaaagacaaagagacccacacactaagcaa

SEQ ID NO: 774382 - DNA, 33 bp, Homo sapien
aagcaaagacaaagagccccacacactaagcaa

SEQ ID NO: 774383 - DNA, 33 bp, Homo sapien
ttcgaatcaaaggtccccagtatggcacccttg

SEQ ID NO: 774384 - DNA, 33 bp, Homo sapien
ttcgaatcaaaggtccgcagtatggcacccttg

SEQ ID NO: 774385 - DNA, 33 bp, Homo sapien
tgactctcacattcaactgatcctcttcataac

SEQ ID NO: 774386 - DNA, 33 bp, Homo sapien
tgactctcacattcaattgatcctcttcataac

SEQ ID NO: 774387 - DNA, 33 bp, Homo sapien
agaatatatcttattcaagagttggatgatact

SEQ ID NO: 774388 - DNA, 33 bp, Homo sapien
agaatatatcttattccagagttggatgatact

SEQ ID NO: 774389 - DNA, 33 bp, Homo sapien
aattatttattacagcaaattttaaagttcagg

SEQ ID NO: 774390 - DNA, 33 bp, Homo sapien
aattatttattacagcgaattttaaagttcagg

SEQ ID NO: 774391 - DNA, 33 bp, Homo sapien
aaaaatctggacagaagtaaagttgctagaaat

SEQ ID NO: 774392 - DNA, 33 bp, Homo sapien
aaaaatctggacagaattaaagttgctagaaat

SEQ ID NO: 774393 - DNA, 33 bp, Homo sapien
agaaaaaacctggatacggaagactggatggac

SEQ ID NO: 774394 - DNA, 33 bp, Homo sapien
agaaaaaacctggatatggaagactggatggac

SEQ ID NO: 774395 - DNA, 33 bp, Homo sapien
tgatacataaagattgaaagtcttccctatggg

SEQ ID NO: 774396 - DNA, 33 bp, Homo sapien
tgatacataaagattggaagtcttccctatggg

SEQ ID NO: 774397 - DNA, 33 bp, Homo sapien
ttaggtcccactccaccgacagctttccttctg

SEQ ID NO: 774398 - DNA, 33 bp, Homo sapien
ttaggtcccactccactgacagctttccttctg

SEQ ID NO: 774399 - DNA, 33 bp, Homo sapien
gtcgctatgaattttccgtctttaattctataa

SEQ ID NO: 774400 - DNA, 33 bp, Homo sapien
gtcgctatgaattttctgtctttaattctataa

SEQ ID NO: 774401 - DNA, 33 bp, Homo sapien
caaaagacatctgctaaacaacaaggatttgat

SEQ ID NO: 774402 - DNA, 33 bp, Homo sapien
caaaagacatctgctatacaacaaggatttgat

SEQ ID NO: 774403 - DNA, 33 bp, Homo sapien
cagaccagtggactaaaaatagattgtaatgtt

SEQ ID NO: 774404 - DNA, 33 bp, Homo sapien
cagaccagtggactaataatagattgtaatgtt

SEQ ID NO: 774405 - DNA, 33 bp, Homo sapien
aataactacaggagtgaaattggaatatttata

SEQ ID NO: 774406 - DNA, 33 bp, Homo sapien
aataactacaggagtggaattggaatatttata

SEQ ID NO: 774407 - DNA, 33 bp, Homo sapien
tgtattataaacgttacgcagttaatgataatt

SEQ ID NO: 774408 - DNA, 33 bp, Homo sapien
tgtattataaacgttatgcagttaatgataatt

SEQ ID NO: 774409 - DNA, 33 bp, Homo sapien
gaagctgatactttcacagtcaaagatgaaatc

SEQ ID NO: 774410 - DNA, 33 bp, Homo sapien
gaagctgatactttcagagtcaaagatgaaatc

SEQ ID NO: 774411 - DNA, 33 bp, Homo sapien
tgacttgccctggatacacattgaatactctct

SEQ ID NO: 774412 - DNA, 33 bp, Homo sapien
tgacttgccctggatatacattgaatactctct

SEQ ID NO: 774413 - DNA, 33 bp, Homo sapien
tatgcaacaggacaaaacattgtaatgagatca

SEQ ID NO: 774414 - DNA, 33 bp, Homo sapien
tatgcaacaggacaaagcattgtaatgagatca

SEQ ID NO: 774415 - DNA, 33 bp, Homo sapien
atgagatatttcaaaaattgataaatgaaacag

SEQ ID NO: 774416 - DNA, 33 bp, Homo sapien
atgagatatttcaaaatttgataaatgaaacag

SEQ ID NO: 774417 - DNA, 33 bp, Homo sapien
gaatgctgtactaaaaacagatcatctttgtta

SEQ ID NO: 774418 - DNA, 33 bp, Homo sapien
gaatgctgtactaaaagcagatcatctttgtta

SEQ ID NO: 774419 - DNA, 33 bp, Homo sapien
tttctgtaacaggacacgagaaagatgatgagg

SEQ ID NO: 774420 - DNA, 33 bp, Homo sapien
tttctgtaacaggacaggagaaagatgatgagg

SEQ ID NO: 774421 - DNA, 33 bp, Homo sapien
cataattccaagttgcagagacgagttatacgt

SEQ ID NO: 774422 - DNA, 33 bp, Homo sapien
cataattccaagttgccgagacgagttatacgt

SEQ ID NO: 774423 - DNA, 33 bp, Homo sapien
acatacacctgcacaagaaggcaaaacagcaaa

SEQ ID NO: 774424 - DNA, 33 bp, Homo sapien
acatacacctgcacaataaggcaaaacagcaaa

SEQ ID NO: 774425 - DNA, 33 bp, Homo sapien
tctgagtactgggtagcccatttaggcaggacg

SEQ ID NO: 774426 - DNA, 33 bp, Homo sapien
tctgagtactgggtagtccatttaggcaggacg

SEQ ID NO: 774427 - DNA, 33 bp, Homo sapien
gagtcagtaagttgaaatatgctataatgttat

SEQ ID NO: 774428 - DNA, 33 bp, Homo sapien
gagtcagtaagttgaagtatgctataatgttat

SEQ ID NO: 774429 - DNA, 33 bp, Homo sapien
tttatgaatacagcaagaggagaatttacatat

SEQ ID NO: 774430 - DNA, 33 bp, Homo sapien
tttatgaatacagcaataggagaatttacatat

SEQ ID NO: 774431 - DNA, 33 bp, Homo sapien
ttacatatagaattcccattcgcctaaaaatga

SEQ ID NO: 774432 - DNA, 33 bp, Homo sapien
ttacatatagaattcctattcgcctaaaaatga

SEQ ID NO: 774433 - DNA, 33 bp, Homo sapien
tgtcccaagtaaacaacgctcttggagtaaatt

SEQ ID NO: 774434 - DNA, 33 bp, Homo sapien
tgtcccaagtaaacaaggctcttggagtaaatt

SEQ ID NO: 774435 - DNA, 33 bp, Homo sapien
aaggacttcaccaataggaacctctgcacagaa

SEQ ID NO: 774436 - DNA, 33 bp, Homo sapien
aaggacttcaccaatatgaacctctgcacagaa

SEQ ID NO: 774437 - DNA, 33 bp, Homo sapien
agcccttccacaggcagactggatattgtggat

SEQ ID NO: 774438 - DNA, 33 bp, Homo sapien
agcccttccacaggcatactggatattgtggat

SEQ ID NO: 774439 - DNA, 33 bp, Homo sapien
ttaatatgccagtgcaaacacaaatgtaaagaa

SEQ ID NO: 774440 - DNA, 33 bp, Homo sapien
ttaatatgccagtgcagacacaaatgtaaagaa

SEQ ID NO: 774441 - DNA, 33 bp, Homo sapien
tttgtgtgaacaaaaacatatcaggagaacatg

SEQ ID NO: 774442 - DNA, 33 bp, Homo sapien
tttgtgtgaacaaaaatatatcaggagaacatg

SEQ ID NO: 774443 - DNA, 33 bp, Homo sapien
cagctttgttcctggaccctgattgtgctaaga

SEQ ID NO: 774444 - DNA, 33 bp, Homo sapien
cagctttgttcctggatcctgattgtgctaaga

SEQ ID NO: 774445 - DNA, 33 bp, Homo sapien
ttttactcagttttccagaggactgttatatac

SEQ ID NO: 774446 - DNA, 33 bp, Homo sapien
ttttactcagttttccggaggactgttatatac

SEQ ID NO: 774447 - DNA, 33 bp, Homo sapien
ttaacagacacctcacaaaacatttaaaaataa

SEQ ID NO: 774448 - DNA, 33 bp, Homo sapien
ttaacagacacctcaccaaacatttaaaaataa

SEQ ID NO: 774449 - DNA, 33 bp, Homo sapien
cttcaaaggcagagtaaagttgccatatgatca

SEQ ID NO: 774450 - DNA, 33 bp, Homo sapien
cttcaaaggcagagtagagttgccatatgatca

SEQ ID NO: 774451 - DNA, 33 bp, Homo sapien
aaatgtggattcagaaccaaaagagttaagtct

SEQ ID NO: 774452 - DNA, 33 bp, Homo sapien
aaatgtggattcagaatcaaaagagttaagtct

SEQ ID NO: 774453 - DNA, 33 bp, Homo sapien
tgacaagtcagaataaactaaagtatccagaga

SEQ ID NO: 774454 - DNA, 33 bp, Homo sapien
tgacaagtcagaataatctaaagtatccagaga

SEQ ID NO: 774455 - DNA, 33 bp, Homo sapien
agtgtccacgttgaaacagatggaataactaca

SEQ ID NO: 774456 - DNA, 33 bp, Homo sapien
agtgtccacgttgaaatagatggaataactaca

SEQ ID NO: 774457 - DNA, 33 bp, Homo sapien
gcttaaacaggcttacaaggctatgaggagtaa

SEQ ID NO: 774458 - DNA, 33 bp, Homo sapien
gcttaaacaggcttacgaggctatgaggagtaa

SEQ ID NO: 774459 - DNA, 33 bp, Homo sapien
acttatctgttatgatcaaaaagcattataacc

SEQ ID NO: 774460 - DNA, 33 bp, Homo sapien
acttatctgttatgatgaaaaagcattataacc

SEQ ID NO: 774461 - DNA, 33 bp, Homo sapien
aaaactctattctacaaatatccatgaaactta

SEQ ID NO: 774462 - DNA, 33 bp, Homo sapien
aaaactctattctacagatatccatgaaactta

SEQ ID NO: 774463 - DNA, 33 bp, Homo sapien
tttattgctcatacaaaaaattagttcacaaac

SEQ ID NO: 774464 - DNA, 33 bp, Homo sapien
tttattgctcatacaacaaattagttcacaaac

SEQ ID NO: 774465 - DNA, 33 bp, Homo sapien
tagcaacagagtaaaactgtgtggctagcagtg

SEQ ID NO: 774466 - DNA, 33 bp, Homo sapien
tagcaacagagtaaaagtgtgtggctagcagtg

SEQ ID NO: 774467 - DNA, 33 bp, Homo sapien
ataaagaaatggaatggagacaatatgagacgc

SEQ ID NO: 774468 - DNA, 33 bp, Homo sapien
ataaagaaatggaatgtagacaatatgagacgc

SEQ ID NO: 774469 - DNA, 33 bp, Homo sapien
aggagaaaaggagatcactgttttagcgagtct

SEQ ID NO: 774470 - DNA, 33 bp, Homo sapien
aggagaaaaggagatccctgttttagcgagtct

SEQ ID NO: 774471 - DNA, 33 bp, Homo sapien
tgatatataaaggaaaagccgtcaaagcctctc

SEQ ID NO: 774472 - DNA, 33 bp, Homo sapien
tgatatataaaggaaaggccgtcaaagcctctc

SEQ ID NO: 774473 - DNA, 33 bp, Homo sapien
aattaaggcttattgcaaaacattacaagtaaa

SEQ ID NO: 774474 - DNA, 33 bp, Homo sapien
aattaaggcttattgctaaacattacaagtaaa

SEQ ID NO: 774475 - DNA, 33 bp, Homo sapien
atcggactttagaaaacacccgtgaatcagaat

SEQ ID NO: 774476 - DNA, 33 bp, Homo sapien
atcggactttagaaaatacccgtgaatcagaat

SEQ ID NO: 774477 - DNA, 33 bp, Homo sapien
acaaactatagctgaaatcattactaagtcata

SEQ ID NO: 774478 - DNA, 33 bp, Homo sapien
acaaactatagctgaagtcattactaagtcata

SEQ ID NO: 774479 - DNA, 33 bp, Homo sapien
tagtctaccgaatttaaaaaatacatttgaaaa

SEQ ID NO: 774480 - DNA, 33 bp, Homo sapien
tagtctaccgaatttagaaaatacatttgaaaa

SEQ ID NO: 774481 - DNA, 33 bp, Homo sapien
gctaccacatgtctggccataagatatacatca

SEQ ID NO: 774482 - DNA, 33 bp, Homo sapien
gctaccacatgtctggtcataagatatacatca

SEQ ID NO: 774483 - DNA, 33 bp, Homo sapien
tttaaaccataaggacactttagctcaaatgag

SEQ ID NO: 774484 - DNA, 33 bp, Homo sapien
tttaaaccataaggacgctttagctcaaatgag

SEQ ID NO: 774485 - DNA, 33 bp, Homo sapien
gaccattgctgaaaacaaactggtatcttctct

SEQ ID NO: 774486 - DNA, 33 bp, Homo sapien
gaccattgctgaaaacgaactggtatcttctct

SEQ ID NO: 774487 - DNA, 33 bp, Homo sapien
ggattctcctccaaaactgttttagactggaga

SEQ ID NO: 774488 - DNA, 33 bp, Homo sapien
ggattctcctccaaaattgttttagactggaga

SEQ ID NO: 774489 - DNA, 33 bp, Homo sapien
ttgcaagagaattaaacgaggtattgcaaacaa

SEQ ID NO: 774490 - DNA, 33 bp, Homo sapien
ttgcaagagaattaaatgaggtattgcaaacaa

SEQ ID NO: 774491 - DNA, 33 bp, Homo sapien
tgttgccaaagaggaacgtgccagtcatgctaa

SEQ ID NO: 774492 - DNA, 33 bp, Homo sapien
tgttgccaaagaggaaggtgccagtcatgctaa

SEQ ID NO: 774493 - DNA, 33 bp, Homo sapien
atcactttctaagaccaaacaacagaacctctg

SEQ ID NO: 774494 - DNA, 33 bp, Homo sapien
atcactttctaagacccaacaacagaacctctg

SEQ ID NO: 774495 - DNA, 33 bp, Homo sapien
ctaaaggagtgatttacagttcacggacagtag

SEQ ID NO: 774496 - DNA, 33 bp, Homo sapien
ctaaaggagtgatttagagttcacggacagtag

SEQ ID NO: 774497 - DNA, 33 bp, Homo sapien
aaacaatgttattttgcatagaggaacactctg

SEQ ID NO: 774498 - DNA, 33 bp, Homo sapien
aaacaatgttattttggatagaggaacactctg

SEQ ID NO: 774499 - DNA, 33 bp, Homo sapien
ttccctccttcagttgaatcacttaatttcttt

SEQ ID NO: 774500 - DNA, 33 bp, Homo sapien
ttccctccttcagttggatcacttaatttcttt

SEQ ID NO: 774501 - DNA, 33 bp, Homo sapien
cacagagtctccacaaatgtttgttgaatgctt

SEQ ID NO: 774502 - DNA, 33 bp, Homo sapien
cacagagtctccacaagtgtttgttgaatgctt

SEQ ID NO: 774503 - DNA, 33 bp, Homo sapien
cttggctatttttcacagtcctcttttgctgat

SEQ ID NO: 774504 - DNA, 33 bp, Homo sapien
cttggctatttttcacggtcctcttttgctgat

SEQ ID NO: 774505 - DNA, 33 bp, Homo sapien
taaactattacacaacactaattctctactgtt

SEQ ID NO: 774506 - DNA, 33 bp, Homo sapien
taaactattacacaacgctaattctctactgtt

SEQ ID NO: 774507 - DNA, 33 bp, Homo sapien
tccttagaccatgaagaagtttatggagacttg

SEQ ID NO: 774508 - DNA, 33 bp, Homo sapien
tccttagaccatgaaggagtttatggagacttg

SEQ ID NO: 774509 - DNA, 33 bp, Homo sapien
ctcagggggcatcacaaacaagtacatatagaa

SEQ ID NO: 774510 - DNA, 33 bp, Homo sapien
ctcagggggcatcacagacaagtacatatagaa

SEQ ID NO: 774511 - DNA, 33 bp, Homo sapien
tcatgttcttagataacggtaatgttgatgtca

SEQ ID NO: 774512 - DNA, 33 bp, Homo sapien
tcatgttcttagataatggtaatgttgatgtca

SEQ ID NO: 774513 - DNA, 33 bp, Homo sapien
tattcttcaaaatttcccaaccaaataatgatg

SEQ ID NO: 774514 - DNA, 33 bp, Homo sapien
tattcttcaaaatttctcaaccaaataatgatg

SEQ ID NO: 774515 - DNA, 33 bp, Homo sapien
gccagaccaagtaataaagccttcaatcctaag

SEQ ID NO: 774516 - DNA, 33 bp, Homo sapien
gccagaccaagtaatacagccttcaatcctaag

SEQ ID NO: 774517 - DNA, 33 bp, Homo sapien
caatatggagttttcaagttcttcctctgcaag

SEQ ID NO: 774518 - DNA, 33 bp, Homo sapien
caatatggagttttcatgttcttcctctgcaag

SEQ ID NO: 774519 - DNA, 33 bp, Homo sapien
tcagttttgatcccagcaattgcctcttctctc

SEQ ID NO: 774520 - DNA, 33 bp, Homo sapien
tcagttttgatcccagtaattgcctcttctctc

SEQ ID NO: 774521 - DNA, 33 bp, Homo sapien
aactgatgatacaggcaaagtctgagccaatgt

SEQ ID NO: 774522 - DNA, 33 bp, Homo sapien
aactgatgatacaggcgaagtctgagccaatgt

SEQ ID NO: 774523 - DNA, 33 bp, Homo sapien
aaattaaactttgaaagtatagttgagactata

SEQ ID NO: 774524 - DNA, 33 bp, Homo sapien
aaattaaactttgaaattatagttgagactata

SEQ ID NO: 774525 - DNA, 33 bp, Homo sapien
ccagccatgactgctggactggctctctgtggc

SEQ ID NO: 774526 - DNA, 33 bp, Homo sapien
ccagccatgactgctgtactggctctctgtggc

SEQ ID NO: 774527 - DNA, 33 bp, Homo sapien
gtgatgagctgaaaaactagagccagccatgtg

SEQ ID NO: 774528 - DNA, 33 bp, Homo sapien
gtgatgagctgaaaaattagagccagccatgtg

SEQ ID NO: 774529 - DNA, 33 bp, Homo sapien
tccagtctgaaggaagactaggagacagaggta

SEQ ID NO: 774530 - DNA, 33 bp, Homo sapien
tccagtctgaaggaaggctaggagacagaggta

SEQ ID NO: 774531 - DNA, 33 bp, Homo sapien
tagttcatattcattacgctggctgagttttcc

SEQ ID NO: 774532 - DNA, 33 bp, Homo sapien
tagttcatattcattatgctggctgagttttcc

SEQ ID NO: 774533 - DNA, 33 bp, Homo sapien
gtcatggtcctctccaccagtcaaggagtctgt

SEQ ID NO: 774534 - DNA, 33 bp, Homo sapien
gtcatggtcctctccatcagtcaaggagtctgt

SEQ ID NO: 774535 - DNA, 33 bp, Homo sapien
aagaccatattagctccctttcctatatcacat

SEQ ID NO: 774536 - DNA, 33 bp, Homo sapien
aagaccatattagctctctttcctatatcacat

SEQ ID NO: 774537 - DNA, 33 bp, Homo sapien
tacagtcatggtttgaagagaagaaggctgaaa

SEQ ID NO: 774538 - DNA, 33 bp, Homo sapien
tacagtcatggtttgaggagaagaaggctgaaa

SEQ ID NO: 774539 - DNA, 33 bp, Homo sapien
aattactcattcctgactcaatttctgtctgtc

SEQ ID NO: 774540 - DNA, 33 bp, Homo sapien
aattactcattcctgattcaatttctgtctgtc

SEQ ID NO: 774541 - DNA, 33 bp, Homo sapien
aaaaaaggcattctcaactggttgtatactgta

SEQ ID NO: 774542 - DNA, 33 bp, Homo sapien
aaaaaaggcattctcacctggttgtatactgta

SEQ ID NO: 774543 - DNA, 33 bp, Homo sapien
gagaggctgagcgaacagcacatgggcattttt

SEQ ID NO: 774544 - DNA, 33 bp, Homo sapien
gagaggctgagcgaacggcacatgggcattttt

SEQ ID NO: 774545 - DNA, 33 bp, Homo sapien
aatgcatttcatgagaagggttgttgtaagagt

SEQ ID NO: 774546 - DNA, 33 bp, Homo sapien
aatgcatttcatgagaggggttgttgtaagagt

SEQ ID NO: 774547 - DNA, 33 bp, Homo sapien
catcctccagaatgcaaaatggtagatccacca

SEQ ID NO: 774548 - DNA, 33 bp, Homo sapien
catcctccagaatgcagaatggtagatccacca

SEQ ID NO: 774549 - DNA, 33 bp, Homo sapien
gaaaagggagatttaaacatggcctataaggct

SEQ ID NO: 774550 - DNA, 33 bp, Homo sapien
gaaaagggagatttaaccatggcctataaggct

SEQ ID NO: 774551 - DNA, 33 bp, Homo sapien
attaagttggctataaaatacaacgattggcaa

SEQ ID NO: 774552 - DNA, 33 bp, Homo sapien
attaagttggctataagatacaacgattggcaa

SEQ ID NO: 774553 - DNA, 33 bp, Homo sapien
atgcaagacactggaaaggcagatggaatagtg

SEQ ID NO: 774554 - DNA, 33 bp, Homo sapien
atgcaagacactggaagggcagatggaatagtg

SEQ ID NO: 774555 - DNA, 33 bp, Homo sapien
tgccatgtggtctcaaaacaacagctcattgaa

SEQ ID NO: 774556 - DNA, 33 bp, Homo sapien
tgccatgtggtctcaacacaacagctcattgaa

SEQ ID NO: 774557 - DNA, 33 bp, Homo sapien
gatggaagagttaacactgacctggagacagac

SEQ ID NO: 774558 - DNA, 33 bp, Homo sapien
gatggaagagttaacattgacctggagacagac

SEQ ID NO: 774559 - DNA, 33 bp, Homo sapien
tgtcacaattcatcaaattattgcaagttttat

SEQ ID NO: 774560 - DNA, 33 bp, Homo sapien
tgtcacaattcatcaagttattgcaagttttat

SEQ ID NO: 774561 - DNA, 33 bp, Homo sapien
aaagccataatgaagagagatatgtgtatgaga

SEQ ID NO: 774562 - DNA, 33 bp, Homo sapien
aaagccataatgaagatagatatgtgtatgaga

SEQ ID NO: 774563 - DNA, 33 bp, Homo sapien
accagcacggctccagaataacaatagtggatt

SEQ ID NO: 774564 - DNA, 33 bp, Homo sapien
accagcacggctccaggataacaatagtggatt

SEQ ID NO: 774565 - DNA, 33 bp, Homo sapien
ttagtgtgaggacttacgataatctagctagga

SEQ ID NO: 774566 - DNA, 33 bp, Homo sapien
ttagtgtgaggacttatgataatctagctagga

SEQ ID NO: 774567 - DNA, 33 bp, Homo sapien
actgtcggagccaaaactagcaggagaggttga

SEQ ID NO: 774568 - DNA, 33 bp, Homo sapien
actgtcggagccaaaattagcaggagaggttga

SEQ ID NO: 774569 - DNA, 33 bp, Homo sapien
cttgactatttagcacacccaaaagagcaatag

SEQ ID NO: 774570 - DNA, 33 bp, Homo sapien
cttgactatttagcacccccaaaagagcaatag

SEQ ID NO: 774571 - DNA, 33 bp, Homo sapien
cactgtacaagtcttacgtctcattggttaatt

SEQ ID NO: 774572 - DNA, 33 bp, Homo sapien
cactgtacaagtcttatgtctcattggttaatt

SEQ ID NO: 774573 - DNA, 33 bp, Homo sapien
accaagcagacgaaaagaagtaaagtacaatcc

SEQ ID NO: 774574 - DNA, 33 bp, Homo sapien
accaagcagacgaaaataagtaaagtacaatcc

SEQ ID NO: 774575 - DNA, 33 bp, Homo sapien
cctttgaaagccgaggaaataaccttgctgatc

SEQ ID NO: 774576 - DNA, 33 bp, Homo sapien
cctttgaaagccgagggaataaccttgctgatc

SEQ ID NO: 774577 - DNA, 33 bp, Homo sapien
attagctacaagtggacagtaaagcagggaact

SEQ ID NO: 774578 - DNA, 33 bp, Homo sapien
attagctacaagtggatagtaaagcagggaact

SEQ ID NO: 774579 - DNA, 33 bp, Homo sapien
cactatgggcctagaaaagaaagtttatgtgtt

SEQ ID NO: 774580 - DNA, 33 bp, Homo sapien
cactatgggcctagaagagaaagtttatgtgtt

SEQ ID NO: 774581 - DNA, 33 bp, Homo sapien
actttaagtcacattcgatctccactgttcacc

SEQ ID NO: 774582 - DNA, 33 bp, Homo sapien
actttaagtcacattctatctccactgttcacc

SEQ ID NO: 774583 - DNA, 33 bp, Homo sapien
tctgtgtataaggcaacgtcacctgggaggcca

SEQ ID NO: 774584 - DNA, 33 bp, Homo sapien
tctgtgtataaggcaatgtcacctgggaggcca

SEQ ID NO: 774585 - DNA, 33 bp, Homo sapien
cttaaaatccaatccacgtgtatgagatatttt

SEQ ID NO: 774586 - DNA, 33 bp, Homo sapien
cttaaaatccaatccatgtgtatgagatatttt

SEQ ID NO: 774587 - DNA, 33 bp, Homo sapien
tgccataaaagaaggaataacagcaaactttgc

SEQ ID NO: 774588 - DNA, 33 bp, Homo sapien
tgccataaaagaaggagtaacagcaaactttgc

SEQ ID NO: 774589 - DNA, 33 bp, Homo sapien
agaccattttgtgcctcacaaggaaatttaaaa

SEQ ID NO: 774590 - DNA, 33 bp, Homo sapien
agaccattttgtgccttacaaggaaatttaaaa

SEQ ID NO: 774591 - DNA, 33 bp, Homo sapien
caagaaaggatggtaacgaaaattaatagctta

SEQ ID NO: 774592 - DNA, 33 bp, Homo sapien
caagaaaggatggtaaggaaaattaatagctta

SEQ ID NO: 774593 - DNA, 33 bp, Homo sapien
tcttggctgttctgaactatggaagcaattctg

SEQ ID NO: 774594 - DNA, 33 bp, Homo sapien
tcttggctgttctgaattatggaagcaattctg

SEQ ID NO: 774595 - DNA, 33 bp, Homo sapien
aattggaagcacacaaaagtcgctggtcaatag

SEQ ID NO: 774596 - DNA, 33 bp, Homo sapien
aattggaagcacacaagagtcgctggtcaatag

SEQ ID NO: 774597 - DNA, 33 bp, Homo sapien
tgttgatgtttgaaaccagatcatttccttctg

SEQ ID NO: 774598 - DNA, 33 bp, Homo sapien
tgttgatgtttgaaacgagatcatttccttctg

SEQ ID NO: 774599 - DNA, 33 bp, Homo sapien
tttaaaaatttcttccaaagtccaattaaagat

SEQ ID NO: 774600 - DNA, 33 bp, Homo sapien
tttaaaaatttcttccgaagtccaattaaagat

SEQ ID NO: 774601 - DNA, 33 bp, Homo sapien
cttaatagtatgaatcaagatacaaatttcagc

SEQ ID NO: 774602 - DNA, 33 bp, Homo sapien
cttaatagtatgaatcgagatacaaatttcagc

SEQ ID NO: 774603 - DNA, 33 bp, Homo sapien
tctatctatctgagacccaaataaataaaagct

SEQ ID NO: 774604 - DNA, 33 bp, Homo sapien
tctatctatctgagacgcaaataaataaaagct

SEQ ID NO: 774605 - DNA, 33 bp, Homo sapien
ctgcattcttgatccaaaccatcttttattcct

SEQ ID NO: 774606 - DNA, 33 bp, Homo sapien
ctgcattcttgatccagaccatcttttattcct

SEQ ID NO: 774607 - DNA, 33 bp, Homo sapien
ttctcctaattactgaatcaaacactaatttag

SEQ ID NO: 774608 - DNA, 33 bp, Homo sapien
ttctcctaattactgagtcaaacactaatttag

SEQ ID NO: 774609 - DNA, 33 bp, Homo sapien
cttgttagcaccatttaaaaaaatcatctaaat

SEQ ID NO: 774610 - DNA, 33 bp, Homo sapien
cttgttagcaccattttaaaaaatcatctaaat

SEQ ID NO: 774611 - DNA, 33 bp, Homo sapien
taaatggctctgaaaaataaatgattgttgaaa

SEQ ID NO: 774612 - DNA, 33 bp, Homo sapien
taaatggctctgaaaagtaaatgattgttgaaa

SEQ ID NO: 774613 - DNA, 33 bp, Homo sapien
tgacatttttaagaaccgatgggcaatatgagc

SEQ ID NO: 774614 - DNA, 33 bp, Homo sapien
tgacatttttaagaactgatgggcaatatgagc

SEQ ID NO: 774615 - DNA, 33 bp, Homo sapien
tttccagttctgtgaagtatctaaatgatagtt

SEQ ID NO: 774616 - DNA, 33 bp, Homo sapien
tttccagttctgtgaattatctaaatgatagtt

SEQ ID NO: 774617 - DNA, 33 bp, Homo sapien
tcacctgtggttgcttaaaaaagtggatctcag

SEQ ID NO: 774618 - DNA, 33 bp, Homo sapien
tcacctgtggttgctttaaaaagtggatctcag

SEQ ID NO: 774619 - DNA, 33 bp, Homo sapien
gaaaagcacagttcaaaaagaggaaaaagataa

SEQ ID NO: 774620 - DNA, 33 bp, Homo sapien
gaaaagcacagttcaagaagaggaaaaagataa

SEQ ID NO: 774621 - DNA, 33 bp, Homo sapien
tcctcctttaaaatgcactctactcactggaac

SEQ ID NO: 774622 - DNA, 33 bp, Homo sapien
tcctcctttaaaatgcgctctactcactggaac

SEQ ID NO: 774623 - DNA, 33 bp, Homo sapien
cagagtgatacccacaaaatggcaggttctgat

SEQ ID NO: 774624 - DNA, 33 bp, Homo sapien
cagagtgatacccacagaatggcaggttctgat

SEQ ID NO: 774625 - DNA, 33 bp, Homo sapien
ctccactgactcattaccgcattccacctccta

SEQ ID NO: 774626 - DNA, 33 bp, Homo sapien
ctccactgactcattatcgcattccacctccta

SEQ ID NO: 774627 - DNA, 33 bp, Homo sapien
gtttaagacgctcaaaactggtagaagtggcta

SEQ ID NO: 774628 - DNA, 33 bp, Homo sapien
gtttaagacgctcaaatctggtagaagtggcta

SEQ ID NO: 774629 - DNA, 33 bp, Homo sapien
tgtgtgtgtcgcaaaacagactgaatcgaactc

SEQ ID NO: 774630 - DNA, 33 bp, Homo sapien
tgtgtgtgtcgcaaaatagactgaatcgaactc

SEQ ID NO: 774631 - DNA, 33 bp, Homo sapien
atgattgaattccggaaataatatgttgagatc

SEQ ID NO: 774632 - DNA, 33 bp, Homo sapien
atgattgaattccggacataatatgttgagatc

SEQ ID NO: 774633 - DNA, 33 bp, Homo sapien
ttctggacctctaggaagttcgttacattgctc

SEQ ID NO: 774634 - DNA, 33 bp, Homo sapien
ttctggacctctaggatgttcgttacattgctc

SEQ ID NO: 774635 - DNA, 33 bp, Homo sapien
aaaaaagaggaatttgaacatggatgcacacac

SEQ ID NO: 774636 - DNA, 33 bp, Homo sapien
aaaaaagaggaatttggacatggatgcacacac

SEQ ID NO: 774637 - DNA, 33 bp, Homo sapien
aatgtgatatggcatcaagacaagtgttctccc

SEQ ID NO: 774638 - DNA, 33 bp, Homo sapien
aatgtgatatggcatcgagacaagtgttctccc

SEQ ID NO: 774639 - DNA, 33 bp, Homo sapien
tcttttactggttaacaagtatggatttacata

SEQ ID NO: 774640 - DNA, 33 bp, Homo sapien
tcttttactggttaacgagtatggatttacata

SEQ ID NO: 774641 - DNA, 33 bp, Homo sapien
aatggatacattcctacagagtaaaaagtaact

SEQ ID NO: 774642 - DNA, 33 bp, Homo sapien
aatggatacattcctatagagtaaaaagtaact

SEQ ID NO: 774643 - DNA, 33 bp, Homo sapien
ggaaagtcttgcttcacgtgtcagcattataaa

SEQ ID NO: 774644 - DNA, 33 bp, Homo sapien
ggaaagtcttgcttcatgtgtcagcattataaa

SEQ ID NO: 774645 - DNA, 33 bp, Homo sapien
tctgtggtaaataacaaagtcattggagactca

SEQ ID NO: 774646 - DNA, 33 bp, Homo sapien
tctgtggtaaataacagagtcattggagactca

SEQ ID NO: 774647 - DNA, 33 bp, Homo sapien
gctgctgaaatgtccaataagataaggacagag

SEQ ID NO: 774648 - DNA, 33 bp, Homo sapien
gctgctgaaatgtccagtaagataaggacagag

SEQ ID NO: 774649 - DNA, 33 bp, Homo sapien
ccagaagactggtaggacaatgtataattatgt

SEQ ID NO: 774650 - DNA, 33 bp, Homo sapien
ccagaagactggtaggtcaatgtataattatgt

SEQ ID NO: 774651 - DNA, 33 bp, Homo sapien
agcccctgagcaaagaagacctgctagaggagt

SEQ ID NO: 774652 - DNA, 33 bp, Homo sapien
agcccctgagcaaagatgacctgctagaggagt

SEQ ID NO: 774653 - DNA, 33 bp, Homo sapien
taatctgaggtacgaaaccgtgtatttctagat

SEQ ID NO: 774654 - DNA, 33 bp, Homo sapien
taatctgaggtacgaatccgtgtatttctagat

SEQ ID NO: 774655 - DNA, 33 bp, Homo sapien
catgatttattgcatcccagagcctttgtatat

SEQ ID NO: 774656 - DNA, 33 bp, Homo sapien
catgatttattgcatctcagagcctttgtatat

SEQ ID NO: 774657 - DNA, 33 bp, Homo sapien
atggtgctgtcactacgaaggatgagaggagga

SEQ ID NO: 774658 - DNA, 33 bp, Homo sapien
atggtgctgtcactactaaggatgagaggagga

SEQ ID NO: 774659 - DNA, 33 bp, Homo sapien
tcagctgggaacttaacacaaatcaaatgatca

SEQ ID NO: 774660 - DNA, 33 bp, Homo sapien
tcagctgggaacttaatacaaatcaaatgatca

SEQ ID NO: 774661 - DNA, 33 bp, Homo sapien
ggtaatggtatgtaccagctaaaatcataaatg

SEQ ID NO: 774662 - DNA, 33 bp, Homo sapien
ggtaatggtatgtaccggctaaaatcataaatg

SEQ ID NO: 774663 - DNA, 33 bp, Homo sapien
ctgcctatttcagtggccacatcctcagttcat

SEQ ID NO: 774664 - DNA, 33 bp, Homo sapien
ctgcctatttcagtggtcacatcctcagttcat

SEQ ID NO: 774665 - DNA, 33 bp, Homo sapien
ttgaagaaatatctcaatgacttgttgttttat

SEQ ID NO: 774666 - DNA, 33 bp, Homo sapien
ttgaagaaatatctcagtgacttgttgttttat

SEQ ID NO: 774667 - DNA, 33 bp, Homo sapien
caaaaagagtaaagaactatggtttgctggcta

SEQ ID NO: 774668 - DNA, 33 bp, Homo sapien
caaaaagagtaaagaattatggtttgctggcta

SEQ ID NO: 774669 - DNA, 33 bp, Homo sapien
cttgcattctggaaacacaagagacttgccagg

SEQ ID NO: 774670 - DNA, 33 bp, Homo sapien
cttgcattctggaaacccaagagacttgccagg

SEQ ID NO: 774671 - DNA, 33 bp, Homo sapien
agaaataaagcagaataaatcttagacatgatt

SEQ ID NO: 774672 - DNA, 33 bp, Homo sapien
agaaataaagcagaatgaatcttagacatgatt

SEQ ID NO: 774673 - DNA, 33 bp, Homo sapien
ctgtagagtgaatacaacttagacactgtgctg

SEQ ID NO: 774674 - DNA, 33 bp, Homo sapien
ctgtagagtgaatacatcttagacactgtgctg

SEQ ID NO: 774675 - DNA, 33 bp, Homo sapien
aaggatatcctttgaacgtatcttctattgttt

SEQ ID NO: 774676 - DNA, 33 bp, Homo sapien
aaggatatcctttgaatgtatcttctattgttt

SEQ ID NO: 774677 - DNA, 33 bp, Homo sapien
tccttttcacagtgcacggagttaaaaagcacc

SEQ ID NO: 774678 - DNA, 33 bp, Homo sapien
tccttttcacagtgcatggagttaaaaagcacc

SEQ ID NO: 774679 - DNA, 33 bp, Homo sapien
gttcattttgttgttcacattcagtcagtatga

SEQ ID NO: 774680 - DNA, 33 bp, Homo sapien
gttcattttgttgttcgcattcagtcagtatga

SEQ ID NO: 774681 - DNA, 33 bp, Homo sapien
ctcaatgtgtccctcaagcatttccatgacact

SEQ ID NO: 774682 - DNA, 33 bp, Homo sapien
ctcaatgtgtccctcaggcatttccatgacact

SEQ ID NO: 774683 - DNA, 33 bp, Homo sapien
gagatgttggactgaaattacccatatattttc

SEQ ID NO: 774684 - DNA, 33 bp, Homo sapien
gagatgttggactgaacttacccatatattttc

SEQ ID NO: 774685 - DNA, 33 bp, Homo sapien
acaggagtgtaacagaagccttcaggttttgaa

SEQ ID NO: 774686 - DNA, 33 bp, Homo sapien
acaggagtgtaacagaggccttcaggttttgaa

SEQ ID NO: 774687 - DNA, 33 bp, Homo sapien
gccctccaactgtgaaatggtaatgtgctaaat

SEQ ID NO: 774688 - DNA, 33 bp, Homo sapien
gccctccaactgtgaactggtaatgtgctaaat

SEQ ID NO: 774689 - DNA, 33 bp, Homo sapien
acctatagtggaactcagaatattcagccagag

SEQ ID NO: 774690 - DNA, 33 bp, Homo sapien
acctatagtggaactcggaatattcagccagag

SEQ ID NO: 774691 - DNA, 33 bp, Homo sapien
tccatatctctagcatcaatcccagtgctggta

SEQ ID NO: 774692 - DNA, 33 bp, Homo sapien
tccatatctctagcatgaatcccagtgctggta

SEQ ID NO: 774693 - DNA, 33 bp, Homo sapien
catggaaatggtcaaggaggcccgagaactggg

SEQ ID NO: 774694 - DNA, 33 bp, Homo sapien
catggaaatggtcaagtaggcccgagaactggg

SEQ ID NO: 774695 - DNA, 33 bp, Homo sapien
ttaatgttcttaggggccacagagagacgaggt

SEQ ID NO: 774696 - DNA, 33 bp, Homo sapien
ttaatgttcttaggggtcacagagagacgaggt

SEQ ID NO: 774697 - DNA, 33 bp, Homo sapien
caaggctttatggtcaaaggactatagtggcta

SEQ ID NO: 774698 - DNA, 33 bp, Homo sapien
caaggctttatggtcagaggactatagtggcta

SEQ ID NO: 774699 - DNA, 33 bp, Homo sapien
taatgaacaaatcatacagattcttcctgttac

SEQ ID NO: 774700 - DNA, 33 bp, Homo sapien
taatgaacaaatcatatagattcttcctgttac

SEQ ID NO: 774701 - DNA, 33 bp, Homo sapien
gccacctagcttgagacgagacaacacagccca

SEQ ID NO: 774702 - DNA, 33 bp, Homo sapien
gccacctagcttgagatgagacaacacagccca

SEQ ID NO: 774703 - DNA, 33 bp, Homo sapien
ccacccagaaacaccacctccaaaggaatagag

SEQ ID NO: 774704 - DNA, 33 bp, Homo sapien
ccacccagaaacaccatctccaaaggaatagag

SEQ ID NO: 774705 - DNA, 33 bp, Homo sapien
aaccttgtatgaataaggtaattctgctaaaat

SEQ ID NO: 774706 - DNA, 33 bp, Homo sapien
aaccttgtatgaataatgtaattctgctaaaat

SEQ ID NO: 774707 - DNA, 33 bp, Homo sapien
tcaaaggctgaaagtaagagtggcctcagtaat

SEQ ID NO: 774708 - DNA, 33 bp, Homo sapien
tcaaaggctgaaagtaggagtggcctcagtaat

SEQ ID NO: 774709 - DNA, 33 bp, Homo sapien
agcctagattttacctaagacaatgtccttgct

SEQ ID NO: 774710 - DNA, 33 bp, Homo sapien
agcctagattttacctgagacaatgtccttgct

SEQ ID NO: 774711 - DNA, 33 bp, Homo sapien
cctcacttttgataggaaaatggtagttgctaa

SEQ ID NO: 774712 - DNA, 33 bp, Homo sapien
cctcacttttgatagggaaatggtagttgctaa

SEQ ID NO: 774713 - DNA, 33 bp, Homo sapien
cttctgcagttatgtgcaagctagaataatacc

SEQ ID NO: 774714 - DNA, 33 bp, Homo sapien
cttctgcagttatgtgtaagctagaataatacc

SEQ ID NO: 774715 - DNA, 33 bp, Homo sapien
tctactgcactaggtagctaagaaggaagagag

SEQ ID NO: 774716 - DNA, 33 bp, Homo sapien
tctactgcactaggtatctaagaaggaagagag

SEQ ID NO: 774717 - DNA, 33 bp, Homo sapien
ttctctctaagaagagaaacaggtagctatgtc

SEQ ID NO: 774718 - DNA, 33 bp, Homo sapien
ttctctctaagaagaggaacaggtagctatgtc

SEQ ID NO: 774719 - DNA, 33 bp, Homo sapien
cttcgatctcattctacgaagttctcctcgtaa

SEQ ID NO: 774720 - DNA, 33 bp, Homo sapien
cttcgatctcattctatgaagttctcctcgtaa

SEQ ID NO: 774721 - DNA, 33 bp, Homo sapien
aaaatatgtgaagatacggtgaagcacaaggta

SEQ ID NO: 774722 - DNA, 33 bp, Homo sapien
aaaatatgtgaagatatggtgaagcacaaggta

SEQ ID NO: 774723 - DNA, 33 bp, Homo sapien
cacaattccctggacaccattgtgattctgctg

SEQ ID NO: 774724 - DNA, 33 bp, Homo sapien
cacaattccctggacatcattgtgattctgctg

SEQ ID NO: 774725 - DNA, 33 bp, Homo sapien
ttggctttcctaatgcacttaatgactttgctt

SEQ ID NO: 774726 - DNA, 33 bp, Homo sapien
ttggctttcctaatgcgcttaatgactttgctt

SEQ ID NO: 774727 - DNA, 33 bp, Homo sapien
attatccaaagaaagacgaaatatggaacaagg

SEQ ID NO: 774728 - DNA, 33 bp, Homo sapien
attatccaaagaaagatgaaatatggaacaagg

SEQ ID NO: 774729 - DNA, 33 bp, Homo sapien
aaagtggtctctacttaaaagttgcagtagatc

SEQ ID NO: 774730 - DNA, 33 bp, Homo sapien
aaagtggtctctactttaaagttgcagtagatc

SEQ ID NO: 774731 - DNA, 33 bp, Homo sapien
ctcatcctaatggcaaagcaataactggtcctg

SEQ ID NO: 774732 - DNA, 33 bp, Homo sapien
ctcatcctaatggcaaggcaataactggtcctg

SEQ ID NO: 774733 - DNA, 33 bp, Homo sapien
ttcagaaagttttatgaaaatcatcataacatg

SEQ ID NO: 774734 - DNA, 33 bp, Homo sapien
ttcagaaagttttatggaaatcatcataacatg

SEQ ID NO: 774735 - DNA, 33 bp, Homo sapien
ggagtgcaatcatacccctctgtaatgaactcc

SEQ ID NO: 774736 - DNA, 33 bp, Homo sapien
ggagtgcaatcatacctctctgtaatgaactcc

SEQ ID NO: 774737 - DNA, 33 bp, Homo sapien
agagaaagcattcgaaagattagtcaatttaca

SEQ ID NO: 774738 - DNA, 33 bp, Homo sapien
agagaaagcattcgaaggattagtcaatttaca

SEQ ID NO: 774739 - DNA, 33 bp, Homo sapien
ataaggacaataagacaggataacctcctaaac

SEQ ID NO: 774740 - DNA, 33 bp, Homo sapien
ataaggacaataagactggataacctcctaaac

SEQ ID NO: 774741 - DNA, 33 bp, Homo sapien
gtcctgtagaacatttaaaagtcacatacagtt

SEQ ID NO: 774742 - DNA, 33 bp, Homo sapien
gtcctgtagaacatttgaaagtcacatacagtt

SEQ ID NO: 774743 - DNA, 33 bp, Homo sapien
gttaggctggactagagtagcctttaggactga

SEQ ID NO: 774744 - DNA, 33 bp, Homo sapien
gttaggctggactagattagcctttaggactga

SEQ ID NO: 774745 - DNA, 33 bp, Homo sapien
tgctattggtaaggcaagattttacgtgatcag

SEQ ID NO: 774746 - DNA, 33 bp, Homo sapien
tgctattggtaaggcaggattttacgtgatcag

SEQ ID NO: 774747 - DNA, 33 bp, Homo sapien
aaaagtcatcttctcaataagacctacccaaaa

SEQ ID NO: 774748 - DNA, 33 bp, Homo sapien
aaaagtcatcttctcagtaagacctacccaaaa

SEQ ID NO: 774749 - DNA, 33 bp, Homo sapien
caaatttatgctagtacgaatgaaactgcacgc

SEQ ID NO: 774750 - DNA, 33 bp, Homo sapien
caaatttatgctagtatgaatgaaactgcacgc

SEQ ID NO: 774751 - DNA, 33 bp, Homo sapien
aaatgctagtcactcacacgcttctcgtaggga

SEQ ID NO: 774752 - DNA, 33 bp, Homo sapien
aaatgctagtcactcatacgcttctcgtaggga

SEQ ID NO: 774753 - DNA, 33 bp, Homo sapien
aatctaaatgttcttacagcaaacaatgtagaa

SEQ ID NO: 774754 - DNA, 33 bp, Homo sapien
aatctaaatgttcttatagcaaacaatgtagaa

SEQ ID NO: 774755 - DNA, 33 bp, Homo sapien
agagaaatgccctcaaagaagagccaaatatcc

SEQ ID NO: 774756 - DNA, 33 bp, Homo sapien
agagaaatgccctcaaggaagagccaaatatcc

SEQ ID NO: 774757 - DNA, 33 bp, Homo sapien
ccttaatctactactaaccacctgtatcttcat

SEQ ID NO: 774758 - DNA, 33 bp, Homo sapien
ccttaatctactactagccacctgtatcttcat

SEQ ID NO: 774759 - DNA, 33 bp, Homo sapien
atgactaccaaaagtaacatgaagatacaggtg

SEQ ID NO: 774760 - DNA, 33 bp, Homo sapien
atgactaccaaaagtagcatgaagatacaggtg

SEQ ID NO: 774761 - DNA, 33 bp, Homo sapien
tgagttgtgaagtgacagtaaaagggcaataag

SEQ ID NO: 774762 - DNA, 33 bp, Homo sapien
tgagttgtgaagtgaccgtaaaagggcaataag

SEQ ID NO: 774763 - DNA, 33 bp, Homo sapien
gtcacttcacaactcacaaactgcaactcttct

SEQ ID NO: 774764 - DNA, 33 bp, Homo sapien
gtcacttcacaactcataaactgcaactcttct

SEQ ID NO: 774765 - DNA, 33 bp, Homo sapien
attttacctgttttaaataagactgagcatatc

SEQ ID NO: 774766 - DNA, 33 bp, Homo sapien
attttacctgttttaagtaagactgagcatatc

SEQ ID NO: 774767 - DNA, 33 bp, Homo sapien
agcctgctttccataacagatagtactaattta

SEQ ID NO: 774768 - DNA, 33 bp, Homo sapien
agcctgctttccataagagatagtactaattta

SEQ ID NO: 774769 - DNA, 33 bp, Homo sapien
tcatggtgtacataaacctgggtgatatagcct

SEQ ID NO: 774770 - DNA, 33 bp, Homo sapien
tcatggtgtacataaatctgggtgatatagcct

SEQ ID NO: 774771 - DNA, 33 bp, Homo sapien
tattttgaattgaaagaaggttaacataacagt

SEQ ID NO: 774772 - DNA, 33 bp, Homo sapien
tattttgaattgaaaggaggttaacataacagt

SEQ ID NO: 774773 - DNA, 33 bp, Homo sapien
ccatccagcctgatacagaactcatttataaat

SEQ ID NO: 774774 - DNA, 33 bp, Homo sapien
ccatccagcctgatactgaactcatttataaat

SEQ ID NO: 774775 - DNA, 33 bp, Homo sapien
aagctgcttagttacacctaaaggaagagtacc

SEQ ID NO: 774776 - DNA, 33 bp, Homo sapien
aagctgcttagttacatctaaaggaagagtacc

SEQ ID NO: 774777 - DNA, 33 bp, Homo sapien
tgaatggacaaaaccacgaatgttagatctaga

SEQ ID NO: 774778 - DNA, 33 bp, Homo sapien
tgaatggacaaaaccatgaatgttagatctaga

SEQ ID NO: 774779 - DNA, 33 bp, Homo sapien
accaaaaggctagaacagaggatctggggccaa

SEQ ID NO: 774780 - DNA, 33 bp, Homo sapien
accaaaaggctagaacggaggatctggggccaa

SEQ ID NO: 774781 - DNA, 33 bp, Homo sapien
agaacttaggatcataacaacaatggactaacc

SEQ ID NO: 774782 - DNA, 33 bp, Homo sapien
agaacttaggatcataccaacaatggactaacc

SEQ ID NO: 774783 - DNA, 33 bp, Homo sapien
aagtggcccaagaaacagtttagtccagaatat

SEQ ID NO: 774784 - DNA, 33 bp, Homo sapien
aagtggcccaagaaacggtttagtccagaatat

SEQ ID NO: 774785 - DNA, 33 bp, Homo sapien
tggctaacaaaaggaaacctctcactttgtctc

SEQ ID NO: 774786 - DNA, 33 bp, Homo sapien
tggctaacaaaaggaaccctctcactttgtctc

SEQ ID NO: 774787 - DNA, 33 bp, Homo sapien
acatttggcataggaaaattaagtgggacagag

SEQ ID NO: 774788 - DNA, 33 bp, Homo sapien
acatttggcataggaagattaagtgggacagag

SEQ ID NO: 774789 - DNA, 33 bp, Homo sapien
atggacatccatgtaaagggaaataggaacact

SEQ ID NO: 774790 - DNA, 33 bp, Homo sapien
atggacatccatgtaaggggaaataggaacact

SEQ ID NO: 774791 - DNA, 33 bp, Homo sapien
ttttctaccttcacaacgtgtcagtccccacat

SEQ ID NO: 774792 - DNA, 33 bp, Homo sapien
ttttctaccttcacaatgtgtcagtccccacat

SEQ ID NO: 774793 - DNA, 33 bp, Homo sapien
ttgagacctggtattacgttgctgttaatggaa

SEQ ID NO: 774794 - DNA, 33 bp, Homo sapien
ttgagacctggtattatgttgctgttaatggaa

SEQ ID NO: 774795 - DNA, 33 bp, Homo sapien
gtaaagtctttatggaaaacatggcatggaagc

SEQ ID NO: 774796 - DNA, 33 bp, Homo sapien
gtaaagtctttatggagaacatggcatggaagc

SEQ ID NO: 774797 - DNA, 33 bp, Homo sapien
ctgttagtgtgcctacccatattaatcctaaat

SEQ ID NO: 774798 - DNA, 33 bp, Homo sapien
ctgttagtgtgcctactcatattaatcctaaat

SEQ ID NO: 774799 - DNA, 33 bp, Homo sapien
ctgtgacttatagttacgatctagtaggagtga

SEQ ID NO: 774800 - DNA, 33 bp, Homo sapien
ctgtgacttatagttatgatctagtaggagtga

SEQ ID NO: 774801 - DNA, 33 bp, Homo sapien
gtctccatctcttttagaccgtatttttactgt

SEQ ID NO: 774802 - DNA, 33 bp, Homo sapien
gtctccatctcttttataccgtatttttactgt

SEQ ID NO: 774803 - DNA, 33 bp, Homo sapien
atgagaagaaatctacaatgtgctaggaacttt

SEQ ID NO: 774804 - DNA, 33 bp, Homo sapien
atgagaagaaatctacgatgtgctaggaacttt

SEQ ID NO: 774805 - DNA, 33 bp, Homo sapien
aaagttaaagcctctacgtttgtctagtagact

SEQ ID NO: 774806 - DNA, 33 bp, Homo sapien
aaagttaaagcctctatgtttgtctagtagact

SEQ ID NO: 774807 - DNA, 33 bp, Homo sapien
cctaacttacttgtctaaaccagtaacctcaaa

SEQ ID NO: 774808 - DNA, 33 bp, Homo sapien
cctaacttacttgtctgaaccagtaacctcaaa

SEQ ID NO: 774809 - DNA, 33 bp, Homo sapien
tgtccatctaccaatgacaattaagaacttaaa

SEQ ID NO: 774810 - DNA, 33 bp, Homo sapien
tgtccatctaccaatgccaattaagaacttaaa

SEQ ID NO: 774811 - DNA, 33 bp, Homo sapien
tatcttcttcacactaaaacaaatgtgtcccat

SEQ ID NO: 774812 - DNA, 33 bp, Homo sapien
tatcttcttcacactataacaaatgtgtcccat

SEQ ID NO: 774813 - DNA, 33 bp, Homo sapien
aggaattactcagtcaaggggaatgatcatctt

SEQ ID NO: 774814 - DNA, 33 bp, Homo sapien
aggaattactcagtcagggggaatgatcatctt

SEQ ID NO: 774815 - DNA, 33 bp, Homo sapien
aagcaattgctgaaacacctgaaaatgacattc

SEQ ID NO: 774816 - DNA, 33 bp, Homo sapien
aagcaattgctgaaacgcctgaaaatgacattc

SEQ ID NO: 774817 - DNA, 33 bp, Homo sapien
ttactgagttctaaaaggtttgtgggaaaatgt

SEQ ID NO: 774818 - DNA, 33 bp, Homo sapien
ttactgagttctaaaatgtttgtgggaaaatgt

SEQ ID NO: 774819 - DNA, 33 bp, Homo sapien
ttttagacccagtcagacctcattataagatac

SEQ ID NO: 774820 - DNA, 33 bp, Homo sapien
ttttagacccagtcaggcctcattataagatac

SEQ ID NO: 774821 - DNA, 33 bp, Homo sapien
ttctgaaataaatgtacccgttgtcactggcct

SEQ ID NO: 774822 - DNA, 33 bp, Homo sapien
ttctgaaataaatgtatccgttgtcactggcct

SEQ ID NO: 774823 - DNA, 33 bp, Homo sapien
tctcaatgactggagaaaaaaaggcttaattta

SEQ ID NO: 774824 - DNA, 33 bp, Homo sapien
tctcaatgactggagagaaaaaggcttaattta

SEQ ID NO: 774825 - DNA, 33 bp, Homo sapien
acaatacattttctaaataagggtgtctactaa

SEQ ID NO: 774826 - DNA, 33 bp, Homo sapien
acaatacattttctaattaagggtgtctactaa

SEQ ID NO: 774827 - DNA, 33 bp, Homo sapien
gaggtctcattctgacaataaaaactcattaag

SEQ ID NO: 774828 - DNA, 33 bp, Homo sapien
gaggtctcattctgacgataaaaactcattaag

SEQ ID NO: 774829 - DNA, 33 bp, Homo sapien
actatggaatactttacagaggtgaaaatcagt

SEQ ID NO: 774830 - DNA, 33 bp, Homo sapien
actatggaatactttatagaggtgaaaatcagt

SEQ ID NO: 774831 - DNA, 33 bp, Homo sapien
aactcatatagcaaggaagaaatgtaaaaaaca

SEQ ID NO: 774832 - DNA, 33 bp, Homo sapien
aactcatatagcaagggagaaatgtaaaaaaca

SEQ ID NO: 774833 - DNA, 33 bp, Homo sapien
ctgtgacaatgctgcaagttctggagagcaaag

SEQ ID NO: 774834 - DNA, 33 bp, Homo sapien
ctgtgacaatgctgcacgttctggagagcaaag

SEQ ID NO: 774835 - DNA, 33 bp, Homo sapien
ataaaaagacaaaacacagcgatttcagttgaa

SEQ ID NO: 774836 - DNA, 33 bp, Homo sapien
ataaaaagacaaaacatagcgatttcagttgaa

SEQ ID NO: 774837 - DNA, 33 bp, Homo sapien
cctcacagaagtttcaatactaaaataggtagc

SEQ ID NO: 774838 - DNA, 33 bp, Homo sapien
cctcacagaagtttcagtactaaaataggtagc

SEQ ID NO: 774839 - DNA, 33 bp, Homo sapien
caagatgacaaactataaagactagaactgagt

SEQ ID NO: 774840 - DNA, 33 bp, Homo sapien
caagatgacaaactatgaagactagaactgagt

SEQ ID NO: 774841 - DNA, 33 bp, Homo sapien
tgggctggagacaccaagacatattctcatggg

SEQ ID NO: 774842 - DNA, 33 bp, Homo sapien
tgggctggagacaccaggacatattctcatggg

SEQ ID NO: 774843 - DNA, 33 bp, Homo sapien
ataatgtttacctcagaccagtactagagttgg

SEQ ID NO: 774844 - DNA, 33 bp, Homo sapien
ataatgtttacctcaggccagtactagagttgg

SEQ ID NO: 774845 - DNA, 33 bp, Homo sapien
tccctgcaagagaaacagcatctgaattttgta

SEQ ID NO: 774846 - DNA, 33 bp, Homo sapien
tccctgcaagagaaacggcatctgaattttgta

SEQ ID NO: 774847 - DNA, 33 bp, Homo sapien
tattggtgaggaaataaatgtttagcttttctg

SEQ ID NO: 774848 - DNA, 33 bp, Homo sapien
tattggtgaggaaatacatgtttagcttttctg

SEQ ID NO: 774849 - DNA, 33 bp, Homo sapien
attttgtagcattagaaccttagggtattggac

SEQ ID NO: 774850 - DNA, 33 bp, Homo sapien
attttgtagcattagagccttagggtattggac

SEQ ID NO: 774851 - DNA, 33 bp, Homo sapien
aggtaggttagaggtaaggaggtgatcataccc

SEQ ID NO: 774852 - DNA, 33 bp, Homo sapien
aggtaggttagaggtagggaggtgatcataccc

SEQ ID NO: 774853 - DNA, 33 bp, Homo sapien
ggccacgtggtacaacagacagagccccagttg

SEQ ID NO: 774854 - DNA, 33 bp, Homo sapien
ggccacgtggtacaacggacagagccccagttg

SEQ ID NO: 774855 - DNA, 33 bp, Homo sapien
aactgcaattatatgaaggacctcagaaaagaa

SEQ ID NO: 774856 - DNA, 33 bp, Homo sapien
aactgcaattatatgagggacctcagaaaagaa

SEQ ID NO: 774857 - DNA, 33 bp, Homo sapien
atgaacaaaaatatgaccaataagccctcagcc

SEQ ID NO: 774858 - DNA, 33 bp, Homo sapien
atgaacaaaaatatgagcaataagccctcagcc

SEQ ID NO: 774859 - DNA, 33 bp, Homo sapien
gtagaatttatgcctccacttctttgagtctgg

SEQ ID NO: 774860 - DNA, 33 bp, Homo sapien
gtagaatttatgcctctacttctttgagtctgg

SEQ ID NO: 774861 - DNA, 33 bp, Homo sapien
tcttcaaattacaagacgtttaaaggcagaggg

SEQ ID NO: 774862 - DNA, 33 bp, Homo sapien
tcttcaaattacaagatgtttaaaggcagaggg

SEQ ID NO: 774863 - DNA, 33 bp, Homo sapien
tttaaatgctttttggccaagataaaatatatt

SEQ ID NO: 774864 - DNA, 33 bp, Homo sapien
tttaaatgctttttggtcaagataaaatatatt

SEQ ID NO: 774865 - DNA, 33 bp, Homo sapien
ctctgtctccgatcccagacaattgatgtacaa

SEQ ID NO: 774866 - DNA, 33 bp, Homo sapien
ctctgtctccgatcccggacaattgatgtacaa

SEQ ID NO: 774867 - DNA, 33 bp, Homo sapien
aaatgtctaagcaataaggtgcaataatgaaga

SEQ ID NO: 774868 - DNA, 33 bp, Homo sapien
aaatgtctaagcaatacggtgcaataatgaaga

SEQ ID NO: 774869 - DNA, 33 bp, Homo sapien
caaagacaaaaaaataaggtgtgtgtctttgac

SEQ ID NO: 774870 - DNA, 33 bp, Homo sapien
caaagacaaaaaaatacggtgtgtgtctttgac

SEQ ID NO: 774871 - DNA, 33 bp, Homo sapien
tatatgtgggtatccacaatgtttcttgacatg

SEQ ID NO: 774872 - DNA, 33 bp, Homo sapien
tatatgtgggtatccataatgtttcttgacatg

SEQ ID NO: 774873 - DNA, 33 bp, Homo sapien
aagggagcaaaagaaaagtgctagttgtttcaa

SEQ ID NO: 774874 - DNA, 33 bp, Homo sapien
aagggagcaaaagaaaggtgctagttgtttcaa

SEQ ID NO: 774875 - DNA, 33 bp, Homo sapien
acaagaccattattcaagagtaaaaagtagatt

SEQ ID NO: 774876 - DNA, 33 bp, Homo sapien
acaagaccattattcaggagtaaaaagtagatt

SEQ ID NO: 774877 - DNA, 33 bp, Homo sapien
taaggattttgtcagacgtggcttatctaagtt

SEQ ID NO: 774878 - DNA, 33 bp, Homo sapien
taaggattttgtcagatgtggcttatctaagtt

SEQ ID NO: 774879 - DNA, 33 bp, Homo sapien
ctcatgaaatctcttacaaaagtttccttgtgg

SEQ ID NO: 774880 - DNA, 33 bp, Homo sapien
ctcatgaaatctcttataaaagtttccttgtgg

SEQ ID NO: 774881 - DNA, 33 bp, Homo sapien
tggaggaatttcacgcacaaaggaggaactaca

SEQ ID NO: 774882 - DNA, 33 bp, Homo sapien
tggaggaatttcacgcgcaaaggaggaactaca

SEQ ID NO: 774883 - DNA, 33 bp, Homo sapien
ctgaacttactagacaaatacttgctccaggta

SEQ ID NO: 774884 - DNA, 33 bp, Homo sapien
ctgaacttactagacagatacttgctccaggta

SEQ ID NO: 774885 - DNA, 33 bp, Homo sapien
attgatttacctcatcaatgacatcaagccaga

SEQ ID NO: 774886 - DNA, 33 bp, Homo sapien
attgatttacctcatcgatgacatcaagccaga

SEQ ID NO: 774887 - DNA, 33 bp, Homo sapien
tgggatagaagcatacagatgaatatatcgaag

SEQ ID NO: 774888 - DNA, 33 bp, Homo sapien
tgggatagaagcatacggatgaatatatcgaag

SEQ ID NO: 774889 - DNA, 33 bp, Homo sapien
tcttttcagattgggcacatgaccaagataaaa

SEQ ID NO: 774890 - DNA, 33 bp, Homo sapien
tcttttcagattgggcgcatgaccaagataaaa

SEQ ID NO: 774891 - DNA, 33 bp, Homo sapien
aaaaattaaatggaagccaactagtttaactga

SEQ ID NO: 774892 - DNA, 33 bp, Homo sapien
aaaaattaaatggaaggcaactagtttaactga

SEQ ID NO: 774893 - DNA, 33 bp, Homo sapien
aagcatggttgccaaacagatcatcagtaaaag

SEQ ID NO: 774894 - DNA, 33 bp, Homo sapien
aagcatggttgccaaagagatcatcagtaaaag

SEQ ID NO: 774895 - DNA, 33 bp, Homo sapien
ttaaagctcagtgaacgactctttcctcttttt

SEQ ID NO: 774896 - DNA, 33 bp, Homo sapien
ttaaagctcagtgaactactctttcctcttttt

SEQ ID NO: 774897 - DNA, 33 bp, Homo sapien
aatcatatgtatctcacggggtttaatcattag

SEQ ID NO: 774898 - DNA, 33 bp, Homo sapien
aatcatatgtatctcatggggtttaatcattag

SEQ ID NO: 774899 - DNA, 33 bp, Homo sapien
catctttgcactctaacgaatgggggcagaaaa

SEQ ID NO: 774900 - DNA, 33 bp, Homo sapien
catctttgcactctaatgaatgggggcagaaaa

SEQ ID NO: 774901 - DNA, 33 bp, Homo sapien
tacagagtatcctaaaatctccaaacaaaagtg

SEQ ID NO: 774902 - DNA, 33 bp, Homo sapien
tacagagtatcctaaagtctccaaacaaaagtg

SEQ ID NO: 774903 - DNA, 33 bp, Homo sapien
tattttggagatgaagaatctgagatttagaga

SEQ ID NO: 774904 - DNA, 33 bp, Homo sapien
tattttggagatgaagtatctgagatttagaga

SEQ ID NO: 774905 - DNA, 33 bp, Homo sapien
gagaaataatacatgacagttgttctcagaggc

SEQ ID NO: 774906 - DNA, 33 bp, Homo sapien
gagaaataatacatgatagttgttctcagaggc

SEQ ID NO: 774907 - DNA, 33 bp, Homo sapien
aacagggaacctgttgcattgcgttcatagtct

SEQ ID NO: 774908 - DNA, 33 bp, Homo sapien
aacagggaacctgttgtattgcgttcatagtct

SEQ ID NO: 774909 - DNA, 33 bp, Homo sapien
gatacatattcagtcactgaaaaacttgggtga

SEQ ID NO: 774910 - DNA, 33 bp, Homo sapien
gatacatattcagtcattgaaaaacttgggtga

SEQ ID NO: 774911 - DNA, 33 bp, Homo sapien
gtttatcaggtctgacaaatcaaagtttttgca

SEQ ID NO: 774912 - DNA, 33 bp, Homo sapien
gtttatcaggtctgacgaatcaaagtttttgca

SEQ ID NO: 774913 - DNA, 33 bp, Homo sapien
acatttaacactaaaacgactgaaagcaatttg

SEQ ID NO: 774914 - DNA, 33 bp, Homo sapien
acatttaacactaaaatgactgaaagcaatttg

SEQ ID NO: 774915 - DNA, 33 bp, Homo sapien
agatagatctcaaaaaaattaggcttaaagaag

SEQ ID NO: 774916 - DNA, 33 bp, Homo sapien
agatagatctcaaaaacattaggcttaaagaag

SEQ ID NO: 774917 - DNA, 33 bp, Homo sapien
ttgttcccctaaaatacagagcagagtagaaga

SEQ ID NO: 774918 - DNA, 33 bp, Homo sapien
ttgttcccctaaaatatagagcagagtagaaga

SEQ ID NO: 774919 - DNA, 33 bp, Homo sapien
gccaaaaacgcttatgaattgttatctagtcct

SEQ ID NO: 774920 - DNA, 33 bp, Homo sapien
gccaaaaacgcttatggattgttatctagtcct

SEQ ID NO: 774921 - DNA, 33 bp, Homo sapien
ataattattgctaacaatcaccagcatgattac

SEQ ID NO: 774922 - DNA, 33 bp, Homo sapien
ataattattgctaacagtcaccagcatgattac

SEQ ID NO: 774923 - DNA, 33 bp, Homo sapien
ctacatcagtattaaaaggaccaatgagagcac

SEQ ID NO: 774924 - DNA, 33 bp, Homo sapien
ctacatcagtattaaacggaccaatgagagcac

SEQ ID NO: 774925 - DNA, 33 bp, Homo sapien
cctccttagagcatctaaatttactggtccttc

SEQ ID NO: 774926 - DNA, 33 bp, Homo sapien
cctccttagagcatctgaatttactggtccttc

SEQ ID NO: 774927 - DNA, 33 bp, Homo sapien
aagatttgaagtttctaaaagtgtcagttctca

SEQ ID NO: 774928 - DNA, 33 bp, Homo sapien
aagatttgaagtttctgaaagtgtcagttctca

SEQ ID NO: 774929 - DNA, 33 bp, Homo sapien
gtgaaactgacctaaaatagacttaccaactgt

SEQ ID NO: 774930 - DNA, 33 bp, Homo sapien
gtgaaactgacctaaactagacttaccaactgt

SEQ ID NO: 774931 - DNA, 33 bp, Homo sapien
caagagaccctgggtaacttttgctgctgaagc

SEQ ID NO: 774932 - DNA, 33 bp, Homo sapien
caagagaccctgggtaccttttgctgctgaagc

SEQ ID NO: 774933 - DNA, 33 bp, Homo sapien
taccttagcatttgaaagtgttaaaattcatcg

SEQ ID NO: 774934 - DNA, 33 bp, Homo sapien
taccttagcatttgaaggtgttaaaattcatcg

SEQ ID NO: 774935 - DNA, 33 bp, Homo sapien
aacctggctgctgttcactgaaaaaagtgccca

SEQ ID NO: 774936 - DNA, 33 bp, Homo sapien
aacctggctgctgttcgctgaaaaaagtgccca

SEQ ID NO: 774937 - DNA, 33 bp, Homo sapien
ttcatatttcatctagaatcatcagaattggaa

SEQ ID NO: 774938 - DNA, 33 bp, Homo sapien
ttcatatttcatctaggatcatcagaattggaa

SEQ ID NO: 774939 - DNA, 33 bp, Homo sapien
gtctgggttttggcgacctttatgttatttgtt

SEQ ID NO: 774940 - DNA, 33 bp, Homo sapien
gtctgggttttggcgatctttatgttatttgtt

SEQ ID NO: 774941 - DNA, 33 bp, Homo sapien
gaacaggctacaattacatttacacacatcaac

SEQ ID NO: 774942 - DNA, 33 bp, Homo sapien
gaacaggctacaattagatttacacacatcaac

SEQ ID NO: 774943 - DNA, 33 bp, Homo sapien
aagccagtttttcataaattttccaccacttag

SEQ ID NO: 774944 - DNA, 33 bp, Homo sapien
aagccagtttttcatacattttccaccacttag

SEQ ID NO: 774945 - DNA, 33 bp, Homo sapien
ttgtaagtaagagcaacggaagatttctgagtc

SEQ ID NO: 774946 - DNA, 33 bp, Homo sapien
ttgtaagtaagagcaatggaagatttctgagtc

SEQ ID NO: 774947 - DNA, 33 bp, Homo sapien
tattttcacagtgttaagggggatcatataata

SEQ ID NO: 774948 - DNA, 33 bp, Homo sapien
tattttcacagtgttaggggggatcatataata

SEQ ID NO: 774949 - DNA, 33 bp, Homo sapien
gcaaattaaatttacactcagtaggctatgttt

SEQ ID NO: 774950 - DNA, 33 bp, Homo sapien
gcaaattaaatttacagtcagtaggctatgttt

SEQ ID NO: 774951 - DNA, 33 bp, Homo sapien
aaattcatatggaaccaaaatggagcctgaata

SEQ ID NO: 774952 - DNA, 33 bp, Homo sapien
aaattcatatggaaccgaaatggagcctgaata

SEQ ID NO: 774953 - DNA, 33 bp, Homo sapien
aatattttttgaactgcagtcagtgctggaaaa

SEQ ID NO: 774954 - DNA, 33 bp, Homo sapien
aatattttttgaactgtagtcagtgctggaaaa

SEQ ID NO: 774955 - DNA, 33 bp, Homo sapien
tttagatgctgggatacaatcgagagcaacaga

SEQ ID NO: 774956 - DNA, 33 bp, Homo sapien
tttagatgctgggatataatcgagagcaacaga

SEQ ID NO: 774957 - DNA, 33 bp, Homo sapien
acttctgaactatgtacgctatataattcatat

SEQ ID NO: 774958 - DNA, 33 bp, Homo sapien
acttctgaactatgtatgctatataattcatat

SEQ ID NO: 774959 - DNA, 33 bp, Homo sapien
taccatttgttgcttcaaagtgtccctcacttt

SEQ ID NO: 774960 - DNA, 33 bp, Homo sapien
taccatttgttgcttctaagtgtccctcacttt

SEQ ID NO: 774961 - DNA, 33 bp, Homo sapien
ttatcagcaacaaaaacggtataatccagaggc

SEQ ID NO: 774962 - DNA, 33 bp, Homo sapien
ttatcagcaacaaaaatggtataatccagaggc

SEQ ID NO: 774963 - DNA, 33 bp, Homo sapien
gttctgctgctttgtgaaagatggaacttctga

SEQ ID NO: 774964 - DNA, 33 bp, Homo sapien
gttctgctgctttgtggaagatggaacttctga

SEQ ID NO: 774965 - DNA, 33 bp, Homo sapien
attacaagttttcagacgataattcagccattt

SEQ ID NO: 774966 - DNA, 33 bp, Homo sapien
attacaagttttcagatgataattcagccattt

SEQ ID NO: 774967 - DNA, 33 bp, Homo sapien
ccctagtaaaatgtaacctcttcagaagagaac

SEQ ID NO: 774968 - DNA, 33 bp, Homo sapien
ccctagtaaaatgtaagctcttcagaagagaac

SEQ ID NO: 774969 - DNA, 33 bp, Homo sapien
atagtagaatgactaacactaatgcaaagtctc

SEQ ID NO: 774970 - DNA, 33 bp, Homo sapien
atagtagaatgactaagactaatgcaaagtctc

SEQ ID NO: 774971 - DNA, 33 bp, Homo sapien
gttatataaatgtactcaatagcaacataattg

SEQ ID NO: 774972 - DNA, 33 bp, Homo sapien
gttatataaatgtactgaatagcaacataattg

SEQ ID NO: 774973 - DNA, 33 bp, Homo sapien
cctagtatgtgactaacacacagttaataatag

SEQ ID NO: 774974 - DNA, 33 bp, Homo sapien
cctagtatgtgactaatacacagttaataatag

SEQ ID NO: 774975 - DNA, 33 bp, Homo sapien
tccattatgcagcatacctattgaataaatact

SEQ ID NO: 774976 - DNA, 33 bp, Homo sapien
tccattatgcagcatatctattgaataaatact

SEQ ID NO: 774977 - DNA, 33 bp, Homo sapien
atttatctgttatgaacttagtttgtcattgtc

SEQ ID NO: 774978 - DNA, 33 bp, Homo sapien
atttatctgttatgaatttagtttgtcattgtc

SEQ ID NO: 774979 - DNA, 33 bp, Homo sapien
ggagtcctggaaccaaacttgagagtataccaa

SEQ ID NO: 774980 - DNA, 33 bp, Homo sapien
ggagtcctggaaccaatcttgagagtataccaa

SEQ ID NO: 774981 - DNA, 33 bp, Homo sapien
aatccatctaggcttacgtacctttggaggtga

SEQ ID NO: 774982 - DNA, 33 bp, Homo sapien
aatccatctaggcttatgtacctttggaggtga

SEQ ID NO: 774983 - DNA, 33 bp, Homo sapien
cacaatgcttgaaataaaaacagttttacactg

SEQ ID NO: 774984 - DNA, 33 bp, Homo sapien
cacaatgcttgaaatagaaacagttttacactg

SEQ ID NO: 774985 - DNA, 33 bp, Homo sapien
tttcttattcactaccaattaacaacacacata

SEQ ID NO: 774986 - DNA, 33 bp, Homo sapien
tttcttattcactaccgattaacaacacacata

SEQ ID NO: 774987 - DNA, 33 bp, Homo sapien
tagcctttctgttttaaaaattgcattggtagg

SEQ ID NO: 774988 - DNA, 33 bp, Homo sapien
tagcctttctgttttacaaattgcattggtagg

SEQ ID NO: 774989 - DNA, 33 bp, Homo sapien
gataaaataaaaactcactgggtgtatttcctc

SEQ ID NO: 774990 - DNA, 33 bp, Homo sapien
gataaaataaaaactctctgggtgtatttcctc

SEQ ID NO: 774991 - DNA, 33 bp, Homo sapien
tagaagtgtttcaaataatagggagaggtagga

SEQ ID NO: 774992 - DNA, 33 bp, Homo sapien
tagaagtgtttcaaatgatagggagaggtagga

SEQ ID NO: 774993 - DNA, 33 bp, Homo sapien
tgacactcctttcctgcagtcctctggaacggt

SEQ ID NO: 774994 - DNA, 33 bp, Homo sapien
tgacactcctttcctgtagtcctctggaacggt

SEQ ID NO: 774995 - DNA, 33 bp, Homo sapien
cacctacattaatggcactgaagttactcgttt

SEQ ID NO: 774996 - DNA, 33 bp, Homo sapien
cacctacattaatggctctgaagttactcgttt

SEQ ID NO: 774997 - DNA, 33 bp, Homo sapien
gtcacataagacttccaagtaaagtcaagggtt

SEQ ID NO: 774998 - DNA, 33 bp, Homo sapien
gtcacataagacttccgagtaaagtcaagggtt

SEQ ID NO: 774999 - DNA, 33 bp, Homo sapien
ctagcctctacactgtcaaacttttgtttaaac

SEQ ID NO: 775000 - DNA, 33 bp, Homo sapien
ctagcctctacactgtgaaacttttgtttaaac

SEQ ID NO: 775001 - DNA, 33 bp, Homo sapien
ttaatgcccttataaacgtctgaagagaccagt

SEQ ID NO: 775002 - DNA, 33 bp, Homo sapien
ttaatgcccttataaatgtctgaagagaccagt

SEQ ID NO: 775003 - DNA, 33 bp, Homo sapien
ttttgcggttttctaacatacttctttccatct

SEQ ID NO: 775004 - DNA, 33 bp, Homo sapien
ttttgcggttttctaagatacttctttccatct

SEQ ID NO: 775005 - DNA, 33 bp, Homo sapien
tatcaacattttctcaatcttgttttaggcttt

SEQ ID NO: 775006 - DNA, 33 bp, Homo sapien
tatcaacattttctcagtcttgttttaggcttt

SEQ ID NO: 775007 - DNA, 33 bp, Homo sapien
aagtttcttgaatgaaagctgataggtctaaaa

SEQ ID NO: 775008 - DNA, 33 bp, Homo sapien
aagtttcttgaatgaatgctgataggtctaaaa

SEQ ID NO: 775009 - DNA, 33 bp, Homo sapien
gtagcatatcctaaacagagtttttaatcagca

SEQ ID NO: 775010 - DNA, 33 bp, Homo sapien
gtagcatatcctaaactgagtttttaatcagca

SEQ ID NO: 775011 - DNA, 33 bp, Homo sapien
tagatatacatgtctgaagttgaaagcaaagtt

SEQ ID NO: 775012 - DNA, 33 bp, Homo sapien
tagatatacatgtctgcagttgaaagcaaagtt

SEQ ID NO: 775013 - DNA, 33 bp, Homo sapien
agttcacaaagccaaaatcagtcatcatgaatt

SEQ ID NO: 775014 - DNA, 33 bp, Homo sapien
agttcacaaagccaaagtcagtcatcatgaatt

SEQ ID NO: 775015 - DNA, 33 bp, Homo sapien
ggtttcctttcagatgcactaaacatgttttct

SEQ ID NO: 775016 - DNA, 33 bp, Homo sapien
ggtttcctttcagatggactaaacatgttttct

SEQ ID NO: 775017 - DNA, 33 bp, Homo sapien
ggagctccacaagattaaaccgttatatcaacc

SEQ ID NO: 775018 - DNA, 33 bp, Homo sapien
ggagctccacaagattcaaccgttatatcaacc

SEQ ID NO: 775019 - DNA, 33 bp, Homo sapien
agccaaacacataagaataggaaaatgttagtt

SEQ ID NO: 775020 - DNA, 33 bp, Homo sapien
agccaaacacataagattaggaaaatgttagtt

SEQ ID NO: 775021 - DNA, 33 bp, Homo sapien
aattcttagatttttacgcctgagaacatccta

SEQ ID NO: 775022 - DNA, 33 bp, Homo sapien
aattcttagatttttatgcctgagaacatccta

SEQ ID NO: 775023 - DNA, 33 bp, Homo sapien
gatgagtaggttcgtggagaaggataataatag

SEQ ID NO: 775024 - DNA, 33 bp, Homo sapien
gatgagtaggttcgtgtagaaggataataatag

SEQ ID NO: 775025 - DNA, 33 bp, Homo sapien
agtaaataacagtaaaataagtgtgcatgattc

SEQ ID NO: 775026 - DNA, 33 bp, Homo sapien
agtaaataacagtaaagtaagtgtgcatgattc

SEQ ID NO: 775027 - DNA, 33 bp, Homo sapien
ctggagatagaatcataagttaaaacagatcac

SEQ ID NO: 775028 - DNA, 33 bp, Homo sapien
ctggagatagaatcatgagttaaaacagatcac

SEQ ID NO: 775029 - DNA, 33 bp, Homo sapien
gatgctatcaccttaacatcctattctccagtt

SEQ ID NO: 775030 - DNA, 33 bp, Homo sapien
gatgctatcaccttaatatcctattctccagtt

SEQ ID NO: 775031 - DNA, 33 bp, Homo sapien
gtaatctcagcatgacactttattcattatctt

SEQ ID NO: 775032 - DNA, 33 bp, Homo sapien
gtaatctcagcatgaccctttattcattatctt

SEQ ID NO: 775033 - DNA, 33 bp, Homo sapien
gaatttgcaacataggccacatttactgatgag

SEQ ID NO: 775034 - DNA, 33 bp, Homo sapien
gaatttgcaacataggtcacatttactgatgag

SEQ ID NO: 775035 - DNA, 33 bp, Homo sapien
tattcctctaattcagactcttgttaatgctca

SEQ ID NO: 775036 - DNA, 33 bp, Homo sapien
tattcctctaattcaggctcttgttaatgctca

SEQ ID NO: 775037 - DNA, 33 bp, Homo sapien
ttgtaagattgtaaaaggtagaatttgagttga

SEQ ID NO: 775038 - DNA, 33 bp, Homo sapien
ttgtaagattgtaaaatgtagaatttgagttga

SEQ ID NO: 775039 - DNA, 33 bp, Homo sapien
ttttgagtacaatctacgtgaaaatgctgtgct

SEQ ID NO: 775040 - DNA, 33 bp, Homo sapien
ttttgagtacaatctatgtgaaaatgctgtgct

SEQ ID NO: 775041 - DNA, 33 bp, Homo sapien
aggtatacattcaccacgtaggagtaggaatgg

SEQ ID NO: 775042 - DNA, 33 bp, Homo sapien
aggtatacattcaccatgtaggagtaggaatgg

SEQ ID NO: 775043 - DNA, 33 bp, Homo sapien
agtggaattgctgtcaactaacatgagtatcta

SEQ ID NO: 775044 - DNA, 33 bp, Homo sapien
agtggaattgctgtcagctaacatgagtatcta

SEQ ID NO: 775045 - DNA, 33 bp, Homo sapien
actgaattatagcagacgtaggcagtacatggt

SEQ ID NO: 775046 - DNA, 33 bp, Homo sapien
actgaattatagcagaggtaggcagtacatggt

SEQ ID NO: 775047 - DNA, 33 bp, Homo sapien
tttgtttagcaataaacggacttccaaatttta

SEQ ID NO: 775048 - DNA, 33 bp, Homo sapien
tttgtttagcaataaatggacttccaaatttta

SEQ ID NO: 775049 - DNA, 33 bp, Homo sapien
gaagcattcatttctacgggtaagaagctattt

SEQ ID NO: 775050 - DNA, 33 bp, Homo sapien
gaagcattcatttctaggggtaagaagctattt

SEQ ID NO: 775051 - DNA, 33 bp, Homo sapien
taaatattagttgtcaggatgatgtataggaag

SEQ ID NO: 775052 - DNA, 33 bp, Homo sapien
taaatattagttgtcatgatgatgtataggaag

SEQ ID NO: 775053 - DNA, 33 bp, Homo sapien
ataagaaaaatgcaaactaaagctaggcatggt

SEQ ID NO: 775054 - DNA, 33 bp, Homo sapien
ataagaaaaatgcaaattaaagctaggcatggt

SEQ ID NO: 775055 - DNA, 33 bp, Homo sapien
tgtctgctttcccacaccttcactaacaaaatg

SEQ ID NO: 775056 - DNA, 33 bp, Homo sapien
tgtctgctttcccacatcttcactaacaaaatg

SEQ ID NO: 775057 - DNA, 33 bp, Homo sapien
gttgcacattaaaataacttctggtaattccta

SEQ ID NO: 775058 - DNA, 33 bp, Homo sapien
gttgcacattaaaatagcttctggtaattccta

SEQ ID NO: 775059 - DNA, 33 bp, Homo sapien
gacttgtgcaaagagtcaatagactgtactact

SEQ ID NO: 775060 - DNA, 33 bp, Homo sapien
gacttgtgcaaagagttaatagactgtactact

SEQ ID NO: 775061 - DNA, 33 bp, Homo sapien
cttatgaagtagatgtgaattcccattttacag

SEQ ID NO: 775062 - DNA, 33 bp, Homo sapien
cttatgaagtagatgttaattcccattttacag

SEQ ID NO: 775063 - DNA, 33 bp, Homo sapien
gaaaggatgcagaggacaggacgagacttgtaa

SEQ ID NO: 775064 - DNA, 33 bp, Homo sapien
gaaaggatgcagaggagaggacgagacttgtaa

SEQ ID NO: 775065 - DNA, 33 bp, Homo sapien
ggcaactaaattgaggacaatgaaatcactgta

SEQ ID NO: 775066 - DNA, 33 bp, Homo sapien
ggcaactaaattgagggcaatgaaatcactgta

SEQ ID NO: 775067 - DNA, 33 bp, Homo sapien
acttcctgcctaaaaacgctagtagtcaacatg

SEQ ID NO: 775068 - DNA, 33 bp, Homo sapien
acttcctgcctaaaaatgctagtagtcaacatg

SEQ ID NO: 775069 - DNA, 33 bp, Homo sapien
cctctgtaccaccttacggactcttaccaagtg

SEQ ID NO: 775070 - DNA, 33 bp, Homo sapien
cctctgtaccaccttatggactcttaccaagtg

SEQ ID NO: 775071 - DNA, 33 bp, Homo sapien
caattgacttagagtaaactgagcttccttcaa

SEQ ID NO: 775072 - DNA, 33 bp, Homo sapien
caattgacttagagtagactgagcttccttcaa

SEQ ID NO: 775073 - DNA, 33 bp, Homo sapien
ttagtaatcagtgtcaatatcatttcatcaatt

SEQ ID NO: 775074 - DNA, 33 bp, Homo sapien
ttagtaatcagtgtcagtatcatttcatcaatt

SEQ ID NO: 775075 - DNA, 33 bp, Homo sapien
tgatctttggagggtacatcatccagttcctat

SEQ ID NO: 775076 - DNA, 33 bp, Homo sapien
tgatctttggagggtatatcatccagttcctat

SEQ ID NO: 775077 - DNA, 33 bp, Homo sapien
tggatatagtatggaaaacaaatctaggtgaaa

SEQ ID NO: 775078 - DNA, 33 bp, Homo sapien
tggatatagtatggaagacaaatctaggtgaaa

SEQ ID NO: 775079 - DNA, 33 bp, Homo sapien
tcaaattggtaatgtcaacaatatttatgtaaa

SEQ ID NO: 775080 - DNA, 33 bp, Homo sapien
tcaaattggtaatgtcgacaatatttatgtaaa

SEQ ID NO: 775081 - DNA, 33 bp, Homo sapien
cagacagacgtttgacaatgtttgtgatgtcct

SEQ ID NO: 775082 - DNA, 33 bp, Homo sapien
cagacagacgtttgacgatgtttgtgatgtcct

SEQ ID NO: 775083 - DNA, 33 bp, Homo sapien
atcttacatatagccccagtccaaactacatct

SEQ ID NO: 775084 - DNA, 33 bp, Homo sapien
atcttacatatagccctagtccaaactacatct

SEQ ID NO: 775085 - DNA, 33 bp, Homo sapien
gacatatttttggtaaaaccagtgaacaaaggt

SEQ ID NO: 775086 - DNA, 33 bp, Homo sapien
gacatatttttggtaagaccagtgaacaaaggt

SEQ ID NO: 775087 - DNA, 33 bp, Homo sapien
ttcactaatcccaatcaatttctcaaatccaac

SEQ ID NO: 775088 - DNA, 33 bp, Homo sapien
ttcactaatcccaatcgatttctcaaatccaac

SEQ ID NO: 775089 - DNA, 33 bp, Homo sapien
gcgaaaggttattcaactggtgagtgtcgttct

SEQ ID NO: 775090 - DNA, 33 bp, Homo sapien
gcgaaaggttattcaagtggtgagtgtcgttct

SEQ ID NO: 775091 - DNA, 33 bp, Homo sapien
tgctacatgcactttgcaatgcggcagcttggc

SEQ ID NO: 775092 - DNA, 33 bp, Homo sapien
tgctacatgcactttgtaatgcggcagcttggc

SEQ ID NO: 775093 - DNA, 33 bp, Homo sapien
aagacataaacaggcacaaaatacaaatggcaa

SEQ ID NO: 775094 - DNA, 33 bp, Homo sapien
aagacataaacaggcagaaaatacaaatggcaa

SEQ ID NO: 775095 - DNA, 33 bp, Homo sapien
tcgtccttgagataagaaataaagaaggaggac

SEQ ID NO: 775096 - DNA, 33 bp, Homo sapien
tcgtccttgagataaggaataaagaaggaggac

SEQ ID NO: 775097 - DNA, 33 bp, Homo sapien
agatacatttttcacacaggagagacctaaata

SEQ ID NO: 775098 - DNA, 33 bp, Homo sapien
agatacatttttcacataggagagacctaaata

SEQ ID NO: 775099 - DNA, 33 bp, Homo sapien
aactggagagagtgtgaacctaggcaattctct

SEQ ID NO: 775100 - DNA, 33 bp, Homo sapien
aactggagagagtgtgcacctaggcaattctct

SEQ ID NO: 775101 - DNA, 33 bp, Homo sapien
aggggtacaggtcagactactatgatggaggaa

SEQ ID NO: 775102 - DNA, 33 bp, Homo sapien
aggggtacaggtcagattactatgatggaggaa

SEQ ID NO: 775103 - DNA, 33 bp, Homo sapien
taggccagacttacgacatctttggtaatacag

SEQ ID NO: 775104 - DNA, 33 bp, Homo sapien
taggccagacttacgatatctttggtaatacag

SEQ ID NO: 775105 - DNA, 33 bp, Homo sapien
tttatatttttctgcaaccatcacctgtatcca

SEQ ID NO: 775106 - DNA, 33 bp, Homo sapien
tttatatttttctgcagccatcacctgtatcca

SEQ ID NO: 775107 - DNA, 33 bp, Homo sapien
tcgagtctctgctttcaattatctttgttattt

SEQ ID NO: 775108 - DNA, 33 bp, Homo sapien
tcgagtctctgctttcgattatctttgttattt

SEQ ID NO: 775109 - DNA, 33 bp, Homo sapien
accaagcacactatctaacacttaataggtgat

SEQ ID NO: 775110 - DNA, 33 bp, Homo sapien
accaagcacactatcttacacttaataggtgat

SEQ ID NO: 775111 - DNA, 33 bp, Homo sapien
aagctgacaaatatgacgtacataaaaataaaa

SEQ ID NO: 775112 - DNA, 33 bp, Homo sapien
aagctgacaaatatgatgtacataaaaataaaa

SEQ ID NO: 775113 - DNA, 33 bp, Homo sapien
gactccaactctcagaatcaagggatcctcgca

SEQ ID NO: 775114 - DNA, 33 bp, Homo sapien
gactccaactctcagattcaagggatcctcgca

SEQ ID NO: 775115 - DNA, 33 bp, Homo sapien
aattccaaaaggctcacagacccctcgaagccc

SEQ ID NO: 775116 - DNA, 33 bp, Homo sapien
aattccaaaaggctcatagacccctcgaagccc

SEQ ID NO: 775117 - DNA, 33 bp, Homo sapien
cattccattgttcccagtatttcttacattaat

SEQ ID NO: 775118 - DNA, 33 bp, Homo sapien
cattccattgttcccattatttcttacattaat

SEQ ID NO: 775119 - DNA, 33 bp, Homo sapien
atgtcctcaagctaaactctgaacattcaagat

SEQ ID NO: 775120 - DNA, 33 bp, Homo sapien
atgtcctcaagctaaattctgaacattcaagat

SEQ ID NO: 775121 - DNA, 33 bp, Homo sapien
agggaagctgagggggaaactgagcgtggcttg

SEQ ID NO: 775122 - DNA, 33 bp, Homo sapien
agggaagctgaggggggaactgagcgtggcttg

SEQ ID NO: 775123 - DNA, 33 bp, Homo sapien
aagggataatgaatccagaggtatagtattatt

SEQ ID NO: 775124 - DNA, 33 bp, Homo sapien
aagggataatgaatccggaggtatagtattatt

SEQ ID NO: 775125 - DNA, 33 bp, Homo sapien
tttctcctgtctcagaagagatgtctctagctc

SEQ ID NO: 775126 - DNA, 33 bp, Homo sapien
tttctcctgtctcagaggagatgtctctagctc

SEQ ID NO: 775127 - DNA, 33 bp, Homo sapien
tgcctggggactaacaatagaaggcactgacgc

SEQ ID NO: 775128 - DNA, 33 bp, Homo sapien
tgcctggggactaacactagaaggcactgacgc

SEQ ID NO: 775129 - DNA, 33 bp, Homo sapien
aactaattttgaggaaatgctacaccaggaatg

SEQ ID NO: 775130 - DNA, 33 bp, Homo sapien
aactaattttgaggaagtgctacaccaggaatg

SEQ ID NO: 775131 - DNA, 33 bp, Homo sapien
ataataaagttacagacagcaggaaatgcaaga

SEQ ID NO: 775132 - DNA, 33 bp, Homo sapien
ataataaagttacagatagcaggaaatgcaaga

SEQ ID NO: 775133 - DNA, 33 bp, Homo sapien
agggggacaaagtctacatcaggtggcaaaacg

SEQ ID NO: 775134 - DNA, 33 bp, Homo sapien
agggggacaaagtctatatcaggtggcaaaacg

SEQ ID NO: 775135 - DNA, 33 bp, Homo sapien
ttacctttagcttttacgtatgaattataggtc

SEQ ID NO: 775136 - DNA, 33 bp, Homo sapien
ttacctttagcttttatgtatgaattataggtc

SEQ ID NO: 775137 - DNA, 33 bp, Homo sapien
tgactgctttgttctgaaataaagtcttacatt

SEQ ID NO: 775138 - DNA, 33 bp, Homo sapien
tgactgctttgttctggaataaagtcttacatt

SEQ ID NO: 775139 - DNA, 33 bp, Homo sapien
gagctctgtgaatttacggtttcttaagctatt

SEQ ID NO: 775140 - DNA, 33 bp, Homo sapien
gagctctgtgaatttatggtttcttaagctatt

SEQ ID NO: 775141 - DNA, 33 bp, Homo sapien
gtgaaatatgaggcaaatgttggagagataggg

SEQ ID NO: 775142 - DNA, 33 bp, Homo sapien
gtgaaatatgaggcaagtgttggagagataggg

SEQ ID NO: 775143 - DNA, 33 bp, Homo sapien
gactgtggagcagatacagagtcttaaaaaaat

SEQ ID NO: 775144 - DNA, 33 bp, Homo sapien
gactgtggagcagatatagagtcttaaaaaaat

SEQ ID NO: 775145 - DNA, 33 bp, Homo sapien
cctgccagcagcatgaaagtttgcaaatgccat

SEQ ID NO: 775146 - DNA, 33 bp, Homo sapien
cctgccagcagcatgacagtttgcaaatgccat

SEQ ID NO: 775147 - DNA, 33 bp, Homo sapien
cggatctcggctgtaactgtaggactttacggg

SEQ ID NO: 775148 - DNA, 33 bp, Homo sapien
cggatctcggctgtaattgtaggactttacggg

SEQ ID NO: 775149 - DNA, 33 bp, Homo sapien
atggcacaaaattcagaaggcacaaaagagtgt

SEQ ID NO: 775150 - DNA, 33 bp, Homo sapien
atggcacaaaattcagcaggcacaaaagagtgt

SEQ ID NO: 775151 - DNA, 33 bp, Homo sapien
cgacatgccgcgaaaaacttgaatttgggggag

SEQ ID NO: 775152 - DNA, 33 bp, Homo sapien
cgacatgccgcgaaaagcttgaatttgggggag

SEQ ID NO: 775153 - DNA, 33 bp, Homo sapien
tttttatggatggtaaaacagtaatagctaata

SEQ ID NO: 775154 - DNA, 33 bp, Homo sapien
tttttatggatggtaatacagtaatagctaata

SEQ ID NO: 775155 - DNA, 33 bp, Homo sapien
ggtagggaagcccataaaggtgattattcaaat

SEQ ID NO: 775156 - DNA, 33 bp, Homo sapien
ggtagggaagcccatagaggtgattattcaaat

SEQ ID NO: 775157 - DNA, 33 bp, Homo sapien
tttcaggcaaaggaaaagatactcccagagatc

SEQ ID NO: 775158 - DNA, 33 bp, Homo sapien
tttcaggcaaaggaaaggatactcccagagatc

SEQ ID NO: 775159 - DNA, 33 bp, Homo sapien
tctacttgatagcactcaatctgagccttcata

SEQ ID NO: 775160 - DNA, 33 bp, Homo sapien
tctacttgatagcactgaatctgagccttcata

SEQ ID NO: 775161 - DNA, 33 bp, Homo sapien
gaatataaattgatacaagcacattataaaata

SEQ ID NO: 775162 - DNA, 33 bp, Homo sapien
gaatataaattgatacgagcacattataaaata

SEQ ID NO: 775163 - DNA, 33 bp, Homo sapien
agtggagggatgaggacgttatcaggatggaga

SEQ ID NO: 775164 - DNA, 33 bp, Homo sapien
agtggagggatgaggatgttatcaggatggaga

SEQ ID NO: 775165 - DNA, 33 bp, Homo sapien
tccttgatccaatcaaacttcagtgagctcatg

SEQ ID NO: 775166 - DNA, 33 bp, Homo sapien
tccttgatccaatcaaccttcagtgagctcatg

SEQ ID NO: 775167 - DNA, 33 bp, Homo sapien
ccagggacaggaactacgctggattcaccttcc

SEQ ID NO: 775168 - DNA, 33 bp, Homo sapien
ccagggacaggaactatgctggattcaccttcc

SEQ ID NO: 775169 - DNA, 33 bp, Homo sapien
gaggtaacaaggatgcacaagtagattacctga

SEQ ID NO: 775170 - DNA, 33 bp, Homo sapien
gaggtaacaaggatgcccaagtagattacctga

SEQ ID NO: 775171 - DNA, 33 bp, Homo sapien
gagattctgatccccaaaggaagaacactgcct

SEQ ID NO: 775172 - DNA, 33 bp, Homo sapien
gagattctgatccccacaggaagaacactgcct

SEQ ID NO: 775173 - DNA, 33 bp, Homo sapien
gtcattgggaatgataataagtaggatcattcc

SEQ ID NO: 775174 - DNA, 33 bp, Homo sapien
gtcattgggaatgatagtaagtaggatcattcc

SEQ ID NO: 775175 - DNA, 33 bp, Homo sapien
gaaaaagagaataaaaagccatgtggttcattg

SEQ ID NO: 775176 - DNA, 33 bp, Homo sapien
gaaaaagagaataaaaggccatgtggttcattg

SEQ ID NO: 775177 - DNA, 33 bp, Homo sapien
ggatctaaggttgaaaacatctaatccctaggt

SEQ ID NO: 775178 - DNA, 33 bp, Homo sapien
ggatctaaggttgaaatcatctaatccctaggt

SEQ ID NO: 775179 - DNA, 33 bp, Homo sapien
cttccaagatgagttacatattaggcaaagtga

SEQ ID NO: 775180 - DNA, 33 bp, Homo sapien
cttccaagatgagttatatattaggcaaagtga

SEQ ID NO: 775181 - DNA, 33 bp, Homo sapien
atgcagcatttacactaagatctgaaactgagt

SEQ ID NO: 775182 - DNA, 33 bp, Homo sapien
atgcagcatttacactgagatctgaaactgagt

SEQ ID NO: 775183 - DNA, 33 bp, Homo sapien
attcaaacttttgagcaatcttgggcactctga

SEQ ID NO: 775184 - DNA, 33 bp, Homo sapien
attcaaacttttgagcgatcttgggcactctga

SEQ ID NO: 775185 - DNA, 33 bp, Homo sapien
ttgcctctgtcctgtccctgtgaaccagtgtag

SEQ ID NO: 775186 - DNA, 33 bp, Homo sapien
ttgcctctgtcctgtctctgtgaaccagtgtag

SEQ ID NO: 775187 - DNA, 33 bp, Homo sapien
ggctcagtgcaatttccaatacgttataatatg

SEQ ID NO: 775188 - DNA, 33 bp, Homo sapien
ggctcagtgcaatttctaatacgttataatatg

SEQ ID NO: 775189 - DNA, 33 bp, Homo sapien
cttgtcagactaggaccgagccattctagcagc

SEQ ID NO: 775190 - DNA, 33 bp, Homo sapien
cttgtcagactaggactgagccattctagcagc

SEQ ID NO: 775191 - DNA, 33 bp, Homo sapien
tgtaagtggaatgctacgtgtattatcatgtct

SEQ ID NO: 775192 - DNA, 33 bp, Homo sapien
tgtaagtggaatgctatgtgtattatcatgtct

SEQ ID NO: 775193 - DNA, 33 bp, Homo sapien
tctttaaatgaatttcaactgcccataaatgtg

SEQ ID NO: 775194 - DNA, 33 bp, Homo sapien
tctttaaatgaatttctactgcccataaatgtg

SEQ ID NO: 775195 - DNA, 33 bp, Homo sapien
caaaccacctcccacagtcttgaccctcataga

SEQ ID NO: 775196 - DNA, 33 bp, Homo sapien
caaaccacctcccacattcttgaccctcataga

SEQ ID NO: 775197 - DNA, 33 bp, Homo sapien
cagtagtgagtttgcacagctcccaaatttcca

SEQ ID NO: 775198 - DNA, 33 bp, Homo sapien
cagtagtgagtttgcatagctcccaaatttcca

SEQ ID NO: 775199 - DNA, 33 bp, Homo sapien
aaatgaaacagtgtacaggaagcctgctaataa

SEQ ID NO: 775200 - DNA, 33 bp, Homo sapien
aaatgaaacagtgtactggaagcctgctaataa

SEQ ID NO: 775201 - DNA, 33 bp, Homo sapien
gttggtagaatttatacgcactaggatcttctg

SEQ ID NO: 775202 - DNA, 33 bp, Homo sapien
gttggtagaatttatatgcactaggatcttctg

SEQ ID NO: 775203 - DNA, 33 bp, Homo sapien
agtcaaattgctctaaaaaggaggtgaagagca

SEQ ID NO: 775204 - DNA, 33 bp, Homo sapien
agtcaaattgctctaacaaggaggtgaagagca

SEQ ID NO: 775205 - DNA, 33 bp, Homo sapien
cctttgttcttgtaaacgtgttagctgttgcaa

SEQ ID NO: 775206 - DNA, 33 bp, Homo sapien
cctttgttcttgtaaaggtgttagctgttgcaa

SEQ ID NO: 775207 - DNA, 33 bp, Homo sapien
gggatcaagcaatacccccatcttagcctcctg

SEQ ID NO: 775208 - DNA, 33 bp, Homo sapien
gggatcaagcaatacctccatcttagcctcctg

SEQ ID NO: 775209 - DNA, 33 bp, Homo sapien
actggaacaaagaacacgtgacagacaaaaatg

SEQ ID NO: 775210 - DNA, 33 bp, Homo sapien
actggaacaaagaacatgtgacagacaaaaatg

SEQ ID NO: 775211 - DNA, 33 bp, Homo sapien
tttgaggtaaagtttacgtatagcgaaatgcag

SEQ ID NO: 775212 - DNA, 33 bp, Homo sapien
tttgaggtaaagtttatgtatagcgaaatgcag

SEQ ID NO: 775213 - DNA, 33 bp, Homo sapien
ggggcaacaacacaaccggaactgtcatctcct

SEQ ID NO: 775214 - DNA, 33 bp, Homo sapien
ggggcaacaacacaactggaactgtcatctcct

SEQ ID NO: 775215 - DNA, 33 bp, Homo sapien
caaaaaccttccaaagaaagctagatcactctc

SEQ ID NO: 775216 - DNA, 33 bp, Homo sapien
caaaaaccttccaaagcaagctagatcactctc

SEQ ID NO: 775217 - DNA, 33 bp, Homo sapien
tggtgtatatgtgacaaggccctaatttcttaa

SEQ ID NO: 775218 - DNA, 33 bp, Homo sapien
tggtgtatatgtgacagggccctaatttcttaa

SEQ ID NO: 775219 - DNA, 33 bp, Homo sapien
cagaggagaggatggacaggttaccagtagtcc

SEQ ID NO: 775220 - DNA, 33 bp, Homo sapien
cagaggagaggatggataggttaccagtagtcc

SEQ ID NO: 775221 - DNA, 33 bp, Homo sapien
aataaaaaccagatacggcaattacataggcca

SEQ ID NO: 775222 - DNA, 33 bp, Homo sapien
aataaaaaccagatactgcaattacataggcca

SEQ ID NO: 775223 - DNA, 33 bp, Homo sapien
tgctcttaaatccagccgagtatacatgtgtgc

SEQ ID NO: 775224 - DNA, 33 bp, Homo sapien
tgctcttaaatccagcggagtatacatgtgtgc

SEQ ID NO: 775225 - DNA, 33 bp, Homo sapien
atgaagctctagattacatatcacaaaacacaa

SEQ ID NO: 775226 - DNA, 33 bp, Homo sapien
atgaagctctagattagatatcacaaaacacaa

SEQ ID NO: 775227 - DNA, 33 bp, Homo sapien
gctgagtaaacagaacaactcctggggtaactg

SEQ ID NO: 775228 - DNA, 33 bp, Homo sapien
gctgagtaaacagaacgactcctggggtaactg

SEQ ID NO: 775229 - DNA, 33 bp, Homo sapien
ttaacttatactcacaatcatcactataaacat

SEQ ID NO: 775230 - DNA, 33 bp, Homo sapien
ttaacttatactcacagtcatcactataaacat

SEQ ID NO: 775231 - DNA, 33 bp, Homo sapien
tatcataggcaattaactgattttaacaccttt

SEQ ID NO: 775232 - DNA, 33 bp, Homo sapien
tatcataggcaattaattgattttaacaccttt

SEQ ID NO: 775233 - DNA, 33 bp, Homo sapien
caggcacttcaaattacggcacgaaaaacacag

SEQ ID NO: 775234 - DNA, 33 bp, Homo sapien
caggcacttcaaattatggcacgaaaaacacag

SEQ ID NO: 775235 - DNA, 33 bp, Homo sapien
gaaatgaaaagaccaacgagaaggcaaaataag

SEQ ID NO: 775236 - DNA, 33 bp, Homo sapien
gaaatgaaaagaccaatgagaaggcaaaataag

SEQ ID NO: 775237 - DNA, 33 bp, Homo sapien
ttacttcccaaatccaatctttccagctgggtc

SEQ ID NO: 775238 - DNA, 33 bp, Homo sapien
ttacttcccaaatccagtctttccagctgggtc

SEQ ID NO: 775239 - DNA, 33 bp, Homo sapien
ttttgagaaattcctaggcttaaaaccatcatt

SEQ ID NO: 775240 - DNA, 33 bp, Homo sapien
ttttgagaaattcctatgcttaaaaccatcatt

SEQ ID NO: 775241 - DNA, 33 bp, Homo sapien
tctgaatctagtcgcaaaatttcaaatcgttta

SEQ ID NO: 775242 - DNA, 33 bp, Homo sapien
tctgaatctagtcgcagaatttcaaatcgttta

SEQ ID NO: 775243 - DNA, 33 bp, Homo sapien
ccatttattgaacaaccgctttgtgccaggcaa

SEQ ID NO: 775244 - DNA, 33 bp, Homo sapien
ccatttattgaacaactgctttgtgccaggcaa

SEQ ID NO: 775245 - DNA, 33 bp, Homo sapien
ggagcaattttgagaaacttctgaaggttagaa

SEQ ID NO: 775246 - DNA, 33 bp, Homo sapien
ggagcaattttgagaagcttctgaaggttagaa

SEQ ID NO: 775247 - DNA, 33 bp, Homo sapien
tgagggtgatcagcaaatactgtgagtgcagtg

SEQ ID NO: 775248 - DNA, 33 bp, Homo sapien
tgagggtgatcagcaagtactgtgagtgcagtg

SEQ ID NO: 775249 - DNA, 33 bp, Homo sapien
tataaaaggctcttaggaaatattcattgaatg

SEQ ID NO: 775250 - DNA, 33 bp, Homo sapien
tataaaaggctcttagtaaatattcattgaatg

SEQ ID NO: 775251 - DNA, 33 bp, Homo sapien
gaatgagaacagtatacctggcctctcagttcc

SEQ ID NO: 775252 - DNA, 33 bp, Homo sapien
gaatgagaacagtatatctggcctctcagttcc

SEQ ID NO: 775253 - DNA, 33 bp, Homo sapien
gcagctgaaaagagaacgatgaaaacaatcagc

SEQ ID NO: 775254 - DNA, 33 bp, Homo sapien
gcagctgaaaagagaatgatgaaaacaatcagc

SEQ ID NO: 775255 - DNA, 33 bp, Homo sapien
cagactaactgttccaaattttttccaaaagca

SEQ ID NO: 775256 - DNA, 33 bp, Homo sapien
cagactaactgttccacattttttccaaaagca

SEQ ID NO: 775257 - DNA, 33 bp, Homo sapien
caaaagtttaccagcaataataaggaattgagt

SEQ ID NO: 775258 - DNA, 33 bp, Homo sapien
caaaagtttaccagcagtaataaggaattgagt

SEQ ID NO: 775259 - DNA, 33 bp, Homo sapien
agaaagtgtaagtgaccagaatttgacaagaat

SEQ ID NO: 775260 - DNA, 33 bp, Homo sapien
agaaagtgtaagtgacgagaatttgacaagaat

SEQ ID NO: 775261 - DNA, 33 bp, Homo sapien
tacagtaactctaatgacatggtaaaacttttg

SEQ ID NO: 775262 - DNA, 33 bp, Homo sapien
tacagtaactctaatggcatggtaaaacttttg

SEQ ID NO: 775263 - DNA, 33 bp, Homo sapien
tgacacatataactaactgctaaataagtgttt

SEQ ID NO: 775264 - DNA, 33 bp, Homo sapien
tgacacatataactaagtgctaaataagtgttt

SEQ ID NO: 775265 - DNA, 33 bp, Homo sapien
gcaactgatttgcccaggagtaattaactggtt

SEQ ID NO: 775266 - DNA, 33 bp, Homo sapien
gcaactgatttgcccatgagtaattaactggtt

SEQ ID NO: 775267 - DNA, 33 bp, Homo sapien
cttacttgtaagccaacagtttacactgccata

SEQ ID NO: 775268 - DNA, 33 bp, Homo sapien
cttacttgtaagccaatagtttacactgccata

SEQ ID NO: 775269 - DNA, 33 bp, Homo sapien
tcctcttacctgcaccactggaacccttccctt

SEQ ID NO: 775270 - DNA, 33 bp, Homo sapien
tcctcttacctgcaccgctggaacccttccctt

SEQ ID NO: 775271 - DNA, 33 bp, Homo sapien
gtgggatgctaaagagacaacagctcttccttc

SEQ ID NO: 775272 - DNA, 33 bp, Homo sapien
gtgggatgctaaagagtcaacagctcttccttc

SEQ ID NO: 775273 - DNA, 33 bp, Homo sapien
cattgtgcataggggaaataaatccatatccag

SEQ ID NO: 775274 - DNA, 33 bp, Homo sapien
cattgtgcataggggagataaatccatatccag

SEQ ID NO: 775275 - DNA, 33 bp, Homo sapien
tggaaatgtggttctaggcacaaagccaagttc

SEQ ID NO: 775276 - DNA, 33 bp, Homo sapien
tggaaatgtggttctatgcacaaagccaagttc

SEQ ID NO: 775277 - DNA, 33 bp, Homo sapien
ggtgctcttctagctaacaaatctatcagagtc

SEQ ID NO: 775278 - DNA, 33 bp, Homo sapien
ggtgctcttctagctaccaaatctatcagagtc

SEQ ID NO: 775279 - DNA, 33 bp, Homo sapien
acaacagtattctaacaatgtcactaactctaa

SEQ ID NO: 775280 - DNA, 33 bp, Homo sapien
acaacagtattctaactatgtcactaactctaa

SEQ ID NO: 775281 - DNA, 33 bp, Homo sapien
gatacaaacaaaggaaactgctgtcttccctcc

SEQ ID NO: 775282 - DNA, 33 bp, Homo sapien
gatacaaacaaaggaagctgctgtcttccctcc

SEQ ID NO: 775283 - DNA, 33 bp, Homo sapien
tcccctgtggtgtgggcattaatgtccctgcta

SEQ ID NO: 775284 - DNA, 33 bp, Homo sapien
tcccctgtggtgtgggtattaatgtccctgcta

SEQ ID NO: 775285 - DNA, 33 bp, Homo sapien
tcacctcctttcctaacatttgtgcaattcttc

SEQ ID NO: 775286 - DNA, 33 bp, Homo sapien
tcacctcctttcctaatatttgtgcaattcttc

SEQ ID NO: 775287 - DNA, 33 bp, Homo sapien
actccatgaaataccccggccatcattgtgtac

SEQ ID NO: 775288 - DNA, 33 bp, Homo sapien
actccatgaaataccctggccatcattgtgtac

SEQ ID NO: 775289 - DNA, 33 bp, Homo sapien
gtctggatattttagccacttttaaacttgacc

SEQ ID NO: 775290 - DNA, 33 bp, Homo sapien
gtctggatattttagcgacttttaaacttgacc

SEQ ID NO: 775291 - DNA, 33 bp, Homo sapien
tttgggagatttcacagattttacctctatatt

SEQ ID NO: 775292 - DNA, 33 bp, Homo sapien
tttgggagatttcacatattttacctctatatt

SEQ ID NO: 775293 - DNA, 33 bp, Homo sapien
gctctgcagtttttgcacagaagtccttccaac

SEQ ID NO: 775294 - DNA, 33 bp, Homo sapien
gctctgcagtttttgcgcagaagtccttccaac

SEQ ID NO: 775295 - DNA, 33 bp, Homo sapien
tgtattcttacaacaaaataggctagagaaaag

SEQ ID NO: 775296 - DNA, 33 bp, Homo sapien
tgtattcttacaacaagataggctagagaaaag

SEQ ID NO: 775297 - DNA, 33 bp, Homo sapien
ggacaaaagactccagaataataattggcataa

SEQ ID NO: 775298 - DNA, 33 bp, Homo sapien
ggacaaaagactccaggataataattggcataa

SEQ ID NO: 775299 - DNA, 33 bp, Homo sapien
cacaagcactgtgatacgtcagcagtcgatctg

SEQ ID NO: 775300 - DNA, 33 bp, Homo sapien
cacaagcactgtgatatgtcagcagtcgatctg

SEQ ID NO: 775301 - DNA, 33 bp, Homo sapien
tgtgcttcttcataacacctttgaaaggatcaa

SEQ ID NO: 775302 - DNA, 33 bp, Homo sapien
tgtgcttcttcataacgcctttgaaaggatcaa

SEQ ID NO: 775303 - DNA, 33 bp, Homo sapien
tgtgttccaaatcttaagcaattataggaaaca

SEQ ID NO: 775304 - DNA, 33 bp, Homo sapien
tgtgttccaaatcttaggcaattataggaaaca

SEQ ID NO: 775305 - DNA, 33 bp, Homo sapien
taaaactaatggctgagaggtatagagtaccca

SEQ ID NO: 775306 - DNA, 33 bp, Homo sapien
taaaactaatggctgataggtatagagtaccca

SEQ ID NO: 775307 - DNA, 33 bp, Homo sapien
gatttggtgtaggatgcaattctggcatctgga

SEQ ID NO: 775308 - DNA, 33 bp, Homo sapien
gatttggtgtaggatgtaattctggcatctgga

SEQ ID NO: 775309 - DNA, 33 bp, Homo sapien
actgggaggaagtaagaagtagtgactaaggaa

SEQ ID NO: 775310 - DNA, 33 bp, Homo sapien
actgggaggaagtaaggagtagtgactaaggaa

SEQ ID NO: 775311 - DNA, 33 bp, Homo sapien
tttaattttcagtaaccgccacatttaacaact

SEQ ID NO: 775312 - DNA, 33 bp, Homo sapien
tttaattttcagtaactgccacatttaacaact

SEQ ID NO: 775313 - DNA, 33 bp, Homo sapien
agaaaaagaaaacctaccatgtacagtcatgca

SEQ ID NO: 775314 - DNA, 33 bp, Homo sapien
agaaaaagaaaacctatcatgtacagtcatgca

SEQ ID NO: 775315 - DNA, 33 bp, Homo sapien
cagaaggatttaggtcaaaagaaggcctggtgg

SEQ ID NO: 775316 - DNA, 33 bp, Homo sapien
cagaaggatttaggtcgaaagaaggcctggtgg

SEQ ID NO: 775317 - DNA, 33 bp, Homo sapien
gtgcttctatgtccaacgcaaaaggagtatgta

SEQ ID NO: 775318 - DNA, 33 bp, Homo sapien
gtgcttctatgtccaatgcaaaaggagtatgta

SEQ ID NO: 775319 - DNA, 33 bp, Homo sapien
aggtgtgattcaaactaaccatgcttatgtact

SEQ ID NO: 775320 - DNA, 33 bp, Homo sapien
aggtgtgattcaaacttaccatgcttatgtact

SEQ ID NO: 775321 - DNA, 33 bp, Homo sapien
agcaaaaagccttccacgggctcccgctcaagt

SEQ ID NO: 775322 - DNA, 33 bp, Homo sapien
agcaaaaagccttccatgggctcccgctcaagt

SEQ ID NO: 775323 - DNA, 33 bp, Homo sapien
ctagttagtaagcaaacgtgaatagagccatag

SEQ ID NO: 775324 - DNA, 33 bp, Homo sapien
ctagttagtaagcaaatgtgaatagagccatag

SEQ ID NO: 775325 - DNA, 33 bp, Homo sapien
aatctgaatgagcttcaaagtggattctctcca

SEQ ID NO: 775326 - DNA, 33 bp, Homo sapien
aatctgaatgagcttcgaagtggattctctcca

SEQ ID NO: 775327 - DNA, 33 bp, Homo sapien
ttatttcaatgtccaactgagaaataagaggca

SEQ ID NO: 775328 - DNA, 33 bp, Homo sapien
ttatttcaatgtccaagtgagaaataagaggca

SEQ ID NO: 775329 - DNA, 33 bp, Homo sapien
catgtctccataggtcaccctccagcttggcca

SEQ ID NO: 775330 - DNA, 33 bp, Homo sapien
catgtctccataggtcgccctccagcttggcca

SEQ ID NO: 775331 - DNA, 33 bp, Homo sapien
ctgattctaggggttagcaccaatgatcccaaa

SEQ ID NO: 775332 - DNA, 33 bp, Homo sapien
ctgattctaggggttatcaccaatgatcccaaa

SEQ ID NO: 775333 - DNA, 33 bp, Homo sapien
agaggctgcagcttcacggtcctaaaaaaaaaa

SEQ ID NO: 775334 - DNA, 33 bp, Homo sapien
agaggctgcagcttcatggtcctaaaaaaaaaa

SEQ ID NO: 775335 - DNA, 33 bp, Homo sapien
aagagatttaatctggaagaagatcctttcttt

SEQ ID NO: 775336 - DNA, 33 bp, Homo sapien
aagagatttaatctggtagaagatcctttcttt

SEQ ID NO: 775337 - DNA, 33 bp, Homo sapien
ttttaggcatggtaaaatcccagaaatcatcaa

SEQ ID NO: 775338 - DNA, 33 bp, Homo sapien
ttttaggcatggtaaagtcccagaaatcatcaa

SEQ ID NO: 775339 - DNA, 33 bp, Homo sapien
aggtgcacaatcaggaatcacagtgatgacagt

SEQ ID NO: 775340 - DNA, 33 bp, Homo sapien
aggtgcacaatcaggattcacagtgatgacagt

SEQ ID NO: 775341 - DNA, 33 bp, Homo sapien
aaacagagatattagcaaggcatctgggtctga

SEQ ID NO: 775342 - DNA, 33 bp, Homo sapien
aaacagagatattagcgaggcatctgggtctga

SEQ ID NO: 775343 - DNA, 33 bp, Homo sapien
tgccccactttgttgccatattttgtaacagca

SEQ ID NO: 775344 - DNA, 33 bp, Homo sapien
tgccccactttgttgctatattttgtaacagca

SEQ ID NO: 775345 - DNA, 33 bp, Homo sapien
tctatcagagccaataagagtctggcatgccgt

SEQ ID NO: 775346 - DNA, 33 bp, Homo sapien
tctatcagagccaataggagtctggcatgccgt

SEQ ID NO: 775347 - DNA, 33 bp, Homo sapien
ttctttcattattcaggatggatgacttatgag

SEQ ID NO: 775348 - DNA, 33 bp, Homo sapien
ttctttcattattcagtatggatgacttatgag

SEQ ID NO: 775349 - DNA, 33 bp, Homo sapien
aagaaactagctatgacataagacaggttggca

SEQ ID NO: 775350 - DNA, 33 bp, Homo sapien
aagaaactagctatgatataagacaggttggca

SEQ ID NO: 775351 - DNA, 33 bp, Homo sapien
tgggagcaaagttcaaagcaaccacaccaggta

SEQ ID NO: 775352 - DNA, 33 bp, Homo sapien
tgggagcaaagttcaaggcaaccacaccaggta

SEQ ID NO: 775353 - DNA, 33 bp, Homo sapien
ataaaacattaggtagacaacacacagcacatc

SEQ ID NO: 775354 - DNA, 33 bp, Homo sapien
ataaaacattaggtagtcaacacacagcacatc

SEQ ID NO: 775355 - DNA, 33 bp, Homo sapien
caatgattagccatgacagcaaaagaagaaaca

SEQ ID NO: 775356 - DNA, 33 bp, Homo sapien
caatgattagccatgatagcaaaagaagaaaca

SEQ ID NO: 775357 - DNA, 33 bp, Homo sapien
agggagggagcaaggaataattcagtcgtacat

SEQ ID NO: 775358 - DNA, 33 bp, Homo sapien
agggagggagcaaggagtaattcagtcgtacat

SEQ ID NO: 775359 - DNA, 33 bp, Homo sapien
gcagggagctggcatccattatacaattaaccc

SEQ ID NO: 775360 - DNA, 33 bp, Homo sapien
gcagggagctggcatcgattatacaattaaccc

SEQ ID NO: 775361 - DNA, 33 bp, Homo sapien
ctttgcatatagttgcatcttgaagaaagaaga

SEQ ID NO: 775362 - DNA, 33 bp, Homo sapien
ctttgcatatagttgcgtcttgaagaaagaaga

SEQ ID NO: 775363 - DNA, 33 bp, Homo sapien
ccaccgggtcactgccacgagacatggcgatta

SEQ ID NO: 775364 - DNA, 33 bp, Homo sapien
ccaccgggtcactgcctcgagacatggcgatta

SEQ ID NO: 775365 - DNA, 33 bp, Homo sapien
aattactgaattggacggagttgacctgggcat

SEQ ID NO: 775366 - DNA, 33 bp, Homo sapien
aattactgaattggactgagttgacctgggcat

SEQ ID NO: 775367 - DNA, 33 bp, Homo sapien
tttccaggatcctgtacatccgggcagttgtgg

SEQ ID NO: 775368 - DNA, 33 bp, Homo sapien
tttccaggatcctgtatatccgggcagttgtgg

SEQ ID NO: 775369 - DNA, 33 bp, Homo sapien
acaatgaatcctgtgaaaacagatggctgaacc

SEQ ID NO: 775370 - DNA, 33 bp, Homo sapien
acaatgaatcctgtgagaacagatggctgaacc

SEQ ID NO: 775371 - DNA, 33 bp, Homo sapien
agtggatcctcattcacatgccagccctgccgt

SEQ ID NO: 775372 - DNA, 33 bp, Homo sapien
agtggatcctcattcagatgccagccctgccgt

SEQ ID NO: 775373 - DNA, 33 bp, Homo sapien
ctcataggtgggaaacaacttcataggttggga

SEQ ID NO: 775374 - DNA, 33 bp, Homo sapien
ctcataggtgggaaacgacttcataggttggga

SEQ ID NO: 775375 - DNA, 33 bp, Homo sapien
tctcattggagctcacagtaaccattttatctg

SEQ ID NO: 775376 - DNA, 33 bp, Homo sapien
tctcattggagctcacggtaaccattttatctg

SEQ ID NO: 775377 - DNA, 33 bp, Homo sapien
gttggggaaattttccaatgtgccattctattc

SEQ ID NO: 775378 - DNA, 33 bp, Homo sapien
gttggggaaattttccgatgtgccattctattc

SEQ ID NO: 775379 - DNA, 33 bp, Homo sapien
accaccagctctcaaacgtggaatgattaacca

SEQ ID NO: 775380 - DNA, 33 bp, Homo sapien
accaccagctctcaaatgtggaatgattaacca

SEQ ID NO: 775381 - DNA, 33 bp, Homo sapien
aagactggggatgcaacgtagagaatcctgtca

SEQ ID NO: 775382 - DNA, 33 bp, Homo sapien
aagactggggatgcaaggtagagaatcctgtca

SEQ ID NO: 775383 - DNA, 33 bp, Homo sapien
ctttcttgaatgctaacagactcaggacttctg

SEQ ID NO: 775384 - DNA, 33 bp, Homo sapien
ctttcttgaatgctaatagactcaggacttctg

SEQ ID NO: 775385 - DNA, 33 bp, Homo sapien
tattaatccaagcccggaatcaaagtgggaggg

SEQ ID NO: 775386 - DNA, 33 bp, Homo sapien
tattaatccaagcccgtaatcaaagtgggaggg

SEQ ID NO: 775387 - DNA, 33 bp, Homo sapien
attgtacctcatcctacaactctaaattacttt

SEQ ID NO: 775388 - DNA, 33 bp, Homo sapien
attgtacctcatcctagaactctaaattacttt

SEQ ID NO: 775389 - DNA, 33 bp, Homo sapien
caacaacagcctgatcaacatcatgaaaccccg

SEQ ID NO: 775390 - DNA, 33 bp, Homo sapien
caacaacagcctgatcgacatcatgaaaccccg

SEQ ID NO: 775391 - DNA, 33 bp, Homo sapien
ttattacttccacaaacgagctgtataccaata

SEQ ID NO: 775392 - DNA, 33 bp, Homo sapien
ttattacttccacaaatgagctgtataccaata

SEQ ID NO: 775393 - DNA, 33 bp, Homo sapien
tctggacagctggccaagatatgctgcttctgt

SEQ ID NO: 775394 - DNA, 33 bp, Homo sapien
tctggacagctggccaggatatgctgcttctgt

SEQ ID NO: 775395 - DNA, 33 bp, Homo sapien
gcatctagactaggagaagcagcatccagacct

SEQ ID NO: 775396 - DNA, 33 bp, Homo sapien
gcatctagactaggagtagcagcatccagacct

SEQ ID NO: 775397 - DNA, 33 bp, Homo sapien
ttcaactaagtcaataagcatctagactaggag

SEQ ID NO: 775398 - DNA, 33 bp, Homo sapien
ttcaactaagtcaataggcatctagactaggag

SEQ ID NO: 775399 - DNA, 33 bp, Homo sapien
ctaccctgtttgatggaaaaacatgcgattcca

SEQ ID NO: 775400 - DNA, 33 bp, Homo sapien
ctaccctgtttgatggcaaaacatgcgattcca

SEQ ID NO: 775401 - DNA, 33 bp, Homo sapien
aagaatgaatctcaaactttaatgggcaacgaa

SEQ ID NO: 775402 - DNA, 33 bp, Homo sapien
aagaatgaatctcaaagtttaatgggcaacgaa

SEQ ID NO: 775403 - DNA, 33 bp, Homo sapien
tgaaggaataaatgtacggtatgtgagtgctac

SEQ ID NO: 775404 - DNA, 33 bp, Homo sapien
tgaaggaataaatgtatggtatgtgagtgctac

SEQ ID NO: 775405 - DNA, 33 bp, Homo sapien
cagtgagttgtttccgccctgttatgtatctca

SEQ ID NO: 775406 - DNA, 33 bp, Homo sapien
cagtgagttgtttccgtcctgttatgtatctca

SEQ ID NO: 775407 - DNA, 33 bp, Homo sapien; identical to SEQ ID NO: 775405

SEQ ID NO: 775408 - DNA, 33 bp, Homo sapien; identical to SEQ ID NO: 775406

SEQ ID NO: 775409 - DNA, 33 bp, Homo sapien
taatctcaccttttcaaattgctatgcctttct

SEQ ID NO: 775410 - DNA, 33 bp, Homo sapien
taatctcaccttttcatattgctatgcctttct

SEQ ID NO: 775411 - DNA, 33 bp, Homo sapien
accaaagagagttagaatacatttagagtctaa

SEQ ID NO: 775412 - DNA, 33 bp, Homo sapien
accaaagagagttagattacatttagagtctaa

SEQ ID NO: 775413 - DNA, 33 bp, Homo sapien
tggcatcttaacctacactagtccaatcctcca

SEQ ID NO: 775414 - DNA, 33 bp, Homo sapien
tggcatcttaacctacgctagtccaatcctcca

SEQ ID NO: 775415 - DNA, 33 bp, Homo sapien
tacctgttgtcacttagattccctttttttttt

SEQ ID NO: 775416 - DNA, 33 bp, Homo sapien
tacctgttgtcacttatattccctttttttttt

SEQ ID NO: 775417 - DNA, 33 bp, Homo sapien
aatttctatccaatagaatgttctgtgatatgg

SEQ ID NO: 775418 - DNA, 33 bp, Homo sapien
aatttctatccaatagtatgttctgtgatatgg

SEQ ID NO: 775419 - DNA, 33 bp, Homo sapien
atgtggtacaatgcaagtctagagagaagctgt

SEQ ID NO: 775420 - DNA, 33 bp, Homo sapien
atgtggtacaatgcaattctagagagaagctgt

SEQ ID NO: 775421 - DNA, 33 bp, Homo sapien
tcactggcccctactcaccaaattgtccttaaa

SEQ ID NO: 775422 - DNA, 33 bp, Homo sapien
tcactggcccctactcgccaaattgtccttaaa

SEQ ID NO: 775423 - DNA, 33 bp, Homo sapien
ttttccagaaagttccacccaatacgcttttaa

SEQ ID NO: 775424 - DNA, 33 bp, Homo sapien
ttttccagaaagttccgcccaatacgcttttaa

SEQ ID NO: 775425 - DNA, 33 bp, Homo sapien
aaacacacaaagtagaaaatgaagcccacttat

SEQ ID NO: 775426 - DNA, 33 bp, Homo sapien
aaacacacaaagtagagaatgaagcccacttat

SEQ ID NO: 775427 - DNA, 33 bp, Homo sapien
attaccttcattgtgggatagcagtcttatttc

SEQ ID NO: 775428 - DNA, 33 bp, Homo sapien
attaccttcattgtggtatagcagtcttatttc

SEQ ID NO: 775429 - DNA, 33 bp, Homo sapien
ctgccattccttcagggccaacactcatcagct

SEQ ID NO: 775430 - DNA, 33 bp, Homo sapien
ctgccattccttcaggtccaacactcatcagct

SEQ ID NO: 775431 - DNA, 33 bp, Homo sapien
cacagtctcagttgacaacatgtggagcagaag

SEQ ID NO: 775432 - DNA, 33 bp, Homo sapien
cacagtctcagttgacgacatgtggagcagaag

SEQ ID NO: 775433 - DNA, 33 bp, Homo sapien
aatcaacaaatccgaaactggattatcattcca

SEQ ID NO: 775434 - DNA, 33 bp, Homo sapien
aatcaacaaatccgaagctggattatcattcca

SEQ ID NO: 775435 - DNA, 33 bp, Homo sapien
attaggaaaaaggaacaaaaatcatctctttcc

SEQ ID NO: 775436 - DNA, 33 bp, Homo sapien
attaggaaaaaggaacgaaaatcatctctttcc

SEQ ID NO: 775437 - DNA, 33 bp, Homo sapien
atttattttgtctaccggctttagataatacat

SEQ ID NO: 775438 - DNA, 33 bp, Homo sapien
atttattttgtctacctgctttagataatacat

SEQ ID NO: 775439 - DNA, 33 bp, Homo sapien
cagggttggggagagaaccctaaattgtagcat

SEQ ID NO: 775440 - DNA, 33 bp, Homo sapien
cagggttggggagagagccctaaattgtagcat

SEQ ID NO: 775441 - DNA, 33 bp, Homo sapien
gagagagttacatgggaaaatagaaaatagggc

SEQ ID NO: 775442 - DNA, 33 bp, Homo sapien
gagagagttacatgggtaaatagaaaatagggc

SEQ ID NO: 775443 - DNA, 33 bp, Homo sapien
atgcctgtgcaagttacaggattttaggaacag

SEQ ID NO: 775444 - DNA, 33 bp, Homo sapien
atgcctgtgcaagttataggattttaggaacag

SEQ ID NO: 775445 - DNA, 33 bp, Homo sapien
tattctatggctcagaaaaagtcagttgtactt

SEQ ID NO: 775446 - DNA, 33 bp, Homo sapien
tattctatggctcagagaaagtcagttgtactt

SEQ ID NO: 775447 - DNA, 33 bp, Homo sapien
gatatcttgacttctaggacttctttcagaaat

SEQ ID NO: 775448 - DNA, 33 bp, Homo sapien
gatatcttgacttctatgacttctttcagaaat

SEQ ID NO: 775449 - DNA, 33 bp, Homo sapien
aatggtttgggaattaggcaaccctagaaaaat

SEQ ID NO: 775450 - DNA, 33 bp, Homo sapien
aatggtttgggaattatgcaaccctagaaaaat

SEQ ID NO: 775451 - DNA, 33 bp, Homo sapien
ataacactgaactaaccagaagaagtaagaaag

SEQ ID NO: 775452 - DNA, 33 bp, Homo sapien
ataacactgaactaacgagaagaagtaagaaag

SEQ ID NO: 775453 - DNA, 33 bp, Homo sapien
ggactatcatacatccaatccaaatatgcttct

SEQ ID NO: 775454 - DNA, 33 bp, Homo sapien
ggactatcatacatccgatccaaatatgcttct

SEQ ID NO: 775455 - DNA, 33 bp, Homo sapien
tatgtctttctgtgaaatatcctctccttacta

SEQ ID NO: 775456 - DNA, 33 bp, Homo sapien
tatgtctttctgtgaattatcctctccttacta

SEQ ID NO: 775457 - DNA, 33 bp, Homo sapien
tttcctgagtcattacaatcacattctggagac

SEQ ID NO: 775458 - DNA, 33 bp, Homo sapien
tttcctgagtcattacgatcacattctggagac

SEQ ID NO: 775459 - DNA, 33 bp, Homo sapien
ggggcacttcgttcaaatataaatgatcacgtg

SEQ ID NO: 775460 - DNA, 33 bp, Homo sapien
ggggcacttcgttcaagtataaatgatcacgtg

SEQ ID NO: 775461 - DNA, 33 bp, Homo sapien
cgtggtacctcagataccgtagttcattctgtg

SEQ ID NO: 775462 - DNA, 33 bp, Homo sapien
cgtggtacctcagatatcgtagttcattctgtg

SEQ ID NO: 775463 - DNA, 33 bp, Homo sapien
aatagtcttttaaaaacgctccgtgtatccaag

SEQ ID NO: 775464 - DNA, 33 bp, Homo sapien
aatagtcttttaaaaatgctccgtgtatccaag

SEQ ID NO: 775465 - DNA, 33 bp, Homo sapien
gtgtgctcatctgtagaagtggaggcagaagtt

SEQ ID NO: 775466 - DNA, 33 bp, Homo sapien
gtgtgctcatctgtagcagtggaggcagaagtt

SEQ ID NO: 775467 - DNA, 33 bp, Homo sapien
gaatgctgggtgataaacactcattttagtgga

SEQ ID NO: 775468 - DNA, 33 bp, Homo sapien
gaatgctgggtgataagcactcattttagtgga

SEQ ID NO: 775469 - DNA, 33 bp, Homo sapien
cagcgaaattgcattacggtattgaaatggaat

SEQ ID NO: 775470 - DNA, 33 bp, Homo sapien
cagcgaaattgcattatggtattgaaatggaat

SEQ ID NO: 775471 - DNA, 33 bp, Homo sapien
atttatagcaaagatacctgataggccaaataa

SEQ ID NO: 775472 - DNA, 33 bp, Homo sapien
atttatagcaaagatatctgataggccaaataa

SEQ ID NO: 775473 - DNA, 33 bp, Homo sapien
tataaaatatgtaagacgcaacatgtcaattat

SEQ ID NO: 775474 - DNA, 33 bp, Homo sapien
tataaaatatgtaagatgcaacatgtcaattat

SEQ ID NO: 775475 - DNA, 33 bp, Homo sapien
tccaggcactctcttaagctgttccttcacaca

SEQ ID NO: 775476 - DNA, 33 bp, Homo sapien
tccaggcactctcttaggctgttccttcacaca

SEQ ID NO: 775477 - DNA, 33 bp, Homo sapien
caaaagctaaacagccacagagaatcacttctc

SEQ ID NO: 775478 - DNA, 33 bp, Homo sapien
caaaagctaaacagccgcagagaatcacttctc

SEQ ID NO: 775479 - DNA, 33 bp, Homo sapien
acagctcagcaattacactctacataatctttt

SEQ ID NO: 775480 - DNA, 33 bp, Homo sapien
acagctcagcaattacgctctacataatctttt

SEQ ID NO: 775481 - DNA, 33 bp, Homo sapien
gtctcccagtgtagacaatgtcaaagctccaca

SEQ ID NO: 775482 - DNA, 33 bp, Homo sapien
gtctcccagtgtagacgatgtcaaagctccaca

SEQ ID NO: 775483 - DNA, 33 bp, Homo sapien
gttacaaaaatagtcacgaacaatgcaagtaga

SEQ ID NO: 775484 - DNA, 33 bp, Homo sapien
gttacaaaaatagtcatgaacaatgcaagtaga

SEQ ID NO: 775485 - DNA, 33 bp, Homo sapien
agacacagaggcaggacgaaaaaaagatgtaaa

SEQ ID NO: 775486 - DNA, 33 bp, Homo sapien
agacacagaggcaggaggaaaaaaagatgtaaa

SEQ ID NO: 775487 - DNA, 33 bp, Homo sapien
ttatactatgccaaacaacagattcaaagtaat

SEQ ID NO: 775488 - DNA, 33 bp, Homo sapien
ttatactatgccaaactacagattcaaagtaat

SEQ ID NO: 775489 - DNA, 33 bp, Homo sapien
ttagatattgtgaacacgaaaactgtgtattta

SEQ ID NO: 775490 - DNA, 33 bp, Homo sapien
ttagatattgtgaacatgaaaactgtgtattta

SEQ ID NO: 775491 - DNA, 33 bp, Homo sapien
tgacttacaggtcaggaagatacgaagcaacta

SEQ ID NO: 775492 - DNA, 33 bp, Homo sapien
tgacttacaggtcagggagatacgaagcaacta

SEQ ID NO: 775493 - DNA, 33 bp, Homo sapien
gccagagtctgtgacaacctagagcagtggttt

SEQ ID NO: 775494 - DNA, 33 bp, Homo sapien
gccagagtctgtgacatcctagagcagtggttt

SEQ ID NO: 775495 - DNA, 33 bp, Homo sapien
aattgtctataaccaaaaagttatggtttgata

SEQ ID NO: 775496 - DNA, 33 bp, Homo sapien
aattgtctataaccaagaagttatggtttgata

SEQ ID NO: 775497 - DNA, 33 bp, Homo sapien
caacaacaaaaatccacgatacgaaattctagg

SEQ ID NO: 775498 - DNA, 33 bp, Homo sapien
caacaacaaaaatccatgatacgaaattctagg

SEQ ID NO: 775499 - DNA, 33 bp, Homo sapien
aatggaagttgtttacactttgttgcagctacc

SEQ ID NO: 775500 - DNA, 33 bp, Homo sapien
aatggaagttgtttacgctttgttgcagctacc

SEQ ID NO: 775501 - DNA, 33 bp, Homo sapien
accagggagccctgaaaagcactgtcctaagag

SEQ ID NO: 775502 - DNA, 33 bp, Homo sapien
accagggagccctgaagagcactgtcctaagag

SEQ ID NO: 775503 - DNA, 33 bp, Homo sapien
gtagctgggactaaagacgtatgccaccacgcc

SEQ ID NO: 775504 - DNA, 33 bp, Homo sapien
gtagctgggactaaaggcgtatgccaccacgcc

SEQ ID NO: 775505 - DNA, 33 bp, Homo sapien
ttgtggtggtggttagaacaatgagatatgagg

SEQ ID NO: 775506 - DNA, 33 bp, Homo sapien
ttgtggtggtggttagcacaatgagatatgagg

SEQ ID NO: 775507 - DNA, 33 bp, Homo sapien
ggcaagtatgtaacagcagtaattcactgaatc

SEQ ID NO: 775508 - DNA, 33 bp, Homo sapien
ggcaagtatgtaacaggagtaattcactgaatc

SEQ ID NO: 775509 - DNA, 33 bp, Homo sapien
cagctttaaacagcataatctgctggtttctgg

SEQ ID NO: 775510 - DNA, 33 bp, Homo sapien
cagctttaaacagcattatctgctggtttctgg

SEQ ID NO: 775511 - DNA, 33 bp, Homo sapien
tgttaattcttactcccactaaaatcacatcat

SEQ ID NO: 775512 - DNA, 33 bp, Homo sapien
tgttaattcttactccgactaaaatcacatcat

SEQ ID NO: 775513 - DNA, 33 bp, Homo sapien
tgagattggtttcctgacaaagaaacttgggac

SEQ ID NO: 775514 - DNA, 33 bp, Homo sapien
tgagattggtttcctgccaaagaaacttgggac

SEQ ID NO: 775515 - DNA, 33 bp, Homo sapien
atctgttgtgagggcaaaaaatggcctgatgca

SEQ ID NO: 775516 - DNA, 33 bp, Homo sapien
atctgttgtgagggcacaaaatggcctgatgca

SEQ ID NO: 775517 - DNA, 33 bp, Homo sapien
tatttttccctgttaaatggagttaatataccc

SEQ ID NO: 775518 - DNA, 33 bp, Homo sapien
tatttttccctgttaagtggagttaatataccc

SEQ ID NO: 775519 - DNA, 33 bp, Homo sapien
ataagcttgtatgtctcacccatcagtcacagg

SEQ ID NO: 775520 - DNA, 33 bp, Homo sapien
ataagcttgtatgtcttacccatcagtcacagg

SEQ ID NO: 775521 - DNA, 33 bp, Homo sapien
ccatgcaatgcagagacaattctaaggtagctc

SEQ ID NO: 775522 - DNA, 33 bp, Homo sapien
ccatgcaatgcagagataattctaaggtagctc

SEQ ID NO: 775523 - DNA, 33 bp, Homo sapien
tgtaggcaatgagacaatggatttgtaaacaca

SEQ ID NO: 775524 - DNA, 33 bp, Homo sapien
tgtaggcaatgagacagtggatttgtaaacaca

SEQ ID NO: 775525 - DNA, 33 bp, Homo sapien
ctgctatacattatccacagatgggtatttagc

SEQ ID NO: 775526 - DNA, 33 bp, Homo sapien
ctgctatacattatccgcagatgggtatttagc

SEQ ID NO: 775527 - DNA, 33 bp, Homo sapien
aacagatggaagcaataaaaggcatccggcatg

SEQ ID NO: 775528 - DNA, 33 bp, Homo sapien
aacagatggaagcaatgaaaggcatccggcatg

SEQ ID NO: 775529 - DNA, 33 bp, Homo sapien
gtggcaagaacaagatgaacatttcttcatgac

SEQ ID NO: 775530 - DNA, 33 bp, Homo sapien
gtggcaagaacaagattaacatttcttcatgac

SEQ ID NO: 775531 - DNA, 33 bp, Homo sapien
atgacatgctcaaacaatggtaattagagaaac

SEQ ID NO: 775532 - DNA, 33 bp, Homo sapien
atgacatgctcaaacagtggtaattagagaaac

SEQ ID NO: 775533 - DNA, 33 bp, Homo sapien
atttgaaaagatgggaccataaaccaatcagcg

SEQ ID NO: 775534 - DNA, 33 bp, Homo sapien
atttgaaaagatgggatcataaaccaatcagcg

SEQ ID NO: 775535 - DNA, 33 bp, Homo sapien
acaactattatttggccctaaccttgaccactg

SEQ ID NO: 775536 - DNA, 33 bp, Homo sapien
acaactattatttggctctaaccttgaccactg

SEQ ID NO: 775537 - DNA, 33 bp, Homo sapien
tgaatcctctaaaaaacaaagtcaacagaactc

SEQ ID NO: 775538 - DNA, 33 bp, Homo sapien
tgaatcctctaaaaaagaaagtcaacagaactc

SEQ ID NO: 775539 - DNA, 33 bp, Homo sapien
tgcttcacaaacttgcaaagttagcacctttgg

SEQ ID NO: 775540 - DNA, 33 bp, Homo sapien
tgcttcacaaacttgcgaagttagcacctttgg

SEQ ID NO: 775541 - DNA, 33 bp, Homo sapien
gaaggaatctattgtacagttgttggagggaaa

SEQ ID NO: 775542 - DNA, 33 bp, Homo sapien
gaaggaatctattgtagagttgttggagggaaa

SEQ ID NO: 775543 - DNA, 33 bp, Homo sapien
tttggctttttagcacacttcccagtaggttca

SEQ ID NO: 775544 - DNA, 33 bp, Homo sapien
tttggctttttagcacgcttcccagtaggttca

SEQ ID NO: 775545 - DNA, 33 bp, Homo sapien
ctactgtcccctaatcagagtttcttcaaatcc

SEQ ID NO: 775546 - DNA, 33 bp, Homo sapien
ctactgtcccctaatccgagtttcttcaaatcc

SEQ ID NO: 775547 - DNA, 33 bp, Homo sapien
atggtgattaatgcaactgaaaggattccagct

SEQ ID NO: 775548 - DNA, 33 bp, Homo sapien
atggtgattaatgcaagtgaaaggattccagct

SEQ ID NO: 775549 - DNA, 33 bp, Homo sapien
tttctgatccagcacactgagtttctcaagagt

SEQ ID NO: 775550 - DNA, 33 bp, Homo sapien
tttctgatccagcacattgagtttctcaagagt

SEQ ID NO: 775551 - DNA, 33 bp, Homo sapien
cagatgaagaagggaaaacaatgactcgaatca

SEQ ID NO: 775552 - DNA, 33 bp, Homo sapien
cagatgaagaagggaagacaatgactcgaatca

SEQ ID NO: 775553 - DNA, 33 bp, Homo sapien
tcacctgtgagacccacgcataatgcactagga

SEQ ID NO: 775554 - DNA, 33 bp, Homo sapien
tcacctgtgagacccatgcataatgcactagga

SEQ ID NO: 775555 - DNA, 33 bp, Homo sapien
ggctcctctaggaaacactcctcttcagggtcc

SEQ ID NO: 775556 - DNA, 33 bp, Homo sapien
ggctcctctaggaaacgctcctcttcagggtcc

SEQ ID NO: 775557 - DNA, 33 bp, Homo sapien
gcaaggtcatgtggtacatagccttttcagaga

SEQ ID NO: 775558 - DNA, 33 bp, Homo sapien
gcaaggtcatgtggtatatagccttttcagaga

SEQ ID NO: 775559 - DNA, 33 bp, Homo sapien
actcctttaagtcttcaccgaaagttatcttct

SEQ ID NO: 775560 - DNA, 33 bp, Homo sapien
actcctttaagtcttcgccgaaagttatcttct

SEQ ID NO: 775561 - DNA, 33 bp, Homo sapien
ggtagcagggagaccaccattaagcagcccaag

SEQ ID NO: 775562 - DNA, 33 bp, Homo sapien
ggtagcagggagaccatcattaagcagcccaag

SEQ ID NO: 775563 - DNA, 33 bp, Homo sapien
aaccctaaataaagtcaaaaggccatctcatca

SEQ ID NO: 775564 - DNA, 33 bp, Homo sapien
aaccctaaataaagtcgaaaggccatctcatca

SEQ ID NO: 775565 - DNA, 33 bp, Homo sapien
tgatgcattctttcttaaaaaatatggacattc

SEQ ID NO: 775566 - DNA, 33 bp, Homo sapien
tgatgcattctttctttaaaaatatggacattc

SEQ ID NO: 775567 - DNA, 33 bp, Homo sapien
ggccagggaggctaaccgaatttcctgcaatgc

SEQ ID NO: 775568 - DNA, 33 bp, Homo sapien
ggccagggaggctaactgaatttcctgcaatgc

SEQ ID NO: 775569 - DNA, 33 bp, Homo sapien
cccattgggtactacacagtaattaaaagcaat

SEQ ID NO: 775570 - DNA, 33 bp, Homo sapien
cccattgggtactacagagtaattaaaagcaat

SEQ ID NO: 775571 - DNA, 33 bp, Homo sapien
cctaaagacctccttaacttagtgggcaagcct

SEQ ID NO: 775572 - DNA, 33 bp, Homo sapien
cctaaagacctccttagcttagtgggcaagcct

SEQ ID NO: 775573 - DNA, 33 bp, Homo sapien
tctttgagtaagaatacagggggaatcatgtca

SEQ ID NO: 775574 - DNA, 33 bp, Homo sapien
tctttgagtaagaatagagggggaatcatgtca

SEQ ID NO: 775575 - DNA, 33 bp, Homo sapien
agattacatgcttcatgatcagtttatacacct

SEQ ID NO: 775576 - DNA, 33 bp, Homo sapien
agattacatgcttcattatcagtttatacacct

SEQ ID NO: 775577 - DNA, 33 bp, Homo sapien
aatgtgtttccatttaaaaataaactatgtgtt

SEQ ID NO: 775578 - DNA, 33 bp, Homo sapien
aatgtgtttccatttagaaataaactatgtgtt

SEQ ID NO: 775579 - DNA, 33 bp, Homo sapien
aaaataaccagtacaaaaagtccattcaaacaa

SEQ ID NO: 775580 - DNA, 33 bp, Homo sapien
aaaataaccagtacaagaagtccattcaaacaa

SEQ ID NO: 775581 - DNA, 33 bp, Homo sapien
tctagttttccttggcaatgctaaatatagttg

SEQ ID NO: 775582 - DNA, 33 bp, Homo sapien
tctagttttccttggctatgctaaatatagttg

SEQ ID NO: 775583 - DNA, 33 bp, Homo sapien
cactcgttcttagaccaaatcgcaatacccttc

SEQ ID NO: 775584 - DNA, 33 bp, Homo sapien
cactcgttcttagaccgaatcgcaatacccttc

SEQ ID NO: 775585 - DNA, 33 bp, Homo sapien
cagagaccaaaactcactcttcaaacagatatg

SEQ ID NO: 775586 - DNA, 33 bp, Homo sapien
cagagaccaaaactcagtcttcaaacagatatg

SEQ ID NO: 775587 - DNA, 33 bp, Homo sapien
tagtgctgctgtctcacgaaggaggtgaagtgt

SEQ ID NO: 775588 - DNA, 33 bp, Homo sapien
tagtgctgctgtctcatgaaggaggtgaagtgt

SEQ ID NO: 775589 - DNA, 33 bp, Homo sapien
cttctttcacaactaaatactacttcccatgga

SEQ ID NO: 775590 - DNA, 33 bp, Homo sapien
cttctttcacaactaactactacttcccatgga

SEQ ID NO: 775591 - DNA, 33 bp, Homo sapien
acatgtatagcctgaacgtgcttttctaatctc

SEQ ID NO: 775592 - DNA, 33 bp, Homo sapien
acatgtatagcctgaatgtgcttttctaatctc

SEQ ID NO: 775593 - DNA, 33 bp, Homo sapien
atggtattggaaatcacattcctagcacaccaa

SEQ ID NO: 775594 - DNA, 33 bp, Homo sapien
atggtattggaaatcatattcctagcacaccaa

SEQ ID NO: 775595 - DNA, 33 bp, Homo sapien
gtgaatatattccatgaaggtataaaatcacag

SEQ ID NO: 775596 - DNA, 33 bp, Homo sapien
gtgaatatattccatggaggtataaaatcacag

SEQ ID NO: 775597 - DNA, 33 bp, Homo sapien
tgtattttgctttagacatgatattactcctcc

SEQ ID NO: 775598 - DNA, 33 bp, Homo sapien
tgtattttgctttagagatgatattactcctcc

SEQ ID NO: 775599 - DNA, 33 bp, Homo sapien
gtctgtcaacacactaatacgcttgctctcaat

SEQ ID NO: 775600 - DNA, 33 bp, Homo sapien
gtctgtcaacacactattacgcttgctctcaat

SEQ ID NO: 775601 - DNA, 33 bp, Homo sapien
gtttttcaccatcccaatcagcggctgcctttt

SEQ ID NO: 775602 - DNA, 33 bp, Homo sapien
gtttttcaccatcccagtcagcggctgcctttt

SEQ ID NO: 775603 - DNA, 33 bp, Homo sapien
tttgtaatctccttcaatctttaaatgcctcat

SEQ ID NO: 775604 - DNA, 33 bp, Homo sapien
tttgtaatctccttcagtctttaaatgcctcat

SEQ ID NO: 775605 - DNA, 33 bp, Homo sapien
ctgactctccaatcagactcttaatcctcatgg

SEQ ID NO: 775606 - DNA, 33 bp, Homo sapien
ctgactctccaatcaggctcttaatcctcatgg

SEQ ID NO: 775607 - DNA, 33 bp, Homo sapien
tgtccacatctgtaaaatggctttgattgcttc

SEQ ID NO: 775608 - DNA, 33 bp, Homo sapien
tgtccacatctgtaaattggctttgattgcttc

SEQ ID NO: 775609 - DNA, 33 bp, Homo sapien
cttaattccaaaagacagcacaaaatagaaaag

SEQ ID NO: 775610 - DNA, 33 bp, Homo sapien
cttaattccaaaagacggcacaaaatagaaaag

SEQ ID NO: 775611 - DNA, 33 bp, Homo sapien
gatttgggcctcatagcctagcaataggaagcc

SEQ ID NO: 775612 - DNA, 33 bp, Homo sapien
gatttgggcctcatagtctagcaataggaagcc

SEQ ID NO: 775613 - DNA, 33 bp, Homo sapien
caggctacaggttcacataggtcagctccacag

SEQ ID NO: 775614 - DNA, 33 bp, Homo sapien
caggctacaggttcacgtaggtcagctccacag

SEQ ID NO: 775615 - DNA, 33 bp, Homo sapien
aactgtcctttaagagaaatgaccaacacaaaa

SEQ ID NO: 775616 - DNA, 33 bp, Homo sapien
aactgtcctttaagagcaatgaccaacacaaaa

SEQ ID NO: 775617 - DNA, 33 bp, Homo sapien
ttattttagagctagacaggttttggaggttcc

SEQ ID NO: 775618 - DNA, 33 bp, Homo sapien
ttattttagagctagataggttttggaggttcc

SEQ ID NO: 775619 - DNA, 33 bp, Homo sapien
aatgggtaatgtcaagacgggtacaaaatatac

SEQ ID NO: 775620 - DNA, 33 bp, Homo sapien
aatgggtaatgtcaaggcgggtacaaaatatac

SEQ ID NO: 775621 - DNA, 33 bp, Homo sapien
ctgtgatgggcaacggaaatgtcatttgactga

SEQ ID NO: 775622 - DNA, 33 bp, Homo sapien
ctgtgatgggcaacgggaatgtcatttgactga

SEQ ID NO: 775623 - DNA, 33 bp, Homo sapien
aaacaaagtccattcccctgggagaacaaccat

SEQ ID NO: 775624 - DNA, 33 bp, Homo sapien
aaacaaagtccattccgctgggagaacaaccat

SEQ ID NO: 775625 - DNA, 33 bp, Homo sapien
ttagctttcacctggaacttaaatggagaaatc

SEQ ID NO: 775626 - DNA, 33 bp, Homo sapien
ttagctttcacctggagcttaaatggagaaatc

SEQ ID NO: 775627 - DNA, 33 bp, Homo sapien
agatgagtgatttaaacacaagaggaagaataa

SEQ ID NO: 775628 - DNA, 33 bp, Homo sapien
agatgagtgatttaaatacaagaggaagaataa

SEQ ID NO: 775629 - DNA, 33 bp, Homo sapien
ttaatgaagacagcacagtccatgagcatctca

SEQ ID NO: 775630 - DNA, 33 bp, Homo sapien
ttaatgaagacagcacggtccatgagcatctca

SEQ ID NO: 775631 - DNA, 33 bp, Homo sapien
gatctgtgattttttaaatagttagcagttaca

SEQ ID NO: 775632 - DNA, 33 bp, Homo sapien
gatctgtgattttttagatagttagcagttaca

SEQ ID NO: 775633 - DNA, 33 bp, Homo sapien
ttggttattagtggcaaaaagaaggctctcagc

SEQ ID NO: 775634 - DNA, 33 bp, Homo sapien
ttggttattagtggcacaaagaaggctctcagc

SEQ ID NO: 775635 - DNA, 33 bp, Homo sapien
ccaggtagaaaacaaacgagacaaagttcctgg

SEQ ID NO: 775636 - DNA, 33 bp, Homo sapien
ccaggtagaaaacaaatgagacaaagttcctgg

SEQ ID NO: 775637 - DNA, 33 bp, Homo sapien
ccagaatgttctcaacacaggatctctgggatt

SEQ ID NO: 775638 - DNA, 33 bp, Homo sapien
ccagaatgttctcaactcaggatctctgggatt

SEQ ID NO: 775639 - DNA, 33 bp, Homo sapien
atgggatctccccatcactgaaatgcagaccct

SEQ ID NO: 775640 - DNA, 33 bp, Homo sapien
atgggatctccccatcgctgaaatgcagaccct

SEQ ID NO: 775641 - DNA, 33 bp, Homo sapien
tgtatggctttacttacgttcagggatctcttt

SEQ ID NO: 775642 - DNA, 33 bp, Homo sapien
tgtatggctttacttatgttcagggatctcttt

SEQ ID NO: 775643 - DNA, 33 bp, Homo sapien
cacattctattgctcaggtgaacccaaccaaaa

SEQ ID NO: 775644 - DNA, 33 bp, Homo sapien
cacattctattgctcatgtgaacccaaccaaaa

SEQ ID NO: 775645 - DNA, 33 bp, Homo sapien
tacctaccagatcctacgacacatccaagaaag

SEQ ID NO: 775646 - DNA, 33 bp, Homo sapien
tacctaccagatcctatgacacatccaagaaag

SEQ ID NO: 775647 - DNA, 33 bp, Homo sapien
tacagcagaccgaaacaatgtattttagaatta

SEQ ID NO: 775648 - DNA, 33 bp, Homo sapien
tacagcagaccgaaaccatgtattttagaatta

SEQ ID NO: 775649 - DNA, 33 bp, Homo sapien
ctgtagggcttgaaaaccttttatcctaattct

SEQ ID NO: 775650 - DNA, 33 bp, Homo sapien
ctgtagggcttgaaaatcttttatcctaattct

SEQ ID NO: 775651 - DNA, 33 bp, Homo sapien
ttcttgtcccctgtgaacagtgggtttctaagg

SEQ ID NO: 775652 - DNA, 33 bp, Homo sapien
ttcttgtcccctgtgaccagtgggtttctaagg

SEQ ID NO: 775653 - DNA, 33 bp, Homo sapien
gtgacacaggccaagaagaggtggaaggtatgc

SEQ ID NO: 775654 - DNA, 33 bp, Homo sapien
gtgacacaggccaagatgaggtggaaggtatgc

SEQ ID NO: 775655 - DNA, 33 bp, Homo sapien
aggcacctgggtacacacctcatacaaacatgc

SEQ ID NO: 775656 - DNA, 33 bp, Homo sapien
aggcacctgggtacacgcctcatacaaacatgc

SEQ ID NO: 775657 - DNA, 33 bp, Homo sapien
tggctaaatggtactccatgacattcccccatt

SEQ ID NO: 775658 - DNA, 33 bp, Homo sapien
tggctaaatggtactctatgacattcccccatt

SEQ ID NO: 775659 - DNA, 33 bp, Homo sapien
acaaaaatataaagaacgcctaagatctgtggg

SEQ ID NO: 775660 - DNA, 33 bp, Homo sapien
acaaaaatataaagaatgcctaagatctgtggg

SEQ ID NO: 775661 - DNA, 33 bp, Homo sapien
gtggataaaaatggaacccagctttgtaagaag

SEQ ID NO: 775662 - DNA, 33 bp, Homo sapien
gtggataaaaatggaatccagctttgtaagaag

SEQ ID NO: 775663 - DNA, 33 bp, Homo sapien
caacacaaagttttaggcagcctatcatttgaa

SEQ ID NO: 775664 - DNA, 33 bp, Homo sapien
caacacaaagttttagtcagcctatcatttgaa

SEQ ID NO: 775665 - DNA, 33 bp, Homo sapien
ttaacgaattacacagaaagtatgtgtttttac

SEQ ID NO: 775666 - DNA, 33 bp, Homo sapien
ttaacgaattacacaggaagtatgtgtttttac

SEQ ID NO: 775667 - DNA, 33 bp, Homo sapien
ttcctaagtgacacaacacttgagcctggtctt

SEQ ID NO: 775668 - DNA, 33 bp, Homo sapien
ttcctaagtgacacaatacttgagcctggtctt

SEQ ID NO: 775669 - DNA, 33 bp, Homo sapien
aagtttatgataaaggccacttactagtggaga

SEQ ID NO: 775670 - DNA, 33 bp, Homo sapien
aagtttatgataaaggtcacttactagtggaga

SEQ ID NO: 775671 - DNA, 33 bp, Homo sapien
aataatataccgtcataaatgctattatctcct

SEQ ID NO: 775672 - DNA, 33 bp, Homo sapien
aataatataccgtcatgaatgctattatctcct

SEQ ID NO: 775673 - DNA, 33 bp, Homo sapien
agacatctgaaataccacttaaaaacaggagct

SEQ ID NO: 775674 - DNA, 33 bp, Homo sapien
agacatctgaaataccgcttaaaaacaggagct

SEQ ID NO: 775675 - DNA, 33 bp, Homo sapien
taattttatagatcccagacctacaaggccatg

SEQ ID NO: 775676 - DNA, 33 bp, Homo sapien
taattttatagatcccggacctacaaggccatg

SEQ ID NO: 775677 - DNA, 33 bp, Homo sapien
aagttctctggccacaactgcttgattgcttgc

SEQ ID NO: 775678 - DNA, 33 bp, Homo sapien
aagttctctggccacacctgcttgattgcttgc

SEQ ID NO: 775679 - DNA, 33 bp, Homo sapien
ctcagaggaataatgaaagggtgaatggagaaa

SEQ ID NO: 775680 - DNA, 33 bp, Homo sapien
ctcagaggaataatgagagggtgaatggagaaa

SEQ ID NO: 775681 - DNA, 33 bp, Homo sapien
tgaatttctaatactgcaatgtttgacatgtgg

SEQ ID NO: 775682 - DNA, 33 bp, Homo sapien
tgaatttctaatactggaatgtttgacatgtgg

SEQ ID NO: 775683 - DNA, 33 bp, Homo sapien
aaaatctcacaaatgcaattcaagtaagttgaa

SEQ ID NO: 775684 - DNA, 33 bp, Homo sapien
aaaatctcacaaatgcgattcaagtaagttgaa

SEQ ID NO: 775685 - DNA, 33 bp, Homo sapien
tgtttggcaatgcacacagatttttataaacct

SEQ ID NO: 775686 - DNA, 33 bp, Homo sapien
tgtttggcaatgcacatagatttttataaacct

SEQ ID NO: 775687 - DNA, 33 bp, Homo sapien
agcatatcaaatactcaaaaactttatccagtt

SEQ ID NO: 775688 - DNA, 33 bp, Homo sapien
agcatatcaaatactcgaaaactttatccagtt

SEQ ID NO: 775689 - DNA, 33 bp, Homo sapien
aatcactctaaacaacacatttaataggttcca

SEQ ID NO: 775690 - DNA, 33 bp, Homo sapien
aatcactctaaacaacgcatttaataggttcca

SEQ ID NO: 775691 - DNA, 33 bp, Homo sapien
cagtagggatgagaacagaaggggtattatgca

SEQ ID NO: 775692 - DNA, 33 bp, Homo sapien
cagtagggatgagaacggaaggggtattatgca

SEQ ID NO: 775693 - DNA, 33 bp, Homo sapien
tcctgtggagggtatccactcttcttccagctg

SEQ ID NO: 775694 - DNA, 33 bp, Homo sapien
tcctgtggagggtatctactcttcttccagctg

SEQ ID NO: 775695 - DNA, 33 bp, Homo sapien
ggtgagatcacactacaggatcaccaggtgtca

SEQ ID NO: 775696 - DNA, 33 bp, Homo sapien
ggtgagatcacactacgggatcaccaggtgtca

SEQ ID NO: 775697 - DNA, 33 bp, Homo sapien
acttgttcattatggactacctaatggcaaagt

SEQ ID NO: 775698 - DNA, 33 bp, Homo sapien
acttgttcattatggagtacctaatggcaaagt

SEQ ID NO: 775699 - DNA, 33 bp, Homo sapien
ggggttgttctctgacaggcaggagtacgggtc

SEQ ID NO: 775700 - DNA, 33 bp, Homo sapien
ggggttgttctctgacgggcaggagtacgggtc

SEQ ID NO: 775701 - DNA, 33 bp, Homo sapien
ggttattaaacaaggccctgagataaaggaata

SEQ ID NO: 775702 - DNA, 33 bp, Homo sapien
ggttattaaacaaggctctgagataaaggaata

SEQ ID NO: 775703 - DNA, 33 bp, Homo sapien
ggcagcactttttttcactgaacacacatttcc

SEQ ID NO: 775704 - DNA, 33 bp, Homo sapien
ggcagcactttttttcgctgaacacacatttcc

SEQ ID NO: 775705 - DNA, 33 bp, Homo sapien
tgacactgaaattggtaaagatacattaatact

SEQ ID NO: 775706 - DNA, 33 bp, Homo sapien
tgacactgaaattggtgaagatacattaatact

SEQ ID NO: 775707 - DNA, 33 bp, Homo sapien
ccgtttgcaaggagcccggacactttcttgata

SEQ ID NO: 775708 - DNA, 33 bp, Homo sapien
ccgtttgcaaggagcctggacactttcttgata

SEQ ID NO: 775709 - DNA, 33 bp, Homo sapien
ggaagaggaacattggaaatagactatagtgtt

SEQ ID NO: 775710 - DNA, 33 bp, Homo sapien
ggaagaggaacattgggaatagactatagtgtt

SEQ ID NO: 775711 - DNA, 33 bp, Homo sapien
cttgagttcagttaaccagggagtaagcctggt

SEQ ID NO: 775712 - DNA, 33 bp, Homo sapien
cttgagttcagttaactagggagtaagcctggt

SEQ ID NO: 775713 - DNA, 33 bp, Homo sapien
gggtgaacccaaattggaccttaaggccattca

SEQ ID NO: 775714 - DNA, 33 bp, Homo sapien
gggtgaacccaaattgtaccttaaggccattca

SEQ ID NO: 775715 - DNA, 33 bp, Homo sapien
gtgactttgagtggcaccacttatttttaagcc

SEQ ID NO: 775716 - DNA, 33 bp, Homo sapien
gtgactttgagtggcatcacttatttttaagcc

SEQ ID NO: 775717 - DNA, 33 bp, Homo sapien
aatttctattttgagcggataatttccaataaa

SEQ ID NO: 775718 - DNA, 33 bp, Homo sapien
aatttctattttgagctgataatttccaataaa

SEQ ID NO: 775719 - DNA, 33 bp, Homo sapien
tatccaccctctacacagaaaccagggaaactt

SEQ ID NO: 775720 - DNA, 33 bp, Homo sapien
tatccaccctctacacggaaaccagggaaactt

SEQ ID NO: 775721 - DNA, 33 bp, Homo sapien
gtgatttcaaagaagcagaatgaaggaggagtt

SEQ ID NO: 775722 - DNA, 33 bp, Homo sapien
gtgatttcaaagaagcggaatgaaggaggagtt

SEQ ID NO: 775723 - DNA, 33 bp, Homo sapien
ataaccacatttaacacctagagtggcatcaga

SEQ ID NO: 775724 - DNA, 33 bp, Homo sapien
ataaccacatttaacatctagagtggcatcaga

SEQ ID NO: 775725 - DNA, 33 bp, Homo sapien
aatatatattaaaacaatgatagcagaaataaa

SEQ ID NO: 775726 - DNA, 33 bp, Homo sapien
aatatatattaaaacagtgatagcagaaataaa

SEQ ID NO: 775727 - DNA, 33 bp, Homo sapien
tccagcctgaacactccaattcagacagctcac

SEQ ID NO: 775728 - DNA, 33 bp, Homo sapien
tccagcctgaacactctaattcagacagctcac

SEQ ID NO: 775729 - DNA, 33 bp, Homo sapien
aagctatacagcaacacagtagacaaaagccag

SEQ ID NO: 775730 - DNA, 33 bp, Homo sapien
aagctatacagcaacagagtagacaaaagccag

SEQ ID NO: 775731 - DNA, 33 bp, Homo sapien
tcatctttgatgtcaaatggccttagtgaccag

SEQ ID NO: 775732 - DNA, 33 bp, Homo sapien
tcatctttgatgtcaagtggccttagtgaccag

SEQ ID NO: 775733 - DNA, 33 bp, Homo sapien
aattacttttgtctaacagccttaacatatact

SEQ ID NO: 775734 - DNA, 33 bp, Homo sapien
aattacttttgtctaatagccttaacatatact

SEQ ID NO: 775735 - DNA, 33 bp, Homo sapien
gactcaccttgcaatacatagtgagaaataatc

SEQ ID NO: 775736 - DNA, 33 bp, Homo sapien
gactcaccttgcaatatatagtgagaaataatc

SEQ ID NO: 775737 - DNA, 33 bp, Homo sapien
ttcttcaaaagcttctaaacacatttgaaaata

SEQ ID NO: 775738 - DNA, 33 bp, Homo sapien
ttcttcaaaagcttctgaacacatttgaaaata

SEQ ID NO: 775739 - DNA, 33 bp, Homo sapien
gtgaagacatttcttcccattacctatatacct

SEQ ID NO: 775740 - DNA, 33 bp, Homo sapien
gtgaagacatttcttctcattacctatatacct

SEQ ID NO: 775741 - DNA, 33 bp, Homo sapien
ctcatcagattcccaactatgctgtggaagcaa

SEQ ID NO: 775742 - DNA, 33 bp, Homo sapien
ctcatcagattcccaagtatgctgtggaagcaa

SEQ ID NO: 775743 - DNA, 33 bp, Homo sapien
ttataagtaccctagacacgatttaaatgcagt

SEQ ID NO: 775744 - DNA, 33 bp, Homo sapien
ttataagtaccctagatacgatttaaatgcagt

SEQ ID NO: 775745 - DNA, 33 bp, Homo sapien
tatcaatgaccacagaaggctatgtggagatta

SEQ ID NO: 775746 - DNA, 33 bp, Homo sapien
tatcaatgaccacagagggctatgtggagatta

SEQ ID NO: 775747 - DNA, 33 bp, Homo sapien
accaaatctccttttacgacattcaacagaaat

SEQ ID NO: 775748 - DNA, 33 bp, Homo sapien
accaaatctccttttatgacattcaacagaaat

SEQ ID NO: 775749 - DNA, 33 bp, Homo sapien
aacttcgaattgtacacgaagcttacaacctag

SEQ ID NO: 775750 - DNA, 33 bp, Homo sapien
aacttcgaattgtacatgaagcttacaacctag

SEQ ID NO: 775751 - DNA, 33 bp, Homo sapien
ctagaaagaaagggtcaactgatttacatgaga

SEQ ID NO: 775752 - DNA, 33 bp, Homo sapien
ctagaaagaaagggtcgactgatttacatgaga

SEQ ID NO: 775753 - DNA, 33 bp, Homo sapien
tttgtttaacatatcaatgagggcagcagtaac

SEQ ID NO: 775754 - DNA, 33 bp, Homo sapien
tttgtttaacatatcagtgagggcagcagtaac

SEQ ID NO: 775755 - DNA, 33 bp, Homo sapien
tcatgttgggctttcacgtcggagcatgggcat

SEQ ID NO: 775756 - DNA, 33 bp, Homo sapien
tcatgttgggctttcatgtcggagcatgggcat

SEQ ID NO: 775757 - DNA, 33 bp, Homo sapien
actgtgtatgccaatagctctttctccccagag

SEQ ID NO: 775758 - DNA, 33 bp, Homo sapien
actgtgtatgccaatatctctttctccccagag

SEQ ID NO: 775759 - DNA, 33 bp, Homo sapien
aagtcctggggcagtagaatattacaaagtttc

SEQ ID NO: 775760 - DNA, 33 bp, Homo sapien
aagtcctggggcagtataatattacaaagtttc

SEQ ID NO: 775761 - DNA, 33 bp, Homo sapien
aatgaaaggaccggaaaggccatgttcctatta

SEQ ID NO: 775762 - DNA, 33 bp, Homo sapien
aatgaaaggaccggaagggccatgttcctatta

SEQ ID NO: 775763 - DNA, 33 bp, Homo sapien
tttctagacttagtaacgtaaaatgcatgacat

SEQ ID NO: 775764 - DNA, 33 bp, Homo sapien
tttctagacttagtaatgtaaaatgcatgacat

SEQ ID NO: 775765 - DNA, 33 bp, Homo sapien
gaataacaatttaaaaagatgatcactcatgtc

SEQ ID NO: 775766 - DNA, 33 bp, Homo sapien
gaataacaatttaaaatgatgatcactcatgtc

SEQ ID NO: 775767 - DNA, 33 bp, Homo sapien
gttatcagcttccagacgagagtgttttcctcc

SEQ ID NO: 775768 - DNA, 33 bp, Homo sapien
gttatcagcttccagatgagagtgttttcctcc

SEQ ID NO: 775769 - DNA, 33 bp, Homo sapien
tagtattactacatgaaaattagcctgtatttc

SEQ ID NO: 775770 - DNA, 33 bp, Homo sapien
tagtattactacatgacaattagcctgtatttc

SEQ ID NO: 775771 - DNA, 33 bp, Homo sapien
ctctcttctctctataaggtatccatttgttaa

SEQ ID NO: 775772 - DNA, 33 bp, Homo sapien
ctctcttctctctatacggtatccatttgttaa

SEQ ID NO: 775773 - DNA, 33 bp, Homo sapien
gacagagagaaacaagaagagctctgacagcca

SEQ ID NO: 775774 - DNA, 33 bp, Homo sapien
gacagagagaaacaaggagagctctgacagcca

SEQ ID NO: 775775 - DNA, 33 bp, Homo sapien
aattttctctttgttacagtagagcaggcactt

SEQ ID NO: 775776 - DNA, 33 bp, Homo sapien
aattttctctttgttatagtagagcaggcactt

SEQ ID NO: 775777 - DNA, 33 bp, Homo sapien
cttatctgctggaaagaagtataagatgatttg

SEQ ID NO: 775778 - DNA, 33 bp, Homo sapien
cttatctgctggaaaggagtataagatgatttg

SEQ ID NO: 775779 - DNA, 33 bp, Homo sapien
atgtcgtttgcttaacatacaccctggaaagag

SEQ ID NO: 775780 - DNA, 33 bp, Homo sapien
atgtcgtttgcttaacgtacaccctggaaagag

SEQ ID NO: 775781 - DNA, 33 bp, Homo sapien
ccatagattttcttaaagcctggcctagaatga

SEQ ID NO: 775782 - DNA, 33 bp, Homo sapien
ccatagattttcttaatgcctggcctagaatga

SEQ ID NO: 775783 - DNA, 33 bp, Homo sapien
cttttggataaacataaatatggacccttctgc

SEQ ID NO: 775784 - DNA, 33 bp, Homo sapien
cttttggataaacatagatatggacccttctgc

SEQ ID NO: 775785 - DNA, 33 bp, Homo sapien
caattttattgctttaacctgtttactaggata

SEQ ID NO: 775786 - DNA, 33 bp, Homo sapien
caattttattgctttatcctgtttactaggata

SEQ ID NO: 775787 - DNA, 33 bp, Homo sapien
gccttagatcagttacagagcagcaagctgcat

SEQ ID NO: 775788 - DNA, 33 bp, Homo sapien
gccttagatcagttacggagcagcaagctgcat

SEQ ID NO: 775789 - DNA, 33 bp, Homo sapien
ataggcttttaagggcaagcctgagaaccaaac

SEQ ID NO: 775790 - DNA, 33 bp, Homo sapien
ataggcttttaagggcgagcctgagaaccaaac

SEQ ID NO: 775791 - DNA, 33 bp, Homo sapien
gagacttctaagaaccagatgcccaaatgagaa

SEQ ID NO: 775792 - DNA, 33 bp, Homo sapien
gagacttctaagaaccggatgcccaaatgagaa

SEQ ID NO: 775793 - DNA, 33 bp, Homo sapien
aattgctctaagtgaaagaactgtcatctgctg

SEQ ID NO: 775794 - DNA, 33 bp, Homo sapien
aattgctctaagtgaaggaactgtcatctgctg

SEQ ID NO: 775795 - DNA, 33 bp, Homo sapien
aggtatttaactgcaaaaaatagcagaatagcc

SEQ ID NO: 775796 - DNA, 33 bp, Homo sapien
aggtatttaactgcaagaaatagcagaatagcc

SEQ ID NO: 775797 - DNA, 33 bp, Homo sapien
ggactcctgataaagcaagtaagttattgggtg

SEQ ID NO: 775798 - DNA, 33 bp, Homo sapien
ggactcctgataaagcgagtaagttattgggtg

SEQ ID NO: 775799 - DNA, 33 bp, Homo sapien
gtgaaaaactgataacaagtggatgacgctacc

SEQ ID NO: 775800 - DNA, 33 bp, Homo sapien
gtgaaaaactgataacgagtggatgacgctacc

SEQ ID NO: 775801 - DNA, 33 bp, Homo sapien
tttctaaattctcttaccagctgtgtttcttgt

SEQ ID NO: 775802 - DNA, 33 bp, Homo sapien
tttctaaattctcttatcagctgtgtttcttgt

SEQ ID NO: 775803 - DNA, 33 bp, Homo sapien
gtgaggattaatgcgagaatgtgtgtcagcact

SEQ ID NO: 775804 - DNA, 33 bp, Homo sapien
gtgaggattaatgcgataatgtgtgtcagcact

SEQ ID NO: 775805 - DNA, 33 bp, Homo sapien
gaaaggagccaaagaaatctgccaggggatcat

SEQ ID NO: 775806 - DNA, 33 bp, Homo sapien
gaaaggagccaaagaactctgccaggggatcat

SEQ ID NO: 775807 - DNA, 33 bp, Homo sapien
ttctgccggctgtaaactcatcacctcctggga

SEQ ID NO: 775808 - DNA, 33 bp, Homo sapien
ttctgccggctgtaaagtcatcacctcctggga

SEQ ID NO: 775809 - DNA, 33 bp, Homo sapien
tgagctgagatcgcacaatggtactacagcctg

SEQ ID NO: 775810 - DNA, 33 bp, Homo sapien
tgagctgagatcgcaccatggtactacagcctg

SEQ ID NO: 775811 - DNA, 33 bp, Homo sapien
tcccgggttcacatgaggtaggtgctattttta

SEQ ID NO: 775812 - DNA, 33 bp, Homo sapien
tcccgggttcacatgatgtaggtgctattttta

SEQ ID NO: 775813 - DNA, 33 bp, Homo sapien
aattgcacagaatctacgggctctgagctactg

SEQ ID NO: 775814 - DNA, 33 bp, Homo sapien
aattgcacagaatctatgggctctgagctactg

SEQ ID NO: 775815 - DNA, 33 bp, Homo sapien
tagggcacatgatgaccgctgatcgttaagtag

SEQ ID NO: 775816 - DNA, 33 bp, Homo sapien
tagggcacatgatgactgctgatcgttaagtag

SEQ ID NO: 775817 - DNA, 33 bp, Homo sapien
caaaaaacttgcaccacgtttgttacagttgaa

SEQ ID NO: 775818 - DNA, 33 bp, Homo sapien
caaaaaacttgcaccaggtttgttacagttgaa

SEQ ID NO: 775819 - DNA, 33 bp, Homo sapien
cagttgaggtcattcagcccctggatctctgtt

SEQ ID NO: 775820 - DNA, 33 bp, Homo sapien
cagttgaggtcattcatcccctggatctctgtt

SEQ ID NO: 775821 - DNA, 33 bp, Homo sapien
ttggcatatttgcaacaaaagtctctggggaga

SEQ ID NO: 775822 - DNA, 33 bp, Homo sapien
ttggcatatttgcaacgaaagtctctggggaga

SEQ ID NO: 775823 - DNA, 33 bp, Homo sapien
ctgactgtatgtgtaacaggcacattgtaggtt

SEQ ID NO: 775824 - DNA, 33 bp, Homo sapien
ctgactgtatgtgtaataggcacattgtaggtt

SEQ ID NO: 775825 - DNA, 33 bp, Homo sapien
cacagaagtttgaggacgatgagatgagaaagg

SEQ ID NO: 775826 - DNA, 33 bp, Homo sapien
cacagaagtttgaggaggatgagatgagaaagg

SEQ ID NO: 775827 - DNA, 33 bp, Homo sapien
caaagtttaagttttgaaggtatggtctatgag

SEQ ID NO: 775828 - DNA, 33 bp, Homo sapien
caaagtttaagttttggaggtatggtctatgag

SEQ ID NO: 775829 - DNA, 33 bp, Homo sapien
tggtctatgagtggcaagtaaacaacaggatag

SEQ ID NO: 775830 - DNA, 33 bp, Homo sapien
tggtctatgagtggcacgtaaacaacaggatag

SEQ ID NO: 775831 - DNA, 33 bp, Homo sapien
atggtggaaatcctcccgcaaatttctatggca

SEQ ID NO: 775832 - DNA, 33 bp, Homo sapien
atggtggaaatcctcctgcaaatttctatggca

SEQ ID NO: 775833 - DNA, 33 bp, Homo sapien
aagagtttatagactacgggctgaagatgagta

SEQ ID NO: 775834 - DNA, 33 bp, Homo sapien
aagagtttatagactatgggctgaagatgagta

SEQ ID NO: 775835 - DNA, 33 bp, Homo sapien
agagacagtttgaatactatctctgttaattac

SEQ ID NO: 775836 - DNA, 33 bp, Homo sapien
agagacagtttgaatattatctctgttaattac

SEQ ID NO: 775837 - DNA, 33 bp, Homo sapien
ccattgtaagtacgagaatctgtctgtgttctc

SEQ ID NO: 775838 - DNA, 33 bp, Homo sapien
ccattgtaagtacgaggatctgtctgtgttctc

SEQ ID NO: 775839 - DNA, 33 bp, Homo sapien
atcattatacgtctcagagagaagtgtcacaaa

SEQ ID NO: 775840 - DNA, 33 bp, Homo sapien
atcattatacgtctcatagagaagtgtcacaaa

SEQ ID NO: 775841 - DNA, 33 bp, Homo sapien
cagctcccagagaccacaggaaacacagacagg

SEQ ID NO: 775842 - DNA, 33 bp, Homo sapien
cagctcccagagaccagaggaaacacagacagg

SEQ ID NO: 775843 - DNA, 33 bp, Homo sapien
tccagcctcatatctgaaagcaagccaaactga

SEQ ID NO: 775844 - DNA, 33 bp, Homo sapien
tccagcctcatatctggaagcaagccaaactga

SEQ ID NO: 775845 - DNA, 33 bp, Homo sapien
ttaactaacataacctcaagctttcaactataa

SEQ ID NO: 775846 - DNA, 33 bp, Homo sapien
ttaactaacataacctgaagctttcaactataa

SEQ ID NO: 775847 - DNA, 33 bp, Homo sapien
gcaaagcttggagaataagtgctaaagtcctaa

SEQ ID NO: 775848 - DNA, 33 bp, Homo sapien
gcaaagcttggagaatcagtgctaaagtcctaa

SEQ ID NO: 775849 - DNA, 33 bp, Homo sapien
tcctagttgatattcacgtgttgtttccagttt

SEQ ID NO: 775850 - DNA, 33 bp, Homo sapien
tcctagttgatattcatgtgttgtttccagttt

SEQ ID NO: 775851 - DNA, 33 bp, Homo sapien
aaagtgaatctgagaaaaggctgcaatctatgg

SEQ ID NO: 775852 - DNA, 33 bp, Homo sapien
aaagtgaatctgagaagaggctgcaatctatgg

SEQ ID NO: 775853 - DNA, 33 bp, Homo sapien
tatcacttttactcaaatgtcagatggagcccc

SEQ ID NO: 775854 - DNA, 33 bp, Homo sapien
tatcacttttactcaattgtcagatggagcccc

SEQ ID NO: 775855 - DNA, 33 bp, Homo sapien
acctctaaaatcacaacaggctactccccaaca

SEQ ID NO: 775856 - DNA, 33 bp, Homo sapien
acctctaaaatcacaagaggctactccccaaca

SEQ ID NO: 775857 - DNA, 33 bp, Homo sapien
ggtcaggtattttgtacatattctgcattttgg

SEQ ID NO: 775858 - DNA, 33 bp, Homo sapien
ggtcaggtattttgtagatattctgcattttgg

SEQ ID NO: 775859 - DNA, 33 bp, Homo sapien
caaaggcgattatcaaactactcaggtaatgca

SEQ ID NO: 775860 - DNA, 33 bp, Homo sapien
caaaggcgattatcaagctactcaggtaatgca

SEQ ID NO: 775861 - DNA, 33 bp, Homo sapien
cagacttcaccatgtacgctaattatgtgggga

SEQ ID NO: 775862 - DNA, 33 bp, Homo sapien
cagacttcaccatgtatgctaattatgtgggga

SEQ ID NO: 775863 - DNA, 33 bp, Homo sapien
gaggcaacctaaatgacaatttcaggaccatgc

SEQ ID NO: 775864 - DNA, 33 bp, Homo sapien
gaggcaacctaaatgagaatttcaggaccatgc

SEQ ID NO: 775865 - DNA, 33 bp, Homo sapien
atcagtgcatgtgagaaaaagccaaaatcagat

SEQ ID NO: 775866 - DNA, 33 bp, Homo sapien
atcagtgcatgtgagataaagccaaaatcagat

SEQ ID NO: 775867 - DNA, 33 bp, Homo sapien
tttagatgaggaattacgttggcttttgttaag

SEQ ID NO: 775868 - DNA, 33 bp, Homo sapien
tttagatgaggaattatgttggcttttgttaag

SEQ ID NO: 775869 - DNA, 33 bp, Homo sapien
gtgggaagcacccaacacagtgatattcaataa

SEQ ID NO: 775870 - DNA, 33 bp, Homo sapien
gtgggaagcacccaacgcagtgatattcaataa

SEQ ID NO: 775871 - DNA, 33 bp, Homo sapien
ccagagtgcttttacaaggacagtttattcaat

SEQ ID NO: 775872 - DNA, 33 bp, Homo sapien
ccagagtgcttttacagggacagtttattcaat

SEQ ID NO: 775873 - DNA, 33 bp, Homo sapien
ctgtcaaacctccttaagcccagagtgctttta

SEQ ID NO: 775874 - DNA, 33 bp, Homo sapien
ctgtcaaacctccttaggcccagagtgctttta

SEQ ID NO: 775875 - DNA, 33 bp, Homo sapien
aatgcttcttcctcacccccattgtcctggtgg

SEQ ID NO: 775876 - DNA, 33 bp, Homo sapien
aatgcttcttcctcactcccattgtcctggtgg

SEQ ID NO: 775877 - DNA, 33 bp, Homo sapien
atcatcagagcttagacagtttcagaaagtatt

SEQ ID NO: 775878 - DNA, 33 bp, Homo sapien
atcatcagagcttagatagtttcagaaagtatt

SEQ ID NO: 775879 - DNA, 33 bp, Homo sapien
tgatatataaaattaaacattgcagtcagggta

SEQ ID NO: 775880 - DNA, 33 bp, Homo sapien
tgatatataaaattaatcattgcagtcagggta

SEQ ID NO: 775881 - DNA, 33 bp, Homo sapien
ttacagatggtgaaataaagggcagagtattta

SEQ ID NO: 775882 - DNA, 33 bp, Homo sapien
ttacagatggtgaaatgaagggcagagtattta

SEQ ID NO: 775883 - DNA, 33 bp, Homo sapien
aaacattactaacaaaaccatactgcaataagt

SEQ ID NO: 775884 - DNA, 33 bp, Homo sapien
aaacattactaacaaatccatactgcaataagt

SEQ ID NO: 775885 - DNA, 33 bp, Homo sapien
ctgaaaggcatgaagaagactctaaaaagaaac

SEQ ID NO: 775886 - DNA, 33 bp, Homo sapien
ctgaaaggcatgaagaggactctaaaaagaaac

SEQ ID NO: 775887 - DNA, 33 bp, Homo sapien
gctaacccctgctatacctctatcttcctgtga

SEQ ID NO: 775888 - DNA, 33 bp, Homo sapien
gctaacccctgctatatctctatcttcctgtga

SEQ ID NO: 775889 - DNA, 33 bp, Homo sapien
gttatccaatacttgacctcatctttaaattct

SEQ ID NO: 775890 - DNA, 33 bp, Homo sapien
gttatccaatacttgatctcatctttaaattct

SEQ ID NO: 775891 - DNA, 33 bp, Homo sapien
tcatgagggcttatagaaaatatttgtaatgag

SEQ ID NO: 775892 - DNA, 33 bp, Homo sapien
tcatgagggcttataggaaatatttgtaatgag

SEQ ID NO: 775893 - DNA, 33 bp, Homo sapien
tgtatcttgatggtgacagaaatatagttggag

SEQ ID NO: 775894 - DNA, 33 bp, Homo sapien
tgtatcttgatggtgatagaaatatagttggag

SEQ ID NO: 775895 - DNA, 33 bp, Homo sapien
agagttaagcattgacaagattcaattaagacc

SEQ ID NO: 775896 - DNA, 33 bp, Homo sapien
agagttaagcattgacgagattcaattaagacc

SEQ ID NO: 775897 - DNA, 33 bp, Homo sapien
aaatcccaggggttgacgtttatgcctcagagt

SEQ ID NO: 775898 - DNA, 33 bp, Homo sapien
aaatcccaggggttgatgtttatgcctcagagt

SEQ ID NO: 775899 - DNA, 33 bp, Homo sapien
gaactcctaagctcaaatggcccttttgccttg

SEQ ID NO: 775900 - DNA, 33 bp, Homo sapien
gaactcctaagctcaagtggcccttttgccttg

SEQ ID NO: 775901 - DNA, 33 bp, Homo sapien
caatttttctatttaccactcatatgacctcga

SEQ ID NO: 775902 - DNA, 33 bp, Homo sapien
caatttttctatttactactcatatgacctcga

SEQ ID NO: 775903 - DNA, 33 bp, Homo sapien
actcatctgagtatgaccccaatttttctattt

SEQ ID NO: 775904 - DNA, 33 bp, Homo sapien
actcatctgagtatgatcccaatttttctattt

SEQ ID NO: 775905 - DNA, 33 bp, Homo sapien
ggaaaaatgtgaagaaaactgagtaagaggaag

SEQ ID NO: 775906 - DNA, 33 bp, Homo sapien
ggaaaaatgtgaagaacactgagtaagaggaag

SEQ ID NO: 775907 - DNA, 33 bp, Homo sapien
ttaaaactttctgcaacgactttctcttgggaa

SEQ ID NO: 775908 - DNA, 33 bp, Homo sapien
ttaaaactttctgcaatgactttctcttgggaa

SEQ ID NO: 775909 - DNA, 33 bp, Homo sapien
tcatgctcgtagtgaaaccacccagaaggatgg

SEQ ID NO: 775910 - DNA, 33 bp, Homo sapien
tcatgctcgtagtgaagccacccagaaggatgg

SEQ ID NO: 775911 - DNA, 33 bp, Homo sapien
tccccaagttttgtccactttagaaccaggagt

SEQ ID NO: 775912 - DNA, 33 bp, Homo sapien
tccccaagttttgtcctctttagaaccaggagt

SEQ ID NO: 775913 - DNA, 33 bp, Homo sapien
gcatttcttctgaaagccactgctgagtttaaa

SEQ ID NO: 775914 - DNA, 33 bp, Homo sapien
gcatttcttctgaaagtcactgctgagtttaaa

SEQ ID NO: 775915 - DNA, 33 bp, Homo sapien
cccgatttcctgcaaaatgaatgttctttatat

SEQ ID NO: 775916 - DNA, 33 bp, Homo sapien
cccgatttcctgcaaagtgaatgttctttatat

SEQ ID NO: 775917 - DNA, 33 bp, Homo sapien
taatcaaatttattgaataggagagaaacagaa

SEQ ID NO: 775918 - DNA, 33 bp, Homo sapien
taatcaaatttattgagtaggagagaaacagaa

SEQ ID NO: 775919 - DNA, 33 bp, Homo sapien
agctattgtggcaaaagaaagggagataaagta

SEQ ID NO: 775920 - DNA, 33 bp, Homo sapien
agctattgtggcaaaataaagggagataaagta

SEQ ID NO: 775921 - DNA, 33 bp, Homo sapien
aagcagaatttagctgcattttaatctgcctat

SEQ ID NO: 775922 - DNA, 33 bp, Homo sapien
aagcagaatttagctgtattttaatctgcctat

SEQ ID NO: 775923 - DNA, 33 bp, Homo sapien
tccctgtagagagaaccagggctttcctgaaaa

SEQ ID NO: 775924 - DNA, 33 bp, Homo sapien
tccctgtagagagaacgagggctttcctgaaaa

SEQ ID NO: 775925 - DNA, 33 bp, Homo sapien
caactgttaatgagcacaaaagtttattaaata

SEQ ID NO: 775926 - DNA, 33 bp, Homo sapien
caactgttaatgagcagaaaagtttattaaata

SEQ ID NO: 775927 - DNA, 33 bp, Homo sapien
gtctcttaaaaggtaacggaggctgggcacagt

SEQ ID NO: 775928 - DNA, 33 bp, Homo sapien
gtctcttaaaaggtaatggaggctgggcacagt

SEQ ID NO: 775929 - DNA, 33 bp, Homo sapien
aaaaaggaaatagtacaaacatgatgctaggga

SEQ ID NO: 775930 - DNA, 33 bp, Homo sapien
aaaaaggaaatagtacgaacatgatgctaggga

SEQ ID NO: 775931 - DNA, 33 bp, Homo sapien
aagtctgtggacagaaagaccttaataattcca

SEQ ID NO: 775932 - DNA, 33 bp, Homo sapien
aagtctgtggacagaaggaccttaataattcca

SEQ ID NO: 775933 - DNA, 33 bp, Homo sapien
tttgaggggatcaataagagccgggtggcatgg

SEQ ID NO: 775934 - DNA, 33 bp, Homo sapien
tttgaggggatcaataggagccgggtggcatgg

SEQ ID NO: 775935 - DNA, 33 bp, Homo sapien
taacccaaagaatccaatgctaccatcaaaacg

SEQ ID NO: 775936 - DNA, 33 bp, Homo sapien
taacccaaagaatccactgctaccatcaaaacg

SEQ ID NO: 775937 - DNA, 33 bp, Homo sapien
tacattcaagttaagcagcaagaagccccaggt

SEQ ID NO: 775938 - DNA, 33 bp, Homo sapien
tacattcaagttaagcggcaagaagccccaggt

SEQ ID NO: 775939 - DNA, 33 bp, Homo sapien
caggaatagccaattaggtaaatgtgtactctt

SEQ ID NO: 775940 - DNA, 33 bp, Homo sapien
caggaatagccaattatgtaaatgtgtactctt

SEQ ID NO: 775941 - DNA, 33 bp, Homo sapien
gcatatttttttctcacagtgatgaaagaggaa

SEQ ID NO: 775942 - DNA, 33 bp, Homo sapien
gcatatttttttctcatagtgatgaaagaggaa

SEQ ID NO: 775943 - DNA, 33 bp, Homo sapien
ttgcagtgcttggaataaatttcacaagtcaac

SEQ ID NO: 775944 - DNA, 33 bp, Homo sapien
ttgcagtgcttggaatgaatttcacaagtcaac

SEQ ID NO: 775945 - DNA, 33 bp, Homo sapien
tggtttatcagatgtacgttgaatgatgtctct

SEQ ID NO: 775946 - DNA, 33 bp, Homo sapien
tggtttatcagatgtatgttgaatgatgtctct

SEQ ID NO: 775947 - DNA, 33 bp, Homo sapien
gttcagagtactgttgcaagtcatttcaggtaa

SEQ ID NO: 775948 - DNA, 33 bp, Homo sapien
gttcagagtactgttggaagtcatttcaggtaa

SEQ ID NO: 775949 - DNA, 33 bp, Homo sapien
ctcaatgcatccctcaatcccttgcgtctcatg

SEQ ID NO: 775950 - DNA, 33 bp, Homo sapien
ctcaatgcatccctcagtcccttgcgtctcatg

SEQ ID NO: 775951 - DNA, 33 bp, Homo sapien
tttaggcaaataaaaaatagagtaacatccttc

SEQ ID NO: 775952 - DNA, 33 bp, Homo sapien
tttaggcaaataaaaactagagtaacatccttc

SEQ ID NO: 775953 - DNA, 33 bp, Homo sapien
tattctcgatcacctccagtaaagcaattaatc

SEQ ID NO: 775954 - DNA, 33 bp, Homo sapien
tattctcgatcacctctagtaaagcaattaatc

SEQ ID NO: 775955 - DNA, 33 bp, Homo sapien
ctagtagatttgcctccgaaagcctctcaatag

SEQ ID NO: 775956 - DNA, 33 bp, Homo sapien
ctagtagatttgcctctgaaagcctctcaatag

SEQ ID NO: 775957 - DNA, 33 bp, Homo sapien
tgtaaacagagagttaaattaagcagtctttga

SEQ ID NO: 775958 - DNA, 33 bp, Homo sapien
tgtaaacagagagttagattaagcagtctttga

SEQ ID NO: 775959 - DNA, 33 bp, Homo sapien
gaagcttggatgttaccggctgaataatgattt

SEQ ID NO: 775960 - DNA, 33 bp, Homo sapien
gaagcttggatgttactggctgaataatgattt

SEQ ID NO: 775961 - DNA, 33 bp, Homo sapien
gaggaggttgcaagaaagcgatcctagagtaaa

SEQ ID NO: 775962 - DNA, 33 bp, Homo sapien
gaggaggttgcaagaaggcgatcctagagtaaa

SEQ ID NO: 775963 - DNA, 33 bp, Homo sapien
tgctcttgattaagcagagcaaaatttaattcc

SEQ ID NO: 775964 - DNA, 33 bp, Homo sapien
tgctcttgattaagcatagcaaaatttaattcc

SEQ ID NO: 775965 - DNA, 33 bp, Homo sapien
taaagtatacagtttaagtcaaggatcactttt

SEQ ID NO: 775966 - DNA, 33 bp, Homo sapien
taaagtatacagtttaggtcaaggatcactttt

SEQ ID NO: 775967 - DNA, 33 bp, Homo sapien
ttgctcctacacagagaagatgacaatggacta

SEQ ID NO: 775968 - DNA, 33 bp, Homo sapien
ttgctcctacacagagcagatgacaatggacta

SEQ ID NO: 775969 - DNA, 33 bp, Homo sapien
attccttccatcagccaattgtacttgctcttt

SEQ ID NO: 775970 - DNA, 33 bp, Homo sapien
attccttccatcagccgattgtacttgctcttt

SEQ ID NO: 775971 - DNA, 33 bp, Homo sapien
aaagtgccaaattaggaataacacttcatgaaa

SEQ ID NO: 775972 - DNA, 33 bp, Homo sapien
aaagtgccaaattagggataacacttcatgaaa

SEQ ID NO: 775973 - DNA, 33 bp, Homo sapien
tatctctttacactaacgaccattacactttgt

SEQ ID NO: 775974 - DNA, 33 bp, Homo sapien
tatctctttacactaatgaccattacactttgt

SEQ ID NO: 775975 - DNA, 33 bp, Homo sapien
gttagagaagtcaagaaacaactgttggtggga

SEQ ID NO: 775976 - DNA, 33 bp, Homo sapien
gttagagaagtcaagacacaactgttggtggga

SEQ ID NO: 775977 - DNA, 33 bp, Homo sapien
gtatctgagatttcacacatcctctagaggtct

SEQ ID NO: 775978 - DNA, 33 bp, Homo sapien
gtatctgagatttcacgcatcctctagaggtct

SEQ ID NO: 775979 - DNA, 33 bp, Homo sapien
aggcacaggacatggacactaatgattctatag

SEQ ID NO: 775980 - DNA, 33 bp, Homo sapien
aggcacaggacatggatactaatgattctatag

SEQ ID NO: 775981 - DNA, 33 bp, Homo sapien
tgtctttcttgatggacagcccttcactttaat

SEQ ID NO: 775982 - DNA, 33 bp, Homo sapien
tgtctttcttgatggagagcccttcactttaat

SEQ ID NO: 775983 - DNA, 33 bp, Homo sapien
gatttcagagagttcacatcaagagaacacacc

SEQ ID NO: 775984 - DNA, 33 bp, Homo sapien
gatttcagagagttcatatcaagagaacacacc

SEQ ID NO: 775985 - DNA, 33 bp, Homo sapien
aggaaaccaaatctgccagtgagatagttaaac

SEQ ID NO: 775986 - DNA, 33 bp, Homo sapien
aggaaaccaaatctgcgagtgagatagttaaac

SEQ ID NO: 775987 - DNA, 33 bp, Homo sapien
taattgatgcattataaggacatgatattaaga

SEQ ID NO: 775988 - DNA, 33 bp, Homo sapien
taattgatgcattatagggacatgatattaaga

SEQ ID NO: 775989 - DNA, 33 bp, Homo sapien
tagattttgtctgaatgagtttctagtgatttg

SEQ ID NO: 775990 - DNA, 33 bp, Homo sapien
tagattttgtctgaattagtttctagtgatttg

SEQ ID NO: 775991 - DNA, 33 bp, Homo sapien
agtcgtgaactttaaactgtaatctattttgct

SEQ ID NO: 775992 - DNA, 33 bp, Homo sapien
agtcgtgaactttaaattgtaatctattttgct

SEQ ID NO: 775993 - DNA, 33 bp, Homo sapien
taaagttcctgtattaaaaccaacttgtgtcac

SEQ ID NO: 775994 - DNA, 33 bp, Homo sapien
taaagttcctgtattataaccaacttgtgtcac

SEQ ID NO: 775995 - DNA, 33 bp, Homo sapien
tattatatgatggtaaacactaagtggatgaaa

SEQ ID NO: 775996 - DNA, 33 bp, Homo sapien
tattatatgatggtaaccactaagtggatgaaa

SEQ ID NO: 775997 - DNA, 33 bp, Homo sapien
gtgagctctacaggagcctagtaacttaacagg

SEQ ID NO: 775998 - DNA, 33 bp, Homo sapien
gtgagctctacaggagtctagtaacttaacagg

SEQ ID NO: 775999 - DNA, 33 bp, Homo sapien
attggatttgaaggcaatagtggaacacttttg

SEQ ID NO: 776000 - DNA, 33 bp, Homo sapien
attggatttgaaggcagtagtggaacacttttg

SEQ ID NO: 776001 - DNA, 33 bp, Homo sapien
gagctccctttgtttacaggcagtactgggtag

SEQ ID NO: 776002 - DNA, 33 bp, Homo sapien
gagctccctttgtttataggcagtactgggtag

SEQ ID NO: 776003 - DNA, 33 bp, Homo sapien
catgttgttcctgcataaatgggaattgcttct

SEQ ID NO: 776004 - DNA, 33 bp, Homo sapien
catgttgttcctgcatgaatgggaattgcttct

SEQ ID NO: 776005 - DNA, 33 bp, Homo sapien
actaagaagagatggacattagacaagtaaata

SEQ ID NO: 776006 - DNA, 33 bp, Homo sapien
actaagaagagatggatattagacaagtaaata

SEQ ID NO: 776007 - DNA, 33 bp, Homo sapien
agcgaagaatttaaaaactagacacagatggcc

SEQ ID NO: 776008 - DNA, 33 bp, Homo sapien
agcgaagaatttaaaacctagacacagatggcc

SEQ ID NO: 776009 - DNA, 33 bp, Homo sapien
ctggattttgaattcaacctcaaaaggtccttg

SEQ ID NO: 776010 - DNA, 33 bp, Homo sapien
ctggattttgaattcatcctcaaaaggtccttg

SEQ ID NO: 776011 - DNA, 33 bp, Homo sapien
cttctggggcaaccataagcaaaacagagattc

SEQ ID NO: 776012 - DNA, 33 bp, Homo sapien
cttctggggcaaccatgagcaaaacagagattc

SEQ ID NO: 776013 - DNA, 33 bp, Homo sapien
tttcccaccattcagcaaatccaagaaccaata

SEQ ID NO: 776014 - DNA, 33 bp, Homo sapien
tttcccaccattcagccaatccaagaaccaata

SEQ ID NO: 776015 - DNA, 33 bp, Homo sapien
atcaattctttgcacacaaatcctcaactcggg

SEQ ID NO: 776016 - DNA, 33 bp, Homo sapien
atcaattctttgcacataaatcctcaactcggg

SEQ ID NO: 776017 - DNA, 33 bp, Homo sapien
gaacaaaccaaccaaacgcagtggccataatct

SEQ ID NO: 776018 - DNA, 33 bp, Homo sapien
gaacaaaccaaccaaatgcagtggccataatct

SEQ ID NO: 776019 - DNA, 33 bp, Homo sapien
ttctgctcaagataaactgcatccagtcaaaat

SEQ ID NO: 776020 - DNA, 33 bp, Homo sapien
ttctgctcaagataaattgcatccagtcaaaat

SEQ ID NO: 776021 - DNA, 33 bp, Homo sapien
ttttccattgcatcaaacttcacaccttcctct

SEQ ID NO: 776022 - DNA, 33 bp, Homo sapien
ttttccattgcatcaagcttcacaccttcctct

SEQ ID NO: 776023 - DNA, 33 bp, Homo sapien
agaagcagatacctgactaagctctgaggagag

SEQ ID NO: 776024 - DNA, 33 bp, Homo sapien
agaagcagatacctgagtaagctctgaggagag

SEQ ID NO: 776025 - DNA, 33 bp, Homo sapien
cacgcacatcttgatacgtaactgaagttgttg

SEQ ID NO: 776026 - DNA, 33 bp, Homo sapien
cacgcacatcttgatatgtaactgaagttgttg

SEQ ID NO: 776027 - DNA, 33 bp, Homo sapien
tcctcatctgtaaaaaacgagcaagttaagact

SEQ ID NO: 776028 - DNA, 33 bp, Homo sapien
tcctcatctgtaaaaatcgagcaagttaagact

SEQ ID NO: 776029 - DNA, 33 bp, Homo sapien
catccattaatttacacggcatctgaagaacat

SEQ ID NO: 776030 - DNA, 33 bp, Homo sapien
catccattaatttacatggcatctgaagaacat

SEQ ID NO: 776031 - DNA, 33 bp, Homo sapien
ttgtcatcttgtcttacgcagtatttgagaagg

SEQ ID NO: 776032 - DNA, 33 bp, Homo sapien
ttgtcatcttgtcttatgcagtatttgagaagg

SEQ ID NO: 776033 - DNA, 33 bp, Homo sapien
gtcctaaattgaactgaatcaatgaatttataa

SEQ ID NO: 776034 - DNA, 33 bp, Homo sapien
gtcctaaattgaactggatcaatgaatttataa

SEQ ID NO: 776035 - DNA, 33 bp, Homo sapien
atattattataaggaaatggcttccatgattct

SEQ ID NO: 776036 - DNA, 33 bp, Homo sapien
atattattataaggaattggcttccatgattct

SEQ ID NO: 776037 - DNA, 33 bp, Homo sapien
caaagtaatagttaccactgtgaaagagaataa

SEQ ID NO: 776038 - DNA, 33 bp, Homo sapien
caaagtaatagttaccgctgtgaaagagaataa

SEQ ID NO: 776039 - DNA, 33 bp, Homo sapien
ctgccacttctcttgacaagtggtgtctgtaaa

SEQ ID NO: 776040 - DNA, 33 bp, Homo sapien
ctgccacttctcttgataagtggtgtctgtaaa

SEQ ID NO: 776041 - DNA, 33 bp, Homo sapien
gattctgagttgacaacatgaattcagctgttt

SEQ ID NO: 776042 - DNA, 33 bp, Homo sapien
gattctgagttgacaagatgaattcagctgttt

SEQ ID NO: 776043 - DNA, 33 bp, Homo sapien
cagcttttctagatacggaggctataccagtgt

SEQ ID NO: 776044 - DNA, 33 bp, Homo sapien
cagcttttctagatactgaggctataccagtgt

SEQ ID NO: 776045 - DNA, 33 bp, Homo sapien
gttgaacgactgataaataaatcatggagtata

SEQ ID NO: 776046 - DNA, 33 bp, Homo sapien
gttgaacgactgataagtaaatcatggagtata

SEQ ID NO: 776047 - DNA, 33 bp, Homo sapien
ttgactatatatgtcacgtttccagtgcttttt

SEQ ID NO: 776048 - DNA, 33 bp, Homo sapien
ttgactatatatgtcatgtttccagtgcttttt

SEQ ID NO: 776049 - DNA, 33 bp, Homo sapien
gcaggctgcagaacaacataaagaagaaggaag

SEQ ID NO: 776050 - DNA, 33 bp, Homo sapien
gcaggctgcagaacaatataaagaagaaggaag

SEQ ID NO: 776051 - DNA, 33 bp, Homo sapien
agaaggaaagtgtaagcagatggcctgagggct

SEQ ID NO: 776052 - DNA, 33 bp, Homo sapien
agaaggaaagtgtaaggagatggcctgagggct

SEQ ID NO: 776053 - DNA, 33 bp, Homo sapien
gccatagaaaactagacgtcattaagcctcctc

SEQ ID NO: 776054 - DNA, 33 bp, Homo sapien
gccatagaaaactagatgtcattaagcctcctc

SEQ ID NO: 776055 - DNA, 33 bp, Homo sapien
ctatttcagaaggaagaaatgggctaaaagcaa

SEQ ID NO: 776056 - DNA, 33 bp, Homo sapien
ctatttcagaaggaaggaatgggctaaaagcaa

SEQ ID NO: 776057 - DNA, 33 bp, Homo sapien
cttattgctctttccaaatttgtatttcatgat

SEQ ID NO: 776058 - DNA, 33 bp, Homo sapien
cttattgctctttccagatttgtatttcatgat

SEQ ID NO: 776059 - DNA, 33 bp, Homo sapien
attttagctggccctaatagccaaagggtggag

SEQ ID NO: 776060 - DNA, 33 bp, Homo sapien
attttagctggccctagtagccaaagggtggag

SEQ ID NO: 776061 - DNA, 33 bp, Homo sapien
ctctttcatgactagcaagaattcaagctttcc

SEQ ID NO: 776062 - DNA, 33 bp, Homo sapien
ctctttcatgactagcgagaattcaagctttcc

SEQ ID NO: 776063 - DNA, 33 bp, Homo sapien
gaatatgctatgtacaatactttcaaacttcaa

SEQ ID NO: 776064 - DNA, 33 bp, Homo sapien
gaatatgctatgtacagtactttcaaacttcaa

SEQ ID NO: 776065 - DNA, 33 bp, Homo sapien
aagtctgcatagtatcccttgcttattattcag

SEQ ID NO: 776066 - DNA, 33 bp, Homo sapien
aagtctgcatagtatctcttgcttattattcag

SEQ ID NO: 776067 - DNA, 33 bp, Homo sapien
catcttccctgccaccaaagaattttgtaagac

SEQ ID NO: 776068 - DNA, 33 bp, Homo sapien
catcttccctgccaccgaagaattttgtaagac

SEQ ID NO: 776069 - DNA, 33 bp, Homo sapien
tccctgttatagagcacgatccttttttgtgtc

SEQ ID NO: 776070 - DNA, 33 bp, Homo sapien
tccctgttatagagcatgatccttttttgtgtc

SEQ ID NO: 776071 - DNA, 33 bp, Homo sapien
tgagagggacagttacactgaaagcaatatgtt

SEQ ID NO: 776072 - DNA, 33 bp, Homo sapien
tgagagggacagttacgctgaaagcaatatgtt

SEQ ID NO: 776073 - DNA, 33 bp, Homo sapien
ttatattttggatatacgtaatagaagatcata

SEQ ID NO: 776074 - DNA, 33 bp, Homo sapien
ttatattttggatataggtaatagaagatcata

SEQ ID NO: 776075 - DNA, 33 bp, Homo sapien
taaaataattctcacactcttgtcaaagtgatc

SEQ ID NO: 776076 - DNA, 33 bp, Homo sapien
taaaataattctcacattcttgtcaaagtgatc

SEQ ID NO: 776077 - DNA, 33 bp, Homo sapien
aagcccagaaaagagagcaagttacagcaatgg

SEQ ID NO: 776078 - DNA, 33 bp, Homo sapien
aagcccagaaaagagatcaagttacagcaatgg

SEQ ID NO: 776079 - DNA, 33 bp, Homo sapien
tccaggtacatcataaactgggataaaacaagg

SEQ ID NO: 776080 - DNA, 33 bp, Homo sapien
tccaggtacatcataatctgggataaaacaagg

SEQ ID NO: 776081 - DNA, 33 bp, Homo sapien
tgtccatagctcaagaagaaagaacacatcaac

SEQ ID NO: 776082 - DNA, 33 bp, Homo sapien
tgtccatagctcaagaggaaagaacacatcaac

SEQ ID NO: 776083 - DNA, 33 bp, Homo sapien
aattctaaggttaacaagaaccagtgtctgaat

SEQ ID NO: 776084 - DNA, 33 bp, Homo sapien
aattctaaggttaacatgaaccagtgtctgaat

SEQ ID NO: 776085 - DNA, 33 bp, Homo sapien
ccatttgtgctgacctcactgggacattgtaca

SEQ ID NO: 776086 - DNA, 33 bp, Homo sapien
ccatttgtgctgaccttactgggacattgtaca

SEQ ID NO: 776087 - DNA, 33 bp, Homo sapien
aatagagagcaacaaaaccatcgaaggatctta

SEQ ID NO: 776088 - DNA, 33 bp, Homo sapien
aatagagagcaacaaagccatcgaaggatctta

SEQ ID NO: 776089 - DNA, 33 bp, Homo sapien
ttgactggcctttccacctagcgttgtacattg

SEQ ID NO: 776090 - DNA, 33 bp, Homo sapien
ttgactggcctttccagctagcgttgtacattg

SEQ ID NO: 776091 - DNA, 33 bp, Homo sapien
gccatggagtgagtaaacggtgagcaactgtgc

SEQ ID NO: 776092 - DNA, 33 bp, Homo sapien
gccatggagtgagtaaccggtgagcaactgtgc

SEQ ID NO: 776093 - DNA, 33 bp, Homo sapien
gtctgacccactaaagaactagatgtgataata

SEQ ID NO: 776094 - DNA, 33 bp, Homo sapien
gtctgacccactaaaggactagatgtgataata

SEQ ID NO: 776095 - DNA, 33 bp, Homo sapien
ttatagttccattctagaatcctggagcaatat

SEQ ID NO: 776096 - DNA, 33 bp, Homo sapien
ttatagttccattctataatcctggagcaatat

SEQ ID NO: 776097 - DNA, 33 bp, Homo sapien
agctcctcattgagacaccaaacaaggatttgg

SEQ ID NO: 776098 - DNA, 33 bp, Homo sapien
agctcctcattgagactccaaacaaggatttgg

SEQ ID NO: 776099 - DNA, 33 bp, Homo sapien
cttaggaggaataagaagttaatccaacagcac

SEQ ID NO: 776100 - DNA, 33 bp, Homo sapien
cttaggaggaataagaggttaatccaacagcac

SEQ ID NO: 776101 - DNA, 33 bp, Homo sapien
aatcaaggtttacagacaatagagaacctggca

SEQ ID NO: 776102 - DNA, 33 bp, Homo sapien
aatcaaggtttacagagaatagagaacctggca

SEQ ID NO: 776103 - DNA, 33 bp, Homo sapien
aaagataggattttccaagtgctttaaagaaaa

SEQ ID NO: 776104 - DNA, 33 bp, Homo sapien
aaagataggattttccgagtgctttaaagaaaa

SEQ ID NO: 776105 - DNA, 33 bp, Homo sapien
ttgctggaagttgtccggactgaagggagctca

SEQ ID NO: 776106 - DNA, 33 bp, Homo sapien
ttgctggaagttgtcctgactgaagggagctca

SEQ ID NO: 776107 - DNA, 33 bp, Homo sapien
tggtttatttgtctaacggctgtgctggtataa

SEQ ID NO: 776108 - DNA, 33 bp, Homo sapien
tggtttatttgtctaatggctgtgctggtataa

SEQ ID NO: 776109 - DNA, 33 bp, Homo sapien
ctgtgtaatttggagacggggttttgataaaca

SEQ ID NO: 776110 - DNA, 33 bp, Homo sapien
ctgtgtaatttggagatggggttttgataaaca

SEQ ID NO: 776111 - DNA, 33 bp, Homo sapien
tgtctcaggactagggaaatatggctgttgact

SEQ ID NO: 776112 - DNA, 33 bp, Homo sapien
tgtctcaggactagggcaatatggctgttgact

SEQ ID NO: 776113 - DNA, 33 bp, Homo sapien
gttacattcagttgagcccaattctaacttata

SEQ ID NO: 776114 - DNA, 33 bp, Homo sapien
gttacattcagttgagtccaattctaacttata

SEQ ID NO: 776115 - DNA, 33 bp, Homo sapien
atttaatactttggagcatctttggctttggag

SEQ ID NO: 776116 - DNA, 33 bp, Homo sapien
atttaatactttggaggatctttggctttggag

SEQ ID NO: 776117 - DNA, 33 bp, Homo sapien
ggcttctggtttctgaaagatatggatgctgga

SEQ ID NO: 776118 - DNA, 33 bp, Homo sapien
ggcttctggtttctgatagatatggatgctgga

SEQ ID NO: 776119 - DNA, 33 bp, Homo sapien
ataaacttgaggcccaactgtcactcaattccc

SEQ ID NO: 776120 - DNA, 33 bp, Homo sapien
ataaacttgaggcccagctgtcactcaattccc

SEQ ID NO: 776121 - DNA, 33 bp, Homo sapien
tgcccatcacgtgagacgcctctgtattagttt

SEQ ID NO: 776122 - DNA, 33 bp, Homo sapien
tgcccatcacgtgagatgcctctgtattagttt

SEQ ID NO: 776123 - DNA, 33 bp, Homo sapien
agaaaaagacagcttaaactgaatccatttaaa

SEQ ID NO: 776124 - DNA, 33 bp, Homo sapien
agaaaaagacagcttatactgaatccatttaaa

SEQ ID NO: 776125 - DNA, 33 bp, Homo sapien
ctgtgacgataattcacggatgtctttgttggc

SEQ ID NO: 776126 - DNA, 33 bp, Homo sapien
ctgtgacgataattcatggatgtctttgttggc

SEQ ID NO: 776127 - DNA, 33 bp, Homo sapien
ttaagtcctcaggaaacgttagcattattacct

SEQ ID NO: 776128 - DNA, 33 bp, Homo sapien
ttaagtcctcaggaaatgttagcattattacct

SEQ ID NO: 776129 - DNA, 33 bp, Homo sapien
tcattttcatttgtccgattcctgttttctgtt

SEQ ID NO: 776130 - DNA, 33 bp, Homo sapien
tcattttcatttgtcctattcctgttttctgtt

SEQ ID NO: 776131 - DNA, 33 bp, Homo sapien
gtgtccaccaacctgcaatggggcaatctaagc

SEQ ID NO: 776132 - DNA, 33 bp, Homo sapien
gtgtccaccaacctgcgatggggcaatctaagc

SEQ ID NO: 776133 - DNA, 33 bp, Homo sapien
gaaggaaaagagagcacggatatatgagtgtgg

SEQ ID NO: 776134 - DNA, 33 bp, Homo sapien
gaaggaaaagagagcatggatatatgagtgtgg

SEQ ID NO: 776135 - DNA, 33 bp, Homo sapien
cgtacgcccttgaagacacagaagctactgtag

SEQ ID NO: 776136 - DNA, 33 bp, Homo sapien
cgtacgcccttgaagatacagaagctactgtag

SEQ ID NO: 776137 - DNA, 33 bp, Homo sapien
taaagagtccctcctcaagttagtccaatttaa

SEQ ID NO: 776138 - DNA, 33 bp, Homo sapien
taaagagtccctcctcgagttagtccaatttaa

SEQ ID NO: 776139 - DNA, 33 bp, Homo sapien
ttggttcgacctccaccgtagaataaatttatt

SEQ ID NO: 776140 - DNA, 33 bp, Homo sapien
ttggttcgacctccactgtagaataaatttatt

SEQ ID NO: 776141 - DNA, 33 bp, Homo sapien
atgtaaacaaataagaagaacaatccacgcagg

SEQ ID NO: 776142 - DNA, 33 bp, Homo sapien
atgtaaacaaataagaggaacaatccacgcagg

SEQ ID NO: 776143 - DNA, 33 bp, Homo sapien
tttccattcctcccaaccttccagaaaatattt

SEQ ID NO: 776144 - DNA, 33 bp, Homo sapien
tttccattcctcccaatcttccagaaaatattt

SEQ ID NO: 776145 - DNA, 33 bp, Homo sapien
attgctgtgttcctataacttagtacagtgcct

SEQ ID NO: 776146 - DNA, 33 bp, Homo sapien
attgctgtgttcctatcacttagtacagtgcct

SEQ ID NO: 776147 - DNA, 33 bp, Homo sapien
ggaagaggacatactcaaaataggaatttgcgg

SEQ ID NO: 776148 - DNA, 33 bp, Homo sapien
ggaagaggacatactcgaaataggaatttgcgg

SEQ ID NO: 776149 - DNA, 33 bp, Homo sapien
gatggcaatttgaccacgaattccagctagccc

SEQ ID NO: 776150 - DNA, 33 bp, Homo sapien
gatggcaatttgaccatgaattccagctagccc

SEQ ID NO: 776151 - DNA, 33 bp, Homo sapien
caaaggcatgtactcaaaaaatacatacaggaa

SEQ ID NO: 776152 - DNA, 33 bp, Homo sapien
caaaggcatgtactcagaaaatacatacaggaa

SEQ ID NO: 776153 - DNA, 33 bp, Homo sapien
atttctgcaattacctaaatcttaaccactagc

SEQ ID NO: 776154 - DNA, 33 bp, Homo sapien
atttctgcaattacctgaatcttaaccactagc

SEQ ID NO: 776155 - DNA, 33 bp, Homo sapien
ttttggcagagggtacaatgaggagagaaacac

SEQ ID NO: 776156 - DNA, 33 bp, Homo sapien
ttttggcagagggtacgatgaggagagaaacac

SEQ ID NO: 776157 - DNA, 33 bp, Homo sapien
gctagagttaatcaccaaaaagtctacattcaa

SEQ ID NO: 776158 - DNA, 33 bp, Homo sapien
gctagagttaatcaccgaaaagtctacattcaa

SEQ ID NO: 776159 - DNA, 33 bp, Homo sapien
aagagagggtcatcaacctccagaataaaaggt

SEQ ID NO: 776160 - DNA, 33 bp, Homo sapien
aagagagggtcatcaatctccagaataaaaggt

SEQ ID NO: 776161 - DNA, 33 bp, Homo sapien
tgaaattgaggaagtacggaggtggcctcacct

SEQ ID NO: 776162 - DNA, 33 bp, Homo sapien
tgaaattgaggaagtagggaggtggcctcacct

SEQ ID NO: 776163 - DNA, 33 bp, Homo sapien
ggaattaatgttaaatcagctgaaaggatggat

SEQ ID NO: 776164 - DNA, 33 bp, Homo sapien
ggaattaatgttaaatgagctgaaaggatggat

SEQ ID NO: 776165 - DNA, 33 bp, Homo sapien
taggttcaggaggttaagattccagttctactt

SEQ ID NO: 776166 - DNA, 33 bp, Homo sapien
taggttcaggaggttatgattccagttctactt

SEQ ID NO: 776167 - DNA, 33 bp, Homo sapien
ggcaatcattgagggaataagaatagtcatatg

SEQ ID NO: 776168 - DNA, 33 bp, Homo sapien
ggcaatcattgagggagtaagaatagtcatatg

SEQ ID NO: 776169 - DNA, 33 bp, Homo sapien
acttatatacctcaaaggcaattctgcgaacag

SEQ ID NO: 776170 - DNA, 33 bp, Homo sapien
acttatatacctcaaatgcaattctgcgaacag

SEQ ID NO: 776171 - DNA, 33 bp, Homo sapien
gttaagaagagaagcacaagaaagagcaagaaa

SEQ ID NO: 776172 - DNA, 33 bp, Homo sapien
gttaagaagagaagcagaagaaagagcaagaaa

SEQ ID NO: 776173 - DNA, 33 bp, Homo sapien
tccatctccagtcttacctgtaaatggtaactc

SEQ ID NO: 776174 - DNA, 33 bp, Homo sapien
tccatctccagtcttatctgtaaatggtaactc

SEQ ID NO: 776175 - DNA, 33 bp, Homo sapien
tcttcctctaagtgacagaaataagccattctc

SEQ ID NO: 776176 - DNA, 33 bp, Homo sapien
tcttcctctaagtgacggaaataagccattctc

SEQ ID NO: 776177 - DNA, 33 bp, Homo sapien
cttggtctgtagacgaaggaactctttattttt

SEQ ID NO: 776178 - DNA, 33 bp, Homo sapien
cttggtctgtagacgagggaactctttattttt

SEQ ID NO: 776179 - DNA, 33 bp, Homo sapien
gagcccagctttgcaacctggagtttcatttga

SEQ ID NO: 776180 - DNA, 33 bp, Homo sapien
gagcccagctttgcaatctggagtttcatttga

SEQ ID NO: 776181 - DNA, 33 bp, Homo sapien
ttattgacctcatctcccctcttgacacagctc

SEQ ID NO: 776182 - DNA, 33 bp, Homo sapien
ttattgacctcatctcgcctcttgacacagctc

SEQ ID NO: 776183 - DNA, 33 bp, Homo sapien
gtctcaaccatttcaccaaaacgtctttcatca

SEQ ID NO: 776184 - DNA, 33 bp, Homo sapien
gtctcaaccatttcacgaaaacgtctttcatca

SEQ ID NO: 776185 - DNA, 33 bp, Homo sapien
tatatagctattgccaatgagtttgctcctgga

SEQ ID NO: 776186 - DNA, 33 bp, Homo sapien
tatatagctattgccagtgagtttgctcctgga

SEQ ID NO: 776187 - DNA, 33 bp, Homo sapien
atgagagatttgaggacagttgatattaaagaa

SEQ ID NO: 776188 - DNA, 33 bp, Homo sapien
atgagagatttgaggagagttgatattaaagaa

SEQ ID NO: 776189 - DNA, 33 bp, Homo sapien
gcctctccagagaaccgaatgtcctggttccct

SEQ ID NO: 776190 - DNA, 33 bp, Homo sapien
gcctctccagagaacctaatgtcctggttccct

SEQ ID NO: 776191 - DNA, 33 bp, Homo sapien
ccgctggccaaactctcaactcagaactaaaat

SEQ ID NO: 776192 - DNA, 33 bp, Homo sapien
ccgctggccaaactctgaactcagaactaaaat

SEQ ID NO: 776193 - DNA, 33 bp, Homo sapien
agtcacgctaggatgagaactcactactgtaag

SEQ ID NO: 776194 - DNA, 33 bp, Homo sapien
agtcacgctaggatgataactcactactgtaag

SEQ ID NO: 776195 - DNA, 33 bp, Homo sapien
ttaatggttttggcaacatgcaatactcatgtc

SEQ ID NO: 776196 - DNA, 33 bp, Homo sapien
ttaatggttttggcaatatgcaatactcatgtc

SEQ ID NO: 776197 - DNA, 33 bp, Homo sapien
ctttgctgaatagcacagaagcagcacttgaac

SEQ ID NO: 776198 - DNA, 33 bp, Homo sapien
ctttgctgaatagcaccgaagcagcacttgaac

SEQ ID NO: 776199 - DNA, 33 bp, Homo sapien
cgtctaactaacaacactgtggtattagtgcct

SEQ ID NO: 776200 - DNA, 33 bp, Homo sapien
cgtctaactaacaacagtgtggtattagtgcct

SEQ ID NO: 776201 - DNA, 33 bp, Homo sapien
tgtctaagtgtgtgcaaaccccaacagaaggaa

SEQ ID NO: 776202 - DNA, 33 bp, Homo sapien
tgtctaagtgtgtgcataccccaacagaaggaa

SEQ ID NO: 776203 - DNA, 33 bp, Homo sapien
tcttaatgcactctcaaaaataaacaaaaggag

SEQ ID NO: 776204 - DNA, 33 bp, Homo sapien
tcttaatgcactctcataaataaacaaaaggag

SEQ ID NO: 776205 - DNA, 33 bp, Homo sapien
gaagatgattacccaaaccatcaggtacacaga

SEQ ID NO: 776206 - DNA, 33 bp, Homo sapien
gaagatgattacccaagccatcaggtacacaga

SEQ ID NO: 776207 - DNA, 33 bp, Homo sapien
agattctgcttctaaccaactagacattgggaa

SEQ ID NO: 776208 - DNA, 33 bp, Homo sapien
agattctgcttctaactaactagacattgggaa

SEQ ID NO: 776209 - DNA, 33 bp, Homo sapien
tgacgatcagtattaacaggagcacagactctt

SEQ ID NO: 776210 - DNA, 33 bp, Homo sapien
tgacgatcagtattaataggagcacagactctt

SEQ ID NO: 776211 - DNA, 33 bp, Homo sapien
acccgggaagtgaagaaagtgcagtgaactgtg

SEQ ID NO: 776212 - DNA, 33 bp, Homo sapien
acccgggaagtgaagacagtgcagtgaactgtg

SEQ ID NO: 776213 - DNA, 33 bp, Homo sapien
gcttctctttttcacgccctcaagcctgaaaat

SEQ ID NO: 776214 - DNA, 33 bp, Homo sapien
gcttctctttttcacgtcctcaagcctgaaaat

SEQ ID NO: 776215 - DNA, 33 bp, Homo sapien
gaactagttcaataaaacatggaacatccaact

SEQ ID NO: 776216 - DNA, 33 bp, Homo sapien
gaactagttcaataaagcatggaacatccaact

SEQ ID NO: 776217 - DNA, 33 bp, Homo sapien
gatctgttgatgaatccgaaattggaagctctg

SEQ ID NO: 776218 - DNA, 33 bp, Homo sapien
gatctgttgatgaatctgaaattggaagctctg

SEQ ID NO: 776219 - DNA, 33 bp, Homo sapien
cttactctaatctgtacgcatcttggccttaaa

SEQ ID NO: 776220 - DNA, 33 bp, Homo sapien
cttactctaatctgtatgcatcttggccttaaa

SEQ ID NO: 776221 - DNA, 33 bp, Homo sapien
acactgggcaatatccacagacatttttggttg

SEQ ID NO: 776222 - DNA, 33 bp, Homo sapien
acactgggcaatatccgcagacatttttggttg

SEQ ID NO: 776223 - DNA, 33 bp, Homo sapien
ctgggtttgcttgccaatattaatgggcaggtt

SEQ ID NO: 776224 - DNA, 33 bp, Homo sapien
ctgggtttgcttgccagtattaatgggcaggtt

SEQ ID NO: 776225 - DNA, 33 bp, Homo sapien
atccccactcctctaacactaatgactgtccaa

SEQ ID NO: 776226 - DNA, 33 bp, Homo sapien
atccccactcctctaatactaatgactgtccaa

SEQ ID NO: 776227 - DNA, 33 bp, Homo sapien
ggttatcgttcttgcaccaaacccctctaatat

SEQ ID NO: 776228 - DNA, 33 bp, Homo sapien
ggttatcgttcttgcatcaaacccctctaatat

SEQ ID NO: 776229 - DNA, 33 bp, Homo sapien
ctcagaaccatgttcaaagttcttcaggtatcc

SEQ ID NO: 776230 - DNA, 33 bp, Homo sapien
ctcagaaccatgttcagagttcttcaggtatcc

SEQ ID NO: 776231 - DNA, 33 bp, Homo sapien
catttcccaagaatagcagcttcatgactctat

SEQ ID NO: 776232 - DNA, 33 bp, Homo sapien
catttcccaagaatagtagcttcatgactctat

SEQ ID NO: 776233 - DNA, 33 bp, Homo sapien
attgtgtatgccttgacgtgagagaattccaaa

SEQ ID NO: 776234 - DNA, 33 bp, Homo sapien
attgtgtatgccttgatgtgagagaattccaaa

SEQ ID NO: 776235 - DNA, 33 bp, Homo sapien
cagaaaatctactttacagcagttgtacgttaa

SEQ ID NO: 776236 - DNA, 33 bp, Homo sapien
cagaaaatctactttatagcagttgtacgttaa

SEQ ID NO: 776237 - DNA, 33 bp, Homo sapien
actttccgggaacttacgtagaatatattggaa

SEQ ID NO: 776238 - DNA, 33 bp, Homo sapien
actttccgggaacttatgtagaatatattggaa

SEQ ID NO: 776239 - DNA, 33 bp, Homo sapien
aaggtcagtattgataagtggttgcttaatgac

SEQ ID NO: 776240 - DNA, 33 bp, Homo sapien
aaggtcagtattgatacgtggttgcttaatgac

SEQ ID NO: 776241 - DNA, 33 bp, Homo sapien
tagactctggccaagactacgttctgtgagaga

SEQ ID NO: 776242 - DNA, 33 bp, Homo sapien
tagactctggccaagagtacgttctgtgagaga

SEQ ID NO: 776243 - DNA, 33 bp, Homo sapien
agtggaaaagtaagacactatcgtacagggagg

SEQ ID NO: 776244 - DNA, 33 bp, Homo sapien
agtggaaaagtaagactctatcgtacagggagg

SEQ ID NO: 776245 - DNA, 33 bp, Homo sapien
gccattaagctttgtaggactgcacatgacatt

SEQ ID NO: 776246 - DNA, 33 bp, Homo sapien
gccattaagctttgtatgactgcacatgacatt

SEQ ID NO: 776247 - DNA, 33 bp, Homo sapien
tggctacgtgactgagaaagtatctatgttaac

SEQ ID NO: 776248 - DNA, 33 bp, Homo sapien
tggctacgtgactgaggaagtatctatgttaac

SEQ ID NO: 776249 - DNA, 33 bp, Homo sapien
ggttgtgagggctcacaaagacatactcattat

SEQ ID NO: 776250 - DNA, 33 bp, Homo sapien
ggttgtgagggctcacgaagacatactcattat

SEQ ID NO: 776251 - DNA, 33 bp, Homo sapien
ttctgacacccaaaacacattttatgcttagag

SEQ ID NO: 776252 - DNA, 33 bp, Homo sapien
ttctgacacccaaaacccattttatgcttagag

SEQ ID NO: 776253 - DNA, 33 bp, Homo sapien
aaatttggtctgatacaacaacgaattaggtat

SEQ ID NO: 776254 - DNA, 33 bp, Homo sapien
aaatttggtctgataccacaacgaattaggtat

SEQ ID NO: 776255 - DNA, 33 bp, Homo sapien
ttttgccaaaattatcaacatgccaggtaagat

SEQ ID NO: 776256 - DNA, 33 bp, Homo sapien
ttttgccaaaattatcgacatgccaggtaagat

SEQ ID NO: 776257 - DNA, 33 bp, Homo sapien
gacacaaaacagaccacagaccatgtatgcaaa

SEQ ID NO: 776258 - DNA, 33 bp, Homo sapien
gacacaaaacagaccatagaccatgtatgcaaa

SEQ ID NO: 776259 - DNA, 33 bp, Homo sapien
tagataaccttgaatgaaatatgacagtacaaa

SEQ ID NO: 776260 - DNA, 33 bp, Homo sapien
tagataaccttgaatggaatatgacagtacaaa

SEQ ID NO: 776261 - DNA, 33 bp, Homo sapien
gtttttgttgcttgaaaatattgttgtcccgga

SEQ ID NO: 776262 - DNA, 33 bp, Homo sapien
gtttttgttgcttgaagatattgttgtcccgga

SEQ ID NO: 776263 - DNA, 33 bp, Homo sapien
aaggcattgggcagaacaggtctggtgtaactc

SEQ ID NO: 776264 - DNA, 33 bp, Homo sapien
aaggcattgggcagaataggtctggtgtaactc

SEQ ID NO: 776265 - DNA, 33 bp, Homo sapien
tgatgaatgaaacacaatgctgcatgaagttgg

SEQ ID NO: 776266 - DNA, 33 bp, Homo sapien
tgatgaatgaaacacagtgctgcatgaagttgg

SEQ ID NO: 776267 - DNA, 33 bp, Homo sapien
ggtaaccaaacgaaaacaggctactactacaaa

SEQ ID NO: 776268 - DNA, 33 bp, Homo sapien
ggtaaccaaacgaaaagaggctactactacaaa

SEQ ID NO: 776269 - DNA, 33 bp, Homo sapien
gatagagtgtcaagaaaaaacctggaaggtacc

SEQ ID NO: 776270 - DNA, 33 bp, Homo sapien
gatagagtgtcaagaagaaacctggaaggtacc

SEQ ID NO: 776271 - DNA, 33 bp, Homo sapien
tcacagaggggttatggaaaaatgtgtagtatg

SEQ ID NO: 776272 - DNA, 33 bp, Homo sapien
tcacagaggggttatgtaaaaatgtgtagtatg

SEQ ID NO: 776273 - DNA, 33 bp, Homo sapien
gtccaagaatgaggcaacagcagagtcagtgtc

SEQ ID NO: 776274 - DNA, 33 bp, Homo sapien
gtccaagaatgaggcaccagcagagtcagtgtc

SEQ ID NO: 776275 - DNA, 33 bp, Homo sapien
cccaaactaaaatacaatctattccactgtggt

SEQ ID NO: 776276 - DNA, 33 bp, Homo sapien
cccaaactaaaatacagtctattccactgtggt

SEQ ID NO: 776277 - DNA, 33 bp, Homo sapien
tagagtctccagaaggaatgcaactctgccgaa

SEQ ID NO: 776278 - DNA, 33 bp, Homo sapien
tagagtctccagaagggatgcaactctgccgaa

SEQ ID NO: 776279 - DNA, 33 bp, Homo sapien
agcctggacttcagaacggagatttttctaaca

SEQ ID NO: 776280 - DNA, 33 bp, Homo sapien
agcctggacttcagaatggagatttttctaaca

SEQ ID NO: 776281 - DNA, 33 bp, Homo sapien
ggttgcccttcagcagacaattaagaaagacat

SEQ ID NO: 776282 - DNA, 33 bp, Homo sapien
ggttgcccttcagcaggcaattaagaaagacat

SEQ ID NO: 776283 - DNA, 33 bp, Homo sapien
gtatacgtattggttaagattagattgatggca

SEQ ID NO: 776284 - DNA, 33 bp, Homo sapien
gtatacgtattggttaggattagattgatggca

SEQ ID NO: 776285 - DNA, 33 bp, Homo sapien
taaggaactattcttccgaactgatttcttagc

SEQ ID NO: 776286 - DNA, 33 bp, Homo sapien
taaggaactattcttctgaactgatttcttagc

SEQ ID NO: 776287 - DNA, 33 bp, Homo sapien
gggagccaactaggacaagtcagggaagtagat

SEQ ID NO: 776288 - DNA, 33 bp, Homo sapien
gggagccaactaggacgagtcagggaagtagat

SEQ ID NO: 776289 - DNA, 33 bp, Homo sapien
agtttggatgggcttacgcttatgggctcagcc

SEQ ID NO: 776290 - DNA, 33 bp, Homo sapien
agtttggatgggcttatgcttatgggctcagcc

SEQ ID NO: 776291 - DNA, 33 bp, Homo sapien
gttcaaagcattgcacagaagttgaatagtcag

SEQ ID NO: 776292 - DNA, 33 bp, Homo sapien
gttcaaagcattgcacggaagttgaatagtcag

SEQ ID NO: 776293 - DNA, 33 bp, Homo sapien
ccaagcaatctgtaaacattacctcactggtta

SEQ ID NO: 776294 - DNA, 33 bp, Homo sapien
ccaagcaatctgtaaatattacctcactggtta

SEQ ID NO: 776295 - DNA, 33 bp, Homo sapien
agcctacaatcgtggcagaaaatgaagtggggc

SEQ ID NO: 776296 - DNA, 33 bp, Homo sapien
agcctacaatcgtggcggaaaatgaagtggggc

SEQ ID NO: 776297 - DNA, 33 bp, Homo sapien
tgaatgtggaagagacactgaagtctgaaatgt

SEQ ID NO: 776298 - DNA, 33 bp, Homo sapien
tgaatgtggaagagacgctgaagtctgaaatgt

SEQ ID NO: 776299 - DNA, 33 bp, Homo sapien
cccgtctgtataaatacgtgttcagagacttca

SEQ ID NO: 776300 - DNA, 33 bp, Homo sapien
cccgtctgtataaatatgtgttcagagacttca

SEQ ID NO: 776301 - DNA, 33 bp, Homo sapien
tatgttctggtaagaaatggataatgaagatga

SEQ ID NO: 776302 - DNA, 33 bp, Homo sapien
tatgttctggtaagaagtggataatgaagatga

SEQ ID NO: 776303 - DNA, 33 bp, Homo sapien
attactgaagaccaaaaggcatcatagcatgat

SEQ ID NO: 776304 - DNA, 33 bp, Homo sapien
attactgaagaccaaacggcatcatagcatgat

SEQ ID NO: 776305 - DNA, 33 bp, Homo sapien
ttttttttccaccagaggtattaaaatgctgca

SEQ ID NO: 776306 - DNA, 33 bp, Homo sapien
ttttttttccaccagatgtattaaaatgctgca

SEQ ID NO: 776307 - DNA, 33 bp, Homo sapien
ccttgaaatggctcagaattgtaaacacctgta

SEQ ID NO: 776308 - DNA, 33 bp, Homo sapien
ccttgaaatggctcagcattgtaaacacctgta

SEQ ID NO: 776309 - DNA, 33 bp, Homo sapien
tctgaaaaggaaaacacggttctgcagttgtga

SEQ ID NO: 776310 - DNA, 33 bp, Homo sapien
tctgaaaaggaaaacatggttctgcagttgtga

SEQ ID NO: 776311 - DNA, 33 bp, Homo sapien
gtcttagcagccagacaatgggtaaaggatagt

SEQ ID NO: 776312 - DNA, 33 bp, Homo sapien
gtcttagcagccagacgatgggtaaaggatagt

SEQ ID NO: 776313 - DNA, 33 bp, Homo sapien
cctgggccacagatatcacacatttcccctcac

SEQ ID NO: 776314 - DNA, 33 bp, Homo sapien
cctgggccacagatattacacatttcccctcac

SEQ ID NO: 776315 - DNA, 33 bp, Homo sapien
ctttagctatatccaaactgtggccttacctga

SEQ ID NO: 776316 - DNA, 33 bp, Homo sapien
ctttagctatatccaagctgtggccttacctga

SEQ ID NO: 776317 - DNA, 33 bp, Homo sapien
acatcactgcctaatacaaatgcactgtggggt

SEQ ID NO: 776318 - DNA, 33 bp, Homo sapien
acatcactgcctaatataaatgcactgtggggt

SEQ ID NO: 776319 - DNA, 33 bp, Homo sapien
gtgtttacctgcctacaatccattctccccaca

SEQ ID NO: 776320 - DNA, 33 bp, Homo sapien
gtgtttacctgcctacgatccattctccccaca

SEQ ID NO: 776321 - DNA, 33 bp, Homo sapien
tactaccgtgaccacaatctttcttaaagagac

SEQ ID NO: 776322 - DNA, 33 bp, Homo sapien
tactaccgtgaccacagtctttcttaaagagac

SEQ ID NO: 776323 - DNA, 33 bp, Homo sapien
tccttgttttagtttacgctgctttgagtatct

SEQ ID NO: 776324 - DNA, 33 bp, Homo sapien
tccttgttttagtttatgctgctttgagtatct

SEQ ID NO: 776325 - DNA, 33 bp, Homo sapien
tgcatattgaaacttaactcgcattatacactt

SEQ ID NO: 776326 - DNA, 33 bp, Homo sapien
tgcatattgaaacttagctcgcattatacactt

SEQ ID NO: 776327 - DNA, 33 bp, Homo sapien
ataattttactagtgccaagttactaccagcat

SEQ ID NO: 776328 - DNA, 33 bp, Homo sapien
ataattttactagtgctaagttactaccagcat

SEQ ID NO: 776329 - DNA, 33 bp, Homo sapien
acaataaggtgacacacggtgaaacacagtggt

SEQ ID NO: 776330 - DNA, 33 bp, Homo sapien
acaataaggtgacacatggtgaaacacagtggt

SEQ ID NO: 776331 - DNA, 33 bp, Homo sapien
ctttctgtaaaatgtggatctgaagctacgtcc

SEQ ID NO: 776332 - DNA, 33 bp, Homo sapien
ctttctgtaaaatgtgtatctgaagctacgtcc

SEQ ID NO: 776333 - DNA, 33 bp, Homo sapien
tcagctccctagagacaggattaatgatgatat

SEQ ID NO: 776334 - DNA, 33 bp, Homo sapien
tcagctccctagagacgggattaatgatgatat

SEQ ID NO: 776335 - DNA, 33 bp, Homo sapien
agcctttggttttggtaacatctgagaaggagt

SEQ ID NO: 776336 - DNA, 33 bp, Homo sapien
agcctttggttttggtcacatctgagaaggagt

SEQ ID NO: 776337 - DNA, 33 bp, Homo sapien
gacgatcttgtgaagacaattaagcataatcac

SEQ ID NO: 776338 - DNA, 33 bp, Homo sapien
gacgatcttgtgaagataattaagcataatcac

SEQ ID NO: 776339 - DNA, 33 bp, Homo sapien
atggccaaaaattcaacgttccttcaatgagag

SEQ ID NO: 776340 - DNA, 33 bp, Homo sapien
atggccaaaaattcaatgttccttcaatgagag

SEQ ID NO: 776341 - DNA, 33 bp, Homo sapien
gggggtgtcatgctctaaataatctgtagctgt

SEQ ID NO: 776342 - DNA, 33 bp, Homo sapien
gggggtgtcatgctctgaataatctgtagctgt

SEQ ID NO: 776343 - DNA, 33 bp, Homo sapien
gacccagcctctgggacgacatgaaataggagg

SEQ ID NO: 776344 - DNA, 33 bp, Homo sapien
gacccagcctctgggatgacatgaaataggagg

SEQ ID NO: 776345 - DNA, 33 bp, Homo sapien
aaaaaaaaagataatgaagagctgtaacaaaga

SEQ ID NO: 776346 - DNA, 33 bp, Homo sapien
aaaaaaaaagataatgcagagctgtaacaaaga

SEQ ID NO: 776347 - DNA, 33 bp, Homo sapien
gatcctgagcagagtacagcttgtcctgtgcct

SEQ ID NO: 776348 - DNA, 33 bp, Homo sapien
gatcctgagcagagtatagcttgtcctgtgcct

SEQ ID NO: 776349 - DNA, 33 bp, Homo sapien
gcttttctatgggaaccgagcagggcaaaggtg

SEQ ID NO: 776350 - DNA, 33 bp, Homo sapien
gcttttctatgggaactgagcagggcaaaggtg

SEQ ID NO: 776351 - DNA, 33 bp, Homo sapien
aggaagaataggcaacaagtagtggcatagaag

SEQ ID NO: 776352 - DNA, 33 bp, Homo sapien
aggaagaataggcaacgagtagtggcatagaag

SEQ ID NO: 776353 - DNA, 33 bp, Homo sapien
aaagcttaacaataagcctcaaaaggataaaac

SEQ ID NO: 776354 - DNA, 33 bp, Homo sapien
aaagcttaacaataaggctcaaaaggataaaac

SEQ ID NO: 776355 - DNA, 33 bp, Homo sapien
aatgatagacacggaagaaaggcaaaggagatc

SEQ ID NO: 776356 - DNA, 33 bp, Homo sapien
aatgatagacacggaataaaggcaaaggagatc

SEQ ID NO: 776357 - DNA, 33 bp, Homo sapien
gttagctgagatgaagaaatgattcaacaatca

SEQ ID NO: 776358 - DNA, 33 bp, Homo sapien
gttagctgagatgaagtaatgattcaacaatca

SEQ ID NO: 776359 - DNA, 33 bp, Homo sapien
tcaggacttggctgatgaactctcaccatcttg

SEQ ID NO: 776360 - DNA, 33 bp, Homo sapien
tcaggacttggctgattaactctcaccatcttg

SEQ ID NO: 776361 - DNA, 33 bp, Homo sapien
cacaaagaaatgatgcacactggatgtagaata

SEQ ID NO: 776362 - DNA, 33 bp, Homo sapien
cacaaagaaatgatgcgcactggatgtagaata

SEQ ID NO: 776363 - DNA, 33 bp, Homo sapien
caagcacaaggaaaaacgccatctataagccaa

SEQ ID NO: 776364 - DNA, 33 bp, Homo sapien
caagcacaaggaaaaatgccatctataagccaa

SEQ ID NO: 776365 - DNA, 33 bp, Homo sapien
tttagcataaccccacagtagaatcaataacgg

SEQ ID NO: 776366 - DNA, 33 bp, Homo sapien
tttagcataaccccacggtagaatcaataacgg

SEQ ID NO: 776367 - DNA, 33 bp, Homo sapien
ttgcaatagaggtgtgcatacagagaacttttt

SEQ ID NO: 776368 - DNA, 33 bp, Homo sapien
ttgcaatagaggtgtgtatacagagaacttttt

SEQ ID NO: 776369 - DNA, 33 bp, Homo sapien
cctttaagaagagagcacttaaaagagtaaggt

SEQ ID NO: 776370 - DNA, 33 bp, Homo sapien
cctttaagaagagagcgcttaaaagagtaaggt

SEQ ID NO: 776371 - DNA, 33 bp, Homo sapien
ccattgatggctctcaataaaaccagaaatact

SEQ ID NO: 776372 - DNA, 33 bp, Homo sapien
ccattgatggctctcagtaaaaccagaaatact

SEQ ID NO: 776373 - DNA, 33 bp, Homo sapien
ccttcttcccaaatcccaaaattaaattctcct

SEQ ID NO: 776374 - DNA, 33 bp, Homo sapien
ccttcttcccaaatcctaaaattaaattctcct

SEQ ID NO: 776375 - DNA, 33 bp, Homo sapien
ggatattgagctgacactgagtgacctcacact

SEQ ID NO: 776376 - DNA, 33 bp, Homo sapien
ggatattgagctgacattgagtgacctcacact

SEQ ID NO: 776377 - DNA, 33 bp, Homo sapien
atgaatatacaccatacacaaaagaacttaatg

SEQ ID NO: 776378 - DNA, 33 bp, Homo sapien
atgaatatacaccatatacaaaagaacttaatg

SEQ ID NO: 776379 - DNA, 33 bp, Homo sapien
aatgatgatgatgcaaccctttcagcttaggtc

SEQ ID NO: 776380 - DNA, 33 bp, Homo sapien
aatgatgatgatgcaatcctttcagcttaggtc

SEQ ID NO: 776381 - DNA, 33 bp, Homo sapien
tgtatgtatgtacttaaatcagctgcataaaac

SEQ ID NO: 776382 - DNA, 33 bp, Homo sapien
tgtatgtatgtacttagatcagctgcataaaac

SEQ ID NO: 776383 - DNA, 33 bp, Homo sapien
taccaaggattaagcactcaataaaaggtcatt

SEQ ID NO: 776384 - DNA, 33 bp, Homo sapien
taccaaggattaagcattcaataaaaggtcatt

SEQ ID NO: 776385 - DNA, 33 bp, Homo sapien
tgcaggctgtgcatacacaccaggaagaaggct

SEQ ID NO: 776386 - DNA, 33 bp, Homo sapien
tgcaggctgtgcatacccaccaggaagaaggct

SEQ ID NO: 776387 - DNA, 33 bp, Homo sapien
taccagagagcttttacgccccagattatgatt

SEQ ID NO: 776388 - DNA, 33 bp, Homo sapien
taccagagagcttttatgccccagattatgatt

SEQ ID NO: 776389 - DNA, 33 bp, Homo sapien
gaattggagttggagtaaaagacaataaacaga

SEQ ID NO: 776390 - DNA, 33 bp, Homo sapien
gaattggagttggagtgaaagacaataaacaga

SEQ ID NO: 776391 - DNA, 33 bp, Homo sapien
agaacaagtctggaacaacgggactcaggacaa

SEQ ID NO: 776392 - DNA, 33 bp, Homo sapien
agaacaagtctggaaccacgggactcaggacaa

SEQ ID NO: 776393 - DNA, 33 bp, Homo sapien
ttgaaatagagcaaaaggaacagaggaaatgaa

SEQ ID NO: 776394 - DNA, 33 bp, Homo sapien
ttgaaatagagcaaaatgaacagaggaaatgaa

SEQ ID NO: 776395 - DNA, 33 bp, Homo sapien
cctaggacagttctcaaaacacacgaggtattt

SEQ ID NO: 776396 - DNA, 33 bp, Homo sapien
cctaggacagttctcacaacacacgaggtattt

SEQ ID NO: 776397 - DNA, 33 bp, Homo sapien
atgcttgctcactgagaaactgagagaccagct

SEQ ID NO: 776398 - DNA, 33 bp, Homo sapien
atgcttgctcactgaggaactgagagaccagct

SEQ ID NO: 776399 - DNA, 33 bp, Homo sapien
tcctttgagaaaaagaatagccggatctaaata

SEQ ID NO: 776400 - DNA, 33 bp, Homo sapien
tcctttgagaaaaagagtagccggatctaaata

SEQ ID NO: 776401 - DNA, 33 bp, Homo sapien
acaggtgtcctgaaccaaaaggaaatgccagac

SEQ ID NO: 776402 - DNA, 33 bp, Homo sapien
acaggtgtcctgaaccgaaaggaaatgccagac

SEQ ID NO: 776403 - DNA, 33 bp, Homo sapien
ggaagaggacagtagggccccagaagtgagtca

SEQ ID NO: 776404 - DNA, 33 bp, Homo sapien
ggaagaggacagtaggtccccagaagtgagtca

SEQ ID NO: 776405 - DNA, 33 bp, Homo sapien
ggtttggaggtgaacacgtgacccaatcaaatg

SEQ ID NO: 776406 - DNA, 33 bp, Homo sapien
ggtttggaggtgaacatgtgacccaatcaaatg

SEQ ID NO: 776407 - DNA, 33 bp, Homo sapien
agtattattagtaggtaaagtcatactgtcacc

SEQ ID NO: 776408 - DNA, 33 bp, Homo sapien
agtattattagtaggtgaagtcatactgtcacc

SEQ ID NO: 776409 - DNA, 33 bp, Homo sapien
agaatggagaggaggcagaatcaccaggcacca

SEQ ID NO: 776410 - DNA, 33 bp, Homo sapien
agaatggagaggaggcggaatcaccaggcacca

SEQ ID NO: 776411 - DNA, 33 bp, Homo sapien
caaaatgcttaaaagaaatcacctggcactcat

SEQ ID NO: 776412 - DNA, 33 bp, Homo sapien
caaaatgcttaaaagatatcacctggcactcat

SEQ ID NO: 776413 - DNA, 33 bp, Homo sapien
aaggaaatgggatacaatcaaccatgactaaag

SEQ ID NO: 776414 - DNA, 33 bp, Homo sapien
aaggaaatgggatacattcaaccatgactaaag

SEQ ID NO: 776415 - DNA, 33 bp, Homo sapien
aaaaagaattcgagtgaaaagctaggagtttct

SEQ ID NO: 776416 - DNA, 33 bp, Homo sapien
aaaaagaattcgagtggaaagctaggagtttct

SEQ ID NO: 776417 - DNA, 33 bp, Homo sapien
ctcctgatgtctcacaactgagtccctcttaga

SEQ ID NO: 776418 - DNA, 33 bp, Homo sapien
ctcctgatgtctcacagctgagtccctcttaga

SEQ ID NO: 776419 - DNA, 33 bp, Homo sapien
tctgttttcaagaaccccccagtccagtgaaga

SEQ ID NO: 776420 - DNA, 33 bp, Homo sapien
tctgttttcaagaacctcccagtccagtgaaga

SEQ ID NO: 776421 - DNA, 33 bp, Homo sapien
atatcagggtcttttaggtggacagcaaaatcg

SEQ ID NO: 776422 - DNA, 33 bp, Homo sapien
atatcagggtcttttatgtggacagcaaaatcg

SEQ ID NO: 776423 - DNA, 33 bp, Homo sapien
ggtcttaacgaaagcagagttctggccgtgagt

SEQ ID NO: 776424 - DNA, 33 bp, Homo sapien
ggtcttaacgaaagcatagttctggccgtgagt

SEQ ID NO: 776425 - DNA, 33 bp, Homo sapien
atagcaacccttctacccaagatggactcctct

SEQ ID NO: 776426 - DNA, 33 bp, Homo sapien
atagcaacccttctactcaagatggactcctct

SEQ ID NO: 776427 - DNA, 33 bp, Homo sapien
taaactcccgttagaaagagtagaatgactggg

SEQ ID NO: 776428 - DNA, 33 bp, Homo sapien
taaactcccgttagaaggagtagaatgactggg

SEQ ID NO: 776429 - DNA, 33 bp, Homo sapien
tcaaaatatcacttaaactcatcaacttggaga

SEQ ID NO: 776430 - DNA, 33 bp, Homo sapien
tcaaaatatcacttaagctcatcaacttggaga

SEQ ID NO: 776431 - DNA, 33 bp, Homo sapien
acccattcttttccacagtcaatgaaatcccac

SEQ ID NO: 776432 - DNA, 33 bp, Homo sapien
acccattcttttccaccgtcaatgaaatcccac

SEQ ID NO: 776433 - DNA, 33 bp, Homo sapien
aagatgtaaagggaagcattcaccccagctctt

SEQ ID NO: 776434 - DNA, 33 bp, Homo sapien
aagatgtaaagggaagtattcaccccagctctt

SEQ ID NO: 776435 - DNA, 33 bp, Homo sapien
actacaaaccaccacaatgaggattctgtggtc

SEQ ID NO: 776436 - DNA, 33 bp, Homo sapien
actacaaaccaccacagtgaggattctgtggtc

SEQ ID NO: 776437 - DNA, 33 bp, Homo sapien
tttaggttttctcataaaatgaaatgctctgta

SEQ ID NO: 776438 - DNA, 33 bp, Homo sapien
tttaggttttctcatacaatgaaatgctctgta

SEQ ID NO: 776439 - DNA, 33 bp, Homo sapien
tatactttaagagtccaaaagtcaaccaactgc

SEQ ID NO: 776440 - DNA, 33 bp, Homo sapien
tatactttaagagtccgaaagtcaaccaactgc

SEQ ID NO: 776441 - DNA, 33 bp, Homo sapien
tacttattctaaaagagaggctttcaaatgctt

SEQ ID NO: 776442 - DNA, 33 bp, Homo sapien
tacttattctaaaagataggctttcaaatgctt

SEQ ID NO: 776443 - DNA, 33 bp, Homo sapien
tttcagttgctcttggaaactgctttggaagca

SEQ ID NO: 776444 - DNA, 33 bp, Homo sapien
tttcagttgctcttgggaactgctttggaagca

SEQ ID NO: 776445 - DNA, 33 bp, Homo sapien
aatatgctagtcacaaaaaaggacacatgctgc

SEQ ID NO: 776446 - DNA, 33 bp, Homo sapien
aatatgctagtcacaagaaaggacacatgctgc

SEQ ID NO: 776447 - DNA, 33 bp, Homo sapien
tccttttgtgttttgaaccttgttgtaatagca

SEQ ID NO: 776448 - DNA, 33 bp, Homo sapien
tccttttgtgttttgacccttgttgtaatagca

SEQ ID NO: 776449 - DNA, 33 bp, Homo sapien
gtattggtgattcaaacagcaaagccacattac

SEQ ID NO: 776450 - DNA, 33 bp, Homo sapien
gtattggtgattcaaatagcaaagccacattac

SEQ ID NO: 776451 - DNA, 33 bp, Homo sapien
cagacactgtctaactcactttggagcctgagg

SEQ ID NO: 776452 - DNA, 33 bp, Homo sapien
cagacactgtctaacttactttggagcctgagg

SEQ ID NO: 776453 - DNA, 33 bp, Homo sapien
agctcctgtcactccacgtggctttgtctctgg

SEQ ID NO: 776454 - DNA, 33 bp, Homo sapien
agctcctgtcactccatgtggctttgtctctgg

SEQ ID NO: 776455 - DNA, 33 bp, Homo sapien
ttctgcacactcttagaacaaatgatgccaaac

SEQ ID NO: 776456 - DNA, 33 bp, Homo sapien
ttctgcacactcttagcacaaatgatgccaaac

SEQ ID NO: 776457 - DNA, 33 bp, Homo sapien
catttggaagggacaggctacacatttctatga

SEQ ID NO: 776458 - DNA, 33 bp, Homo sapien
catttggaagggacagtctacacatttctatga

SEQ ID NO: 776459 - DNA, 33 bp, Homo sapien
cttactactgcatagaaccccaaaaggacccag

SEQ ID NO: 776460 - DNA, 33 bp, Homo sapien
cttactactgcatagacccccaaaaggacccag

SEQ ID NO: 776461 - DNA, 33 bp, Homo sapien
ctggtcataggtttcccatcctgaagcaaaaga

SEQ ID NO: 776462 - DNA, 33 bp, Homo sapien
ctggtcataggtttccgatcctgaagcaaaaga

SEQ ID NO: 776463 - DNA, 33 bp, Homo sapien
ctgttcttggtaatgacgatacacagtaaacaa

SEQ ID NO: 776464 - DNA, 33 bp, Homo sapien
ctgttcttggtaatgatgatacacagtaaacaa

SEQ ID NO: 776465 - DNA, 33 bp, Homo sapien
tttaaaacatcactctcactagcttgtggagaa

SEQ ID NO: 776466 - DNA, 33 bp, Homo sapien
tttaaaacatcactctgactagcttgtggagaa

SEQ ID NO: 776467 - DNA, 33 bp, Homo sapien
gtccaaactgcctatcactctcctagatgcatg

SEQ ID NO: 776468 - DNA, 33 bp, Homo sapien
gtccaaactgcctatcgctctcctagatgcatg

SEQ ID NO: 776469 - DNA, 33 bp, Homo sapien
ccatgtccatgtaagacagcaaacttagtctat

SEQ ID NO: 776470 - DNA, 33 bp, Homo sapien
ccatgtccatgtaagatagcaaacttagtctat

SEQ ID NO: 776471 - DNA, 33 bp, Homo sapien
cctgcagatttcaaaactgattatctgtgctgc

SEQ ID NO: 776472 - DNA, 33 bp, Homo sapien
cctgcagatttcaaaattgattatctgtgctgc

SEQ ID NO: 776473 - DNA, 33 bp, Homo sapien
cacttgtagaaagagaacacctgaacttccttt

SEQ ID NO: 776474 - DNA, 33 bp, Homo sapien
cacttgtagaaagagaccacctgaacttccttt

SEQ ID NO: 776475 - DNA, 33 bp, Homo sapien
ggaactactgctgcagcactttaatgagatccc

SEQ ID NO: 776476 - DNA, 33 bp, Homo sapien
ggaactactgctgcagtactttaatgagatccc

SEQ ID NO: 776477 - DNA, 33 bp, Homo sapien
caacgatattttctgacggcaatgtctaattat

SEQ ID NO: 776478 - DNA, 33 bp, Homo sapien
caacgatattttctgatggcaatgtctaattat

SEQ ID NO: 776479 - DNA, 33 bp, Homo sapien
ttgctgtgtccttaacaggttgcaagatcccct

SEQ ID NO: 776480 - DNA, 33 bp, Homo sapien
ttgctgtgtccttaacgggttgcaagatcccct

SEQ ID NO: 776481 - DNA, 33 bp, Homo sapien
tacataagcaataacaagaaggataggttacag

SEQ ID NO: 776482 - DNA, 33 bp, Homo sapien
tacataagcaataacaggaaggataggttacag

SEQ ID NO: 776483 - DNA, 33 bp, Homo sapien
tggacaatggaaacataaagacatggatacata

SEQ ID NO: 776484 - DNA, 33 bp, Homo sapien
tggacaatggaaacatgaagacatggatacata

SEQ ID NO: 776485 - DNA, 33 bp, Homo sapien
ttaattaactctgatgccatagggcttgggacc

SEQ ID NO: 776486 - DNA, 33 bp, Homo sapien
ttaattaactctgatgtcatagggcttgggacc

SEQ ID NO: 776487 - DNA, 33 bp, Homo sapien
cttaggacctacctaaaatcaaagtctaatgtt

SEQ ID NO: 776488 - DNA, 33 bp, Homo sapien
cttaggacctacctaagatcaaagtctaatgtt

SEQ ID NO: 776489 - DNA, 33 bp, Homo sapien
tgaggaccgggacaacagcatcttaccagtcac

SEQ ID NO: 776490 - DNA, 33 bp, Homo sapien
tgaggaccgggacaacggcatcttaccagtcac

SEQ ID NO: 776491 - DNA, 33 bp, Homo sapien
aaatttctgtggtttagaggccacctagttttt

SEQ ID NO: 776492 - DNA, 33 bp, Homo sapien
aaatttctgtggtttataggccacctagttttt

SEQ ID NO: 776493 - DNA, 33 bp, Homo sapien
acttgaatgttcggcaactttctgctgtgacca

SEQ ID NO: 776494 - DNA, 33 bp, Homo sapien
acttgaatgttcggcagctttctgctgtgacca

SEQ ID NO: 776495 - DNA, 33 bp, Homo sapien
acggccgatgtcccgcccatattccttttagga

SEQ ID NO: 776496 - DNA, 33 bp, Homo sapien
acggccgatgtcccgcgcatattccttttagga

SEQ ID NO: 776497 - DNA, 33 bp, Homo sapien
tctaaagaggagcaaactgaggctgcagagaga

SEQ ID NO: 776498 - DNA, 33 bp, Homo sapien
tctaaagaggagcaaattgaggctgcagagaga

SEQ ID NO: 776499 - DNA, 33 bp, Homo sapien
tctgccaactgtgaaacagaagaccaaaatagt

SEQ ID NO: 776500 - DNA, 33 bp, Homo sapien
tctgccaactgtgaaatagaagaccaaaatagt

SEQ ID NO: 776501 - DNA, 33 bp, Homo sapien
ccctcaccctcttgaacctactgcagtggtcac

SEQ ID NO: 776502 - DNA, 33 bp, Homo sapien
ccctcaccctcttgaatctactgcagtggtcac

SEQ ID NO: 776503 - DNA, 33 bp, Homo sapien
taagtgttctggagtcaaagtgagcaaataaaa

SEQ ID NO: 776504 - DNA, 33 bp, Homo sapien
taagtgttctggagtcgaagtgagcaaataaaa

SEQ ID NO: 776505 - DNA, 33 bp, Homo sapien
ctttcttgcagggttacatgagccaggggcttg

SEQ ID NO: 776506 - DNA, 33 bp, Homo sapien
ctttcttgcagggttatatgagccaggggcttg

SEQ ID NO: 776507 - DNA, 33 bp, Homo sapien
ctttctcctagtccctaaatctcatctgcacca

SEQ ID NO: 776508 - DNA, 33 bp, Homo sapien
ctttctcctagtccctgaatctcatctgcacca

SEQ ID NO: 776509 - DNA, 33 bp, Homo sapien
ctgcggaaataagcacaaatgggctctgttgga

SEQ ID NO: 776510 - DNA, 33 bp, Homo sapien
ctgcggaaataagcacgaatgggctctgttgga

SEQ ID NO: 776511 - DNA, 33 bp, Homo sapien
tgtgaataatggtgtacgtttgtctaatcaaag

SEQ ID NO: 776512 - DNA, 33 bp, Homo sapien
tgtgaataatggtgtatgtttgtctaatcaaag

SEQ ID NO: 776513 - DNA, 33 bp, Homo sapien
ttattataaatccacaccacactttggatcaca

SEQ ID NO: 776514 - DNA, 33 bp, Homo sapien
ttattataaatccacatcacactttggatcaca

SEQ ID NO: 776515 - DNA, 33 bp, Homo sapien
ggaagtggacaggaaaaagaaggattaatgtcc

SEQ ID NO: 776516 - DNA, 33 bp, Homo sapien
ggaagtggacaggaaagagaaggattaatgtcc

SEQ ID NO: 776517 - DNA, 33 bp, Homo sapien
cctcgtcaagaagcaggagactttaatgacacc

SEQ ID NO: 776518 - DNA, 33 bp, Homo sapien
cctcgtcaagaagcagtagactttaatgacacc

SEQ ID NO: 776519 - DNA, 33 bp, Homo sapien
agtttagctgtgtttacgggggtagactgggtg

SEQ ID NO: 776520 - DNA, 33 bp, Homo sapien
agtttagctgtgtttatgggggtagactgggtg

SEQ ID NO: 776521 - DNA, 33 bp, Homo sapien
tggcaacaataagttacaagacatccctgacca

SEQ ID NO: 776522 - DNA, 33 bp, Homo sapien
tggcaacaataagttataagacatccctgacca

SEQ ID NO: 776523 - DNA, 33 bp, Homo sapien
atgttctctttcatcacgtgttttttgaatctt

SEQ ID NO: 776524 - DNA, 33 bp, Homo sapien
atgttctctttcatcatgtgttttttgaatctt

SEQ ID NO: 776525 - DNA, 33 bp, Homo sapien
aatttgtctatataggaaatggtgaaaagtctt

SEQ ID NO: 776526 - DNA, 33 bp, Homo sapien
aatttgtctatataggcaatggtgaaaagtctt

SEQ ID NO: 776527 - DNA, 33 bp, Homo sapien
caaatctgacttattaacaccattatttgtaaa

SEQ ID NO: 776528 - DNA, 33 bp, Homo sapien
caaatctgacttattagcaccattatttgtaaa

SEQ ID NO: 776529 - DNA, 33 bp, Homo sapien
catggccttggtgataacttaattttagacttt

SEQ ID NO: 776530 - DNA, 33 bp, Homo sapien
catggccttggtgataccttaattttagacttt

SEQ ID NO: 776531 - DNA, 33 bp, Homo sapien
ttagaaaaacattatgcaagccattcaggcctt

SEQ ID NO: 776532 - DNA, 33 bp, Homo sapien
ttagaaaaacattatgtaagccattcaggcctt

SEQ ID NO: 776533 - DNA, 33 bp, Homo sapien
tgaatagtctataacaatgtcatccaacagctc

SEQ ID NO: 776534 - DNA, 33 bp, Homo sapien
tgaatagtctataacagtgtcatccaacagctc

SEQ ID NO: 776535 - DNA, 33 bp, Homo sapien
gtgtgtggtctcaagaagagctgatcaaataaa

SEQ ID NO: 776536 - DNA, 33 bp, Homo sapien
gtgtgtggtctcaagacgagctgatcaaataaa

SEQ ID NO: 776537 - DNA, 33 bp, Homo sapien
gaagatattttggagacagatcagcatgacttg

SEQ ID NO: 776538 - DNA, 33 bp, Homo sapien
gaagatattttggagagagatcagcatgacttg

SEQ ID NO: 776539 - DNA, 33 bp, Homo sapien
cctgctttgagcaacacagttctctagaatcac

SEQ ID NO: 776540 - DNA, 33 bp, Homo sapien
cctgctttgagcaacatagttctctagaatcac

SEQ ID NO: 776541 - DNA, 33 bp, Homo sapien
caatgagatggagacacagctcaatattgcagc

SEQ ID NO: 776542 - DNA, 33 bp, Homo sapien
caatgagatggagacatagctcaatattgcagc

SEQ ID NO: 776543 - DNA, 33 bp, Homo sapien
agatgagaaattaggagtagtctcattttttgg

SEQ ID NO: 776544 - DNA, 33 bp, Homo sapien
agatgagaaattaggattagtctcattttttgg

SEQ ID NO: 776545 - DNA, 33 bp, Homo sapien
agtctagccactgatacgacgtggtagcagtct

SEQ ID NO: 776546 - DNA, 33 bp, Homo sapien
agtctagccactgatatgacgtggtagcagtct

SEQ ID NO: 776547 - DNA, 33 bp, Homo sapien
taaggaaagtacattgccaaggtggaataaaat

SEQ ID NO: 776548 - DNA, 33 bp, Homo sapien
taaggaaagtacattggcaaggtggaataaaat

SEQ ID NO: 776549 - DNA, 33 bp, Homo sapien
agaacttataccatcaaaccaatccagtggaca

SEQ ID NO: 776550 - DNA, 33 bp, Homo sapien
agaacttataccatcagaccaatccagtggaca

SEQ ID NO: 776551 - DNA, 33 bp, Homo sapien
agctgggttgaggaaacaagaagtggtgtcctt

SEQ ID NO: 776552 - DNA, 33 bp, Homo sapien
agctgggttgaggaaagaagaagtggtgtcctt

SEQ ID NO: 776553 - DNA, 33 bp, Homo sapien
cacggcttgcctgttcgcctctagcacaaagtc

SEQ ID NO: 776554 - DNA, 33 bp, Homo sapien
cacggcttgcctgttctcctctagcacaaagtc

SEQ ID NO: 776555 - DNA, 33 bp, Homo sapien
tgagactgtgagggaacaaaaaggccatcccac

SEQ ID NO: 776556 - DNA, 33 bp, Homo sapien
tgagactgtgagggaagaaaaaggccatcccac

SEQ ID NO: 776557 - DNA, 33 bp, Homo sapien
acaggtattgtcaatgaagcagattagattccg

SEQ ID NO: 776558 - DNA, 33 bp, Homo sapien
acaggtattgtcaatgcagcagattagattccg

SEQ ID NO: 776559 - DNA, 33 bp, Homo sapien
acattcaaaccacaccaaccataaaactgttag

SEQ ID NO: 776560 - DNA, 33 bp, Homo sapien
acattcaaaccacaccgaccataaaactgttag

SEQ ID NO: 776561 - DNA, 33 bp, Homo sapien
atgtcattattttgacactcaaattatcccaga

SEQ ID NO: 776562 - DNA, 33 bp, Homo sapien
atgtcattattttgacgctcaaattatcccaga

SEQ ID NO: 776563 - DNA, 33 bp, Homo sapien
aggcttgccttcctcacattaaaagaggttttt

SEQ ID NO: 776564 - DNA, 33 bp, Homo sapien
aggcttgccttcctcagattaaaagaggttttt

SEQ ID NO: 776565 - DNA, 33 bp, Homo sapien
gagactgctaccacgcaccataatgcctggcta

SEQ ID NO: 776566 - DNA, 33 bp, Homo sapien
gagactgctaccacgcgccataatgcctggcta

SEQ ID NO: 776567 - DNA, 33 bp, Homo sapien
ctgcccaaagaagtgacgatgtgagatgattat

SEQ ID NO: 776568 - DNA, 33 bp, Homo sapien
ctgcccaaagaagtgatgatgtgagatgattat

SEQ ID NO: 776569 - DNA, 33 bp, Homo sapien
acttctgtttcagagaccaagaacattttttaa

SEQ ID NO: 776570 - DNA, 33 bp, Homo sapien
acttctgtttcagagagcaagaacattttttaa

SEQ ID NO: 776571 - DNA, 33 bp, Homo sapien
atacttgaatcacttacgatgaataggagtgct

SEQ ID NO: 776572 - DNA, 33 bp, Homo sapien
atacttgaatcacttaggatgaataggagtgct

SEQ ID NO: 776573 - DNA, 33 bp, Homo sapien
aggcttctagttttccgcaagacttgaaacaac

SEQ ID NO: 776574 - DNA, 33 bp, Homo sapien
aggcttctagttttcctcaagacttgaaacaac

SEQ ID NO: 776575 - DNA, 33 bp, Homo sapien
cactccatccagcagaactccaagcaccagttt

SEQ ID NO: 776576 - DNA, 33 bp, Homo sapien
cactccatccagcagagctccaagcaccagttt

SEQ ID NO: 776577 - DNA, 33 bp, Homo sapien
cacagttcaacagtcaatcgttaaatacatgat

SEQ ID NO: 776578 - DNA, 33 bp, Homo sapien
cacagttcaacagtcagtcgttaaatacatgat

SEQ ID NO: 776579 - DNA, 33 bp, Homo sapien
tctgctgtatttggaacgcttagagatatacag

SEQ ID NO: 776580 - DNA, 33 bp, Homo sapien
tctgctgtatttggaatgcttagagatatacag

SEQ ID NO: 776581 - DNA, 33 bp, Homo sapien
caagactgttggatcaaatagtatgtttacttt

SEQ ID NO: 776582 - DNA, 33 bp, Homo sapien
caagactgttggatcatatagtatgtttacttt

SEQ ID NO: 776583 - DNA, 33 bp, Homo sapien
aaaaagactattggaacgtaaactttcttctca

SEQ ID NO: 776584 - DNA, 33 bp, Homo sapien
aaaaagactattggaatgtaaactttcttctca

SEQ ID NO: 776585 - DNA, 33 bp, Homo sapien
gatgtgtgaggtgatacaatttgtctgaaaagt

SEQ ID NO: 776586 - DNA, 33 bp, Homo sapien
gatgtgtgaggtgatataatttgtctgaaaagt

SEQ ID NO: 776587 - DNA, 33 bp, Homo sapien
acctatttagaattcaaatcaggttcgtgattg

SEQ ID NO: 776588 - DNA, 33 bp, Homo sapien
acctatttagaattcagatcaggttcgtgattg

SEQ ID NO: 776589 - DNA, 33 bp, Homo sapien
acctccacgctgaaaaagaaaaaataaagcagt

SEQ ID NO: 776590 - DNA, 33 bp, Homo sapien
acctccacgctgaaaaggaaaaaataaagcagt

SEQ ID NO: 776591 - DNA, 33 bp, Homo sapien
atacagaagcatactcaaagccaattctatttc

SEQ ID NO: 776592 - DNA, 33 bp, Homo sapien
atacagaagcatactcgaagccaattctatttc

SEQ ID NO: 776593 - DNA, 33 bp, Homo sapien
acggcagcagctgtaggaaagattgccctcaga

SEQ ID NO: 776594 - DNA, 33 bp, Homo sapien
acggcagcagctgtagtaaagattgccctcaga

SEQ ID NO: 776595 - DNA, 33 bp, Homo sapien
ggtatgacttgcctcaagagagatggtgtcttt

SEQ ID NO: 776596 - DNA, 33 bp, Homo sapien
ggtatgacttgcctcaggagagatggtgtcttt

SEQ ID NO: 776597 - DNA, 33 bp, Homo sapien
tctgtagtctagtgtaataactggctcatagta

SEQ ID NO: 776598 - DNA, 33 bp, Homo sapien
tctgtagtctagtgtagtaactggctcatagta

SEQ ID NO: 776599 - DNA, 33 bp, Homo sapien
aacaaatactgctggaacacttcgacatacatg

SEQ ID NO: 776600 - DNA, 33 bp, Homo sapien
aacaaatactgctggagcacttcgacatacatg

SEQ ID NO: 776601 - DNA, 33 bp, Homo sapien
gtatttgttgaaatgacggtctcttcattgatt

SEQ ID NO: 776602 - DNA, 33 bp, Homo sapien
gtatttgttgaaatgatggtctcttcattgatt

SEQ ID NO: 776603 - DNA, 33 bp, Homo sapien
taaacatacctaaaacagcacagtctctctact

SEQ ID NO: 776604 - DNA, 33 bp, Homo sapien
taaacatacctaaaacggcacagtctctctact

SEQ ID NO: 776605 - DNA, 33 bp, Homo sapien
taaattttaggaggtcacttaaatcaaatattt

SEQ ID NO: 776606 - DNA, 33 bp, Homo sapien
taaattttaggaggtcgcttaaatcaaatattt

SEQ ID NO: 776607 - DNA, 33 bp, Homo sapien
actgtgtgctcctggactcacttgtcctagaga

SEQ ID NO: 776608 - DNA, 33 bp, Homo sapien
actgtgtgctcctggattcacttgtcctagaga

SEQ ID NO: 776609 - DNA, 33 bp, Homo sapien
aagattgttctttctacgttcagttgtcttggc

SEQ ID NO: 776610 - DNA, 33 bp, Homo sapien
aagattgttctttctatgttcagttgtcttggc

SEQ ID NO: 776611 - DNA, 33 bp, Homo sapien
tcttgacggtttctccgacacatccctacagta

SEQ ID NO: 776612 - DNA, 33 bp, Homo sapien
tcttgacggtttctcctacacatccctacagta

SEQ ID NO: 776613 - DNA, 33 bp, Homo sapien
attgctagattagtgtcaagtttctctggaaag

SEQ ID NO: 776614 - DNA, 33 bp, Homo sapien
attgctagattagtgtgaagtttctctggaaag

SEQ ID NO: 776615 - DNA, 33 bp, Homo sapien
tcatttatctggaacaaaaagagttcaaatagt

SEQ ID NO: 776616 - DNA, 33 bp, Homo sapien
tcatttatctggaacacaaagagttcaaatagt

SEQ ID NO: 776617 - DNA, 33 bp, Homo sapien
ccatgatgtttccacaaaatatcaacaacagcc

SEQ ID NO: 776618 - DNA, 33 bp, Homo sapien
ccatgatgtttccacacaatatcaacaacagcc

SEQ ID NO: 776619 - DNA, 33 bp, Homo sapien
acccaccttaagtgaccgcttttgcacaatctc

SEQ ID NO: 776620 - DNA, 33 bp, Homo sapien
acccaccttaagtgactgcttttgcacaatctc

SEQ ID NO: 776621 - DNA, 33 bp, Homo sapien
cattatagcatggaataagatacacatgaataa

SEQ ID NO: 776622 - DNA, 33 bp, Homo sapien
cattatagcatggaatgagatacacatgaataa

SEQ ID NO: 776623 - DNA, 33 bp, Homo sapien
aataacattgttttcaatacgattaagcaagta

SEQ ID NO: 776624 - DNA, 33 bp, Homo sapien
aataacattgttttcagtacgattaagcaagta

SEQ ID NO: 776625 - DNA, 33 bp, Homo sapien
accccatgcaagaaatgacaaattcactgaagc

SEQ ID NO: 776626 - DNA, 33 bp, Homo sapien
accccatgcaagaaattacaaattcactgaagc

SEQ ID NO: 776627 - DNA, 33 bp, Homo sapien; identical to SEQ ID NO: 776625

SEQ ID NO: 776628 - DNA, 33 bp, Homo sapien; identical to SEQ ID NO: 776626

SEQ ID NO: 776629 - DNA, 33 bp, Homo sapien; identical to SEQ ID NO: 776625

SEQ ID NO: 776630 - DNA, 33 bp, Homo sapien; identical to SEQ ID NO: 776626

SEQ ID NO: 776631 - DNA, 33 bp, Homo sapien
tgacagttttgaaagagatcagcaatttgttga

SEQ ID NO: 776632 - DNA, 33 bp, Homo sapien
tgacagttttgaaagatatcagcaatttgttga

SEQ ID NO: 776633 - DNA, 33 bp, Homo sapien
aaatgcattcaataaaatataagagtaacagta

SEQ ID NO: 776634 - DNA, 33 bp, Homo sapien
aaatgcattcaataaagtataagagtaacagta

SEQ ID NO: 776635 - DNA, 33 bp, Homo sapien
tatttgcaactttttaccattgatgaccagagt

SEQ ID NO: 776636 - DNA, 33 bp, Homo sapien
tatttgcaactttttatcattgatgaccagagt

SEQ ID NO: 776637 - DNA, 33 bp, Homo sapien
actggaatggagtgtgaaaaaaaaaaatcatag

SEQ ID NO: 776638 - DNA, 33 bp, Homo sapien
actggaatggagtgtggaaaaaaaaaatcatag

SEQ ID NO: 776639 - DNA, 33 bp, Homo sapien
taccacaatatcaacacgattagctacaccaaa

SEQ ID NO: 776640 - DNA, 33 bp, Homo sapien
taccacaatatcaacatgattagctacaccaaa

SEQ ID NO: 776641 - DNA, 33 bp, Homo sapien
ttgtatcactggttcaaacattggcccaatacc

SEQ ID NO: 776642 - DNA, 33 bp, Homo sapien
ttgtatcactggttcacacattggcccaatacc

SEQ ID NO: 776643 - DNA, 33 bp, Homo sapien
cctcccaaatccagaacgtcttgtttactgcta

SEQ ID NO: 776644 - DNA, 33 bp, Homo sapien
cctcccaaatccagaatgtcttgtttactgcta

SEQ ID NO: 776645 - DNA, 33 bp, Homo sapien
atatttcagaggtttgaagttttgcatatttga

SEQ ID NO: 776646 - DNA, 33 bp, Homo sapien
atatttcagaggtttggagttttgcatatttga

SEQ ID NO: 776647 - DNA, 33 bp, Homo sapien
attttgaggtttagcacggcaatcatatcaaag

SEQ ID NO: 776648 - DNA, 33 bp, Homo sapien
attttgaggtttagcatggcaatcatatcaaag

SEQ ID NO: 776649 - DNA, 33 bp, Homo sapien
cttctatagataaatacgctgttaaaaatctgt

SEQ ID NO: 776650 - DNA, 33 bp, Homo sapien
cttctatagataaatatgctgttaaaaatctgt

SEQ ID NO: 776651 - DNA, 33 bp, Homo sapien
tatatcctgctgtttgaatttttcctcaaaact

SEQ ID NO: 776652 - DNA, 33 bp, Homo sapien
tatatcctgctgtttgtatttttcctcaaaact

SEQ ID NO: 776653 - DNA, 33 bp, Homo sapien
tcattttaccacttcaatcactaaagccagtaa

SEQ ID NO: 776654 - DNA, 33 bp, Homo sapien
tcattttaccacttcagtcactaaagccagtaa

SEQ ID NO: 776655 - DNA, 33 bp, Homo sapien
aaatgtattcaatgtccatttagtcgtaagatt

SEQ ID NO: 776656 - DNA, 33 bp, Homo sapien
aaatgtattcaatgtctatttagtcgtaagatt

SEQ ID NO: 776657 - DNA, 33 bp, Homo sapien
gaatatgcctgtgtaaccactaccccaaacaat

SEQ ID NO: 776658 - DNA, 33 bp, Homo sapien
gaatatgcctgtgtaatcactaccccaaacaat

SEQ ID NO: 776659 - DNA, 33 bp, Homo sapien
tcttcaaaatctttacacgattgatcttccatg

SEQ ID NO: 776660 - DNA, 33 bp, Homo sapien
tcttcaaaatctttacgcgattgatcttccatg

SEQ ID NO: 776661 - DNA, 33 bp, Homo sapien
ggctcatctggctgcacattttgaaaagaatca

SEQ ID NO: 776662 - DNA, 33 bp, Homo sapien
ggctcatctggctgcatattttgaaaagaatca

SEQ ID NO: 776663 - DNA, 33 bp, Homo sapien
gagggtaccaagccagactgatggaattactgg

SEQ ID NO: 776664 - DNA, 33 bp, Homo sapien
gagggtaccaagccaggctgatggaattactgg

SEQ ID NO: 776665 - DNA, 33 bp, Homo sapien
ttttagagatttttaaatgttgttggacttaag

SEQ ID NO: 776666 - DNA, 33 bp, Homo sapien
ttttagagatttttaagtgttgttggacttaag

SEQ ID NO: 776667 - DNA, 33 bp, Homo sapien
gaagaaatcagaaaccaagaaaatggagactat

SEQ ID NO: 776668 - DNA, 33 bp, Homo sapien
gaagaaatcagaaaccgagaaaatggagactat

SEQ ID NO: 776669 - DNA, 33 bp, Homo sapien
acttatgaggagattacgtcctgataaacccat

SEQ ID NO: 776670 - DNA, 33 bp, Homo sapien
acttatgaggagattatgtcctgataaacccat

SEQ ID NO: 776671 - DNA, 33 bp, Homo sapien
ggttacacatacacaacgggaaaatgccatgtg

SEQ ID NO: 776672 - DNA, 33 bp, Homo sapien
ggttacacatacacaaggggaaaatgccatgtg

SEQ ID NO: 776673 - DNA, 33 bp, Homo sapien
caagaagggagacagggactattggtaagacat

SEQ ID NO: 776674 - DNA, 33 bp, Homo sapien
caagaagggagacaggtactattggtaagacat

SEQ ID NO: 776675 - DNA, 33 bp, Homo sapien
caaaaaaagtgcaaacaagagaaaaacggggaa

SEQ ID NO: 776676 - DNA, 33 bp, Homo sapien
caaaaaaagtgcaaacgagagaaaaacggggaa

SEQ ID NO: 776677 - DNA, 33 bp, Homo sapien
ctgttatcaaggaaaccgctaagactaccttga

SEQ ID NO: 776678 - DNA, 33 bp, Homo sapien
ctgttatcaaggaaactgctaagactaccttga

SEQ ID NO: 776679 - DNA, 33 bp, Homo sapien
aaagaattatcccataaacttcactttgattca

SEQ ID NO: 776680 - DNA, 33 bp, Homo sapien
aaagaattatcccatacacttcactttgattca

SEQ ID NO: 776681 - DNA, 33 bp, Homo sapien
ccctcatgactaaagccgccagtcacatttatc

SEQ ID NO: 776682 - DNA, 33 bp, Homo sapien
ccctcatgactaaagctgccagtcacatttatc

SEQ ID NO: 776683 - DNA, 33 bp, Homo sapien
tcagcatccatacataggtgcattagtagctac

SEQ ID NO: 776684 - DNA, 33 bp, Homo sapien
tcagcatccatacatatgtgcattagtagctac

SEQ ID NO: 776685 - DNA, 33 bp, Homo sapien
tgcttttgtgctgtaactgcagagctgaatagc

SEQ ID NO: 776686 - DNA, 33 bp, Homo sapien
tgcttttgtgctgtaattgcagagctgaatagc

SEQ ID NO: 776687 - DNA, 33 bp, Homo sapien
tgttggaatggattcacagttgtccctgggtat

SEQ ID NO: 776688 - DNA, 33 bp, Homo sapien
tgttggaatggattcagagttgtccctgggtat

SEQ ID NO: 776689 - DNA, 33 bp, Homo sapien
agaacgattaaaacagcctcatgaaaaaaggtc

SEQ ID NO: 776690 - DNA, 33 bp, Homo sapien
agaacgattaaaacaggctcatgaaaaaaggtc

SEQ ID NO: 776691 - DNA, 33 bp, Homo sapien
ctacaagtggcgcctcaaacagcgacagaatta

SEQ ID NO: 776692 - DNA, 33 bp, Homo sapien
ctacaagtggcgcctcgaacagcgacagaatta

SEQ ID NO: 776693 - DNA, 33 bp, Homo sapien
atttgaaaacctatcaaaccagaatgtgatgtg

SEQ ID NO: 776694 - DNA, 33 bp, Homo sapien
atttgaaaacctatcagaccagaatgtgatgtg

SEQ ID NO: 776695 - DNA, 33 bp, Homo sapien
aaagctaccgataggaagtaatgggtgagatga

SEQ ID NO: 776696 - DNA, 33 bp, Homo sapien
aaagctaccgataggatgtaatgggtgagatga

SEQ ID NO: 776697 - DNA, 33 bp, Homo sapien
aatggcaggaattttacagtgtacccaccattt

SEQ ID NO: 776698 - DNA, 33 bp, Homo sapien
aatggcaggaattttatagtgtacccaccattt

SEQ ID NO: 776699 - DNA, 33 bp, Homo sapien
ctggtcattcatcttacatcctttcagtgtcct

SEQ ID NO: 776700 - DNA, 33 bp, Homo sapien
ctggtcattcatcttatatcctttcagtgtcct

SEQ ID NO: 776701 - DNA, 33 bp, Homo sapien
cttcaaagaacctatccaacctgttcaactatt

SEQ ID NO: 776702 - DNA, 33 bp, Homo sapien
cttcaaagaacctatctaacctgttcaactatt

SEQ ID NO: 776703 - DNA, 33 bp, Homo sapien
atctccctgtcagagaaaagactggcctgatag

SEQ ID NO: 776704 - DNA, 33 bp, Homo sapien
atctccctgtcagagagaagactggcctgatag

SEQ ID NO: 776705 - DNA, 33 bp, Homo sapien
ctacaatatagaagaaacatgaagacgttttgc

SEQ ID NO: 776706 - DNA, 33 bp, Homo sapien
ctacaatatagaagaaccatgaagacgttttgc

SEQ ID NO: 776707 - DNA, 33 bp, Homo sapien
cctatacattcaaagcaccgttattcataatac

SEQ ID NO: 776708 - DNA, 33 bp, Homo sapien
cctatacattcaaagcgccgttattcataatac

SEQ ID NO: 776709 - DNA, 33 bp, Homo sapien
tctttcaagctggaaacgtgtgggctcaaatga

SEQ ID NO: 776710 - DNA, 33 bp, Homo sapien
tctttcaagctggaaatgtgtgggctcaaatga

SEQ ID NO: 776711 - DNA, 33 bp, Homo sapien
tggaagaaaaagtacaagtatagtcaggtgagg

SEQ ID NO: 776712 - DNA, 33 bp, Homo sapien
tggaagaaaaagtacaggtatagtcaggtgagg

SEQ ID NO: 776713 - DNA, 33 bp, Homo sapien
aggataaaaatcatcaatgaaatcggtccatca

SEQ ID NO: 776714 - DNA, 33 bp, Homo sapien
aggataaaaatcatcagtgaaatcggtccatca

SEQ ID NO: 776715 - DNA, 33 bp, Homo sapien
caatatattatgttaacggtgtagattctggaa

SEQ ID NO: 776716 - DNA, 33 bp, Homo sapien
caatatattatgttaagggtgtagattctggaa

SEQ ID NO: 776717 - DNA, 33 bp, Homo sapien
acccacactaggccccacttagggatctccagg

SEQ ID NO: 776718 - DNA, 33 bp, Homo sapien
acccacactaggccccgcttagggatctccagg

SEQ ID NO: 776719 - DNA, 33 bp, Homo sapien
cttctagaaagggtcacgatacatgtagagtta

SEQ ID NO: 776720 - DNA, 33 bp, Homo sapien
cttctagaaagggtcatgatacatgtagagtta

SEQ ID NO: 776721 - DNA, 33 bp, Homo sapien
gacaagtatgcttgtacgtttgaaaggtgatta

SEQ ID NO: 776722 - DNA, 33 bp, Homo sapien
gacaagtatgcttgtatgtttgaaaggtgatta

SEQ ID NO: 776723 - DNA, 33 bp, Homo sapien
tcacagagaagttatcacaaggaaaatataccc

SEQ ID NO: 776724 - DNA, 33 bp, Homo sapien
tcacagagaagttatcgcaaggaaaatataccc

SEQ ID NO: 776725 - DNA, 33 bp, Homo sapien
tacacaaagataagaaaacgtggctcctggcct

SEQ ID NO: 776726 - DNA, 33 bp, Homo sapien
tacacaaagataagaagacgtggctcctggcct

SEQ ID NO: 776727 - DNA, 33 bp, Homo sapien
tgtactaattaaaaaaatgtatcctgatcatgg

SEQ ID NO: 776728 - DNA, 33 bp, Homo sapien
tgtactaattaaaaaagtgtatcctgatcatgg

SEQ ID NO: 776729 - DNA, 33 bp, Homo sapien
cctgatgagaaggaaggagaaagtactcatgat

SEQ ID NO: 776730 - DNA, 33 bp, Homo sapien
cctgatgagaaggaagtagaaagtactcatgat

SEQ ID NO: 776731 - DNA, 33 bp, Homo sapien
acagttaatattgatgaattccacatctatgtc

SEQ ID NO: 776732 - DNA, 33 bp, Homo sapien
acagttaatattgatggattccacatctatgtc

SEQ ID NO: 776733 - DNA, 33 bp, Homo sapien
catatttctaccaccacatctgctgtcatctca

SEQ ID NO: 776734 - DNA, 33 bp, Homo sapien
catatttctaccaccatatctgctgtcatctca

SEQ ID NO: 776735 - DNA, 33 bp, Homo sapien
gatatctcaatttccaatcatttatttaccaga

SEQ ID NO: 776736 - DNA, 33 bp, Homo sapien
gatatctcaatttccagtcatttatttaccaga

SEQ ID NO: 776737 - DNA, 33 bp, Homo sapien
aatcatttttaacccaagtagggcacatactga

SEQ ID NO: 776738 - DNA, 33 bp, Homo sapien
aatcatttttaacccatgtagggcacatactga

SEQ ID NO: 776739 - DNA, 33 bp, Homo sapien
gctatgtgaaatccaaacatcttcatcataagc

SEQ ID NO: 776740 - DNA, 33 bp, Homo sapien
gctatgtgaaatccaagcatcttcatcataagc

SEQ ID NO: 776741 - DNA, 33 bp, Homo sapien
tgatgaaagccaactcgatcagcgggtattggg

SEQ ID NO: 776742 - DNA, 33 bp, Homo sapien
tgatgaaagccaactctatcagcgggtattggg

SEQ ID NO: 776743 - DNA, 33 bp, Homo sapien
atgtcacaaattcagcggcactgtttagtagct

SEQ ID NO: 776744 - DNA, 33 bp, Homo sapien
atgtcacaaattcagctgcactgtttagtagct

SEQ ID NO: 776745 - DNA, 33 bp, Homo sapien
taaaaccaatgctgcaatcttcatccaggtaca

SEQ ID NO: 776746 - DNA, 33 bp, Homo sapien
taaaaccaatgctgcagtcttcatccaggtaca

SEQ ID NO: 776747 - DNA, 33 bp, Homo sapien
atttatgaaagaccctaagcatacaaaattcat

SEQ ID NO: 776748 - DNA, 33 bp, Homo sapien
atttatgaaagaccctgagcatacaaaattcat

SEQ ID NO: 776749 - DNA, 33 bp, Homo sapien
cccatctttcacaacacctgtctacattcagtt

SEQ ID NO: 776750 - DNA, 33 bp, Homo sapien
cccatctttcacaacatctgtctacattcagtt

SEQ ID NO: 776751 - DNA, 33 bp, Homo sapien
acataataaaatataaaacaaacgtgacaggtt

SEQ ID NO: 776752 - DNA, 33 bp, Homo sapien
acataataaaatataagacaaacgtgacaggtt

SEQ ID NO: 776753 - DNA, 33 bp, Homo sapien
ggactggccactttataacaaagaccttgaact

SEQ ID NO: 776754 - DNA, 33 bp, Homo sapien
ggactggccactttatgacaaagaccttgaact

SEQ ID NO: 776755 - DNA, 33 bp, Homo sapien
agaaacagcctactacaatgactctgacaacaa

SEQ ID NO: 776756 - DNA, 33 bp, Homo sapien
agaaacagcctactacgatgactctgacaacaa

SEQ ID NO: 776757 - DNA, 33 bp, Homo sapien
tagacccaaagatcctcaaggcaagaagtgtct

SEQ ID NO: 776758 - DNA, 33 bp, Homo sapien
tagacccaaagatccttaaggcaagaagtgtct

SEQ ID NO: 776759 - DNA, 33 bp, Homo sapien
ttgtcctttttctccaggtcacttaggcaatca

SEQ ID NO: 776760 - DNA, 33 bp, Homo sapien
ttgtcctttttctccatgtcacttaggcaatca

SEQ ID NO: 776761 - DNA, 33 bp, Homo sapien
acttatttaggagtgaaagataggaatagttaa

SEQ ID NO: 776762 - DNA, 33 bp, Homo sapien
acttatttaggagtgatagataggaatagttaa

SEQ ID NO: 776763 - DNA, 33 bp, Homo sapien
ggagtaattggttacaatggctagtatcactta

SEQ ID NO: 776764 - DNA, 33 bp, Homo sapien
ggagtaattggttacagtggctagtatcactta

SEQ ID NO: 776765 - DNA, 33 bp, Homo sapien
tgaaaggcagcagccggagttgggtaaattact

SEQ ID NO: 776766 - DNA, 33 bp, Homo sapien
tgaaaggcagcagccgtagttgggtaaattact

SEQ ID NO: 776767 - DNA, 33 bp, Homo sapien
actggaaggccactgcaaatgcttacagaccac

SEQ ID NO: 776768 - DNA, 33 bp, Homo sapien
actggaaggccactgcgaatgcttacagaccac

SEQ ID NO: 776769 - DNA, 33 bp, Homo sapien
aagtaagtccaggtcactgaagacttcgtgggg

SEQ ID NO: 776770 - DNA, 33 bp, Homo sapien
aagtaagtccaggtcagtgaagacttcgtgggg

SEQ ID NO: 776771 - DNA, 33 bp, Homo sapien
cctctctccgtcaagtaacattgtctctctaag

SEQ ID NO: 776772 - DNA, 33 bp, Homo sapien
cctctctccgtcaagtgacattgtctctctaag

SEQ ID NO: 776773 - DNA, 33 bp, Homo sapien
agacgatgcaaacaaacagccagagaaataaaa

SEQ ID NO: 776774 - DNA, 33 bp, Homo sapien
agacgatgcaaacaaagagccagagaaataaaa

SEQ ID NO: 776775 - DNA, 33 bp, Homo sapien
ccaatctttccctggcaagctgatctggtcttg

SEQ ID NO: 776776 - DNA, 33 bp, Homo sapien
ccaatctttccctggcgagctgatctggtcttg

SEQ ID NO: 776777 - DNA, 33 bp, Homo sapien
ttctttgctatcttctaaaaaattcaccatcat

SEQ ID NO: 776778 - DNA, 33 bp, Homo sapien
ttctttgctatcttctgaaaaattcaccatcat

SEQ ID NO: 776779 - DNA, 33 bp, Homo sapien
taggtgtacaacacacactaggggcaatatgct

SEQ ID NO: 776780 - DNA, 33 bp, Homo sapien
taggtgtacaacacacgctaggggcaatatgct

SEQ ID NO: 776781 - DNA, 33 bp, Homo sapien
tgttgaaatttaaggagatataactcttgacac

SEQ ID NO: 776782 - DNA, 33 bp, Homo sapien
tgttgaaatttaaggatatataactcttgacac

SEQ ID NO: 776783 - DNA, 33 bp, Homo sapien
tgcaaagtatcaactaataacaacagcaagagg

SEQ ID NO: 776784 - DNA, 33 bp, Homo sapien
tgcaaagtatcaactagtaacaacagcaagagg

SEQ ID NO: 776785 - DNA, 33 bp, Homo sapien
gggtctttaacctcacaatgaacctgccgtgga

SEQ ID NO: 776786 - DNA, 33 bp, Homo sapien
gggtctttaacctcacgatgaacctgccgtgga

SEQ ID NO: 776787 - DNA, 33 bp, Homo sapien
catagatagaaaatcacaggtagaaaatgatgt

SEQ ID NO: 776788 - DNA, 33 bp, Homo sapien
catagatagaaaatcataggtagaaaatgatgt

SEQ ID NO: 776789 - DNA, 33 bp, Homo sapien
gagtttgaaacacttaaccaacaagcaatagag

SEQ ID NO: 776790 - DNA, 33 bp, Homo sapien
gagtttgaaacacttagccaacaagcaatagag

SEQ ID NO: 776791 - DNA, 33 bp, Homo sapien
cagattattatgctaccactgactctattatga

SEQ ID NO: 776792 - DNA, 33 bp, Homo sapien
cagattattatgctactactgactctattatga

SEQ ID NO: 776793 - DNA, 33 bp, Homo sapien
taactttcaatggctaccaacccctttcttaaa

SEQ ID NO: 776794 - DNA, 33 bp, Homo sapien
taactttcaatggctatcaacccctttcttaaa

SEQ ID NO: 776795 - DNA, 33 bp, Homo sapien
gccagggaaattacaccgtggccccaggagcag

SEQ ID NO: 776796 - DNA, 33 bp, Homo sapien
gccagggaaattacactgtggccccaggagcag

SEQ ID NO: 776797 - DNA, 33 bp, Homo sapien
gctgcagtctttcccacgatgttcattgatcag

SEQ ID NO: 776798 - DNA, 33 bp, Homo sapien
gctgcagtctttcccatgatgttcattgatcag

SEQ ID NO: 776799 - DNA, 33 bp, Homo sapien
cacccacaaaagacaactcttcattcagaaagc

SEQ ID NO: 776800 - DNA, 33 bp, Homo sapien
cacccacaaaagacaattcttcattcagaaagc

SEQ ID NO: 776801 - DNA, 33 bp, Homo sapien
tggtagaatcatgactaaggacacttgctgtga

SEQ ID NO: 776802 - DNA, 33 bp, Homo sapien
tggtagaatcatgactgaggacacttgctgtga

SEQ ID NO: 776803 - DNA, 33 bp, Homo sapien
catcaccagcgataacagtcgtgttcctcatcc

SEQ ID NO: 776804 - DNA, 33 bp, Homo sapien
catcaccagcgataacggtcgtgttcctcatcc

SEQ ID NO: 776805 - DNA, 33 bp, Homo sapien
gatctatgccttgagggaaagatgggaaaatag

SEQ ID NO: 776806 - DNA, 33 bp, Homo sapien
gatctatgccttgaggtaaagatgggaaaatag

SEQ ID NO: 776807 - DNA, 33 bp, Homo sapien
ctctacatctctagcacaaattggcacacaaag

SEQ ID NO: 776808 - DNA, 33 bp, Homo sapien
ctctacatctctagcataaattggcacacaaag

SEQ ID NO: 776809 - DNA, 33 bp, Homo sapien
tttcgagctgtgttctaaagagatgagagtgtg

SEQ ID NO: 776810 - DNA, 33 bp, Homo sapien
tttcgagctgtgttctgaagagatgagagtgtg

SEQ ID NO: 776811 - DNA, 33 bp, Homo sapien
ggtatgggatatgagaatcagtgcctcttattg

SEQ ID NO: 776812 - DNA, 33 bp, Homo sapien
ggtatgggatatgagactcagtgcctcttattg

SEQ ID NO: 776813 - DNA, 33 bp, Homo sapien
gtaattaatgcagcaaatgtttatttctcactc

SEQ ID NO: 776814 - DNA, 33 bp, Homo sapien
gtaattaatgcagcaagtgtttatttctcactc

SEQ ID NO: 776815 - DNA, 33 bp, Homo sapien
tactgcatagttctaacgtatagtttttatgtg

SEQ ID NO: 776816 - DNA, 33 bp, Homo sapien
tactgcatagttctaatgtatagtttttatgtg

SEQ ID NO: 776817 - DNA, 33 bp, Homo sapien
agggtgatgacatataaaggttttgggattctc

SEQ ID NO: 776818 - DNA, 33 bp, Homo sapien
agggtgatgacatatagaggttttgggattctc

SEQ ID NO: 776819 - DNA, 33 bp, Homo sapien
aggccattactcttgcacaaaatgtagatttat

SEQ ID NO: 776820 - DNA, 33 bp, Homo sapien
aggccattactcttgcgcaaaatgtagatttat

SEQ ID NO: 776821 - DNA, 33 bp, Homo sapien
ctgatagcataactgcacctaacaacttcaaaa

SEQ ID NO: 776822 - DNA, 33 bp, Homo sapien
ctgatagcataactgctcctaacaacttcaaaa

SEQ ID NO: 776823 - DNA, 33 bp, Homo sapien
cctgtattagttttaaatccataactgacagct

SEQ ID NO: 776824 - DNA, 33 bp, Homo sapien
cctgtattagttttaattccataactgacagct

SEQ ID NO: 776825 - DNA, 33 bp, Homo sapien
tatactaaggccgagaagtttccttcctggagt

SEQ ID NO: 776826 - DNA, 33 bp, Homo sapien
tatactaaggccgagaggtttccttcctggagt

SEQ ID NO: 776827 - DNA, 33 bp, Homo sapien
gaagaaattgtaagaactgtaagtattaggagt

SEQ ID NO: 776828 - DNA, 33 bp, Homo sapien
gaagaaattgtaagaattgtaagtattaggagt

SEQ ID NO: 776829 - DNA, 33 bp, Homo sapien
attaaacatcccggaccgctaaaatgacttcgt

SEQ ID NO: 776830 - DNA, 33 bp, Homo sapien
attaaacatcccggactgctaaaatgacttcgt

SEQ ID NO: 776831 - DNA, 33 bp, Homo sapien
aaggtttctgccctctaagaatttgttttgtaa

SEQ ID NO: 776832 - DNA, 33 bp, Homo sapien
aaggtttctgccctcttagaatttgttttgtaa

SEQ ID NO: 776833 - DNA, 33 bp, Homo sapien
gaactttgcttagcacaggggctttggaaccat

SEQ ID NO: 776834 - DNA, 33 bp, Homo sapien
gaactttgcttagcaccggggctttggaaccat

SEQ ID NO: 776835 - DNA, 33 bp, Homo sapien
cttccctcgaccttcaatcctagaagaggggct

SEQ ID NO: 776836 - DNA, 33 bp, Homo sapien
cttccctcgaccttcagtcctagaagaggggct

SEQ ID NO: 776837 - DNA, 33 bp, Homo sapien
aggtatgacatttccagggagaaaacacacaca

SEQ ID NO: 776838 - DNA, 33 bp, Homo sapien
aggtatgacatttccatggagaaaacacacaca

SEQ ID NO: 776839 - DNA, 33 bp, Homo sapien
tgaatgtgttttttgacgttgcatctcccaggc

SEQ ID NO: 776840 - DNA, 33 bp, Homo sapien
tgaatgtgttttttgatgttgcatctcccaggc

SEQ ID NO: 776841 - DNA, 33 bp, Homo sapien
gctgtcttcccatctccattctgcctttacaac

SEQ ID NO: 776842 - DNA, 33 bp, Homo sapien
gctgtcttcccatctcgattctgcctttacaac

SEQ ID NO: 776843 - DNA, 33 bp, Homo sapien
attcaagctgagactccatgtaaattgcttgca

SEQ ID NO: 776844 - DNA, 33 bp, Homo sapien
attcaagctgagactctatgtaaattgcttgca

SEQ ID NO: 776845 - DNA, 33 bp, Homo sapien
agtctccagttttaaacgttgacaggtggagat

SEQ ID NO: 776846 - DNA, 33 bp, Homo sapien
agtctccagttttaaatgttgacaggtggagat

SEQ ID NO: 776847 - DNA, 33 bp, Homo sapien
actcatacttagttacccatccacatatttctg

SEQ ID NO: 776848 - DNA, 33 bp, Homo sapien
actcatacttagttactcatccacatatttctg

SEQ ID NO: 776849 - DNA, 33 bp, Homo sapien
agtgaggctggtcttccagagtgggtggtcagc

SEQ ID NO: 776850 - DNA, 33 bp, Homo sapien
agtgaggctggtcttctagagtgggtggtcagc

SEQ ID NO: 776851 - DNA, 33 bp, Homo sapien
cttttcactgttctaacggtgctttgataaata

SEQ ID NO: 776852 - DNA, 33 bp, Homo sapien
cttttcactgttctaatggtgctttgataaata

SEQ ID NO: 776853 - DNA, 33 bp, Homo sapien
ttcaggagcacaaaacgagtggcctggtgaaag

SEQ ID NO: 776854 - DNA, 33 bp, Homo sapien
ttcaggagcacaaaactagtggcctggtgaaag

SEQ ID NO: 776855 - DNA, 33 bp, Homo sapien
atccgcagcgtcagagaaagctgtattgtctga

SEQ ID NO: 776856 - DNA, 33 bp, Homo sapien
atccgcagcgtcagaggaagctgtattgtctga

SEQ ID NO: 776857 - DNA, 33 bp, Homo sapien
cacaatgctctggaaccctcttattaaggccac

SEQ ID NO: 776858 - DNA, 33 bp, Homo sapien
cacaatgctctggaactctcttattaaggccac

SEQ ID NO: 776859 - DNA, 33 bp, Homo sapien
ggtaagctaggagaagacagtctggcacacagg

SEQ ID NO: 776860 - DNA, 33 bp, Homo sapien
ggtaagctaggagaaggcagtctggcacacagg

SEQ ID NO: 776861 - DNA, 33 bp, Homo sapien
gagaccttagtgcttccgaacctttataattat

SEQ ID NO: 776862 - DNA, 33 bp, Homo sapien
gagaccttagtgcttctgaacctttataattat

SEQ ID NO: 776863 - DNA, 33 bp, Homo sapien
cagccaatgcgactcacgtaatctacagcaaca

SEQ ID NO: 776864 - DNA, 33 bp, Homo sapien
cagccaatgcgactcatgtaatctacagcaaca

SEQ ID NO: 776865 - DNA, 33 bp, Homo sapien
ttataacactttcaatcaggatattttaatttt

SEQ ID NO: 776866 - DNA, 33 bp, Homo sapien
ttataacactttcaattaggatattttaatttt

SEQ ID NO: 776867 - DNA, 33 bp, Homo sapien
aaaatgaagtgggaaccagtgctgttagcaatg

SEQ ID NO: 776868 - DNA, 33 bp, Homo sapien
aaaatgaagtgggaactagtgctgttagcaatg

SEQ ID NO: 776869 - DNA, 33 bp, Homo sapien
ataattttttttgcacactcttcacgctagcct

SEQ ID NO: 776870 - DNA, 33 bp, Homo sapien
ataattttttttgcacgctcttcacgctagcct

SEQ ID NO: 776871 - DNA, 33 bp, Homo sapien
aaggtacaatttttgaaagtcactattcctttg

SEQ ID NO: 776872 - DNA, 33 bp, Homo sapien
aaggtacaatttttgagagtcactattcctttg

SEQ ID NO: 776873 - DNA, 33 bp, Homo sapien
tgcttcttggacatatcaagacactcccacccc

SEQ ID NO: 776874 - DNA, 33 bp, Homo sapien
tgcttcttggacatatgaagacactcccacccc

SEQ ID NO: 776875 - DNA, 33 bp, Homo sapien
ttagagaaggcgtgagaacatggtgccctggaa

SEQ ID NO: 776876 - DNA, 33 bp, Homo sapien
ttagagaaggcgtgaggacatggtgccctggaa

SEQ ID NO: 776877 - DNA, 33 bp, Homo sapien
tctgttttgcctgttaacaataggagatcattt

SEQ ID NO: 776878 - DNA, 33 bp, Homo sapien
tctgttttgcctgttagcaataggagatcattt

SEQ ID NO: 776879 - DNA, 33 bp, Homo sapien
acaatcaatgctctaccatttctgaaaacctta

SEQ ID NO: 776880 - DNA, 33 bp, Homo sapien
acaatcaatgctctactatttctgaaaacctta

SEQ ID NO: 776881 - DNA, 33 bp, Homo sapien
catctcaattccaataagtgtgtctgagttcat

SEQ ID NO: 776882 - DNA, 33 bp, Homo sapien
catctcaattccaatatgtgtgtctgagttcat

SEQ ID NO: 776883 - DNA, 33 bp, Homo sapien
tgacagggtcagaatccccagctattttgacag

SEQ ID NO: 776884 - DNA, 33 bp, Homo sapien
tgacagggtcagaatctccagctattttgacag

SEQ ID NO: 776885 - DNA, 33 bp, Homo sapien
caatctcaggcatttaaacttgtatgtgcactg

SEQ ID NO: 776886 - DNA, 33 bp, Homo sapien
caatctcaggcatttacacttgtatgtgcactg

SEQ ID NO: 776887 - DNA, 33 bp, Homo sapien
cacaattgtctcctagaatcagggctgtataca

SEQ ID NO: 776888 - DNA, 33 bp, Homo sapien
cacaattgtctcctagtatcagggctgtataca

SEQ ID NO: 776889 - DNA, 33 bp, Homo sapien
ttgatcatgtaatccacgagttgtgtcgttgta

SEQ ID NO: 776890 - DNA, 33 bp, Homo sapien
ttgatcatgtaatccatgagttgtgtcgttgta

SEQ ID NO: 776891 - DNA, 33 bp, Homo sapien
cccaatgccagacatacccagtaggcaacattt

SEQ ID NO: 776892 - DNA, 33 bp, Homo sapien
cccaatgccagacatatccagtaggcaacattt

SEQ ID NO: 776893 - DNA, 33 bp, Homo sapien
acaccacttccaaacacggtgggctggcctgtc

SEQ ID NO: 776894 - DNA, 33 bp, Homo sapien
acaccacttccaaacatggtgggctggcctgtc

SEQ ID NO: 776895 - DNA, 33 bp, Homo sapien
gtggagcctgctggtacgaatgaacaagaggac

SEQ ID NO: 776896 - DNA, 33 bp, Homo sapien
gtggagcctgctggtatgaatgaacaagaggac

SEQ ID NO: 776897 - DNA, 33 bp, Homo sapien; identical to SEQ ID NO: 776895

SEQ ID NO: 776898 - DNA, 33 bp, Homo sapien; identical to SEQ ID NO: 776896

SEQ ID NO: 776899 - DNA, 33 bp, Homo sapien
atcagcctgttagccaagagaggaggtgtgggc

SEQ ID NO: 776900 - DNA, 33 bp, Homo sapien
atcagcctgttagccaggagaggaggtgtgggc

SEQ ID NO: 776901 - DNA, 33 bp, Homo sapien
tatagactaccataaaattaattaagcaatagc

SEQ ID NO: 776902 - DNA, 33 bp, Homo sapien
tatagactaccataaacttaattaagcaatagc

SEQ ID NO: 776903 - DNA, 33 bp, Homo sapien
ccaaaaccattaggcactaattagagagattta

SEQ ID NO: 776904 - DNA, 33 bp, Homo sapien
ccaaaaccattaggcattaattagagagattta

SEQ ID NO: 776905 - DNA, 33 bp, Homo sapien
tatcaaaaggaaagaaaagatgaggaatagcat

SEQ ID NO: 776906 - DNA, 33 bp, Homo sapien
tatcaaaaggaaagaagagatgaggaatagcat

SEQ ID NO: 776907 - DNA, 33 bp, Homo sapien
agccatggaaagatgacgttgctaccacaccca

SEQ ID NO: 776908 - DNA, 33 bp, Homo sapien
agccatggaaagatgatgttgctaccacaccca

SEQ ID NO: 776909 - DNA, 33 bp, Homo sapien
aaaaaggcagatacgagaatattgcaactgtta

SEQ ID NO: 776910 - DNA, 33 bp, Homo sapien
aaaaaggcagatacgataatattgcaactgtta

SEQ ID NO: 776911 - DNA, 33 bp, Homo sapien
taaaattctatttctgaacgaggcagtagaaat

SEQ ID NO: 776912 - DNA, 33 bp, Homo sapien
taaaattctatttctggacgaggcagtagaaat

SEQ ID NO: 776913 - DNA, 33 bp, Homo sapien
tcagtttatattgacccagtggcttcatgtgaa

SEQ ID NO: 776914 - DNA, 33 bp, Homo sapien
tcagtttatattgacctagtggcttcatgtgaa

SEQ ID NO: 776915 - DNA, 33 bp, Homo sapien
agtgtgtttttgctgaagatggaggaaaatcaa

SEQ ID NO: 776916 - DNA, 33 bp, Homo sapien
agtgtgtttttgctgatgatggaggaaaatcaa

SEQ ID NO: 776917 - DNA, 33 bp, Homo sapien
aggttggcccatttaaacctcaacaaccaatgg

SEQ ID NO: 776918 - DNA, 33 bp, Homo sapien
aggttggcccatttaagcctcaacaaccaatgg

SEQ ID NO: 776919 - DNA, 33 bp, Homo sapien
atttgatttcaaagacagataggaaaactacac

SEQ ID NO: 776920 - DNA, 33 bp, Homo sapien
atttgatttcaaagacggataggaaaactacac

SEQ ID NO: 776921 - DNA, 33 bp, Homo sapien
tgggaactttgggatgcaattaggtcatgagag

SEQ ID NO: 776922 - DNA, 33 bp, Homo sapien
tgggaactttgggatgtaattaggtcatgagag

SEQ ID NO: 776923 - DNA, 33 bp, Homo sapien
aaagtcagacaaagacagaggatgaaatatttg

SEQ ID NO: 776924 - DNA, 33 bp, Homo sapien
aaagtcagacaaagacggaggatgaaatatttg

SEQ ID NO: 776925 - DNA, 33 bp, Homo sapien
tcctgccatgagaaatgaaagtcagacaaagac

SEQ ID NO: 776926 - DNA, 33 bp, Homo sapien
tcctgccatgagaaattaaagtcagacaaagac

SEQ ID NO: 776927 - DNA, 33 bp, Homo sapien
ggcaggagggctttgaacaattacaattgggca

SEQ ID NO: 776928 - DNA, 33 bp, Homo sapien
ggcaggagggctttgagcaattacaattgggca

SEQ ID NO: 776929 - DNA, 33 bp, Homo sapien
ttaagttaatccatacaacctaatgagccacaa

SEQ ID NO: 776930 - DNA, 33 bp, Homo sapien
ttaagttaatccatacgacctaatgagccacaa

SEQ ID NO: 776931 - DNA, 33 bp, Homo sapien
ctttcaatgatttgacccatatattaacctgaa

SEQ ID NO: 776932 - DNA, 33 bp, Homo sapien
ctttcaatgatttgactcatatattaacctgaa

SEQ ID NO: 776933 - DNA, 33 bp, Homo sapien
tgggagcaatagtaaacgaacatggtatttctt

SEQ ID NO: 776934 - DNA, 33 bp, Homo sapien
tgggagcaatagtaaatgaacatggtatttctt

SEQ ID NO: 776935 - DNA, 33 bp, Homo sapien
acaataaggctcaacaataagattaacgttctg

SEQ ID NO: 776936 - DNA, 33 bp, Homo sapien
acaataaggctcaacagtaagattaacgttctg

SEQ ID NO: 776937 - DNA, 33 bp, Homo sapien
tgatattttccaacagcccctcacattttctct

SEQ ID NO: 776938 - DNA, 33 bp, Homo sapien
tgatattttccaacagtccctcacattttctct

SEQ ID NO: 776939 - DNA, 33 bp, Homo sapien
gtcttcaatgaaacaccgagtcttgttctcaaa

SEQ ID NO: 776940 - DNA, 33 bp, Homo sapien
gtcttcaatgaaacactgagtcttgttctcaaa

SEQ ID NO: 776941 - DNA, 33 bp, Homo sapien
ttctcagcacactatcacaaaaacggagagcca

SEQ ID NO: 776942 - DNA, 33 bp, Homo sapien
ttctcagcacactatcgcaaaaacggagagcca

SEQ ID NO: 776943 - DNA, 33 bp, Homo sapien
gttagacttgtattgcaatccgaaagctctcct

SEQ ID NO: 776944 - DNA, 33 bp, Homo sapien
gttagacttgtattgccatccgaaagctctcct

SEQ ID NO: 776945 - DNA, 33 bp, Homo sapien
ggaacctccttaaaccagaatgtagcactttgt

SEQ ID NO: 776946 - DNA, 33 bp, Homo sapien
ggaacctccttaaacctgaatgtagcactttgt

SEQ ID NO: 776947 - DNA, 33 bp, Homo sapien
tattttagccaaaaagccaaagtgctagaaact

SEQ ID NO: 776948 - DNA, 33 bp, Homo sapien
tattttagccaaaaagtcaaagtgctagaaact

SEQ ID NO: 776949 - DNA, 33 bp, Homo sapien
tccaattcaatgcagaaaactgcaagtgatcct

SEQ ID NO: 776950 - DNA, 33 bp, Homo sapien
tccaattcaatgcagagaactgcaagtgatcct

SEQ ID NO: 776951 - DNA, 33 bp, Homo sapien
ctctctcaaaaacatactaggcttctgatctac

SEQ ID NO: 776952 - DNA, 33 bp, Homo sapien
ctctctcaaaaacatagtaggcttctgatctac

SEQ ID NO: 776953 - DNA, 33 bp, Homo sapien
tgcagcagtgtgctaacctggtttatttgggtt

SEQ ID NO: 776954 - DNA, 33 bp, Homo sapien
tgcagcagtgtgctaatctggtttatttgggtt

SEQ ID NO: 776955 - DNA, 33 bp, Homo sapien
agaggtcattgatagaagcctgggaagttgggg

SEQ ID NO: 776956 - DNA, 33 bp, Homo sapien
agaggtcattgatagaggcctgggaagttgggg

SEQ ID NO: 776957 - DNA, 33 bp, Homo sapien
ataaaacttagcttgaactttcttttgattata

SEQ ID NO: 776958 - DNA, 33 bp, Homo sapien
ataaaacttagcttgatctttcttttgattata

SEQ ID NO: 776959 - DNA, 33 bp, Homo sapien
cttaagccagcctcaacgttcctttggagatcc

SEQ ID NO: 776960 - DNA, 33 bp, Homo sapien
cttaagccagcctcaatgttcctttggagatcc

SEQ ID NO: 776961 - DNA, 33 bp, Homo sapien
agtttatcagccccaaagtaggtattgtcctat

SEQ ID NO: 776962 - DNA, 33 bp, Homo sapien
agtttatcagccccaaggtaggtattgtcctat

SEQ ID NO: 776963 - DNA, 33 bp, Homo sapien
ccctatggatggaaagcatcctcatttggaaag

SEQ ID NO: 776964 - DNA, 33 bp, Homo sapien
ccctatggatggaaagtatcctcatttggaaag

SEQ ID NO: 776965 - DNA, 33 bp, Homo sapien
taatgctgtgataggtcaagagcacatttcttt

SEQ ID NO: 776966 - DNA, 33 bp, Homo sapien
taatgctgtgataggttaagagcacatttcttt

SEQ ID NO: 776967 - DNA, 33 bp, Homo sapien
ttctttcaaggccctacatttgtaatctaccat

SEQ ID NO: 776968 - DNA, 33 bp, Homo sapien
ttctttcaaggccctatatttgtaatctaccat

SEQ ID NO: 776969 - DNA, 33 bp, Homo sapien
ctcgccacttttcccacgaatggtagcacatta

SEQ ID NO: 776970 - DNA, 33 bp, Homo sapien
ctcgccacttttcccatgaatggtagcacatta

SEQ ID NO: 776971 - DNA, 33 bp, Homo sapien
gaatggtagcacattacgtttagcaccttgctt

SEQ ID NO: 776972 - DNA, 33 bp, Homo sapien
gaatggtagcacattatgtttagcaccttgctt

SEQ ID NO: 776973 - DNA, 33 bp, Homo sapien
gtccatgttttcagcaatcgtcagctgacacca

SEQ ID NO: 776974 - DNA, 33 bp, Homo sapien
gtccatgttttcagcagtcgtcagctgacacca

SEQ ID NO: 776975 - DNA, 33 bp, Homo sapien
tgttgaaggctaatcaatatagcttcagtttga

SEQ ID NO: 776976 - DNA, 33 bp, Homo sapien
tgttgaaggctaatcactatagcttcagtttga

SEQ ID NO: 776977 - DNA, 33 bp, Homo sapien
tgttaatacatgccaacacttagaacagtaaca

SEQ ID NO: 776978 - DNA, 33 bp, Homo sapien
tgttaatacatgccaatacttagaacagtaaca

SEQ ID NO: 776979 - DNA, 33 bp, Homo sapien
tagccttctctagggcaccttccttgactctcc

SEQ ID NO: 776980 - DNA, 33 bp, Homo sapien
tagccttctctagggcgccttccttgactctcc

SEQ ID NO: 776981 - DNA, 33 bp, Homo sapien
atgctgctgtcattataaaagtaaaataccttt

SEQ ID NO: 776982 - DNA, 33 bp, Homo sapien
atgctgctgtcattatgaaagtaaaataccttt

SEQ ID NO: 776983 - DNA, 33 bp, Homo sapien
tccatgttacgaactacaatatggtagaattgg

SEQ ID NO: 776984 - DNA, 33 bp, Homo sapien
tccatgttacgaactataatatggtagaattgg

SEQ ID NO: 776985 - DNA, 33 bp, Homo sapien
aaaaatatgaaatcaaagtttctgctcttacag

SEQ ID NO: 776986 - DNA, 33 bp, Homo sapien
aaaaatatgaaatcaaggtttctgctcttacag

SEQ ID NO: 776987 - DNA, 33 bp, Homo sapien
atatcccggctataacgctacaataatatatgt

SEQ ID NO: 776988 - DNA, 33 bp, Homo sapien
atatcccggctataactctacaataatatatgt

SEQ ID NO: 776989 - DNA, 33 bp, Homo sapien
gggaaaatggcaagtaacaatgtaagagcaagt

SEQ ID NO: 776990 - DNA, 33 bp, Homo sapien
gggaaaatggcaagtagcaatgtaagagcaagt

SEQ ID NO: 776991 - DNA, 33 bp, Homo sapien
gctcagacctggaacaaggagaattcagtcaac

SEQ ID NO: 776992 - DNA, 33 bp, Homo sapien
gctcagacctggaacacggagaattcagtcaac

SEQ ID NO: 776993 - DNA, 33 bp, Homo sapien
attgtacctttgtatacagcattctcaattgcc

SEQ ID NO: 776994 - DNA, 33 bp, Homo sapien
attgtacctttgtatagagcattctcaattgcc

SEQ ID NO: 776995 - DNA, 33 bp, Homo sapien
gaaggcgaattggagcacattcaaagccagagt

SEQ ID NO: 776996 - DNA, 33 bp, Homo sapien
gaaggcgaattggagctcattcaaagccagagt

SEQ ID NO: 776997 - DNA, 33 bp, Homo sapien
ctctgtacaagccacaaaagctattactctagg

SEQ ID NO: 776998 - DNA, 33 bp, Homo sapien
ctctgtacaagccacagaagctattactctagg

SEQ ID NO: 776999 - DNA, 33 bp, Homo sapien
aagtagtactttgagcccgcaagctgactggcg

SEQ ID NO: 777000 - DNA, 33 bp, Homo sapien
aagtagtactttgagctcgcaagctgactggcg

SEQ ID NO: 777001 - DNA, 33 bp, Homo sapien
aaagagtaatacattccaagaactttgattagc

SEQ ID NO: 777002 - DNA, 33 bp, Homo sapien
aaagagtaatacattctaagaactttgattagc

SEQ ID NO: 777003 - DNA, 33 bp, Homo sapien
tttgttttgtttgcaactgatgaagccaaagag

SEQ ID NO: 777004 - DNA, 33 bp, Homo sapien
tttgttttgtttgcaagtgatgaagccaaagag

SEQ ID NO: 777005 - DNA, 33 bp, Homo sapien
ttgcaaaacattctgacattatagtgatcaaac

SEQ ID NO: 777006 - DNA, 33 bp, Homo sapien
ttgcaaaacattctgatattatagtgatcaaac

SEQ ID NO: 777007 - DNA, 33 bp, Homo sapien
gtgaccccagagctaccagacaaatgcccacct

SEQ ID NO: 777008 - DNA, 33 bp, Homo sapien
gtgaccccagagctactagacaaatgcccacct

SEQ ID NO: 777009 - DNA, 33 bp, Homo sapien
tgcaggcatactggaaaaggaaggaagatgtaa

SEQ ID NO: 777010 - DNA, 33 bp, Homo sapien
tgcaggcatactggaagaggaaggaagatgtaa

SEQ ID NO: 777011 - DNA, 33 bp, Homo sapien
tttacataaaaagagccagtgattgaatgcccc

SEQ ID NO: 777012 - DNA, 33 bp, Homo sapien
tttacataaaaagagctagtgattgaatgcccc

SEQ ID NO: 777013 - DNA, 33 bp, Homo sapien
ccgagtcccctgatgaaggaatcactaccactg

SEQ ID NO: 777014 - DNA, 33 bp, Homo sapien
ccgagtcccctgatgagggaatcactaccactg

SEQ ID NO: 777015 - DNA, 33 bp, Homo sapien
aatgttaagatcaaaacgagtggatatgacaca

SEQ ID NO: 777016 - DNA, 33 bp, Homo sapien
aatgttaagatcaaaaggagtggatatgacaca

SEQ ID NO: 777017 - DNA, 33 bp, Homo sapien
acacagctctatttcacggctcagattgtcccc

SEQ ID NO: 777018 - DNA, 33 bp, Homo sapien
acacagctctatttcatggctcagattgtcccc

SEQ ID NO: 777019 - DNA, 33 bp, Homo sapien
taatcttgtgtatttacaaaggctaaagaaaaa

SEQ ID NO: 777020 - DNA, 33 bp, Homo sapien
taatcttgtgtatttagaaaggctaaagaaaaa

SEQ ID NO: 777021 - DNA, 33 bp, Homo sapien
ctgtgatcagtgtcagaaaagaaccgtgttcag

SEQ ID NO: 777022 - DNA, 33 bp, Homo sapien
ctgtgatcagtgtcaggaaagaaccgtgttcag

SEQ ID NO: 777023 - DNA, 33 bp, Homo sapien
gcataaaatggaaaaaatttgaaggcattgatg

SEQ ID NO: 777024 - DNA, 33 bp, Homo sapien
gcataaaatggaaaaactttgaaggcattgatg

SEQ ID NO: 777025 - DNA, 33 bp, Homo sapien
acaagtgaacaaggacgcaagtaggtgcctgat

SEQ ID NO: 777026 - DNA, 33 bp, Homo sapien
acaagtgaacaaggactcaagtaggtgcctgat

SEQ ID NO: 777027 - DNA, 33 bp, Homo sapien
aggaacagtagggggaataagtgaggactaggt

SEQ ID NO: 777028 - DNA, 33 bp, Homo sapien
aggaacagtagggggagtaagtgaggactaggt

SEQ ID NO: 777029 - DNA, 33 bp, Homo sapien
aattgaagttccagccaccttaactatgaatat

SEQ ID NO: 777030 - DNA, 33 bp, Homo sapien
aattgaagttccagccgccttaactatgaatat

SEQ ID NO: 777031 - DNA, 33 bp, Homo sapien
ttgaattcttcatttaacaaaacttgaagctag

SEQ ID NO: 777032 - DNA, 33 bp, Homo sapien
ttgaattcttcatttagcaaaacttgaagctag

SEQ ID NO: 777033 - DNA, 33 bp, Homo sapien
ggtataggtatagatacaggttgccatggcaac

SEQ ID NO: 777034 - DNA, 33 bp, Homo sapien
ggtataggtatagatataggttgccatggcaac

SEQ ID NO: 777035 - DNA, 33 bp, Homo sapien
gaagagcctctcctgacatttcctattccagag

SEQ ID NO: 777036 - DNA, 33 bp, Homo sapien
gaagagcctctcctgagatttcctattccagag

SEQ ID NO: 777037 - DNA, 33 bp, Homo sapien
gttttcttcatctcaaccctctgactgtttcag

SEQ ID NO: 777038 - DNA, 33 bp, Homo sapien
gttttcttcatctcaatcctctgactgtttcag

SEQ ID NO: 777039 - DNA, 33 bp, Homo sapien
ctatctctcacagttacaagaatctggtaatgg

SEQ ID NO: 777040 - DNA, 33 bp, Homo sapien
ctatctctcacagttataagaatctggtaatgg

SEQ ID NO: 777041 - DNA, 33 bp, Homo sapien
gcttggttacccaaccagcctttcttcctggga

SEQ ID NO: 777042 - DNA, 33 bp, Homo sapien
gcttggttacccaaccggcctttcttcctggga

SEQ ID NO: 777043 - DNA, 33 bp, Homo sapien
gctgagtctgaaaaatcaactcactgcattctt

SEQ ID NO: 777044 - DNA, 33 bp, Homo sapien
gctgagtctgaaaaatgaactcactgcattctt

SEQ ID NO: 777045 - DNA, 33 bp, Homo sapien
gcatggctaacataaacagtattggtgctgaaa

SEQ ID NO: 777046 - DNA, 33 bp, Homo sapien
gcatggctaacataaagagtattggtgctgaaa

SEQ ID NO: 777047 - DNA, 33 bp, Homo sapien
tatttttaataagacacaaggtgcagggttaga

SEQ ID NO: 777048 - DNA, 33 bp, Homo sapien
tatttttaataagacataaggtgcagggttaga

SEQ ID NO: 777049 - DNA, 33 bp, Homo sapien
accttgagcagtgacaacaggaagctaacatcc

SEQ ID NO: 777050 - DNA, 33 bp, Homo sapien
accttgagcagtgacaccaggaagctaacatcc

SEQ ID NO: 777051 - DNA, 33 bp, Homo sapien
gcatgaggtcccagaaaattagagattgccacc

SEQ ID NO: 777052 - DNA, 33 bp, Homo sapien
gcatgaggtcccagaagattagagattgccacc

SEQ ID NO: 777053 - DNA, 33 bp, Homo sapien
ctcacctgcaaaaggaaggtgaagaggtggttt

SEQ ID NO: 777054 - DNA, 33 bp, Homo sapien
ctcacctgcaaaaggagggtgaagaggtggttt

SEQ ID NO: 777055 - DNA, 33 bp, Homo sapien
gggtcactaaatattcaattccagaaagccaac

SEQ ID NO: 777056 - DNA, 33 bp, Homo sapien
gggtcactaaatattccattccagaaagccaac

SEQ ID NO: 777057 - DNA, 33 bp, Homo sapien
ctgagtccaagctagcaccatcctcctctgggt

SEQ ID NO: 777058 - DNA, 33 bp, Homo sapien
ctgagtccaagctagcgccatcctcctctgggt

SEQ ID NO: 777059 - DNA, 33 bp, Homo sapien
ctagagtggtcttaccaatgaacagggggccag

SEQ ID NO: 777060 - DNA, 33 bp, Homo sapien
ctagagtggtcttacccatgaacagggggccag

SEQ ID NO: 777061 - DNA, 33 bp, Homo sapien
aatgtggagtaagggaagcccagtgttgaaaca

SEQ ID NO: 777062 - DNA, 33 bp, Homo sapien
aatgtggagtaagggatgcccagtgttgaaaca

SEQ ID NO: 777063 - DNA, 33 bp, Homo sapien
aaagcatcattgtgcccataaactttttgtaaa

SEQ ID NO: 777064 - DNA, 33 bp, Homo sapien
aaagcatcattgtgccgataaactttttgtaaa

SEQ ID NO: 777065 - DNA, 33 bp, Homo sapien
aatgtgctggaagcaacataaatccaagacttt

SEQ ID NO: 777066 - DNA, 33 bp, Homo sapien
aatgtgctggaagcaatataaatccaagacttt

SEQ ID NO: 777067 - DNA, 33 bp, Homo sapien
tgcaggataaagggaaaataggatccagggtgg

SEQ ID NO: 777068 - DNA, 33 bp, Homo sapien
tgcaggataaagggaagataggatccagggtgg

SEQ ID NO: 777069 - DNA, 33 bp, Homo sapien
ctggtgaggagtatagcccctctttccccgcaa

SEQ ID NO: 777070 - DNA, 33 bp, Homo sapien
ctggtgaggagtataggccctctttccccgcaa

SEQ ID NO: 777071 - DNA, 33 bp, Homo sapien
tcatgaactggtctgacgtcccaaagattggaa

SEQ ID NO: 777072 - DNA, 33 bp, Homo sapien
tcatgaactggtctgaggtcccaaagattggaa

SEQ ID NO: 777073 - DNA, 33 bp, Homo sapien
tcagtccagtggacaacaaatgggagctgaatt

SEQ ID NO: 777074 - DNA, 33 bp, Homo sapien
tcagtccagtggacaagaaatgggagctgaatt

SEQ ID NO: 777075 - DNA, 33 bp, Homo sapien
ccactgctttttagatcagctcttctccttttc

SEQ ID NO: 777076 - DNA, 33 bp, Homo sapien
ccactgctttttagattagctcttctccttttc

SEQ ID NO: 777077 - DNA, 33 bp, Homo sapien
gagaagaaagttctgcccctcttccaaaagcag

SEQ ID NO: 777078 - DNA, 33 bp, Homo sapien
gagaagaaagttctgctcctcttccaaaagcag

SEQ ID NO: 777079 - DNA, 33 bp, Homo sapien
tctgcttctgggttgcactttctgcatatacaa

SEQ ID NO: 777080 - DNA, 33 bp, Homo sapien
tctgcttctgggttgcgctttctgcatatacaa

SEQ ID NO: 777081 - DNA, 33 bp, Homo sapien
cttaacattcttgtccaatcacagacacaaaat

SEQ ID NO: 777082 - DNA, 33 bp, Homo sapien
cttaacattcttgtcctatcacagacacaaaat

SEQ ID NO: 777083 - DNA, 33 bp, Homo sapien
agcattcttctacgctaaactccccaaatcatc

SEQ ID NO: 777084 - DNA, 33 bp, Homo sapien
agcattcttctacgctcaactccccaaatcatc

SEQ ID NO: 777085 - DNA, 33 bp, Homo sapien
ttgaacctagagattccacattagggatttcca

SEQ ID NO: 777086 - DNA, 33 bp, Homo sapien
ttgaacctagagattctacattagggatttcca

SEQ ID NO: 777087 - DNA, 33 bp, Homo sapien
gtctacacctcctctcactactctgacatctca

SEQ ID NO: 777088 - DNA, 33 bp, Homo sapien
gtctacacctcctctctctactctgacatctca

SEQ ID NO: 777089 - DNA, 33 bp, Homo sapien
cctggacaggtttcccaaagacggcagctggtt

SEQ ID NO: 777090 - DNA, 33 bp, Homo sapien
cctggacaggtttcccgaagacggcagctggtt

SEQ ID NO: 777091 - DNA, 33 bp, Homo sapien
tacccaaaaactcacaacaaggaagaggctttt

SEQ ID NO: 777092 - DNA, 33 bp, Homo sapien
tacccaaaaactcacagcaaggaagaggctttt

SEQ ID NO: 777093 - DNA, 33 bp, Homo sapien
acttttgggaagaaaaatttagagaaccagggc

SEQ ID NO: 777094 - DNA, 33 bp, Homo sapien
acttttgggaagaaaagtttagagaaccagggc

SEQ ID NO: 777095 - DNA, 33 bp, Homo sapien
ctatttctataaccaaatcttatggataatagc

SEQ ID NO: 777096 - DNA, 33 bp, Homo sapien
ctatttctataaccaactcttatggataatagc

SEQ ID NO: 777097 - DNA, 33 bp, Homo sapien
atatacacttttaataacgacgtgcagaatagc

SEQ ID NO: 777098 - DNA, 33 bp, Homo sapien
atatacacttttaatatcgacgtgcagaatagc

SEQ ID NO: 777099 - DNA, 33 bp, Homo sapien
ctgaagcctatcacaactgttggatgttccact

SEQ ID NO: 777100 - DNA, 33 bp, Homo sapien
ctgaagcctatcacaattgttggatgttccact

SEQ ID NO: 777101 - DNA, 33 bp, Homo sapien
tggttgcatactcactcagagactcattggcat

SEQ ID NO: 777102 - DNA, 33 bp, Homo sapien
tggttgcatactcactgagagactcattggcat

SEQ ID NO: 777103 - DNA, 33 bp, Homo sapien
acatttatgaaactcaactggtaatgcctacct

SEQ ID NO: 777104 - DNA, 33 bp, Homo sapien
acatttatgaaactcagctggtaatgcctacct

SEQ ID NO: 777105 - DNA, 33 bp, Homo sapien
aggtgattttggtctaagaaagagcctaggttt

SEQ ID NO: 777106 - DNA, 33 bp, Homo sapien
aggtgattttggtctaggaaagagcctaggttt

SEQ ID NO: 777107 - DNA, 33 bp, Homo sapien
ttccctggcaggtgccaccactttacatttgca

SEQ ID NO: 777108 - DNA, 33 bp, Homo sapien
ttccctggcaggtgccgccactttacatttgca

SEQ ID NO: 777109 - DNA, 33 bp, Homo sapien
tattgagccccaactacgtgtcaaaaacagtct

SEQ ID NO: 777110 - DNA, 33 bp, Homo sapien
tattgagccccaactatgtgtcaaaaacagtct

SEQ ID NO: 777111 - DNA, 33 bp, Homo sapien
tcttttataacaaccaatgattttgggtaggca

SEQ ID NO: 777112 - DNA, 33 bp, Homo sapien
tcttttataacaaccagtgattttgggtaggca

SEQ ID NO: 777113 - DNA, 33 bp, Homo sapien
taaaaccatagtgcacacattagggcaccgcag

SEQ ID NO: 777114 - DNA, 33 bp, Homo sapien
taaaaccatagtgcacgcattagggcaccgcag

SEQ ID NO: 777115 - DNA, 33 bp, Homo sapien
cattgtctagactccaaaaaagtttgactaact

SEQ ID NO: 777116 - DNA, 33 bp, Homo sapien
cattgtctagactccagaaaagtttgactaact

SEQ ID NO: 777117 - DNA, 33 bp, Homo sapien
tgagtgaagatattctaaattctaaattcttat

SEQ ID NO: 777118 - DNA, 33 bp, Homo sapien
tgagtgaagatattctgaattctaaattcttat

SEQ ID NO: 777119 - DNA, 33 bp, Homo sapien
acccaaggaacaagacgctcatggtaccaactc

SEQ ID NO: 777120 - DNA, 33 bp, Homo sapien
acccaaggaacaagactctcatggtaccaactc

SEQ ID NO: 777121 - DNA, 33 bp, Homo sapien
attagcataccaaaagacacatcattttgaaga

SEQ ID NO: 777122 - DNA, 33 bp, Homo sapien
attagcataccaaaagtcacatcattttgaaga

SEQ ID NO: 777123 - DNA, 33 bp, Homo sapien
atcacaactggcttgcagacttaaccaccaagg

SEQ ID NO: 777124 - DNA, 33 bp, Homo sapien
atcacaactggcttgcggacttaaccaccaagg

SEQ ID NO: 777125 - DNA, 33 bp, Homo sapien
gcttggatgatttaaaaagttgagtttagagct

SEQ ID NO: 777126 - DNA, 33 bp, Homo sapien
gcttggatgatttaaatagttgagtttagagct

SEQ ID NO: 777127 - DNA, 33 bp, Homo sapien
ttttttttcttttcaccgctctcattatttttg

SEQ ID NO: 777128 - DNA, 33 bp, Homo sapien
ttttttttcttttcactgctctcattatttttg

SEQ ID NO: 777129 - DNA, 33 bp, Homo sapien
tcctagaaccctgagacatttatgtgaaaaagt

SEQ ID NO: 777130 - DNA, 33 bp, Homo sapien
tcctagaaccctgagatatttatgtgaaaaagt

SEQ ID NO: 777131 - DNA, 33 bp, Homo sapien
attgtgtttgtattcacaggctattgtagctta

SEQ ID NO: 777132 - DNA, 33 bp, Homo sapien
attgtgtttgtattcataggctattgtagctta

SEQ ID NO: 777133 - DNA, 33 bp, Homo sapien
ttatggaccatgtcaaaggattattttcttcat

SEQ ID NO: 777134 - DNA, 33 bp, Homo sapien
ttatggaccatgtcaagggattattttcttcat

SEQ ID NO: 777135 - DNA, 33 bp, Homo sapien
acagcagaccaccttcaccactatgaggatcca

SEQ ID NO: 777136 - DNA, 33 bp, Homo sapien
acagcagaccaccttcgccactatgaggatcca

SEQ ID NO: 777137 - DNA, 33 bp, Homo sapien
atggggtgtggagttacacctgatagcaaggag

SEQ ID NO: 777138 - DNA, 33 bp, Homo sapien
atggggtgtggagttatacctgatagcaaggag

SEQ ID NO: 777139 - DNA, 33 bp, Homo sapien
ggagcagcttggcacaaagcagcattgacagtc

SEQ ID NO: 777140 - DNA, 33 bp, Homo sapien
ggagcagcttggcacagagcagcattgacagtc

SEQ ID NO: 777141 - DNA, 33 bp, Homo sapien
gagctgccaatcacctaaacaatcaccttctaa

SEQ ID NO: 777142 - DNA, 33 bp, Homo sapien
gagctgccaatcacctgaacaatcaccttctaa

SEQ ID NO: 777143 - DNA, 33 bp, Homo sapien
gaaagtgaagggaatgaaagtttgtgctgagcc

SEQ ID NO: 777144 - DNA, 33 bp, Homo sapien
gaaagtgaagggaatggaagtttgtgctgagcc

SEQ ID NO: 777145 - DNA, 33 bp, Homo sapien
tttgtgcagagcacggaacaaggtgctgtggtc

SEQ ID NO: 777146 - DNA, 33 bp, Homo sapien
tttgtgcagagcacgggacaaggtgctgtggtc

SEQ ID NO: 777147 - DNA, 33 bp, Homo sapien
tcttaaacaattcaacgaagcaagtgttataaa

SEQ ID NO: 777148 - DNA, 33 bp, Homo sapien
tcttaaacaattcaactaagcaagtgttataaa

SEQ ID NO: 777149 - DNA, 33 bp, Homo sapien
caaaataccatagctcccttaaccattctttac

SEQ ID NO: 777150 - DNA, 33 bp, Homo sapien
caaaataccatagctctcttaaccattctttac

SEQ ID NO: 777151 - DNA, 33 bp, Homo sapien
gtagccccagcccaaaaagaagagcaaactgga

SEQ ID NO: 777152 - DNA, 33 bp, Homo sapien
gtagccccagcccaaagagaagagcaaactgga

SEQ ID NO: 777153 - DNA, 33 bp, Homo sapien
gcctacacatggtgctaaaggaatgaaggaagg

SEQ ID NO: 777154 - DNA, 33 bp, Homo sapien
gcctacacatggtgctgaaggaatgaaggaagg

SEQ ID NO: 777155 - DNA, 33 bp, Homo sapien
aggtaaagatttgcaagccgagcctaaataaaa

SEQ ID NO: 777156 - DNA, 33 bp, Homo sapien
aggtaaagatttgcaatccgagcctaaataaaa

SEQ ID NO: 777157 - DNA, 33 bp, Homo sapien
cttgaaccacctaggagtatttagtttaaaact

SEQ ID NO: 777158 - DNA, 33 bp, Homo sapien
cttgaaccacctaggattatttagtttaaaact

SEQ ID NO: 777159 - DNA, 33 bp, Homo sapien
tctccaaatttacttacgatctccatttcctct

SEQ ID NO: 777160 - DNA, 33 bp, Homo sapien
tctccaaatttacttatgatctccatttcctct

SEQ ID NO: 777161 - DNA, 33 bp, Homo sapien
ggataactgcctgatacctaaaagaggaaacca

SEQ ID NO: 777162 - DNA, 33 bp, Homo sapien
ggataactgcctgatagctaaaagaggaaacca

SEQ ID NO: 777163 - DNA, 33 bp, Homo sapien
aacatagtgatccgaactggctgaagtggaaaa

SEQ ID NO: 777164 - DNA, 33 bp, Homo sapien
aacatagtgatccgaattggctgaagtggaaaa

SEQ ID NO: 777165 - DNA, 33 bp, Homo sapien
gaggctcttagttagacgatgattgacctagtt

SEQ ID NO: 777166 - DNA, 33 bp, Homo sapien
gaggctcttagttagatgatgattgacctagtt

SEQ ID NO: 777167 - DNA, 33 bp, Homo sapien
ggaaatctagataaaaatgtttagttagaggtt

SEQ ID NO: 777168 - DNA, 33 bp, Homo sapien
ggaaatctagataaaagtgtttagttagaggtt

SEQ ID NO: 777169 - DNA, 33 bp, Homo sapien
ttcagcttcagtggacaaggagattactgctct

SEQ ID NO: 777170 - DNA, 33 bp, Homo sapien
ttcagcttcagtggacgaggagattactgctct

SEQ ID NO: 777171 - DNA, 33 bp, Homo sapien
tatcttcaaaacaacactatagcactaacacat

SEQ ID NO: 777172 - DNA, 33 bp, Homo sapien
tatcttcaaaacaacagtatagcactaacacat

SEQ ID NO: 777173 - DNA, 33 bp, Homo sapien
gggcatgccaaaacaacgggtctgttttcagtt

SEQ ID NO: 777174 - DNA, 33 bp, Homo sapien
gggcatgccaaaacaatgggtctgttttcagtt

SEQ ID NO: 777175 - DNA, 33 bp, Homo sapien
cattaagtcctaggaaagtggtcagaaagttgg

SEQ ID NO: 777176 - DNA, 33 bp, Homo sapien
cattaagtcctaggaatgtggtcagaaagttgg

SEQ ID NO: 777177 - DNA, 33 bp, Homo sapien
tttctgaagagtgagcaaaatggaagtaggaca

SEQ ID NO: 777178 - DNA, 33 bp, Homo sapien
tttctgaagagtgagccaaatggaagtaggaca

SEQ ID NO: 777179 - DNA, 33 bp, Homo sapien
tgacctcatagcaaagaatgagtgaaccactag

SEQ ID NO: 777180 - DNA, 33 bp, Homo sapien
tgacctcatagcaaaggatgagtgaaccactag

SEQ ID NO: 777181 - DNA, 33 bp, Homo sapien
aacatacagcacaaataagatgattggagagaa

SEQ ID NO: 777182 - DNA, 33 bp, Homo sapien
aacatacagcacaaatcagatgattggagagaa

SEQ ID NO: 777183 - DNA, 33 bp, Homo sapien
tcagagattctattaccgacacaagatgaactc

SEQ ID NO: 777184 - DNA, 33 bp, Homo sapien
tcagagattctattactgacacaagatgaactc

SEQ ID NO: 777185 - DNA, 33 bp, Homo sapien
tttgaattcctcagacgatgtggacaaatatgc

SEQ ID NO: 777186 - DNA, 33 bp, Homo sapien
tttgaattcctcagactatgtggacaaatatgc

SEQ ID NO: 777187 - DNA, 33 bp, Homo sapien
agccaggaatcataaactcacattcagagagaa

SEQ ID NO: 777188 - DNA, 33 bp, Homo sapien
agccaggaatcataaattcacattcagagagaa

SEQ ID NO: 777189 - DNA, 33 bp, Homo sapien; identical to SEQ ID NO: 777187

SEQ ID NO: 777190 - DNA, 33 bp, Homo sapien; identical to SEQ ID NO: 777188

SEQ ID NO: 777191 - DNA, 33 bp, Homo sapien
aggaacagtggagctaccaccatccctagagct

SEQ ID NO: 777192 - DNA, 33 bp, Homo sapien
aggaacagtggagctatcaccatccctagagct

SEQ ID NO: 777193 - DNA, 33 bp, Homo sapien
ctgaatttctgccccacagttaaatcagttggc

SEQ ID NO: 777194 - DNA, 33 bp, Homo sapien
ctgaatttctgccccatagttaaatcagttggc

SEQ ID NO: 777195 - DNA, 33 bp, Homo sapien
tagcctcgtttcctccaaagaatccttgaagac

SEQ ID NO: 777196 - DNA, 33 bp, Homo sapien
tagcctcgtttcctccgaagaatccttgaagac

SEQ ID NO: 777197 - DNA, 33 bp, Homo sapien
tggttgagaggagatacgtgaaatcaagctgct

SEQ ID NO: 777198 - DNA, 33 bp, Homo sapien
tggttgagaggagatatgtgaaatcaagctgct

SEQ ID NO: 777199 - DNA, 33 bp, Homo sapien
ggccagtacattccccaattcagaggccccttg

SEQ ID NO: 777200 - DNA, 33 bp, Homo sapien
ggccagtacattccccgattcagaggccccttg

SEQ ID NO: 777201 - DNA, 33 bp, Homo sapien
ggtcaataatgccgctcagattggaatccactg

SEQ ID NO: 777202 - DNA, 33 bp, Homo sapien
ggtcaataatgccgctgagattggaatccactg

SEQ ID NO: 777203 - DNA, 33 bp, Homo sapien
cacaagacagctgtgaccatttacctctctggg

SEQ ID NO: 777204 - DNA, 33 bp, Homo sapien
cacaagacagctgtgagcatttacctctctggg

SEQ ID NO: 777205 - DNA, 33 bp, Homo sapien
attgtgaacatctaagacccagagatgaaagga

SEQ ID NO: 777206 - DNA, 33 bp, Homo sapien
attgtgaacatctaagtcccagagatgaaagga

SEQ ID NO: 777207 - DNA, 33 bp, Homo sapien; identical to SEQ ID NO: 777205

SEQ ID NO: 777208 - DNA, 33 bp, Homo sapien; identical to SEQ ID NO: 777206

SEQ ID NO: 777209 - DNA, 33 bp, Homo sapien
agagaacgtttactagccatgcctttgaaaggt

SEQ ID NO: 777210 - DNA, 33 bp, Homo sapien
agagaacgtttactagtcatgcctttgaaaggt

SEQ ID NO: 777211 - DNA, 33 bp, Homo sapien
gaactttactgagtaacagaacagcttgcggga

SEQ ID NO: 777212 - DNA, 33 bp, Homo sapien
gaactttactgagtaagagaacagcttgcggga

SEQ ID NO: 777213 - DNA, 33 bp, Homo sapien
tttttttctttccaccaagacatacatagatgg

SEQ ID NO: 777214 - DNA, 33 bp, Homo sapien
tttttttctttccaccgagacatacatagatgg

SEQ ID NO: 777215 - DNA, 33 bp, Homo sapien
caatatcaggagcaaacttagagaaaagatgtc

SEQ ID NO: 777216 - DNA, 33 bp, Homo sapien
caatatcaggagcaaatttagagaaaagatgtc

SEQ ID NO: 777217 - DNA, 33 bp, Homo sapien
aagccagcttaaaaggacattgcaggacaactg

SEQ ID NO: 777218 - DNA, 33 bp, Homo sapien
aagccagcttaaaagggcattgcaggacaactg

SEQ ID NO: 777219 - DNA, 33 bp, Homo sapien
atttaccaacattaaaacctaggatagatgcaa

SEQ ID NO: 777220 - DNA, 33 bp, Homo sapien
atttaccaacattaaaccctaggatagatgcaa

SEQ ID NO: 777221 - DNA, 33 bp, Homo sapien
attttgcaaatctgacaatactgtatattatgc

SEQ ID NO: 777222 - DNA, 33 bp, Homo sapien
attttgcaaatctgacgatactgtatattatgc

SEQ ID NO: 777223 - DNA, 33 bp, Homo sapien
gattttttgacataggcatttggcactataaac

SEQ ID NO: 777224 - DNA, 33 bp, Homo sapien
gattttttgacataggtatttggcactataaac

SEQ ID NO: 777225 - DNA, 33 bp, Homo sapien
agcttttgattgctcaacaaatgagaaaactat

SEQ ID NO: 777226 - DNA, 33 bp, Homo sapien
agcttttgattgctcagcaaatgagaaaactat

SEQ ID NO: 777227 - DNA, 33 bp, Homo sapien
tatttgtagagcaaacacctatccatttttctg

SEQ ID NO: 777228 - DNA, 33 bp, Homo sapien
tatttgtagagcaaactcctatccatttttctg

SEQ ID NO: 777229 - DNA, 33 bp, Homo sapien
attgaacacaacaatagcccttggccaggaact

SEQ ID NO: 777230 - DNA, 33 bp, Homo sapien
attgaacacaacaatatcccttggccaggaact

SEQ ID NO: 777231 - DNA, 33 bp, Homo sapien
tgttggctaagagtctcaatttctggccacatg

SEQ ID NO: 777232 - DNA, 33 bp, Homo sapien
tgttggctaagagtcttaatttctggccacatg

SEQ ID NO: 777233 - DNA, 33 bp, Homo sapien
caagaagcataatgagaaggaaaacaacaacaa

SEQ ID NO: 777234 - DNA, 33 bp, Homo sapien
caagaagcataatgaggaggaaaacaacaacaa

SEQ ID NO: 777235 - DNA, 33 bp, Homo sapien
aagatctggcaaaaccagatcttgaagtatgcg

SEQ ID NO: 777236 - DNA, 33 bp, Homo sapien
aagatctggcaaaaccggatcttgaagtatgcg

SEQ ID NO: 777237 - DNA, 33 bp, Homo sapien
ctacaaattcttccaaactttttccattaccca

SEQ ID NO: 777238 - DNA, 33 bp, Homo sapien
ctacaaattcttccaacctttttccattaccca

SEQ ID NO: 777239 - DNA, 33 bp, Homo sapien
caagatctactttccaatcatcgtgattaatgc

SEQ ID NO: 777240 - DNA, 33 bp, Homo sapien
caagatctactttccagtcatcgtgattaatgc

SEQ ID NO: 777241 - DNA, 33 bp, Homo sapien
gtttctgagagtcaacaaattcctgaatgctat

SEQ ID NO: 777242 - DNA, 33 bp, Homo sapien
gtttctgagagtcaacgaattcctgaatgctat

SEQ ID NO: 777243 - DNA, 33 bp, Homo sapien
acatagaacttcatcacagaactaagcattaga

SEQ ID NO: 777244 - DNA, 33 bp, Homo sapien
acatagaacttcatcatagaactaagcattaga

SEQ ID NO: 777245 - DNA, 33 bp, Homo sapien
agtaacgaaattttgaatatgtcagtctttagt

SEQ ID NO: 777246 - DNA, 33 bp, Homo sapien
agtaacgaaattttgactatgtcagtctttagt

SEQ ID NO: 777247 - DNA, 33 bp, Homo sapien
gtactacatttgtcaccgctattagagtccagc

SEQ ID NO: 777248 - DNA, 33 bp, Homo sapien
gtactacatttgtcactgctattagagtccagc

SEQ ID NO: 777249 - DNA, 33 bp, Homo sapien
gatatggaatgagtttaaaaaatgaagaggtaa

SEQ ID NO: 777250 - DNA, 33 bp, Homo sapien
gatatggaatgagtttgaaaaatgaagaggtaa

SEQ ID NO: 777251 - DNA, 33 bp, Homo sapien
agtttgaataaatgtacgcttagagtgtctttt

SEQ ID NO: 777252 - DNA, 33 bp, Homo sapien
agtttgaataaatgtatgcttagagtgtctttt

SEQ ID NO: 777253 - DNA, 33 bp, Homo sapien
ctgtccaatctgcatacaaaatggaattccagt

SEQ ID NO: 777254 - DNA, 33 bp, Homo sapien
ctgtccaatctgcatataaaatggaattccagt

SEQ ID NO: 777255 - DNA, 33 bp, Homo sapien
caaattggtatcactaaaaatgttgcatcttgg

SEQ ID NO: 777256 - DNA, 33 bp, Homo sapien
caaattggtatcactagaaatgttgcatcttgg

SEQ ID NO: 777257 - DNA, 33 bp, Homo sapien
gagggaagatcctgaaccatttcatcttcctat

SEQ ID NO: 777258 - DNA, 33 bp, Homo sapien
gagggaagatcctgaatcatttcatcttcctat

SEQ ID NO: 777259 - DNA, 33 bp, Homo sapien
gactgggataagttaacgctaatctttctactt

SEQ ID NO: 777260 - DNA, 33 bp, Homo sapien
gactgggataagttaatgctaatctttctactt

SEQ ID NO: 777261 - DNA, 33 bp, Homo sapien
gatctcctccggggacaaatgcaatgatctagc

SEQ ID NO: 777262 - DNA, 33 bp, Homo sapien
gatctcctccggggacgaatgcaatgatctagc

SEQ ID NO: 777263 - DNA, 33 bp, Homo sapien
aatttttatcactctaataagtgtctactgcta

SEQ ID NO: 777264 - DNA, 33 bp, Homo sapien
aatttttatcactctattaagtgtctactgcta

SEQ ID NO: 777265 - DNA, 33 bp, Homo sapien
tatccacaagacagacagtatcaatttacattc

SEQ ID NO: 777266 - DNA, 33 bp, Homo sapien
tatccacaagacagacggtatcaatttacattc

SEQ ID NO: 777267 - DNA, 33 bp, Homo sapien
agcctcaggtattactaaggaaccaaaccgctt

SEQ ID NO: 777268 - DNA, 33 bp, Homo sapien
agcctcaggtattacttaggaaccaaaccgctt

SEQ ID NO: 777269 - DNA, 33 bp, Homo sapien
taactcacatcacacaatggcttctttggatga

SEQ ID NO: 777270 - DNA, 33 bp, Homo sapien
taactcacatcacacagtggcttctttggatga

SEQ ID NO: 777271 - DNA, 33 bp, Homo sapien
ctgagcaacattaaacagttatttaatcagagt

SEQ ID NO: 777272 - DNA, 33 bp, Homo sapien
ctgagcaacattaaacggttatttaatcagagt

SEQ ID NO: 777273 - DNA, 33 bp, Homo sapien
tgtatatattgcataccggcagaatctgggctt

SEQ ID NO: 777274 - DNA, 33 bp, Homo sapien
tgtatatattgcatactggcagaatctgggctt

SEQ ID NO: 777275 - DNA, 33 bp, Homo sapien
cttctacaccgttgtcagaattaaatttctaaa

SEQ ID NO: 777276 - DNA, 33 bp, Homo sapien
cttctacaccgttgtcggaattaaatttctaaa

SEQ ID NO: 777277 - DNA, 33 bp, Homo sapien
catacagtttagttcacaaattgcacttttaaa

SEQ ID NO: 777278 - DNA, 33 bp, Homo sapien
catacagtttagttcataaattgcacttttaaa

SEQ ID NO: 777279 - DNA, 33 bp, Homo sapien
aggaccacactttgaccactactgaattagtgc

SEQ ID NO: 777280 - DNA, 33 bp, Homo sapien
aggaccacactttgactactactgaattagtgc

SEQ ID NO: 777281 - DNA, 33 bp, Homo sapien
ttacgtggtcctaccaatatagccaggtttttt

SEQ ID NO: 777282 - DNA, 33 bp, Homo sapien
ttacgtggtcctaccagtatagccaggtttttt

SEQ ID NO: 777283 - DNA, 33 bp, Homo sapien
ttaaaaagcagggagggcattacaaattagatt

SEQ ID NO: 777284 - DNA, 33 bp, Homo sapien
ttaaaaagcagggaggtcattacaaattagatt

SEQ ID NO: 777285 - DNA, 33 bp, Homo sapien
aagagatatagtcgctaaacactaggtcatata

SEQ ID NO: 777286 - DNA, 33 bp, Homo sapien
aagagatatagtcgctgaacactaggtcatata

SEQ ID NO: 777287 - DNA, 33 bp, Homo sapien
cccatgtcaaagctgaagatgaaagagaaacca

SEQ ID NO: 777288 - DNA, 33 bp, Homo sapien
cccatgtcaaagctgaggatgaaagagaaacca

SEQ ID NO: 777289 - DNA, 33 bp, Homo sapien
taaaactactgagaacaaagtattgggttaaga

SEQ ID NO: 777290 - DNA, 33 bp, Homo sapien
taaaactactgagaacgaagtattgggttaaga

SEQ ID NO: 777291 - DNA, 33 bp, Homo sapien
ctgtctccccagcatgcagaaaggggatgaatc

SEQ ID NO: 777292 - DNA, 33 bp, Homo sapien
ctgtctccccagcatgtagaaaggggatgaatc

SEQ ID NO: 777293 - DNA, 33 bp, Homo sapien
cctttcatcaccttcaaacacaagctacagaca

SEQ ID NO: 777294 - DNA, 33 bp, Homo sapien
cctttcatcaccttcatacacaagctacagaca

SEQ ID NO: 777295 - DNA, 33 bp, Homo sapien
ctggatgtggctccaaatgggcgcaggaaccgc

SEQ ID NO: 777296 - DNA, 33 bp, Homo sapien
ctggatgtggctccaactgggcgcaggaaccgc

SEQ ID NO: 777297 - DNA, 33 bp, Homo sapien
ttagtttatgtaactcccatatccagtctagga

SEQ ID NO: 777298 - DNA, 33 bp, Homo sapien
ttagtttatgtaactctcatatccagtctagga

SEQ ID NO: 777299 - DNA, 33 bp, Homo sapien
gacaaacttttgcatacggaaaattaaaacatt

SEQ ID NO: 777300 - DNA, 33 bp, Homo sapien
gacaaacttttgcatatggaaaattaaaacatt

SEQ ID NO: 777301 - DNA, 33 bp, Homo sapien
gcaccccaagaggaaccaagtggacaactggga

SEQ ID NO: 777302 - DNA, 33 bp, Homo sapien
gcaccccaagaggaacgaagtggacaactggga

SEQ ID NO: 777303 - DNA, 33 bp, Homo sapien
gtgtgtaagaagaaccacagaatggtgctgccc

SEQ ID NO: 777304 - DNA, 33 bp, Homo sapien
gtgtgtaagaagaaccgcagaatggtgctgccc

SEQ ID NO: 777305 - DNA, 33 bp, Homo sapien
attagtcttagctgggcaatctacagagacata

SEQ ID NO: 777306 - DNA, 33 bp, Homo sapien
attagtcttagctggggaatctacagagacata

SEQ ID NO: 777307 - DNA, 33 bp, Homo sapien
ctggtcagtgaaatgaaaataaaaatggactga

SEQ ID NO: 777308 - DNA, 33 bp, Homo sapien
ctggtcagtgaaatgagaataaaaatggactga

SEQ ID NO: 777309 - DNA, 33 bp, Homo sapien
gcagtgcaaactcctaaaagtgtcattgctact

SEQ ID NO: 777310 - DNA, 33 bp, Homo sapien
gcagtgcaaactcctagaagtgtcattgctact

SEQ ID NO: 777311 - DNA, 33 bp, Homo sapien
aagtttcatttgaacacaatgatgctcactaac

SEQ ID NO: 777312 - DNA, 33 bp, Homo sapien
aagtttcatttgaacataatgatgctcactaac

SEQ ID NO: 777313 - DNA, 33 bp, Homo sapien
cagctttgcttgctcaagaacttcataaatgtg

SEQ ID NO: 777314 - DNA, 33 bp, Homo sapien
cagctttgcttgctcaggaacttcataaatgtg

SEQ ID NO: 777315 - DNA, 33 bp, Homo sapien
tccttatcactaccacaacagtcaaaatattta

SEQ ID NO: 777316 - DNA, 33 bp, Homo sapien
tccttatcactaccaccacagtcaaaatattta

SEQ ID NO: 777317 - DNA, 33 bp, Homo sapien
caaacagcaatgccaacgttagcagtaaagcca

SEQ ID NO: 777318 - DNA, 33 bp, Homo sapien
caaacagcaatgccaatgttagcagtaaagcca

SEQ ID NO: 777319 - DNA, 33 bp, Homo sapien
ggcagcagctggggccgcttttctgctgtcctc

SEQ ID NO: 777320 - DNA, 33 bp, Homo sapien
ggcagcagctggggcctcttttctgctgtcctc

SEQ ID NO: 777321 - DNA, 33 bp, Homo sapien
ggctctgggtactgtcccggagtaacagtgaat

SEQ ID NO: 777322 - DNA, 33 bp, Homo sapien
ggctctgggtactgtctcggagtaacagtgaat

SEQ ID NO: 777323 - DNA, 33 bp, Homo sapien
gaagtttgatcctatacggtgatggctgcagaa

SEQ ID NO: 777324 - DNA, 33 bp, Homo sapien
gaagtttgatcctatatggtgatggctgcagaa

SEQ ID NO: 777325 - DNA, 33 bp, Homo sapien
ttgtacaaaggcacaaagcctgactcgactgta

SEQ ID NO: 777326 - DNA, 33 bp, Homo sapien
ttgtacaaaggcacaaggcctgactcgactgta

SEQ ID NO: 777327 - DNA, 33 bp, Homo sapien
tgtctagagtagtaaccgaggttcgttgcctca

SEQ ID NO: 777328 - DNA, 33 bp, Homo sapien
tgtctagagtagtaactgaggttcgttgcctca

SEQ ID NO: 777329 - DNA, 33 bp, Homo sapien
tgcacgattcctggaacagcttacctcctatgt

SEQ ID NO: 777330 - DNA, 33 bp, Homo sapien
tgcacgattcctggaatagcttacctcctatgt

SEQ ID NO: 777331 - DNA, 33 bp, Homo sapien
agattgaacccaaatcagaagacctgtccccgg

SEQ ID NO: 777332 - DNA, 33 bp, Homo sapien
agattgaacccaaatcggaagacctgtccccgg

SEQ ID NO: 777333 - DNA, 33 bp, Homo sapien
ggcctgagtggagatgaagaccctgtgagccag

SEQ ID NO: 777334 - DNA, 33 bp, Homo sapien
ggcctgagtggagatggagaccctgtgagccag

SEQ ID NO: 777335 - DNA, 33 bp, Homo sapien
ttatagccgaaagtcactgaacttactacgcta

SEQ ID NO: 777336 - DNA, 33 bp, Homo sapien
ttatagccgaaagtcattgaacttactacgcta

SEQ ID NO: 777337 - DNA, 33 bp, Homo sapien
agcctgtactcttaaccgtgacatgcatggaag

SEQ ID NO: 777338 - DNA, 33 bp, Homo sapien
agcctgtactcttaactgtgacatgcatggaag

SEQ ID NO: 777339 - DNA, 33 bp, Homo sapien
attacactgtagagacaaaagaatgcacatata

SEQ ID NO: 777340 - DNA, 33 bp, Homo sapien
attacactgtagagaccaaagaatgcacatata

SEQ ID NO: 777341 - DNA, 33 bp, Homo sapien
aatgccaaactttttaccagtacagtataatta

SEQ ID NO: 777342 - DNA, 33 bp, Homo sapien
aatgccaaactttttatcagtacagtataatta

SEQ ID NO: 777343 - DNA, 33 bp, Homo sapien
tcttttatgtcatctcccattctcctccacata

SEQ ID NO: 777344 - DNA, 33 bp, Homo sapien
tcttttatgtcatctctcattctcctccacata

SEQ ID NO: 777345 - DNA, 33 bp, Homo sapien
ctatcctcaaaggccaaggaagctaagaggctg

SEQ ID NO: 777346 - DNA, 33 bp, Homo sapien
ctatcctcaaaggccatggaagctaagaggctg

SEQ ID NO: 777347 - DNA, 33 bp, Homo sapien
aacttgggtttggttgcaaaacatagtaggttc

SEQ ID NO: 777348 - DNA, 33 bp, Homo sapien
aacttgggtttggttgtaaaacatagtaggttc

SEQ ID NO: 777349 - DNA, 33 bp, Homo sapien
tgtctattcctaatgaactgaaccactaggtaa

SEQ ID NO: 777350 - DNA, 33 bp, Homo sapien
tgtctattcctaatgagctgaaccactaggtaa

SEQ ID NO: 777351 - DNA, 33 bp, Homo sapien
gtttccgtcattgttacctgacaaccgtggtgt

SEQ ID NO: 777352 - DNA, 33 bp, Homo sapien
gtttccgtcattgttagctgacaaccgtggtgt

SEQ ID NO: 777353 - DNA, 33 bp, Homo sapien
accataataggatagcactgtgaatacatcctt

SEQ ID NO: 777354 - DNA, 33 bp, Homo sapien
accataataggatagcgctgtgaatacatcctt

SEQ ID NO: 777355 - DNA, 33 bp, Homo sapien
ctgggttttttgcctacagtgactgataacagc

SEQ ID NO: 777356 - DNA, 33 bp, Homo sapien
ctgggttttttgcctagagtgactgataacagc

SEQ ID NO: 777357 - DNA, 33 bp, Homo sapien
gggccttaaactcagcggcatgttggaaacatt

SEQ ID NO: 777358 - DNA, 33 bp, Homo sapien
gggccttaaactcagctgcatgttggaaacatt

SEQ ID NO: 777359 - DNA, 33 bp, Homo sapien
agccactttttctcaacgttctgaaactcacgc

SEQ ID NO: 777360 - DNA, 33 bp, Homo sapien
agccactttttctcaatgttctgaaactcacgc

SEQ ID NO: 777361 - DNA, 33 bp, Homo sapien
agccccacacttaaaagagcccacagtggttta

SEQ ID NO: 777362 - DNA, 33 bp, Homo sapien
agccccacacttaaaatagcccacagtggttta

SEQ ID NO: 777363 - DNA, 33 bp, Homo sapien
cctggggtccgccaaaagcacaatggtaaaggc

SEQ ID NO: 777364 - DNA, 33 bp, Homo sapien
cctggggtccgccaaaggcacaatggtaaaggc

SEQ ID NO: 777365 - DNA, 33 bp, Homo sapien
ctcacatcctaggaacacatcctttacctgcaa

SEQ ID NO: 777366 - DNA, 33 bp, Homo sapien
ctcacatcctaggaacgcatcctttacctgcaa

SEQ ID NO: 777367 - DNA, 33 bp, Homo sapien
tgtcaatagcctacaacctgcaataaactatta

SEQ ID NO: 777368 - DNA, 33 bp, Homo sapien
tgtcaatagcctacaatctgcaataaactatta

SEQ ID NO: 777369 - DNA, 33 bp, Homo sapien
actcagtcttccacaccgctgtcagaatcctct

SEQ ID NO: 777370 - DNA, 33 bp, Homo sapien
actcagtcttccacactgctgtcagaatcctct

SEQ ID NO: 777371 - DNA, 33 bp, Homo sapien
ctttctgtatcatcaaaatttccatatttcaac

SEQ ID NO: 777372 - DNA, 33 bp, Homo sapien
ctttctgtatcatcaacatttccatatttcaac

SEQ ID NO: 777373 - DNA, 33 bp, Homo sapien
tttctttcaattctgacctctcccttcagttac

SEQ ID NO: 777374 - DNA, 33 bp, Homo sapien
tttctttcaattctgagctctcccttcagttac

SEQ ID NO: 777375 - DNA, 33 bp, Homo sapien
aaaccagccctaaataacacattgagaagacca

SEQ ID NO: 777376 - DNA, 33 bp, Homo sapien
aaaccagccctaaataccacattgagaagacca

SEQ ID NO: 777377 - DNA, 33 bp, Homo sapien
agttggccagggttgacgagcatctgtgctggg

SEQ ID NO: 777378 - DNA, 33 bp, Homo sapien
agttggccagggttgatgagcatctgtgctggg

SEQ ID NO: 777379 - DNA, 33 bp, Homo sapien
tcattagctgtcaaaacaaatcagggaactcag

SEQ ID NO: 777380 - DNA, 33 bp, Homo sapien
tcattagctgtcaaaataaatcagggaactcag

SEQ ID NO: 777381 - DNA, 33 bp, Homo sapien
gtgagcgttcagagtaagtttggtgattagatt

SEQ ID NO: 777382 - DNA, 33 bp, Homo sapien
gtgagcgttcagagtaggtttggtgattagatt

SEQ ID NO: 777383 - DNA, 33 bp, Homo sapien
acatgaacactggggcgatatagaagaagcgaa

SEQ ID NO: 777384 - DNA, 33 bp, Homo sapien
acatgaacactggggctatatagaagaagcgaa

SEQ ID NO: 777385 - DNA, 33 bp, Homo sapien
cactttcctatgtgtacgtttgacaccaaataa

SEQ ID NO: 777386 - DNA, 33 bp, Homo sapien
cactttcctatgtgtatgtttgacaccaaataa

SEQ ID NO: 777387 - DNA, 33 bp, Homo sapien
agaaccactttccagaataactctctaggcatg

SEQ ID NO: 777388 - DNA, 33 bp, Homo sapien
agaaccactttccagagtaactctctaggcatg

SEQ ID NO: 777389 - DNA, 33 bp, Homo sapien
aggtggcaaactgagcaataccagccacgactc

SEQ ID NO: 777390 - DNA, 33 bp, Homo sapien
aggtggcaaactgagccataccagccacgactc

SEQ ID NO: 777391 - DNA, 33 bp, Homo sapien
tagctctcacctgtaaacttggtgctttgggag

SEQ ID NO: 777392 - DNA, 33 bp, Homo sapien
tagctctcacctgtaatcttggtgctttgggag

SEQ ID NO: 777393 - DNA, 33 bp, Homo sapien
tagggacgcttggttaaaattacatgtgcccaa

SEQ ID NO: 777394 - DNA, 33 bp, Homo sapien
tagggacgcttggttataattacatgtgcccaa

SEQ ID NO: 777395 - DNA, 33 bp, Homo sapien
ttggatcttaagaacaaagctaccatatttccc

SEQ ID NO: 777396 - DNA, 33 bp, Homo sapien
ttggatcttaagaacagagctaccatatttccc

SEQ ID NO: 777397 - DNA, 33 bp, Homo sapien
gagtctcaaaattagaagcctgatggtgccttt

SEQ ID NO: 777398 - DNA, 33 bp, Homo sapien
gagtctcaaaattagatgcctgatggtgccttt

SEQ ID NO: 777399 - DNA, 33 bp, Homo sapien
ccctatgagctcagcactctatttcctttactc

SEQ ID NO: 777400 - DNA, 33 bp, Homo sapien
ccctatgagctcagcattctatttcctttactc

SEQ ID NO: 777401 - DNA, 33 bp, Homo sapien
caacattttgcaattgaattctatcttcctgct

SEQ ID NO: 777402 - DNA, 33 bp, Homo sapien
caacattttgcaattgcattctatcttcctgct

SEQ ID NO: 777403 - DNA, 33 bp, Homo sapien
tgggattcattcctgaaccggcccttttctagt

SEQ ID NO: 777404 - DNA, 33 bp, Homo sapien
tgggattcattcctgagccggcccttttctagt

SEQ ID NO: 777405 - DNA, 33 bp, Homo sapien
atcatcaaatcacttcaagctcaggaatgactt

SEQ ID NO: 777406 - DNA, 33 bp, Homo sapien
atcatcaaatcacttcgagctcaggaatgactt

SEQ ID NO: 777407 - DNA, 33 bp, Homo sapien
ttgaatcccaattccagtacttactagctatgt

SEQ ID NO: 777408 - DNA, 33 bp, Homo sapien
ttgaatcccaattccattacttactagctatgt

SEQ ID NO: 777409 - DNA, 33 bp, Homo sapien
ttaacccctgcctgaccaataataatgctaata

SEQ ID NO: 777410 - DNA, 33 bp, Homo sapien
ttaacccctgcctgactaataataatgctaata

SEQ ID NO: 777411 - DNA, 33 bp, Homo sapien
actgcagcagttgtaaaatgttgagtgatcctc

SEQ ID NO: 777412 - DNA, 33 bp, Homo sapien
actgcagcagttgtaagatgttgagtgatcctc

SEQ ID NO: 777413 - DNA, 33 bp, Homo sapien
gggaatgagactgctacatcatgttaagtgttt

SEQ ID NO: 777414 - DNA, 33 bp, Homo sapien
gggaatgagactgctatatcatgttaagtgttt

SEQ ID NO: 777415 - DNA, 33 bp, Homo sapien
ctttggttattctgcaaactttccagggcagac

SEQ ID NO: 777416 - DNA, 33 bp, Homo sapien
ctttggttattctgcagactttccagggcagac

SEQ ID NO: 777417 - DNA, 33 bp, Homo sapien
cttcagctcccgttcagaaaattgttgctaaat

SEQ ID NO: 777418 - DNA, 33 bp, Homo sapien
cttcagctcccgttcataaaattgttgctaaat

SEQ ID NO: 777419 - DNA, 33 bp, Homo sapien
agtgtttacaatgagaccttaattttggaaatt

SEQ ID NO: 777420 - DNA, 33 bp, Homo sapien
agtgtttacaatgagatcttaattttggaaatt

SEQ ID NO: 777421 - DNA, 33 bp, Homo sapien
cattttgtctgaagcaccaaaattactgtggtt

SEQ ID NO: 777422 - DNA, 33 bp, Homo sapien
cattttgtctgaagcagcaaaattactgtggtt

SEQ ID NO: 777423 - DNA, 33 bp, Homo sapien
ttcaggtgatgtgtgcgcattttcttcagggta

SEQ ID NO: 777424 - DNA, 33 bp, Homo sapien
ttcaggtgatgtgtgctcattttcttcagggta

SEQ ID NO: 777425 - DNA, 33 bp, Homo sapien
cttcctctgaaatctcaatgttcttagaaggtg

SEQ ID NO: 777426 - DNA, 33 bp, Homo sapien
cttcctctgaaatctcgatgttcttagaaggtg

SEQ ID NO: 777427 - DNA, 33 bp, Homo sapien
ctctggggacagtggccaatattaattgtctgt

SEQ ID NO: 777428 - DNA, 33 bp, Homo sapien
ctctggggacagtggctaatattaattgtctgt

SEQ ID NO: 777429 - DNA, 33 bp, Homo sapien
ttaattcacagaatgaagatgtgcactacaaat

SEQ ID NO: 777430 - DNA, 33 bp, Homo sapien
ttaattcacagaatgaggatgtgcactacaaat

SEQ ID NO: 777431 - DNA, 33 bp, Homo sapien
tcttgatttctgctccaaggatgtttgagaatt

SEQ ID NO: 777432 - DNA, 33 bp, Homo sapien
tcttgatttctgctccgaggatgtttgagaatt

SEQ ID NO: 777433 - DNA, 33 bp, Homo sapien
ttttgcttgatatctacgtcatttttccttttc

SEQ ID NO: 777434 - DNA, 33 bp, Homo sapien
ttttgcttgatatctatgtcatttttccttttc

SEQ ID NO: 777435 - DNA, 33 bp, Homo sapien
tggaatatttcatgaccaacgccagggaaagga

SEQ ID NO: 777436 - DNA, 33 bp, Homo sapien
tggaatatttcatgactaacgccagggaaagga

SEQ ID NO: 777437 - DNA, 33 bp, Homo sapien
tctcatgacctcataaacatacttttcattttc

SEQ ID NO: 777438 - DNA, 33 bp, Homo sapien
tctcatgacctcataagcatacttttcattttc

SEQ ID NO: 777439 - DNA, 33 bp, Homo sapien
ccaaaggaaaagaaatcatcccatcagaaggac

SEQ ID NO: 777440 - DNA, 33 bp, Homo sapien
ccaaaggaaaagaaattatcccatcagaaggac

SEQ ID NO: 777441 - DNA, 33 bp, Homo sapien
tttaaaaagaagccaggataaatgtgtgctggg

SEQ ID NO: 777442 - DNA, 33 bp, Homo sapien
tttaaaaagaagccagtataaatgtgtgctggg

SEQ ID NO: 777443 - DNA, 33 bp, Homo sapien
cccactttcccagataaaaccaatgcatatctt

SEQ ID NO: 777444 - DNA, 33 bp, Homo sapien
cccactttcccagatagaaccaatgcatatctt

SEQ ID NO: 777445 - DNA, 33 bp, Homo sapien
actggactacatgagcacatctgtcaaaaacag

SEQ ID NO: 777446 - DNA, 33 bp, Homo sapien
actggactacatgagcgcatctgtcaaaaacag

SEQ ID NO: 777447 - DNA, 33 bp, Homo sapien
tccagagacatctgaagatacaggcctgggaat

SEQ ID NO: 777448 - DNA, 33 bp, Homo sapien
tccagagacatctgaatatacaggcctgggaat

SEQ ID NO: 777449 - DNA, 33 bp, Homo sapien
ccccgcccagtctttacggtgaaacagtgactt

SEQ ID NO: 777450 - DNA, 33 bp, Homo sapien
ccccgcccagtctttatggtgaaacagtgactt

SEQ ID NO: 777451 - DNA, 33 bp, Homo sapien
tccatccctgccattacggtcaccttgttcatg

SEQ ID NO: 777452 - DNA, 33 bp, Homo sapien
tccatccctgccattatggtcaccttgttcatg

SEQ ID NO: 777453 - DNA, 33 bp, Homo sapien
cttccaaactagaaaccaaatggagtgcccaaa

SEQ ID NO: 777454 - DNA, 33 bp, Homo sapien
cttccaaactagaaactaaatggagtgcccaaa

SEQ ID NO: 777455 - DNA, 33 bp, Homo sapien
tgatcactttgcacttgaagccctcttggagat

SEQ ID NO: 777456 - DNA, 33 bp, Homo sapien
tgatcactttgcactttaagccctcttggagat

SEQ ID NO: 777457 - DNA, 33 bp, Homo sapien
ttttatatctcacatgaattagagaaagactgt

SEQ ID NO: 777458 - DNA, 33 bp, Homo sapien
ttttatatctcacatggattagagaaagactgt

SEQ ID NO: 777459 - DNA, 33 bp, Homo sapien
aagcactgactttagaaaactcaggccaaaaca

SEQ ID NO: 777460 - DNA, 33 bp, Homo sapien
aagcactgactttagacaactcaggccaaaaca

SEQ ID NO: 777461 - DNA, 33 bp, Homo sapien
aaagaattccacatccagaattattaacctctt

SEQ ID NO: 777462 - DNA, 33 bp, Homo sapien
aaagaattccacatcccgaattattaacctctt

SEQ ID NO: 777463 - DNA, 33 bp, Homo sapien
agtagcatgattggaaacattctcagcccaaga

SEQ ID NO: 777464 - DNA, 33 bp, Homo sapien
agtagcatgattggaagcattctcagcccaaga

SEQ ID NO: 777465 - DNA, 33 bp, Homo sapien
ttttttggcacaccacaaagagaaggagttctc

SEQ ID NO: 777466 - DNA, 33 bp, Homo sapien
ttttttggcacaccacgaagagaaggagttctc

SEQ ID NO: 777467 - DNA, 33 bp, Homo sapien
ccagaccttgggtccaagatgctccgagcaagc

SEQ ID NO: 777468 - DNA, 33 bp, Homo sapien
ccagaccttgggtccacgatgctccgagcaagc

SEQ ID NO: 777469 - DNA, 33 bp, Homo sapien
ggtccaagaactctgagaaatgttgagtttcac

SEQ ID NO: 777470 - DNA, 33 bp, Homo sapien
ggtccaagaactctgataaatgttgagtttcac

SEQ ID NO: 777471 - DNA, 33 bp, Homo sapien
ctaccactaatccatacgccacactggacaaac

SEQ ID NO: 777472 - DNA, 33 bp, Homo sapien
ctaccactaatccatatgccacactggacaaac

SEQ ID NO: 777473 - DNA, 33 bp, Homo sapien
tcagaatttttgagaacggttagggacaaagaa

SEQ ID NO: 777474 - DNA, 33 bp, Homo sapien
tcagaatttttgagaatggttagggacaaagaa

SEQ ID NO: 777475 - DNA, 33 bp, Homo sapien
accaaggaggtctgtaggatacaccaagtcctc

SEQ ID NO: 777476 - DNA, 33 bp, Homo sapien
accaaggaggtctgtatgatacaccaagtcctc

SEQ ID NO: 777477 - DNA, 33 bp, Homo sapien
agggttcctgactgatgaaaggatgctggttga

SEQ ID NO: 777478 - DNA, 33 bp, Homo sapien
agggttcctgactgattaaaggatgctggttga

SEQ ID NO: 777479 - DNA, 33 bp, Homo sapien
acaacagacagcagaacggagtacggtgaaggc

SEQ ID NO: 777480 - DNA, 33 bp, Homo sapien
acaacagacagcagaatggagtacggtgaaggc

SEQ ID NO: 777481 - DNA, 33 bp, Homo sapien
agaacctgaagtcaaactgcttttcaaagagac

SEQ ID NO: 777482 - DNA, 33 bp, Homo sapien
agaacctgaagtcaaattgcttttcaaagagac

SEQ ID NO: 777483 - DNA, 33 bp, Homo sapien
agggaaactgtattgaaggactgtgataggggc

SEQ ID NO: 777484 - DNA, 33 bp, Homo sapien
agggaaactgtattgagggactgtgataggggc

SEQ ID NO: 777485 - DNA, 33 bp, Homo sapien
ctcaacccatttgctccatgctgtcaactgaag

SEQ ID NO: 777486 - DNA, 33 bp, Homo sapien
ctcaacccatttgctctatgctgtcaactgaag

SEQ ID NO: 777487 - DNA, 33 bp, Homo sapien
catttcacataagacacggattgatgcattgga

SEQ ID NO: 777488 - DNA, 33 bp, Homo sapien
catttcacataagacatggattgatgcattgga

SEQ ID NO: 777489 - DNA, 33 bp, Homo sapien
gatgaaattcactccaaagttacctacagcaaa

SEQ ID NO: 777490 - DNA, 33 bp, Homo sapien
gatgaaattcactccagagttacctacagcaaa

SEQ ID NO: 777491 - DNA, 33 bp, Homo sapien
cagtctcgactcaccgaaagctttgtctcccag

SEQ ID NO: 777492 - DNA, 33 bp, Homo sapien
cagtctcgactcaccgcaagctttgtctcccag

SEQ ID NO: 777493 - DNA, 33 bp, Homo sapien
gttcttattgttgaataaaaaagtgcacagtgt

SEQ ID NO: 777494 - DNA, 33 bp, Homo sapien
gttcttattgttgaattaaaaagtgcacagtgt

SEQ ID NO: 777495 - DNA, 33 bp, Homo sapien
taaagataaagctcacacataaagacactgtag

SEQ ID NO: 777496 - DNA, 33 bp, Homo sapien
taaagataaagctcacgcataaagacactgtag

SEQ ID NO: 777497 - DNA, 33 bp, Homo sapien
aaataggacaccaacaaaaagtcagcacaaagt

SEQ ID NO: 777498 - DNA, 33 bp, Homo sapien
aaataggacaccaacataaagtcagcacaaagt

SEQ ID NO: 777499 - DNA, 33 bp, Homo sapien
catccacaaccaattcccctcagttaccaagag

SEQ ID NO: 777500 - DNA, 33 bp, Homo sapien
catccacaaccaattctcctcagttaccaagag

SEQ ID NO: 777501 - DNA, 33 bp, Homo sapien
atgtggaacctgccataagaaggattgactgta

SEQ ID NO: 777502 - DNA, 33 bp, Homo sapien
atgtggaacctgccatgagaaggattgactgta

SEQ ID NO: 777503 - DNA, 33 bp, Homo sapien
gtgtaaacttgccatgcatttacataaaaaatt

SEQ ID NO: 777504 - DNA, 33 bp, Homo sapien
gtgtaaacttgccatgtatttacataaaaaatt

SEQ ID NO: 777505 - DNA, 33 bp, Homo sapien
aaattgccgagtaacacgatttcagtaacatgt

SEQ ID NO: 777506 - DNA, 33 bp, Homo sapien
aaattgccgagtaacatgatttcagtaacatgt

SEQ ID NO: 777507 - DNA, 33 bp, Homo sapien
gcgcatttgcaaggacgcctcttcgatttaact

SEQ ID NO: 777508 - DNA, 33 bp, Homo sapien
gcgcatttgcaaggactcctcttcgatttaact

SEQ ID NO: 777509 - DNA, 33 bp, Homo sapien
taataaattaaacatacggtgactttccaagtt

SEQ ID NO: 777510 - DNA, 33 bp, Homo sapien
taataaattaaacatatggtgactttccaagtt

SEQ ID NO: 777511 - DNA, 33 bp, Homo sapien
cttcccaagtgcttaaatctcataaacataata

SEQ ID NO: 777512 - DNA, 33 bp, Homo sapien
cttcccaagtgcttaactctcataaacataata

SEQ ID NO: 777513 - DNA, 33 bp, Homo sapien
aaaccactcacagtcaactaagcaaacaagtgt

SEQ ID NO: 777514 - DNA, 33 bp, Homo sapien
aaaccactcacagtcacctaagcaaacaagtgt

SEQ ID NO: 777515 - DNA, 33 bp, Homo sapien
acgtggtgctaaatgacatggagaccaatcagg

SEQ ID NO: 777516 - DNA, 33 bp, Homo sapien
acgtggtgctaaatgagatggagaccaatcagg

SEQ ID NO: 777517 - DNA, 33 bp, Homo sapien
gtttgtctgattaacaaatgaagaaaatgagat

SEQ ID NO: 777518 - DNA, 33 bp, Homo sapien
gtttgtctgattaacagatgaagaaaatgagat

SEQ ID NO: 777519 - DNA, 33 bp, Homo sapien
gaagggagagaggcctaacgattctgcaagcat

SEQ ID NO: 777520 - DNA, 33 bp, Homo sapien
gaagggagagaggcctgacgattctgcaagcat

SEQ ID NO: 777521 - DNA, 33 bp, Homo sapien
ggattgctggattgtaggttagttctattttta

SEQ ID NO: 777522 - DNA, 33 bp, Homo sapien
ggattgctggattgtatgttagttctattttta

SEQ ID NO: 777523 - DNA, 33 bp, Homo sapien
cccttatttcattgaccatttggccaaggcaaa

SEQ ID NO: 777524 - DNA, 33 bp, Homo sapien
cccttatttcattgacgatttggccaaggcaaa

SEQ ID NO: 777525 - DNA, 33 bp, Homo sapien
ttgctaagtgaaagacactaatctggaaaagtc

SEQ ID NO: 777526 - DNA, 33 bp, Homo sapien
ttgctaagtgaaagacgctaatctggaaaagtc

SEQ ID NO: 777527 - DNA, 33 bp, Homo sapien
aaatgcaaattggtacagcccttctgcaggaaa

SEQ ID NO: 777528 - DNA, 33 bp, Homo sapien
aaatgcaaattggtacggcccttctgcaggaaa

SEQ ID NO: 777529 - DNA, 33 bp, Homo sapien
gtgtttggcaggaaacactctaaaacaagcact

SEQ ID NO: 777530 - DNA, 33 bp, Homo sapien
gtgtttggcaggaaacgctctaaaacaagcact

SEQ ID NO: 777531 - DNA, 33 bp, Homo sapien
attatgctttgccaaaattcagagggtagcaga

SEQ ID NO: 777532 - DNA, 33 bp, Homo sapien
attatgctttgccaaagttcagagggtagcaga

SEQ ID NO: 777533 - DNA, 33 bp, Homo sapien
gaaatcctgggttagaagctcaaagtaaagaac

SEQ ID NO: 777534 - DNA, 33 bp, Homo sapien
gaaatcctgggttagaggctcaaagtaaagaac

SEQ ID NO: 777535 - DNA, 33 bp, Homo sapien
tgaatgattgaattaactgagtgaagcttttat

SEQ ID NO: 777536 - DNA, 33 bp, Homo sapien
tgaatgattgaattaattgagtgaagcttttat

SEQ ID NO: 777537 - DNA, 33 bp, Homo sapien
ccagtgaaatgctgccagaatgaactcagtcat

SEQ ID NO: 777538 - DNA, 33 bp, Homo sapien
ccagtgaaatgctgccggaatgaactcagtcat

SEQ ID NO: 777539 - DNA, 33 bp, Homo sapien
atggtgacaattaacactgaagtgaataggcca

SEQ ID NO: 777540 - DNA, 33 bp, Homo sapien
atggtgacaattaacattgaagtgaataggcca

SEQ ID NO: 777541 - DNA, 33 bp, Homo sapien
caataacactcttaatcacacatttccttttag

SEQ ID NO: 777542 - DNA, 33 bp, Homo sapien
caataacactcttaattacacatttccttttag

SEQ ID NO: 777543 - DNA, 33 bp, Homo sapien
cctgcccctttaaaaacagcacagatggatgga

SEQ ID NO: 777544 - DNA, 33 bp, Homo sapien
cctgcccctttaaaaatagcacagatggatgga

SEQ ID NO: 777545 - DNA, 33 bp, Homo sapien
ttgaactagacagtaacgctcagtgtgttgttt

SEQ ID NO: 777546 - DNA, 33 bp, Homo sapien
ttgaactagacagtaatgctcagtgtgttgttt

SEQ ID NO: 777547 - DNA, 33 bp, Homo sapien
ccaaccagttttaaaacgctccatgcaaatact

SEQ ID NO: 777548 - DNA, 33 bp, Homo sapien
ccaaccagttttaaaaggctccatgcaaatact

SEQ ID NO: 777549 - DNA, 33 bp, Homo sapien
ttataatgctagatcacggtgaagtcattttga

SEQ ID NO: 777550 - DNA, 33 bp, Homo sapien
ttataatgctagatcatggtgaagtcattttga

SEQ ID NO: 777551 - DNA, 33 bp, Homo sapien
tctctgccatgtcataaccttgtattgtcctaa

SEQ ID NO: 777552 - DNA, 33 bp, Homo sapien
tctctgccatgtcatagccttgtattgtcctaa

SEQ ID NO: 777553 - DNA, 33 bp, Homo sapien
gtctaaataacaagaacagatgagctcgcgaga

SEQ ID NO: 777554 - DNA, 33 bp, Homo sapien
gtctaaataacaagaatagatgagctcgcgaga

SEQ ID NO: 777555 - DNA, 33 bp, Homo sapien
tatggaaaaaccaagaaggacagtgctaatcac

SEQ ID NO: 777556 - DNA, 33 bp, Homo sapien
tatggaaaaaccaagagggacagtgctaatcac

SEQ ID NO: 777557 - DNA, 33 bp, Homo sapien
agacccataaccttgaactaggttccatcacac

SEQ ID NO: 777558 - DNA, 33 bp, Homo sapien
agacccataaccttgatctaggttccatcacac

SEQ ID NO: 777559 - DNA, 33 bp, Homo sapien
gagaagaaaccacacaatatgtattaatgtatt

SEQ ID NO: 777560 - DNA, 33 bp, Homo sapien
gagaagaaaccacacagtatgtattaatgtatt

SEQ ID NO: 777561 - DNA, 33 bp, Homo sapien
agaccaggtagagctaagaggtatctgcacttc

SEQ ID NO: 777562 - DNA, 33 bp, Homo sapien
agaccaggtagagctacgaggtatctgcacttc

SEQ ID NO: 777563 - DNA, 33 bp, Homo sapien
ttgacaaagacacaaaagtttcatgatttccca

SEQ ID NO: 777564 - DNA, 33 bp, Homo sapien
ttgacaaagacacaaaggtttcatgatttccca

SEQ ID NO: 777565 - DNA, 33 bp, Homo sapien
acaacatcaatgtcaaacgacagggttaatgct

SEQ ID NO: 777566 - DNA, 33 bp, Homo sapien
acaacatcaatgtcaagcgacagggttaatgct

SEQ ID NO: 777567 - DNA, 33 bp, Homo sapien
ttagtccttcaccaaacactcttgtttattccc

SEQ ID NO: 777568 - DNA, 33 bp, Homo sapien
ttagtccttcaccaaatactcttgtttattccc

SEQ ID NO: 777569 - DNA, 33 bp, Homo sapien
gatcataatgtagttaagattgcttttagggtt

SEQ ID NO: 777570 - DNA, 33 bp, Homo sapien
gatcataatgtagttaggattgcttttagggtt

SEQ ID NO: 777571 - DNA, 33 bp, Homo sapien
aatgacaattggctgtcaaaatctctacggttt

SEQ ID NO: 777572 - DNA, 33 bp, Homo sapien
aatgacaattggctgttaaaatctctacggttt

SEQ ID NO: 777573 - DNA, 33 bp, Homo sapien
ctcctgagcagagcaacggggtggctttggcaa

SEQ ID NO: 777574 - DNA, 33 bp, Homo sapien
ctcctgagcagagcaatggggtggctttggcaa

SEQ ID NO: 777575 - DNA, 33 bp, Homo sapien
cctttgtcctcagagccgctcctcccctgataa

SEQ ID NO: 777576 - DNA, 33 bp, Homo sapien
cctttgtcctcagagctgctcctcccctgataa

SEQ ID NO: 777577 - DNA, 33 bp, Homo sapien
caaagctaccaacagacgaagtgtgcctctagg

SEQ ID NO: 777578 - DNA, 33 bp, Homo sapien
caaagctaccaacagatgaagtgtgcctctagg

SEQ ID NO: 777579 - DNA, 33 bp, Homo sapien
tctgttggtagctttgcatctttttactgtgtc

SEQ ID NO: 777580 - DNA, 33 bp, Homo sapien
tctgttggtagctttgtatctttttactgtgtc

SEQ ID NO: 777581 - DNA, 33 bp, Homo sapien
gttttccacagtaatcacctaataaaccactgg

SEQ ID NO: 777582 - DNA, 33 bp, Homo sapien
gttttccacagtaatcgcctaataaaccactgg

SEQ ID NO: 777583 - DNA, 33 bp, Homo sapien
cagttttcagggcagacggtccccaagcttctc

SEQ ID NO: 777584 - DNA, 33 bp, Homo sapien
cagttttcagggcagatggtccccaagcttctc

SEQ ID NO: 777585 - DNA, 33 bp, Homo sapien; identical to SEQ ID NO: 777583

SEQ ID NO: 777586 - DNA, 33 bp, Homo sapien; identical to SEQ ID NO: 777584

SEQ ID NO: 777587 - DNA, 33 bp, Homo sapien
ccagggccagcctgcaccagcgtgtgccaacct

SEQ ID NO: 777588 - DNA, 33 bp, Homo sapien
ccagggccagcctgcatcagcgtgtgccaacct

SEQ ID NO: 777589 - DNA, 33 bp, Homo sapien
aaaaaagcacagaaaaccatttgaggttccaga

SEQ ID NO: 777590 - DNA, 33 bp, Homo sapien
aaaaaagcacagaaaatcatttgaggttccaga

SEQ ID NO: 777591 - DNA, 33 bp, Homo sapien
tatggaaaagcagaagcaacctcaaatgaagta

SEQ ID NO: 777592 - DNA, 33 bp, Homo sapien
tatggaaaagcagaagtaacctcaaatgaagta

SEQ ID NO: 777593 - DNA, 33 bp, Homo sapien
aggtgacactggcccaagccgtcagaactcagg

SEQ ID NO: 777594 - DNA, 33 bp, Homo sapien
aggtgacactggcccaggccgtcagaactcagg

SEQ ID NO: 777595 - DNA, 33 bp, Homo sapien
caagggctttttaggagaactgttgcagatggt

SEQ ID NO: 777596 - DNA, 33 bp, Homo sapien
caagggctttttaggataactgttgcagatggt

SEQ ID NO: 777597 - DNA, 33 bp, Homo sapien
tttgggtatgaaataacgcttttacctatactc

SEQ ID NO: 777598 - DNA, 33 bp, Homo sapien
tttgggtatgaaataatgcttttacctatactc

SEQ ID NO: 777599 - DNA, 33 bp, Homo sapien
agtgcctacttcacagaaataacaagggaacat

SEQ ID NO: 777600 - DNA, 33 bp, Homo sapien
agtgcctacttcacaggaataacaagggaacat

SEQ ID NO: 777601 - DNA, 33 bp, Homo sapien
gtgctgttccagtggcaccctctgtgctgatgg

SEQ ID NO: 777602 - DNA, 33 bp, Homo sapien
gtgctgttccagtggcgccctctgtgctgatgg

SEQ ID NO: 777603 - DNA, 33 bp, Homo sapien
cctttcagggcatcaagaattaacacttaccat

SEQ ID NO: 777604 - DNA, 33 bp, Homo sapien
cctttcagggcatcaataattaacacttaccat

SEQ ID NO: 777605 - DNA, 33 bp, Homo sapien
agtaaatggcactaaacgtgattaagaaatagg

SEQ ID NO: 777606 - DNA, 33 bp, Homo sapien
agtaaatggcactaaatgtgattaagaaatagg

SEQ ID NO: 777607 - DNA, 33 bp, Homo sapien
tgactgtagacaagaccgagagagaaacaaagc

SEQ ID NO: 777608 - DNA, 33 bp, Homo sapien
tgactgtagacaagactgagagagaaacaaagc

SEQ ID NO: 777609 - DNA, 33 bp, Homo sapien
atcagttgagataaaaatagaactccatttctc

SEQ ID NO: 777610 - DNA, 33 bp, Homo sapien
atcagttgagataaaagtagaactccatttctc

SEQ ID NO: 777611 - DNA, 33 bp, Homo sapien
ttcctaaccacttcaacttatgagatgattaaa

SEQ ID NO: 777612 - DNA, 33 bp, Homo sapien
ttcctaaccacttcaatttatgagatgattaaa

SEQ ID NO: 777613 - DNA, 33 bp, Homo sapien
tacaaaacatgaaacaagtgaaaaatatgaaat

SEQ ID NO: 777614 - DNA, 33 bp, Homo sapien
tacaaaacatgaaacaggtgaaaaatatgaaat

SEQ ID NO: 777615 - DNA, 33 bp, Homo sapien
aacttacagaaaagctcaaggatatccactatt

SEQ ID NO: 777616 - DNA, 33 bp, Homo sapien
aacttacagaaaagctgaaggatatccactatt

SEQ ID NO: 777617 - DNA, 33 bp, Homo sapien
tttggtcatgctgtaacgcgagctggacagagt

SEQ ID NO: 777618 - DNA, 33 bp, Homo sapien
tttggtcatgctgtaatgcgagctggacagagt

SEQ ID NO: 777619 - DNA, 33 bp, Homo sapien
ggtagctacccattgaagtttaccatcccttac

SEQ ID NO: 777620 - DNA, 33 bp, Homo sapien
ggtagctacccattgaggtttaccatcccttac

SEQ ID NO: 777621 - DNA, 33 bp, Homo sapien
gtcacttctcctcctaataaagatacacagagg

SEQ ID NO: 777622 - DNA, 33 bp, Homo sapien
gtcacttctcctcctagtaaagatacacagagg

SEQ ID NO: 777623 - DNA, 33 bp, Homo sapien
ccacatcaaggaaaaactggcaaaccgagaggg

SEQ ID NO: 777624 - DNA, 33 bp, Homo sapien
ccacatcaaggaaaaattggcaaaccgagaggg

SEQ ID NO: 777625 - DNA, 33 bp, Homo sapien
gtggttgaaccagaacacaaacacggtcctgac

SEQ ID NO: 777626 - DNA, 33 bp, Homo sapien
gtggttgaaccagaacgcaaacacggtcctgac

SEQ ID NO: 777627 - DNA, 33 bp, Homo sapien
ggatagcaatttttaaccatgttcagtgtgaag

SEQ ID NO: 777628 - DNA, 33 bp, Homo sapien
ggatagcaatttttaagcatgttcagtgtgaag

SEQ ID NO: 777629 - DNA, 33 bp, Homo sapien
tcaagggtagttttgacgacacaaagtctgcct

SEQ ID NO: 777630 - DNA, 33 bp, Homo sapien
tcaagggtagttttgatgacacaaagtctgcct

SEQ ID NO: 777631 - DNA, 33 bp, Homo sapien
taatgggacagattgacgtcctatgccttctga

SEQ ID NO: 777632 - DNA, 33 bp, Homo sapien
taatgggacagattgatgtcctatgccttctga

SEQ ID NO: 777633 - DNA, 33 bp, Homo sapien
gtgaggacagtaaaaaggaagacagtaacacca

SEQ ID NO: 777634 - DNA, 33 bp, Homo sapien
gtgaggacagtaaaaatgaagacagtaacacca

SEQ ID NO: 777635 - DNA, 33 bp, Homo sapien
aattttatgttaccccaaatgaacattcctacc

SEQ ID NO: 777636 - DNA, 33 bp, Homo sapien
aattttatgttaccccgaatgaacattcctacc

SEQ ID NO: 777637 - DNA, 33 bp, Homo sapien
gagagggcaggataaagaagatggattgaattt

SEQ ID NO: 777638 - DNA, 33 bp, Homo sapien
gagagggcaggataaataagatggattgaattt

SEQ ID NO: 777639 - DNA, 33 bp, Homo sapien
ggcagttagttattcaacaccaacagaaaccaa

SEQ ID NO: 777640 - DNA, 33 bp, Homo sapien
ggcagttagttattcagcaccaacagaaaccaa

SEQ ID NO: 777641 - DNA, 33 bp, Homo sapien
gcacttgttttgcatacaaccctggggctattt

SEQ ID NO: 777642 - DNA, 33 bp, Homo sapien
gcacttgttttgcatataaccctggggctattt

SEQ ID NO: 777643 - DNA, 33 bp, Homo sapien
atagtcttctgtaacaagggagttgggagtaga

SEQ ID NO: 777644 - DNA, 33 bp, Homo sapien
atagtcttctgtaacaggggagttgggagtaga

SEQ ID NO: 777645 - DNA, 33 bp, Homo sapien
tcctcctgcaggccaaatctcacatcctattct

SEQ ID NO: 777646 - DNA, 33 bp, Homo sapien
tcctcctgcaggccaagtctcacatcctattct

SEQ ID NO: 777647 - DNA, 33 bp, Homo sapien
aatgttagccctgtgcccattgttttatatcat

SEQ ID NO: 777648 - DNA, 33 bp, Homo sapien
aatgttagccctgtgcgcattgttttatatcat

SEQ ID NO: 777649 - DNA, 33 bp, Homo sapien
taaatctagatggtaacaaaaaagagtaaaagc

SEQ ID NO: 777650 - DNA, 33 bp, Homo sapien
taaatctagatggtaataaaaaagagtaaaagc

SEQ ID NO: 777651 - DNA, 33 bp, Homo sapien
tctgtgatctgacgcaatatgtgttcctattga

SEQ ID NO: 777652 - DNA, 33 bp, Homo sapien
tctgtgatctgacgcagtatgtgttcctattga

SEQ ID NO: 777653 - DNA, 33 bp, Homo sapien
aggcttttaatgaagcaaggagtgttcaggagg

SEQ ID NO: 777654 - DNA, 33 bp, Homo sapien
aggcttttaatgaagccaggagtgttcaggagg

SEQ ID NO: 777655 - DNA, 33 bp, Homo sapien
gtggttagtatgaataccgatggacaggttccc

SEQ ID NO: 777656 - DNA, 33 bp, Homo sapien
gtggttagtatgaatagcgatggacaggttccc

SEQ ID NO: 777657 - DNA, 33 bp, Homo sapien
tgctcatccttaagaagtggtggtttaggccgg

SEQ ID NO: 777658 - DNA, 33 bp, Homo sapien
tgctcatccttaagaattggtggtttaggccgg

SEQ ID NO: 777659 - DNA, 33 bp, Homo sapien
ttttagcatcattttacgacagagaattaactc

SEQ ID NO: 777660 - DNA, 33 bp, Homo sapien
ttttagcatcattttatgacagagaattaactc

SEQ ID NO: 777661 - DNA, 33 bp, Homo sapien
actttaggcactatcaataaaaaaacatacatg

SEQ ID NO: 777662 - DNA, 33 bp, Homo sapien
actttaggcactatcagtaaaaaaacatacatg

SEQ ID NO: 777663 - DNA, 33 bp, Homo sapien
tggtaatcttgacctcacttttactgaaatctt

SEQ ID NO: 777664 - DNA, 33 bp, Homo sapien
tggtaatcttgacctcgcttttactgaaatctt

SEQ ID NO: 777665 - DNA, 33 bp, Homo sapien
taagaaagtggattgaaaataggatatatacac

SEQ ID NO: 777666 - DNA, 33 bp, Homo sapien
taagaaagtggattgagaataggatatatacac

SEQ ID NO: 777667 - DNA, 33 bp, Homo sapien
gtggtcaaggctagataaaattattcaaaccct

SEQ ID NO: 777668 - DNA, 33 bp, Homo sapien
gtggtcaaggctagatgaaattattcaaaccct

SEQ ID NO: 777669 - DNA, 33 bp, Homo sapien
ccaagagcacagtaagaaggaagctatgtctct

SEQ ID NO: 777670 - DNA, 33 bp, Homo sapien
ccaagagcacagtaaggaggaagctatgtctct

SEQ ID NO: 777671 - DNA, 33 bp, Homo sapien
tcaagtttggctgaaacatgtatttgtgcaggt

SEQ ID NO: 777672 - DNA, 33 bp, Homo sapien
tcaagtttggctgaaatatgtatttgtgcaggt

SEQ ID NO: 777673 - DNA, 33 bp, Homo sapien
aaaaaagcaaaaaggcaaagatctgaaataaat

SEQ ID NO: 777674 - DNA, 33 bp, Homo sapien
aaaaaagcaaaaaggcgaagatctgaaataaat

SEQ ID NO: 777675 - DNA, 33 bp, Homo sapien
cagatttgattagatgaaggctttattttttga

SEQ ID NO: 777676 - DNA, 33 bp, Homo sapien
cagatttgattagatgcaggctttattttttga

SEQ ID NO: 777677 - DNA, 33 bp, Homo sapien
aaataataaaatgaaccaagtgcctcctaaact

SEQ ID NO: 777678 - DNA, 33 bp, Homo sapien
aaataataaaatgaacgaagtgcctcctaaact

SEQ ID NO: 777679 - DNA, 33 bp, Homo sapien
taacttggtgagaaaaataggtccttttgggga

SEQ ID NO: 777680 - DNA, 33 bp, Homo sapien
taacttggtgagaaaagtaggtccttttgggga

SEQ ID NO: 777681 - DNA, 33 bp, Homo sapien
catttattgacggtccactaaaggccaagcaat

SEQ ID NO: 777682 - DNA, 33 bp, Homo sapien
catttattgacggtccgctaaaggccaagcaat

SEQ ID NO: 777683 - DNA, 33 bp, Homo sapien
cctctctactttaggagcatctgttcatgtgtt

SEQ ID NO: 777684 - DNA, 33 bp, Homo sapien
cctctctactttaggatcatctgttcatgtgtt

SEQ ID NO: 777685 - DNA, 33 bp, Homo sapien
ctcatttttagagtgccgactgtatgccgttta

SEQ ID NO: 777686 - DNA, 33 bp, Homo sapien
ctcatttttagagtgctgactgtatgccgttta

SEQ ID NO: 777687 - DNA, 33 bp, Homo sapien
cgacatctctcagcacaggaaaatgagctggac

SEQ ID NO: 777688 - DNA, 33 bp, Homo sapien
cgacatctctcagcacgggaaaatgagctggac

SEQ ID NO: 777689 - DNA, 33 bp, Homo sapien
gatgggtcgtttgaacccactgatccaagaaca

SEQ ID NO: 777690 - DNA, 33 bp, Homo sapien
gatgggtcgtttgaactcactgatccaagaaca

SEQ ID NO: 777691 - DNA, 33 bp, Homo sapien
accaaaacaacagcaaattccattcctttttgt

SEQ ID NO: 777692 - DNA, 33 bp, Homo sapien
accaaaacaacagcaagttccattcctttttgt

SEQ ID NO: 777693 - DNA, 33 bp, Homo sapien
gggcatagtgtggggaactaacaagggccacgg

SEQ ID NO: 777694 - DNA, 33 bp, Homo sapien
gggcatagtgtggggatctaacaagggccacgg

SEQ ID NO: 777695 - DNA, 33 bp, Homo sapien
aatgattacgatagacacatttgagatgattgg

SEQ ID NO: 777696 - DNA, 33 bp, Homo sapien
aatgattacgatagacgcatttgagatgattgg

SEQ ID NO: 777697 - DNA, 33 bp, Homo sapien
tctatcaaagtgacataagaagaattgactgca

SEQ ID NO: 777698 - DNA, 33 bp, Homo sapien
tctatcaaagtgacatgagaagaattgactgca

SEQ ID NO: 777699 - DNA, 33 bp, Homo sapien
tgtgtggttgaatacacagcagatttgtcgtgt

SEQ ID NO: 777700 - DNA, 33 bp, Homo sapien
tgtgtggttgaatacatagcagatttgtcgtgt

SEQ ID NO: 777701 - DNA, 33 bp, Homo sapien
caacacaacgtatgtgaactgtgccaggaaact

SEQ ID NO: 777702 - DNA, 33 bp, Homo sapien
caacacaacgtatgtggactgtgccaggaaact

SEQ ID NO: 777703 - DNA, 33 bp, Homo sapien
acgttgtgttggctcacgtctttgtggctgtga

SEQ ID NO: 777704 - DNA, 33 bp, Homo sapien
acgttgtgttggctcatgtctttgtggctgtga

SEQ ID NO: 777705 - DNA, 33 bp, Homo sapien
tcatgaccagaaataaaatctctccgggaacga

SEQ ID NO: 777706 - DNA, 33 bp, Homo sapien
tcatgaccagaaataacatctctccgggaacga

SEQ ID NO: 777707 - DNA, 33 bp, Homo sapien
catgaatagtacttgacggcataagactgtgat

SEQ ID NO: 777708 - DNA, 33 bp, Homo sapien
catgaatagtacttgatggcataagactgtgat

SEQ ID NO: 777709 - DNA, 33 bp, Homo sapien
gtggatcaatgtattcacgggttaatgggttat

SEQ ID NO: 777710 - DNA, 33 bp, Homo sapien
gtggatcaatgtattcccgggttaatgggttat

SEQ ID NO: 777711 - DNA, 33 bp, Homo sapien
cttcttcttacaaagccacaagtcccactctca

SEQ ID NO: 777712 - DNA, 33 bp, Homo sapien
cttcttcttacaaagctacaagtcccactctca

SEQ ID NO: 777713 - DNA, 33 bp, Homo sapien
aataagaatgaagcccaaaacaaaaacatggtc

SEQ ID NO: 777714 - DNA, 33 bp, Homo sapien
aataagaatgaagcccgaaacaaaaacatggtc

SEQ ID NO: 777715 - DNA, 33 bp, Homo sapien
atacatctactgctacccaatggcactcttttt

SEQ ID NO: 777716 - DNA, 33 bp, Homo sapien
atacatctactgctactcaatggcactcttttt

SEQ ID NO: 777717 - DNA, 33 bp, Homo sapien
ataacatctagggaccagagaaagagcctttat

SEQ ID NO: 777718 - DNA, 33 bp, Homo sapien
ataacatctagggaccggagaaagagcctttat

SEQ ID NO: 777719 - DNA, 33 bp, Homo sapien
acaggaggctgtaagacaatagaaaccaagctt

SEQ ID NO: 777720 - DNA, 33 bp, Homo sapien
acaggaggctgtaagataatagaaaccaagctt

SEQ ID NO: 777721 - DNA, 33 bp, Homo sapien
accctgagacaactcactctccaattctccacg

SEQ ID NO: 777722 - DNA, 33 bp, Homo sapien
accctgagacaactcattctccaattctccacg

SEQ ID NO: 777723 - DNA, 33 bp, Homo sapien
aggctaataggtttgacaaatttgtatttttct

SEQ ID NO: 777724 - DNA, 33 bp, Homo sapien
aggctaataggtttgataaatttgtatttttct

SEQ ID NO: 777725 - DNA, 33 bp, Homo sapien
catctctgtcacttaccaggttatactcatcaa

SEQ ID NO: 777726 - DNA, 33 bp, Homo sapien
catctctgtcacttactaggttatactcatcaa

SEQ ID NO: 777727 - DNA, 33 bp, Homo sapien
agttgatatagttagaagagtattaagaccagt

SEQ ID NO: 777728 - DNA, 33 bp, Homo sapien
agttgatatagttagacgagtattaagaccagt

SEQ ID NO: 777729 - DNA, 33 bp, Homo sapien
aaaacgggctatcccacgttcacactaataaca

SEQ ID NO: 777730 - DNA, 33 bp, Homo sapien
aaaacgggctatcccatgttcacactaataaca

SEQ ID NO: 777731 - DNA, 33 bp, Homo sapien
gcactcatacttaaccagcataataaaaatgat

SEQ ID NO: 777732 - DNA, 33 bp, Homo sapien
gcactcatacttaacctgcataataaaaatgat

SEQ ID NO: 777733 - DNA, 33 bp, Homo sapien
cctctccataaagtgcagataataatatagcac

SEQ ID NO: 777734 - DNA, 33 bp, Homo sapien
cctctccataaagtgcggataataatatagcac

SEQ ID NO: 777735 - DNA, 33 bp, Homo sapien
aggctgcgatagcccactgcttcctctcgctct

SEQ ID NO: 777736 - DNA, 33 bp, Homo sapien
aggctgcgatagcccattgcttcctctcgctct

SEQ ID NO: 777737 - DNA, 33 bp, Homo sapien
aatattttagcaagtacattctgaactctgaaa

SEQ ID NO: 777738 - DNA, 33 bp, Homo sapien
aatattttagcaagtatattctgaactctgaaa

SEQ ID NO: 777739 - DNA, 33 bp, Homo sapien
taccagatttcctggaagagcgatatatattta

SEQ ID NO: 777740 - DNA, 33 bp, Homo sapien
taccagatttcctggaggagcgatatatattta

SEQ ID NO: 777741 - DNA, 33 bp, Homo sapien
aaaaatgttcatagaaataatggccaaaatttt

SEQ ID NO: 777742 - DNA, 33 bp, Homo sapien
aaaaatgttcatagaagtaatggccaaaatttt

SEQ ID NO: 777743 - DNA, 33 bp, Homo sapien
agtgaacagaaatgcaagaacagaaacccagac

SEQ ID NO: 777744 - DNA, 33 bp, Homo sapien
agtgaacagaaatgcaggaacagaaacccagac

SEQ ID NO: 777745 - DNA, 33 bp, Homo sapien
agtgattttcaagacaatagactgcaaggaatg

SEQ ID NO: 777746 - DNA, 33 bp, Homo sapien
agtgattttcaagacactagactgcaaggaatg

SEQ ID NO: 777747 - DNA, 33 bp, Homo sapien
gagattagcattcaaacataaggaaccataaaa

SEQ ID NO: 777748 - DNA, 33 bp, Homo sapien
gagattagcattcaaatataaggaaccataaaa

SEQ ID NO: 777749 - DNA, 33 bp, Homo sapien
aaagcctctcatgggagattctggctaggacag

SEQ ID NO: 777750 - DNA, 33 bp, Homo sapien
aaagcctctcatgggatattctggctaggacag

SEQ ID NO: 777751 - DNA, 33 bp, Homo sapien
agccttctattccagacagttttgtattctgtc

SEQ ID NO: 777752 - DNA, 33 bp, Homo sapien
agccttctattccagatagttttgtattctgtc

SEQ ID NO: 777753 - DNA, 33 bp, Homo sapien
tgagaacatattcacaatagggctgtgcttttt

SEQ ID NO: 777754 - DNA, 33 bp, Homo sapien
tgagaacatattcacagtagggctgtgcttttt

SEQ ID NO: 777755 - DNA, 33 bp, Homo sapien
aagaggcaaaccgtcaataatgagatggtttgg

SEQ ID NO: 777756 - DNA, 33 bp, Homo sapien
aagaggcaaaccgtcagtaatgagatggtttgg

SEQ ID NO: 777757 - DNA, 33 bp, Homo sapien
caaagagcacagaaaaatactgaactccagaaa

SEQ ID NO: 777758 - DNA, 33 bp, Homo sapien
caaagagcacagaaaattactgaactccagaaa

SEQ ID NO: 777759 - DNA, 33 bp, Homo sapien
aggacacatttctcacagtccctatcatcagga

SEQ ID NO: 777760 - DNA, 33 bp, Homo sapien
aggacacatttctcacggtccctatcatcagga

SEQ ID NO: 777761 - DNA, 33 bp, Homo sapien
gttttctgttagactcaactacataattatgag

SEQ ID NO: 777762 - DNA, 33 bp, Homo sapien
gttttctgttagactcgactacataattatgag

SEQ ID NO: 777763 - DNA, 33 bp, Homo sapien
tcaggcctcacacaaacgttaaaaactcagatt

SEQ ID NO: 777764 - DNA, 33 bp, Homo sapien
tcaggcctcacacaaatgttaaaaactcagatt

SEQ ID NO: 777765 - DNA, 33 bp, Homo sapien
ttctggtaaatacagccaagaatttgctctctt

SEQ ID NO: 777766 - DNA, 33 bp, Homo sapien
ttctggtaaatacagctaagaatttgctctctt

SEQ ID NO: 777767 - DNA, 33 bp, Homo sapien
atttttcaagctgtcaaataaaattgtgtttta

SEQ ID NO: 777768 - DNA, 33 bp, Homo sapien
atttttcaagctgtcagataaaattgtgtttta

SEQ ID NO: 777769 - DNA, 33 bp, Homo sapien
tggaaggtgttgattcgcactgctataagttgc

SEQ ID NO: 777770 - DNA, 33 bp, Homo sapien
tggaaggtgttgattctcactgctataagttgc

SEQ ID NO: 777771 - DNA, 33 bp, Homo sapien
actgagggttagagagactaagtgctcagccct

SEQ ID NO: 777772 - DNA, 33 bp, Homo sapien
actgagggttagagaggctaagtgctcagccct

SEQ ID NO: 777773 - DNA, 33 bp, Homo sapien
atgtaggggtgagacacgataaaaaaccttgca

SEQ ID NO: 777774 - DNA, 33 bp, Homo sapien
atgtaggggtgagacatgataaaaaaccttgca

SEQ ID NO: 777775 - DNA, 33 bp, Homo sapien
tctgggaaacgctgagaacatgggggactgaaa

SEQ ID NO: 777776 - DNA, 33 bp, Homo sapien
tctgggaaacgctgaggacatgggggactgaaa

SEQ ID NO: 777777 - DNA, 33 bp, Homo sapien
gcctgtaactctccaacctaactcatgccacgc

SEQ ID NO: 777778 - DNA, 33 bp, Homo sapien
gcctgtaactctccaagctaactcatgccacgc

SEQ ID NO: 777779 - DNA, 33 bp, Homo sapien
cggttcagcaattgataagctatattttccctg

SEQ ID NO: 777780 - DNA, 33 bp, Homo sapien
cggttcagcaattgatgagctatattttccctg

SEQ ID NO: 777781 - DNA, 33 bp, Homo sapien
aaatattttgtggttacgtactatgtgctattt

SEQ ID NO: 777782 - DNA, 33 bp, Homo sapien
aaatattttgtggttatgtactatgtgctattt

SEQ ID NO: 777783 - DNA, 33 bp, Homo sapien
catatacagtgttaatgagttaatgagttgaat

SEQ ID NO: 777784 - DNA, 33 bp, Homo sapien
catatacagtgttaattagttaatgagttgaat

SEQ ID NO: 777785 - DNA, 33 bp, Homo sapien
cactttatcttacagagtaggatgtcaggttcg

SEQ ID NO: 777786 - DNA, 33 bp, Homo sapien
cactttatcttacagattaggatgtcaggttcg

SEQ ID NO: 777787 - DNA, 33 bp, Homo sapien
gcaaatcagaccaaacaggaatggagtcactca

SEQ ID NO: 777788 - DNA, 33 bp, Homo sapien
gcaaatcagaccaaacgggaatggagtcactca

SEQ ID NO: 777789 - DNA, 33 bp, Homo sapien
aattaaccatcacatcaatctaacatgggctgg

SEQ ID NO: 777790 - DNA, 33 bp, Homo sapien
aattaaccatcacatccatctaacatgggctgg

SEQ ID NO: 777791 - DNA, 33 bp, Homo sapien
gtcattcagaagttcactctacagtactcatag

SEQ ID NO: 777792 - DNA, 33 bp, Homo sapien
gtcattcagaagttcattctacagtactcatag

SEQ ID NO: 777793 - DNA, 33 bp, Homo sapien
catcccaagagagctacgaaaaataattagtag

SEQ ID NO: 777794 - DNA, 33 bp, Homo sapien
catcccaagagagctatgaaaaataattagtag

SEQ ID NO: 777795 - DNA, 33 bp, Homo sapien
gctcagagccatacttcaaacagatagattcta

SEQ ID NO: 777796 - DNA, 33 bp, Homo sapien
gctcagagccatactttaaacagatagattcta

SEQ ID NO: 777797 - DNA, 33 bp, Homo sapien
attcctagctttttgaacagtggacaatctggt

SEQ ID NO: 777798 - DNA, 33 bp, Homo sapien
attcctagctttttgatcagtggacaatctggt

SEQ ID NO: 777799 - DNA, 33 bp, Homo sapien
cctacaagatgttcagaaacacaacagaccaat

SEQ ID NO: 777800 - DNA, 33 bp, Homo sapien
cctacaagatgttcaggaacacaacagaccaat

SEQ ID NO: 777801 - DNA, 33 bp, Homo sapien
tactggatctgaagcaagagatctgtgggtgtc

SEQ ID NO: 777802 - DNA, 33 bp, Homo sapien
tactggatctgaagcaggagatctgtgggtgtc

SEQ ID NO: 777803 - DNA, 33 bp, Homo sapien
aatgtcttctcagcaacttccccgtttactttc

SEQ ID NO: 777804 - DNA, 33 bp, Homo sapien
aatgtcttctcagcaatttccccgtttactttc

SEQ ID NO: 777805 - DNA, 33 bp, Homo sapien
gagacagagaaatctaataaccgaagagtacgt

SEQ ID NO: 777806 - DNA, 33 bp, Homo sapien
gagacagagaaatctagtaaccgaagagtacgt

SEQ ID NO: 777807 - DNA, 33 bp, Homo sapien
ttatcaactagttacaaattaggttctcacaac

SEQ ID NO: 777808 - DNA, 33 bp, Homo sapien
ttatcaactagttacatattaggttctcacaac

SEQ ID NO: 777809 - DNA, 33 bp, Homo sapien
ctcttgttgtataaacaatcagtgctcttacag

SEQ ID NO: 777810 - DNA, 33 bp, Homo sapien
ctcttgttgtataaactatcagtgctcttacag

SEQ ID NO: 777811 - DNA, 33 bp, Homo sapien
caatatccagggagtccacttccttcctacatc

SEQ ID NO: 777812 - DNA, 33 bp, Homo sapien
caatatccagggagtctacttccttcctacatc

SEQ ID NO: 777813 - DNA, 33 bp, Homo sapien
cccagcctggcaaagacgtggtccttgaccttc

SEQ ID NO: 777814 - DNA, 33 bp, Homo sapien
cccagcctggcaaagatgtggtccttgaccttc

SEQ ID NO: 777815 - DNA, 33 bp, Homo sapien
ggggtcctctaggctcacccattctttcactcc

SEQ ID NO: 777816 - DNA, 33 bp, Homo sapien
ggggtcctctaggctcgcccattctttcactcc

SEQ ID NO: 777817 - DNA, 33 bp, Homo sapien
agacccttttatgtcacgtgccactgtcttttc

SEQ ID NO: 777818 - DNA, 33 bp, Homo sapien
agacccttttatgtcatgtgccactgtcttttc

SEQ ID NO: 777819 - DNA, 33 bp, Homo sapien
aaagatacaatgctaaaaggttcctaattgtag

SEQ ID NO: 777820 - DNA, 33 bp, Homo sapien
aaagatacaatgctaagaggttcctaattgtag

SEQ ID NO: 777821 - DNA, 33 bp, Homo sapien
gttctagaaagctcatcatataacagattccaa

SEQ ID NO: 777822 - DNA, 33 bp, Homo sapien
gttctagaaagctcattatataacagattccaa

SEQ ID NO: 777823 - DNA, 33 bp, Homo sapien
acaggagaaagtgtcactaaaaaaggtactaag

SEQ ID NO: 777824 - DNA, 33 bp, Homo sapien
acaggagaaagtgtcattaaaaaaggtactaag

SEQ ID NO: 777825 - DNA, 33 bp, Homo sapien
tgtttgatttgtggtgacaatgtgcccagcctc

SEQ ID NO: 777826 - DNA, 33 bp, Homo sapien
tgtttgatttgtggtggcaatgtgcccagcctc

SEQ ID NO: 777827 - DNA, 33 bp, Homo sapien
gcctcctctccatctaagtatggcaatatgact

SEQ ID NO: 777828 - DNA, 33 bp, Homo sapien
gcctcctctccatctacgtatggcaatatgact

SEQ ID NO: 777829 - DNA, 33 bp, Homo sapien
cagttaatatttgaaaattgcattagctcttac

SEQ ID NO: 777830 - DNA, 33 bp, Homo sapien
cagttaatatttgaaagttgcattagctcttac

SEQ ID NO: 777831 - DNA, 33 bp, Homo sapien
tcctgaatatgcttgaagaaggttgcattcttt

SEQ ID NO: 777832 - DNA, 33 bp, Homo sapien
tcctgaatatgcttgaggaaggttgcattcttt

SEQ ID NO: 777833 - DNA, 33 bp, Homo sapien
ttgccaaaggaaaggaaatgctgaatgcagaca

SEQ ID NO: 777834 - DNA, 33 bp, Homo sapien
ttgccaaaggaaaggagatgctgaatgcagaca

SEQ ID NO: 777835 - DNA, 33 bp, Homo sapien
tgtatccagaactcaacgcatctggccctcaca

SEQ ID NO: 777836 - DNA, 33 bp, Homo sapien
tgtatccagaactcaatgcatctggccctcaca

SEQ ID NO: 777837 - DNA, 33 bp, Homo sapien
caagtatttggatgaaacctgttagatggtggg

SEQ ID NO: 777838 - DNA, 33 bp, Homo sapien
caagtatttggatgaaccctgttagatggtggg

SEQ ID NO: 777839 - DNA, 33 bp, Homo sapien
actgaggaagaggtaggccaactgcactggcta

SEQ ID NO: 777840 - DNA, 33 bp, Homo sapien
actgaggaagaggtagtccaactgcactggcta

SEQ ID NO: 777841 - DNA, 33 bp, Homo sapien
agaaagagaaacaagacgccaaagctctccttg

SEQ ID NO: 777842 - DNA, 33 bp, Homo sapien
agaaagagaaacaagatgccaaagctctccttg

SEQ ID NO: 777843 - DNA, 33 bp, Homo sapien
ttgctcttgcctccatcacataaccggtcacat

SEQ ID NO: 777844 - DNA, 33 bp, Homo sapien
ttgctcttgcctccatgacataaccggtcacat

SEQ ID NO: 777845 - DNA, 33 bp, Homo sapien
aggcagaccaggctaacgatgaggtcttggtta

SEQ ID NO: 777846 - DNA, 33 bp, Homo sapien
aggcagaccaggctaaggatgaggtcttggtta

SEQ ID NO: 777847 - DNA, 33 bp, Homo sapien
aaagtatatatctggcgcaactctggacaattg

SEQ ID NO: 777848 - DNA, 33 bp, Homo sapien
aaagtatatatctggctcaactctggacaattg

SEQ ID NO: 777849 - DNA, 33 bp, Homo sapien
gctctcagcaaatcagaagaagagaccttcctc

SEQ ID NO: 777850 - DNA, 33 bp, Homo sapien
gctctcagcaaatcaggagaagagaccttcctc

SEQ ID NO: 777851 - DNA, 33 bp, Homo sapien
gtgtgtgtctgtatgcacctctctttgtctctt

SEQ ID NO: 777852 - DNA, 33 bp, Homo sapien
gtgtgtgtctgtatgcgcctctctttgtctctt

SEQ ID NO: 777853 - DNA, 33 bp, Homo sapien
agagccctatgaaagaaacaccagagtacacca

SEQ ID NO: 777854 - DNA, 33 bp, Homo sapien
agagccctatgaaagagacaccagagtacacca

SEQ ID NO: 777855 - DNA, 33 bp, Homo sapien
cttctgttcccatagaccatatttcgtaaaaga

SEQ ID NO: 777856 - DNA, 33 bp, Homo sapien
cttctgttcccatagagcatatttcgtaaaaga

SEQ ID NO: 777857 - DNA, 33 bp, Homo sapien
ccatgtgccacaccgacgtttcagtgacattta

SEQ ID NO: 777858 - DNA, 33 bp, Homo sapien
ccatgtgccacaccgatgtttcagtgacattta

SEQ ID NO: 777859 - DNA, 33 bp, Homo sapien
acactgtgtgacttcagaggatgggttatcaga

SEQ ID NO: 777860 - DNA, 33 bp, Homo sapien
acactgtgtgacttcataggatgggttatcaga

SEQ ID NO: 777861 - DNA, 33 bp, Homo sapien
agaaagatagtctccccatagagtgcttagaga

SEQ ID NO: 777862 - DNA, 33 bp, Homo sapien
agaaagatagtctccctatagagtgcttagaga

SEQ ID NO: 777863 - DNA, 33 bp, Homo sapien
aatgccctgaagcccacgtggttagttgttgac

SEQ ID NO: 777864 - DNA, 33 bp, Homo sapien
aatgccctgaagcccatgtggttagttgttgac

SEQ ID NO: 777865 - DNA, 33 bp, Homo sapien
ttgaggcacatcatgacacatttattctttaga

SEQ ID NO: 777866 - DNA, 33 bp, Homo sapien
ttgaggcacatcatgagacatttattctttaga

SEQ ID NO: 777867 - DNA, 33 bp, Homo sapien
caaatatttttcacaacgtctggcctttcatgt

SEQ ID NO: 777868 - DNA, 33 bp, Homo sapien
caaatatttttcacaatgtctggcctttcatgt

SEQ ID NO: 777869 - DNA, 33 bp, Homo sapien
tatcacaaagggtgtacggttctcttccccttg

SEQ ID NO: 777870 - DNA, 33 bp, Homo sapien
tatcacaaagggtgtatggttctcttccccttg

SEQ ID NO: 777871 - DNA, 33 bp, Homo sapien
ggtgttctcactaacacggatactcaggatcta

SEQ ID NO: 777872 - DNA, 33 bp, Homo sapien
ggtgttctcactaacatggatactcaggatcta

SEQ ID NO: 777873 - DNA, 33 bp, Homo sapien
tagtgggcctaaccaacatttcccagcaataga

SEQ ID NO: 777874 - DNA, 33 bp, Homo sapien
tagtgggcctaaccaatatttcccagcaataga

SEQ ID NO: 777875 - DNA, 33 bp, Homo sapien
tgagcctcaatcccacaaggaccctctaagaaa

SEQ ID NO: 777876 - DNA, 33 bp, Homo sapien
tgagcctcaatcccacgaggaccctctaagaaa

SEQ ID NO: 777877 - DNA, 33 bp, Homo sapien
tgctgttagagtcagtcaatccaggaaacatac

SEQ ID NO: 777878 - DNA, 33 bp, Homo sapien
tgctgttagagtcagttaatccaggaaacatac

SEQ ID NO: 777879 - DNA, 33 bp, Homo sapien
taagagtccatgataaggttgataaaagagttc

SEQ ID NO: 777880 - DNA, 33 bp, Homo sapien
taagagtccatgataatgttgataaaagagttc

SEQ ID NO: 777881 - DNA, 33 bp, Homo sapien
tgactgctgatttgaccattgttctttgtgcat

SEQ ID NO: 777882 - DNA, 33 bp, Homo sapien
tgactgctgatttgactattgttctttgtgcat

SEQ ID NO: 777883 - DNA, 33 bp, Homo sapien
taaatagttttgaaaacgagaagttgaagcccc

SEQ ID NO: 777884 - DNA, 33 bp, Homo sapien
taaatagttttgaaaaggagaagttgaagcccc

SEQ ID NO: 777885 - DNA, 33 bp, Homo sapien
agggaaggaaaatgagaatctgccagccacaac

SEQ ID NO: 777886 - DNA, 33 bp, Homo sapien
agggaaggaaaatgaggatctgccagccacaac

SEQ ID NO: 777887 - DNA, 33 bp, Homo sapien
cttgtggctagatacaatggaagttgtacataa

SEQ ID NO: 777888 - DNA, 33 bp, Homo sapien
cttgtggctagatacagtggaagttgtacataa

SEQ ID NO: 777889 - DNA, 33 bp, Homo sapien
accagaagtatgttcacaaagctataggtgtag

SEQ ID NO: 777890 - DNA, 33 bp, Homo sapien
accagaagtatgttcataaagctataggtgtag

SEQ ID NO: 777891 - DNA, 33 bp, Homo sapien
gtgctctatgaacatagcaggttactgtcatta

SEQ ID NO: 777892 - DNA, 33 bp, Homo sapien
gtgctctatgaacatatcaggttactgtcatta

SEQ ID NO: 777893 - DNA, 33 bp, Homo sapien
gtactcctaaccactggaaaatgcctgtgttat

SEQ ID NO: 777894 - DNA, 33 bp, Homo sapien
gtactcctaaccactgtaaaatgcctgtgttat

SEQ ID NO: 777895 - DNA, 33 bp, Homo sapien
gagtcttaaaagttaaataacatgtccatagcc

SEQ ID NO: 777896 - DNA, 33 bp, Homo sapien
gagtcttaaaagttaactaacatgtccatagcc

SEQ ID NO: 777897 - DNA, 33 bp, Homo sapien
cactaaccaatgtcataagcagtccagtagctg

SEQ ID NO: 777898 - DNA, 33 bp, Homo sapien
cactaaccaatgtcatgagcagtccagtagctg

SEQ ID NO: 777899 - DNA, 33 bp, Homo sapien
gttcaaaggtacacaccccggtagaagaataga

SEQ ID NO: 777900 - DNA, 33 bp, Homo sapien
gttcaaaggtacacactccggtagaagaataga

SEQ ID NO: 777901 - DNA, 33 bp, Homo sapien
tttttgagtcaaagaactcccatgtgtaacaat

SEQ ID NO: 777902 - DNA, 33 bp, Homo sapien
tttttgagtcaaagaattcccatgtgtaacaat

SEQ ID NO: 777903 - DNA, 33 bp, Homo sapien
tgtatcttatcccttcacattgttacacatggg

SEQ ID NO: 777904 - DNA, 33 bp, Homo sapien
tgtatcttatcccttcgcattgttacacatggg

SEQ ID NO: 777905 - DNA, 33 bp, Homo sapien
cttgatttctctctgacggaaaagacagccttg

SEQ ID NO: 777906 - DNA, 33 bp, Homo sapien
cttgatttctctctgatggaaaagacagccttg

SEQ ID NO: 777907 - DNA, 33 bp, Homo sapien
tttggtcctacaagccaaatgcgtatgttctgt

SEQ ID NO: 777908 - DNA, 33 bp, Homo sapien
tttggtcctacaagcccaatgcgtatgttctgt

SEQ ID NO: 777909 - DNA, 33 bp, Homo sapien
gaccctagcagctgcaaagatagtgtatgcgga

SEQ ID NO: 777910 - DNA, 33 bp, Homo sapien
gaccctagcagctgcagagatagtgtatgcgga

SEQ ID NO: 777911 - DNA, 33 bp, Homo sapien
aggagctatttagaaacgtcagggtttgctggg

SEQ ID NO: 777912 - DNA, 33 bp, Homo sapien
aggagctatttagaaatgtcagggtttgctggg

SEQ ID NO: 777913 - DNA, 33 bp, Homo sapien
actgtgtctgactaataagtatgtgagcttaca

SEQ ID NO: 777914 - DNA, 33 bp, Homo sapien
actgtgtctgactaatgagtatgtgagcttaca

SEQ ID NO: 777915 - DNA, 33 bp, Homo sapien
agaatgaacgtaagaacgatgaagtggatgggc

SEQ ID NO: 777916 - DNA, 33 bp, Homo sapien
agaatgaacgtaagaatgatgaagtggatgggc

SEQ ID NO: 777917 - DNA, 33 bp, Homo sapien
gtgttgcaatgcattggcaacaagttcttagct

SEQ ID NO: 777918 - DNA, 33 bp, Homo sapien
gtgttgcaatgcattgtcaacaagttcttagct

SEQ ID NO: 777919 - DNA, 33 bp, Homo sapien
aaagggaatgtattaacgaaaggtattcagggc

SEQ ID NO: 777920 - DNA, 33 bp, Homo sapien
aaagggaatgtattaatgaaaggtattcagggc

SEQ ID NO: 777921 - DNA, 33 bp, Homo sapien
atgagctttcctaacaccagcataaatatcacc

SEQ ID NO: 777922 - DNA, 33 bp, Homo sapien
atgagctttcctaacatcagcataaatatcacc

SEQ ID NO: 777923 - DNA, 33 bp, Homo sapien
gcttcccgcttccccaagatcagactcagaggg

SEQ ID NO: 777924 - DNA, 33 bp, Homo sapien
gcttcccgcttccccaggatcagactcagaggg

SEQ ID NO: 777925 - DNA, 33 bp, Homo sapien
aaatacatcacagtagaatccttggctcttgat

SEQ ID NO: 777926 - DNA, 33 bp, Homo sapien
aaatacatcacagtaggatccttggctcttgat

SEQ ID NO: 777927 - DNA, 33 bp, Homo sapien
cttctgctcacagagaatagcactatcttcaag

SEQ ID NO: 777928 - DNA, 33 bp, Homo sapien
cttctgctcacagagactagcactatcttcaag

SEQ ID NO: 777929 - DNA, 33 bp, Homo sapien
gccagaagttctaaaacctccaaggtatgtagc

SEQ ID NO: 777930 - DNA, 33 bp, Homo sapien
gccagaagttctaaaatctccaaggtatgtagc

SEQ ID NO: 777931 - DNA, 33 bp, Homo sapien
aaaatgagaaacaatcaaaatcagggctccttc

SEQ ID NO: 777932 - DNA, 33 bp, Homo sapien
aaaatgagaaacaatcgaaatcagggctccttc

SEQ ID NO: 777933 - DNA, 33 bp, Homo sapien
caaggtaaccttagacaaaacacgtattaatct

SEQ ID NO: 777934 - DNA, 33 bp, Homo sapien
caaggtaaccttagaccaaacacgtattaatct

SEQ ID NO: 777935 - DNA, 33 bp, Homo sapien
gagaacatttatttgaccaattcaatcaaccaa

SEQ ID NO: 777936 - DNA, 33 bp, Homo sapien
gagaacatttatttgagcaattcaatcaaccaa

SEQ ID NO: 777937 - DNA, 33 bp, Homo sapien
agcccatagttgctgacctcggtactactgcta

SEQ ID NO: 777938 - DNA, 33 bp, Homo sapien
agcccatagttgctgatctcggtactactgcta

SEQ ID NO: 777939 - DNA, 33 bp, Homo sapien
tagagaactgtctttacgttcacatggcagtct

SEQ ID NO: 777940 - DNA, 33 bp, Homo sapien
tagagaactgtctttatgttcacatggcagtct

SEQ ID NO: 777941 - DNA, 33 bp, Homo sapien
atttgccatttaaaaagtagacgatccctagca

SEQ ID NO: 777942 - DNA, 33 bp, Homo sapien
atttgccatttaaaaattagacgatccctagca

SEQ ID NO: 777943 - DNA, 33 bp, Homo sapien
aatgtagttcccaatacgaatggggcagtaagt

SEQ ID NO: 777944 - DNA, 33 bp, Homo sapien
aatgtagttcccaatatgaatggggcagtaagt

SEQ ID NO: 777945 - DNA, 33 bp, Homo sapien
ggggagccactgtccactattattggagtgtgg

SEQ ID NO: 777946 - DNA, 33 bp, Homo sapien
ggggagccactgtccagtattattggagtgtgg

SEQ ID NO: 777947 - DNA, 33 bp, Homo sapien
cagaaaatagctcagcactttaaaaataaaaga

SEQ ID NO: 777948 - DNA, 33 bp, Homo sapien
cagaaaatagctcagcgctttaaaaataaaaga

SEQ ID NO: 777949 - DNA, 33 bp, Homo sapien
gactttaaagtgcaaccattggatcatctgaag

SEQ ID NO: 777950 - DNA, 33 bp, Homo sapien
gactttaaagtgcaactattggatcatctgaag

SEQ ID NO: 777951 - DNA, 33 bp, Homo sapien
ctcagatgttatcagaagtgccctgggctgcac

SEQ ID NO: 777952 - DNA, 33 bp, Homo sapien
ctcagatgttatcagaggtgccctgggctgcac

SEQ ID NO: 777953 - DNA, 33 bp, Homo sapien
actctgaattaaggccaaggaagaacataccaa

SEQ ID NO: 777954 - DNA, 33 bp, Homo sapien
actctgaattaaggccgaggaagaacataccaa

SEQ ID NO: 777955 - DNA, 33 bp, Homo sapien
aagcttctatgtgctacaactaggctgcgtgct

SEQ ID NO: 777956 - DNA, 33 bp, Homo sapien
aagcttctatgtgctagaactaggctgcgtgct

SEQ ID NO: 777957 - DNA, 33 bp, Homo sapien
atgagaggagttaaaagagtgtgacagtaaaag

SEQ ID NO: 777958 - DNA, 33 bp, Homo sapien
atgagaggagttaaaatagtgtgacagtaaaag

SEQ ID NO: 777959 - DNA, 33 bp, Homo sapien
gtaccatgcttttcacaatgaccctgttctatt

SEQ ID NO: 777960 - DNA, 33 bp, Homo sapien
gtaccatgcttttcacgatgaccctgttctatt

SEQ ID NO: 777961 - DNA, 33 bp, Homo sapien
aagaacttccagtttaaaatgacacctggctag

SEQ ID NO: 777962 - DNA, 33 bp, Homo sapien
aagaacttccagtttacaatgacacctggctag

SEQ ID NO: 777963 - DNA, 33 bp, Homo sapien
tcctgaagcagggaaaaccacacatggcaaaga

SEQ ID NO: 777964 - DNA, 33 bp, Homo sapien
tcctgaagcagggaaacccacacatggcaaaga

SEQ ID NO: 777965 - DNA, 33 bp, Homo sapien
tctgctgtagagaaataagatctcactctcttg

SEQ ID NO: 777966 - DNA, 33 bp, Homo sapien
tctgctgtagagaaattagatctcactctcttg

SEQ ID NO: 777967 - DNA, 33 bp, Homo sapien
tattccaagctaatgacggaagcaagattcata

SEQ ID NO: 777968 - DNA, 33 bp, Homo sapien
tattccaagctaatgatggaagcaagattcata

SEQ ID NO: 777969 - DNA, 33 bp, Homo sapien
caattccagccacatcacctgagttttcaagtg

SEQ ID NO: 777970 - DNA, 33 bp, Homo sapien
caattccagccacatcgcctgagttttcaagtg

SEQ ID NO: 777971 - DNA, 33 bp, Homo sapien
cttccctccctaatacagtacacagaagtgggt

SEQ ID NO: 777972 - DNA, 33 bp, Homo sapien
cttccctccctaatacggtacacagaagtgggt

SEQ ID NO: 777973 - DNA, 33 bp, Homo sapien
gaaaatgtttgtcccacggactcagtgcaaatt

SEQ ID NO: 777974 - DNA, 33 bp, Homo sapien
gaaaatgtttgtcccatggactcagtgcaaatt

SEQ ID NO: 777975 - DNA, 33 bp, Homo sapien
attgcctcaaactctgaatatgcaatattttcc

SEQ ID NO: 777976 - DNA, 33 bp, Homo sapien
attgcctcaaactctgtatatgcaatattttcc

SEQ ID NO: 777977 - DNA, 33 bp, Homo sapien
gaattttcaaagcccaaattttcaatgacaagc

SEQ ID NO: 777978 - DNA, 33 bp, Homo sapien
gaattttcaaagcccagattttcaatgacaagc

SEQ ID NO: 777979 - DNA, 33 bp, Homo sapien
ctgttccataattgcaagttaaaatgctgtaat

SEQ ID NO: 777980 - DNA, 33 bp, Homo sapien
ctgttccataattgcacgttaaaatgctgtaat

SEQ ID NO: 777981 - DNA, 33 bp, Homo sapien
aaactggcttaactcactcagatgtggaagagc

SEQ ID NO: 777982 - DNA, 33 bp, Homo sapien
aaactggcttaactcattcagatgtggaagagc

SEQ ID NO: 777983 - DNA, 33 bp, Homo sapien
gaaaatccattaatgcacgaatggctctaccct

SEQ ID NO: 777984 - DNA, 33 bp, Homo sapien
gaaaatccattaatgcgcgaatggctctaccct

SEQ ID NO: 777985 - DNA, 33 bp, Homo sapien
tgactaagagaaaaaaagtcagaatatggctaa

SEQ ID NO: 777986 - DNA, 33 bp, Homo sapien
tgactaagagaaaaaatgtcagaatatggctaa

SEQ ID NO: 777987 - DNA, 33 bp, Homo sapien
ttgagttgtgcgaaaacgggaaagttatttgtt

SEQ ID NO: 777988 - DNA, 33 bp, Homo sapien
ttgagttgtgcgaaaatgggaaagttatttgtt

SEQ ID NO: 777989 - DNA, 33 bp, Homo sapien
catgttaaagtcctaaacctagtacctcagaat

SEQ ID NO: 777990 - DNA, 33 bp, Homo sapien
catgttaaagtcctaaccctagtacctcagaat

SEQ ID NO: 777991 - DNA, 33 bp, Homo sapien
attctagctgtataacactgaggacaaaggatt

SEQ ID NO: 777992 - DNA, 33 bp, Homo sapien
attctagctgtataaccctgaggacaaaggatt

SEQ ID NO: 777993 - DNA, 33 bp, Homo sapien
tacttcaaaagatacacgcgttaaagttaataa

SEQ ID NO: 777994 - DNA, 33 bp, Homo sapien
tacttcaaaagatacatgcgttaaagttaataa

SEQ ID NO: 777995 - DNA, 33 bp, Homo sapien
atggagagaaaacagcacatattcttaattatg

SEQ ID NO: 777996 - DNA, 33 bp, Homo sapien
atggagagaaaacagctcatattcttaattatg

SEQ ID NO: 777997 - DNA, 33 bp, Homo sapien
attttgcaaactctccagatgtcctaacaataa

SEQ ID NO: 777998 - DNA, 33 bp, Homo sapien
attttgcaaactctccggatgtcctaacaataa

SEQ ID NO: 777999 - DNA, 33 bp, Homo sapien
cccaatcctggtttaaagccaaagcagatggga

SEQ ID NO: 778000 - DNA, 33 bp, Homo sapien
cccaatcctggtttaaggccaaagcagatggga

SEQ ID NO: 778001 - DNA, 33 bp, Homo sapien
gggggtaggggaagccactgtttgtccacttct

SEQ ID NO: 778002 - DNA, 33 bp, Homo sapien
gggggtaggggaagccgctgtttgtccacttct

SEQ ID NO: 778003 - DNA, 33 bp, Homo sapien
aggagctcttaaaatcactaaaaacaaaataac

SEQ ID NO: 778004 - DNA, 33 bp, Homo sapien
aggagctcttaaaatcgctaaaaacaaaataac

SEQ ID NO: 778005 - DNA, 33 bp, Homo sapien
tctgctcaccagccagaagttcagacagagagg

SEQ ID NO: 778006 - DNA, 33 bp, Homo sapien
tctgctcaccagccagcagttcagacagagagg

SEQ ID NO: 778007 - DNA, 33 bp, Homo sapien
agcttaaaatgttgacaacctggctttttacag

SEQ ID NO: 778008 - DNA, 33 bp, Homo sapien
agcttaaaatgttgacgacctggctttttacag

SEQ ID NO: 778009 - DNA, 33 bp, Homo sapien
gtgaactgccatatcccagaaagtgaaacttat

SEQ ID NO: 778010 - DNA, 33 bp, Homo sapien
gtgaactgccatatccgagaaagtgaaacttat

SEQ ID NO: 778011 - DNA, 33 bp, Homo sapien
agaacttggccacaaactgaagaggtgcaacca

SEQ ID NO: 778012 - DNA, 33 bp, Homo sapien
agaacttggccacaaattgaagaggtgcaacca

SEQ ID NO: 778013 - DNA, 33 bp, Homo sapien
gctggaatgatccccacgtgtactgatccacct

SEQ ID NO: 778014 - DNA, 33 bp, Homo sapien
gctggaatgatccccatgtgtactgatccacct

SEQ ID NO: 778015 - DNA, 33 bp, Homo sapien
atttggtatcttcaaacagtgacacccagatct

SEQ ID NO: 778016 - DNA, 33 bp, Homo sapien
atttggtatcttcaaagagtgacacccagatct

SEQ ID NO: 778017 - DNA, 33 bp, Homo sapien
gaaaaatgtaatctaaactggaaccaagaagtc

SEQ ID NO: 778018 - DNA, 33 bp, Homo sapien
gaaaaatgtaatctaatctggaaccaagaagtc

SEQ ID NO: 778019 - DNA, 33 bp, Homo sapien
accctgtgtattgttgcattggaattggatatt

SEQ ID NO: 778020 - DNA, 33 bp, Homo sapien
accctgtgtattgttggattggaattggatatt

SEQ ID NO: 778021 - DNA, 33 bp, Homo sapien
ctctgctatcttatccccactataaattccttt

SEQ ID NO: 778022 - DNA, 33 bp, Homo sapien
ctctgctatcttatcctcactataaattccttt

SEQ ID NO: 778023 - DNA, 33 bp, Homo sapien
tacagggaagtgtagcaagtttgcttgtggtta

SEQ ID NO: 778024 - DNA, 33 bp, Homo sapien
tacagggaagtgtagcgagtttgcttgtggtta

SEQ ID NO: 778025 - DNA, 33 bp, Homo sapien
ttacatacctgatgcacagtaagtagtcactaa

SEQ ID NO: 778026 - DNA, 33 bp, Homo sapien
ttacatacctgatgcatagtaagtagtcactaa

SEQ ID NO: 778027 - DNA, 33 bp, Homo sapien
ttttatcacccaacacaggaaaggattttgctt

SEQ ID NO: 778028 - DNA, 33 bp, Homo sapien
ttttatcacccaacacgggaaaggattttgctt

SEQ ID NO: 778029 - DNA, 33 bp, Homo sapien
atttttgatggaaacccggacattctgggtctc

SEQ ID NO: 778030 - DNA, 33 bp, Homo sapien
atttttgatggaaacctggacattctgggtctc

SEQ ID NO: 778031 - DNA, 33 bp, Homo sapien
atgaccaactatctaacgattttggatcccttt

SEQ ID NO: 778032 - DNA, 33 bp, Homo sapien
atgaccaactatctaatgattttggatcccttt

SEQ ID NO: 778033 - DNA, 33 bp, Homo sapien
tgaattacatagccagaaaaatagtacagttgt

SEQ ID NO: 778034 - DNA, 33 bp, Homo sapien
tgaattacatagccaggaaaatagtacagttgt

SEQ ID NO: 778035 - DNA, 33 bp, Homo sapien
acacagactatttttcaagcctcattttgaatt

SEQ ID NO: 778036 - DNA, 33 bp, Homo sapien
acacagactatttttcgagcctcattttgaatt

SEQ ID NO: 778037 - DNA, 33 bp, Homo sapien
gagtgttctgtgttcaaataagtttgagaaata

SEQ ID NO: 778038 - DNA, 33 bp, Homo sapien
gagtgttctgtgttcagataagtttgagaaata

SEQ ID NO: 778039 - DNA, 33 bp, Homo sapien
tgaattaccctgaacaacattttctgagctgtt

SEQ ID NO: 778040 - DNA, 33 bp, Homo sapien
tgaattaccctgaacagcattttctgagctgtt

SEQ ID NO: 778041 - DNA, 33 bp, Homo sapien
atgaaggcaactttcaagtcaaattgggccacc

SEQ ID NO: 778042 - DNA, 33 bp, Homo sapien
atgaaggcaactttcacgtcaaattgggccacc

SEQ ID NO: 778043 - DNA, 33 bp, Homo sapien
ctgagagctttaagcgaaggttgtacattaaat

SEQ ID NO: 778044 - DNA, 33 bp, Homo sapien
ctgagagctttaagcgcaggttgtacattaaat

SEQ ID NO: 778045 - DNA, 33 bp, Homo sapien
cagctatatcctagtaacaactttacttaataa

SEQ ID NO: 778046 - DNA, 33 bp, Homo sapien
cagctatatcctagtagcaactttacttaataa

SEQ ID NO: 778047 - DNA, 33 bp, Homo sapien
atttctgtttaaagcccattacctttgctcctt

SEQ ID NO: 778048 - DNA, 33 bp, Homo sapien
atttctgtttaaagcctattacctttgctcctt

SEQ ID NO: 778049 - DNA, 33 bp, Homo sapien
atttcacttctaagtacggttatgcattgctta

SEQ ID NO: 778050 - DNA, 33 bp, Homo sapien
atttcacttctaagtatggttatgcattgctta

SEQ ID NO: 778051 - DNA, 33 bp, Homo sapien
ttggctaacactagtcccacagaagaagatccc

SEQ ID NO: 778052 - DNA, 33 bp, Homo sapien
ttggctaacactagtctcacagaagaagatccc

SEQ ID NO: 778053 - DNA, 33 bp, Homo sapien
ctaacttcagcaacacaacaataatacaaacca

SEQ ID NO: 778054 - DNA, 33 bp, Homo sapien
ctaacttcagcaacacgacaataatacaaacca

SEQ ID NO: 778055 - DNA, 33 bp, Homo sapien
tccacagctatgaagacctgtacatccacttag

SEQ ID NO: 778056 - DNA, 33 bp, Homo sapien
tccacagctatgaagatctgtacatccacttag

SEQ ID NO: 778057 - DNA, 33 bp, Homo sapien
tcaggaacacattgcacctctacagggaacctg

SEQ ID NO: 778058 - DNA, 33 bp, Homo sapien
tcaggaacacattgcatctctacagggaacctg

SEQ ID NO: 778059 - DNA, 33 bp, Homo sapien
tccaaaggagtaccacacattcccctttgcgat

SEQ ID NO: 778060 - DNA, 33 bp, Homo sapien
tccaaaggagtaccacgcattcccctttgcgat

SEQ ID NO: 778061 - DNA, 33 bp, Homo sapien
gtaaaaagttcagttcacaggatccatcatgcc

SEQ ID NO: 778062 - DNA, 33 bp, Homo sapien
gtaaaaagttcagttctcaggatccatcatgcc

SEQ ID NO: 778063 - DNA, 33 bp, Homo sapien
ctattgactcctcaacacatggcccattactac

SEQ ID NO: 778064 - DNA, 33 bp, Homo sapien
ctattgactcctcaactcatggcccattactac

SEQ ID NO: 778065 - DNA, 33 bp, Homo sapien
atagactggggtggaaatctttggacaaatcca

SEQ ID NO: 778066 - DNA, 33 bp, Homo sapien
atagactggggtggaagtctttggacaaatcca

SEQ ID NO: 778067 - DNA, 33 bp, Homo sapien
gaacatctcagggttcaaggttaggctaacaga

SEQ ID NO: 778068 - DNA, 33 bp, Homo sapien
gaacatctcagggttcgaggttaggctaacaga

SEQ ID NO: 778069 - DNA, 33 bp, Homo sapien
tcctgatctgacagcacactaaaaagcattagg

SEQ ID NO: 778070 - DNA, 33 bp, Homo sapien
tcctgatctgacagcatactaaaaagcattagg

SEQ ID NO: 778071 - DNA, 33 bp, Homo sapien
ttccactggtcaccacaaaggtcatgctattct

SEQ ID NO: 778072 - DNA, 33 bp, Homo sapien
ttccactggtcaccacgaaggtcatgctattct

SEQ ID NO: 778073 - DNA, 33 bp, Homo sapien
gtgctcagatgaaggcgctgtgctatgatgagc

SEQ ID NO: 778074 - DNA, 33 bp, Homo sapien
gtgctcagatgaaggctctgtgctatgatgagc

SEQ ID NO: 778075 - DNA, 33 bp, Homo sapien
cagtgacgcactgaaaagttcctctgacagtgg

SEQ ID NO: 778076 - DNA, 33 bp, Homo sapien
cagtgacgcactgaaaggttcctctgacagtgg

SEQ ID NO: 778077 - DNA, 33 bp, Homo sapien
gttcctaactttggacaagcaacggctcttctg

SEQ ID NO: 778078 - DNA, 33 bp, Homo sapien
gttcctaactttggaccagcaacggctcttctg

SEQ ID NO: 778079 - DNA, 33 bp, Homo sapien
tttctgaaatgttgaccgagtaaaatcaaaata

SEQ ID NO: 778080 - DNA, 33 bp, Homo sapien
tttctgaaatgttgactgagtaaaatcaaaata

SEQ ID NO: 778081 - DNA, 33 bp, Homo sapien
tctctgctttggtatacacaggaatttgacctg

SEQ ID NO: 778082 - DNA, 33 bp, Homo sapien
tctctgctttggtatatacaggaatttgacctg

SEQ ID NO: 778083 - DNA, 33 bp, Homo sapien
actgacctggagcctccagagcaagggtcagga

SEQ ID NO: 778084 - DNA, 33 bp, Homo sapien
actgacctggagcctctagagcaagggtcagga

SEQ ID NO: 778085 - DNA, 33 bp, Homo sapien
atgcagggtttatgtcactgtccgaactgggag

SEQ ID NO: 778086 - DNA, 33 bp, Homo sapien
atgcagggtttatgtcgctgtccgaactgggag

SEQ ID NO: 778087 - DNA, 33 bp, Homo sapien
gctctaggtctccccaatggcacttagaacaat

SEQ ID NO: 778088 - DNA, 33 bp, Homo sapien
gctctaggtctccccagtggcacttagaacaat

SEQ ID NO: 778089 - DNA, 33 bp, Homo sapien
gatatgggtgttaaccaaaagcaatgcacatct

SEQ ID NO: 778090 - DNA, 33 bp, Homo sapien
gatatgggtgttaacctaaagcaatgcacatct

SEQ ID NO: 778091 - DNA, 33 bp, Homo sapien
tcttccccaatactaactctcgcaacatgggct

SEQ ID NO: 778092 - DNA, 33 bp, Homo sapien
tcttccccaatactaagtctcgcaacatgggct

SEQ ID NO: 778093 - DNA, 33 bp, Homo sapien
tactatgttaagttaacggtgcaagacaagtgg

SEQ ID NO: 778094 - DNA, 33 bp, Homo sapien
tactatgttaagttaatggtgcaagacaagtgg

SEQ ID NO: 778095 - DNA, 33 bp, Homo sapien
tattgaactcctactacgtttgaggcactggag

SEQ ID NO: 778096 - DNA, 33 bp, Homo sapien
tattgaactcctactatgtttgaggcactggag

SEQ ID NO: 778097 - DNA, 33 bp, Homo sapien
caacaaataaaagaacaagtgtactcattaaga

SEQ ID NO: 778098 - DNA, 33 bp, Homo sapien
caacaaataaaagaacgagtgtactcattaaga

SEQ ID NO: 778099 - DNA, 33 bp, Homo sapien
gcaaagataaaataagcctggatccctagtgct

SEQ ID NO: 778100 - DNA, 33 bp, Homo sapien
gcaaagataaaataagtctggatccctagtgct

SEQ ID NO: 778101 - DNA, 33 bp, Homo sapien
caaactgtctcggaggaaagttcaggcatggga

SEQ ID NO: 778102 - DNA, 33 bp, Homo sapien
caaactgtctcggagggaagttcaggcatggga

SEQ ID NO: 778103 - DNA, 33 bp, Homo sapien
caaacctcatatttagcaggagaaggctgctaa

SEQ ID NO: 778104 - DNA, 33 bp, Homo sapien
caaacctcatatttagtaggagaaggctgctaa

SEQ ID NO: 778105 - DNA, 33 bp, Homo sapien
tgtgaatcactgctgacgctggaggatgggcag

SEQ ID NO: 778106 - DNA, 33 bp, Homo sapien
tgtgaatcactgctgatgctggaggatgggcag

SEQ ID NO: 778107 - DNA, 33 bp, Homo sapien
gggtttgacctacaaaagtgaggaggccgagag

SEQ ID NO: 778108 - DNA, 33 bp, Homo sapien
gggtttgacctacaaacgtgaggaggccgagag

SEQ ID NO: 778109 - DNA, 33 bp, Homo sapien
ttgttatacatttccaacacatcaatcttaaac

SEQ ID NO: 778110 - DNA, 33 bp, Homo sapien
ttgttatacatttccagcacatcaatcttaaac

SEQ ID NO: 778111 - DNA, 33 bp, Homo sapien
aaccaattcataaagaatacatacaaatctggc

SEQ ID NO: 778112 - DNA, 33 bp, Homo sapien
aaccaattcataaagagtacatacaaatctggc

SEQ ID NO: 778113 - DNA, 33 bp, Homo sapien
tccaaaagtgagaccaatgaatactaagttctt

SEQ ID NO: 778114 - DNA, 33 bp, Homo sapien
tccaaaagtgagaccagtgaatactaagttctt

SEQ ID NO: 778115 - DNA, 33 bp, Homo sapien
aaacttgaactttccacacataaactcagggca

SEQ ID NO: 778116 - DNA, 33 bp, Homo sapien
aaacttgaactttccatacataaactcagggca

SEQ ID NO: 778117 - DNA, 33 bp, Homo sapien
atatagcgagatttctaaacgtctctgagccat

SEQ ID NO: 778118 - DNA, 33 bp, Homo sapien
atatagcgagatttcttaacgtctctgagccat

SEQ ID NO: 778119 - DNA, 33 bp, Homo sapien
acagtaagttactacacgtcaagcactgggcta

SEQ ID NO: 778120 - DNA, 33 bp, Homo sapien
acagtaagttactacatgtcaagcactgggcta

SEQ ID NO: 778121 - DNA, 33 bp, Homo sapien
tgtgtgtattttgccacctgttgttaatttagg

SEQ ID NO: 778122 - DNA, 33 bp, Homo sapien
tgtgtgtattttgccagctgttgttaatttagg

SEQ ID NO: 778123 - DNA, 33 bp, Homo sapien
ttgttaccggtaatgtaaatgcccagaaaaaaa

SEQ ID NO: 778124 - DNA, 33 bp, Homo sapien
ttgttaccggtaatgtgaatgcccagaaaaaaa

SEQ ID NO: 778125 - DNA, 33 bp, Homo sapien
cagcacacagtagtaacgtaactatttatagca

SEQ ID NO: 778126 - DNA, 33 bp, Homo sapien
cagcacacagtagtaatgtaactatttatagca

SEQ ID NO: 778127 - DNA, 33 bp, Homo sapien
tgtttgggtgatttaacacttcttatcatgaga

SEQ ID NO: 778128 - DNA, 33 bp, Homo sapien
tgtttgggtgatttaatacttcttatcatgaga

SEQ ID NO: 778129 - DNA, 33 bp, Homo sapien
cccctcatcattgcccacattcaattcacagct

SEQ ID NO: 778130 - DNA, 33 bp, Homo sapien
cccctcatcattgcccgcattcaattcacagct

SEQ ID NO: 778131 - DNA, 33 bp, Homo sapien
caacaggtaatctcagcaggaatctcaaatttg

SEQ ID NO: 778132 - DNA, 33 bp, Homo sapien
caacaggtaatctcagtaggaatctcaaatttg

SEQ ID NO: 778133 - DNA, 33 bp, Homo sapien; identical to SEQ ID NO: 778131

SEQ ID NO: 778134 - DNA, 33 bp, Homo sapien; identical to SEQ ID NO: 778132

SEQ ID NO: 778135 - DNA, 33 bp, Homo sapien
tatgctcctagttatcacaggaaaaggatacag

SEQ ID NO: 778136 - DNA, 33 bp, Homo sapien
tatgctcctagttatcgcaggaaaaggatacag

SEQ ID NO: 778137 - DNA, 33 bp, Homo sapien
ggccaatcttaggtaccatgtccttgagcctca

SEQ ID NO: 778138 - DNA, 33 bp, Homo sapien
ggccaatcttaggtactatgtccttgagcctca

SEQ ID NO: 778139 - DNA, 33 bp, Homo sapien
agacaccgggcataacagcatctcacttgtaaa

SEQ ID NO: 778140 - DNA, 33 bp, Homo sapien
agacaccgggcataaccgcatctcacttgtaaa

SEQ ID NO: 778141 - DNA, 33 bp, Homo sapien
ttaaactggacactcacagggaactggcttaaa

SEQ ID NO: 778142 - DNA, 33 bp, Homo sapien
ttaaactggacactcagagggaactggcttaaa

SEQ ID NO: 778143 - DNA, 33 bp, Homo sapien
tagagaattggggaacaagatagtgtggattcc

SEQ ID NO: 778144 - DNA, 33 bp, Homo sapien
tagagaattggggaaccagatagtgtggattcc

SEQ ID NO: 778145 - DNA, 33 bp, Homo sapien
gagcagatttaactccaagccgtcttcttgccc

SEQ ID NO: 778146 - DNA, 33 bp, Homo sapien
gagcagatttaactcccagccgtcttcttgccc

SEQ ID NO: 778147 - DNA, 33 bp, Homo sapien
acaagagcagttactcaagaaatttcagccaag

SEQ ID NO: 778148 - DNA, 33 bp, Homo sapien
acaagagcagttactcgagaaatttcagccaag

SEQ ID NO: 778149 - DNA, 33 bp, Homo sapien
taagaaaatttagaagaaactatacaacatgtt

SEQ ID NO: 778150 - DNA, 33 bp, Homo sapien
taagaaaatttagaaggaactatacaacatgtt

SEQ ID NO: 778151 - DNA, 33 bp, Homo sapien
ttaaaagctaccgtaaaacaacataccacataa

SEQ ID NO: 778152 - DNA, 33 bp, Homo sapien
ttaaaagctaccgtaagacaacataccacataa

SEQ ID NO: 778153 - DNA, 33 bp, Homo sapien
gaggtaccttgaaaagacttttagtagaggtat

SEQ ID NO: 778154 - DNA, 33 bp, Homo sapien
gaggtaccttgaaaaggcttttagtagaggtat

SEQ ID NO: 778155 - DNA, 33 bp, Homo sapien
cagtatgactgacaaaccctctcaaacaataga

SEQ ID NO: 778156 - DNA, 33 bp, Homo sapien
cagtatgactgacaaatcctctcaaacaataga

SEQ ID NO: 778157 - DNA, 33 bp, Homo sapien
ggaagatttggagttacattcaccaagccctga

SEQ ID NO: 778158 - DNA, 33 bp, Homo sapien
ggaagatttggagttatattcaccaagccctga

SEQ ID NO: 778159 - DNA, 33 bp, Homo sapien
ggtaatatgctgaactaactgtgacaagaaagc

SEQ ID NO: 778160 - DNA, 33 bp, Homo sapien
ggtaatatgctgaactgactgtgacaagaaagc

SEQ ID NO: 778161 - DNA, 33 bp, Homo sapien
tgttatctgtattgccaatggacagcaaagatt

SEQ ID NO: 778162 - DNA, 33 bp, Homo sapien
tgttatctgtattgccgatggacagcaaagatt

SEQ ID NO: 778163 - DNA, 33 bp, Homo sapien
tgtctggatgtatcaaccaaaattcctctgtga

SEQ ID NO: 778164 - DNA, 33 bp, Homo sapien
tgtctggatgtatcaatcaaaattcctctgtga

SEQ ID NO: 778165 - DNA, 33 bp, Homo sapien
ttgatcattatgatgaaactatgctatttaaaa

SEQ ID NO: 778166 - DNA, 33 bp, Homo sapien
ttgatcattatgatgacactatgctatttaaaa

SEQ ID NO: 778167 - DNA, 33 bp, Homo sapien
caggcaaaggctggaacctgggcttgccaaata

SEQ ID NO: 778168 - DNA, 33 bp, Homo sapien
caggcaaaggctggaatctgggcttgccaaata

SEQ ID NO: 778169 - DNA, 33 bp, Homo sapien
catacagttgcctaaactcaagaacttcaaaag

SEQ ID NO: 778170 - DNA, 33 bp, Homo sapien
catacagttgcctaaattcaagaacttcaaaag

SEQ ID NO: 778171 - DNA, 33 bp, Homo sapien
aatacactgctcaaccagagaagtggtttgacc

SEQ ID NO: 778172 - DNA, 33 bp, Homo sapien
aatacactgctcaaccggagaagtggtttgacc

SEQ ID NO: 778173 - DNA, 33 bp, Homo sapien
aaatcaaaattctcacaaaattcttctaaaacc

SEQ ID NO: 778174 - DNA, 33 bp, Homo sapien
aaatcaaaattctcactaaattcttctaaaacc

SEQ ID NO: 778175 - DNA, 33 bp, Homo sapien
aggaacacgctgatgaactgagcaaaggaaagg

SEQ ID NO: 778176 - DNA, 33 bp, Homo sapien
aggaacacgctgatgagctgagcaaaggaaagg

SEQ ID NO: 778177 - DNA, 33 bp, Homo sapien
actcggccgttttaaaaggtgactctttcctgt

SEQ ID NO: 778178 - DNA, 33 bp, Homo sapien
actcggccgttttaaagggtgactctttcctgt

SEQ ID NO: 778179 - DNA, 33 bp, Homo sapien
caatgctcttgaactacgatgaccgtggctgcc

SEQ ID NO: 778180 - DNA, 33 bp, Homo sapien
caatgctcttgaactatgatgaccgtggctgcc

SEQ ID NO: 778181 - DNA, 33 bp, Homo sapien; identical to SEQ ID NO: 778179

SEQ ID NO: 778182 - DNA, 33 bp, Homo sapien; identical to SEQ ID NO: 778180

SEQ ID NO: 778183 - DNA, 33 bp, Homo sapien
aaagtgctatttggaaaacattttacaagtttt

SEQ ID NO: 778184 - DNA, 33 bp, Homo sapien
aaagtgctatttggaagacattttacaagtttt

SEQ ID NO: 778185 - DNA, 33 bp, Homo sapien
ggaatacggcattgacaataaatggaactatac

SEQ ID NO: 778186 - DNA, 33 bp, Homo sapien
ggaatacggcattgacgataaatggaactatac

SEQ ID NO: 778187 - DNA, 33 bp, Homo sapien
tcccatgggcctgctgccaatgagaggtaagaa

SEQ ID NO: 778188 - DNA, 33 bp, Homo sapien
tcccatgggcctgctgtcaatgagaggtaagaa

SEQ ID NO: 778189 - DNA, 33 bp, Homo sapien
ttcaaaccttgcaatacagtttcttcggacttt

SEQ ID NO: 778190 - DNA, 33 bp, Homo sapien
ttcaaaccttgcaatatagtttcttcggacttt

SEQ ID NO: 778191 - DNA, 33 bp, Homo sapien
gttggaaacataccaactgtaactaacagtatt

SEQ ID NO: 778192 - DNA, 33 bp, Homo sapien
gttggaaacataccaattgtaactaacagtatt

SEQ ID NO: 778193 - DNA, 33 bp, Homo sapien
atggaagtatcagaataaattaatcaggtatat

SEQ ID NO: 778194 - DNA, 33 bp, Homo sapien
atggaagtatcagaatgaattaatcaggtatat

SEQ ID NO: 778195 - DNA, 33 bp, Homo sapien
cccttccagagtcactcagacagaattaatgca

SEQ ID NO: 778196 - DNA, 33 bp, Homo sapien
cccttccagagtcactgagacagaattaatgca

SEQ ID NO: 778197 - DNA, 33 bp, Homo sapien
tgtgaaatattcctaccaccactgaggcatacc

SEQ ID NO: 778198 - DNA, 33 bp, Homo sapien
tgtgaaatattcctactaccactgaggcatacc

SEQ ID NO: 778199 - DNA, 33 bp, Homo sapien
ctctagattttggagactagactctagacttta

SEQ ID NO: 778200 - DNA, 33 bp, Homo sapien
ctctagattttggagattagactctagacttta

SEQ ID NO: 778201 - DNA, 33 bp, Homo sapien
tgtagcactaacaacacatttgggcattcttgg

SEQ ID NO: 778202 - DNA, 33 bp, Homo sapien
tgtagcactaacaacatatttgggcattcttgg

SEQ ID NO: 778203 - DNA, 33 bp, Homo sapien
atggaatttcaaagaagagggtatggatccact

SEQ ID NO: 778204 - DNA, 33 bp, Homo sapien
atggaatttcaaagaatagggtatggatccact

SEQ ID NO: 778205 - DNA, 33 bp, Homo sapien
ccctttacatattctcacagtatcttgttcctg

SEQ ID NO: 778206 - DNA, 33 bp, Homo sapien
ccctttacatattctcccagtatcttgttcctg

SEQ ID NO: 778207 - DNA, 33 bp, Homo sapien
ggcctaaacttcctaccaaccatggccttgggc

SEQ ID NO: 778208 - DNA, 33 bp, Homo sapien
ggcctaaacttcctactaaccatggccttgggc

SEQ ID NO: 778209 - DNA, 33 bp, Homo sapien
cagcatagatagcacccgggacctgttagaaat

SEQ ID NO: 778210 - DNA, 33 bp, Homo sapien
cagcatagatagcacctgggacctgttagaaat

SEQ ID NO: 778211 - DNA, 33 bp, Homo sapien
taaacaataggttcgacaaaggtgacgagataa

SEQ ID NO: 778212 - DNA, 33 bp, Homo sapien
taaacaataggttcgataaaggtgacgagataa

SEQ ID NO: 778213 - DNA, 33 bp, Homo sapien
tagaggaggtcagggaaattcctatcaagaggc

SEQ ID NO: 778214 - DNA, 33 bp, Homo sapien
tagaggaggtcagggacattcctatcaagaggc

SEQ ID NO: 778215 - DNA, 33 bp, Homo sapien
ttgggataaacttctaaaactccagtaatatga

SEQ ID NO: 778216 - DNA, 33 bp, Homo sapien
ttgggataaacttctagaactccagtaatatga

SEQ ID NO: 778217 - DNA, 33 bp, Homo sapien
atagatgggtcgatggcaggcattcatcttgga

SEQ ID NO: 778218 - DNA, 33 bp, Homo sapien
atagatgggtcgatggtaggcattcatcttgga

SEQ ID NO: 778219 - DNA, 33 bp, Homo sapien
tttcactcattggctaccttgagggtttaaata

SEQ ID NO: 778220 - DNA, 33 bp, Homo sapien
tttcactcattggctatcttgagggtttaaata

SEQ ID NO: 778221 - DNA, 33 bp, Homo sapien
tatatagaattggcccaaatattgctccctctt

SEQ ID NO: 778222 - DNA, 33 bp, Homo sapien
tatatagaattggcccgaatattgctccctctt

SEQ ID NO: 778223 - DNA, 33 bp, Homo sapien
ggttagagagtgacaacgcccaggctagaatcc

SEQ ID NO: 778224 - DNA, 33 bp, Homo sapien
ggttagagagtgacaatgcccaggctagaatcc

SEQ ID NO: 778225 - DNA, 33 bp, Homo sapien
taaccttacatttgaaccaagggaaaagatgct

SEQ ID NO: 778226 - DNA, 33 bp, Homo sapien
taaccttacatttgaagcaagggaaaagatgct

SEQ ID NO: 778227 - DNA, 33 bp, Homo sapien
ttggatttacacttaacgatgaagaatgctggc

SEQ ID NO: 778228 - DNA, 33 bp, Homo sapien
ttggatttacacttaatgatgaagaatgctggc

SEQ ID NO: 778229 - DNA, 33 bp, Homo sapien
cagctggaggcgattaacctaagtgaattaaca

SEQ ID NO: 778230 - DNA, 33 bp, Homo sapien
cagctggaggcgattaccctaagtgaattaaca

SEQ ID NO: 778231 - DNA, 33 bp, Homo sapien
tatacaattcataagaaactgaagtgatacctt

SEQ ID NO: 778232 - DNA, 33 bp, Homo sapien
tatacaattcataagacactgaagtgatacctt

SEQ ID NO: 778233 - DNA, 33 bp, Homo sapien
cctctggaaattcatcaattataattcaggttt

SEQ ID NO: 778234 - DNA, 33 bp, Homo sapien
cctctggaaattcatcgattataattcaggttt

SEQ ID NO: 778235 - DNA, 33 bp, Homo sapien
ttgccactctgtcctaacaagtacaaagctgaa

SEQ ID NO: 778236 - DNA, 33 bp, Homo sapien
ttgccactctgtcctagcaagtacaaagctgaa

SEQ ID NO: 778237 - DNA, 33 bp, Homo sapien
gtgatgtaagaacatgaaagtagctgttataaa

SEQ ID NO: 778238 - DNA, 33 bp, Homo sapien
gtgatgtaagaacatggaagtagctgttataaa

SEQ ID NO: 778239 - DNA, 33 bp, Homo sapien
tggccagcaactttacaaaaataatgtgagcca

SEQ ID NO: 778240 - DNA, 33 bp, Homo sapien
tggccagcaactttacgaaaataatgtgagcca

SEQ ID NO: 778241 - DNA, 33 bp, Homo sapien
caagggcactgactcaaacggttactgcgatga

SEQ ID NO: 778242 - DNA, 33 bp, Homo sapien
caagggcactgactcacacggttactgcgatga

SEQ ID NO: 778243 - DNA, 33 bp, Homo sapien
taaaacacttgctctccgaacacagggagtttt

SEQ ID NO: 778244 - DNA, 33 bp, Homo sapien
taaaacacttgctctctgaacacagggagtttt

SEQ ID NO: 778245 - DNA, 33 bp, Homo sapien
aaactctagttacagaagtagtccttgcactga

SEQ ID NO: 778246 - DNA, 33 bp, Homo sapien
aaactctagttacagaggtagtccttgcactga

SEQ ID NO: 778247 - DNA, 33 bp, Homo sapien
cctttgacttttgctacattatcacgaagactt

SEQ ID NO: 778248 - DNA, 33 bp, Homo sapien
cctttgacttttgctatattatcacgaagactt

SEQ ID NO: 778249 - DNA, 33 bp, Homo sapien
atatttgttcaaattaccaacaaacatttatat

SEQ ID NO: 778250 - DNA, 33 bp, Homo sapien
atatttgttcaaattatcaacaaacatttatat

SEQ ID NO: 778251 - DNA, 33 bp, Homo sapien
ctggcagagccaaaagaaaccctctttatcatc

SEQ ID NO: 778252 - DNA, 33 bp, Homo sapien
ctggcagagccaaaaggaaccctctttatcatc

SEQ ID NO: 778253 - DNA, 33 bp, Homo sapien
tgccagtctatggggccaatggtcctaaaactg

SEQ ID NO: 778254 - DNA, 33 bp, Homo sapien
tgccagtctatggggctaatggtcctaaaactg

SEQ ID NO: 778255 - DNA, 33 bp, Homo sapien
ctattaggatggcgccaaaatgaggaaatggag

SEQ ID NO: 778256 - DNA, 33 bp, Homo sapien
ctattaggatggcgcccaaatgaggaaatggag

SEQ ID NO: 778257 - DNA, 33 bp, Homo sapien
tgagccaagatcatgccagtgtgctgctccagc

SEQ ID NO: 778258 - DNA, 33 bp, Homo sapien
tgagccaagatcatgcgagtgtgctgctccagc

SEQ ID NO: 778259 - DNA, 33 bp, Homo sapien
aaagtaacagggaccacatataccctaacacct

SEQ ID NO: 778260 - DNA, 33 bp, Homo sapien
aaagtaacagggaccagatataccctaacacct

SEQ ID NO: 778261 - DNA, 33 bp, Homo sapien
tctacaaaaatcagataaaaaaggtgagagtct

SEQ ID NO: 778262 - DNA, 33 bp, Homo sapien
tctacaaaaatcagattaaaaaggtgagagtct

SEQ ID NO: 778263 - DNA, 33 bp, Homo sapien
ttatttgtgatcaggacctttccaattatgatc

SEQ ID NO: 778264 - DNA, 33 bp, Homo sapien
ttatttgtgatcaggagctttccaattatgatc

SEQ ID NO: 778265 - DNA, 33 bp, Homo sapien
tccagagcccactccacgattctctctctcata

SEQ ID NO: 778266 - DNA, 33 bp, Homo sapien
tccagagcccactccatgattctctctctcata

SEQ ID NO: 778267 - DNA, 33 bp, Homo sapien
attagtcctcacaagacaaccaaacacaaagac

SEQ ID NO: 778268 - DNA, 33 bp, Homo sapien
attagtcctcacaagagaaccaaacacaaagac

SEQ ID NO: 778269 - DNA, 33 bp, Homo sapien
gtagagtatatctggtcaagagttgattgttta

SEQ ID NO: 778270 - DNA, 33 bp, Homo sapien
gtagagtatatctggttaagagttgattgttta

SEQ ID NO: 778271 - DNA, 33 bp, Homo sapien
tctcctaagcttctgactagtctgcctctatta

SEQ ID NO: 778272 - DNA, 33 bp, Homo sapien
tctcctaagcttctgagtagtctgcctctatta

SEQ ID NO: 778273 - DNA, 33 bp, Homo sapien
gccatggtgccaagagaatatgaaccacaggca

SEQ ID NO: 778274 - DNA, 33 bp, Homo sapien
gccatggtgccaagagcatatgaaccacaggca

SEQ ID NO: 778275 - DNA, 33 bp, Homo sapien
atccagtttaatggccagaagaatgcaggcttg

SEQ ID NO: 778276 - DNA, 33 bp, Homo sapien
atccagtttaatggccggaagaatgcaggcttg

SEQ ID NO: 778277 - DNA, 33 bp, Homo sapien
ttgcctaatttctctcactaggatttccagtat

SEQ ID NO: 778278 - DNA, 33 bp, Homo sapien
ttgcctaatttctctcgctaggatttccagtat

SEQ ID NO: 778279 - DNA, 33 bp, Homo sapien
attcttgctgagcttcacatcctaaaagataat

SEQ ID NO: 778280 - DNA, 33 bp, Homo sapien
attcttgctgagcttcgcatcctaaaagataat

SEQ ID NO: 778281 - DNA, 33 bp, Homo sapien
ctgtgagcaagtaatacgccatgattttagccc

SEQ ID NO: 778282 - DNA, 33 bp, Homo sapien
ctgtgagcaagtaatatgccatgattttagccc

SEQ ID NO: 778283 - DNA, 33 bp, Homo sapien
ttccagacaaaaccaacgtacttcatcttacac

SEQ ID NO: 778284 - DNA, 33 bp, Homo sapien
ttccagacaaaaccaatgtacttcatcttacac

SEQ ID NO: 778285 - DNA, 33 bp, Homo sapien
tgatcatttcgtcaaccagaagagtccaactct

SEQ ID NO: 778286 - DNA, 33 bp, Homo sapien
tgatcatttcgtcaacgagaagagtccaactct

SEQ ID NO: 778287 - DNA, 33 bp, Homo sapien
aaagccacaaatattccatgtaagcagctaagt

SEQ ID NO: 778288 - DNA, 33 bp, Homo sapien
aaagccacaaatattctatgtaagcagctaagt

SEQ ID NO: 778289 - DNA, 33 bp, Homo sapien
tggctcagaaaacacactgaagtgaaaatacaa

SEQ ID NO: 778290 - DNA, 33 bp, Homo sapien
tggctcagaaaacacattgaagtgaaaatacaa

SEQ ID NO: 778291 - DNA, 33 bp, Homo sapien
gcagaaaatattgcagaacatatgaccaggaaa

SEQ ID NO: 778292 - DNA, 33 bp, Homo sapien
gcagaaaatattgcaggacatatgaccaggaaa

SEQ ID NO: 778293 - DNA, 33 bp, Homo sapien
ttcaaacttttgctcacgaccaactgtaagaaa

SEQ ID NO: 778294 - DNA, 33 bp, Homo sapien
ttcaaacttttgctcatgaccaactgtaagaaa

SEQ ID NO: 778295 - DNA, 33 bp, Homo sapien
atttgattcagatttacagctaagatgtgaagg

SEQ ID NO: 778296 - DNA, 33 bp, Homo sapien
atttgattcagatttatagctaagatgtgaagg

SEQ ID NO: 778297 - DNA, 33 bp, Homo sapien
tcacagtgtaaagaaaaccgctgggaagttcaa

SEQ ID NO: 778298 - DNA, 33 bp, Homo sapien
tcacagtgtaaagaaagccgctgggaagttcaa

SEQ ID NO: 778299 - DNA, 33 bp, Homo sapien
ccaaatccacgaaaaaaattctcagtgtattag

SEQ ID NO: 778300 - DNA, 33 bp, Homo sapien
ccaaatccacgaaaaacattctcagtgtattag

SEQ ID NO: 778301 - DNA, 33 bp, Homo sapien
taatgatttggttttgaaattgttattattcag

SEQ ID NO: 778302 - DNA, 33 bp, Homo sapien
taatgatttggttttgcaattgttattattcag

SEQ ID NO: 778303 - DNA, 33 bp, Homo sapien
tcctgaatacactcaccatatttccattgcaac

SEQ ID NO: 778304 - DNA, 33 bp, Homo sapien
tcctgaatacactcactatatttccattgcaac

SEQ ID NO: 778305 - DNA, 33 bp, Homo sapien
aaatgaagatctcctcacattatcttggaaaat

SEQ ID NO: 778306 - DNA, 33 bp, Homo sapien
aaatgaagatctcctcgcattatcttggaaaat

SEQ ID NO: 778307 - DNA, 33 bp, Homo sapien
aactttagaaatacacacagaattcaaataaat

SEQ ID NO: 778308 - DNA, 33 bp, Homo sapien
aactttagaaatacacgcagaattcaaataaat

SEQ ID NO: 778309 - DNA, 33 bp, Homo sapien
ttgtagtatgtccccaaagatatgtcctgcagg

SEQ ID NO: 778310 - DNA, 33 bp, Homo sapien
ttgtagtatgtccccatagatatgtcctgcagg

SEQ ID NO: 778311 - DNA, 33 bp, Homo sapien
aaacaaattctgccaaaccacatttgtaagaaa

SEQ ID NO: 778312 - DNA, 33 bp, Homo sapien
aaacaaattctgccaatccacatttgtaagaaa

SEQ ID NO: 778313 - DNA, 33 bp, Homo sapien
caaccggatacaggaaaaaacactggaaagaac

SEQ ID NO: 778314 - DNA, 33 bp, Homo sapien
caaccggatacaggaagaaacactggaaagaac

SEQ ID NO: 778315 - DNA, 33 bp, Homo sapien
ttcatctgtagaatgcccatttgatttttaata

SEQ ID NO: 778316 - DNA, 33 bp, Homo sapien
ttcatctgtagaatgctcatttgatttttaata

SEQ ID NO: 778317 - DNA, 33 bp, Homo sapien
tcagcagcaggcaatgaagaatggagaacctaa

SEQ ID NO: 778318 - DNA, 33 bp, Homo sapien
tcagcagcaggcaatggagaatggagaacctaa

SEQ ID NO: 778319 - DNA, 33 bp, Homo sapien
tagctaagtgtttcaaggtataatgttacaaat

SEQ ID NO: 778320 - DNA, 33 bp, Homo sapien
tagctaagtgtttcaatgtataatgttacaaat

SEQ ID NO: 778321 - DNA, 33 bp, Homo sapien
caaatatctcagaagtcacaggttgtacacatg

SEQ ID NO: 778322 - DNA, 33 bp, Homo sapien
caaatatctcagaagttacaggttgtacacatg

SEQ ID NO: 778323 - DNA, 33 bp, Homo sapien
gaaatgtgtggtggggacatattagtggtgaca

SEQ ID NO: 778324 - DNA, 33 bp, Homo sapien
gaaatgtgtggtggggccatattagtggtgaca

SEQ ID NO: 778325 - DNA, 33 bp, Homo sapien
cacagtctctatataaaggatgcttcagaaaag

SEQ ID NO: 778326 - DNA, 33 bp, Homo sapien
cacagtctctatataatggatgcttcagaaaag

SEQ ID NO: 778327 - DNA, 33 bp, Homo sapien
tattctgatgccattacagttgccctgttttta

SEQ ID NO: 778328 - DNA, 33 bp, Homo sapien
tattctgatgccattatagttgccctgttttta

SEQ ID NO: 778329 - DNA, 33 bp, Homo sapien
acagcctgaatagcccaacagttctgaactgga

SEQ ID NO: 778330 - DNA, 33 bp, Homo sapien
acagcctgaatagcccgacagttctgaactgga

SEQ ID NO: 778331 - DNA, 33 bp, Homo sapien
tgaatagccttgcacaaataccataagtgaagc

SEQ ID NO: 778332 - DNA, 33 bp, Homo sapien
tgaatagccttgcacagataccataagtgaagc

SEQ ID NO: 778333 - DNA, 33 bp, Homo sapien
tttggcatataacctgcaaataaggtgtagttc

SEQ ID NO: 778334 - DNA, 33 bp, Homo sapien
tttggcatataacctggaaataaggtgtagttc

SEQ ID NO: 778335 - DNA, 33 bp, Homo sapien
gtaatggagtcttaataataagtgcaagataat

SEQ ID NO: 778336 - DNA, 33 bp, Homo sapien
gtaatggagtcttaatgataagtgcaagataat

SEQ ID NO: 778337 - DNA, 33 bp, Homo sapien
gacatcaaagacactcacttcggaaatgtccct

SEQ ID NO: 778338 - DNA, 33 bp, Homo sapien
gacatcaaagacactcgcttcggaaatgtccct

SEQ ID NO: 778339 - DNA, 33 bp, Homo sapien; identical to SEQ ID NO: 778337

SEQ ID NO: 778340 - DNA, 33 bp, Homo sapien; identical to SEQ ID NO: 778338

SEQ ID NO: 778341 - DNA, 33 bp, Homo sapien
ccagctggaccaattaggatcttttaagtccca

SEQ ID NO: 778342 - DNA, 33 bp, Homo sapien
ccagctggaccaattatgatcttttaagtccca

SEQ ID NO: 778343 - DNA, 33 bp, Homo sapien
atttgcctcatagaacagatttattattaggaa

SEQ ID NO: 778344 - DNA, 33 bp, Homo sapien
atttgcctcatagaactgatttattattaggaa

SEQ ID NO: 778345 - DNA, 33 bp, Homo sapien
aatttttactgccaaactcttcattagaaaagt

SEQ ID NO: 778346 - DNA, 33 bp, Homo sapien
aatttttactgccaaagtcttcattagaaaagt

SEQ ID NO: 778347 - DNA, 33 bp, Homo sapien
tggcagcttaacaggactaagatgatgagatga

SEQ ID NO: 778348 - DNA, 33 bp, Homo sapien
tggcagcttaacaggagtaagatgatgagatga

SEQ ID NO: 778349 - DNA, 33 bp, Homo sapien
acttacatactgctggcagatgataaactgtac

SEQ ID NO: 778350 - DNA, 33 bp, Homo sapien
acttacatactgctggtagatgataaactgtac

SEQ ID NO: 778351 - DNA, 33 bp, Homo sapien
ctaaagtctttttcaacgctaaaatacagtctt

SEQ ID NO: 778352 - DNA, 33 bp, Homo sapien
ctaaagtctttttcaatgctaaaatacagtctt

SEQ ID NO: 778353 - DNA, 33 bp, Homo sapien
ttctctagatagctcacgtagatcttatgtaat

SEQ ID NO: 778354 - DNA, 33 bp, Homo sapien
ttctctagatagctcatgtagatcttatgtaat

SEQ ID NO: 778355 - DNA, 33 bp, Homo sapien
ctcctgaggcattttcacaaaacacggtgaata

SEQ ID NO: 778356 - DNA, 33 bp, Homo sapien
ctcctgaggcattttcgcaaaacacggtgaata

SEQ ID NO: 778357 - DNA, 33 bp, Homo sapien
tggtttgttgcaactgccaacctgtcatctaca

SEQ ID NO: 778358 - DNA, 33 bp, Homo sapien
tggtttgttgcaactgtcaacctgtcatctaca

SEQ ID NO: 778359 - DNA, 33 bp, Homo sapien
tcaaaattgaagagaaccacaaaaataaacata

SEQ ID NO: 778360 - DNA, 33 bp, Homo sapien
tcaaaattgaagagaatcacaaaaataaacata

SEQ ID NO: 778361 - DNA, 33 bp, Homo sapien
gatttagaaacataatcacataccttccttaat

SEQ ID NO: 778362 - DNA, 33 bp, Homo sapien
gatttagaaacataattacataccttccttaat

SEQ ID NO: 778363 - DNA, 33 bp, Homo sapien
atcacagggttgcgtacgaaataaaaaactgaa

SEQ ID NO: 778364 - DNA, 33 bp, Homo sapien
atcacagggttgcgtatgaaataaaaaactgaa

SEQ ID NO: 778365 - DNA, 33 bp, Homo sapien
caccaggggatgatggaacaatatgatttaaag

SEQ ID NO: 778366 - DNA, 33 bp, Homo sapien
caccaggggatgatgggacaatatgatttaaag

SEQ ID NO: 778367 - DNA, 33 bp, Homo sapien
aaattaataaacgtcaaaatagtgtattcctat

SEQ ID NO: 778368 - DNA, 33 bp, Homo sapien
aaattaataaacgtcagaatagtgtattcctat

SEQ ID NO: 778369 - DNA, 33 bp, Homo sapien
atgcattgtgagtgaactggctttgttcaattt

SEQ ID NO: 778370 - DNA, 33 bp, Homo sapien
atgcattgtgagtgaattggctttgttcaattt

SEQ ID NO: 778371 - DNA, 33 bp, Homo sapien
atttaatgtactgaaacgtaaatagtaccatag

SEQ ID NO: 778372 - DNA, 33 bp, Homo sapien
atttaatgtactgaaaggtaaatagtaccatag

SEQ ID NO: 778373 - DNA, 33 bp, Homo sapien
gggaggaagtaaattacgtagattagtaaattc

SEQ ID NO: 778374 - DNA, 33 bp, Homo sapien
gggaggaagtaaattaggtagattagtaaattc

SEQ ID NO: 778375 - DNA, 33 bp, Homo sapien
cagctatcactctagacggtgagttagtccatt

SEQ ID NO: 778376 - DNA, 33 bp, Homo sapien
cagctatcactctagatggtgagttagtccatt

SEQ ID NO: 778377 - DNA, 33 bp, Homo sapien
acatctttttcctggacgataactgttttaaag

SEQ ID NO: 778378 - DNA, 33 bp, Homo sapien
acatctttttcctggatgataactgttttaaag

SEQ ID NO: 778379 - DNA, 33 bp, Homo sapien
ctcctgctgactaaaacgccctcaccaaatcta

SEQ ID NO: 778380 - DNA, 33 bp, Homo sapien
ctcctgctgactaaaatgccctcaccaaatcta

SEQ ID NO: 778381 - DNA, 33 bp, Homo sapien
tcctaagaaagtcatcaaaggtgtacatataga

SEQ ID NO: 778382 - DNA, 33 bp, Homo sapien
tcctaagaaagtcatctaaggtgtacatataga

SEQ ID NO: 778383 - DNA, 33 bp, Homo sapien
aaaactgtaatttctgaaaaacatctttctctg

SEQ ID NO: 778384 - DNA, 33 bp, Homo sapien
aaaactgtaatttctggaaaacatctttctctg

SEQ ID NO: 778385 - DNA, 33 bp, Homo sapien
cccagataatatatcaactcttctgtgaaaact

SEQ ID NO: 778386 - DNA, 33 bp, Homo sapien
cccagataatatatcacctcttctgtgaaaact

SEQ ID NO: 778387 - DNA, 33 bp, Homo sapien
tcagatagatgataaaattagctccaatagcca

SEQ ID NO: 778388 - DNA, 33 bp, Homo sapien
tcagatagatgataaagttagctccaatagcca

SEQ ID NO: 778389 - DNA, 33 bp, Homo sapien
gtatatctctgaccaactgaaatctagcttgca

SEQ ID NO: 778390 - DNA, 33 bp, Homo sapien
gtatatctctgaccaattgaaatctagcttgca

SEQ ID NO: 778391 - DNA, 33 bp, Homo sapien
ccttaattgaaagaccagcaaatactttgtagc

SEQ ID NO: 778392 - DNA, 33 bp, Homo sapien
ccttaattgaaagacctgcaaatactttgtagc

SEQ ID NO: 778393 - DNA, 33 bp, Homo sapien
tttctggtgcagatcaacgttctcactgagaag

SEQ ID NO: 778394 - DNA, 33 bp, Homo sapien
tttctggtgcagatcagcgttctcactgagaag

SEQ ID NO: 778395 - DNA, 33 bp, Homo sapien
gcagaattaacaaaggccctctgtgctggaatt

SEQ ID NO: 778396 - DNA, 33 bp, Homo sapien
gcagaattaacaaaggtcctctgtgctggaatt

SEQ ID NO: 778397 - DNA, 33 bp, Homo sapien
catttctccgttgagaatatgatttcctctgat

SEQ ID NO: 778398 - DNA, 33 bp, Homo sapien
catttctccgttgagattatgatttcctctgat

SEQ ID NO: 778399 - DNA, 33 bp, Homo sapien
ggaataacctccttgaagcactaagcatgaaaa

SEQ ID NO: 778400 - DNA, 33 bp, Homo sapien
ggaataacctccttgaggcactaagcatgaaaa

SEQ ID NO: 778401 - DNA, 33 bp, Homo sapien
acccttgctggcctccgacagtctctgacttac

SEQ ID NO: 778402 - DNA, 33 bp, Homo sapien
acccttgctggcctcctacagtctctgacttac

SEQ ID NO: 778403 - DNA, 33 bp, Homo sapien
cttttttaattttagcaaggaaagactgccctg

SEQ ID NO: 778404 - DNA, 33 bp, Homo sapien
cttttttaattttagcgaggaaagactgccctg

SEQ ID NO: 778405 - DNA, 33 bp, Homo sapien
atctgtaaagttccacaaacgggccagcctctg

SEQ ID NO: 778406 - DNA, 33 bp, Homo sapien
atctgtaaagttccacgaacgggccagcctctg

SEQ ID NO: 778407 - DNA, 33 bp, Homo sapien
taaagtgtttcgatggaacctttatggagggcc

SEQ ID NO: 778408 - DNA, 33 bp, Homo sapien
taaagtgtttcgatgggacctttatggagggcc

SEQ ID NO: 778409 - DNA, 33 bp, Homo sapien
tataattgaattgcaaatgtcattgttattgtg

SEQ ID NO: 778410 - DNA, 33 bp, Homo sapien
tataattgaattgcaagtgtcattgttattgtg

SEQ ID NO: 778411 - DNA, 33 bp, Homo sapien
tgcctgtgtagcctcacgcccatagtacggaaa

SEQ ID NO: 778412 - DNA, 33 bp, Homo sapien
tgcctgtgtagcctcatgcccatagtacggaaa

SEQ ID NO: 778413 - DNA, 33 bp, Homo sapien
tctgttctttttaaaacggaatctgacaggatc

SEQ ID NO: 778414 - DNA, 33 bp, Homo sapien
tctgttctttttaaaatggaatctgacaggatc

SEQ ID NO: 778415 - DNA, 33 bp, Homo sapien
ttcccaacagcagaaaagtagatttatagcagg

SEQ ID NO: 778416 - DNA, 33 bp, Homo sapien
ttcccaacagcagaaacgtagatttatagcagg

SEQ ID NO: 778417 - DNA, 33 bp, Homo sapien
gtgccattgctctggacggctgtctgtagctaa

SEQ ID NO: 778418 - DNA, 33 bp, Homo sapien
gtgccattgctctggatggctgtctgtagctaa

SEQ ID NO: 778419 - DNA, 33 bp, Homo sapien
tgactagagcattaaactgtaatgaaaatacct

SEQ ID NO: 778420 - DNA, 33 bp, Homo sapien
tgactagagcattaaattgtaatgaaaatacct

SEQ ID NO: 778421 - DNA, 33 bp, Homo sapien
gttttaattcaagtcaacgtctcaagattttgt

SEQ ID NO: 778422 - DNA, 33 bp, Homo sapien
gttttaattcaagtcagcgtctcaagattttgt

SEQ ID NO: 778423 - DNA, 33 bp, Homo sapien
atgtctccttttatgcaataacgaaagatccaa

SEQ ID NO: 778424 - DNA, 33 bp, Homo sapien
atgtctccttttatgcgataacgaaagatccaa

SEQ ID NO: 778425 - DNA, 33 bp, Homo sapien
taaaaggagacatttccattagtcacaactacg

SEQ ID NO: 778426 - DNA, 33 bp, Homo sapien
taaaaggagacatttctattagtcacaactacg

SEQ ID NO: 778427 - DNA, 33 bp, Homo sapien
tgctccattgaatttcacagatactttgaatgg

SEQ ID NO: 778428 - DNA, 33 bp, Homo sapien
tgctccattgaatttcgcagatactttgaatgg

SEQ ID NO: 778429 - DNA, 33 bp, Homo sapien
atctttaatgtacttacgaatcatagcgggagc

SEQ ID NO: 778430 - DNA, 33 bp, Homo sapien
atctttaatgtacttatgaatcatagcgggagc

SEQ ID NO: 778431 - DNA, 33 bp, Homo sapien
ttcaggtcttaaggtacggtacagcagttcttc

SEQ ID NO: 778432 - DNA, 33 bp, Homo sapien
ttcaggtcttaaggtatggtacagcagttcttc

SEQ ID NO: 778433 - DNA, 33 bp, Homo sapien
tgaattggccaaactacctaatatcccattaaa

SEQ ID NO: 778434 - DNA, 33 bp, Homo sapien
tgaattggccaaactatctaatatcccattaaa

SEQ ID NO: 778435 - DNA, 33 bp, Homo sapien
ggcggggatttgggccactgccgggagaagccg

SEQ ID NO: 778436 - DNA, 33 bp, Homo sapien
ggcggggatttgggccgctgccgggagaagccg

SEQ ID NO: 778437 - DNA, 33 bp, Homo sapien
tcttgccctctgttacaacgatgaaatacgcct

SEQ ID NO: 778438 - DNA, 33 bp, Homo sapien
tcttgccctctgttacgacgatgaaatacgcct

SEQ ID NO: 778439 - DNA, 33 bp, Homo sapien
attgagtgctaatggacggattcagggccattt

SEQ ID NO: 778440 - DNA, 33 bp, Homo sapien
attgagtgctaatggatggattcagggccattt

SEQ ID NO: 778441 - DNA, 33 bp, Homo sapien
tggagtgtctagagcaaagttacagagaggcct

SEQ ID NO: 778442 - DNA, 33 bp, Homo sapien
tggagtgtctagagcacagttacagagaggcct

SEQ ID NO: 778443 - DNA, 33 bp, Homo sapien
gtacttaccgacaccaatgaatggggcatccag

SEQ ID NO: 778444 - DNA, 33 bp, Homo sapien
gtacttaccgacaccagtgaatggggcatccag

SEQ ID NO: 778445 - DNA, 33 bp, Homo sapien
gaggtgagaaattagacatggcaattacagaaa

SEQ ID NO: 778446 - DNA, 33 bp, Homo sapien
gaggtgagaaattagagatggcaattacagaaa

SEQ ID NO: 778447 - DNA, 33 bp, Homo sapien
ctgagataaagattcaaataaaagcaggttgtt

SEQ ID NO: 778448 - DNA, 33 bp, Homo sapien
ctgagataaagattcagataaaagcaggttgtt

SEQ ID NO: 778449 - DNA, 33 bp, Homo sapien
ctacttgtcccttggagaatgcagcagtcagga

SEQ ID NO: 778450 - DNA, 33 bp, Homo sapien
ctacttgtcccttggataatgcagcagtcagga

SEQ ID NO: 778451 - DNA, 33 bp, Homo sapien
ttagaacatggagacaatgaatcaaaaactcat

SEQ ID NO: 778452 - DNA, 33 bp, Homo sapien
ttagaacatggagacagtgaatcaaaaactcat

SEQ ID NO: 778453 - DNA, 33 bp, Homo sapien
ttaaagttttacagtacagtgattataattgct

SEQ ID NO: 778454 - DNA, 33 bp, Homo sapien
ttaaagttttacagtagagtgattataattgct

SEQ ID NO: 778455 - DNA, 33 bp, Homo sapien
gatcagaagacaacaaagagaaggaagaggtcc

SEQ ID NO: 778456 - DNA, 33 bp, Homo sapien
gatcagaagacaacaaggagaaggaagaggtcc

SEQ ID NO: 778457 - DNA, 33 bp, Homo sapien
ttttgcagctatgattatggatattgagatggg

SEQ ID NO: 778458 - DNA, 33 bp, Homo sapien
ttttgcagctatgattgtggatattgagatggg

SEQ ID NO: 778459 - DNA, 33 bp, Homo sapien
atgctactctgtgactctgaagatggataaagg

SEQ ID NO: 778460 - DNA, 33 bp, Homo sapien
atgctactctgtgactttgaagatggataaagg

SEQ ID NO: 778461 - DNA, 33 bp, Homo sapien
agcctggttagggagacgtgtaactgtccaatc

SEQ ID NO: 778462 - DNA, 33 bp, Homo sapien
agcctggttagggagatgtgtaactgtccaatc

SEQ ID NO: 778463 - DNA, 33 bp, Homo sapien
gttataattgatcacactatttttccctactaa

SEQ ID NO: 778464 - DNA, 33 bp, Homo sapien
gttataattgatcacagtatttttccctactaa

SEQ ID NO: 778465 - DNA, 33 bp, Homo sapien
gtgacttctaggaatacaccaggtgcagtgaac

SEQ ID NO: 778466 - DNA, 33 bp, Homo sapien
gtgacttctaggaatataccaggtgcagtgaac

SEQ ID NO: 778467 - DNA, 33 bp, Homo sapien
acagactcacgctcctcaaagtgatgagccact

SEQ ID NO: 778468 - DNA, 33 bp, Homo sapien
acagactcacgctccttaaagtgatgagccact

SEQ ID NO: 778469 - DNA, 33 bp, Homo sapien
tgtactttcagatgtacggagaaataattgcat

SEQ ID NO: 778470 - DNA, 33 bp, Homo sapien
tgtactttcagatgtatggagaaataattgcat

SEQ ID NO: 778471 - DNA, 33 bp, Homo sapien
ctaacagtgaagtgtaagctaacaagttacagc

SEQ ID NO: 778472 - DNA, 33 bp, Homo sapien
ctaacagtgaagtgtatgctaacaagttacagc

SEQ ID NO: 778473 - DNA, 33 bp, Homo sapien
gtctaatttgcttcaccgctcttgaaccgcaag

SEQ ID NO: 778474 - DNA, 33 bp, Homo sapien
gtctaatttgcttcactgctcttgaaccgcaag

SEQ ID NO: 778475 - DNA, 33 bp, Homo sapien
agtttcatggaagacaaaatgtcctgagggcac

SEQ ID NO: 778476 - DNA, 33 bp, Homo sapien
agtttcatggaagacagaatgtcctgagggcac

SEQ ID NO: 778477 - DNA, 33 bp, Homo sapien
cactttaatttttctactaacagagttttattc

SEQ ID NO: 778478 - DNA, 33 bp, Homo sapien
cactttaatttttctagtaacagagttttattc

SEQ ID NO: 778479 - DNA, 33 bp, Homo sapien
agaggtcctccacatcccttgtgagctgtattc

SEQ ID NO: 778480 - DNA, 33 bp, Homo sapien
agaggtcctccacatcgcttgtgagctgtattc

SEQ ID NO: 778481 - DNA, 33 bp, Homo sapien
gtcgaacctatgccgaaaaaagaccccgtaccc

SEQ ID NO: 778482 - DNA, 33 bp, Homo sapien
gtcgaacctatgccgataaaagaccccgtaccc

SEQ ID NO: 778483 - DNA, 33 bp, Homo sapien
ccctgatacagcttccaaaaaaccagccaaaga

SEQ ID NO: 778484 - DNA, 33 bp, Homo sapien
ccctgatacagcttccgaaaaaccagccaaaga

SEQ ID NO: 778485 - DNA, 33 bp, Homo sapien
aaaaagtgaccttagacgctccagaaaagaggt

SEQ ID NO: 778486 - DNA, 33 bp, Homo sapien
aaaaagtgaccttagatgctccagaaaagaggt

SEQ ID NO: 778487 - DNA, 33 bp, Homo sapien
ttcaattttctgcatacggataaccagttttcc

SEQ ID NO: 778488 - DNA, 33 bp, Homo sapien
ttcaattttctgcatatggataaccagttttcc

SEQ ID NO: 778489 - DNA, 33 bp, Homo sapien
cacctgaggcatagaaggaaggaggaaaatatc

SEQ ID NO: 778490 - DNA, 33 bp, Homo sapien
cacctgaggcatagaatgaaggaggaaaatatc

SEQ ID NO: 778491 - DNA, 33 bp, Homo sapien
aaaaactgtccggaaactgaatgtgaagaggaa

SEQ ID NO: 778492 - DNA, 33 bp, Homo sapien
aaaaactgtccggaaattgaatgtgaagaggaa

SEQ ID NO: 778493 - DNA, 33 bp, Homo sapien
ctgaggccagtcacacaaagactagcacaggtg

SEQ ID NO: 778494 - DNA, 33 bp, Homo sapien
ctgaggccagtcacactaagactagcacaggtg

SEQ ID NO: 778495 - DNA, 33 bp, Homo sapien
cactgcacctagctaaaacaacattttaatata

SEQ ID NO: 778496 - DNA, 33 bp, Homo sapien
cactgcacctagctaagacaacattttaatata

SEQ ID NO: 778497 - DNA, 33 bp, Homo sapien
gtcacttctccttccacgcaaagtagataacca

SEQ ID NO: 778498 - DNA, 33 bp, Homo sapien
gtcacttctccttccatgcaaagtagataacca

SEQ ID NO: 778499 - DNA, 33 bp, Homo sapien
tattgtttacgagagcaaccctttccttctagt

SEQ ID NO: 778500 - DNA, 33 bp, Homo sapien
tattgtttacgagagcgaccctttccttctagt

SEQ ID NO: 778501 - DNA, 33 bp, Homo sapien
tatctttcgatctaaaatgtgtcttctgtagat

SEQ ID NO: 778502 - DNA, 33 bp, Homo sapien
tatctttcgatctaaagtgtgtcttctgtagat

SEQ ID NO: 778503 - DNA, 33 bp, Homo sapien
tatttatgatgtataaatatgatgttttgatta

SEQ ID NO: 778504 - DNA, 33 bp, Homo sapien
tatttatgatgtataagtatgatgttttgatta

SEQ ID NO: 778505 - DNA, 33 bp, Homo sapien
cagcctttaggtctcaacttaacagcttttaat

SEQ ID NO: 778506 - DNA, 33 bp, Homo sapien
cagcctttaggtctcagcttaacagcttttaat

SEQ ID NO: 778507 - DNA, 33 bp, Homo sapien
aagacagagtttctcaatatcagcgctcttgac

SEQ ID NO: 778508 - DNA, 33 bp, Homo sapien
aagacagagtttctcattatcagcgctcttgac

SEQ ID NO: 778509 - DNA, 33 bp, Homo sapien
ataagtaatatttagtcaaaagagtctgagctc

SEQ ID NO: 778510 - DNA, 33 bp, Homo sapien
ataagtaatatttagtgaaaagagtctgagctc

SEQ ID NO: 778511 - DNA, 33 bp, Homo sapien
tagatatgagcaacacaggtcactgtaacaact

SEQ ID NO: 778512 - DNA, 33 bp, Homo sapien
tagatatgagcaacacgggtcactgtaacaact

SEQ ID NO: 778513 - DNA, 33 bp, Homo sapien
agcggcatgggccataaagtagaaaaaccatta

SEQ ID NO: 778514 - DNA, 33 bp, Homo sapien
agcggcatgggccatagagtagaaaaaccatta

SEQ ID NO: 778515 - DNA, 33 bp, Homo sapien
ggttccatataacataagaaagaggtaggacca

SEQ ID NO: 778516 - DNA, 33 bp, Homo sapien
ggttccatataacataggaaagaggtaggacca

SEQ ID NO: 778517 - DNA, 33 bp, Homo sapien
ttgtatccattaaaaaatgctttgtccttgtca

SEQ ID NO: 778518 - DNA, 33 bp, Homo sapien
ttgtatccattaaaaagtgctttgtccttgtca

SEQ ID NO: 778519 - DNA, 33 bp, Homo sapien
gaaaattgatgatatgaaagttggaaatccatg

SEQ ID NO: 778520 - DNA, 33 bp, Homo sapien
gaaaattgatgatatggaagttggaaatccatg

SEQ ID NO: 778521 - DNA, 33 bp, Homo sapien
aaatcaacataaatggcccataaaagatctaac

SEQ ID NO: 778522 - DNA, 33 bp, Homo sapien
aaatcaacataaatggtccataaaagatctaac

SEQ ID NO: 778523 - DNA, 33 bp, Homo sapien
gctcattcctacctcacggtctatgcaactgat

SEQ ID NO: 778524 - DNA, 33 bp, Homo sapien
gctcattcctacctcagggtctatgcaactgat

SEQ ID NO: 778525 - DNA, 33 bp, Homo sapien
catcagtggataaccaatagcaccgtagccagt

SEQ ID NO: 778526 - DNA, 33 bp, Homo sapien
catcagtggataaccagtagcaccgtagccagt

SEQ ID NO: 778527 - DNA, 33 bp, Homo sapien
aatataaagcttggacagatgatagacagaaaa

SEQ ID NO: 778528 - DNA, 33 bp, Homo sapien
aatataaagcttggacggatgatagacagaaaa

SEQ ID NO: 778529 - DNA, 33 bp, Homo sapien
tgcctgcctgaccaaaactaactttgctttcac

SEQ ID NO: 778530 - DNA, 33 bp, Homo sapien
tgcctgcctgaccaaacctaactttgctttcac

SEQ ID NO: 778531 - DNA, 33 bp, Homo sapien
acaacctgtatgcttacgattagtgtccttttc

SEQ ID NO: 778532 - DNA, 33 bp, Homo sapien
acaacctgtatgcttatgattagtgtccttttc

SEQ ID NO: 778533 - DNA, 33 bp, Homo sapien
tattttgaagccctaacactatgatggtatttg

SEQ ID NO: 778534 - DNA, 33 bp, Homo sapien
tattttgaagccctaatactatgatggtatttg

SEQ ID NO: 778535 - DNA, 33 bp, Homo sapien
tctccttccatcgtcccgagaactgaacctcat

SEQ ID NO: 778536 - DNA, 33 bp, Homo sapien
tctccttccatcgtcctgagaactgaacctcat

SEQ ID NO: 778537 - DNA, 33 bp, Homo sapien
aacatctgatcaaccaactaaaggttgtggttt

SEQ ID NO: 778538 - DNA, 33 bp, Homo sapien
aacatctgatcaaccatctaaaggttgtggttt

SEQ ID NO: 778539 - DNA, 33 bp, Homo sapien
ctacataagactaataaccatcagtacttgtac

SEQ ID NO: 778540 - DNA, 33 bp, Homo sapien
ctacataagactaatacccatcagtacttgtac

SEQ ID NO: 778541 - DNA, 33 bp, Homo sapien
ggaggtgccagtgggaataaagataaatgtcta

SEQ ID NO: 778542 - DNA, 33 bp, Homo sapien
ggaggtgccagtgggagtaaagataaatgtcta

SEQ ID NO: 778543 - DNA, 33 bp, Homo sapien
agtgaaaggaagttgaagggtatcctaatttca

SEQ ID NO: 778544 - DNA, 33 bp, Homo sapien
agtgaaaggaagttgaggggtatcctaatttca

SEQ ID NO: 778545 - DNA, 33 bp, Homo sapien
tatatgagggatgctacaacaggacaggataag

SEQ ID NO: 778546 - DNA, 33 bp, Homo sapien
tatatgagggatgctataacaggacaggataag

SEQ ID NO: 778547 - DNA, 33 bp, Homo sapien
aggttttctttgagtccacaaatagtgttgttg

SEQ ID NO: 778548 - DNA, 33 bp, Homo sapien
aggttttctttgagtctacaaatagtgttgttg

SEQ ID NO: 778549 - DNA, 33 bp, Homo sapien
agggaacagaagagacaacaatcagtcctttat

SEQ ID NO: 778550 - DNA, 33 bp, Homo sapien
agggaacagaagagaccacaatcagtcctttat

SEQ ID NO: 778551 - DNA, 33 bp, Homo sapien
tcattgctcttcctcaataagtgaataaatcaa

SEQ ID NO: 778552 - DNA, 33 bp, Homo sapien
tcattgctcttcctcagtaagtgaataaatcaa

SEQ ID NO: 778553 - DNA, 33 bp, Homo sapien
tactagaagagattggcacaaccttttgacatg

SEQ ID NO: 778554 - DNA, 33 bp, Homo sapien
tactagaagagattggtacaaccttttgacatg

SEQ ID NO: 778555 - DNA, 33 bp, Homo sapien
ctcccattgtagattgaagataagacagtcacc

SEQ ID NO: 778556 - DNA, 33 bp, Homo sapien
ctcccattgtagattggagataagacagtcacc

SEQ ID NO: 778557 - DNA, 33 bp, Homo sapien
ccttctgttgtagcgacattgcttctaacaata

SEQ ID NO: 778558 - DNA, 33 bp, Homo sapien
ccttctgttgtagcgatattgcttctaacaata

SEQ ID NO: 778559 - DNA, 33 bp, Homo sapien
agatgttaaacaggataagctttgaggccattc

SEQ ID NO: 778560 - DNA, 33 bp, Homo sapien
agatgttaaacaggatgagctttgaggccattc

SEQ ID NO: 778561 - DNA, 33 bp, Homo sapien
tccactactccaaagactaaagagagacaagaa

SEQ ID NO: 778562 - DNA, 33 bp, Homo sapien
tccactactccaaagattaaagagagacaagaa

SEQ ID NO: 778563 - DNA, 33 bp, Homo sapien
ttgggaggagtgtccacgcctttcctcaagtct

SEQ ID NO: 778564 - DNA, 33 bp, Homo sapien
ttgggaggagtgtccatgcctttcctcaagtct

SEQ ID NO: 778565 - DNA, 33 bp, Homo sapien
tgcagtacaatgaaacacagaggttttcaattt

SEQ ID NO: 778566 - DNA, 33 bp, Homo sapien
tgcagtacaatgaaactcagaggttttcaattt

SEQ ID NO: 778567 - DNA, 33 bp, Homo sapien
tttgagctgaaggcaaataagaagcagcaaatg

SEQ ID NO: 778568 - DNA, 33 bp, Homo sapien
tttgagctgaaggcaattaagaagcagcaaatg

SEQ ID NO: 778569 - DNA, 33 bp, Homo sapien
ggtacacgtgcaggagaatgcgcaggtctgtta

SEQ ID NO: 778570 - DNA, 33 bp, Homo sapien
ggtacacgtgcaggaggatgcgcaggtctgtta

SEQ ID NO: 778571 - DNA, 33 bp, Homo sapien
tttccttgcaattcaaatcaattcaatcatgat

SEQ ID NO: 778572 - DNA, 33 bp, Homo sapien
tttccttgcaattcaagtcaattcaatcatgat

SEQ ID NO: 778573 - DNA, 33 bp, Homo sapien
atgttctgaagagtaaaggctagttgtgctaca

SEQ ID NO: 778574 - DNA, 33 bp, Homo sapien
atgttctgaagagtaagggctagttgtgctaca

SEQ ID NO: 778575 - DNA, 33 bp, Homo sapien
ctagagaagtcaaacactcaatcattatgagcc

SEQ ID NO: 778576 - DNA, 33 bp, Homo sapien
ctagagaagtcaaacagtcaatcattatgagcc

SEQ ID NO: 778577 - DNA, 33 bp, Homo sapien
tgcccccatattgtacactgcagaataagctac

SEQ ID NO: 778578 - DNA, 33 bp, Homo sapien
tgcccccatattgtacgctgcagaataagctac

SEQ ID NO: 778579 - DNA, 33 bp, Homo sapien
aaatttggatagatagcaattcaggcaaagctc

SEQ ID NO: 778580 - DNA, 33 bp, Homo sapien
aaatttggatagataggaattcaggcaaagctc

SEQ ID NO: 778581 - DNA, 33 bp, Homo sapien
agtctctgagctaacaagtcaacatcagcataa

SEQ ID NO: 778582 - DNA, 33 bp, Homo sapien
agtctctgagctaacacgtcaacatcagcataa

SEQ ID NO: 778583 - DNA, 33 bp, Homo sapien
tcccacttgagttatgacaggagcctaccatga

SEQ ID NO: 778584 - DNA, 33 bp, Homo sapien
tcccacttgagttatggcaggagcctaccatga

SEQ ID NO: 778585 - DNA, 33 bp, Homo sapien
gccaataaacacatacaaaaaaatgttccacat

SEQ ID NO: 778586 - DNA, 33 bp, Homo sapien
gccaataaacacatacgaaaaaatgttccacat

SEQ ID NO: 778587 - DNA, 33 bp, Homo sapien
aagacagcatgatccaatggaaagaacatgggt

SEQ ID NO: 778588 - DNA, 33 bp, Homo sapien
aagacagcatgatccagtggaaagaacatgggt

SEQ ID NO: 778589 - DNA, 33 bp, Homo sapien
gtaataaaccttcaaacgtgatgagggtaaaaa

SEQ ID NO: 778590 - DNA, 33 bp, Homo sapien
gtaataaaccttcaaatgtgatgagggtaaaaa

SEQ ID NO: 778591 - DNA, 33 bp, Homo sapien
ctatccatagcaaaaaactcctacaaattggtg

SEQ ID NO: 778592 - DNA, 33 bp, Homo sapien
ctatccatagcaaaaagctcctacaaattggtg

SEQ ID NO: 778593 - DNA, 33 bp, Homo sapien
tttttttctccagtcaatcatttatgttttgga

SEQ ID NO: 778594 - DNA, 33 bp, Homo sapien
tttttttctccagtcagtcatttatgttttgga

SEQ ID NO: 778595 - DNA, 33 bp, Homo sapien
ggtgattctcctctcaggtagtttcttcaagtg

SEQ ID NO: 778596 - DNA, 33 bp, Homo sapien
ggtgattctcctctcatgtagtttcttcaagtg

SEQ ID NO: 778597 - DNA, 33 bp, Homo sapien
taagggagttgtcacaaaggaagcaaaaatgga

SEQ ID NO: 778598 - DNA, 33 bp, Homo sapien
taagggagttgtcacagaggaagcaaaaatgga

SEQ ID NO: 778599 - DNA, 33 bp, Homo sapien
cctgatgcacaatggagctgaggaggggaatgt

SEQ ID NO: 778600 - DNA, 33 bp, Homo sapien
cctgatgcacaatggatctgaggaggggaatgt

SEQ ID NO: 778601 - DNA, 33 bp, Homo sapien
ctttccacaggtgatacagtatgtttctgacaa

SEQ ID NO: 778602 - DNA, 33 bp, Homo sapien
ctttccacaggtgatagagtatgtttctgacaa

SEQ ID NO: 778603 - DNA, 33 bp, Homo sapien
gcttactctgttaggccaattgttttgttagaa

SEQ ID NO: 778604 - DNA, 33 bp, Homo sapien
gcttactctgttaggcgaattgttttgttagaa

SEQ ID NO: 778605 - DNA, 33 bp, Homo sapien
aaggtggttgaaataacgcccaacacatagtaa

SEQ ID NO: 778606 - DNA, 33 bp, Homo sapien
aaggtggttgaaataatgcccaacacatagtaa

SEQ ID NO: 778607 - DNA, 33 bp, Homo sapien
ttgtacttggtttcaacgtagggtgatcacctt

SEQ ID NO: 778608 - DNA, 33 bp, Homo sapien
ttgtacttggtttcaatgtagggtgatcacctt

SEQ ID NO: 778609 - DNA, 33 bp, Homo sapien
gctcagcacttcaggtcacacgtctatgtcact

SEQ ID NO: 778610 - DNA, 33 bp, Homo sapien
gctcagcacttcaggttacacgtctatgtcact

SEQ ID NO: 778611 - DNA, 33 bp, Homo sapien
gtatagcttaaacagaccataaattgtcacacg

SEQ ID NO: 778612 - DNA, 33 bp, Homo sapien
gtatagcttaaacagatcataaattgtcacacg

SEQ ID NO: 778613 - DNA, 33 bp, Homo sapien
gacaaaatgatagctccaaaccggaactactga

SEQ ID NO: 778614 - DNA, 33 bp, Homo sapien
gacaaaatgatagctctaaaccggaactactga

SEQ ID NO: 778615 - DNA, 33 bp, Homo sapien
aattaaagcacaaacacgaggtctgattttatt

SEQ ID NO: 778616 - DNA, 33 bp, Homo sapien
aattaaagcacaaacatgaggtctgattttatt

SEQ ID NO: 778617 - DNA, 33 bp, Homo sapien
gatacaatggactttaaggactcaggcaaaagg

SEQ ID NO: 778618 - DNA, 33 bp, Homo sapien
gatacaatggactttagggactcaggcaaaagg

SEQ ID NO: 778619 - DNA, 33 bp, Homo sapien
gtttgctttataggccaataactgaatctctct

SEQ ID NO: 778620 - DNA, 33 bp, Homo sapien
gtttgctttataggcccataactgaatctctct

SEQ ID NO: 778621 - DNA, 33 bp, Homo sapien
cctttctcactatccaactcctgaaaccctctg

SEQ ID NO: 778622 - DNA, 33 bp, Homo sapien
cctttctcactatccagctcctgaaaccctctg

SEQ ID NO: 778623 - DNA, 33 bp, Homo sapien
ggttcagacactctggaactaaaagttatgatt

SEQ ID NO: 778624 - DNA, 33 bp, Homo sapien
ggttcagacactctggcactaaaagttatgatt

SEQ ID NO: 778625 - DNA, 33 bp, Homo sapien
gtttgccctcacaccagtcttttcaacacaaga

SEQ ID NO: 778626 - DNA, 33 bp, Homo sapien
gtttgccctcacaccattcttttcaacacaaga

SEQ ID NO: 778627 - DNA, 33 bp, Homo sapien
tatgtgtccagtgccaagagttacaaatatctc

SEQ ID NO: 778628 - DNA, 33 bp, Homo sapien
tatgtgtccagtgccaggagttacaaatatctc

SEQ ID NO: 778629 - DNA, 33 bp, Homo sapien
cataattgcatgagccaattccttataacaagt

SEQ ID NO: 778630 - DNA, 33 bp, Homo sapien
cataattgcatgagccgattccttataacaagt

SEQ ID NO: 778631 - DNA, 33 bp, Homo sapien
ataatcacaaatgcaacaaatgccaatgtagac

SEQ ID NO: 778632 - DNA, 33 bp, Homo sapien
ataatcacaaatgcaagaaatgccaatgtagac

SEQ ID NO: 778633 - DNA, 33 bp, Homo sapien
ctctcaactactgccaaagagagaataatgtga

SEQ ID NO: 778634 - DNA, 33 bp, Homo sapien
ctctcaactactgccagagagagaataatgtga

SEQ ID NO: 778635 - DNA, 33 bp, Homo sapien
agtctctgaatgtacaaccatgtcagcaaattg

SEQ ID NO: 778636 - DNA, 33 bp, Homo sapien
agtctctgaatgtacagccatgtcagcaaattg

SEQ ID NO: 778637 - DNA, 33 bp, Homo sapien
gataatggtatgaagacggacaaaactgaagtc

SEQ ID NO: 778638 - DNA, 33 bp, Homo sapien
gataatggtatgaagatggacaaaactgaagtc

SEQ ID NO: 778639 - DNA, 33 bp, Homo sapien
ttgacacttgtttatacccagaggcagccttaa

SEQ ID NO: 778640 - DNA, 33 bp, Homo sapien
ttgacacttgtttatatccagaggcagccttaa

SEQ ID NO: 778641 - DNA, 33 bp, Homo sapien
ttgtgctaattattaacatactctctagctcct

SEQ ID NO: 778642 - DNA, 33 bp, Homo sapien
ttgtgctaattattaagatactctctagctcct

SEQ ID NO: 778643 - DNA, 33 bp, Homo sapien
agctgggagactgaacacagataatttaatgta

SEQ ID NO: 778644 - DNA, 33 bp, Homo sapien
agctgggagactgaacgcagataatttaatgta

SEQ ID NO: 778645 - DNA, 33 bp, Homo sapien
ttataattagattccactgctgccgatggagac

SEQ ID NO: 778646 - DNA, 33 bp, Homo sapien
ttataattagattccattgctgccgatggagac

SEQ ID NO: 778647 - DNA, 33 bp, Homo sapien
aaacatctcagatgccagaagtggaaaaggaag

SEQ ID NO: 778648 - DNA, 33 bp, Homo sapien
aaacatctcagatgccggaagtggaaaaggaag

SEQ ID NO: 778649 - DNA, 33 bp, Homo sapien
cctgaaatggaaacccggagcctgccagtattt

SEQ ID NO: 778650 - DNA, 33 bp, Homo sapien
cctgaaatggaaaccctgagcctgccagtattt

SEQ ID NO: 778651 - DNA, 33 bp, Homo sapien
tatcatgtagcatctcacaaacgtgactatata

SEQ ID NO: 778652 - DNA, 33 bp, Homo sapien
tatcatgtagcatctcgcaaacgtgactatata

SEQ ID NO: 778653 - DNA, 33 bp, Homo sapien
tgtggatatgacactacgctatgggaatatact

SEQ ID NO: 778654 - DNA, 33 bp, Homo sapien
tgtggatatgacactatgctatgggaatatact

SEQ ID NO: 778655 - DNA, 33 bp, Homo sapien
ctgattttatataccaagtgtttgctgtggatc

SEQ ID NO: 778656 - DNA, 33 bp, Homo sapien
ctgattttatataccaggtgtttgctgtggatc

SEQ ID NO: 778657 - DNA, 33 bp, Homo sapien
gcaggaaagatgtgcaaccattttcagctcagc

SEQ ID NO: 778658 - DNA, 33 bp, Homo sapien
gcaggaaagatgtgcagccattttcagctcagc

SEQ ID NO: 778659 - DNA, 33 bp, Homo sapien
ggatatattgtgaagaccttaatgccaagatag

SEQ ID NO: 778660 - DNA, 33 bp, Homo sapien
ggatatattgtgaagatcttaatgccaagatag

SEQ ID NO: 778661 - DNA, 33 bp, Homo sapien
aggttgaccattgggaaactgcttctaagagat

SEQ ID NO: 778662 - DNA, 33 bp, Homo sapien
aggttgaccattgggagactgcttctaagagat

SEQ ID NO: 778663 - DNA, 33 bp, Homo sapien
tcgtccagtataccaactgactctagctaatat

SEQ ID NO: 778664 - DNA, 33 bp, Homo sapien
tcgtccagtataccaattgactctagctaatat

SEQ ID NO: 778665 - DNA, 33 bp, Homo sapien
gagtgaaagttactaaagagtatatgatatttt

SEQ ID NO: 778666 - DNA, 33 bp, Homo sapien
gagtgaaagttactaatgagtatatgatatttt

SEQ ID NO: 778667 - DNA, 33 bp, Homo sapien
attctcccacgtccaaatctatgttagcatttc

SEQ ID NO: 778668 - DNA, 33 bp, Homo sapien
attctcccacgtccaactctatgttagcatttc

SEQ ID NO: 778669 - DNA, 33 bp, Homo sapien
gagaaactgctgaaaaccctaacgaaagcactt

SEQ ID NO: 778670 - DNA, 33 bp, Homo sapien
gagaaactgctgaaaagcctaacgaaagcactt

SEQ ID NO: 778671 - DNA, 33 bp, Homo sapien
attcatctgggtggatgaattacgtaaaggagc

SEQ ID NO: 778672 - DNA, 33 bp, Homo sapien
attcatctgggtggattaattacgtaaaggagc

SEQ ID NO: 778673 - DNA, 33 bp, Homo sapien
caagacacagagtagaaaaggctgtcctgttag

SEQ ID NO: 778674 - DNA, 33 bp, Homo sapien
caagacacagagtagagaaggctgtcctgttag

SEQ ID NO: 778675 - DNA, 33 bp, Homo sapien
tgtatattggtgaataagccaaatacttccact

SEQ ID NO: 778676 - DNA, 33 bp, Homo sapien
tgtatattggtgaataggccaaatacttccact

SEQ ID NO: 778677 - DNA, 33 bp, Homo sapien
agaaagtcctgctgcacgatcactttagccata

SEQ ID NO: 778678 - DNA, 33 bp, Homo sapien
agaaagtcctgctgcatgatcactttagccata

SEQ ID NO: 778679 - DNA, 33 bp, Homo sapien
tgatgaataaacagacgaatagttgggccactg

SEQ ID NO: 778680 - DNA, 33 bp, Homo sapien
tgatgaataaacagactaatagttgggccactg

SEQ ID NO: 778681 - DNA, 33 bp, Homo sapien
gggaccacagatgtgcactaacacgcttggcta

SEQ ID NO: 778682 - DNA, 33 bp, Homo sapien
gggaccacagatgtgcgctaacacgcttggcta

SEQ ID NO: 778683 - DNA, 33 bp, Homo sapien
cattgtcaacctgctaccagaaagccaagtgac

SEQ ID NO: 778684 - DNA, 33 bp, Homo sapien
cattgtcaacctgctatcagaaagccaagtgac

SEQ ID NO: 778685 - DNA, 33 bp, Homo sapien
aaaaaagagtgtactacggctaaagagttaaca

SEQ ID NO: 778686 - DNA, 33 bp, Homo sapien
aaaaaagagtgtactagggctaaagagttaaca

SEQ ID NO: 778687 - DNA, 33 bp, Homo sapien
acactcttttttccctcaaatgttcaatgaatg

SEQ ID NO: 778688 - DNA, 33 bp, Homo sapien
acactcttttttccctgaaatgttcaatgaatg

SEQ ID NO: 778689 - DNA, 33 bp, Homo sapien
cacattttgaaaatcaataaaacctcgttgatt

SEQ ID NO: 778690 - DNA, 33 bp, Homo sapien
cacattttgaaaatcagtaaaacctcgttgatt

SEQ ID NO: 778691 - DNA, 33 bp, Homo sapien
aaatgctgataaataacgcaagttagaatgtgg

SEQ ID NO: 778692 - DNA, 33 bp, Homo sapien
aaatgctgataaataatgcaagttagaatgtgg

SEQ ID NO: 778693 - DNA, 33 bp, Homo sapien
cttcactatgaatgtgcagttgaagttcaaggt

SEQ ID NO: 778694 - DNA, 33 bp, Homo sapien
cttcactatgaatgtggagttgaagttcaaggt

SEQ ID NO: 778695 - DNA, 33 bp, Homo sapien
aatgaggagtcacttacgggttcctgcgtgggg

SEQ ID NO: 778696 - DNA, 33 bp, Homo sapien
aatgaggagtcacttatgggttcctgcgtgggg

SEQ ID NO: 778697 - DNA, 33 bp, Homo sapien
accacagaatgaaacacgtgctataattaaggt

SEQ ID NO: 778698 - DNA, 33 bp, Homo sapien
accacagaatgaaacatgtgctataattaaggt

SEQ ID NO: 778699 - DNA, 33 bp, Homo sapien
tcaggtcctgtcagccactggatcccacaaaac

SEQ ID NO: 778700 - DNA, 33 bp, Homo sapien
tcaggtcctgtcagccgctggatcccacaaaac

SEQ ID NO: 778701 - DNA, 33 bp, Homo sapien
cacaagccctgagaagactgattatttcctttc

SEQ ID NO: 778702 - DNA, 33 bp, Homo sapien
cacaagccctgagaagtctgattatttcctttc

SEQ ID NO: 778703 - DNA, 33 bp, Homo sapien
atcattatagcatctgcaacctttttctgaaat

SEQ ID NO: 778704 - DNA, 33 bp, Homo sapien
atcattatagcatctgtaacctttttctgaaat

SEQ ID NO: 778705 - DNA, 33 bp, Homo sapien
gagatctttaaatcatcagaacagattactcca

SEQ ID NO: 778706 - DNA, 33 bp, Homo sapien
gagatctttaaatcatgagaacagattactcca

SEQ ID NO: 778707 - DNA, 33 bp, Homo sapien
gtgatgccatagttacacatcagtggacatggg

SEQ ID NO: 778708 - DNA, 33 bp, Homo sapien
gtgatgccatagttacgcatcagtggacatggg

SEQ ID NO: 778709 - DNA, 33 bp, Homo sapien
aggggaaatgggaacacagagctgaatcacagg

SEQ ID NO: 778710 - DNA, 33 bp, Homo sapien
aggggaaatgggaacagagagctgaatcacagg

SEQ ID NO: 778711 - DNA, 33 bp, Homo sapien
cagtgaaatatggcaaagatgagaggacagggc

SEQ ID NO: 778712 - DNA, 33 bp, Homo sapien
cagtgaaatatggcaaggatgagaggacagggc

SEQ ID NO: 778713 - DNA, 33 bp, Homo sapien
aagtttgttttatatcacatgaaagcagtctgg

SEQ ID NO: 778714 - DNA, 33 bp, Homo sapien
aagtttgttttatatctcatgaaagcagtctgg

SEQ ID NO: 778715 - DNA, 33 bp, Homo sapien
atggaagattagacatgagaagcaatcatttga

SEQ ID NO: 778716 - DNA, 33 bp, Homo sapien
atggaagattagacattagaagcaatcatttga

SEQ ID NO: 778717 - DNA, 33 bp, Homo sapien
cataagagactgaagaagttttttacatcacat

SEQ ID NO: 778718 - DNA, 33 bp, Homo sapien
cataagagactgaagaggttttttacatcacat

SEQ ID NO: 778719 - DNA, 33 bp, Homo sapien
taggcagttgattgtaaatctcaggaaattagt

SEQ ID NO: 778720 - DNA, 33 bp, Homo sapien
taggcagttgattgtacatctcaggaaattagt

SEQ ID NO: 778721 - DNA, 33 bp, Homo sapien
ctgtctaaagtatccaacaaagaagtggattca

SEQ ID NO: 778722 - DNA, 33 bp, Homo sapien
ctgtctaaagtatccagcaaagaagtggattca

SEQ ID NO: 778723 - DNA, 33 bp, Homo sapien
gcacagacggatgcccaatgagcatttgccaaa

SEQ ID NO: 778724 - DNA, 33 bp, Homo sapien
gcacagacggatgccccatgagcatttgccaaa

SEQ ID NO: 778725 - DNA, 33 bp, Homo sapien
ctctggtctggggtaacagcaaagagtcctgaa

SEQ ID NO: 778726 - DNA, 33 bp, Homo sapien
ctctggtctggggtaagagcaaagagtcctgaa

SEQ ID NO: 778727 - DNA, 33 bp, Homo sapien
actcccagatccattacagtatttgaggaagcg

SEQ ID NO: 778728 - DNA, 33 bp, Homo sapien
actcccagatccattagagtatttgaggaagcg

SEQ ID NO: 778729 - DNA, 33 bp, Homo sapien
cctggaatatgttacactgagtttgataaaatg

SEQ ID NO: 778730 - DNA, 33 bp, Homo sapien
cctggaatatgttacattgagtttgataaaatg

SEQ ID NO: 778731 - DNA, 33 bp, Homo sapien
tttcatggcatttctgcattttactaatgatat

SEQ ID NO: 778732 - DNA, 33 bp, Homo sapien
tttcatggcatttctgtattttactaatgatat

SEQ ID NO: 778733 - DNA, 33 bp, Homo sapien
atgtttgtagtgtggccgaaactcagaacacag

SEQ ID NO: 778734 - DNA, 33 bp, Homo sapien
atgtttgtagtgtggctgaaactcagaacacag

SEQ ID NO: 778735 - DNA, 33 bp, Homo sapien
acagaatgctgtcactaaggtgtattgtgaatg

SEQ ID NO: 778736 - DNA, 33 bp, Homo sapien
acagaatgctgtcactgaggtgtattgtgaatg

SEQ ID NO: 778737 - DNA, 33 bp, Homo sapien
tttctttaggactcaacttatatgtcagctttt

SEQ ID NO: 778738 - DNA, 33 bp, Homo sapien
tttctttaggactcaatttatatgtcagctttt

SEQ ID NO: 778739 - DNA, 33 bp, Homo sapien
gcttcaactgcagaaactcattttctcacaaat

SEQ ID NO: 778740 - DNA, 33 bp, Homo sapien
gcttcaactgcagaaattcattttctcacaaat

SEQ ID NO: 778741 - DNA, 33 bp, Homo sapien
ctacctcatttgcactaaataagcgttctgtgg

SEQ ID NO: 778742 - DNA, 33 bp, Homo sapien
ctacctcatttgcactgaataagcgttctgtgg

SEQ ID NO: 778743 - DNA, 33 bp, Homo sapien
tatttagagtgagtcacgttctcaccagctata

SEQ ID NO: 778744 - DNA, 33 bp, Homo sapien
tatttagagtgagtcatgttctcaccagctata

SEQ ID NO: 778745 - DNA, 33 bp, Homo sapien
cttgagagtgtcggtgaaagtggttctgagagc

SEQ ID NO: 778746 - DNA, 33 bp, Homo sapien
cttgagagtgtcggtggaagtggttctgagagc

SEQ ID NO: 778747 - DNA, 33 bp, Homo sapien
cttctgtctcactccaactggggctctcagaac

SEQ ID NO: 778748 - DNA, 33 bp, Homo sapien
cttctgtctcactccagctggggctctcagaac

SEQ ID NO: 778749 - DNA, 33 bp, Homo sapien
aaataggcagttcataagggctaaaagagtgag

SEQ ID NO: 778750 - DNA, 33 bp, Homo sapien
aaataggcagttcatacgggctaaaagagtgag

SEQ ID NO: 778751 - DNA, 33 bp, Homo sapien
ctttcctccagggctcacattcactcaatgagt

SEQ ID NO: 778752 - DNA, 33 bp, Homo sapien
ctttcctccagggctcgcattcactcaatgagt

SEQ ID NO: 778753 - DNA, 33 bp, Homo sapien
tagtgtgtggggtataaacgtgtggtgtgtgat

SEQ ID NO: 778754 - DNA, 33 bp, Homo sapien
tagtgtgtggggtatagacgtgtggtgtgtgat

SEQ ID NO: 778755 - DNA, 33 bp, Homo sapien
gtagccagagacataccagctacaagggcaaaa

SEQ ID NO: 778756 - DNA, 33 bp, Homo sapien
gtagccagagacatactagctacaagggcaaaa

SEQ ID NO: 778757 - DNA, 33 bp, Homo sapien
cttgctcatgatcaacaaaagctctctgtttat

SEQ ID NO: 778758 - DNA, 33 bp, Homo sapien
cttgctcatgatcaacgaaagctctctgtttat

SEQ ID NO: 778759 - DNA, 33 bp, Homo sapien
acttggctcccaggtaaacaatgagtaattata

SEQ ID NO: 778760 - DNA, 33 bp, Homo sapien
acttggctcccaggtagacaatgagtaattata

SEQ ID NO: 778761 - DNA, 33 bp, Homo sapien
acaaaagataactagcacagtggtctattggaa

SEQ ID NO: 778762 - DNA, 33 bp, Homo sapien
acaaaagataactagcgcagtggtctattggaa

SEQ ID NO: 778763 - DNA, 33 bp, Homo sapien
actggtaatagttcccagagaatggctggctcc

SEQ ID NO: 778764 - DNA, 33 bp, Homo sapien
actggtaatagttcccggagaatggctggctcc

SEQ ID NO: 778765 - DNA, 33 bp, Homo sapien
catctgcttcatggaggacctgaattaatacaa

SEQ ID NO: 778766 - DNA, 33 bp, Homo sapien
catctgcttcatggagtacctgaattaatacaa

SEQ ID NO: 778767 - DNA, 33 bp, Homo sapien
cctgagtttctagctcactgaactcttgtctcc

SEQ ID NO: 778768 - DNA, 33 bp, Homo sapien
cctgagtttctagctcgctgaactcttgtctcc

SEQ ID NO: 778769 - DNA, 33 bp, Homo sapien
ggtgaaaggccttttcaaaattatccagctatt

SEQ ID NO: 778770 - DNA, 33 bp, Homo sapien
ggtgaaaggccttttccaaattatccagctatt

SEQ ID NO: 778771 - DNA, 33 bp, Homo sapien
aaacaagggagtttaacaagagcctaagcagga

SEQ ID NO: 778772 - DNA, 33 bp, Homo sapien
aaacaagggagtttaataagagcctaagcagga

SEQ ID NO: 778773 - DNA, 33 bp, Homo sapien
ctttagtgtacttccaatcatataaatcacagg

SEQ ID NO: 778774 - DNA, 33 bp, Homo sapien
ctttagtgtacttccagtcatataaatcacagg

SEQ ID NO: 778775 - DNA, 33 bp, Homo sapien
tataaccatgccctgaactaatgatgcttaagc

SEQ ID NO: 778776 - DNA, 33 bp, Homo sapien
tataaccatgccctgacctaatgatgcttaagc

SEQ ID NO: 778777 - DNA, 33 bp, Homo sapien
tcacacctaataaagggcagtaagcacggattt

SEQ ID NO: 778778 - DNA, 33 bp, Homo sapien
tcacacctaataaaggtcagtaagcacggattt

SEQ ID NO: 778779 - DNA, 33 bp, Homo sapien
acttgttacctaatccaagcatccttggtggcc

SEQ ID NO: 778780 - DNA, 33 bp, Homo sapien
acttgttacctaatccgagcatccttggtggcc

SEQ ID NO: 778781 - DNA, 33 bp, Homo sapien
tgtagcttttcttaaagaaggaatagggcctac

SEQ ID NO: 778782 - DNA, 33 bp, Homo sapien
tgtagcttttcttaaataaggaatagggcctac

SEQ ID NO: 778783 - DNA, 33 bp, Homo sapien
tagcaaaagtcattgcaagttctgaaggaaaca

SEQ ID NO: 778784 - DNA, 33 bp, Homo sapien
tagcaaaagtcattgcgagttctgaaggaaaca

SEQ ID NO: 778785 - DNA, 33 bp, Homo sapien
aaagggattgcagtagcagtaggtggcatggtc

SEQ ID NO: 778786 - DNA, 33 bp, Homo sapien
aaagggattgcagtagtagtaggtggcatggtc

SEQ ID NO: 778787 - DNA, 33 bp, Homo sapien
catttgctctccccaccgaacaaagggattgca

SEQ ID NO: 778788 - DNA, 33 bp, Homo sapien
catttgctctccccactgaacaaagggattgca

SEQ ID NO: 778789 - DNA, 33 bp, Homo sapien
tagtgctaatcacagcagctatgatttagtgag

SEQ ID NO: 778790 - DNA, 33 bp, Homo sapien
tagtgctaatcacagcggctatgatttagtgag

SEQ ID NO: 778791 - DNA, 33 bp, Homo sapien
agccaaattgacggcacgctcagcatatgggat

SEQ ID NO: 778792 - DNA, 33 bp, Homo sapien
agccaaattgacggcaggctcagcatatgggat

SEQ ID NO: 778793 - DNA, 33 bp, Homo sapien
tgagaaatttgtataccgggtccacaggagaca

SEQ ID NO: 778794 - DNA, 33 bp, Homo sapien
tgagaaatttgtatactgggtccacaggagaca

SEQ ID NO: 778795 - DNA, 33 bp, Homo sapien
ttctcactggactcgggatgtatgaggacagac

SEQ ID NO: 778796 - DNA, 33 bp, Homo sapien
ttctcactggactcggtatgtatgaggacagac

SEQ ID NO: 778797 - DNA, 33 bp, Homo sapien
tgctgggtttgaagaactaaagcctgtggttcc

SEQ ID NO: 778798 - DNA, 33 bp, Homo sapien
tgctgggtttgaagaattaaagcctgtggttcc

SEQ ID NO: 778799 - DNA, 33 bp, Homo sapien
gctaaatgcttacttacggagaagagacgagtt

SEQ ID NO: 778800 - DNA, 33 bp, Homo sapien
gctaaatgcttacttatggagaagagacgagtt

SEQ ID NO: 778801 - DNA, 33 bp, Homo sapien
cttctctgtggtaatacaattttcaatagaatt

SEQ ID NO: 778802 - DNA, 33 bp, Homo sapien
cttctctgtggtaatataattttcaatagaatt

SEQ ID NO: 778803 - DNA, 33 bp, Homo sapien
ttcatctactaaaacacgtctttcctctgattt

SEQ ID NO: 778804 - DNA, 33 bp, Homo sapien
ttcatctactaaaacatgtctttcctctgattt

SEQ ID NO: 778805 - DNA, 33 bp, Homo sapien
ggaagccaaagatgtaaacaaggaacatcaaat

SEQ ID NO: 778806 - DNA, 33 bp, Homo sapien
ggaagccaaagatgtagacaaggaacatcaaat

SEQ ID NO: 778807 - DNA, 33 bp, Homo sapien
tttcatgaaatgtacaactttactttaactaga

SEQ ID NO: 778808 - DNA, 33 bp, Homo sapien
tttcatgaaatgtacatctttactttaactaga

SEQ ID NO: 778809 - DNA, 33 bp, Homo sapien
aacttgttgaaactcacattcttgggccccacc

SEQ ID NO: 778810 - DNA, 33 bp, Homo sapien
aacttgttgaaactcagattcttgggccccacc

SEQ ID NO: 778811 - DNA, 33 bp, Homo sapien
tcagtgaacccaaggccgaagaccacaggttaa

SEQ ID NO: 778812 - DNA, 33 bp, Homo sapien
tcagtgaacccaaggctgaagaccacaggttaa

SEQ ID NO: 778813 - DNA, 33 bp, Homo sapien
gtaggacttacctgaccctatcaaatcagacgt

SEQ ID NO: 778814 - DNA, 33 bp, Homo sapien
gtaggacttacctgactctatcaaatcagacgt

SEQ ID NO: 778815 - DNA, 33 bp, Homo sapien
ctgtaaagtaatcaagccctggttagcatgtgg

SEQ ID NO: 778816 - DNA, 33 bp, Homo sapien
ctgtaaagtaatcaaggcctggttagcatgtgg

SEQ ID NO: 778817 - DNA, 33 bp, Homo sapien
ttgatatctctgaaaacgtgtacctttctctgc

SEQ ID NO: 778818 - DNA, 33 bp, Homo sapien
ttgatatctctgaaaatgtgtacctttctctgc

SEQ ID NO: 778819 - DNA, 33 bp, Homo sapien
ttccaatttgagtgacaaaagcagcaaatgcat

SEQ ID NO: 778820 - DNA, 33 bp, Homo sapien
ttccaatttgagtgacgaaagcagcaaatgcat

SEQ ID NO: 778821 - DNA, 33 bp, Homo sapien
ttcaaaaacagccgccaactgagtcctggatct

SEQ ID NO: 778822 - DNA, 33 bp, Homo sapien
ttcaaaaacagccgcctactgagtcctggatct

SEQ ID NO: 778823 - DNA, 33 bp, Homo sapien
ggcagaatgaaccaggcaatgctacgccaggct

SEQ ID NO: 778824 - DNA, 33 bp, Homo sapien
ggcagaatgaaccaggtaatgctacgccaggct

SEQ ID NO: 778825 - DNA, 33 bp, Homo sapien
tctataaaggattccacgcttcccagtttccct

SEQ ID NO: 778826 - DNA, 33 bp, Homo sapien
tctataaaggattccatgcttcccagtttccct

SEQ ID NO: 778827 - DNA, 33 bp, Homo sapien
cacctgtaggtttagcaaacagttaaatggaaa

SEQ ID NO: 778828 - DNA, 33 bp, Homo sapien
cacctgtaggtttagcgaacagttaaatggaaa

SEQ ID NO: 778829 - DNA, 33 bp, Homo sapien
ggccatgtcgcctcccagaaaatcagctccctg

SEQ ID NO: 778830 - DNA, 33 bp, Homo sapien
ggccatgtcgcctcccggaaaatcagctccctg

SEQ ID NO: 778831 - DNA, 33 bp, Homo sapien
tgccatcaggcaggtactacaatttcattactt

SEQ ID NO: 778832 - DNA, 33 bp, Homo sapien
tgccatcaggcaggtattacaatttcattactt

SEQ ID NO: 778833 - DNA, 33 bp, Homo sapien
ttaatacacgaagggcactggacgagaggatca

SEQ ID NO: 778834 - DNA, 33 bp, Homo sapien
ttaatacacgaagggcgctggacgagaggatca

SEQ ID NO: 778835 - DNA, 33 bp, Homo sapien
agcaaaccaaatccaacggcacatcaaaaagat

SEQ ID NO: 778836 - DNA, 33 bp, Homo sapien
agcaaaccaaatccaatggcacatcaaaaagat

SEQ ID NO: 778837 - DNA, 33 bp, Homo sapien
atcacatagataagaaatcagctacttcatcta

SEQ ID NO: 778838 - DNA, 33 bp, Homo sapien
atcacatagataagaattcagctacttcatcta

SEQ ID NO: 778839 - DNA, 33 bp, Homo sapien
atgaaaacctatggtacgatttattacaagaag

SEQ ID NO: 778840 - DNA, 33 bp, Homo sapien
atgaaaacctatggtatgatttattacaagaag

SEQ ID NO: 778841 - DNA, 33 bp, Homo sapien
ttaataatatgataccagaataaagaccacacg

SEQ ID NO: 778842 - DNA, 33 bp, Homo sapien
ttaataatatgataccggaataaagaccacacg

SEQ ID NO: 778843 - DNA, 33 bp, Homo sapien
aaaaaaaatgtgagagaacagaatggtatatta

SEQ ID NO: 778844 - DNA, 33 bp, Homo sapien
aaaaaaaatgtgagaggacagaatggtatatta

SEQ ID NO: 778845 - DNA, 33 bp, Homo sapien
tatgatgttgaacagacgggtgctattaatgca

SEQ ID NO: 778846 - DNA, 33 bp, Homo sapien
tatgatgttgaacagatgggtgctattaatgca

SEQ ID NO: 778847 - DNA, 33 bp, Homo sapien
ttcccaactcttagaaaatggttcaatgaacaa

SEQ ID NO: 778848 - DNA, 33 bp, Homo sapien
ttcccaactcttagaagatggttcaatgaacaa

SEQ ID NO: 778849 - DNA, 33 bp, Homo sapien
aaactcttaaatagacagaaagacatctcatgt

SEQ ID NO: 778850 - DNA, 33 bp, Homo sapien
aaactcttaaatagacggaaagacatctcatgt

SEQ ID NO: 778851 - DNA, 33 bp, Homo sapien
agacactgagtagtcaccatcctctgttgaaaa

SEQ ID NO: 778852 - DNA, 33 bp, Homo sapien
agacactgagtagtcagcatcctctgttgaaaa

SEQ ID NO: 778853 - DNA, 33 bp, Homo sapien
ttcaaaggtctctttaggtaagccaagccattg

SEQ ID NO: 778854 - DNA, 33 bp, Homo sapien
ttcaaaggtctctttatgtaagccaagccattg

SEQ ID NO: 778855 - DNA, 33 bp, Homo sapien
acaaggattatcacacaagtgtctactcaccag

SEQ ID NO: 778856 - DNA, 33 bp, Homo sapien
acaaggattatcacacgagtgtctactcaccag

SEQ ID NO: 778857 - DNA, 33 bp, Homo sapien
gggaggaagaacacaaagtaaatacaagataaa

SEQ ID NO: 778858 - DNA, 33 bp, Homo sapien
gggaggaagaacacaaggtaaatacaagataaa

SEQ ID NO: 778859 - DNA, 33 bp, Homo sapien
ctgcttttgttcttctaaaacaatgtatgaacc

SEQ ID NO: 778860 - DNA, 33 bp, Homo sapien
ctgcttttgttcttctcaaacaatgtatgaacc

SEQ ID NO: 778861 - DNA, 33 bp, Homo sapien
tgttttcgagtcaagcacataaaaggctgcagg

SEQ ID NO: 778862 - DNA, 33 bp, Homo sapien
tgttttcgagtcaagcgcataaaaggctgcagg

SEQ ID NO: 778863 - DNA, 33 bp, Homo sapien
agagttgtaatcaggaaatacagcctccagaga

SEQ ID NO: 778864 - DNA, 33 bp, Homo sapien
agagttgtaatcaggagatacagcctccagaga

SEQ ID NO: 778865 - DNA, 33 bp, Homo sapien
tcttagcccttgacacagtatgtgaagagagtt

SEQ ID NO: 778866 - DNA, 33 bp, Homo sapien
tcttagcccttgacacggtatgtgaagagagtt

SEQ ID NO: 778867 - DNA, 33 bp, Homo sapien
agctggggtgaaggaacgaggaggagcacaagg

SEQ ID NO: 778868 - DNA, 33 bp, Homo sapien
agctggggtgaaggaatgaggaggagcacaagg

SEQ ID NO: 778869 - DNA, 33 bp, Homo sapien
ctgtgcagttttttaaagcatggcatcacacac

SEQ ID NO: 778870 - DNA, 33 bp, Homo sapien
ctgtgcagttttttaaggcatggcatcacacac

SEQ ID NO: 778871 - DNA, 33 bp, Homo sapien
ctgagattagagtccaagtctgtgtttccaaaa

SEQ ID NO: 778872 - DNA, 33 bp, Homo sapien
ctgagattagagtccacgtctgtgtttccaaaa

SEQ ID NO: 778873 - DNA, 33 bp, Homo sapien
acattctgtattttgacgaatgtataatccact

SEQ ID NO: 778874 - DNA, 33 bp, Homo sapien
acattctgtattttgatgaatgtataatccact

SEQ ID NO: 778875 - DNA, 33 bp, Homo sapien
aaaacagataaggaaaagctcatccacagagct

SEQ ID NO: 778876 - DNA, 33 bp, Homo sapien
aaaacagataaggaaacgctcatccacagagct

SEQ ID NO: 778877 - DNA, 33 bp, Homo sapien
tttttaagttaagataacagctagtctttggaa

SEQ ID NO: 778878 - DNA, 33 bp, Homo sapien
tttttaagttaagatagcagctagtctttggaa

SEQ ID NO: 778879 - DNA, 33 bp, Homo sapien
tttatttgttgtcagacaccctttgttcttttc

SEQ ID NO: 778880 - DNA, 33 bp, Homo sapien
tttatttgttgtcagataccctttgttcttttc

SEQ ID NO: 778881 - DNA, 33 bp, Homo sapien
caatctatctttacacagccaacgttctcatct

SEQ ID NO: 778882 - DNA, 33 bp, Homo sapien
caatctatctttacacggccaacgttctcatct

SEQ ID NO: 778883 - DNA, 33 bp, Homo sapien
tttatttctcctagcacgtacccatttacctgg

SEQ ID NO: 778884 - DNA, 33 bp, Homo sapien
tttatttctcctagcatgtacccatttacctgg

SEQ ID NO: 778885 - DNA, 33 bp, Homo sapien
catgtttttagccccaatgaattgagtgagact

SEQ ID NO: 778886 - DNA, 33 bp, Homo sapien
catgtttttagccccagtgaattgagtgagact

SEQ ID NO: 778887 - DNA, 33 bp, Homo sapien
taagaaatggacggtcaaaataaatggaaagtc

SEQ ID NO: 778888 - DNA, 33 bp, Homo sapien
taagaaatggacggtcgaaataaatggaaagtc

SEQ ID NO: 778889 - DNA, 33 bp, Homo sapien
actgacttggtgacaacgaggttcccagctcca

SEQ ID NO: 778890 - DNA, 33 bp, Homo sapien
actgacttggtgacaatgaggttcccagctcca

SEQ ID NO: 778891 - DNA, 33 bp, Homo sapien
ttttaaaattgtagtggaaactggtgcaatttc

SEQ ID NO: 778892 - DNA, 33 bp, Homo sapien
ttttaaaattgtagtgtaaactggtgcaatttc

SEQ ID NO: 778893 - DNA, 33 bp, Homo sapien
ctgtgaactgtaactaaggacacacatgtcagg

SEQ ID NO: 778894 - DNA, 33 bp, Homo sapien
ctgtgaactgtaactacggacacacatgtcagg

SEQ ID NO: 778895 - DNA, 33 bp, Homo sapien
aaggatcaaaagagaacagctcgcagcaggtag

SEQ ID NO: 778896 - DNA, 33 bp, Homo sapien
aaggatcaaaagagaatagctcgcagcaggtag

SEQ ID NO: 778897 - DNA, 33 bp, Homo sapien
tttgcagtgcaaagcaccttcagttttacaaga

SEQ ID NO: 778898 - DNA, 33 bp, Homo sapien
tttgcagtgcaaagcatcttcagttttacaaga

SEQ ID NO: 778899 - DNA, 33 bp, Homo sapien
gtagagcttgtaagtgacaaccttggatattct

SEQ ID NO: 778900 - DNA, 33 bp, Homo sapien
gtagagcttgtaagtggcaaccttggatattct

SEQ ID NO: 778901 - DNA, 33 bp, Homo sapien
cctcacatcatatacaaaaagtagttcaaaatg

SEQ ID NO: 778902 - DNA, 33 bp, Homo sapien
cctcacatcatatacagaaagtagttcaaaatg

SEQ ID NO: 778903 - DNA, 33 bp, Homo sapien
atatagatatggtgctcacgctaatagttggat

SEQ ID NO: 778904 - DNA, 33 bp, Homo sapien
atatagatatggtgcttacgctaatagttggat

SEQ ID NO: 778905 - DNA, 33 bp, Homo sapien
aataattccaagtttaggagcccttggcagagg

SEQ ID NO: 778906 - DNA, 33 bp, Homo sapien
aataattccaagtttatgagcccttggcagagg

SEQ ID NO: 778907 - DNA, 33 bp, Homo sapien
aacccactgtatttatcagaggattgttcctca

SEQ ID NO: 778908 - DNA, 33 bp, Homo sapien
aacccactgtatttattagaggattgttcctca

SEQ ID NO: 778909 - DNA, 33 bp, Homo sapien
ctgtcctttgagctaacaaactgtctttggaaa

SEQ ID NO: 778910 - DNA, 33 bp, Homo sapien
ctgtcctttgagctaagaaactgtctttggaaa

SEQ ID NO: 778911 - DNA, 33 bp, Homo sapien
tacaaagatgaatgacagacccggtgactcttt

SEQ ID NO: 778912 - DNA, 33 bp, Homo sapien
tacaaagatgaatgaccgacccggtgactcttt

SEQ ID NO: 778913 - DNA, 33 bp, Homo sapien
cttgctgtaggcttaccgcagtgcttatgtgtt

SEQ ID NO: 778914 - DNA, 33 bp, Homo sapien
cttgctgtaggcttactgcagtgcttatgtgtt

SEQ ID NO: 778915 - DNA, 33 bp, Homo sapien
tattccacatatttagcatccctggcaactgtc

SEQ ID NO: 778916 - DNA, 33 bp, Homo sapien
tattccacatatttagtatccctggcaactgtc

SEQ ID NO: 778917 - DNA, 33 bp, Homo sapien
tcaagtttgagaaacacggctctgtccagggcc

SEQ ID NO: 778918 - DNA, 33 bp, Homo sapien
tcaagtttgagaaacatggctctgtccagggcc

SEQ ID NO: 778919 - DNA, 33 bp, Homo sapien
ttccttgttcacatccaaattaagaacagactt

SEQ ID NO: 778920 - DNA, 33 bp, Homo sapien
ttccttgttcacatccgaattaagaacagactt

SEQ ID NO: 778921 - DNA, 33 bp, Homo sapien
agttagggagggtcaaactcagatatttttggt

SEQ ID NO: 778922 - DNA, 33 bp, Homo sapien
agttagggagggtcaatctcagatatttttggt

SEQ ID NO: 778923 - DNA, 33 bp, Homo sapien
agaatggagcagtacacgttgccatagaagatg

SEQ ID NO: 778924 - DNA, 33 bp, Homo sapien
agaatggagcagtacatgttgccatagaagatg

SEQ ID NO: 778925 - DNA, 33 bp, Homo sapien
atttctggagatcagacgtcttaaaatcaaggc

SEQ ID NO: 778926 - DNA, 33 bp, Homo sapien
atttctggagatcagaggtcttaaaatcaaggc

SEQ ID NO: 778927 - DNA, 33 bp, Homo sapien
gggtccaaaattccagaagcccaaattagaggc

SEQ ID NO: 778928 - DNA, 33 bp, Homo sapien
gggtccaaaattccaggagcccaaattagaggc

SEQ ID NO: 778929 - DNA, 33 bp, Homo sapien
actggcattttaaatcaataagaatgaggttta

SEQ ID NO: 778930 - DNA, 33 bp, Homo sapien
actggcattttaaatcgataagaatgaggttta

SEQ ID NO: 778931 - DNA, 33 bp, Homo sapien
tttccatttcacccggaagctaactgctagaga

SEQ ID NO: 778932 - DNA, 33 bp, Homo sapien
tttccatttcacccgggagctaactgctagaga

SEQ ID NO: 778933 - DNA, 33 bp, Homo sapien
acttctctttgggtgaagtcagatgcaagaact

SEQ ID NO: 778934 - DNA, 33 bp, Homo sapien
acttctctttgggtgatgtcagatgcaagaact

SEQ ID NO: 778935 - DNA, 33 bp, Homo sapien
gcccaatggaagcctccataaagaattaaaata

SEQ ID NO: 778936 - DNA, 33 bp, Homo sapien
gcccaatggaagcctctataaagaattaaaata

SEQ ID NO: 778937 - DNA, 33 bp, Homo sapien
gattttagatgtctacaattaagtcagggagca

SEQ ID NO: 778938 - DNA, 33 bp, Homo sapien
gattttagatgtctacgattaagtcagggagca

SEQ ID NO: 778939 - DNA, 33 bp, Homo sapien
gtctgataaatatcgacgatccctgtgtttctc

SEQ ID NO: 778940 - DNA, 33 bp, Homo sapien
gtctgataaatatcgatgatccctgtgtttctc

SEQ ID NO: 778941 - DNA, 33 bp, Homo sapien
ctgtattgcacatctaaaatcctatcttttcac

SEQ ID NO: 778942 - DNA, 33 bp, Homo sapien
ctgtattgcacatctataatcctatcttttcac

SEQ ID NO: 778943 - DNA, 33 bp, Homo sapien
tcttacctggaattaaagtgggaaataattcac

SEQ ID NO: 778944 - DNA, 33 bp, Homo sapien
tcttacctggaattaaggtgggaaataattcac

SEQ ID NO: 778945 - DNA, 33 bp, Homo sapien
tttccttaggcaaccaagagtttaatgtgtttt

SEQ ID NO: 778946 - DNA, 33 bp, Homo sapien
tttccttaggcaaccaggagtttaatgtgtttt

SEQ ID NO: 778947 - DNA, 33 bp, Homo sapien
tttagcaagattgtcaaaaacaacctaaacaag

SEQ ID NO: 778948 - DNA, 33 bp, Homo sapien
tttagcaagattgtcacaaacaacctaaacaag

SEQ ID NO: 778949 - DNA, 33 bp, Homo sapien
agaccagtttagtccacaagaagaattagatac

SEQ ID NO: 778950 - DNA, 33 bp, Homo sapien
agaccagtttagtccataagaagaattagatac

SEQ ID NO: 778951 - DNA, 33 bp, Homo sapien
atttgcatgccttgaaataagtggaagataacc

SEQ ID NO: 778952 - DNA, 33 bp, Homo sapien
atttgcatgccttgaagtaagtggaagataacc

SEQ ID NO: 778953 - DNA, 33 bp, Homo sapien
ttgtaggtcatctacacgatactattcatcttt

SEQ ID NO: 778954 - DNA, 33 bp, Homo sapien
ttgtaggtcatctacaggatactattcatcttt

SEQ ID NO: 778955 - DNA, 33 bp, Homo sapien
gtttgtctagtagtaccctatgtacttgttttc

SEQ ID NO: 778956 - DNA, 33 bp, Homo sapien
gtttgtctagtagtactctatgtacttgttttc

SEQ ID NO: 778957 - DNA, 33 bp, Homo sapien
ctttccaggtaaatcaaagttcaagtgaatttt

SEQ ID NO: 778958 - DNA, 33 bp, Homo sapien
ctttccaggtaaatcagagttcaagtgaatttt

SEQ ID NO: 778959 - DNA, 33 bp, Homo sapien
gagtaacgttgtctccaaaggttctgctttggt

SEQ ID NO: 778960 - DNA, 33 bp, Homo sapien
gagtaacgttgtctccgaaggttctgctttggt

SEQ ID NO: 778961 - DNA, 33 bp, Homo sapien
tgatgagaggaactaactgatttatctgaagtc

SEQ ID NO: 778962 - DNA, 33 bp, Homo sapien
tgatgagaggaactaattgatttatctgaagtc

SEQ ID NO: 778963 - DNA, 33 bp, Homo sapien
aaaacttagaggaaaaaaacatgatctgagtct

SEQ ID NO: 778964 - DNA, 33 bp, Homo sapien
aaaacttagaggaaaataacatgatctgagtct

SEQ ID NO: 778965 - DNA, 33 bp, Homo sapien
aggcagacccctgtaacgagctgtggccaaact

SEQ ID NO: 778966 - DNA, 33 bp, Homo sapien
aggcagacccctgtaatgagctgtggccaaact

SEQ ID NO: 778967 - DNA, 33 bp, Homo sapien
ctgcatatttttacataatcagtgcccctagtc

SEQ ID NO: 778968 - DNA, 33 bp, Homo sapien
ctgcatatttttacattatcagtgcccctagtc

SEQ ID NO: 778969 - DNA, 33 bp, Homo sapien
gaaaagctcatctcaaaggaactaaaacttaca

SEQ ID NO: 778970 - DNA, 33 bp, Homo sapien
gaaaagctcatctcaatggaactaaaacttaca

SEQ ID NO: 778971 - DNA, 33 bp, Homo sapien
attcagaatgtttgcgaatctcagataattgaa

SEQ ID NO: 778972 - DNA, 33 bp, Homo sapien
attcagaatgtttgcggatctcagataattgaa

SEQ ID NO: 778973 - DNA, 33 bp, Homo sapien
actggagtgatcttaacggtgcttctcaaactt

SEQ ID NO: 778974 - DNA, 33 bp, Homo sapien
actggagtgatcttaatggtgcttctcaaactt

SEQ ID NO: 778975 - DNA, 33 bp, Homo sapien
atttattaatctgttcaaaactgtaccattata

SEQ ID NO: 778976 - DNA, 33 bp, Homo sapien
atttattaatctgttccaaactgtaccattata

SEQ ID NO: 778977 - DNA, 33 bp, Homo sapien
cttgacatgtagaaaacttatcaattttatatt

SEQ ID NO: 778978 - DNA, 33 bp, Homo sapien
cttgacatgtagaaaagttatcaattttatatt

SEQ ID NO: 778979 - DNA, 33 bp, Homo sapien
cctcccacaacatgcaagaattatggaagttca

SEQ ID NO: 778980 - DNA, 33 bp, Homo sapien
cctcccacaacatgcaggaattatggaagttca

SEQ ID NO: 778981 - DNA, 33 bp, Homo sapien
atgtaaatcacctagaacattttccagggaaga

SEQ ID NO: 778982 - DNA, 33 bp, Homo sapien
atgtaaatcacctagaccattttccagggaaga

SEQ ID NO: 778983 - DNA, 33 bp, Homo sapien
aagatatgggtatctgcagagtataattagctt

SEQ ID NO: 778984 - DNA, 33 bp, Homo sapien
aagatatgggtatctggagagtataattagctt

SEQ ID NO: 778985 - DNA, 33 bp, Homo sapien
ttaagaatcaggaaaaatgagttttgatgaata

SEQ ID NO: 778986 - DNA, 33 bp, Homo sapien
ttaagaatcaggaaaagtgagttttgatgaata

SEQ ID NO: 778987 - DNA, 33 bp, Homo sapien
ttgggaagcttgaagacggacacaagagccaac

SEQ ID NO: 778988 - DNA, 33 bp, Homo sapien
ttgggaagcttgaagatggacacaagagccaac

SEQ ID NO: 778989 - DNA, 33 bp, Homo sapien
aactgtatccaggcccagaaccatggctcagga

SEQ ID NO: 778990 - DNA, 33 bp, Homo sapien
aactgtatccaggcccggaaccatggctcagga

SEQ ID NO: 778991 - DNA, 33 bp, Homo sapien
gtacgtattatcaggtaaagagagagtctacac

SEQ ID NO: 778992 - DNA, 33 bp, Homo sapien
gtacgtattatcaggtgaagagagagtctacac

SEQ ID NO: 778993 - DNA, 33 bp, Homo sapien
gaaagtgtacttttggcataatccatttacaaa

SEQ ID NO: 778994 - DNA, 33 bp, Homo sapien
gaaagtgtacttttggtataatccatttacaaa

SEQ ID NO: 778995 - DNA, 33 bp, Homo sapien
gctcaagatcacacgacataagagagaatcaga

SEQ ID NO: 778996 - DNA, 33 bp, Homo sapien
gctcaagatcacacgatataagagagaatcaga

SEQ ID NO: 778997 - DNA, 33 bp, Homo sapien
tatcacaaaataaaaaagtgtatattcagcgct

SEQ ID NO: 778998 - DNA, 33 bp, Homo sapien
tatcacaaaataaaaaggtgtatattcagcgct

SEQ ID NO: 778999 - DNA, 33 bp, Homo sapien
aggcttctggtagtgcaattaccatactcagag

SEQ ID NO: 779000 - DNA, 33 bp, Homo sapien
aggcttctggtagtgcgattaccatactcagag

SEQ ID NO: 779001 - DNA, 33 bp, Homo sapien
acatttgttgttatgacggcaaatgcagaggct

SEQ ID NO: 779002 - DNA, 33 bp, Homo sapien
acatttgttgttatgatggcaaatgcagaggct

SEQ ID NO: 779003 - DNA, 33 bp, Homo sapien
gactattttctaatgcccgtctttttgctccgt

SEQ ID NO: 779004 - DNA, 33 bp, Homo sapien
gactattttctaatgctcgtctttttgctccgt

SEQ ID NO: 779005 - DNA, 33 bp, Homo sapien
gaaatcatatctcatcacaaacaatttttcagg

SEQ ID NO: 779006 - DNA, 33 bp, Homo sapien
gaaatcatatctcatcgcaaacaatttttcagg

SEQ ID NO: 779007 - DNA, 33 bp, Homo sapien
tccgtgcataaatgctcactaaatacctccctg

SEQ ID NO: 779008 - DNA, 33 bp, Homo sapien
tccgtgcataaatgcttactaaatacctccctg

SEQ ID NO: 779009 - DNA, 33 bp, Homo sapien
ccgtgcccggcctaacaattccttaatatcatc

SEQ ID NO: 779010 - DNA, 33 bp, Homo sapien
ccgtgcccggcctaacgattccttaatatcatc

SEQ ID NO: 779011 - DNA, 33 bp, Homo sapien
gtttcaaaaggcatagccacataacaggctaat

SEQ ID NO: 779012 - DNA, 33 bp, Homo sapien
gtttcaaaaggcatagtcacataacaggctaat

SEQ ID NO: 779013 - DNA, 33 bp, Homo sapien
aatatcttggtatttgaagagagtttgaccttg

SEQ ID NO: 779014 - DNA, 33 bp, Homo sapien
aatatcttggtatttggagagagtttgaccttg

SEQ ID NO: 779015 - DNA, 33 bp, Homo sapien
tccacttatgagagaaacagaccaaaaaaggca

SEQ ID NO: 779016 - DNA, 33 bp, Homo sapien
tccacttatgagagaatcagaccaaaaaaggca

SEQ ID NO: 779017 - DNA, 33 bp, Homo sapien
gtctgattttcagccacctgctgtgtaaaggaa

SEQ ID NO: 779018 - DNA, 33 bp, Homo sapien
gtctgattttcagccagctgctgtgtaaaggaa

SEQ ID NO: 779019 - DNA, 33 bp, Homo sapien
cctgctgggttgaaaccgtacatgctgtgttat

SEQ ID NO: 779020 - DNA, 33 bp, Homo sapien
cctgctgggttgaaactgtacatgctgtgttat

SEQ ID NO: 779021 - DNA, 33 bp, Homo sapien
tattcccatcctccagaagctaactggctttgg

SEQ ID NO: 779022 - DNA, 33 bp, Homo sapien
tattcccatcctccaggagctaactggctttgg

SEQ ID NO: 779023 - DNA, 33 bp, Homo sapien
acccagctaattcttaaatttgttttagcaggg

SEQ ID NO: 779024 - DNA, 33 bp, Homo sapien
acccagctaattcttacatttgttttagcaggg

SEQ ID NO: 779025 - DNA, 33 bp, Homo sapien
tcatttatgtacagtagattttggtgatagcct

SEQ ID NO: 779026 - DNA, 33 bp, Homo sapien
tcatttatgtacagtatattttggtgatagcct

SEQ ID NO: 779027 - DNA, 33 bp, Homo sapien
gggtggaaacaccccaaatgtctaacagtgcgt

SEQ ID NO: 779028 - DNA, 33 bp, Homo sapien
gggtggaaacaccccagatgtctaacagtgcgt

SEQ ID NO: 779029 - DNA, 33 bp, Homo sapien
tgtggttgactgggataaaccaagaactacagg

SEQ ID NO: 779030 - DNA, 33 bp, Homo sapien
tgtggttgactgggatgaaccaagaactacagg

SEQ ID NO: 779031 - DNA, 33 bp, Homo sapien
gaaaaatgagaaaacacgtgcagcagacctaac

SEQ ID NO: 779032 - DNA, 33 bp, Homo sapien
gaaaaatgagaaaacatgtgcagcagacctaac

SEQ ID NO: 779033 - DNA, 33 bp, Homo sapien
ccaccagtgatgcatacatactttaaagtttaa

SEQ ID NO: 779034 - DNA, 33 bp, Homo sapien
ccaccagtgatgcatagatactttaaagtttaa

SEQ ID NO: 779035 - DNA, 33 bp, Homo sapien
tcagagctgcagcaaacgtataaagaagtcatt

SEQ ID NO: 779036 - DNA, 33 bp, Homo sapien
tcagagctgcagcaaatgtataaagaagtcatt

SEQ ID NO: 779037 - DNA, 33 bp, Homo sapien
cccttttcacccacaacgatagcctcaacaatg

SEQ ID NO: 779038 - DNA, 33 bp, Homo sapien
cccttttcacccacaatgatagcctcaacaatg

SEQ ID NO: 779039 - DNA, 33 bp, Homo sapien
tcacgacatacaaaggaatggtgaccagcagaa

SEQ ID NO: 779040 - DNA, 33 bp, Homo sapien
tcacgacatacaaagggatggtgaccagcagaa

SEQ ID NO: 779041 - DNA, 33 bp, Homo sapien
agtcctttcctgacccccagttctgaagacaaa

SEQ ID NO: 779042 - DNA, 33 bp, Homo sapien
agtcctttcctgacccgcagttctgaagacaaa

SEQ ID NO: 779043 - DNA, 33 bp, Homo sapien
ttatagaaggacaagaagagaaagcaagaacaa

SEQ ID NO: 779044 - DNA, 33 bp, Homo sapien
ttatagaaggacaagatgagaaagcaagaacaa

SEQ ID NO: 779045 - DNA, 33 bp, Homo sapien
cagaaactctaggcacaagctttgattcctctt

SEQ ID NO: 779046 - DNA, 33 bp, Homo sapien
cagaaactctaggcacgagctttgattcctctt

SEQ ID NO: 779047 - DNA, 33 bp, Homo sapien
gtgttcaagaaagaatgagaaggaaggaagtcc

SEQ ID NO: 779048 - DNA, 33 bp, Homo sapien
gtgttcaagaaagaattagaaggaaggaagtcc

SEQ ID NO: 779049 - DNA, 33 bp, Homo sapien
taggagaaattaactacgaatttgacacttttt

SEQ ID NO: 779050 - DNA, 33 bp, Homo sapien
taggagaaattaactaggaatttgacacttttt

SEQ ID NO: 779051 - DNA, 33 bp, Homo sapien
gctcacctgcatcagaaccaactaagggtactt

SEQ ID NO: 779052 - DNA, 33 bp, Homo sapien
gctcacctgcatcagagccaactaagggtactt

SEQ ID NO: 779053 - DNA, 33 bp, Homo sapien
ggctcctacacgttctaacaagattctccctgt

SEQ ID NO: 779054 - DNA, 33 bp, Homo sapien
ggctcctacacgttctgacaagattctccctgt

SEQ ID NO: 779055 - DNA, 33 bp, Homo sapien
acatattttcagagtcagaaagcaggagtggct

SEQ ID NO: 779056 - DNA, 33 bp, Homo sapien
acatattttcagagtcggaaagcaggagtggct

SEQ ID NO: 779057 - DNA, 33 bp, Homo sapien
tattatggacactagacacagttggaagtctga

SEQ ID NO: 779058 - DNA, 33 bp, Homo sapien
tattatggacactagatacagttggaagtctga

SEQ ID NO: 779059 - DNA, 33 bp, Homo sapien
aaatctttacctgtccaaacattgcaaaggcat

SEQ ID NO: 779060 - DNA, 33 bp, Homo sapien
aaatctttacctgtcccaacattgcaaaggcat

SEQ ID NO: 779061 - DNA, 33 bp, Homo sapien
tctattagtttaaaaacatggggccctggaaca

SEQ ID NO: 779062 - DNA, 33 bp, Homo sapien
tctattagtttaaaaatatggggccctggaaca

SEQ ID NO: 779063 - DNA, 33 bp, Homo sapien
acttcctatgcccccacaagttgagcttggcac

SEQ ID NO: 779064 - DNA, 33 bp, Homo sapien
acttcctatgcccccataagttgagcttggcac

SEQ ID NO: 779065 - DNA, 33 bp, Homo sapien
aaaggcacatattgcacgagagagagaaaactc

SEQ ID NO: 779066 - DNA, 33 bp, Homo sapien
aaaggcacatattgcatgagagagagaaaactc

SEQ ID NO: 779067 - DNA, 33 bp, Homo sapien
ccagccctggagctatcaggcctctaaggtcct

SEQ ID NO: 779068 - DNA, 33 bp, Homo sapien
ccagccctggagctattaggcctctaaggtcct

SEQ ID NO: 779069 - DNA, 33 bp, Homo sapien
gattaaaacccaacaaactcgagtgctggggtc

SEQ ID NO: 779070 - DNA, 33 bp, Homo sapien
gattaaaacccaacaagctcgagtgctggggtc

SEQ ID NO: 779071 - DNA, 33 bp, Homo sapien
attcttgacataaagacaaagatgttgagttcc

SEQ ID NO: 779072 - DNA, 33 bp, Homo sapien
attcttgacataaagataaagatgttgagttcc

SEQ ID NO: 779073 - DNA, 33 bp, Homo sapien
atgaaacaggtgtcaacgtggagggcagaatcc

SEQ ID NO: 779074 - DNA, 33 bp, Homo sapien
atgaaacaggtgtcaatgtggagggcagaatcc

SEQ ID NO: 779075 - DNA, 33 bp, Homo sapien
gacaaaaatgttgattgaaactagtggttctct

SEQ ID NO: 779076 - DNA, 33 bp, Homo sapien
gacaaaaatgttgatttaaactagtggttctct

SEQ ID NO: 779077 - DNA, 33 bp, Homo sapien
ttctgtgtagccagtgcaactctaaaaacaacc

SEQ ID NO: 779078 - DNA, 33 bp, Homo sapien
ttctgtgtagccagtgtaactctaaaaacaacc

SEQ ID NO: 779079 - DNA, 33 bp, Homo sapien
taactaggatgatacaatagctggaagattaaa

SEQ ID NO: 779080 - DNA, 33 bp, Homo sapien
taactaggatgatacagtagctggaagattaaa

SEQ ID NO: 779081 - DNA, 33 bp, Homo sapien
tggcattggtttgccaatatttaaactgatgtg

SEQ ID NO: 779082 - DNA, 33 bp, Homo sapien
tggcattggtttgccagtatttaaactgatgtg

SEQ ID NO: 779083 - DNA, 33 bp, Homo sapien
agaagagaacagggaaagtgacggcctgagagg

SEQ ID NO: 779084 - DNA, 33 bp, Homo sapien
agaagagaacagggaaggtgacggcctgagagg

SEQ ID NO: 779085 - DNA, 33 bp, Homo sapien
ttaaaagaaaacgcaacattagcatgatttgaa

SEQ ID NO: 779086 - DNA, 33 bp, Homo sapien
ttaaaagaaaacgcaatattagcatgatttgaa

SEQ ID NO: 779087 - DNA, 33 bp, Homo sapien
taacctgccctggttcacagccatcacaggtat

SEQ ID NO: 779088 - DNA, 33 bp, Homo sapien
taacctgccctggttcgcagccatcacaggtat

SEQ ID NO: 779089 - DNA, 33 bp, Homo sapien
tttatcttgtcatttacaacatccatataagca

SEQ ID NO: 779090 - DNA, 33 bp, Homo sapien
tttatcttgtcatttataacatccatataagca

SEQ ID NO: 779091 - DNA, 33 bp, Homo sapien
agtctacaacaaccccaacatattttcccatga

SEQ ID NO: 779092 - DNA, 33 bp, Homo sapien
agtctacaacaaccccgacatattttcccatga

SEQ ID NO: 779093 - DNA, 33 bp, Homo sapien
ttttctatgcttcaccagactatttccaagctg

SEQ ID NO: 779094 - DNA, 33 bp, Homo sapien
ttttctatgcttcaccggactatttccaagctg

SEQ ID NO: 779095 - DNA, 33 bp, Homo sapien
cagataatttgagggccgactgcaggaagcagg

SEQ ID NO: 779096 - DNA, 33 bp, Homo sapien
cagataatttgagggctgactgcaggaagcagg

SEQ ID NO: 779097 - DNA, 33 bp, Homo sapien
tcaaatgccttgctgaggatttccataggaaaa

SEQ ID NO: 779098 - DNA, 33 bp, Homo sapien
tcaaatgccttgctgatgatttccataggaaaa

SEQ ID NO: 779099 - DNA, 33 bp, Homo sapien
aatacagggtggtagagtaatgaatcctgaaaa

SEQ ID NO: 779100 - DNA, 33 bp, Homo sapien
aatacagggtggtagattaatgaatcctgaaaa

SEQ ID NO: 779101 - DNA, 33 bp, Homo sapien
ttttggtttgagtgaacctttttgcaaaacatt

SEQ ID NO: 779102 - DNA, 33 bp, Homo sapien
ttttggtttgagtgaatctttttgcaaaacatt

SEQ ID NO: 779103 - DNA, 33 bp, Homo sapien
agatttacacttaaaaacctttcaccattgaat

SEQ ID NO: 779104 - DNA, 33 bp, Homo sapien
agatttacacttaaaagcctttcaccattgaat

SEQ ID NO: 779105 - DNA, 33 bp, Homo sapien
caaggctgcattcatcggaaaacttgattgggg

SEQ ID NO: 779106 - DNA, 33 bp, Homo sapien
caaggctgcattcatctgaaaacttgattgggg

SEQ ID NO: 779107 - DNA, 33 bp, Homo sapien
gggctgttattcccacaggcaacattgagccaa

SEQ ID NO: 779108 - DNA, 33 bp, Homo sapien
gggctgttattcccacgggcaacattgagccaa

SEQ ID NO: 779109 - DNA, 33 bp, Homo sapien
aaactctgcttgtaaaaaatatggagttcttaa

SEQ ID NO: 779110 - DNA, 33 bp, Homo sapien
aaactctgcttgtaaagaatatggagttcttaa

SEQ ID NO: 779111 - DNA, 33 bp, Homo sapien
atggtaccgaagacaacccggtggcctgaattc

SEQ ID NO: 779112 - DNA, 33 bp, Homo sapien
atggtaccgaagacaagccggtggcctgaattc

SEQ ID NO: 779113 - DNA, 33 bp, Homo sapien
cagacacagcatttctaacatgggtccctcctc

SEQ ID NO: 779114 - DNA, 33 bp, Homo sapien
cagacacagcatttctgacatgggtccctcctc

SEQ ID NO: 779115 - DNA, 33 bp, Homo sapien
gtgatgtacgttaaaacgtgagaagcaccgttc

SEQ ID NO: 779116 - DNA, 33 bp, Homo sapien
gtgatgtacgttaaaatgtgagaagcaccgttc

SEQ ID NO: 779117 - DNA, 33 bp, Homo sapien
tattttatgaattttcccagtcagaggcttctt

SEQ ID NO: 779118 - DNA, 33 bp, Homo sapien
tattttatgaattttctcagtcagaggcttctt

SEQ ID NO: 779119 - DNA, 33 bp, Homo sapien
taaaagagcaacattagaacacttatatcccaa

SEQ ID NO: 779120 - DNA, 33 bp, Homo sapien
taaaagagcaacattataacacttatatcccaa

SEQ ID NO: 779121 - DNA, 33 bp, Homo sapien
tggttggaactaaagacaagacattaggaaata

SEQ ID NO: 779122 - DNA, 33 bp, Homo sapien
tggttggaactaaagataagacattaggaaata

SEQ ID NO: 779123 - DNA, 33 bp, Homo sapien
tgcaaacaaatggaaaatatgtgaggaggttta

SEQ ID NO: 779124 - DNA, 33 bp, Homo sapien
tgcaaacaaatggaaagtatgtgaggaggttta

SEQ ID NO: 779125 - DNA, 33 bp, Homo sapien
gaacctatgactttaacatgcgtaggctgttgg

SEQ ID NO: 779126 - DNA, 33 bp, Homo sapien
gaacctatgactttaatatgcgtaggctgttgg

SEQ ID NO: 779127 - DNA, 33 bp, Homo sapien
ttcccaggcaggtcaacgggaaaaggttgcagg

SEQ ID NO: 779128 - DNA, 33 bp, Homo sapien
ttcccaggcaggtcaatgggaaaaggttgcagg

SEQ ID NO: 779129 - DNA, 33 bp, Homo sapien
aatgcagtctcaggaaacaatagttttgcaata

SEQ ID NO: 779130 - DNA, 33 bp, Homo sapien
aatgcagtctcaggaatcaatagttttgcaata

SEQ ID NO: 779131 - DNA, 33 bp, Homo sapien
taaatgtatttatcacaagctctttatcattgt

SEQ ID NO: 779132 - DNA, 33 bp, Homo sapien
taaatgtatttatcaccagctctttatcattgt

SEQ ID NO: 779133 - DNA, 33 bp, Homo sapien
cttacccaagaaaagacagattgtgaaaatact

SEQ ID NO: 779134 - DNA, 33 bp, Homo sapien
cttacccaagaaaagatagattgtgaaaatact

SEQ ID NO: 779135 - DNA, 33 bp, Homo sapien
agtttcatgtcaataaaatcatacacataactt

SEQ ID NO: 779136 - DNA, 33 bp, Homo sapien
agtttcatgtcaataagatcatacacataactt

SEQ ID NO: 779137 - DNA, 33 bp, Homo sapien
actccccctaatatcccaaactccatagaaata

SEQ ID NO: 779138 - DNA, 33 bp, Homo sapien
actccccctaatatcctaaactccatagaaata

SEQ ID NO: 779139 - DNA, 33 bp, Homo sapien
ttctggctttttctgaggtacattaccaaaaga

SEQ ID NO: 779140 - DNA, 33 bp, Homo sapien
ttctggctttttctgatgtacattaccaaaaga

SEQ ID NO: 779141 - DNA, 33 bp, Homo sapien
cacatactgaaatttacagccatgcatattctc

SEQ ID NO: 779142 - DNA, 33 bp, Homo sapien
cacatactgaaatttagagccatgcatattctc

SEQ ID NO: 779143 - DNA, 33 bp, Homo sapien
ggtaagctttaggaatcattaaaccctgacttg

SEQ ID NO: 779144 - DNA, 33 bp, Homo sapien
ggtaagctttaggaatgattaaaccctgacttg

SEQ ID NO: 779145 - DNA, 33 bp, Homo sapien
tgtacaaaccatgcacgaaaacttaaatcgcct

SEQ ID NO: 779146 - DNA, 33 bp, Homo sapien
tgtacaaaccatgcactaaaacttaaatcgcct

SEQ ID NO: 779147 - DNA, 33 bp, Homo sapien
tatctccaggtaaaaacgggtgtgtcgagcttc

SEQ ID NO: 779148 - DNA, 33 bp, Homo sapien
tatctccaggtaaaaaggggtgtgtcgagcttc

SEQ ID NO: 779149 - DNA, 33 bp, Homo sapien
gcagcttctccaaagtcacaaagtttgtacagg

SEQ ID NO: 779150 - DNA, 33 bp, Homo sapien
gcagcttctccaaagtgacaaagtttgtacagg

SEQ ID NO: 779151 - DNA, 33 bp, Homo sapien
aaacaatggaagctcccgaaacgtggaactatg

SEQ ID NO: 779152 - DNA, 33 bp, Homo sapien
aaacaatggaagctcctgaaacgtggaactatg

SEQ ID NO: 779153 - DNA, 33 bp, Homo sapien
aagaggactttaccgaacctcagagatgacaga

SEQ ID NO: 779154 - DNA, 33 bp, Homo sapien
aagaggactttaccgagcctcagagatgacaga

SEQ ID NO: 779155 - DNA, 33 bp, Homo sapien
tctctccaagtgcatcgaagtttaagtgttttg

SEQ ID NO: 779156 - DNA, 33 bp, Homo sapien
tctctccaagtgcatctaagtttaagtgttttg

SEQ ID NO: 779157 - DNA, 33 bp, Homo sapien
tagccaggacacgaaacatactctaaacttcaa

SEQ ID NO: 779158 - DNA, 33 bp, Homo sapien
tagccaggacacgaaatatactctaaacttcaa

SEQ ID NO: 779159 - DNA, 33 bp, Homo sapien
ggaaatagcaaatatacccatagacatcagttg

SEQ ID NO: 779160 - DNA, 33 bp, Homo sapien
ggaaatagcaaatatatccatagacatcagttg

SEQ ID NO: 779161 - DNA, 33 bp, Homo sapien
tgctgtggtagaacgcagaaggagatttttgga

SEQ ID NO: 779162 - DNA, 33 bp, Homo sapien
tgctgtggtagaacgcggaaggagatttttgga

SEQ ID NO: 779163 - DNA, 33 bp, Homo sapien
aagacctgtattcagaccccacctttgtcacta

SEQ ID NO: 779164 - DNA, 33 bp, Homo sapien
aagacctgtattcagatcccacctttgtcacta

SEQ ID NO: 779165 - DNA, 33 bp, Homo sapien
aagagattaggaaaaaaactgacaataagtgct

SEQ ID NO: 779166 - DNA, 33 bp, Homo sapien
aagagattaggaaaaacactgacaataagtgct

SEQ ID NO: 779167 - DNA, 33 bp, Homo sapien
gtcttttaattctttgaacatattttcaagtct

SEQ ID NO: 779168 - DNA, 33 bp, Homo sapien
gtcttttaattctttggacatattttcaagtct

SEQ ID NO: 779169 - DNA, 33 bp, Homo sapien
tccctggacagtcagacggctaaaatacagccc

SEQ ID NO: 779170 - DNA, 33 bp, Homo sapien
tccctggacagtcagatggctaaaatacagccc

SEQ ID NO: 779171 - DNA, 33 bp, Homo sapien
gactagaggagctggtaaactgaggcacccacg

SEQ ID NO: 779172 - DNA, 33 bp, Homo sapien
gactagaggagctggtgaactgaggcacccacg

SEQ ID NO: 779173 - DNA, 33 bp, Homo sapien
gcaggaaagaccctacaactttctctcatagcc

SEQ ID NO: 779174 - DNA, 33 bp, Homo sapien
gcaggaaagaccctacgactttctctcatagcc

SEQ ID NO: 779175 - DNA, 33 bp, Homo sapien
ctagttgtataagttacgatacgaagtgagcat

SEQ ID NO: 779176 - DNA, 33 bp, Homo sapien
ctagttgtataagttatgatacgaagtgagcat

SEQ ID NO: 779177 - DNA, 33 bp, Homo sapien
tttcagaaaggtctgggacatattggtggttct

SEQ ID NO: 779178 - DNA, 33 bp, Homo sapien
tttcagaaaggtctggtacatattggtggttct

SEQ ID NO: 779179 - DNA, 33 bp, Homo sapien
tattgagtgccttaacaatatcttgagattact

SEQ ID NO: 779180 - DNA, 33 bp, Homo sapien
tattgagtgccttaacgatatcttgagattact

SEQ ID NO: 779181 - DNA, 33 bp, Homo sapien
cttgcctaaaacccacaccttaggatatagccc

SEQ ID NO: 779182 - DNA, 33 bp, Homo sapien
cttgcctaaaacccacgccttaggatatagccc

SEQ ID NO: 779183 - DNA, 33 bp, Homo sapien
ggagtggtagttcaaacacattaaagtagagag

SEQ ID NO: 779184 - DNA, 33 bp, Homo sapien
ggagtggtagttcaaatacattaaagtagagag

SEQ ID NO: 779185 - DNA, 33 bp, Homo sapien
agttaggagaaacaacaggaactctttgggtgc

SEQ ID NO: 779186 - DNA, 33 bp, Homo sapien
agttaggagaaacaactggaactctttgggtgc

SEQ ID NO: 779187 - DNA, 33 bp, Homo sapien
tcctcctctgcaaaaaaggagaaaatatcaaat

SEQ ID NO: 779188 - DNA, 33 bp, Homo sapien
tcctcctctgcaaaaatggagaaaatatcaaat

SEQ ID NO: 779189 - DNA, 33 bp, Homo sapien
ccattccatgatccacaaagatttcactgaatt

SEQ ID NO: 779190 - DNA, 33 bp, Homo sapien
ccattccatgatccacgaagatttcactgaatt

SEQ ID NO: 779191 - DNA, 33 bp, Homo sapien
tgtgctgatacatgagcatgatgggaaagtact

SEQ ID NO: 779192 - DNA, 33 bp, Homo sapien
tgtgctgatacatgaggatgatgggaaagtact

SEQ ID NO: 779193 - DNA, 33 bp, Homo sapien
ccactaagagccagcaacatgaggaagccttca

SEQ ID NO: 779194 - DNA, 33 bp, Homo sapien
ccactaagagccagcatcatgaggaagccttca

SEQ ID NO: 779195 - DNA, 33 bp, Homo sapien
ctgtaatctaacaaacaacttctagaataggga

SEQ ID NO: 779196 - DNA, 33 bp, Homo sapien
ctgtaatctaacaaacgacttctagaataggga

SEQ ID NO: 779197 - DNA, 33 bp, Homo sapien
cagtgagctatcagagacaattcttattaaaag

SEQ ID NO: 779198 - DNA, 33 bp, Homo sapien
cagtgagctatcagaggcaattcttattaaaag

SEQ ID NO: 779199 - DNA, 33 bp, Homo sapien
gaatcaagcactggagaagctcaaaacccagga

SEQ ID NO: 779200 - DNA, 33 bp, Homo sapien
gaatcaagcactggaggagctcaaaacccagga

SEQ ID NO: 779201 - DNA, 33 bp, Homo sapien
tgggaaactggttacactatcttttcctggagg

SEQ ID NO: 779202 - DNA, 33 bp, Homo sapien
tgggaaactggttacagtatcttttcctggagg

SEQ ID NO: 779203 - DNA, 33 bp, Homo sapien
ggcctactcaacaaccactgtctctggactctc

SEQ ID NO: 779204 - DNA, 33 bp, Homo sapien
ggcctactcaacaaccgctgtctctggactctc

SEQ ID NO: 779205 - DNA, 33 bp, Homo sapien
gatgaaagaacatacagaggccccgctctggcc

SEQ ID NO: 779206 - DNA, 33 bp, Homo sapien
gatgaaagaacatacataggccccgctctggcc

SEQ ID NO: 779207 - DNA, 33 bp, Homo sapien
tggctgcaggtttcaaagagcgagtagcttgaa

SEQ ID NO: 779208 - DNA, 33 bp, Homo sapien
tggctgcaggtttcaaggagcgagtagcttgaa

SEQ ID NO: 779209 - DNA, 33 bp, Homo sapien
tacatgaaaacaaatgacaacagcttgtgggtg

SEQ ID NO: 779210 - DNA, 33 bp, Homo sapien
tacatgaaaacaaatggcaacagcttgtgggtg

SEQ ID NO: 779211 - DNA, 33 bp, Homo sapien
gaaattagggttactaagagttaaagtagtagt

SEQ ID NO: 779212 - DNA, 33 bp, Homo sapien
gaaattagggttactacgagttaaagtagtagt

SEQ ID NO: 779213 - DNA, 33 bp, Homo sapien
cagtgtgatggttggcactcagttcaccgtcac

SEQ ID NO: 779214 - DNA, 33 bp, Homo sapien
cagtgtgatggttggcgctcagttcaccgtcac

SEQ ID NO: 779215 - DNA, 33 bp, Homo sapien
gcttcactgctaaatcaacctactttcaagtgc

SEQ ID NO: 779216 - DNA, 33 bp, Homo sapien
gcttcactgctaaatccacctactttcaagtgc

SEQ ID NO: 779217 - DNA, 33 bp, Homo sapien
gttgactctcttaagtcaccagcctcatctctc

SEQ ID NO: 779218 - DNA, 33 bp, Homo sapien
gttgactctcttaagttaccagcctcatctctc

SEQ ID NO: 779219 - DNA, 33 bp, Homo sapien
aaatattcatgtatgcccagatactaataaagg

SEQ ID NO: 779220 - DNA, 33 bp, Homo sapien
aaatattcatgtatgctcagatactaataaagg

SEQ ID NO: 779221 - DNA, 33 bp, Homo sapien
ttcaccattgtatgaacagttttgttgtatctg

SEQ ID NO: 779222 - DNA, 33 bp, Homo sapien
ttcaccattgtatgaatagttttgttgtatctg

SEQ ID NO: 779223 - DNA, 33 bp, Homo sapien
ccagagcaggctcttacggaaatgtacttggat

SEQ ID NO: 779224 - DNA, 33 bp, Homo sapien
ccagagcaggctcttatggaaatgtacttggat

SEQ ID NO: 779225 - DNA, 33 bp, Homo sapien
agcccacaagggttaactcgccaggcattcgat

SEQ ID NO: 779226 - DNA, 33 bp, Homo sapien
agcccacaagggttaattcgccaggcattcgat

SEQ ID NO: 779227 - DNA, 33 bp, Homo sapien
atgtactgtggaggcaagataaataagggcagg

SEQ ID NO: 779228 - DNA, 33 bp, Homo sapien
atgtactgtggaggcaggataaataagggcagg

SEQ ID NO: 779229 - DNA, 33 bp, Homo sapien
caactagcggtttccaatctctccctcttctta

SEQ ID NO: 779230 - DNA, 33 bp, Homo sapien
caactagcggtttccagtctctccctcttctta

SEQ ID NO: 779231 - DNA, 33 bp, Homo sapien
ttaagtgtcagcactacgtttatggtccctacc

SEQ ID NO: 779232 - DNA, 33 bp, Homo sapien
ttaagtgtcagcactaggtttatggtccctacc

SEQ ID NO: 779233 - DNA, 33 bp, Homo sapien
actatatgacaacagtaaacagaggatgcatga

SEQ ID NO: 779234 - DNA, 33 bp, Homo sapien
actatatgacaacagtcaacagaggatgcatga

SEQ ID NO: 779235 - DNA, 33 bp, Homo sapien
gtcaaggggatcattcaagatttaagattccag

SEQ ID NO: 779236 - DNA, 33 bp, Homo sapien
gtcaaggggatcattccagatttaagattccag

SEQ ID NO: 779237 - DNA, 33 bp, Homo sapien
agggtaagacagaagactataatgcacttagtc

SEQ ID NO: 779238 - DNA, 33 bp, Homo sapien
agggtaagacagaagagtataatgcacttagtc

SEQ ID NO: 779239 - DNA, 33 bp, Homo sapien
cttagctccacgtagacattttaaagtatcaga

SEQ ID NO: 779240 - DNA, 33 bp, Homo sapien
cttagctccacgtagatattttaaagtatcaga

SEQ ID NO: 779241 - DNA, 33 bp, Homo sapien
gatttctgtgtgttgacattatatcctgaaacc

SEQ ID NO: 779242 - DNA, 33 bp, Homo sapien
gatttctgtgtgttgatattatatcctgaaacc

SEQ ID NO: 779243 - DNA, 33 bp, Homo sapien
ttttcctaagaaacaaatgccaaagtatgaaaa

SEQ ID NO: 779244 - DNA, 33 bp, Homo sapien
ttttcctaagaaacaagtgccaaagtatgaaaa

SEQ ID NO: 779245 - DNA, 33 bp, Homo sapien
ttagaataccaaaaaaatctgtgtgacttctat

SEQ ID NO: 779246 - DNA, 33 bp, Homo sapien
ttagaataccaaaaaactctgtgtgacttctat

SEQ ID NO: 779247 - DNA, 33 bp, Homo sapien
actcttttacatcacacctaagttaacatttac

SEQ ID NO: 779248 - DNA, 33 bp, Homo sapien
actcttttacatcacatctaagttaacatttac

SEQ ID NO: 779249 - DNA, 33 bp, Homo sapien
taatgtcatcaaatacccagtcaatgatcaaat

SEQ ID NO: 779250 - DNA, 33 bp, Homo sapien
taatgtcatcaaatactcagtcaatgatcaaat

SEQ ID NO: 779251 - DNA, 33 bp, Homo sapien
ggctgacctttactaagagaactgcagatgtaa

SEQ ID NO: 779252 - DNA, 33 bp, Homo sapien
ggctgacctttactaatagaactgcagatgtaa

SEQ ID NO: 779253 - DNA, 33 bp, Homo sapien
tgatagtaaagatacaacaattaagctcatcta

SEQ ID NO: 779254 - DNA, 33 bp, Homo sapien
tgatagtaaagatacagcaattaagctcatcta

SEQ ID NO: 779255 - DNA, 33 bp, Homo sapien
gatttagtatcttggacgccttacttacctgca

SEQ ID NO: 779256 - DNA, 33 bp, Homo sapien
gatttagtatcttggatgccttacttacctgca

SEQ ID NO: 779257 - DNA, 33 bp, Homo sapien
ttcttaccgagagccaacctaattattactact

SEQ ID NO: 779258 - DNA, 33 bp, Homo sapien
ttcttaccgagagccaccctaattattactact

SEQ ID NO: 779259 - DNA, 33 bp, Homo sapien
taggcagttaatcaacaaatataatatcccatt

SEQ ID NO: 779260 - DNA, 33 bp, Homo sapien
taggcagttaatcaacgaatataatatcccatt

SEQ ID NO: 779261 - DNA, 33 bp, Homo sapien
agattcctgagcctaactaatagattttagagt

SEQ ID NO: 779262 - DNA, 33 bp, Homo sapien
agattcctgagcctaattaatagattttagagt

SEQ ID NO: 779263 - DNA, 33 bp, Homo sapien
cctttctgtatcttgagagaagcctttatgaca

SEQ ID NO: 779264 - DNA, 33 bp, Homo sapien
cctttctgtatcttgatagaagcctttatgaca

SEQ ID NO: 779265 - DNA, 33 bp, Homo sapien
ccaagaaaacagggtaacattctttagtggcat

SEQ ID NO: 779266 - DNA, 33 bp, Homo sapien
ccaagaaaacagggtagcattctttagtggcat

SEQ ID NO: 779267 - DNA, 33 bp, Homo sapien
aatccagagcccactccccgaaacatctccttt

SEQ ID NO: 779268 - DNA, 33 bp, Homo sapien
aatccagagcccactctccgaaacatctccttt

SEQ ID NO: 779269 - DNA, 33 bp, Homo sapien
atttaggatagaaggagaatcacataaacttgg

SEQ ID NO: 779270 - DNA, 33 bp, Homo sapien
atttaggatagaaggataatcacataaacttgg

SEQ ID NO: 779271 - DNA, 33 bp, Homo sapien
gaagataaccagctaaaagggaaatgaagggtt

SEQ ID NO: 779272 - DNA, 33 bp, Homo sapien
gaagataaccagctaagagggaaatgaagggtt

SEQ ID NO: 779273 - DNA, 33 bp, Homo sapien
tgatatgtttgcagaactatcaaagcaagactc

SEQ ID NO: 779274 - DNA, 33 bp, Homo sapien
tgatatgtttgcagaattatcaaagcaagactc

SEQ ID NO: 779275 - DNA, 33 bp, Homo sapien
tttaaaaggatcattacgttacttgggcctggg

SEQ ID NO: 779276 - DNA, 33 bp, Homo sapien
tttaaaaggatcattaggttacttgggcctggg

SEQ ID NO: 779277 - DNA, 33 bp, Homo sapien
aaagtttactaccaacaaattctcattaaagaa

SEQ ID NO: 779278 - DNA, 33 bp, Homo sapien
aaagtttactaccaaccaattctcattaaagaa

SEQ ID NO: 779279 - DNA, 33 bp, Homo sapien
ggggattttcacaactcacaataggtgacaaac

SEQ ID NO: 779280 - DNA, 33 bp, Homo sapien
ggggattttcacaacttacaataggtgacaaac

SEQ ID NO: 779281 - DNA, 33 bp, Homo sapien
gagcaagtaccgcatccattttatctttacaaa

SEQ ID NO: 779282 - DNA, 33 bp, Homo sapien
gagcaagtaccgcatctattttatctttacaaa

SEQ ID NO: 779283 - DNA, 33 bp, Homo sapien
tgctgaggccaaaccacgacaagggctattttt

SEQ ID NO: 779284 - DNA, 33 bp, Homo sapien
tgctgaggccaaaccatgacaagggctattttt

SEQ ID NO: 779285 - DNA, 33 bp, Homo sapien
aatgctttcatgggcactatattgtttagtcat

SEQ ID NO: 779286 - DNA, 33 bp, Homo sapien
aatgctttcatgggcattatattgtttagtcat

SEQ ID NO: 779287 - DNA, 33 bp, Homo sapien
ggatgacttacaaaagccatttatattcagtac

SEQ ID NO: 779288 - DNA, 33 bp, Homo sapien
ggatgacttacaaaaggcatttatattcagtac

SEQ ID NO: 779289 - DNA, 33 bp, Homo sapien
atgtcatagagtttaacaggcttaacactgtag

SEQ ID NO: 779290 - DNA, 33 bp, Homo sapien
atgtcatagagtttaagaggcttaacactgtag

SEQ ID NO: 779291 - DNA, 33 bp, Homo sapien
atgccatgatccgcaaaagaatgttacagaata

SEQ ID NO: 779292 - DNA, 33 bp, Homo sapien
atgccatgatccgcaagagaatgttacagaata

SEQ ID NO: 779293 - DNA, 33 bp, Homo sapien
agaagacctaaggccgaaagtcgctgtgcagca

SEQ ID NO: 779294 - DNA, 33 bp, Homo sapien
agaagacctaaggccgcaagtcgctgtgcagca

SEQ ID NO: 779295 - DNA, 33 bp, Homo sapien
tgctttttgattctagactaaattatccaatat

SEQ ID NO: 779296 - DNA, 33 bp, Homo sapien
tgctttttgattctaggctaaattatccaatat

SEQ ID NO: 779297 - DNA, 33 bp, Homo sapien
ggtgagaagaaaatacagactgagaaggtaaga

SEQ ID NO: 779298 - DNA, 33 bp, Homo sapien
ggtgagaagaaaatacggactgagaaggtaaga

SEQ ID NO: 779299 - DNA, 33 bp, Homo sapien
agaccaatatggcaggaagctctaaaagactgg

SEQ ID NO: 779300 - DNA, 33 bp, Homo sapien
agaccaatatggcaggcagctctaaaagactgg

SEQ ID NO: 779301 - DNA, 33 bp, Homo sapien
aaactcaaaggatttcaacataggaagatgtgc

SEQ ID NO: 779302 - DNA, 33 bp, Homo sapien
aaactcaaaggatttccacataggaagatgtgc

SEQ ID NO: 779303 - DNA, 33 bp, Homo sapien
caagaatagcaagtgcaaaaaagcagtagctct

SEQ ID NO: 779304 - DNA, 33 bp, Homo sapien
caagaatagcaagtgccaaaaagcagtagctct

SEQ ID NO: 779305 - DNA, 33 bp, Homo sapien
atgatagaagagctgaaagccaaacaggagatg

SEQ ID NO: 779306 - DNA, 33 bp, Homo sapien
atgatagaagagctgagagccaaacaggagatg

SEQ ID NO: 779307 - DNA, 33 bp, Homo sapien
aaggacatatcctacaactagttatcacttaaa

SEQ ID NO: 779308 - DNA, 33 bp, Homo sapien
aaggacatatcctacagctagttatcacttaaa

SEQ ID NO: 779309 - DNA, 33 bp, Homo sapien
aatgtaatgaagtttgcaaagtgatttagatta

SEQ ID NO: 779310 - DNA, 33 bp, Homo sapien
aatgtaatgaagtttgtaaagtgatttagatta

SEQ ID NO: 779311 - DNA, 33 bp, Homo sapien
ctatgtacaattcctaactgctattgggtggtg

SEQ ID NO: 779312 - DNA, 33 bp, Homo sapien
ctatgtacaattcctacctgctattgggtggtg

SEQ ID NO: 779313 - DNA, 33 bp, Homo sapien
gacacctctttgaataccttttggaatttcctg

SEQ ID NO: 779314 - DNA, 33 bp, Homo sapien
gacacctctttgaatatcttttggaatttcctg

SEQ ID NO: 779315 - DNA, 33 bp, Homo sapien
gttttagcatttccaacgggcatcaacaaatct

SEQ ID NO: 779316 - DNA, 33 bp, Homo sapien
gttttagcatttccaatgggcatcaacaaatct

SEQ ID NO: 779317 - DNA, 33 bp, Homo sapien
ttatagcctgtagtttaaaaaaagtctattctg

SEQ ID NO: 779318 - DNA, 33 bp, Homo sapien
ttatagcctgtagttttaaaaaagtctattctg

SEQ ID NO: 779319 - DNA, 33 bp, Homo sapien
aaaggtttcacataatcacagcttttgagttat

SEQ ID NO: 779320 - DNA, 33 bp, Homo sapien
aaaggtttcacataatgacagcttttgagttat

SEQ ID NO: 779321 - DNA, 33 bp, Homo sapien
attatcaagttgttgaggtttatgtactctaca

SEQ ID NO: 779322 - DNA, 33 bp, Homo sapien
attatcaagttgttgatgtttatgtactctaca

SEQ ID NO: 779323 - DNA, 33 bp, Homo sapien
agaggtagaggtaatacccttaaggctgagata

SEQ ID NO: 779324 - DNA, 33 bp, Homo sapien
agaggtagaggtaatatccttaaggctgagata

SEQ ID NO: 779325 - DNA, 33 bp, Homo sapien
ttaattttgtcccataccactgtaaccgcccaa

SEQ ID NO: 779326 - DNA, 33 bp, Homo sapien
ttaattttgtcccatagcactgtaaccgcccaa

SEQ ID NO: 779327 - DNA, 33 bp, Homo sapien
ggctcccggtcactcaaaggcaccttctggttg

SEQ ID NO: 779328 - DNA, 33 bp, Homo sapien
ggctcccggtcactcagaggcaccttctggttg

SEQ ID NO: 779329 - DNA, 33 bp, Homo sapien
tcttcttaggtctaacactctgctttcccatat

SEQ ID NO: 779330 - DNA, 33 bp, Homo sapien
tcttcttaggtctaacgctctgctttcccatat

SEQ ID NO: 779331 - DNA, 33 bp, Homo sapien
gttcgagtcattaaaaaccttctctagaccttt

SEQ ID NO: 779332 - DNA, 33 bp, Homo sapien
gttcgagtcattaaaagccttctctagaccttt

SEQ ID NO: 779333 - DNA, 33 bp, Homo sapien
ttccctgaattgaaaacgtgttacttgcattag

SEQ ID NO: 779334 - DNA, 33 bp, Homo sapien
ttccctgaattgaaaatgtgttacttgcattag

SEQ ID NO: 779335 - DNA, 33 bp, Homo sapien
agcagagtgaagagacaaaaacaaagtccttga

SEQ ID NO: 779336 - DNA, 33 bp, Homo sapien
agcagagtgaagagacgaaaacaaagtccttga

SEQ ID NO: 779337 - DNA, 33 bp, Homo sapien
aattgcatcgagcaaaactgcctctcattttat

SEQ ID NO: 779338 - DNA, 33 bp, Homo sapien
aattgcatcgagcaaacctgcctctcattttat

SEQ ID NO: 779339 - DNA, 33 bp, Homo sapien
cagcatgagcaacccaagaaaaaatgagaaata

SEQ ID NO: 779340 - DNA, 33 bp, Homo sapien
cagcatgagcaacccaggaaaaaatgagaaata

SEQ ID NO: 779341 - DNA, 33 bp, Homo sapien
atctacattccaccgccgagactgcatccgcct

SEQ ID NO: 779342 - DNA, 33 bp, Homo sapien
atctacattccaccgctgagactgcatccgcct

SEQ ID NO: 779343 - DNA, 33 bp, Homo sapien
tgttgatgaaagggacaaataccaggaggagct

SEQ ID NO: 779344 - DNA, 33 bp, Homo sapien
tgttgatgaaagggacgaataccaggaggagct

SEQ ID NO: 779345 - DNA, 33 bp, Homo sapien
aatggctacaggtcacaaagtatggatgttgga

SEQ ID NO: 779346 - DNA, 33 bp, Homo sapien
aatggctacaggtcacgaagtatggatgttgga

SEQ ID NO: 779347 - DNA, 33 bp, Homo sapien
ttgggagttctagccactataataaggcaagaa

SEQ ID NO: 779348 - DNA, 33 bp, Homo sapien
ttgggagttctagccagtataataaggcaagaa

SEQ ID NO: 779349 - DNA, 33 bp, Homo sapien
actattcttattcaacactatattgggagttct

SEQ ID NO: 779350 - DNA, 33 bp, Homo sapien
actattcttattcaacgctatattgggagttct

SEQ ID NO: 779351 - DNA, 33 bp, Homo sapien
tctatgcaattcaggcacaagaaagaagtactg

SEQ ID NO: 779352 - DNA, 33 bp, Homo sapien
tctatgcaattcaggcgcaagaaagaagtactg

SEQ ID NO: 779353 - DNA, 33 bp, Homo sapien
tatcaacttcttcctccaccctactctgtcacc

SEQ ID NO: 779354 - DNA, 33 bp, Homo sapien
tatcaacttcttcctcgaccctactctgtcacc

SEQ ID NO: 779355 - DNA, 33 bp, Homo sapien
atggaattatatacagccatttaacttattttt

SEQ ID NO: 779356 - DNA, 33 bp, Homo sapien
atggaattatatacaggcatttaacttattttt

SEQ ID NO: 779357 - DNA, 33 bp, Homo sapien
ataatactcacatataacccatgaataagtaaa

SEQ ID NO: 779358 - DNA, 33 bp, Homo sapien
ataatactcacatataccccatgaataagtaaa

SEQ ID NO: 779359 - DNA, 33 bp, Homo sapien
tagcagagtatggtcacggtagttagtaacaat

SEQ ID NO: 779360 - DNA, 33 bp, Homo sapien
tagcagagtatggtcatggtagttagtaacaat

SEQ ID NO: 779361 - DNA, 33 bp, Homo sapien
tggaagttggaatgagcagagattgtgccactg

SEQ ID NO: 779362 - DNA, 33 bp, Homo sapien
tggaagttggaatgaggagagattgtgccactg

SEQ ID NO: 779363 - DNA, 33 bp, Homo sapien
atgcatgagtatcatacagcagtagaaatgaat

SEQ ID NO: 779364 - DNA, 33 bp, Homo sapien
atgcatgagtatcatatagcagtagaaatgaat

SEQ ID NO: 779365 - DNA, 33 bp, Homo sapien
aatccgatcttcctcactcctttttgtggtcta

SEQ ID NO: 779366 - DNA, 33 bp, Homo sapien
aatccgatcttcctcagtcctttttgtggtcta

SEQ ID NO: 779367 - DNA, 33 bp, Homo sapien
ttgaccttttctgtaaaatggaaggcaaatgga

SEQ ID NO: 779368 - DNA, 33 bp, Homo sapien
ttgaccttttctgtaagatggaaggcaaatgga

SEQ ID NO: 779369 - DNA, 33 bp, Homo sapien
caggagactcacttaacgaatgttgcatttcat

SEQ ID NO: 779370 - DNA, 33 bp, Homo sapien
caggagactcacttaatgaatgttgcatttcat

SEQ ID NO: 779371 - DNA, 33 bp, Homo sapien
ctccattcctgtgtaaaaaaacatgtcaaaact

SEQ ID NO: 779372 - DNA, 33 bp, Homo sapien
ctccattcctgtgtaacaaaacatgtcaaaact

SEQ ID NO: 779373 - DNA, 33 bp, Homo sapien
aatgctacattttctaaggtcctttgctgtcgt

SEQ ID NO: 779374 - DNA, 33 bp, Homo sapien
aatgctacattttctagggtcctttgctgtcgt

SEQ ID NO: 779375 - DNA, 33 bp, Homo sapien
aaggcttggaaaaccactggactgtgatgcagg

SEQ ID NO: 779376 - DNA, 33 bp, Homo sapien
aaggcttggaaaaccattggactgtgatgcagg

SEQ ID NO: 779377 - DNA, 33 bp, Homo sapien
gaggaagtttggtccacggcctatgtaaacagt

SEQ ID NO: 779378 - DNA, 33 bp, Homo sapien
gaggaagtttggtccatggcctatgtaaacagt

SEQ ID NO: 779379 - DNA, 33 bp, Homo sapien
gctgcattcacagttacgtaaccaaattggcct

SEQ ID NO: 779380 - DNA, 33 bp, Homo sapien
gctgcattcacagttatgtaaccaaattggcct

SEQ ID NO: 779381 - DNA, 33 bp, Homo sapien
acgaggcattttctcacagtccctgacagcaca

SEQ ID NO: 779382 - DNA, 33 bp, Homo sapien
acgaggcattttctcatagtccctgacagcaca

SEQ ID NO: 779383 - DNA, 33 bp, Homo sapien
tgttgcaaaggtagaactagaatcttacttctg

SEQ ID NO: 779384 - DNA, 33 bp, Homo sapien
tgttgcaaaggtagaattagaatcttacttctg

SEQ ID NO: 779385 - DNA, 33 bp, Homo sapien
gaatgctactgggtacaatgattcctaaaggaa

SEQ ID NO: 779386 - DNA, 33 bp, Homo sapien
gaatgctactgggtacgatgattcctaaaggaa

SEQ ID NO: 779387 - DNA, 33 bp, Homo sapien
tattgcagagttgaaaataattcctttaggaat

SEQ ID NO: 779388 - DNA, 33 bp, Homo sapien
tattgcagagttgaaagtaattcctttaggaat

SEQ ID NO: 779389 - DNA, 33 bp, Homo sapien
tcaatgcactgaaaataatctaactgggaagtt

SEQ ID NO: 779390 - DNA, 33 bp, Homo sapien
tcaatgcactgaaaatcatctaactgggaagtt

SEQ ID NO: 779391 - DNA, 33 bp, Homo sapien
taaaatactgggataaatatgtttgtagatata

SEQ ID NO: 779392 - DNA, 33 bp, Homo sapien
taaaatactgggataagtatgtttgtagatata

SEQ ID NO: 779393 - DNA, 33 bp, Homo sapien
tgcaaaatgcacagcgccaccttcctgtactgt

SEQ ID NO: 779394 - DNA, 33 bp, Homo sapien
tgcaaaatgcacagcggcaccttcctgtactgt

SEQ ID NO: 779395 - DNA, 33 bp, Homo sapien
aagtcacaatcaacaacggcaaatgaggactct

SEQ ID NO: 779396 - DNA, 33 bp, Homo sapien
aagtcacaatcaacaatggcaaatgaggactct

SEQ ID NO: 779397 - DNA, 33 bp, Homo sapien
taacttacactcatgaaatcagctcaggattca

SEQ ID NO: 779398 - DNA, 33 bp, Homo sapien
taacttacactcatgacatcagctcaggattca

SEQ ID NO: 779399 - DNA, 33 bp, Homo sapien
ttctaaaccatgaatcagacacctaagaggacc

SEQ ID NO: 779400 - DNA, 33 bp, Homo sapien
ttctaaaccatgaatcggacacctaagaggacc

SEQ ID NO: 779401 - DNA, 33 bp, Homo sapien
actttgctaatggttccctatgtcaggttatat

SEQ ID NO: 779402 - DNA, 33 bp, Homo sapien
actttgctaatggttctctatgtcaggttatat

SEQ ID NO: 779403 - DNA, 33 bp, Homo sapien
acatattttattaggcacaccaagtatttttaa

SEQ ID NO: 779404 - DNA, 33 bp, Homo sapien
acatattttattaggctcaccaagtatttttaa

SEQ ID NO: 779405 - DNA, 33 bp, Homo sapien
aaatgaatatgacagaatccttgccctcaatga

SEQ ID NO: 779406 - DNA, 33 bp, Homo sapien
aaatgaatatgacagagtccttgccctcaatga

SEQ ID NO: 779407 - DNA, 33 bp, Homo sapien
tcgggataaagtataacgtaatggtatgtcaat

SEQ ID NO: 779408 - DNA, 33 bp, Homo sapien
tcgggataaagtataatgtaatggtatgtcaat

SEQ ID NO: 779409 - DNA, 33 bp, Homo sapien
caagtgttctttcagaaggaggatgacaggaca

SEQ ID NO: 779410 - DNA, 33 bp, Homo sapien
caagtgttctttcagagggaggatgacaggaca

SEQ ID NO: 779411 - DNA, 33 bp, Homo sapien
caacccgtggctataacacacagaaaggaatcc

SEQ ID NO: 779412 - DNA, 33 bp, Homo sapien
caacccgtggctataatacacagaaaggaatcc

SEQ ID NO: 779413 - DNA, 33 bp, Homo sapien
gaaaggaaactgcatacggctgaaaccctcccc

SEQ ID NO: 779414 - DNA, 33 bp, Homo sapien
gaaaggaaactgcatatggctgaaaccctcccc

SEQ ID NO: 779415 - DNA, 33 bp, Homo sapien
tgtttttatccaattgaaacctgcatctctaag

SEQ ID NO: 779416 - DNA, 33 bp, Homo sapien
tgtttttatccaattgtaacctgcatctctaag

SEQ ID NO: 779417 - DNA, 33 bp, Homo sapien
tgcccagggactccagaatgatggagtggagcg

SEQ ID NO: 779418 - DNA, 33 bp, Homo sapien
tgcccagggactccaggatgatggagtggagcg

SEQ ID NO: 779419 - DNA, 33 bp, Homo sapien
aggcctgccaagaaccaaagccgctgctccacc

SEQ ID NO: 779420 - DNA, 33 bp, Homo sapien
aggcctgccaagaaccgaagccgctgctccacc

SEQ ID NO: 779421 - DNA, 33 bp, Homo sapien
tgtggggtcatctccaatgaaagccaacagcgc

SEQ ID NO: 779422 - DNA, 33 bp, Homo sapien
tgtggggtcatctccagtgaaagccaacagcgc

SEQ ID NO: 779423 - DNA, 33 bp, Homo sapien
aaaactgagttttatccattcgttcacaaatat

SEQ ID NO: 779424 - DNA, 33 bp, Homo sapien
aaaactgagttttatctattcgttcacaaatat

SEQ ID NO: 779425 - DNA, 33 bp, Homo sapien
cctaacacacagaggaactctaatattttccaa

SEQ ID NO: 779426 - DNA, 33 bp, Homo sapien
cctaacacacagaggagctctaatattttccaa

SEQ ID NO: 779427 - DNA, 33 bp, Homo sapien
ctgtgatctgtcagcaagaacttacttcaaggg

SEQ ID NO: 779428 - DNA, 33 bp, Homo sapien
ctgtgatctgtcagcaggaacttacttcaaggg

SEQ ID NO: 779429 - DNA, 33 bp, Homo sapien
tcagggccagcccaccaagaaccaaagcactca

SEQ ID NO: 779430 - DNA, 33 bp, Homo sapien
tcagggccagcccaccgagaaccaaagcactca

SEQ ID NO: 779431 - DNA, 33 bp, Homo sapien
ttatgtattttgacaacgtctatgttcaaagga

SEQ ID NO: 779432 - DNA, 33 bp, Homo sapien
ttatgtattttgacaatgtctatgttcaaagga

SEQ ID NO: 779433 - DNA, 33 bp, Homo sapien
agctctttcaaatcaacgctgcggtgaaaaccc

SEQ ID NO: 779434 - DNA, 33 bp, Homo sapien
agctctttcaaatcaatgctgcggtgaaaaccc

SEQ ID NO: 779435 - DNA, 33 bp, Homo sapien
ccagtttagccccaaaagatacgtgtaggttgg

SEQ ID NO: 779436 - DNA, 33 bp, Homo sapien
ccagtttagccccaaaggatacgtgtaggttgg

SEQ ID NO: 779437 - DNA, 33 bp, Homo sapien
tgagaagcaggacttacggagctatgtggacgc

SEQ ID NO: 779438 - DNA, 33 bp, Homo sapien
tgagaagcaggacttatggagctatgtggacgc

SEQ ID NO: 779439 - DNA, 33 bp, Homo sapien
attcacaaaataagccaataggtaaatgatttg

SEQ ID NO: 779440 - DNA, 33 bp, Homo sapien
attcacaaaataagccgataggtaaatgatttg

SEQ ID NO: 779441 - DNA, 33 bp, Homo sapien
ttattggtcgtttgtacatctgctttgtagaaa

SEQ ID NO: 779442 - DNA, 33 bp, Homo sapien
ttattggtcgtttgtatatctgctttgtagaaa

SEQ ID NO: 779443 - DNA, 33 bp, Homo sapien
atatagtgtattaaaaatattgatggtaagcag

SEQ ID NO: 779444 - DNA, 33 bp, Homo sapien
atatagtgtattaaaactattgatggtaagcag

SEQ ID NO: 779445 - DNA, 33 bp, Homo sapien
gagacagattcagtcaggtagcttgacgtggtg

SEQ ID NO: 779446 - DNA, 33 bp, Homo sapien
gagacagattcagtcatgtagcttgacgtggtg

SEQ ID NO: 779447 - DNA, 33 bp, Homo sapien
ttaagataggacatgaagcccggcgcagcggct

SEQ ID NO: 779448 - DNA, 33 bp, Homo sapien
ttaagataggacatgaggcccggcgcagcggct

SEQ ID NO: 779449 - DNA, 33 bp, Homo sapien
agcagggagcctttcaccaattccaccattttt

SEQ ID NO: 779450 - DNA, 33 bp, Homo sapien
agcagggagcctttcatcaattccaccattttt

SEQ ID NO: 779451 - DNA, 33 bp, Homo sapien
tttaacaaaagcacccaactatcactttaaaaa

SEQ ID NO: 779452 - DNA, 33 bp, Homo sapien
tttaacaaaagcacccgactatcactttaaaaa

SEQ ID NO: 779453 - DNA, 33 bp, Homo sapien
aatgttagaaatcatacgaaccagcttaaagtg

SEQ ID NO: 779454 - DNA, 33 bp, Homo sapien
aatgttagaaatcatatgaaccagcttaaagtg

SEQ ID NO: 779455 - DNA, 33 bp, Homo sapien
agaaggggcctagagactattaagtgtaatttt

SEQ ID NO: 779456 - DNA, 33 bp, Homo sapien
agaaggggcctagagattattaagtgtaatttt

SEQ ID NO: 779457 - DNA, 33 bp, Homo sapien
agtggctgatgtcctccagtcttgcttactgac

SEQ ID NO: 779458 - DNA, 33 bp, Homo sapien
agtggctgatgtcctctagtcttgcttactgac

SEQ ID NO: 779459 - DNA, 33 bp, Homo sapien
ccgatccccagaaaccccattcaagggaacctg

SEQ ID NO: 779460 - DNA, 33 bp, Homo sapien
ccgatccccagaaacctcattcaagggaacctg

SEQ ID NO: 779461 - DNA, 33 bp, Homo sapien
cagtggtgagagaaaacagaattacattttatg

SEQ ID NO: 779462 - DNA, 33 bp, Homo sapien
cagtggtgagagaaaagagaattacattttatg

SEQ ID NO: 779463 - DNA, 33 bp, Homo sapien
agtacattggcactcaaacaattgttccaggtc

SEQ ID NO: 779464 - DNA, 33 bp, Homo sapien
agtacattggcactcatacaattgttccaggtc

SEQ ID NO: 779465 - DNA, 33 bp, Homo sapien
aaaaagcctttgataactatctctagctccatt

SEQ ID NO: 779466 - DNA, 33 bp, Homo sapien
aaaaagcctttgataattatctctagctccatt

SEQ ID NO: 779467 - DNA, 33 bp, Homo sapien
aggttccagacaaaacagtgtacatggtagttg

SEQ ID NO: 779468 - DNA, 33 bp, Homo sapien
aggttccagacaaaactgtgtacatggtagttg

SEQ ID NO: 779469 - DNA, 33 bp, Homo sapien
aagccttcccaaaggaacttgcatgattggcag

SEQ ID NO: 779470 - DNA, 33 bp, Homo sapien
aagccttcccaaaggagcttgcatgattggcag

SEQ ID NO: 779471 - DNA, 33 bp, Homo sapien
aacaaggaacctgtcactgaaggaacagaaaga

SEQ ID NO: 779472 - DNA, 33 bp, Homo sapien
aacaaggaacctgtcattgaaggaacagaaaga

SEQ ID NO: 779473 - DNA, 33 bp, Homo sapien
aaaaagaggaatcagaaaaagctggtgataata

SEQ ID NO: 779474 - DNA, 33 bp, Homo sapien
aaaaagaggaatcagacaaagctggtgataata

SEQ ID NO: 779475 - DNA, 33 bp, Homo sapien
ggactgatggcatagaccagcatccttagactc

SEQ ID NO: 779476 - DNA, 33 bp, Homo sapien
ggactgatggcatagatcagcatccttagactc

SEQ ID NO: 779477 - DNA, 33 bp, Homo sapien
ccgcaacagtttaaacagagtccttagcagcta

SEQ ID NO: 779478 - DNA, 33 bp, Homo sapien
ccgcaacagtttaaacggagtccttagcagcta

SEQ ID NO: 779479 - DNA, 33 bp, Homo sapien
taaacatataggaagacgacgaaggctaccaag

SEQ ID NO: 779480 - DNA, 33 bp, Homo sapien
taaacatataggaagaggacgaaggctaccaag

SEQ ID NO: 779481 - DNA, 33 bp, Homo sapien
aataacaaacattggcacctatcagtgaaatgt

SEQ ID NO: 779482 - DNA, 33 bp, Homo sapien
aataacaaacattggcgcctatcagtgaaatgt

SEQ ID NO: 779483 - DNA, 33 bp, Homo sapien
aagaggccctttcacactggcttcattttttaa

SEQ ID NO: 779484 - DNA, 33 bp, Homo sapien
aagaggccctttcacattggcttcattttttaa

SEQ ID NO: 779485 - DNA, 33 bp, Homo sapien
tctccattataaacaacgcttatacttggctag

SEQ ID NO: 779486 - DNA, 33 bp, Homo sapien
tctccattataaacaatgcttatacttggctag

SEQ ID NO: 779487 - DNA, 33 bp, Homo sapien
cagctacagttcagagaaaacaacttcagcaag

SEQ ID NO: 779488 - DNA, 33 bp, Homo sapien
cagctacagttcagaggaaacaacttcagcaag

SEQ ID NO: 779489 - DNA, 33 bp, Homo sapien
ctcactgctgagtgtaggaaggagttacaactc

SEQ ID NO: 779490 - DNA, 33 bp, Homo sapien
ctcactgctgagtgtatgaaggagttacaactc

SEQ ID NO: 779491 - DNA, 33 bp, Homo sapien
aagggcctgaggagcaggataggcacaagtaag

SEQ ID NO: 779492 - DNA, 33 bp, Homo sapien
aagggcctgaggagcatgataggcacaagtaag

SEQ ID NO: 779493 - DNA, 33 bp, Homo sapien
ctccttcaaggagagaagtggaaagaactagca

SEQ ID NO: 779494 - DNA, 33 bp, Homo sapien
ctccttcaaggagagaggtggaaagaactagca

SEQ ID NO: 779495 - DNA, 33 bp, Homo sapien
tagctaacagcctgaaatgaatgtaaactttga

SEQ ID NO: 779496 - DNA, 33 bp, Homo sapien
tagctaacagcctgaactgaatgtaaactttga

SEQ ID NO: 779497 - DNA, 33 bp, Homo sapien
gttgagtaaaagattacattaaacaagattggc

SEQ ID NO: 779498 - DNA, 33 bp, Homo sapien
gttgagtaaaagattagattaaacaagattggc

SEQ ID NO: 779499 - DNA, 33 bp, Homo sapien
aagatttctgacaccaactgtaactttacggat

SEQ ID NO: 779500 - DNA, 33 bp, Homo sapien
aagatttctgacaccagctgtaactttacggat

SEQ ID NO: 779501 - DNA, 33 bp, Homo sapien
agaatgacgctcctagaagaggaactagtatac

SEQ ID NO: 779502 - DNA, 33 bp, Homo sapien
agaatgacgctcctagcagaggaactagtatac

SEQ ID NO: 779503 - DNA, 33 bp, Homo sapien
attctaaggagtttacaacatacggtatataca

SEQ ID NO: 779504 - DNA, 33 bp, Homo sapien
attctaaggagtttaccacatacggtatataca

SEQ ID NO: 779505 - DNA, 33 bp, Homo sapien
tgagtaaaactttaaaaatctgaatgacaatca

SEQ ID NO: 779506 - DNA, 33 bp, Homo sapien
tgagtaaaactttaaacatctgaatgacaatca

SEQ ID NO: 779507 - DNA, 33 bp, Homo sapien
ccaagatcttgttctacgtcttggagcctttta

SEQ ID NO: 779508 - DNA, 33 bp, Homo sapien
ccaagatcttgttctatgtcttggagcctttta

SEQ ID NO: 779509 - DNA, 33 bp, Homo sapien
attaaggaatgtaaataaaaatggaaaggacat

SEQ ID NO: 779510 - DNA, 33 bp, Homo sapien
attaaggaatgtaaatcaaaatggaaaggacat

SEQ ID NO: 779511 - DNA, 33 bp, Homo sapien
cataatcagagctcaacgtaattggcatattac

SEQ ID NO: 779512 - DNA, 33 bp, Homo sapien
cataatcagagctcaaggtaattggcatattac

SEQ ID NO: 779513 - DNA, 33 bp, Homo sapien
cttattgttccgaatgaaaagagtggagcttta

SEQ ID NO: 779514 - DNA, 33 bp, Homo sapien
cttattgttccgaatgtaaagagtggagcttta

SEQ ID NO: 779515 - DNA, 33 bp, Homo sapien
gaaatacaactaaaaacatggcactcaaaactt

SEQ ID NO: 779516 - DNA, 33 bp, Homo sapien
gaaatacaactaaaaatatggcactcaaaactt

SEQ ID NO: 779517 - DNA, 33 bp, Homo sapien
tagatttaaaagccataaacttggagcagcttt

SEQ ID NO: 779518 - DNA, 33 bp, Homo sapien
tagatttaaaagccatcaacttggagcagcttt

SEQ ID NO: 779519 - DNA, 33 bp, Homo sapien
gaagtgttgaaagaaacaaaaaagtcaacaagt

SEQ ID NO: 779520 - DNA, 33 bp, Homo sapien
gaagtgttgaaagaaataaaaaagtcaacaagt

SEQ ID NO: 779521 - DNA, 33 bp, Homo sapien
cagttttttgggatcactattacgatgatgaca

SEQ ID NO: 779522 - DNA, 33 bp, Homo sapien
cagttttttgggatcattattacgatgatgaca

SEQ ID NO: 779523 - DNA, 33 bp, Homo sapien
tagtgttagcaattgaaaaacatagatgaaggc

SEQ ID NO: 779524 - DNA, 33 bp, Homo sapien
tagtgttagcaattgagaaacatagatgaaggc

SEQ ID NO: 779525 - DNA, 33 bp, Homo sapien
tgtactatgtcttgtcactcagtctacttctct

SEQ ID NO: 779526 - DNA, 33 bp, Homo sapien
tgtactatgtcttgtcgctcagtctacttctct

SEQ ID NO: 779527 - DNA, 33 bp, Homo sapien
aattacagtcgtgccacgttttggtcaaggagg

SEQ ID NO: 779528 - DNA, 33 bp, Homo sapien
aattacagtcgtgccatgttttggtcaaggagg

SEQ ID NO: 779529 - DNA, 33 bp, Homo sapien
ttttgtcaaaacaggaaaattagctgagtcagg

SEQ ID NO: 779530 - DNA, 33 bp, Homo sapien
ttttgtcaaaacaggagaattagctgagtcagg

SEQ ID NO: 779531 - DNA, 33 bp, Homo sapien
tgaggtaatataggggaaaaacttttggcacaa

SEQ ID NO: 779532 - DNA, 33 bp, Homo sapien
tgaggtaatatagggggaaaacttttggcacaa

SEQ ID NO: 779533 - DNA, 33 bp, Homo sapien
cctcttgagtaactaggactgtaggtgtatgcc

SEQ ID NO: 779534 - DNA, 33 bp, Homo sapien
cctcttgagtaactagtactgtaggtgtatgcc

SEQ ID NO: 779535 - DNA, 33 bp, Homo sapien
tcacagggcagtattgcagatgaaacagttcta

SEQ ID NO: 779536 - DNA, 33 bp, Homo sapien
tcacagggcagtattgtagatgaaacagttcta

SEQ ID NO: 779537 - DNA, 33 bp, Homo sapien
ttactaggccaattgaagctaaagttcatctag

SEQ ID NO: 779538 - DNA, 33 bp, Homo sapien
ttactaggccaattgatgctaaagttcatctag

SEQ ID NO: 779539 - DNA, 33 bp, Homo sapien
taaactctccttaaaaatatgtgtatccaccat

SEQ ID NO: 779540 - DNA, 33 bp, Homo sapien
taaactctccttaaaattatgtgtatccaccat

SEQ ID NO: 779541 - DNA, 33 bp, Homo sapien
tgtttttacaaaataacgtgcagcagtcgcaca

SEQ ID NO: 779542 - DNA, 33 bp, Homo sapien
tgtttttacaaaataatgtgcagcagtcgcaca

SEQ ID NO: 779543 - DNA, 33 bp, Homo sapien
gtggttaagcagttcaccccgagtcccactgtt

SEQ ID NO: 779544 - DNA, 33 bp, Homo sapien
gtggttaagcagttcatcccgagtcccactgtt

SEQ ID NO: 779545 - DNA, 33 bp, Homo sapien
aaaggatgaataataactgactaacagaatcaa

SEQ ID NO: 779546 - DNA, 33 bp, Homo sapien
aaaggatgaataataagtgactaacagaatcaa

SEQ ID NO: 779547 - DNA, 33 bp, Homo sapien
tggcattaataagtctaaagtactgcaagctac

SEQ ID NO: 779548 - DNA, 33 bp, Homo sapien
tggcattaataagtctgaagtactgcaagctac

SEQ ID NO: 779549 - DNA, 33 bp, Homo sapien
tctatggtatctgataacatttggtatctaatt

SEQ ID NO: 779550 - DNA, 33 bp, Homo sapien
tctatggtatctgatagcatttggtatctaatt

SEQ ID NO: 779551 - DNA, 33 bp, Homo sapien
taaccaaatgaaacaacctactgaataaggagc

SEQ ID NO: 779552 - DNA, 33 bp, Homo sapien
taaccaaatgaaacaagctactgaataaggagc

SEQ ID NO: 779553 - DNA, 33 bp, Homo sapien
aaccagcctaaattcacatcaatcaacgagtgg

SEQ ID NO: 779554 - DNA, 33 bp, Homo sapien
aaccagcctaaattcatatcaatcaacgagtgg

SEQ ID NO: 779555 - DNA, 33 bp, Homo sapien
tcattcaaggctactacaaacaccattacacaa

SEQ ID NO: 779556 - DNA, 33 bp, Homo sapien
tcattcaaggctactataaacaccattacacaa

SEQ ID NO: 779557 - DNA, 33 bp, Homo sapien
cactatctcattattgaaacactttcttcactt

SEQ ID NO: 779558 - DNA, 33 bp, Homo sapien
cactatctcattattgtaacactttcttcactt

SEQ ID NO: 779559 - DNA, 33 bp, Homo sapien
gcatttgctcccaacactcaaccaaaactacac

SEQ ID NO: 779560 - DNA, 33 bp, Homo sapien
gcatttgctcccaacattcaaccaaaactacac

SEQ ID NO: 779561 - DNA, 33 bp, Homo sapien
agagttgtctatttgcacttttcccagttcttt

SEQ ID NO: 779562 - DNA, 33 bp, Homo sapien
agagttgtctatttgcgcttttcccagttcttt

SEQ ID NO: 779563 - DNA, 33 bp, Homo sapien
gctgcaaaaatcctataaagagttgtctatttg

SEQ ID NO: 779564 - DNA, 33 bp, Homo sapien
gctgcaaaaatcctatgaagagttgtctatttg

SEQ ID NO: 779565 - DNA, 33 bp, Homo sapien
ttggatccacataaagaaagcatgagcatacaa

SEQ ID NO: 779566 - DNA, 33 bp, Homo sapien
ttggatccacataaagcaagcatgagcatacaa

SEQ ID NO: 779567 - DNA, 33 bp, Homo sapien
cgtctcacaccagtcacaatggtaactattaaa

SEQ ID NO: 779568 - DNA, 33 bp, Homo sapien
cgtctcacaccagtcagaatggtaactattaaa

SEQ ID NO: 779569 - DNA, 33 bp, Homo sapien
acacctctgttagataccaagtttctgcatttg

SEQ ID NO: 779570 - DNA, 33 bp, Homo sapien
acacctctgttagatatcaagtttctgcatttg

SEQ ID NO: 779571 - DNA, 33 bp, Homo sapien
gttattttcttcgttagctaagcatggctcaca

SEQ ID NO: 779572 - DNA, 33 bp, Homo sapien
gttattttcttcgttatctaagcatggctcaca

SEQ ID NO: 779573 - DNA, 33 bp, Homo sapien
ctccatcacattaccaatatgttatcgatctgt

SEQ ID NO: 779574 - DNA, 33 bp, Homo sapien
ctccatcacattaccagtatgttatcgatctgt

SEQ ID NO: 779575 - DNA, 33 bp, Homo sapien
ttttaagtagctgtgcaaatacttttttggtaa

SEQ ID NO: 779576 - DNA, 33 bp, Homo sapien
ttttaagtagctgtgccaatacttttttggtaa

SEQ ID NO: 779577 - DNA, 33 bp, Homo sapien
gtaagaagtcaacaacagaatttttaaaataga

SEQ ID NO: 779578 - DNA, 33 bp, Homo sapien
gtaagaagtcaacaaccgaatttttaaaataga

SEQ ID NO: 779579 - DNA, 33 bp, Homo sapien
actccattttacggataagcaaacagatttaga

SEQ ID NO: 779580 - DNA, 33 bp, Homo sapien
actccattttacggatgagcaaacagatttaga

SEQ ID NO: 779581 - DNA, 33 bp, Homo sapien
ttgttcaggtttaaaacttcatgtaatgtgagc

SEQ ID NO: 779582 - DNA, 33 bp, Homo sapien
ttgttcaggtttaaaatttcatgtaatgtgagc

SEQ ID NO: 779583 - DNA, 33 bp, Homo sapien
taaatttagaattttccaatcttcttccaaaaa

SEQ ID NO: 779584 - DNA, 33 bp, Homo sapien
taaatttagaattttcgaatcttcttccaaaaa

SEQ ID NO: 779585 - DNA, 33 bp, Homo sapien
cacagctattctgagagtcacccagttttgtgg

SEQ ID NO: 779586 - DNA, 33 bp, Homo sapien
cacagctattctgagattcacccagttttgtgg

SEQ ID NO: 779587 - DNA, 33 bp, Homo sapien
ctagatatcgttattccaacctcacaaggacaa

SEQ ID NO: 779588 - DNA, 33 bp, Homo sapien
ctagatatcgttattctaacctcacaaggacaa

SEQ ID NO: 779589 - DNA, 33 bp, Homo sapien
gtatcccttttccttaaaatccctgaagctctt

SEQ ID NO: 779590 - DNA, 33 bp, Homo sapien
gtatcccttttccttagaatccctgaagctctt

SEQ ID NO: 779591 - DNA, 33 bp, Homo sapien
cattttctaggatccaatcatttgtactcactt

SEQ ID NO: 779592 - DNA, 33 bp, Homo sapien
cattttctaggatccagtcatttgtactcactt

SEQ ID NO: 779593 - DNA, 33 bp, Homo sapien
ttacttttatacttaacgatagtgctaaggtac

SEQ ID NO: 779594 - DNA, 33 bp, Homo sapien
ttacttttatacttaatgatagtgctaaggtac

SEQ ID NO: 779595 - DNA, 33 bp, Homo sapien
gaagaaaaagagcactcacaaatacatatactg

SEQ ID NO: 779596 - DNA, 33 bp, Homo sapien
gaagaaaaagagcactgacaaatacatatactg

SEQ ID NO: 779597 - DNA, 33 bp, Homo sapien
tgtattctgatttctaaccttgctacctattgc

SEQ ID NO: 779598 - DNA, 33 bp, Homo sapien
tgtattctgatttctatccttgctacctattgc

SEQ ID NO: 779599 - DNA, 33 bp, Homo sapien
ctaaccaagtgaaaaaaccaatatacacaaata

SEQ ID NO: 779600 - DNA, 33 bp, Homo sapien
ctaaccaagtgaaaaatccaatatacacaaata

SEQ ID NO: 779601 - DNA, 33 bp, Homo sapien
ttatttcataccaaaaaaaggcagtttcttccc

SEQ ID NO: 779602 - DNA, 33 bp, Homo sapien
ttatttcataccaaaacaaggcagtttcttccc

SEQ ID NO: 779603 - DNA, 33 bp, Homo sapien
tatcaagtggtgccgaatccctccagagcacct

SEQ ID NO: 779604 - DNA, 33 bp, Homo sapien
tatcaagtggtgccgagtccctccagagcacct

SEQ ID NO: 779605 - DNA, 33 bp, Homo sapien
cctcacctgtaaaatgcactaatgtctaagaga

SEQ ID NO: 779606 - DNA, 33 bp, Homo sapien
cctcacctgtaaaatggactaatgtctaagaga

SEQ ID NO: 779607 - DNA, 33 bp, Homo sapien
tgccagcagatgctaacgtcttctaacctcctt

SEQ ID NO: 779608 - DNA, 33 bp, Homo sapien
tgccagcagatgctaatgtcttctaacctcctt

SEQ ID NO: 779609 - DNA, 33 bp, Homo sapien
tggtcaccttcagacccagtgaaatactcactg

SEQ ID NO: 779610 - DNA, 33 bp, Homo sapien
tggtcaccttcagaccgagtgaaatactcactg

SEQ ID NO: 779611 - DNA, 33 bp, Homo sapien
gtttccagtggaatcgcagttcaggcctccagt

SEQ ID NO: 779612 - DNA, 33 bp, Homo sapien
gtttccagtggaatcgtagttcaggcctccagt

SEQ ID NO: 779613 - DNA, 33 bp, Homo sapien
cagatcaggaactagaagtcaaagggtttcctg

SEQ ID NO: 779614 - DNA, 33 bp, Homo sapien
cagatcaggaactagacgtcaaagggtttcctg

SEQ ID NO: 779615 - DNA, 33 bp, Homo sapien
tattttggttatagtcaagcaggagctctgtct

SEQ ID NO: 779616 - DNA, 33 bp, Homo sapien
tattttggttatagtcgagcaggagctctgtct

SEQ ID NO: 779617 - DNA, 33 bp, Homo sapien
tttatttgcatatcaactgctatatcagaattt

SEQ ID NO: 779618 - DNA, 33 bp, Homo sapien
tttatttgcatatcaattgctatatcagaattt

SEQ ID NO: 779619 - DNA, 33 bp, Homo sapien
ttggaaagtctggaagaaaatggcaaactctct

SEQ ID NO: 779620 - DNA, 33 bp, Homo sapien
ttggaaagtctggaaggaaatggcaaactctct

SEQ ID NO: 779621 - DNA, 33 bp, Homo sapien
atacaacagagcgaggaaaaactaaacagaaat

SEQ ID NO: 779622 - DNA, 33 bp, Homo sapien
atacaacagagcgagggaaaactaaacagaaat

SEQ ID NO: 779623 - DNA, 33 bp, Homo sapien
tatttttaaaagacatgaatgaccgttaactaa

SEQ ID NO: 779624 - DNA, 33 bp, Homo sapien
tatttttaaaagacattaatgaccgttaactaa

SEQ ID NO: 779625 - DNA, 33 bp, Homo sapien
ggcagggagttatcgaagaggaagagaagcgga

SEQ ID NO: 779626 - DNA, 33 bp, Homo sapien
ggcagggagttatcgaggaggaagagaagcgga

SEQ ID NO: 779627 - DNA, 33 bp, Homo sapien
cagccttgcgtatcaccactgttcctctgatag

SEQ ID NO: 779628 - DNA, 33 bp, Homo sapien
cagccttgcgtatcacgactgttcctctgatag

SEQ ID NO: 779629 - DNA, 33 bp, Homo sapien
ggttcagaaaactgcacggttggccacacaggc

SEQ ID NO: 779630 - DNA, 33 bp, Homo sapien
ggttcagaaaactgcatggttggccacacaggc

SEQ ID NO: 779631 - DNA, 33 bp, Homo sapien
actcatttctagaggcaattttcaccctcccat

SEQ ID NO: 779632 - DNA, 33 bp, Homo sapien
actcatttctagaggccattttcaccctcccat

SEQ ID NO: 779633 - DNA, 33 bp, Homo sapien
ggctgttgccatgttacactggaacccagaatt

SEQ ID NO: 779634 - DNA, 33 bp, Homo sapien
ggctgttgccatgttatactggaacccagaatt

SEQ ID NO: 779635 - DNA, 33 bp, Homo sapien
gggcatagtccacatgaatggagtgctggccat

SEQ ID NO: 779636 - DNA, 33 bp, Homo sapien
gggcatagtccacatggatggagtgctggccat

SEQ ID NO: 779637 - DNA, 33 bp, Homo sapien
ttaccaggaatggcaacggacagccgtggctga

SEQ ID NO: 779638 - DNA, 33 bp, Homo sapien
ttaccaggaatggcaatggacagccgtggctga

SEQ ID NO: 779639 - DNA, 33 bp, Homo sapien
cttctgactcttgcctcaagctaagtcacttaa

SEQ ID NO: 779640 - DNA, 33 bp, Homo sapien
cttctgactcttgcctgaagctaagtcacttaa

SEQ ID NO: 779641 - DNA, 33 bp, Homo sapien
gggcaatttctgatgactatttttattaatgat

SEQ ID NO: 779642 - DNA, 33 bp, Homo sapien
gggcaatttctgatgagtatttttattaatgat

SEQ ID NO: 779643 - DNA, 33 bp, Homo sapien
ccataaccttggaaaaatgaattgagcaggtca

SEQ ID NO: 779644 - DNA, 33 bp, Homo sapien
ccataaccttggaaaactgaattgagcaggtca

SEQ ID NO: 779645 - DNA, 33 bp, Homo sapien
ctaaggagaaatatcccgacacaaagaggaaaa

SEQ ID NO: 779646 - DNA, 33 bp, Homo sapien
ctaaggagaaatatcctgacacaaagaggaaaa

SEQ ID NO: 779647 - DNA, 33 bp, Homo sapien
tggaatcctgtagcaaatgccttcataagaact

SEQ ID NO: 779648 - DNA, 33 bp, Homo sapien
tggaatcctgtagcaactgccttcataagaact

SEQ ID NO: 779649 - DNA, 33 bp, Homo sapien
ctcactccatgatggacgctttgaggaagggaa

SEQ ID NO: 779650 - DNA, 33 bp, Homo sapien
ctcactccatgatggatgctttgaggaagggaa

SEQ ID NO: 779651 - DNA, 33 bp, Homo sapien
gactcaaagcaaaataagaacagaacagtggaa

SEQ ID NO: 779652 - DNA, 33 bp, Homo sapien
gactcaaagcaaaataggaacagaacagtggaa

SEQ ID NO: 779653 - DNA, 33 bp, Homo sapien
aatatgaactctgtaacctcttcagtggctccc

SEQ ID NO: 779654 - DNA, 33 bp, Homo sapien
aatatgaactctgtaatctcttcagtggctccc

SEQ ID NO: 779655 - DNA, 33 bp, Homo sapien
acttgctccatgagacaaactcactacagcgtt

SEQ ID NO: 779656 - DNA, 33 bp, Homo sapien
acttgctccatgagacgaactcactacagcgtt

SEQ ID NO: 779657 - DNA, 33 bp, Homo sapien
gagttctaatttctacagtaccactaaaaactc

SEQ ID NO: 779658 - DNA, 33 bp, Homo sapien
gagttctaatttctacggtaccactaaaaactc

SEQ ID NO: 779659 - DNA, 33 bp, Homo sapien
aaattgccccatataaagttgaaatttaatgtt

SEQ ID NO: 779660 - DNA, 33 bp, Homo sapien
aaattgccccatataaggttgaaatttaatgtt

SEQ ID NO: 779661 - DNA, 33 bp, Homo sapien
ccagcctgagtcattcagaaacagatttacaaa

SEQ ID NO: 779662 - DNA, 33 bp, Homo sapien
ccagcctgagtcattcggaaacagatttacaaa

SEQ ID NO: 779663 - DNA, 33 bp, Homo sapien
aatgatcaggccgagacggaggaagagccttca

SEQ ID NO: 779664 - DNA, 33 bp, Homo sapien
aatgatcaggccgagatggaggaagagccttca

SEQ ID NO: 779665 - DNA, 33 bp, Homo sapien
ttcacgtgtctggtcacgaatgctgcctgccaa

SEQ ID NO: 779666 - DNA, 33 bp, Homo sapien
ttcacgtgtctggtcatgaatgctgcctgccaa

SEQ ID NO: 779667 - DNA, 33 bp, Homo sapien
ggacttgttggaatgacagaaaatatatggcaa

SEQ ID NO: 779668 - DNA, 33 bp, Homo sapien
ggacttgttggaatgatagaaaatatatggcaa

SEQ ID NO: 779669 - DNA, 33 bp, Homo sapien
ggcgattctgtatagcccgtgacgctttgttga

SEQ ID NO: 779670 - DNA, 33 bp, Homo sapien
ggcgattctgtatagctcgtgacgctttgttga

SEQ ID NO: 779671 - DNA, 33 bp, Homo sapien
cacctttgctttaagacgtgcagatgatgtaaa

SEQ ID NO: 779672 - DNA, 33 bp, Homo sapien
cacctttgctttaagatgtgcagatgatgtaaa

SEQ ID NO: 779673 - DNA, 33 bp, Homo sapien
aaatacttgtgtgttacgaaattatttgagcag

SEQ ID NO: 779674 - DNA, 33 bp, Homo sapien
aaatacttgtgtgttatgaaattatttgagcag

SEQ ID NO: 779675 - DNA, 33 bp, Homo sapien
gttgttgttgttaaacaggaattgtaaatactt

SEQ ID NO: 779676 - DNA, 33 bp, Homo sapien
gttgttgttgttaaacgggaattgtaaatactt

SEQ ID NO: 779677 - DNA, 33 bp, Homo sapien
caaataatcaccaacaataaggtcatgtgattt

SEQ ID NO: 779678 - DNA, 33 bp, Homo sapien
caaataatcaccaacagtaaggtcatgtgattt

SEQ ID NO: 779679 - DNA, 33 bp, Homo sapien
ggcacaaaggccactacctaaaaacgtcatttt

SEQ ID NO: 779680 - DNA, 33 bp, Homo sapien
ggcacaaaggccactatctaaaaacgtcatttt

SEQ ID NO: 779681 - DNA, 33 bp, Homo sapien
ctctcctcctctttgggaattgggagaagagct

SEQ ID NO: 779682 - DNA, 33 bp, Homo sapien
ctctcctcctctttggtaattgggagaagagct

SEQ ID NO: 779683 - DNA, 33 bp, Homo sapien
ataatccctgttagaccgaatgtacctccccag

SEQ ID NO: 779684 - DNA, 33 bp, Homo sapien
ataatccctgttagacggaatgtacctccccag

SEQ ID NO: 779685 - DNA, 33 bp, Homo sapien
cccctatttttaggggaagaggcagcatagctt

SEQ ID NO: 779686 - DNA, 33 bp, Homo sapien
cccctatttttagggggagaggcagcatagctt

SEQ ID NO: 779687 - DNA, 33 bp, Homo sapien
ctgtatctgtaatatacgctgtctaatgtatct

SEQ ID NO: 779688 - DNA, 33 bp, Homo sapien
ctgtatctgtaatatatgctgtctaatgtatct

SEQ ID NO: 779689 - DNA, 33 bp, Homo sapien
agaatggcgaaatacaaacctatggtagaagat

SEQ ID NO: 779690 - DNA, 33 bp, Homo sapien
agaatggcgaaatacagacctatggtagaagat

SEQ ID NO: 779691 - DNA, 33 bp, Homo sapien
atctgttgctcccttagatgatcactgtttgag

SEQ ID NO: 779692 - DNA, 33 bp, Homo sapien
atctgttgctcccttatatgatcactgtttgag

SEQ ID NO: 779693 - DNA, 33 bp, Homo sapien
gcggattggaatcttacgaatacagaactccat

SEQ ID NO: 779694 - DNA, 33 bp, Homo sapien
gcggattggaatcttatgaatacagaactccat

SEQ ID NO: 779695 - DNA, 33 bp, Homo sapien
ataccctataacttcaaggttatgcgattacaa

SEQ ID NO: 779696 - DNA, 33 bp, Homo sapien
ataccctataacttcagggttatgcgattacaa

SEQ ID NO: 779697 - DNA, 33 bp, Homo sapien
gtccttaatctagcccagactgaaaaactaatt

SEQ ID NO: 779698 - DNA, 33 bp, Homo sapien
gtccttaatctagccctgactgaaaaactaatt

SEQ ID NO: 779699 - DNA, 33 bp, Homo sapien
tggaccctagcagggaaacatccaaatgccagc

SEQ ID NO: 779700 - DNA, 33 bp, Homo sapien
tggaccctagcagggacacatccaaatgccagc

SEQ ID NO: 779701 - DNA, 33 bp, Homo sapien
ctccctgaaaatgcaaatcatggcccctctgca

SEQ ID NO: 779702 - DNA, 33 bp, Homo sapien
ctccctgaaaatgcaactcatggcccctctgca

SEQ ID NO: 779703 - DNA, 33 bp, Homo sapien
gcttgaaaggcagctcagaagtttggattctat

SEQ ID NO: 779704 - DNA, 33 bp, Homo sapien
gcttgaaaggcagctccgaagtttggattctat

SEQ ID NO: 779705 - DNA, 33 bp, Homo sapien
aaaaagaagtagtaaccgtataagagaattcaa

SEQ ID NO: 779706 - DNA, 33 bp, Homo sapien
aaaaagaagtagtaacggtataagagaattcaa

SEQ ID NO: 779707 - DNA, 33 bp, Homo sapien
ctcctgaagaatgagaacttcaagacataagtg

SEQ ID NO: 779708 - DNA, 33 bp, Homo sapien
ctcctgaagaatgagaccttcaagacataagtg

SEQ ID NO: 779709 - DNA, 33 bp, Homo sapien
ctggttattcactctagaaaatgacaagctctg

SEQ ID NO: 779710 - DNA, 33 bp, Homo sapien
ctggttattcactctataaaatgacaagctctg

SEQ ID NO: 779711 - DNA, 33 bp, Homo sapien
caggcttgccacaaccaactacacacatctctt

SEQ ID NO: 779712 - DNA, 33 bp, Homo sapien
caggcttgccacaaccgactacacacatctctt

SEQ ID NO: 779713 - DNA, 33 bp, Homo sapien
agttgggccctaaatacaatcacaagtgtccta

SEQ ID NO: 779714 - DNA, 33 bp, Homo sapien
agttgggccctaaatataatcacaagtgtccta

SEQ ID NO: 779715 - DNA, 33 bp, Homo sapien
ataagcataaaatagaatattcatcggcaataa

SEQ ID NO: 779716 - DNA, 33 bp, Homo sapien
ataagcataaaatagagtattcatcggcaataa

SEQ ID NO: 779717 - DNA, 33 bp, Homo sapien
gtttaacatcagggaaaagacacctagaacctg

SEQ ID NO: 779718 - DNA, 33 bp, Homo sapien
gtttaacatcagggaacagacacctagaacctg

SEQ ID NO: 779719 - DNA, 33 bp, Homo sapien
aacaaatatttactgacgccccatgctgcctgc

SEQ ID NO: 779720 - DNA, 33 bp, Homo sapien
aacaaatatttactgatgccccatgctgcctgc

SEQ ID NO: 779721 - DNA, 33 bp, Homo sapien
agaggattcacgagaacggaaagacatcgtagg

SEQ ID NO: 779722 - DNA, 33 bp, Homo sapien
agaggattcacgagaatggaaagacatcgtagg

SEQ ID NO: 779723 - DNA, 33 bp, Homo sapien
taaggatgcctccttcaatcacttgccccaggc

SEQ ID NO: 779724 - DNA, 33 bp, Homo sapien
taaggatgcctccttcgatcacttgccccaggc

SEQ ID NO: 779725 - DNA, 33 bp, Homo sapien
cccttccttcctcactaagagccctatagccca

SEQ ID NO: 779726 - DNA, 33 bp, Homo sapien
cccttccttcctcactgagagccctatagccca

SEQ ID NO: 779727 - DNA, 33 bp, Homo sapien
tccccgtaagttggccagacaagtgaagtgagc

SEQ ID NO: 779728 - DNA, 33 bp, Homo sapien
tccccgtaagttggccggacaagtgaagtgagc

SEQ ID NO: 779729 - DNA, 33 bp, Homo sapien
agtatttattaggaaccgtgccttcttggaaca

SEQ ID NO: 779730 - DNA, 33 bp, Homo sapien
agtatttattaggaacggtgccttcttggaaca

SEQ ID NO: 779731 - DNA, 33 bp, Homo sapien
cccactggaaccactactagaatgggtagccca

SEQ ID NO: 779732 - DNA, 33 bp, Homo sapien
cccactggaaccactattagaatgggtagccca

SEQ ID NO: 779733 - DNA, 33 bp, Homo sapien
tagaatgggtagcccaacaggaacaattgttca

SEQ ID NO: 779734 - DNA, 33 bp, Homo sapien
tagaatgggtagcccaccaggaacaattgttca

SEQ ID NO: 779735 - DNA, 33 bp, Homo sapien
gagagtccattcagtacatgtgcacagtcctgt

SEQ ID NO: 779736 - DNA, 33 bp, Homo sapien
gagagtccattcagtatatgtgcacagtcctgt

SEQ ID NO: 779737 - DNA, 33 bp, Homo sapien
taaggacattcatgcactcatcaaggctgacaa

SEQ ID NO: 779738 - DNA, 33 bp, Homo sapien
taaggacattcatgcattcatcaaggctgacaa

SEQ ID NO: 779739 - DNA, 33 bp, Homo sapien
ctactaccagagttgcaaatgccaaaggtcttg

SEQ ID NO: 779740 - DNA, 33 bp, Homo sapien
ctactaccagagttgcgaatgccaaaggtcttg

SEQ ID NO: 779741 - DNA, 33 bp, Homo sapien
ccagaattcagcaagacggtacctgactgtaac

SEQ ID NO: 779742 - DNA, 33 bp, Homo sapien
ccagaattcagcaagatggtacctgactgtaac

SEQ ID NO: 779743 - DNA, 33 bp, Homo sapien
tggccgagcgacttcacgcaacataatttctaa

SEQ ID NO: 779744 - DNA, 33 bp, Homo sapien
tggccgagcgacttcatgcaacataatttctaa

SEQ ID NO: 779745 - DNA, 33 bp, Homo sapien
tgtttagaagaaataactcaatactgagaggag

SEQ ID NO: 779746 - DNA, 33 bp, Homo sapien
tgtttagaagaaataagtcaatactgagaggag

SEQ ID NO: 779747 - DNA, 33 bp, Homo sapien
tcaggccttttctcacaactcttgtctcatttg

SEQ ID NO: 779748 - DNA, 33 bp, Homo sapien
tcaggccttttctcacgactcttgtctcatttg

SEQ ID NO: 779749 - DNA, 33 bp, Homo sapien
acagggtttgaggataagaacaaaggagacttc

SEQ ID NO: 779750 - DNA, 33 bp, Homo sapien
acagggtttgaggataggaacaaaggagacttc

SEQ ID NO: 779751 - DNA, 33 bp, Homo sapien
agaaatattcagctataagatggattagccgtg

SEQ ID NO: 779752 - DNA, 33 bp, Homo sapien
agaaatattcagctatgagatggattagccgtg

SEQ ID NO: 779753 - DNA, 33 bp, Homo sapien
tatttgccaaccagagaccattagcagggacac

SEQ ID NO: 779754 - DNA, 33 bp, Homo sapien
tatttgccaaccagagtccattagcagggacac

SEQ ID NO: 779755 - DNA, 33 bp, Homo sapien
agttactttccacttacctgtatggagaatctg

SEQ ID NO: 779756 - DNA, 33 bp, Homo sapien
agttactttccacttatctgtatggagaatctg

SEQ ID NO: 779757 - DNA, 33 bp, Homo sapien
ctgtaatatatccagaagagaagtgccagtcca

SEQ ID NO: 779758 - DNA, 33 bp, Homo sapien
ctgtaatatatccagatgagaagtgccagtcca

SEQ ID NO: 779759 - DNA, 33 bp, Homo sapien
tctacattgacctgataacattctggcctatta

SEQ ID NO: 779760 - DNA, 33 bp, Homo sapien
tctacattgacctgatgacattctggcctatta

SEQ ID NO: 779761 - DNA, 33 bp, Homo sapien
agatgatcctggagcacgttcagggaggagggc

SEQ ID NO: 779762 - DNA, 33 bp, Homo sapien
agatgatcctggagcatgttcagggaggagggc

SEQ ID NO: 779763 - DNA, 33 bp, Homo sapien
ttgtctgtttttgccacgagagctcgttttctg

SEQ ID NO: 779764 - DNA, 33 bp, Homo sapien
ttgtctgtttttgccatgagagctcgttttctg

SEQ ID NO: 779765 - DNA, 33 bp, Homo sapien
tgcctccaagcaggaaagagcacatcagggaca

SEQ ID NO: 779766 - DNA, 33 bp, Homo sapien
tgcctccaagcaggaaggagcacatcagggaca

SEQ ID NO: 779767 - DNA, 33 bp, Homo sapien
ccctaactcagttatacggtcttacaggacaaa

SEQ ID NO: 779768 - DNA, 33 bp, Homo sapien
ccctaactcagttatatggtcttacaggacaaa

SEQ ID NO: 779769 - DNA, 33 bp, Homo sapien
tccatgtctacagcaaccttcctcaaagtgtgg

SEQ ID NO: 779770 - DNA, 33 bp, Homo sapien
tccatgtctacagcaagcttcctcaaagtgtgg

SEQ ID NO: 779771 - DNA, 33 bp, Homo sapien
tttcatgcatatttaactctagtgggaaagtca

SEQ ID NO: 779772 - DNA, 33 bp, Homo sapien
tttcatgcatatttaattctagtgggaaagtca

SEQ ID NO: 779773 - DNA, 33 bp, Homo sapien
tcctggctttcatcccaagaaaatacacaaacc

SEQ ID NO: 779774 - DNA, 33 bp, Homo sapien
tcctggctttcatcccgagaaaatacacaaacc

SEQ ID NO: 779775 - DNA, 33 bp, Homo sapien
gaaaagcggatcgatacggtgatgtttcggaac

SEQ ID NO: 779776 - DNA, 33 bp, Homo sapien
gaaaagcggatcgatatggtgatgtttcggaac

SEQ ID NO: 779777 - DNA, 33 bp, Homo sapien
acctcaaaggagcaaagctgcttactctgcttc

SEQ ID NO: 779778 - DNA, 33 bp, Homo sapien
acctcaaaggagcaaatctgcttactctgcttc

SEQ ID NO: 779779 - DNA, 33 bp, Homo sapien
caggtgaggaaactgacgaagtggctttaggga

SEQ ID NO: 779780 - DNA, 33 bp, Homo sapien
caggtgaggaaactgatgaagtggctttaggga

SEQ ID NO: 779781 - DNA, 33 bp, Homo sapien
ctctgtgctctatgaacatgatatccagacttg

SEQ ID NO: 779782 - DNA, 33 bp, Homo sapien
ctctgtgctctatgaatatgatatccagacttg

SEQ ID NO: 779783 - DNA, 33 bp, Homo sapien
atcatcatcctaaaaacgagcaggcacccaaag

SEQ ID NO: 779784 - DNA, 33 bp, Homo sapien
atcatcatcctaaaaatgagcaggcacccaaag

SEQ ID NO: 779785 - DNA, 33 bp, Homo sapien
tttcctaatcttgccacccatagactgtaagga

SEQ ID NO: 779786 - DNA, 33 bp, Homo sapien
tttcctaatcttgccatccatagactgtaagga

SEQ ID NO: 779787 - DNA, 33 bp, Homo sapien
tgcataatattgacccaaacttcgtggactctt

SEQ ID NO: 779788 - DNA, 33 bp, Homo sapien
tgcataatattgacccgaacttcgtggactctt

SEQ ID NO: 779789 - DNA, 33 bp, Homo sapien
gccagccacaaaaggccaagtattgtgtggttc

SEQ ID NO: 779790 - DNA, 33 bp, Homo sapien
gccagccacaaaaggctaagtattgtgtggttc

SEQ ID NO: 779791 - DNA, 33 bp, Homo sapien
tttatggatttgtatacgttgaaccattcttgc

SEQ ID NO: 779792 - DNA, 33 bp, Homo sapien
tttatggatttgtatatgttgaaccattcttgc

SEQ ID NO: 779793 - DNA, 33 bp, Homo sapien
aagtggatgatgtattcaaagtaccaaaagaaa

SEQ ID NO: 779794 - DNA, 33 bp, Homo sapien
aagtggatgatgtatttaaagtaccaaaagaaa

SEQ ID NO: 779795 - DNA, 33 bp, Homo sapien
ctgttggactcaagccaaaatgacacatcaccc

SEQ ID NO: 779796 - DNA, 33 bp, Homo sapien
ctgttggactcaagccgaaatgacacatcaccc

SEQ ID NO: 779797 - DNA, 33 bp, Homo sapien
cctactgcaaggaggtaaacaaaaggatcccag

SEQ ID NO: 779798 - DNA, 33 bp, Homo sapien
cctactgcaaggaggttaacaaaaggatcccag

SEQ ID NO: 779799 - DNA, 33 bp, Homo sapien
ttgggatggccacataaagaatgggaagaaatg

SEQ ID NO: 779800 - DNA, 33 bp, Homo sapien
ttgggatggccacatagagaatgggaagaaatg

SEQ ID NO: 779801 - DNA, 33 bp, Homo sapien
ccatatataatgataacggcttccccttgaaaa

SEQ ID NO: 779802 - DNA, 33 bp, Homo sapien
ccatatataatgataatggcttccccttgaaaa

SEQ ID NO: 779803 - DNA, 33 bp, Homo sapien
aacattacagactggaacataaagaaaaaccta

SEQ ID NO: 779804 - DNA, 33 bp, Homo sapien
aacattacagactggatcataaagaaaaaccta

SEQ ID NO: 779805 - DNA, 33 bp, Homo sapien
gtggacaacaagaaagaccatctactaggccaa

SEQ ID NO: 779806 - DNA, 33 bp, Homo sapien
gtggacaacaagaaagtccatctactaggccaa

SEQ ID NO: 779807 - DNA, 33 bp, Homo sapien
cccagctcaagaatagcaggtttcaggtctcta

SEQ ID NO: 779808 - DNA, 33 bp, Homo sapien
cccagctcaagaatagtaggtttcaggtctcta

SEQ ID NO: 779809 - DNA, 33 bp, Homo sapien
ctgatggttttccacacgtcgaagccatccaga

SEQ ID NO: 779810 - DNA, 33 bp, Homo sapien
ctgatggttttccacatgtcgaagccatccaga

SEQ ID NO: 779811 - DNA, 33 bp, Homo sapien
gtaaggcccagtgtgacacatatctacctttaa

SEQ ID NO: 779812 - DNA, 33 bp, Homo sapien
gtaaggcccagtgtgatacatatctacctttaa

SEQ ID NO: 779813 - DNA, 33 bp, Homo sapien
tgtgcaactgaaggacactacataatacctcag

SEQ ID NO: 779814 - DNA, 33 bp, Homo sapien
tgtgcaactgaaggacgctacataatacctcag

SEQ ID NO: 779815 - DNA, 33 bp, Homo sapien
aatccactgagttaggacattagttggttaact

SEQ ID NO: 779816 - DNA, 33 bp, Homo sapien
aatccactgagttaggccattagttggttaact

SEQ ID NO: 779817 - DNA, 33 bp, Homo sapien
atgacgccagctcctaaaagaagcaaagaaacg

SEQ ID NO: 779818 - DNA, 33 bp, Homo sapien
atgacgccagctcctagaagaagcaaagaaacg

SEQ ID NO: 779819 - DNA, 33 bp, Homo sapien
cagggatgttggggtaaagatgatgtttcaggg

SEQ ID NO: 779820 - DNA, 33 bp, Homo sapien
cagggatgttggggtagagatgatgtttcaggg

SEQ ID NO: 779821 - DNA, 33 bp, Homo sapien
attattatgagagtccacatattacaaaaatac

SEQ ID NO: 779822 - DNA, 33 bp, Homo sapien
attattatgagagtccgcatattacaaaaatac

SEQ ID NO: 779823 - DNA, 33 bp, Homo sapien
tcttttgagcttcatactagagttatgagtgga

SEQ ID NO: 779824 - DNA, 33 bp, Homo sapien
tcttttgagcttcatagtagagttatgagtgga

SEQ ID NO: 779825 - DNA, 33 bp, Homo sapien
taattcatgtggcaacagattactctaaggaaa

SEQ ID NO: 779826 - DNA, 33 bp, Homo sapien
taattcatgtggcaacggattactctaaggaaa

SEQ ID NO: 779827 - DNA, 33 bp, Homo sapien
tactcaaaacccacgcagagctaggagataggg

SEQ ID NO: 779828 - DNA, 33 bp, Homo sapien
tactcaaaacccacgccgagctaggagataggg

SEQ ID NO: 779829 - DNA, 33 bp, Homo sapien
gttaaaaactagaatgaattgtctttagggttg

SEQ ID NO: 779830 - DNA, 33 bp, Homo sapien
gttaaaaactagaatgcattgtctttagggttg

SEQ ID NO: 779831 - DNA, 33 bp, Homo sapien
agtcacatgttcatacagactcccttgtcctga

SEQ ID NO: 779832 - DNA, 33 bp, Homo sapien
agtcacatgttcatactgactcccttgtcctga

SEQ ID NO: 779833 - DNA, 33 bp, Homo sapien
gcacttggacaggaaccacgatcatacctattg

SEQ ID NO: 779834 - DNA, 33 bp, Homo sapien
gcacttggacaggaactacgatcatacctattg

SEQ ID NO: 779835 - DNA, 33 bp, Homo sapien
cactgtctaatggaaacaaaatgtgagccacaa

SEQ ID NO: 779836 - DNA, 33 bp, Homo sapien
cactgtctaatggaaataaaatgtgagccacaa

SEQ ID NO: 779837 - DNA, 33 bp, Homo sapien
atatttgacaccttggaaacttgcattaatact

SEQ ID NO: 779838 - DNA, 33 bp, Homo sapien
atatttgacaccttgggaacttgcattaatact

SEQ ID NO: 779839 - DNA, 33 bp, Homo sapien
tacaacccatgcctcaaaataatgagacttgaa

SEQ ID NO: 779840 - DNA, 33 bp, Homo sapien
tacaacccatgcctcagaataatgagacttgaa

SEQ ID NO: 779841 - DNA, 33 bp, Homo sapien
tcacatgtaatattgtaaaagctcagataataa

SEQ ID NO: 779842 - DNA, 33 bp, Homo sapien
tcacatgtaatattgtgaaagctcagataataa

SEQ ID NO: 779843 - DNA, 33 bp, Homo sapien
gataaggagcacttgaataaaggcagagggaag

SEQ ID NO: 779844 - DNA, 33 bp, Homo sapien
gataaggagcacttgagtaaaggcagagggaag

SEQ ID NO: 779845 - DNA, 33 bp, Homo sapien
tcaccaaatataatccaacaccaggaagctaga

SEQ ID NO: 779846 - DNA, 33 bp, Homo sapien
tcaccaaatataatccgacaccaggaagctaga

SEQ ID NO: 779847 - DNA, 33 bp, Homo sapien
tattttatgaagtgagcacaaccaagacaacaa

SEQ ID NO: 779848 - DNA, 33 bp, Homo sapien
tattttatgaagtgagtacaaccaagacaacaa

SEQ ID NO: 779849 - DNA, 33 bp, Homo sapien
ctcattgttgcaagaactggaagtcataagttt

SEQ ID NO: 779850 - DNA, 33 bp, Homo sapien
ctcattgttgcaagaattggaagtcataagttt

SEQ ID NO: 779851 - DNA, 33 bp, Homo sapien
aactgtgacagttgatcagaacagggatctgga

SEQ ID NO: 779852 - DNA, 33 bp, Homo sapien
aactgtgacagttgatgagaacagggatctgga

SEQ ID NO: 779853 - DNA, 33 bp, Homo sapien
aaatcattaaagaaagccacatgaagaatccac

SEQ ID NO: 779854 - DNA, 33 bp, Homo sapien
aaatcattaaagaaaggcacatgaagaatccac

SEQ ID NO: 779855 - DNA, 33 bp, Homo sapien
agtgttacatgatagcacctatattctaaaggc

SEQ ID NO: 779856 - DNA, 33 bp, Homo sapien
agtgttacatgatagcgcctatattctaaaggc

SEQ ID NO: 779857 - DNA, 33 bp, Homo sapien
gccccacacattcacaccttttaaaatggtccc

SEQ ID NO: 779858 - DNA, 33 bp, Homo sapien
gccccacacattcacatcttttaaaatggtccc

SEQ ID NO: 779859 - DNA, 33 bp, Homo sapien
aagtgctgggttggaaccagttcggcatttgcc

SEQ ID NO: 779860 - DNA, 33 bp, Homo sapien
aagtgctgggttggaatcagttcggcatttgcc

SEQ ID NO: 779861 - DNA, 33 bp, Homo sapien
tcagaatctctttcaactcccctttcagaggtc

SEQ ID NO: 779862 - DNA, 33 bp, Homo sapien
tcagaatctctttcaattcccctttcagaggtc

SEQ ID NO: 779863 - DNA, 33 bp, Homo sapien
tgcacagaaggcgataaatgctctttctctcct

SEQ ID NO: 779864 - DNA, 33 bp, Homo sapien
tgcacagaaggcgatagatgctctttctctcct

SEQ ID NO: 779865 - DNA, 33 bp, Homo sapien
gaaaatcctctaactcaactggtcatattccac

SEQ ID NO: 779866 - DNA, 33 bp, Homo sapien
gaaaatcctctaactccactggtcatattccac

SEQ ID NO: 779867 - DNA, 33 bp, Homo sapien
gtatttccttaaaatacgcccatttagaacact

SEQ ID NO: 779868 - DNA, 33 bp, Homo sapien
gtatttccttaaaatatgcccatttagaacact

SEQ ID NO: 779869 - DNA, 33 bp, Homo sapien
attacaaatgcatctacccttaaacccagaaaa

SEQ ID NO: 779870 - DNA, 33 bp, Homo sapien
attacaaatgcatctatccttaaacccagaaaa

SEQ ID NO: 779871 - DNA, 33 bp, Homo sapien
atcaaagaatggtgaaatgaatactttgcacat

SEQ ID NO: 779872 - DNA, 33 bp, Homo sapien
atcaaagaatggtgaagtgaatactttgcacat

SEQ ID NO: 779873 - DNA, 33 bp, Homo sapien
ttatatatcatttctcccttttttctgtatgaa

SEQ ID NO: 779874 - DNA, 33 bp, Homo sapien
ttatatatcatttctctcttttttctgtatgaa

SEQ ID NO: 779875 - DNA, 33 bp, Homo sapien
ggtcataataacttcaaggtcttagaaatatga

SEQ ID NO: 779876 - DNA, 33 bp, Homo sapien
ggtcataataacttcagggtcttagaaatatga

SEQ ID NO: 779877 - DNA, 33 bp, Homo sapien
catgagtttataatgactacctctaattctatt

SEQ ID NO: 779878 - DNA, 33 bp, Homo sapien
catgagtttataatgagtacctctaattctatt

SEQ ID NO: 779879 - DNA, 33 bp, Homo sapien
aatttgacaagtgacaaactggaagaaaatatt

SEQ ID NO: 779880 - DNA, 33 bp, Homo sapien
aatttgacaagtgacatactggaagaaaatatt

SEQ ID NO: 779881 - DNA, 33 bp, Homo sapien
gggatctaaatataaaaatgcaactatacaatt

SEQ ID NO: 779882 - DNA, 33 bp, Homo sapien
gggatctaaatataaagatgcaactatacaatt

SEQ ID NO: 779883 - DNA, 33 bp, Homo sapien
ttcaacaaaaagtaaaattcatcataattgaga

SEQ ID NO: 779884 - DNA, 33 bp, Homo sapien
ttcaacaaaaagtaaagttcatcataattgaga

SEQ ID NO: 779885 - DNA, 33 bp, Homo sapien
cagtgaaggcaaaaaccagactgtattgaaaaa

SEQ ID NO: 779886 - DNA, 33 bp, Homo sapien
cagtgaaggcaaaaactagactgtattgaaaaa

SEQ ID NO: 779887 - DNA, 33 bp, Homo sapien
gagaccttcacaacaacccctatcatcacagcc

SEQ ID NO: 779888 - DNA, 33 bp, Homo sapien
gagaccttcacaacaatccctatcatcacagcc

SEQ ID NO: 779889 - DNA, 33 bp, Homo sapien
tctggtttgatttgaacgctaattagcctgatt

SEQ ID NO: 779890 - DNA, 33 bp, Homo sapien
tctggtttgatttgaatgctaattagcctgatt

SEQ ID NO: 779891 - DNA, 33 bp, Homo sapien
cataaatctgataaagccacaggtccatttcac

SEQ ID NO: 779892 - DNA, 33 bp, Homo sapien
cataaatctgataaaggcacaggtccatttcac

SEQ ID NO: 779893 - DNA, 33 bp, Homo sapien
ctatgcttaaaatatcaaatgggcaattgttct

SEQ ID NO: 779894 - DNA, 33 bp, Homo sapien
ctatgcttaaaatatcgaatgggcaattgttct

SEQ ID NO: 779895 - DNA, 33 bp, Homo sapien
ggagagcttagctctgcaagtatggctttggac

SEQ ID NO: 779896 - DNA, 33 bp, Homo sapien
ggagagcttagctctggaagtatggctttggac

SEQ ID NO: 779897 - DNA, 33 bp, Homo sapien
tagaactgtggtggaaaggatgtaaattaatag

SEQ ID NO: 779898 - DNA, 33 bp, Homo sapien
tagaactgtggtggaatggatgtaaattaatag

SEQ ID NO: 779899 - DNA, 33 bp, Homo sapien
tgatttggggtaggtcaatgtacttaaataaac

SEQ ID NO: 779900 - DNA, 33 bp, Homo sapien
tgatttggggtaggtccatgtacttaaataaac

SEQ ID NO: 779901 - DNA, 33 bp, Homo sapien
aaaatctttggttgaaaacagtaattctccatc

SEQ ID NO: 779902 - DNA, 33 bp, Homo sapien
aaaatctttggttgaagacagtaattctccatc

SEQ ID NO: 779903 - DNA, 33 bp, Homo sapien
tgctgacaggttttgacaagaacacgattcacc

SEQ ID NO: 779904 - DNA, 33 bp, Homo sapien
tgctgacaggttttgataagaacacgattcacc

SEQ ID NO: 779905 - DNA, 33 bp, Homo sapien
actttcaagagttgggccatttttaaccttatt

SEQ ID NO: 779906 - DNA, 33 bp, Homo sapien
actttcaagagttgggtcatttttaaccttatt

SEQ ID NO: 779907 - DNA, 33 bp, Homo sapien
ttaggtgctagaggaacacatctcagtgaactt

SEQ ID NO: 779908 - DNA, 33 bp, Homo sapien
ttaggtgctagaggaagacatctcagtgaactt

SEQ ID NO: 779909 - DNA, 33 bp, Homo sapien
caccatgttcatgactaaaacgcagatggattg

SEQ ID NO: 779910 - DNA, 33 bp, Homo sapien
caccatgttcatgactgaaacgcagatggattg

SEQ ID NO: 779911 - DNA, 33 bp, Homo sapien
taatgattcagccttgaaaaattaatttaaacc

SEQ ID NO: 779912 - DNA, 33 bp, Homo sapien
taatgattcagccttgcaaaattaatttaaacc

SEQ ID NO: 779913 - DNA, 33 bp, Homo sapien
ttaatattattagaacaagtaacctatggatga

SEQ ID NO: 779914 - DNA, 33 bp, Homo sapien
ttaatattattagaaccagtaacctatggatga

SEQ ID NO: 779915 - DNA, 33 bp, Homo sapien
catccaaggaccttatgactttgcttaattgtt

SEQ ID NO: 779916 - DNA, 33 bp, Homo sapien
catccaaggaccttattactttgcttaattgtt

SEQ ID NO: 779917 - DNA, 33 bp, Homo sapien
caaattcattcatcaaaaacgggttctctgcta

SEQ ID NO: 779918 - DNA, 33 bp, Homo sapien
caaattcattcatcaacaacgggttctctgcta

SEQ ID NO: 779919 - DNA, 33 bp, Homo sapien
aacccctttattttccgcatcgtgttcttgatt

SEQ ID NO: 779920 - DNA, 33 bp, Homo sapien
aacccctttattttcctcatcgtgttcttgatt

SEQ ID NO: 779921 - DNA, 33 bp, Homo sapien
aatcatctgaggagcacgttaaaaagcagagtc

SEQ ID NO: 779922 - DNA, 33 bp, Homo sapien
aatcatctgaggagcatgttaaaaagcagagtc

SEQ ID NO: 779923 - DNA, 33 bp, Homo sapien
tcctgtttaacaataacatataccgcataacat

SEQ ID NO: 779924 - DNA, 33 bp, Homo sapien
tcctgtttaacaataatatataccgcataacat

SEQ ID NO: 779925 - DNA, 33 bp, Homo sapien
tacccactaggaaaaaacactaaatttcatgtc

SEQ ID NO: 779926 - DNA, 33 bp, Homo sapien
tacccactaggaaaaatcactaaatttcatgtc

SEQ ID NO: 779927 - DNA, 33 bp, Homo sapien
tatcactggagcctgaagaataggtgaacagac

SEQ ID NO: 779928 - DNA, 33 bp, Homo sapien
tatcactggagcctgatgaataggtgaacagac

SEQ ID NO: 779929 - DNA, 33 bp, Homo sapien
tctttttctggattccacattacatctgccaga

SEQ ID NO: 779930 - DNA, 33 bp, Homo sapien
tctttttctggattccgcattacatctgccaga

SEQ ID NO: 779931 - DNA, 33 bp, Homo sapien
atctactccacaaatacctcggtgttaaaaatt

SEQ ID NO: 779932 - DNA, 33 bp, Homo sapien
atctactccacaaatatctcggtgttaaaaatt

SEQ ID NO: 779933 - DNA, 33 bp, Homo sapien
tgcccaggtagatgaacggattgacactgctgt

SEQ ID NO: 779934 - DNA, 33 bp, Homo sapien
tgcccaggtagatgaagggattgacactgctgt

SEQ ID NO: 779935 - DNA, 33 bp, Homo sapien
acatcttgtgtaactactaccattattgtgtcc

SEQ ID NO: 779936 - DNA, 33 bp, Homo sapien
acatcttgtgtaactattaccattattgtgtcc

SEQ ID NO: 779937 - DNA, 33 bp, Homo sapien
tgtgttgtaaaggacagagctggtctactatag

SEQ ID NO: 779938 - DNA, 33 bp, Homo sapien
tgtgttgtaaaggacatagctggtctactatag

SEQ ID NO: 779939 - DNA, 33 bp, Homo sapien
caggcagtagcagttacgttgggaaatggggaa

SEQ ID NO: 779940 - DNA, 33 bp, Homo sapien
caggcagtagcagttatgttgggaaatggggaa

SEQ ID NO: 779941 - DNA, 33 bp, Homo sapien
attgtgtgtacatagaatatttcaggaaggaat

SEQ ID NO: 779942 - DNA, 33 bp, Homo sapien
attgtgtgtacatagactatttcaggaaggaat

SEQ ID NO: 779943 - DNA, 33 bp, Homo sapien
tttgaatggctattccaagaacttagtgcttct

SEQ ID NO: 779944 - DNA, 33 bp, Homo sapien
tttgaatggctattcccagaacttagtgcttct

SEQ ID NO: 779945 - DNA, 33 bp, Homo sapien
tgtggtggaaggaagccctgagataacaagcaa

SEQ ID NO: 779946 - DNA, 33 bp, Homo sapien
tgtggtggaaggaagctctgagataacaagcaa

SEQ ID NO: 779947 - DNA, 33 bp, Homo sapien
tttaccaatatgtagacggaaaaatgtcaggac

SEQ ID NO: 779948 - DNA, 33 bp, Homo sapien
tttaccaatatgtagatggaaaaatgtcaggac

SEQ ID NO: 779949 - DNA, 33 bp, Homo sapien
acatttagggactggcaaaattctcaccctcct

SEQ ID NO: 779950 - DNA, 33 bp, Homo sapien
acatttagggactggcgaaattctcaccctcct

SEQ ID NO: 779951 - DNA, 33 bp, Homo sapien
ctgaaaggcctatatactaggtttctggacact

SEQ ID NO: 779952 - DNA, 33 bp, Homo sapien
ctgaaaggcctatatattaggtttctggacact

SEQ ID NO: 779953 - DNA, 33 bp, Homo sapien
tcctgggtagaaatgaccccttcttcctgcata

SEQ ID NO: 779954 - DNA, 33 bp, Homo sapien
tcctgggtagaaatgatcccttcttcctgcata

SEQ ID NO: 779955 - DNA, 33 bp, Homo sapien
gttctcaaacatgccacaacagggatgaacctt

SEQ ID NO: 779956 - DNA, 33 bp, Homo sapien
gttctcaaacatgccataacagggatgaacctt

SEQ ID NO: 779957 - DNA, 33 bp, Homo sapien
tactcattggacattacctgcttatcgttctgc

SEQ ID NO: 779958 - DNA, 33 bp, Homo sapien
tactcattggacattatctgcttatcgttctgc

SEQ ID NO: 779959 - DNA, 33 bp, Homo sapien
caatgtaattcctctcgcagaattcaactcagg

SEQ ID NO: 779960 - DNA, 33 bp, Homo sapien
caatgtaattcctctctcagaattcaactcagg

SEQ ID NO: 779961 - DNA, 33 bp, Homo sapien
ctgaccaaaactgttacagcttagcctgatgaa

SEQ ID NO: 779962 - DNA, 33 bp, Homo sapien
ctgaccaaaactgttagagcttagcctgatgaa

SEQ ID NO: 779963 - DNA, 33 bp, Homo sapien
cctttcacatgcaaaaatatttaagccattctt

SEQ ID NO: 779964 - DNA, 33 bp, Homo sapien
cctttcacatgcaaaattatttaagccattctt

SEQ ID NO: 779965 - DNA, 33 bp, Homo sapien
aaacctcacaacaagagaatggctacgtattat

SEQ ID NO: 779966 - DNA, 33 bp, Homo sapien
aaacctcacaacaagataatggctacgtattat

SEQ ID NO: 779967 - DNA, 33 bp, Homo sapien
ttacatttctcttgaacgacaaaaacaaaacag

SEQ ID NO: 779968 - DNA, 33 bp, Homo sapien
ttacatttctcttgaatgacaaaaacaaaacag

SEQ ID NO: 779969 - DNA, 33 bp, Homo sapien
agatgaatagagaaagaagtactacaaagtgag

SEQ ID NO: 779970 - DNA, 33 bp, Homo sapien
agatgaatagagaaaggagtactacaaagtgag

SEQ ID NO: 779971 - DNA, 33 bp, Homo sapien
agggtgacttagcacacagaggttcaacaagtg

SEQ ID NO: 779972 - DNA, 33 bp, Homo sapien
agggtgacttagcacagagaggttcaacaagtg

SEQ ID NO: 779973 - DNA, 33 bp, Homo sapien
aataattactgtgaaagggagtgacttaggata

SEQ ID NO: 779974 - DNA, 33 bp, Homo sapien
aataattactgtgaaatggagtgacttaggata

SEQ ID NO: 779975 - DNA, 33 bp, Homo sapien
tagcagaaaaacctcacggtaaagatcttggag

SEQ ID NO: 779976 - DNA, 33 bp, Homo sapien
tagcagaaaaacctcagggtaaagatcttggag

SEQ ID NO: 779977 - DNA, 33 bp, Homo sapien
cgtcactttgatatggccatttagttagttgaa

SEQ ID NO: 779978 - DNA, 33 bp, Homo sapien
cgtcactttgatatggtcatttagttagttgaa

SEQ ID NO: 779979 - DNA, 33 bp, Homo sapien
agagaaatcgaaactcaagtgaactaaaggaaa

SEQ ID NO: 779980 - DNA, 33 bp, Homo sapien
agagaaatcgaaactctagtgaactaaaggaaa

SEQ ID NO: 779981 - DNA, 33 bp, Homo sapien
gaggttcattaactgcagatggctttgaagaag

SEQ ID NO: 779982 - DNA, 33 bp, Homo sapien
gaggttcattaactgcggatggctttgaagaag

SEQ ID NO: 779983 - DNA, 33 bp, Homo sapien
ttctgtttgacttgaaagaattaactgctctta

SEQ ID NO: 779984 - DNA, 33 bp, Homo sapien
ttctgtttgacttgaaggaattaactgctctta

SEQ ID NO: 779985 - DNA, 33 bp, Homo sapien
taaatgcacgttactacgttaaagaggccaact

SEQ ID NO: 779986 - DNA, 33 bp, Homo sapien
taaatgcacgttactatgttaaagaggccaact

SEQ ID NO: 779987 - DNA, 33 bp, Homo sapien
ctgtgatactaaaccagatgattcatggataat

SEQ ID NO: 779988 - DNA, 33 bp, Homo sapien
ctgtgatactaaaccatatgattcatggataat

SEQ ID NO: 779989 - DNA, 33 bp, Homo sapien
aaagctccatcaactacatatccattttatgac

SEQ ID NO: 779990 - DNA, 33 bp, Homo sapien
aaagctccatcaactatatatccattttatgac

SEQ ID NO: 779991 - DNA, 33 bp, Homo sapien
ttgggtacgccccatagatcttaagcacaacac

SEQ ID NO: 779992 - DNA, 33 bp, Homo sapien
ttgggtacgccccatatatcttaagcacaacac

SEQ ID NO: 779993 - DNA, 33 bp, Homo sapien
caccactgaaccaatgaactttggatctaatgt

SEQ ID NO: 779994 - DNA, 33 bp, Homo sapien
caccactgaaccaatgcactttggatctaatgt

SEQ ID NO: 779995 - DNA, 33 bp, Homo sapien
ttggcctttctgtggagggagttaagaactaaa

SEQ ID NO: 779996 - DNA, 33 bp, Homo sapien
ttggcctttctgtggatggagttaagaactaaa

SEQ ID NO: 779997 - DNA, 33 bp, Homo sapien
ctcccgcctttccaaaacctttgcttacataac

SEQ ID NO: 779998 - DNA, 33 bp, Homo sapien
ctcccgcctttccaaaccctttgcttacataac

SEQ ID NO: 779999 - DNA, 33 bp, Homo sapien
aacgcacactctcgccaaatctagactccctcc

SEQ ID NO: 780000 - DNA, 33 bp, Homo sapien
aacgcacactctcgccgaatctagactccctcc

SEQ ID NO: 780001 - DNA, 33 bp, Homo sapien
aagtgtataagccagacgaataaatgccattaa

SEQ ID NO: 780002 - DNA, 33 bp, Homo sapien
aagtgtataagccagatgaataaatgccattaa

SEQ ID NO: 780003 - DNA, 33 bp, Homo sapien
taaacacgaatgcacaagttactgaattattgt

SEQ ID NO: 780004 - DNA, 33 bp, Homo sapien
taaacacgaatgcacaggttactgaattattgt

SEQ ID NO: 780005 - DNA, 33 bp, Homo sapien
ttgctctacaaaacaaggagaaccatataatct

SEQ ID NO: 780006 - DNA, 33 bp, Homo sapien
ttgctctacaaaacaatgagaaccatataatct

SEQ ID NO: 780007 - DNA, 33 bp, Homo sapien
ttggactgagtgttagcacagtttccagaaagg

SEQ ID NO: 780008 - DNA, 33 bp, Homo sapien
ttggactgagtgttagtacagtttccagaaagg

SEQ ID NO: 780009 - DNA, 33 bp, Homo sapien
atctgattcaacgtcaatccagaatgtgctgtg

SEQ ID NO: 780010 - DNA, 33 bp, Homo sapien
atctgattcaacgtcagtccagaatgtgctgtg

SEQ ID NO: 780011 - DNA, 33 bp, Homo sapien
acacagccctatcctcaagaagcttataatcta

SEQ ID NO: 780012 - DNA, 33 bp, Homo sapien
acacagccctatcctccagaagcttataatcta

SEQ ID NO: 780013 - DNA, 33 bp, Homo sapien
tctcactggggagaatcaactgtggatgaacaa

SEQ ID NO: 780014 - DNA, 33 bp, Homo sapien
tctcactggggagaatgaactgtggatgaacaa

SEQ ID NO: 780015 - DNA, 33 bp, Homo sapien
ccttctcattaagtgacaggttgctaaatactg

SEQ ID NO: 780016 - DNA, 33 bp, Homo sapien
ccttctcattaagtgataggttgctaaatactg

SEQ ID NO: 780017 - DNA, 33 bp, Homo sapien
atgaaattgtatgaaaactgttgtgagatggag

SEQ ID NO: 780018 - DNA, 33 bp, Homo sapien
atgaaattgtatgaaagctgttgtgagatggag

SEQ ID NO: 780019 - DNA, 33 bp, Homo sapien
aaatgacacctgcaaaaaaagtaaaatttataa

SEQ ID NO: 780020 - DNA, 33 bp, Homo sapien
aaatgacacctgcaaagaaagtaaaatttataa

SEQ ID NO: 780021 - DNA, 33 bp, Homo sapien
tactgacaaaatcaggaccacaaggagataaat

SEQ ID NO: 780022 - DNA, 33 bp, Homo sapien
tactgacaaaatcaggcccacaaggagataaat

SEQ ID NO: 780023 - DNA, 33 bp, Homo sapien
ccaggacaactcaggaaaaaagcattcccgctt

SEQ ID NO: 780024 - DNA, 33 bp, Homo sapien
ccaggacaactcaggagaaaagcattcccgctt

SEQ ID NO: 780025 - DNA, 33 bp, Homo sapien
aactggaagaaacaacaattatttactcctaaa

SEQ ID NO: 780026 - DNA, 33 bp, Homo sapien
aactggaagaaacaacgattatttactcctaaa

SEQ ID NO: 780027 - DNA, 33 bp, Homo sapien
gcaaatggagatgataataagtgaatacagccc

SEQ ID NO: 780028 - DNA, 33 bp, Homo sapien
gcaaatggagatgatagtaagtgaatacagccc

SEQ ID NO: 780029 - DNA, 33 bp, Homo sapien
attagtgaactgcttacgtaaaagttttatgag

SEQ ID NO: 780030 - DNA, 33 bp, Homo sapien
attagtgaactgcttatgtaaaagttttatgag

SEQ ID NO: 780031 - DNA, 33 bp, Homo sapien
gaataagattgccttcaaggagcttcatgagac

SEQ ID NO: 780032 - DNA, 33 bp, Homo sapien
gaataagattgccttcgaggagcttcatgagac

SEQ ID NO: 780033 - DNA, 33 bp, Homo sapien
caagaaaaggaaatgaaatactgatacattcta

SEQ ID NO: 780034 - DNA, 33 bp, Homo sapien
caagaaaaggaaatgacatactgatacattcta

SEQ ID NO: 780035 - DNA, 33 bp, Homo sapien
attaccttgatagaaaatgggctcttttaaaca

SEQ ID NO: 780036 - DNA, 33 bp, Homo sapien
attaccttgatagaaagtgggctcttttaaaca

SEQ ID NO: 780037 - DNA, 33 bp, Homo sapien; identical to SEQ ID NO: 780035

SEQ ID NO: 780038 - DNA, 33 bp, Homo sapien; identical to SEQ ID NO: 780036

SEQ ID NO: 780039 - DNA, 33 bp, Homo sapien
tgaatcaggtatgatacaaaaagttgtaatagc

SEQ ID NO: 780040 - DNA, 33 bp, Homo sapien
tgaatcaggtatgatataaaaagttgtaatagc

SEQ ID NO: 780041 - DNA, 33 bp, Homo sapien; identical to SEQ ID NO: 780039

SEQ ID NO: 780042 - DNA, 33 bp, Homo sapien; identical to SEQ ID NO: 780040

SEQ ID NO: 780043 - DNA, 33 bp, Homo sapien
aaaatgtaaatggctaaaaaattaaaataatac

SEQ ID NO: 780044 - DNA, 33 bp, Homo sapien
aaaatgtaaatggctacaaaattaaaataatac

SEQ ID NO: 780045 - DNA, 33 bp, Homo sapien
cttgatgatgtcactgaaccaacaaatcacctt

SEQ ID NO: 780046 - DNA, 33 bp, Homo sapien
cttgatgatgtcactggaccaacaaatcacctt

SEQ ID NO: 780047 - DNA, 33 bp, Homo sapien
aaaggtaaatgtggaaatggcaaaaattcacca

SEQ ID NO: 780048 - DNA, 33 bp, Homo sapien
aaaggtaaatgtggaactggcaaaaattcacca

SEQ ID NO: 780049 - DNA, 33 bp, Homo sapien
cagataaataatagccaaaccaaatgataaata

SEQ ID NO: 780050 - DNA, 33 bp, Homo sapien
cagataaataatagcccaaccaaatgataaata

SEQ ID NO: 780051 - DNA, 33 bp, Homo sapien
ggcatgactcacgacaaaaattaagtgcttaac

SEQ ID NO: 780052 - DNA, 33 bp, Homo sapien
ggcatgactcacgacacaaattaagtgcttaac

SEQ ID NO: 780053 - DNA, 33 bp, Homo sapien
ccttctgtctgacctacctgaattctaatcaag

SEQ ID NO: 780054 - DNA, 33 bp, Homo sapien
ccttctgtctgacctatctgaattctaatcaag

SEQ ID NO: 780055 - DNA, 33 bp, Homo sapien
tttatgtaacagcttaaatttcaccacttaagc

SEQ ID NO: 780056 - DNA, 33 bp, Homo sapien
tttatgtaacagcttatatttcaccacttaagc

SEQ ID NO: 780057 - DNA, 33 bp, Homo sapien
cactgcggcaggtaaggcatttaatcatcatct

SEQ ID NO: 780058 - DNA, 33 bp, Homo sapien
cactgcggcaggtaagtcatttaatcatcatct

SEQ ID NO: 780059 - DNA, 33 bp, Homo sapien
tttgatcttatagcaaaagtgtatggcagcaag

SEQ ID NO: 780060 - DNA, 33 bp, Homo sapien
tttgatcttatagcaagagtgtatggcagcaag

SEQ ID NO: 780061 - DNA, 33 bp, Homo sapien
ataacggtttgcttacaaattgtagaaagccag

SEQ ID NO: 780062 - DNA, 33 bp, Homo sapien
ataacggtttgcttacgaattgtagaaagccag

SEQ ID NO: 780063 - DNA, 33 bp, Homo sapien
tatcaaaggtctaacagggacacagcaagtaca

SEQ ID NO: 780064 - DNA, 33 bp, Homo sapien
tatcaaaggtctaacatggacacagcaagtaca

SEQ ID NO: 780065 - DNA, 33 bp, Homo sapien
ttccaaatgttaatgacggtttttcatatcttt

SEQ ID NO: 780066 - DNA, 33 bp, Homo sapien
ttccaaatgttaatgatggtttttcatatcttt

SEQ ID NO: 780067 - DNA, 33 bp, Homo sapien
acatgttctgtgaatacggtagtttggaattgc

SEQ ID NO: 780068 - DNA, 33 bp, Homo sapien
acatgttctgtgaatatggtagtttggaattgc

SEQ ID NO: 780069 - DNA, 33 bp, Homo sapien
gtaaccatacattgaaactttcttagtcattct

SEQ ID NO: 780070 - DNA, 33 bp, Homo sapien
gtaaccatacattgaagctttcttagtcattct

SEQ ID NO: 780071 - DNA, 33 bp, Homo sapien
gacttgtaaccagaagaaattagctgtgacaga

SEQ ID NO: 780072 - DNA, 33 bp, Homo sapien
gacttgtaaccagaagcaattagctgtgacaga

SEQ ID NO: 780073 - DNA, 33 bp, Homo sapien
aataacacaagatatccattgtctgccacattg

SEQ ID NO: 780074 - DNA, 33 bp, Homo sapien
aataacacaagatatcgattgtctgccacattg

SEQ ID NO: 780075 - DNA, 33 bp, Homo sapien
tggtactccataaacactgctcgaccaaacggg

SEQ ID NO: 780076 - DNA, 33 bp, Homo sapien
tggtactccataaacattgctcgaccaaacggg

SEQ ID NO: 780077 - DNA, 33 bp, Homo sapien
gactgagatgtttaataactaaccaactgaaca

SEQ ID NO: 780078 - DNA, 33 bp, Homo sapien
gactgagatgtttaatgactaaccaactgaaca

SEQ ID NO: 780079 - DNA, 33 bp, Homo sapien
tttcactcggtcttcaggtcaccacatattcat

SEQ ID NO: 780080 - DNA, 33 bp, Homo sapien
tttcactcggtcttcatgtcaccacatattcat

SEQ ID NO: 780081 - DNA, 33 bp, Homo sapien
aggaaggggagagagacgggggaattgcctgcc

SEQ ID NO: 780082 - DNA, 33 bp, Homo sapien
aggaaggggagagagatgggggaattgcctgcc

SEQ ID NO: 780083 - DNA, 33 bp, Homo sapien
gttttgcttcaagtaaatgaacaactgacttga

SEQ ID NO: 780084 - DNA, 33 bp, Homo sapien
gttttgcttcaagtaactgaacaactgacttga

SEQ ID NO: 780085 - DNA, 33 bp, Homo sapien
actaatagaaatgcagacacctttgagagggtt

SEQ ID NO: 780086 - DNA, 33 bp, Homo sapien
actaatagaaatgcagtcacctttgagagggtt

SEQ ID NO: 780087 - DNA, 33 bp, Homo sapien
agcctgggtttctgaactcatgattctaaagtg

SEQ ID NO: 780088 - DNA, 33 bp, Homo sapien
agcctgggtttctgaattcatgattctaaagtg

SEQ ID NO: 780089 - DNA, 33 bp, Homo sapien
gagatcatttgctcaactgtctttttggatgtc

SEQ ID NO: 780090 - DNA, 33 bp, Homo sapien
gagatcatttgctcaattgtctttttggatgtc

SEQ ID NO: 780091 - DNA, 33 bp, Homo sapien
ttacacatgctaataccgtataatcattctcta

SEQ ID NO: 780092 - DNA, 33 bp, Homo sapien
ttacacatgctaatactgtataatcattctcta

SEQ ID NO: 780093 - DNA, 33 bp, Homo sapien
tggtatgctaaatttcaggccttgtggcactct

SEQ ID NO: 780094 - DNA, 33 bp, Homo sapien
tggtatgctaaatttcgggccttgtggcactct

SEQ ID NO: 780095 - DNA, 33 bp, Homo sapien
agtgtctgggagaacaaagttccaacagcaagt

SEQ ID NO: 780096 - DNA, 33 bp, Homo sapien
agtgtctgggagaacagagttccaacagcaagt

SEQ ID NO: 780097 - DNA, 33 bp, Homo sapien
tctgcattgaagtccaggaacttgacccttctc

SEQ ID NO: 780098 - DNA, 33 bp, Homo sapien
tctgcattgaagtccatgaacttgacccttctc

SEQ ID NO: 780099 - DNA, 33 bp, Homo sapien
catgctttgctagataaccaaggttgtatcatt

SEQ ID NO: 780100 - DNA, 33 bp, Homo sapien
catgctttgctagatagccaaggttgtatcatt

SEQ ID NO: 780101 - DNA, 33 bp, Homo sapien
taatagtagcttcctaaaaatcccactagactt

SEQ ID NO: 780102 - DNA, 33 bp, Homo sapien
taatagtagcttcctataaatcccactagactt

SEQ ID NO: 780103 - DNA, 33 bp, Homo sapien
gctgagctaatgaagccgctgacttgatttgca

SEQ ID NO: 780104 - DNA, 33 bp, Homo sapien
gctgagctaatgaagctgctgacttgatttgca

SEQ ID NO: 780105 - DNA, 33 bp, Homo sapien
atcatggagacattccaatttacattatacaca

SEQ ID NO: 780106 - DNA, 33 bp, Homo sapien
atcatggagacattccgatttacattatacaca

SEQ ID NO: 780107 - DNA, 33 bp, Homo sapien
aaaagaaatgtgacgcactctcaccaagatgct

SEQ ID NO: 780108 - DNA, 33 bp, Homo sapien
aaaagaaatgtgacgctctctcaccaagatgct

SEQ ID NO: 780109 - DNA, 33 bp, Homo sapien
tgttgaatgaatgaccaaaagagtaattcaagg

SEQ ID NO: 780110 - DNA, 33 bp, Homo sapien
tgttgaatgaatgaccgaaagagtaattcaagg

SEQ ID NO: 780111 - DNA, 33 bp, Homo sapien
tcagaagttgagcatgaaagtgggtgctattta

SEQ ID NO: 780112 - DNA, 33 bp, Homo sapien
tcagaagttgagcatggaagtgggtgctattta

SEQ ID NO: 780113 - DNA, 33 bp, Homo sapien
tcctgtccaaacccaacaggccaatggtgatgt

SEQ ID NO: 780114 - DNA, 33 bp, Homo sapien
tcctgtccaaacccaagaggccaatggtgatgt

SEQ ID NO: 780115 - DNA, 33 bp, Homo sapien
acttgagttgggaaccaaaagagaaaaatggac

SEQ ID NO: 780116 - DNA, 33 bp, Homo sapien
acttgagttgggaaccgaaagagaaaaatggac

SEQ ID NO: 780117 - DNA, 33 bp, Homo sapien
gagtgtcagcttctggcatgttctgtgtggttt

SEQ ID NO: 780118 - DNA, 33 bp, Homo sapien
gagtgtcagcttctggtatgttctgtgtggttt

SEQ ID NO: 780119 - DNA, 33 bp, Homo sapien
gcaactcaacacttgcaatgattaatgggcaat

SEQ ID NO: 780120 - DNA, 33 bp, Homo sapien
gcaactcaacacttgcgatgattaatgggcaat

SEQ ID NO: 780121 - DNA, 33 bp, Homo sapien
gtttacataggactcaaaacagtttacattggt

SEQ ID NO: 780122 - DNA, 33 bp, Homo sapien
gtttacataggactcagaacagtttacattggt

SEQ ID NO: 780123 - DNA, 33 bp, Homo sapien
caccccaagtcttaaacaaaagccatgttaacc

SEQ ID NO: 780124 - DNA, 33 bp, Homo sapien
caccccaagtcttaaagaaaagccatgttaacc

SEQ ID NO: 780125 - DNA, 33 bp, Homo sapien
aactccacattctcaacagaacagatgtatctt

SEQ ID NO: 780126 - DNA, 33 bp, Homo sapien
aactccacattctcaagagaacagatgtatctt

SEQ ID NO: 780127 - DNA, 33 bp, Homo sapien
acagacatctgtgatacggtatataggtcagaa

SEQ ID NO: 780128 - DNA, 33 bp, Homo sapien
acagacatctgtgatatggtatataggtcagaa

SEQ ID NO: 780129 - DNA, 33 bp, Homo sapien
catatataatcactccgacttcttccactttat

SEQ ID NO: 780130 - DNA, 33 bp, Homo sapien
catatataatcactcctacttcttccactttat

SEQ ID NO: 780131 - DNA, 33 bp, Homo sapien
aagaaaatgaacaagcgcagaggacagggtcaa

SEQ ID NO: 780132 - DNA, 33 bp, Homo sapien
aagaaaatgaacaagctcagaggacagggtcaa

SEQ ID NO: 780133 - DNA, 33 bp, Homo sapien
gctgacacttgacctcccattccttctcaacaa

SEQ ID NO: 780134 - DNA, 33 bp, Homo sapien
gctgacacttgacctctcattccttctcaacaa

SEQ ID NO: 780135 - DNA, 33 bp, Homo sapien
agcccacataacaagaatacatggaagctacat

SEQ ID NO: 780136 - DNA, 33 bp, Homo sapien
agcccacataacaagagtacatggaagctacat

SEQ ID NO: 780137 - DNA, 33 bp, Homo sapien
tgataatggtgaatcacggtagcaaatgctcac

SEQ ID NO: 780138 - DNA, 33 bp, Homo sapien
tgataatggtgaatcatggtagcaaatgctcac

SEQ ID NO: 780139 - DNA, 33 bp, Homo sapien
acatattgtttcaatacgcccgtgtcaggacta

SEQ ID NO: 780140 - DNA, 33 bp, Homo sapien
acatattgtttcaatatgcccgtgtcaggacta

SEQ ID NO: 780141 - DNA, 33 bp, Homo sapien
gacaccatctgctgagaaagagttatggcccca

SEQ ID NO: 780142 - DNA, 33 bp, Homo sapien
gacaccatctgctgaggaagagttatggcccca

SEQ ID NO: 780143 - DNA, 33 bp, Homo sapien
ggaaatctgacatttgcagcaagagcagtactg

SEQ ID NO: 780144 - DNA, 33 bp, Homo sapien
ggaaatctgacatttgtagcaagagcagtactg

SEQ ID NO: 780145 - DNA, 33 bp, Homo sapien
ctgtagaaaagtctggaaagacggatgagcagt

SEQ ID NO: 780146 - DNA, 33 bp, Homo sapien
ctgtagaaaagtctgggaagacggatgagcagt

SEQ ID NO: 780147 - DNA, 33 bp, Homo sapien
tcctattcactcttcaaaatctcagttcaatat

SEQ ID NO: 780148 - DNA, 33 bp, Homo sapien
tcctattcactcttcagaatctcagttcaatat

SEQ ID NO: 780149 - DNA, 33 bp, Homo sapien
gagagacattatttataagcttggtgatttcaa

SEQ ID NO: 780150 - DNA, 33 bp, Homo sapien
gagagacattatttatcagcttggtgatttcaa

SEQ ID NO: 780151 - DNA, 33 bp, Homo sapien
atggcaaagagaaataccgtcttcctgagttgt

SEQ ID NO: 780152 - DNA, 33 bp, Homo sapien
atggcaaagagaaatatcgtcttcctgagttgt

SEQ ID NO: 780153 - DNA, 33 bp, Homo sapien
atttccacagatctgaaactgtgtccttttggc

SEQ ID NO: 780154 - DNA, 33 bp, Homo sapien
atttccacagatctgacactgtgtccttttggc

SEQ ID NO: 780155 - DNA, 33 bp, Homo sapien
agacccaggctgtcggaatgtgttgactgttta

SEQ ID NO: 780156 - DNA, 33 bp, Homo sapien
agacccaggctgtcgggatgtgttgactgttta

SEQ ID NO: 780157 - DNA, 33 bp, Homo sapien
ccttcaaaagttgcaccagtttgtgtgcagcac

SEQ ID NO: 780158 - DNA, 33 bp, Homo sapien
ccttcaaaagttgcacgagtttgtgtgcagcac

SEQ ID NO: 780159 - DNA, 33 bp, Homo sapien
agaggaaaacctggaaattaggaaatgaagaaa

SEQ ID NO: 780160 - DNA, 33 bp, Homo sapien
agaggaaaacctggaacttaggaaatgaagaaa

SEQ ID NO: 780161 - DNA, 33 bp, Homo sapien
gcgccaggaactgggccaaggactcaagttaga

SEQ ID NO: 780162 - DNA, 33 bp, Homo sapien
gcgccaggaactgggctaaggactcaagttaga

SEQ ID NO: 780163 - DNA, 33 bp, Homo sapien
gggactgaggagtcaactccgttttggtcttaa

SEQ ID NO: 780164 - DNA, 33 bp, Homo sapien
gggactgaggagtcaagtccgttttggtcttaa

SEQ ID NO: 780165 - DNA, 33 bp, Homo sapien
actcttctgtgggctacatatttgacatacatt

SEQ ID NO: 780166 - DNA, 33 bp, Homo sapien
actcttctgtgggctagatatttgacatacatt

SEQ ID NO: 780167 - DNA, 33 bp, Homo sapien
gaagccactcagtatgcatttcttgaataaatg

SEQ ID NO: 780168 - DNA, 33 bp, Homo sapien
gaagccactcagtatgtatttcttgaataaatg

SEQ ID NO: 780169 - DNA, 33 bp, Homo sapien
taaatgttagggaaggacaaagcttttataggt

SEQ ID NO: 780170 - DNA, 33 bp, Homo sapien
taaatgttagggaagggcaaagcttttataggt

SEQ ID NO: 780171 - DNA, 33 bp, Homo sapien
tcaagggaggtcatcaaagagaaaaagagttac

SEQ ID NO: 780172 - DNA, 33 bp, Homo sapien
tcaagggaggtcatcagagagaaaaagagttac

SEQ ID NO: 780173 - DNA, 33 bp, Homo sapien
tcccctatctcctctcaacccattaaccaaaga

SEQ ID NO: 780174 - DNA, 33 bp, Homo sapien
tcccctatctcctctccacccattaaccaaaga

SEQ ID NO: 780175 - DNA, 33 bp, Homo sapien
aacatggacagccacaatggtcttatgagatct

SEQ ID NO: 780176 - DNA, 33 bp, Homo sapien
aacatggacagccacagtggtcttatgagatct

SEQ ID NO: 780177 - DNA, 33 bp, Homo sapien
ttgtattcagaaaacactgtcaaaaacttacat

SEQ ID NO: 780178 - DNA, 33 bp, Homo sapien
ttgtattcagaaaacattgtcaaaaacttacat

SEQ ID NO: 780179 - DNA, 33 bp, Homo sapien
atgatgactgcaatgcaattctgatactaacta

SEQ ID NO: 780180 - DNA, 33 bp, Homo sapien
atgatgactgcaatgcgattctgatactaacta

SEQ ID NO: 780181 - DNA, 33 bp, Homo sapien
atggattttatctaacaatcttcactttcttcc

SEQ ID NO: 780182 - DNA, 33 bp, Homo sapien
atggattttatctaacgatcttcactttcttcc

SEQ ID NO: 780183 - DNA, 33 bp, Homo sapien
tggatgtattagctggaaggtagtaaaacatag

SEQ ID NO: 780184 - DNA, 33 bp, Homo sapien
tggatgtattagctgggaggtagtaaaacatag

SEQ ID NO: 780185 - DNA, 33 bp, Homo sapien
tcctgttctaattttacgaatgcagtatcttct

SEQ ID NO: 780186 - DNA, 33 bp, Homo sapien
tcctgttctaattttatgaatgcagtatcttct

SEQ ID NO: 780187 - DNA, 33 bp, Homo sapien
ccaaagatcccccttcccttctgtgtgctcctg

SEQ ID NO: 780188 - DNA, 33 bp, Homo sapien
ccaaagatcccccttctcttctgtgtgctcctg

SEQ ID NO: 780189 - DNA, 33 bp, Homo sapien
cctcctggcttctttccacttctttcctctgga

SEQ ID NO: 780190 - DNA, 33 bp, Homo sapien
cctcctggcttctttctacttctttcctctgga

SEQ ID NO: 780191 - DNA, 33 bp, Homo sapien
agaatgtaggaataaaaggtgtcaaagcactag

SEQ ID NO: 780192 - DNA, 33 bp, Homo sapien
agaatgtaggaataaagggtgtcaaagcactag

SEQ ID NO: 780193 - DNA, 33 bp, Homo sapien
ttctggacgtcatttccccttttttgtctataa

SEQ ID NO: 780194 - DNA, 33 bp, Homo sapien
ttctggacgtcatttctccttttttgtctataa

SEQ ID NO: 780195 - DNA, 33 bp, Homo sapien
gcttgagcaatggagcaatacaggtgacattta

SEQ ID NO: 780196 - DNA, 33 bp, Homo sapien
gcttgagcaatggagcgatacaggtgacattta

SEQ ID NO: 780197 - DNA, 33 bp, Homo sapien
gtgaatacagggccaaagactgaccatgagagt

SEQ ID NO: 780198 - DNA, 33 bp, Homo sapien
gtgaatacagggccaaggactgaccatgagagt

SEQ ID NO: 780199 - DNA, 33 bp, Homo sapien
atgacaaagagtttcaaaaatgttggttcttaa

SEQ ID NO: 780200 - DNA, 33 bp, Homo sapien
atgacaaagagtttcagaaatgttggttcttaa

SEQ ID NO: 780201 - DNA, 33 bp, Homo sapien
acagaaccctctattcacctaacaatatattct

SEQ ID NO: 780202 - DNA, 33 bp, Homo sapien
acagaaccctctattctcctaacaatatattct

SEQ ID NO: 780203 - DNA, 33 bp, Homo sapien
agaatgtaaggctaacagcagttcaaagtaggg

SEQ ID NO: 780204 - DNA, 33 bp, Homo sapien
agaatgtaaggctaacggcagttcaaagtaggg

SEQ ID NO: 780205 - DNA, 33 bp, Homo sapien
aagagctaaataatacaaaaagttgtggctttg

SEQ ID NO: 780206 - DNA, 33 bp, Homo sapien
aagagctaaataatacgaaaagttgtggctttg

SEQ ID NO: 780207 - DNA, 33 bp, Homo sapien
tcagattggacacttccccacactggacctcaa

SEQ ID NO: 780208 - DNA, 33 bp, Homo sapien
tcagattggacacttctccacactggacctcaa

SEQ ID NO: 780209 - DNA, 33 bp, Homo sapien
agtatccatcactcaaataacatacattgtacc

SEQ ID NO: 780210 - DNA, 33 bp, Homo sapien
agtatccatcactcaagtaacatacattgtacc

SEQ ID NO: 780211 - DNA, 33 bp, Homo sapien
atggaataattattcccgagtgtccattacagg

SEQ ID NO: 780212 - DNA, 33 bp, Homo sapien
atggaataattattcctgagtgtccattacagg

SEQ ID NO: 780213 - DNA, 33 bp, Homo sapien
gggtgataatagattaacaaactcaattacaaa

SEQ ID NO: 780214 - DNA, 33 bp, Homo sapien
gggtgataatagattagcaaactcaattacaaa

SEQ ID NO: 780215 - DNA, 33 bp, Homo sapien
agttttatgcattgatcagacattcactctccc

SEQ ID NO: 780216 - DNA, 33 bp, Homo sapien
agttttatgcattgattagacattcactctccc

SEQ ID NO: 780217 - DNA, 33 bp, Homo sapien
ggacagatgagtgccacagttataattataacg

SEQ ID NO: 780218 - DNA, 33 bp, Homo sapien
ggacagatgagtgccatagttataattataacg

SEQ ID NO: 780219 - DNA, 33 bp, Homo sapien
aagaagaaggaatcatcaatggggcttggggct

SEQ ID NO: 780220 - DNA, 33 bp, Homo sapien
aagaagaaggaatcatgaatggggcttggggct

SEQ ID NO: 780221 - DNA, 33 bp, Homo sapien
gatattctttctaatacgactttgtacctctta

SEQ ID NO: 780222 - DNA, 33 bp, Homo sapien
gatattctttctaatatgactttgtacctctta

SEQ ID NO: 780223 - DNA, 33 bp, Homo sapien
agtttcactgacactcgctggtcattacagcaa

SEQ ID NO: 780224 - DNA, 33 bp, Homo sapien
agtttcactgacactctctggtcattacagcaa

SEQ ID NO: 780225 - DNA, 33 bp, Homo sapien
caaaagagccatctatgacttacctctatcacc

SEQ ID NO: 780226 - DNA, 33 bp, Homo sapien
caaaagagccatctattacttacctctatcacc

SEQ ID NO: 780227 - DNA, 33 bp, Homo sapien
gataaaagggcaaggaaattgactttttgacta

SEQ ID NO: 780228 - DNA, 33 bp, Homo sapien
gataaaagggcaaggacattgactttttgacta

SEQ ID NO: 780229 - DNA, 33 bp, Homo sapien
tcagaggctttgctagacccttgagccaagaca

SEQ ID NO: 780230 - DNA, 33 bp, Homo sapien
tcagaggctttgctaggcccttgagccaagaca

SEQ ID NO: 780231 - DNA, 33 bp, Homo sapien
catcaacacaaactccaaagaccctgaataggc

SEQ ID NO: 780232 - DNA, 33 bp, Homo sapien
catcaacacaaactccgaagaccctgaataggc

SEQ ID NO: 780233 - DNA, 33 bp, Homo sapien
acaaaatccagggcacagaatattttcattatg

SEQ ID NO: 780234 - DNA, 33 bp, Homo sapien
acaaaatccagggcacggaatattttcattatg

SEQ ID NO: 780235 - DNA, 33 bp, Homo sapien
gctgctctaagaagaccagggcttttctgatga

SEQ ID NO: 780236 - DNA, 33 bp, Homo sapien
gctgctctaagaagacgagggcttttctgatga

SEQ ID NO: 780237 - DNA, 33 bp, Homo sapien
tgagtgtcgaaatggaccgtgcgttcccaactc

SEQ ID NO: 780238 - DNA, 33 bp, Homo sapien
tgagtgtcgaaatggagcgtgcgttcccaactc

SEQ ID NO: 780239 - DNA, 33 bp, Homo sapien
ggtaaaagctgagaagcaataaatccccatcta

SEQ ID NO: 780240 - DNA, 33 bp, Homo sapien
ggtaaaagctgagaagtaataaatccccatcta

SEQ ID NO: 780241 - DNA, 33 bp, Homo sapien
gagatcttggtgtaaacgtaataactgagccac

SEQ ID NO: 780242 - DNA, 33 bp, Homo sapien
gagatcttggtgtaaaggtaataactgagccac

SEQ ID NO: 780243 - DNA, 33 bp, Homo sapien
aactttgagataaagacggaaaagggctccgag

SEQ ID NO: 780244 - DNA, 33 bp, Homo sapien
aactttgagataaagatggaaaagggctccgag

SEQ ID NO: 780245 - DNA, 33 bp, Homo sapien
tagacttcacagcctgcatgatgacacaagcaa

SEQ ID NO: 780246 - DNA, 33 bp, Homo sapien
tagacttcacagcctggatgatgacacaagcaa

SEQ ID NO: 780247 - DNA, 33 bp, Homo sapien
tgtcaatatgcttacagtccactagggggagcc

SEQ ID NO: 780248 - DNA, 33 bp, Homo sapien
tgtcaatatgcttacattccactagggggagcc

SEQ ID NO: 780249 - DNA, 33 bp, Homo sapien
atcagcttcaaaaatacaaggagggccaactag

SEQ ID NO: 780250 - DNA, 33 bp, Homo sapien
atcagcttcaaaaatataaggagggccaactag

SEQ ID NO: 780251 - DNA, 33 bp, Homo sapien
atatagcttcatataaacactggaaaactttgt

SEQ ID NO: 780252 - DNA, 33 bp, Homo sapien
atatagcttcatataagcactggaaaactttgt

SEQ ID NO: 780253 - DNA, 33 bp, Homo sapien
cgacagcacacattcaccaggtatgcagagaag

SEQ ID NO: 780254 - DNA, 33 bp, Homo sapien
cgacagcacacattcatcaggtatgcagagaag

SEQ ID NO: 780255 - DNA, 33 bp, Homo sapien
ctctgaaatttcatcacgtacagtctatcagca

SEQ ID NO: 780256 - DNA, 33 bp, Homo sapien
ctctgaaatttcatcatgtacagtctatcagca

SEQ ID NO: 780257 - DNA, 33 bp, Homo sapien
ccataagcttttgacccggtaattctactcctc

SEQ ID NO: 780258 - DNA, 33 bp, Homo sapien
ccataagcttttgacctggtaattctactcctc

SEQ ID NO: 780259 - DNA, 33 bp, Homo sapien
acaccttcttctctaaatactcatagagcactt

SEQ ID NO: 780260 - DNA, 33 bp, Homo sapien
acaccttcttctctaattactcatagagcactt

SEQ ID NO: 780261 - DNA, 33 bp, Homo sapien
cccaaagaggatctaaagtaggtcgtcaaacag

SEQ ID NO: 780262 - DNA, 33 bp, Homo sapien
cccaaagaggatctaaggtaggtcgtcaaacag

SEQ ID NO: 780263 - DNA, 33 bp, Homo sapien
acaggaatgaccttgaagacttgatttgcatta

SEQ ID NO: 780264 - DNA, 33 bp, Homo sapien
acaggaatgaccttgatgacttgatttgcatta

SEQ ID NO: 780265 - DNA, 33 bp, Homo sapien
cagaagcaaacgaagaatcaattaagtacaaaa

SEQ ID NO: 780266 - DNA, 33 bp, Homo sapien
cagaagcaaacgaagagtcaattaagtacaaaa

SEQ ID NO: 780267 - DNA, 33 bp, Homo sapien
cagagctcctgccctaaaaaaggaaatttaatg

SEQ ID NO: 780268 - DNA, 33 bp, Homo sapien
cagagctcctgccctacaaaaggaaatttaatg

SEQ ID NO: 780269 - DNA, 33 bp, Homo sapien
ttctataatcatgtgaataacaccataaataag

SEQ ID NO: 780270 - DNA, 33 bp, Homo sapien
ttctataatcatgtgactaacaccataaataag

SEQ ID NO: 780271 - DNA, 33 bp, Homo sapien
gaatgactggccccacaagatatttttatccct

SEQ ID NO: 780272 - DNA, 33 bp, Homo sapien
gaatgactggccccacgagatatttttatccct

SEQ ID NO: 780273 - DNA, 33 bp, Homo sapien
cacagggtgaaaggaacgtgcctgctaagggtg

SEQ ID NO: 780274 - DNA, 33 bp, Homo sapien
cacagggtgaaaggaatgtgcctgctaagggtg

SEQ ID NO: 780275 - DNA, 33 bp, Homo sapien
tatgttccaataaaaccaggaggctagctggat

SEQ ID NO: 780276 - DNA, 33 bp, Homo sapien
tatgttccaataaaactaggaggctagctggat

SEQ ID NO: 780277 - DNA, 33 bp, Homo sapien
gtttgcttgttggtcacatattcacagaagtca

SEQ ID NO: 780278 - DNA, 33 bp, Homo sapien
gtttgcttgttggtcagatattcacagaagtca

SEQ ID NO: 780279 - DNA, 33 bp, Homo sapien
gggaacaaaagtgggcaagaaagtaaagcctcc

SEQ ID NO: 780280 - DNA, 33 bp, Homo sapien
gggaacaaaagtgggcgagaaagtaaagcctcc

SEQ ID NO: 780281 - DNA, 33 bp, Homo sapien
ctcctaggttctaagcaaattgacaaaaaagac

SEQ ID NO: 780282 - DNA, 33 bp, Homo sapien
ctcctaggttctaagcgaattgacaaaaaagac

SEQ ID NO: 780283 - DNA, 33 bp, Homo sapien
gcctacttctgtatacactgaccaaagaacggc

SEQ ID NO: 780284 - DNA, 33 bp, Homo sapien
gcctacttctgtatacgctgaccaaagaacggc

SEQ ID NO: 780285 - DNA, 33 bp, Homo sapien
aaagctgatattctcaaaaataatggagaatgg

SEQ ID NO: 780286 - DNA, 33 bp, Homo sapien
aaagctgatattctcacaaataatggagaatgg

SEQ ID NO: 780287 - DNA, 33 bp, Homo sapien
tcactcactttcaaaactggaaaaatcaattcc

SEQ ID NO: 780288 - DNA, 33 bp, Homo sapien
tcactcactttcaaaattggaaaaatcaattcc

SEQ ID NO: 780289 - DNA, 33 bp, Homo sapien
agcccaacacacctgacgtattaacaaatattt

SEQ ID NO: 780290 - DNA, 33 bp, Homo sapien
agcccaacacacctgatgtattaacaaatattt

SEQ ID NO: 780291 - DNA, 33 bp, Homo sapien
gtggtaggctctttgccattcttctccacttac

SEQ ID NO: 780292 - DNA, 33 bp, Homo sapien
gtggtaggctctttgctattcttctccacttac

SEQ ID NO: 780293 - DNA, 33 bp, Homo sapien
agatcagttaaattacagaaggttcatgttgta

SEQ ID NO: 780294 - DNA, 33 bp, Homo sapien
agatcagttaaattacggaaggttcatgttgta

SEQ ID NO: 780295 - DNA, 33 bp, Homo sapien
atatgtttctctttcaaggtggttagtctagca

SEQ ID NO: 780296 - DNA, 33 bp, Homo sapien
atatgtttctctttcagggtggttagtctagca

SEQ ID NO: 780297 - DNA, 33 bp, Homo sapien
cttgaagtggaaggaacgaataggtgtgtgcct

SEQ ID NO: 780298 - DNA, 33 bp, Homo sapien
cttgaagtggaaggaatgaataggtgtgtgcct

SEQ ID NO: 780299 - DNA, 33 bp, Homo sapien
gtgcttccatcgaaacaccaaaattaaagatgt

SEQ ID NO: 780300 - DNA, 33 bp, Homo sapien
gtgcttccatcgaaacgccaaaattaaagatgt

SEQ ID NO: 780301 - DNA, 33 bp, Homo sapien
cttggttaccaaagacactcacatctttaattt

SEQ ID NO: 780302 - DNA, 33 bp, Homo sapien
cttggttaccaaagacgctcacatctttaattt

SEQ ID NO: 780303 - DNA, 33 bp, Homo sapien
actagaatttgaactcacctacattgaacattc

SEQ ID NO: 780304 - DNA, 33 bp, Homo sapien
actagaatttgaactcgcctacattgaacattc

SEQ ID NO: 780305 - DNA, 33 bp, Homo sapien
ttaaacttatcctaaaatggctattaggttatt

SEQ ID NO: 780306 - DNA, 33 bp, Homo sapien
ttaaacttatcctaaagtggctattaggttatt

SEQ ID NO: 780307 - DNA, 33 bp, Homo sapien
tggtgtggattttttaagcttttttgtgcatat

SEQ ID NO: 780308 - DNA, 33 bp, Homo sapien
tggtgtggattttttaggcttttttgtgcatat

SEQ ID NO: 780309 - DNA, 33 bp, Homo sapien
aattggtaacttctgacggtgctgtgaggtttt

SEQ ID NO: 780310 - DNA, 33 bp, Homo sapien
aattggtaacttctgatggtgctgtgaggtttt

SEQ ID NO: 780311 - DNA, 33 bp, Homo sapien
ttgtgtgtgtattacaacaatcttgggggcaga

SEQ ID NO: 780312 - DNA, 33 bp, Homo sapien
ttgtgtgtgtattacagcaatcttgggggcaga

SEQ ID NO: 780313 - DNA, 33 bp, Homo sapien
ttgatttctagttttacgctattatggtcagaa

SEQ ID NO: 780314 - DNA, 33 bp, Homo sapien
ttgatttctagttttatgctattatggtcagaa

SEQ ID NO: 780315 - DNA, 33 bp, Homo sapien
agatacttcatgcaaacgtaaccaggggagaga

SEQ ID NO: 780316 - DNA, 33 bp, Homo sapien
agatacttcatgcaaaggtaaccaggggagaga

SEQ ID NO: 780317 - DNA, 33 bp, Homo sapien
cccggtgaccatttcaggtatctaaaacagtat

SEQ ID NO: 780318 - DNA, 33 bp, Homo sapien
cccggtgaccatttcatgtatctaaaacagtat

SEQ ID NO: 780319 - DNA, 33 bp, Homo sapien
cctactcactcttcaaaccattagaatcggccc

SEQ ID NO: 780320 - DNA, 33 bp, Homo sapien
cctactcactcttcaacccattagaatcggccc

SEQ ID NO: 780321 - DNA, 33 bp, Homo sapien
atgacgatatcactgccctcgtattcaacaatg

SEQ ID NO: 780322 - DNA, 33 bp, Homo sapien
atgacgatatcactgctctcgtattcaacaatg

SEQ ID NO: 780323 - DNA, 33 bp, Homo sapien
aattttttaaatgggcaaaaggcttgaaatgtc

SEQ ID NO: 780324 - DNA, 33 bp, Homo sapien
aattttttaaatgggcgaaaggcttgaaatgtc

SEQ ID NO: 780325 - DNA, 33 bp, Homo sapien
taaaaatactgtcaaaaccaatggttaactaca

SEQ ID NO: 780326 - DNA, 33 bp, Homo sapien
taaaaatactgtcaaacccaatggttaactaca

SEQ ID NO: 780327 - DNA, 33 bp, Homo sapien
ttcaaatcagaggttcaataattaggtaaagca

SEQ ID NO: 780328 - DNA, 33 bp, Homo sapien
ttcaaatcagaggttccataattaggtaaagca

SEQ ID NO: 780329 - DNA, 33 bp, Homo sapien
aacagagttgcacagccagtagatggtgaggtg

SEQ ID NO: 780330 - DNA, 33 bp, Homo sapien
aacagagttgcacagctagtagatggtgaggtg

SEQ ID NO: 780331 - DNA, 33 bp, Homo sapien
aaaaaaaaaagaatacaacctgctttgtttaga

SEQ ID NO: 780332 - DNA, 33 bp, Homo sapien
aaaaaaaaaagaatacgacctgctttgtttaga

SEQ ID NO: 780333 - DNA, 33 bp, Homo sapien
agcatattattctcacagcaaaaggcagaagag

SEQ ID NO: 780334 - DNA, 33 bp, Homo sapien
agcatattattctcacggcaaaaggcagaagag

SEQ ID NO: 780335 - DNA, 33 bp, Homo sapien
ctagcctcaggtcacaaagagaaataggatcca

SEQ ID NO: 780336 - DNA, 33 bp, Homo sapien
ctagcctcaggtcacagagagaaataggatcca

SEQ ID NO: 780337 - DNA, 33 bp, Homo sapien
tagaatgtttaatttcacttctctcacttgaat

SEQ ID NO: 780338 - DNA, 33 bp, Homo sapien
tagaatgtttaatttcgcttctctcacttgaat

SEQ ID NO: 780339 - DNA, 33 bp, Homo sapien
taggttgtccatattgaagctggattatgggat

SEQ ID NO: 780340 - DNA, 33 bp, Homo sapien
taggttgtccatattgcagctggattatgggat

SEQ ID NO: 780341 - DNA, 33 bp, Homo sapien
taaccatgttaaaacactcatatttcaagaaaa

SEQ ID NO: 780342 - DNA, 33 bp, Homo sapien
taaccatgttaaaacattcatatttcaagaaaa

SEQ ID NO: 780343 - DNA, 33 bp, Homo sapien
ttacccaggttacttacgaaaagtgaataggtt

SEQ ID NO: 780344 - DNA, 33 bp, Homo sapien
ttacccaggttacttatgaaaagtgaataggtt

SEQ ID NO: 780345 - DNA, 33 bp, Homo sapien
ctgagctctttagaggccaaagctgacacatgg

SEQ ID NO: 780346 - DNA, 33 bp, Homo sapien
ctgagctctttagaggtcaaagctgacacatgg

SEQ ID NO: 780347 - DNA, 33 bp, Homo sapien
caaatattgacgaaaaagtatccttggcaaagt

SEQ ID NO: 780348 - DNA, 33 bp, Homo sapien
caaatattgacgaaaacgtatccttggcaaagt

SEQ ID NO: 780349 - DNA, 33 bp, Homo sapien
tttaagtttgttgccaccataattattgttcat

SEQ ID NO: 780350 - DNA, 33 bp, Homo sapien
tttaagtttgttgccagcataattattgttcat

SEQ ID NO: 780351 - DNA, 33 bp, Homo sapien
ccagagagcaaaggtcactttcaaatgaacaat

SEQ ID NO: 780352 - DNA, 33 bp, Homo sapien
ccagagagcaaaggtcgctttcaaatgaacaat

SEQ ID NO: 780353 - DNA, 33 bp, Homo sapien
tgcctaaaaaaaactgaatctgaatctaatcaa

SEQ ID NO: 780354 - DNA, 33 bp, Homo sapien
tgcctaaaaaaaactgcatctgaatctaatcaa

SEQ ID NO: 780355 - DNA, 33 bp, Homo sapien
actttccagacttccaacctggcatccaagagc

SEQ ID NO: 780356 - DNA, 33 bp, Homo sapien
actttccagacttccagcctggcatccaagagc

SEQ ID NO: 780357 - DNA, 33 bp, Homo sapien
tgcccatatcttttgcccttttttctattggat

SEQ ID NO: 780358 - DNA, 33 bp, Homo sapien
tgcccatatcttttgcgcttttttctattggat

SEQ ID NO: 780359 - DNA, 33 bp, Homo sapien
aaaaagagtaatagtcacagtctgctaattcca

SEQ ID NO: 780360 - DNA, 33 bp, Homo sapien
aaaaagagtaatagtcgcagtctgctaattcca

SEQ ID NO: 780361 - DNA, 33 bp, Homo sapien
tgttctcaagcttccaataagaatttctgcact

SEQ ID NO: 780362 - DNA, 33 bp, Homo sapien
tgttctcaagcttccagtaagaatttctgcact

SEQ ID NO: 780363 - DNA, 33 bp, Homo sapien
agccatatactcaagagaaaagagctcatgtat

SEQ ID NO: 780364 - DNA, 33 bp, Homo sapien
agccatatactcaagataaaagagctcatgtat

SEQ ID NO: 780365 - DNA, 33 bp, Homo sapien
taaatgtgacaactcaataagttttttgccttg

SEQ ID NO: 780366 - DNA, 33 bp, Homo sapien
taaatgtgacaactcagtaagttttttgccttg

SEQ ID NO: 780367 - DNA, 33 bp, Homo sapien
gattctcagaaccgcaaaataggagctacaagg

SEQ ID NO: 780368 - DNA, 33 bp, Homo sapien
gattctcagaaccgcagaataggagctacaagg

SEQ ID NO: 780369 - DNA, 33 bp, Homo sapien
acctggttatcaaagacggcaaagaccaaaaga

SEQ ID NO: 780370 - DNA, 33 bp, Homo sapien
acctggttatcaaagatggcaaagaccaaaaga

SEQ ID NO: 780371 - DNA, 33 bp, Homo sapien
catgcctggtgtctccaagtccagagatgctct

SEQ ID NO: 780372 - DNA, 33 bp, Homo sapien
catgcctggtgtctccgagtccagagatgctct

SEQ ID NO: 780373 - DNA, 33 bp, Homo sapien
acactgtctagagaaagactttcttgttttgtc

SEQ ID NO: 780374 - DNA, 33 bp, Homo sapien
acactgtctagagaaatactttcttgttttgtc

SEQ ID NO: 780375 - DNA, 33 bp, Homo sapien
ttggagagatgataaaaatttcacaaagctaat

SEQ ID NO: 780376 - DNA, 33 bp, Homo sapien
ttggagagatgataaacatttcacaaagctaat

SEQ ID NO: 780377 - DNA, 33 bp, Homo sapien
ctttcactctacctccaaataggatccacgctt

SEQ ID NO: 780378 - DNA, 33 bp, Homo sapien
ctttcactctacctccgaataggatccacgctt

SEQ ID NO: 780379 - DNA, 33 bp, Homo sapien
gctcttatccatattacagaccagaagggcaaa

SEQ ID NO: 780380 - DNA, 33 bp, Homo sapien
gctcttatccatattatagaccagaagggcaaa

SEQ ID NO: 780381 - DNA, 33 bp, Homo sapien
atttcctcttgtcttcgccatccggtgacaccc

SEQ ID NO: 780382 - DNA, 33 bp, Homo sapien
atttcctcttgtcttctccatccggtgacaccc

SEQ ID NO: 780383 - DNA, 33 bp, Homo sapien
cctctctctgcttttcgaactctcacacctcct

SEQ ID NO: 780384 - DNA, 33 bp, Homo sapien
cctctctctgcttttctaactctcacacctcct

SEQ ID NO: 780385 - DNA, 33 bp, Homo sapien
gaatgatgctgtagaaaaaattcagataccaag

SEQ ID NO: 780386 - DNA, 33 bp, Homo sapien
gaatgatgctgtagaagaaattcagataccaag

SEQ ID NO: 780387 - DNA, 33 bp, Homo sapien
tatttaactgctaccacatattcaaattcatga

SEQ ID NO: 780388 - DNA, 33 bp, Homo sapien
tatttaactgctaccatatattcaaattcatga

SEQ ID NO: 780389 - DNA, 33 bp, Homo sapien
tctagcgcttgtgccacgtaagggctgatgaac

SEQ ID NO: 780390 - DNA, 33 bp, Homo sapien
tctagcgcttgtgccatgtaagggctgatgaac

SEQ ID NO: 780391 - DNA, 33 bp, Homo sapien
aataattataggaaagaaattcagcagtgaaat

SEQ ID NO: 780392 - DNA, 33 bp, Homo sapien
aataattataggaaaggaattcagcagtgaaat

SEQ ID NO: 780393 - DNA, 33 bp, Homo sapien
tggaaaaacttcaccaatagacctgctcagtgc

SEQ ID NO: 780394 - DNA, 33 bp, Homo sapien
tggaaaaacttcaccagtagacctgctcagtgc

SEQ ID NO: 780395 - DNA, 33 bp, Homo sapien
aatctgagtgggctgaatcaatcagtttaaagg

SEQ ID NO: 780396 - DNA, 33 bp, Homo sapien
aatctgagtgggctgattcaatcagtttaaagg

SEQ ID NO: 780397 - DNA, 33 bp, Homo sapien
catcacctttaaattccagatctccaaaatcca

SEQ ID NO: 780398 - DNA, 33 bp, Homo sapien
catcacctttaaattcgagatctccaaaatcca

SEQ ID NO: 780399 - DNA, 33 bp, Homo sapien
acaaggtagagtctgacagtcaggagcctcagc

SEQ ID NO: 780400 - DNA, 33 bp, Homo sapien
acaaggtagagtctgatagtcaggagcctcagc

SEQ ID NO: 780401 - DNA, 33 bp, Homo sapien
tagcccttactctagaacaactttagtcacatt

SEQ ID NO: 780402 - DNA, 33 bp, Homo sapien
tagcccttactctagagcaactttagtcacatt

SEQ ID NO: 780403 - DNA, 33 bp, Homo sapien
ctttagtcacattctacggcttgacctttttag

SEQ ID NO: 780404 - DNA, 33 bp, Homo sapien
ctttagtcacattctatggcttgacctttttag

SEQ ID NO: 780405 - DNA, 33 bp, Homo sapien
tgatggcatggatagacgtggatgaatggcaaa

SEQ ID NO: 780406 - DNA, 33 bp, Homo sapien
tgatggcatggatagatgtggatgaatggcaaa

SEQ ID NO: 780407 - DNA, 33 bp, Homo sapien
caattttcctatacctaagaatgcctttgcttt

SEQ ID NO: 780408 - DNA, 33 bp, Homo sapien
caattttcctatacctgagaatgcctttgcttt

SEQ ID NO: 780409 - DNA, 33 bp, Homo sapien
ttttggcctgaatctcacagctgccaagggtga

SEQ ID NO: 780410 - DNA, 33 bp, Homo sapien
ttttggcctgaatctcgcagctgccaagggtga

SEQ ID NO: 780411 - DNA, 33 bp, Homo sapien
ttagggaaaattcctcacttattagacttaatt

SEQ ID NO: 780412 - DNA, 33 bp, Homo sapien
ttagggaaaattcctcgcttattagacttaatt

SEQ ID NO: 780413 - DNA, 33 bp, Homo sapien
tttccctaagtttgccaatgaaatgttcaaatt

SEQ ID NO: 780414 - DNA, 33 bp, Homo sapien
tttccctaagtttgcctatgaaatgttcaaatt

SEQ ID NO: 780415 - DNA, 33 bp, Homo sapien
acctggttggattgtacactagagagtgatgag

SEQ ID NO: 780416 - DNA, 33 bp, Homo sapien
acctggttggattgtagactagagagtgatgag

SEQ ID NO: 780417 - DNA, 33 bp, Homo sapien
gtcagatgcattatgcaatgttctgtgatatta

SEQ ID NO: 780418 - DNA, 33 bp, Homo sapien
gtcagatgcattatgctatgttctgtgatatta

SEQ ID NO: 780419 - DNA, 33 bp, Homo sapien
aatatttcatagtatacagatgccacaatttct

SEQ ID NO: 780420 - DNA, 33 bp, Homo sapien
aatatttcatagtatatagatgccacaatttct

SEQ ID NO: 780421 - DNA, 33 bp, Homo sapien
cccaggaaagtgaggagagatgccttttgtgga

SEQ ID NO: 780422 - DNA, 33 bp, Homo sapien
cccaggaaagtgaggatagatgccttttgtgga

SEQ ID NO: 780423 - DNA, 33 bp, Homo sapien
cagtctagccttcaaaaccctccacaaaaggca

SEQ ID NO: 780424 - DNA, 33 bp, Homo sapien
cagtctagccttcaaagccctccacaaaaggca

SEQ ID NO: 780425 - DNA, 33 bp, Homo sapien
agtttaattttaatggcacttgcaacgtattcc

SEQ ID NO: 780426 - DNA, 33 bp, Homo sapien
agtttaattttaatggtacttgcaacgtattcc

SEQ ID NO: 780427 - DNA, 33 bp, Homo sapien
acatgaattctgctaaaaattaaagcgagaaca

SEQ ID NO: 780428 - DNA, 33 bp, Homo sapien
acatgaattctgctaacaattaaagcgagaaca

SEQ ID NO: 780429 - DNA, 33 bp, Homo sapien
tagatactaatctccaagagaggactcatttaa

SEQ ID NO: 780430 - DNA, 33 bp, Homo sapien
tagatactaatctccaggagaggactcatttaa

SEQ ID NO: 780431 - DNA, 33 bp, Homo sapien
acactattaccagctacggtccctcttctacca

SEQ ID NO: 780432 - DNA, 33 bp, Homo sapien
acactattaccagctatggtccctcttctacca

SEQ ID NO: 780433 - DNA, 33 bp, Homo sapien
gtacactatttattgacgtaccagatggtgtga

SEQ ID NO: 780434 - DNA, 33 bp, Homo sapien
gtacactatttattgaggtaccagatggtgtga

SEQ ID NO: 780435 - DNA, 33 bp, Homo sapien
gcctttgcagattccaatgatgagaattttcat

SEQ ID NO: 780436 - DNA, 33 bp, Homo sapien
gcctttgcagattccagtgatgagaattttcat

SEQ ID NO: 780437 - DNA, 33 bp, Homo sapien
gactttaactgctgttcaaaatccatccactaa

SEQ ID NO: 780438 - DNA, 33 bp, Homo sapien
gactttaactgctgttgaaaatccatccactaa

SEQ ID NO: 780439 - DNA, 33 bp, Homo sapien
cggtcctctgtcttcaacctgaactgtgtgata

SEQ ID NO: 780440 - DNA, 33 bp, Homo sapien
cggtcctctgtcttcagcctgaactgtgtgata

SEQ ID NO: 780441 - DNA, 33 bp, Homo sapien
agcacagtaattgggaatacaatcagtggtaat

SEQ ID NO: 780442 - DNA, 33 bp, Homo sapien
agcacagtaattgggagtacaatcagtggtaat

SEQ ID NO: 780443 - DNA, 33 bp, Homo sapien
ttgtaaatatatcataaaggttggctgttacta

SEQ ID NO: 780444 - DNA, 33 bp, Homo sapien
ttgtaaatatatcatagaggttggctgttacta

SEQ ID NO: 780445 - DNA, 33 bp, Homo sapien
gctgacagtacccctacggtggtgtttaacatg

SEQ ID NO: 780446 - DNA, 33 bp, Homo sapien
gctgacagtacccctatggtggtgtttaacatg

SEQ ID NO: 780447 - DNA, 33 bp, Homo sapien
tttcacatattgtaacaagcgtatctttccaca

SEQ ID NO: 780448 - DNA, 33 bp, Homo sapien
tttcacatattgtaactagcgtatctttccaca

SEQ ID NO: 780449 - DNA, 33 bp, Homo sapien
acaaaaaaataatttaacagatggcacttcatg

SEQ ID NO: 780450 - DNA, 33 bp, Homo sapien
acaaaaaaataatttaccagatggcacttcatg

SEQ ID NO: 780451 - DNA, 33 bp, Homo sapien
atactataacctcacacgaatcttttcctgaat

SEQ ID NO: 780452 - DNA, 33 bp, Homo sapien
atactataacctcacatgaatcttttcctgaat

SEQ ID NO: 780453 - DNA, 33 bp, Homo sapien
gaacaatgatcattaaaaagacaggaaacaaca

SEQ ID NO: 780454 - DNA, 33 bp, Homo sapien
gaacaatgatcattaagaagacaggaaacaaca

SEQ ID NO: 780455 - DNA, 33 bp, Homo sapien
ggcgacagagttagaacctttctcaaataaaca

SEQ ID NO: 780456 - DNA, 33 bp, Homo sapien
ggcgacagagttagaatctttctcaaataaaca

SEQ ID NO: 780457 - DNA, 33 bp, Homo sapien
aatatatataaaggacagagtacatttatggaa

SEQ ID NO: 780458 - DNA, 33 bp, Homo sapien
aatatatataaaggacggagtacatttatggaa

SEQ ID NO: 780459 - DNA, 33 bp, Homo sapien
ccttttatttgtccacagcatccgtagtgttgt

SEQ ID NO: 780460 - DNA, 33 bp, Homo sapien
ccttttatttgtccacggcatccgtagtgttgt

SEQ ID NO: 780461 - DNA, 33 bp, Homo sapien
cacagcccagcactcccaatgaacctcctgaat

SEQ ID NO: 780462 - DNA, 33 bp, Homo sapien
cacagcccagcactccgaatgaacctcctgaat

SEQ ID NO: 780463 - DNA, 33 bp, Homo sapien
agcacttttagattcaacacaaaattgaatgga

SEQ ID NO: 780464 - DNA, 33 bp, Homo sapien
agcacttttagattcatcacaaaattgaatgga

SEQ ID NO: 780465 - DNA, 33 bp, Homo sapien
gcaggcctctgaaatacgacaacagctgtccaa

SEQ ID NO: 780466 - DNA, 33 bp, Homo sapien
gcaggcctctgaaatatgacaacagctgtccaa

SEQ ID NO: 780467 - DNA, 33 bp, Homo sapien
actccttagcagtggaagctttacaaaatagaa

SEQ ID NO: 780468 - DNA, 33 bp, Homo sapien
actccttagcagtggatgctttacaaaatagaa

SEQ ID NO: 780469 - DNA, 33 bp, Homo sapien
tcattgtaacctttgtcaattttgtaactttgg

SEQ ID NO: 780470 - DNA, 33 bp, Homo sapien
tcattgtaacctttgtgaattttgtaactttgg

SEQ ID NO: 780471 - DNA, 33 bp, Homo sapien
aaagacgagtcttccacgaaacatggatgggac

SEQ ID NO: 780472 - DNA, 33 bp, Homo sapien
aaagacgagtcttccaggaaacatggatgggac

SEQ ID NO: 780473 - DNA, 33 bp, Homo sapien
cataatagcaataagaaagcagtaagaagagag

SEQ ID NO: 780474 - DNA, 33 bp, Homo sapien
cataatagcaataagagagcagtaagaagagag

SEQ ID NO: 780475 - DNA, 33 bp, Homo sapien
gttaaggtctagcacactcaatttgcttgctct

SEQ ID NO: 780476 - DNA, 33 bp, Homo sapien
gttaaggtctagcacagtcaatttgcttgctct

SEQ ID NO: 780477 - DNA, 33 bp, Homo sapien
ttctaggttagttcataaaagcctgttctaccc

SEQ ID NO: 780478 - DNA, 33 bp, Homo sapien
ttctaggttagttcatgaaagcctgttctaccc

SEQ ID NO: 780479 - DNA, 33 bp, Homo sapien
cctcagtgtagttcacaactaaggcttttcagt

SEQ ID NO: 780480 - DNA, 33 bp, Homo sapien
cctcagtgtagttcacgactaaggcttttcagt

SEQ ID NO: 780481 - DNA, 33 bp, Homo sapien
taattaaaaacatggaaacagagtcagagtgtg

SEQ ID NO: 780482 - DNA, 33 bp, Homo sapien
taattaaaaacatggacacagagtcagagtgtg

SEQ ID NO: 780483 - DNA, 33 bp, Homo sapien
ataataaccttttatacctcaaaggcagttttt

SEQ ID NO: 780484 - DNA, 33 bp, Homo sapien
ataataaccttttatatctcaaaggcagttttt

SEQ ID NO: 780485 - DNA, 33 bp, Homo sapien
aagattcagaaaaaacgatacttgtgcagggtt

SEQ ID NO: 780486 - DNA, 33 bp, Homo sapien
aagattcagaaaaaactatacttgtgcagggtt

SEQ ID NO: 780487 - DNA, 33 bp, Homo sapien
ttgaaggacaaaaaagactagcatgaattccat

SEQ ID NO: 780488 - DNA, 33 bp, Homo sapien
ttgaaggacaaaaaaggctagcatgaattccat

SEQ ID NO: 780489 - DNA, 33 bp, Homo sapien
tttgtcatatagtaaactaggccccaaattaac

SEQ ID NO: 780490 - DNA, 33 bp, Homo sapien
tttgtcatatagtaaattaggccccaaattaac

SEQ ID NO: 780491 - DNA, 33 bp, Homo sapien
cgtcagtttccatgccaaagcttaagtgtcaca

SEQ ID NO: 780492 - DNA, 33 bp, Homo sapien
cgtcagtttccatgcctaagcttaagtgtcaca

SEQ ID NO: 780493 - DNA, 33 bp, Homo sapien
atctctacagtctaaaaagtgaagaaaagttag

SEQ ID NO: 780494 - DNA, 33 bp, Homo sapien
atctctacagtctaaacagtgaagaaaagttag

SEQ ID NO: 780495 - DNA, 33 bp, Homo sapien
ctgtttctacaggatacagtgctaccagttctg

SEQ ID NO: 780496 - DNA, 33 bp, Homo sapien
ctgtttctacaggatagagtgctaccagttctg

SEQ ID NO: 780497 - DNA, 33 bp, Homo sapien
tcccttgccgtcctaacccggggatcaggggtc

SEQ ID NO: 780498 - DNA, 33 bp, Homo sapien
tcccttgccgtcctaatccggggatcaggggtc

SEQ ID NO: 780499 - DNA, 33 bp, Homo sapien
gaagctgaaacgactcaacctctaccagggtaa

SEQ ID NO: 780500 - DNA, 33 bp, Homo sapien
gaagctgaaacgactcgacctctaccagggtaa

SEQ ID NO: 780501 - DNA, 33 bp, Homo sapien
tatctagcagttacaaggagccaacagcaaata

SEQ ID NO: 780502 - DNA, 33 bp, Homo sapien
tatctagcagttacaatgagccaacagcaaata

SEQ ID NO: 780503 - DNA, 33 bp, Homo sapien
gttagtaagtactatgcagagaccactggcaag

SEQ ID NO: 780504 - DNA, 33 bp, Homo sapien
gttagtaagtactatgtagagaccactggcaag

SEQ ID NO: 780505 - DNA, 33 bp, Homo sapien
gtgagagacttggttcccactggattaaaaagt

SEQ ID NO: 780506 - DNA, 33 bp, Homo sapien
gtgagagacttggttctcactggattaaaaagt

SEQ ID NO: 780507 - DNA, 33 bp, Homo sapien
acatgaaattgggcaccagggaagctcacctac

SEQ ID NO: 780508 - DNA, 33 bp, Homo sapien
acatgaaattgggcacgagggaagctcacctac

SEQ ID NO: 780509 - DNA, 33 bp, Homo sapien
cacaaagagctcctaacagaagccagctagaga

SEQ ID NO: 780510 - DNA, 33 bp, Homo sapien
cacaaagagctcctaatagaagccagctagaga

SEQ ID NO: 780511 - DNA, 33 bp, Homo sapien
taaataagttcaaaagcaggagatagtggctct

SEQ ID NO: 780512 - DNA, 33 bp, Homo sapien
taaataagttcaaaagtaggagatagtggctct

SEQ ID NO: 780513 - DNA, 33 bp, Homo sapien
tatccgactttacccaatgctggtgtttgtcaa

SEQ ID NO: 780514 - DNA, 33 bp, Homo sapien
tatccgactttacccagtgctggtgtttgtcaa

SEQ ID NO: 780515 - DNA, 33 bp, Homo sapien
ccaggagtgaagacacaaagaacaacagaaaac

SEQ ID NO: 780516 - DNA, 33 bp, Homo sapien
ccaggagtgaagacacgaagaacaacagaaaac

SEQ ID NO: 780517 - DNA, 33 bp, Homo sapien
ctgagtttgagttcacaacaggcctgtgttcct

SEQ ID NO: 780518 - DNA, 33 bp, Homo sapien
ctgagtttgagttcacgacaggcctgtgttcct

SEQ ID NO: 780519 - DNA, 33 bp, Homo sapien
attttgatacctgcaagtaaacattttattaat

SEQ ID NO: 780520 - DNA, 33 bp, Homo sapien
attttgatacctgcaattaaacattttattaat

SEQ ID NO: 780521 - DNA, 33 bp, Homo sapien
attgctgtgtataccacctcaaggaacaagcca

SEQ ID NO: 780522 - DNA, 33 bp, Homo sapien
attgctgtgtataccatctcaaggaacaagcca

SEQ ID NO: 780523 - DNA, 33 bp, Homo sapien
aagaagaaatgcgagcaaaggtggggaaaagcc

SEQ ID NO: 780524 - DNA, 33 bp, Homo sapien
aagaagaaatgcgagcgaaggtggggaaaagcc

SEQ ID NO: 780525 - DNA, 33 bp, Homo sapien
cacgaggacagcttgaaggtaatggctcccatg

SEQ ID NO: 780526 - DNA, 33 bp, Homo sapien
cacgaggacagcttgagggtaatggctcccatg

SEQ ID NO: 780527 - DNA, 33 bp, Homo sapien
ctcttcaaatctctgaaagcctatcataaaaat

SEQ ID NO: 780528 - DNA, 33 bp, Homo sapien
ctcttcaaatctctgagagcctatcataaaaat

SEQ ID NO: 780529 - DNA, 33 bp, Homo sapien
ctttgggagaatcagaactgttttcaatatgac

SEQ ID NO: 780530 - DNA, 33 bp, Homo sapien
ctttgggagaatcagatctgttttcaatatgac

SEQ ID NO: 780531 - DNA, 33 bp, Homo sapien
ttcttggaaacaagcccacctttcctactaacc

SEQ ID NO: 780532 - DNA, 33 bp, Homo sapien
ttcttggaaacaagcctacctttcctactaacc

SEQ ID NO: 780533 - DNA, 33 bp, Homo sapien
gagtcaaaactcaataaaataacaaatcagtgg

SEQ ID NO: 780534 - DNA, 33 bp, Homo sapien
gagtcaaaactcaatacaataacaaatcagtgg

SEQ ID NO: 780535 - DNA, 33 bp, Homo sapien
agggaaattttcagcacaattttaccaaaaagg

SEQ ID NO: 780536 - DNA, 33 bp, Homo sapien
agggaaattttcagcagaattttaccaaaaagg

SEQ ID NO: 780537 - DNA, 33 bp, Homo sapien
ctgtctcagatctcaaactgtgtgctgggagaa

SEQ ID NO: 780538 - DNA, 33 bp, Homo sapien
ctgtctcagatctcaacctgtgtgctgggagaa

SEQ ID NO: 780539 - DNA, 33 bp, Homo sapien
caagattcaaagactcccaaactcatgctagtt

SEQ ID NO: 780540 - DNA, 33 bp, Homo sapien
caagattcaaagactctcaaactcatgctagtt

SEQ ID NO: 780541 - DNA, 33 bp, Homo sapien
ttttgactttttggtccattaggtttgcttttc

SEQ ID NO: 780542 - DNA, 33 bp, Homo sapien
ttttgactttttggtctattaggtttgcttttc

SEQ ID NO: 780543 - DNA, 33 bp, Homo sapien
tcatttcttctcccaaagagtgacaccgtccaa

SEQ ID NO: 780544 - DNA, 33 bp, Homo sapien
tcatttcttctcccaatgagtgacaccgtccaa

SEQ ID NO: 780545 - DNA, 33 bp, Homo sapien
agaattacaaaaaggaatatgtttccactccat

SEQ ID NO: 780546 - DNA, 33 bp, Homo sapien
agaattacaaaaaggagtatgtttccactccat

SEQ ID NO: 780547 - DNA, 33 bp, Homo sapien
tgcaccaaacacccagaacctaatgcttgtggt

SEQ ID NO: 780548 - DNA, 33 bp, Homo sapien
tgcaccaaacacccagcacctaatgcttgtggt

SEQ ID NO: 780549 - DNA, 33 bp, Homo sapien
ccaccagtctagtaaacgatagagctggaatca

SEQ ID NO: 780550 - DNA, 33 bp, Homo sapien
ccaccagtctagtaaatgatagagctggaatca

SEQ ID NO: 780551 - DNA, 33 bp, Homo sapien
tgaaatgtttaagtaacgaactgtgactgtgaa

SEQ ID NO: 780552 - DNA, 33 bp, Homo sapien
tgaaatgtttaagtaatgaactgtgactgtgaa

SEQ ID NO: 780553 - DNA, 33 bp, Homo sapien
aaatattaattagccaatgaagtggagatactg

SEQ ID NO: 780554 - DNA, 33 bp, Homo sapien
aaatattaattagccagtgaagtggagatactg

SEQ ID NO: 780555 - DNA, 33 bp, Homo sapien
gtattatatatttcaaaatagctggaaaacagg

SEQ ID NO: 780556 - DNA, 33 bp, Homo sapien
gtattatatatttcaagatagctggaaaacagg

SEQ ID NO: 780557 - DNA, 33 bp, Homo sapien
tttagtgggtagtagcaagtaacagtttccagc

SEQ ID NO: 780558 - DNA, 33 bp, Homo sapien
tttagtgggtagtagccagtaacagtttccagc

SEQ ID NO: 780559 - DNA, 33 bp, Homo sapien
gcccagtcaagcctcaagatgataatgcatctt

SEQ ID NO: 780560 - DNA, 33 bp, Homo sapien
gcccagtcaagcctcaggatgataatgcatctt

SEQ ID NO: 780561 - DNA, 33 bp, Homo sapien
ccttcaggcgaggggacggacatatcactggac

SEQ ID NO: 780562 - DNA, 33 bp, Homo sapien
ccttcaggcgaggggatggacatatcactggac

SEQ ID NO: 780563 - DNA, 33 bp, Homo sapien
agatcctcaggaaacacccactttttatgcaca

SEQ ID NO: 780564 - DNA, 33 bp, Homo sapien
agatcctcaggaaacatccactttttatgcaca

SEQ ID NO: 780565 - DNA, 33 bp, Homo sapien
caaaagctaagacaggacctgagaagctctggt

SEQ ID NO: 780566 - DNA, 33 bp, Homo sapien
caaaagctaagacagggcctgagaagctctggt

SEQ ID NO: 780567 - DNA, 33 bp, Homo sapien
ttaggtggctattcaacaaacagagtgagagat

SEQ ID NO: 780568 - DNA, 33 bp, Homo sapien
ttaggtggctattcaataaacagagtgagagat

SEQ ID NO: 780569 - DNA, 33 bp, Homo sapien
tatttcaaatggtccacgaaataaaacagaaat

SEQ ID NO: 780570 - DNA, 33 bp, Homo sapien
tatttcaaatggtccatgaaataaaacagaaat

SEQ ID NO: 780571 - DNA, 33 bp, Homo sapien
gactttaccgttaagcacccagaagtgagaacc

SEQ ID NO: 780572 - DNA, 33 bp, Homo sapien
gactttaccgttaagcgcccagaagtgagaacc

SEQ ID NO: 780573 - DNA, 33 bp, Homo sapien
agaggatgaaatacacacaccaggagtaaagtg

SEQ ID NO: 780574 - DNA, 33 bp, Homo sapien
agaggatgaaatacacgcaccaggagtaaagtg

SEQ ID NO: 780575 - DNA, 33 bp, Homo sapien
aaattgaaccatttagcccatgagccttgttaa

SEQ ID NO: 780576 - DNA, 33 bp, Homo sapien
aaattgaaccatttagtccatgagccttgttaa

SEQ ID NO: 780577 - DNA, 33 bp, Homo sapien
agctctaatccacaataaaactctgctggttct

SEQ ID NO: 780578 - DNA, 33 bp, Homo sapien
agctctaatccacaatcaaactctgctggttct

SEQ ID NO: 780579 - DNA, 33 bp, Homo sapien
aaagtcctggtctgtacgtaagtggttacacaa

SEQ ID NO: 780580 - DNA, 33 bp, Homo sapien
aaagtcctggtctgtatgtaagtggttacacaa

SEQ ID NO: 780581 - DNA, 33 bp, Homo sapien
ggtgacacttaatgaactggaattgttctcctg

SEQ ID NO: 780582 - DNA, 33 bp, Homo sapien
ggtgacacttaatgaattggaattgttctcctg

SEQ ID NO: 780583 - DNA, 33 bp, Homo sapien
ctcaaaacctgcttgccgacttgaagagactgg

SEQ ID NO: 780584 - DNA, 33 bp, Homo sapien
ctcaaaacctgcttgctgacttgaagagactgg

SEQ ID NO: 780585 - DNA, 33 bp, Homo sapien
tccccaccgggacaggaatattttgaggaagtc

SEQ ID NO: 780586 - DNA, 33 bp, Homo sapien
tccccaccgggacaggtatattttgaggaagtc

SEQ ID NO: 780587 - DNA, 33 bp, Homo sapien
aattagaaagacaaaaactatctgaacatagga

SEQ ID NO: 780588 - DNA, 33 bp, Homo sapien
aattagaaagacaaaagctatctgaacatagga

SEQ ID NO: 780589 - DNA, 33 bp, Homo sapien
gctctcaaacagcagaaaaaaatgagtctattc

SEQ ID NO: 780590 - DNA, 33 bp, Homo sapien
gctctcaaacagcagagaaaaatgagtctattc

SEQ ID NO: 780591 - DNA, 33 bp, Homo sapien
tgttgtgactagaaccggggccaatgattttag

SEQ ID NO: 780592 - DNA, 33 bp, Homo sapien
tgttgtgactagaacctgggccaatgattttag

SEQ ID NO: 780593 - DNA, 33 bp, Homo sapien
ttgaaaacaaagtgtcacattaccaaaataaca

SEQ ID NO: 780594 - DNA, 33 bp, Homo sapien
ttgaaaacaaagtgtcgcattaccaaaataaca

SEQ ID NO: 780595 - DNA, 33 bp, Homo sapien
gatcatagcaccaatacagctgagtgtagtcct

SEQ ID NO: 780596 - DNA, 33 bp, Homo sapien
gatcatagcaccaatatagctgagtgtagtcct

SEQ ID NO: 780597 - DNA, 33 bp, Homo sapien
aatgtaacataactcaaaatggtgctaacagct

SEQ ID NO: 780598 - DNA, 33 bp, Homo sapien
aatgtaacataactcacaatggtgctaacagct

SEQ ID NO: 780599 - DNA, 33 bp, Homo sapien
tgataattacatagaaccaacaggaacaacttg

SEQ ID NO: 780600 - DNA, 33 bp, Homo sapien
tgataattacatagaatcaacaggaacaacttg

SEQ ID NO: 780601 - DNA, 33 bp, Homo sapien
gaccacccctccataaaagaacgtaacagggaa

SEQ ID NO: 780602 - DNA, 33 bp, Homo sapien
gaccacccctccataatagaacgtaacagggaa

SEQ ID NO: 780603 - DNA, 33 bp, Homo sapien
accatgtggatgttacaatcccaacaccatgct

SEQ ID NO: 780604 - DNA, 33 bp, Homo sapien
accatgtggatgttacgatcccaacaccatgct

SEQ ID NO: 780605 - DNA, 33 bp, Homo sapien
cctgtatcataagtaacaacggaatcatcaaat

SEQ ID NO: 780606 - DNA, 33 bp, Homo sapien
cctgtatcataagtaataacggaatcatcaaat

SEQ ID NO: 780607 - DNA, 33 bp, Homo sapien
ggaattagcggatctcacaaccacactctagtc

SEQ ID NO: 780608 - DNA, 33 bp, Homo sapien
ggaattagcggatctcgcaaccacactctagtc

SEQ ID NO: 780609 - DNA, 33 bp, Homo sapien
agttaatgactagtaaatattgaacgtgtattg

SEQ ID NO: 780610 - DNA, 33 bp, Homo sapien
agttaatgactagtaagtattgaacgtgtattg

SEQ ID NO: 780611 - DNA, 33 bp, Homo sapien
cctgaaacggtggaataagacgtacccgagcgc

SEQ ID NO: 780612 - DNA, 33 bp, Homo sapien
cctgaaacggtggaatgagacgtacccgagcgc

SEQ ID NO: 780613 - DNA, 33 bp, Homo sapien
atgttcctcttctcaacgatcttaccctcattt

SEQ ID NO: 780614 - DNA, 33 bp, Homo sapien
atgttcctcttctcaatgatcttaccctcattt

SEQ ID NO: 780615 - DNA, 33 bp, Homo sapien
taatatggctaagtgccgataagagggctgcta

SEQ ID NO: 780616 - DNA, 33 bp, Homo sapien
taatatggctaagtgctgataagagggctgcta

SEQ ID NO: 780617 - DNA, 33 bp, Homo sapien
aaatggtaagtctgaccacatttttatctagca

SEQ ID NO: 780618 - DNA, 33 bp, Homo sapien
aaatggtaagtctgacgacatttttatctagca

SEQ ID NO: 780619 - DNA, 33 bp, Homo sapien
tggtctaagatattcacgttggctttgatactt

SEQ ID NO: 780620 - DNA, 33 bp, Homo sapien
tggtctaagatattcatgttggctttgatactt

SEQ ID NO: 780621 - DNA, 33 bp, Homo sapien
ctgtgtgagtatctaccagttgtttccatccat

SEQ ID NO: 780622 - DNA, 33 bp, Homo sapien
ctgtgtgagtatctacgagttgtttccatccat

SEQ ID NO: 780623 - DNA, 33 bp, Homo sapien
tcttgtgacacgcccaaggttttactgttacgg

SEQ ID NO: 780624 - DNA, 33 bp, Homo sapien
tcttgtgacacgcccacggttttactgttacgg

SEQ ID NO: 780625 - DNA, 33 bp, Homo sapien
agctcctggagagacaaggtaaaaggccacatc

SEQ ID NO: 780626 - DNA, 33 bp, Homo sapien
agctcctggagagacagggtaaaaggccacatc

SEQ ID NO: 780627 - DNA, 33 bp, Homo sapien
gggtgttgagtagcttaaagatcatattctaca

SEQ ID NO: 780628 - DNA, 33 bp, Homo sapien
gggtgttgagtagcttgaagatcatattctaca

SEQ ID NO: 780629 - DNA, 33 bp, Homo sapien
aatatcacttaactacagagtgggcctggaaac

SEQ ID NO: 780630 - DNA, 33 bp, Homo sapien
aatatcacttaactacggagtgggcctggaaac

SEQ ID NO: 780631 - DNA, 33 bp, Homo sapien
aagaatctaagcactgcaaagaaagtgtgatta

SEQ ID NO: 780632 - DNA, 33 bp, Homo sapien
aagaatctaagcactggaaagaaagtgtgatta

SEQ ID NO: 780633 - DNA, 33 bp, Homo sapien
tgttagtattagtgacagcaaaactgaatctct

SEQ ID NO: 780634 - DNA, 33 bp, Homo sapien
tgttagtattagtgacggcaaaactgaatctct

SEQ ID NO: 780635 - DNA, 33 bp, Homo sapien
tctctgaggcttcctgacaagggttagtgtgac

SEQ ID NO: 780636 - DNA, 33 bp, Homo sapien
tctctgaggcttcctggcaagggttagtgtgac

SEQ ID NO: 780637 - DNA, 33 bp, Homo sapien
cgcattaaaaaaacaacgacagctacatcaagc

SEQ ID NO: 780638 - DNA, 33 bp, Homo sapien
cgcattaaaaaaacaaggacagctacatcaagc

SEQ ID NO: 780639 - DNA, 33 bp, Homo sapien
aatctgcaactttagaagtcatatgccctgagg

SEQ ID NO: 780640 - DNA, 33 bp, Homo sapien
aatctgcaactttagaggtcatatgccctgagg

SEQ ID NO: 780641 - DNA, 33 bp, Homo sapien
cctgtcatggtcaaacagtcaggagcctgcact

SEQ ID NO: 780642 - DNA, 33 bp, Homo sapien
cctgtcatggtcaaacggtcaggagcctgcact

SEQ ID NO: 780643 - DNA, 33 bp, Homo sapien
tgggtctgctactgcccagagatttagaagggc

SEQ ID NO: 780644 - DNA, 33 bp, Homo sapien
tgggtctgctactgcctagagatttagaagggc

SEQ ID NO: 780645 - DNA, 33 bp, Homo sapien
cagtgtcctttagagccgatacttaaagtcagt

SEQ ID NO: 780646 - DNA, 33 bp, Homo sapien
cagtgtcctttagagctgatacttaaagtcagt

SEQ ID NO: 780647 - DNA, 33 bp, Homo sapien
caaatatgattacacacgtaagagaccaagtgg

SEQ ID NO: 780648 - DNA, 33 bp, Homo sapien
caaatatgattacacaggtaagagaccaagtgg

SEQ ID NO: 780649 - DNA, 33 bp, Homo sapien
acttctcaaaagaagagatacacgtggccaaca

SEQ ID NO: 780650 - DNA, 33 bp, Homo sapien
acttctcaaaagaagatatacacgtggccaaca

SEQ ID NO: 780651 - DNA, 33 bp, Homo sapien
agttcaataactgcccagagaatgcattaggta

SEQ ID NO: 780652 - DNA, 33 bp, Homo sapien
agttcaataactgcccggagaatgcattaggta

SEQ ID NO: 780653 - DNA, 33 bp, Homo sapien
ccctaatgactaatgacgtagaatgccttttca

SEQ ID NO: 780654 - DNA, 33 bp, Homo sapien
ccctaatgactaatgatgtagaatgccttttca

SEQ ID NO: 780655 - DNA, 33 bp, Homo sapien
ttgtgattttatcatgaagtctggtcccttgaa

SEQ ID NO: 780656 - DNA, 33 bp, Homo sapien
ttgtgattttatcatgcagtctggtcccttgaa

SEQ ID NO: 780657 - DNA, 33 bp, Homo sapien
tagttaacaaggctcaaatcttgtaggctctat

SEQ ID NO: 780658 - DNA, 33 bp, Homo sapien
tagttaacaaggctcagatcttgtaggctctat

SEQ ID NO: 780659 - DNA, 33 bp, Homo sapien
tcttgtatacttctgaaattttgtgattgttac

SEQ ID NO: 780660 - DNA, 33 bp, Homo sapien
tcttgtatacttctgagattttgtgattgttac

SEQ ID NO: 780661 - DNA, 33 bp, Homo sapien
catttctcctcaaaacacattaacaattttgca

SEQ ID NO: 780662 - DNA, 33 bp, Homo sapien
catttctcctcaaaactcattaacaattttgca

SEQ ID NO: 780663 - DNA, 33 bp, Homo sapien
ggggtttgagcagcaccgaagaaacaagccaca

SEQ ID NO: 780664 - DNA, 33 bp, Homo sapien
ggggtttgagcagcacggaagaaacaagccaca

SEQ ID NO: 780665 - DNA, 33 bp, Homo sapien
cttgactttgagggtcgcctgtagctccaggct

SEQ ID NO: 780666 - DNA, 33 bp, Homo sapien
cttgactttgagggtctcctgtagctccaggct

SEQ ID NO: 780667 - DNA, 33 bp, Homo sapien
aagctttctgtcctcaatgaaattacactacct

SEQ ID NO: 780668 - DNA, 33 bp, Homo sapien
aagctttctgtcctcattgaaattacactacct

SEQ ID NO: 780669 - DNA, 33 bp, Homo sapien
ggcagaaggttcagcaacccttggctccaaagg

SEQ ID NO: 780670 - DNA, 33 bp, Homo sapien
ggcagaaggttcagcaccccttggctccaaagg

SEQ ID NO: 780671 - DNA, 33 bp, Homo sapien
agcattcctagagtccaattcttccattttccc

SEQ ID NO: 780672 - DNA, 33 bp, Homo sapien
agcattcctagagtccgattcttccattttccc

SEQ ID NO: 780673 - DNA, 33 bp, Homo sapien
gcttctctttgttctcccaggaaatcagaaaca

SEQ ID NO: 780674 - DNA, 33 bp, Homo sapien
gcttctctttgttctctcaggaaatcagaaaca

SEQ ID NO: 780675 - DNA, 33 bp, Homo sapien
tgcacccccattgcgaacatctactccaagcta

SEQ ID NO: 780676 - DNA, 33 bp, Homo sapien
tgcacccccattgcgaccatctactccaagcta

SEQ ID NO: 780677 - DNA, 33 bp, Homo sapien
attacaggaaagatgaaagtaattgtgagatgc

SEQ ID NO: 780678 - DNA, 33 bp, Homo sapien
attacaggaaagatgatagtaattgtgagatgc

SEQ ID NO: 780679 - DNA, 33 bp, Homo sapien
cctgatgacaaaacagaagctctgtaatataaa

SEQ ID NO: 780680 - DNA, 33 bp, Homo sapien
cctgatgacaaaacagtagctctgtaatataaa

SEQ ID NO: 780681 - DNA, 33 bp, Homo sapien
aaatgtaaagcagagacagatagatgagctggt

SEQ ID NO: 780682 - DNA, 33 bp, Homo sapien
aaatgtaaagcagagatagatagatgagctggt

SEQ ID NO: 780683 - DNA, 33 bp, Homo sapien
agaccagcttggagaaaaaagtgaggctctgtc

SEQ ID NO: 780684 - DNA, 33 bp, Homo sapien
agaccagcttggagaagaaagtgaggctctgtc

SEQ ID NO: 780685 - DNA, 33 bp, Homo sapien
tttatcatctcttgccaggatttttttccagtg

SEQ ID NO: 780686 - DNA, 33 bp, Homo sapien
tttatcatctcttgcctggatttttttccagtg

SEQ ID NO: 780687 - DNA, 33 bp, Homo sapien
aaaagtttgtttatcacatctacctcagtgtct

SEQ ID NO: 780688 - DNA, 33 bp, Homo sapien
aaaagtttgtttatcatatctacctcagtgtct

SEQ ID NO: 780689 - DNA, 33 bp, Homo sapien
tacttaccaaccaaacgcagtgacttactttct

SEQ ID NO: 780690 - DNA, 33 bp, Homo sapien
tacttaccaaccaaactcagtgacttactttct

SEQ ID NO: 780691 - DNA, 33 bp, Homo sapien
ctcaaggcagcatattaaagtagttgtttgttt

SEQ ID NO: 780692 - DNA, 33 bp, Homo sapien
ctcaaggcagcatattgaagtagttgtttgttt

SEQ ID NO: 780693 - DNA, 33 bp, Homo sapien
ggagatataatctttgaatgagtgtgtaaaaga

SEQ ID NO: 780694 - DNA, 33 bp, Homo sapien
ggagatataatctttggatgagtgtgtaaaaga

SEQ ID NO: 780695 - DNA, 33 bp, Homo sapien
aattaattaaatcaaaaaggtctcttgtcctca

SEQ ID NO: 780696 - DNA, 33 bp, Homo sapien
aattaattaaatcaaacaggtctcttgtcctca

SEQ ID NO: 780697 - DNA, 33 bp, Homo sapien
attagtttagttgccacagggacaaaaaggcta

SEQ ID NO: 780698 - DNA, 33 bp, Homo sapien
attagtttagttgccatagggacaaaaaggcta

SEQ ID NO: 780699 - DNA, 33 bp, Homo sapien
cttgccattgaagttacgatgcattctttgtga

SEQ ID NO: 780700 - DNA, 33 bp, Homo sapien
cttgccattgaagttatgatgcattctttgtga

SEQ ID NO: 780701 - DNA, 33 bp, Homo sapien
tttgtttacaccataccgtagtctattaggtgt

SEQ ID NO: 780702 - DNA, 33 bp, Homo sapien
tttgtttacaccatactgtagtctattaggtgt

SEQ ID NO: 780703 - DNA, 33 bp, Homo sapien
ccctaagtctcttcaactgagtggtaagagagc

SEQ ID NO: 780704 - DNA, 33 bp, Homo sapien
ccctaagtctcttcaattgagtggtaagagagc

SEQ ID NO: 780705 - DNA, 33 bp, Homo sapien
tgtctttagaacaaaacggtgcacagtgaagca

SEQ ID NO: 780706 - DNA, 33 bp, Homo sapien
tgtctttagaacaaaatggtgcacagtgaagca

SEQ ID NO: 780707 - DNA, 33 bp, Homo sapien
ccactgttgattgacacctaggttgataccatg

SEQ ID NO: 780708 - DNA, 33 bp, Homo sapien
ccactgttgattgacatctaggttgataccatg

SEQ ID NO: 780709 - DNA, 33 bp, Homo sapien
tggtgaaaacttttaacaatcattgttctcgtg

SEQ ID NO: 780710 - DNA, 33 bp, Homo sapien
tggtgaaaacttttaagaatcattgttctcgtg

SEQ ID NO: 780711 - DNA, 33 bp, Homo sapien
tgaaagtaatgcaaatgagaagacagtggaaca

SEQ ID NO: 780712 - DNA, 33 bp, Homo sapien
tgaaagtaatgcaaattagaagacagtggaaca

SEQ ID NO: 780713 - DNA, 33 bp, Homo sapien
ttagaattagaatcacccaaaggagaggagaga

SEQ ID NO: 780714 - DNA, 33 bp, Homo sapien
ttagaattagaatcactcaaaggagaggagaga

SEQ ID NO: 780715 - DNA, 33 bp, Homo sapien
aactgtccaaaatgaaatacagagtgaagggga

SEQ ID NO: 780716 - DNA, 33 bp, Homo sapien
aactgtccaaaatgaattacagagtgaagggga

SEQ ID NO: 780717 - DNA, 33 bp, Homo sapien
ttacactcactcttatcacatcatcatcaacta

SEQ ID NO: 780718 - DNA, 33 bp, Homo sapien
ttacactcactcttattacatcatcatcaacta

SEQ ID NO: 780719 - DNA, 33 bp, Homo sapien
aaatgactatggcagacgaagcaaaagtttcat

SEQ ID NO: 780720 - DNA, 33 bp, Homo sapien
aaatgactatggcagatgaagcaaaagtttcat

SEQ ID NO: 780721 - DNA, 33 bp, Homo sapien
taaatgtaaaggactcaaaagaaaaatgaggca

SEQ ID NO: 780722 - DNA, 33 bp, Homo sapien
taaatgtaaaggactcgaaagaaaaatgaggca

SEQ ID NO: 780723 - DNA, 33 bp, Homo sapien
aatcaatgattcttaacagttttgaagtcatgg

SEQ ID NO: 780724 - DNA, 33 bp, Homo sapien
aatcaatgattcttaatagttttgaagtcatgg

SEQ ID NO: 780725 - DNA, 33 bp, Homo sapien
ctttctcatgaatttaacttattcctacactgt

SEQ ID NO: 780726 - DNA, 33 bp, Homo sapien
ctttctcatgaatttatcttattcctacactgt

SEQ ID NO: 780727 - DNA, 33 bp, Homo sapien
cttcactggaaacacaaaaaatgaaaaggtgtc

SEQ ID NO: 780728 - DNA, 33 bp, Homo sapien
cttcactggaaacacacaaaatgaaaaggtgtc

SEQ ID NO: 780729 - DNA, 33 bp, Homo sapien
acattcctgggcataccggcatcacaatgcatt

SEQ ID NO: 780730 - DNA, 33 bp, Homo sapien
acattcctgggcatactggcatcacaatgcatt

SEQ ID NO: 780731 - DNA, 33 bp, Homo sapien
aatattttgtgtgtgcgcctactcagttctttc

SEQ ID NO: 780732 - DNA, 33 bp, Homo sapien
aatattttgtgtgtgctcctactcagttctttc

SEQ ID NO: 780733 - DNA, 33 bp, Homo sapien
aatctttttggctatccctcaaccttaagtgag

SEQ ID NO: 780734 - DNA, 33 bp, Homo sapien
aatctttttggctatctctcaaccttaagtgag

SEQ ID NO: 780735 - DNA, 33 bp, Homo sapien
accctcatctcataacacagacaaaaatcaaac

SEQ ID NO: 780736 - DNA, 33 bp, Homo sapien
accctcatctcataacgcagacaaaaatcaaac

SEQ ID NO: 780737 - DNA, 33 bp, Homo sapien
aacttgtttgtgaatcaacaatactgtcttaga

SEQ ID NO: 780738 - DNA, 33 bp, Homo sapien
aacttgtttgtgaatccacaatactgtcttaga

SEQ ID NO: 780739 - DNA, 33 bp, Homo sapien
agactgtgagtagttacagcagtgaaacaggat

SEQ ID NO: 780740 - DNA, 33 bp, Homo sapien
agactgtgagtagttatagcagtgaaacaggat

SEQ ID NO: 780741 - DNA, 33 bp, Homo sapien
ctgatcaaatgttcaaagcgcttgcaacctgct

SEQ ID NO: 780742 - DNA, 33 bp, Homo sapien
ctgatcaaatgttcaacgcgcttgcaacctgct

SEQ ID NO: 780743 - DNA, 33 bp, Homo sapien
atgctcaactacaaaaagcaaacaagtatgtga

SEQ ID NO: 780744 - DNA, 33 bp, Homo sapien
atgctcaactacaaaaggcaaacaagtatgtga

SEQ ID NO: 780745 - DNA, 33 bp, Homo sapien
aggaaaaaatctgagcagaaatcaatgaaattg

SEQ ID NO: 780746 - DNA, 33 bp, Homo sapien
aggaaaaaatctgagccgaaatcaatgaaattg

SEQ ID NO: 780747 - DNA, 33 bp, Homo sapien
tgtgtctttacatgaccaactcatttctttcta

SEQ ID NO: 780748 - DNA, 33 bp, Homo sapien
tgtgtctttacatgactaactcatttctttcta

SEQ ID NO: 780749 - DNA, 33 bp, Homo sapien
ttttctctgccgggaccatgttccctgtaccaa

SEQ ID NO: 780750 - DNA, 33 bp, Homo sapien
ttttctctgccgggactatgttccctgtaccaa

SEQ ID NO: 780751 - DNA, 33 bp, Homo sapien
tacctaaaatgggtaaatcaaagacatctgact

SEQ ID NO: 780752 - DNA, 33 bp, Homo sapien
tacctaaaatgggtaagtcaaagacatctgact

SEQ ID NO: 780753 - DNA, 33 bp, Homo sapien
gagggagctaaaggaaagacttgacttccaaag

SEQ ID NO: 780754 - DNA, 33 bp, Homo sapien
gagggagctaaaggaaggacttgacttccaaag

SEQ ID NO: 780755 - DNA, 33 bp, Homo sapien
ttgtttctctgttgcaataatcttaggatcttc

SEQ ID NO: 780756 - DNA, 33 bp, Homo sapien
ttgtttctctgttgcagtaatcttaggatcttc

SEQ ID NO: 780757 - DNA, 33 bp, Homo sapien
tacacacatcataatacaatcttccatagtcct

SEQ ID NO: 780758 - DNA, 33 bp, Homo sapien
tacacacatcataatataatcttccatagtcct

SEQ ID NO: 780759 - DNA, 33 bp, Homo sapien
cataaggagcttaccaaagggtaatgagcaggt

SEQ ID NO: 780760 - DNA, 33 bp, Homo sapien
cataaggagcttaccacagggtaatgagcaggt

SEQ ID NO: 780761 - DNA, 33 bp, Homo sapien
tcttccactgtgagatgaagggttaccctgaag

SEQ ID NO: 780762 - DNA, 33 bp, Homo sapien
tcttccactgtgagattaagggttaccctgaag

SEQ ID NO: 780763 - DNA, 33 bp, Homo sapien
tggagaacatagggtacgaaagcagcgtctggt

SEQ ID NO: 780764 - DNA, 33 bp, Homo sapien
tggagaacatagggtatgaaagcagcgtctggt

SEQ ID NO: 780765 - DNA, 33 bp, Homo sapien
cctcatgcaatattaaatgatagttgaaagtat

SEQ ID NO: 780766 - DNA, 33 bp, Homo sapien
cctcatgcaatattaagtgatagttgaaagtat

SEQ ID NO: 780767 - DNA, 33 bp, Homo sapien
agttataatgacttccacttgaaataatttatt

SEQ ID NO: 780768 - DNA, 33 bp, Homo sapien
agttataatgacttccgcttgaaataatttatt

SEQ ID NO: 780769 - DNA, 33 bp, Homo sapien
gaatggggtcatgaaaacatttttggctaaata

SEQ ID NO: 780770 - DNA, 33 bp, Homo sapien
gaatggggtcatgaaagcatttttggctaaata

SEQ ID NO: 780771 - DNA, 33 bp, Homo sapien
gctgtaaaacattatcacagatttactagccta

SEQ ID NO: 780772 - DNA, 33 bp, Homo sapien
gctgtaaaacattatcgcagatttactagccta

SEQ ID NO: 780773 - DNA, 33 bp, Homo sapien
gatatttgattcagaaaagaaaagcttaactac

SEQ ID NO: 780774 - DNA, 33 bp, Homo sapien
gatatttgattcagaagagaaaagcttaactac

SEQ ID NO: 780775 - DNA, 33 bp, Homo sapien
agcttaggtttctacccgattagtttccaccat

SEQ ID NO: 780776 - DNA, 33 bp, Homo sapien
agcttaggtttctacctgattagtttccaccat

SEQ ID NO: 780777 - DNA, 33 bp, Homo sapien
atatatttttggtttacggttggagacgtattt

SEQ ID NO: 780778 - DNA, 33 bp, Homo sapien
atatatttttggtttatggttggagacgtattt

SEQ ID NO: 780779 - DNA, 33 bp, Homo sapien
tcctgaagcaacctgaggaaaacatacaagaat

SEQ ID NO: 780780 - DNA, 33 bp, Homo sapien
tcctgaagcaacctgatgaaaacatacaagaat

SEQ ID NO: 780781 - DNA, 33 bp, Homo sapien
gttattaaacaagttaacctttctgtactagtc

SEQ ID NO: 780782 - DNA, 33 bp, Homo sapien
gttattaaacaagttatcctttctgtactagtc

SEQ ID NO: 780783 - DNA, 33 bp, Homo sapien
aagattctagcttacgacccagctagaaaaaga

SEQ ID NO: 780784 - DNA, 33 bp, Homo sapien
aagattctagcttacggcccagctagaaaaaga

SEQ ID NO: 780785 - DNA, 33 bp, Homo sapien
aagatttactaggctggatggagaagaggtttc

SEQ ID NO: 780786 - DNA, 33 bp, Homo sapien
aagatttactaggctgtatggagaagaggtttc

SEQ ID NO: 780787 - DNA, 33 bp, Homo sapien
tgcatgaaatgacaaagctaacagagacgaggc

SEQ ID NO: 780788 - DNA, 33 bp, Homo sapien
tgcatgaaatgacaaatctaacagagacgaggc

SEQ ID NO: 780789 - DNA, 33 bp, Homo sapien
cacccatggcgtcagacataatccgctcacacc

SEQ ID NO: 780790 - DNA, 33 bp, Homo sapien
cacccatggcgtcagatataatccgctcacacc

SEQ ID NO: 780791 - DNA, 33 bp, Homo sapien
tatcttgggtacctctgaccgctgggtgggact

SEQ ID NO: 780792 - DNA, 33 bp, Homo sapien
tatcttgggtacctcttaccgctgggtgggact

SEQ ID NO: 780793 - DNA, 33 bp, Homo sapien
atatcagtcgcatccacgttagcatcttgaacc

SEQ ID NO: 780794 - DNA, 33 bp, Homo sapien
atatcagtcgcatccatgttagcatcttgaacc

SEQ ID NO: 780795 - DNA, 33 bp, Homo sapien
accagtttaatagccacactctgattacttctt

SEQ ID NO: 780796 - DNA, 33 bp, Homo sapien
accagtttaatagccatactctgattacttctt

SEQ ID NO: 780797 - DNA, 33 bp, Homo sapien
atatatgtctttacaacagtcctgcaatttatg

SEQ ID NO: 780798 - DNA, 33 bp, Homo sapien
atatatgtctttacaagagtcctgcaatttatg

SEQ ID NO: 780799 - DNA, 33 bp, Homo sapien
taccttctttttggaacgccataaaaattacct

SEQ ID NO: 780800 - DNA, 33 bp, Homo sapien
taccttctttttggaatgccataaaaattacct

SEQ ID NO: 780801 - DNA, 33 bp, Homo sapien
tgagcctgtgtcctcaactgcaaagctgaaaca

SEQ ID NO: 780802 - DNA, 33 bp, Homo sapien
tgagcctgtgtcctcatctgcaaagctgaaaca

SEQ ID NO: 780803 - DNA, 33 bp, Homo sapien
ctatctatacttatacacctatatctctatcta

SEQ ID NO: 780804 - DNA, 33 bp, Homo sapien
ctatctatacttatacccctatatctctatcta

SEQ ID NO: 780805 - DNA, 33 bp, Homo sapien
ggtggagagctattccacagtccctgctcccaa

SEQ ID NO: 780806 - DNA, 33 bp, Homo sapien
ggtggagagctattccgcagtccctgctcccaa

SEQ ID NO: 780807 - DNA, 33 bp, Homo sapien
gactagtatcagcgaacaggtagggagataagc

SEQ ID NO: 780808 - DNA, 33 bp, Homo sapien
gactagtatcagcgaagaggtagggagataagc

SEQ ID NO: 780809 - DNA, 33 bp, Homo sapien
caaaaagtggaagaaacctaaatctgctctgaa

SEQ ID NO: 780810 - DNA, 33 bp, Homo sapien
caaaaagtggaagaaatctaaatctgctctgaa

SEQ ID NO: 780811 - DNA, 33 bp, Homo sapien
tttcagtgagtgaccacgataggcagaaaaaca

SEQ ID NO: 780812 - DNA, 33 bp, Homo sapien
tttcagtgagtgaccatgataggcagaaaaaca

SEQ ID NO: 780813 - DNA, 33 bp, Homo sapien
tattcccaaacgagacaaaagcaattagttttt

SEQ ID NO: 780814 - DNA, 33 bp, Homo sapien
tattcccaaacgagacgaaagcaattagttttt

SEQ ID NO: 780815 - DNA, 33 bp, Homo sapien
cttacacattaacaaactttatcctgataatgc

SEQ ID NO: 780816 - DNA, 33 bp, Homo sapien
cttacacattaacaaattttatcctgataatgc

SEQ ID NO: 780817 - DNA, 33 bp, Homo sapien
attcatttgaaattaaagtgagagtttcaattc

SEQ ID NO: 780818 - DNA, 33 bp, Homo sapien
attcatttgaaattaaggtgagagtttcaattc

SEQ ID NO: 780819 - DNA, 33 bp, Homo sapien
tctgtggttttcttaaccttagccattcattta

SEQ ID NO: 780820 - DNA, 33 bp, Homo sapien
tctgtggttttcttaatcttagccattcattta

SEQ ID NO: 780821 - DNA, 33 bp, Homo sapien
atttctcagacattctgaatctagaccatgtta

SEQ ID NO: 780822 - DNA, 33 bp, Homo sapien
atttctcagacattcttaatctagaccatgtta

SEQ ID NO: 780823 - DNA, 33 bp, Homo sapien
aggtttctacattgtcccatgacaggtatcact

SEQ ID NO: 780824 - DNA, 33 bp, Homo sapien
aggtttctacattgtctcatgacaggtatcact

SEQ ID NO: 780825 - DNA, 33 bp, Homo sapien
gaatcatccctgggcacggtaaagtgaacagtc

SEQ ID NO: 780826 - DNA, 33 bp, Homo sapien
gaatcatccctgggcatggtaaagtgaacagtc

SEQ ID NO: 780827 - DNA, 33 bp, Homo sapien
aaaagcaagaaattcaaacagaagggtccaggg

SEQ ID NO: 780828 - DNA, 33 bp, Homo sapien
aaaagcaagaaattcagacagaagggtccaggg

SEQ ID NO: 780829 - DNA, 33 bp, Homo sapien
taaaaggtccaaataccatgcatgacattttga

SEQ ID NO: 780830 - DNA, 33 bp, Homo sapien
taaaaggtccaaatactatgcatgacattttga

SEQ ID NO: 780831 - DNA, 33 bp, Homo sapien
cattgcacaatcagtaccattatctagttccag

SEQ ID NO: 780832 - DNA, 33 bp, Homo sapien
cattgcacaatcagtatcattatctagttccag

SEQ ID NO: 780833 - DNA, 33 bp, Homo sapien
cacttcattaatccccactaactgcctcaattt

SEQ ID NO: 780834 - DNA, 33 bp, Homo sapien
cacttcattaatcccctctaactgcctcaattt

SEQ ID NO: 780835 - DNA, 33 bp, Homo sapien
tcagggaaagcaatgacgtctccaaagcaggag

SEQ ID NO: 780836 - DNA, 33 bp, Homo sapien
tcagggaaagcaatgatgtctccaaagcaggag

SEQ ID NO: 780837 - DNA, 33 bp, Homo sapien
gagaggcaagaaattaagagtctttctctcact

SEQ ID NO: 780838 - DNA, 33 bp, Homo sapien
gagaggcaagaaattaggagtctttctctcact

SEQ ID NO: 780839 - DNA, 33 bp, Homo sapien
tcagtccaacagcaaaagaactcaatatctgac

SEQ ID NO: 780840 - DNA, 33 bp, Homo sapien
tcagtccaacagcaaaggaactcaatatctgac

SEQ ID NO: 780841 - DNA, 33 bp, Homo sapien
gttcatctaaaactaacgcccaacttgttctta

SEQ ID NO: 780842 - DNA, 33 bp, Homo sapien
gttcatctaaaactaatgcccaacttgttctta

SEQ ID NO: 780843 - DNA, 33 bp, Homo sapien
ttaagtgtccacagtacattttgttagctaaga

SEQ ID NO: 780844 - DNA, 33 bp, Homo sapien
ttaagtgtccacagtatattttgttagctaaga

SEQ ID NO: 780845 - DNA, 33 bp, Homo sapien
agtatctagcggaaaaattttacctctctgtgc

SEQ ID NO: 780846 - DNA, 33 bp, Homo sapien
agtatctagcggaaaacttttacctctctgtgc

SEQ ID NO: 780847 - DNA, 33 bp, Homo sapien
atggaatgtcactgaagatggaaaccaggacca

SEQ ID NO: 780848 - DNA, 33 bp, Homo sapien
atggaatgtcactgaatatggaaaccaggacca

SEQ ID NO: 780849 - DNA, 33 bp, Homo sapien
aggcactttattgtaactcatctgcccagcaga

SEQ ID NO: 780850 - DNA, 33 bp, Homo sapien
aggcactttattgtaattcatctgcccagcaga

SEQ ID NO: 780851 - DNA, 33 bp, Homo sapien
taggccaatgtccaaaagacttttccaatgtta

SEQ ID NO: 780852 - DNA, 33 bp, Homo sapien
taggccaatgtccaaacgacttttccaatgtta

SEQ ID NO: 780853 - DNA, 33 bp, Homo sapien
caaaacacagtctcaactaaaagtacaaaaatt

SEQ ID NO: 780854 - DNA, 33 bp, Homo sapien
caaaacacagtctcaattaaaagtacaaaaatt

SEQ ID NO: 780855 - DNA, 33 bp, Homo sapien
taccaacaatgaccacacttagaatcaaataaa

SEQ ID NO: 780856 - DNA, 33 bp, Homo sapien
taccaacaatgaccacgcttagaatcaaataaa

SEQ ID NO: 780857 - DNA, 33 bp, Homo sapien
tgtactggcttcaaaaacagaatgaaactggaa

SEQ ID NO: 780858 - DNA, 33 bp, Homo sapien
tgtactggcttcaaaaccagaatgaaactggaa

SEQ ID NO: 780859 - DNA, 33 bp, Homo sapien
tgtataggaatatatacggacaactgtgtgtat

SEQ ID NO: 780860 - DNA, 33 bp, Homo sapien
tgtataggaatatatatggacaactgtgtgtat

SEQ ID NO: 780861 - DNA, 33 bp, Homo sapien
agtcggttctcataacaaaaactgccatgcctt

SEQ ID NO: 780862 - DNA, 33 bp, Homo sapien
agtcggttctcataacgaaaactgccatgcctt

SEQ ID NO: 780863 - DNA, 33 bp, Homo sapien
gtgccatttgatgctcaacaaagctcctttcag

SEQ ID NO: 780864 - DNA, 33 bp, Homo sapien
gtgccatttgatgctcgacaaagctcctttcag

SEQ ID NO: 780865 - DNA, 33 bp, Homo sapien
taaaaaaagcagcaccccaattcctaaatgact

SEQ ID NO: 780866 - DNA, 33 bp, Homo sapien
taaaaaaagcagcaccgcaattcctaaatgact

SEQ ID NO: 780867 - DNA, 33 bp, Homo sapien
gggattaactgtgttaacatgctttgggagctg

SEQ ID NO: 780868 - DNA, 33 bp, Homo sapien
gggattaactgtgttagcatgctttgggagctg

SEQ ID NO: 780869 - DNA, 33 bp, Homo sapien
tttctcactatgataaatctgaatagttacact

SEQ ID NO: 780870 - DNA, 33 bp, Homo sapien
tttctcactatgataactctgaatagttacact

SEQ ID NO: 780871 - DNA, 33 bp, Homo sapien
aattgtcatgtacccacatcctccagtgaattt

SEQ ID NO: 780872 - DNA, 33 bp, Homo sapien
aattgtcatgtacccatatcctccagtgaattt

SEQ ID NO: 780873 - DNA, 33 bp, Homo sapien
aagtttgaatgctcaacggtcagagaaactttt

SEQ ID NO: 780874 - DNA, 33 bp, Homo sapien
aagtttgaatgctcaatggtcagagaaactttt

SEQ ID NO: 780875 - DNA, 33 bp, Homo sapien
ggcctccatgaatgacccttccactactttact

SEQ ID NO: 780876 - DNA, 33 bp, Homo sapien
ggcctccatgaatgactcttccactactttact

SEQ ID NO: 780877 - DNA, 33 bp, Homo sapien
taatgaatcagcttaactaaatttcattgaatt

SEQ ID NO: 780878 - DNA, 33 bp, Homo sapien
taatgaatcagcttaattaaatttcattgaatt

SEQ ID NO: 780879 - DNA, 33 bp, Homo sapien
tttgaagaacctgacaatattgaatgtggagaa

SEQ ID NO: 780880 - DNA, 33 bp, Homo sapien
tttgaagaacctgacagtattgaatgtggagaa

SEQ ID NO: 780881 - DNA, 33 bp, Homo sapien
ctaaaacagacccaaacgtgttctatcaggaaa

SEQ ID NO: 780882 - DNA, 33 bp, Homo sapien
ctaaaacagacccaaatgtgttctatcaggaaa

SEQ ID NO: 780883 - DNA, 33 bp, Homo sapien
gcaagactccatgtccaacaataacaacaacaa

SEQ ID NO: 780884 - DNA, 33 bp, Homo sapien
gcaagactccatgtccgacaataacaacaacaa

SEQ ID NO: 780885 - DNA, 33 bp, Homo sapien
acactaggaaatagtgacacacttctcaggaga

SEQ ID NO: 780886 - DNA, 33 bp, Homo sapien
acactaggaaatagtggcacacttctcaggaga

SEQ ID NO: 780887 - DNA, 33 bp, Homo sapien
ccttatggactttgccccggttataccttcttg

SEQ ID NO: 780888 - DNA, 33 bp, Homo sapien
ccttatggactttgcctcggttataccttcttg

SEQ ID NO: 780889 - DNA, 33 bp, Homo sapien
atcagccttgggatatcagatgtatttattttt

SEQ ID NO: 780890 - DNA, 33 bp, Homo sapien
atcagccttgggatatgagatgtatttattttt

SEQ ID NO: 780891 - DNA, 33 bp, Homo sapien
caaatactttttaggaaacttggacactgcttc

SEQ ID NO: 780892 - DNA, 33 bp, Homo sapien
caaatactttttaggatacttggacactgcttc

SEQ ID NO: 780893 - DNA, 33 bp, Homo sapien
agaaatgttaaacagacgtattcctggcctcca

SEQ ID NO: 780894 - DNA, 33 bp, Homo sapien
agaaatgttaaacagatgtattcctggcctcca

SEQ ID NO: 780895 - DNA, 33 bp, Homo sapien
aaaactcctggaagaaaatcatgacttttagaa

SEQ ID NO: 780896 - DNA, 33 bp, Homo sapien
aaaactcctggaagaatatcatgacttttagaa

SEQ ID NO: 780897 - DNA, 33 bp, Homo sapien
agtatcaacctcataacggtgttcaaagactaa

SEQ ID NO: 780898 - DNA, 33 bp, Homo sapien
agtatcaacctcataagggtgttcaaagactaa

SEQ ID NO: 780899 - DNA, 33 bp, Homo sapien
caatactctatccccaaacttggcaggacctct

SEQ ID NO: 780900 - DNA, 33 bp, Homo sapien
caatactctatccccagacttggcaggacctct

SEQ ID NO: 780901 - DNA, 33 bp, Homo sapien
ctatcttgctaacctcacaattactataggtgt

SEQ ID NO: 780902 - DNA, 33 bp, Homo sapien
ctatcttgctaacctcgcaattactataggtgt

SEQ ID NO: 780903 - DNA, 33 bp, Homo sapien
caacagtccttgccagaatggtgcagctgtatt

SEQ ID NO: 780904 - DNA, 33 bp, Homo sapien
caacagtccttgccaggatggtgcagctgtatt

SEQ ID NO: 780905 - DNA, 33 bp, Homo sapien
ctcttgcccttttacaatatcaaggtaacattt

SEQ ID NO: 780906 - DNA, 33 bp, Homo sapien
ctcttgcccttttacagtatcaaggtaacattt

SEQ ID NO: 780907 - DNA, 33 bp, Homo sapien
agcaatttgtattcacagaaagtagagtagaga

SEQ ID NO: 780908 - DNA, 33 bp, Homo sapien
agcaatttgtattcacggaaagtagagtagaga

SEQ ID NO: 780909 - DNA, 33 bp, Homo sapien
aaatgccagatacatgaaataacctatcactag

SEQ ID NO: 780910 - DNA, 33 bp, Homo sapien
aaatgccagatacatgcaataacctatcactag

SEQ ID NO: 780911 - DNA, 33 bp, Homo sapien
agttatgccaaagcaacgtctcaggatgaacga

SEQ ID NO: 780912 - DNA, 33 bp, Homo sapien
agttatgccaaagcaatgtctcaggatgaacga

SEQ ID NO: 780913 - DNA, 33 bp, Homo sapien
tcttttaccttgttaagggacatttcgttcatc

SEQ ID NO: 780914 - DNA, 33 bp, Homo sapien
tcttttaccttgttaatggacatttcgttcatc

SEQ ID NO: 780915 - DNA, 33 bp, Homo sapien
cattgatctttgtaacagcaaaacattaaatcc

SEQ ID NO: 780916 - DNA, 33 bp, Homo sapien
cattgatctttgtaacggcaaaacattaaatcc

SEQ ID NO: 780917 - DNA, 33 bp, Homo sapien
taatgtacaacatctaccagaaataaggctggg

SEQ ID NO: 780918 - DNA, 33 bp, Homo sapien
taatgtacaacatctatcagaaataaggctggg

SEQ ID NO: 780919 - DNA, 33 bp, Homo sapien
ttcttcaccacttccccacaagcaccttcaaga

SEQ ID NO: 780920 - DNA, 33 bp, Homo sapien
ttcttcaccacttccctacaagcaccttcaaga

SEQ ID NO: 780921 - DNA, 33 bp, Homo sapien
tactaacaatacaaaacttaaagcaagggcttg

SEQ ID NO: 780922 - DNA, 33 bp, Homo sapien
tactaacaatacaaaagttaaagcaagggcttg

SEQ ID NO: 780923 - DNA, 33 bp, Homo sapien
atctcagtgtctctgtaaaggtggacaccacag

SEQ ID NO: 780924 - DNA, 33 bp, Homo sapien
atctcagtgtctctgtcaaggtggacaccacag

SEQ ID NO: 780925 - DNA, 33 bp, Homo sapien
ttgctctgaggggaaacactacctctactttcc

SEQ ID NO: 780926 - DNA, 33 bp, Homo sapien
ttgctctgaggggaaatactacctctactttcc

SEQ ID NO: 780927 - DNA, 33 bp, Homo sapien
gttcccatgagtaagtcaattcatctgtctttg

SEQ ID NO: 780928 - DNA, 33 bp, Homo sapien
gttcccatgagtaagttaattcatctgtctttg

SEQ ID NO: 780929 - DNA, 33 bp, Homo sapien
agctccttccctaccccaaactgcctttcatcc

SEQ ID NO: 780930 - DNA, 33 bp, Homo sapien
agctccttccctaccctaaactgcctttcatcc

SEQ ID NO: 780931 - DNA, 33 bp, Homo sapien
cttcatcctcaccaaaacgtctctaataatata

SEQ ID NO: 780932 - DNA, 33 bp, Homo sapien
cttcatcctcaccaaagcgtctctaataatata

SEQ ID NO: 780933 - DNA, 33 bp, Homo sapien
acagcagactcatcgtaacagctgcccagaaga

SEQ ID NO: 780934 - DNA, 33 bp, Homo sapien
acagcagactcatcgtgacagctgcccagaaga

SEQ ID NO: 780935 - DNA, 33 bp, Homo sapien
tgttatgctgcagttcaagctaggtggcaaaaa

SEQ ID NO: 780936 - DNA, 33 bp, Homo sapien
tgttatgctgcagttcgagctaggtggcaaaaa

SEQ ID NO: 780937 - DNA, 33 bp, Homo sapien
aagacgggctgactcacctctactgcatagttg

SEQ ID NO: 780938 - DNA, 33 bp, Homo sapien
aagacgggctgactcatctctactgcatagttg

SEQ ID NO: 780939 - DNA, 33 bp, Homo sapien
aagaacgtctgagacacgggaagtttgtccctg

SEQ ID NO: 780940 - DNA, 33 bp, Homo sapien
aagaacgtctgagacatgggaagtttgtccctg

SEQ ID NO: 780941 - DNA, 33 bp, Homo sapien
atatctaaggagcaaaaggaagaatgtaacttt

SEQ ID NO: 780942 - DNA, 33 bp, Homo sapien
atatctaaggagcaaagggaagaatgtaacttt

SEQ ID NO: 780943 - DNA, 33 bp, Homo sapien
gatacaaataaagcaacgcacaaccactttttt

SEQ ID NO: 780944 - DNA, 33 bp, Homo sapien
gatacaaataaagcaatgcacaaccactttttt

SEQ ID NO: 780945 - DNA, 33 bp, Homo sapien
aatatatagctaacaccggccaatcagctccct

SEQ ID NO: 780946 - DNA, 33 bp, Homo sapien
aatatatagctaacactggccaatcagctccct

SEQ ID NO: 780947 - DNA, 33 bp, Homo sapien
ctagaaatctaagatcaaaggtgacaggattgg

SEQ ID NO: 780948 - DNA, 33 bp, Homo sapien
ctagaaatctaagatcgaaggtgacaggattgg

SEQ ID NO: 780949 - DNA, 33 bp, Homo sapien
ctggtctaaatggaatgattcatggtctacaga

SEQ ID NO: 780950 - DNA, 33 bp, Homo sapien
ctggtctaaatggaattattcatggtctacaga

SEQ ID NO: 780951 - DNA, 33 bp, Homo sapien
gagagtgtaccagaaagatactagatcaattcc

SEQ ID NO: 780952 - DNA, 33 bp, Homo sapien
gagagtgtaccagaaatatactagatcaattcc

SEQ ID NO: 780953 - DNA, 33 bp, Homo sapien
ggtcttttgctccctcacagtggagtttttgca

SEQ ID NO: 780954 - DNA, 33 bp, Homo sapien
ggtcttttgctccctcgcagtggagtttttgca

SEQ ID NO: 780955 - DNA, 33 bp, Homo sapien
taaccagatgtacaaaatgatagaaatagcttg

SEQ ID NO: 780956 - DNA, 33 bp, Homo sapien
taaccagatgtacaaagtgatagaaatagcttg

SEQ ID NO: 780957 - DNA, 33 bp, Homo sapien
ttaaaataggcatagaagaagtaaacctttaac

SEQ ID NO: 780958 - DNA, 33 bp, Homo sapien
ttaaaataggcatagaggaagtaaacctttaac

SEQ ID NO: 780959 - DNA, 33 bp, Homo sapien
tacttattagctgaaaatgaaggaatgcatttg

SEQ ID NO: 780960 - DNA, 33 bp, Homo sapien
tacttattagctgaaactgaaggaatgcatttg

SEQ ID NO: 780961 - DNA, 33 bp, Homo sapien
ctggcctagtctttgacgtcagatcaaatgctt

SEQ ID NO: 780962 - DNA, 33 bp, Homo sapien
ctggcctagtctttgatgtcagatcaaatgctt

SEQ ID NO: 780963 - DNA, 33 bp, Homo sapien
agctggcccaggaagcacctctgaggtcatatt

SEQ ID NO: 780964 - DNA, 33 bp, Homo sapien
agctggcccaggaagcgcctctgaggtcatatt

SEQ ID NO: 780965 - DNA, 33 bp, Homo sapien
gactcttggagtgataaattttagcaagaatca

SEQ ID NO: 780966 - DNA, 33 bp, Homo sapien
gactcttggagtgatacattttagcaagaatca

SEQ ID NO: 780967 - DNA, 33 bp, Homo sapien
agaagcaaaccagagtaaattaatgattcttgc

SEQ ID NO: 780968 - DNA, 33 bp, Homo sapien
agaagcaaaccagagtgaattaatgattcttgc

SEQ ID NO: 780969 - DNA, 33 bp, Homo sapien
gccagaataggaggaccgggagcaggcacagca

SEQ ID NO: 780970 - DNA, 33 bp, Homo sapien
gccagaataggaggactgggagcaggcacagca

SEQ ID NO: 780971 - DNA, 33 bp, Homo sapien
gacctaagacatgcaggatgagattccaaatcg

SEQ ID NO: 780972 - DNA, 33 bp, Homo sapien
gacctaagacatgcagtatgagattccaaatcg

SEQ ID NO: 780973 - DNA, 33 bp, Homo sapien
gacatcgaggccactaccacctagttctttctg

SEQ ID NO: 780974 - DNA, 33 bp, Homo sapien
gacatcgaggccactatcacctagttctttctg

SEQ ID NO: 780975 - DNA, 33 bp, Homo sapien
tactgtatgactgtgcccatttgatggatgaga

SEQ ID NO: 780976 - DNA, 33 bp, Homo sapien
tactgtatgactgtgctcatttgatggatgaga

SEQ ID NO: 780977 - DNA, 33 bp, Homo sapien
catttatcctttgcaacacttctgagatataat

SEQ ID NO: 780978 - DNA, 33 bp, Homo sapien
catttatcctttgcaatacttctgagatataat

SEQ ID NO: 780979 - DNA, 33 bp, Homo sapien
actttgaaaattattccatgacttcaggatttt

SEQ ID NO: 780980 - DNA, 33 bp, Homo sapien
actttgaaaattattctatgacttcaggatttt

SEQ ID NO: 780981 - DNA, 33 bp, Homo sapien
acacaagaaatagagaccttaaagcagctagag

SEQ ID NO: 780982 - DNA, 33 bp, Homo sapien
acacaagaaatagagatcttaaagcagctagag

SEQ ID NO: 780983 - DNA, 33 bp, Homo sapien
ctatggtttcaccaaaatgaatttagatatgaa

SEQ ID NO: 780984 - DNA, 33 bp, Homo sapien
ctatggtttcaccaaagtgaatttagatatgaa

SEQ ID NO: 780985 - DNA, 33 bp, Homo sapien
aatcatgtttttgatcaattctggaaaattctg

SEQ ID NO: 780986 - DNA, 33 bp, Homo sapien
aatcatgtttttgatccattctggaaaattctg

SEQ ID NO: 780987 - DNA, 33 bp, Homo sapien
cactggcagtttgaaacgattgagcttttaatt

SEQ ID NO: 780988 - DNA, 33 bp, Homo sapien
cactggcagtttgaaatgattgagcttttaatt

SEQ ID NO: 780989 - DNA, 33 bp, Homo sapien
gccctacctgttcctacgcagagattaaaactt

SEQ ID NO: 780990 - DNA, 33 bp, Homo sapien
gccctacctgttcctatgcagagattaaaactt

SEQ ID NO: 780991 - DNA, 33 bp, Homo sapien
aagaactctgttaggcagatataacctgggact

SEQ ID NO: 780992 - DNA, 33 bp, Homo sapien
aagaactctgttaggcggatataacctgggact

SEQ ID NO: 780993 - DNA, 33 bp, Homo sapien
tggtccatccagataacaaatccaggctccagg

SEQ ID NO: 780994 - DNA, 33 bp, Homo sapien
tggtccatccagataataaatccaggctccagg

SEQ ID NO: 780995 - DNA, 33 bp, Homo sapien
tctttccattcagagcagcccattagatctttt

SEQ ID NO: 780996 - DNA, 33 bp, Homo sapien
tctttccattcagagcggcccattagatctttt

SEQ ID NO: 780997 - DNA, 33 bp, Homo sapien
tttgctgcttcatgtgcatacaagttgaactaa

SEQ ID NO: 780998 - DNA, 33 bp, Homo sapien
tttgctgcttcatgtgtatacaagttgaactaa

SEQ ID NO: 780999 - DNA, 33 bp, Homo sapien
ggaaatagaacaccgaaaattatatgcaaatat

SEQ ID NO: 781000 - DNA, 33 bp, Homo sapien
ggaaatagaacaccgataattatatgcaaatat

SEQ ID NO: 781001 - DNA, 33 bp, Homo sapien
ataaaagttgtagaatcattatctagtgccttt

SEQ ID NO: 781002 - DNA, 33 bp, Homo sapien
ataaaagttgtagaatgattatctagtgccttt

SEQ ID NO: 781003 - DNA, 33 bp, Homo sapien
atccagaggtgtgagaaataccaccttattgcc

SEQ ID NO: 781004 - DNA, 33 bp, Homo sapien
atccagaggtgtgagacataccaccttattgcc

SEQ ID NO: 781005 - DNA, 33 bp, Homo sapien
tagtcttgttgcacgaaaggaaagtacaagact

SEQ ID NO: 781006 - DNA, 33 bp, Homo sapien
tagtcttgttgcacgagaggaaagtacaagact

SEQ ID NO: 781007 - DNA, 33 bp, Homo sapien
ttaaccaaatggctacactgaaaaaatggtaag

SEQ ID NO: 781008 - DNA, 33 bp, Homo sapien
ttaaccaaatggctacgctgaaaaaatggtaag

SEQ ID NO: 781009 - DNA, 33 bp, Homo sapien
caactcccctagtcaaaatcagagaagccaaat

SEQ ID NO: 781010 - DNA, 33 bp, Homo sapien
caactcccctagtcaacatcagagaagccaaat

SEQ ID NO: 781011 - DNA, 33 bp, Homo sapien
ggcatttctgccataacgttggcagaggaaaca

SEQ ID NO: 781012 - DNA, 33 bp, Homo sapien
ggcatttctgccataatgttggcagaggaaaca

SEQ ID NO: 781013 - DNA, 33 bp, Homo sapien
gtctccagtttcttcaatagagaaatggcaatc

SEQ ID NO: 781014 - DNA, 33 bp, Homo sapien
gtctccagtttcttcattagagaaatggcaatc

SEQ ID NO: 781015 - DNA, 33 bp, Homo sapien
tattgtgagcattaataaaacaaagcaggtaga

SEQ ID NO: 781016 - DNA, 33 bp, Homo sapien
tattgtgagcattaatgaaacaaagcaggtaga

SEQ ID NO: 781017 - DNA, 33 bp, Homo sapien
gtcctcctattacataccacaaaagccagcccc

SEQ ID NO: 781018 - DNA, 33 bp, Homo sapien
gtcctcctattacatagcacaaaagccagcccc

SEQ ID NO: 781019 - DNA, 33 bp, Homo sapien
gtgcacgctatgccctcaaagccagactctagt

SEQ ID NO: 781020 - DNA, 33 bp, Homo sapien
gtgcacgctatgccctgaaagccagactctagt

SEQ ID NO: 781021 - DNA, 33 bp, Homo sapien
acattaataaatactgaaaattcggtaaaaata

SEQ ID NO: 781022 - DNA, 33 bp, Homo sapien
acattaataaatactgcaaattcggtaaaaata

SEQ ID NO: 781023 - DNA, 33 bp, Homo sapien
tgttttcagacccttgaacatctggttactctt

SEQ ID NO: 781024 - DNA, 33 bp, Homo sapien
tgttttcagacccttgtacatctggttactctt

SEQ ID NO: 781025 - DNA, 33 bp, Homo sapien
aacaaatgcatttttacggtactcaaatgaaaa

SEQ ID NO: 781026 - DNA, 33 bp, Homo sapien
aacaaatgcatttttatggtactcaaatgaaaa

SEQ ID NO: 781027 - DNA, 33 bp, Homo sapien
ttaagggtacttccaaaccatagaattggtggc

SEQ ID NO: 781028 - DNA, 33 bp, Homo sapien
ttaagggtacttccaagccatagaattggtggc

SEQ ID NO: 781029 - DNA, 33 bp, Homo sapien
gccacccagaaaacaccagcccttctctatatt

SEQ ID NO: 781030 - DNA, 33 bp, Homo sapien
gccacccagaaaacacgagcccttctctatatt

SEQ ID NO: 781031 - DNA, 33 bp, Homo sapien
tcctagggacctttcaaatattcagaacatatt

SEQ ID NO: 781032 - DNA, 33 bp, Homo sapien
tcctagggacctttcagatattcagaacatatt

SEQ ID NO: 781033 - DNA, 33 bp, Homo sapien
tttttatatacttgtaggtgagtagaatattgc

SEQ ID NO: 781034 - DNA, 33 bp, Homo sapien
tttttatatacttgtatgtgagtagaatattgc

SEQ ID NO: 781035 - DNA, 33 bp, Homo sapien
tgcaagtaaataagccaaaaacaaagtcagcac

SEQ ID NO: 781036 - DNA, 33 bp, Homo sapien
tgcaagtaaataagccgaaaacaaagtcagcac

SEQ ID NO: 781037 - DNA, 33 bp, Homo sapien
tttcatttaaagattgaatgtcagaactaccat

SEQ ID NO: 781038 - DNA, 33 bp, Homo sapien
tttcatttaaagattggatgtcagaactaccat

SEQ ID NO: 781039 - DNA, 33 bp, Homo sapien
tgtctgcataattcagacctatattctttctct

SEQ ID NO: 781040 - DNA, 33 bp, Homo sapien
tgtctgcataattcagccctatattctttctct

SEQ ID NO: 781041 - DNA, 33 bp, Homo sapien
tgtttctctgctcctcactaggaatgcttttag

SEQ ID NO: 781042 - DNA, 33 bp, Homo sapien
tgtttctctgctcctcgctaggaatgcttttag

SEQ ID NO: 781043 - DNA, 33 bp, Homo sapien
agctcaggaattgcaggcagatttacatactaa

SEQ ID NO: 781044 - DNA, 33 bp, Homo sapien
agctcaggaattgcagtcagatttacatactaa

SEQ ID NO: 781045 - DNA, 33 bp, Homo sapien
ccctgctccgcccccccaaatacgacggaacag

SEQ ID NO: 781046 - DNA, 33 bp, Homo sapien
ccctgctccgccccccgaaatacgacggaacag

SEQ ID NO: 781047 - DNA, 33 bp, Homo sapien
ccactaaatacccctgaaccacttcacaggtaa

SEQ ID NO: 781048 - DNA, 33 bp, Homo sapien
ccactaaatacccctgtaccacttcacaggtaa

SEQ ID NO: 781049 - DNA, 33 bp, Homo sapien
tcaaattgaaagcaccaaatgtgaagatctgga

SEQ ID NO: 781050 - DNA, 33 bp, Homo sapien
tcaaattgaaagcaccgaatgtgaagatctgga

SEQ ID NO: 781051 - DNA, 33 bp, Homo sapien
cttgtcgctgcttaaacgtcgcagtgctcaatt

SEQ ID NO: 781052 - DNA, 33 bp, Homo sapien
cttgtcgctgcttaaatgtcgcagtgctcaatt

SEQ ID NO: 781053 - DNA, 33 bp, Homo sapien
tgtatatttggcatctaaccagaaatatacagt

SEQ ID NO: 781054 - DNA, 33 bp, Homo sapien
tgtatatttggcatctgaccagaaatatacagt

SEQ ID NO: 781055 - DNA, 33 bp, Homo sapien
gcatccctttaaatcacgcaacaatattttgga

SEQ ID NO: 781056 - DNA, 33 bp, Homo sapien
gcatccctttaaatcatgcaacaatattttgga

SEQ ID NO: 781057 - DNA, 33 bp, Homo sapien
tgttcctaatagacaccggagacttacgaaaga

SEQ ID NO: 781058 - DNA, 33 bp, Homo sapien
tgttcctaatagacactggagacttacgaaaga

SEQ ID NO: 781059 - DNA, 33 bp, Homo sapien
gcagcagaagaaaaaaattattgtatgtctcag

SEQ ID NO: 781060 - DNA, 33 bp, Homo sapien
gcagcagaagaaaaaagttattgtatgtctcag

SEQ ID NO: 781061 - DNA, 33 bp, Homo sapien
catcagcagagagtaaaagtggtaggttaaagt

SEQ ID NO: 781062 - DNA, 33 bp, Homo sapien
catcagcagagagtaagagtggtaggttaaagt

SEQ ID NO: 781063 - DNA, 33 bp, Homo sapien
tccaaaacatccagagaaattaggcagatgtgt

SEQ ID NO: 781064 - DNA, 33 bp, Homo sapien
tccaaaacatccagagcaattaggcagatgtgt

SEQ ID NO: 781065 - DNA, 33 bp, Homo sapien
attacatactgagagacggagtaggaaaggtgg

SEQ ID NO: 781066 - DNA, 33 bp, Homo sapien
attacatactgagagatggagtaggaaaggtgg

SEQ ID NO: 781067 - DNA, 33 bp, Homo sapien
tttgagttttccaggtaaacatatcacagggcc

SEQ ID NO: 781068 - DNA, 33 bp, Homo sapien
tttgagttttccaggttaacatatcacagggcc

SEQ ID NO: 781069 - DNA, 33 bp, Homo sapien
tatttcaggagaacacagatacaaattaataaa

SEQ ID NO: 781070 - DNA, 33 bp, Homo sapien
tatttcaggagaacacggatacaaattaataaa

SEQ ID NO: 781071 - DNA, 33 bp, Homo sapien
tcttactatgctatcaaaagtgttttagcattt

SEQ ID NO: 781072 - DNA, 33 bp, Homo sapien
tcttactatgctatcagaagtgttttagcattt

SEQ ID NO: 781073 - DNA, 33 bp, Homo sapien
ccattttctgccttcaactccactacacgaact

SEQ ID NO: 781074 - DNA, 33 bp, Homo sapien
ccattttctgccttcatctccactacacgaact

SEQ ID NO: 781075 - DNA, 33 bp, Homo sapien
aaaatgtctcgagtaacaccccagaagcacagg

SEQ ID NO: 781076 - DNA, 33 bp, Homo sapien
aaaatgtctcgagtaataccccagaagcacagg

SEQ ID NO: 781077 - DNA, 33 bp, Homo sapien
aaattctaaatttgaaatgcctcaactttttgc

SEQ ID NO: 781078 - DNA, 33 bp, Homo sapien
aaattctaaatttgaagtgcctcaactttttgc

SEQ ID NO: 781079 - DNA, 33 bp, Homo sapien
ttgctggaatattgcaaaggtgcgaacttcaga

SEQ ID NO: 781080 - DNA, 33 bp, Homo sapien
ttgctggaatattgcataggtgcgaacttcaga

SEQ ID NO: 781081 - DNA, 33 bp, Homo sapien
agatagaaatgcactaaatctgaagttcgcacc

SEQ ID NO: 781082 - DNA, 33 bp, Homo sapien
agatagaaatgcactagatctgaagttcgcacc

SEQ ID NO: 781083 - DNA, 33 bp, Homo sapien
gctattgttattatgacgtacttggccctcttc

SEQ ID NO: 781084 - DNA, 33 bp, Homo sapien
gctattgttattatgatgtacttggccctcttc

SEQ ID NO: 781085 - DNA, 33 bp, Homo sapien
ttggaaaatgtggttacgatttggaatagatac

SEQ ID NO: 781086 - DNA, 33 bp, Homo sapien
ttggaaaatgtggttatgatttggaatagatac

SEQ ID NO: 781087 - DNA, 33 bp, Homo sapien
cccctttctttgcggacataacacttcaggaag

SEQ ID NO: 781088 - DNA, 33 bp, Homo sapien
cccctttctttgcggagataacacttcaggaag

SEQ ID NO: 781089 - DNA, 33 bp, Homo sapien
tggcgaggagcacatcacataggacctagtggg

SEQ ID NO: 781090 - DNA, 33 bp, Homo sapien
tggcgaggagcacatcgcataggacctagtggg

SEQ ID NO: 781091 - DNA, 33 bp, Homo sapien
cacaagtacaaaaacaactttcaaagaagagca

SEQ ID NO: 781092 - DNA, 33 bp, Homo sapien
cacaagtacaaaaacagctttcaaagaagagca

SEQ ID NO: 781093 - DNA, 33 bp, Homo sapien
tactttctgtctgtgcagatttgtttattcttg

SEQ ID NO: 781094 - DNA, 33 bp, Homo sapien
tactttctgtctgtgcggatttgtttattcttg

SEQ ID NO: 781095 - DNA, 33 bp, Homo sapien
tattgtgactaggaacaactagtataaaccatc

SEQ ID NO: 781096 - DNA, 33 bp, Homo sapien
tattgtgactaggaacgactagtataaaccatc

SEQ ID NO: 781097 - DNA, 33 bp, Homo sapien
aaactgaaaagaaaaactgtggagttaggcatt

SEQ ID NO: 781098 - DNA, 33 bp, Homo sapien
aaactgaaaagaaaaagtgtggagttaggcatt

SEQ ID NO: 781099 - DNA, 33 bp, Homo sapien
tgtttattcccagtgactagtaaattgcatttt

SEQ ID NO: 781100 - DNA, 33 bp, Homo sapien
tgtttattcccagtgattagtaaattgcatttt

SEQ ID NO: 781101 - DNA, 33 bp, Homo sapien
atctgctgatcaaggcaacttctggcaggtgga

SEQ ID NO: 781102 - DNA, 33 bp, Homo sapien
atctgctgatcaaggcgacttctggcaggtgga

SEQ ID NO: 781103 - DNA, 33 bp, Homo sapien
caattgtcctaaaaacggaaagtctcactacca

SEQ ID NO: 781104 - DNA, 33 bp, Homo sapien
caattgtcctaaaaactgaaagtctcactacca

SEQ ID NO: 781105 - DNA, 33 bp, Homo sapien
gtgacataagaaaacagatgggtgtatgtatgt

SEQ ID NO: 781106 - DNA, 33 bp, Homo sapien
gtgacataagaaaacatatgggtgtatgtatgt

SEQ ID NO: 781107 - DNA, 33 bp, Homo sapien
acttctgattctatgccctaaaggtgtttgcat

SEQ ID NO: 781108 - DNA, 33 bp, Homo sapien
acttctgattctatgctctaaaggtgtttgcat

SEQ ID NO: 781109 - DNA, 33 bp, Homo sapien
ccttcagagacttggacaataaaattgctagag

SEQ ID NO: 781110 - DNA, 33 bp, Homo sapien
ccttcagagacttggagaataaaattgctagag

SEQ ID NO: 781111 - DNA, 33 bp, Homo sapien
taagattgggtcacaacattacctggacataaa

SEQ ID NO: 781112 - DNA, 33 bp, Homo sapien
taagattgggtcacaatattacctggacataaa

SEQ ID NO: 781113 - DNA, 33 bp, Homo sapien
caaccagattttgtgacagcagtctcagtggtg

SEQ ID NO: 781114 - DNA, 33 bp, Homo sapien
caaccagattttgtgatagcagtctcagtggtg

SEQ ID NO: 781115 - DNA, 33 bp, Homo sapien
aatgtgtgaatcagaaatacaatcaagaggtcg

SEQ ID NO: 781116 - DNA, 33 bp, Homo sapien
aatgtgtgaatcagaagtacaatcaagaggtcg

SEQ ID NO: 781117 - DNA, 33 bp, Homo sapien
gtaatgctattttatacagttgctgtggccatt

SEQ ID NO: 781118 - DNA, 33 bp, Homo sapien
gtaatgctattttatagagttgctgtggccatt

SEQ ID NO: 781119 - DNA, 33 bp, Homo sapien
gtatgacacaaaattacgtgcttggatacacac

SEQ ID NO: 781120 - DNA, 33 bp, Homo sapien
gtatgacacaaaattatgtgcttggatacacac

SEQ ID NO: 781121 - DNA, 33 bp, Homo sapien
aaattttattttcaaacgttgatgttgcagttt

SEQ ID NO: 781122 - DNA, 33 bp, Homo sapien
aaattttattttcaaaggttgatgttgcagttt

SEQ ID NO: 781123 - DNA, 33 bp, Homo sapien
tccatgggatggtttccctttacctgtgtgtgg

SEQ ID NO: 781124 - DNA, 33 bp, Homo sapien
tccatgggatggtttctctttacctgtgtgtgg

SEQ ID NO: 781125 - DNA, 33 bp, Homo sapien
gatcctaagcatttgacgatgactgtgagaagc

SEQ ID NO: 781126 - DNA, 33 bp, Homo sapien
gatcctaagcatttgatgatgactgtgagaagc

SEQ ID NO: 781127 - DNA, 33 bp, Homo sapien
aagtgattcctaagaaaaagacctgtgggagat

SEQ ID NO: 781128 - DNA, 33 bp, Homo sapien
aagtgattcctaagaagaagacctgtgggagat

SEQ ID NO: 781129 - DNA, 33 bp, Homo sapien
cccggcaacaattaagcctacccatatgcaaga

SEQ ID NO: 781130 - DNA, 33 bp, Homo sapien
cccggcaacaattaagtctacccatatgcaaga

SEQ ID NO: 781131 - DNA, 33 bp, Homo sapien
tgcctaacctcagggacatgtctttctttaggc

SEQ ID NO: 781132 - DNA, 33 bp, Homo sapien
tgcctaacctcagggatatgtctttctttaggc

SEQ ID NO: 781133 - DNA, 33 bp, Homo sapien
catgcactgactcactaagaatcaccagctttt

SEQ ID NO: 781134 - DNA, 33 bp, Homo sapien
catgcactgactcactgagaatcaccagctttt

SEQ ID NO: 781135 - DNA, 33 bp, Homo sapien
caacagtcacccaagacatacttactcctcaaa

SEQ ID NO: 781136 - DNA, 33 bp, Homo sapien
caacagtcacccaagatatacttactcctcaaa

SEQ ID NO: 781137 - DNA, 33 bp, Homo sapien
gcacatcgatacctcacgaagcattttcttcaa

SEQ ID NO: 781138 - DNA, 33 bp, Homo sapien
gcacatcgatacctcatgaagcattttcttcaa

SEQ ID NO: 781139 - DNA, 33 bp, Homo sapien
agggcattagaagaaccacatatatctcagtta

SEQ ID NO: 781140 - DNA, 33 bp, Homo sapien
agggcattagaagaactacatatatctcagtta

SEQ ID NO: 781141 - DNA, 33 bp, Homo sapien
taaatacacaatacccaccactttctccaagtc

SEQ ID NO: 781142 - DNA, 33 bp, Homo sapien
taaatacacaataccctccactttctccaagtc

SEQ ID NO: 781143 - DNA, 33 bp, Homo sapien
ttcagaggacatctgccagagaactaagaagag

SEQ ID NO: 781144 - DNA, 33 bp, Homo sapien
ttcagaggacatctgctagagaactaagaagag

SEQ ID NO: 781145 - DNA, 33 bp, Homo sapien
aggtttgctatagcacaggtcccgaacacccag

SEQ ID NO: 781146 - DNA, 33 bp, Homo sapien
aggtttgctatagcacgggtcccgaacacccag

SEQ ID NO: 781147 - DNA, 33 bp, Homo sapien
gatgtgaaccagtacccgaattcctgtgtatag

SEQ ID NO: 781148 - DNA, 33 bp, Homo sapien
gatgtgaaccagtacctgaattcctgtgtatag

SEQ ID NO: 781149 - DNA, 33 bp, Homo sapien
ggaaagtggaatcataaatacagcattttcttt

SEQ ID NO: 781150 - DNA, 33 bp, Homo sapien
ggaaagtggaatcatatatacagcattttcttt

SEQ ID NO: 781151 - DNA, 33 bp, Homo sapien
taaaccttggctggtcactagtatttgtcccct

SEQ ID NO: 781152 - DNA, 33 bp, Homo sapien
taaaccttggctggtcgctagtatttgtcccct

SEQ ID NO: 781153 - DNA, 33 bp, Homo sapien
tcagataatttcctcactagtgcccacaaatag

SEQ ID NO: 781154 - DNA, 33 bp, Homo sapien
tcagataatttcctcagtagtgcccacaaatag

SEQ ID NO: 781155 - DNA, 33 bp, Homo sapien
tgaaaatggagtaatacagtaggacccaagaaa

SEQ ID NO: 781156 - DNA, 33 bp, Homo sapien
tgaaaatggagtaatatagtaggacccaagaaa

SEQ ID NO: 781157 - DNA, 33 bp, Homo sapien
gcttaggacagaggaaaactgcctcttggagat

SEQ ID NO: 781158 - DNA, 33 bp, Homo sapien
gcttaggacagaggaacactgcctcttggagat

SEQ ID NO: 781159 - DNA, 33 bp, Homo sapien
caaatactgaagtcaaataaggagctgcagaac

SEQ ID NO: 781160 - DNA, 33 bp, Homo sapien
caaatactgaagtcaagtaaggagctgcagaac

SEQ ID NO: 781161 - DNA, 33 bp, Homo sapien
cttgaaccctagtccgacagactctaaatgtgt

SEQ ID NO: 781162 - DNA, 33 bp, Homo sapien
cttgaaccctagtccggcagactctaaatgtgt

SEQ ID NO: 781163 - DNA, 33 bp, Homo sapien
tggaggcaaaatgaaagtgggttgtgtacacag

SEQ ID NO: 781164 - DNA, 33 bp, Homo sapien
tggaggcaaaatgaaattgggttgtgtacacag

SEQ ID NO: 781165 - DNA, 33 bp, Homo sapien
aggaagagcaaagaaaatctggacaaaagaaat

SEQ ID NO: 781166 - DNA, 33 bp, Homo sapien
aggaagagcaaagaaagtctggacaaaagaaat

SEQ ID NO: 781167 - DNA, 33 bp, Homo sapien
agactctgcctaaaaaaaaattgtgttatggaa

SEQ ID NO: 781168 - DNA, 33 bp, Homo sapien
agactctgcctaaaaacaaattgtgttatggaa

SEQ ID NO: 781169 - DNA, 33 bp, Homo sapien
aaaattctactgcctcaaatccactgaaacaac

SEQ ID NO: 781170 - DNA, 33 bp, Homo sapien
aaaattctactgcctcgaatccactgaaacaac

SEQ ID NO: 781171 - DNA, 33 bp, Homo sapien
tgtgagacaatgatccaaataaggaaggaaaat

SEQ ID NO: 781172 - DNA, 33 bp, Homo sapien
tgtgagacaatgatccgaataaggaaggaaaat

SEQ ID NO: 781173 - DNA, 33 bp, Homo sapien
cgtgactcaatgacatcaaggttctagatcctt

SEQ ID NO: 781174 - DNA, 33 bp, Homo sapien
cgtgactcaatgacattaaggttctagatcctt

SEQ ID NO: 781175 - DNA, 33 bp, Homo sapien
acagcctagcgcccacagtcaatcctgggtgag

SEQ ID NO: 781176 - DNA, 33 bp, Homo sapien
acagcctagcgcccacggtcaatcctgggtgag

SEQ ID NO: 781177 - DNA, 33 bp, Homo sapien
attgctttctgttaaccaacctctggctatgtg

SEQ ID NO: 781178 - DNA, 33 bp, Homo sapien
attgctttctgttaacgaacctctggctatgtg

SEQ ID NO: 781179 - DNA, 33 bp, Homo sapien
ctactctctacttctccgaaatcaactttttta

SEQ ID NO: 781180 - DNA, 33 bp, Homo sapien
ctactctctacttctctgaaatcaactttttta

SEQ ID NO: 781181 - DNA, 33 bp, Homo sapien
tgtcctctgaggcaccaaagtttttattttgat

SEQ ID NO: 781182 - DNA, 33 bp, Homo sapien
tgtcctctgaggcaccgaagtttttattttgat

SEQ ID NO: 781183 - DNA, 33 bp, Homo sapien
agacaacatttacaaaccttgcgtctgataagt

SEQ ID NO: 781184 - DNA, 33 bp, Homo sapien
agacaacatttacaaatcttgcgtctgataagt

SEQ ID NO: 781185 - DNA, 33 bp, Homo sapien
cctgagcagactaagacaagatgcactccccac

SEQ ID NO: 781186 - DNA, 33 bp, Homo sapien
cctgagcagactaagataagatgcactccccac

SEQ ID NO: 781187 - DNA, 33 bp, Homo sapien
aaacatttctcttccccgagttcagtaattgtc

SEQ ID NO: 781188 - DNA, 33 bp, Homo sapien
aaacatttctcttccctgagttcagtaattgtc

SEQ ID NO: 781189 - DNA, 33 bp, Homo sapien
tttttaaaaatgtgaccgctagaaaactttaaa

SEQ ID NO: 781190 - DNA, 33 bp, Homo sapien
tttttaaaaatgtgactgctagaaaactttaaa

SEQ ID NO: 781191 - DNA, 33 bp, Homo sapien
cacattgtgagataccaaatgtggattagaagt

SEQ ID NO: 781192 - DNA, 33 bp, Homo sapien
cacattgtgagataccgaatgtggattagaagt

SEQ ID NO: 781193 - DNA, 33 bp, Homo sapien
cacctcgaggcattgtaaaaataaaattatgtc

SEQ ID NO: 781194 - DNA, 33 bp, Homo sapien
cacctcgaggcattgtgaaaataaaattatgtc

SEQ ID NO: 781195 - DNA, 33 bp, Homo sapien
aatcctcatgtctgtcaacagagaatcaatttt

SEQ ID NO: 781196 - DNA, 33 bp, Homo sapien
aatcctcatgtctgtccacagagaatcaatttt

SEQ ID NO: 781197 - DNA, 33 bp, Homo sapien
gttagtttattttctgcagctctcccggtattg

SEQ ID NO: 781198 - DNA, 33 bp, Homo sapien
gttagtttattttctgtagctctcccggtattg

SEQ ID NO: 781199 - DNA, 33 bp, Homo sapien
agggaactagtctgaaagggtcaatagtctcag

SEQ ID NO: 781200 - DNA, 33 bp, Homo sapien
agggaactagtctgaaggggtcaatagtctcag

SEQ ID NO: 781201 - DNA, 33 bp, Homo sapien
gtgtggcttgaggatcacttggtgaaatagaaa

SEQ ID NO: 781202 - DNA, 33 bp, Homo sapien
gtgtggcttgaggatctcttggtgaaatagaaa

SEQ ID NO: 781203 - DNA, 33 bp, Homo sapien
tatcatagcaatttcaccgtacttgtaatgcag

SEQ ID NO: 781204 - DNA, 33 bp, Homo sapien
tatcatagcaatttcatcgtacttgtaatgcag

SEQ ID NO: 781205 - DNA, 33 bp, Homo sapien
tagttgcttttcaacaaagattcaggataaaga

SEQ ID NO: 781206 - DNA, 33 bp, Homo sapien
tagttgcttttcaacagagattcaggataaaga

SEQ ID NO: 781207 - DNA, 33 bp, Homo sapien
aaggaaatggtcaaaactccccatgccctagct

SEQ ID NO: 781208 - DNA, 33 bp, Homo sapien
aaggaaatggtcaaaattccccatgccctagct

SEQ ID NO: 781209 - DNA, 33 bp, Homo sapien
caacagaagtttggaacgcaacccttgtaattt

SEQ ID NO: 781210 - DNA, 33 bp, Homo sapien
caacagaagtttggaatgcaacccttgtaattt

SEQ ID NO: 781211 - DNA, 33 bp, Homo sapien
gatgctaaaaggaagaacagtgcttctgtgaat

SEQ ID NO: 781212 - DNA, 33 bp, Homo sapien
gatgctaaaaggaagagcagtgcttctgtgaat

SEQ ID NO: 781213 - DNA, 33 bp, Homo sapien
gaaggtagatgacatcagagaatggaaaaatgg

SEQ ID NO: 781214 - DNA, 33 bp, Homo sapien
gaaggtagatgacatcggagaatggaaaaatgg

SEQ ID NO: 781215 - DNA, 33 bp, Homo sapien
caccatcaaatgctaccgccggcatgaaaattg

SEQ ID NO: 781216 - DNA, 33 bp, Homo sapien
caccatcaaatgctactgccggcatgaaaattg

SEQ ID NO: 781217 - DNA, 33 bp, Homo sapien
ttttatggtataagaagctcaagaggataaatt

SEQ ID NO: 781218 - DNA, 33 bp, Homo sapien
ttttatggtataagaatctcaagaggataaatt

SEQ ID NO: 781219 - DNA, 33 bp, Homo sapien
cctttcaaaaccaaataactcaatccagtcagt

SEQ ID NO: 781220 - DNA, 33 bp, Homo sapien
cctttcaaaaccaaatgactcaatccagtcagt

SEQ ID NO: 781221 - DNA, 33 bp, Homo sapien
tagaagataaggtcacaaaataggcagagatca

SEQ ID NO: 781222 - DNA, 33 bp, Homo sapien
tagaagataaggtcacgaaataggcagagatca

SEQ ID NO: 781223 - DNA, 33 bp, Homo sapien
atcctgtatattgccacagaagcttgttgaatg

SEQ ID NO: 781224 - DNA, 33 bp, Homo sapien
atcctgtatattgccatagaagcttgttgaatg

SEQ ID NO: 781225 - DNA, 33 bp, Homo sapien
gctcttccccagtgagaattgttgcaaatgggg

SEQ ID NO: 781226 - DNA, 33 bp, Homo sapien
gctcttccccagtgaggattgttgcaaatgggg

SEQ ID NO: 781227 - DNA, 33 bp, Homo sapien
gtcagcatggagacaaatgatctcacaacaagg

SEQ ID NO: 781228 - DNA, 33 bp, Homo sapien
gtcagcatggagacaagtgatctcacaacaagg

SEQ ID NO: 781229 - DNA, 33 bp, Homo sapien
cagaactaggcatttcgctgtgtcgttaatctt

SEQ ID NO: 781230 - DNA, 33 bp, Homo sapien
cagaactaggcatttctctgtgtcgttaatctt

SEQ ID NO: 781231 - DNA, 33 bp, Homo sapien
tgttccttgtcaatgacagaaaatactcttctc

SEQ ID NO: 781232 - DNA, 33 bp, Homo sapien
tgttccttgtcaatgatagaaaatactcttctc

SEQ ID NO: 781233 - DNA, 33 bp, Homo sapien
cctcattttcatgaccaggaaattccacgcttt

SEQ ID NO: 781234 - DNA, 33 bp, Homo sapien
cctcattttcatgaccgggaaattccacgcttt

SEQ ID NO: 781235 - DNA, 33 bp, Homo sapien
tctccaagctttgataactgtggcttaatattc

SEQ ID NO: 781236 - DNA, 33 bp, Homo sapien
tctccaagctttgatacctgtggcttaatattc

SEQ ID NO: 781237 - DNA, 33 bp, Homo sapien
gacagttaataaatgcagcaggatcccactcat

SEQ ID NO: 781238 - DNA, 33 bp, Homo sapien
gacagttaataaatgcggcaggatcccactcat

SEQ ID NO: 781239 - DNA, 33 bp, Homo sapien
cccagatctaaggtacagaagttctaggttcta

SEQ ID NO: 781240 - DNA, 33 bp, Homo sapien
cccagatctaaggtaccgaagttctaggttcta

SEQ ID NO: 781241 - DNA, 33 bp, Homo sapien
gctatgcaagccaacaatgtccttaatatttaa

SEQ ID NO: 781242 - DNA, 33 bp, Homo sapien
gctatgcaagccaacattgtccttaatatttaa

SEQ ID NO: 781243 - DNA, 33 bp, Homo sapien
atggctgcttaaatcaaagaattgtataaagaa

SEQ ID NO: 781244 - DNA, 33 bp, Homo sapien
atggctgcttaaatcagagaattgtataaagaa

SEQ ID NO: 781245 - DNA, 33 bp, Homo sapien
aagggcagtgaaaaacactgaaaagagctgtga

SEQ ID NO: 781246 - DNA, 33 bp, Homo sapien
aagggcagtgaaaaactctgaaaagagctgtga

SEQ ID NO: 781247 - DNA, 33 bp, Homo sapien
tgagaagaaatgtcagacaactcactgatctaa

SEQ ID NO: 781248 - DNA, 33 bp, Homo sapien
tgagaagaaatgtcaggcaactcactgatctaa

SEQ ID NO: 781249 - DNA, 33 bp, Homo sapien
ggagctgcaatccttacgggagatacagaactt

SEQ ID NO: 781250 - DNA, 33 bp, Homo sapien
ggagctgcaatccttatgggagatacagaactt

SEQ ID NO: 781251 - DNA, 33 bp, Homo sapien
gtagtaattttgtagcgcaactgtgatgtcaca

SEQ ID NO: 781252 - DNA, 33 bp, Homo sapien
gtagtaattttgtagctcaactgtgatgtcaca

SEQ ID NO: 781253 - DNA, 33 bp, Homo sapien
tttcaaagaggaccacggaatcctgttctctaa

SEQ ID NO: 781254 - DNA, 33 bp, Homo sapien
tttcaaagaggaccactgaatcctgttctctaa

SEQ ID NO: 781255 - DNA, 33 bp, Homo sapien
tttcctcatccttcaaattagaatgctatcatt

SEQ ID NO: 781256 - DNA, 33 bp, Homo sapien
tttcctcatccttcaacttagaatgctatcatt

SEQ ID NO: 781257 - DNA, 33 bp, Homo sapien
ccttctgtacccgccaactgtaaacttagaatt

SEQ ID NO: 781258 - DNA, 33 bp, Homo sapien
ccttctgtacccgccagctgtaaacttagaatt

SEQ ID NO: 781259 - DNA, 33 bp, Homo sapien
tattccctgaacgtgccaatgactttttctgta

SEQ ID NO: 781260 - DNA, 33 bp, Homo sapien
tattccctgaacgtgctaatgactttttctgta

SEQ ID NO: 781261 - DNA, 33 bp, Homo sapien
ttcaaagttaagagaagaaggtggaagggtctt

SEQ ID NO: 781262 - DNA, 33 bp, Homo sapien
ttcaaagttaagagaataaggtggaagggtctt

SEQ ID NO: 781263 - DNA, 33 bp, Homo sapien
gttgatgttgttaagaactatggtaagaacaaa

SEQ ID NO: 781264 - DNA, 33 bp, Homo sapien
gttgatgttgttaagatctatggtaagaacaaa

SEQ ID NO: 781265 - DNA, 33 bp, Homo sapien
ggtgcatttatcaaaaccaggaaaccaacactg

SEQ ID NO: 781266 - DNA, 33 bp, Homo sapien
ggtgcatttatcaaaatcaggaaaccaacactg

SEQ ID NO: 781267 - DNA, 33 bp, Homo sapien
ttaacatcttatactaacacggtgcatttatca

SEQ ID NO: 781268 - DNA, 33 bp, Homo sapien
ttaacatcttatactaccacggtgcatttatca

SEQ ID NO: 781269 - DNA, 33 bp, Homo sapien
attgtaggccaacgtaaggctgttagcttctac

SEQ ID NO: 781270 - DNA, 33 bp, Homo sapien
attgtaggccaacgtacggctgttagcttctac

SEQ ID NO: 781271 - DNA, 33 bp, Homo sapien
tgttaacagtatctctaacacgtagcacaaaat

SEQ ID NO: 781272 - DNA, 33 bp, Homo sapien
tgttaacagtatctctgacacgtagcacaaaat

SEQ ID NO: 781273 - DNA, 33 bp, Homo sapien
ttctgtaggattagcaaagctatggaaatgaac

SEQ ID NO: 781274 - DNA, 33 bp, Homo sapien
ttctgtaggattagcagagctatggaaatgaac

SEQ ID NO: 781275 - DNA, 33 bp, Homo sapien
gaggaatccaatgttcagaaaatgaaataccaa

SEQ ID NO: 781276 - DNA, 33 bp, Homo sapien
gaggaatccaatgttcggaaaatgaaataccaa

SEQ ID NO: 781277 - DNA, 33 bp, Homo sapien
ctcagcagaaagctcaactagtggctgatagaa

SEQ ID NO: 781278 - DNA, 33 bp, Homo sapien
ctcagcagaaagctcacctagtggctgatagaa

SEQ ID NO: 781279 - DNA, 33 bp, Homo sapien
cctgcctgttgtcaaaatctgctgaggatctgt

SEQ ID NO: 781280 - DNA, 33 bp, Homo sapien
cctgcctgttgtcaaactctgctgaggatctgt

SEQ ID NO: 781281 - DNA, 33 bp, Homo sapien
ttaagcacatctaggcaaaggaccttattgtag

SEQ ID NO: 781282 - DNA, 33 bp, Homo sapien
ttaagcacatctaggcgaaggaccttattgtag

SEQ ID NO: 781283 - DNA, 33 bp, Homo sapien
gtttgtaggtttgatacgataatcacagaaaaa

SEQ ID NO: 781284 - DNA, 33 bp, Homo sapien
gtttgtaggtttgatatgataatcacagaaaaa

SEQ ID NO: 781285 - DNA, 33 bp, Homo sapien
actatatgcttgcagtcaaaacagttcttataa

SEQ ID NO: 781286 - DNA, 33 bp, Homo sapien
actatatgcttgcagtgaaaacagttcttataa

SEQ ID NO: 781287 - DNA, 33 bp, Homo sapien
aaatccaaataggcaaacctgggttaatataat

SEQ ID NO: 781288 - DNA, 33 bp, Homo sapien
aaatccaaataggcaatcctgggttaatataat

SEQ ID NO: 781289 - DNA, 33 bp, Homo sapien
agctgtcagacaggaacgtttaattgtgcagaa

SEQ ID NO: 781290 - DNA, 33 bp, Homo sapien
agctgtcagacaggaatgtttaattgtgcagaa

SEQ ID NO: 781291 - DNA, 33 bp, Homo sapien
tagtggacagaacataatatctaggcctgactc

SEQ ID NO: 781292 - DNA, 33 bp, Homo sapien
tagtggacagaacatagtatctaggcctgactc

SEQ ID NO: 781293 - DNA, 33 bp, Homo sapien
cccttaaagacacaccaagatacaatattttgc

SEQ ID NO: 781294 - DNA, 33 bp, Homo sapien
cccttaaagacacaccgagatacaatattttgc

SEQ ID NO: 781295 - DNA, 33 bp, Homo sapien
tgtacaaaagaaatacaggacacataaaccaga

SEQ ID NO: 781296 - DNA, 33 bp, Homo sapien
tgtacaaaagaaatacgggacacataaaccaga

SEQ ID NO: 781297 - DNA, 33 bp, Homo sapien
gatatggagtgatttcaagaatacattgctatg

SEQ ID NO: 781298 - DNA, 33 bp, Homo sapien
gatatggagtgatttccagaatacattgctatg

SEQ ID NO: 781299 - DNA, 33 bp, Homo sapien
tgcaatgaataacctacgtatttttgtattgtt

SEQ ID NO: 781300 - DNA, 33 bp, Homo sapien
tgcaatgaataacctatgtatttttgtattgtt

SEQ ID NO: 781301 - DNA, 33 bp, Homo sapien
ttcactcgcaattggaaaaatgcaaactaaaac

SEQ ID NO: 781302 - DNA, 33 bp, Homo sapien
ttcactcgcaattggagaaatgcaaactaaaac

SEQ ID NO: 781303 - DNA, 33 bp, Homo sapien
cacaaacagattgaaacagcatttttttttttt

SEQ ID NO: 781304 - DNA, 33 bp, Homo sapien
cacaaacagattgaaagagcatttttttttttt

SEQ ID NO: 781305 - DNA, 33 bp, Homo sapien
taggcacatcatagtcaagctgctaaaaatcaa

SEQ ID NO: 781306 - DNA, 33 bp, Homo sapien
taggcacatcatagtcgagctgctaaaaatcaa

SEQ ID NO: 781307 - DNA, 33 bp, Homo sapien
gaagactcaccctgacaaaacttcaaatatcct

SEQ ID NO: 781308 - DNA, 33 bp, Homo sapien
gaagactcaccctgacgaaacttcaaatatcct

SEQ ID NO: 781309 - DNA, 33 bp, Homo sapien
atgtctgaattggacagagaaaatagatttctc

SEQ ID NO: 781310 - DNA, 33 bp, Homo sapien
atgtctgaattggacatagaaaatagatttctc

SEQ ID NO: 781311 - DNA, 33 bp, Homo sapien
ctgttctctccttcaaccaacatatttgttcgt

SEQ ID NO: 781312 - DNA, 33 bp, Homo sapien
ctgttctctccttcaatcaacatatttgttcgt

SEQ ID NO: 781313 - DNA, 33 bp, Homo sapien
gatgagcaactcctacaagtctatgacagggaa

SEQ ID NO: 781314 - DNA, 33 bp, Homo sapien
gatgagcaactcctacgagtctatgacagggaa

SEQ ID NO: 781315 - DNA, 33 bp, Homo sapien
tcaaaatttcatgggacgttcttggtaaaacta

SEQ ID NO: 781316 - DNA, 33 bp, Homo sapien
tcaaaatttcatgggatgttcttggtaaaacta

SEQ ID NO: 781317 - DNA, 33 bp, Homo sapien
agaagaaatgtttggaccatgaatggacactga

SEQ ID NO: 781318 - DNA, 33 bp, Homo sapien
agaagaaatgtttggatcatgaatggacactga

SEQ ID NO: 781319 - DNA, 33 bp, Homo sapien
tgtgcttttgatattacagttgagaactctttg

SEQ ID NO: 781320 - DNA, 33 bp, Homo sapien
tgtgcttttgatattatagttgagaactctttg

SEQ ID NO: 781321 - DNA, 33 bp, Homo sapien
tctgtgaccaggattgcataaagtatagcaatt

SEQ ID NO: 781322 - DNA, 33 bp, Homo sapien
tctgtgaccaggattgtataaagtatagcaatt

SEQ ID NO: 781323 - DNA, 33 bp, Homo sapien
cattagttatgccaacagacatttgtgctaaga

SEQ ID NO: 781324 - DNA, 33 bp, Homo sapien
cattagttatgccaacggacatttgtgctaaga

SEQ ID NO: 781325 - DNA, 33 bp, Homo sapien
ttagctatcttcaaatgacagttagcaatgatt

SEQ ID NO: 781326 - DNA, 33 bp, Homo sapien
ttagctatcttcaaattacagttagcaatgatt

SEQ ID NO: 781327 - DNA, 33 bp, Homo sapien
atctcagaaaactctgcaataattttgatacat

SEQ ID NO: 781328 - DNA, 33 bp, Homo sapien
atctcagaaaactctggaataattttgatacat

SEQ ID NO: 781329 - DNA, 33 bp, Homo sapien
tgacagcttgtcatcaaaaacataaacatcaat

SEQ ID NO: 781330 - DNA, 33 bp, Homo sapien
tgacagcttgtcatcacaaacataaacatcaat

SEQ ID NO: 781331 - DNA, 33 bp, Homo sapien
ttcaaccaacagaaaacttcaatcaggttcatg

SEQ ID NO: 781332 - DNA, 33 bp, Homo sapien
ttcaaccaacagaaaatttcaatcaggttcatg

SEQ ID NO: 781333 - DNA, 33 bp, Homo sapien
agtggctctctgatacaattttccaaaatgtac

SEQ ID NO: 781334 - DNA, 33 bp, Homo sapien
agtggctctctgatacgattttccaaaatgtac

SEQ ID NO: 781335 - DNA, 33 bp, Homo sapien
cctgtgtatgcttctacctaaacatggccagtt

SEQ ID NO: 781336 - DNA, 33 bp, Homo sapien
cctgtgtatgcttctatctaaacatggccagtt

SEQ ID NO: 781337 - DNA, 33 bp, Homo sapien
aatttatttcaacacactctttcactttgaata

SEQ ID NO: 781338 - DNA, 33 bp, Homo sapien
aatttatttcaacacagtctttcactttgaata

SEQ ID NO: 781339 - DNA, 33 bp, Homo sapien
tctcctgcttaaaataactaaaattggagaaag

SEQ ID NO: 781340 - DNA, 33 bp, Homo sapien
tctcctgcttaaaatatctaaaattggagaaag

SEQ ID NO: 781341 - DNA, 33 bp, Homo sapien
atctgaatccagtgcacactttcttgctaacag

SEQ ID NO: 781342 - DNA, 33 bp, Homo sapien
atctgaatccagtgcatactttcttgctaacag

SEQ ID NO: 781343 - DNA, 33 bp, Homo sapien
ctttgaattaaggacaaaacctgtacaaaagtg

SEQ ID NO: 781344 - DNA, 33 bp, Homo sapien
ctttgaattaaggacagaacctgtacaaaagtg

SEQ ID NO: 781345 - DNA, 33 bp, Homo sapien
tcagcgctgagatacactgaggcttaaacaggc

SEQ ID NO: 781346 - DNA, 33 bp, Homo sapien
tcagcgctgagatacattgaggcttaaacaggc

SEQ ID NO: 781347 - DNA, 33 bp, Homo sapien
tcaaagtttaatgaaagagacaaacacaaaaaa

SEQ ID NO: 781348 - DNA, 33 bp, Homo sapien
tcaaagtttaatgaaatagacaaacacaaaaaa

SEQ ID NO: 781349 - DNA, 33 bp, Homo sapien
catttcatctttagacaacctctagacaaatac

SEQ ID NO: 781350 - DNA, 33 bp, Homo sapien
catttcatctttagaccacctctagacaaatac

SEQ ID NO: 781351 - DNA, 33 bp, Homo sapien
atagagtaaaagaaaacgaagagacacataagt

SEQ ID NO: 781352 - DNA, 33 bp, Homo sapien
atagagtaaaagaaaatgaagagacacataagt

SEQ ID NO: 781353 - DNA, 33 bp, Homo sapien
agaatcaggcctagaactgaaaagaaaatcaaa

SEQ ID NO: 781354 - DNA, 33 bp, Homo sapien
agaatcaggcctagaattgaaaagaaaatcaaa

SEQ ID NO: 781355 - DNA, 33 bp, Homo sapien
cactacctgagacgtcgaaaaaggagcacatct

SEQ ID NO: 781356 - DNA, 33 bp, Homo sapien
cactacctgagacgtctaaaaaggagcacatct

SEQ ID NO: 781357 - DNA, 33 bp, Homo sapien
tgggaatagcatcggcagattacacagtcagca

SEQ ID NO: 781358 - DNA, 33 bp, Homo sapien
tgggaatagcatcggcggattacacagtcagca

SEQ ID NO: 781359 - DNA, 33 bp, Homo sapien
gaagagtgtgtctcacaaaagactgagtcaaaa

SEQ ID NO: 781360 - DNA, 33 bp, Homo sapien
gaagagtgtgtctcacgaaagactgagtcaaaa

SEQ ID NO: 781361 - DNA, 33 bp, Homo sapien
tcatttccagctgttaactcaacacaaatatga

SEQ ID NO: 781362 - DNA, 33 bp, Homo sapien
tcatttccagctgttacctcaacacaaatatga

SEQ ID NO: 781363 - DNA, 33 bp, Homo sapien
caagcaccttatccaaaaacaaattgattagtt

SEQ ID NO: 781364 - DNA, 33 bp, Homo sapien
caagcaccttatccaagaacaaattgattagtt

SEQ ID NO: 781365 - DNA, 33 bp, Homo sapien
ttagtagacttttctccgaagtcagttgacaac

SEQ ID NO: 781366 - DNA, 33 bp, Homo sapien
ttagtagacttttctctgaagtcagttgacaac

SEQ ID NO: 781367 - DNA, 33 bp, Homo sapien
ttaataggtatgttcacgacaagttcagggaca

SEQ ID NO: 781368 - DNA, 33 bp, Homo sapien
ttaataggtatgttcatgacaagttcagggaca

SEQ ID NO: 781369 - DNA, 33 bp, Homo sapien
gagtttttacctttccagaccaattgttttgta

SEQ ID NO: 781370 - DNA, 33 bp, Homo sapien
gagtttttacctttccggaccaattgttttgta

SEQ ID NO: 781371 - DNA, 33 bp, Homo sapien
aaaaatgaatcaatcacgtttcaccggacatgg

SEQ ID NO: 781372 - DNA, 33 bp, Homo sapien
aaaaatgaatcaatcaggtttcaccggacatgg

SEQ ID NO: 781373 - DNA, 33 bp, Homo sapien
ccaattctctaaatccagccttgtttctcatgg

SEQ ID NO: 781374 - DNA, 33 bp, Homo sapien
ccaattctctaaatcctgccttgtttctcatgg

SEQ ID NO: 781375 - DNA, 33 bp, Homo sapien
caccacttagagataccgagcacttagagtcct

SEQ ID NO: 781376 - DNA, 33 bp, Homo sapien
caccacttagagatactgagcacttagagtcct

SEQ ID NO: 781377 - DNA, 33 bp, Homo sapien
aggaacctatttaccacgctgaagtctgcactc

SEQ ID NO: 781378 - DNA, 33 bp, Homo sapien
aggaacctatttaccatgctgaagtctgcactc

SEQ ID NO: 781379 - DNA, 33 bp, Homo sapien
tcagggagaactggctaacctgattacaatgat

SEQ ID NO: 781380 - DNA, 33 bp, Homo sapien
tcagggagaactggctcacctgattacaatgat

SEQ ID NO: 781381 - DNA, 33 bp, Homo sapien
gacaccagtagctttcacgactaaagtaacctc

SEQ ID NO: 781382 - DNA, 33 bp, Homo sapien
gacaccagtagctttcccgactaaagtaacctc

SEQ ID NO: 781383 - DNA, 33 bp, Homo sapien
ggtataattgacatgtaaaagttgtatatattt

SEQ ID NO: 781384 - DNA, 33 bp, Homo sapien
ggtataattgacatgttaaagttgtatatattt

SEQ ID NO: 781385 - DNA, 33 bp, Homo sapien
actgttcataaggataagcacattcggctgtaa

SEQ ID NO: 781386 - DNA, 33 bp, Homo sapien
actgttcataaggataggcacattcggctgtaa

SEQ ID NO: 781387 - DNA, 33 bp, Homo sapien
tttaaaaaacatcccactgactacaaatggatg

SEQ ID NO: 781388 - DNA, 33 bp, Homo sapien
tttaaaaaacatcccattgactacaaatggatg

SEQ ID NO: 781389 - DNA, 33 bp, Homo sapien
gaagttgagaggaaaaattggctttcatcttta

SEQ ID NO: 781390 - DNA, 33 bp, Homo sapien
gaagttgagaggaaaacttggctttcatcttta

SEQ ID NO: 781391 - DNA, 33 bp, Homo sapien
atcccaagagcatggaagatgttattatatctg

SEQ ID NO: 781392 - DNA, 33 bp, Homo sapien
atcccaagagcatggacgatgttattatatctg

SEQ ID NO: 781393 - DNA, 33 bp, Homo sapien
gttgttggctatcaaaattattgttgtaaatac

SEQ ID NO: 781394 - DNA, 33 bp, Homo sapien
gttgttggctatcaaagttattgttgtaaatac

SEQ ID NO: 781395 - DNA, 33 bp, Homo sapien
attaaattatgtgtcacgccttgaggtattcgt

SEQ ID NO: 781396 - DNA, 33 bp, Homo sapien
attaaattatgtgtcatgccttgaggtattcgt

SEQ ID NO: 781397 - DNA, 33 bp, Homo sapien
ttcctgctcactttcaagccaagaaagaaaaga

SEQ ID NO: 781398 - DNA, 33 bp, Homo sapien
ttcctgctcactttcatgccaagaaagaaaaga

SEQ ID NO: 781399 - DNA, 33 bp, Homo sapien
ctcatttcttaactgaagtatatgtcttccctt

SEQ ID NO: 781400 - DNA, 33 bp, Homo sapien
ctcatttcttaactgacgtatatgtcttccctt

SEQ ID NO: 781401 - DNA, 33 bp, Homo sapien
ctcagctacagttccaaagtgatttcagagata

SEQ ID NO: 781402 - DNA, 33 bp, Homo sapien
ctcagctacagttccagagtgatttcagagata

SEQ ID NO: 781403 - DNA, 33 bp, Homo sapien
ccaccatcttgatttccaaacttaagcataaat

SEQ ID NO: 781404 - DNA, 33 bp, Homo sapien
ccaccatcttgatttctaaacttaagcataaat

SEQ ID NO: 781405 - DNA, 33 bp, Homo sapien
ctgtctggacctgtgaatacattttttattcat

SEQ ID NO: 781406 - DNA, 33 bp, Homo sapien
ctgtctggacctgtgagtacattttttattcat

SEQ ID NO: 781407 - DNA, 33 bp, Homo sapien
atttttgtacatgaaacactgacctcaatgaaa

SEQ ID NO: 781408 - DNA, 33 bp, Homo sapien
atttttgtacatgaaatactgacctcaatgaaa

SEQ ID NO: 781409 - DNA, 33 bp, Homo sapien
ctgagagctcatttgagtacattaaaaatcgtg

SEQ ID NO: 781410 - DNA, 33 bp, Homo sapien
ctgagagctcatttgattacattaaaaatcgtg

SEQ ID NO: 781411 - DNA, 33 bp, Homo sapien
cattatttatggagaagcaaaagctgtatacat

SEQ ID NO: 781412 - DNA, 33 bp, Homo sapien
cattatttatggagaatcaaaagctgtatacat

SEQ ID NO: 781413 - DNA, 33 bp, Homo sapien
tttctccagcaaaacacaaggataaataaggaa

SEQ ID NO: 781414 - DNA, 33 bp, Homo sapien
tttctccagcaaaacataaggataaataaggaa

SEQ ID NO: 781415 - DNA, 33 bp, Homo sapien
taaactgctcacactaccattttacatgcaagc

SEQ ID NO: 781416 - DNA, 33 bp, Homo sapien
taaactgctcacactatcattttacatgcaagc

SEQ ID NO: 781417 - DNA, 33 bp, Homo sapien
gtgttgcaccttctcaaaatttctcggacagct

SEQ ID NO: 781418 - DNA, 33 bp, Homo sapien
gtgttgcaccttctcagaatttctcggacagct

SEQ ID NO: 781419 - DNA, 33 bp, Homo sapien
gaaagtggaacagccaaaaaaggggcagaatca

SEQ ID NO: 781420 - DNA, 33 bp, Homo sapien
gaaagtggaacagccagaaaaggggcagaatca

SEQ ID NO: 781421 - DNA, 33 bp, Homo sapien
cttctccagaaataaaacctgaaactcaagcag

SEQ ID NO: 781422 - DNA, 33 bp, Homo sapien
cttctccagaaataaaccctgaaactcaagcag

SEQ ID NO: 781423 - DNA, 33 bp, Homo sapien
tctgaatgactataaacctggataggtacacat

SEQ ID NO: 781424 - DNA, 33 bp, Homo sapien
tctgaatgactataaatctggataggtacacat

SEQ ID NO: 781425 - DNA, 33 bp, Homo sapien
tctcagttatcttttacagcagtaccttgttta

SEQ ID NO: 781426 - DNA, 33 bp, Homo sapien
tctcagttatcttttatagcagtaccttgttta

SEQ ID NO: 781427 - DNA, 33 bp, Homo sapien
atggtgttaatctggacgtcactgcgatgaatg

SEQ ID NO: 781428 - DNA, 33 bp, Homo sapien
atggtgttaatctggatgtcactgcgatgaatg

SEQ ID NO: 781429 - DNA, 33 bp, Homo sapien
agggtaagataggtaacgcccaatgaaaatgca

SEQ ID NO: 781430 - DNA, 33 bp, Homo sapien
agggtaagataggtaatgcccaatgaaaatgca

SEQ ID NO: 781431 - DNA, 33 bp, Homo sapien
gagtaatgtgttaaagaatgagaaaagagcatg

SEQ ID NO: 781432 - DNA, 33 bp, Homo sapien
gagtaatgtgttaaaggatgagaaaagagcatg

SEQ ID NO: 781433 - DNA, 33 bp, Homo sapien
gcaactaaggcaaatagtaggacctatctgtcc

SEQ ID NO: 781434 - DNA, 33 bp, Homo sapien
gcaactaaggcaaatattaggacctatctgtcc

SEQ ID NO: 781435 - DNA, 33 bp, Homo sapien
atacacaatagtagaacgctggagaaagttttc

SEQ ID NO: 781436 - DNA, 33 bp, Homo sapien
atacacaatagtagaatgctggagaaagttttc

SEQ ID NO: 781437 - DNA, 33 bp, Homo sapien
tgattccagcttaatcaaaatggtagccctttt

SEQ ID NO: 781438 - DNA, 33 bp, Homo sapien
tgattccagcttaatcgaaatggtagccctttt

SEQ ID NO: 781439 - DNA, 33 bp, Homo sapien
aaaccggtgacaattacaatcccaaaagacata

SEQ ID NO: 781440 - DNA, 33 bp, Homo sapien
aaaccggtgacaattataatcccaaaagacata

SEQ ID NO: 781441 - DNA, 33 bp, Homo sapien
tctgattagtaaagaactgactgcacaaatata

SEQ ID NO: 781442 - DNA, 33 bp, Homo sapien
tctgattagtaaagaattgactgcacaaatata

SEQ ID NO: 781443 - DNA, 33 bp, Homo sapien
gtgtgtagcagaagcaagtaatccctacagccc

SEQ ID NO: 781444 - DNA, 33 bp, Homo sapien
gtgtgtagcagaagcaggtaatccctacagccc

SEQ ID NO: 781445 - DNA, 33 bp, Homo sapien
atattccttaaaactaaaatgtggcatggctta

SEQ ID NO: 781446 - DNA, 33 bp, Homo sapien
atattccttaaaactagaatgtggcatggctta

SEQ ID NO: 781447 - DNA, 33 bp, Homo sapien
aagactttccaagggacacataaaagtgaagcc

SEQ ID NO: 781448 - DNA, 33 bp, Homo sapien
aagactttccaagggatacataaaagtgaagcc

SEQ ID NO: 781449 - DNA, 33 bp, Homo sapien
tttccttaagcttctcacttttgtaaatccctt

SEQ ID NO: 781450 - DNA, 33 bp, Homo sapien
tttccttaagcttctcgcttttgtaaatccctt

SEQ ID NO: 781451 - DNA, 33 bp, Homo sapien
tttctcagagctttcacacaggattgttttctt

SEQ ID NO: 781452 - DNA, 33 bp, Homo sapien
tttctcagagctttcatacaggattgttttctt

SEQ ID NO: 781453 - DNA, 33 bp, Homo sapien
acacaatattctacacaaactgcctttatgtga

SEQ ID NO: 781454 - DNA, 33 bp, Homo sapien
acacaatattctacacgaactgcctttatgtga

SEQ ID NO: 781455 - DNA, 33 bp, Homo sapien
ctaacagagcatataaaatcacatcttaacaag

SEQ ID NO: 781456 - DNA, 33 bp, Homo sapien
ctaacagagcatataacatcacatcttaacaag

SEQ ID NO: 781457 - DNA, 33 bp, Homo sapien
tatgcagcaaatttccagagactgagtcaaact

SEQ ID NO: 781458 - DNA, 33 bp, Homo sapien
tatgcagcaaatttccggagactgagtcaaact

SEQ ID NO: 781459 - DNA, 33 bp, Homo sapien
taatatgtataaaacaactgcttgatactggag

SEQ ID NO: 781460 - DNA, 33 bp, Homo sapien
taatatgtataaaacagctgcttgatactggag

SEQ ID NO: 781461 - DNA, 33 bp, Homo sapien
accaaaatacaaggcactgaaatctggtgcatt

SEQ ID NO: 781462 - DNA, 33 bp, Homo sapien
accaaaatacaaggcagtgaaatctggtgcatt

SEQ ID NO: 781463 - DNA, 33 bp, Homo sapien
aacacagtgtgattaaatagatatcacaaaagc

SEQ ID NO: 781464 - DNA, 33 bp, Homo sapien
aacacagtgtgattaagtagatatcacaaaagc

SEQ ID NO: 781465 - DNA, 33 bp, Homo sapien
tgacagatctgccagggacgaaggctttgagtc

SEQ ID NO: 781466 - DNA, 33 bp, Homo sapien
tgacagatctgccaggtacgaaggctttgagtc

SEQ ID NO: 781467 - DNA, 33 bp, Homo sapien
acatgaacacaattcaactaaattctttgccac

SEQ ID NO: 781468 - DNA, 33 bp, Homo sapien
acatgaacacaattcagctaaattctttgccac

SEQ ID NO: 781469 - DNA, 33 bp, Homo sapien
atcatttaaaattgtacaagcacagtgataata

SEQ ID NO: 781470 - DNA, 33 bp, Homo sapien
atcatttaaaattgtagaagcacagtgataata

SEQ ID NO: 781471 - DNA, 33 bp, Homo sapien
aagtgttaactttctcaaggtcaaatagctggt

SEQ ID NO: 781472 - DNA, 33 bp, Homo sapien
aagtgttaactttctcgaggtcaaatagctggt

SEQ ID NO: 781473 - DNA, 33 bp, Homo sapien
gcgctgctttcctttcactttctcctacagctt

SEQ ID NO: 781474 - DNA, 33 bp, Homo sapien
gcgctgctttcctttcgctttctcctacagctt

SEQ ID NO: 781475 - DNA, 33 bp, Homo sapien
tgacttctgctgtccaggagcttataatataac

SEQ ID NO: 781476 - DNA, 33 bp, Homo sapien
tgacttctgctgtccatgagcttataatataac

SEQ ID NO: 781477 - DNA, 33 bp, Homo sapien
caggaatctgccagaaattaaatttgttatata

SEQ ID NO: 781478 - DNA, 33 bp, Homo sapien
caggaatctgccagaagttaaatttgttatata

SEQ ID NO: 781479 - DNA, 33 bp, Homo sapien
aaaaatagtcattttacgtttgacctttatcag

SEQ ID NO: 781480 - DNA, 33 bp, Homo sapien
aaaaatagtcattttatgtttgacctttatcag

SEQ ID NO: 781481 - DNA, 33 bp, Homo sapien
aatgattcaaatgtagccccttgaacagtgata

SEQ ID NO: 781482 - DNA, 33 bp, Homo sapien
aatgattcaaatgtagtcccttgaacagtgata

SEQ ID NO: 781483 - DNA, 33 bp, Homo sapien
aaggaccatttggacacattgagatttttatgc

SEQ ID NO: 781484 - DNA, 33 bp, Homo sapien
aaggaccatttggacatattgagatttttatgc

SEQ ID NO: 781485 - DNA, 33 bp, Homo sapien
cttaaccgacatatcccgaacagtggagaactt

SEQ ID NO: 781486 - DNA, 33 bp, Homo sapien
cttaaccgacatatcctgaacagtggagaactt

SEQ ID NO: 781487 - DNA, 33 bp, Homo sapien
aatctgagcaccatcactgagacaagcttgcac

SEQ ID NO: 781488 - DNA, 33 bp, Homo sapien
aatctgagcaccatcattgagacaagcttgcac

SEQ ID NO: 781489 - DNA, 33 bp, Homo sapien
tcccacaaaatgcctcaaccgtatggctaagcg

SEQ ID NO: 781490 - DNA, 33 bp, Homo sapien
tcccacaaaatgcctcgaccgtatggctaagcg

SEQ ID NO: 781491 - DNA, 33 bp, Homo sapien
tggatgaactagactcaagacttttggatttcc

SEQ ID NO: 781492 - DNA, 33 bp, Homo sapien
tggatgaactagactcgagacttttggatttcc

SEQ ID NO: 781493 - DNA, 33 bp, Homo sapien
ctttatggttcaaaaccagacaacaattactat

SEQ ID NO: 781494 - DNA, 33 bp, Homo sapien
ctttatggttcaaaactagacaacaattactat

SEQ ID NO: 781495 - DNA, 33 bp, Homo sapien
gtgatttgatactccacgtaaaactcttcctaa

SEQ ID NO: 781496 - DNA, 33 bp, Homo sapien
gtgatttgatactccatgtaaaactcttcctaa

SEQ ID NO: 781497 - DNA, 33 bp, Homo sapien
cccctcttcctgtagaagtatttgagaacataa

SEQ ID NO: 781498 - DNA, 33 bp, Homo sapien
cccctcttcctgtagaggtatttgagaacataa

SEQ ID NO: 781499 - DNA, 33 bp, Homo sapien
cttagccagtcttgcaactcctttaatgcttca

SEQ ID NO: 781500 - DNA, 33 bp, Homo sapien
cttagccagtcttgcacctcctttaatgcttca

SEQ ID NO: 781501 - DNA, 33 bp, Homo sapien
gttgccaaaggatcagacccaggctaagggaac

SEQ ID NO: 781502 - DNA, 33 bp, Homo sapien
gttgccaaaggatcaggcccaggctaagggaac

SEQ ID NO: 781503 - DNA, 33 bp, Homo sapien
ttcttgaacaagtatacaaatcacaaacactaa

SEQ ID NO: 781504 - DNA, 33 bp, Homo sapien
ttcttgaacaagtatagaaatcacaaacactaa

SEQ ID NO: 781505 - DNA, 33 bp, Homo sapien
actgtcctcatcagcaaataaattcatggattt

SEQ ID NO: 781506 - DNA, 33 bp, Homo sapien
actgtcctcatcagcagataaattcatggattt

SEQ ID NO: 781507 - DNA, 33 bp, Homo sapien
tagtcacacaagcaggccaagctccctcacagt

SEQ ID NO: 781508 - DNA, 33 bp, Homo sapien
tagtcacacaagcaggtcaagctccctcacagt

SEQ ID NO: 781509 - DNA, 33 bp, Homo sapien
tttgtttgttcatataaaatttcctatctctga

SEQ ID NO: 781510 - DNA, 33 bp, Homo sapien
tttgtttgttcatatacaatttcctatctctga

SEQ ID NO: 781511 - DNA, 33 bp, Homo sapien
atattgctataagccaataactgtcacctcaaa

SEQ ID NO: 781512 - DNA, 33 bp, Homo sapien
atattgctataagccagtaactgtcacctcaaa

SEQ ID NO: 781513 - DNA, 33 bp, Homo sapien
aaagcaatcacgacaaaagcaaaatttgacaaa

SEQ ID NO: 781514 - DNA, 33 bp, Homo sapien
aaagcaatcacgacaagagcaaaatttgacaaa

SEQ ID NO: 781515 - DNA, 33 bp, Homo sapien
caagcatgatggacaacaaagaaagaagtgaag

SEQ ID NO: 781516 - DNA, 33 bp, Homo sapien
caagcatgatggacaagaaagaaagaagtgaag

SEQ ID NO: 781517 - DNA, 33 bp, Homo sapien
ttcagagctaagacagaatgaaatagccttatg

SEQ ID NO: 781518 - DNA, 33 bp, Homo sapien
ttcagagctaagacagtatgaaatagccttatg

SEQ ID NO: 781519 - DNA, 33 bp, Homo sapien
tcaatatagttgttcaccaggctctggcaactc

SEQ ID NO: 781520 - DNA, 33 bp, Homo sapien
tcaatatagttgttcatcaggctctggcaactc

SEQ ID NO: 781521 - DNA, 33 bp, Homo sapien
acacaaaataccatcactacaatcactgggata

SEQ ID NO: 781522 - DNA, 33 bp, Homo sapien
acacaaaataccatcattacaatcactgggata

SEQ ID NO: 781523 - DNA, 33 bp, Homo sapien
aatactggttagaatacaactcagaattgtcct

SEQ ID NO: 781524 - DNA, 33 bp, Homo sapien
aatactggttagaatagaactcagaattgtcct

SEQ ID NO: 781525 - DNA, 33 bp, Homo sapien
cacactggctcaaagaaaacacaatggaacgtg

SEQ ID NO: 781526 - DNA, 33 bp, Homo sapien
cacactggctcaaagacaacacaatggaacgtg

SEQ ID NO: 781527 - DNA, 33 bp, Homo sapien
gctgatatagagaagaacatttacttgggtttc

SEQ ID NO: 781528 - DNA, 33 bp, Homo sapien
gctgatatagagaagagcatttacttgggtttc

SEQ ID NO: 781529 - DNA, 33 bp, Homo sapien
aaatacattgtacatacgaaggtgtaaatttaa

SEQ ID NO: 781530 - DNA, 33 bp, Homo sapien
aaatacattgtacatatgaaggtgtaaatttaa

SEQ ID NO: 781531 - DNA, 33 bp, Homo sapien
gccacactaacggagaatctagaagtcgtttgg

SEQ ID NO: 781532 - DNA, 33 bp, Homo sapien
gccacactaacggagagtctagaagtcgtttgg

SEQ ID NO: 781533 - DNA, 33 bp, Homo sapien
cctttcctttggttaacggatggtgttacgcat

SEQ ID NO: 781534 - DNA, 33 bp, Homo sapien
cctttcctttggttaatggatggtgttacgcat

SEQ ID NO: 781535 - DNA, 33 bp, Homo sapien
gtcttgaatagttctacgctggtccaaaaacta

SEQ ID NO: 781536 - DNA, 33 bp, Homo sapien
gtcttgaatagttctatgctggtccaaaaacta

SEQ ID NO: 781537 - DNA, 33 bp, Homo sapien
ccagcatttatagtaactggctttcccatcatt

SEQ ID NO: 781538 - DNA, 33 bp, Homo sapien
ccagcatttatagtaattggctttcccatcatt

SEQ ID NO: 781539 - DNA, 33 bp, Homo sapien
acataataccattgaaaagatgaaatagcaaaa

SEQ ID NO: 781540 - DNA, 33 bp, Homo sapien
acataataccattgaagagatgaaatagcaaaa

SEQ ID NO: 781541 - DNA, 33 bp, Homo sapien
aacttgacagaaatctgaaagctgtacataaca

SEQ ID NO: 781542 - DNA, 33 bp, Homo sapien
aacttgacagaaatcttaaagctgtacataaca

SEQ ID NO: 781543 - DNA, 33 bp, Homo sapien
aatggtttaagacataaagttcagaatccatta

SEQ ID NO: 781544 - DNA, 33 bp, Homo sapien
aatggtttaagacatagagttcagaatccatta

SEQ ID NO: 781545 - DNA, 33 bp, Homo sapien
tttcaaacatattcagaagatataaattgcaga

SEQ ID NO: 781546 - DNA, 33 bp, Homo sapien
tttcaaacatattcaggagatataaattgcaga

SEQ ID NO: 781547 - DNA, 33 bp, Homo sapien
gagaaggagtcggccacctacagctagtgaaac

SEQ ID NO: 781548 - DNA, 33 bp, Homo sapien
gagaaggagtcggccatctacagctagtgaaac

SEQ ID NO: 781549 - DNA, 33 bp, Homo sapien
aggaatcctcaaccaacgcccccaagcagaaca

SEQ ID NO: 781550 - DNA, 33 bp, Homo sapien
aggaatcctcaaccaatgcccccaagcagaaca

SEQ ID NO: 781551 - DNA, 33 bp, Homo sapien
atgagtatgcttggccaaactatgcagcactat

SEQ ID NO: 781552 - DNA, 33 bp, Homo sapien
atgagtatgcttggccgaactatgcagcactat

SEQ ID NO: 781553 - DNA, 33 bp, Homo sapien
gagcactaatggagaaattaaataagaacagtc

SEQ ID NO: 781554 - DNA, 33 bp, Homo sapien
gagcactaatggagaagttaaataagaacagtc

SEQ ID NO: 781555 - DNA, 33 bp, Homo sapien
gaatgcatagaataagaccatatttagtgacac

SEQ ID NO: 781556 - DNA, 33 bp, Homo sapien
gaatgcatagaataaggccatatttagtgacac

SEQ ID NO: 781557 - DNA, 33 bp, Homo sapien
ttcactcgagcaaataagttacaaaaaagtacc

SEQ ID NO: 781558 - DNA, 33 bp, Homo sapien
ttcactcgagcaaatacgttacaaaaaagtacc

SEQ ID NO: 781559 - DNA, 33 bp, Homo sapien
aatctgattctttataacattttgcttgtgtac

SEQ ID NO: 781560 - DNA, 33 bp, Homo sapien
aatctgattctttatagcattttgcttgtgtac

SEQ ID NO: 781561 - DNA, 33 bp, Homo sapien
aaatttgaaaaagcccaaaatgagctaatctcg

SEQ ID NO: 781562 - DNA, 33 bp, Homo sapien
aaatttgaaaaagccccaaatgagctaatctcg

SEQ ID NO: 781563 - DNA, 33 bp, Homo sapien
attttgtaatcattatcataatccagtttagta

SEQ ID NO: 781564 - DNA, 33 bp, Homo sapien
attttgtaatcattatgataatccagtttagta

SEQ ID NO: 781565 - DNA, 33 bp, Homo sapien
actctgagccattaaccatggactgtaactcaa

SEQ ID NO: 781566 - DNA, 33 bp, Homo sapien
actctgagccattaacgatggactgtaactcaa

SEQ ID NO: 781567 - DNA, 33 bp, Homo sapien
agcccaagaggcagaacctacagtaagttgtgg

SEQ ID NO: 781568 - DNA, 33 bp, Homo sapien
agcccaagaggcagaatctacagtaagttgtgg

SEQ ID NO: 781569 - DNA, 33 bp, Homo sapien
aagattttaagtcaaaaggtgacatggttagat

SEQ ID NO: 781570 - DNA, 33 bp, Homo sapien
aagattttaagtcaaagggtgacatggttagat

SEQ ID NO: 781571 - DNA, 33 bp, Homo sapien
gactgccttcctctcaacttctcacacaacctt

SEQ ID NO: 781572 - DNA, 33 bp, Homo sapien
gactgccttcctctcatcttctcacacaacctt

SEQ ID NO: 781573 - DNA, 33 bp, Homo sapien
caacatggaagtagtaaagaaagcataggagtt

SEQ ID NO: 781574 - DNA, 33 bp, Homo sapien
caacatggaagtagtagagaaagcataggagtt

SEQ ID NO: 781575 - DNA, 33 bp, Homo sapien
tctaacgtaacttcaaaattgttctagacaatc

SEQ ID NO: 781576 - DNA, 33 bp, Homo sapien
tctaacgtaacttcaacattgttctagacaatc

SEQ ID NO: 781577 - DNA, 33 bp, Homo sapien
aaataacagagccacacgattttggataaaact

SEQ ID NO: 781578 - DNA, 33 bp, Homo sapien
aaataacagagccacatgattttggataaaact

SEQ ID NO: 781579 - DNA, 33 bp, Homo sapien
ccttaggctttctaccacccgcagagctcttgg

SEQ ID NO: 781580 - DNA, 33 bp, Homo sapien
ccttaggctttctaccgcccgcagagctcttgg

SEQ ID NO: 781581 - DNA, 33 bp, Homo sapien
taatagcggcataaaacgaacaaagacattaga

SEQ ID NO: 781582 - DNA, 33 bp, Homo sapien
taatagcggcataaaatgaacaaagacattaga

SEQ ID NO: 781583 - DNA, 33 bp, Homo sapien
tttgaggaaatattacaaaagtctctaggataa

SEQ ID NO: 781584 - DNA, 33 bp, Homo sapien
tttgaggaaatattacgaaagtctctaggataa

SEQ ID NO: 781585 - DNA, 33 bp, Homo sapien
taattaactctcttaccagtgtggccagcactt

SEQ ID NO: 781586 - DNA, 33 bp, Homo sapien
taattaactctcttactagtgtggccagcactt

SEQ ID NO: 781587 - DNA, 33 bp, Homo sapien
gagtaatatctctcaacggatgctttaaaaaac

SEQ ID NO: 781588 - DNA, 33 bp, Homo sapien
gagtaatatctctcaatggatgctttaaaaaac

SEQ ID NO: 781589 - DNA, 33 bp, Homo sapien
gtttctgaagggcttccactatattgtactcat

SEQ ID NO: 781590 - DNA, 33 bp, Homo sapien
gtttctgaagggcttctactatattgtactcat

SEQ ID NO: 781591 - DNA, 33 bp, Homo sapien
aagttaatcaaaaagccgatgaactccttttct

SEQ ID NO: 781592 - DNA, 33 bp, Homo sapien
aagttaatcaaaaagctgatgaactccttttct

SEQ ID NO: 781593 - DNA, 33 bp, Homo sapien
aacactgaggatgtaacggagttttcacaagtt

SEQ ID NO: 781594 - DNA, 33 bp, Homo sapien
aacactgaggatgtaatggagttttcacaagtt

SEQ ID NO: 781595 - DNA, 33 bp, Homo sapien
aagttgggatccactgaaacagtacataatgta

SEQ ID NO: 781596 - DNA, 33 bp, Homo sapien
aagttgggatccactgcaacagtacataatgta

SEQ ID NO: 781597 - DNA, 33 bp, Homo sapien
tagatactgtgaggaacataatctttgcctaca

SEQ ID NO: 781598 - DNA, 33 bp, Homo sapien
tagatactgtgaggaatataatctttgcctaca

SEQ ID NO: 781599 - DNA, 33 bp, Homo sapien
aactgtgcagatttagacactttgtaacctgta

SEQ ID NO: 781600 - DNA, 33 bp, Homo sapien
aactgtgcagatttagtcactttgtaacctgta

SEQ ID NO: 781601 - DNA, 33 bp, Homo sapien
acaaagagatcagaaaaagtcacctagagagtt

SEQ ID NO: 781602 - DNA, 33 bp, Homo sapien
acaaagagatcagaaagagtcacctagagagtt

SEQ ID NO: 781603 - DNA, 33 bp, Homo sapien
atataaagttaattcaaagaaaagcaaaggttt

SEQ ID NO: 781604 - DNA, 33 bp, Homo sapien
atataaagttaattcacagaaaagcaaaggttt

SEQ ID NO: 781605 - DNA, 33 bp, Homo sapien
aagttccttcctggaaagttctctattcaggta

SEQ ID NO: 781606 - DNA, 33 bp, Homo sapien
aagttccttcctggaaggttctctattcaggta

SEQ ID NO: 781607 - DNA, 33 bp, Homo sapien
actatgcagaatgagacaataatgtcagaaact

SEQ ID NO: 781608 - DNA, 33 bp, Homo sapien
actatgcagaatgagataataatgtcagaaact

SEQ ID NO: 781609 - DNA, 33 bp, Homo sapien
tggtcaggttgaaacacggctttggtgatctgg

SEQ ID NO: 781610 - DNA, 33 bp, Homo sapien
tggtcaggttgaaacatggctttggtgatctgg

SEQ ID NO: 781611 - DNA, 33 bp, Homo sapien
cactgtttttgttggaatcactttgcttctcat

SEQ ID NO: 781612 - DNA, 33 bp, Homo sapien
cactgtttttgttggagtcactttgcttctcat

SEQ ID NO: 781613 - DNA, 33 bp, Homo sapien
agacagatgctatggcaacacctctcttattct

SEQ ID NO: 781614 - DNA, 33 bp, Homo sapien
agacagatgctatggccacacctctcttattct

SEQ ID NO: 781615 - DNA, 33 bp, Homo sapien
aattcaaatttcctaggccttgtagccaaaggt

SEQ ID NO: 781616 - DNA, 33 bp, Homo sapien
aattcaaatttcctagtccttgtagccaaaggt

SEQ ID NO: 781617 - DNA, 33 bp, Homo sapien
tatactattctatttcacagttatgttgtagat

SEQ ID NO: 781618 - DNA, 33 bp, Homo sapien
tatactattctatttcgcagttatgttgtagat

SEQ ID NO: 781619 - DNA, 33 bp, Homo sapien
aaacatggaatcaaatcatgtgctaatggtgga

SEQ ID NO: 781620 - DNA, 33 bp, Homo sapien
aaacatggaatcaaattatgtgctaatggtgga

SEQ ID NO: 781621 - DNA, 33 bp, Homo sapien
cagatttcattgggtacctatatcaatgcttta

SEQ ID NO: 781622 - DNA, 33 bp, Homo sapien
cagatttcattgggtatctatatcaatgcttta

SEQ ID NO: 781623 - DNA, 33 bp, Homo sapien
gtttgtgtgttgagggaagcagaggcattacta

SEQ ID NO: 781624 - DNA, 33 bp, Homo sapien
gtttgtgtgttgaggggagcagaggcattacta

SEQ ID NO: 781625 - DNA, 33 bp, Homo sapien
gaaaatttcatgagaaactacaaaatatttata

SEQ ID NO: 781626 - DNA, 33 bp, Homo sapien
gaaaatttcatgagaagctacaaaatatttata

SEQ ID NO: 781627 - DNA, 33 bp, Homo sapien
ggagcaagaccaggaaagtaatgtggatctgta

SEQ ID NO: 781628 - DNA, 33 bp, Homo sapien
ggagcaagaccaggaaggtaatgtggatctgta

SEQ ID NO: 781629 - DNA, 33 bp, Homo sapien
ttttctctgtctggaacaggttttgttgtttgt

SEQ ID NO: 781630 - DNA, 33 bp, Homo sapien
ttttctctgtctggaataggttttgttgtttgt

SEQ ID NO: 781631 - DNA, 33 bp, Homo sapien
tacaaaataagtagcgaaaattttgtaaataac

SEQ ID NO: 781632 - DNA, 33 bp, Homo sapien
tacaaaataagtagcgcaaattttgtaaataac

SEQ ID NO: 781633 - DNA, 33 bp, Homo sapien
ttcttcctgactttatcaccagcacctagcatg

SEQ ID NO: 781634 - DNA, 33 bp, Homo sapien
ttcttcctgactttattaccagcacctagcatg

SEQ ID NO: 781635 - DNA, 33 bp, Homo sapien
tacacaggccatcatcactgtccaaaaaatctc

SEQ ID NO: 781636 - DNA, 33 bp, Homo sapien
tacacaggccatcatcgctgtccaaaaaatctc

SEQ ID NO: 781637 - DNA, 33 bp, Homo sapien
gtaaaaacaaaagatccgaggaattcaaagacc

SEQ ID NO: 781638 - DNA, 33 bp, Homo sapien
gtaaaaacaaaagatctgaggaattcaaagacc

SEQ ID NO: 781639 - DNA, 33 bp, Homo sapien
ttgtggttggggcgcagcaaggatcagccctgt

SEQ ID NO: 781640 - DNA, 33 bp, Homo sapien
ttgtggttggggcgcatcaaggatcagccctgt

SEQ ID NO: 781641 - DNA, 33 bp, Homo sapien
aagtatatcttatacaaatctgtctcaaaaatc

SEQ ID NO: 781642 - DNA, 33 bp, Homo sapien
aagtatatcttatacatatctgtctcaaaaatc

SEQ ID NO: 781643 - DNA, 33 bp, Homo sapien
taacttagcctcagatcagctatgagatcttca

SEQ ID NO: 781644 - DNA, 33 bp, Homo sapien
taacttagcctcagattagctatgagatcttca

SEQ ID NO: 781645 - DNA, 33 bp, Homo sapien
agggaaagcaatctacacttcagactgctgcaa

SEQ ID NO: 781646 - DNA, 33 bp, Homo sapien
agggaaagcaatctactcttcagactgctgcaa

SEQ ID NO: 781647 - DNA, 33 bp, Homo sapien
tctaaaatcgttgcagaaaatcatctaatagca

SEQ ID NO: 781648 - DNA, 33 bp, Homo sapien
tctaaaatcgttgcaggaaatcatctaatagca

SEQ ID NO: 781649 - DNA, 33 bp, Homo sapien
tgtaacttctaaagaccattaataagcgctgct

SEQ ID NO: 781650 - DNA, 33 bp, Homo sapien
tgtaacttctaaagactattaataagcgctgct

SEQ ID NO: 781651 - DNA, 33 bp, Homo sapien
caggttgagttcccatcaggattttgacatgaa

SEQ ID NO: 781652 - DNA, 33 bp, Homo sapien
caggttgagttcccattaggattttgacatgaa

SEQ ID NO: 781653 - DNA, 33 bp, Homo sapien
gctaaaatggtctgaccgcagttggctacacct

SEQ ID NO: 781654 - DNA, 33 bp, Homo sapien
gctaaaatggtctgactgcagttggctacacct

SEQ ID NO: 781655 - DNA, 33 bp, Homo sapien
gtactatataaatggccccataaaagaacaatt

SEQ ID NO: 781656 - DNA, 33 bp, Homo sapien
gtactatataaatggctccataaaagaacaatt

SEQ ID NO: 781657 - DNA, 33 bp, Homo sapien
gtgtttcagagaagaaaagctccccaagtaatt

SEQ ID NO: 781658 - DNA, 33 bp, Homo sapien
gtgtttcagagaagaagagctccccaagtaatt

SEQ ID NO: 781659 - DNA, 33 bp, Homo sapien
tgaggacatggactgaaaatagaataagtaatc

SEQ ID NO: 781660 - DNA, 33 bp, Homo sapien
tgaggacatggactgagaatagaataagtaatc

SEQ ID NO: 781661 - DNA, 33 bp, Homo sapien
gctaacttcagagtcaaggtaaaacatacaaaa

SEQ ID NO: 781662 - DNA, 33 bp, Homo sapien
gctaacttcagagtcagggtaaaacatacaaaa

SEQ ID NO: 781663 - DNA, 33 bp, Homo sapien
cccttggattccagcactgactttataattaac

SEQ ID NO: 781664 - DNA, 33 bp, Homo sapien
cccttggattccagcattgactttataattaac

SEQ ID NO: 781665 - DNA, 33 bp, Homo sapien
gtgatgctggagtcaaataactggtataaaaat

SEQ ID NO: 781666 - DNA, 33 bp, Homo sapien
gtgatgctggagtcaagtaactggtataaaaat

SEQ ID NO: 781667 - DNA, 33 bp, Homo sapien
gcaaagatttttccaccgcaatgtaagtgttat

SEQ ID NO: 781668 - DNA, 33 bp, Homo sapien
gcaaagatttttccactgcaatgtaagtgttat

SEQ ID NO: 781669 - DNA, 33 bp, Homo sapien
caaggcatgagacttccattttcagacaaattt

SEQ ID NO: 781670 - DNA, 33 bp, Homo sapien
caaggcatgagacttctattttcagacaaattt

SEQ ID NO: 781671 - DNA, 33 bp, Homo sapien
aggtgttcccaaataaaatactctttcaatgaa

SEQ ID NO: 781672 - DNA, 33 bp, Homo sapien
aggtgttcccaaataacatactctttcaatgaa

SEQ ID NO: 781673 - DNA, 33 bp, Homo sapien
tccaagcagtgggtacaagcgctagttctggtg

SEQ ID NO: 781674 - DNA, 33 bp, Homo sapien
tccaagcagtgggtaccagcgctagttctggtg

SEQ ID NO: 781675 - DNA, 33 bp, Homo sapien
atcagaagcattaataaatcactatgagaaagg

SEQ ID NO: 781676 - DNA, 33 bp, Homo sapien
atcagaagcattaatatatcactatgagaaagg

SEQ ID NO: 781677 - DNA, 33 bp, Homo sapien
ggggtgacaagaacaacggagtcatgtgtttct

SEQ ID NO: 781678 - DNA, 33 bp, Homo sapien
ggggtgacaagaacaatggagtcatgtgtttct

SEQ ID NO: 781679 - DNA, 33 bp, Homo sapien
ataaaataatcgtacactctgtaaagtttagat

SEQ ID NO: 781680 - DNA, 33 bp, Homo sapien
ataaaataatcgtacattctgtaaagtttagat

SEQ ID NO: 781681 - DNA, 33 bp, Homo sapien
aagtatttttaaattaagcaacaggatgtgttt

SEQ ID NO: 781682 - DNA, 33 bp, Homo sapien
aagtatttttaaattatgcaacaggatgtgttt

SEQ ID NO: 781683 - DNA, 33 bp, Homo sapien
atttggaaatgaaataaaactcaagttcaattt

SEQ ID NO: 781684 - DNA, 33 bp, Homo sapien
atttggaaatgaaatacaactcaagttcaattt

SEQ ID NO: 781685 - DNA, 33 bp, Homo sapien
atttataggtcaaagccaaatgatgagaataca

SEQ ID NO: 781686 - DNA, 33 bp, Homo sapien
atttataggtcaaagctaaatgatgagaataca

SEQ ID NO: 781687 - DNA, 33 bp, Homo sapien
tatgcctggtcattaaatggaagaaaataattg

SEQ ID NO: 781688 - DNA, 33 bp, Homo sapien
tatgcctggtcattaattggaagaaaataattg

SEQ ID NO: 781689 - DNA, 33 bp, Homo sapien
ctataattgttgtaaaagtccattcagttacaa

SEQ ID NO: 781690 - DNA, 33 bp, Homo sapien
ctataattgttgtaaatgtccattcagttacaa

SEQ ID NO: 781691 - DNA, 33 bp, Homo sapien
ttaagggaaacttaaaatagagagactggtaac

SEQ ID NO: 781692 - DNA, 33 bp, Homo sapien
ttaagggaaacttaaagtagagagactggtaac

SEQ ID NO: 781693 - DNA, 33 bp, Homo sapien
tttcacaaacactaagaccaactaacatttcaa

SEQ ID NO: 781694 - DNA, 33 bp, Homo sapien
tttcacaaacactaaggccaactaacatttcaa

SEQ ID NO: 781695 - DNA, 33 bp, Homo sapien
tcatactcagctttgaacgatttggaagtgata

SEQ ID NO: 781696 - DNA, 33 bp, Homo sapien
tcatactcagctttgagcgatttggaagtgata

SEQ ID NO: 781697 - DNA, 33 bp, Homo sapien
aaagattacgagggggaatgtttattagaacag

SEQ ID NO: 781698 - DNA, 33 bp, Homo sapien
aaagattacgaggggggatgtttattagaacag

SEQ ID NO: 781699 - DNA, 33 bp, Homo sapien
cagtagactacatcacaggcacagccagactct

SEQ ID NO: 781700 - DNA, 33 bp, Homo sapien
cagtagactacatcacgggcacagccagactct

SEQ ID NO: 781701 - DNA, 33 bp, Homo sapien
gaattatattaagagcaaggtgaagaagaagaa

SEQ ID NO: 781702 - DNA, 33 bp, Homo sapien
gaattatattaagagcgaggtgaagaagaagaa

SEQ ID NO: 781703 - DNA, 33 bp, Homo sapien
attatcattcaaagaaagcatgagagttatgat

SEQ ID NO: 781704 - DNA, 33 bp, Homo sapien
attatcattcaaagaacgcatgagagttatgat

SEQ ID NO: 781705 - DNA, 33 bp, Homo sapien
tgggaagagttcaacaatgtattttcatcttgg

SEQ ID NO: 781706 - DNA, 33 bp, Homo sapien
tgggaagagttcaacagtgtattttcatcttgg

SEQ ID NO: 781707 - DNA, 33 bp, Homo sapien
aattacttacattttcaagactaattagtgccc

SEQ ID NO: 781708 - DNA, 33 bp, Homo sapien
aattacttacattttcgagactaattagtgccc

SEQ ID NO: 781709 - DNA, 33 bp, Homo sapien
tattggtcataagggcagagaatattacaatct

SEQ ID NO: 781710 - DNA, 33 bp, Homo sapien
tattggtcataagggcggagaatattacaatct

SEQ ID NO: 781711 - DNA, 33 bp, Homo sapien
tgtgtcactctcaaatgatatcttgacagcaat

SEQ ID NO: 781712 - DNA, 33 bp, Homo sapien
tgtgtcactctcaaattatatcttgacagcaat

SEQ ID NO: 781713 - DNA, 33 bp, Homo sapien
agtggcggcattatgcagagagcatttcagtgt

SEQ ID NO: 781714 - DNA, 33 bp, Homo sapien
agtggcggcattatgcggagagcatttcagtgt

SEQ ID NO: 781715 - DNA, 33 bp, Homo sapien
tgctataacaccaaaaccgaatagttgtaatag

SEQ ID NO: 781716 - DNA, 33 bp, Homo sapien
tgctataacaccaaaatcgaatagttgtaatag

SEQ ID NO: 781717 - DNA, 33 bp, Homo sapien
atgattttttgcctgaaaatctagcaagaactc

SEQ ID NO: 781718 - DNA, 33 bp, Homo sapien
atgattttttgcctgataatctagcaagaactc

SEQ ID NO: 781719 - DNA, 33 bp, Homo sapien
tgtgcaggctaattgccccgtgccagttcccag

SEQ ID NO: 781720 - DNA, 33 bp, Homo sapien
tgtgcaggctaattgcgccgtgccagttcccag

SEQ ID NO: 781721 - DNA, 33 bp, Homo sapien
aaaatttattcagaaaaataattatgcaagaat

SEQ ID NO: 781722 - DNA, 33 bp, Homo sapien
aaaatttattcagaaagataattatgcaagaat

SEQ ID NO: 781723 - DNA, 33 bp, Homo sapien
gggaaagattgaaaacaaaaattgttggaaaag

SEQ ID NO: 781724 - DNA, 33 bp, Homo sapien
gggaaagattgaaaacgaaaattgttggaaaag

SEQ ID NO: 781725 - DNA, 33 bp, Homo sapien
aaggaccacaatacctaagaggggcattttgag

SEQ ID NO: 781726 - DNA, 33 bp, Homo sapien
aaggaccacaatacctgagaggggcattttgag

SEQ ID NO: 781727 - DNA, 33 bp, Homo sapien
aggtgttatcacagagccaaaaaaataaaaaaa

SEQ ID NO: 781728 - DNA, 33 bp, Homo sapien
aggtgttatcacagagtcaaaaaaataaaaaaa

SEQ ID NO: 781729 - DNA, 33 bp, Homo sapien
cccttcactcaattaaatctagcacagtctgga

SEQ ID NO: 781730 - DNA, 33 bp, Homo sapien
cccttcactcaattaagtctagcacagtctgga

SEQ ID NO: 781731 - DNA, 33 bp, Homo sapien
aaattcttcttaatggaacatttgtctcttctc

SEQ ID NO: 781732 - DNA, 33 bp, Homo sapien
aaattcttcttaatgggacatttgtctcttctc

SEQ ID NO: 781733 - DNA, 33 bp, Homo sapien
atagtttggcatcagaggattgaaaattaaaac

SEQ ID NO: 781734 - DNA, 33 bp, Homo sapien
atagtttggcatcagatgattgaaaattaaaac

SEQ ID NO: 781735 - DNA, 33 bp, Homo sapien
gaaaatgcttggagtcaaataataatgaaaata

SEQ ID NO: 781736 - DNA, 33 bp, Homo sapien
gaaaatgcttggagtcgaataataatgaaaata

SEQ ID NO: 781737 - DNA, 33 bp, Homo sapien
atcatctagcaaaaatcaggttccacgtatcct

SEQ ID NO: 781738 - DNA, 33 bp, Homo sapien
atcatctagcaaaaatgaggttccacgtatcct

SEQ ID NO: 781739 - DNA, 33 bp, Homo sapien
tatttagggtaacatgaatgcacttagaggaca

SEQ ID NO: 781740 - DNA, 33 bp, Homo sapien
tatttagggtaacatggatgcacttagaggaca

SEQ ID NO: 781741 - DNA, 33 bp, Homo sapien
atacccaaaagtattgaaatcagtatatcaaag

SEQ ID NO: 781742 - DNA, 33 bp, Homo sapien
atacccaaaagtattgcaatcagtatatcaaag

SEQ ID NO: 781743 - DNA, 33 bp, Homo sapien
acacttatcacgtatcaaaattaatgctgttga

SEQ ID NO: 781744 - DNA, 33 bp, Homo sapien
acacttatcacgtatctaaattaatgctgttga

SEQ ID NO: 781745 - DNA, 33 bp, Homo sapien
cataaagttcaggatagtaattgtatttacagg

SEQ ID NO: 781746 - DNA, 33 bp, Homo sapien
cataaagttcaggatattaattgtatttacagg

SEQ ID NO: 781747 - DNA, 33 bp, Homo sapien
cctttccaaatcatgacgtcctctgtatcctgt

SEQ ID NO: 781748 - DNA, 33 bp, Homo sapien
cctttccaaatcatgatgtcctctgtatcctgt

SEQ ID NO: 781749 - DNA, 33 bp, Homo sapien
aactttagtgcagttacgatcacaaaatctcca

SEQ ID NO: 781750 - DNA, 33 bp, Homo sapien
aactttagtgcagttatgatcacaaaatctcca

SEQ ID NO: 781751 - DNA, 33 bp, Homo sapien
tatatgtgactcaaggaacaagaatggctcagg

SEQ ID NO: 781752 - DNA, 33 bp, Homo sapien
tatatgtgactcaaggtacaagaatggctcagg

SEQ ID NO: 781753 - DNA, 33 bp, Homo sapien
tcacttcacagcaaataaagtataacaatgggc

SEQ ID NO: 781754 - DNA, 33 bp, Homo sapien
tcacttcacagcaaatgaagtataacaatgggc

SEQ ID NO: 781755 - DNA, 33 bp, Homo sapien
tagtgccattccaagaatacattatgatgatcg

SEQ ID NO: 781756 - DNA, 33 bp, Homo sapien
tagtgccattccaagagtacattatgatgatcg

SEQ ID NO: 781757 - DNA, 33 bp, Homo sapien
tactatgacaactgaaaaattccacagttacct

SEQ ID NO: 781758 - DNA, 33 bp, Homo sapien
tactatgacaactgaacaattccacagttacct

SEQ ID NO: 781759 - DNA, 33 bp, Homo sapien
caccagtgaccctcgcggatgcatagaaatttt

SEQ ID NO: 781760 - DNA, 33 bp, Homo sapien
caccagtgaccctcgctgatgcatagaaatttt

SEQ ID NO: 781761 - DNA, 33 bp, Homo sapien
ttgcatgtaaaaccagacccacatacacaacct

SEQ ID NO: 781762 - DNA, 33 bp, Homo sapien
ttgcatgtaaaaccaggcccacatacacaacct

SEQ ID NO: 781763 - DNA, 33 bp, Homo sapien
gagtaaagtttaaaggcccaacaaaggcttatt

SEQ ID NO: 781764 - DNA, 33 bp, Homo sapien
gagtaaagtttaaaggtccaacaaaggcttatt

SEQ ID NO: 781765 - DNA, 33 bp, Homo sapien
tgaaatgttagaaatactaatggctgtaaagcc

SEQ ID NO: 781766 - DNA, 33 bp, Homo sapien
tgaaatgttagaaatagtaatggctgtaaagcc

SEQ ID NO: 781767 - DNA, 33 bp, Homo sapien
gaaacattttaattagacatccatagctgtcaa

SEQ ID NO: 781768 - DNA, 33 bp, Homo sapien
gaaacattttaattaggcatccatagctgtcaa

SEQ ID NO: 781769 - DNA, 33 bp, Homo sapien
tgttactacttcacagacagattctcctggcag

SEQ ID NO: 781770 - DNA, 33 bp, Homo sapien
tgttactacttcacagccagattctcctggcag

SEQ ID NO: 781771 - DNA, 33 bp, Homo sapien
aaaatgcaaagtaggaatagaagccgcaaaagt

SEQ ID NO: 781772 - DNA, 33 bp, Homo sapien
aaaatgcaaagtaggagtagaagccgcaaaagt

SEQ ID NO: 781773 - DNA, 33 bp, Homo sapien
tgtgctttgaagatcacaggtgagtggtatttg

SEQ ID NO: 781774 - DNA, 33 bp, Homo sapien
tgtgctttgaagatcataggtgagtggtatttg

SEQ ID NO: 781775 - DNA, 33 bp, Homo sapien
tccttagccaagagaaatgaaatacaactacct

SEQ ID NO: 781776 - DNA, 33 bp, Homo sapien
tccttagccaagagaagtgaaatacaactacct

SEQ ID NO: 781777 - DNA, 33 bp, Homo sapien
agaggctagtagaggacatgacatttttcaagt

SEQ ID NO: 781778 - DNA, 33 bp, Homo sapien
agaggctagtagaggagatgacatttttcaagt

SEQ ID NO: 781779 - DNA, 33 bp, Homo sapien
gaactttgacatttaacctacactctacattgt

SEQ ID NO: 781780 - DNA, 33 bp, Homo sapien
gaactttgacatttaagctacactctacattgt

SEQ ID NO: 781781 - DNA, 33 bp, Homo sapien
ttactgtgacactcaacatccttcataagtcct

SEQ ID NO: 781782 - DNA, 33 bp, Homo sapien
ttactgtgacactcaatatccttcataagtcct

SEQ ID NO: 781783 - DNA, 33 bp, Homo sapien
tctattctgtcactcccgctacctgaactaatc

SEQ ID NO: 781784 - DNA, 33 bp, Homo sapien
tctattctgtcactcctgctacctgaactaatc

SEQ ID NO: 781785 - DNA, 33 bp, Homo sapien
cctttcatagcacatcagatcaaaattctaatt

SEQ ID NO: 781786 - DNA, 33 bp, Homo sapien
cctttcatagcacatcggatcaaaattctaatt

SEQ ID NO: 781787 - DNA, 33 bp, Homo sapien
aagaaggagacattacaccaataacacagaaat

SEQ ID NO: 781788 - DNA, 33 bp, Homo sapien
aagaaggagacattacgccaataacacagaaat

SEQ ID NO: 781789 - DNA, 33 bp, Homo sapien
tatgatgggatagcaaatatggtttattgggct

SEQ ID NO: 781790 - DNA, 33 bp, Homo sapien
tatgatgggatagcaagtatggtttattgggct

SEQ ID NO: 781791 - DNA, 33 bp, Homo sapien
agtaagctatggcacaaagcagttcaatcaaca

SEQ ID NO: 781792 - DNA, 33 bp, Homo sapien
agtaagctatggcacagagcagttcaatcaaca

SEQ ID NO: 781793 - DNA, 33 bp, Homo sapien
aacttgccctgaaatagataagaaatgtcaagt

SEQ ID NO: 781794 - DNA, 33 bp, Homo sapien
aacttgccctgaaatatataagaaatgtcaagt

SEQ ID NO: 781795 - DNA, 33 bp, Homo sapien
ggcaagttctgactcaacttgatggaagtgaac

SEQ ID NO: 781796 - DNA, 33 bp, Homo sapien
ggcaagttctgactcatcttgatggaagtgaac

SEQ ID NO: 781797 - DNA, 33 bp, Homo sapien
atttctcagacccatacacctttctcccagttt

SEQ ID NO: 781798 - DNA, 33 bp, Homo sapien
atttctcagacccatatacctttctcccagttt

SEQ ID NO: 781799 - DNA, 33 bp, Homo sapien
aagaagttatcacctaaatcacatttatgtacc

SEQ ID NO: 781800 - DNA, 33 bp, Homo sapien
aagaagttatcacctagatcacatttatgtacc

SEQ ID NO: 781801 - DNA, 33 bp, Homo sapien
tttatggctaagtccacgaatcaattgtaacaa

SEQ ID NO: 781802 - DNA, 33 bp, Homo sapien
tttatggctaagtccatgaatcaattgtaacaa

SEQ ID NO: 781803 - DNA, 33 bp, Homo sapien
ccatatcatctgtttaccccatcagtagtttct

SEQ ID NO: 781804 - DNA, 33 bp, Homo sapien
ccatatcatctgtttatcccatcagtagtttct

SEQ ID NO: 781805 - DNA, 33 bp, Homo sapien
ctctggggggaaatacacacctttcctgtaagt

SEQ ID NO: 781806 - DNA, 33 bp, Homo sapien
ctctggggggaaatacgcacctttcctgtaagt

SEQ ID NO: 781807 - DNA, 33 bp, Homo sapien
gatatttttgttgcaaatatcagacagttaacc

SEQ ID NO: 781808 - DNA, 33 bp, Homo sapien
gatatttttgttgcaagtatcagacagttaacc

SEQ ID NO: 781809 - DNA, 33 bp, Homo sapien
cttcatatcttcagcaaattttcccttttcttt

SEQ ID NO: 781810 - DNA, 33 bp, Homo sapien
cttcatatcttcagcagattttcccttttcttt

SEQ ID NO: 781811 - DNA, 33 bp, Homo sapien
ttcagtcaaatcataacaggaaacctggtccaa

SEQ ID NO: 781812 - DNA, 33 bp, Homo sapien
ttcagtcaaatcataataggaaacctggtccaa

SEQ ID NO: 781813 - DNA, 33 bp, Homo sapien
caacaactcagcctagaaattttcaagttatta

SEQ ID NO: 781814 - DNA, 33 bp, Homo sapien
caacaactcagcctagtaattttcaagttatta

SEQ ID NO: 781815 - DNA, 33 bp, Homo sapien
ttactaatttttcccacgtgcctgtaggcttga

SEQ ID NO: 781816 - DNA, 33 bp, Homo sapien
ttactaatttttcccatgtgcctgtaggcttga

SEQ ID NO: 781817 - DNA, 33 bp, Homo sapien
tgaactttcgatagcccaagatggacatgagca

SEQ ID NO: 781818 - DNA, 33 bp, Homo sapien
tgaactttcgatagcctaagatggacatgagca

SEQ ID NO: 781819 - DNA, 33 bp, Homo sapien
catttttttacatatacccagaaaccaaatgaa

SEQ ID NO: 781820 - DNA, 33 bp, Homo sapien
catttttttacatatatccagaaaccaaatgaa

SEQ ID NO: 781821 - DNA, 33 bp, Homo sapien
agtgccttcatccctaccttcagtatctataat

SEQ ID NO: 781822 - DNA, 33 bp, Homo sapien
agtgccttcatccctatcttcagtatctataat

SEQ ID NO: 781823 - DNA, 33 bp, Homo sapien
tatagaagagtctccaaatatttgtctgatttc

SEQ ID NO: 781824 - DNA, 33 bp, Homo sapien
tatagaagagtctccagatatttgtctgatttc

SEQ ID NO: 781825 - DNA, 33 bp, Homo sapien
gtatgtaatgagcttagagtcttctggacctca

SEQ ID NO: 781826 - DNA, 33 bp, Homo sapien
gtatgtaatgagcttatagtcttctggacctca

SEQ ID NO: 781827 - DNA, 33 bp, Homo sapien
aaaggctggattttgcaagatctcttatcacta

SEQ ID NO: 781828 - DNA, 33 bp, Homo sapien
aaaggctggattttgctagatctcttatcacta

SEQ ID NO: 781829 - DNA, 33 bp, Homo sapien
tattatttattcaggacgatggaactttcctta

SEQ ID NO: 781830 - DNA, 33 bp, Homo sapien
tattatttattcaggatgatggaactttcctta

SEQ ID NO: 781831 - DNA, 33 bp, Homo sapien
aagtaatctttgacaaagtcagacaaaaacatg

SEQ ID NO: 781832 - DNA, 33 bp, Homo sapien
aagtaatctttgacaatgtcagacaaaaacatg

SEQ ID NO: 781833 - DNA, 33 bp, Homo sapien
tctgcagctaaagtagaacaaacacaacttaga

SEQ ID NO: 781834 - DNA, 33 bp, Homo sapien
tctgcagctaaagtaggacaaacacaacttaga

SEQ ID NO: 781835 - DNA, 33 bp, Homo sapien
atcattctctccacacccaaaacaggagatgca

SEQ ID NO: 781836 - DNA, 33 bp, Homo sapien
atcattctctccacacgcaaaacaggagatgca

SEQ ID NO: 781837 - DNA, 33 bp, Homo sapien
aaccactactgtttaaatgcaaccatgctttga

SEQ ID NO: 781838 - DNA, 33 bp, Homo sapien
aaccactactgtttaagtgcaaccatgctttga

SEQ ID NO: 781839 - DNA, 33 bp, Homo sapien
actgatccttgacatccagcttgcattgtctct

SEQ ID NO: 781840 - DNA, 33 bp, Homo sapien
actgatccttgacatctagcttgcattgtctct

SEQ ID NO: 781841 - DNA, 33 bp, Homo sapien
aatgaaaaacaatgaacggaagtgttgactttt

SEQ ID NO: 781842 - DNA, 33 bp, Homo sapien
aatgaaaaacaatgaatggaagtgttgactttt

SEQ ID NO: 781843 - DNA, 33 bp, Homo sapien
acaacgtagcctcctaaatgtagctatcaacag

SEQ ID NO: 781844 - DNA, 33 bp, Homo sapien
acaacgtagcctcctagatgtagctatcaacag

SEQ ID NO: 781845 - DNA, 33 bp, Homo sapien
ggagtagaatttcttaacaatctgactctcttt

SEQ ID NO: 781846 - DNA, 33 bp, Homo sapien
ggagtagaatttcttatcaatctgactctcttt

SEQ ID NO: 781847 - DNA, 33 bp, Homo sapien
tactgacatagatcaaaacatcataaaacaaca

SEQ ID NO: 781848 - DNA, 33 bp, Homo sapien
tactgacatagatcaacacatcataaaacaaca

SEQ ID NO: 781849 - DNA, 33 bp, Homo sapien
aggtggtatctttaacagccagtatacaattca

SEQ ID NO: 781850 - DNA, 33 bp, Homo sapien
aggtggtatctttaacggccagtatacaattca

SEQ ID NO: 781851 - DNA, 33 bp, Homo sapien
aagattcacatctcctaaaacccgtaacaatga

SEQ ID NO: 781852 - DNA, 33 bp, Homo sapien
aagattcacatctccttaaacccgtaacaatga

SEQ ID NO: 781853 - DNA, 33 bp, Homo sapien
catgatcatttgtacaccaagccccagagacat

SEQ ID NO: 781854 - DNA, 33 bp, Homo sapien
catgatcatttgtacatcaagccccagagacat

SEQ ID NO: 781855 - DNA, 33 bp, Homo sapien
ttactgaacatgagataactctctgctaggaat

SEQ ID NO: 781856 - DNA, 33 bp, Homo sapien
ttactgaacatgagatgactctctgctaggaat

SEQ ID NO: 781857 - DNA, 33 bp, Homo sapien
tatttactgcagcataatataacttaaccagac

SEQ ID NO: 781858 - DNA, 33 bp, Homo sapien
tatttactgcagcatactataacttaaccagac

SEQ ID NO: 781859 - DNA, 33 bp, Homo sapien
ggacaacatagtcaaaaaacatctcttgcaaaa

SEQ ID NO: 781860 - DNA, 33 bp, Homo sapien
ggacaacatagtcaaacaacatctcttgcaaaa

SEQ ID NO: 781861 - DNA, 33 bp, Homo sapien
ttaaactcaaccttagaatgtcagaataggtat

SEQ ID NO: 781862 - DNA, 33 bp, Homo sapien
ttaaactcaaccttagcatgtcagaataggtat

SEQ ID NO: 781863 - DNA, 33 bp, Homo sapien
taaaatgtgcttattacaagagtgttttgggaa

SEQ ID NO: 781864 - DNA, 33 bp, Homo sapien
taaaatgtgcttattataagagtgttttgggaa

SEQ ID NO: 781865 - DNA, 33 bp, Homo sapien
taagattgggaaacaaaaagaagtcagaaatag

SEQ ID NO: 781866 - DNA, 33 bp, Homo sapien
taagattgggaaacaagaagaagtcagaaatag

SEQ ID NO: 781867 - DNA, 33 bp, Homo sapien
tattactaccttctacacaattaaatcacaaag

SEQ ID NO: 781868 - DNA, 33 bp, Homo sapien
tattactaccttctacgcaattaaatcacaaag

SEQ ID NO: 781869 - DNA, 33 bp, Homo sapien
actacagacactaagaataagatatgctaacag

SEQ ID NO: 781870 - DNA, 33 bp, Homo sapien
actacagacactaagattaagatatgctaacag

SEQ ID NO: 781871 - DNA, 33 bp, Homo sapien
tttaaggatgcagctaagtgaataattacattt

SEQ ID NO: 781872 - DNA, 33 bp, Homo sapien
tttaaggatgcagctaggtgaataattacattt

SEQ ID NO: 781873 - DNA, 33 bp, Homo sapien
agactgttttccaatacggctttactactttat

SEQ ID NO: 781874 - DNA, 33 bp, Homo sapien
agactgttttccaatatggctttactactttat

SEQ ID NO: 781875 - DNA, 33 bp, Homo sapien
taaaatgaaaaaataaagtgtcatgatatacat

SEQ ID NO: 781876 - DNA, 33 bp, Homo sapien
taaaatgaaaaaataaggtgtcatgatatacat

SEQ ID NO: 781877 - DNA, 33 bp, Homo sapien
gatgttaccaaagcaaccatacatgaagataca

SEQ ID NO: 781878 - DNA, 33 bp, Homo sapien
gatgttaccaaagcaatcatacatgaagataca

SEQ ID NO: 781879 - DNA, 33 bp, Homo sapien
aagaagaccactggtgcaatttcataagcaata

SEQ ID NO: 781880 - DNA, 33 bp, Homo sapien
aagaagaccactggtgtaatttcataagcaata

SEQ ID NO: 781881 - DNA, 33 bp, Homo sapien
tacttaatattacccacccaaaaggagaaaact

SEQ ID NO: 781882 - DNA, 33 bp, Homo sapien
tacttaatattacccatccaaaaggagaaaact

SEQ ID NO: 781883 - DNA, 33 bp, Homo sapien
aatgaaaaaaagacaacaaatgaactgagcaca

SEQ ID NO: 781884 - DNA, 33 bp, Homo sapien
aatgaaaaaaagacaagaaatgaactgagcaca

SEQ ID NO: 781885 - DNA, 33 bp, Homo sapien
aactggtactgatataaataagaaaggtaatgc

SEQ ID NO: 781886 - DNA, 33 bp, Homo sapien
aactggtactgatatagataagaaaggtaatgc

SEQ ID NO: 781887 - DNA, 33 bp, Homo sapien
aagaagaaatccaaaaagtttatgaggatatta

SEQ ID NO: 781888 - DNA, 33 bp, Homo sapien
aagaagaaatccaaaatgtttatgaggatatta

SEQ ID NO: 781889 - DNA, 33 bp, Homo sapien
tcccacttccaaaaccccttgcaggataagacc

SEQ ID NO: 781890 - DNA, 33 bp, Homo sapien
tcccacttccaaaacctcttgcaggataagacc

SEQ ID NO: 781891 - DNA, 33 bp, Homo sapien
cccaatgtactcataaaccgacttcgacaatta

SEQ ID NO: 781892 - DNA, 33 bp, Homo sapien
cccaatgtactcataacccgacttcgacaatta

SEQ ID NO: 781893 - DNA, 33 bp, Homo sapien
agggatcatagcactcaccgcgaagagtcagga

SEQ ID NO: 781894 - DNA, 33 bp, Homo sapien
agggatcatagcactcgccgcgaagagtcagga

SEQ ID NO: 781895 - DNA, 33 bp, Homo sapien
atactcaccattattaacagcaataaaatgtct

SEQ ID NO: 781896 - DNA, 33 bp, Homo sapien
atactcaccattattagcagcaataaaatgtct

SEQ ID NO: 781897 - DNA, 33 bp, Homo sapien
tgaagccatagaaaggaaagccaagatgacaga

SEQ ID NO: 781898 - DNA, 33 bp, Homo sapien
tgaagccatagaaagggaagccaagatgacaga

SEQ ID NO: 781899 - DNA, 33 bp, Homo sapien
acagactccttaaagcaaaatgatcatatctgt

SEQ ID NO: 781900 - DNA, 33 bp, Homo sapien
acagactccttaaagccaaatgatcatatctgt

SEQ ID NO: 781901 - DNA, 33 bp, Homo sapien
ccaatgtgaatatgacaaatttcaaaggacaag

SEQ ID NO: 781902 - DNA, 33 bp, Homo sapien
ccaatgtgaatatgacgaatttcaaaggacaag

SEQ ID NO: 781903 - DNA, 33 bp, Homo sapien
cttcacttagatttgaagtaacaaagagatatt

SEQ ID NO: 781904 - DNA, 33 bp, Homo sapien
cttcacttagatttgaggtaacaaagagatatt

SEQ ID NO: 781905 - DNA, 33 bp, Homo sapien
gaattatagctcaacaaaggaaatagtagatga

SEQ ID NO: 781906 - DNA, 33 bp, Homo sapien
gaattatagctcaacagaggaaatagtagatga

SEQ ID NO: 781907 - DNA, 33 bp, Homo sapien
ctgagacttagaaacaataggtaatttgaccga

SEQ ID NO: 781908 - DNA, 33 bp, Homo sapien
ctgagacttagaaacagtaggtaatttgaccga

SEQ ID NO: 781909 - DNA, 33 bp, Homo sapien
gtattaaaatatctgacgtttacacacacacac

SEQ ID NO: 781910 - DNA, 33 bp, Homo sapien
gtattaaaatatctgaggtttacacacacacac

SEQ ID NO: 781911 - DNA, 33 bp, Homo sapien
gactaaattcaattcagtaagcaatctaactaa

SEQ ID NO: 781912 - DNA, 33 bp, Homo sapien
gactaaattcaattcattaagcaatctaactaa

SEQ ID NO: 781913 - DNA, 33 bp, Homo sapien
tcttactccaggcaatcagcagaaagtgcatta

SEQ ID NO: 781914 - DNA, 33 bp, Homo sapien
tcttactccaggcaatgagcagaaagtgcatta

SEQ ID NO: 781915 - DNA, 33 bp, Homo sapien
tttattaagtattaacacgcacaatcacaaggt

SEQ ID NO: 781916 - DNA, 33 bp, Homo sapien
tttattaagtattaactcgcacaatcacaaggt

SEQ ID NO: 781917 - DNA, 33 bp, Homo sapien
tttgggtggccagcttaaaacgaaagcagccaa

SEQ ID NO: 781918 - DNA, 33 bp, Homo sapien
tttgggtggccagcttgaaacgaaagcagccaa

SEQ ID NO: 781919 - DNA, 33 bp, Homo sapien
cattttaaattactaaaccatcccagtgcttca

SEQ ID NO: 781920 - DNA, 33 bp, Homo sapien
cattttaaattactaagccatcccagtgcttca

SEQ ID NO: 781921 - DNA, 33 bp, Homo sapien
acagcaactatgggaacctcaactttgaaatag

SEQ ID NO: 781922 - DNA, 33 bp, Homo sapien
acagcaactatgggaatctcaactttgaaatag

SEQ ID NO: 781923 - DNA, 33 bp, Homo sapien
gtggcatagtagaaaaaaaagtgacaacaattg

SEQ ID NO: 781924 - DNA, 33 bp, Homo sapien
gtggcatagtagaaaagaaagtgacaacaattg

SEQ ID NO: 781925 - DNA, 33 bp, Homo sapien
gaaacagaatgtgatccaatttggtaaatattc

SEQ ID NO: 781926 - DNA, 33 bp, Homo sapien
gaaacagaatgtgatctaatttggtaaatattc

SEQ ID NO: 781927 - DNA, 33 bp, Homo sapien
tagcaatagaaaaaaaatcaattgaatcagaac

SEQ ID NO: 781928 - DNA, 33 bp, Homo sapien
tagcaatagaaaaaaactcaattgaatcagaac

SEQ ID NO: 781929 - DNA, 33 bp, Homo sapien
tctagaaaatgtttgacaatatgcctgttttct

SEQ ID NO: 781930 - DNA, 33 bp, Homo sapien
tctagaaaatgtttgataatatgcctgttttct

SEQ ID NO: 781931 - DNA, 33 bp, Homo sapien
tttccctggatgagtaaaacagcttagtgatct

SEQ ID NO: 781932 - DNA, 33 bp, Homo sapien
tttccctggatgagtagaacagcttagtgatct

SEQ ID NO: 781933 - DNA, 33 bp, Homo sapien
ttaatatgaaaagttacagtgaattctcctaat

SEQ ID NO: 781934 - DNA, 33 bp, Homo sapien
ttaatatgaaaagttagagtgaattctcctaat

SEQ ID NO: 781935 - DNA, 33 bp, Homo sapien
accttcagatgacagaaagtgccagcctggtga

SEQ ID NO: 781936 - DNA, 33 bp, Homo sapien
accttcagatgacagacagtgccagcctggtga

SEQ ID NO: 781937 - DNA, 33 bp, Homo sapien
ctaaatctatggaaaaaaagggataaatgttat

SEQ ID NO: 781938 - DNA, 33 bp, Homo sapien
ctaaatctatggaaaacaagggataaatgttat

SEQ ID NO: 781939 - DNA, 33 bp, Homo sapien
aaccgacataaattgaaatggaaatcaactgca

SEQ ID NO: 781940 - DNA, 33 bp, Homo sapien
aaccgacataaattgagatggaaatcaactgca

SEQ ID NO: 781941 - DNA, 33 bp, Homo sapien
ttggcagaaaaactacaccttgcaaatagcact

SEQ ID NO: 781942 - DNA, 33 bp, Homo sapien
ttggcagaaaaactacgccttgcaaatagcact

SEQ ID NO: 781943 - DNA, 33 bp, Homo sapien
tattctcccttaaaaacgtctgccgtttccatg

SEQ ID NO: 781944 - DNA, 33 bp, Homo sapien
tattctcccttaaaaatgtctgccgtttccatg

SEQ ID NO: 781945 - DNA, 33 bp, Homo sapien
taaggcattcataagaaacagatagaaacatct

SEQ ID NO: 781946 - DNA, 33 bp, Homo sapien
taaggcattcataagagacagatagaaacatct

SEQ ID NO: 781947 - DNA, 33 bp, Homo sapien
agtcctaagtttccaaataaatccattggtatt

SEQ ID NO: 781948 - DNA, 33 bp, Homo sapien
agtcctaagtttccaagtaaatccattggtatt

SEQ ID NO: 781949 - DNA, 33 bp, Homo sapien
gaaggtatagtggtgtaaaaagatatcccatac

SEQ ID NO: 781950 - DNA, 33 bp, Homo sapien
gaaggtatagtggtgtgaaaagatatcccatac

SEQ ID NO: 781951 - DNA, 33 bp, Homo sapien
cactttcttcctcaatgataacacatcaggaag

SEQ ID NO: 781952 - DNA, 33 bp, Homo sapien
cactttcttcctcaattataacacatcaggaag

SEQ ID NO: 781953 - DNA, 33 bp, Homo sapien
atggttattagttctcaagctagtccacactga

SEQ ID NO: 781954 - DNA, 33 bp, Homo sapien
atggttattagttctccagctagtccacactga

SEQ ID NO: 781955 - DNA, 33 bp, Homo sapien
tatctttgacaaatcacagggcagcagagattg

SEQ ID NO: 781956 - DNA, 33 bp, Homo sapien
tatctttgacaaatcatagggcagcagagattg

SEQ ID NO: 781957 - DNA, 33 bp, Homo sapien
acatttactgaggagcacacatatacctgggct

SEQ ID NO: 781958 - DNA, 33 bp, Homo sapien
acatttactgaggagcgcacatatacctgggct

SEQ ID NO: 781959 - DNA, 33 bp, Homo sapien
tcaggttcaaacttcacgttctactctgactga

SEQ ID NO: 781960 - DNA, 33 bp, Homo sapien
tcaggttcaaacttcatgttctactctgactga

SEQ ID NO: 781961 - DNA, 33 bp, Homo sapien
aaaacagcatgataccagcacaaacacaggcac

SEQ ID NO: 781962 - DNA, 33 bp, Homo sapien
aaaacagcatgataccggcacaaacacaggcac

SEQ ID NO: 781963 - DNA, 33 bp, Homo sapien
tggactttccaaacccagaaggctggaacaatt

SEQ ID NO: 781964 - DNA, 33 bp, Homo sapien
tggactttccaaacccggaaggctggaacaatt

SEQ ID NO: 781965 - DNA, 33 bp, Homo sapien
tgttctctcatttatcaattttctacagatata

SEQ ID NO: 781966 - DNA, 33 bp, Homo sapien
tgttctctcatttatccattttctacagatata

SEQ ID NO: 781967 - DNA, 33 bp, Homo sapien
tgcaatctcacaacacaagctaaccctcaggac

SEQ ID NO: 781968 - DNA, 33 bp, Homo sapien
tgcaatctcacaacacgagctaaccctcaggac

SEQ ID NO: 781969 - DNA, 33 bp, Homo sapien
acacttgaatcacagcacaataaaaatagaaat

SEQ ID NO: 781970 - DNA, 33 bp, Homo sapien
acacttgaatcacagcgcaataaaaatagaaat

SEQ ID NO: 781971 - DNA, 33 bp, Homo sapien
aggttaaactaaagcagggagtgagaataaatg

SEQ ID NO: 781972 - DNA, 33 bp, Homo sapien
aggttaaactaaagcatggagtgagaataaatg

SEQ ID NO: 781973 - DNA, 33 bp, Homo sapien
ctgctgatatctctggcataaatacttctacaa

SEQ ID NO: 781974 - DNA, 33 bp, Homo sapien
ctgctgatatctctgggataaatacttctacaa

SEQ ID NO: 781975 - DNA, 33 bp, Homo sapien
caaaccaagtatctgaactgcatcatttagacc

SEQ ID NO: 781976 - DNA, 33 bp, Homo sapien
caaaccaagtatctgacctgcatcatttagacc

SEQ ID NO: 781977 - DNA, 33 bp, Homo sapien
gttttatagcctaacactgatctattctggaga

SEQ ID NO: 781978 - DNA, 33 bp, Homo sapien
gttttatagcctaacattgatctattctggaga

SEQ ID NO: 781979 - DNA, 33 bp, Homo sapien
actatcaaagaaagtacgtcttcctgtggtcct

SEQ ID NO: 781980 - DNA, 33 bp, Homo sapien
actatcaaagaaagtatgtcttcctgtggtcct

SEQ ID NO: 781981 - DNA, 33 bp, Homo sapien
ccactgagattatcaacattccatttgcactcc

SEQ ID NO: 781982 - DNA, 33 bp, Homo sapien
ccactgagattatcaagattccatttgcactcc

SEQ ID NO: 781983 - DNA, 33 bp, Homo sapien
catttctttctcttgcccttttcataattttct

SEQ ID NO: 781984 - DNA, 33 bp, Homo sapien
catttctttctcttgctcttttcataattttct

SEQ ID NO: 781985 - DNA, 33 bp, Homo sapien
aaatagatccataagcaactcaagcctctttgt

SEQ ID NO: 781986 - DNA, 33 bp, Homo sapien
aaatagatccataagcgactcaagcctctttgt

SEQ ID NO: 781987 - DNA, 33 bp, Homo sapien
gttagcaagtatgtggaaaactctgaattcagt

SEQ ID NO: 781988 - DNA, 33 bp, Homo sapien
gttagcaagtatgtggtaaactctgaattcagt

SEQ ID NO: 781989 - DNA, 33 bp, Homo sapien
gggtggcaagctgctacagaaccaggaagagct

SEQ ID NO: 781990 - DNA, 33 bp, Homo sapien
gggtggcaagctgctatagaaccaggaagagct

SEQ ID NO: 781991 - DNA, 33 bp, Homo sapien
ggggggtggtaatgtacggactaggtgaagtcc

SEQ ID NO: 781992 - DNA, 33 bp, Homo sapien
ggggggtggtaatgtatggactaggtgaagtcc

SEQ ID NO: 781993 - DNA, 33 bp, Homo sapien
cattaccttcttcttcaaatcggacagatcccc

SEQ ID NO: 781994 - DNA, 33 bp, Homo sapien
cattaccttcttcttcgaatcggacagatcccc

SEQ ID NO: 781995 - DNA, 33 bp, Homo sapien
atccccaatttgagccacctctgaattaaggtg

SEQ ID NO: 781996 - DNA, 33 bp, Homo sapien
atccccaatttgagccccctctgaattaaggtg

SEQ ID NO: 781997 - DNA, 33 bp, Homo sapien
agagacagcagaaaagaaataggtactcctgtt

SEQ ID NO: 781998 - DNA, 33 bp, Homo sapien
agagacagcagaaaaggaataggtactcctgtt

SEQ ID NO: 781999 - DNA, 33 bp, Homo sapien
tactatccatatactcaaagatttgctttacat

SEQ ID NO: 782000 - DNA, 33 bp, Homo sapien
tactatccatatactctaagatttgctttacat

SEQ ID NO: 782001 - DNA, 33 bp, Homo sapien
tagaatgttctaaagcaaactccaaatgtcagc

SEQ ID NO: 782002 - DNA, 33 bp, Homo sapien
tagaatgttctaaagccaactccaaatgtcagc

SEQ ID NO: 782003 - DNA, 33 bp, Homo sapien
atggtgtaactggcaaaaggaacaagaaacaga

SEQ ID NO: 782004 - DNA, 33 bp, Homo sapien
atggtgtaactggcaagaggaacaagaaacaga

SEQ ID NO: 782005 - DNA, 33 bp, Homo sapien
tttggactatccctggaactttattggtctggg

SEQ ID NO: 782006 - DNA, 33 bp, Homo sapien
tttggactatccctgggactttattggtctggg

SEQ ID NO: 782007 - DNA, 33 bp, Homo sapien
gcatgatagacctttccaatctgtggttctcag

SEQ ID NO: 782008 - DNA, 33 bp, Homo sapien
gcatgatagacctttctaatctgtggttctcag

SEQ ID NO: 782009 - DNA, 33 bp, Homo sapien
cctcaggaagcttccaatcatagtagaagacaa

SEQ ID NO: 782010 - DNA, 33 bp, Homo sapien
cctcaggaagcttccagtcatagtagaagacaa

SEQ ID NO: 782011 - DNA, 33 bp, Homo sapien
atctcattgagttaaaccaaggtgtaggtagga

SEQ ID NO: 782012 - DNA, 33 bp, Homo sapien
atctcattgagttaaatcaaggtgtaggtagga

SEQ ID NO: 782013 - DNA, 33 bp, Homo sapien
tatagctacctttcatcagaattatatctacac

SEQ ID NO: 782014 - DNA, 33 bp, Homo sapien
tatagctacctttcattagaattatatctacac

SEQ ID NO: 782015 - DNA, 33 bp, Homo sapien
atcagttaaaatcaaaccaaatttatgtattga

SEQ ID NO: 782016 - DNA, 33 bp, Homo sapien
atcagttaaaatcaaagcaaatttatgtattga

SEQ ID NO: 782017 - DNA, 33 bp, Homo sapien
ctctaatcatccactacggtaaactgttttcaa

SEQ ID NO: 782018 - DNA, 33 bp, Homo sapien
ctctaatcatccactatggtaaactgttttcaa

SEQ ID NO: 782019 - DNA, 33 bp, Homo sapien
ctgagtgttttgtggccataaatggagaagaat

SEQ ID NO: 782020 - DNA, 33 bp, Homo sapien
ctgagtgttttgtggctataaatggagaagaat

SEQ ID NO: 782021 - DNA, 33 bp, Homo sapien
cttttgttacagagaactgtgaaataaaatcaa

SEQ ID NO: 782022 - DNA, 33 bp, Homo sapien
cttttgttacagagaattgtgaaataaaatcaa

SEQ ID NO: 782023 - DNA, 33 bp, Homo sapien
cccttaatcagtctagcacgtttccatacttca

SEQ ID NO: 782024 - DNA, 33 bp, Homo sapien
cccttaatcagtctagtacgtttccatacttca

SEQ ID NO: 782025 - DNA, 33 bp, Homo sapien
atcaagagcgtctactcaccagatgccagcagc

SEQ ID NO: 782026 - DNA, 33 bp, Homo sapien
atcaagagcgtctacttaccagatgccagcagc

SEQ ID NO: 782027 - DNA, 33 bp, Homo sapien
ttgagagtaaggcaccacagtacaatttggagt

SEQ ID NO: 782028 - DNA, 33 bp, Homo sapien
ttgagagtaaggcaccgcagtacaatttggagt

SEQ ID NO: 782029 - DNA, 33 bp, Homo sapien
ttaaaatttagcattaaagacaaagcaacaaga

SEQ ID NO: 782030 - DNA, 33 bp, Homo sapien
ttaaaatttagcattacagacaaagcaacaaga

SEQ ID NO: 782031 - DNA, 33 bp, Homo sapien
atagcactgtcagaaaagttaaattatcctgtt

SEQ ID NO: 782032 - DNA, 33 bp, Homo sapien
atagcactgtcagaaatgttaaattatcctgtt

SEQ ID NO: 782033 - DNA, 33 bp, Homo sapien
tgattacaacataaaacatgactgcccacaaaa

SEQ ID NO: 782034 - DNA, 33 bp, Homo sapien
tgattacaacataaaatatgactgcccacaaaa

SEQ ID NO: 782035 - DNA, 33 bp, Homo sapien
caagtgttaagttcaagtcttgaatatctttat

SEQ ID NO: 782036 - DNA, 33 bp, Homo sapien
caagtgttaagttcaattcttgaatatctttat

SEQ ID NO: 782037 - DNA, 33 bp, Homo sapien
tgtacctcatattgaagtattcactcccagaaa

SEQ ID NO: 782038 - DNA, 33 bp, Homo sapien
tgtacctcatattgaattattcactcccagaaa

SEQ ID NO: 782039 - DNA, 33 bp, Homo sapien
agaaaagcatagtgaacagtaaaggggtttttg

SEQ ID NO: 782040 - DNA, 33 bp, Homo sapien
agaaaagcatagtgaatagtaaaggggtttttg

SEQ ID NO: 782041 - DNA, 33 bp, Homo sapien
agcctagaggaagtcaactagaagctcagcagc

SEQ ID NO: 782042 - DNA, 33 bp, Homo sapien
agcctagaggaagtcagctagaagctcagcagc

SEQ ID NO: 782043 - DNA, 33 bp, Homo sapien
cactagtgttggactaaacagcaggaaaaatat

SEQ ID NO: 782044 - DNA, 33 bp, Homo sapien
cactagtgttggactagacagcaggaaaaatat

SEQ ID NO: 782045 - DNA, 33 bp, Homo sapien
aatatctaacagagaaactgctaacaaaagtgg

SEQ ID NO: 782046 - DNA, 33 bp, Homo sapien
aatatctaacagagaatctgctaacaaaagtgg

SEQ ID NO: 782047 - DNA, 33 bp, Homo sapien
tatttgaaatatgaaacggtagagtctagggag

SEQ ID NO: 782048 - DNA, 33 bp, Homo sapien
tatttgaaatatgaaatggtagagtctagggag

SEQ ID NO: 782049 - DNA, 33 bp, Homo sapien
aagtgatttctttggactatgcctgtacattaa

SEQ ID NO: 782050 - DNA, 33 bp, Homo sapien
aagtgatttctttggattatgcctgtacattaa

SEQ ID NO: 782051 - DNA, 33 bp, Homo sapien
tttagtagataacatacacctctgaagtcacta

SEQ ID NO: 782052 - DNA, 33 bp, Homo sapien
tttagtagataacatagacctctgaagtcacta

SEQ ID NO: 782053 - DNA, 33 bp, Homo sapien
gaatatgcagaggccaataatctagaaatttat

SEQ ID NO: 782054 - DNA, 33 bp, Homo sapien
gaatatgcagaggccagtaatctagaaatttat

SEQ ID NO: 782055 - DNA, 33 bp, Homo sapien
ctgataactcacacaaaaaatagaggcccaaga

SEQ ID NO: 782056 - DNA, 33 bp, Homo sapien
ctgataactcacacaagaaatagaggcccaaga

SEQ ID NO: 782057 - DNA, 33 bp, Homo sapien
agaatgcgatgtggacaggatttatggggacaa

SEQ ID NO: 782058 - DNA, 33 bp, Homo sapien
agaatgcgatgtggacgggatttatggggacaa

SEQ ID NO: 782059 - DNA, 33 bp, Homo sapien
cgctgtgtatgaggacaaatagagagctaatgc

SEQ ID NO: 782060 - DNA, 33 bp, Homo sapien
cgctgtgtatgaggaccaatagagagctaatgc

SEQ ID NO: 782061 - DNA, 33 bp, Homo sapien
aggaaccacagctcacgattaaacaattgctga

SEQ ID NO: 782062 - DNA, 33 bp, Homo sapien
aggaaccacagctcactattaaacaattgctga

SEQ ID NO: 782063 - DNA, 33 bp, Homo sapien
cattttttagtaattccagtatctggccatcct

SEQ ID NO: 782064 - DNA, 33 bp, Homo sapien
cattttttagtaattctagtatctggccatcct

SEQ ID NO: 782065 - DNA, 33 bp, Homo sapien
caaaacaccagctgaacgtaagataaagaaaca

SEQ ID NO: 782066 - DNA, 33 bp, Homo sapien
caaaacaccagctgaatgtaagataaagaaaca

SEQ ID NO: 782067 - DNA, 33 bp, Homo sapien
acagcagtccaatttaccattttgctaccttgg

SEQ ID NO: 782068 - DNA, 33 bp, Homo sapien
acagcagtccaatttatcattttgctaccttgg

SEQ ID NO: 782069 - DNA, 33 bp, Homo sapien
aagtactagtcagaaagctgagaagctgaaatg

SEQ ID NO: 782070 - DNA, 33 bp, Homo sapien
aagtactagtcagaaatctgagaagctgaaatg

SEQ ID NO: 782071 - DNA, 33 bp, Homo sapien
ttttgctaacaaaaaactttcagaagaatttcg

SEQ ID NO: 782072 - DNA, 33 bp, Homo sapien
ttttgctaacaaaaaagtttcagaagaatttcg

SEQ ID NO: 782073 - DNA, 33 bp, Homo sapien
tattgtgctccactataatacaccatatgctct

SEQ ID NO: 782074 - DNA, 33 bp, Homo sapien
tattgtgctccactattatacaccatatgctct

SEQ ID NO: 782075 - DNA, 33 bp, Homo sapien
tttatttctacgttcaacctaaaagctcactgc

SEQ ID NO: 782076 - DNA, 33 bp, Homo sapien
tttatttctacgttcagcctaaaagctcactgc

SEQ ID NO: 782077 - DNA, 33 bp, Homo sapien
atactgcacattcaaagtatcatcatttgttgt

SEQ ID NO: 782078 - DNA, 33 bp, Homo sapien
atactgcacattcaaattatcatcatttgttgt

SEQ ID NO: 782079 - DNA, 33 bp, Homo sapien
atagtattcactacaaattgacttaagaaccct

SEQ ID NO: 782080 - DNA, 33 bp, Homo sapien
atagtattcactacaagttgacttaagaaccct

SEQ ID NO: 782081 - DNA, 33 bp, Homo sapien
tcatcttgctgaaataaagaggttctcattgtt

SEQ ID NO: 782082 - DNA, 33 bp, Homo sapien
tcatcttgctgaaatagagaggttctcattgtt

SEQ ID NO: 782083 - DNA, 33 bp, Homo sapien
tctttattttctttccaagagtctgcagtagat

SEQ ID NO: 782084 - DNA, 33 bp, Homo sapien
tctttattttctttcccagagtctgcagtagat

SEQ ID NO: 782085 - DNA, 33 bp, Homo sapien
atcagattacagcatacgataaaaagtaaatgc

SEQ ID NO: 782086 - DNA, 33 bp, Homo sapien
atcagattacagcatatgataaaaagtaaatgc

SEQ ID NO: 782087 - DNA, 33 bp, Homo sapien
tctatcttttccatcaaaacagtgaaaaagaac

SEQ ID NO: 782088 - DNA, 33 bp, Homo sapien
tctatcttttccatcataacagtgaaaaagaac

SEQ ID NO: 782089 - DNA, 33 bp, Homo sapien
caattgtgagacaatacgaatgagccacgtggc

SEQ ID NO: 782090 - DNA, 33 bp, Homo sapien
caattgtgagacaatatgaatgagccacgtggc

SEQ ID NO: 782091 - DNA, 33 bp, Homo sapien
gagcagaattccagaaaaactgaagttggtggt

SEQ ID NO: 782092 - DNA, 33 bp, Homo sapien
gagcagaattccagaagaactgaagttggtggt

SEQ ID NO: 782093 - DNA, 33 bp, Homo sapien
ggagctaactgccagaaacaaaatggacatgat

SEQ ID NO: 782094 - DNA, 33 bp, Homo sapien
ggagctaactgccagagacaaaatggacatgat

SEQ ID NO: 782095 - DNA, 33 bp, Homo sapien
ttctgaactttctgtcgctcacggcaatcatgt

SEQ ID NO: 782096 - DNA, 33 bp, Homo sapien
ttctgaactttctgtctctcacggcaatcatgt

SEQ ID NO: 782097 - DNA, 33 bp, Homo sapien
acagcaaacagctaaaagaagatttcagccatt

SEQ ID NO: 782098 - DNA, 33 bp, Homo sapien
acagcaaacagctaaaggaagatttcagccatt

SEQ ID NO: 782099 - DNA, 33 bp, Homo sapien
tgaaatttagccgaaaaagtatatcaaaagcaa

SEQ ID NO: 782100 - DNA, 33 bp, Homo sapien
tgaaatttagccgaaagagtatatcaaaagcaa

SEQ ID NO: 782101 - DNA, 33 bp, Homo sapien
gtatactgcttgaagaagtgtccactggaagga

SEQ ID NO: 782102 - DNA, 33 bp, Homo sapien
gtatactgcttgaagacgtgtccactggaagga

SEQ ID NO: 782103 - DNA, 33 bp, Homo sapien
ttttggtggacttttacgtgagagacgaagact

SEQ ID NO: 782104 - DNA, 33 bp, Homo sapien
ttttggtggacttttatgtgagagacgaagact

SEQ ID NO: 782105 - DNA, 33 bp, Homo sapien
atcaaagaggaatgaaagatttgtccagtggat

SEQ ID NO: 782106 - DNA, 33 bp, Homo sapien
atcaaagaggaatgaatgatttgtccagtggat

SEQ ID NO: 782107 - DNA, 33 bp, Homo sapien
atcatgttgagaaatagcagagcaaaatttggt

SEQ ID NO: 782108 - DNA, 33 bp, Homo sapien
atcatgttgagaaatatcagagcaaaatttggt

SEQ ID NO: 782109 - DNA, 33 bp, Homo sapien
ccttaatcaaaaacaacgaggtttgagctagta

SEQ ID NO: 782110 - DNA, 33 bp, Homo sapien
ccttaatcaaaaacaatgaggtttgagctagta

SEQ ID NO: 782111 - DNA, 33 bp, Homo sapien
ggtaaaaatcatatataaaatggccacagttaa

SEQ ID NO: 782112 - DNA, 33 bp, Homo sapien
ggtaaaaatcatatatgaaatggccacagttaa

SEQ ID NO: 782113 - DNA, 33 bp, Homo sapien
tctcagcctcaaaggtcaatagggtacatggag

SEQ ID NO: 782114 - DNA, 33 bp, Homo sapien
tctcagcctcaaaggttaatagggtacatggag

SEQ ID NO: 782115 - DNA, 33 bp, Homo sapien
tttgcctcatacttgccaatactgtccctgaaa

SEQ ID NO: 782116 - DNA, 33 bp, Homo sapien
tttgcctcatacttgctaatactgtccctgaaa

SEQ ID NO: 782117 - DNA, 33 bp, Homo sapien
taattgtaagaagggcaaaagggtcaaattctg

SEQ ID NO: 782118 - DNA, 33 bp, Homo sapien
taattgtaagaagggcgaaagggtcaaattctg

SEQ ID NO: 782119 - DNA, 33 bp, Homo sapien
ttactttccattcagtaaacacatttgtataat

SEQ ID NO: 782120 - DNA, 33 bp, Homo sapien
ttactttccattcagtgaacacatttgtataat

SEQ ID NO: 782121 - DNA, 33 bp, Homo sapien
ttagagaaaaaaaaaagatgcctacagaatgta

SEQ ID NO: 782122 - DNA, 33 bp, Homo sapien
ttagagaaaaaaaaaatatgcctacagaatgta

SEQ ID NO: 782123 - DNA, 33 bp, Homo sapien
gatattaaaaataagggcacttacaaatgatag

SEQ ID NO: 782124 - DNA, 33 bp, Homo sapien
gatattaaaaataaggtcacttacaaatgatag

SEQ ID NO: 782125 - DNA, 33 bp, Homo sapien
tggtgattactgattgaaaaccaagccacccag

SEQ ID NO: 782126 - DNA, 33 bp, Homo sapien
tggtgattactgattgcaaaccaagccacccag

SEQ ID NO: 782127 - DNA, 33 bp, Homo sapien
tagttgctgcatagagaagttaagtaggcagaa

SEQ ID NO: 782128 - DNA, 33 bp, Homo sapien
tagttgctgcatagaggagttaagtaggcagaa

SEQ ID NO: 782129 - DNA, 33 bp, Homo sapien
agaaagaacaactgcccaaattttaaggagata

SEQ ID NO: 782130 - DNA, 33 bp, Homo sapien
agaaagaacaactgccgaaattttaaggagata

SEQ ID NO: 782131 - DNA, 33 bp, Homo sapien
agttctagtccatcaaaagaagctgtaaagaca

SEQ ID NO: 782132 - DNA, 33 bp, Homo sapien
agttctagtccatcaacagaagctgtaaagaca

SEQ ID NO: 782133 - DNA, 33 bp, Homo sapien
catattcctatatacaagtgtgctgttcagctt

SEQ ID NO: 782134 - DNA, 33 bp, Homo sapien
catattcctatatacaggtgtgctgttcagctt

SEQ ID NO: 782135 - DNA, 33 bp, Homo sapien
taaattccctgcttcaacttttttatgaagagc

SEQ ID NO: 782136 - DNA, 33 bp, Homo sapien
taaattccctgcttcagcttttttatgaagagc

SEQ ID NO: 782137 - DNA, 33 bp, Homo sapien
gaaggtcagaaaatcagatttgttcatggccac

SEQ ID NO: 782138 - DNA, 33 bp, Homo sapien
gaaggtcagaaaatcatatttgttcatggccac

SEQ ID NO: 782139 - DNA, 33 bp, Homo sapien
atactatgtagattgacactttttctcctaaca

SEQ ID NO: 782140 - DNA, 33 bp, Homo sapien
atactatgtagattgatactttttctcctaaca

SEQ ID NO: 782141 - DNA, 33 bp, Homo sapien
aaaacttaaatgcatgaaggatcagttgttagg

SEQ ID NO: 782142 - DNA, 33 bp, Homo sapien
aaaacttaaatgcatggaggatcagttgttagg

SEQ ID NO: 782143 - DNA, 33 bp, Homo sapien
ttactctgcttcatacgcaatccttacctggtc

SEQ ID NO: 782144 - DNA, 33 bp, Homo sapien
ttactctgcttcatactcaatccttacctggtc

SEQ ID NO: 782145 - DNA, 33 bp, Homo sapien
gcaatcatcctattgagacctgggttttgtctc

SEQ ID NO: 782146 - DNA, 33 bp, Homo sapien
gcaatcatcctattgatacctgggttttgtctc

SEQ ID NO: 782147 - DNA, 33 bp, Homo sapien
gatgtgctagggtacaatctcttaacagctatg

SEQ ID NO: 782148 - DNA, 33 bp, Homo sapien
gatgtgctagggtacagtctcttaacagctatg

SEQ ID NO: 782149 - DNA, 33 bp, Homo sapien
caactatttaactgtacctttgtcgtacaaaaa

SEQ ID NO: 782150 - DNA, 33 bp, Homo sapien
caactatttaactgtatctttgtcgtacaaaaa

SEQ ID NO: 782151 - DNA, 33 bp, Homo sapien
gccatgatcatctgtgaattgtctgtggcagtt

SEQ ID NO: 782152 - DNA, 33 bp, Homo sapien
gccatgatcatctgtgtattgtctgtggcagtt

SEQ ID NO: 782153 - DNA, 33 bp, Homo sapien
aattgtagctctcacaataaagctgggtgaaaa

SEQ ID NO: 782154 - DNA, 33 bp, Homo sapien
aattgtagctctcacattaaagctgggtgaaaa

SEQ ID NO: 782155 - DNA, 33 bp, Homo sapien
tgaaggctttgtcatacgctttgggtctatcta

SEQ ID NO: 782156 - DNA, 33 bp, Homo sapien
tgaaggctttgtcatatgctttgggtctatcta

SEQ ID NO: 782157 - DNA, 33 bp, Homo sapien
tcttatttttgtcaaacgtccaagctgccagta

SEQ ID NO: 782158 - DNA, 33 bp, Homo sapien
tcttatttttgtcaaatgtccaagctgccagta

SEQ ID NO: 782159 - DNA, 33 bp, Homo sapien
cataaaggacttgccaatctgaattcgggtgtt

SEQ ID NO: 782160 - DNA, 33 bp, Homo sapien
cataaaggacttgccagtctgaattcgggtgtt

SEQ ID NO: 782161 - DNA, 33 bp, Homo sapien
catttgtctgtgcatacaggaaagaatgaaagc

SEQ ID NO: 782162 - DNA, 33 bp, Homo sapien
catttgtctgtgcatataggaaagaatgaaagc

SEQ ID NO: 782163 - DNA, 33 bp, Homo sapien
tgaaaacttattccaactggtgaaataaaaatg

SEQ ID NO: 782164 - DNA, 33 bp, Homo sapien
tgaaaacttattccaattggtgaaataaaaatg

SEQ ID NO: 782165 - DNA, 33 bp, Homo sapien
taggttttacaagaaactggacacttaaagacc

SEQ ID NO: 782166 - DNA, 33 bp, Homo sapien
taggttttacaagaaattggacacttaaagacc

SEQ ID NO: 782167 - DNA, 33 bp, Homo sapien
ggtttagttgaagtcaccatgaatttttatagc

SEQ ID NO: 782168 - DNA, 33 bp, Homo sapien
ggtttagttgaagtcatcatgaatttttatagc

SEQ ID NO: 782169 - DNA, 33 bp, Homo sapien
tgatgcaaacatgcccacaatataatgaaaaac

SEQ ID NO: 782170 - DNA, 33 bp, Homo sapien
tgatgcaaacatgcccgcaatataatgaaaaac

SEQ ID NO: 782171 - DNA, 33 bp, Homo sapien
actatcagtgtgtgaacaataccatcatctgtc

SEQ ID NO: 782172 - DNA, 33 bp, Homo sapien
actatcagtgtgtgaataataccatcatctgtc

SEQ ID NO: 782173 - DNA, 33 bp, Homo sapien
atttaaaaaaaccataatatatgcttggaaaaa

SEQ ID NO: 782174 - DNA, 33 bp, Homo sapien
atttaaaaaaaccatagtatatgcttggaaaaa

SEQ ID NO: 782175 - DNA, 33 bp, Homo sapien
taaagacaagaaagtacaatgtgttaggaaaaa

SEQ ID NO: 782176 - DNA, 33 bp, Homo sapien
taaagacaagaaagtagaatgtgttaggaaaaa

SEQ ID NO: 782177 - DNA, 33 bp, Homo sapien
ccaaaaaaagtctctacattgctatcgtatttt

SEQ ID NO: 782178 - DNA, 33 bp, Homo sapien
ccaaaaaaagtctctatattgctatcgtatttt

SEQ ID NO: 782179 - DNA, 33 bp, Homo sapien
gtcgggggcagtcaaccgctgggcggcccaatg

SEQ ID NO: 782180 - DNA, 33 bp, Homo sapien
gtcgggggcagtcaactgctgggcggcccaatg

SEQ ID NO: 782181 - DNA, 33 bp, Homo sapien
tctgggatacagaaagccgtttgttcttgtgat

SEQ ID NO: 782182 - DNA, 33 bp, Homo sapien
tctgggatacagaaagtcgtttgttcttgtgat

SEQ ID NO: 782183 - DNA, 33 bp, Homo sapien
ttattttacagaatacaaactattttagtgact

SEQ ID NO: 782184 - DNA, 33 bp, Homo sapien
ttattttacagaatacgaactattttagtgact

SEQ ID NO: 782185 - DNA, 33 bp, Homo sapien
atagttgttgagggtacggtaaatgtccacagc

SEQ ID NO: 782186 - DNA, 33 bp, Homo sapien
atagttgttgagggtatggtaaatgtccacagc

SEQ ID NO: 782187 - DNA, 33 bp, Homo sapien
aatagagctaacatacaatccaacaataccact

SEQ ID NO: 782188 - DNA, 33 bp, Homo sapien
aatagagctaacatacgatccaacaataccact

SEQ ID NO: 782189 - DNA, 33 bp, Homo sapien
gaaaaccagaaagtccggaatatacctgattca

SEQ ID NO: 782190 - DNA, 33 bp, Homo sapien
gaaaaccagaaagtcctgaatatacctgattca

SEQ ID NO: 782191 - DNA, 33 bp, Homo sapien
atggatgcctgtgagacggaaactgaggacatg

SEQ ID NO: 782192 - DNA, 33 bp, Homo sapien
atggatgcctgtgagatggaaactgaggacatg

SEQ ID NO: 782193 - DNA, 33 bp, Homo sapien; identical to SEQ ID NO: 782191

SEQ ID NO: 782194 - DNA, 33 bp, Homo sapien; identical to SEQ ID NO: 782192

SEQ ID NO: 782195 - DNA, 33 bp, Homo sapien
atatacaatggcctcaagattcatctgacttgc

SEQ ID NO: 782196 - DNA, 33 bp, Homo sapien
atatacaatggcctcaggattcatctgacttgc

SEQ ID NO: 782197 - DNA, 33 bp, Homo sapien
cagatgtctagcacctaaaaaaggagacataag

SEQ ID NO: 782198 - DNA, 33 bp, Homo sapien
cagatgtctagcacctgaaaaaggagacataag

SEQ ID NO: 782199 - DNA, 33 bp, Homo sapien
aggtacggaatcaatccatatgctgtatatttt

SEQ ID NO: 782200 - DNA, 33 bp, Homo sapien
aggtacggaatcaatctatatgctgtatatttt

SEQ ID NO: 782201 - DNA, 33 bp, Homo sapien
aaattactactaaataacaggcatactctgggt

SEQ ID NO: 782202 - DNA, 33 bp, Homo sapien
aaattactactaaatagcaggcatactctgggt

SEQ ID NO: 782203 - DNA, 33 bp, Homo sapien
cacttgtttgaaaaggcatggttaagtgaggca

SEQ ID NO: 782204 - DNA, 33 bp, Homo sapien
cacttgtttgaaaaggtatggttaagtgaggca

SEQ ID NO: 782205 - DNA, 33 bp, Homo sapien
taacatatgttttacaacacacatttgtcattt

SEQ ID NO: 782206 - DNA, 33 bp, Homo sapien
taacatatgttttacatcacacatttgtcattt

SEQ ID NO: 782207 - DNA, 33 bp, Homo sapien
gccttttttatgtgtaaggagtgagatttatag

SEQ ID NO: 782208 - DNA, 33 bp, Homo sapien
gccttttttatgtgtagggagtgagatttatag

SEQ ID NO: 782209 - DNA, 33 bp, Homo sapien
ggaactgaggaacaaaatattgaaacctggact

SEQ ID NO: 782210 - DNA, 33 bp, Homo sapien
ggaactgaggaacaaagtattgaaacctggact

SEQ ID NO: 782211 - DNA, 33 bp, Homo sapien
atgacaaatggcaagtaaaaaggctattgttgc

SEQ ID NO: 782212 - DNA, 33 bp, Homo sapien
atgacaaatggcaagtgaaaaggctattgttgc

SEQ ID NO: 782213 - DNA, 33 bp, Homo sapien
agcagccccctggcaaatagagtgtccacagtg

SEQ ID NO: 782214 - DNA, 33 bp, Homo sapien
agcagccccctggcaactagagtgtccacagtg

SEQ ID NO: 782215 - DNA, 33 bp, Homo sapien
caatcaagccaagaaccaaatcaagaacacaat

SEQ ID NO: 782216 - DNA, 33 bp, Homo sapien
caatcaagccaagaacgaaatcaagaacacaat

SEQ ID NO: 782217 - DNA, 33 bp, Homo sapien
gatatgtggtcaataacaaaatggttgtttgtg

SEQ ID NO: 782218 - DNA, 33 bp, Homo sapien
gatatgtggtcaataataaaatggttgtttgtg

SEQ ID NO: 782219 - DNA, 33 bp, Homo sapien
cccagtgggtcacagtaacatacaaagcagcag

SEQ ID NO: 782220 - DNA, 33 bp, Homo sapien
cccagtgggtcacagtgacatacaaagcagcag

SEQ ID NO: 782221 - DNA, 33 bp, Homo sapien
gcaattgattaaactcactacctgccgccttct

SEQ ID NO: 782222 - DNA, 33 bp, Homo sapien
gcaattgattaaactcgctacctgccgccttct

SEQ ID NO: 782223 - DNA, 33 bp, Homo sapien
aatgtgtgaccatgtaactttctgagtatctgt

SEQ ID NO: 782224 - DNA, 33 bp, Homo sapien
aatgtgtgaccatgtacctttctgagtatctgt

SEQ ID NO: 782225 - DNA, 33 bp, Homo sapien
gatggcacgttaaagaaagaaagatggcttggt

SEQ ID NO: 782226 - DNA, 33 bp, Homo sapien
gatggcacgttaaagagagaaagatggcttggt

SEQ ID NO: 782227 - DNA, 33 bp, Homo sapien
cattgggcacggaaaaacatttaatttgatgag

SEQ ID NO: 782228 - DNA, 33 bp, Homo sapien
cattgggcacggaaaagcatttaatttgatgag

SEQ ID NO: 782229 - DNA, 33 bp, Homo sapien
aagtttcttcaaaggagtaggcatttataagtt

SEQ ID NO: 782230 - DNA, 33 bp, Homo sapien
aagtttcttcaaaggattaggcatttataagtt

SEQ ID NO: 782231 - DNA, 33 bp, Homo sapien
atataacagtagtctaccttctgccactagctg

SEQ ID NO: 782232 - DNA, 33 bp, Homo sapien
atataacagtagtctatcttctgccactagctg

SEQ ID NO: 782233 - DNA, 33 bp, Homo sapien
gtatgagggaaatgaaaaacttgatgcctgact

SEQ ID NO: 782234 - DNA, 33 bp, Homo sapien
gtatgagggaaatgaagaacttgatgcctgact

SEQ ID NO: 782235 - DNA, 33 bp, Homo sapien
aggtaaaatgaggctacgttaatgaataaccta

SEQ ID NO: 782236 - DNA, 33 bp, Homo sapien
aggtaaaatgaggctatgttaatgaataaccta

SEQ ID NO: 782237 - DNA, 33 bp, Homo sapien
atagataaacatttaccaaacttgatctgaaaa

SEQ ID NO: 782238 - DNA, 33 bp, Homo sapien
atagataaacatttactaaacttgatctgaaaa

SEQ ID NO: 782239 - DNA, 33 bp, Homo sapien
ctcctgggctgactcagatgcttggaaagctgc

SEQ ID NO: 782240 - DNA, 33 bp, Homo sapien
ctcctgggctgactcatatgcttggaaagctgc

SEQ ID NO: 782241 - DNA, 33 bp, Homo sapien
caccggcagctcaggacaagtgaaccagccagc

SEQ ID NO: 782242 - DNA, 33 bp, Homo sapien
caccggcagctcaggagaagtgaaccagccagc

SEQ ID NO: 782243 - DNA, 33 bp, Homo sapien
ccataaatatcacttaggattctagacaattca

SEQ ID NO: 782244 - DNA, 33 bp, Homo sapien
ccataaatatcacttatgattctagacaattca

SEQ ID NO: 782245 - DNA, 33 bp, Homo sapien
cagcttgttatgatacccttctgcgatatggca

SEQ ID NO: 782246 - DNA, 33 bp, Homo sapien
cagcttgttatgatactcttctgcgatatggca

SEQ ID NO: 782247 - DNA, 33 bp, Homo sapien
aggaggacagagaagcgatcataacataacatt

SEQ ID NO: 782248 - DNA, 33 bp, Homo sapien
aggaggacagagaagctatcataacataacatt

SEQ ID NO: 782249 - DNA, 33 bp, Homo sapien
ttgttagcgtctcctgcagtttttcttactaac

SEQ ID NO: 782250 - DNA, 33 bp, Homo sapien
ttgttagcgtctcctgtagtttttcttactaac

SEQ ID NO: 782251 - DNA, 33 bp, Homo sapien
gagtaagtcattaaaacgctctaaccctgtatt

SEQ ID NO: 782252 - DNA, 33 bp, Homo sapien
gagtaagtcattaaaatgctctaaccctgtatt

SEQ ID NO: 782253 - DNA, 33 bp, Homo sapien
atatggaaaatggtcaaacaagtcaagatctac

SEQ ID NO: 782254 - DNA, 33 bp, Homo sapien
atatggaaaatggtcatacaagtcaagatctac

SEQ ID NO: 782255 - DNA, 33 bp, Homo sapien
taactgctgagttaaaattctcaccttttttcg

SEQ ID NO: 782256 - DNA, 33 bp, Homo sapien
taactgctgagttaaatttctcaccttttttcg

SEQ ID NO: 782257 - DNA, 33 bp, Homo sapien
tgggtagatgagggaagcttcagccactcaaag

SEQ ID NO: 782258 - DNA, 33 bp, Homo sapien
tgggtagatgagggaatcttcagccactcaaag

SEQ ID NO: 782259 - DNA, 33 bp, Homo sapien
gtcaagggcactaaacggtatgtttctaaggaa

SEQ ID NO: 782260 - DNA, 33 bp, Homo sapien
gtcaagggcactaaactgtatgtttctaaggaa

SEQ ID NO: 782261 - DNA, 33 bp, Homo sapien
tgaactagaaggcaaaaataaaggagaagacca

SEQ ID NO: 782262 - DNA, 33 bp, Homo sapien
tgaactagaaggcaaagataaaggagaagacca

SEQ ID NO: 782263 - DNA, 33 bp, Homo sapien
gattttttgatttccacgctaatttcttcattg

SEQ ID NO: 782264 - DNA, 33 bp, Homo sapien
gattttttgatttccatgctaatttcttcattg

SEQ ID NO: 782265 - DNA, 33 bp, Homo sapien
tgacttcatgactaatcataaagggaaaagact

SEQ ID NO: 782266 - DNA, 33 bp, Homo sapien
tgacttcatgactaatgataaagggaaaagact

SEQ ID NO: 782267 - DNA, 33 bp, Homo sapien
agaccaattaagaggccattttgatagttaagc

SEQ ID NO: 782268 - DNA, 33 bp, Homo sapien
agaccaattaagaggctattttgatagttaagc

SEQ ID NO: 782269 - DNA, 33 bp, Homo sapien
aagtaattcccaggtacgtattccaactttcaa

SEQ ID NO: 782270 - DNA, 33 bp, Homo sapien
aagtaattcccaggtatgtattccaactttcaa

SEQ ID NO: 782271 - DNA, 33 bp, Homo sapien
tttggaaatcacctaaccagcaaaaataccaaa

SEQ ID NO: 782272 - DNA, 33 bp, Homo sapien
tttggaaatcacctaatcagcaaaaataccaaa

SEQ ID NO: 782273 - DNA, 33 bp, Homo sapien
accctgctctgcgtgacgaccattcccatgccc

SEQ ID NO: 782274 - DNA, 33 bp, Homo sapien
accctgctctgcgtgatgaccattcccatgccc

SEQ ID NO: 782275 - DNA, 33 bp, Homo sapien
tttggtcgatgacagactacatattgggcaatg

SEQ ID NO: 782276 - DNA, 33 bp, Homo sapien
tttggtcgatgacagattacatattgggcaatg

SEQ ID NO: 782277 - DNA, 33 bp, Homo sapien
atagtgataatacagaataacctaacatttgta

SEQ ID NO: 782278 - DNA, 33 bp, Homo sapien
atagtgataatacagactaacctaacatttgta

SEQ ID NO: 782279 - DNA, 33 bp, Homo sapien
taatattgttgagaaccattatttgtcagggag

SEQ ID NO: 782280 - DNA, 33 bp, Homo sapien
taatattgttgagaacgattatttgtcagggag

SEQ ID NO: 782281 - DNA, 33 bp, Homo sapien
ataactttcttgaaaacacctcagtgtatacaa

SEQ ID NO: 782282 - DNA, 33 bp, Homo sapien
ataactttcttgaaaatacctcagtgtatacaa

SEQ ID NO: 782283 - DNA, 33 bp, Homo sapien
tgtgttgacatgatgccgcaagtagaaaattcc

SEQ ID NO: 782284 - DNA, 33 bp, Homo sapien
tgtgttgacatgatgctgcaagtagaaaattcc

SEQ ID NO: 782285 - DNA, 33 bp, Homo sapien
catttcatatcaaagacgcacaatctccgatag

SEQ ID NO: 782286 - DNA, 33 bp, Homo sapien
catttcatatcaaagaggcacaatctccgatag

SEQ ID NO: 782287 - DNA, 33 bp, Homo sapien
aatgaaacaatagcaacttcaacataaggtgtg

SEQ ID NO: 782288 - DNA, 33 bp, Homo sapien
aatgaaacaatagcaagttcaacataaggtgtg

SEQ ID NO: 782289 - DNA, 33 bp, Homo sapien
taatccatccagttagcaattcttagcacacac

SEQ ID NO: 782290 - DNA, 33 bp, Homo sapien
taatccatccagttagtaattcttagcacacac

SEQ ID NO: 782291 - DNA, 33 bp, Homo sapien
acttgtttttgccaaaatcctgctaaagtaaca

SEQ ID NO: 782292 - DNA, 33 bp, Homo sapien
acttgtttttgccaaagtcctgctaaagtaaca

SEQ ID NO: 782293 - DNA, 33 bp, Homo sapien
tgcttttggaatttccggcagagccagtttcag

SEQ ID NO: 782294 - DNA, 33 bp, Homo sapien
tgcttttggaatttcctgcagagccagtttcag

SEQ ID NO: 782295 - DNA, 33 bp, Homo sapien
gaatgaataacaaaaacgtgtcacctaagtggt

SEQ ID NO: 782296 - DNA, 33 bp, Homo sapien
gaatgaataacaaaaatgtgtcacctaagtggt

SEQ ID NO: 782297 - DNA, 33 bp, Homo sapien
gcatcctgtactttgaacaaagatttctacaca

SEQ ID NO: 782298 - DNA, 33 bp, Homo sapien
gcatcctgtactttgagcaaagatttctacaca

SEQ ID NO: 782299 - DNA, 33 bp, Homo sapien
ttatatcctggcttacgacattaataattcaag

SEQ ID NO: 782300 - DNA, 33 bp, Homo sapien
ttatatcctggcttactacattaataattcaag

SEQ ID NO: 782301 - DNA, 33 bp, Homo sapien
gagttatttgctgtaaaacatctcaaccctgca

SEQ ID NO: 782302 - DNA, 33 bp, Homo sapien
gagttatttgctgtaacacatctcaaccctgca

SEQ ID NO: 782303 - DNA, 33 bp, Homo sapien
agaaaggctactttccaagaaaattactctctg

SEQ ID NO: 782304 - DNA, 33 bp, Homo sapien
agaaaggctactttccgagaaaattactctctg

SEQ ID NO: 782305 - DNA, 33 bp, Homo sapien
gacagttgggacctatgagttaagattaacagc

SEQ ID NO: 782306 - DNA, 33 bp, Homo sapien
gacagttgggacctattagttaagattaacagc

SEQ ID NO: 782307 - DNA, 33 bp, Homo sapien
ttaataagtgatcacacgacctctttttgaaaa

SEQ ID NO: 782308 - DNA, 33 bp, Homo sapien
ttaataagtgatcacatgacctctttttgaaaa

SEQ ID NO: 782309 - DNA, 33 bp, Homo sapien
ctgttggtatagaaataatagtacgtgtgagct

SEQ ID NO: 782310 - DNA, 33 bp, Homo sapien
ctgttggtatagaaatgatagtacgtgtgagct

SEQ ID NO: 782311 - DNA, 33 bp, Homo sapien
tgtgccattactttcacgatttcctaaatgtgc

SEQ ID NO: 782312 - DNA, 33 bp, Homo sapien
tgtgccattactttcatgatttcctaaatgtgc

SEQ ID NO: 782313 - DNA, 33 bp, Homo sapien
gttttgtaggtttggacactaaattgtagaaat

SEQ ID NO: 782314 - DNA, 33 bp, Homo sapien
gttttgtaggtttggagactaaattgtagaaat

SEQ ID NO: 782315 - DNA, 33 bp, Homo sapien
attttgttaaatttaaactggaagtcactagcc

SEQ ID NO: 782316 - DNA, 33 bp, Homo sapien
attttgttaaatttaacctggaagtcactagcc

SEQ ID NO: 782317 - DNA, 33 bp, Homo sapien
tgtacgtagagatgtaccaatccttctcatccc

SEQ ID NO: 782318 - DNA, 33 bp, Homo sapien
tgtacgtagagatgtatcaatccttctcatccc

SEQ ID NO: 782319 - DNA, 33 bp, Homo sapien
gtaggatacagctacaaaaaagaattaggacta

SEQ ID NO: 782320 - DNA, 33 bp, Homo sapien
gtaggatacagctacagaaaagaattaggacta

SEQ ID NO: 782321 - DNA, 33 bp, Homo sapien
acagatacaccagtagaaaagtaataggaaagc

SEQ ID NO: 782322 - DNA, 33 bp, Homo sapien
acagatacaccagtaggaaagtaataggaaagc

SEQ ID NO: 782323 - DNA, 33 bp, Homo sapien
tgaacagcttaacccccccagcattagggaagt

SEQ ID NO: 782324 - DNA, 33 bp, Homo sapien
tgaacagcttaacccctccagcattagggaagt

SEQ ID NO: 782325 - DNA, 33 bp, Homo sapien
attctagtttgcaccccatgttctgattaggct

SEQ ID NO: 782326 - DNA, 33 bp, Homo sapien
attctagtttgcaccctatgttctgattaggct

SEQ ID NO: 782327 - DNA, 33 bp, Homo sapien
tcttagtgaagaacaacaggaagttaaaaccag

SEQ ID NO: 782328 - DNA, 33 bp, Homo sapien
tcttagtgaagaacaataggaagttaaaaccag

SEQ ID NO: 782329 - DNA, 33 bp, Homo sapien
gtaattaattcatgttccaaaggtgacttattg

SEQ ID NO: 782330 - DNA, 33 bp, Homo sapien
gtaattaattcatgttgcaaaggtgacttattg

SEQ ID NO: 782331 - DNA, 33 bp, Homo sapien
cacctcaatcacttggaaaattgcaaaggctta

SEQ ID NO: 782332 - DNA, 33 bp, Homo sapien
cacctcaatcacttggcaaattgcaaaggctta

SEQ ID NO: 782333 - DNA, 33 bp, Homo sapien
tggtttacagttaggaacttttccatgcaaaaa

SEQ ID NO: 782334 - DNA, 33 bp, Homo sapien
tggtttacagttaggaccttttccatgcaaaaa

SEQ ID NO: 782335 - DNA, 33 bp, Homo sapien
ttgccataaaaagcacgggtttgtaattgcaaa

SEQ ID NO: 782336 - DNA, 33 bp, Homo sapien
ttgccataaaaagcactggtttgtaattgcaaa

SEQ ID NO: 782337 - DNA, 33 bp, Homo sapien
attctctgattgtccaggaggtacagcaccatt

SEQ ID NO: 782338 - DNA, 33 bp, Homo sapien
attctctgattgtccatgaggtacagcaccatt

SEQ ID NO: 782339 - DNA, 33 bp, Homo sapien
caatatattctcatgtaaaacttgtaatagaaa

SEQ ID NO: 782340 - DNA, 33 bp, Homo sapien
caatatattctcatgtgaaacttgtaatagaaa

SEQ ID NO: 782341 - DNA, 33 bp, Homo sapien
tgagtaacggattttgaagagagagctctgtct

SEQ ID NO: 782342 - DNA, 33 bp, Homo sapien
tgagtaacggattttggagagagagctctgtct

SEQ ID NO: 782343 - DNA, 33 bp, Homo sapien
aatgaaataagtcaaaatccttgatctcaagtg

SEQ ID NO: 782344 - DNA, 33 bp, Homo sapien
aatgaaataagtcaaagtccttgatctcaagtg

SEQ ID NO: 782345 - DNA, 33 bp, Homo sapien
aatgaaccagtttgtaaaatgtttgttatgctt

SEQ ID NO: 782346 - DNA, 33 bp, Homo sapien
aatgaaccagtttgtagaatgtttgttatgctt

SEQ ID NO: 782347 - DNA, 33 bp, Homo sapien
ttggcagaagttagaacggaatatgaaggtaga

SEQ ID NO: 782348 - DNA, 33 bp, Homo sapien
ttggcagaagttagaatggaatatgaaggtaga

SEQ ID NO: 782349 - DNA, 33 bp, Homo sapien
tcacagtggctgagcagcaaattctaaagactc

SEQ ID NO: 782350 - DNA, 33 bp, Homo sapien
tcacagtggctgagcatcaaattctaaagactc

SEQ ID NO: 782351 - DNA, 33 bp, Homo sapien
acaattacaggtaatgaattagaatggtgttca

SEQ ID NO: 782352 - DNA, 33 bp, Homo sapien
acaattacaggtaatgtattagaatggtgttca

SEQ ID NO: 782353 - DNA, 33 bp, Homo sapien
atcacttctctactcacgttactatttcacaca

SEQ ID NO: 782354 - DNA, 33 bp, Homo sapien
atcacttctctactcatgttactatttcacaca

SEQ ID NO: 782355 - DNA, 33 bp, Homo sapien
ctgccagtctgctgaagtcactgagttggcttt

SEQ ID NO: 782356 - DNA, 33 bp, Homo sapien
ctgccagtctgctgaattcactgagttggcttt

SEQ ID NO: 782357 - DNA, 33 bp, Homo sapien
aaacttccaggtacacacaataaattatataca

SEQ ID NO: 782358 - DNA, 33 bp, Homo sapien
aaacttccaggtacacccaataaattatataca

SEQ ID NO: 782359 - DNA, 33 bp, Homo sapien
ctgtcctgctgtttaccacccactggccaatca

SEQ ID NO: 782360 - DNA, 33 bp, Homo sapien
ctgtcctgctgtttactacccactggccaatca

SEQ ID NO: 782361 - DNA, 33 bp, Homo sapien
aaacattaccctgaacacagccaaaaagagatg

SEQ ID NO: 782362 - DNA, 33 bp, Homo sapien
aaacattaccctgaacgcagccaaaaagagatg

SEQ ID NO: 782363 - DNA, 33 bp, Homo sapien
tactaagatgtgtcaactaggaggatgtgatga

SEQ ID NO: 782364 - DNA, 33 bp, Homo sapien
tactaagatgtgtcaagtaggaggatgtgatga

SEQ ID NO: 782365 - DNA, 33 bp, Homo sapien
ccaacagtagctccaacagagagtcaagggtca

SEQ ID NO: 782366 - DNA, 33 bp, Homo sapien
ccaacagtagctccaagagagagtcaagggtca

SEQ ID NO: 782367 - DNA, 33 bp, Homo sapien
gtgtttgcacaggccaatagctgcatttcaaaa

SEQ ID NO: 782368 - DNA, 33 bp, Homo sapien
gtgtttgcacaggccagtagctgcatttcaaaa

SEQ ID NO: 782369 - DNA, 33 bp, Homo sapien
aaaaaaataaaactccactattctctctttgaa

SEQ ID NO: 782370 - DNA, 33 bp, Homo sapien
aaaaaaataaaactccgctattctctctttgaa

SEQ ID NO: 782371 - DNA, 33 bp, Homo sapien
gccgcagcaggaaatacgtcagttaatttcaga

SEQ ID NO: 782372 - DNA, 33 bp, Homo sapien
gccgcagcaggaaatatgtcagttaatttcaga

SEQ ID NO: 782373 - DNA, 33 bp, Homo sapien
gtcctagatttgagtagggcagactgacttgca

SEQ ID NO: 782374 - DNA, 33 bp, Homo sapien
gtcctagatttgagtatggcagactgacttgca

SEQ ID NO: 782375 - DNA, 33 bp, Homo sapien
gaattgatctgtaacacggaatcactgggttga

SEQ ID NO: 782376 - DNA, 33 bp, Homo sapien
gaattgatctgtaacatggaatcactgggttga

SEQ ID NO: 782377 - DNA, 33 bp, Homo sapien
atgacaaattccagtcaaagaaatgcttaagtc

SEQ ID NO: 782378 - DNA, 33 bp, Homo sapien
atgacaaattccagtcgaagaaatgcttaagtc

SEQ ID NO: 782379 - DNA, 33 bp, Homo sapien
ttttctccacaatctcgctataatctcttatat

SEQ ID NO: 782380 - DNA, 33 bp, Homo sapien
ttttctccacaatctctctataatctcttatat

SEQ ID NO: 782381 - DNA, 33 bp, Homo sapien
aagaaaatattcacaccccatatatacgacaaa

SEQ ID NO: 782382 - DNA, 33 bp, Homo sapien
aagaaaatattcacactccatatatacgacaaa

SEQ ID NO: 782383 - DNA, 33 bp, Homo sapien
ataacaaatctagccacatctctactgaataaa

SEQ ID NO: 782384 - DNA, 33 bp, Homo sapien
ataacaaatctagccatatctctactgaataaa

SEQ ID NO: 782385 - DNA, 33 bp, Homo sapien
gctttacacttgtctccgaatttatcttagtag

SEQ ID NO: 782386 - DNA, 33 bp, Homo sapien
gctttacacttgtctctgaatttatcttagtag

SEQ ID NO: 782387 - DNA, 33 bp, Homo sapien
ggacacaattcaacccaccatactattaaatag

SEQ ID NO: 782388 - DNA, 33 bp, Homo sapien
ggacacaattcaacccgccatactattaaatag

SEQ ID NO: 782389 - DNA, 33 bp, Homo sapien
gaatatacctagctaaagaggtgaaagatctct

SEQ ID NO: 782390 - DNA, 33 bp, Homo sapien
gaatatacctagctaaggaggtgaaagatctct

SEQ ID NO: 782391 - DNA, 33 bp, Homo sapien
ttgtccaggggaggtacgttggtttctcaggtg

SEQ ID NO: 782392 - DNA, 33 bp, Homo sapien
ttgtccaggggaggtatgttggtttctcaggtg

SEQ ID NO: 782393 - DNA, 33 bp, Homo sapien
gtaggagaccagggtacatttcatcccttatct

SEQ ID NO: 782394 - DNA, 33 bp, Homo sapien
gtaggagaccagggtatatttcatcccttatct

SEQ ID NO: 782395 - DNA, 33 bp, Homo sapien
tctagaaggtactgtacaaagtattctcaggag

SEQ ID NO: 782396 - DNA, 33 bp, Homo sapien
tctagaaggtactgtataaagtattctcaggag

SEQ ID NO: 782397 - DNA, 33 bp, Homo sapien
cttctagaatctatacaggagtaagcagatcat

SEQ ID NO: 782398 - DNA, 33 bp, Homo sapien
cttctagaatctataccggagtaagcagatcat

SEQ ID NO: 782399 - DNA, 33 bp, Homo sapien
taagaataactattaacgtcagcatttctgggc

SEQ ID NO: 782400 - DNA, 33 bp, Homo sapien
taagaataactattaatgtcagcatttctgggc

SEQ ID NO: 782401 - DNA, 33 bp, Homo sapien
gatatacaaatacataaagggtagactctggcc

SEQ ID NO: 782402 - DNA, 33 bp, Homo sapien
gatatacaaatacatagagggtagactctggcc

SEQ ID NO: 782403 - DNA, 33 bp, Homo sapien
taaatacaagaaaaaaatgtgctcaaaatgtgt

SEQ ID NO: 782404 - DNA, 33 bp, Homo sapien
taaatacaagaaaaaagtgtgctcaaaatgtgt

SEQ ID NO: 782405 - DNA, 33 bp, Homo sapien
tctttgtctttatgaacgtctagaggattctac

SEQ ID NO: 782406 - DNA, 33 bp, Homo sapien
tctttgtctttatgaaggtctagaggattctac

SEQ ID NO: 782407 - DNA, 33 bp, Homo sapien
caggaacctagatttagcaggggaatacccaag

SEQ ID NO: 782408 - DNA, 33 bp, Homo sapien
caggaacctagatttatcaggggaatacccaag

SEQ ID NO: 782409 - DNA, 33 bp, Homo sapien
ttgattcaattagtgacagtgaagtataaataa

SEQ ID NO: 782410 - DNA, 33 bp, Homo sapien
ttgattcaattagtgagagtgaagtataaataa

SEQ ID NO: 782411 - DNA, 33 bp, Homo sapien
tgtatccccactggctaaaagaaaactataaac

SEQ ID NO: 782412 - DNA, 33 bp, Homo sapien
tgtatccccactggcttaaagaaaactataaac

SEQ ID NO: 782413 - DNA, 33 bp, Homo sapien
tttttaaatgtttctacgtctttttctcagtga

SEQ ID NO: 782414 - DNA, 33 bp, Homo sapien
tttttaaatgtttctatgtctttttctcagtga

SEQ ID NO: 782415 - DNA, 33 bp, Homo sapien
tctttgttaaaaatacagagtcctgagctacat

SEQ ID NO: 782416 - DNA, 33 bp, Homo sapien
tctttgttaaaaatacggagtcctgagctacat

SEQ ID NO: 782417 - DNA, 33 bp, Homo sapien
ttgaggtcctcactagccagcacaattctcaaa

SEQ ID NO: 782418 - DNA, 33 bp, Homo sapien
ttgaggtcctcactaggcagcacaattctcaaa

SEQ ID NO: 782419 - DNA, 33 bp, Homo sapien
tggaatgccaaaataaaaagaccatgaaggcag

SEQ ID NO: 782420 - DNA, 33 bp, Homo sapien
tggaatgccaaaataagaagaccatgaaggcag

SEQ ID NO: 782421 - DNA, 33 bp, Homo sapien
aatgagtagtcaaatacggaaaggcattgattt

SEQ ID NO: 782422 - DNA, 33 bp, Homo sapien
aatgagtagtcaaatatggaaaggcattgattt

SEQ ID NO: 782423 - DNA, 33 bp, Homo sapien
ctcatgtaataacttcacaagtgtttttatgca

SEQ ID NO: 782424 - DNA, 33 bp, Homo sapien
ctcatgtaataacttcccaagtgtttttatgca

SEQ ID NO: 782425 - DNA, 33 bp, Homo sapien
tatttggttttgtcccggctggattcagctgcc

SEQ ID NO: 782426 - DNA, 33 bp, Homo sapien
tatttggttttgtccctgctggattcagctgcc

SEQ ID NO: 782427 - DNA, 33 bp, Homo sapien
aatgttggcattatcacccccattgaaggttaa

SEQ ID NO: 782428 - DNA, 33 bp, Homo sapien
aatgttggcattatcagccccattgaaggttaa

SEQ ID NO: 782429 - DNA, 33 bp, Homo sapien
attttctgcatttgacgagaaggtacaagccat

SEQ ID NO: 782430 - DNA, 33 bp, Homo sapien
attttctgcatttgactagaaggtacaagccat

SEQ ID NO: 782431 - DNA, 33 bp, Homo sapien
cattacacaaaaggaacctaacttagtgctcct

SEQ ID NO: 782432 - DNA, 33 bp, Homo sapien
cattacacaaaaggaagctaacttagtgctcct

SEQ ID NO: 782433 - DNA, 33 bp, Homo sapien
gaattcaaattgctccaattatctcaacaatat

SEQ ID NO: 782434 - DNA, 33 bp, Homo sapien
gaattcaaattgctccgattatctcaacaatat

SEQ ID NO: 782435 - DNA, 33 bp, Homo sapien
ccataacttggtaaacagacatcaaaagcacct

SEQ ID NO: 782436 - DNA, 33 bp, Homo sapien
ccataacttggtaaaccgacatcaaaagcacct

SEQ ID NO: 782437 - DNA, 33 bp, Homo sapien
gagtattttctttacagtctgcctcatttccac

SEQ ID NO: 782438 - DNA, 33 bp, Homo sapien
gagtattttctttacattctgcctcatttccac

SEQ ID NO: 782439 - DNA, 33 bp, Homo sapien
ggtcagagaaggaaaccgagtctcttatgaatg

SEQ ID NO: 782440 - DNA, 33 bp, Homo sapien
ggtcagagaaggaaactgagtctcttatgaatg

SEQ ID NO: 782441 - DNA, 33 bp, Homo sapien
cctaagcctgttgagacaaagattttgccagaa

SEQ ID NO: 782442 - DNA, 33 bp, Homo sapien
cctaagcctgttgagataaagattttgccagaa

SEQ ID NO: 782443 - DNA, 33 bp, Homo sapien
gatgatcactagaagacgctagaactaaatgtc

SEQ ID NO: 782444 - DNA, 33 bp, Homo sapien
gatgatcactagaagatgctagaactaaatgtc

SEQ ID NO: 782445 - DNA, 33 bp, Homo sapien
ttcaaaaagtattgcaagaactcagaaggtaga

SEQ ID NO: 782446 - DNA, 33 bp, Homo sapien
ttcaaaaagtattgcaggaactcagaaggtaga

SEQ ID NO: 782447 - DNA, 33 bp, Homo sapien
agcaataaatgtaggaagacgccaggtagtatg

SEQ ID NO: 782448 - DNA, 33 bp, Homo sapien
agcaataaatgtaggatgacgccaggtagtatg

SEQ ID NO: 782449 - DNA, 33 bp, Homo sapien
tatatatcctggagcaatcatcttgacttttgc

SEQ ID NO: 782450 - DNA, 33 bp, Homo sapien
tatatatcctggagcagtcatcttgacttttgc

SEQ ID NO: 782451 - DNA, 33 bp, Homo sapien
ctactttctctgattacggacaagatccaaatt

SEQ ID NO: 782452 - DNA, 33 bp, Homo sapien
ctactttctctgattatggacaagatccaaatt

SEQ ID NO: 782453 - DNA, 33 bp, Homo sapien
aggtaagtgctccgcaaggttgagcaagttgca

SEQ ID NO: 782454 - DNA, 33 bp, Homo sapien
aggtaagtgctccgcagggttgagcaagttgca

SEQ ID NO: 782455 - DNA, 33 bp, Homo sapien
gaaaggagggtggctaaatattttaatcttaat

SEQ ID NO: 782456 - DNA, 33 bp, Homo sapien
gaaaggagggtggctagatattttaatcttaat

SEQ ID NO: 782457 - DNA, 33 bp, Homo sapien
aatggaagtttaatgcaaaagcgtcatggaata

SEQ ID NO: 782458 - DNA, 33 bp, Homo sapien
aatggaagtttaatgcgaaagcgtcatggaata

SEQ ID NO: 782459 - DNA, 33 bp, Homo sapien
atgacacagttctgaccaggttaaataagtaga

SEQ ID NO: 782460 - DNA, 33 bp, Homo sapien
atgacacagttctgacgaggttaaataagtaga

SEQ ID NO: 782461 - DNA, 33 bp, Homo sapien
aagtgcacttaatatacctaacctattgaacat

SEQ ID NO: 782462 - DNA, 33 bp, Homo sapien
aagtgcacttaatatagctaacctattgaacat

SEQ ID NO: 782463 - DNA, 33 bp, Homo sapien
gaggttgattttatccgaaagttgatgaggagc

SEQ ID NO: 782464 - DNA, 33 bp, Homo sapien
gaggttgattttatcctaaagttgatgaggagc

SEQ ID NO: 782465 - DNA, 33 bp, Homo sapien
caagccatgaccttataagtaataacaatgtta

SEQ ID NO: 782466 - DNA, 33 bp, Homo sapien
caagccatgaccttatgagtaataacaatgtta

SEQ ID NO: 782467 - DNA, 33 bp, Homo sapien
ggttggtttttgctaacgagttgtaagggttct

SEQ ID NO: 782468 - DNA, 33 bp, Homo sapien
ggttggtttttgctaatgagttgtaagggttct

SEQ ID NO: 782469 - DNA, 33 bp, Homo sapien
tacatgtaaacgtttcccatgccactctcacat

SEQ ID NO: 782470 - DNA, 33 bp, Homo sapien
tacatgtaaacgtttctcatgccactctcacat

SEQ ID NO: 782471 - DNA, 33 bp, Homo sapien
ttctctgagtaaagtgacaaactcatggaaagt

SEQ ID NO: 782472 - DNA, 33 bp, Homo sapien
ttctctgagtaaagtggcaaactcatggaaagt

SEQ ID NO: 782473 - DNA, 33 bp, Homo sapien
atcataacatcagtgggaaaagcaagaaaacct

SEQ ID NO: 782474 - DNA, 33 bp, Homo sapien
atcataacatcagtggtaaaagcaagaaaacct

SEQ ID NO: 782475 - DNA, 33 bp, Homo sapien
tctgccactgccacgacggcggttctattcctg

SEQ ID NO: 782476 - DNA, 33 bp, Homo sapien
tctgccactgccacgatggcggttctattcctg

SEQ ID NO: 782477 - DNA, 33 bp, Homo sapien
gccggacatgagaagacgctaaagaagagcatt

SEQ ID NO: 782478 - DNA, 33 bp, Homo sapien
gccggacatgagaagatgctaaagaagagcatt

SEQ ID NO: 782479 - DNA, 33 bp, Homo sapien
ttttatagcttaaaaacacgaaattcctcttag

SEQ ID NO: 782480 - DNA, 33 bp, Homo sapien
ttttatagcttaaaaatacgaaattcctcttag

SEQ ID NO: 782481 - DNA, 33 bp, Homo sapien
ggttgacatctaccaaaaatttaactatctaaa

SEQ ID NO: 782482 - DNA, 33 bp, Homo sapien
ggttgacatctaccaacaatttaactatctaaa

SEQ ID NO: 782483 - DNA, 33 bp, Homo sapien
tgtgcaagtgatttagaaaggaagtcctcccag

SEQ ID NO: 782484 - DNA, 33 bp, Homo sapien
tgtgcaagtgatttagtaaggaagtcctcccag

SEQ ID NO: 782485 - DNA, 33 bp, Homo sapien
aaattcagatattttaagctgcaggtagtatat

SEQ ID NO: 782486 - DNA, 33 bp, Homo sapien
aaattcagatattttaggctgcaggtagtatat

SEQ ID NO: 782487 - DNA, 33 bp, Homo sapien
gtatgtatgtgagaacagattaaagacattggc

SEQ ID NO: 782488 - DNA, 33 bp, Homo sapien
gtatgtatgtgagaaccgattaaagacattggc

SEQ ID NO: 782489 - DNA, 33 bp, Homo sapien
actcccccatcaaaagacgcatagtggctgaat

SEQ ID NO: 782490 - DNA, 33 bp, Homo sapien
actcccccatcaaaaggcgcatagtggctgaat

SEQ ID NO: 782491 - DNA, 33 bp, Homo sapien
tcaagaagagagaacgaattctaggtgagcaat

SEQ ID NO: 782492 - DNA, 33 bp, Homo sapien
tcaagaagagagaacggattctaggtgagcaat

SEQ ID NO: 782493 - DNA, 33 bp, Homo sapien
agatacacacagaaagaaagtataattgagaag

SEQ ID NO: 782494 - DNA, 33 bp, Homo sapien
agatacacacagaaaggaagtataattgagaag

SEQ ID NO: 782495 - DNA, 33 bp, Homo sapien
aattacaaccgcatcacacgccatatgtattca

SEQ ID NO: 782496 - DNA, 33 bp, Homo sapien
aattacaaccgcatcatacgccatatgtattca

SEQ ID NO: 782497 - DNA, 33 bp, Homo sapien
aatatttatattaacccggatcttgattgtcat

SEQ ID NO: 782498 - DNA, 33 bp, Homo sapien
aatatttatattaacctggatcttgattgtcat

SEQ ID NO: 782499 - DNA, 33 bp, Homo sapien
ataagatgactgacagaatgtgtccctatggcc

SEQ ID NO: 782500 - DNA, 33 bp, Homo sapien
ataagatgactgacaggatgtgtccctatggcc

SEQ ID NO: 782501 - DNA, 33 bp, Homo sapien
ctttaaatttcatgatcagatgtaccaaaggac

SEQ ID NO: 782502 - DNA, 33 bp, Homo sapien
ctttaaatttcatgattagatgtaccaaaggac

SEQ ID NO: 782503 - DNA, 33 bp, Homo sapien
tagagccagatgaagacgcttaggagtacgggg

SEQ ID NO: 782504 - DNA, 33 bp, Homo sapien
tagagccagatgaagaggcttaggagtacgggg

SEQ ID NO: 782505 - DNA, 33 bp, Homo sapien
aatctctccgacttaccagttaccaccatgttg

SEQ ID NO: 782506 - DNA, 33 bp, Homo sapien
aatctctccgacttacgagttaccaccatgttg

SEQ ID NO: 782507 - DNA, 33 bp, Homo sapien
tttctaggctttccaactctcctcatgggtaaa

SEQ ID NO: 782508 - DNA, 33 bp, Homo sapien
tttctaggctttccaattctcctcatgggtaaa

SEQ ID NO: 782509 - DNA, 33 bp, Homo sapien
tttctcatgtttaaaacccaactacagtgggca

SEQ ID NO: 782510 - DNA, 33 bp, Homo sapien
tttctcatgtttaaaatccaactacagtgggca

SEQ ID NO: 782511 - DNA, 33 bp, Homo sapien
agagaagtgaaagaaacggatctaacatccaga

SEQ ID NO: 782512 - DNA, 33 bp, Homo sapien
agagaagtgaaagaaagggatctaacatccaga

SEQ ID NO: 782513 - DNA, 33 bp, Homo sapien
atgaatttatgaaaaccggagattttatgaggg

SEQ ID NO: 782514 - DNA, 33 bp, Homo sapien
atgaatttatgaaaactggagattttatgaggg

SEQ ID NO: 782515 - DNA, 33 bp, Homo sapien
tgtttctccttacaaaataactgaccacgaagc

SEQ ID NO: 782516 - DNA, 33 bp, Homo sapien
tgtttctccttacaaagtaactgaccacgaagc

SEQ ID NO: 782517 - DNA, 33 bp, Homo sapien
ttatatatgtgccaaagtttgagtttctgattt

SEQ ID NO: 782518 - DNA, 33 bp, Homo sapien
ttatatatgtgccaaattttgagtttctgattt

SEQ ID NO: 782519 - DNA, 33 bp, Homo sapien
gccaaactgaagtagaagatcagaactgggagg

SEQ ID NO: 782520 - DNA, 33 bp, Homo sapien
gccaaactgaagtagacgatcagaactgggagg

SEQ ID NO: 782521 - DNA, 33 bp, Homo sapien
gctacaatgggtatagccaacctcttgaataaa

SEQ ID NO: 782522 - DNA, 33 bp, Homo sapien
gctacaatgggtataggcaacctcttgaataaa

SEQ ID NO: 782523 - DNA, 33 bp, Homo sapien
attattgattttccccaccaaaagcctaagtta

SEQ ID NO: 782524 - DNA, 33 bp, Homo sapien
attattgattttccccgccaaaagcctaagtta

SEQ ID NO: 782525 - DNA, 33 bp, Homo sapien
agtctcttgagattaactcacttttgaaacatg

SEQ ID NO: 782526 - DNA, 33 bp, Homo sapien
agtctcttgagattaagtcacttttgaaacatg

SEQ ID NO: 782527 - DNA, 33 bp, Homo sapien
cagctaattaaacacacaaacctgtgagaaagc

SEQ ID NO: 782528 - DNA, 33 bp, Homo sapien
cagctaattaaacacataaacctgtgagaaagc

SEQ ID NO: 782529 - DNA, 33 bp, Homo sapien
tagcttgatttttgaacatagaacaattgattc

SEQ ID NO: 782530 - DNA, 33 bp, Homo sapien
tagcttgatttttgaatatagaacaattgattc

SEQ ID NO: 782531 - DNA, 33 bp, Homo sapien
aattagaagttttctactaacagatgtaaatgt

SEQ ID NO: 782532 - DNA, 33 bp, Homo sapien
aattagaagttttctagtaacagatgtaaatgt

SEQ ID NO: 782533 - DNA, 33 bp, Homo sapien
tgtatttggattactggaaagatatgtacaaat

SEQ ID NO: 782534 - DNA, 33 bp, Homo sapien
tgtatttggattactgtaaagatatgtacaaat

SEQ ID NO: 782535 - DNA, 33 bp, Homo sapien
cttcaacaaaccacaccagctctgcaacaatgg

SEQ ID NO: 782536 - DNA, 33 bp, Homo sapien
cttcaacaaaccacactagctctgcaacaatgg

SEQ ID NO: 782537 - DNA, 33 bp, Homo sapien
ttcatattccaaaaaacttcactgtgtctctga

SEQ ID NO: 782538 - DNA, 33 bp, Homo sapien
ttcatattccaaaaaagttcactgtgtctctga

SEQ ID NO: 782539 - DNA, 33 bp, Homo sapien
ctcataatagtgaataagtctaatgagacatga

SEQ ID NO: 782540 - DNA, 33 bp, Homo sapien
ctcataatagtgaatacgtctaatgagacatga

SEQ ID NO: 782541 - DNA, 33 bp, Homo sapien
agagtagaggggaaggcagttgtcaaaaaagaa

SEQ ID NO: 782542 - DNA, 33 bp, Homo sapien
agagtagaggggaaggtagttgtcaaaaaagaa

SEQ ID NO: 782543 - DNA, 33 bp, Homo sapien
ctacctacacttcctacgccctatataatcttg

SEQ ID NO: 782544 - DNA, 33 bp, Homo sapien
ctacctacacttcctatgccctatataatcttg

SEQ ID NO: 782545 - DNA, 33 bp, Homo sapien
cctctggaaacacttacaaaatacatcttgagg

SEQ ID NO: 782546 - DNA, 33 bp, Homo sapien
cctctggaaacacttataaaatacatcttgagg

SEQ ID NO: 782547 - DNA, 33 bp, Homo sapien
tacacccattcttcagcacctccatcagcttta

SEQ ID NO: 782548 - DNA, 33 bp, Homo sapien
tacacccattcttcaggacctccatcagcttta

SEQ ID NO: 782549 - DNA, 33 bp, Homo sapien
ttttttaaatacaaagaactatgcaaatataaa

SEQ ID NO: 782550 - DNA, 33 bp, Homo sapien
ttttttaaatacaaagtactatgcaaatataaa

SEQ ID NO: 782551 - DNA, 33 bp, Homo sapien
attcaatggaattttaccattgatcattaccat

SEQ ID NO: 782552 - DNA, 33 bp, Homo sapien
attcaatggaattttatcattgatcattaccat

SEQ ID NO: 782553 - DNA, 33 bp, Homo sapien
tgggtcaggcacccacacagtctgctatggcca

SEQ ID NO: 782554 - DNA, 33 bp, Homo sapien
tgggtcaggcacccacgcagtctgctatggcca

SEQ ID NO: 782555 - DNA, 33 bp, Homo sapien
ggggctttagcttgaaatatttaccaatttacc

SEQ ID NO: 782556 - DNA, 33 bp, Homo sapien
ggggctttagcttgaagtatttaccaatttacc

SEQ ID NO: 782557 - DNA, 33 bp, Homo sapien
agctcgtaaactggaacagattcagctggatag

SEQ ID NO: 782558 - DNA, 33 bp, Homo sapien
agctcgtaaactggaatagattcagctggatag

SEQ ID NO: 782559 - DNA, 33 bp, Homo sapien
ccattttctcataccactaaaacaacagttaat

SEQ ID NO: 782560 - DNA, 33 bp, Homo sapien
ccattttctcataccagtaaaacaacagttaat

SEQ ID NO: 782561 - DNA, 33 bp, Homo sapien
gtactgttcatgctaacgctaactttctgcact

SEQ ID NO: 782562 - DNA, 33 bp, Homo sapien
gtactgttcatgctaatgctaactttctgcact

SEQ ID NO: 782563 - DNA, 33 bp, Homo sapien
acatgagactgctggaacagaggcaaaggtata

SEQ ID NO: 782564 - DNA, 33 bp, Homo sapien
acatgagactgctggaccagaggcaaaggtata

SEQ ID NO: 782565 - DNA, 33 bp, Homo sapien
atgtgggtatacatgaagtgtgtcactttctag

SEQ ID NO: 782566 - DNA, 33 bp, Homo sapien
atgtgggtatacatgacgtgtgtcactttctag

SEQ ID NO: 782567 - DNA, 33 bp, Homo sapien
atcatgaaaaactacccgatcagagtgtccata

SEQ ID NO: 782568 - DNA, 33 bp, Homo sapien
atcatgaaaaactacctgatcagagtgtccata

SEQ ID NO: 782569 - DNA, 33 bp, Homo sapien
ggccccagagattatcacagtacattgggtgag

SEQ ID NO: 782570 - DNA, 33 bp, Homo sapien
ggccccagagattatcgcagtacattgggtgag

SEQ ID NO: 782571 - DNA, 33 bp, Homo sapien
cattggcacttagaaaaactttaattcaagttc

SEQ ID NO: 782572 - DNA, 33 bp, Homo sapien
cattggcacttagaaagactttaattcaagttc

SEQ ID NO: 782573 - DNA, 33 bp, Homo sapien
caatacactgtataatcaaaagatcagatttat

SEQ ID NO: 782574 - DNA, 33 bp, Homo sapien
caatacactgtataatgaaaagatcagatttat

SEQ ID NO: 782575 - DNA, 33 bp, Homo sapien
ctctttcttgtttcaacataaatctgatctttt

SEQ ID NO: 782576 - DNA, 33 bp, Homo sapien
ctctttcttgtttcaagataaatctgatctttt

SEQ ID NO: 782577 - DNA, 33 bp, Homo sapien
atttcttgggagaataagataagaacctaagac

SEQ ID NO: 782578 - DNA, 33 bp, Homo sapien
atttcttgggagaatatgataagaacctaagac

SEQ ID NO: 782579 - DNA, 33 bp, Homo sapien
aattaactcagaagcaactacctacaagcaagt

SEQ ID NO: 782580 - DNA, 33 bp, Homo sapien
aattaactcagaagcacctacctacaagcaagt

SEQ ID NO: 782581 - DNA, 33 bp, Homo sapien
attgtcatgtgcaacacacgattttgtcaacaa

SEQ ID NO: 782582 - DNA, 33 bp, Homo sapien
attgtcatgtgcaacatacgattttgtcaacaa

SEQ ID NO: 782583 - DNA, 33 bp, Homo sapien
atagcttgttttgggacctccaagaggaatgag

SEQ ID NO: 782584 - DNA, 33 bp, Homo sapien
atagcttgttttgggatctccaagaggaatgag

SEQ ID NO: 782585 - DNA, 33 bp, Homo sapien
attattcccattttgcagatttactagaataaa

SEQ ID NO: 782586 - DNA, 33 bp, Homo sapien
attattcccattttgcggatttactagaataaa

SEQ ID NO: 782587 - DNA, 33 bp, Homo sapien
tataactctgctgctcaaagtcctgcaatagct

SEQ ID NO: 782588 - DNA, 33 bp, Homo sapien
tataactctgctgctcgaagtcctgcaatagct

SEQ ID NO: 782589 - DNA, 33 bp, Homo sapien
cacagagtttctacaaagatgctgcctagtgaa

SEQ ID NO: 782590 - DNA, 33 bp, Homo sapien
cacagagtttctacaaggatgctgcctagtgaa

SEQ ID NO: 782591 - DNA, 33 bp, Homo sapien
tccaacataatgaaccaactgatgggaaaagaa

SEQ ID NO: 782592 - DNA, 33 bp, Homo sapien
tccaacataatgaaccgactgatgggaaaagaa

SEQ ID NO: 782593 - DNA, 33 bp, Homo sapien
atttccatgtactcatcagggaaaaaatgaact

SEQ ID NO: 782594 - DNA, 33 bp, Homo sapien
atttccatgtactcattagggaaaaaatgaact

SEQ ID NO: 782595 - DNA, 33 bp, Homo sapien
tactaataaagttgaaaatctcttcaaaggctg

SEQ ID NO: 782596 - DNA, 33 bp, Homo sapien
tactaataaagttgaacatctcttcaaaggctg

SEQ ID NO: 782597 - DNA, 33 bp, Homo sapien
tatttcaatatgaaagacaggacttcaatattt

SEQ ID NO: 782598 - DNA, 33 bp, Homo sapien
tatttcaatatgaaaggcaggacttcaatattt

SEQ ID NO: 782599 - DNA, 33 bp, Homo sapien
tggaataggactatgaaacatgggatgacatgg

SEQ ID NO: 782600 - DNA, 33 bp, Homo sapien
tggaataggactatgacacatgggatgacatgg

SEQ ID NO: 782601 - DNA, 33 bp, Homo sapien
agatatatgggagctaagtataaagtagagtcc

SEQ ID NO: 782602 - DNA, 33 bp, Homo sapien
agatatatgggagctaggtataaagtagagtcc

SEQ ID NO: 782603 - DNA, 33 bp, Homo sapien
tcctatagaacagaaccattcatccttctcttt

SEQ ID NO: 782604 - DNA, 33 bp, Homo sapien
tcctatagaacagaacgattcatccttctcttt

SEQ ID NO: 782605 - DNA, 33 bp, Homo sapien
atataaatctatcaaaacacgtacatttgatgt

SEQ ID NO: 782606 - DNA, 33 bp, Homo sapien
atataaatctatcaaagcacgtacatttgatgt

SEQ ID NO: 782607 - DNA, 33 bp, Homo sapien
acattatatgaagataagagttttgatgcacct

SEQ ID NO: 782608 - DNA, 33 bp, Homo sapien
acattatatgaagatatgagttttgatgcacct

SEQ ID NO: 782609 - DNA, 33 bp, Homo sapien
aatgctaccactaccacaataaaacaacaacaa

SEQ ID NO: 782610 - DNA, 33 bp, Homo sapien
aatgctaccactaccataataaaacaacaacaa

SEQ ID NO: 782611 - DNA, 33 bp, Homo sapien
tatggccaaagtgttaccacaggaagacccaaa

SEQ ID NO: 782612 - DNA, 33 bp, Homo sapien
tatggccaaagtgttatcacaggaagacccaaa

SEQ ID NO: 782613 - DNA, 33 bp, Homo sapien
aataggaactgaggccaaaatactttctcattc

SEQ ID NO: 782614 - DNA, 33 bp, Homo sapien
aataggaactgaggccgaaatactttctcattc

SEQ ID NO: 782615 - DNA, 33 bp, Homo sapien
aatgtaagagacaccactaatgacaaagtgtgg

SEQ ID NO: 782616 - DNA, 33 bp, Homo sapien
aatgtaagagacaccagtaatgacaaagtgtgg

SEQ ID NO: 782617 - DNA, 33 bp, Homo sapien
agatacaagtgaacaactatttacctaggagag

SEQ ID NO: 782618 - DNA, 33 bp, Homo sapien
agatacaagtgaacaagtatttacctaggagag

SEQ ID NO: 782619 - DNA, 33 bp, Homo sapien
tagtacctcattataacagcctgaactaagaca

SEQ ID NO: 782620 - DNA, 33 bp, Homo sapien
tagtacctcattataagagcctgaactaagaca

SEQ ID NO: 782621 - DNA, 33 bp, Homo sapien
aacctgattctaaatacgtacagagggtaatgg

SEQ ID NO: 782622 - DNA, 33 bp, Homo sapien
aacctgattctaaatatgtacagagggtaatgg

SEQ ID NO: 782623 - DNA, 33 bp, Homo sapien
aatatgtgaactaataagcataagcagaatggg

SEQ ID NO: 782624 - DNA, 33 bp, Homo sapien
aatatgtgaactaataggcataagcagaatggg

SEQ ID NO: 782625 - DNA, 33 bp, Homo sapien
acttagaaggtagtgacccaatctctcagtgat

SEQ ID NO: 782626 - DNA, 33 bp, Homo sapien
acttagaaggtagtgatccaatctctcagtgat

SEQ ID NO: 782627 - DNA, 33 bp, Homo sapien
cctagtaaagtaacaacgtacatcaagttgttt

SEQ ID NO: 782628 - DNA, 33 bp, Homo sapien
cctagtaaagtaacaatgtacatcaagttgttt

SEQ ID NO: 782629 - DNA, 33 bp, Homo sapien
aggttataaatcaaggaatgtaaatgccacatt

SEQ ID NO: 782630 - DNA, 33 bp, Homo sapien
aggttataaatcaagggatgtaaatgccacatt

SEQ ID NO: 782631 - DNA, 33 bp, Homo sapien
attccacactaggaaagtcataggtgctcaaac

SEQ ID NO: 782632 - DNA, 33 bp, Homo sapien
attccacactaggaaattcataggtgctcaaac

SEQ ID NO: 782633 - DNA, 33 bp, Homo sapien
ttatacttttattacacagttacgtaccaacaa

SEQ ID NO: 782634 - DNA, 33 bp, Homo sapien
ttatacttttattacatagttacgtaccaacaa

SEQ ID NO: 782635 - DNA, 33 bp, Homo sapien
gcgttggcaccgcccgaatcggtagcccgccgc

SEQ ID NO: 782636 - DNA, 33 bp, Homo sapien
gcgttggcaccgcccggatcggtagcccgccgc

SEQ ID NO: 782637 - DNA, 33 bp, Homo sapien
gtaccatgacagatccaggaggaaaaacggtgg

SEQ ID NO: 782638 - DNA, 33 bp, Homo sapien
gtaccatgacagatccgggaggaaaaacggtgg

SEQ ID NO: 782639 - DNA, 33 bp, Homo sapien
tttacaggtaaggacaacggggcttagagaggt

SEQ ID NO: 782640 - DNA, 33 bp, Homo sapien
tttacaggtaaggacagcggggcttagagaggt

SEQ ID NO: 782641 - DNA, 33 bp, Homo sapien
aaataatttgtacagcaaaccctgacacacaat

SEQ ID NO: 782642 - DNA, 33 bp, Homo sapien
aaataatttgtacagccaaccctgacacacaat

SEQ ID NO: 782643 - DNA, 33 bp, Homo sapien
ccctgaggttgggtgaagttggttggaatggct

SEQ ID NO: 782644 - DNA, 33 bp, Homo sapien
ccctgaggttgggtgatgttggttggaatggct

SEQ ID NO: 782645 - DNA, 33 bp, Homo sapien
tcttgttgatattctacgtcttttctgtttatg

SEQ ID NO: 782646 - DNA, 33 bp, Homo sapien
tcttgttgatattctatgtcttttctgtttatg

SEQ ID NO: 782647 - DNA, 33 bp, Homo sapien
ttttctgattcttagactagcattctgcctacg

SEQ ID NO: 782648 - DNA, 33 bp, Homo sapien
ttttctgattcttagattagcattctgcctacg

SEQ ID NO: 782649 - DNA, 33 bp, Homo sapien
cttaaataaagtagtagcatagtttcgtaggca

SEQ ID NO: 782650 - DNA, 33 bp, Homo sapien
cttaaataaagtagtatcatagtttcgtaggca

SEQ ID NO: 782651 - DNA, 33 bp, Homo sapien
atatgcatatttcataaagctagacaaagatga

SEQ ID NO: 782652 - DNA, 33 bp, Homo sapien
atatgcatatttcatagagctagacaaagatga

SEQ ID NO: 782653 - DNA, 33 bp, Homo sapien
ttttgtaattgaagaactggggggtctagcata

SEQ ID NO: 782654 - DNA, 33 bp, Homo sapien
ttttgtaattgaagaattggggggtctagcata

SEQ ID NO: 782655 - DNA, 33 bp, Homo sapien
agctaggtaggcgatacacttttagggatggct

SEQ ID NO: 782656 - DNA, 33 bp, Homo sapien
agctaggtaggcgatatacttttagggatggct

SEQ ID NO: 782657 - DNA, 33 bp, Homo sapien
ctgtaaatccaaattacgtcgccacagaaatta

SEQ ID NO: 782658 - DNA, 33 bp, Homo sapien
ctgtaaatccaaattatgtcgccacagaaatta

SEQ ID NO: 782659 - DNA, 33 bp, Homo sapien
cacaaattagcttgaacggtagaaagatttata

SEQ ID NO: 782660 - DNA, 33 bp, Homo sapien
cacaaattagcttgaatggtagaaagatttata

SEQ ID NO: 782661 - DNA, 33 bp, Homo sapien
tgactgccaggtttagaacagatattaagaacc

SEQ ID NO: 782662 - DNA, 33 bp, Homo sapien
tgactgccaggtttaggacagatattaagaacc

SEQ ID NO: 782663 - DNA, 33 bp, Homo sapien
acagtccttactttgacggtctctcttctcaca

SEQ ID NO: 782664 - DNA, 33 bp, Homo sapien
acagtccttactttgatggtctctcttctcaca

SEQ ID NO: 782665 - DNA, 33 bp, Homo sapien
ggtataaccctatcacagaatcctactgagcaa

SEQ ID NO: 782666 - DNA, 33 bp, Homo sapien
ggtataaccctatcacggaatcctactgagcaa

SEQ ID NO: 782667 - DNA, 33 bp, Homo sapien
aacaacaaaggccctaagtagccaaagcattcc

SEQ ID NO: 782668 - DNA, 33 bp, Homo sapien
aacaacaaaggccctaggtagccaaagcattcc

SEQ ID NO: 782669 - DNA, 33 bp, Homo sapien
aaactaggcactctcactctgaagcgacattag

SEQ ID NO: 782670 - DNA, 33 bp, Homo sapien
aaactaggcactctcattctgaagcgacattag

SEQ ID NO: 782671 - DNA, 33 bp, Homo sapien
gacagttctggtgccacgtgatcgaagatttaa

SEQ ID NO: 782672 - DNA, 33 bp, Homo sapien
gacagttctggtgccatgtgatcgaagatttaa

SEQ ID NO: 782673 - DNA, 33 bp, Homo sapien
agttgtttatctgagaacatcttagtttccctt

SEQ ID NO: 782674 - DNA, 33 bp, Homo sapien
agttgtttatctgagatcatcttagtttccctt

SEQ ID NO: 782675 - DNA, 33 bp, Homo sapien
gtgaaaaatccaatccaaaaagcctatacacta

SEQ ID NO: 782676 - DNA, 33 bp, Homo sapien
gtgaaaaatccaatccgaaaagcctatacacta

SEQ ID NO: 782677 - DNA, 33 bp, Homo sapien
tgaacattccttacaccacttaacttcacaaaa

SEQ ID NO: 782678 - DNA, 33 bp, Homo sapien
tgaacattccttacactacttaacttcacaaaa

SEQ ID NO: 782679 - DNA, 33 bp, Homo sapien
ttcagtgatggtcaaacagaagtatttgacagt

SEQ ID NO: 782680 - DNA, 33 bp, Homo sapien
ttcagtgatggtcaaagagaagtatttgacagt

SEQ ID NO: 782681 - DNA, 33 bp, Homo sapien
gaaagcaagaaatacacgaaaaccacagatcct

SEQ ID NO: 782682 - DNA, 33 bp, Homo sapien
gaaagcaagaaatacatgaaaaccacagatcct

SEQ ID NO: 782683 - DNA, 33 bp, Homo sapien
ctactggtaaaatgaagagcataatccagtttc

SEQ ID NO: 782684 - DNA, 33 bp, Homo sapien
ctactggtaaaatgaatagcataatccagtttc

SEQ ID NO: 782685 - DNA, 33 bp, Homo sapien
gcagaatcctgactccggaagatgtctgtgcac

SEQ ID NO: 782686 - DNA, 33 bp, Homo sapien
gcagaatcctgactcctgaagatgtctgtgcac

SEQ ID NO: 782687 - DNA, 33 bp, Homo sapien
caattggctgcagacaaataggcttttttattt

SEQ ID NO: 782688 - DNA, 33 bp, Homo sapien
caattggctgcagacagataggcttttttattt

SEQ ID NO: 782689 - DNA, 33 bp, Homo sapien
caatgctaattgatacagtaaataacttgtcag

SEQ ID NO: 782690 - DNA, 33 bp, Homo sapien
caatgctaattgatacggtaaataacttgtcag

SEQ ID NO: 782691 - DNA, 33 bp, Homo sapien
atatcagtgaaaaataggttgttatggagatta

SEQ ID NO: 782692 - DNA, 33 bp, Homo sapien
atatcagtgaaaaatatgttgttatggagatta

SEQ ID NO: 782693 - DNA, 33 bp, Homo sapien
aaatttgtgtggctacagaggcagtattattct

SEQ ID NO: 782694 - DNA, 33 bp, Homo sapien
aaatttgtgtggctacggaggcagtattattct

SEQ ID NO: 782695 - DNA, 33 bp, Homo sapien
tctttcagctcttctccgactgactttcctgaa

SEQ ID NO: 782696 - DNA, 33 bp, Homo sapien
tctttcagctcttctctgactgactttcctgaa

SEQ ID NO: 782697 - DNA, 33 bp, Homo sapien
ctccctgggaaagttcaaatgagaaaattgtct

SEQ ID NO: 782698 - DNA, 33 bp, Homo sapien
ctccctgggaaagttcgaatgagaaaattgtct

SEQ ID NO: 782699 - DNA, 33 bp, Homo sapien
gttctctcttctgccactcattattttaagcag

SEQ ID NO: 782700 - DNA, 33 bp, Homo sapien
gttctctcttctgccattcattattttaagcag

SEQ ID NO: 782701 - DNA, 33 bp, Homo sapien
acactctcctgaataaaatcattactagctatg

SEQ ID NO: 782702 - DNA, 33 bp, Homo sapien
acactctcctgaataagatcattactagctatg

SEQ ID NO: 782703 - DNA, 33 bp, Homo sapien
gatactcaaaagtgtaggcttcattagtttatc

SEQ ID NO: 782704 - DNA, 33 bp, Homo sapien
gatactcaaaagtgtatgcttcattagtttatc

SEQ ID NO: 782705 - DNA, 33 bp, Homo sapien
acagggtccttaaaacagaaggcctggtatgag

SEQ ID NO: 782706 - DNA, 33 bp, Homo sapien
acagggtccttaaaacggaaggcctggtatgag

SEQ ID NO: 782707 - DNA, 33 bp, Homo sapien
gactatagcattaagacaggaaccaggaagagg

SEQ ID NO: 782708 - DNA, 33 bp, Homo sapien
gactatagcattaagataggaaccaggaagagg

SEQ ID NO: 782709 - DNA, 33 bp, Homo sapien
ccttttgttttcctacagaatgaactcattata

SEQ ID NO: 782710 - DNA, 33 bp, Homo sapien
ccttttgttttcctaccgaatgaactcattata

SEQ ID NO: 782711 - DNA, 33 bp, Homo sapien
gataggcaacatgaaagttgaaaataagttaca

SEQ ID NO: 782712 - DNA, 33 bp, Homo sapien
gataggcaacatgaaatttgaaaataagttaca

SEQ ID NO: 782713 - DNA, 33 bp, Homo sapien
tgtttaaaataatgcgcaaagtttcacagatta

SEQ ID NO: 782714 - DNA, 33 bp, Homo sapien
tgtttaaaataatgcgtaaagtttcacagatta

SEQ ID NO: 782715 - DNA, 33 bp, Homo sapien
ctttttcacagataaacggtaaagattgttaca

SEQ ID NO: 782716 - DNA, 33 bp, Homo sapien
ctttttcacagataaatggtaaagattgttaca

SEQ ID NO: 782717 - DNA, 33 bp, Homo sapien
catcttgttaaattgaagagaaataaatcagaa

SEQ ID NO: 782718 - DNA, 33 bp, Homo sapien
catcttgttaaattgaggagaaataaatcagaa

SEQ ID NO: 782719 - DNA, 33 bp, Homo sapien
taaaagagctttcctgcaggtatctaatttaga

SEQ ID NO: 782720 - DNA, 33 bp, Homo sapien
taaaagagctttcctgtaggtatctaatttaga

SEQ ID NO: 782721 - DNA, 33 bp, Homo sapien
gtcagagtttgaataaagtgtccatagtctaaa

SEQ ID NO: 782722 - DNA, 33 bp, Homo sapien
gtcagagtttgaataatgtgtccatagtctaaa

SEQ ID NO: 782723 - DNA, 33 bp, Homo sapien
tccataagtgatacaaacctgggagctgtaaat

SEQ ID NO: 782724 - DNA, 33 bp, Homo sapien
tccataagtgatacaagcctgggagctgtaaat

SEQ ID NO: 782725 - DNA, 33 bp, Homo sapien
ggtcccattgctaagaatatttcaaattaaagc

SEQ ID NO: 782726 - DNA, 33 bp, Homo sapien
ggtcccattgctaagattatttcaaattaaagc

SEQ ID NO: 782727 - DNA, 33 bp, Homo sapien
ggaaatacaatctaagaactcttatttgctaat

SEQ ID NO: 782728 - DNA, 33 bp, Homo sapien
ggaaatacaatctaagtactcttatttgctaat

SEQ ID NO: 782729 - DNA, 33 bp, Homo sapien
agattgtatttcctgaggtttaatattaacagg

SEQ ID NO: 782730 - DNA, 33 bp, Homo sapien
agattgtatttcctgatgtttaatattaacagg

SEQ ID NO: 782731 - DNA, 33 bp, Homo sapien
gaagctagaaaagatacgtgaactaagaaataa

SEQ ID NO: 782732 - DNA, 33 bp, Homo sapien
gaagctagaaaagatatgtgaactaagaaataa

SEQ ID NO: 782733 - DNA, 33 bp, Homo sapien
gtgcagatggaggaaacactataaaatctgcta

SEQ ID NO: 782734 - DNA, 33 bp, Homo sapien
gtgcagatggaggaaagactataaaatctgcta

SEQ ID NO: 782735 - DNA, 33 bp, Homo sapien
tgtaaataatgtaagacgcattggagaatggtg

SEQ ID NO: 782736 - DNA, 33 bp, Homo sapien
tgtaaataatgtaagatgcattggagaatggtg

SEQ ID NO: 782737 - DNA, 33 bp, Homo sapien
gagccaatgtaaatgaagtcaaatcagcaaaag

SEQ ID NO: 782738 - DNA, 33 bp, Homo sapien
gagccaatgtaaatgaggtcaaatcagcaaaag

SEQ ID NO: 782739 - DNA, 33 bp, Homo sapien
ttaaaaggaagtcctaactgatcgatcacatag

SEQ ID NO: 782740 - DNA, 33 bp, Homo sapien
ttaaaaggaagtcctagctgatcgatcacatag

SEQ ID NO: 782741 - DNA, 33 bp, Homo sapien
attccagagtcacgacactttctaaactgttaa

SEQ ID NO: 782742 - DNA, 33 bp, Homo sapien
attccagagtcacgacgctttctaaactgttaa

SEQ ID NO: 782743 - DNA, 33 bp, Homo sapien
gaggtttctagactaaaagacttcttgcaaagg

SEQ ID NO: 782744 - DNA, 33 bp, Homo sapien
gaggtttctagactaagagacttcttgcaaagg

SEQ ID NO: 782745 - DNA, 33 bp, Homo sapien
agtctttcaatcaatcaccttccttatccatcc

SEQ ID NO: 782746 - DNA, 33 bp, Homo sapien
agtctttcaatcaatcgccttccttatccatcc

SEQ ID NO: 782747 - DNA, 33 bp, Homo sapien
tgccagatacttccccagctgagcatctgaaag

SEQ ID NO: 782748 - DNA, 33 bp, Homo sapien
tgccagatacttccccggctgagcatctgaaag

SEQ ID NO: 782749 - DNA, 33 bp, Homo sapien
agctcagttcatttgagaagatagactgcagct

SEQ ID NO: 782750 - DNA, 33 bp, Homo sapien
agctcagttcatttgataagatagactgcagct

SEQ ID NO: 782751 - DNA, 33 bp, Homo sapien
cttttcccaaatgagactacattcacaggttcc

SEQ ID NO: 782752 - DNA, 33 bp, Homo sapien
cttttcccaaatgagattacattcacaggttcc

SEQ ID NO: 782753 - DNA, 33 bp, Homo sapien
ctcagtagagtagcatgacctctgcatggtagc

SEQ ID NO: 782754 - DNA, 33 bp, Homo sapien
ctcagtagagtagcattacctctgcatggtagc

SEQ ID NO: 782755 - DNA, 33 bp, Homo sapien
ggtggaagtagagaaaattaactgattaaaagg

SEQ ID NO: 782756 - DNA, 33 bp, Homo sapien
ggtggaagtagagaaagttaactgattaaaagg

SEQ ID NO: 782757 - DNA, 33 bp, Homo sapien
ttttgtttacctcttacgtatcctagtcttgga

SEQ ID NO: 782758 - DNA, 33 bp, Homo sapien
ttttgtttacctcttatgtatcctagtcttgga

SEQ ID NO: 782759 - DNA, 33 bp, Homo sapien
ctattccagttgaacaccaagagaaaaacaatg

SEQ ID NO: 782760 - DNA, 33 bp, Homo sapien
ctattccagttgaacatcaagagaaaaacaatg

SEQ ID NO: 782761 - DNA, 33 bp, Homo sapien
cttgaaattatttcaacgataggttgctaagca

SEQ ID NO: 782762 - DNA, 33 bp, Homo sapien
cttgaaattatttcaatgataggttgctaagca

SEQ ID NO: 782763 - DNA, 33 bp, Homo sapien
agaacactcagtaatcacatggatagatttact

SEQ ID NO: 782764 - DNA, 33 bp, Homo sapien
agaacactcagtaatcgcatggatagatttact

SEQ ID NO: 782765 - DNA, 33 bp, Homo sapien
tattttacaggctaggaaatgagttggatatat

SEQ ID NO: 782766 - DNA, 33 bp, Homo sapien
tattttacaggctaggtaatgagttggatatat

SEQ ID NO: 782767 - DNA, 33 bp, Homo sapien
tcccctactctacaaaacttatgagtgcctaag

SEQ ID NO: 782768 - DNA, 33 bp, Homo sapien
tcccctactctacaaaccttatgagtgcctaag

SEQ ID NO: 782769 - DNA, 33 bp, Homo sapien
ccaaagactggaagaaatctctctctaaggaca

SEQ ID NO: 782770 - DNA, 33 bp, Homo sapien
ccaaagactggaagaagtctctctctaaggaca

SEQ ID NO: 782771 - DNA, 33 bp, Homo sapien
ataatcagtactggaacgttcaccaaaaaaagt

SEQ ID NO: 782772 - DNA, 33 bp, Homo sapien
ataatcagtactggaatgttcaccaaaaaaagt

SEQ ID NO: 782773 - DNA, 33 bp, Homo sapien
aagaaagaaaaggagaatagacaggattagaag

SEQ ID NO: 782774 - DNA, 33 bp, Homo sapien
aagaaagaaaaggagagtagacaggattagaag

SEQ ID NO: 782775 - DNA, 33 bp, Homo sapien
ttttcctaaatattccagcctagctcactgatg

SEQ ID NO: 782776 - DNA, 33 bp, Homo sapien
ttttcctaaatattccggcctagctcactgatg

SEQ ID NO: 782777 - DNA, 33 bp, Homo sapien
atttcagttttaggaactgtttgactccatagc

SEQ ID NO: 782778 - DNA, 33 bp, Homo sapien
atttcagttttaggaattgtttgactccatagc

SEQ ID NO: 782779 - DNA, 33 bp, Homo sapien
atctctacgtcccataagcagagtaataatagg

SEQ ID NO: 782780 - DNA, 33 bp, Homo sapien
atctctacgtcccataggcagagtaataatagg

SEQ ID NO: 782781 - DNA, 33 bp, Homo sapien
taaagcaaactggacacccccaaaacgtgtgtt

SEQ ID NO: 782782 - DNA, 33 bp, Homo sapien
taaagcaaactggacatccccaaaacgtgtgtt

SEQ ID NO: 782783 - DNA, 33 bp, Homo sapien
ataaacaaagggctctaaaatctgctaaaacac

SEQ ID NO: 782784 - DNA, 33 bp, Homo sapien
ataaacaaagggctctgaaatctgctaaaacac

SEQ ID NO: 782785 - DNA, 33 bp, Homo sapien
tgcactctacaaaaagcatcattctcataatag

SEQ ID NO: 782786 - DNA, 33 bp, Homo sapien
tgcactctacaaaaagtatcattctcataatag

SEQ ID NO: 782787 - DNA, 33 bp, Homo sapien
agggccgggttcttgaaagcagtggcagaaggg

SEQ ID NO: 782788 - DNA, 33 bp, Homo sapien
agggccgggttcttgatagcagtggcagaaggg

SEQ ID NO: 782789 - DNA, 33 bp, Homo sapien
gccatggcttctctttcaaaattaacagtgaat

SEQ ID NO: 782790 - DNA, 33 bp, Homo sapien
gccatggcttctctttgaaaattaacagtgaat

SEQ ID NO: 782791 - DNA, 33 bp, Homo sapien
gctgcagtttttttctaaatcaagtcatctcac

SEQ ID NO: 782792 - DNA, 33 bp, Homo sapien
gctgcagtttttttctgaatcaagtcatctcac

SEQ ID NO: 782793 - DNA, 33 bp, Homo sapien
tgcagtcacctgttagcatattgtaatttatgc

SEQ ID NO: 782794 - DNA, 33 bp, Homo sapien
tgcagtcacctgttagtatattgtaatttatgc

SEQ ID NO: 782795 - DNA, 33 bp, Homo sapien
cctaaagtatgagaaaaaagatccaatgtgcat

SEQ ID NO: 782796 - DNA, 33 bp, Homo sapien
cctaaagtatgagaaacaagatccaatgtgcat

SEQ ID NO: 782797 - DNA, 33 bp, Homo sapien
gtgaatttggcctcgaactttgtccccacatat

SEQ ID NO: 782798 - DNA, 33 bp, Homo sapien
gtgaatttggcctcgagctttgtccccacatat

SEQ ID NO: 782799 - DNA, 33 bp, Homo sapien
gaggtaatgtacactaccgactaattgtcaaag

SEQ ID NO: 782800 - DNA, 33 bp, Homo sapien
gaggtaatgtacactatcgactaattgtcaaag

SEQ ID NO: 782801 - DNA, 33 bp, Homo sapien
ctgttaattattacacaacgtacattattttac

SEQ ID NO: 782802 - DNA, 33 bp, Homo sapien
ctgttaattattacacgacgtacattattttac

SEQ ID NO: 782803 - DNA, 33 bp, Homo sapien
attcacaactgtctcaatagaggattattggtt

SEQ ID NO: 782804 - DNA, 33 bp, Homo sapien
attcacaactgtctcagtagaggattattggtt

SEQ ID NO: 782805 - DNA, 33 bp, Homo sapien
tccagccaaaactgtacggtatgttacttatgc

SEQ ID NO: 782806 - DNA, 33 bp, Homo sapien
tccagccaaaactgtatggtatgttacttatgc

SEQ ID NO: 782807 - DNA, 33 bp, Homo sapien
tgagttacaaagaagacacataaatcgaaaaac

SEQ ID NO: 782808 - DNA, 33 bp, Homo sapien
tgagttacaaagaagagacataaatcgaaaaac

SEQ ID NO: 782809 - DNA, 33 bp, Homo sapien
aaatttttttaacaacccatatgcaaaatgttt

SEQ ID NO: 782810 - DNA, 33 bp, Homo sapien
aaatttttttaacaactcatatgcaaaatgttt

SEQ ID NO: 782811 - DNA, 33 bp, Homo sapien
tttgaaatatgttggaccattaataagaattag

SEQ ID NO: 782812 - DNA, 33 bp, Homo sapien
tttgaaatatgttggagcattaataagaattag

SEQ ID NO: 782813 - DNA, 33 bp, Homo sapien
gtccttacatttaccaggaagatctcactttcc

SEQ ID NO: 782814 - DNA, 33 bp, Homo sapien
gtccttacatttaccatgaagatctcactttcc

SEQ ID NO: 782815 - DNA, 33 bp, Homo sapien
tacacagaagtcaggaagtgaggtttgggaatc

SEQ ID NO: 782816 - DNA, 33 bp, Homo sapien
tacacagaagtcaggacgtgaggtttgggaatc

SEQ ID NO: 782817 - DNA, 33 bp, Homo sapien
gtataaatttattaacacatcagtcaacttttc

SEQ ID NO: 782818 - DNA, 33 bp, Homo sapien
gtataaatttattaactcatcagtcaacttttc

SEQ ID NO: 782819 - DNA, 33 bp, Homo sapien
ttatttgtttctgaaactgtaagaatgcatgga

SEQ ID NO: 782820 - DNA, 33 bp, Homo sapien
ttatttgtttctgaaattgtaagaatgcatgga

SEQ ID NO: 782821 - DNA, 33 bp, Homo sapien
ggtgcagcattaacccaagaagaatatacagca

SEQ ID NO: 782822 - DNA, 33 bp, Homo sapien
ggtgcagcattaacccgagaagaatatacagca

SEQ ID NO: 782823 - DNA, 33 bp, Homo sapien
tgctcagtatagttaaacactgcttggaaaaat

SEQ ID NO: 782824 - DNA, 33 bp, Homo sapien
tgctcagtatagttaagcactgcttggaaaaat

SEQ ID NO: 782825 - DNA, 33 bp, Homo sapien
ggtctgacttggaagaagctgtgtggccaacag

SEQ ID NO: 782826 - DNA, 33 bp, Homo sapien
ggtctgacttggaagaggctgtgtggccaacag

SEQ ID NO: 782827 - DNA, 33 bp, Homo sapien
gtgcctccttgttccacaatttctataaaatta

SEQ ID NO: 782828 - DNA, 33 bp, Homo sapien
gtgcctccttgttccagaatttctataaaatta

SEQ ID NO: 782829 - DNA, 33 bp, Homo sapien
atgataatgattttgccgagagaagcacatgaa

SEQ ID NO: 782830 - DNA, 33 bp, Homo sapien
atgataatgattttgctgagagaagcacatgaa

SEQ ID NO: 782831 - DNA, 33 bp, Homo sapien
tttcatgaccttgaccagatcaatatattgcac

SEQ ID NO: 782832 - DNA, 33 bp, Homo sapien
tttcatgaccttgaccggatcaatatattgcac

SEQ ID NO: 782833 - DNA, 33 bp, Homo sapien
atgaaacctaactgacgctatgaaaaaaatgaa

SEQ ID NO: 782834 - DNA, 33 bp, Homo sapien
atgaaacctaactgactctatgaaaaaaatgaa

SEQ ID NO: 782835 - DNA, 33 bp, Homo sapien
agggttaaagtctacaaccagaacttcttatca

SEQ ID NO: 782836 - DNA, 33 bp, Homo sapien
agggttaaagtctacagccagaacttcttatca

SEQ ID NO: 782837 - DNA, 33 bp, Homo sapien
taataaaatcttcacaatgatttttcaacaaat

SEQ ID NO: 782838 - DNA, 33 bp, Homo sapien
taataaaatcttcacagtgatttttcaacaaat

SEQ ID NO: 782839 - DNA, 33 bp, Homo sapien
ctgtcagattcattgaacaagcttaaattcagg

SEQ ID NO: 782840 - DNA, 33 bp, Homo sapien
ctgtcagattcattgagcaagcttaaattcagg

SEQ ID NO: 782841 - DNA, 33 bp, Homo sapien
ttataaagtgtatgaactgctgaactttttata

SEQ ID NO: 782842 - DNA, 33 bp, Homo sapien
ttataaagtgtatgaattgctgaactttttata

SEQ ID NO: 782843 - DNA, 33 bp, Homo sapien
gatgggaaatttggacaggaatgagctactaca

SEQ ID NO: 782844 - DNA, 33 bp, Homo sapien
gatgggaaatttggacgggaatgagctactaca

SEQ ID NO: 782845 - DNA, 33 bp, Homo sapien
tgacttgattgaataccagtgtttgggccagtg

SEQ ID NO: 782846 - DNA, 33 bp, Homo sapien
tgacttgattgaatactagtgtttgggccagtg

SEQ ID NO: 782847 - DNA, 33 bp, Homo sapien
cttaacagcatttctcaagtgtgcttcccagaa

SEQ ID NO: 782848 - DNA, 33 bp, Homo sapien
cttaacagcatttctccagtgtgcttcccagaa

SEQ ID NO: 782849 - DNA, 33 bp, Homo sapien
tgtatacctgtagtgaagtaactcaatccttca

SEQ ID NO: 782850 - DNA, 33 bp, Homo sapien
tgtatacctgtagtgatgtaactcaatccttca

SEQ ID NO: 782851 - DNA, 33 bp, Homo sapien
tataaaactagcaagcactgtacagcaaaggag

SEQ ID NO: 782852 - DNA, 33 bp, Homo sapien
tataaaactagcaagctctgtacagcaaaggag

SEQ ID NO: 782853 - DNA, 33 bp, Homo sapien
aaagagaggcctataaaagaacccaattatctg

SEQ ID NO: 782854 - DNA, 33 bp, Homo sapien
aaagagaggcctataatagaacccaattatctg

SEQ ID NO: 782855 - DNA, 33 bp, Homo sapien
atgtgaagtagtagaaagatggttaagaaagaa

SEQ ID NO: 782856 - DNA, 33 bp, Homo sapien
atgtgaagtagtagaaggatggttaagaaagaa

SEQ ID NO: 782857 - DNA, 33 bp, Homo sapien
ggcaatttaatcaaacacatcaaagaatcttag

SEQ ID NO: 782858 - DNA, 33 bp, Homo sapien
ggcaatttaatcaaacccatcaaagaatcttag

SEQ ID NO: 782859 - DNA, 33 bp, Homo sapien
tggtcttgtcaaccaacggtcaatacctatccc

SEQ ID NO: 782860 - DNA, 33 bp, Homo sapien
tggtcttgtcaaccaatggtcaatacctatccc

SEQ ID NO: 782861 - DNA, 33 bp, Homo sapien
tccttcagtgatttggacaatgtttgctcatca

SEQ ID NO: 782862 - DNA, 33 bp, Homo sapien
tccttcagtgatttgggcaatgtttgctcatca

SEQ ID NO: 782863 - DNA, 33 bp, Homo sapien
tggagcacagtaggaaaattttgtacctacatt

SEQ ID NO: 782864 - DNA, 33 bp, Homo sapien
tggagcacagtaggaagattttgtacctacatt

SEQ ID NO: 782865 - DNA, 33 bp, Homo sapien
aatagagtatattcagcagagagttatgttcag

SEQ ID NO: 782866 - DNA, 33 bp, Homo sapien
aatagagtatattcagtagagagttatgttcag

SEQ ID NO: 782867 - DNA, 33 bp, Homo sapien
ctaagaagtctactcaaaaaacttagacaagaa

SEQ ID NO: 782868 - DNA, 33 bp, Homo sapien
ctaagaagtctactcagaaaacttagacaagaa

SEQ ID NO: 782869 - DNA, 33 bp, Homo sapien
gatatgtttatatcctaaaaaagccgaagtgtt

SEQ ID NO: 782870 - DNA, 33 bp, Homo sapien
gatatgtttatatcctgaaaaagccgaagtgtt

SEQ ID NO: 782871 - DNA, 33 bp, Homo sapien
caattatggataatggacaattgtaggtaaaaa

SEQ ID NO: 782872 - DNA, 33 bp, Homo sapien
caattatggataatgggcaattgtaggtaaaaa

SEQ ID NO: 782873 - DNA, 33 bp, Homo sapien
catcctagtttgtttagagaaatccaagtctac

SEQ ID NO: 782874 - DNA, 33 bp, Homo sapien
catcctagtttgtttatagaaatccaagtctac

SEQ ID NO: 782875 - DNA, 33 bp, Homo sapien
gatgtttaaaaaaatcaaattcatgcccaaaca

SEQ ID NO: 782876 - DNA, 33 bp, Homo sapien
gatgtttaaaaaaatcgaattcatgcccaaaca

SEQ ID NO: 782877 - DNA, 33 bp, Homo sapien
ttcacttacttgattaaattttgatatgactca

SEQ ID NO: 782878 - DNA, 33 bp, Homo sapien
ttcacttacttgattagattttgatatgactca

SEQ ID NO: 782879 - DNA, 33 bp, Homo sapien
gcgcagaatagtaagcactcttccagtttttcc

SEQ ID NO: 782880 - DNA, 33 bp, Homo sapien
gcgcagaatagtaagcgctcttccagtttttcc

SEQ ID NO: 782881 - DNA, 33 bp, Homo sapien
tgccagtccactatgccaacttctgattaaccc

SEQ ID NO: 782882 - DNA, 33 bp, Homo sapien
tgccagtccactatgctaacttctgattaaccc

SEQ ID NO: 782883 - DNA, 33 bp, Homo sapien
taaaataaataaataaagtgagccaaaggccta

SEQ ID NO: 782884 - DNA, 33 bp, Homo sapien
taaaataaataaataaggtgagccaaaggccta

SEQ ID NO: 782885 - DNA, 33 bp, Homo sapien
aattgttagttttttccagatgttttcttcaag

SEQ ID NO: 782886 - DNA, 33 bp, Homo sapien
aattgttagttttttcgagatgttttcttcaag

SEQ ID NO: 782887 - DNA, 33 bp, Homo sapien
cagtatgttgagatgactaagatttgctttagc

SEQ ID NO: 782888 - DNA, 33 bp, Homo sapien
cagtatgttgagatgattaagatttgctttagc

SEQ ID NO: 782889 - DNA, 33 bp, Homo sapien
cttctcaatcaagcaacacaatttgttacagag

SEQ ID NO: 782890 - DNA, 33 bp, Homo sapien
cttctcaatcaagcaatacaatttgttacagag

SEQ ID NO: 782891 - DNA, 33 bp, Homo sapien
actgtaaaatacactacacttggcaacaattag

SEQ ID NO: 782892 - DNA, 33 bp, Homo sapien
actgtaaaatacactagacttggcaacaattag

SEQ ID NO: 782893 - DNA, 33 bp, Homo sapien
aaagccatcctggaaactgtcaggtaataggag

SEQ ID NO: 782894 - DNA, 33 bp, Homo sapien
aaagccatcctggaaattgtcaggtaataggag

SEQ ID NO: 782895 - DNA, 33 bp, Homo sapien
gtctttataagaggaacgatcagagagtggtat

SEQ ID NO: 782896 - DNA, 33 bp, Homo sapien
gtctttataagaggaatgatcagagagtggtat

SEQ ID NO: 782897 - DNA, 33 bp, Homo sapien
ctggaggttaggcggccatgttcaaggttctag

SEQ ID NO: 782898 - DNA, 33 bp, Homo sapien
ctggaggttaggcggctatgttcaaggttctag

SEQ ID NO: 782899 - DNA, 33 bp, Homo sapien
ttacttgaattctgaaatggctgaatatttgaa

SEQ ID NO: 782900 - DNA, 33 bp, Homo sapien
ttacttgaattctgaagtggctgaatatttgaa

SEQ ID NO: 782901 - DNA, 33 bp, Homo sapien
gtgtacttattatcaacctgggaatgtcgtcac

SEQ ID NO: 782902 - DNA, 33 bp, Homo sapien
gtgtacttattatcaatctgggaatgtcgtcac

SEQ ID NO: 782903 - DNA, 33 bp, Homo sapien
gtaagagcagaatggacaacttgttgggtagga

SEQ ID NO: 782904 - DNA, 33 bp, Homo sapien
gtaagagcagaatggataacttgttgggtagga

SEQ ID NO: 782905 - DNA, 33 bp, Homo sapien
gttcagcaatccactccattattttaggcctct

SEQ ID NO: 782906 - DNA, 33 bp, Homo sapien
gttcagcaatccactctattattttaggcctct

SEQ ID NO: 782907 - DNA, 33 bp, Homo sapien
agtatagctggcaagcaccttaataatcagaac

SEQ ID NO: 782908 - DNA, 33 bp, Homo sapien
agtatagctggcaagcgccttaataatcagaac

SEQ ID NO: 782909 - DNA, 33 bp, Homo sapien
atctttttttgaataacgatgtatgtattctct

SEQ ID NO: 782910 - DNA, 33 bp, Homo sapien
atctttttttgaataatgatgtatgtattctct

SEQ ID NO: 782911 - DNA, 33 bp, Homo sapien
aaaaggagcaatcacaactattctgagacactg

SEQ ID NO: 782912 - DNA, 33 bp, Homo sapien
aaaaggagcaatcacatctattctgagacactg

SEQ ID NO: 782913 - DNA, 33 bp, Homo sapien
gcatacaaaagtttccaatacaatttattaaga

SEQ ID NO: 782914 - DNA, 33 bp, Homo sapien
gcatacaaaagtttcctatacaatttattaaga

SEQ ID NO: 782915 - DNA, 33 bp, Homo sapien
cacttttaacgtgacccgactgccaatctgaga

SEQ ID NO: 782916 - DNA, 33 bp, Homo sapien
cacttttaacgtgacctgactgccaatctgaga

SEQ ID NO: 782917 - DNA, 33 bp, Homo sapien
accaacacccagcttacagacacaaacctatac

SEQ ID NO: 782918 - DNA, 33 bp, Homo sapien
accaacacccagcttatagacacaaacctatac

SEQ ID NO: 782919 - DNA, 33 bp, Homo sapien
gcacagtgtgttgaaaattaaaatggacaaaag

SEQ ID NO: 782920 - DNA, 33 bp, Homo sapien
gcacagtgtgttgaaacttaaaatggacaaaag

SEQ ID NO: 782921 - DNA, 33 bp, Homo sapien
aaatcaatgactcgaacgaccactcaatgaaac

SEQ ID NO: 782922 - DNA, 33 bp, Homo sapien
aaatcaatgactcgaatgaccactcaatgaaac

SEQ ID NO: 782923 - DNA, 33 bp, Homo sapien
tttatacagaagaaaagaaagcatagtagctgc

SEQ ID NO: 782924 - DNA, 33 bp, Homo sapien
tttatacagaagaaaataaagcatagtagctgc

SEQ ID NO: 782925 - DNA, 33 bp, Homo sapien
ttatggtgtataaaccgcatttatttcatttag

SEQ ID NO: 782926 - DNA, 33 bp, Homo sapien
ttatggtgtataaacctcatttatttcatttag

SEQ ID NO: 782927 - DNA, 33 bp, Homo sapien
tgtttttacaagcccaataattttctaatggct

SEQ ID NO: 782928 - DNA, 33 bp, Homo sapien
tgtttttacaagcccagtaattttctaatggct

SEQ ID NO: 782929 - DNA, 33 bp, Homo sapien
tatgtctcaatcaataaggaagaatgcctctta

SEQ ID NO: 782930 - DNA, 33 bp, Homo sapien
tatgtctcaatcaatagggaagaatgcctctta

SEQ ID NO: 782931 - DNA, 33 bp, Homo sapien
ttcttgacttatatgacctgccattagcattta

SEQ ID NO: 782932 - DNA, 33 bp, Homo sapien
ttcttgacttatatgatctgccattagcattta

SEQ ID NO: 782933 - DNA, 33 bp, Homo sapien
ggttagtgtagtgaagccattgtttacattgaa

SEQ ID NO: 782934 - DNA, 33 bp, Homo sapien
ggttagtgtagtgaagtcattgtttacattgaa

SEQ ID NO: 782935 - DNA, 33 bp, Homo sapien
aaacactggctaatcacggaacaggtttgtcag

SEQ ID NO: 782936 - DNA, 33 bp, Homo sapien
aaacactggctaatcatggaacaggtttgtcag

SEQ ID NO: 782937 - DNA, 33 bp, Homo sapien
ttctcccataaggaaagatcttgcttagtgtat

SEQ ID NO: 782938 - DNA, 33 bp, Homo sapien
ttctcccataaggaaatatcttgcttagtgtat

SEQ ID NO: 782939 - DNA, 33 bp, Homo sapien
gggattcaggagcaagcctataccatcagcagt

SEQ ID NO: 782940 - DNA, 33 bp, Homo sapien
gggattcaggagcaaggctataccatcagcagt

SEQ ID NO: 782941 - DNA, 33 bp, Homo sapien
gtgtgaggtgaaagcgcaagagggagtggtgat

SEQ ID NO: 782942 - DNA, 33 bp, Homo sapien
gtgtgaggtgaaagcggaagagggagtggtgat

SEQ ID NO: 782943 - DNA, 33 bp, Homo sapien
cagttagagaaacagcaagagaagtacatttta

SEQ ID NO: 782944 - DNA, 33 bp, Homo sapien
cagttagagaaacagcgagagaagtacatttta

SEQ ID NO: 782945 - DNA, 33 bp, Homo sapien
aagagaaaaaaagtaacgaatcatagttgagtt

SEQ ID NO: 782946 - DNA, 33 bp, Homo sapien
aagagaaaaaaagtaatgaatcatagttgagtt

SEQ ID NO: 782947 - DNA, 33 bp, Homo sapien
cacacacattggtagaatccttttaaggaattc

SEQ ID NO: 782948 - DNA, 33 bp, Homo sapien
cacacacattggtagattccttttaaggaattc

SEQ ID NO: 782949 - DNA, 33 bp, Homo sapien
ctcaacaattcccatacatattcctcattatct

SEQ ID NO: 782950 - DNA, 33 bp, Homo sapien
ctcaacaattcccatatatattcctcattatct

SEQ ID NO: 782951 - DNA, 33 bp, Homo sapien
atttttctaaaatacaaagctgttgatcctgcc

SEQ ID NO: 782952 - DNA, 33 bp, Homo sapien
atttttctaaaatacagagctgttgatcctgcc

SEQ ID NO: 782953 - DNA, 33 bp, Homo sapien
tgaaggagaataccaccgaacaattttgcagat

SEQ ID NO: 782954 - DNA, 33 bp, Homo sapien
tgaaggagaataccacggaacaattttgcagat

SEQ ID NO: 782955 - DNA, 33 bp, Homo sapien
catgcgtcttttgagcacagcaaagaaaataga

SEQ ID NO: 782956 - DNA, 33 bp, Homo sapien
catgcgtcttttgagcccagcaaagaaaataga

SEQ ID NO: 782957 - DNA, 33 bp, Homo sapien
ggggtctctttaaatacgctgtatacgcacaaa

SEQ ID NO: 782958 - DNA, 33 bp, Homo sapien
ggggtctctttaaatatgctgtatacgcacaaa

SEQ ID NO: 782959 - DNA, 33 bp, Homo sapien
tctttaacaattgccaaagacttccccaacttc

SEQ ID NO: 782960 - DNA, 33 bp, Homo sapien
tctttaacaattgccatagacttccccaacttc

SEQ ID NO: 782961 - DNA, 33 bp, Homo sapien
agtggagatggattagacatactttattatctg

SEQ ID NO: 782962 - DNA, 33 bp, Homo sapien
agtggagatggattagccatactttattatctg

SEQ ID NO: 782963 - DNA, 33 bp, Homo sapien
agtccagaaagaaagaacatccttgaattattc

SEQ ID NO: 782964 - DNA, 33 bp, Homo sapien
agtccagaaagaaagagcatccttgaattattc

SEQ ID NO: 782965 - DNA, 33 bp, Homo sapien
ttcaacatataaaccaaagactcattaattcct

SEQ ID NO: 782966 - DNA, 33 bp, Homo sapien
ttcaacatataaaccagagactcattaattcct

SEQ ID NO: 782967 - DNA, 33 bp, Homo sapien
tcctaaactgagatgaagaaagggattaacctt

SEQ ID NO: 782968 - DNA, 33 bp, Homo sapien
tcctaaactgagatgaggaaagggattaacctt

SEQ ID NO: 782969 - DNA, 33 bp, Homo sapien
gatgaactgtgaggaacaactgaaaggaactct

SEQ ID NO: 782970 - DNA, 33 bp, Homo sapien
gatgaactgtgaggaagaactgaaaggaactct

SEQ ID NO: 782971 - DNA, 33 bp, Homo sapien
gcagtcatcaacaacaccagcccacaccaactg

SEQ ID NO: 782972 - DNA, 33 bp, Homo sapien
gcagtcatcaacaacatcagcccacaccaactg

SEQ ID NO: 782973 - DNA, 33 bp, Homo sapien
caggttattattgatacgtgaggctttgttcct

SEQ ID NO: 782974 - DNA, 33 bp, Homo sapien
caggttattattgatatgtgaggctttgttcct

SEQ ID NO: 782975 - DNA, 33 bp, Homo sapien
aactcaccttatcattaaagacatacattgatt

SEQ ID NO: 782976 - DNA, 33 bp, Homo sapien
aactcaccttatcattgaagacatacattgatt

SEQ ID NO: 782977 - DNA, 33 bp, Homo sapien
ataaacagtcagtcaagaatcaatggcaaaaaa

SEQ ID NO: 782978 - DNA, 33 bp, Homo sapien
ataaacagtcagtcaataatcaatggcaaaaaa

SEQ ID NO: 782979 - DNA, 33 bp, Homo sapien
gagctatgacaaggaaaaaggttagagaataaa

SEQ ID NO: 782980 - DNA, 33 bp, Homo sapien
gagctatgacaaggaagaaggttagagaataaa

SEQ ID NO: 782981 - DNA, 33 bp, Homo sapien
ccctaggtcagtcatcaaggtgctggtggtatg

SEQ ID NO: 782982 - DNA, 33 bp, Homo sapien
ccctaggtcagtcatcgaggtgctggtggtatg

SEQ ID NO: 782983 - DNA, 33 bp, Homo sapien
ctgttgtcatgacgcaaacattctactgactat

SEQ ID NO: 782984 - DNA, 33 bp, Homo sapien
ctgttgtcatgacgcagacattctactgactat

SEQ ID NO: 782985 - DNA, 33 bp, Homo sapien
agagataaaggaaatcaagagagaatgtgaatt

SEQ ID NO: 782986 - DNA, 33 bp, Homo sapien
agagataaaggaaatcgagagagaatgtgaatt

SEQ ID NO: 782987 - DNA, 33 bp, Homo sapien
atatttgtcagatcaagctcagtcattggtggt

SEQ ID NO: 782988 - DNA, 33 bp, Homo sapien
atatttgtcagatcaatctcagtcattggtggt

SEQ ID NO: 782989 - DNA, 33 bp, Homo sapien
agagatatacaccatcaaggaaaaaagcaaaaa

SEQ ID NO: 782990 - DNA, 33 bp, Homo sapien
agagatatacaccatctaggaaaaaagcaaaaa

SEQ ID NO: 782991 - DNA, 33 bp, Homo sapien
cacatcacaatttctcaccttaatatttatccc

SEQ ID NO: 782992 - DNA, 33 bp, Homo sapien
cacatcacaatttctcgccttaatatttatccc

SEQ ID NO: 782993 - DNA, 33 bp, Homo sapien
cacttcaattttaacaacctctgagccaaacat

SEQ ID NO: 782994 - DNA, 33 bp, Homo sapien
cacttcaattttaacatcctctgagccaaacat

SEQ ID NO: 782995 - DNA, 33 bp, Homo sapien
aaaagattcgctcataacaaaagtgtaaataac

SEQ ID NO: 782996 - DNA, 33 bp, Homo sapien
aaaagattcgctcatagcaaaagtgtaaataac

SEQ ID NO: 782997 - DNA, 33 bp, Homo sapien
cacttttctccttctgaagcctgctggacagct

SEQ ID NO: 782998 - DNA, 33 bp, Homo sapien
cacttttctccttctgtagcctgctggacagct

SEQ ID NO: 782999 - DNA, 33 bp, Homo sapien; identical to SEQ ID NO: 782997

SEQ ID NO: 783000 - DNA, 33 bp, Homo sapien; identical to SEQ ID NO: 782998

SEQ ID NO: 783001 - DNA, 33 bp, Homo sapien; identical to SEQ ID NO: 782997

SEQ ID NO: 783002 - DNA, 33 bp, Homo sapien; identical to SEQ ID NO: 782998

SEQ ID NO: 783003 - DNA, 33 bp, Homo sapien
cctggaatttttttaacatactctcactaatcc

SEQ ID NO: 783004 - DNA, 33 bp, Homo sapien
cctggaatttttttaagatactctcactaatcc

SEQ ID NO: 783005 - DNA, 33 bp, Homo sapien
ggttaatccatacagagatcaatacagaattta

SEQ ID NO: 783006 - DNA, 33 bp, Homo sapien
ggttaatccatacagatatcaatacagaattta

SEQ ID NO: 783007 - DNA, 33 bp, Homo sapien
aatggtataatggacactggactcagagtcgag

SEQ ID NO: 783008 - DNA, 33 bp, Homo sapien
aatggtataatggacattggactcagagtcgag

SEQ ID NO: 783009 - DNA, 33 bp, Homo sapien
ccaactgcttgagtaccaactggaatgccctct

SEQ ID NO: 783010 - DNA, 33 bp, Homo sapien
ccaactgcttgagtactaactggaatgccctct

SEQ ID NO: 783011 - DNA, 33 bp, Homo sapien
aaaccctcctgtattgcaaatttgtgaaataat

SEQ ID NO: 783012 - DNA, 33 bp, Homo sapien
aaaccctcctgtattggaaatttgtgaaataat

SEQ ID NO: 783013 - DNA, 33 bp, Homo sapien
aatgtagagtcagcctagtatatgagcatcaga

SEQ ID NO: 783014 - DNA, 33 bp, Homo sapien
aatgtagagtcagcctcgtatatgagcatcaga

SEQ ID NO: 783015 - DNA, 33 bp, Homo sapien
tccctagtgtctacgacgatttccaagctctat

SEQ ID NO: 783016 - DNA, 33 bp, Homo sapien
tccctagtgtctacgatgatttccaagctctat

SEQ ID NO: 783017 - DNA, 33 bp, Homo sapien
ctaacatttttaaacaagggcaatcaactatat

SEQ ID NO: 783018 - DNA, 33 bp, Homo sapien
ctaacatttttaaacatgggcaatcaactatat

SEQ ID NO: 783019 - DNA, 33 bp, Homo sapien
atatgaacttcaaaccaaataattatctccatc

SEQ ID NO: 783020 - DNA, 33 bp, Homo sapien
atatgaacttcaaaccgaataattatctccatc

SEQ ID NO: 783021 - DNA, 33 bp, Homo sapien
cagagtaaggtgatgaaaattaataccttgttt

SEQ ID NO: 783022 - DNA, 33 bp, Homo sapien
cagagtaaggtgatgagaattaataccttgttt

SEQ ID NO: 783023 - DNA, 33 bp, Homo sapien
acaaaggaaggacaacacgtggtacattggaga

SEQ ID NO: 783024 - DNA, 33 bp, Homo sapien
acaaaggaaggacaactcgtggtacattggaga

SEQ ID NO: 783025 - DNA, 33 bp, Homo sapien
aggccatcaactgtaaagaggactatgttcatg

SEQ ID NO: 783026 - DNA, 33 bp, Homo sapien
aggccatcaactgtaacgaggactatgttcatg

SEQ ID NO: 783027 - DNA, 33 bp, Homo sapien
accaagtttgggatcaagtattttggctaatgg

SEQ ID NO: 783028 - DNA, 33 bp, Homo sapien
accaagtttgggatcaggtattttggctaatgg

SEQ ID NO: 783029 - DNA, 33 bp, Homo sapien
tgaaaacgggaataacactagtcaagggaaaat

SEQ ID NO: 783030 - DNA, 33 bp, Homo sapien
tgaaaacgggaataacgctagtcaagggaaaat

SEQ ID NO: 783031 - DNA, 33 bp, Homo sapien
cccagagttgaaaaaaaggtccataacatttgg

SEQ ID NO: 783032 - DNA, 33 bp, Homo sapien
cccagagttgaaaaaacggtccataacatttgg

SEQ ID NO: 783033 - DNA, 33 bp, Homo sapien
tccagttttgagtacactgaaggtaactttctt

SEQ ID NO: 783034 - DNA, 33 bp, Homo sapien
tccagttttgagtacattgaaggtaactttctt

SEQ ID NO: 783035 - DNA, 33 bp, Homo sapien
catgtgggatgaagcacggggaagtcaattcta

SEQ ID NO: 783036 - DNA, 33 bp, Homo sapien
catgtgggatgaagcatggggaagtcaattcta

SEQ ID NO: 783037 - DNA, 33 bp, Homo sapien
ggacttagtgttgttcactcagtattaggtttc

SEQ ID NO: 783038 - DNA, 33 bp, Homo sapien
ggacttagtgttgttcgctcagtattaggtttc

SEQ ID NO: 783039 - DNA, 33 bp, Homo sapien
ctgggaggttggactacggcagaaacatttaat

SEQ ID NO: 783040 - DNA, 33 bp, Homo sapien
ctgggaggttggactatggcagaaacatttaat

SEQ ID NO: 783041 - DNA, 33 bp, Homo sapien
aggtatttgttacttacgggaaaatgcaccgca

SEQ ID NO: 783042 - DNA, 33 bp, Homo sapien
aggtatttgttacttatgggaaaatgcaccgca

SEQ ID NO: 783043 - DNA, 33 bp, Homo sapien
tctgaagccatccctaataaatttggcatattt

SEQ ID NO: 783044 - DNA, 33 bp, Homo sapien
tctgaagccatccctagtaaatttggcatattt

SEQ ID NO: 783045 - DNA, 33 bp, Homo sapien
tgagtcatacataccaccaatgaaacattgcag

SEQ ID NO: 783046 - DNA, 33 bp, Homo sapien
tgagtcatacataccatcaatgaaacattgcag

SEQ ID NO: 783047 - DNA, 33 bp, Homo sapien
acaagcattatattcacctacaaaatttataaa

SEQ ID NO: 783048 - DNA, 33 bp, Homo sapien
acaagcattatattcatctacaaaatttataaa

SEQ ID NO: 783049 - DNA, 33 bp, Homo sapien
atttgcagggactaatcagtgtgtcttaattat

SEQ ID NO: 783050 - DNA, 33 bp, Homo sapien
atttgcagggactaattagtgtgtcttaattat

SEQ ID NO: 783051 - DNA, 33 bp, Homo sapien
tcattatgtttgtaaacgtatgtaacctgcagg

SEQ ID NO: 783052 - DNA, 33 bp, Homo sapien
tcattatgtttgtaaatgtatgtaacctgcagg

SEQ ID NO: 783053 - DNA, 33 bp, Homo sapien
gctgcctggactgttacattaggaaggattgtg

SEQ ID NO: 783054 - DNA, 33 bp, Homo sapien
gctgcctggactgttatattaggaaggattgtg

SEQ ID NO: 783055 - DNA, 33 bp, Homo sapien
aagggatagctaatgcgctgttaaaaagctctt

SEQ ID NO: 783056 - DNA, 33 bp, Homo sapien
aagggatagctaatgctctgttaaaaagctctt

SEQ ID NO: 783057 - DNA, 33 bp, Homo sapien
gggccttccatggatccgaaaaggcagataaag

SEQ ID NO: 783058 - DNA, 33 bp, Homo sapien
gggccttccatggatcggaaaaggcagataaag

SEQ ID NO: 783059 - DNA, 33 bp, Homo sapien
tttttggtttgacccacatactgaaccaaccca

SEQ ID NO: 783060 - DNA, 33 bp, Homo sapien
tttttggtttgacccatatactgaaccaaccca

SEQ ID NO: 783061 - DNA, 33 bp, Homo sapien
ttctgggcatatagaaagattaaactcctagtc

SEQ ID NO: 783062 - DNA, 33 bp, Homo sapien
ttctgggcatatagaaggattaaactcctagtc

SEQ ID NO: 783063 - DNA, 33 bp, Homo sapien
aatttctcttgtgttaagccactgaggtttgga

SEQ ID NO: 783064 - DNA, 33 bp, Homo sapien
aatttctcttgtgttaggccactgaggtttgga

SEQ ID NO: 783065 - DNA, 33 bp, Homo sapien
taggcaaagaattcacaacgaagacccaaaagc

SEQ ID NO: 783066 - DNA, 33 bp, Homo sapien
taggcaaagaattcacgacgaagacccaaaagc

SEQ ID NO: 783067 - DNA, 33 bp, Homo sapien
agagggattaggcacaaaatattgaaggtgcag

SEQ ID NO: 783068 - DNA, 33 bp, Homo sapien
agagggattaggcacagaatattgaaggtgcag

SEQ ID NO: 783069 - DNA, 33 bp, Homo sapien
ttatttatctgttccaatgatgggcatctaggt

SEQ ID NO: 783070 - DNA, 33 bp, Homo sapien
ttatttatctgttccagtgatgggcatctaggt

SEQ ID NO: 783071 - DNA, 33 bp, Homo sapien
atataaaaaagctctacggcagtaatttgctag

SEQ ID NO: 783072 - DNA, 33 bp, Homo sapien
atataaaaaagctctatggcagtaatttgctag

SEQ ID NO: 783073 - DNA, 33 bp, Homo sapien
ttccatctaaaaaatacagtggcttttgctttg

SEQ ID NO: 783074 - DNA, 33 bp, Homo sapien
ttccatctaaaaaatatagtggcttttgctttg

SEQ ID NO: 783075 - DNA, 33 bp, Homo sapien
caggattcttgacctcacatagttcatagtctc

SEQ ID NO: 783076 - DNA, 33 bp, Homo sapien
caggattcttgacctcgcatagttcatagtctc

SEQ ID NO: 783077 - DNA, 33 bp, Homo sapien
tactttcttgtattaaacagatcaaataggttc

SEQ ID NO: 783078 - DNA, 33 bp, Homo sapien
tactttcttgtattaagcagatcaaataggttc

SEQ ID NO: 783079 - DNA, 33 bp, Homo sapien
gaaagtcaggtccatggatagcaatgagcattg

SEQ ID NO: 783080 - DNA, 33 bp, Homo sapien
gaaagtcaggtccatgtatagcaatgagcattg

SEQ ID NO: 783081 - DNA, 33 bp, Homo sapien
atgagaaaatcagaaaagcatatattcggtgat

SEQ ID NO: 783082 - DNA, 33 bp, Homo sapien
atgagaaaatcagaaaggcatatattcggtgat

SEQ ID NO: 783083 - DNA, 33 bp, Homo sapien
acatatttttttggagaaagacaattcaatctg

SEQ ID NO: 783084 - DNA, 33 bp, Homo sapien
acatatttttttggaggaagacaattcaatctg

SEQ ID NO: 783085 - DNA, 33 bp, Homo sapien
tctggtgagaggtaaaaaatgaagagtgagttg

SEQ ID NO: 783086 - DNA, 33 bp, Homo sapien
tctggtgagaggtaaagaatgaagagtgagttg

SEQ ID NO: 783087 - DNA, 33 bp, Homo sapien
gggaccggagctgaaaaacagagcatgaccaag

SEQ ID NO: 783088 - DNA, 33 bp, Homo sapien
gggaccggagctgaaagacagagcatgaccaag

SEQ ID NO: 783089 - DNA, 33 bp, Homo sapien
tacaggcctggcccaaaaaccaggcactcacca

SEQ ID NO: 783090 - DNA, 33 bp, Homo sapien
tacaggcctggcccaacaaccaggcactcacca

SEQ ID NO: 783091 - DNA, 33 bp, Homo sapien
tcaaagaacactaccacctcggtgtggcctccc

SEQ ID NO: 783092 - DNA, 33 bp, Homo sapien
tcaaagaacactaccatctcggtgtggcctccc

SEQ ID NO: 783093 - DNA, 33 bp, Homo sapien
tttatcaatcagaataaggtgggttaaactgtg

SEQ ID NO: 783094 - DNA, 33 bp, Homo sapien
tttatcaatcagaatagggtgggttaaactgtg

SEQ ID NO: 783095 - DNA, 33 bp, Homo sapien
gaatttcagaagcacaaatttagtggataaaat

SEQ ID NO: 783096 - DNA, 33 bp, Homo sapien
gaatttcagaagcacagatttagtggataaaat

SEQ ID NO: 783097 - DNA, 33 bp, Homo sapien
gaatgagaccttgaaaagccaagtgcctatagc

SEQ ID NO: 783098 - DNA, 33 bp, Homo sapien
gaatgagaccttgaaaggccaagtgcctatagc

SEQ ID NO: 783099 - DNA, 33 bp, Homo sapien
ggtgtgtaagacaaaagggagaaatggactttg

SEQ ID NO: 783100 - DNA, 33 bp, Homo sapien
ggtgtgtaagacaaaatggagaaatggactttg

SEQ ID NO: 783101 - DNA, 33 bp, Homo sapien
ttttctgggctgatccactttcaatacccctta

SEQ ID NO: 783102 - DNA, 33 bp, Homo sapien
ttttctgggctgatccgctttcaatacccctta

SEQ ID NO: 783103 - DNA, 33 bp, Homo sapien
gttcaggatttgaagcaatttgtgtgtattttc

SEQ ID NO: 783104 - DNA, 33 bp, Homo sapien
gttcaggatttgaagccatttgtgtgtattttc

SEQ ID NO: 783105 - DNA, 33 bp, Homo sapien
atctgagcaattaaaccatcttatgccaagtcc

SEQ ID NO: 783106 - DNA, 33 bp, Homo sapien
atctgagcaattaaactatcttatgccaagtcc

SEQ ID NO: 783107 - DNA, 33 bp, Homo sapien
caattaccaaagctagcagtagtcagcacagga

SEQ ID NO: 783108 - DNA, 33 bp, Homo sapien
caattaccaaagctagtagtagtcagcacagga

SEQ ID NO: 783109 - DNA, 33 bp, Homo sapien
acagtcaggccggaagcatttttagagggcgta

SEQ ID NO: 783110 - DNA, 33 bp, Homo sapien
acagtcaggccggaagtatttttagagggcgta

SEQ ID NO: 783111 - DNA, 33 bp, Homo sapien
gcttgggatctataaaaagtgtatctggtttat

SEQ ID NO: 783112 - DNA, 33 bp, Homo sapien
gcttgggatctataaagagtgtatctggtttat

SEQ ID NO: 783113 - DNA, 33 bp, Homo sapien
ggttagaatatgcctacgtccaaagatgaaaac

SEQ ID NO: 783114 - DNA, 33 bp, Homo sapien
ggttagaatatgcctatgtccaaagatgaaaac

SEQ ID NO: 783115 - DNA, 33 bp, Homo sapien
tggaaacagagaaaacagcatcttcttttcact

SEQ ID NO: 783116 - DNA, 33 bp, Homo sapien
tggaaacagagaaaacggcatcttcttttcact

SEQ ID NO: 783117 - DNA, 33 bp, Homo sapien
gggatgaaagtttagaaacaaaatgctgttgtt

SEQ ID NO: 783118 - DNA, 33 bp, Homo sapien
gggatgaaagtttagacacaaaatgctgttgtt

SEQ ID NO: 783119 - DNA, 33 bp, Homo sapien
tagggtatccatctaaccagtttcctggaagac

SEQ ID NO: 783120 - DNA, 33 bp, Homo sapien
tagggtatccatctaatcagtttcctggaagac

SEQ ID NO: 783121 - DNA, 33 bp, Homo sapien
gggatcccaacttcaacgtttgctcctcagaga

SEQ ID NO: 783122 - DNA, 33 bp, Homo sapien
gggatcccaacttcaatgtttgctcctcagaga

SEQ ID NO: 783123 - DNA, 33 bp, Homo sapien
ggtattcttttcttgcaacaaactttcacacgt

SEQ ID NO: 783124 - DNA, 33 bp, Homo sapien
ggtattcttttcttgcgacaaactttcacacgt

SEQ ID NO: 783125 - DNA, 33 bp, Homo sapien
tgaacatgaaaccgcaagtttgatttgctgtag

SEQ ID NO: 783126 - DNA, 33 bp, Homo sapien
tgaacatgaaaccgcacgtttgatttgctgtag

SEQ ID NO: 783127 - DNA, 33 bp, Homo sapien
tgatttgctgtagttcaccttaaagccacgtgg

SEQ ID NO: 783128 - DNA, 33 bp, Homo sapien
tgatttgctgtagttcgccttaaagccacgtgg

SEQ ID NO: 783129 - DNA, 33 bp, Homo sapien
aaaaccctatggaaggaagacaagatgataagg

SEQ ID NO: 783130 - DNA, 33 bp, Homo sapien
aaaaccctatggaagggagacaagatgataagg

SEQ ID NO: 783131 - DNA, 33 bp, Homo sapien
tatttattaagtgcaaataaaaacgtgctcact

SEQ ID NO: 783132 - DNA, 33 bp, Homo sapien
tatttattaagtgcaagtaaaaacgtgctcact

SEQ ID NO: 783133 - DNA, 33 bp, Homo sapien
attggaagacactgaacgctcaaagaagtagcc

SEQ ID NO: 783134 - DNA, 33 bp, Homo sapien
attggaagacactgaatgctcaaagaagtagcc

SEQ ID NO: 783135 - DNA, 33 bp, Homo sapien
aagtatacactgcagaactgaaaccagatcagg

SEQ ID NO: 783136 - DNA, 33 bp, Homo sapien
aagtatacactgcagacctgaaaccagatcagg

SEQ ID NO: 783137 - DNA, 33 bp, Homo sapien
ctactgaggatgttcaaccagataatgggtttg

SEQ ID NO: 783138 - DNA, 33 bp, Homo sapien
ctactgaggatgttcagccagataatgggtttg

SEQ ID NO: 783139 - DNA, 33 bp, Homo sapien
catcgcagttgcggacaaatgcgaacccccatc

SEQ ID NO: 783140 - DNA, 33 bp, Homo sapien
catcgcagttgcggacgaatgcgaacccccatc

SEQ ID NO: 783141 - DNA, 33 bp, Homo sapien
agaaatctgaaaaccaatgcaaagaaatcagaa

SEQ ID NO: 783142 - DNA, 33 bp, Homo sapien
agaaatctgaaaaccagtgcaaagaaatcagaa

SEQ ID NO: 783143 - DNA, 33 bp, Homo sapien
ttgagcaactgaggcagccataacaataccctc

SEQ ID NO: 783144 - DNA, 33 bp, Homo sapien
ttgagcaactgaggcatccataacaataccctc

SEQ ID NO: 783145 - DNA, 33 bp, Homo sapien
ttaactgcattccaggacaatattcaacagtat

SEQ ID NO: 783146 - DNA, 33 bp, Homo sapien
ttaactgcattccagggcaatattcaacagtat

SEQ ID NO: 783147 - DNA, 33 bp, Homo sapien
caatatccaccccttccagagcaacaagtgtct

SEQ ID NO: 783148 - DNA, 33 bp, Homo sapien
caatatccaccccttctagagcaacaagtgtct

SEQ ID NO: 783149 - DNA, 33 bp, Homo sapien
aaatatttcaaatttcactacctagagatatcc

SEQ ID NO: 783150 - DNA, 33 bp, Homo sapien
aaatatttcaaatttcgctacctagagatatcc

SEQ ID NO: 783151 - DNA, 33 bp, Homo sapien
agccttcacaataactgacactcagttgacaca

SEQ ID NO: 783152 - DNA, 33 bp, Homo sapien
agccttcacaataacttacactcagttgacaca

SEQ ID NO: 783153 - DNA, 33 bp, Homo sapien
gagaggtgtggaattacatcacagtttttttca

SEQ ID NO: 783154 - DNA, 33 bp, Homo sapien
gagaggtgtggaattatatcacagtttttttca

SEQ ID NO: 783155 - DNA, 33 bp, Homo sapien
tgaaagctctgaatgcaacctggagcctgtcaa

SEQ ID NO: 783156 - DNA, 33 bp, Homo sapien
tgaaagctctgaatgcgacctggagcctgtcaa

SEQ ID NO: 783157 - DNA, 33 bp, Homo sapien
aactttcatacttacaatgataccaagttaaga

SEQ ID NO: 783158 - DNA, 33 bp, Homo sapien
aactttcatacttacattgataccaagttaaga

SEQ ID NO: 783159 - DNA, 33 bp, Homo sapien
gaaggaattgacattaaatcttccgctttccat

SEQ ID NO: 783160 - DNA, 33 bp, Homo sapien
gaaggaattgacattagatcttccgctttccat

SEQ ID NO: 783161 - DNA, 33 bp, Homo sapien
aggacggaggtgataaataaatcagagtatcag

SEQ ID NO: 783162 - DNA, 33 bp, Homo sapien
aggacggaggtgataagtaaatcagagtatcag

SEQ ID NO: 783163 - DNA, 33 bp, Homo sapien
atagttggaagtttccagagaagcaaaatttga

SEQ ID NO: 783164 - DNA, 33 bp, Homo sapien
atagttggaagtttccggagaagcaaaatttga

SEQ ID NO: 783165 - DNA, 33 bp, Homo sapien
aaaagagcagggttgaaagaaatcagaaagagg

SEQ ID NO: 783166 - DNA, 33 bp, Homo sapien
aaaagagcagggttgatagaaatcagaaagagg

SEQ ID NO: 783167 - DNA, 33 bp, Homo sapien
ccacggcgtccctctccatagcaacatttttag

SEQ ID NO: 783168 - DNA, 33 bp, Homo sapien
ccacggcgtccctctctatagcaacatttttag

SEQ ID NO: 783169 - DNA, 33 bp, Homo sapien
tgcaatataatttaaaacaccaatctcaaacca

SEQ ID NO: 783170 - DNA, 33 bp, Homo sapien
tgcaatataatttaaagcaccaatctcaaacca

SEQ ID NO: 783171 - DNA, 33 bp, Homo sapien
tgagcctcacaggaaacctgttcaatctcctgg

SEQ ID NO: 783172 - DNA, 33 bp, Homo sapien
tgagcctcacaggaaagctgttcaatctcctgg

SEQ ID NO: 783173 - DNA, 33 bp, Homo sapien
ttgtaagcatcataaactgtctagttgccctct

SEQ ID NO: 783174 - DNA, 33 bp, Homo sapien
ttgtaagcatcataaattgtctagttgccctct

SEQ ID NO: 783175 - DNA, 33 bp, Homo sapien
actatacatttgagcagagagatttttcatgct

SEQ ID NO: 783176 - DNA, 33 bp, Homo sapien
actatacatttgagcatagagatttttcatgct

SEQ ID NO: 783177 - DNA, 33 bp, Homo sapien
tgaattagtaattgcaaaacttaccatgaagaa

SEQ ID NO: 783178 - DNA, 33 bp, Homo sapien
tgaattagtaattgcagaacttaccatgaagaa

SEQ ID NO: 783179 - DNA, 33 bp, Homo sapien
aaaatggactaagacactaatattggacaaaat

SEQ ID NO: 783180 - DNA, 33 bp, Homo sapien
aaaatggactaagacattaatattggacaaaat

SEQ ID NO: 783181 - DNA, 33 bp, Homo sapien
aatagccaattcgatcaaggggaagaaaggata

SEQ ID NO: 783182 - DNA, 33 bp, Homo sapien
aatagccaattcgatcgaggggaagaaaggata

SEQ ID NO: 783183 - DNA, 33 bp, Homo sapien
agggctggctgtgaaaactgtggtaaagacgtt

SEQ ID NO: 783184 - DNA, 33 bp, Homo sapien
agggctggctgtgaaacctgtggtaaagacgtt

SEQ ID NO: 783185 - DNA, 33 bp, Homo sapien
atatccatacattttacagctgcactctatatt

SEQ ID NO: 783186 - DNA, 33 bp, Homo sapien
atatccatacattttatagctgcactctatatt

SEQ ID NO: 783187 - DNA, 33 bp, Homo sapien
acgccctccacactaccgcgtgaatagttactg

SEQ ID NO: 783188 - DNA, 33 bp, Homo sapien
acgccctccacactactgcgtgaatagttactg

SEQ ID NO: 783189 - DNA, 33 bp, Homo sapien
cagggcttagcgccaaatcttttcaagagctta

SEQ ID NO: 783190 - DNA, 33 bp, Homo sapien
cagggcttagcgccaagtcttttcaagagctta

SEQ ID NO: 783191 - DNA, 33 bp, Homo sapien
agacgccatgcatcacactggcaggaaatccat

SEQ ID NO: 783192 - DNA, 33 bp, Homo sapien
agacgccatgcatcacgctggcaggaaatccat

SEQ ID NO: 783193 - DNA, 33 bp, Homo sapien
ttttgggggtcatccaaaacatcagaagcccca

SEQ ID NO: 783194 - DNA, 33 bp, Homo sapien
ttttgggggtcatccagaacatcagaagcccca

SEQ ID NO: 783195 - DNA, 33 bp, Homo sapien
ttttatcaatggtaaacaattgttgatttaact

SEQ ID NO: 783196 - DNA, 33 bp, Homo sapien
ttttatcaatggtaaataattgttgatttaact

SEQ ID NO: 783197 - DNA, 33 bp, Homo sapien
tattgactcagtgtcccgaaaaagctaagcccc

SEQ ID NO: 783198 - DNA, 33 bp, Homo sapien
tattgactcagtgtcctgaaaaagctaagcccc

SEQ ID NO: 783199 - DNA, 33 bp, Homo sapien
caaactggagattggcagataaatattgatgtt

SEQ ID NO: 783200 - DNA, 33 bp, Homo sapien
caaactggagattggcggataaatattgatgtt

SEQ ID NO: 783201 - DNA, 33 bp, Homo sapien
tgtcaggtactaggataagcacttgatgtgaac

SEQ ID NO: 783202 - DNA, 33 bp, Homo sapien
tgtcaggtactaggatgagcacttgatgtgaac

SEQ ID NO: 783203 - DNA, 33 bp, Homo sapien
agggtgtgcattgttacaaggcaaagatatttc

SEQ ID NO: 783204 - DNA, 33 bp, Homo sapien
agggtgtgcattgttataaggcaaagatatttc

SEQ ID NO: 783205 - DNA, 33 bp, Homo sapien
cctttgatcattctaactatgctttgaacgtta

SEQ ID NO: 783206 - DNA, 33 bp, Homo sapien
cctttgatcattctaattatgctttgaacgtta

SEQ ID NO: 783207 - DNA, 33 bp, Homo sapien
acataatacatatgaacacatacgaaactttta

SEQ ID NO: 783208 - DNA, 33 bp, Homo sapien
acataatacatatgaagacatacgaaactttta

SEQ ID NO: 783209 - DNA, 33 bp, Homo sapien
atgggaaggctactgcaagagagagagatttca

SEQ ID NO: 783210 - DNA, 33 bp, Homo sapien
atgggaaggctactgcgagagagagagatttca

SEQ ID NO: 783211 - DNA, 33 bp, Homo sapien
acttacctgttgaattaaagaggattatataaa

SEQ ID NO: 783212 - DNA, 33 bp, Homo sapien
acttacctgttgaattcaagaggattatataaa

SEQ ID NO: 783213 - DNA, 33 bp, Homo sapien
ttaagcactgcagtccaataatgaggacaagta

SEQ ID NO: 783214 - DNA, 33 bp, Homo sapien
ttaagcactgcagtccgataatgaggacaagta

SEQ ID NO: 783215 - DNA, 33 bp, Homo sapien
ggtgtatttaaaaaaaaataatgctgtgttcaa

SEQ ID NO: 783216 - DNA, 33 bp, Homo sapien
ggtgtatttaaaaaaacataatgctgtgttcaa

SEQ ID NO: 783217 - DNA, 33 bp, Homo sapien
agaattagtcatagaaacaaagtgcttagaatc

SEQ ID NO: 783218 - DNA, 33 bp, Homo sapien
agaattagtcatagaagcaaagtgcttagaatc

SEQ ID NO: 783219 - DNA, 33 bp, Homo sapien
tgtgaaacagcctccactgaggttattgacaag

SEQ ID NO: 783220 - DNA, 33 bp, Homo sapien
tgtgaaacagcctccattgaggttattgacaag

SEQ ID NO: 783221 - DNA, 33 bp, Homo sapien
aggtacactatgtcccagcaaagagcaggtgct

SEQ ID NO: 783222 - DNA, 33 bp, Homo sapien
aggtacactatgtcccggcaaagagcaggtgct

SEQ ID NO: 783223 - DNA, 33 bp, Homo sapien
gaaaataacataggaaatacacagaacaacaaa

SEQ ID NO: 783224 - DNA, 33 bp, Homo sapien
gaaaataacataggaagtacacagaacaacaaa

SEQ ID NO: 783225 - DNA, 33 bp, Homo sapien
ggtatacaatttggcaagacacgtaaaaacagt

SEQ ID NO: 783226 - DNA, 33 bp, Homo sapien
ggtatacaatttggcaggacacgtaaaaacagt

SEQ ID NO: 783227 - DNA, 33 bp, Homo sapien
ggaagcgacacttcaaacaaaagctgcaaagaa

SEQ ID NO: 783228 - DNA, 33 bp, Homo sapien
ggaagcgacacttcaatcaaaagctgcaaagaa

SEQ ID NO: 783229 - DNA, 33 bp, Homo sapien
caaagccacatccatacgtatacgcttctacca

SEQ ID NO: 783230 - DNA, 33 bp, Homo sapien
caaagccacatccatatgtatacgcttctacca

SEQ ID NO: 783231 - DNA, 33 bp, Homo sapien
ttaaatagtagaattacagcaccagtcaagcta

SEQ ID NO: 783232 - DNA, 33 bp, Homo sapien
ttaaatagtagaattatagcaccagtcaagcta

SEQ ID NO: 783233 - DNA, 33 bp, Homo sapien
gtagtcacccagctagaaagggatcaagtcaga

SEQ ID NO: 783234 - DNA, 33 bp, Homo sapien
gtagtcacccagctagtaagggatcaagtcaga

SEQ ID NO: 783235 - DNA, 33 bp, Homo sapien
tctgaaagcacactagaaagattcgaattgaat

SEQ ID NO: 783236 - DNA, 33 bp, Homo sapien
tctgaaagcacactaggaagattcgaattgaat

SEQ ID NO: 783237 - DNA, 33 bp, Homo sapien
tcaggtttggacactccacaattataataccag

SEQ ID NO: 783238 - DNA, 33 bp, Homo sapien
tcaggtttggacactctacaattataataccag

SEQ ID NO: 783239 - DNA, 33 bp, Homo sapien
cgcccgcctagcccccagaagattacaggcgtg

SEQ ID NO: 783240 - DNA, 33 bp, Homo sapien
cgcccgcctagcccccggaagattacaggcgtg

SEQ ID NO: 783241 - DNA, 33 bp, Homo sapien
atgaaacatactcatgccaaaggctgtttcaga

SEQ ID NO: 783242 - DNA, 33 bp, Homo sapien
atgaaacatactcatgtcaaaggctgtttcaga

SEQ ID NO: 783243 - DNA, 33 bp, Homo sapien
tgtcattggtgagcacagggaagtaaagacaaa

SEQ ID NO: 783244 - DNA, 33 bp, Homo sapien
tgtcattggtgagcacggggaagtaaagacaaa

SEQ ID NO: 783245 - DNA, 33 bp, Homo sapien
taaacaatgtttgtcaatcaagccttaataaag

SEQ ID NO: 783246 - DNA, 33 bp, Homo sapien
taaacaatgtttgtcagtcaagccttaataaag

SEQ ID NO: 783247 - DNA, 33 bp, Homo sapien
ggattttgattaaagactaccaactttcagtta

SEQ ID NO: 783248 - DNA, 33 bp, Homo sapien
ggattttgattaaagagtaccaactttcagtta

SEQ ID NO: 783249 - DNA, 33 bp, Homo sapien
accagggcttggctagatcacagctctgtggct

SEQ ID NO: 783250 - DNA, 33 bp, Homo sapien
accagggcttggctaggtcacagctctgtggct

SEQ ID NO: 783251 - DNA, 33 bp, Homo sapien
catctctaaagaatgcacctccagctctttctc

SEQ ID NO: 783252 - DNA, 33 bp, Homo sapien
catctctaaagaatgcgcctccagctctttctc

SEQ ID NO: 783253 - DNA, 33 bp, Homo sapien
tgaccttctgtactcacggacttccaatgtata

SEQ ID NO: 783254 - DNA, 33 bp, Homo sapien
tgaccttctgtactcatggacttccaatgtata

SEQ ID NO: 783255 - DNA, 33 bp, Homo sapien
ccccaaatgaacatgaacagaacatagtaacct

SEQ ID NO: 783256 - DNA, 33 bp, Homo sapien
ccccaaatgaacatgagcagaacatagtaacct

SEQ ID NO: 783257 - DNA, 33 bp, Homo sapien
tggctatgatttattacggcaaagaatacaaaa

SEQ ID NO: 783258 - DNA, 33 bp, Homo sapien
tggctatgatttattatggcaaagaatacaaaa

SEQ ID NO: 783259 - DNA, 33 bp, Homo sapien
gtcttctttgattccacagatgtaacattttag

SEQ ID NO: 783260 - DNA, 33 bp, Homo sapien
gtcttctttgattccatagatgtaacattttag

SEQ ID NO: 783261 - DNA, 33 bp, Homo sapien
atatgtaagaactgacacacaatagaagctcat

SEQ ID NO: 783262 - DNA, 33 bp, Homo sapien
atatgtaagaactgactcacaatagaagctcat

SEQ ID NO: 783263 - DNA, 33 bp, Homo sapien
tctgaagggtcagtcccatttcaaaacaaactg

SEQ ID NO: 783264 - DNA, 33 bp, Homo sapien
tctgaagggtcagtcctatttcaaaacaaactg

SEQ ID NO: 783265 - DNA, 33 bp, Homo sapien
atgaacctaaataacaagaagtaccacaaagtg

SEQ ID NO: 783266 - DNA, 33 bp, Homo sapien
atgaacctaaataacaggaagtaccacaaagtg

SEQ ID NO: 783267 - DNA, 33 bp, Homo sapien
agattggattttcaacagttaacatttttcagt

SEQ ID NO: 783268 - DNA, 33 bp, Homo sapien
agattggattttcaacggttaacatttttcagt

SEQ ID NO: 783269 - DNA, 33 bp, Homo sapien
aaacccagctatgccactgatagttgcttccca

SEQ ID NO: 783270 - DNA, 33 bp, Homo sapien
aaacccagctatgccattgatagttgcttccca

SEQ ID NO: 783271 - DNA, 33 bp, Homo sapien
attagaacaggacatacaagggaaattatgaca

SEQ ID NO: 783272 - DNA, 33 bp, Homo sapien
attagaacaggacatagaagggaaattatgaca

SEQ ID NO: 783273 - DNA, 33 bp, Homo sapien
tggagagtagagggaaataaacagcctcctagc

SEQ ID NO: 783274 - DNA, 33 bp, Homo sapien
tggagagtagagggaagtaaacagcctcctagc

SEQ ID NO: 783275 - DNA, 33 bp, Homo sapien
gagcttctgcatcttaataaacaaccctacaaa

SEQ ID NO: 783276 - DNA, 33 bp, Homo sapien
gagcttctgcatcttagtaaacaaccctacaaa

SEQ ID NO: 783277 - DNA, 33 bp, Homo sapien
attgttttactaagcaacgtgtatagtacaaaa

SEQ ID NO: 783278 - DNA, 33 bp, Homo sapien
attgttttactaagcagcgtgtatagtacaaaa

SEQ ID NO: 783279 - DNA, 33 bp, Homo sapien
atgaacagccagttataagagcatgtggataaa

SEQ ID NO: 783280 - DNA, 33 bp, Homo sapien
atgaacagccagttatgagagcatgtggataaa

SEQ ID NO: 783281 - DNA, 33 bp, Homo sapien
ttatggtaccttaacaccctgtgcacatgccaa

SEQ ID NO: 783282 - DNA, 33 bp, Homo sapien
ttatggtaccttaacatcctgtgcacatgccaa

SEQ ID NO: 783283 - DNA, 33 bp, Homo sapien
ggagatggtaccccagaccccattctcaaggtg

SEQ ID NO: 783284 - DNA, 33 bp, Homo sapien
ggagatggtaccccagcccccattctcaaggtg

SEQ ID NO: 783285 - DNA, 33 bp, Homo sapien
ccatcaccctgaaacccgattcctggcattcta

SEQ ID NO: 783286 - DNA, 33 bp, Homo sapien
ccatcaccctgaaacctgattcctggcattcta

SEQ ID NO: 783287 - DNA, 33 bp, Homo sapien
cagttggcgactctccagaaactggccaattaa

SEQ ID NO: 783288 - DNA, 33 bp, Homo sapien
cagttggcgactctccggaaactggccaattaa

SEQ ID NO: 783289 - DNA, 33 bp, Homo sapien
tctgcagtttcctcaaccactttgcaaaactga

SEQ ID NO: 783290 - DNA, 33 bp, Homo sapien
tctgcagtttcctcaatcactttgcaaaactga

SEQ ID NO: 783291 - DNA, 33 bp, Homo sapien
attacctatagtacaaggaaaggcacagttaca

SEQ ID NO: 783292 - DNA, 33 bp, Homo sapien
attacctatagtacaatgaaaggcacagttaca

SEQ ID NO: 783293 - DNA, 33 bp, Homo sapien
gcaaggaggagaagagaactcgactgtcaaact

SEQ ID NO: 783294 - DNA, 33 bp, Homo sapien
gcaaggaggagaagaggactcgactgtcaaact

SEQ ID NO: 783295 - DNA, 33 bp, Homo sapien
agattttcactttaacaggaggttttgtagaga

SEQ ID NO: 783296 - DNA, 33 bp, Homo sapien
agattttcactttaactggaggttttgtagaga

SEQ ID NO: 783297 - DNA, 33 bp, Homo sapien
taactagagagcaaaccggttgagagaagaggt

SEQ ID NO: 783298 - DNA, 33 bp, Homo sapien
taactagagagcaaactggttgagagaagaggt

SEQ ID NO: 783299 - DNA, 33 bp, Homo sapien
cagtaccttgttaaaaccacagcagtcaccgac

SEQ ID NO: 783300 - DNA, 33 bp, Homo sapien
cagtaccttgttaaaagcacagcagtcaccgac

SEQ ID NO: 783301 - DNA, 33 bp, Homo sapien
ccagaacatgagtctccaatgaccttaattttt

SEQ ID NO: 783302 - DNA, 33 bp, Homo sapien
ccagaacatgagtctcgaatgaccttaattttt

SEQ ID NO: 783303 - DNA, 33 bp, Homo sapien
caaagtctatcctccaatactgatagagttagg

SEQ ID NO: 783304 - DNA, 33 bp, Homo sapien
caaagtctatcctccagtactgatagagttagg

SEQ ID NO: 783305 - DNA, 33 bp, Homo sapien
cagccgtaccagatcgcatgggaactagttaca

SEQ ID NO: 783306 - DNA, 33 bp, Homo sapien
cagccgtaccagatcgtatgggaactagttaca

SEQ ID NO: 783307 - DNA, 33 bp, Homo sapien
gatgcatggtctcctgcaggccttaagtttctc

SEQ ID NO: 783308 - DNA, 33 bp, Homo sapien
gatgcatggtctcctgtaggccttaagtttctc

SEQ ID NO: 783309 - DNA, 33 bp, Homo sapien
tattctgttttatagcagatgaattttaaaagg

SEQ ID NO: 783310 - DNA, 33 bp, Homo sapien
tattctgttttatagcggatgaattttaaaagg

SEQ ID NO: 783311 - DNA, 33 bp, Homo sapien
tgaaaatttggactcacgtaaatttagaaataa

SEQ ID NO: 783312 - DNA, 33 bp, Homo sapien
tgaaaatttggactcaggtaaatttagaaataa

SEQ ID NO: 783313 - DNA, 33 bp, Homo sapien
ttacagtagtgcaagaccaagttgattagggca

SEQ ID NO: 783314 - DNA, 33 bp, Homo sapien
ttacagtagtgcaagagcaagttgattagggca

SEQ ID NO: 783315 - DNA, 33 bp, Homo sapien
gcctgtcgcaggcacaactgcctagacacagac

SEQ ID NO: 783316 - DNA, 33 bp, Homo sapien
gcctgtcgcaggcacagctgcctagacacagac

SEQ ID NO: 783317 - DNA, 33 bp, Homo sapien
aaaccgtcaataaaaacaatgaattcataaaat

SEQ ID NO: 783318 - DNA, 33 bp, Homo sapien
aaaccgtcaataaaaagaatgaattcataaaat

SEQ ID NO: 783319 - DNA, 33 bp, Homo sapien
atagaaatgaataaaacggacttaaagcttgcc

SEQ ID NO: 783320 - DNA, 33 bp, Homo sapien
atagaaatgaataaaatggacttaaagcttgcc

SEQ ID NO: 783321 - DNA, 33 bp, Homo sapien
ccccattatttcatcaatgaagacaattagcca

SEQ ID NO: 783322 - DNA, 33 bp, Homo sapien
ccccattatttcatcattgaagacaattagcca

SEQ ID NO: 783323 - DNA, 33 bp, Homo sapien
ctatcacacagggacaataacattataagacta

SEQ ID NO: 783324 - DNA, 33 bp, Homo sapien
ctatcacacagggacagtaacattataagacta

SEQ ID NO: 783325 - DNA, 33 bp, Homo sapien
taattactctgcttccaaagccacaaaactact

SEQ ID NO: 783326 - DNA, 33 bp, Homo sapien
taattactctgcttcctaagccacaaaactact

SEQ ID NO: 783327 - DNA, 33 bp, Homo sapien
gtttatttgctcatcaatgaggaagaaatgtgt

SEQ ID NO: 783328 - DNA, 33 bp, Homo sapien
gtttatttgctcatcagtgaggaagaaatgtgt

SEQ ID NO: 783329 - DNA, 33 bp, Homo sapien
atgcattattttcagacagaaagcaagaaaaat

SEQ ID NO: 783330 - DNA, 33 bp, Homo sapien
atgcattattttcagatagaaagcaagaaaaat

SEQ ID NO: 783331 - DNA, 33 bp, Homo sapien
catatttacctaactcaaagaagagatgtagaa

SEQ ID NO: 783332 - DNA, 33 bp, Homo sapien
catatttacctaactcgaagaagagatgtagaa

SEQ ID NO: 783333 - DNA, 33 bp, Homo sapien
tatgaaagatatacaaaccttgcattgtttttg

SEQ ID NO: 783334 - DNA, 33 bp, Homo sapien
tatgaaagatatacaacccttgcattgtttttg

SEQ ID NO: 783335 - DNA, 33 bp, Homo sapien
ctggttatattgagaaaataacgcacaagatgt

SEQ ID NO: 783336 - DNA, 33 bp, Homo sapien
ctggttatattgagaacataacgcacaagatgt

SEQ ID NO: 783337 - DNA, 33 bp, Homo sapien
ttcctattacaaacacaatctatacaaatacgg

SEQ ID NO: 783338 - DNA, 33 bp, Homo sapien
ttcctattacaaacaccatctatacaaatacgg

SEQ ID NO: 783339 - DNA, 33 bp, Homo sapien
aatgggctttcaattaagtactcccaagtacag

SEQ ID NO: 783340 - DNA, 33 bp, Homo sapien
aatgggctttcaattaggtactcccaagtacag

SEQ ID NO: 783341 - DNA, 33 bp, Homo sapien
ggttaactttgggcataataacatttcggctaa

SEQ ID NO: 783342 - DNA, 33 bp, Homo sapien
ggttaactttgggcatgataacatttcggctaa

SEQ ID NO: 783343 - DNA, 33 bp, Homo sapien
caggttgagtaattctaactgatggaactaatg

SEQ ID NO: 783344 - DNA, 33 bp, Homo sapien
caggttgagtaattctgactgatggaactaatg

SEQ ID NO: 783345 - DNA, 33 bp, Homo sapien
ttgtgtgcatccatgtaacatcgtaactcggtg

SEQ ID NO: 783346 - DNA, 33 bp, Homo sapien
ttgtgtgcatccatgtgacatcgtaactcggtg

SEQ ID NO: 783347 - DNA, 33 bp, Homo sapien
caggcagtattgattaccccagcaacaacactt

SEQ ID NO: 783348 - DNA, 33 bp, Homo sapien
caggcagtattgattatcccagcaacaacactt

SEQ ID NO: 783349 - DNA, 33 bp, Homo sapien
cactttacacaaccccacttatttgagtccaca

SEQ ID NO: 783350 - DNA, 33 bp, Homo sapien
cactttacacaaccccgcttatttgagtccaca

SEQ ID NO: 783351 - DNA, 33 bp, Homo sapien
gatccatagctgctctcaaacatacgctagaaa

SEQ ID NO: 783352 - DNA, 33 bp, Homo sapien
gatccatagctgctctgaaacatacgctagaaa

SEQ ID NO: 783353 - DNA, 33 bp, Homo sapien
atgtctgtgatttggaaagccaaccataagaaa

SEQ ID NO: 783354 - DNA, 33 bp, Homo sapien
atgtctgtgatttggagagccaaccataagaaa

SEQ ID NO: 783355 - DNA, 33 bp, Homo sapien
gcttaagtaagttggcaaatgactggcttcaat

SEQ ID NO: 783356 - DNA, 33 bp, Homo sapien
gcttaagtaagttggcgaatgactggcttcaat

SEQ ID NO: 783357 - DNA, 33 bp, Homo sapien
tggattcaatatccacccctgaacttatcattg

SEQ ID NO: 783358 - DNA, 33 bp, Homo sapien
tggattcaatatccacgcctgaacttatcattg

SEQ ID NO: 783359 - DNA, 33 bp, Homo sapien
tgaaacttctgtgcctgacaaacaagattaaat

SEQ ID NO: 783360 - DNA, 33 bp, Homo sapien
tgaaacttctgtgccttacaaacaagattaaat

SEQ ID NO: 783361 - DNA, 33 bp, Homo sapien
tgcaccaacctagttacacagcaaggactaatt

SEQ ID NO: 783362 - DNA, 33 bp, Homo sapien
tgcaccaacctagttagacagcaaggactaatt

SEQ ID NO: 783363 - DNA, 33 bp, Homo sapien
gaactgggaagggcaaagtttaatgcctgtgag

SEQ ID NO: 783364 - DNA, 33 bp, Homo sapien
gaactgggaagggcaaggtttaatgcctgtgag

SEQ ID NO: 783365 - DNA, 33 bp, Homo sapien
taacatggataattatcaattggttcagttcag

SEQ ID NO: 783366 - DNA, 33 bp, Homo sapien
taacatggataattattaattggttcagttcag

SEQ ID NO: 783367 - DNA, 33 bp, Homo sapien
ctcttctgagaaatggcattagacactggatta

SEQ ID NO: 783368 - DNA, 33 bp, Homo sapien
ctcttctgagaaatggtattagacactggatta

SEQ ID NO: 783369 - DNA, 33 bp, Homo sapien
gatgtggagaggaaaacggtggcctgggaagag

SEQ ID NO: 783370 - DNA, 33 bp, Homo sapien
gatgtggagaggaaaatggtggcctgggaagag

SEQ ID NO: 783371 - DNA, 33 bp, Homo sapien
gggttaattttcctgaaacatcatgccatattt

SEQ ID NO: 783372 - DNA, 33 bp, Homo sapien
gggttaattttcctgagacatcatgccatattt

SEQ ID NO: 783373 - DNA, 33 bp, Homo sapien
tttcttcatgcctgtagctctttgtcattactt

SEQ ID NO: 783374 - DNA, 33 bp, Homo sapien
tttcttcatgcctgtatctctttgtcattactt

SEQ ID NO: 783375 - DNA, 33 bp, Homo sapien
ttgtgcaactgtcaccactatccatgtttccag

SEQ ID NO: 783376 - DNA, 33 bp, Homo sapien
ttgtgcaactgtcaccgctatccatgtttccag

SEQ ID NO: 783377 - DNA, 33 bp, Homo sapien
accttgctctgtactaactggtggctgtagatg

SEQ ID NO: 783378 - DNA, 33 bp, Homo sapien
accttgctctgtactacctggtggctgtagatg

SEQ ID NO: 783379 - DNA, 33 bp, Homo sapien
ataagaatgggatttccaaggttgttctctcaa

SEQ ID NO: 783380 - DNA, 33 bp, Homo sapien
ataagaatgggatttctaaggttgttctctcaa

SEQ ID NO: 783381 - DNA, 33 bp, Homo sapien
gccaagacttgaggggccacgattccaaagaaa

SEQ ID NO: 783382 - DNA, 33 bp, Homo sapien
gccaagacttgaggggtcacgattccaaagaaa

SEQ ID NO: 783383 - DNA, 33 bp, Homo sapien
taactgaagggaattacagaaaacactgctaac

SEQ ID NO: 783384 - DNA, 33 bp, Homo sapien
taactgaagggaattagagaaaacactgctaac

SEQ ID NO: 783385 - DNA, 33 bp, Homo sapien
ggagggcattgggagaaaggttgcaagcagatc

SEQ ID NO: 783386 - DNA, 33 bp, Homo sapien
ggagggcattgggagacaggttgcaagcagatc

SEQ ID NO: 783387 - DNA, 33 bp, Homo sapien
aacacagaggttaaacacatagcacctgtcttc

SEQ ID NO: 783388 - DNA, 33 bp, Homo sapien
aacacagaggttaaacgcatagcacctgtcttc

SEQ ID NO: 783389 - DNA, 33 bp, Homo sapien
aaaagaccatgaaaccacctgattaagggtcac

SEQ ID NO: 783390 - DNA, 33 bp, Homo sapien
aaaagaccatgaaaccgcctgattaagggtcac

SEQ ID NO: 783391 - DNA, 33 bp, Homo sapien
gcctttgggttagtttcaaacaataatgtaaaa

SEQ ID NO: 783392 - DNA, 33 bp, Homo sapien
gcctttgggttagtttgaaacaataatgtaaaa

SEQ ID NO: 783393 - DNA, 33 bp, Homo sapien
tcaaccatgaaatgacaaatacacagttttttg

SEQ ID NO: 783394 - DNA, 33 bp, Homo sapien
tcaaccatgaaatgacgaatacacagttttttg

SEQ ID NO: 783395 - DNA, 33 bp, Homo sapien
ttcattctccaaaaaaattgtatgatggaagag

SEQ ID NO: 783396 - DNA, 33 bp, Homo sapien
ttcattctccaaaaaatttgtatgatggaagag

SEQ ID NO: 783397 - DNA, 33 bp, Homo sapien
attgactgaacaaaaacaatagatgtcttaaac

SEQ ID NO: 783398 - DNA, 33 bp, Homo sapien
attgactgaacaaaaagaatagatgtcttaaac

SEQ ID NO: 783399 - DNA, 33 bp, Homo sapien
tagagtagcaattataacagataagattttcag

SEQ ID NO: 783400 - DNA, 33 bp, Homo sapien
tagagtagcaattatagcagataagattttcag

SEQ ID NO: 783401 - DNA, 33 bp, Homo sapien
aaaattaggtcagttcaccaacacaatgtttcc

SEQ ID NO: 783402 - DNA, 33 bp, Homo sapien
aaaattaggtcagttcgccaacacaatgtttcc

SEQ ID NO: 783403 - DNA, 33 bp, Homo sapien
cctccagtctgaattagaaggtcttcttgattt

SEQ ID NO: 783404 - DNA, 33 bp, Homo sapien
cctccagtctgaattataaggtcttcttgattt

SEQ ID NO: 783405 - DNA, 33 bp, Homo sapien
ttgaacaaggaagtgacgtaatctagcttatgt

SEQ ID NO: 783406 - DNA, 33 bp, Homo sapien
ttgaacaaggaagtgatgtaatctagcttatgt

SEQ ID NO: 783407 - DNA, 33 bp, Homo sapien
agaaggaatgttcaacaaaatgcttatgacaag

SEQ ID NO: 783408 - DNA, 33 bp, Homo sapien
agaaggaatgttcaaccaaatgcttatgacaag

SEQ ID NO: 783409 - DNA, 33 bp, Homo sapien
tatgcttatacaatacaagtagatgcacagata

SEQ ID NO: 783410 - DNA, 33 bp, Homo sapien
tatgcttatacaatacgagtagatgcacagata

SEQ ID NO: 783411 - DNA, 33 bp, Homo sapien
ctaagcaatttaaagaaggggcttaggtgggaa

SEQ ID NO: 783412 - DNA, 33 bp, Homo sapien
ctaagcaatttaaagagggggcttaggtgggaa

SEQ ID NO: 783413 - DNA, 33 bp, Homo sapien
caaacacatatacaaaatgatttctagcaatta

SEQ ID NO: 783414 - DNA, 33 bp, Homo sapien
caaacacatatacaaagtgatttctagcaatta

SEQ ID NO: 783415 - DNA, 33 bp, Homo sapien
ggaccctaagaaatcccgatgtggccaggcaca

SEQ ID NO: 783416 - DNA, 33 bp, Homo sapien
ggaccctaagaaatcctgatgtggccaggcaca

SEQ ID NO: 783417 - DNA, 33 bp, Homo sapien
gctattggagtgttcaaaatagaaatagaccac

SEQ ID NO: 783418 - DNA, 33 bp, Homo sapien
gctattggagtgttcagaatagaaatagaccac

SEQ ID NO: 783419 - DNA, 33 bp, Homo sapien
tacaagcttctccccacgcttaaagttccagga

SEQ ID NO: 783420 - DNA, 33 bp, Homo sapien
tacaagcttctccccatgcttaaagttccagga

SEQ ID NO: 783421 - DNA, 33 bp, Homo sapien
aatccacagcaacccaatatgggaagaatgatc

SEQ ID NO: 783422 - DNA, 33 bp, Homo sapien
aatccacagcaacccagtatgggaagaatgatc

SEQ ID NO: 783423 - DNA, 33 bp, Homo sapien
gacatttgttaaaataaggacaacagactgagg

SEQ ID NO: 783424 - DNA, 33 bp, Homo sapien
gacatttgttaaaatatggacaacagactgagg

SEQ ID NO: 783425 - DNA, 33 bp, Homo sapien
catttgtttgcttgtaagagaaagtttgacaaa

SEQ ID NO: 783426 - DNA, 33 bp, Homo sapien
catttgtttgcttgtacgagaaagtttgacaaa

SEQ ID NO: 783427 - DNA, 33 bp, Homo sapien
gaaatgaaggacataccggaaataaacttcctg

SEQ ID NO: 783428 - DNA, 33 bp, Homo sapien
gaaatgaaggacatactggaaataaacttcctg

SEQ ID NO: 783429 - DNA, 33 bp, Homo sapien
cccactacaagtcatacagaatttggtctgtga

SEQ ID NO: 783430 - DNA, 33 bp, Homo sapien
cccactacaagtcatatagaatttggtctgtga

SEQ ID NO: 783431 - DNA, 33 bp, Homo sapien
cctttacttctcaatgaaaaataatagtcaatt

SEQ ID NO: 783432 - DNA, 33 bp, Homo sapien
cctttacttctcaatggaaaataatagtcaatt

SEQ ID NO: 783433 - DNA, 33 bp, Homo sapien
gaaaataatggctaagaatcttccaaagttgat

SEQ ID NO: 783434 - DNA, 33 bp, Homo sapien
gaaaataatggctaaggatcttccaaagttgat

SEQ ID NO: 783435 - DNA, 33 bp, Homo sapien
cccatataccctggagaaaaaaatgctgcacag

SEQ ID NO: 783436 - DNA, 33 bp, Homo sapien
cccatataccctggaggaaaaaatgctgcacag

SEQ ID NO: 783437 - DNA, 33 bp, Homo sapien
ggggtacgattgaatccacctcttgatagtgct

SEQ ID NO: 783438 - DNA, 33 bp, Homo sapien
ggggtacgattgaatctacctcttgatagtgct

SEQ ID NO: 783439 - DNA, 33 bp, Homo sapien
agaaagccatgatctccatgatcgagccactgc

SEQ ID NO: 783440 - DNA, 33 bp, Homo sapien
agaaagccatgatctctatgatcgagccactgc

SEQ ID NO: 783441 - DNA, 33 bp, Homo sapien
aaatgtacacaggaggccactgaattgtttaga

SEQ ID NO: 783442 - DNA, 33 bp, Homo sapien
aaatgtacacaggaggtcactgaattgtttaga

SEQ ID NO: 783443 - DNA, 33 bp, Homo sapien
catccttgaggtgctcacttcaatatgtcaaat

SEQ ID NO: 783444 - DNA, 33 bp, Homo sapien
catccttgaggtgctcgcttcaatatgtcaaat

SEQ ID NO: 783445 - DNA, 33 bp, Homo sapien
taaaggatgaataagaacccctccttgtcttca

SEQ ID NO: 783446 - DNA, 33 bp, Homo sapien
taaaggatgaataagaccccctccttgtcttca

SEQ ID NO: 783447 - DNA, 33 bp, Homo sapien
ctccgtaattgcattcaacacttttacacaaac

SEQ ID NO: 783448 - DNA, 33 bp, Homo sapien
ctccgtaattgcattcgacacttttacacaaac

SEQ ID NO: 783449 - DNA, 33 bp, Homo sapien
atggctacctggaaggaacaagccaatgtgggg

SEQ ID NO: 783450 - DNA, 33 bp, Homo sapien
atggctacctggaagggacaagccaatgtgggg

SEQ ID NO: 783451 - DNA, 33 bp, Homo sapien
ttctgttaaaataaacggctttctcacaaaact

SEQ ID NO: 783452 - DNA, 33 bp, Homo sapien
ttctgttaaaataaactgctttctcacaaaact

SEQ ID NO: 783453 - DNA, 33 bp, Homo sapien
gtccagaatttactaacgctctccttaagggct

SEQ ID NO: 783454 - DNA, 33 bp, Homo sapien
gtccagaatttactaatgctctccttaagggct

SEQ ID NO: 783455 - DNA, 33 bp, Homo sapien
aaattcaaacaatgtacagcaaaaagtcacgga

SEQ ID NO: 783456 - DNA, 33 bp, Homo sapien
aaattcaaacaatgtagagcaaaaagtcacgga

SEQ ID NO: 783457 - DNA, 33 bp, Homo sapien
gatgagagttgactacaaaggttcagcatgaga

SEQ ID NO: 783458 - DNA, 33 bp, Homo sapien
gatgagagttgactacgaaggttcagcatgaga

SEQ ID NO: 783459 - DNA, 33 bp, Homo sapien
ttaatcaaacatgcaaaaatatttcaagaaaat

SEQ ID NO: 783460 - DNA, 33 bp, Homo sapien
ttaatcaaacatgcaacaatatttcaagaaaat

SEQ ID NO: 783461 - DNA, 33 bp, Homo sapien
tagagtggttattacaataaaagaagcagcaaa

SEQ ID NO: 783462 - DNA, 33 bp, Homo sapien
tagagtggttattacagtaaaagaagcagcaaa

SEQ ID NO: 783463 - DNA, 33 bp, Homo sapien
acgactgcatatgcaaaggtggtcctataaggt

SEQ ID NO: 783464 - DNA, 33 bp, Homo sapien
acgactgcatatgcaacggtggtcctataaggt

SEQ ID NO: 783465 - DNA, 33 bp, Homo sapien
ttttctacatcaaacaatacctaaacaaaacta

SEQ ID NO: 783466 - DNA, 33 bp, Homo sapien
ttttctacatcaaacattacctaaacaaaacta

SEQ ID NO: 783467 - DNA, 33 bp, Homo sapien
aaaagtctccattccaacataagttaagaaaag

SEQ ID NO: 783468 - DNA, 33 bp, Homo sapien
aaaagtctccattccagcataagttaagaaaag

SEQ ID NO: 783469 - DNA, 33 bp, Homo sapien
tcctcttatctctaacaattttgccagtgtttc

SEQ ID NO: 783470 - DNA, 33 bp, Homo sapien
tcctcttatctctaaccattttgccagtgtttc

SEQ ID NO: 783471 - DNA, 33 bp, Homo sapien
ctagcccgccaaaaaagtatgactagggaaagg

SEQ ID NO: 783472 - DNA, 33 bp, Homo sapien
ctagcccgccaaaaaattatgactagggaaagg

SEQ ID NO: 783473 - DNA, 33 bp, Homo sapien
acaccagaaaaatgaacaatgatcagatccagc

SEQ ID NO: 783474 - DNA, 33 bp, Homo sapien
acaccagaaaaatgaataatgatcagatccagc

SEQ ID NO: 783475 - DNA, 33 bp, Homo sapien
gaataacaaaaaataacctcaacagctttatga

SEQ ID NO: 783476 - DNA, 33 bp, Homo sapien
gaataacaaaaaataatctcaacagctttatga

SEQ ID NO: 783477 - DNA, 33 bp, Homo sapien
gtactatgagttaaaactgctggcttcattttc

SEQ ID NO: 783478 - DNA, 33 bp, Homo sapien
gtactatgagttaaaagtgctggcttcattttc

SEQ ID NO: 783479 - DNA, 33 bp, Homo sapien
aattttgaagtttggaagttgtgaagttcaggt

SEQ ID NO: 783480 - DNA, 33 bp, Homo sapien
aattttgaagtttggacgttgtgaagttcaggt

SEQ ID NO: 783481 - DNA, 33 bp, Homo sapien
tctgtggtgcttcttacgcatcatccaatttaa

SEQ ID NO: 783482 - DNA, 33 bp, Homo sapien
tctgtggtgcttcttatgcatcatccaatttaa

SEQ ID NO: 783483 - DNA, 33 bp, Homo sapien
ctattaaactaaggcaacaaacattatgttcta

SEQ ID NO: 783484 - DNA, 33 bp, Homo sapien
ctattaaactaaggcagcaaacattatgttcta

SEQ ID NO: 783485 - DNA, 33 bp, Homo sapien
tttgaagcaacctaaacactacattctgcaact

SEQ ID NO: 783486 - DNA, 33 bp, Homo sapien
tttgaagcaacctaaatactacattctgcaact

SEQ ID NO: 783487 - DNA, 33 bp, Homo sapien
ttatgatactttttaaccacctagcaacattga

SEQ ID NO: 783488 - DNA, 33 bp, Homo sapien
ttatgatactttttaagcacctagcaacattga

SEQ ID NO: 783489 - DNA, 33 bp, Homo sapien
aaaagaaaaatcaacactatgtgcttttgaaac

SEQ ID NO: 783490 - DNA, 33 bp, Homo sapien
aaaagaaaaatcaacattatgtgcttttgaaac

SEQ ID NO: 783491 - DNA, 33 bp, Homo sapien
atgacagttatctataagagaattgtaggaaat

SEQ ID NO: 783492 - DNA, 33 bp, Homo sapien
atgacagttatctatatgagaattgtaggaaat

SEQ ID NO: 783493 - DNA, 33 bp, Homo sapien
tttgagattttatggacgaaaaacctggcatga

SEQ ID NO: 783494 - DNA, 33 bp, Homo sapien
tttgagattttatggatgaaaaacctggcatga

SEQ ID NO: 783495 - DNA, 33 bp, Homo sapien
ttactaacacaatagacgtcgatcttaatagct

SEQ ID NO: 783496 - DNA, 33 bp, Homo sapien
ttactaacacaatagaggtcgatcttaatagct

SEQ ID NO: 783497 - DNA, 33 bp, Homo sapien
tttttaatcatgcttacgccactgtagtttctg

SEQ ID NO: 783498 - DNA, 33 bp, Homo sapien
tttttaatcatgcttatgccactgtagtttctg

SEQ ID NO: 783499 - DNA, 33 bp, Homo sapien
caatgagctagccaaccgacaaaaactaatttt

SEQ ID NO: 783500 - DNA, 33 bp, Homo sapien
caatgagctagccaactgacaaaaactaatttt

SEQ ID NO: 783501 - DNA, 33 bp, Homo sapien
agcaaatattgcaaaacggcaaatgttactgcc

SEQ ID NO: 783502 - DNA, 33 bp, Homo sapien
agcaaatattgcaaaatggcaaatgttactgcc

SEQ ID NO: 783503 - DNA, 33 bp, Homo sapien
acaaactagtacttgccgaatggtatgagcttt

SEQ ID NO: 783504 - DNA, 33 bp, Homo sapien
acaaactagtacttgctgaatggtatgagcttt

SEQ ID NO: 783505 - DNA, 33 bp, Homo sapien
aattcatttcatcagaatatctggcaatgtcat

SEQ ID NO: 783506 - DNA, 33 bp, Homo sapien
aattcatttcatcagagtatctggcaatgtcat

SEQ ID NO: 783507 - DNA, 33 bp, Homo sapien
ataaagtcagtaaaaacatcagtaatttccaaa

SEQ ID NO: 783508 - DNA, 33 bp, Homo sapien
ataaagtcagtaaaaagatcagtaatttccaaa

SEQ ID NO: 783509 - DNA, 33 bp, Homo sapien
ttgtaattctctctgacgacaaattatggtgag

SEQ ID NO: 783510 - DNA, 33 bp, Homo sapien
ttgtaattctctctgatgacaaattatggtgag

SEQ ID NO: 783511 - DNA, 33 bp, Homo sapien
ctctctgagtctcagaaaatacataaaatggga

SEQ ID NO: 783512 - DNA, 33 bp, Homo sapien
ctctctgagtctcagataatacataaaatggga

SEQ ID NO: 783513 - DNA, 33 bp, Homo sapien
tctagtttcaaagaaagtgttggagatatgcat

SEQ ID NO: 783514 - DNA, 33 bp, Homo sapien
tctagtttcaaagaaattgttggagatatgcat

SEQ ID NO: 783515 - DNA, 33 bp, Homo sapien
tcaagccttggattaacgttgtttgggaatgtt

SEQ ID NO: 783516 - DNA, 33 bp, Homo sapien
tcaagccttggattaatgttgtttgggaatgtt

SEQ ID NO: 783517 - DNA, 33 bp, Homo sapien
tgcaataaaaaacgtaagcactctttcttgaat

SEQ ID NO: 783518 - DNA, 33 bp, Homo sapien
tgcaataaaaaacgtatgcactctttcttgaat

SEQ ID NO: 783519 - DNA, 33 bp, Homo sapien
tgtgaagaagctttcaagaatctgatgagggat

SEQ ID NO: 783520 - DNA, 33 bp, Homo sapien
tgtgaagaagctttcacgaatctgatgagggat

SEQ ID NO: 783521 - DNA, 33 bp, Homo sapien
agaatctttatgcttacctcttagcttgaggaa

SEQ ID NO: 783522 - DNA, 33 bp, Homo sapien
agaatctttatgcttatctcttagcttgaggaa

SEQ ID NO: 783523 - DNA, 33 bp, Homo sapien
gttgtcttctttcaacacttaaaagatgtattt

SEQ ID NO: 783524 - DNA, 33 bp, Homo sapien
gttgtcttctttcaacccttaaaagatgtattt

SEQ ID NO: 783525 - DNA, 33 bp, Homo sapien
tttccattccacttcacgaccattcttttgtcc

SEQ ID NO: 783526 - DNA, 33 bp, Homo sapien
tttccattccacttcaggaccattcttttgtcc

SEQ ID NO: 783527 - DNA, 33 bp, Homo sapien
gtgcatatatatttcaccataatttctcctact

SEQ ID NO: 783528 - DNA, 33 bp, Homo sapien
gtgcatatatatttcatcataatttctcctact

SEQ ID NO: 783529 - DNA, 33 bp, Homo sapien
ctagaccacatagtacagattacccagcataat

SEQ ID NO: 783530 - DNA, 33 bp, Homo sapien
ctagaccacatagtactgattacccagcataat

SEQ ID NO: 783531 - DNA, 33 bp, Homo sapien
gcgctgcaaccgcaaccgtcaccagcaagtatt

SEQ ID NO: 783532 - DNA, 33 bp, Homo sapien
gcgctgcaaccgcaactgtcaccagcaagtatt

SEQ ID NO: 783533 - DNA, 33 bp, Homo sapien
tttaggaaagagaaaaatagactcattcaactt

SEQ ID NO: 783534 - DNA, 33 bp, Homo sapien
tttaggaaagagaaaagtagactcattcaactt

SEQ ID NO: 783535 - DNA, 33 bp, Homo sapien
ttaccttattcatcacagcaaacttgtctatgt

SEQ ID NO: 783536 - DNA, 33 bp, Homo sapien
ttaccttattcatcacggcaaacttgtctatgt

SEQ ID NO: 783537 - DNA, 33 bp, Homo sapien
attaaccatctgaacaccctcgtgagtggctct

SEQ ID NO: 783538 - DNA, 33 bp, Homo sapien
attaaccatctgaacagcctcgtgagtggctct

SEQ ID NO: 783539 - DNA, 33 bp, Homo sapien
cagggtagtcctattacagagcagtgctgaaga

SEQ ID NO: 783540 - DNA, 33 bp, Homo sapien
cagggtagtcctattatagagcagtgctgaaga

SEQ ID NO: 783541 - DNA, 33 bp, Homo sapien
ccagtaccagtggataaagttaggtaatagttc

SEQ ID NO: 783542 - DNA, 33 bp, Homo sapien
ccagtaccagtggatagagttaggtaatagttc

SEQ ID NO: 783543 - DNA, 33 bp, Homo sapien
gccaatagcacccatcaaattgaaaaaatcaag

SEQ ID NO: 783544 - DNA, 33 bp, Homo sapien
gccaatagcacccatcgaattgaaaaaatcaag

SEQ ID NO: 783545 - DNA, 33 bp, Homo sapien
aaaaagcttacaatgaacagaacatctcccaaa

SEQ ID NO: 783546 - DNA, 33 bp, Homo sapien
aaaaagcttacaatgagcagaacatctcccaaa

SEQ ID NO: 783547 - DNA, 33 bp, Homo sapien
aaatgtaaacagtccaaattaagatatgctgta

SEQ ID NO: 783548 - DNA, 33 bp, Homo sapien
aaatgtaaacagtccagattaagatatgctgta

SEQ ID NO: 783549 - DNA, 33 bp, Homo sapien
gaaatctctccccaccccagtattcaaaattct

SEQ ID NO: 783550 - DNA, 33 bp, Homo sapien
gaaatctctccccacctcagtattcaaaattct

SEQ ID NO: 783551 - DNA, 33 bp, Homo sapien
ttcaagaaagaaggcgaaagtgaatggcatagt

SEQ ID NO: 783552 - DNA, 33 bp, Homo sapien
ttcaagaaagaaggcggaagtgaatggcatagt

SEQ ID NO: 783553 - DNA, 33 bp, Homo sapien
atcttaaacactgaggaaacccatctggctaat

SEQ ID NO: 783554 - DNA, 33 bp, Homo sapien
atcttaaacactgaggcaacccatctggctaat

SEQ ID NO: 783555 - DNA, 33 bp, Homo sapien
tacctactccaactcactccaaatgcttacaac

SEQ ID NO: 783556 - DNA, 33 bp, Homo sapien
tacctactccaactcattccaaatgcttacaac

SEQ ID NO: 783557 - DNA, 33 bp, Homo sapien
attttattccagtttcaatcatatcaaccacct

SEQ ID NO: 783558 - DNA, 33 bp, Homo sapien
attttattccagtttcgatcatatcaaccacct

SEQ ID NO: 783559 - DNA, 33 bp, Homo sapien
tgcatgtagaaagagaatattacattgtggcat

SEQ ID NO: 783560 - DNA, 33 bp, Homo sapien
tgcatgtagaaagagagtattacattgtggcat

SEQ ID NO: 783561 - DNA, 33 bp, Homo sapien
ataccttctgaaatgacacggaaaacataatgc

SEQ ID NO: 783562 - DNA, 33 bp, Homo sapien
ataccttctgaaatgagacggaaaacataatgc

SEQ ID NO: 783563 - DNA, 33 bp, Homo sapien
tttttgacaacctaccaaattaacttacactga

SEQ ID NO: 783564 - DNA, 33 bp, Homo sapien
tttttgacaacctaccgaattaacttacactga

SEQ ID NO: 783565 - DNA, 33 bp, Homo sapien
gtgtttacctgataaaccaccaccgagcccagt

SEQ ID NO: 783566 - DNA, 33 bp, Homo sapien
gtgtttacctgataaatcaccaccgagcccagt

SEQ ID NO: 783567 - DNA, 33 bp, Homo sapien
acttagtgattaattgaagcataccaggtcacc

SEQ ID NO: 783568 - DNA, 33 bp, Homo sapien
acttagtgattaattggagcataccaggtcacc

SEQ ID NO: 783569 - DNA, 33 bp, Homo sapien
gtatatttatatgggaaactttgactgtcaact

SEQ ID NO: 783570 - DNA, 33 bp, Homo sapien
gtatatttatatgggacactttgactgtcaact

SEQ ID NO: 783571 - DNA, 33 bp, Homo sapien
ctttaaactgaactcaaattgaatcctaatagg

SEQ ID NO: 783572 - DNA, 33 bp, Homo sapien
ctttaaactgaactcagattgaatcctaatagg

SEQ ID NO: 783573 - DNA, 33 bp, Homo sapien
ttaattagtgactgaagagtgttgaataaatat

SEQ ID NO: 783574 - DNA, 33 bp, Homo sapien
ttaattagtgactgaatagtgttgaataaatat

SEQ ID NO: 783575 - DNA, 33 bp, Homo sapien
tctgtacctagtattacattttcaaactgagcg

SEQ ID NO: 783576 - DNA, 33 bp, Homo sapien
tctgtacctagtattatattttcaaactgagcg

SEQ ID NO: 783577 - DNA, 33 bp, Homo sapien
aatattgcatgagtcaaacactaaaaaagttat

SEQ ID NO: 783578 - DNA, 33 bp, Homo sapien
aatattgcatgagtcatacactaaaaaagttat

SEQ ID NO: 783579 - DNA, 33 bp, Homo sapien
attacaagcttaaaaactgatcctagaagcaac

SEQ ID NO: 783580 - DNA, 33 bp, Homo sapien
attacaagcttaaaaattgatcctagaagcaac

SEQ ID NO: 783581 - DNA, 33 bp, Homo sapien
aattaagtaggtgtcaaggatcgtaaatatttc

SEQ ID NO: 783582 - DNA, 33 bp, Homo sapien
aattaagtaggtgtcacggatcgtaaatatttc

SEQ ID NO: 783583 - DNA, 33 bp, Homo sapien
acaataacgaaaaataagtgtttataggtgatc

SEQ ID NO: 783584 - DNA, 33 bp, Homo sapien
acaataacgaaaaataggtgtttataggtgatc

SEQ ID NO: 783585 - DNA, 33 bp, Homo sapien
aaatagatgaatgtcaagccaacttagtattag

SEQ ID NO: 783586 - DNA, 33 bp, Homo sapien
aaatagatgaatgtcatgccaacttagtattag

SEQ ID NO: 783587 - DNA, 33 bp, Homo sapien
ttctttaagactttagaccaaaaatagtgttgc

SEQ ID NO: 783588 - DNA, 33 bp, Homo sapien
ttctttaagactttaggccaaaaatagtgttgc

SEQ ID NO: 783589 - DNA, 33 bp, Homo sapien
aatgtaccactctggtgaagtttcatcaactat

SEQ ID NO: 783590 - DNA, 33 bp, Homo sapien
aatgtaccactctggttaagtttcatcaactat

SEQ ID NO: 783591 - DNA, 33 bp, Homo sapien
ctactgaaaatccaaaaatagttttatacgaag

SEQ ID NO: 783592 - DNA, 33 bp, Homo sapien
ctactgaaaatccaaagatagttttatacgaag

SEQ ID NO: 783593 - DNA, 33 bp, Homo sapien
caaactgtttcatggaaggcgaataggtatttc

SEQ ID NO: 783594 - DNA, 33 bp, Homo sapien
caaactgtttcatggagggcgaataggtatttc

SEQ ID NO: 783595 - DNA, 33 bp, Homo sapien
aacctaggttatccaaatctagaaataacacat

SEQ ID NO: 783596 - DNA, 33 bp, Homo sapien
aacctaggttatccaagtctagaaataacacat

SEQ ID NO: 783597 - DNA, 33 bp, Homo sapien
gaagcagaagcaagaaaccttaaggagaaaact

SEQ ID NO: 783598 - DNA, 33 bp, Homo sapien
gaagcagaagcaagaagccttaaggagaaaact

SEQ ID NO: 783599 - DNA, 33 bp, Homo sapien
agtgtaggtagttaagagaaagtcaggcacact

SEQ ID NO: 783600 - DNA, 33 bp, Homo sapien
agtgtaggtagttaagggaaagtcaggcacact

SEQ ID NO: 783601 - DNA, 33 bp, Homo sapien
atgagaaaatgctccacatcactaattatcaga

SEQ ID NO: 783602 - DNA, 33 bp, Homo sapien
atgagaaaatgctccagatcactaattatcaga

SEQ ID NO: 783603 - DNA, 33 bp, Homo sapien
gcattattttgcaaaaatcttcaagcaacgtaa

SEQ ID NO: 783604 - DNA, 33 bp, Homo sapien
gcattattttgcaaaagtcttcaagcaacgtaa

SEQ ID NO: 783605 - DNA, 33 bp, Homo sapien
aacctgtgcatcggaagatttttccttaaaatt

SEQ ID NO: 783606 - DNA, 33 bp, Homo sapien
aacctgtgcatcggaatatttttccttaaaatt

SEQ ID NO: 783607 - DNA, 33 bp, Homo sapien
aggtgcaccagaatcaccactggagaggtcttc

SEQ ID NO: 783608 - DNA, 33 bp, Homo sapien
aggtgcaccagaatcatcactggagaggtcttc

SEQ ID NO: 783609 - DNA, 33 bp, Homo sapien
aaatgtttaggtgttactaaatggctcctttaa

SEQ ID NO: 783610 - DNA, 33 bp, Homo sapien
aaatgtttaggtgttattaaatggctcctttaa

SEQ ID NO: 783611 - DNA, 33 bp, Homo sapien
agccccatgaaattcaccccatctctgctgaaa

SEQ ID NO: 783612 - DNA, 33 bp, Homo sapien
agccccatgaaattcatcccatctctgctgaaa

SEQ ID NO: 783613 - DNA, 33 bp, Homo sapien
attgccatagctggaaacagaagtcccaagttc

SEQ ID NO: 783614 - DNA, 33 bp, Homo sapien
attgccatagctggaagcagaagtcccaagttc

SEQ ID NO: 783615 - DNA, 33 bp, Homo sapien
gatccagttgaaaatacatggcactttcctctt

SEQ ID NO: 783616 - DNA, 33 bp, Homo sapien
gatccagttgaaaatatatggcactttcctctt

SEQ ID NO: 783617 - DNA, 33 bp, Homo sapien
tgggagaaactgatccaaccctcatgtatgact

SEQ ID NO: 783618 - DNA, 33 bp, Homo sapien
tgggagaaactgatccgaccctcatgtatgact

SEQ ID NO: 783619 - DNA, 33 bp, Homo sapien
tggttgcttctataataaaaagggcagtgtttt

SEQ ID NO: 783620 - DNA, 33 bp, Homo sapien
tggttgcttctataatgaaaagggcagtgtttt

SEQ ID NO: 783621 - DNA, 33 bp, Homo sapien
agaaacatctgtaagaaacatctgtaaaccaag

SEQ ID NO: 783622 - DNA, 33 bp, Homo sapien
agaaacatctgtaagacacatctgtaaaccaag

SEQ ID NO: 783623 - DNA, 33 bp, Homo sapien
tgtctccatagtccaaaaaggctcataatgaga

SEQ ID NO: 783624 - DNA, 33 bp, Homo sapien
tgtctccatagtccaacaaggctcataatgaga

SEQ ID NO: 783625 - DNA, 33 bp, Homo sapien
tggcaaattctgctaaacttagactgattctag

SEQ ID NO: 783626 - DNA, 33 bp, Homo sapien
tggcaaattctgctaaccttagactgattctag

SEQ ID NO: 783627 - DNA, 33 bp, Homo sapien
tatttactgctgaataactacacatatacgtac

SEQ ID NO: 783628 - DNA, 33 bp, Homo sapien
tatttactgctgaatatctacacatatacgtac

SEQ ID NO: 783629 - DNA, 33 bp, Homo sapien
ccaccttggcttcagacctatggagctttgagc

SEQ ID NO: 783630 - DNA, 33 bp, Homo sapien
ccaccttggcttcagatctatggagctttgagc

SEQ ID NO: 783631 - DNA, 33 bp, Homo sapien
agtcattctgacaataaagggagcagataaaaa

SEQ ID NO: 783632 - DNA, 33 bp, Homo sapien
agtcattctgacaatagagggagcagataaaaa

SEQ ID NO: 783633 - DNA, 33 bp, Homo sapien
gttctcacaagcttcgcagatataatctctccc

SEQ ID NO: 783634 - DNA, 33 bp, Homo sapien
gttctcacaagcttcgtagatataatctctccc

SEQ ID NO: 783635 - DNA, 33 bp, Homo sapien
aaacaaggcacctgtagatttggttcaattgat

SEQ ID NO: 783636 - DNA, 33 bp, Homo sapien
aaacaaggcacctgtatatttggttcaattgat

SEQ ID NO: 783637 - DNA, 33 bp, Homo sapien
cctagaaccttgaacaatgcttagagagctaat

SEQ ID NO: 783638 - DNA, 33 bp, Homo sapien
cctagaaccttgaacagtgcttagagagctaat

SEQ ID NO: 783639 - DNA, 33 bp, Homo sapien
cagttatgaaatggtacctatctcctagaaaac

SEQ ID NO: 783640 - DNA, 33 bp, Homo sapien
cagttatgaaatggtatctatctcctagaaaac

SEQ ID NO: 783641 - DNA, 33 bp, Homo sapien
aaataaattttggcaacaatacagagaaaccag

SEQ ID NO: 783642 - DNA, 33 bp, Homo sapien
aaataaattttggcaagaatacagagaaaccag

SEQ ID NO: 783643 - DNA, 33 bp, Homo sapien
tgactcaacttacaagaacataccccaatcaga

SEQ ID NO: 783644 - DNA, 33 bp, Homo sapien
tgactcaacttacaaggacataccccaatcaga

SEQ ID NO: 783645 - DNA, 33 bp, Homo sapien
taaatactaaatcttcaactgaaaaatctagga

SEQ ID NO: 783646 - DNA, 33 bp, Homo sapien
taaatactaaatcttcgactgaaaaatctagga

SEQ ID NO: 783647 - DNA, 33 bp, Homo sapien
ttcatgagaaaactcaatgaagagaaatgtgac

SEQ ID NO: 783648 - DNA, 33 bp, Homo sapien
ttcatgagaaaactcagtgaagagaaatgtgac

SEQ ID NO: 783649 - DNA, 33 bp, Homo sapien
aattgtgctgtataaacgtatgtgtgtatgcaa

SEQ ID NO: 783650 - DNA, 33 bp, Homo sapien
aattgtgctgtataaatgtatgtgtgtatgcaa

SEQ ID NO: 783651 - DNA, 33 bp, Homo sapien
gatgtggtgctaacataagagctccttaacata

SEQ ID NO: 783652 - DNA, 33 bp, Homo sapien
gatgtggtgctaacatgagagctccttaacata

SEQ ID NO: 783653 - DNA, 33 bp, Homo sapien
gggattcttggcatcaagttttaatttgctatc

SEQ ID NO: 783654 - DNA, 33 bp, Homo sapien
gggattcttggcatcaggttttaatttgctatc

SEQ ID NO: 783655 - DNA, 33 bp, Homo sapien
tacatctaacaacttgaatgtatcttgaatgca

SEQ ID NO: 783656 - DNA, 33 bp, Homo sapien
tacatctaacaacttggatgtatcttgaatgca

SEQ ID NO: 783657 - DNA, 33 bp, Homo sapien
atttgcctaactattcgcaggtatctatgaata

SEQ ID NO: 783658 - DNA, 33 bp, Homo sapien
atttgcctaactattctcaggtatctatgaata

SEQ ID NO: 783659 - DNA, 33 bp, Homo sapien
tcaaaggaatctggtaataaccaacattcagat

SEQ ID NO: 783660 - DNA, 33 bp, Homo sapien
tcaaaggaatctggtagtaaccaacattcagat

SEQ ID NO: 783661 - DNA, 33 bp, Homo sapien
ctcattcggcaagacaagttaaagaaataagag

SEQ ID NO: 783662 - DNA, 33 bp, Homo sapien
ctcattcggcaagacacgttaaagaaataagag

SEQ ID NO: 783663 - DNA, 33 bp, Homo sapien
actctgtcaagtgtccaggaaaaaataatactg

SEQ ID NO: 783664 - DNA, 33 bp, Homo sapien
actctgtcaagtgtccgggaaaaaataatactg

SEQ ID NO: 783665 - DNA, 33 bp, Homo sapien
gtctgtaccattgtataaaaaggaaaatgtttg

SEQ ID NO: 783666 - DNA, 33 bp, Homo sapien
gtctgtaccattgtattaaaaggaaaatgtttg

SEQ ID NO: 783667 - DNA, 33 bp, Homo sapien
cctgctatatacataacgagctggaaaatatag

SEQ ID NO: 783668 - DNA, 33 bp, Homo sapien
cctgctatatacataatgagctggaaaatatag

SEQ ID NO: 783669 - DNA, 33 bp, Homo sapien
tttacaaaagtttgaagaaataagttgataagt

SEQ ID NO: 783670 - DNA, 33 bp, Homo sapien
tttacaaaagtttgaataaataagttgataagt

SEQ ID NO: 783671 - DNA, 33 bp, Homo sapien
tgtagctgagagtggacgccgcctcaatttccc

SEQ ID NO: 783672 - DNA, 33 bp, Homo sapien
tgtagctgagagtggatgccgcctcaatttccc

SEQ ID NO: 783673 - DNA, 33 bp, Homo sapien
tgttgcataaaacacaataagatgaagtattag

SEQ ID NO: 783674 - DNA, 33 bp, Homo sapien
tgttgcataaaacacagtaagatgaagtattag

SEQ ID NO: 783675 - DNA, 33 bp, Homo sapien
ctgctttctgaaactacgttacattagttgggg

SEQ ID NO: 783676 - DNA, 33 bp, Homo sapien
ctgctttctgaaactatgttacattagttgggg

SEQ ID NO: 783677 - DNA, 33 bp, Homo sapien
aaaggtttatgctacagggctggaaacaaggat

SEQ ID NO: 783678 - DNA, 33 bp, Homo sapien
aaaggtttatgctacatggctggaaacaaggat

SEQ ID NO: 783679 - DNA, 33 bp, Homo sapien
tatatgcacttatacaaaaactttccttcttca

SEQ ID NO: 783680 - DNA, 33 bp, Homo sapien
tatatgcacttatacataaactttccttcttca

SEQ ID NO: 783681 - DNA, 33 bp, Homo sapien
ttgaaagcaacaagggaaatatgtcccttcact

SEQ ID NO: 783682 - DNA, 33 bp, Homo sapien
ttgaaagcaacaagggtaatatgtcccttcact

SEQ ID NO: 783683 - DNA, 33 bp, Homo sapien
atacctgtctctattacctaaaaactatccatc

SEQ ID NO: 783684 - DNA, 33 bp, Homo sapien
atacctgtctctattatctaaaaactatccatc

SEQ ID NO: 783685 - DNA, 33 bp, Homo sapien
caaacaatattctgtgcagcaaataatcatttt

SEQ ID NO: 783686 - DNA, 33 bp, Homo sapien
caaacaatattctgtggagcaaataatcatttt

SEQ ID NO: 783687 - DNA, 33 bp, Homo sapien
ccttgacacctaaaaacgttctaactactcaga

SEQ ID NO: 783688 - DNA, 33 bp, Homo sapien
ccttgacacctaaaaatgttctaactactcaga

SEQ ID NO: 783689 - DNA, 33 bp, Homo sapien
tattattatgtatcaccatgttgtgacaagttt

SEQ ID NO: 783690 - DNA, 33 bp, Homo sapien
tattattatgtatcactatgttgtgacaagttt

SEQ ID NO: 783691 - DNA, 33 bp, Homo sapien
ttatttttgatataaacttacagccacaatgat

SEQ ID NO: 783692 - DNA, 33 bp, Homo sapien
ttatttttgatataaatttacagccacaatgat

SEQ ID NO: 783693 - DNA, 33 bp, Homo sapien
ggaaaggaatcagctacagtcacacacaaagta

SEQ ID NO: 783694 - DNA, 33 bp, Homo sapien
ggaaaggaatcagctagagtcacacacaaagta

SEQ ID NO: 783695 - DNA, 33 bp, Homo sapien
agggttggttctgctacggactgaaaaattgta

SEQ ID NO: 783696 - DNA, 33 bp, Homo sapien
agggttggttctgctatggactgaaaaattgta

SEQ ID NO: 783697 - DNA, 33 bp, Homo sapien
gattgtttcacttccacgcttaaaatcctctag

SEQ ID NO: 783698 - DNA, 33 bp, Homo sapien
gattgtttcacttccatgcttaaaatcctctag

SEQ ID NO: 783699 - DNA, 33 bp, Homo sapien
aaaatgtctgcctatgaaacaactcacatcaca

SEQ ID NO: 783700 - DNA, 33 bp, Homo sapien
aaaatgtctgcctatggaacaactcacatcaca

SEQ ID NO: 783701 - DNA, 33 bp, Homo sapien
tttaatctgaagcccaatactcggccttgcatg

SEQ ID NO: 783702 - DNA, 33 bp, Homo sapien
tttaatctgaagcccagtactcggccttgcatg

SEQ ID NO: 783703 - DNA, 33 bp, Homo sapien
acacaaatcggcactacgtatctagttcaaggt

SEQ ID NO: 783704 - DNA, 33 bp, Homo sapien
acacaaatcggcactatgtatctagttcaaggt

SEQ ID NO: 783705 - DNA, 33 bp, Homo sapien
gaagaccagtccgtcacgttcagttctacctga

SEQ ID NO: 783706 - DNA, 33 bp, Homo sapien
gaagaccagtccgtcatgttcagttctacctga

SEQ ID NO: 783707 - DNA, 33 bp, Homo sapien
gtgcacataattaggcagaaagaagagcacttc

SEQ ID NO: 783708 - DNA, 33 bp, Homo sapien
gtgcacataattaggcggaaagaagagcacttc

SEQ ID NO: 783709 - DNA, 33 bp, Homo sapien
gaatgcttgccttaaaggtgagaggcggttttg

SEQ ID NO: 783710 - DNA, 33 bp, Homo sapien
gaatgcttgccttaaatgtgagaggcggttttg

SEQ ID NO: 783711 - DNA, 33 bp, Homo sapien
ttacaggcagtatctacgttttactctcctcat

SEQ ID NO: 783712 - DNA, 33 bp, Homo sapien
ttacaggcagtatctatgttttactctcctcat

SEQ ID NO: 783713 - DNA, 33 bp, Homo sapien
gctctctttggaattgaacagaataagaagaga

SEQ ID NO: 783714 - DNA, 33 bp, Homo sapien
gctctctttggaattggacagaataagaagaga

SEQ ID NO: 783715 - DNA, 33 bp, Homo sapien
tatatactagaacacccatcaaatcacattcta

SEQ ID NO: 783716 - DNA, 33 bp, Homo sapien
tatatactagaacacctatcaaatcacattcta

SEQ ID NO: 783717 - DNA, 33 bp, Homo sapien
agtacagctaaaggaaaaaagagaaaaatgtga

SEQ ID NO: 783718 - DNA, 33 bp, Homo sapien
agtacagctaaaggaacaaagagaaaaatgtga

SEQ ID NO: 783719 - DNA, 33 bp, Homo sapien
ctaatccatcagccaaaactaagattggaaaat

SEQ ID NO: 783720 - DNA, 33 bp, Homo sapien
ctaatccatcagccaagactaagattggaaaat

SEQ ID NO: 783721 - DNA, 33 bp, Homo sapien
gtaggtaatgtttaataagtgtttctcattttc

SEQ ID NO: 783722 - DNA, 33 bp, Homo sapien
gtaggtaatgtttaatgagtgtttctcattttc

SEQ ID NO: 783723 - DNA, 33 bp, Homo sapien
attctgcctagaatctcaaagtcggagtaaact

SEQ ID NO: 783724 - DNA, 33 bp, Homo sapien
attctgcctagaatcttaaagtcggagtaaact

SEQ ID NO: 783725 - DNA, 33 bp, Homo sapien
atcatctttcttgccacgatttttggtgatcct

SEQ ID NO: 783726 - DNA, 33 bp, Homo sapien
atcatctttcttgccatgatttttggtgatcct

SEQ ID NO: 783727 - DNA, 33 bp, Homo sapien
caatcactgggtaaaggaataggttctgaatca

SEQ ID NO: 783728 - DNA, 33 bp, Homo sapien
caatcactgggtaaagtaataggttctgaatca

SEQ ID NO: 783729 - DNA, 33 bp, Homo sapien
tccaatagttttgcccagcttctacaataaagt

SEQ ID NO: 783730 - DNA, 33 bp, Homo sapien
tccaatagttttgcccggcttctacaataaagt

SEQ ID NO: 783731 - DNA, 33 bp, Homo sapien
aacatgatgccataaaacacaactcagccctct

SEQ ID NO: 783732 - DNA, 33 bp, Homo sapien
aacatgatgccataaatcacaactcagccctct

SEQ ID NO: 783733 - DNA, 33 bp, Homo sapien
agtgttactcattacacacatttcacagacacc

SEQ ID NO: 783734 - DNA, 33 bp, Homo sapien
agtgttactcattacatacatttcacagacacc

SEQ ID NO: 783735 - DNA, 33 bp, Homo sapien
atgagtggaggcataggcatcttcgttcacact

SEQ ID NO: 783736 - DNA, 33 bp, Homo sapien
atgagtggaggcatagtcatcttcgttcacact

SEQ ID NO: 783737 - DNA, 33 bp, Homo sapien
ctatggccattttcaagtacagaattaacatag

SEQ ID NO: 783738 - DNA, 33 bp, Homo sapien
ctatggccattttcaattacagaattaacatag

SEQ ID NO: 783739 - DNA, 33 bp, Homo sapien
caaaccttcaccctgcacatctgggccaattta

SEQ ID NO: 783740 - DNA, 33 bp, Homo sapien
caaaccttcaccctgctcatctgggccaattta

SEQ ID NO: 783741 - DNA, 33 bp, Homo sapien
actaatgcaataataaaaactttggtccaaaat

SEQ ID NO: 783742 - DNA, 33 bp, Homo sapien
actaatgcaataataagaactttggtccaaaat

SEQ ID NO: 783743 - DNA, 33 bp, Homo sapien
ctcttagatcagtgaccggtacgtaataaatgc

SEQ ID NO: 783744 - DNA, 33 bp, Homo sapien
ctcttagatcagtgactggtacgtaataaatgc

SEQ ID NO: 783745 - DNA, 33 bp, Homo sapien
tttatagatgagaaaactaaggtacagatgggc

SEQ ID NO: 783746 - DNA, 33 bp, Homo sapien
tttatagatgagaaaagtaaggtacagatgggc

SEQ ID NO: 783747 - DNA, 33 bp, Homo sapien
aagatatcagaaatgccgaaggaccagaaaaag

SEQ ID NO: 783748 - DNA, 33 bp, Homo sapien
aagatatcagaaatgctgaaggaccagaaaaag

SEQ ID NO: 783749 - DNA, 33 bp, Homo sapien
agtccacaaagtcaaagcgaaagccatctaaaa

SEQ ID NO: 783750 - DNA, 33 bp, Homo sapien
agtccacaaagtcaaatcgaaagccatctaaaa

SEQ ID NO: 783751 - DNA, 33 bp, Homo sapien
aagagaaggaaagacagaaaaatctttaagtag

SEQ ID NO: 783752 - DNA, 33 bp, Homo sapien
aagagaaggaaagacataaaaatctttaagtag

SEQ ID NO: 783753 - DNA, 33 bp, Homo sapien
ggctaaaagagaaccaagtgctaaaagtcaaga

SEQ ID NO: 783754 - DNA, 33 bp, Homo sapien
ggctaaaagagaaccaggtgctaaaagtcaaga

SEQ ID NO: 783755 - DNA, 33 bp, Homo sapien
tggtgctgaaatgagacaacagtttggaactat

SEQ ID NO: 783756 - DNA, 33 bp, Homo sapien
tggtgctgaaatgagataacagtttggaactat

SEQ ID NO: 783757 - DNA, 33 bp, Homo sapien
caggatacaaaattaacggacatatatcactaa

SEQ ID NO: 783758 - DNA, 33 bp, Homo sapien
caggatacaaaattaatggacatatatcactaa

SEQ ID NO: 783759 - DNA, 33 bp, Homo sapien
tttctttttttttgtacctctaccaggtattgg

SEQ ID NO: 783760 - DNA, 33 bp, Homo sapien
tttctttttttttgtatctctaccaggtattgg

SEQ ID NO: 783761 - DNA, 33 bp, Homo sapien
aaagcgagtaggagaaatatcgctgaatttttt

SEQ ID NO: 783762 - DNA, 33 bp, Homo sapien
aaagcgagtaggagaagtatcgctgaatttttt

SEQ ID NO: 783763 - DNA, 33 bp, Homo sapien
aatagaaaaattgctaacaaacctgtcaaagtt

SEQ ID NO: 783764 - DNA, 33 bp, Homo sapien
aatagaaaaattgctagcaaacctgtcaaagtt

SEQ ID NO: 783765 - DNA, 33 bp, Homo sapien
agagacttggaatttaagccttagtcaccatca

SEQ ID NO: 783766 - DNA, 33 bp, Homo sapien
agagacttggaatttaggccttagtcaccatca

SEQ ID NO: 783767 - DNA, 33 bp, Homo sapien
tcacttcacatacagcaagttcctcacacttcc

SEQ ID NO: 783768 - DNA, 33 bp, Homo sapien
tcacttcacatacagccagttcctcacacttcc

SEQ ID NO: 783769 - DNA, 33 bp, Homo sapien
tctctatctgttgctacactctcacttctcata

SEQ ID NO: 783770 - DNA, 33 bp, Homo sapien
tctctatctgttgctatactctcacttctcata

SEQ ID NO: 783771 - DNA, 33 bp, Homo sapien
ctaacttaataaggcccgccacagagagttggt

SEQ ID NO: 783772 - DNA, 33 bp, Homo sapien
ctaacttaataaggcctgccacagagagttggt

SEQ ID NO: 783773 - DNA, 33 bp, Homo sapien
tgtatatatttgcagaagagaagaatcaaataa

SEQ ID NO: 783774 - DNA, 33 bp, Homo sapien
tgtatatatttgcagatgagaagaatcaaataa

SEQ ID NO: 783775 - DNA, 33 bp, Homo sapien
catttacagttcatatcaataattttataccat

SEQ ID NO: 783776 - DNA, 33 bp, Homo sapien
catttacagttcatatgaataattttataccat

SEQ ID NO: 783777 - DNA, 33 bp, Homo sapien
cccacctagtttgtcacattttttgtggcagcc

SEQ ID NO: 783778 - DNA, 33 bp, Homo sapien
cccacctagtttgtcatattttttgtggcagcc

SEQ ID NO: 783779 - DNA, 33 bp, Homo sapien
gcaggatggacaaattcaagaagcttcaagaag

SEQ ID NO: 783780 - DNA, 33 bp, Homo sapien
gcaggatggacaaattgaagaagcttcaagaag

SEQ ID NO: 783781 - DNA, 33 bp, Homo sapien
actttgtttagagttgaagaataaattcagggc

SEQ ID NO: 783782 - DNA, 33 bp, Homo sapien
actttgtttagagttgcagaataaattcagggc

SEQ ID NO: 783783 - DNA, 33 bp, Homo sapien
aaactatccttaacacagctagcaataaatgaa

SEQ ID NO: 783784 - DNA, 33 bp, Homo sapien
aaactatccttaacacggctagcaataaatgaa

SEQ ID NO: 783785 - DNA, 33 bp, Homo sapien
ttccatcatttaacaacgcagtaggaattgagg

SEQ ID NO: 783786 - DNA, 33 bp, Homo sapien
ttccatcatttaacaatgcagtaggaattgagg

SEQ ID NO: 783787 - DNA, 33 bp, Homo sapien
ttgctctttctcaaaaaattgctgaggtaaact

SEQ ID NO: 783788 - DNA, 33 bp, Homo sapien
ttgctctttctcaaaatattgctgaggtaaact

SEQ ID NO: 783789 - DNA, 33 bp, Homo sapien
tttcctaggcactatcaaattgcattccatgga

SEQ ID NO: 783790 - DNA, 33 bp, Homo sapien
tttcctaggcactatcgaattgcattccatgga

SEQ ID NO: 783791 - DNA, 33 bp, Homo sapien
ctgcctctaaggttacacaggaacacaactgta

SEQ ID NO: 783792 - DNA, 33 bp, Homo sapien
ctgcctctaaggttactcaggaacacaactgta

SEQ ID NO: 783793 - DNA, 33 bp, Homo sapien
ttcaaataaaacaaacaccgttgctgaatcact

SEQ ID NO: 783794 - DNA, 33 bp, Homo sapien
ttcaaataaaacaaaccccgttgctgaatcact

SEQ ID NO: 783795 - DNA, 33 bp, Homo sapien
atattaaacaaactgaagtagatctttctggaa

SEQ ID NO: 783796 - DNA, 33 bp, Homo sapien
atattaaacaaactgaggtagatctttctggaa

SEQ ID NO: 783797 - DNA, 33 bp, Homo sapien
ttagatctttgacaaactctccacatcaaacaa

SEQ ID NO: 783798 - DNA, 33 bp, Homo sapien
ttagatctttgacaaattctccacatcaaacaa

SEQ ID NO: 783799 - DNA, 33 bp, Homo sapien
tgaaatatggaatcaaattatactgatgtgatt

SEQ ID NO: 783800 - DNA, 33 bp, Homo sapien
tgaaatatggaatcaacttatactgatgtgatt

SEQ ID NO: 783801 - DNA, 33 bp, Homo sapien
ggaagtgggaaaagaacgtgtataggagtttag

SEQ ID NO: 783802 - DNA, 33 bp, Homo sapien
ggaagtgggaaaagaatgtgtataggagtttag

SEQ ID NO: 783803 - DNA, 33 bp, Homo sapien
gcagctctttgaaaaagcaatccaaaagagaaa

SEQ ID NO: 783804 - DNA, 33 bp, Homo sapien
gcagctctttgaaaaatcaatccaaaagagaaa

SEQ ID NO: 783805 - DNA, 33 bp, Homo sapien
tgtggtgtcaaaatcccccacatatgatcactt

SEQ ID NO: 783806 - DNA, 33 bp, Homo sapien
tgtggtgtcaaaatcctccacatatgatcactt

SEQ ID NO: 783807 - DNA, 33 bp, Homo sapien
agtcaagcatttagagacagaaacactaattag

SEQ ID NO: 783808 - DNA, 33 bp, Homo sapien
agtcaagcatttagaggcagaaacactaattag

SEQ ID NO: 783809 - DNA, 33 bp, Homo sapien
ccgtttctgagttcacaagatgaaatgtgaatt

SEQ ID NO: 783810 - DNA, 33 bp, Homo sapien
ccgtttctgagttcaccagatgaaatgtgaatt

SEQ ID NO: 783811 - DNA, 33 bp, Homo sapien
ttaagtatgtttcaagaatgttaatggcataca

SEQ ID NO: 783812 - DNA, 33 bp, Homo sapien
ttaagtatgtttcaagtatgttaatggcataca

SEQ ID NO: 783813 - DNA, 33 bp, Homo sapien
atttgaatgatgacaccggagcctcatgtactt

SEQ ID NO: 783814 - DNA, 33 bp, Homo sapien
atttgaatgatgacactggagcctcatgtactt

SEQ ID NO: 783815 - DNA, 33 bp, Homo sapien
gaaaatctggtttggaagacaaacaattccaag

SEQ ID NO: 783816 - DNA, 33 bp, Homo sapien
gaaaatctggtttggaggacaaacaattccaag

SEQ ID NO: 783817 - DNA, 33 bp, Homo sapien
ccttacctatctcaaagatgagctttctccaac

SEQ ID NO: 783818 - DNA, 33 bp, Homo sapien
ccttacctatctcaaatatgagctttctccaac

SEQ ID NO: 783819 - DNA, 33 bp, Homo sapien
gttctcacaagtaaaaactaaacaatgtgtaca

SEQ ID NO: 783820 - DNA, 33 bp, Homo sapien
gttctcacaagtaaaagctaaacaatgtgtaca

SEQ ID NO: 783821 - DNA, 33 bp, Homo sapien
ttgatggaaccccagcagacagcttctatgagg

SEQ ID NO: 783822 - DNA, 33 bp, Homo sapien
ttgatggaaccccagcggacagcttctatgagg

SEQ ID NO: 783823 - DNA, 33 bp, Homo sapien
caggtctagcctgcagaagaactaagcttttca

SEQ ID NO: 783824 - DNA, 33 bp, Homo sapien
caggtctagcctgcagcagaactaagcttttca

SEQ ID NO: 783825 - DNA, 33 bp, Homo sapien
tttcctcagtgtcaaggagtcaataacatcatc

SEQ ID NO: 783826 - DNA, 33 bp, Homo sapien
tttcctcagtgtcaagtagtcaataacatcatc

SEQ ID NO: 783827 - DNA, 33 bp, Homo sapien
cctttcattccatattcaagtgcaattttaatt

SEQ ID NO: 783828 - DNA, 33 bp, Homo sapien
cctttcattccatatttaagtgcaattttaatt

SEQ ID NO: 783829 - DNA, 33 bp, Homo sapien
agtattttataatgtcaactctagaaaattagc

SEQ ID NO: 783830 - DNA, 33 bp, Homo sapien
agtattttataatgtcgactctagaaaattagc

SEQ ID NO: 783831 - DNA, 33 bp, Homo sapien
caagaaattagtctgaaccagatgacatctctt

SEQ ID NO: 783832 - DNA, 33 bp, Homo sapien
caagaaattagtctgagccagatgacatctctt

SEQ ID NO: 783833 - DNA, 33 bp, Homo sapien
gacaataccgagatgacatagctttcaaatata

SEQ ID NO: 783834 - DNA, 33 bp, Homo sapien
gacaataccgagatgatatagctttcaaatata

SEQ ID NO: 783835 - DNA, 33 bp, Homo sapien
tttattgggatgtacacgattgtgtgtgtgtgc

SEQ ID NO: 783836 - DNA, 33 bp, Homo sapien
tttattgggatgtacatgattgtgtgtgtgtgc

SEQ ID NO: 783837 - DNA, 33 bp, Homo sapien
tgatactggagggtgcaaatagcataatataca

SEQ ID NO: 783838 - DNA, 33 bp, Homo sapien
tgatactggagggtgcgaatagcataatataca

SEQ ID NO: 783839 - DNA, 33 bp, Homo sapien
ccttttgagaaaataacgtgggtatattcaaca

SEQ ID NO: 783840 - DNA, 33 bp, Homo sapien
ccttttgagaaaataatgtgggtatattcaaca

SEQ ID NO: 783841 - DNA, 33 bp, Homo sapien
actacctaataactaacctatcattgtcctttc

SEQ ID NO: 783842 - DNA, 33 bp, Homo sapien
actacctaataactaatctatcattgtcctttc

SEQ ID NO: 783843 - DNA, 33 bp, Homo sapien
catgggcatcaggaaactcattaactgtcaggt

SEQ ID NO: 783844 - DNA, 33 bp, Homo sapien
catgggcatcaggaaattcattaactgtcaggt

SEQ ID NO: 783845 - DNA, 33 bp, Homo sapien
caacccaaacacgtcacaagatgaatggagcac

SEQ ID NO: 783846 - DNA, 33 bp, Homo sapien
caacccaaacacgtcataagatgaatggagcac

SEQ ID NO: 783847 - DNA, 33 bp, Homo sapien
ctggttatacaccaaaaggtgggtgggatgttc

SEQ ID NO: 783848 - DNA, 33 bp, Homo sapien
ctggttatacaccaaatggtgggtgggatgttc

SEQ ID NO: 783849 - DNA, 33 bp, Homo sapien
tacatggacgagactgaatcttttttctttaac

SEQ ID NO: 783850 - DNA, 33 bp, Homo sapien
tacatggacgagactggatcttttttctttaac

SEQ ID NO: 783851 - DNA, 33 bp, Homo sapien
gggtgagtcaaggaggcacactgatgcaaaatg

SEQ ID NO: 783852 - DNA, 33 bp, Homo sapien
gggtgagtcaaggaggtacactgatgcaaaatg

SEQ ID NO: 783853 - DNA, 33 bp, Homo sapien
cacaggccccacttcactattttcctctgtctt

SEQ ID NO: 783854 - DNA, 33 bp, Homo sapien
cacaggccccacttcattattttcctctgtctt

SEQ ID NO: 783855 - DNA, 33 bp, Homo sapien
gctccaattagctccaatgagaaagagctctgg

SEQ ID NO: 783856 - DNA, 33 bp, Homo sapien
gctccaattagctccagtgagaaagagctctgg

SEQ ID NO: 783857 - DNA, 33 bp, Homo sapien
catgctttgaaattacagattcttagagtagca

SEQ ID NO: 783858 - DNA, 33 bp, Homo sapien
catgctttgaaattactgattcttagagtagca

SEQ ID NO: 783859 - DNA, 33 bp, Homo sapien
tttggactcttcattgaaactgcacttcaagaa

SEQ ID NO: 783860 - DNA, 33 bp, Homo sapien
tttggactcttcattgcaactgcacttcaagaa

SEQ ID NO: 783861 - DNA, 33 bp, Homo sapien
agagattgttacaaacaaaccaattatatcttt

SEQ ID NO: 783862 - DNA, 33 bp, Homo sapien
agagattgttacaaacgaaccaattatatcttt

SEQ ID NO: 783863 - DNA, 33 bp, Homo sapien
tttagccagcgaagtaagagcagaagtgaggta

SEQ ID NO: 783864 - DNA, 33 bp, Homo sapien
tttagccagcgaagtatgagcagaagtgaggta

SEQ ID NO: 783865 - DNA, 33 bp, Homo sapien
cccgtaaattgaattacgcattcactatatctt

SEQ ID NO: 783866 - DNA, 33 bp, Homo sapien
cccgtaaattgaattatgcattcactatatctt

SEQ ID NO: 783867 - DNA, 33 bp, Homo sapien
aaatcattgttttgtacgtcttcatgtacataa

SEQ ID NO: 783868 - DNA, 33 bp, Homo sapien
aaatcattgttttgtatgtcttcatgtacataa

SEQ ID NO: 783869 - DNA, 33 bp, Homo sapien
tccactgaacaagacaacattttttttcatcct

SEQ ID NO: 783870 - DNA, 33 bp, Homo sapien
tccactgaacaagacaccattttttttcatcct

SEQ ID NO: 783871 - DNA, 33 bp, Homo sapien
attatgtaaattgacaatcaagcttcaggaggt

SEQ ID NO: 783872 - DNA, 33 bp, Homo sapien
attatgtaaattgacagtcaagcttcaggaggt

SEQ ID NO: 783873 - DNA, 33 bp, Homo sapien
atgggaagttgcatgcacaagctgaagttttat

SEQ ID NO: 783874 - DNA, 33 bp, Homo sapien
atgggaagttgcatgcccaagctgaagttttat

SEQ ID NO: 783875 - DNA, 33 bp, Homo sapien
accccagaggtgtcaaaccactttgaagtaatc

SEQ ID NO: 783876 - DNA, 33 bp, Homo sapien
accccagaggtgtcaagccactttgaagtaatc

SEQ ID NO: 783877 - DNA, 33 bp, Homo sapien
tttggcttgtagctaaatcactctgatctctga

SEQ ID NO: 783878 - DNA, 33 bp, Homo sapien
tttggcttgtagctaagtcactctgatctctga

SEQ ID NO: 783879 - DNA, 33 bp, Homo sapien
agaatgtgtgactgaacggaaaagagatgaata

SEQ ID NO: 783880 - DNA, 33 bp, Homo sapien
agaatgtgtgactgaatggaaaagagatgaata

SEQ ID NO: 783881 - DNA, 33 bp, Homo sapien
tgtaaggaaataactgcattggagagaagagaa

SEQ ID NO: 783882 - DNA, 33 bp, Homo sapien
tgtaaggaaataactgtattggagagaagagaa

SEQ ID NO: 783883 - DNA, 33 bp, Homo sapien
ggtacagttcagtaacaggtgctttaacaagct

SEQ ID NO: 783884 - DNA, 33 bp, Homo sapien
ggtacagttcagtaaccggtgctttaacaagct

SEQ ID NO: 783885 - DNA, 33 bp, Homo sapien
gcaggagacatttttacgcccgattcaaaagca

SEQ ID NO: 783886 - DNA, 33 bp, Homo sapien
gcaggagacatttttatgcccgattcaaaagca

SEQ ID NO: 783887 - DNA, 33 bp, Homo sapien
ttgtttttttgtcctacggtgataatgttcata

SEQ ID NO: 783888 - DNA, 33 bp, Homo sapien
ttgtttttttgtcctatggtgataatgttcata

SEQ ID NO: 783889 - DNA, 33 bp, Homo sapien
cctctgccccgaagcccgagaagctgatgggct

SEQ ID NO: 783890 - DNA, 33 bp, Homo sapien
cctctgccccgaagcctgagaagctgatgggct

SEQ ID NO: 783891 - DNA, 33 bp, Homo sapien
gcaagacagacagctcactctcagggcacgtag

SEQ ID NO: 783892 - DNA, 33 bp, Homo sapien
gcaagacagacagctctctctcagggcacgtag

SEQ ID NO: 783893 - DNA, 33 bp, Homo sapien
aagttaaaaaaaactgccaatgagttaacttaa

SEQ ID NO: 783894 - DNA, 33 bp, Homo sapien
aagttaaaaaaaactgtcaatgagttaacttaa

SEQ ID NO: 783895 - DNA, 33 bp, Homo sapien
tgtccttgacactgaacagaccttacacaatat

SEQ ID NO: 783896 - DNA, 33 bp, Homo sapien
tgtccttgacactgaatagaccttacacaatat

SEQ ID NO: 783897 - DNA, 33 bp, Homo sapien
ccaatatcatggataaatctgaaagggatgaaa

SEQ ID NO: 783898 - DNA, 33 bp, Homo sapien
ccaatatcatggataagtctgaaagggatgaaa

SEQ ID NO: 783899 - DNA, 33 bp, Homo sapien
acccctcataattgtgcagcattaatctgtcta

SEQ ID NO: 783900 - DNA, 33 bp, Homo sapien
acccctcataattgtggagcattaatctgtcta

SEQ ID NO: 783901 - DNA, 33 bp, Homo sapien
taagccaacactccaacagtatcaccatgtaag

SEQ ID NO: 783902 - DNA, 33 bp, Homo sapien
taagccaacactccaatagtatcaccatgtaag

SEQ ID NO: 783903 - DNA, 33 bp, Homo sapien
atgccatgttgagaaaacaaccattaggaatga

SEQ ID NO: 783904 - DNA, 33 bp, Homo sapien
atgccatgttgagaaaccaaccattaggaatga

SEQ ID NO: 783905 - DNA, 33 bp, Homo sapien
gtgactcctggagttaataacagataaccctaa

SEQ ID NO: 783906 - DNA, 33 bp, Homo sapien
gtgactcctggagttagtaacagataaccctaa

SEQ ID NO: 783907 - DNA, 33 bp, Homo sapien
ctggcagcttctcacccacatgtagcaagagag

SEQ ID NO: 783908 - DNA, 33 bp, Homo sapien
ctggcagcttctcacctacatgtagcaagagag

SEQ ID NO: 783909 - DNA, 33 bp, Homo sapien
acattattcagtggtacgaggctgtgcttgata

SEQ ID NO: 783910 - DNA, 33 bp, Homo sapien
acattattcagtggtatgaggctgtgcttgata

SEQ ID NO: 783911 - DNA, 33 bp, Homo sapien
gcctagatccctgctacggagtgaacttggatg

SEQ ID NO: 783912 - DNA, 33 bp, Homo sapien
gcctagatccctgctatggagtgaacttggatg

SEQ ID NO: 783913 - DNA, 33 bp, Homo sapien
acattctcatataatcaactactagaacataag

SEQ ID NO: 783914 - DNA, 33 bp, Homo sapien
acattctcatataatcgactactagaacataag

SEQ ID NO: 783915 - DNA, 33 bp, Homo sapien
agggatgtgaaacaatcagacacttatattaac

SEQ ID NO: 783916 - DNA, 33 bp, Homo sapien
agggatgtgaaacaatgagacacttatattaac

SEQ ID NO: 783917 - DNA, 33 bp, Homo sapien
aagctggcaagaaatacggatgtacaaagttgg

SEQ ID NO: 783918 - DNA, 33 bp, Homo sapien
aagctggcaagaaatatggatgtacaaagttgg

SEQ ID NO: 783919 - DNA, 33 bp, Homo sapien
cagagatttgtggttcccagcaacttggccaac

SEQ ID NO: 783920 - DNA, 33 bp, Homo sapien
cagagatttgtggttcgcagcaacttggccaac

SEQ ID NO: 783921 - DNA, 33 bp, Homo sapien
ttctgtgctcagagaaagaaaaagaggtggtct

SEQ ID NO: 783922 - DNA, 33 bp, Homo sapien
ttctgtgctcagagaaggaaaaagaggtggtct

SEQ ID NO: 783923 - DNA, 33 bp, Homo sapien
aatgacaattgaacaggaacagtgtagcaggca

SEQ ID NO: 783924 - DNA, 33 bp, Homo sapien
aatgacaattgaacagtaacagtgtagcaggca

SEQ ID NO: 783925 - DNA, 33 bp, Homo sapien
cacctcaagcaaacaaatgatgataactcataa

SEQ ID NO: 783926 - DNA, 33 bp, Homo sapien
cacctcaagcaaacaagtgatgataactcataa

SEQ ID NO: 783927 - DNA, 33 bp, Homo sapien
acaatagaaatgtatccccgtgaagagaatatg

SEQ ID NO: 783928 - DNA, 33 bp, Homo sapien
acaatagaaatgtatctccgtgaagagaatatg

SEQ ID NO: 783929 - DNA, 33 bp, Homo sapien
cttctttctacttccacatggccggtgtgataa

SEQ ID NO: 783930 - DNA, 33 bp, Homo sapien
cttctttctacttccatatggccggtgtgataa

SEQ ID NO: 783931 - DNA, 33 bp, Homo sapien
agatctctgagtctgaaatctttttgagttagg

SEQ ID NO: 783932 - DNA, 33 bp, Homo sapien
agatctctgagtctgagatctttttgagttagg

SEQ ID NO: 783933 - DNA, 33 bp, Homo sapien
ataccaaatattccttaaaaacagcttattatc

SEQ ID NO: 783934 - DNA, 33 bp, Homo sapien
ataccaaatattccttcaaaacagcttattatc

SEQ ID NO: 783935 - DNA, 33 bp, Homo sapien
cctttatctttgcccactatcctttccaaagac

SEQ ID NO: 783936 - DNA, 33 bp, Homo sapien
cctttatctttgcccattatcctttccaaagac

SEQ ID NO: 783937 - DNA, 33 bp, Homo sapien
ttaaaagtcacaaaaaactagtagaaaagcttc

SEQ ID NO: 783938 - DNA, 33 bp, Homo sapien
ttaaaagtcacaaaaagctagtagaaaagcttc

SEQ ID NO: 783939 - DNA, 33 bp, Homo sapien
gagacctaattcttccacattctttggctgcat

SEQ ID NO: 783940 - DNA, 33 bp, Homo sapien
gagacctaattcttccgcattctttggctgcat

SEQ ID NO: 783941 - DNA, 33 bp, Homo sapien
tcatgtgttgctcaaaaatggggatatttcctg

SEQ ID NO: 783942 - DNA, 33 bp, Homo sapien
tcatgtgttgctcaaagatggggatatttcctg

SEQ ID NO: 783943 - DNA, 33 bp, Homo sapien
caatagttgaccctcaggagaacaccataaacc

SEQ ID NO: 783944 - DNA, 33 bp, Homo sapien
caatagttgaccctcatgagaacaccataaacc

SEQ ID NO: 783945 - DNA, 33 bp, Homo sapien
tgcaaactatgtacccaacagaggtctaatatc

SEQ ID NO: 783946 - DNA, 33 bp, Homo sapien
tgcaaactatgtacccgacagaggtctaatatc

SEQ ID NO: 783947 - DNA, 33 bp, Homo sapien; identical to SEQ ID NO: 783945

SEQ ID NO: 783948 - DNA, 33 bp, Homo sapien; identical to SEQ ID NO: 783946

SEQ ID NO: 783949 - DNA, 33 bp, Homo sapien
gttttcctgaaataaaaagctgattatatctct

SEQ ID NO: 783950 - DNA, 33 bp, Homo sapien
gttttcctgaaataaagagctgattatatctct

SEQ ID NO: 783951 - DNA, 33 bp, Homo sapien
gctgattcattttataagtggttctaatgccag

SEQ ID NO: 783952 - DNA, 33 bp, Homo sapien
gctgattcattttatatgtggttctaatgccag

SEQ ID NO: 783953 - DNA, 33 bp, Homo sapien
gagtctatccttataaaaaaccagtgagactgg

SEQ ID NO: 783954 - DNA, 33 bp, Homo sapien
gagtctatccttataacaaaccagtgagactgg

SEQ ID NO: 783955 - DNA, 33 bp, Homo sapien
cacgtaacaatatgaggcagattctaatatcat

SEQ ID NO: 783956 - DNA, 33 bp, Homo sapien
cacgtaacaatatgagtcagattctaatatcat

SEQ ID NO: 783957 - DNA, 33 bp, Homo sapien
aagactcccaggattaaagttggacttgagtag

SEQ ID NO: 783958 - DNA, 33 bp, Homo sapien
aagactcccaggattacagttggacttgagtag

SEQ ID NO: 783959 - DNA, 33 bp, Homo sapien
aatgtccagagtaaaacgtcaagaacaggcagg

SEQ ID NO: 783960 - DNA, 33 bp, Homo sapien
aatgtccagagtaaaatgtcaagaacaggcagg

SEQ ID NO: 783961 - DNA, 33 bp, Homo sapien
tacccctttgagaatacgagaagagctatgatt

SEQ ID NO: 783962 - DNA, 33 bp, Homo sapien
tacccctttgagaatatgagaagagctatgatt

SEQ ID NO: 783963 - DNA, 33 bp, Homo sapien
tgctcagaataaatcagtagcaaaactcatttt

SEQ ID NO: 783964 - DNA, 33 bp, Homo sapien
tgctcagaataaatcattagcaaaactcatttt

SEQ ID NO: 783965 - DNA, 33 bp, Homo sapien
tgatgccaactgcttagaatatcagaaagataa

SEQ ID NO: 783966 - DNA, 33 bp, Homo sapien
tgatgccaactgcttataatatcagaaagataa

SEQ ID NO: 783967 - DNA, 33 bp, Homo sapien
ttatgaagaaattatacgtccttattctcattt

SEQ ID NO: 783968 - DNA, 33 bp, Homo sapien
ttatgaagaaattatatgtccttattctcattt

SEQ ID NO: 783969 - DNA, 33 bp, Homo sapien
gaaaagtcctgaaaaaatgcctatttgtcaata

SEQ ID NO: 783970 - DNA, 33 bp, Homo sapien
gaaaagtcctgaaaaattgcctatttgtcaata

SEQ ID NO: 783971 - DNA, 33 bp, Homo sapien
gaatcctcctattttcccactgttcccagaatt

SEQ ID NO: 783972 - DNA, 33 bp, Homo sapien
gaatcctcctattttctcactgttcccagaatt

SEQ ID NO: 783973 - DNA, 33 bp, Homo sapien
gatatagttcaatacacagtgctagatcataaa

SEQ ID NO: 783974 - DNA, 33 bp, Homo sapien
gatatagttcaatacagagtgctagatcataaa

SEQ ID NO: 783975 - DNA, 33 bp, Homo sapien
ctggattacacattaacagtctgaaagccctag

SEQ ID NO: 783976 - DNA, 33 bp, Homo sapien
ctggattacacattaatagtctgaaagccctag

SEQ ID NO: 783977 - DNA, 33 bp, Homo sapien
gtgtcattccaacccacagtccacattgtgtct

SEQ ID NO: 783978 - DNA, 33 bp, Homo sapien
gtgtcattccaacccagagtccacattgtgtct

SEQ ID NO: 783979 - DNA, 33 bp, Homo sapien
taatatctaatgtaaaaaccaaatgagagaaag

SEQ ID NO: 783980 - DNA, 33 bp, Homo sapien
taatatctaatgtaaagaccaaatgagagaaag

SEQ ID NO: 783981 - DNA, 33 bp, Homo sapien
tcaaagtaaacattgacaatcctactcacttta

SEQ ID NO: 783982 - DNA, 33 bp, Homo sapien
tcaaagtaaacattgagaatcctactcacttta

SEQ ID NO: 783983 - DNA, 33 bp, Homo sapien
cattaagacaaagggacgcgagtgttgcttatg

SEQ ID NO: 783984 - DNA, 33 bp, Homo sapien
cattaagacaaagggatgcgagtgttgcttatg

SEQ ID NO: 783985 - DNA, 33 bp, Homo sapien
agtagtttaagaaaaaatttgttgatcctttct

SEQ ID NO: 783986 - DNA, 33 bp, Homo sapien
agtagtttaagaaaaagtttgttgatcctttct

SEQ ID NO: 783987 - DNA, 33 bp, Homo sapien
agacacttgaaagaaacggaagttttgcagaca

SEQ ID NO: 783988 - DNA, 33 bp, Homo sapien
agacacttgaaagaaatggaagttttgcagaca

SEQ ID NO: 783989 - DNA, 33 bp, Homo sapien
aattacctaatgagccagacctggatttatatt

SEQ ID NO: 783990 - DNA, 33 bp, Homo sapien
aattacctaatgagccggacctggatttatatt

SEQ ID NO: 783991 - DNA, 33 bp, Homo sapien
cccactcaatccagtacctgagattacaatcca

SEQ ID NO: 783992 - DNA, 33 bp, Homo sapien
cccactcaatccagtagctgagattacaatcca

SEQ ID NO: 783993 - DNA, 33 bp, Homo sapien
ggaatcctttgacctacggaactatctgctttg

SEQ ID NO: 783994 - DNA, 33 bp, Homo sapien
ggaatcctttgacctatggaactatctgctttg

SEQ ID NO: 783995 - DNA, 33 bp, Homo sapien
agggaattgaaacccaaagtgctttatctataa

SEQ ID NO: 783996 - DNA, 33 bp, Homo sapien
agggaattgaaacccagagtgctttatctataa

SEQ ID NO: 783997 - DNA, 33 bp, Homo sapien
agctaatggataccaaatgtttctaatttcacc

SEQ ID NO: 783998 - DNA, 33 bp, Homo sapien
agctaatggataccaagtgtttctaatttcacc

SEQ ID NO: 783999 - DNA, 33 bp, Homo sapien
tctaggttcacatatactaggagttaaaacact

SEQ ID NO: 784000 - DNA, 33 bp, Homo sapien
tctaggttcacatatattaggagttaaaacact

SEQ ID NO: 784001 - DNA, 33 bp, Homo sapien
cagggtcatcattaccaaacattgagtaattaa

SEQ ID NO: 784002 - DNA, 33 bp, Homo sapien
cagggtcatcattaccgaacattgagtaattaa

SEQ ID NO: 784003 - DNA, 33 bp, Homo sapien
ctatgatatgaatgggcaataattttttcttgc

SEQ ID NO: 784004 - DNA, 33 bp, Homo sapien
ctatgatatgaatggggaataattttttcttgc

SEQ ID NO: 784005 - DNA, 33 bp, Homo sapien
aaaattaatatttgtaagaaggtctcatttggc

SEQ ID NO: 784006 - DNA, 33 bp, Homo sapien
aaaattaatatttgtaggaaggtctcatttggc

SEQ ID NO: 784007 - DNA, 33 bp, Homo sapien
tcctgcagttataatcaatgctttggacacttt

SEQ ID NO: 784008 - DNA, 33 bp, Homo sapien
tcctgcagttataatcgatgctttggacacttt

SEQ ID NO: 784009 - DNA, 33 bp, Homo sapien
gctgcagcgagattaaatcattccacagcactc

SEQ ID NO: 784010 - DNA, 33 bp, Homo sapien
gctgcagcgagattaactcattccacagcactc

SEQ ID NO: 784011 - DNA, 33 bp, Homo sapien
ataagattcctcattccaaaagtttattgtttt

SEQ ID NO: 784012 - DNA, 33 bp, Homo sapien
ataagattcctcattctaaaagtttattgtttt

SEQ ID NO: 784013 - DNA, 33 bp, Homo sapien
aaaaaaattgcacaataaattcagttagatttc

SEQ ID NO: 784014 - DNA, 33 bp, Homo sapien
aaaaaaattgcacaatgaattcagttagatttc

SEQ ID NO: 784015 - DNA, 33 bp, Homo sapien
ctttacctatctgaacactcattttccgtgtcc

SEQ ID NO: 784016 - DNA, 33 bp, Homo sapien
ctttacctatctgaacgctcattttccgtgtcc

SEQ ID NO: 784017 - DNA, 33 bp, Homo sapien
aaatagacaaatcaaggaactagtgtctgaccc

SEQ ID NO: 784018 - DNA, 33 bp, Homo sapien
aaatagacaaatcaagtaactagtgtctgaccc

SEQ ID NO: 784019 - DNA, 33 bp, Homo sapien
gatccacatttagataagattttggaagtgtct

SEQ ID NO: 784020 - DNA, 33 bp, Homo sapien
gatccacatttagatatgattttggaagtgtct

SEQ ID NO: 784021 - DNA, 33 bp, Homo sapien
ctaagaactgaagtaacggtcatgcttgttata

SEQ ID NO: 784022 - DNA, 33 bp, Homo sapien
ctaagaactgaagtaatggtcatgcttgttata

SEQ ID NO: 784023 - DNA, 33 bp, Homo sapien
gcactggaatagcatacatggttgaagaaatgt

SEQ ID NO: 784024 - DNA, 33 bp, Homo sapien
gcactggaatagcatatatggttgaagaaatgt

SEQ ID NO: 784025 - DNA, 33 bp, Homo sapien
aaattcccagcaaggactagtagtagagaatga

SEQ ID NO: 784026 - DNA, 33 bp, Homo sapien
aaattcccagcaaggattagtagtagagaatga

SEQ ID NO: 784027 - DNA, 33 bp, Homo sapien
tgcctagcctgtcgtacctaccatcaacaaaat

SEQ ID NO: 784028 - DNA, 33 bp, Homo sapien
tgcctagcctgtcgtagctaccatcaacaaaat

SEQ ID NO: 784029 - DNA, 33 bp, Homo sapien
gccgccgctgccgtcaagtgcgtaatgacgtat

SEQ ID NO: 784030 - DNA, 33 bp, Homo sapien
gccgccgctgccgtcaggtgcgtaatgacgtat

SEQ ID NO: 784031 - DNA, 33 bp, Homo sapien
gcaaatgcccaaataccggtgctgtcattaggc

SEQ ID NO: 784032 - DNA, 33 bp, Homo sapien
gcaaatgcccaaatactggtgctgtcattaggc

SEQ ID NO: 784033 - DNA, 33 bp, Homo sapien
ctaatgttgtttaacactacaattaactaataa

SEQ ID NO: 784034 - DNA, 33 bp, Homo sapien
ctaatgttgtttaacagtacaattaactaataa

SEQ ID NO: 784035 - DNA, 33 bp, Homo sapien
taatgtcttctaggaacccctatatggcctgcc

SEQ ID NO: 784036 - DNA, 33 bp, Homo sapien
taatgtcttctaggaatccctatatggcctgcc

SEQ ID NO: 784037 - DNA, 33 bp, Homo sapien
agctccacatttacacgggatacccttggtcac

SEQ ID NO: 784038 - DNA, 33 bp, Homo sapien
agctccacatttacactggatacccttggtcac

SEQ ID NO: 784039 - DNA, 33 bp, Homo sapien
agagacgagataagcacataaataagaccccaa

SEQ ID NO: 784040 - DNA, 33 bp, Homo sapien
agagacgagataagcatataaataagaccccaa

SEQ ID NO: 784041 - DNA, 33 bp, Homo sapien
tgaagaagtaagatcacagaggaaaattatgca

SEQ ID NO: 784042 - DNA, 33 bp, Homo sapien
tgaagaagtaagatcatagaggaaaattatgca

SEQ ID NO: 784043 - DNA, 33 bp, Homo sapien
gcatagccaaattttcgacatacgtttattgag

SEQ ID NO: 784044 - DNA, 33 bp, Homo sapien
gcatagccaaattttctacatacgtttattgag

SEQ ID NO: 784045 - DNA, 33 bp, Homo sapien
atacatacctgtcaatcaacttagtttctagtg

SEQ ID NO: 784046 - DNA, 33 bp, Homo sapien
atacatacctgtcaatgaacttagtttctagtg

SEQ ID NO: 784047 - DNA, 33 bp, Homo sapien
atgacatctccttgtacatttttctttccttcc

SEQ ID NO: 784048 - DNA, 33 bp, Homo sapien
atgacatctccttgtatatttttctttccttcc

SEQ ID NO: 784049 - DNA, 33 bp, Homo sapien
atctttaaccaagggacgttttagcctttggcc

SEQ ID NO: 784050 - DNA, 33 bp, Homo sapien
atctttaaccaagggatgttttagcctttggcc

SEQ ID NO: 784051 - DNA, 33 bp, Homo sapien
atgaagtcaaggaccactggggttgctctgtaa

SEQ ID NO: 784052 - DNA, 33 bp, Homo sapien
atgaagtcaaggaccattggggttgctctgtaa

SEQ ID NO: 784053 - DNA, 33 bp, Homo sapien
ttagtaaactggagacgcaatgttttagactcc

SEQ ID NO: 784054 - DNA, 33 bp, Homo sapien
ttagtaaactggagactcaatgttttagactcc

SEQ ID NO: 784055 - DNA, 33 bp, Homo sapien
tcaatagattgtctagcaccggatctgtagtaa

SEQ ID NO: 784056 - DNA, 33 bp, Homo sapien
tcaatagattgtctagtaccggatctgtagtaa

SEQ ID NO: 784057 - DNA, 33 bp, Homo sapien
gttatctgtctttgaaaagcatattactgtctt

SEQ ID NO: 784058 - DNA, 33 bp, Homo sapien
gttatctgtctttgaagagcatattactgtctt

SEQ ID NO: 784059 - DNA, 33 bp, Homo sapien
cggaatacttgattaaatcagacttggaaggtg

SEQ ID NO: 784060 - DNA, 33 bp, Homo sapien
cggaatacttgattaagtcagacttggaaggtg

SEQ ID NO: 784061 - DNA, 33 bp, Homo sapien
aacagttttcagtcataaatttgagtaatgcta

SEQ ID NO: 784062 - DNA, 33 bp, Homo sapien
aacagttttcagtcatgaatttgagtaatgcta

SEQ ID NO: 784063 - DNA, 33 bp, Homo sapien
cctgttccttgctctaacatatttcaaaaatta

SEQ ID NO: 784064 - DNA, 33 bp, Homo sapien
cctgttccttgctctatcatatttcaaaaatta

SEQ ID NO: 784065 - DNA, 33 bp, Homo sapien
ctcaggcatttcttagcaggtagcgcacagact

SEQ ID NO: 784066 - DNA, 33 bp, Homo sapien
ctcaggcatttcttaggaggtagcgcacagact

SEQ ID NO: 784067 - DNA, 33 bp, Homo sapien
gtcttattaaatcacaaataccaaagatgtaaa

SEQ ID NO: 784068 - DNA, 33 bp, Homo sapien
gtcttattaaatcacagataccaaagatgtaaa

SEQ ID NO: 784069 - DNA, 33 bp, Homo sapien
aacatttcaaactataccagtgcaaaaaattat

SEQ ID NO: 784070 - DNA, 33 bp, Homo sapien
aacatttcaaactatatcagtgcaaaaaattat

SEQ ID NO: 784071 - DNA, 33 bp, Homo sapien
ccaaaaataactttaaaactgcactttgtatat

SEQ ID NO: 784072 - DNA, 33 bp, Homo sapien
ccaaaaataactttaagactgcactttgtatat

SEQ ID NO: 784073 - DNA, 33 bp, Homo sapien
tctggtatctcctatacggggagttgtcgagct

SEQ ID NO: 784074 - DNA, 33 bp, Homo sapien
tctggtatctcctatatggggagttgtcgagct

SEQ ID NO: 784075 - DNA, 33 bp, Homo sapien
tattcatggatatttacggaaaaaaacaaacaa

SEQ ID NO: 784076 - DNA, 33 bp, Homo sapien
tattcatggatatttatggaaaaaaacaaacaa

SEQ ID NO: 784077 - DNA, 33 bp, Homo sapien
agaaatggtctaggcagaaaaaaataaataaaa

SEQ ID NO: 784078 - DNA, 33 bp, Homo sapien
agaaatggtctaggcataaaaaaataaataaaa

SEQ ID NO: 784079 - DNA, 33 bp, Homo sapien
taatttataatagcaaactccctgcagaagtca

SEQ ID NO: 784080 - DNA, 33 bp, Homo sapien
taatttataatagcaatctccctgcagaagtca

SEQ ID NO: 784081 - DNA, 33 bp, Homo sapien
aataaagtagccaagaagaaagttcactatgaa

SEQ ID NO: 784082 - DNA, 33 bp, Homo sapien
aataaagtagccaagacgaaagttcactatgaa

SEQ ID NO: 784083 - DNA, 33 bp, Homo sapien
tttaagcttaatgacaatggacttagcaggaca

SEQ ID NO: 784084 - DNA, 33 bp, Homo sapien
tttaagcttaatgacagtggacttagcaggaca

SEQ ID NO: 784085 - DNA, 33 bp, Homo sapien
gacactgacttccctccgaaaatcttttcatac

SEQ ID NO: 784086 - DNA, 33 bp, Homo sapien
gacactgacttccctctgaaaatcttttcatac

SEQ ID NO: 784087 - DNA, 33 bp, Homo sapien
atcaatggatgtaaacaaacttatatcttacaa

SEQ ID NO: 784088 - DNA, 33 bp, Homo sapien
atcaatggatgtaaacgaacttatatcttacaa

SEQ ID NO: 784089 - DNA, 33 bp, Homo sapien
tctaaatgccatactacctataattctatgatt

SEQ ID NO: 784090 - DNA, 33 bp, Homo sapien
tctaaatgccatactatctataattctatgatt

SEQ ID NO: 784091 - DNA, 33 bp, Homo sapien
gacatttaggcaacaacttgtagtctcaggtat

SEQ ID NO: 784092 - DNA, 33 bp, Homo sapien
gacatttaggcaacaagttgtagtctcaggtat

SEQ ID NO: 784093 - DNA, 33 bp, Homo sapien
ggatttcgtggtcctacgctaagttcagaaagg

SEQ ID NO: 784094 - DNA, 33 bp, Homo sapien
ggatttcgtggtcctatgctaagttcagaaagg

SEQ ID NO: 784095 - DNA, 33 bp, Homo sapien
atcccggaaattataccgagcaaaacagaaact

SEQ ID NO: 784096 - DNA, 33 bp, Homo sapien
atcccggaaattatactgagcaaaacagaaact

SEQ ID NO: 784097 - DNA, 33 bp, Homo sapien
aggagaattgttgtgccatgaaattttaaccta

SEQ ID NO: 784098 - DNA, 33 bp, Homo sapien
aggagaattgttgtgctatgaaattttaaccta

SEQ ID NO: 784099 - DNA, 33 bp, Homo sapien
caagaatgttcctaagaatgcagtatgcaagtt

SEQ ID NO: 784100 - DNA, 33 bp, Homo sapien
caagaatgttcctaagcatgcagtatgcaagtt

SEQ ID NO: 784101 - DNA, 33 bp, Homo sapien
agaaatccgatagagaagttgtaatggaaaaac

SEQ ID NO: 784102 - DNA, 33 bp, Homo sapien
agaaatccgatagagaggttgtaatggaaaaac

SEQ ID NO: 784103 - DNA, 33 bp, Homo sapien
gggcaagaaacagggcaattaggtaaatggtta

SEQ ID NO: 784104 - DNA, 33 bp, Homo sapien
gggcaagaaacagggcgattaggtaaatggtta

SEQ ID NO: 784105 - DNA, 33 bp, Homo sapien
gatgtatgtatttcaaaggatgcactaaagttt

SEQ ID NO: 784106 - DNA, 33 bp, Homo sapien
gatgtatgtatttcaagggatgcactaaagttt

SEQ ID NO: 784107 - DNA, 33 bp, Homo sapien
aaacaagatgcacatacaagtctttctgcaaaa

SEQ ID NO: 784108 - DNA, 33 bp, Homo sapien
aaacaagatgcacatataagtctttctgcaaaa

SEQ ID NO: 784109 - DNA, 33 bp, Homo sapien
tgtttaattcagagcaaaaatcttgactgcatt

SEQ ID NO: 784110 - DNA, 33 bp, Homo sapien
tgtttaattcagagcagaaatcttgactgcatt

SEQ ID NO: 784111 - DNA, 33 bp, Homo sapien
taaaacttaactgtcaaaagtcatgctctcttt

SEQ ID NO: 784112 - DNA, 33 bp, Homo sapien
taaaacttaactgtcagaagtcatgctctcttt

SEQ ID NO: 784113 - DNA, 33 bp, Homo sapien
gtctaaaagtgcttcaaaactagaaacaaaaaa

SEQ ID NO: 784114 - DNA, 33 bp, Homo sapien
gtctaaaagtgcttcataactagaaacaaaaaa

SEQ ID NO: 784115 - DNA, 33 bp, Homo sapien
aaagtcatactccagaaaaaatttacccaagaa

SEQ ID NO: 784116 - DNA, 33 bp, Homo sapien
aaagtcatactccagagaaaatttacccaagaa

SEQ ID NO: 784117 - DNA, 33 bp, Homo sapien
tgctatttatacctcaataatgtcacagataag

SEQ ID NO: 784118 - DNA, 33 bp, Homo sapien
tgctatttatacctcagtaatgtcacagataag

SEQ ID NO: 784119 - DNA, 33 bp, Homo sapien
tgtttgtgtccatgtcaatttctttcatcagtg

SEQ ID NO: 784120 - DNA, 33 bp, Homo sapien
tgtttgtgtccatgtcgatttctttcatcagtg

SEQ ID NO: 784121 - DNA, 33 bp, Homo sapien
aaatcagatacatgcacaaaacagtgtctactc

SEQ ID NO: 784122 - DNA, 33 bp, Homo sapien
aaatcagatacatgcataaaacagtgtctactc

SEQ ID NO: 784123 - DNA, 33 bp, Homo sapien
gtttggagacctagtaaaggattagcagtggct

SEQ ID NO: 784124 - DNA, 33 bp, Homo sapien
gtttggagacctagtagaggattagcagtggct

SEQ ID NO: 784125 - DNA, 33 bp, Homo sapien
aataccatgtgaacaaccagaaaaacaccttct

SEQ ID NO: 784126 - DNA, 33 bp, Homo sapien
aataccatgtgaacaagcagaaaaacaccttct

SEQ ID NO: 784127 - DNA, 33 bp, Homo sapien
ataccatatgggactcaacaactttttgacagt

SEQ ID NO: 784128 - DNA, 33 bp, Homo sapien
ataccatatgggactcgacaactttttgacagt

SEQ ID NO: 784129 - DNA, 33 bp, Homo sapien
tctgctctcaccacaccagggaaactccgagga

SEQ ID NO: 784130 - DNA, 33 bp, Homo sapien
tctgctctcaccacactagggaaactccgagga

SEQ ID NO: 784131 - DNA, 33 bp, Homo sapien
gttgagtatgagaggaagagggccgaggacagt

SEQ ID NO: 784132 - DNA, 33 bp, Homo sapien
gttgagtatgagaggaggagggccgaggacagt

SEQ ID NO: 784133 - DNA, 33 bp, Homo sapien
ctagaataccttattcaatgtcctggtgacatt

SEQ ID NO: 784134 - DNA, 33 bp, Homo sapien
ctagaataccttattcgatgtcctggtgacatt

SEQ ID NO: 784135 - DNA, 33 bp, Homo sapien
atgggtcttagataaacggaaagaacatttcat

SEQ ID NO: 784136 - DNA, 33 bp, Homo sapien
atgggtcttagataaatggaaagaacatttcat

SEQ ID NO: 784137 - DNA, 33 bp, Homo sapien
ttggcgaatagagaagaaattcatggttttctt

SEQ ID NO: 784138 - DNA, 33 bp, Homo sapien
ttggcgaatagagaagcaattcatggttttctt

SEQ ID NO: 784139 - DNA, 33 bp, Homo sapien
aaagggaattgagaacgcagtatgatgtctttc

SEQ ID NO: 784140 - DNA, 33 bp, Homo sapien
aaagggaattgagaactcagtatgatgtctttc

SEQ ID NO: 784141 - DNA, 33 bp, Homo sapien
ataagctgctagaaggaccaaaaaaaattatat

SEQ ID NO: 784142 - DNA, 33 bp, Homo sapien
ataagctgctagaagggccaaaaaaaattatat

SEQ ID NO: 784143 - DNA, 33 bp, Homo sapien
tcaagtaaattgtgaaaaagaaactgaggatca

SEQ ID NO: 784144 - DNA, 33 bp, Homo sapien
tcaagtaaattgtgaacaagaaactgaggatca

SEQ ID NO: 784145 - DNA, 33 bp, Homo sapien
gatgatggatcggccaacagttcctaaaaaggg

SEQ ID NO: 784146 - DNA, 33 bp, Homo sapien
gatgatggatcggccaccagttcctaaaaaggg

SEQ ID NO: 784147 - DNA, 33 bp, Homo sapien
ttttcctctgcgttagcattcatcttagacagg

SEQ ID NO: 784148 - DNA, 33 bp, Homo sapien
ttttcctctgcgttagtattcatcttagacagg

SEQ ID NO: 784149 - DNA, 33 bp, Homo sapien
gcttcaggggctaaaagaattcaatcagacctt

SEQ ID NO: 784150 - DNA, 33 bp, Homo sapien
gcttcaggggctaaaataattcaatcagacctt

SEQ ID NO: 784151 - DNA, 33 bp, Homo sapien
gagttaagttgataagcagaaatgccaagaaaa

SEQ ID NO: 784152 - DNA, 33 bp, Homo sapien
gagttaagttgataaggagaaatgccaagaaaa

SEQ ID NO: 784153 - DNA, 33 bp, Homo sapien
tattcaggctagagagaagggaaaaagataaat

SEQ ID NO: 784154 - DNA, 33 bp, Homo sapien
tattcaggctagagaggagggaaaaagataaat

SEQ ID NO: 784155 - DNA, 33 bp, Homo sapien
atatgttagcatttaaagaagagcttgtttgct

SEQ ID NO: 784156 - DNA, 33 bp, Homo sapien
atatgttagcatttaatgaagagcttgtttgct

SEQ ID NO: 784157 - DNA, 33 bp, Homo sapien
aagctggcaaaggatccgagatggtaacagcat

SEQ ID NO: 784158 - DNA, 33 bp, Homo sapien
aagctggcaaaggatctgagatggtaacagcat

SEQ ID NO: 784159 - DNA, 33 bp, Homo sapien
agggtatgcacccaaccgttctgcggtctccca

SEQ ID NO: 784160 - DNA, 33 bp, Homo sapien
agggtatgcacccaactgttctgcggtctccca

SEQ ID NO: 784161 - DNA, 33 bp, Homo sapien
atggtgactataattaacaacaacttattgtat

SEQ ID NO: 784162 - DNA, 33 bp, Homo sapien
atggtgactataattagcaacaacttattgtat

SEQ ID NO: 784163 - DNA, 33 bp, Homo sapien
aagtgttatattttgaagtgatgttagtagagt

SEQ ID NO: 784164 - DNA, 33 bp, Homo sapien
aagtgttatattttgacgtgatgttagtagagt

SEQ ID NO: 784165 - DNA, 33 bp, Homo sapien
gtcagcaaattaaacaatactccccttagtcaa

SEQ ID NO: 784166 - DNA, 33 bp, Homo sapien
gtcagcaaattaaacagtactccccttagtcaa

SEQ ID NO: 784167 - DNA, 33 bp, Homo sapien
tttttagcgctagcagaaacgttagaaatgttc

SEQ ID NO: 784168 - DNA, 33 bp, Homo sapien
tttttagcgctagcaggaacgttagaaatgttc

SEQ ID NO: 784169 - DNA, 33 bp, Homo sapien
attttaaaaccgaatgcattgcacacaaaataa

SEQ ID NO: 784170 - DNA, 33 bp, Homo sapien
attttaaaaccgaatggattgcacacaaaataa

SEQ ID NO: 784171 - DNA, 33 bp, Homo sapien
tgcactgactggctaactctctctcactcttag

SEQ ID NO: 784172 - DNA, 33 bp, Homo sapien
tgcactgactggctaattctctctcactcttag

SEQ ID NO: 784173 - DNA, 33 bp, Homo sapien
ttcccacagttctttaacaatatgtcagtgtcg

SEQ ID NO: 784174 - DNA, 33 bp, Homo sapien
ttcccacagttctttatcaatatgtcagtgtcg

SEQ ID NO: 784175 - DNA, 33 bp, Homo sapien
ggcaatagtttgaaaacaggcaattgactagcg

SEQ ID NO: 784176 - DNA, 33 bp, Homo sapien
ggcaatagtttgaaaagaggcaattgactagcg

SEQ ID NO: 784177 - DNA, 33 bp, Homo sapien
ctcctattacattgatcacagttcaccctacaa

SEQ ID NO: 784178 - DNA, 33 bp, Homo sapien
ctcctattacattgatgacagttcaccctacaa

SEQ ID NO: 784179 - DNA, 33 bp, Homo sapien
cagaaacagtgaccaacccatgaatatatttcc

SEQ ID NO: 784180 - DNA, 33 bp, Homo sapien
cagaaacagtgaccaatccatgaatatatttcc

SEQ ID NO: 784181 - DNA, 33 bp, Homo sapien
ccttgaacttttagagaataacatcaccccata

SEQ ID NO: 784182 - DNA, 33 bp, Homo sapien
ccttgaacttttagaggataacatcaccccata

SEQ ID NO: 784183 - DNA, 33 bp, Homo sapien
ggactgccccctttacaataatcagctaataaa

SEQ ID NO: 784184 - DNA, 33 bp, Homo sapien
ggactgccccctttacgataatcagctaataaa

SEQ ID NO: 784185 - DNA, 33 bp, Homo sapien
ttacagactatgaataaggtctttgttccttta

SEQ ID NO: 784186 - DNA, 33 bp, Homo sapien
ttacagactatgaatatggtctttgttccttta

SEQ ID NO: 784187 - DNA, 33 bp, Homo sapien
aagcataaaggacccaatggaaaatggaatctt

SEQ ID NO: 784188 - DNA, 33 bp, Homo sapien
aagcataaaggacccagtggaaaatggaatctt

SEQ ID NO: 784189 - DNA, 33 bp, Homo sapien
agtaaaaacttgctcagctggaacatcagtgct

SEQ ID NO: 784190 - DNA, 33 bp, Homo sapien
agtaaaaacttgctcatctggaacatcagtgct

SEQ ID NO: 784191 - DNA, 33 bp, Homo sapien
gagttggtacaaagtgaagggacaaaatgtaat

SEQ ID NO: 784192 - DNA, 33 bp, Homo sapien
gagttggtacaaagtgcagggacaaaatgtaat

SEQ ID NO: 784193 - DNA, 33 bp, Homo sapien
attgtcacagcaaatccctgtagctatgaatta

SEQ ID NO: 784194 - DNA, 33 bp, Homo sapien
attgtcacagcaaatctctgtagctatgaatta

SEQ ID NO: 784195 - DNA, 33 bp, Homo sapien
tttggaaatgttataaaatcaacctcataagca

SEQ ID NO: 784196 - DNA, 33 bp, Homo sapien
tttggaaatgttataatatcaacctcataagca

SEQ ID NO: 784197 - DNA, 33 bp, Homo sapien
acttcctccatcatcaccaaaaggcaactggaa

SEQ ID NO: 784198 - DNA, 33 bp, Homo sapien
acttcctccatcatcatcaaaaggcaactggaa

SEQ ID NO: 784199 - DNA, 33 bp, Homo sapien
cctatttgattgttagaatttatctgtaaaagg

SEQ ID NO: 784200 - DNA, 33 bp, Homo sapien
cctatttgattgttaggatttatctgtaaaagg

SEQ ID NO: 784201 - DNA, 33 bp, Homo sapien
agacaatctataaccaactttaatcatgcatta

SEQ ID NO: 784202 - DNA, 33 bp, Homo sapien
agacaatctataaccatctttaatcatgcatta

SEQ ID NO: 784203 - DNA, 33 bp, Homo sapien
atggacaatggatgtacggataatttggccctt

SEQ ID NO: 784204 - DNA, 33 bp, Homo sapien
atggacaatggatgtagggataatttggccctt

SEQ ID NO: 784205 - DNA, 33 bp, Homo sapien
tccactattttggaccaaaaaaaaatcagcaat

SEQ ID NO: 784206 - DNA, 33 bp, Homo sapien
tccactattttggacccaaaaaaaatcagcaat

SEQ ID NO: 784207 - DNA, 33 bp, Homo sapien
gagaggggtgaagaataaaataccatctatttg

SEQ ID NO: 784208 - DNA, 33 bp, Homo sapien
gagaggggtgaagaatgaaataccatctatttg

SEQ ID NO: 784209 - DNA, 33 bp, Homo sapien
gcccagactttaccaccatgcaatacatccatg

SEQ ID NO: 784210 - DNA, 33 bp, Homo sapien
gcccagactttaccactatgcaatacatccatg

SEQ ID NO: 784211 - DNA, 33 bp, Homo sapien
cagatgatatcaagagaaagatcagattaatct

SEQ ID NO: 784212 - DNA, 33 bp, Homo sapien
cagatgatatcaagaggaagatcagattaatct

SEQ ID NO: 784213 - DNA, 33 bp, Homo sapien
acaacttactggacaactctgattttctttctt

SEQ ID NO: 784214 - DNA, 33 bp, Homo sapien
acaacttactggacaattctgattttctttctt

SEQ ID NO: 784215 - DNA, 33 bp, Homo sapien
aggaaatccaagtcaccaatatgtggtatgtgg

SEQ ID NO: 784216 - DNA, 33 bp, Homo sapien
aggaaatccaagtcactaatatgtggtatgtgg

SEQ ID NO: 784217 - DNA, 33 bp, Homo sapien
tttagtttgttggttcaaaagactcaaaaaaat

SEQ ID NO: 784218 - DNA, 33 bp, Homo sapien
tttagtttgttggttcgaaagactcaaaaaaat

SEQ ID NO: 784219 - DNA, 33 bp, Homo sapien
ctttttatgacgataaatgaattgaaaacaagt

SEQ ID NO: 784220 - DNA, 33 bp, Homo sapien
ctttttatgacgataagtgaattgaaaacaagt

SEQ ID NO: 784221 - DNA, 33 bp, Homo sapien
aacaagtcaaaaagtacgaaagatgaatctaga

SEQ ID NO: 784222 - DNA, 33 bp, Homo sapien
aacaagtcaaaaagtatgaaagatgaatctaga

SEQ ID NO: 784223 - DNA, 33 bp, Homo sapien
ggacacattcagaccacgtttagttgtgttgtc

SEQ ID NO: 784224 - DNA, 33 bp, Homo sapien
ggacacattcagaccatgtttagttgtgttgtc

SEQ ID NO: 784225 - DNA, 33 bp, Homo sapien
atgctaagtcttcatcaaaaacaatgccaaatt

SEQ ID NO: 784226 - DNA, 33 bp, Homo sapien
atgctaagtcttcatcgaaaacaatgccaaatt

SEQ ID NO: 784227 - DNA, 33 bp, Homo sapien
caactaactctttggccataggagtactgggac

SEQ ID NO: 784228 - DNA, 33 bp, Homo sapien
caactaactctttggctataggagtactgggac

SEQ ID NO: 784229 - DNA, 33 bp, Homo sapien
atatattggaaactaaacccttatctgatatat

SEQ ID NO: 784230 - DNA, 33 bp, Homo sapien
atatattggaaactaaccccttatctgatatat

SEQ ID NO: 784231 - DNA, 33 bp, Homo sapien
aatttctcgtggctatgagtctgttttcttgct

SEQ ID NO: 784232 - DNA, 33 bp, Homo sapien
aatttctcgtggctattagtctgttttcttgct

SEQ ID NO: 784233 - DNA, 33 bp, Homo sapien
ctatactgcacttccaaatagacattgtaggtg

SEQ ID NO: 784234 - DNA, 33 bp, Homo sapien
ctatactgcacttccatatagacattgtaggtg

SEQ ID NO: 784235 - DNA, 33 bp, Homo sapien
gatcaaaggccttgtcaaaagaactggtaacaa

SEQ ID NO: 784236 - DNA, 33 bp, Homo sapien
gatcaaaggccttgtcgaaagaactggtaacaa

SEQ ID NO: 784237 - DNA, 33 bp, Homo sapien
taaaacagattatgaaaagaggactgaaattta

SEQ ID NO: 784238 - DNA, 33 bp, Homo sapien
taaaacagattatgaagagaggactgaaattta

SEQ ID NO: 784239 - DNA, 33 bp, Homo sapien
gtacaaatcaaaagtaaaagacagcttcagttg

SEQ ID NO: 784240 - DNA, 33 bp, Homo sapien
gtacaaatcaaaagtagaagacagcttcagttg

SEQ ID NO: 784241 - DNA, 33 bp, Homo sapien
aaggcaaacagaataagcgcacaaactctttgt

SEQ ID NO: 784242 - DNA, 33 bp, Homo sapien
aaggcaaacagaataatcgcacaaactctttgt

SEQ ID NO: 784243 - DNA, 33 bp, Homo sapien
caagggaaatcagcaaaattgtatagtctctca

SEQ ID NO: 784244 - DNA, 33 bp, Homo sapien
caagggaaatcagcaagattgtatagtctctca

SEQ ID NO: 784245 - DNA, 33 bp, Homo sapien
gttacaggcattgggtaaaatactcccgttcca

SEQ ID NO: 784246 - DNA, 33 bp, Homo sapien
gttacaggcattgggtgaaatactcccgttcca

SEQ ID NO: 784247 - DNA, 33 bp, Homo sapien
aagtgttgtgagaacaatattttcaaggtggaa

SEQ ID NO: 784248 - DNA, 33 bp, Homo sapien
aagtgttgtgagaacagtattttcaaggtggaa

SEQ ID NO: 784249 - DNA, 33 bp, Homo sapien
caagaattgggagaaaatctatggttaggatgg

SEQ ID NO: 784250 - DNA, 33 bp, Homo sapien
caagaattgggagaaagtctatggttaggatgg

SEQ ID NO: 784251 - DNA, 33 bp, Homo sapien
gatatccaatagaaagcagatatccaacacaaa

SEQ ID NO: 784252 - DNA, 33 bp, Homo sapien
gatatccaatagaaaggagatatccaacacaaa

SEQ ID NO: 784253 - DNA, 33 bp, Homo sapien
gtcatagtattgttagccgagccttgtacttaa

SEQ ID NO: 784254 - DNA, 33 bp, Homo sapien
gtcatagtattgttagtcgagccttgtacttaa

SEQ ID NO: 784255 - DNA, 33 bp, Homo sapien
actgagaaacggggcacattcagttgaaggatg

SEQ ID NO: 784256 - DNA, 33 bp, Homo sapien
actgagaaacggggcagattcagttgaaggatg

SEQ ID NO: 784257 - DNA, 33 bp, Homo sapien
tgttttgcttgcttatcactatccataaaccat

SEQ ID NO: 784258 - DNA, 33 bp, Homo sapien
tgttttgcttgcttatgactatccataaaccat

SEQ ID NO: 784259 - DNA, 33 bp, Homo sapien
caaactttgctcttaacggtgggcggtaattca

SEQ ID NO: 784260 - DNA, 33 bp, Homo sapien
caaactttgctcttaatggtgggcggtaattca

SEQ ID NO: 784261 - DNA, 33 bp, Homo sapien
atagcccaggatcatacgtttaacctggagccc

SEQ ID NO: 784262 - DNA, 33 bp, Homo sapien
atagcccaggatcataggtttaacctggagccc

SEQ ID NO: 784263 - DNA, 33 bp, Homo sapien
atattaaaacaatacccggcttataagcaatga

SEQ ID NO: 784264 - DNA, 33 bp, Homo sapien
atattaaaacaatacctggcttataagcaatga

SEQ ID NO: 784265 - DNA, 33 bp, Homo sapien
ctttccagaactgttacggggttcaaatgaaac

SEQ ID NO: 784266 - DNA, 33 bp, Homo sapien
ctttccagaactgttatggggttcaaatgaaac

SEQ ID NO: 784267 - DNA, 33 bp, Homo sapien
aattgtggatctttaaaaagagaatgtcaaacc

SEQ ID NO: 784268 - DNA, 33 bp, Homo sapien
aattgtggatctttaagaagagaatgtcaaacc

SEQ ID NO: 784269 - DNA, 33 bp, Homo sapien
agagagctagagggcacgtgaggtataagcaaa

SEQ ID NO: 784270 - DNA, 33 bp, Homo sapien
agagagctagagggcaggtgaggtataagcaaa

SEQ ID NO: 784271 - DNA, 33 bp, Homo sapien
gggtgactagcttctgcagagctgttagaaccc

SEQ ID NO: 784272 - DNA, 33 bp, Homo sapien
gggtgactagcttctgtagagctgttagaaccc

SEQ ID NO: 784273 - DNA, 33 bp, Homo sapien
gagaaagagtctccacagatttctggattgagg

SEQ ID NO: 784274 - DNA, 33 bp, Homo sapien
gagaaagagtctccacggatttctggattgagg

SEQ ID NO: 784275 - DNA, 33 bp, Homo sapien
gtctgtctgaggtaccagctggcttcgtagtca

SEQ ID NO: 784276 - DNA, 33 bp, Homo sapien
gtctgtctgaggtacccgctggcttcgtagtca

SEQ ID NO: 784277 - DNA, 33 bp, Homo sapien
caccaaaattctccagaagattctgatccagcc

SEQ ID NO: 784278 - DNA, 33 bp, Homo sapien
caccaaaattctccaggagattctgatccagcc

SEQ ID NO: 784279 - DNA, 33 bp, Homo sapien
tttagaagggctcacaaaacagataaaagggga

SEQ ID NO: 784280 - DNA, 33 bp, Homo sapien
tttagaagggctcacagaacagataaaagggga

SEQ ID NO: 784281 - DNA, 33 bp, Homo sapien
tctagatgtccagaaacgaccttgaaatatgaa

SEQ ID NO: 784282 - DNA, 33 bp, Homo sapien
tctagatgtccagaaatgaccttgaaatatgaa

SEQ ID NO: 784283 - DNA, 33 bp, Homo sapien
gctgacccctcgctcaataagtacattcctcca

SEQ ID NO: 784284 - DNA, 33 bp, Homo sapien
gctgacccctcgctcagtaagtacattcctcca

SEQ ID NO: 784285 - DNA, 33 bp, Homo sapien
agcatcctatggtattaaaacatgaagatccaa

SEQ ID NO: 784286 - DNA, 33 bp, Homo sapien
agcatcctatggtattgaaacatgaagatccaa

SEQ ID NO: 784287 - DNA, 33 bp, Homo sapien
gtatcagaatttctgaagcacaactttgatttt

SEQ ID NO: 784288 - DNA, 33 bp, Homo sapien
gtatcagaatttctgaggcacaactttgatttt

SEQ ID NO: 784289 - DNA, 33 bp, Homo sapien
atttcagccattccaacagatctgaagtagtat

SEQ ID NO: 784290 - DNA, 33 bp, Homo sapien
atttcagccattccaatagatctgaagtagtat

SEQ ID NO: 784291 - DNA, 33 bp, Homo sapien
tacagtgttctttggaatataatatggcgtgaa

SEQ ID NO: 784292 - DNA, 33 bp, Homo sapien
tacagtgttctttggagtataatatggcgtgaa

SEQ ID NO: 784293 - DNA, 33 bp, Homo sapien
gagtgaaaaatgtcaaccttaaaagttgcatat

SEQ ID NO: 784294 - DNA, 33 bp, Homo sapien
gagtgaaaaatgtcaatcttaaaagttgcatat

SEQ ID NO: 784295 - DNA, 33 bp, Homo sapien
tatcctgtttagcctacgaattgacaatgaggt

SEQ ID NO: 784296 - DNA, 33 bp, Homo sapien
tatcctgtttagcctatgaattgacaatgaggt

SEQ ID NO: 784297 - DNA, 33 bp, Homo sapien
aaaggcctactagtaccaaactgaaatttttct

SEQ ID NO: 784298 - DNA, 33 bp, Homo sapien
aaaggcctactagtactaaactgaaatttttct

SEQ ID NO: 784299 - DNA, 33 bp, Homo sapien
acttatttactcatcaacttaaatgttcatctc

SEQ ID NO: 784300 - DNA, 33 bp, Homo sapien
acttatttactcatcagcttaaatgttcatctc

SEQ ID NO: 784301 - DNA, 33 bp, Homo sapien
ggatatttattgttaacgtgtttgttcttgttt

SEQ ID NO: 784302 - DNA, 33 bp, Homo sapien
ggatatttattgttaatgtgtttgttcttgttt

SEQ ID NO: 784303 - DNA, 33 bp, Homo sapien
aggaccaaaagcagaacgagaataaagatggag

SEQ ID NO: 784304 - DNA, 33 bp, Homo sapien
aggaccaaaagcagaatgagaataaagatggag

SEQ ID NO: 784305 - DNA, 33 bp, Homo sapien
gatgtagtgtgtgctactactcagccccttaac

SEQ ID NO: 784306 - DNA, 33 bp, Homo sapien
gatgtagtgtgtgctattactcagccccttaac

SEQ ID NO: 784307 - DNA, 33 bp, Homo sapien
cgagatgctgggccaagctgcaaaccataactg

SEQ ID NO: 784308 - DNA, 33 bp, Homo sapien
cgagatgctgggccaatctgcaaaccataactg

SEQ ID NO: 784309 - DNA, 33 bp, Homo sapien
gtccttaaaattattcccattctcataccaact

SEQ ID NO: 784310 - DNA, 33 bp, Homo sapien
gtccttaaaattattctcattctcataccaact

SEQ ID NO: 784311 - DNA, 33 bp, Homo sapien
gaaaataattagcaaaatcattgaacatcttta

SEQ ID NO: 784312 - DNA, 33 bp, Homo sapien
gaaaataattagcaaagtcattgaacatcttta

SEQ ID NO: 784313 - DNA, 33 bp, Homo sapien
ttaggacatgtgaatcaataagcaagatgaatc

SEQ ID NO: 784314 - DNA, 33 bp, Homo sapien
ttaggacatgtgaatccataagcaagatgaatc

SEQ ID NO: 784315 - DNA, 33 bp, Homo sapien
aatccactcgagatgaaagggactgaaaaccaa

SEQ ID NO: 784316 - DNA, 33 bp, Homo sapien
aatccactcgagatgacagggactgaaaaccaa

SEQ ID NO: 784317 - DNA, 33 bp, Homo sapien
cattttttgcatacacaggacacttatttgcct

SEQ ID NO: 784318 - DNA, 33 bp, Homo sapien
cattttttgcatacacgggacacttatttgcct

SEQ ID NO: 784319 - DNA, 33 bp, Homo sapien
ttgtaaaatgtattgacgcctacatgtcatatt

SEQ ID NO: 784320 - DNA, 33 bp, Homo sapien
ttgtaaaatgtattgatgcctacatgtcatatt

SEQ ID NO: 784321 - DNA, 33 bp, Homo sapien
ctatagcaagtgttcaataaacattagcaattg

SEQ ID NO: 784322 - DNA, 33 bp, Homo sapien
ctatagcaagtgttcagtaaacattagcaattg

SEQ ID NO: 784323 - DNA, 33 bp, Homo sapien
tgcagccatcttgttagaaatctgaggatgaag

SEQ ID NO: 784324 - DNA, 33 bp, Homo sapien
tgcagccatcttgttataaatctgaggatgaag

SEQ ID NO: 784325 - DNA, 33 bp, Homo sapien
ttggatccaatctgccaaattgtagaattgaat

SEQ ID NO: 784326 - DNA, 33 bp, Homo sapien
ttggatccaatctgccgaattgtagaattgaat

SEQ ID NO: 784327 - DNA, 33 bp, Homo sapien
caggacacagcagttacaaaccaatttaggatg

SEQ ID NO: 784328 - DNA, 33 bp, Homo sapien
caggacacagcagttagaaaccaatttaggatg

SEQ ID NO: 784329 - DNA, 33 bp, Homo sapien
aatgccttggctgaaaaaaatgcaatccctctt

SEQ ID NO: 784330 - DNA, 33 bp, Homo sapien
aatgccttggctgaaataaatgcaatccctctt

SEQ ID NO: 784331 - DNA, 33 bp, Homo sapien
ttcttacaagagagaacgaatcacaagaataat

SEQ ID NO: 784332 - DNA, 33 bp, Homo sapien
ttcttacaagagagaatgaatcacaagaataat

SEQ ID NO: 784333 - DNA, 33 bp, Homo sapien
tttcgaaagctaccatcaccttcaatagaataa

SEQ ID NO: 784334 - DNA, 33 bp, Homo sapien
tttcgaaagctaccatgaccttcaatagaataa

SEQ ID NO: 784335 - DNA, 33 bp, Homo sapien
acactatttttataaccaggcattgtaaaactt

SEQ ID NO: 784336 - DNA, 33 bp, Homo sapien
acactatttttataactaggcattgtaaaactt

SEQ ID NO: 784337 - DNA, 33 bp, Homo sapien
aaaaataaatgagacaatgagtatgtggaatgc

SEQ ID NO: 784338 - DNA, 33 bp, Homo sapien
aaaaataaatgagacagtgagtatgtggaatgc

SEQ ID NO: 784339 - DNA, 33 bp, Homo sapien
aaaatgtcaatactcaccttatctcctttgatg

SEQ ID NO: 784340 - DNA, 33 bp, Homo sapien
aaaatgtcaatactcatcttatctcctttgatg

SEQ ID NO: 784341 - DNA, 33 bp, Homo sapien
gcatctgtttggaacaaccacccaaggcgattc

SEQ ID NO: 784342 - DNA, 33 bp, Homo sapien
gcatctgtttggaacagccacccaaggcgattc

SEQ ID NO: 784343 - DNA, 33 bp, Homo sapien
tgggagtgttgcaagaatataaggatagaaagg

SEQ ID NO: 784344 - DNA, 33 bp, Homo sapien
tgggagtgttgcaagagtataaggatagaaagg

SEQ ID NO: 784345 - DNA, 33 bp, Homo sapien
tttgtttcactgggaaataaaaatccttgtaaa

SEQ ID NO: 784346 - DNA, 33 bp, Homo sapien
tttgtttcactgggaagtaaaaatccttgtaaa

SEQ ID NO: 784347 - DNA, 33 bp, Homo sapien
ggagatttttcattaccattaactcatttgtca

SEQ ID NO: 784348 - DNA, 33 bp, Homo sapien
ggagatttttcattactattaactcatttgtca

SEQ ID NO: 784349 - DNA, 33 bp, Homo sapien
ataacatggtgctaaacagtagaaaggcaagat

SEQ ID NO: 784350 - DNA, 33 bp, Homo sapien
ataacatggtgctaaatagtagaaaggcaagat

SEQ ID NO: 784351 - DNA, 33 bp, Homo sapien
ctcatctcagtggtcacagttaaactcaattta

SEQ ID NO: 784352 - DNA, 33 bp, Homo sapien
ctcatctcagtggtcatagttaaactcaattta

SEQ ID NO: 784353 - DNA, 33 bp, Homo sapien
caacttcattttttgacgtttgactgctgaaag

SEQ ID NO: 784354 - DNA, 33 bp, Homo sapien
caacttcattttttgatgtttgactgctgaaag

SEQ ID NO: 784355 - DNA, 33 bp, Homo sapien
ggggactcatgatagactaaagatacattcgtc

SEQ ID NO: 784356 - DNA, 33 bp, Homo sapien
ggggactcatgatagattaaagatacattcgtc

SEQ ID NO: 784357 - DNA, 33 bp, Homo sapien
ggtagttcacacatcactaaatattgaacaaac

SEQ ID NO: 784358 - DNA, 33 bp, Homo sapien
ggtagttcacacatcattaaatattgaacaaac

SEQ ID NO: 784359 - DNA, 33 bp, Homo sapien
cctccataatatcacacctggagaacaatcact

SEQ ID NO: 784360 - DNA, 33 bp, Homo sapien
cctccataatatcacatctggagaacaatcact

SEQ ID NO: 784361 - DNA, 33 bp, Homo sapien
acatataggaaaggtgaattattaagcaggcca

SEQ ID NO: 784362 - DNA, 33 bp, Homo sapien
acatataggaaaggtgcattattaagcaggcca

SEQ ID NO: 784363 - DNA, 33 bp, Homo sapien
tctccctgataacatacagggagaacagtgttt

SEQ ID NO: 784364 - DNA, 33 bp, Homo sapien
tctccctgataacatagagggagaacagtgttt

SEQ ID NO: 784365 - DNA, 33 bp, Homo sapien
tagcagaatgagggtgcaatgcccacagctgct

SEQ ID NO: 784366 - DNA, 33 bp, Homo sapien
tagcagaatgagggtgtaatgcccacagctgct

SEQ ID NO: 784367 - DNA, 33 bp, Homo sapien
agcatttttcagagccaactgctgggtccacaa

SEQ ID NO: 784368 - DNA, 33 bp, Homo sapien
agcatttttcagagccgactgctgggtccacaa

SEQ ID NO: 784369 - DNA, 33 bp, Homo sapien
acagcctgccaatgacaactggctgctttggcc

SEQ ID NO: 784370 - DNA, 33 bp, Homo sapien
acagcctgccaatgacgactggctgctttggcc

SEQ ID NO: 784371 - DNA, 33 bp, Homo sapien
taattttgtccaaactaaacagctggtaggttg

SEQ ID NO: 784372 - DNA, 33 bp, Homo sapien
taattttgtccaaactgaacagctggtaggttg

SEQ ID NO: 784373 - DNA, 33 bp, Homo sapien
atcagtataacaatggccacttcccaccccatg

SEQ ID NO: 784374 - DNA, 33 bp, Homo sapien
atcagtataacaatggtcacttcccaccccatg

SEQ ID NO: 784375 - DNA, 33 bp, Homo sapien
taaaaaatcgaagttcaaggtgtatttagattt

SEQ ID NO: 784376 - DNA, 33 bp, Homo sapien
taaaaaatcgaagttccaggtgtatttagattt

SEQ ID NO: 784377 - DNA, 33 bp, Homo sapien
aaccaatggtatctgccatactgagaacatcta

SEQ ID NO: 784378 - DNA, 33 bp, Homo sapien
aaccaatggtatctgctatactgagaacatcta

SEQ ID NO: 784379 - DNA, 33 bp, Homo sapien
tacaagactgaaaaccaggagaccaaatacctt

SEQ ID NO: 784380 - DNA, 33 bp, Homo sapien
tacaagactgaaaaccgggagaccaaatacctt

SEQ ID NO: 784381 - DNA, 33 bp, Homo sapien
aagcacattccagggaagatttggaggcagagt

SEQ ID NO: 784382 - DNA, 33 bp, Homo sapien
aagcacattccagggatgatttggaggcagagt

SEQ ID NO: 784383 - DNA, 33 bp, Homo sapien
gactgaacaaccaggcacgtaccatagctttcc

SEQ ID NO: 784384 - DNA, 33 bp, Homo sapien
gactgaacaaccaggcgcgtaccatagctttcc

SEQ ID NO: 784385 - DNA, 33 bp, Homo sapien
aaagattatcaaccatcagtgtcatttttcaag

SEQ ID NO: 784386 - DNA, 33 bp, Homo sapien
aaagattatcaaccatgagtgtcatttttcaag

SEQ ID NO: 784387 - DNA, 33 bp, Homo sapien
caaatagaggttttcaaaatgcacatcagtaac

SEQ ID NO: 784388 - DNA, 33 bp, Homo sapien
caaatagaggttttcataatgcacatcagtaac

SEQ ID NO: 784389 - DNA, 33 bp, Homo sapien
attgtggttctggttcaatccataaaaaatctt

SEQ ID NO: 784390 - DNA, 33 bp, Homo sapien
attgtggttctggttcgatccataaaaaatctt

SEQ ID NO: 784391 - DNA, 33 bp, Homo sapien
atgggatttactgccaaatggataaagttttga

SEQ ID NO: 784392 - DNA, 33 bp, Homo sapien
atgggatttactgccagatggataaagttttga

SEQ ID NO: 784393 - DNA, 33 bp, Homo sapien
aagtggaaagagaaacagagtaataaaatgttt

SEQ ID NO: 784394 - DNA, 33 bp, Homo sapien
aagtggaaagagaaacggagtaataaaatgttt

SEQ ID NO: 784395 - DNA, 33 bp, Homo sapien
ttttgattgaaggggaaggtaagcaaaacgcaa

SEQ ID NO: 784396 - DNA, 33 bp, Homo sapien
ttttgattgaaggggatggtaagcaaaacgcaa

SEQ ID NO: 784397 - DNA, 33 bp, Homo sapien
ggcttgcgtgggtcatcagagagagaggtcacg

SEQ ID NO: 784398 - DNA, 33 bp, Homo sapien
ggcttgcgtgggtcatgagagagagaggtcacg

SEQ ID NO: 784399 - DNA, 33 bp, Homo sapien
gactgttgactagtggaaaatcattatgtttaa

SEQ ID NO: 784400 - DNA, 33 bp, Homo sapien
gactgttgactagtgggaaatcattatgtttaa

SEQ ID NO: 784401 - DNA, 33 bp, Homo sapien
cgggaggtatagccaaagatgcaaccgtgttct

SEQ ID NO: 784402 - DNA, 33 bp, Homo sapien
cgggaggtatagccaaggatgcaaccgtgttct

SEQ ID NO: 784403 - DNA, 33 bp, Homo sapien
aaactggctgaagtgcaacaggctgaggaagga

SEQ ID NO: 784404 - DNA, 33 bp, Homo sapien
aaactggctgaagtgcgacaggctgaggaagga

SEQ ID NO: 784405 - DNA, 33 bp, Homo sapien
gttgtgagacatagaggaaaaagaataagagca

SEQ ID NO: 784406 - DNA, 33 bp, Homo sapien
gttgtgagacatagagtaaaaagaataagagca

SEQ ID NO: 784407 - DNA, 33 bp, Homo sapien
cgaagtatgtgtggtaagactgcagctgccgag

SEQ ID NO: 784408 - DNA, 33 bp, Homo sapien
cgaagtatgtgtggtacgactgcagctgccgag

SEQ ID NO: 784409 - DNA, 33 bp, Homo sapien
gccacatacataaatcacgtaaccacatatttt

SEQ ID NO: 784410 - DNA, 33 bp, Homo sapien
gccacatacataaatcgcgtaaccacatatttt

SEQ ID NO: 784411 - DNA, 33 bp, Homo sapien
ctagtgattcatctccaattctgttgaaaaagc

SEQ ID NO: 784412 - DNA, 33 bp, Homo sapien
ctagtgattcatctccgattctgttgaaaaagc

SEQ ID NO: 784413 - DNA, 33 bp, Homo sapien
aggcaacatcaaactacactaggaaaagtgact

SEQ ID NO: 784414 - DNA, 33 bp, Homo sapien
aggcaacatcaaactatactaggaaaagtgact

SEQ ID NO: 784415 - DNA, 33 bp, Homo sapien
agatgccagagccataccatgagaagtagagta

SEQ ID NO: 784416 - DNA, 33 bp, Homo sapien
agatgccagagccatagcatgagaagtagagta

SEQ ID NO: 784417 - DNA, 33 bp, Homo sapien
tggccagctggtaaaccaaaggagagaatgtcc

SEQ ID NO: 784418 - DNA, 33 bp, Homo sapien
tggccagctggtaaactaaaggagagaatgtcc

SEQ ID NO: 784419 - DNA, 33 bp, Homo sapien
tactgaggtttgtaaaaagttgcgaactgctga

SEQ ID NO: 784420 - DNA, 33 bp, Homo sapien
tactgaggtttgtaaagagttgcgaactgctga

SEQ ID NO: 784421 - DNA, 33 bp, Homo sapien
tttatgtgaaggtgaactcttgcacttggtttc

SEQ ID NO: 784422 - DNA, 33 bp, Homo sapien
tttatgtgaaggtgaattcttgcacttggtttc

SEQ ID NO: 784423 - DNA, 33 bp, Homo sapien
gtgtatggatgataagcccaacggtaatttttt

SEQ ID NO: 784424 - DNA, 33 bp, Homo sapien
gtgtatggatgataagtccaacggtaatttttt

SEQ ID NO: 784425 - DNA, 33 bp, Homo sapien
caacatctagaacagcacaaccgtatatggaga

SEQ ID NO: 784426 - DNA, 33 bp, Homo sapien
caacatctagaacagcgcaaccgtatatggaga

SEQ ID NO: 784427 - DNA, 33 bp, Homo sapien
catttttctgcttgtacatagtcctttttggtg

SEQ ID NO: 784428 - DNA, 33 bp, Homo sapien
catttttctgcttgtagatagtcctttttggtg

SEQ ID NO: 784429 - DNA, 33 bp, Homo sapien
aggatactgtgcaaacgccttaccaagtcttgc

SEQ ID NO: 784430 - DNA, 33 bp, Homo sapien
aggatactgtgcaaactccttaccaagtcttgc

SEQ ID NO: 784431 - DNA, 33 bp, Homo sapien
attgtgacacttatgaaatagtcatccaatgcc

SEQ ID NO: 784432 - DNA, 33 bp, Homo sapien
attgtgacacttatgagatagtcatccaatgcc

SEQ ID NO: 784433 - DNA, 33 bp, Homo sapien
atgctactggtccagagatcatacttaaagacc

SEQ ID NO: 784434 - DNA, 33 bp, Homo sapien
atgctactggtccagatatcatacttaaagacc

SEQ ID NO: 784435 - DNA, 33 bp, Homo sapien
tctctacgaaaaatacacaaaatactgggcgtg

SEQ ID NO: 784436 - DNA, 33 bp, Homo sapien
tctctacgaaaaatacgcaaaatactgggcgtg

SEQ ID NO: 784437 - DNA, 33 bp, Homo sapien
gctgcagaataaaaaccggtctcttttgactgt

SEQ ID NO: 784438 - DNA, 33 bp, Homo sapien
gctgcagaataaaaactggtctcttttgactgt

SEQ ID NO: 784439 - DNA, 33 bp, Homo sapien
aaaccgacagaaatccaaacccacctggagcag

SEQ ID NO: 784440 - DNA, 33 bp, Homo sapien
aaaccgacagaaatccgaacccacctggagcag

SEQ ID NO: 784441 - DNA, 33 bp, Homo sapien
attaggtgccttaccaaacatttctgattgtta

SEQ ID NO: 784442 - DNA, 33 bp, Homo sapien
attaggtgccttaccagacatttctgattgtta

SEQ ID NO: 784443 - DNA, 33 bp, Homo sapien
tagatttatcttcacaagcctattttcaggacc

SEQ ID NO: 784444 - DNA, 33 bp, Homo sapien
tagatttatcttcacaggcctattttcaggacc

SEQ ID NO: 784445 - DNA, 33 bp, Homo sapien
actttgtctcaatataaatgttgtctcaatata

SEQ ID NO: 784446 - DNA, 33 bp, Homo sapien
actttgtctcaatatagatgttgtctcaatata

SEQ ID NO: 784447 - DNA, 33 bp, Homo sapien
cctgctgtgctttacaagtaaatagagaatgga

SEQ ID NO: 784448 - DNA, 33 bp, Homo sapien
cctgctgtgctttacacgtaaatagagaatgga

SEQ ID NO: 784449 - DNA, 33 bp, Homo sapien
cttcaacctacaattactaatgttacagaatat

SEQ ID NO: 784450 - DNA, 33 bp, Homo sapien
cttcaacctacaattattaatgttacagaatat

SEQ ID NO: 784451 - DNA, 33 bp, Homo sapien
ccaccctgaaacttaccggcttaaaatgattta

SEQ ID NO: 784452 - DNA, 33 bp, Homo sapien
ccaccctgaaacttactggcttaaaatgattta

SEQ ID NO: 784453 - DNA, 33 bp, Homo sapien
aggcaacatttggcccacatcacattgccctaa

SEQ ID NO: 784454 - DNA, 33 bp, Homo sapien
aggcaacatttggcccgcatcacattgccctaa

SEQ ID NO: 784455 - DNA, 33 bp, Homo sapien
atccacttatccagaaatcagactcttgacaat

SEQ ID NO: 784456 - DNA, 33 bp, Homo sapien
atccacttatccagaagtcagactcttgacaat

SEQ ID NO: 784457 - DNA, 33 bp, Homo sapien
gccagtttacattctcactatcagtgcgtgagc

SEQ ID NO: 784458 - DNA, 33 bp, Homo sapien
gccagtttacattctcgctatcagtgcgtgagc

SEQ ID NO: 784459 - DNA, 33 bp, Homo sapien
acattagggagtatcaataaactacaaaatttg

SEQ ID NO: 784460 - DNA, 33 bp, Homo sapien
acattagggagtatcagtaaactacaaaatttg

SEQ ID NO: 784461 - DNA, 33 bp, Homo sapien
actgtcttattgtagtaaaaacactgctagctt

SEQ ID NO: 784462 - DNA, 33 bp, Homo sapien
actgtcttattgtagtcaaaacactgctagctt

SEQ ID NO: 784463 - DNA, 33 bp, Homo sapien
ttccatgttactagcacgtcaatgaccatttaa

SEQ ID NO: 784464 - DNA, 33 bp, Homo sapien
ttccatgttactagcatgtcaatgaccatttaa

SEQ ID NO: 784465 - DNA, 33 bp, Homo sapien
cattgagatcatagagaacatggacatatctgg

SEQ ID NO: 784466 - DNA, 33 bp, Homo sapien
cattgagatcatagaggacatggacatatctgg

SEQ ID NO: 784467 - DNA, 33 bp, Homo sapien
atattagagtttgttgaaaagaagatataccag

SEQ ID NO: 784468 - DNA, 33 bp, Homo sapien
atattagagtttgttggaaagaagatataccag

SEQ ID NO: 784469 - DNA, 33 bp, Homo sapien
atctcagttgtgtttgcagaagtccaagtgaga

SEQ ID NO: 784470 - DNA, 33 bp, Homo sapien
atctcagttgtgtttggagaagtccaagtgaga

SEQ ID NO: 784471 - DNA, 33 bp, Homo sapien
acagggagaaggataactgaatatgtctcattt

SEQ ID NO: 784472 - DNA, 33 bp, Homo sapien
acagggagaaggataattgaatatgtctcattt

SEQ ID NO: 784473 - DNA, 33 bp, Homo sapien
tgtgagaattaaatgaatcaaaatttgcaaagc

SEQ ID NO: 784474 - DNA, 33 bp, Homo sapien
tgtgagaattaaatgagtcaaaatttgcaaagc

SEQ ID NO: 784475 - DNA, 33 bp, Homo sapien
gtgctgatgagagaaactgcaaatacataaacc

SEQ ID NO: 784476 - DNA, 33 bp, Homo sapien
gtgctgatgagagaaagtgcaaatacataaacc

SEQ ID NO: 784477 - DNA, 33 bp, Homo sapien
gtggccataacgtgtacagaaaaatctccaagt

SEQ ID NO: 784478 - DNA, 33 bp, Homo sapien
gtggccataacgtgtagagaaaaatctccaagt

SEQ ID NO: 784479 - DNA, 33 bp, Homo sapien
atcattaaactctaacacatttgacttcagaga

SEQ ID NO: 784480 - DNA, 33 bp, Homo sapien
atcattaaactctaacgcatttgacttcagaga

SEQ ID NO: 784481 - DNA, 33 bp, Homo sapien
caaaagaactaggagcaacctatcttgaactcc

SEQ ID NO: 784482 - DNA, 33 bp, Homo sapien
caaaagaactaggagcgacctatcttgaactcc

SEQ ID NO: 784483 - DNA, 33 bp, Homo sapien
aatagtgctaggactacgctcccaaatccagta

SEQ ID NO: 784484 - DNA, 33 bp, Homo sapien
aatagtgctaggactatgctcccaaatccagta

SEQ ID NO: 784485 - DNA, 33 bp, Homo sapien
taaatcttaccagttacgggcagcagtgactat

SEQ ID NO: 784486 - DNA, 33 bp, Homo sapien
taaatcttaccagttatgggcagcagtgactat

SEQ ID NO: 784487 - DNA, 33 bp, Homo sapien
gaattggtaatctgaacgttatatggtgaacat

SEQ ID NO: 784488 - DNA, 33 bp, Homo sapien
gaattggtaatctgaaggttatatggtgaacat

SEQ ID NO: 784489 - DNA, 33 bp, Homo sapien
aagtccttaaaagtgccccaatcagaagtcaca

SEQ ID NO: 784490 - DNA, 33 bp, Homo sapien
aagtccttaaaagtgctccaatcagaagtcaca

SEQ ID NO: 784491 - DNA, 33 bp, Homo sapien
tgcacacaaaccctaacgcttcaaaattatcta

SEQ ID NO: 784492 - DNA, 33 bp, Homo sapien
tgcacacaaaccctaatgcttcaaaattatcta

SEQ ID NO: 784493 - DNA, 33 bp, Homo sapien
gactcatgaacacaaacagcggtgcacaggaat

SEQ ID NO: 784494 - DNA, 33 bp, Homo sapien
gactcatgaacacaaagagcggtgcacaggaat

SEQ ID NO: 784495 - DNA, 33 bp, Homo sapien
agttaagcaaacaatgaatggttagtgttcacc

SEQ ID NO: 784496 - DNA, 33 bp, Homo sapien
agttaagcaaacaatggatggttagtgttcacc

SEQ ID NO: 784497 - DNA, 33 bp, Homo sapien
gagggactgggcttgaccttcaaggcaagttaa

SEQ ID NO: 784498 - DNA, 33 bp, Homo sapien
gagggactgggcttgatcttcaaggcaagttaa

SEQ ID NO: 784499 - DNA, 33 bp, Homo sapien
tggaaaacagcatccccgagaggcacctccagc

SEQ ID NO: 784500 - DNA, 33 bp, Homo sapien
tggaaaacagcatccctgagaggcacctccagc

SEQ ID NO: 784501 - DNA, 33 bp, Homo sapien
ctcgtacctctttatgcatacacaatggaaaac

SEQ ID NO: 784502 - DNA, 33 bp, Homo sapien
ctcgtacctctttatgtatacacaatggaaaac

SEQ ID NO: 784503 - DNA, 33 bp, Homo sapien
tgattgagccgctgtgcactgtagaactctggt

SEQ ID NO: 784504 - DNA, 33 bp, Homo sapien
tgattgagccgctgtgtactgtagaactctggt

SEQ ID NO: 784505 - DNA, 33 bp, Homo sapien
gccagtctataactcaaagtcaatgttcagttt

SEQ ID NO: 784506 - DNA, 33 bp, Homo sapien
gccagtctataactcagagtcaatgttcagttt

SEQ ID NO: 784507 - DNA, 33 bp, Homo sapien
tcacaattagacgaacaatcccaagaacaggta

SEQ ID NO: 784508 - DNA, 33 bp, Homo sapien
tcacaattagacgaaccatcccaagaacaggta

SEQ ID NO: 784509 - DNA, 33 bp, Homo sapien
aactccataaagtcaaacagcaaaatgatttta

SEQ ID NO: 784510 - DNA, 33 bp, Homo sapien
aactccataaagtcaagcagcaaaatgatttta

SEQ ID NO: 784511 - DNA, 33 bp, Homo sapien; identical to SEQ ID NO: 784509

SEQ ID NO: 784512 - DNA, 33 bp, Homo sapien; identical to SEQ ID NO: 784510

SEQ ID NO: 784513 - DNA, 33 bp, Homo sapien
ggggtgagttgaggaacggtgatgtcaatcact

SEQ ID NO: 784514 - DNA, 33 bp, Homo sapien
ggggtgagttgaggaatggtgatgtcaatcact

SEQ ID NO: 784515 - DNA, 33 bp, Homo sapien
acaggcatactttatacatggatagatttgtag

SEQ ID NO: 784516 - DNA, 33 bp, Homo sapien
acaggcatactttatatatggatagatttgtag

SEQ ID NO: 784517 - DNA, 33 bp, Homo sapien
atttaggcctggagtacataaaaccttcttccc

SEQ ID NO: 784518 - DNA, 33 bp, Homo sapien
atttaggcctggagtagataaaaccttcttccc

SEQ ID NO: 784519 - DNA, 33 bp, Homo sapien
tatgattgtaattttacactcgattagaccaga

SEQ ID NO: 784520 - DNA, 33 bp, Homo sapien
tatgattgtaattttagactcgattagaccaga

SEQ ID NO: 784521 - DNA, 33 bp, Homo sapien
cccctcaggaccaaaccgtgtgcaaagtagcgt

SEQ ID NO: 784522 - DNA, 33 bp, Homo sapien
cccctcaggaccaaactgtgtgcaaagtagcgt

SEQ ID NO: 784523 - DNA, 33 bp, Homo sapien
agtctgcccgtatccacaaaatcatgagttctg

SEQ ID NO: 784524 - DNA, 33 bp, Homo sapien
agtctgcccgtatccataaaatcatgagttctg

SEQ ID NO: 784525 - DNA, 33 bp, Homo sapien
acaaactgtcctttcgaattagagatgctctat

SEQ ID NO: 784526 - DNA, 33 bp, Homo sapien
acaaactgtcctttcgcattagagatgctctat

SEQ ID NO: 784527 - DNA, 33 bp, Homo sapien
tctgggctcatgtgtagatggaactgtcacttg

SEQ ID NO: 784528 - DNA, 33 bp, Homo sapien
tctgggctcatgtgtatatggaactgtcacttg

SEQ ID NO: 784529 - DNA, 33 bp, Homo sapien
gtgctggagcgtgagacagtccccaggccctgt

SEQ ID NO: 784530 - DNA, 33 bp, Homo sapien
gtgctggagcgtgagatagtccccaggccctgt

SEQ ID NO: 784531 - DNA, 33 bp, Homo sapien
caagagtaatcagtcacgtgtctcagtagcagg

SEQ ID NO: 784532 - DNA, 33 bp, Homo sapien
caagagtaatcagtcatgtgtctcagtagcagg

SEQ ID NO: 784533 - DNA, 33 bp, Homo sapien
agaatttacgagcccacgcaacgggaaaatgca

SEQ ID NO: 784534 - DNA, 33 bp, Homo sapien
agaatttacgagcccaggcaacgggaaaatgca

SEQ ID NO: 784535 - DNA, 33 bp, Homo sapien
gcccacctcaaacccactcaagcacaaagagaa

SEQ ID NO: 784536 - DNA, 33 bp, Homo sapien
gcccacctcaaacccattcaagcacaaagagaa

SEQ ID NO: 784537 - DNA, 33 bp, Homo sapien
atcttttgtaccgtcaactcctaccattgtaca

SEQ ID NO: 784538 - DNA, 33 bp, Homo sapien
atcttttgtaccgtcagctcctaccattgtaca

SEQ ID NO: 784539 - DNA, 33 bp, Homo sapien
ctgtgaaactgataaccataaaatttggtatct

SEQ ID NO: 784540 - DNA, 33 bp, Homo sapien
ctgtgaaactgataacgataaaatttggtatct

SEQ ID NO: 784541 - DNA, 33 bp, Homo sapien
atctcttgctttactgcatttgggtgaggactg

SEQ ID NO: 784542 - DNA, 33 bp, Homo sapien
atctcttgctttactggatttgggtgaggactg

SEQ ID NO: 784543 - DNA, 33 bp, Homo sapien
atcaggtcttgagagacagtgagaacagcagag

SEQ ID NO: 784544 - DNA, 33 bp, Homo sapien
atcaggtcttgagagatagtgagaacagcagag

SEQ ID NO: 784545 - DNA, 33 bp, Homo sapien
taatctgtaggatggacgagatgggatgtacac

SEQ ID NO: 784546 - DNA, 33 bp, Homo sapien
taatctgtaggatggatgagatgggatgtacac

SEQ ID NO: 784547 - DNA, 33 bp, Homo sapien
caggcagtcttcagtacaagaagcgtcaatctc

SEQ ID NO: 784548 - DNA, 33 bp, Homo sapien
caggcagtcttcagtataagaagcgtcaatctc

SEQ ID NO: 784549 - DNA, 33 bp, Homo sapien
aaaaaaattgtatgacaccaatctctcctgtct

SEQ ID NO: 784550 - DNA, 33 bp, Homo sapien
aaaaaaattgtatgaccccaatctctcctgtct

SEQ ID NO: 784551 - DNA, 33 bp, Homo sapien
gtgtgcccatttttatcagagtctcttagaatc

SEQ ID NO: 784552 - DNA, 33 bp, Homo sapien
gtgtgcccatttttatgagagtctcttagaatc

SEQ ID NO: 784553 - DNA, 33 bp, Homo sapien
catttgtagatggacaataagaacttcacgtct

SEQ ID NO: 784554 - DNA, 33 bp, Homo sapien
catttgtagatggacagtaagaacttcacgtct

SEQ ID NO: 784555 - DNA, 33 bp, Homo sapien
ggaatacaattgaacacgaacaatagaggccct

SEQ ID NO: 784556 - DNA, 33 bp, Homo sapien
ggaatacaattgaacatgaacaatagaggccct

SEQ ID NO: 784557 - DNA, 33 bp, Homo sapien
tatgttctagtagagacgctgtatcttctcctc

SEQ ID NO: 784558 - DNA, 33 bp, Homo sapien
tatgttctagtagagatgctgtatcttctcctc

SEQ ID NO: 784559 - DNA, 33 bp, Homo sapien
tctacactttgagatacgcgcacacacacacac

SEQ ID NO: 784560 - DNA, 33 bp, Homo sapien
tctacactttgagatatgcgcacacacacacac

SEQ ID NO: 784561 - DNA, 33 bp, Homo sapien
ggttacaaatcacaaaacatttggtaactgcat

SEQ ID NO: 784562 - DNA, 33 bp, Homo sapien
ggttacaaatcacaaagcatttggtaactgcat

SEQ ID NO: 784563 - DNA, 33 bp, Homo sapien
ctttcttttgagctctcaaaactgctatgtgac

SEQ ID NO: 784564 - DNA, 33 bp, Homo sapien
ctttcttttgagctcttaaaactgctatgtgac

SEQ ID NO: 784565 - DNA, 33 bp, Homo sapien
cccaaatgctaatcaactccctgggctctttat

SEQ ID NO: 784566 - DNA, 33 bp, Homo sapien
cccaaatgctaatcaattccctgggctctttat

SEQ ID NO: 784567 - DNA, 33 bp, Homo sapien
ttaaaatatcggtgaagtagaagcagtggtgac

SEQ ID NO: 784568 - DNA, 33 bp, Homo sapien
ttaaaatatcggtgaattagaagcagtggtgac

SEQ ID NO: 784569 - DNA, 33 bp, Homo sapien
aagcttgaaaatcagcaatgatgactgcacttt

SEQ ID NO: 784570 - DNA, 33 bp, Homo sapien
aagcttgaaaatcagcgatgatgactgcacttt

SEQ ID NO: 784571 - DNA, 33 bp, Homo sapien
agatcctctgtaaacaataagccacttgtttca

SEQ ID NO: 784572 - DNA, 33 bp, Homo sapien
agatcctctgtaaacagtaagccacttgtttca

SEQ ID NO: 784573 - DNA, 33 bp, Homo sapien
tgatatatacatcctcacagcatttaaatgacc

SEQ ID NO: 784574 - DNA, 33 bp, Homo sapien
tgatatatacatcctcgcagcatttaaatgacc

SEQ ID NO: 784575 - DNA, 33 bp, Homo sapien
gttagaaactttctcaccctgacatttgtacca

SEQ ID NO: 784576 - DNA, 33 bp, Homo sapien
gttagaaactttctcatcctgacatttgtacca

SEQ ID NO: 784577 - DNA, 33 bp, Homo sapien
gataggacattttgcaatagaaactcacaatgg

SEQ ID NO: 784578 - DNA, 33 bp, Homo sapien
gataggacattttgcattagaaactcacaatgg

SEQ ID NO: 784579 - DNA, 33 bp, Homo sapien
atagagacctccaacactcagaggccagtcaaa

SEQ ID NO: 784580 - DNA, 33 bp, Homo sapien
atagagacctccaacattcagaggccagtcaaa

SEQ ID NO: 784581 - DNA, 33 bp, Homo sapien
gtaggcaaaggagaataagaaagaataggcaga

SEQ ID NO: 784582 - DNA, 33 bp, Homo sapien
gtaggcaaaggagaatgagaaagaataggcaga

SEQ ID NO: 784583 - DNA, 33 bp, Homo sapien
gtatgcaggacagtcaaatgttgggttatatac

SEQ ID NO: 784584 - DNA, 33 bp, Homo sapien
gtatgcaggacagtcagatgttgggttatatac

SEQ ID NO: 784585 - DNA, 33 bp, Homo sapien
ggaatctttggtcaaaaacacatcccctataat

SEQ ID NO: 784586 - DNA, 33 bp, Homo sapien
ggaatctttggtcaaatacacatcccctataat

SEQ ID NO: 784587 - DNA, 33 bp, Homo sapien
tctgccctagggtatcaccaacccaaagataaa

SEQ ID NO: 784588 - DNA, 33 bp, Homo sapien
tctgccctagggtatcgccaacccaaagataaa

SEQ ID NO: 784589 - DNA, 33 bp, Homo sapien
gactcgtttctcaaaaagttgcaaaattctcct

SEQ ID NO: 784590 - DNA, 33 bp, Homo sapien
gactcgtttctcaaaaggttgcaaaattctcct

SEQ ID NO: 784591 - DNA, 33 bp, Homo sapien
taacaaaaactattacacttcaactgaattttt

SEQ ID NO: 784592 - DNA, 33 bp, Homo sapien
taacaaaaactattacccttcaactgaattttt

SEQ ID NO: 784593 - DNA, 33 bp, Homo sapien
aagagacatagtttcactctattgcctaggcta

SEQ ID NO: 784594 - DNA, 33 bp, Homo sapien
aagagacatagtttcattctattgcctaggcta

SEQ ID NO: 784595 - DNA, 33 bp, Homo sapien
tgttttcctccatgtaggcttgagcttctcatt

SEQ ID NO: 784596 - DNA, 33 bp, Homo sapien
tgttttcctccatgtatgcttgagcttctcatt

SEQ ID NO: 784597 - DNA, 33 bp, Homo sapien
aacccctaggatctgcactttgataacactttg

SEQ ID NO: 784598 - DNA, 33 bp, Homo sapien
aacccctaggatctgcgctttgataacactttg

SEQ ID NO: 784599 - DNA, 33 bp, Homo sapien
tacagtgaaaagtaagactccttcaatccttct

SEQ ID NO: 784600 - DNA, 33 bp, Homo sapien
tacagtgaaaagtaagtctccttcaatccttct

SEQ ID NO: 784601 - DNA, 33 bp, Homo sapien
ttaacctgtggcaaataatcaacaatactcctc

SEQ ID NO: 784602 - DNA, 33 bp, Homo sapien
ttaacctgtggcaaatcatcaacaatactcctc

SEQ ID NO: 784603 - DNA, 33 bp, Homo sapien
taaataaaacaagagaaaaaacctgatgataaa

SEQ ID NO: 784604 - DNA, 33 bp, Homo sapien
taaataaaacaagagagaaaacctgatgataaa

SEQ ID NO: 784605 - DNA, 33 bp, Homo sapien
aggtcaataagacacaccagaaaactgtaacaa

SEQ ID NO: 784606 - DNA, 33 bp, Homo sapien
aggtcaataagacacatcagaaaactgtaacaa

SEQ ID NO: 784607 - DNA, 33 bp, Homo sapien
tatcacagatgtacaacgtttaatgggttcatt

SEQ ID NO: 784608 - DNA, 33 bp, Homo sapien
tatcacagatgtacaatgtttaatgggttcatt

SEQ ID NO: 784609 - DNA, 33 bp, Homo sapien
acaacaagaacgaccactaaacatctactagaa

SEQ ID NO: 784610 - DNA, 33 bp, Homo sapien
acaacaagaacgaccagtaaacatctactagaa

SEQ ID NO: 784611 - DNA, 33 bp, Homo sapien
ccagacttcctacaaactgactcatgcaaacag

SEQ ID NO: 784612 - DNA, 33 bp, Homo sapien
ccagacttcctacaaattgactcatgcaaacag

SEQ ID NO: 784613 - DNA, 33 bp, Homo sapien
tcttcctggctgacttcaagataattctatttt

SEQ ID NO: 784614 - DNA, 33 bp, Homo sapien
tcttcctggctgactttaagataattctatttt

SEQ ID NO: 784615 - DNA, 33 bp, Homo sapien
gaagaggctagaattacacaggtagtaataaat

SEQ ID NO: 784616 - DNA, 33 bp, Homo sapien
gaagaggctagaattatacaggtagtaataaat

SEQ ID NO: 784617 - DNA, 33 bp, Homo sapien
gctcataccacatcgtaaattacccctaagccc

SEQ ID NO: 784618 - DNA, 33 bp, Homo sapien
gctcataccacatcgtgaattacccctaagccc

SEQ ID NO: 784619 - DNA, 33 bp, Homo sapien
gggcaaattattgtaaataacaggcagttctcc

SEQ ID NO: 784620 - DNA, 33 bp, Homo sapien
gggcaaattattgtaattaacaggcagttctcc

SEQ ID NO: 784621 - DNA, 33 bp, Homo sapien
tggacttgtaagagaacactgtggcttcattac

SEQ ID NO: 784622 - DNA, 33 bp, Homo sapien
tggacttgtaagagaatactgtggcttcattac

SEQ ID NO: 784623 - DNA, 33 bp, Homo sapien
ttattatatatgaaagcctctcgtgtattaata

SEQ ID NO: 784624 - DNA, 33 bp, Homo sapien
ttattatatatgaaagtctctcgtgtattaata

SEQ ID NO: 784625 - DNA, 33 bp, Homo sapien
tctgttaagttgtctgcagccttggaaaacaga

SEQ ID NO: 784626 - DNA, 33 bp, Homo sapien
tctgttaagttgtctgtagccttggaaaacaga

SEQ ID NO: 784627 - DNA, 33 bp, Homo sapien
aagggagaagtacctacgttccccaaagatgtg

SEQ ID NO: 784628 - DNA, 33 bp, Homo sapien
aagggagaagtacctatgttccccaaagatgtg

SEQ ID NO: 784629 - DNA, 33 bp, Homo sapien
ctgtattgtagctgtacagtattcaatatgtga

SEQ ID NO: 784630 - DNA, 33 bp, Homo sapien
ctgtattgtagctgtatagtattcaatatgtga

SEQ ID NO: 784631 - DNA, 33 bp, Homo sapien; identical to SEQ ID NO: 784629

SEQ ID NO: 784632 - DNA, 33 bp, Homo sapien; identical to SEQ ID NO: 784630

SEQ ID NO: 784633 - DNA, 33 bp, Homo sapien
agagagcattctgactaagaaaggataaggcat

SEQ ID NO: 784634 - DNA, 33 bp, Homo sapien
agagagcattctgactgagaaaggataaggcat

SEQ ID NO: 784635 - DNA, 33 bp, Homo sapien
caaatgaggatctctgcaggaatggaagaaatc

SEQ ID NO: 784636 - DNA, 33 bp, Homo sapien
caaatgaggatctctgtaggaatggaagaaatc

SEQ ID NO: 784637 - DNA, 33 bp, Homo sapien
aggatgtgctttaaaaaaatggtgcagtgtgtg

SEQ ID NO: 784638 - DNA, 33 bp, Homo sapien
aggatgtgctttaaaacaatggtgcagtgtgtg

SEQ ID NO: 784639 - DNA, 33 bp, Homo sapien
ggcttagtgttagtgtaaatacatacaaaagga

SEQ ID NO: 784640 - DNA, 33 bp, Homo sapien
ggcttagtgttagtgtgaatacatacaaaagga

SEQ ID NO: 784641 - DNA, 33 bp, Homo sapien
tataatttgagtcaccagatctagtcacgccta

SEQ ID NO: 784642 - DNA, 33 bp, Homo sapien
tataatttgagtcaccggatctagtcacgccta

SEQ ID NO: 784643 - DNA, 33 bp, Homo sapien
gccgtgaattgcttacaactagacccttatgtg

SEQ ID NO: 784644 - DNA, 33 bp, Homo sapien
gccgtgaattgcttacgactagacccttatgtg

SEQ ID NO: 784645 - DNA, 33 bp, Homo sapien
agtgaggctgaaaagccagttgcaggttttatt

SEQ ID NO: 784646 - DNA, 33 bp, Homo sapien
agtgaggctgaaaagctagttgcaggttttatt

SEQ ID NO: 784647 - DNA, 33 bp, Homo sapien
ttagttgatagggaaacagtcaccaatgttgtg

SEQ ID NO: 784648 - DNA, 33 bp, Homo sapien
ttagttgatagggaaagagtcaccaatgttgtg

SEQ ID NO: 784649 - DNA, 33 bp, Homo sapien
actgtcaatgtcattaccaaatcccatttttga

SEQ ID NO: 784650 - DNA, 33 bp, Homo sapien
actgtcaatgtcattatcaaatcccatttttga

SEQ ID NO: 784651 - DNA, 33 bp, Homo sapien
ttcttttattgcgatcagaaagatacttgatat

SEQ ID NO: 784652 - DNA, 33 bp, Homo sapien
ttcttttattgcgatcggaaagatacttgatat

SEQ ID NO: 784653 - DNA, 33 bp, Homo sapien
ttgttaaactgtgatacgggtataagtaattgc

SEQ ID NO: 784654 - DNA, 33 bp, Homo sapien
ttgttaaactgtgatatgggtataagtaattgc

SEQ ID NO: 784655 - DNA, 33 bp, Homo sapien
gataatcttttaaggccaaccattcccagttca

SEQ ID NO: 784656 - DNA, 33 bp, Homo sapien
gataatcttttaaggcgaaccattcccagttca

SEQ ID NO: 784657 - DNA, 33 bp, Homo sapien
ggcagcttgtcaagcaagtgtaaatagataagg

SEQ ID NO: 784658 - DNA, 33 bp, Homo sapien
ggcagcttgtcaagcaggtgtaaatagataagg

SEQ ID NO: 784659 - DNA, 33 bp, Homo sapien
ccttgtcttttcacccaacttgctcgttcagtc

SEQ ID NO: 784660 - DNA, 33 bp, Homo sapien
ccttgtcttttcaccccacttgctcgttcagtc

SEQ ID NO: 784661 - DNA, 33 bp, Homo sapien
aaggggagagaattaacgtcctaaaatactatt

SEQ ID NO: 784662 - DNA, 33 bp, Homo sapien
aaggggagagaattaatgtcctaaaatactatt

SEQ ID NO: 784663 - DNA, 33 bp, Homo sapien
gaaggtggaacagtcactcctgacacttttctg

SEQ ID NO: 784664 - DNA, 33 bp, Homo sapien
gaaggtggaacagtcattcctgacacttttctg

SEQ ID NO: 784665 - DNA, 33 bp, Homo sapien
tgatgggatattaatgaaatcagggaatggcaa

SEQ ID NO: 784666 - DNA, 33 bp, Homo sapien
tgatgggatattaatggaatcagggaatggcaa

SEQ ID NO: 784667 - DNA, 33 bp, Homo sapien
tacatatcaagaatccaaccaattaccaccacc

SEQ ID NO: 784668 - DNA, 33 bp, Homo sapien
tacatatcaagaatccgaccaattaccaccacc

SEQ ID NO: 784669 - DNA, 33 bp, Homo sapien
cataagcatgtgtaaacatacatacagatacat

SEQ ID NO: 784670 - DNA, 33 bp, Homo sapien
cataagcatgtgtaaatatacatacagatacat

SEQ ID NO: 784671 - DNA, 33 bp, Homo sapien
tggagccttctgattcgctccagtaggaagtgg

SEQ ID NO: 784672 - DNA, 33 bp, Homo sapien
tggagccttctgattctctccagtaggaagtgg

SEQ ID NO: 784673 - DNA, 33 bp, Homo sapien
tcacaggagaatatccacaactatgttccttcc

SEQ ID NO: 784674 - DNA, 33 bp, Homo sapien
tcacaggagaatatccgcaactatgttccttcc

SEQ ID NO: 784675 - DNA, 33 bp, Homo sapien
agttctttgtgcaaatcagatgaaagtgccaat

SEQ ID NO: 784676 - DNA, 33 bp, Homo sapien
agttctttgtgcaaatgagatgaaagtgccaat

SEQ ID NO: 784677 - DNA, 33 bp, Homo sapien
ctaacctgtttccataactccatgtcatctccc

SEQ ID NO: 784678 - DNA, 33 bp, Homo sapien
ctaacctgtttccatagctccatgtcatctccc

SEQ ID NO: 784679 - DNA, 33 bp, Homo sapien
gtaagagctttttgtcaactgtgactccagaaa

SEQ ID NO: 784680 - DNA, 33 bp, Homo sapien
gtaagagctttttgtcgactgtgactccagaaa

SEQ ID NO: 784681 - DNA, 33 bp, Homo sapien
cactgcccaaaagataaagtataagctcccttt

SEQ ID NO: 784682 - DNA, 33 bp, Homo sapien
cactgcccaaaagatacagtataagctcccttt

SEQ ID NO: 784683 - DNA, 33 bp, Homo sapien
acatatagcagaataaaagagctcgggaccatg

SEQ ID NO: 784684 - DNA, 33 bp, Homo sapien
acatatagcagaataagagagctcgggaccatg

SEQ ID NO: 784685 - DNA, 33 bp, Homo sapien
tttctgactcatatgcaagacttacccgagatg

SEQ ID NO: 784686 - DNA, 33 bp, Homo sapien
tttctgactcatatgcgagacttacccgagatg

SEQ ID NO: 784687 - DNA, 33 bp, Homo sapien
ccgcgcttggaagaagactgagtagttttttac

SEQ ID NO: 784688 - DNA, 33 bp, Homo sapien
ccgcgcttggaagaagtctgagtagttttttac

SEQ ID NO: 784689 - DNA, 33 bp, Homo sapien
ttcattttgtagagaaagaatcagaagcaagct

SEQ ID NO: 784690 - DNA, 33 bp, Homo sapien
ttcattttgtagagaaggaatcagaagcaagct

SEQ ID NO: 784691 - DNA, 33 bp, Homo sapien
gactatcaaccaaaaaggtggcatccttatcat

SEQ ID NO: 784692 - DNA, 33 bp, Homo sapien
gactatcaaccaaaaatgtggcatccttatcat

SEQ ID NO: 784693 - DNA, 33 bp, Homo sapien
ccttctctttgaactacatggctttgaagaatt

SEQ ID NO: 784694 - DNA, 33 bp, Homo sapien
ccttctctttgaactatatggctttgaagaatt

SEQ ID NO: 784695 - DNA, 33 bp, Homo sapien
ggcaaatgttttataacggtagatgtgtcagag

SEQ ID NO: 784696 - DNA, 33 bp, Homo sapien
ggcaaatgttttataatggtagatgtgtcagag

SEQ ID NO: 784697 - DNA, 33 bp, Homo sapien
ccgctagactcagcacagggccaggtataggac

SEQ ID NO: 784698 - DNA, 33 bp, Homo sapien
ccgctagactcagcacggggccaggtataggac

SEQ ID NO: 784699 - DNA, 33 bp, Homo sapien
gccgaaaactgtcatacgctcccacgttatggg

SEQ ID NO: 784700 - DNA, 33 bp, Homo sapien
gccgaaaactgtcatatgctcccacgttatggg

SEQ ID NO: 784701 - DNA, 33 bp, Homo sapien
ctgttagggtaagtaaatgaagactatggtaag

SEQ ID NO: 784702 - DNA, 33 bp, Homo sapien
ctgttagggtaagtaagtgaagactatggtaag

SEQ ID NO: 784703 - DNA, 33 bp, Homo sapien
tagaatctaggggccaaaagcaatcaattaaga

SEQ ID NO: 784704 - DNA, 33 bp, Homo sapien
tagaatctaggggccagaagcaatcaattaaga

SEQ ID NO: 784705 - DNA, 33 bp, Homo sapien
ctacaatttccactgaatattagtacaacaggt

SEQ ID NO: 784706 - DNA, 33 bp, Homo sapien
ctacaatttccactgagtattagtacaacaggt

SEQ ID NO: 784707 - DNA, 33 bp, Homo sapien
atcaaaaaacaaccaacacacaggatttgattt

SEQ ID NO: 784708 - DNA, 33 bp, Homo sapien
atcaaaaaacaaccaagacacaggatttgattt

SEQ ID NO: 784709 - DNA, 33 bp, Homo sapien
tccctcacttcaccctcaatcataatcatcttc

SEQ ID NO: 784710 - DNA, 33 bp, Homo sapien
tccctcacttcacccttaatcataatcatcttc

SEQ ID NO: 784711 - DNA, 33 bp, Homo sapien
ttgaggcagatcataaagaaaattaggagtgag

SEQ ID NO: 784712 - DNA, 33 bp, Homo sapien
ttgaggcagatcataaggaaaattaggagtgag

SEQ ID NO: 784713 - DNA, 33 bp, Homo sapien
atacaattctaaacaacgtaggcatgatcacta

SEQ ID NO: 784714 - DNA, 33 bp, Homo sapien
atacaattctaaacaatgtaggcatgatcacta

SEQ ID NO: 784715 - DNA, 33 bp, Homo sapien
catcccagtctggggaaaaatgaagaaccaaga

SEQ ID NO: 784716 - DNA, 33 bp, Homo sapien
catcccagtctggggacaaatgaagaaccaaga

SEQ ID NO: 784717 - DNA, 33 bp, Homo sapien
cttttctcacctcctaccctatgcaccacttca

SEQ ID NO: 784718 - DNA, 33 bp, Homo sapien
cttttctcacctcctatcctatgcaccacttca

SEQ ID NO: 784719 - DNA, 33 bp, Homo sapien
gcagctaccagtgatacgagttcttgtgtcaac

SEQ ID NO: 784720 - DNA, 33 bp, Homo sapien
gcagctaccagtgatatgagttcttgtgtcaac

SEQ ID NO: 784721 - DNA, 33 bp, Homo sapien
ggttcaggcagggaaacttggtgttcaggaata

SEQ ID NO: 784722 - DNA, 33 bp, Homo sapien
ggttcaggcagggaaatttggtgttcaggaata

SEQ ID NO: 784723 - DNA, 33 bp, Homo sapien
aagactatcaaaaaccacagctgtctaggggat

SEQ ID NO: 784724 - DNA, 33 bp, Homo sapien
aagactatcaaaaaccgcagctgtctaggggat

SEQ ID NO: 784725 - DNA, 33 bp, Homo sapien
aggcaaaagagcaaaagaggcactttacaaaag

SEQ ID NO: 784726 - DNA, 33 bp, Homo sapien
aggcaaaagagcaaaataggcactttacaaaag

SEQ ID NO: 784727 - DNA, 33 bp, Homo sapien
tcttgcttaatgcacccgaccagtgacttattt

SEQ ID NO: 784728 - DNA, 33 bp, Homo sapien
tcttgcttaatgcacctgaccagtgacttattt

SEQ ID NO: 784729 - DNA, 33 bp, Homo sapien
atcttctccagaggtaacacttgactggcttac

SEQ ID NO: 784730 - DNA, 33 bp, Homo sapien
atcttctccagaggtagcacttgactggcttac

SEQ ID NO: 784731 - DNA, 33 bp, Homo sapien
atgagggtggagccgaataactaccatcttctc

SEQ ID NO: 784732 - DNA, 33 bp, Homo sapien
atgagggtggagccgagtaactaccatcttctc

SEQ ID NO: 784733 - DNA, 33 bp, Homo sapien
aaaatcttcagtcttgcaatggttggatttctt

SEQ ID NO: 784734 - DNA, 33 bp, Homo sapien
aaaatcttcagtcttggaatggttggatttctt

SEQ ID NO: 784735 - DNA, 33 bp, Homo sapien
agtcagagtgtttatggaagtctctatggcaac

SEQ ID NO: 784736 - DNA, 33 bp, Homo sapien
agtcagagtgtttatgtaagtctctatggcaac

SEQ ID NO: 784737 - DNA, 33 bp, Homo sapien
ggattctgtcatgcacagtaggtggattatgtt

SEQ ID NO: 784738 - DNA, 33 bp, Homo sapien
ggattctgtcatgcacggtaggtggattatgtt

SEQ ID NO: 784739 - DNA, 33 bp, Homo sapien
ggactcatgtaactaactggtgttttctactac

SEQ ID NO: 784740 - DNA, 33 bp, Homo sapien
ggactcatgtaactaattggtgttttctactac

SEQ ID NO: 784741 - DNA, 33 bp, Homo sapien
gcagctaattgtggcactcattgcagccaagtt

SEQ ID NO: 784742 - DNA, 33 bp, Homo sapien
gcagctaattgtggcattcattgcagccaagtt

SEQ ID NO: 784743 - DNA, 33 bp, Homo sapien
gctgagtcataaaaacaagttcctgccctcttg

SEQ ID NO: 784744 - DNA, 33 bp, Homo sapien
gctgagtcataaaaaccagttcctgccctcttg

SEQ ID NO: 784745 - DNA, 33 bp, Homo sapien
ccctgaactttgaacactatgagtcagttctgc

SEQ ID NO: 784746 - DNA, 33 bp, Homo sapien
ccctgaactttgaacagtatgagtcagttctgc

SEQ ID NO: 784747 - DNA, 33 bp, Homo sapien
aaacatgagttgaaagaaagtttgaatggctat

SEQ ID NO: 784748 - DNA, 33 bp, Homo sapien
aaacatgagttgaaaggaagtttgaatggctat

SEQ ID NO: 784749 - DNA, 33 bp, Homo sapien
ggttaaaaggttctgaatcacctgctcagttta

SEQ ID NO: 784750 - DNA, 33 bp, Homo sapien
ggttaaaaggttctgagtcacctgctcagttta

SEQ ID NO: 784751 - DNA, 33 bp, Homo sapien
gggtgtttctgacacacctagctataaggttga

SEQ ID NO: 784752 - DNA, 33 bp, Homo sapien
gggtgtttctgacacatctagctataaggttga

SEQ ID NO: 784753 - DNA, 33 bp, Homo sapien
aaccccatttgactcacctgtttggcctgcacg

SEQ ID NO: 784754 - DNA, 33 bp, Homo sapien
aaccccatttgactcatctgtttggcctgcacg

SEQ ID NO: 784755 - DNA, 33 bp, Homo sapien
taaaatatcaagagtaaacaagtccttttaaat

SEQ ID NO: 784756 - DNA, 33 bp, Homo sapien
taaaatatcaagagtagacaagtccttttaaat

SEQ ID NO: 784757 - DNA, 33 bp, Homo sapien
attgtaagtgaaaaaacgaagtgcataaagttt

SEQ ID NO: 784758 - DNA, 33 bp, Homo sapien
attgtaagtgaaaaaatgaagtgcataaagttt

SEQ ID NO: 784759 - DNA, 33 bp, Homo sapien
agctcatagatacttcacagaataggtgacttt

SEQ ID NO: 784760 - DNA, 33 bp, Homo sapien
agctcatagatacttcgcagaataggtgacttt

SEQ ID NO: 784761 - DNA, 33 bp, Homo sapien
gtgtcaagtcagctacaggtttaattgagaggt

SEQ ID NO: 784762 - DNA, 33 bp, Homo sapien
gtgtcaagtcagctacgggtttaattgagaggt

SEQ ID NO: 784763 - DNA, 33 bp, Homo sapien
cctgctcctctgaatacatacttgtttccacct

SEQ ID NO: 784764 - DNA, 33 bp, Homo sapien
cctgctcctctgaatatatacttgtttccacct

SEQ ID NO: 784765 - DNA, 33 bp, Homo sapien
ttactgatgcaccctaaaacagtttctaacata

SEQ ID NO: 784766 - DNA, 33 bp, Homo sapien
ttactgatgcaccctagaacagtttctaacata

SEQ ID NO: 784767 - DNA, 33 bp, Homo sapien
ggagcaattagcattacggtgcttatcaaatgc

SEQ ID NO: 784768 - DNA, 33 bp, Homo sapien
ggagcaattagcattagggtgcttatcaaatgc

SEQ ID NO: 784769 - DNA, 33 bp, Homo sapien
cacaatgcattactcacgcggtgatgctagtgt

SEQ ID NO: 784770 - DNA, 33 bp, Homo sapien
cacaatgcattactcatgcggtgatgctagtgt

SEQ ID NO: 784771 - DNA, 33 bp, Homo sapien
ggtttctggaagtcacagtaccaacagctgatg

SEQ ID NO: 784772 - DNA, 33 bp, Homo sapien
ggtttctggaagtcacggtaccaacagctgatg

SEQ ID NO: 784773 - DNA, 33 bp, Homo sapien
cgtattaacaatagcaactcttccaatccatga

SEQ ID NO: 784774 - DNA, 33 bp, Homo sapien
cgtattaacaatagcatctcttccaatccatga

SEQ ID NO: 784775 - DNA, 33 bp, Homo sapien
gggctgaatatcaaaacatggaaaagatcccga

SEQ ID NO: 784776 - DNA, 33 bp, Homo sapien
gggctgaatatcaaaagatggaaaagatcccga

SEQ ID NO: 784777 - DNA, 33 bp, Homo sapien
atgattgatcaatgggaaaaccaaggtggcaaa

SEQ ID NO: 784778 - DNA, 33 bp, Homo sapien
atgattgatcaatggggaaaccaaggtggcaaa

SEQ ID NO: 784779 - DNA, 33 bp, Homo sapien
ctttgtttgataattaaaaatgatttcctacat

SEQ ID NO: 784780 - DNA, 33 bp, Homo sapien
ctttgtttgataattacaaatgatttcctacat

SEQ ID NO: 784781 - DNA, 33 bp, Homo sapien
ccaccaatttctgtcacgagctctgtttttcct

SEQ ID NO: 784782 - DNA, 33 bp, Homo sapien
ccaccaatttctgtcatgagctctgtttttcct

SEQ ID NO: 784783 - DNA, 33 bp, Homo sapien
aatggcagttattccacagtttagtgattgcct

SEQ ID NO: 784784 - DNA, 33 bp, Homo sapien
aatggcagttattccatagtttagtgattgcct

SEQ ID NO: 784785 - DNA, 33 bp, Homo sapien
acctctcttagaatccaattttggtactaccat

SEQ ID NO: 784786 - DNA, 33 bp, Homo sapien
acctctcttagaatcccattttggtactaccat

SEQ ID NO: 784787 - DNA, 33 bp, Homo sapien
agatttccaaggagccactttaacaacaacatc

SEQ ID NO: 784788 - DNA, 33 bp, Homo sapien
agatttccaaggagccgctttaacaacaacatc

SEQ ID NO: 784789 - DNA, 33 bp, Homo sapien
atcattacatagctcacagatgttcttcaaatt

SEQ ID NO: 784790 - DNA, 33 bp, Homo sapien
atcattacatagctcatagatgttcttcaaatt

SEQ ID NO: 784791 - DNA, 33 bp, Homo sapien
accacacatctaggaaaaaaaggatataactta

SEQ ID NO: 784792 - DNA, 33 bp, Homo sapien
accacacatctaggaacaaaaggatataactta

SEQ ID NO: 784793 - DNA, 33 bp, Homo sapien
gtaacaactgacggtacatagttaagtatataa

SEQ ID NO: 784794 - DNA, 33 bp, Homo sapien
gtaacaactgacggtagatagttaagtatataa

SEQ ID NO: 784795 - DNA, 33 bp, Homo sapien
atataatgcctatttaagtgttagctattttca

SEQ ID NO: 784796 - DNA, 33 bp, Homo sapien
atataatgcctatttatgtgttagctattttca

SEQ ID NO: 784797 - DNA, 33 bp, Homo sapien
gagacttaagcgactgcaagatagatctgaggc

SEQ ID NO: 784798 - DNA, 33 bp, Homo sapien
gagacttaagcgactggaagatagatctgaggc

SEQ ID NO: 784799 - DNA, 33 bp, Homo sapien
agattgttttccatgaaagtcctttttccccta

SEQ ID NO: 784800 - DNA, 33 bp, Homo sapien
agattgttttccatgagagtcctttttccccta

SEQ ID NO: 784801 - DNA, 33 bp, Homo sapien
gcccacctgtccagaacaatggtaaggcagctt

SEQ ID NO: 784802 - DNA, 33 bp, Homo sapien
gcccacctgtccagaataatggtaaggcagctt

SEQ ID NO: 784803 - DNA, 33 bp, Homo sapien
ctacttctgtgatcctaaagagtgggcctgagt

SEQ ID NO: 784804 - DNA, 33 bp, Homo sapien
ctacttctgtgatccttaagagtgggcctgagt

SEQ ID NO: 784805 - DNA, 33 bp, Homo sapien
aagtgagcaaacattcacttatggtgtccgtga

SEQ ID NO: 784806 - DNA, 33 bp, Homo sapien
aagtgagcaaacattcccttatggtgtccgtga

SEQ ID NO: 784807 - DNA, 33 bp, Homo sapien
gacatcatcctgtttccatgcaaatgacagaac

SEQ ID NO: 784808 - DNA, 33 bp, Homo sapien
gacatcatcctgtttctatgcaaatgacagaac

SEQ ID NO: 784809 - DNA, 33 bp, Homo sapien
tgctaactcaatgttacaatgcagctgccaaaa

SEQ ID NO: 784810 - DNA, 33 bp, Homo sapien
tgctaactcaatgttataatgcagctgccaaaa

SEQ ID NO: 784811 - DNA, 33 bp, Homo sapien
agacatctctggagcccgaacaatccatttact

SEQ ID NO: 784812 - DNA, 33 bp, Homo sapien
agacatctctggagcctgaacaatccatttact

SEQ ID NO: 784813 - DNA, 33 bp, Homo sapien
ttcttacaatagatcccaaaactcagaaggaac

SEQ ID NO: 784814 - DNA, 33 bp, Homo sapien
ttcttacaatagatcctaaaactcagaaggaac

SEQ ID NO: 784815 - DNA, 33 bp, Homo sapien
atagcagttagaaaagaaattatccccaaattg

SEQ ID NO: 784816 - DNA, 33 bp, Homo sapien
atagcagttagaaaaggaattatccccaaattg

SEQ ID NO: 784817 - DNA, 33 bp, Homo sapien
aatgacatggaaaaaacgatggcatattgggct

SEQ ID NO: 784818 - DNA, 33 bp, Homo sapien
aatgacatggaaaaaatgatggcatattgggct

SEQ ID NO: 784819 - DNA, 33 bp, Homo sapien
cagttttctttcctacaaaactgtgtccctgtg

SEQ ID NO: 784820 - DNA, 33 bp, Homo sapien
cagttttctttcctaccaaactgtgtccctgtg

SEQ ID NO: 784821 - DNA, 33 bp, Homo sapien
gctttcggtggaaatccatataggcttaaaaga

SEQ ID NO: 784822 - DNA, 33 bp, Homo sapien
gctttcggtggaaatctatataggcttaaaaga

SEQ ID NO: 784823 - DNA, 33 bp, Homo sapien
gtaggtgttcagagggaagatgtgctaattctg

SEQ ID NO: 784824 - DNA, 33 bp, Homo sapien
gtaggtgttcagagggtagatgtgctaattctg

SEQ ID NO: 784825 - DNA, 33 bp, Homo sapien
tcctggccatgaaccactaagttgattcttatg

SEQ ID NO: 784826 - DNA, 33 bp, Homo sapien
tcctggccatgaaccattaagttgattcttatg

SEQ ID NO: 784827 - DNA, 33 bp, Homo sapien
taactataactcttaaagatagcttaatgactg

SEQ ID NO: 784828 - DNA, 33 bp, Homo sapien
taactataactcttaacgatagcttaatgactg

SEQ ID NO: 784829 - DNA, 33 bp, Homo sapien
ctatttcagaagagccaagactgatgatttagc

SEQ ID NO: 784830 - DNA, 33 bp, Homo sapien
ctatttcagaagagccgagactgatgatttagc

SEQ ID NO: 784831 - DNA, 33 bp, Homo sapien
tgaattaagatacccacaaatgaaacaagaaca

SEQ ID NO: 784832 - DNA, 33 bp, Homo sapien
tgaattaagatacccagaaatgaaacaagaaca

SEQ ID NO: 784833 - DNA, 33 bp, Homo sapien
ggctggctttgccacaagattgaccattgtgcg

SEQ ID NO: 784834 - DNA, 33 bp, Homo sapien
ggctggctttgccacaggattgaccattgtgcg

SEQ ID NO: 784835 - DNA, 33 bp, Homo sapien
aagcgaatgtagaccaagatgtattatttattc

SEQ ID NO: 784836 - DNA, 33 bp, Homo sapien
aagcgaatgtagaccatgatgtattatttattc

SEQ ID NO: 784837 - DNA, 33 bp, Homo sapien
tgatgtgctttgttgaatagtgctcagtgattt

SEQ ID NO: 784838 - DNA, 33 bp, Homo sapien
tgatgtgctttgttgagtagtgctcagtgattt

SEQ ID NO: 784839 - DNA, 33 bp, Homo sapien
tccatttgttcaccaacatttactctgatattt

SEQ ID NO: 784840 - DNA, 33 bp, Homo sapien
tccatttgttcaccaatatttactctgatattt

SEQ ID NO: 784841 - DNA, 33 bp, Homo sapien
ttcttgaaaccctgccgattgttcttgcagtaa

SEQ ID NO: 784842 - DNA, 33 bp, Homo sapien
ttcttgaaaccctgcctattgttcttgcagtaa

SEQ ID NO: 784843 - DNA, 33 bp, Homo sapien
ttgtgtgcagaggaaacatcaggtgcgaagatc

SEQ ID NO: 784844 - DNA, 33 bp, Homo sapien
ttgtgtgcagaggaaatatcaggtgcgaagatc

SEQ ID NO: 784845 - DNA, 33 bp, Homo sapien
cccagtaggatacccactggcctggcaatttct

SEQ ID NO: 784846 - DNA, 33 bp, Homo sapien
cccagtaggatacccattggcctggcaatttct

SEQ ID NO: 784847 - DNA, 33 bp, Homo sapien
atgttagcaatgaataagtgatgaaacagttat

SEQ ID NO: 784848 - DNA, 33 bp, Homo sapien
atgttagcaatgaataggtgatgaaacagttat

SEQ ID NO: 784849 - DNA, 33 bp, Homo sapien
gttcccagcaggatagacaattcctggccaaga

SEQ ID NO: 784850 - DNA, 33 bp, Homo sapien
gttcccagcaggataggcaattcctggccaaga

SEQ ID NO: 784851 - DNA, 33 bp, Homo sapien
atcatctggtcaaaaccatgagttcctggagga

SEQ ID NO: 784852 - DNA, 33 bp, Homo sapien
atcatctggtcaaaactatgagttcctggagga

SEQ ID NO: 784853 - DNA, 33 bp, Homo sapien
tgagttagatttggaaactgtttgtcagcttaa

SEQ ID NO: 784854 - DNA, 33 bp, Homo sapien
tgagttagatttggaacctgtttgtcagcttaa

SEQ ID NO: 784855 - DNA, 33 bp, Homo sapien
gtgatataatcaaggacctcagaaagtttggca

SEQ ID NO: 784856 - DNA, 33 bp, Homo sapien
gtgatataatcaaggatctcagaaagtttggca

SEQ ID NO: 784857 - DNA, 33 bp, Homo sapien
ttttaaatgcgtcagcactaagatactccctta

SEQ ID NO: 784858 - DNA, 33 bp, Homo sapien
ttttaaatgcgtcagcgctaagatactccctta

SEQ ID NO: 784859 - DNA, 33 bp, Homo sapien
ggcctcttcttcactccatgatacttgtaaaga

SEQ ID NO: 784860 - DNA, 33 bp, Homo sapien
ggcctcttcttcactctatgatacttgtaaaga

SEQ ID NO: 784861 - DNA, 33 bp, Homo sapien
tttgacaggaggtatcaatggatagcgtgtagc

SEQ ID NO: 784862 - DNA, 33 bp, Homo sapien
tttgacaggaggtatcgatggatagcgtgtagc

SEQ ID NO: 784863 - DNA, 33 bp, Homo sapien
ccctcctggggtactacatctacgcatgcctaa

SEQ ID NO: 784864 - DNA, 33 bp, Homo sapien
ccctcctggggtactatatctacgcatgcctaa

SEQ ID NO: 784865 - DNA, 33 bp, Homo sapien
gaatttttcttatggacgacaatgtctggattc

SEQ ID NO: 784866 - DNA, 33 bp, Homo sapien
gaatttttcttatggatgacaatgtctggattc

SEQ ID NO: 784867 - DNA, 33 bp, Homo sapien
gggaatcattgggtacacacatcttcaaatttc

SEQ ID NO: 784868 - DNA, 33 bp, Homo sapien
gggaatcattgggtacgcacatcttcaaatttc

SEQ ID NO: 784869 - DNA, 33 bp, Homo sapien
aggcctcacagaggaaatgacagaactaggttt

SEQ ID NO: 784870 - DNA, 33 bp, Homo sapien
aggcctcacagaggaagtgacagaactaggttt

SEQ ID NO: 784871 - DNA, 33 bp, Homo sapien
ggacactcttttatgccattccaatgaccagtt

SEQ ID NO: 784872 - DNA, 33 bp, Homo sapien
ggacactcttttatgctattccaatgaccagtt

SEQ ID NO: 784873 - DNA, 33 bp, Homo sapien
ttgagctcaggcaatccatccatctcagcctcc

SEQ ID NO: 784874 - DNA, 33 bp, Homo sapien
ttgagctcaggcaatctatccatctcagcctcc

SEQ ID NO: 784875 - DNA, 33 bp, Homo sapien
tttttagtttatgcaaacccgcttgcctatttt

SEQ ID NO: 784876 - DNA, 33 bp, Homo sapien
tttttagtttatgcaatcccgcttgcctatttt

SEQ ID NO: 784877 - DNA, 33 bp, Homo sapien
gagaaaatcaaatttaaagtcgtctacagtcta

SEQ ID NO: 784878 - DNA, 33 bp, Homo sapien
gagaaaatcaaatttacagtcgtctacagtcta

SEQ ID NO: 784879 - DNA, 33 bp, Homo sapien
ctgtcacagaaaatcaaaaggcagctattagca

SEQ ID NO: 784880 - DNA, 33 bp, Homo sapien
ctgtcacagaaaatcagaaggcagctattagca

SEQ ID NO: 784881 - DNA, 33 bp, Homo sapien
ccactttttcatgaaactctcttctcttggctt

SEQ ID NO: 784882 - DNA, 33 bp, Homo sapien
ccactttttcatgaaattctcttctcttggctt

SEQ ID NO: 784883 - DNA, 33 bp, Homo sapien
cttgttccccgaaacagaagctccttcagcctc

SEQ ID NO: 784884 - DNA, 33 bp, Homo sapien
cttgttccccgaaacataagctccttcagcctc

SEQ ID NO: 784885 - DNA, 33 bp, Homo sapien
tgctgaccaagacttcaatcttctcagatgcaa

SEQ ID NO: 784886 - DNA, 33 bp, Homo sapien
tgctgaccaagacttcgatcttctcagatgcaa

SEQ ID NO: 784887 - DNA, 33 bp, Homo sapien
aaacagctagagggtgaataactaggaggagag

SEQ ID NO: 784888 - DNA, 33 bp, Homo sapien
aaacagctagagggtggataactaggaggagag

SEQ ID NO: 784889 - DNA, 33 bp, Homo sapien
gtttctgactattcgacatgagtcatggctgtt

SEQ ID NO: 784890 - DNA, 33 bp, Homo sapien
gtttctgactattcgatatgagtcatggctgtt

SEQ ID NO: 784891 - DNA, 33 bp, Homo sapien
ggccagtgtaagctgaagagagcgaacaagagg

SEQ ID NO: 784892 - DNA, 33 bp, Homo sapien
ggccagtgtaagctgaggagagcgaacaagagg

SEQ ID NO: 784893 - DNA, 33 bp, Homo sapien
gggaagagcctgtctaagagttgtgactagctt

SEQ ID NO: 784894 - DNA, 33 bp, Homo sapien
gggaagagcctgtctaggagttgtgactagctt

SEQ ID NO: 784895 - DNA, 33 bp, Homo sapien
tcttttaatcctgttacgtgggtgtgaggttgg

SEQ ID NO: 784896 - DNA, 33 bp, Homo sapien
tcttttaatcctgttatgtgggtgtgaggttgg

SEQ ID NO: 784897 - DNA, 33 bp, Homo sapien
tattttacttaaaagcacagaagttgaattgat

SEQ ID NO: 784898 - DNA, 33 bp, Homo sapien
tattttacttaaaagcccagaagttgaattgat

SEQ ID NO: 784899 - DNA, 33 bp, Homo sapien
ttaacatatctgcatcaaactctttcccaggct

SEQ ID NO: 784900 - DNA, 33 bp, Homo sapien
ttaacatatctgcatcgaactctttcccaggct

SEQ ID NO: 784901 - DNA, 33 bp, Homo sapien
cctactaccacaaccaaatgatctgtttcctgc

SEQ ID NO: 784902 - DNA, 33 bp, Homo sapien
cctactaccacaaccagatgatctgtttcctgc

SEQ ID NO: 784903 - DNA, 33 bp, Homo sapien
ccctccaacacggaagaatctatcatttggtgt

SEQ ID NO: 784904 - DNA, 33 bp, Homo sapien
ccctccaacacggaagcatctatcatttggtgt

SEQ ID NO: 784905 - DNA, 33 bp, Homo sapien
ttgaatccagaagcaaccaattttaaagtatgt

SEQ ID NO: 784906 - DNA, 33 bp, Homo sapien
ttgaatccagaagcaatcaattttaaagtatgt

SEQ ID NO: 784907 - DNA, 33 bp, Homo sapien
gatttaaactgaatggcccagctataatgacct

SEQ ID NO: 784908 - DNA, 33 bp, Homo sapien
gatttaaactgaatggtccagctataatgacct

SEQ ID NO: 784909 - DNA, 33 bp, Homo sapien
cttactacctccaacacgaaacaagcagccccg

SEQ ID NO: 784910 - DNA, 33 bp, Homo sapien
cttactacctccaacatgaaacaagcagccccg

SEQ ID NO: 784911 - DNA, 33 bp, Homo sapien
ctgctgaactcttctcccagtggatggaatcca

SEQ ID NO: 784912 - DNA, 33 bp, Homo sapien
ctgctgaactcttctctcagtggatggaatcca

SEQ ID NO: 784913 - DNA, 33 bp, Homo sapien
tttctctttgatgtaaaagtctttgatcaagca

SEQ ID NO: 784914 - DNA, 33 bp, Homo sapien
tttctctttgatgtaagagtctttgatcaagca

SEQ ID NO: 784915 - DNA, 33 bp, Homo sapien
attcatgaagaacctcaagggtagatttttgag

SEQ ID NO: 784916 - DNA, 33 bp, Homo sapien
attcatgaagaacctcgagggtagatttttgag

SEQ ID NO: 784917 - DNA, 33 bp, Homo sapien
cctcacagagatacaaaaggaaaaggaatataa

SEQ ID NO: 784918 - DNA, 33 bp, Homo sapien
cctcacagagatacaagaggaaaaggaatataa

SEQ ID NO: 784919 - DNA, 33 bp, Homo sapien
aatgaaaagacagttcacagaataggagaaaat

SEQ ID NO: 784920 - DNA, 33 bp, Homo sapien
aatgaaaagacagttcccagaataggagaaaat

SEQ ID NO: 784921 - DNA, 33 bp, Homo sapien
gagtgacaagatataaactaaattcacttcctt

SEQ ID NO: 784922 - DNA, 33 bp, Homo sapien
gagtgacaagatataagctaaattcacttcctt

SEQ ID NO: 784923 - DNA, 33 bp, Homo sapien
tagaaactcttataaccggtgattatcatttat

SEQ ID NO: 784924 - DNA, 33 bp, Homo sapien
tagaaactcttataactggtgattatcatttat

SEQ ID NO: 784925 - DNA, 33 bp, Homo sapien
ccacaaaagactacaaaaaaatacagaggtagt

SEQ ID NO: 784926 - DNA, 33 bp, Homo sapien
ccacaaaagactacaacaaaatacagaggtagt

SEQ ID NO: 784927 - DNA, 33 bp, Homo sapien
cgataccaaacctcaaattcacagcttgcattt

SEQ ID NO: 784928 - DNA, 33 bp, Homo sapien
cgataccaaacctcaacttcacagcttgcattt

SEQ ID NO: 784929 - DNA, 33 bp, Homo sapien
gtgcttgtcatcattcccaatcctgaaataagc

SEQ ID NO: 784930 - DNA, 33 bp, Homo sapien
gtgcttgtcatcattcgcaatcctgaaataagc

SEQ ID NO: 784931 - DNA, 33 bp, Homo sapien
cttttcaacactaacagtgaaacagtgagtata

SEQ ID NO: 784932 - DNA, 33 bp, Homo sapien
cttttcaacactaacattgaaacagtgagtata

SEQ ID NO: 784933 - DNA, 33 bp, Homo sapien
agttcagttgtatataagagttatgtttggtca

SEQ ID NO: 784934 - DNA, 33 bp, Homo sapien
agttcagttgtatataggagttatgtttggtca

SEQ ID NO: 784935 - DNA, 33 bp, Homo sapien
cttctcatctccctggacatttccattttgtct

SEQ ID NO: 784936 - DNA, 33 bp, Homo sapien
cttctcatctccctgggcatttccattttgtct

SEQ ID NO: 784937 - DNA, 33 bp, Homo sapien
agaaaaatacttgctacgctgacgatgcaagga

SEQ ID NO: 784938 - DNA, 33 bp, Homo sapien
agaaaaatacttgctatgctgacgatgcaagga

SEQ ID NO: 784939 - DNA, 33 bp, Homo sapien
agaatggaaatacttcaacatggtattaacagg

SEQ ID NO: 784940 - DNA, 33 bp, Homo sapien
agaatggaaatacttcgacatggtattaacagg

SEQ ID NO: 784941 - DNA, 33 bp, Homo sapien
aaaacaagagcaaaaaaattaggcagctgctgg

SEQ ID NO: 784942 - DNA, 33 bp, Homo sapien
aaaacaagagcaaaaagattaggcagctgctgg

SEQ ID NO: 784943 - DNA, 33 bp, Homo sapien
ctatcaataagaagcaacagatggctgacaaac

SEQ ID NO: 784944 - DNA, 33 bp, Homo sapien
ctatcaataagaagcagcagatggctgacaaac

SEQ ID NO: 784945 - DNA, 33 bp, Homo sapien
cttttaaaagaatataccttgctctcctctcaa

SEQ ID NO: 784946 - DNA, 33 bp, Homo sapien
cttttaaaagaatatagcttgctctcctctcaa

SEQ ID NO: 784947 - DNA, 33 bp, Homo sapien
gtgaaccaaattagtaatacaatgtagtagcaa

SEQ ID NO: 784948 - DNA, 33 bp, Homo sapien
gtgaaccaaattagtattacaatgtagtagcaa

SEQ ID NO: 784949 - DNA, 33 bp, Homo sapien
ttttgattcatttgtaataacacagtttaaaca

SEQ ID NO: 784950 - DNA, 33 bp, Homo sapien
ttttgattcatttgtattaacacagtttaaaca

SEQ ID NO: 784951 - DNA, 33 bp, Homo sapien
aggatgacactgttacagcatgtgagagtaact

SEQ ID NO: 784952 - DNA, 33 bp, Homo sapien
aggatgacactgttacggcatgtgagagtaact

SEQ ID NO: 784953 - DNA, 33 bp, Homo sapien
agtgcggatcaaaagcacctctggttcccaatc

SEQ ID NO: 784954 - DNA, 33 bp, Homo sapien
agtgcggatcaaaagcgcctctggttcccaatc

SEQ ID NO: 784955 - DNA, 33 bp, Homo sapien
ctgcattacaagtctaccttgaaacactctctt

SEQ ID NO: 784956 - DNA, 33 bp, Homo sapien
ctgcattacaagtctatcttgaaacactctctt

SEQ ID NO: 784957 - DNA, 33 bp, Homo sapien
ggcttagaatccacacagcgctcatggaaactt

SEQ ID NO: 784958 - DNA, 33 bp, Homo sapien
ggcttagaatccacaccgcgctcatggaaactt

SEQ ID NO: 784959 - DNA, 33 bp, Homo sapien
atgtggtggcagtaacactcaacaaacaccctt

SEQ ID NO: 784960 - DNA, 33 bp, Homo sapien
atgtggtggcagtaacgctcaacaaacaccctt

SEQ ID NO: 784961 - DNA, 33 bp, Homo sapien
acacagaagcattcgcagagagtagaaagagtt

SEQ ID NO: 784962 - DNA, 33 bp, Homo sapien
acacagaagcattcgcggagagtagaaagagtt

SEQ ID NO: 784963 - DNA, 33 bp, Homo sapien
actgagcaagacaaaacaagaggcaggtttggt

SEQ ID NO: 784964 - DNA, 33 bp, Homo sapien
actgagcaagacaaaataagaggcaggtttggt

SEQ ID NO: 784965 - DNA, 33 bp, Homo sapien
agaggtttgaggtgaaatgccttaggacttgga

SEQ ID NO: 784966 - DNA, 33 bp, Homo sapien
agaggtttgaggtgaattgccttaggacttgga

SEQ ID NO: 784967 - DNA, 33 bp, Homo sapien
ggagaaggcagaggtaaggaaagtaaataagat

SEQ ID NO: 784968 - DNA, 33 bp, Homo sapien
ggagaaggcagaggtagggaaagtaaataagat

SEQ ID NO: 784969 - DNA, 33 bp, Homo sapien
gggaaaaggattgtgaagcagtgggtttggact

SEQ ID NO: 784970 - DNA, 33 bp, Homo sapien
gggaaaaggattgtgaggcagtgggtttggact

SEQ ID NO: 784971 - DNA, 33 bp, Homo sapien
ttaatgctgtaaaatacagtagctgaaattaag

SEQ ID NO: 784972 - DNA, 33 bp, Homo sapien
ttaatgctgtaaaatatagtagctgaaattaag

SEQ ID NO: 784973 - DNA, 33 bp, Homo sapien
tgggctgtacagagaaatgatcagtatttggta

SEQ ID NO: 784974 - DNA, 33 bp, Homo sapien
tgggctgtacagagaagtgatcagtatttggta

SEQ ID NO: 784975 - DNA, 33 bp, Homo sapien
tgccaagattaaaaaacggtgcattcttgttta

SEQ ID NO: 784976 - DNA, 33 bp, Homo sapien
tgccaagattaaaaaatggtgcattcttgttta

SEQ ID NO: 784977 - DNA, 33 bp, Homo sapien
aaatgagaggtggcaaatgatactacgtgaaga

SEQ ID NO: 784978 - DNA, 33 bp, Homo sapien
aaatgagaggtggcaagtgatactacgtgaaga

SEQ ID NO: 784979 - DNA, 33 bp, Homo sapien
aaagcctaatcctacacatacgactaaggagat

SEQ ID NO: 784980 - DNA, 33 bp, Homo sapien
aaagcctaatcctacatatacgactaaggagat

SEQ ID NO: 784981 - DNA, 33 bp, Homo sapien
gcttctaagtctcctacgtttttgattacagct

SEQ ID NO: 784982 - DNA, 33 bp, Homo sapien
gcttctaagtctcctatgtttttgattacagct

SEQ ID NO: 784983 - DNA, 33 bp, Homo sapien
cttttctttccttgccagctctctccctctctc

SEQ ID NO: 784984 - DNA, 33 bp, Homo sapien
cttttctttccttgccggctctctccctctctc

SEQ ID NO: 784985 - DNA, 33 bp, Homo sapien
tcaatgtcaaactgtacatatgccagtggcgtc

SEQ ID NO: 784986 - DNA, 33 bp, Homo sapien
tcaatgtcaaactgtatatatgccagtggcgtc

SEQ ID NO: 784987 - DNA, 33 bp, Homo sapien
ggatgtgaactaaaaaacacagaaggaattggc

SEQ ID NO: 784988 - DNA, 33 bp, Homo sapien
ggatgtgaactaaaaatcacagaaggaattggc

SEQ ID NO: 784989 - DNA, 33 bp, Homo sapien
tttggattttgtggaaattaaactatctcatgt

SEQ ID NO: 784990 - DNA, 33 bp, Homo sapien
tttggattttgtggaacttaaactatctcatgt

SEQ ID NO: 784991 - DNA, 33 bp, Homo sapien
tgaaccctagcttcaacgataacatgaggataa

SEQ ID NO: 784992 - DNA, 33 bp, Homo sapien
tgaaccctagcttcaatgataacatgaggataa

SEQ ID NO: 784993 - DNA, 33 bp, Homo sapien
agctgaatggtccataaaactgacaaattcttt

SEQ ID NO: 784994 - DNA, 33 bp, Homo sapien
agctgaatggtccatacaactgacaaattcttt

SEQ ID NO: 784995 - DNA, 33 bp, Homo sapien
cccatagtcaaggacacggtctttacaatatat

SEQ ID NO: 784996 - DNA, 33 bp, Homo sapien
cccatagtcaaggacatggtctttacaatatat

SEQ ID NO: 784997 - DNA, 33 bp, Homo sapien
ggagcaaagcacaacacaggcttgtaatagcta

SEQ ID NO: 784998 - DNA, 33 bp, Homo sapien
ggagcaaagcacaacataggcttgtaatagcta

SEQ ID NO: 784999 - DNA, 33 bp, Homo sapien
actcatttaacgcatgaaagtataaaacgcgtt

SEQ ID NO: 785000 - DNA, 33 bp, Homo sapien
actcatttaacgcatggaagtataaaacgcgtt

SEQ ID NO: 785001 - DNA, 33 bp, Homo sapien
ctattcttgtcgactcaaaaaccagacaaatga

SEQ ID NO: 785002 - DNA, 33 bp, Homo sapien
ctattcttgtcgactcgaaaaccagacaaatga

SEQ ID NO: 785003 - DNA, 33 bp, Homo sapien
aagacaatagacagtgcaaagaagggcattcca

SEQ ID NO: 785004 - DNA, 33 bp, Homo sapien
aagacaatagacagtggaaagaagggcattcca

SEQ ID NO: 785005 - DNA, 33 bp, Homo sapien
gtcaagaacaaatgtcagaaaaatggcccacgg

SEQ ID NO: 785006 - DNA, 33 bp, Homo sapien
gtcaagaacaaatgtcggaaaaatggcccacgg

SEQ ID NO: 785007 - DNA, 33 bp, Homo sapien
tcttggatgccaacacgaattgatttatgttga

SEQ ID NO: 785008 - DNA, 33 bp, Homo sapien
tcttggatgccaacactaattgatttatgttga

SEQ ID NO: 785009 - DNA, 33 bp, Homo sapien
gaaaattggagaaagaacaaattagagtatatt

SEQ ID NO: 785010 - DNA, 33 bp, Homo sapien
gaaaattggagaaagaccaaattagagtatatt

SEQ ID NO: 785011 - DNA, 33 bp, Homo sapien
aacccatcgcaatagacagaagcccttagtgga

SEQ ID NO: 785012 - DNA, 33 bp, Homo sapien
aacccatcgcaatagagagaagcccttagtgga

SEQ ID NO: 785013 - DNA, 33 bp, Homo sapien
cattgttcttctcttacctccttgagttcaatt

SEQ ID NO: 785014 - DNA, 33 bp, Homo sapien
cattgttcttctcttatctccttgagttcaatt

SEQ ID NO: 785015 - DNA, 33 bp, Homo sapien
aatcattctccccacaaaaacaccaaattgaac

SEQ ID NO: 785016 - DNA, 33 bp, Homo sapien
aatcattctccccacagaaacaccaaattgaac

SEQ ID NO: 785017 - DNA, 33 bp, Homo sapien
gtgaatgacacagttcactataaaagtattgta

SEQ ID NO: 785018 - DNA, 33 bp, Homo sapien
gtgaatgacacagttctctataaaagtattgta

SEQ ID NO: 785019 - DNA, 33 bp, Homo sapien
ccttagaacatctcccgagagagcatcaggcca

SEQ ID NO: 785020 - DNA, 33 bp, Homo sapien
ccttagaacatctccctagagagcatcaggcca

SEQ ID NO: 785021 - DNA, 33 bp, Homo sapien
aaattttctgacaaaacacatagctgtctaatt

SEQ ID NO: 785022 - DNA, 33 bp, Homo sapien
aaattttctgacaaaatacatagctgtctaatt

SEQ ID NO: 785023 - DNA, 33 bp, Homo sapien
gtaacttttgagggaacaggaattggcattttc

SEQ ID NO: 785024 - DNA, 33 bp, Homo sapien
gtaacttttgagggaagaggaattggcattttc

SEQ ID NO: 785025 - DNA, 33 bp, Homo sapien
agtgagtgttgctgataagaagcatagccagac

SEQ ID NO: 785026 - DNA, 33 bp, Homo sapien
agtgagtgttgctgatgagaagcatagccagac

SEQ ID NO: 785027 - DNA, 33 bp, Homo sapien
aatgctacagcctataaaaataatctgaggaca

SEQ ID NO: 785028 - DNA, 33 bp, Homo sapien
aatgctacagcctatacaaataatctgaggaca

SEQ ID NO: 785029 - DNA, 33 bp, Homo sapien
tatatatgctttagaaaatgttactgtctcgta

SEQ ID NO: 785030 - DNA, 33 bp, Homo sapien
tatatatgctttagaagatgttactgtctcgta

SEQ ID NO: 785031 - DNA, 33 bp, Homo sapien
tttggatttagcaacagtgaagtcattgtagtc

SEQ ID NO: 785032 - DNA, 33 bp, Homo sapien
tttggatttagcaacattgaagtcattgtagtc

SEQ ID NO: 785033 - DNA, 33 bp, Homo sapien
ttaacttctccttgaaactttcctgactatgca

SEQ ID NO: 785034 - DNA, 33 bp, Homo sapien
ttaacttctccttgaagctttcctgactatgca

SEQ ID NO: 785035 - DNA, 33 bp, Homo sapien
cgtgcactttgatctgcagacagttaaggttct

SEQ ID NO: 785036 - DNA, 33 bp, Homo sapien
cgtgcactttgatctgtagacagttaaggttct

SEQ ID NO: 785037 - DNA, 33 bp, Homo sapien
cttatatgcaaatgtacggcgctaccacccata

SEQ ID NO: 785038 - DNA, 33 bp, Homo sapien
cttatatgcaaatgtatggcgctaccacccata

SEQ ID NO: 785039 - DNA, 33 bp, Homo sapien
tctcacgtaatattcacaggcaggtaggtggag

SEQ ID NO: 785040 - DNA, 33 bp, Homo sapien
tctcacgtaatattcagaggcaggtaggtggag

SEQ ID NO: 785041 - DNA, 33 bp, Homo sapien
aagagaccccaaaatacaatagctcaaataagg

SEQ ID NO: 785042 - DNA, 33 bp, Homo sapien
aagagaccccaaaatataatagctcaaataagg

SEQ ID NO: 785043 - DNA, 33 bp, Homo sapien
tgggtgataggttaataagagcagaactgagtt

SEQ ID NO: 785044 - DNA, 33 bp, Homo sapien
tgggtgataggttaatgagagcagaactgagtt

SEQ ID NO: 785045 - DNA, 33 bp, Homo sapien
taaaaatgtggaatccagaagacaaaatatgga

SEQ ID NO: 785046 - DNA, 33 bp, Homo sapien
taaaaatgtggaatcctgaagacaaaatatgga

SEQ ID NO: 785047 - DNA, 33 bp, Homo sapien
aaaggcaagtgccttaacatgaaagagccaagt

SEQ ID NO: 785048 - DNA, 33 bp, Homo sapien
aaaggcaagtgccttaccatgaaagagccaagt

SEQ ID NO: 785049 - DNA, 33 bp, Homo sapien
ataaaatatcttacaccgaaattgaggaaataa

SEQ ID NO: 785050 - DNA, 33 bp, Homo sapien
ataaaatatcttacactgaaattgaggaaataa

SEQ ID NO: 785051 - DNA, 33 bp, Homo sapien
aaagccaatcaaaacaagaaccataacatccag

SEQ ID NO: 785052 - DNA, 33 bp, Homo sapien
aaagccaatcaaaacaggaaccataacatccag

SEQ ID NO: 785053 - DNA, 33 bp, Homo sapien
tatcaatattcatcacagatattggcccacagt

SEQ ID NO: 785054 - DNA, 33 bp, Homo sapien
tatcaatattcatcacggatattggcccacagt

SEQ ID NO: 785055 - DNA, 33 bp, Homo sapien
tgagcattagaaaaacacgaatgaaaaccacaa

SEQ ID NO: 785056 - DNA, 33 bp, Homo sapien
tgagcattagaaaaacgcgaatgaaaaccacaa

SEQ ID NO: 785057 - DNA, 33 bp, Homo sapien
ttgatagcggaatggccgactctagttaacaac

SEQ ID NO: 785058 - DNA, 33 bp, Homo sapien
ttgatagcggaatggctgactctagttaacaac

SEQ ID NO: 785059 - DNA, 33 bp, Homo sapien
tggcaagattgaggagaaaaaagaacatttcta

SEQ ID NO: 785060 - DNA, 33 bp, Homo sapien
tggcaagattgaggaggaaaaagaacatttcta

SEQ ID NO: 785061 - DNA, 33 bp, Homo sapien
aaagatcatttatcacaatcaagtaggattcat

SEQ ID NO: 785062 - DNA, 33 bp, Homo sapien
aaagatcatttatcacgatcaagtaggattcat

SEQ ID NO: 785063 - DNA, 33 bp, Homo sapien
ctaaatgtttcctgtcaataccagcaaagctct

SEQ ID NO: 785064 - DNA, 33 bp, Homo sapien
ctaaatgtttcctgtcgataccagcaaagctct

SEQ ID NO: 785065 - DNA, 33 bp, Homo sapien
tgtctgtcttctctaaccttacattctagttaa

SEQ ID NO: 785066 - DNA, 33 bp, Homo sapien
tgtctgtcttctctaagcttacattctagttaa

SEQ ID NO: 785067 - DNA, 33 bp, Homo sapien
gatccagaaccaattacgtatttcacatttgcc

SEQ ID NO: 785068 - DNA, 33 bp, Homo sapien
gatccagaaccaattatgtatttcacatttgcc

SEQ ID NO: 785069 - DNA, 33 bp, Homo sapien
atcaagttctcagaaaaaatgtagaatcctgat

SEQ ID NO: 785070 - DNA, 33 bp, Homo sapien
atcaagttctcagaaagaatgtagaatcctgat

SEQ ID NO: 785071 - DNA, 33 bp, Homo sapien
acacagcatataattagagtggcaagcataaag

SEQ ID NO: 785072 - DNA, 33 bp, Homo sapien
acacagcatataattatagtggcaagcataaag

SEQ ID NO: 785073 - DNA, 33 bp, Homo sapien
actcagctctgaacaacagttgctaataaaagg

SEQ ID NO: 785074 - DNA, 33 bp, Homo sapien
actcagctctgaacaatagttgctaataaaagg

SEQ ID NO: 785075 - DNA, 33 bp, Homo sapien
tcttgtaatagtttcacagtttgcgttcttaga

SEQ ID NO: 785076 - DNA, 33 bp, Homo sapien
tcttgtaatagtttcatagtttgcgttcttaga

SEQ ID NO: 785077 - DNA, 33 bp, Homo sapien
ttagtagcttgaattacgccacagtggaaattt

SEQ ID NO: 785078 - DNA, 33 bp, Homo sapien
ttagtagcttgaattatgccacagtggaaattt

SEQ ID NO: 785079 - DNA, 33 bp, Homo sapien
attagtaaacaagatcaccacatttcttgccct

SEQ ID NO: 785080 - DNA, 33 bp, Homo sapien
attagtaaacaagatcgccacatttcttgccct

SEQ ID NO: 785081 - DNA, 33 bp, Homo sapien
taatgcttttcccaagccccagtctatgtaagt

SEQ ID NO: 785082 - DNA, 33 bp, Homo sapien
taatgcttttcccaagtcccagtctatgtaagt

SEQ ID NO: 785083 - DNA, 33 bp, Homo sapien
aaaatttctgcatatcactaatcattacagaaa

SEQ ID NO: 785084 - DNA, 33 bp, Homo sapien
aaaatttctgcatatcgctaatcattacagaaa

SEQ ID NO: 785085 - DNA, 33 bp, Homo sapien
aggtatttgaaagttaagtaatagcaactgaaa

SEQ ID NO: 785086 - DNA, 33 bp, Homo sapien
aggtatttgaaagttaggtaatagcaactgaaa

SEQ ID NO: 785087 - DNA, 33 bp, Homo sapien
gttaggctgaaccatacgctaaagggccaagat

SEQ ID NO: 785088 - DNA, 33 bp, Homo sapien
gttaggctgaaccatatgctaaagggccaagat

SEQ ID NO: 785089 - DNA, 33 bp, Homo sapien
ccagtctcctaaggaaaggcaagaaatagggga

SEQ ID NO: 785090 - DNA, 33 bp, Homo sapien
ccagtctcctaaggaagggcaagaaatagggga

SEQ ID NO: 785091 - DNA, 33 bp, Homo sapien
tgaagagagaagatgacggtgagagaagcagtg

SEQ ID NO: 785092 - DNA, 33 bp, Homo sapien
tgaagagagaagatgatggtgagagaagcagtg

SEQ ID NO: 785093 - DNA, 33 bp, Homo sapien
gtcactgaccactttaccatctttctcctcttt

SEQ ID NO: 785094 - DNA, 33 bp, Homo sapien
gtcactgaccactttatcatctttctcctcttt

SEQ ID NO: 785095 - DNA, 33 bp, Homo sapien
gcagtaggagctataaactagggctagtggata

SEQ ID NO: 785096 - DNA, 33 bp, Homo sapien
gcagtaggagctataagctagggctagtggata

SEQ ID NO: 785097 - DNA, 33 bp, Homo sapien
tacaattttatgtctgaaaatttggtaatgtgg

SEQ ID NO: 785098 - DNA, 33 bp, Homo sapien
tacaattttatgtctgcaaatttggtaatgtgg

SEQ ID NO: 785099 - DNA, 33 bp, Homo sapien
caaatgatagtagttacctatctcctccagaaa

SEQ ID NO: 785100 - DNA, 33 bp, Homo sapien
caaatgatagtagttatctatctcctccagaaa

SEQ ID NO: 785101 - DNA, 33 bp, Homo sapien
atacattcctccttatcacatagctaactcatt

SEQ ID NO: 785102 - DNA, 33 bp, Homo sapien
atacattcctccttattacatagctaactcatt

SEQ ID NO: 785103 - DNA, 33 bp, Homo sapien
gataagtcgaagagtaccagatacgacacaatc

SEQ ID NO: 785104 - DNA, 33 bp, Homo sapien
gataagtcgaagagtatcagatacgacacaatc

SEQ ID NO: 785105 - DNA, 33 bp, Homo sapien
gatgtgtttcgcgggcacgtgttttagcccatt

SEQ ID NO: 785106 - DNA, 33 bp, Homo sapien
gatgtgtttcgcgggcgcgtgttttagcccatt

SEQ ID NO: 785107 - DNA, 33 bp, Homo sapien
cctgtgtctcaccctacatttggagctcatctg

SEQ ID NO: 785108 - DNA, 33 bp, Homo sapien
cctgtgtctcaccctagatttggagctcatctg

SEQ ID NO: 785109 - DNA, 33 bp, Homo sapien
gaacatagtcatctccagaagtagcaaccttta

SEQ ID NO: 785110 - DNA, 33 bp, Homo sapien
gaacatagtcatctccggaagtagcaaccttta

SEQ ID NO: 785111 - DNA, 33 bp, Homo sapien
gacaaagtatgaaacaaaacaagctgtaagact

SEQ ID NO: 785112 - DNA, 33 bp, Homo sapien
gacaaagtatgaaacacaacaagctgtaagact

SEQ ID NO: 785113 - DNA, 33 bp, Homo sapien
ctgcagtgaagtcttgcaggatctttgtcctgg

SEQ ID NO: 785114 - DNA, 33 bp, Homo sapien
ctgcagtgaagtcttgtaggatctttgtcctgg

SEQ ID NO: 785115 - DNA, 33 bp, Homo sapien
gttcaagcttgccagaatctctatacagcatct

SEQ ID NO: 785116 - DNA, 33 bp, Homo sapien
gttcaagcttgccagagtctctatacagcatct

SEQ ID NO: 785117 - DNA, 33 bp, Homo sapien
caaagtaaagaagttccagtgtgaaactctggg

SEQ ID NO: 785118 - DNA, 33 bp, Homo sapien
caaagtaaagaagttctagtgtgaaactctggg

SEQ ID NO: 785119 - DNA, 33 bp, Homo sapien
ctgtatgatgtgctaaatgttgccagatgaaaa

SEQ ID NO: 785120 - DNA, 33 bp, Homo sapien
ctgtatgatgtgctaagtgttgccagatgaaaa

SEQ ID NO: 785121 - DNA, 33 bp, Homo sapien
tagttctaccctctaaagttgcttttctgaagc

SEQ ID NO: 785122 - DNA, 33 bp, Homo sapien
tagttctaccctctaacgttgcttttctgaagc

SEQ ID NO: 785123 - DNA, 33 bp, Homo sapien
acagacatacaaatcaagtagcatttcatggtt

SEQ ID NO: 785124 - DNA, 33 bp, Homo sapien
acagacatacaaatcacgtagcatttcatggtt

SEQ ID NO: 785125 - DNA, 33 bp, Homo sapien
tggtttttataagtgaaatagtatcggaagcta

SEQ ID NO: 785126 - DNA, 33 bp, Homo sapien
tggtttttataagtgagatagtatcggaagcta

SEQ ID NO: 785127 - DNA, 33 bp, Homo sapien
gatctctaggggattacgtatcatttgagggag

SEQ ID NO: 785128 - DNA, 33 bp, Homo sapien
gatctctaggggattatgtatcatttgagggag

SEQ ID NO: 785129 - DNA, 33 bp, Homo sapien
tgctcaaggatcccaaatctgattaatcactaa

SEQ ID NO: 785130 - DNA, 33 bp, Homo sapien
tgctcaaggatcccaagtctgattaatcactaa

SEQ ID NO: 785131 - DNA, 33 bp, Homo sapien
aaaaatgaagcaaagaagcaagggaattaatac

SEQ ID NO: 785132 - DNA, 33 bp, Homo sapien
aaaaatgaagcaaagatgcaagggaattaatac

SEQ ID NO: 785133 - DNA, 33 bp, Homo sapien
ttactcctacaatttccctcatatatcccgaac

SEQ ID NO: 785134 - DNA, 33 bp, Homo sapien
ttactcctacaatttctctcatatatcccgaac

SEQ ID NO: 785135 - DNA, 33 bp, Homo sapien
tttggctctcaatttgcatactgactagtgata

SEQ ID NO: 785136 - DNA, 33 bp, Homo sapien
tttggctctcaatttggatactgactagtgata

SEQ ID NO: 785137 - DNA, 33 bp, Homo sapien
cagaaaagcatccatccctgtttttcctttgtt

SEQ ID NO: 785138 - DNA, 33 bp, Homo sapien
cagaaaagcatccatctctgtttttcctttgtt

SEQ ID NO: 785139 - DNA, 33 bp, Homo sapien
tgaccctgaagtataacaaatcctcaaataacc

SEQ ID NO: 785140 - DNA, 33 bp, Homo sapien
tgaccctgaagtataagaaatcctcaaataacc

SEQ ID NO: 785141 - DNA, 33 bp, Homo sapien
agctgctcaagaaaagccttccagctgagaaat

SEQ ID NO: 785142 - DNA, 33 bp, Homo sapien
agctgctcaagaaaagtcttccagctgagaaat

SEQ ID NO: 785143 - DNA, 33 bp, Homo sapien
gaatagatctgtgttacgccggtttttcacaca

SEQ ID NO: 785144 - DNA, 33 bp, Homo sapien
gaatagatctgtgttatgccggtttttcacaca

SEQ ID NO: 785145 - DNA, 33 bp, Homo sapien
ttaaaataggtctgagaaactagtaggcagcta

SEQ ID NO: 785146 - DNA, 33 bp, Homo sapien
ttaaaataggtctgaggaactagtaggcagcta

SEQ ID NO: 785147 - DNA, 33 bp, Homo sapien
cacccacaaggtaaccaaatcacggagccaggt

SEQ ID NO: 785148 - DNA, 33 bp, Homo sapien
cacccacaaggtaaccgaatcacggagccaggt

SEQ ID NO: 785149 - DNA, 33 bp, Homo sapien; identical to SEQ ID NO: 785147

SEQ ID NO: 785150 - DNA, 33 bp, Homo sapien; identical to SEQ ID NO: 785148

SEQ ID NO: 785151 - DNA, 33 bp, Homo sapien
ttgtgaaattctgcaaatatcaatagttcattc

SEQ ID NO: 785152 - DNA, 33 bp, Homo sapien
ttgtgaaattctgcaagtatcaatagttcattc

SEQ ID NO: 785153 - DNA, 33 bp, Homo sapien
catttaaattgagcaaatgctagcctttcacat

SEQ ID NO: 785154 - DNA, 33 bp, Homo sapien
catttaaattgagcaagtgctagcctttcacat

SEQ ID NO: 785155 - DNA, 33 bp, Homo sapien
taataatttatactcaaaaaggattgcctgtga

SEQ ID NO: 785156 - DNA, 33 bp, Homo sapien
taataatttatactcagaaaggattgcctgtga

SEQ ID NO: 785157 - DNA, 33 bp, Homo sapien
ctcacattaaacagacactttatatcaataatc

SEQ ID NO: 785158 - DNA, 33 bp, Homo sapien
ctcacattaaacagactctttatatcaataatc

SEQ ID NO: 785159 - DNA, 33 bp, Homo sapien
ccaaactaccttctgaatatttttgcttttgtt

SEQ ID NO: 785160 - DNA, 33 bp, Homo sapien
ccaaactaccttctgagtatttttgcttttgtt

SEQ ID NO: 785161 - DNA, 33 bp, Homo sapien
catctcctctacctccaaaacagctattgtttt

SEQ ID NO: 785162 - DNA, 33 bp, Homo sapien
catctcctctacctccgaaacagctattgtttt

SEQ ID NO: 785163 - DNA, 33 bp, Homo sapien
attactgccacatgaaaaacatttaagcatggc

SEQ ID NO: 785164 - DNA, 33 bp, Homo sapien
attactgccacatgaagaacatttaagcatggc

SEQ ID NO: 785165 - DNA, 33 bp, Homo sapien
ataatttcagacgtagcagataagaccaactcc

SEQ ID NO: 785166 - DNA, 33 bp, Homo sapien
ataatttcagacgtagtagataagaccaactcc

SEQ ID NO: 785167 - DNA, 33 bp, Homo sapien
ctggcaaattgaaatgcacagtaattaagtgtt

SEQ ID NO: 785168 - DNA, 33 bp, Homo sapien
ctggcaaattgaaatgtacagtaattaagtgtt

SEQ ID NO: 785169 - DNA, 33 bp, Homo sapien
ggaacacttacttctacgctgttgatgggaatg

SEQ ID NO: 785170 - DNA, 33 bp, Homo sapien
ggaacacttacttctatgctgttgatgggaatg

SEQ ID NO: 785171 - DNA, 33 bp, Homo sapien
catcatgttgtataccccaaatgtacacaatac

SEQ ID NO: 785172 - DNA, 33 bp, Homo sapien
catcatgttgtatacctcaaatgtacacaatac

SEQ ID NO: 785173 - DNA, 33 bp, Homo sapien
aaatggggacttactaaattgtccaagctgatc

SEQ ID NO: 785174 - DNA, 33 bp, Homo sapien
aaatggggacttactagattgtccaagctgatc

SEQ ID NO: 785175 - DNA, 33 bp, Homo sapien
ttgttttgttttgttaaggtgaaagagtgtcaa

SEQ ID NO: 785176 - DNA, 33 bp, Homo sapien
ttgttttgttttgttagggtgaaagagtgtcaa

SEQ ID NO: 785177 - DNA, 33 bp, Homo sapien
cctatttactaccccactaatgagaatgtaatg

SEQ ID NO: 785178 - DNA, 33 bp, Homo sapien
cctatttactaccccagtaatgagaatgtaatg

SEQ ID NO: 785179 - DNA, 33 bp, Homo sapien
ttgtaagtgaattacactctcgcattctacacc

SEQ ID NO: 785180 - DNA, 33 bp, Homo sapien
ttgtaagtgaattacattctcgcattctacacc

SEQ ID NO: 785181 - DNA, 33 bp, Homo sapien
attctacaccattacactcagtagttttactgt

SEQ ID NO: 785182 - DNA, 33 bp, Homo sapien
attctacaccattacattcagtagttttactgt

SEQ ID NO: 785183 - DNA, 33 bp, Homo sapien
gctctgtcatccccaacgggaagctgcaatacc

SEQ ID NO: 785184 - DNA, 33 bp, Homo sapien
gctctgtcatccccaatgggaagctgcaatacc

SEQ ID NO: 785185 - DNA, 33 bp, Homo sapien
tcatatatctaaacaacgaagtatgacattcca

SEQ ID NO: 785186 - DNA, 33 bp, Homo sapien
tcatatatctaaacaatgaagtatgacattcca

SEQ ID NO: 785187 - DNA, 33 bp, Homo sapien
agcccaactttgctcaggtcaggaaagaaacat

SEQ ID NO: 785188 - DNA, 33 bp, Homo sapien
agcccaactttgctcatgtcaggaaagaaacat

SEQ ID NO: 785189 - DNA, 33 bp, Homo sapien
cacattgccagagataggcttctgagtccccaa

SEQ ID NO: 785190 - DNA, 33 bp, Homo sapien
cacattgccagagatatgcttctgagtccccaa

SEQ ID NO: 785191 - DNA, 33 bp, Homo sapien
tttatcttgtcaaccacgatgcagaaagatgaa

SEQ ID NO: 785192 - DNA, 33 bp, Homo sapien
tttatcttgtcaaccatgatgcagaaagatgaa

SEQ ID NO: 785193 - DNA, 33 bp, Homo sapien
cctttaaaaatcaatagagatgcaaatttctca

SEQ ID NO: 785194 - DNA, 33 bp, Homo sapien
cctttaaaaatcaatatagatgcaaatttctca

SEQ ID NO: 785195 - DNA, 33 bp, Homo sapien
tacagtggaaccataaaggaggcagctaactgc

SEQ ID NO: 785196 - DNA, 33 bp, Homo sapien
tacagtggaaccataagggaggcagctaactgc

SEQ ID NO: 785197 - DNA, 33 bp, Homo sapien
ttccctttaatgcttacaaagggtaacgtggta

SEQ ID NO: 785198 - DNA, 33 bp, Homo sapien
ttccctttaatgcttagaaagggtaacgtggta

SEQ ID NO: 785199 - DNA, 33 bp, Homo sapien
aaaggaagagaatccaggtgttgtttgaaatta

SEQ ID NO: 785200 - DNA, 33 bp, Homo sapien
aaaggaagagaatccatgtgttgtttgaaatta

SEQ ID NO: 785201 - DNA, 33 bp, Homo sapien
tgcaatttattgtttaagttaaagtgtatcaag

SEQ ID NO: 785202 - DNA, 33 bp, Homo sapien
tgcaatttattgtttaggttaaagtgtatcaag

SEQ ID NO: 785203 - DNA, 33 bp, Homo sapien
cttaccaaataataaaactacatcagaaacaaa

SEQ ID NO: 785204 - DNA, 33 bp, Homo sapien
cttaccaaataataaagctacatcagaaacaaa

SEQ ID NO: 785205 - DNA, 33 bp, Homo sapien
caggcttcctcacataaggcagcaatgtttcaa

SEQ ID NO: 785206 - DNA, 33 bp, Homo sapien
caggcttcctcacatagggcagcaatgtttcaa

SEQ ID NO: 785207 - DNA, 33 bp, Homo sapien
ctatcatgtgcacagcgctcatttccttgcctg

SEQ ID NO: 785208 - DNA, 33 bp, Homo sapien
ctatcatgtgcacagctctcatttccttgcctg

SEQ ID NO: 785209 - DNA, 33 bp, Homo sapien
tctgctgactccactactactattgatatctat

SEQ ID NO: 785210 - DNA, 33 bp, Homo sapien
tctgctgactccactattactattgatatctat

SEQ ID NO: 785211 - DNA, 33 bp, Homo sapien
atcagggtattcgaaccgttagttgcttccact

SEQ ID NO: 785212 - DNA, 33 bp, Homo sapien
atcagggtattcgaactgttagttgcttccact

SEQ ID NO: 785213 - DNA, 33 bp, Homo sapien
aagacaggaaaatgtacgaacgtttgaaactct

SEQ ID NO: 785214 - DNA, 33 bp, Homo sapien
aagacaggaaaatgtatgaacgtttgaaactct

SEQ ID NO: 785215 - DNA, 33 bp, Homo sapien
tttcattaattttgtaccttgagttacttaagc

SEQ ID NO: 785216 - DNA, 33 bp, Homo sapien
tttcattaattttgtatcttgagttacttaagc

SEQ ID NO: 785217 - DNA, 33 bp, Homo sapien
gccacaccttcctttacgactttgtaggtatta

SEQ ID NO: 785218 - DNA, 33 bp, Homo sapien
gccacaccttcctttatgactttgtaggtatta

SEQ ID NO: 785219 - DNA, 33 bp, Homo sapien
gcctgtcctttcccaactgattatatctgaata

SEQ ID NO: 785220 - DNA, 33 bp, Homo sapien
gcctgtcctttcccaattgattatatctgaata

SEQ ID NO: 785221 - DNA, 33 bp, Homo sapien
ttttggtagtttattcacaaggcaaacagagat

SEQ ID NO: 785222 - DNA, 33 bp, Homo sapien
ttttggtagtttattcgcaaggcaaacagagat

SEQ ID NO: 785223 - DNA, 33 bp, Homo sapien
ggtttgataatacctacgtcataatgagtagtc

SEQ ID NO: 785224 - DNA, 33 bp, Homo sapien
ggtttgataatacctatgtcataatgagtagtc

SEQ ID NO: 785225 - DNA, 33 bp, Homo sapien
tgaggaagccaacacacgaggagaaggatgcag

SEQ ID NO: 785226 - DNA, 33 bp, Homo sapien
tgaggaagccaacacaggaggagaaggatgcag

SEQ ID NO: 785227 - DNA, 33 bp, Homo sapien
aaacatttgaataccacccactaatctgatgtg

SEQ ID NO: 785228 - DNA, 33 bp, Homo sapien
aaacatttgaataccatccactaatctgatgtg

SEQ ID NO: 785229 - DNA, 33 bp, Homo sapien
gacccagtagagatgaaactctaggaaacacta

SEQ ID NO: 785230 - DNA, 33 bp, Homo sapien
gacccagtagagatgacactctaggaaacacta

SEQ ID NO: 785231 - DNA, 33 bp, Homo sapien
atacttttattctcacaaagttttactaatact

SEQ ID NO: 785232 - DNA, 33 bp, Homo sapien
atacttttattctcacgaagttttactaatact

SEQ ID NO: 785233 - DNA, 33 bp, Homo sapien
tcttctttaaagggaacgcttcctccatctatg

SEQ ID NO: 785234 - DNA, 33 bp, Homo sapien
tcttctttaaagggaatgcttcctccatctatg

SEQ ID NO: 785235 - DNA, 33 bp, Homo sapien
acataaaattagtccaaatcaaatatagctctt

SEQ ID NO: 785236 - DNA, 33 bp, Homo sapien
acataaaattagtccacatcaaatatagctctt

SEQ ID NO: 785237 - DNA, 33 bp, Homo sapien
acaaaaaccttattaaacacagatttagctcat

SEQ ID NO: 785238 - DNA, 33 bp, Homo sapien
acaaaaaccttattaagcacagatttagctcat

SEQ ID NO: 785239 - DNA, 33 bp, Homo sapien
ttctacacagaggtcccgactgactcccatcac

SEQ ID NO: 785240 - DNA, 33 bp, Homo sapien
ttctacacagaggtcctgactgactcccatcac

SEQ ID NO: 785241 - DNA, 33 bp, Homo sapien
gactttgaattcaacaatgtcaaagcaaagtat

SEQ ID NO: 785242 - DNA, 33 bp, Homo sapien
gactttgaattcaacagtgtcaaagcaaagtat

SEQ ID NO: 785243 - DNA, 33 bp, Homo sapien
ttccagaatatgtgaccatctttaggtctaaga

SEQ ID NO: 785244 - DNA, 33 bp, Homo sapien
ttccagaatatgtgactatctttaggtctaaga

SEQ ID NO: 785245 - DNA, 33 bp, Homo sapien
catcatataccactggaaaaattgtcaaatagt

SEQ ID NO: 785246 - DNA, 33 bp, Homo sapien
catcatataccactggcaaaattgtcaaatagt

SEQ ID NO: 785247 - DNA, 33 bp, Homo sapien
atgatcattaaccttccaataaacatagtgaaa

SEQ ID NO: 785248 - DNA, 33 bp, Homo sapien
atgatcattaaccttctaataaacatagtgaaa

SEQ ID NO: 785249 - DNA, 33 bp, Homo sapien
tgagtccatgaagtaacactcatccactatcgg

SEQ ID NO: 785250 - DNA, 33 bp, Homo sapien
tgagtccatgaagtaatactcatccactatcgg

SEQ ID NO: 785251 - DNA, 33 bp, Homo sapien
ccattcatcagaatcactcaccttttcaaaatc

SEQ ID NO: 785252 - DNA, 33 bp, Homo sapien
ccattcatcagaatcattcaccttttcaaaatc

SEQ ID NO: 785253 - DNA, 33 bp, Homo sapien
tccaggtttcaactagcaggaaagctttgggtg

SEQ ID NO: 785254 - DNA, 33 bp, Homo sapien
tccaggtttcaactagtaggaaagctttgggtg

SEQ ID NO: 785255 - DNA, 33 bp, Homo sapien
aatattttagtactgcacaaaaacacaaacaca

SEQ ID NO: 785256 - DNA, 33 bp, Homo sapien
aatattttagtactgcgcaaaaacacaaacaca

SEQ ID NO: 785257 - DNA, 33 bp, Homo sapien
gcataaagtcctgtgcccagagaacagtctggt

SEQ ID NO: 785258 - DNA, 33 bp, Homo sapien
gcataaagtcctgtgctcagagaacagtctggt

SEQ ID NO: 785259 - DNA, 33 bp, Homo sapien
tttagtaattgtgcaaaccataaaataattaga

SEQ ID NO: 785260 - DNA, 33 bp, Homo sapien
tttagtaattgtgcaatccataaaataattaga

SEQ ID NO: 785261 - DNA, 33 bp, Homo sapien
tgcatttgatctcacaacatttttgcttaatct

SEQ ID NO: 785262 - DNA, 33 bp, Homo sapien
tgcatttgatctcacagcatttttgcttaatct

SEQ ID NO: 785263 - DNA, 33 bp, Homo sapien
actctaaatgccagtgaagtttctgcaatcaaa

SEQ ID NO: 785264 - DNA, 33 bp, Homo sapien
actctaaatgccagtggagtttctgcaatcaaa

SEQ ID NO: 785265 - DNA, 33 bp, Homo sapien
agtaagagccctatacacgcagctattactgtt

SEQ ID NO: 785266 - DNA, 33 bp, Homo sapien
agtaagagccctatacgcgcagctattactgtt

SEQ ID NO: 785267 - DNA, 33 bp, Homo sapien
cacagttttatgtctaccacaataggatcacca

SEQ ID NO: 785268 - DNA, 33 bp, Homo sapien
cacagttttatgtctatcacaataggatcacca

SEQ ID NO: 785269 - DNA, 33 bp, Homo sapien
agcatactcaaaaccaaatttgtacctatcaag

SEQ ID NO: 785270 - DNA, 33 bp, Homo sapien
agcatactcaaaaccagatttgtacctatcaag

SEQ ID NO: 785271 - DNA, 33 bp, Homo sapien
atgaactattcgtcaacgtcacccatattttac

SEQ ID NO: 785272 - DNA, 33 bp, Homo sapien
atgaactattcgtcaatgtcacccatattttac

SEQ ID NO: 785273 - DNA, 33 bp, Homo sapien
ctaaacccctttattaacatatctggcctctac

SEQ ID NO: 785274 - DNA, 33 bp, Homo sapien
ctaaacccctttattagcatatctggcctctac

SEQ ID NO: 785275 - DNA, 33 bp, Homo sapien
tgattacaggaaactgacagacccatgaaaagt

SEQ ID NO: 785276 - DNA, 33 bp, Homo sapien
tgattacaggaaactggcagacccatgaaaagt

SEQ ID NO: 785277 - DNA, 33 bp, Homo sapien
gttagatagtattagcaaagttcagcatgaata

SEQ ID NO: 785278 - DNA, 33 bp, Homo sapien
gttagatagtattagcgaagttcagcatgaata

SEQ ID NO: 785279 - DNA, 33 bp, Homo sapien
atctggttgccagagaaagattgcagctggctg

SEQ ID NO: 785280 - DNA, 33 bp, Homo sapien
atctggttgccagagagagattgcagctggctg

SEQ ID NO: 785281 - DNA, 33 bp, Homo sapien
aaaggctaggttaaatgatacttcaactgctaa

SEQ ID NO: 785282 - DNA, 33 bp, Homo sapien
aaaggctaggttaaattatacttcaactgctaa

SEQ ID NO: 785283 - DNA, 33 bp, Homo sapien
gtggcctggtttataacagaccatggagggtac

SEQ ID NO: 785284 - DNA, 33 bp, Homo sapien
gtggcctggtttataatagaccatggagggtac

SEQ ID NO: 785285 - DNA, 33 bp, Homo sapien
gaaagcactataaggcaattatctggggggcag

SEQ ID NO: 785286 - DNA, 33 bp, Homo sapien
gaaagcactataaggcgattatctggggggcag

SEQ ID NO: 785287 - DNA, 33 bp, Homo sapien
tttaacacaacttaccaataactactgactatt

SEQ ID NO: 785288 - DNA, 33 bp, Homo sapien
tttaacacaacttaccgataactactgactatt

SEQ ID NO: 785289 - DNA, 33 bp, Homo sapien
atgctacctatataagaactgtacatctgtagt

SEQ ID NO: 785290 - DNA, 33 bp, Homo sapien
atgctacctatataaggactgtacatctgtagt

SEQ ID NO: 785291 - DNA, 33 bp, Homo sapien
tcagcgattttgtttacgagtaacaggtctgtt

SEQ ID NO: 785292 - DNA, 33 bp, Homo sapien
tcagcgattttgtttatgagtaacaggtctgtt

SEQ ID NO: 785293 - DNA, 33 bp, Homo sapien
tgcaggaagaatgtcacggctcaaaacccaaac

SEQ ID NO: 785294 - DNA, 33 bp, Homo sapien
tgcaggaagaatgtcatggctcaaaacccaaac

SEQ ID NO: 785295 - DNA, 33 bp, Homo sapien
gttttatgggttttcaagtgtgcataaagtgtc

SEQ ID NO: 785296 - DNA, 33 bp, Homo sapien
gttttatgggttttcacgtgtgcataaagtgtc

SEQ ID NO: 785297 - DNA, 33 bp, Homo sapien
cttgtccctgcaaaagaaaatctctgctactgg

SEQ ID NO: 785298 - DNA, 33 bp, Homo sapien
cttgtccctgcaaaaggaaatctctgctactgg

SEQ ID NO: 785299 - DNA, 33 bp, Homo sapien
atctaaggtcagttcacgtaagaattggggttg

SEQ ID NO: 785300 - DNA, 33 bp, Homo sapien
atctaaggtcagttcatgtaagaattggggttg

SEQ ID NO: 785301 - DNA, 33 bp, Homo sapien
ttgtatctttccaaagcctctcagttttcattt

SEQ ID NO: 785302 - DNA, 33 bp, Homo sapien
ttgtatctttccaaaggctctcagttttcattt

SEQ ID NO: 785303 - DNA, 33 bp, Homo sapien
agatcataggtatatccccacactgcaacaaac

SEQ ID NO: 785304 - DNA, 33 bp, Homo sapien
agatcataggtatatctccacactgcaacaaac

SEQ ID NO: 785305 - DNA, 33 bp, Homo sapien
aggtgtagtagctgcaaaaaataaaaggagggg

SEQ ID NO: 785306 - DNA, 33 bp, Homo sapien
aggtgtagtagctgcagaaaataaaaggagggg

SEQ ID NO: 785307 - DNA, 33 bp, Homo sapien
aacttaaagaaagcagacatttcctaattttcc

SEQ ID NO: 785308 - DNA, 33 bp, Homo sapien
aacttaaagaaagcaggcatttcctaattttcc

SEQ ID NO: 785309 - DNA, 33 bp, Homo sapien
atcctcaatcctcgagacataaaaggtttagaa

SEQ ID NO: 785310 - DNA, 33 bp, Homo sapien
atcctcaatcctcgaggcataaaaggtttagaa

SEQ ID NO: 785311 - DNA, 33 bp, Homo sapien
aacaagcttagaacacaggaaatacacttagaa

SEQ ID NO: 785312 - DNA, 33 bp, Homo sapien
aacaagcttagaacacgggaaatacacttagaa

SEQ ID NO: 785313 - DNA, 33 bp, Homo sapien
acttgttgagtgatgagcatgtgggctggtttt

SEQ ID NO: 785314 - DNA, 33 bp, Homo sapien
acttgttgagtgatgatcatgtgggctggtttt

SEQ ID NO: 785315 - DNA, 33 bp, Homo sapien
caatatgcaatttgtcactaatgaatagtttta

SEQ ID NO: 785316 - DNA, 33 bp, Homo sapien
caatatgcaatttgtccctaatgaatagtttta

SEQ ID NO: 785317 - DNA, 33 bp, Homo sapien
cagccagccagaattcacttggagccaagaacg

SEQ ID NO: 785318 - DNA, 33 bp, Homo sapien
cagccagccagaattcgcttggagccaagaacg

SEQ ID NO: 785319 - DNA, 33 bp, Homo sapien
gagacaaattatacatcactcacaaatcctgaa

SEQ ID NO: 785320 - DNA, 33 bp, Homo sapien
gagacaaattatacatgactcacaaatcctgaa

SEQ ID NO: 785321 - DNA, 33 bp, Homo sapien
tgacacacaggatagacacaagtgcttcatctt

SEQ ID NO: 785322 - DNA, 33 bp, Homo sapien
tgacacacaggatagatacaagtgcttcatctt

SEQ ID NO: 785323 - DNA, 33 bp, Homo sapien
tttacaactaattgaccgtatgaaaaggagatt

SEQ ID NO: 785324 - DNA, 33 bp, Homo sapien
tttacaactaattgactgtatgaaaaggagatt

SEQ ID NO: 785325 - DNA, 33 bp, Homo sapien
tgactggatgatgaaaatagctgaatagaaact

SEQ ID NO: 785326 - DNA, 33 bp, Homo sapien
tgactggatgatgaaagtagctgaatagaaact

SEQ ID NO: 785327 - DNA, 33 bp, Homo sapien
tgctggaataaagtcaaagagattagtatgaac

SEQ ID NO: 785328 - DNA, 33 bp, Homo sapien
tgctggaataaagtcagagagattagtatgaac

SEQ ID NO: 785329 - DNA, 33 bp, Homo sapien
aagaatttgaagagatcagccagtattctgatg

SEQ ID NO: 785330 - DNA, 33 bp, Homo sapien
aagaatttgaagagatgagccagtattctgatg

SEQ ID NO: 785331 - DNA, 33 bp, Homo sapien
accacgtccgccccgcaagcacagagcgtcgcc

SEQ ID NO: 785332 - DNA, 33 bp, Homo sapien
accacgtccgccccgcgagcacagagcgtcgcc

SEQ ID NO: 785333 - DNA, 33 bp, Homo sapien
atcatataggcattgcacagccaatcaaaaaca

SEQ ID NO: 785334 - DNA, 33 bp, Homo sapien
atcatataggcattgcgcagccaatcaaaaaca

SEQ ID NO: 785335 - DNA, 33 bp, Homo sapien
gaacagcaacaatttgaaaaatctgtaaaccat

SEQ ID NO: 785336 - DNA, 33 bp, Homo sapien
gaacagcaacaatttgcaaaatctgtaaaccat

SEQ ID NO: 785337 - DNA, 33 bp, Homo sapien
cactgaatcatccatagattgtgggactagaat

SEQ ID NO: 785338 - DNA, 33 bp, Homo sapien
cactgaatcatccatatattgtgggactagaat

SEQ ID NO: 785339 - DNA, 33 bp, Homo sapien
ctccggggaacagtgagtaaaggtggcagtcat

SEQ ID NO: 785340 - DNA, 33 bp, Homo sapien
ctccggggaacagtgattaaaggtggcagtcat

SEQ ID NO: 785341 - DNA, 33 bp, Homo sapien
ttagctcataaacttacgttttgtagtgagaac

SEQ ID NO: 785342 - DNA, 33 bp, Homo sapien
ttagctcataaacttatgttttgtagtgagaac

SEQ ID NO: 785343 - DNA, 33 bp, Homo sapien
aactcatagaactagagaatagagtggtggttc

SEQ ID NO: 785344 - DNA, 33 bp, Homo sapien
aactcatagaactagataatagagtggtggttc

SEQ ID NO: 785345 - DNA, 33 bp, Homo sapien
taagataatgcatagggaacaggatgacaaaag

SEQ ID NO: 785346 - DNA, 33 bp, Homo sapien
taagataatgcataggtaacaggatgacaaaag

SEQ ID NO: 785347 - DNA, 33 bp, Homo sapien
gatctcttctctgaatcacacggaactgtctcc

SEQ ID NO: 785348 - DNA, 33 bp, Homo sapien
gatctcttctctgaatgacacggaactgtctcc

SEQ ID NO: 785349 - DNA, 33 bp, Homo sapien
aatcaatacataagtacggcatggtagattttt

SEQ ID NO: 785350 - DNA, 33 bp, Homo sapien
aatcaatacataagtagggcatggtagattttt

SEQ ID NO: 785351 - DNA, 33 bp, Homo sapien
aaggtctctagtcccagaaatggaaaatctttt

SEQ ID NO: 785352 - DNA, 33 bp, Homo sapien
aaggtctctagtcccataaatggaaaatctttt

SEQ ID NO: 785353 - DNA, 33 bp, Homo sapien
aatcatttccaggaaaatccttagttctggcag

SEQ ID NO: 785354 - DNA, 33 bp, Homo sapien
aatcatttccaggaaagtccttagttctggcag

SEQ ID NO: 785355 - DNA, 33 bp, Homo sapien
ttcaagacatttaaccaatcatggaatacttct

SEQ ID NO: 785356 - DNA, 33 bp, Homo sapien
ttcaagacatttaaccgatcatggaatacttct

SEQ ID NO: 785357 - DNA, 33 bp, Homo sapien
accatcatggaaaagcaaagtttcacaagagac

SEQ ID NO: 785358 - DNA, 33 bp, Homo sapien
accatcatggaaaagccaagtttcacaagagac

SEQ ID NO: 785359 - DNA, 33 bp, Homo sapien
tcacatagtcataaaaaggaatctgtaagctta

SEQ ID NO: 785360 - DNA, 33 bp, Homo sapien
tcacatagtcataaaacggaatctgtaagctta

SEQ ID NO: 785361 - DNA, 33 bp, Homo sapien
cctcgcctcttcttaagaatttgtatataaccc

SEQ ID NO: 785362 - DNA, 33 bp, Homo sapien
cctcgcctcttcttaataatttgtatataaccc

SEQ ID NO: 785363 - DNA, 33 bp, Homo sapien
aagtgcagtagagagacgtagtgactggaagaa

SEQ ID NO: 785364 - DNA, 33 bp, Homo sapien
aagtgcagtagagagaggtagtgactggaagaa

SEQ ID NO: 785365 - DNA, 33 bp, Homo sapien
attttgagatgtttgaaaagaaacttctgagga

SEQ ID NO: 785366 - DNA, 33 bp, Homo sapien
attttgagatgtttgagaagaaacttctgagga

SEQ ID NO: 785367 - DNA, 33 bp, Homo sapien
attatgaattaaatgaacttttcacagggtatc

SEQ ID NO: 785368 - DNA, 33 bp, Homo sapien
attatgaattaaatgaccttttcacagggtatc

SEQ ID NO: 785369 - DNA, 33 bp, Homo sapien
agcataaattctaaaacgatggctactgtacta

SEQ ID NO: 785370 - DNA, 33 bp, Homo sapien
agcataaattctaaaatgatggctactgtacta

SEQ ID NO: 785371 - DNA, 33 bp, Homo sapien
gtcttacttatcagccactaagaaatggcatga

SEQ ID NO: 785372 - DNA, 33 bp, Homo sapien
gtcttacttatcagccgctaagaaatggcatga

SEQ ID NO: 785373 - DNA, 33 bp, Homo sapien
ccctcccaactatatcaatgtttaaccaacaaa

SEQ ID NO: 785374 - DNA, 33 bp, Homo sapien
ccctcccaactatatccatgtttaaccaacaaa

SEQ ID NO: 785375 - DNA, 33 bp, Homo sapien
tatattagccaataacgcaacaagctagcttga

SEQ ID NO: 785376 - DNA, 33 bp, Homo sapien
tatattagccaataactcaacaagctagcttga

SEQ ID NO: 785377 - DNA, 33 bp, Homo sapien
tttgtgagtgctggacacttcatatagcaagcc

SEQ ID NO: 785378 - DNA, 33 bp, Homo sapien
tttgtgagtgctggacgcttcatatagcaagcc

SEQ ID NO: 785379 - DNA, 33 bp, Homo sapien
catcagaggtctcaaacggaccgcctgcagacc

SEQ ID NO: 785380 - DNA, 33 bp, Homo sapien
catcagaggtctcaaatggaccgcctgcagacc

SEQ ID NO: 785381 - DNA, 33 bp, Homo sapien
atgctatgactgataactcttccccatatctag

SEQ ID NO: 785382 - DNA, 33 bp, Homo sapien
atgctatgactgataattcttccccatatctag

SEQ ID NO: 785383 - DNA, 33 bp, Homo sapien
gagaaagtttaattggcagttgaagctgtatag

SEQ ID NO: 785384 - DNA, 33 bp, Homo sapien
gagaaagtttaattgggagttgaagctgtatag

SEQ ID NO: 785385 - DNA, 33 bp, Homo sapien
tcacctttaagtctcaaccaaagaaagacaaaa

SEQ ID NO: 785386 - DNA, 33 bp, Homo sapien
tcacctttaagtctcagccaaagaaagacaaaa

SEQ ID NO: 785387 - DNA, 33 bp, Homo sapien
aagttttaaccatgtacgtccaaatagttgaac

SEQ ID NO: 785388 - DNA, 33 bp, Homo sapien
aagttttaaccatgtaggtccaaatagttgaac

SEQ ID NO: 785389 - DNA, 33 bp, Homo sapien
atttccttttacctcaagttgaagtaaaagtaa

SEQ ID NO: 785390 - DNA, 33 bp, Homo sapien
atttccttttacctcaggttgaagtaaaagtaa

SEQ ID NO: 785391 - DNA, 33 bp, Homo sapien
gagaacaatgcttaaccgagtgttctcctgact

SEQ ID NO: 785392 - DNA, 33 bp, Homo sapien
gagaacaatgcttaactgagtgttctcctgact

SEQ ID NO: 785393 - DNA, 33 bp, Homo sapien
tatagccattatgaaaagtggttgggaggtttc

SEQ ID NO: 785394 - DNA, 33 bp, Homo sapien
tatagccattatgaaaggtggttgggaggtttc

SEQ ID NO: 785395 - DNA, 33 bp, Homo sapien
tgacacaaaaattcgaaagaatcaacttagaga

SEQ ID NO: 785396 - DNA, 33 bp, Homo sapien
tgacacaaaaattcgagagaatcaacttagaga

SEQ ID NO: 785397 - DNA, 33 bp, Homo sapien
acagtgataacagttacgtatgtaatgtactta

SEQ ID NO: 785398 - DNA, 33 bp, Homo sapien
acagtgataacagttatgtatgtaatgtactta

SEQ ID NO: 785399 - DNA, 33 bp, Homo sapien
tgctttaaattgatcaactcattatccaacctg

SEQ ID NO: 785400 - DNA, 33 bp, Homo sapien
tgctttaaattgatcatctcattatccaacctg

SEQ ID NO: 785401 - DNA, 33 bp, Homo sapien
tctagatgtctgtaaacgccatcaatacagtca

SEQ ID NO: 785402 - DNA, 33 bp, Homo sapien
tctagatgtctgtaaatgccatcaatacagtca

SEQ ID NO: 785403 - DNA, 33 bp, Homo sapien
ccatcaatacagtcaacggaagaagaaaagtgt

SEQ ID NO: 785404 - DNA, 33 bp, Homo sapien
ccatcaatacagtcaatggaagaagaaaagtgt

SEQ ID NO: 785405 - DNA, 33 bp, Homo sapien
caggacaggaaaggacactgcttcaactataaa

SEQ ID NO: 785406 - DNA, 33 bp, Homo sapien
caggacaggaaaggaccctgcttcaactataaa

SEQ ID NO: 785407 - DNA, 33 bp, Homo sapien
ccaatttaaactcagaaccctctcctcattatc

SEQ ID NO: 785408 - DNA, 33 bp, Homo sapien
ccaatttaaactcagacccctctcctcattatc

SEQ ID NO: 785409 - DNA, 33 bp, Homo sapien
cacatataacataaacagtcacaaacaataaat

SEQ ID NO: 785410 - DNA, 33 bp, Homo sapien
cacatataacataaacggtcacaaacaataaat

SEQ ID NO: 785411 - DNA, 33 bp, Homo sapien
gcttgcactgcttgggcattatgtatgtaaaat

SEQ ID NO: 785412 - DNA, 33 bp, Homo sapien
gcttgcactgcttggggattatgtatgtaaaat

SEQ ID NO: 785413 - DNA, 33 bp, Homo sapien
tttaaggtactcccacaaataggcatggaggta

SEQ ID NO: 785414 - DNA, 33 bp, Homo sapien
tttaaggtactcccacgaataggcatggaggta

SEQ ID NO: 785415 - DNA, 33 bp, Homo sapien
tggactatatttactacgtttgatattgctgac

SEQ ID NO: 785416 - DNA, 33 bp, Homo sapien
tggactatatttactatgtttgatattgctgac

SEQ ID NO: 785417 - DNA, 33 bp, Homo sapien
cgacatgcatgagtcgcagcccttcagctttgc

SEQ ID NO: 785418 - DNA, 33 bp, Homo sapien
cgacatgcatgagtcggagcccttcagctttgc

SEQ ID NO: 785419 - DNA, 33 bp, Homo sapien; identical to SEQ ID NO: 785417

SEQ ID NO: 785420 - DNA, 33 bp, Homo sapien; identical to SEQ ID NO: 785418

SEQ ID NO: 785421 - DNA, 33 bp, Homo sapien
tcattttgcggtgtataaaatgaaacacatttc

SEQ ID NO: 785422 - DNA, 33 bp, Homo sapien
tcattttgcggtgtatgaaatgaaacacatttc

SEQ ID NO: 785423 - DNA, 33 bp, Homo sapien
tattcttacctgccaacctaagtgtcttgactg

SEQ ID NO: 785424 - DNA, 33 bp, Homo sapien
tattcttacctgccaatctaagtgtcttgactg

SEQ ID NO: 785425 - DNA, 33 bp, Homo sapien
tatttgaaaatagcatgaccatacttcttaaac

SEQ ID NO: 785426 - DNA, 33 bp, Homo sapien
tatttgaaaatagcattaccatacttcttaaac

SEQ ID NO: 785427 - DNA, 33 bp, Homo sapien
ttggagcatccttcacacttcatagaattcttc

SEQ ID NO: 785428 - DNA, 33 bp, Homo sapien
ttggagcatccttcacgcttcatagaattcttc

SEQ ID NO: 785429 - DNA, 33 bp, Homo sapien
atcctggtactgaaaaatcaagcaaaattcaac

SEQ ID NO: 785430 - DNA, 33 bp, Homo sapien
atcctggtactgaaaagtcaagcaaaattcaac

SEQ ID NO: 785431 - DNA, 33 bp, Homo sapien
ctcccaatataagtacagagattaaccttcact

SEQ ID NO: 785432 - DNA, 33 bp, Homo sapien
ctcccaatataagtacggagattaaccttcact

SEQ ID NO: 785433 - DNA, 33 bp, Homo sapien
tctcagccttacacacaacatttgaggtgcatg

SEQ ID NO: 785434 - DNA, 33 bp, Homo sapien
tctcagccttacacacgacatttgaggtgcatg

SEQ ID NO: 785435 - DNA, 33 bp, Homo sapien
tctatttggtgttgaacctgaataagaacttgt

SEQ ID NO: 785436 - DNA, 33 bp, Homo sapien
tctatttggtgttgaatctgaataagaacttgt

SEQ ID NO: 785437 - DNA, 33 bp, Homo sapien
gtggtatgagtagtaaactgaattttataagca

SEQ ID NO: 785438 - DNA, 33 bp, Homo sapien
gtggtatgagtagtaagctgaattttataagca

SEQ ID NO: 785439 - DNA, 33 bp, Homo sapien
gcagtgcctaatacaaaagcatggttgtgggtc

SEQ ID NO: 785440 - DNA, 33 bp, Homo sapien
gcagtgcctaatacaagagcatggttgtgggtc

SEQ ID NO: 785441 - DNA, 33 bp, Homo sapien
gtattgttatggttgcagattcacaaaaatata

SEQ ID NO: 785442 - DNA, 33 bp, Homo sapien
gtattgttatggttgcggattcacaaaaatata

SEQ ID NO: 785443 - DNA, 33 bp, Homo sapien
catggtaggagagttacaggaacacagtgggag

SEQ ID NO: 785444 - DNA, 33 bp, Homo sapien
catggtaggagagttataggaacacagtgggag

SEQ ID NO: 785445 - DNA, 33 bp, Homo sapien
atagctttcattacggaaaaaatatacatcttc

SEQ ID NO: 785446 - DNA, 33 bp, Homo sapien
atagctttcattacgggaaaaatatacatcttc

SEQ ID NO: 785447 - DNA, 33 bp, Homo sapien
ggcaatgaatggaatcaagctggtgaaagacta

SEQ ID NO: 785448 - DNA, 33 bp, Homo sapien
ggcaatgaatggaatcgagctggtgaaagacta

SEQ ID NO: 785449 - DNA, 33 bp, Homo sapien
cttgggactaagtcttcaaagaaattaggccat

SEQ ID NO: 785450 - DNA, 33 bp, Homo sapien
cttgggactaagtcttgaaagaaattaggccat

SEQ ID NO: 785451 - DNA, 33 bp, Homo sapien
tggaggatgaattaacaggtagaaagcataaag

SEQ ID NO: 785452 - DNA, 33 bp, Homo sapien
tggaggatgaattaacgggtagaaagcataaag

SEQ ID NO: 785453 - DNA, 33 bp, Homo sapien
tgtcactggccatgccaacatacctcactctgg

SEQ ID NO: 785454 - DNA, 33 bp, Homo sapien
tgtcactggccatgccgacatacctcactctgg

SEQ ID NO: 785455 - DNA, 33 bp, Homo sapien
caaattcataagttgacagtgtttggaggtggg

SEQ ID NO: 785456 - DNA, 33 bp, Homo sapien
caaattcataagttgatagtgtttggaggtggg

SEQ ID NO: 785457 - DNA, 33 bp, Homo sapien
tgcattactatccagactattgcttggcaaata

SEQ ID NO: 785458 - DNA, 33 bp, Homo sapien
tgcattactatccagagtattgcttggcaaata

SEQ ID NO: 785459 - DNA, 33 bp, Homo sapien
ctcatcaaatgtgacacagttctttatttggga

SEQ ID NO: 785460 - DNA, 33 bp, Homo sapien
ctcatcaaatgtgacatagttctttatttggga

SEQ ID NO: 785461 - DNA, 33 bp, Homo sapien
tattctcactccaggcgagaagatttcccactt

SEQ ID NO: 785462 - DNA, 33 bp, Homo sapien
tattctcactccaggctagaagatttcccactt

SEQ ID NO: 785463 - DNA, 33 bp, Homo sapien
aaatttcaagactatacgaacatctaacttaaa

SEQ ID NO: 785464 - DNA, 33 bp, Homo sapien
aaatttcaagactatatgaacatctaacttaaa

SEQ ID NO: 785465 - DNA, 33 bp, Homo sapien
ttttttgctggtcataaattggctcttagcgtg

SEQ ID NO: 785466 - DNA, 33 bp, Homo sapien
ttttttgctggtcatatattggctcttagcgtg

SEQ ID NO: 785467 - DNA, 33 bp, Homo sapien
aacttggcccatccaacaatgctgtggttctta

SEQ ID NO: 785468 - DNA, 33 bp, Homo sapien
aacttggcccatccaataatgctgtggttctta

SEQ ID NO: 785469 - DNA, 33 bp, Homo sapien
cagtgtctgggcatcactaaagagttaggcatt

SEQ ID NO: 785470 - DNA, 33 bp, Homo sapien
cagtgtctgggcatcattaaagagttaggcatt

SEQ ID NO: 785471 - DNA, 33 bp, Homo sapien
cttgtaagcccacagaactgtgaagattctcag

SEQ ID NO: 785472 - DNA, 33 bp, Homo sapien
cttgtaagcccacagagctgtgaagattctcag

SEQ ID NO: 785473 - DNA, 33 bp, Homo sapien
ctgtcagtttcattgaaggtcagatggttatag

SEQ ID NO: 785474 - DNA, 33 bp, Homo sapien
ctgtcagtttcattgatggtcagatggttatag

SEQ ID NO: 785475 - DNA, 33 bp, Homo sapien
gtgttagtttagtcaggatgatagcttccagct

SEQ ID NO: 785476 - DNA, 33 bp, Homo sapien
gtgttagtttagtcagtatgatagcttccagct

SEQ ID NO: 785477 - DNA, 33 bp, Homo sapien
aaaccactctggcacacatatacctacgtaaca

SEQ ID NO: 785478 - DNA, 33 bp, Homo sapien
aaaccactctggcacatatatacctacgtaaca

SEQ ID NO: 785479 - DNA, 33 bp, Homo sapien
caaacccaacatccaaaatacgatcagcttcat

SEQ ID NO: 785480 - DNA, 33 bp, Homo sapien
caaacccaacatccaagatacgatcagcttcat

SEQ ID NO: 785481 - DNA, 33 bp, Homo sapien
cattggtaatttaatacgcacagcattcaatct

SEQ ID NO: 785482 - DNA, 33 bp, Homo sapien
cattggtaatttaataggcacagcattcaatct

SEQ ID NO: 785483 - DNA, 33 bp, Homo sapien
ggatcaattgttaacaggtgctatcgtaaatct

SEQ ID NO: 785484 - DNA, 33 bp, Homo sapien
ggatcaattgttaacatgtgctatcgtaaatct

SEQ ID NO: 785485 - DNA, 33 bp, Homo sapien
ttgaacataatggataagtagaaaaagcttaag

SEQ ID NO: 785486 - DNA, 33 bp, Homo sapien
ttgaacataatggataggtagaaaaagcttaag

SEQ ID NO: 785487 - DNA, 33 bp, Homo sapien
agtctattcattctaccccttttcaaatgtact

SEQ ID NO: 785488 - DNA, 33 bp, Homo sapien
agtctattcattctactccttttcaaatgtact

SEQ ID NO: 785489 - DNA, 33 bp, Homo sapien
atttgattgacatcccacttgaaatccatcttg

SEQ ID NO: 785490 - DNA, 33 bp, Homo sapien
atttgattgacatcccgcttgaaatccatcttg

SEQ ID NO: 785491 - DNA, 33 bp, Homo sapien
aacaactcgatagcaaaagtccaaaccttagag

SEQ ID NO: 785492 - DNA, 33 bp, Homo sapien
aacaactcgatagcaagagtccaaaccttagag

SEQ ID NO: 785493 - DNA, 33 bp, Homo sapien
ttgccgctttcaggaaaggaaatgtcaaactag

SEQ ID NO: 785494 - DNA, 33 bp, Homo sapien
ttgccgctttcaggaagggaaatgtcaaactag

SEQ ID NO: 785495 - DNA, 33 bp, Homo sapien
tccggaccgcgggtgacattcagatttccaaca

SEQ ID NO: 785496 - DNA, 33 bp, Homo sapien
tccggaccgcgggtgagattcagatttccaaca

SEQ ID NO: 785497 - DNA, 33 bp, Homo sapien
ttcacacatatttcaccgtcagggagccatgac

SEQ ID NO: 785498 - DNA, 33 bp, Homo sapien
ttcacacatatttcactgtcagggagccatgac

SEQ ID NO: 785499 - DNA, 33 bp, Homo sapien
tttaattgtatagaaactcagtgttgcattata

SEQ ID NO: 785500 - DNA, 33 bp, Homo sapien
tttaattgtatagaaattcagtgttgcattata

SEQ ID NO: 785501 - DNA, 33 bp, Homo sapien
ttgagaacctctgtcaacactatgaacacatca

SEQ ID NO: 785502 - DNA, 33 bp, Homo sapien
ttgagaacctctgtcagcactatgaacacatca

SEQ ID NO: 785503 - DNA, 33 bp, Homo sapien
tgggactggagaatgacaaaggaaacacctagg

SEQ ID NO: 785504 - DNA, 33 bp, Homo sapien
tgggactggagaatgagaaaggaaacacctagg

SEQ ID NO: 785505 - DNA, 33 bp, Homo sapien
aagatttgtgaagtgaaatttaattgcttattt

SEQ ID NO: 785506 - DNA, 33 bp, Homo sapien
aagatttgtgaagtgagatttaattgcttattt

SEQ ID NO: 785507 - DNA, 33 bp, Homo sapien
tagtataaaagattcagatgctagaaatctcta

SEQ ID NO: 785508 - DNA, 33 bp, Homo sapien
tagtataaaagattcatatgctagaaatctcta

SEQ ID NO: 785509 - DNA, 33 bp, Homo sapien
agtcctagttaaagccaaactacattatcggtc

SEQ ID NO: 785510 - DNA, 33 bp, Homo sapien
agtcctagttaaagcccaactacattatcggtc

SEQ ID NO: 785511 - DNA, 33 bp, Homo sapien
ttaaagagtgttcagacctactattctcctcta

SEQ ID NO: 785512 - DNA, 33 bp, Homo sapien
ttaaagagtgttcagatctactattctcctcta

SEQ ID NO: 785513 - DNA, 33 bp, Homo sapien
atccatgcatttaaccaacgaattaaactagta

SEQ ID NO: 785514 - DNA, 33 bp, Homo sapien
atccatgcatttaaccgacgaattaaactagta

SEQ ID NO: 785515 - DNA, 33 bp, Homo sapien
tattttgctatcataagaagttcaaatgaaagg

SEQ ID NO: 785516 - DNA, 33 bp, Homo sapien
tattttgctatcataataagttcaaatgaaagg

SEQ ID NO: 785517 - DNA, 33 bp, Homo sapien
taaacaatgtagtatgcaccagatgctagggtg

SEQ ID NO: 785518 - DNA, 33 bp, Homo sapien
taaacaatgtagtatgtaccagatgctagggtg

SEQ ID NO: 785519 - DNA, 33 bp, Homo sapien
tgaaggcaaaaaagaaagtctctctcctgataa

SEQ ID NO: 785520 - DNA, 33 bp, Homo sapien
tgaaggcaaaaaagaaggtctctctcctgataa

SEQ ID NO: 785521 - DNA, 33 bp, Homo sapien
aggttctcagtctcaaatcacaccaattaagtg

SEQ ID NO: 785522 - DNA, 33 bp, Homo sapien
aggttctcagtctcaagtcacaccaattaagtg

SEQ ID NO: 785523 - DNA, 33 bp, Homo sapien
gggtctactgcagacactggggttttatggcat

SEQ ID NO: 785524 - DNA, 33 bp, Homo sapien
gggtctactgcagacattggggttttatggcat

SEQ ID NO: 785525 - DNA, 33 bp, Homo sapien
aactcatcaaaaataactagcctagacaaatag

SEQ ID NO: 785526 - DNA, 33 bp, Homo sapien
aactcatcaaaaataattagcctagacaaatag

SEQ ID NO: 785527 - DNA, 33 bp, Homo sapien
atcctgcttgccactcaactacatttatggatg

SEQ ID NO: 785528 - DNA, 33 bp, Homo sapien
atcctgcttgccactctactacatttatggatg

SEQ ID NO: 785529 - DNA, 33 bp, Homo sapien
agggtacatggagtagacctagaaggaaagtca

SEQ ID NO: 785530 - DNA, 33 bp, Homo sapien
agggtacatggagtaggcctagaaggaaagtca

SEQ ID NO: 785531 - DNA, 33 bp, Homo sapien
ttcactgggccaatgacgagtggggtgaccata

SEQ ID NO: 785532 - DNA, 33 bp, Homo sapien
ttcactgggccaatgatgagtggggtgaccata

SEQ ID NO: 785533 - DNA, 33 bp, Homo sapien
aatcctaattatctaccaaaggccgcacttgct

SEQ ID NO: 785534 - DNA, 33 bp, Homo sapien
aatcctaattatctacgaaaggccgcacttgct

SEQ ID NO: 785535 - DNA, 33 bp, Homo sapien
gaacttccgggttgctaaagatacagagatgtt

SEQ ID NO: 785536 - DNA, 33 bp, Homo sapien
gaacttccgggttgctgaagatacagagatgtt

SEQ ID NO: 785537 - DNA, 33 bp, Homo sapien
aataatttttaacagacgtatagatgtcattat

SEQ ID NO: 785538 - DNA, 33 bp, Homo sapien
aataatttttaacagatgtatagatgtcattat

SEQ ID NO: 785539 - DNA, 33 bp, Homo sapien
ttattgacctcatctccagcttgtggatgatca

SEQ ID NO: 785540 - DNA, 33 bp, Homo sapien
ttattgacctcatctctagcttgtggatgatca

SEQ ID NO: 785541 - DNA, 33 bp, Homo sapien
tttgaggaaaagaaaacggatagttcaccttgc

SEQ ID NO: 785542 - DNA, 33 bp, Homo sapien
tttgaggaaaagaaaagggatagttcaccttgc

SEQ ID NO: 785543 - DNA, 33 bp, Homo sapien
tatagcagttgatatgcaaagtatgttaagcaa

SEQ ID NO: 785544 - DNA, 33 bp, Homo sapien
tatagcagttgatatggaaagtatgttaagcaa

SEQ ID NO: 785545 - DNA, 33 bp, Homo sapien
gaatgtagattactccaaaatggcagtggaaac

SEQ ID NO: 785546 - DNA, 33 bp, Homo sapien
gaatgtagattactcccaaatggcagtggaaac

SEQ ID NO: 785547 - DNA, 33 bp, Homo sapien
tgtgaaaatacagcaaattctcagacaacgaac

SEQ ID NO: 785548 - DNA, 33 bp, Homo sapien
tgtgaaaatacagcaagttctcagacaacgaac

SEQ ID NO: 785549 - DNA, 33 bp, Homo sapien
gagatctttggctaatcacccacatttcaggtt

SEQ ID NO: 785550 - DNA, 33 bp, Homo sapien
gagatctttggctaatgacccacatttcaggtt

SEQ ID NO: 785551 - DNA, 33 bp, Homo sapien
gtttttcttgaagaccaacaagctcaaatagac

SEQ ID NO: 785552 - DNA, 33 bp, Homo sapien
gtttttcttgaagaccgacaagctcaaatagac

SEQ ID NO: 785553 - DNA, 33 bp, Homo sapien
gttcaagaccaaactgcacaaagtggggaaact

SEQ ID NO: 785554 - DNA, 33 bp, Homo sapien
gttcaagaccaaactggacaaagtggggaaact

SEQ ID NO: 785555 - DNA, 33 bp, Homo sapien
cagctatgcattgcccagcaaacttaccacact

SEQ ID NO: 785556 - DNA, 33 bp, Homo sapien
cagctatgcattgcccggcaaacttaccacact

SEQ ID NO: 785557 - DNA, 33 bp, Homo sapien
tagaatgagcccttgaggtctgcaccacataat

SEQ ID NO: 785558 - DNA, 33 bp, Homo sapien
tagaatgagcccttgatgtctgcaccacataat

SEQ ID NO: 785559 - DNA, 33 bp, Homo sapien
atgagttcagatttagacctctttgagaaatgc

SEQ ID NO: 785560 - DNA, 33 bp, Homo sapien
atgagttcagatttaggcctctttgagaaatgc

SEQ ID NO: 785561 - DNA, 33 bp, Homo sapien
ttaataaacacttgtacctgtgattacctgatt

SEQ ID NO: 785562 - DNA, 33 bp, Homo sapien
ttaataaacacttgtatctgtgattacctgatt

SEQ ID NO: 785563 - DNA, 33 bp, Homo sapien
atgtattttaccccacccaagttcgtgaacact

SEQ ID NO: 785564 - DNA, 33 bp, Homo sapien
atgtattttaccccactcaagttcgtgaacact

SEQ ID NO: 785565 - DNA, 33 bp, Homo sapien
tttactgagtttcgaacggagctcagagcaaaa

SEQ ID NO: 785566 - DNA, 33 bp, Homo sapien
tttactgagtttcgaatggagctcagagcaaaa

SEQ ID NO: 785567 - DNA, 33 bp, Homo sapien
agagggtagcataagaaagggaaccagaataag

SEQ ID NO: 785568 - DNA, 33 bp, Homo sapien
agagggtagcataagacagggaaccagaataag

SEQ ID NO: 785569 - DNA, 33 bp, Homo sapien
ggtttagaagatgataaagcacagactagagtc

SEQ ID NO: 785570 - DNA, 33 bp, Homo sapien
ggtttagaagatgatagagcacagactagagtc

SEQ ID NO: 785571 - DNA, 33 bp, Homo sapien
gaaggacaatattgacggcatataccttgccta

SEQ ID NO: 785572 - DNA, 33 bp, Homo sapien
gaaggacaatattgactgcatataccttgccta

SEQ ID NO: 785573 - DNA, 33 bp, Homo sapien
ggtagttttgctaacacacatccacttgtaatc

SEQ ID NO: 785574 - DNA, 33 bp, Homo sapien
ggtagttttgctaacatacatccacttgtaatc

SEQ ID NO: 785575 - DNA, 33 bp, Homo sapien
tagcttccagattgcaataagcatcgtgtaaag

SEQ ID NO: 785576 - DNA, 33 bp, Homo sapien
tagcttccagattgcagtaagcatcgtgtaaag

SEQ ID NO: 785577 - DNA, 33 bp, Homo sapien
aagaaagacagtgcaaaattaaaactgaaactc

SEQ ID NO: 785578 - DNA, 33 bp, Homo sapien
aagaaagacagtgcaacattaaaactgaaactc

SEQ ID NO: 785579 - DNA, 33 bp, Homo sapien
tttgacagtaagggaaataaatgtttggaatac

SEQ ID NO: 785580 - DNA, 33 bp, Homo sapien
tttgacagtaagggaagtaaatgtttggaatac

SEQ ID NO: 785581 - DNA, 33 bp, Homo sapien
acaggaaggagaagtaaaaatgccaataaataa

SEQ ID NO: 785582 - DNA, 33 bp, Homo sapien
acaggaaggagaagtacaaatgccaataaataa

SEQ ID NO: 785583 - DNA, 33 bp, Homo sapien
cttcgtgctctctaaaaccttttgatcattaag

SEQ ID NO: 785584 - DNA, 33 bp, Homo sapien
cttcgtgctctctaaatccttttgatcattaag

SEQ ID NO: 785585 - DNA, 33 bp, Homo sapien
atactatgaataaaatcacatggtgtgcacctg

SEQ ID NO: 785586 - DNA, 33 bp, Homo sapien
atactatgaataaaattacatggtgtgcacctg

SEQ ID NO: 785587 - DNA, 33 bp, Homo sapien
gaggatggaccctataaaattgagtacaaaatt

SEQ ID NO: 785588 - DNA, 33 bp, Homo sapien
gaggatggaccctatagaattgagtacaaaatt

SEQ ID NO: 785589 - DNA, 33 bp, Homo sapien
gaagagcaaaaataccaactccatgaggaagag

SEQ ID NO: 785590 - DNA, 33 bp, Homo sapien
gaagagcaaaaataccgactccatgaggaagag

SEQ ID NO: 785591 - DNA, 33 bp, Homo sapien
aaagagacagaggtcaccctaagataaagtatc

SEQ ID NO: 785592 - DNA, 33 bp, Homo sapien
aaagagacagaggtcatcctaagataaagtatc

SEQ ID NO: 785593 - DNA, 33 bp, Homo sapien
tactttcaaggtggctcactcaactgtgcaagt

SEQ ID NO: 785594 - DNA, 33 bp, Homo sapien
tactttcaaggtggcttactcaactgtgcaagt

SEQ ID NO: 785595 - DNA, 33 bp, Homo sapien
acttggcatcaaactaactccaaggaaggttgg

SEQ ID NO: 785596 - DNA, 33 bp, Homo sapien
acttggcatcaaactatctccaaggaaggttgg

SEQ ID NO: 785597 - DNA, 33 bp, Homo sapien
tacctttttctctatcagactagttttattcac

SEQ ID NO: 785598 - DNA, 33 bp, Homo sapien
tacctttttctctatcggactagttttattcac

SEQ ID NO: 785599 - DNA, 33 bp, Homo sapien
gtagtgcttgaaactacgtagggaactagggat

SEQ ID NO: 785600 - DNA, 33 bp, Homo sapien
gtagtgcttgaaactatgtagggaactagggat

SEQ ID NO: 785601 - DNA, 33 bp, Homo sapien
gcactacaacataaatcatgcttctgaatactg

SEQ ID NO: 785602 - DNA, 33 bp, Homo sapien
gcactacaacataaatgatgcttctgaatactg

SEQ ID NO: 785603 - DNA, 33 bp, Homo sapien
gaaggctcgttagaccaactgcctatgggaaat

SEQ ID NO: 785604 - DNA, 33 bp, Homo sapien
gaaggctcgttagaccgactgcctatgggaaat

SEQ ID NO: 785605 - DNA, 33 bp, Homo sapien
gagattgtgtgtgtcaagacatctagattccaa

SEQ ID NO: 785606 - DNA, 33 bp, Homo sapien
gagattgtgtgtgtcaggacatctagattccaa

SEQ ID NO: 785607 - DNA, 33 bp, Homo sapien
attgtatattgctggaatatcaactctttattc

SEQ ID NO: 785608 - DNA, 33 bp, Homo sapien
attgtatattgctggagtatcaactctttattc

SEQ ID NO: 785609 - DNA, 33 bp, Homo sapien
cttcgctataaatatactacctgtgttttcaat

SEQ ID NO: 785610 - DNA, 33 bp, Homo sapien
cttcgctataaatatagtacctgtgttttcaat

SEQ ID NO: 785611 - DNA, 33 bp, Homo sapien
gcttacattaatacccccattacccaaaacacc

SEQ ID NO: 785612 - DNA, 33 bp, Homo sapien
gcttacattaataccctcattacccaaaacacc

SEQ ID NO: 785613 - DNA, 33 bp, Homo sapien
taaagaaaatgctgaactcaataggcttaatgg

SEQ ID NO: 785614 - DNA, 33 bp, Homo sapien
taaagaaaatgctgaattcaataggcttaatgg

SEQ ID NO: 785615 - DNA, 33 bp, Homo sapien
tgggatgcagggactccaacaatggaagagaaa

SEQ ID NO: 785616 - DNA, 33 bp, Homo sapien
tgggatgcagggactctaacaatggaagagaaa

SEQ ID NO: 785617 - DNA, 33 bp, Homo sapien
ctatcgtataagttcaccagtggcttaacttat

SEQ ID NO: 785618 - DNA, 33 bp, Homo sapien
ctatcgtataagttcatcagtggcttaacttat

SEQ ID NO: 785619 - DNA, 33 bp, Homo sapien
tgtattgtggtcagaactgtatgaactgtgtct

SEQ ID NO: 785620 - DNA, 33 bp, Homo sapien
tgtattgtggtcagaattgtatgaactgtgtct

SEQ ID NO: 785621 - DNA, 33 bp, Homo sapien
ctacctccagaagccaagttagaatatagaagg

SEQ ID NO: 785622 - DNA, 33 bp, Homo sapien
ctacctccagaagccatgttagaatatagaagg

SEQ ID NO: 785623 - DNA, 33 bp, Homo sapien
aaaaggtgatttttccacatgagggttccctgc

SEQ ID NO: 785624 - DNA, 33 bp, Homo sapien
aaaaggtgatttttccgcatgagggttccctgc

SEQ ID NO: 785625 - DNA, 33 bp, Homo sapien
atgcacactgactgggaaagacaagagagaacc

SEQ ID NO: 785626 - DNA, 33 bp, Homo sapien
atgcacactgactgggcaagacaagagagaacc

SEQ ID NO: 785627 - DNA, 33 bp, Homo sapien
tgggagcagtttactacgcccttattctcagtc

SEQ ID NO: 785628 - DNA, 33 bp, Homo sapien
tgggagcagtttactatgcccttattctcagtc

SEQ ID NO: 785629 - DNA, 33 bp, Homo sapien
tttcagggtggagataaacaaaaaggttgaact

SEQ ID NO: 785630 - DNA, 33 bp, Homo sapien
tttcagggtggagatacacaaaaaggttgaact

SEQ ID NO: 785631 - DNA, 33 bp, Homo sapien
atatgcatttcattggaattgaacgtattttat

SEQ ID NO: 785632 - DNA, 33 bp, Homo sapien
atatgcatttcattgggattgaacgtattttat

SEQ ID NO: 785633 - DNA, 33 bp, Homo sapien
agtaagcaatcaatgacagttgtaatgatgata

SEQ ID NO: 785634 - DNA, 33 bp, Homo sapien
agtaagcaatcaatgatagttgtaatgatgata

SEQ ID NO: 785635 - DNA, 33 bp, Homo sapien
atgtttaaaacgtctaaagatttcactgtaatc

SEQ ID NO: 785636 - DNA, 33 bp, Homo sapien
atgtttaaaacgtctacagatttcactgtaatc

SEQ ID NO: 785637 - DNA, 33 bp, Homo sapien
cattttgctttaataaaccacagagaatgacaa

SEQ ID NO: 785638 - DNA, 33 bp, Homo sapien
cattttgctttaataacccacagagaatgacaa

SEQ ID NO: 785639 - DNA, 33 bp, Homo sapien
gagaaaatagccatcaatcagttgcttcctcaa

SEQ ID NO: 785640 - DNA, 33 bp, Homo sapien
gagaaaatagccatcagtcagttgcttcctcaa

SEQ ID NO: 785641 - DNA, 33 bp, Homo sapien
aatttatggaagatagaaaagggcataaggaga

SEQ ID NO: 785642 - DNA, 33 bp, Homo sapien
aatttatggaagataggaaagggcataaggaga

SEQ ID NO: 785643 - DNA, 33 bp, Homo sapien
gtgagtagatgtagaagtgcaactttattgaag

SEQ ID NO: 785644 - DNA, 33 bp, Homo sapien
gtgagtagatgtagaattgcaactttattgaag

SEQ ID NO: 785645 - DNA, 33 bp, Homo sapien
ccagtaagaactgcctaaattctgtatcagaaa

SEQ ID NO: 785646 - DNA, 33 bp, Homo sapien
ccagtaagaactgcctcaattctgtatcagaaa

SEQ ID NO: 785647 - DNA, 33 bp, Homo sapien
ttgacaaatttagtcccatggatttagactaga

SEQ ID NO: 785648 - DNA, 33 bp, Homo sapien
ttgacaaatttagtcctatggatttagactaga

SEQ ID NO: 785649 - DNA, 33 bp, Homo sapien
cacgggcatttctagacgaaggactctaatcaa

SEQ ID NO: 785650 - DNA, 33 bp, Homo sapien
cacgggcatttctagatgaaggactctaatcaa

SEQ ID NO: 785651 - DNA, 33 bp, Homo sapien
agcacattgctttcaactgagttatatagcaaa

SEQ ID NO: 785652 - DNA, 33 bp, Homo sapien
agcacattgctttcaattgagttatatagcaaa

SEQ ID NO: 785653 - DNA, 33 bp, Homo sapien
tgcaaaactaggctgacgtcccggcatttggaa

SEQ ID NO: 785654 - DNA, 33 bp, Homo sapien
tgcaaaactaggctgatgtcccggcatttggaa

SEQ ID NO: 785655 - DNA, 33 bp, Homo sapien
aaggtggaactgggaacctggatctacaaccca

SEQ ID NO: 785656 - DNA, 33 bp, Homo sapien
aaggtggaactgggaatctggatctacaaccca

SEQ ID NO: 785657 - DNA, 33 bp, Homo sapien
actaccaccaccaaaaaacatgaagatatatag

SEQ ID NO: 785658 - DNA, 33 bp, Homo sapien
actaccaccaccaaaacacatgaagatatatag

SEQ ID NO: 785659 - DNA, 33 bp, Homo sapien
acacaaattagattgcagataagtttttctcag

SEQ ID NO: 785660 - DNA, 33 bp, Homo sapien
acacaaattagattgcggataagtttttctcag

SEQ ID NO: 785661 - DNA, 33 bp, Homo sapien
ctttcctttttttggcaatagacagtaggaaac

SEQ ID NO: 785662 - DNA, 33 bp, Homo sapien
ctttcctttttttggcgatagacagtaggaaac

SEQ ID NO: 785663 - DNA, 33 bp, Homo sapien
gcataggaacttaaaacagagattcagttgaaa

SEQ ID NO: 785664 - DNA, 33 bp, Homo sapien
gcataggaacttaaaatagagattcagttgaaa

SEQ ID NO: 785665 - DNA, 33 bp, Homo sapien
tatggactgagtcaaaattacatagaacctgta

SEQ ID NO: 785666 - DNA, 33 bp, Homo sapien
tatggactgagtcaaagttacatagaacctgta

SEQ ID NO: 785667 - DNA, 33 bp, Homo sapien
tcaccagtgatagaaactttataccaattaggc

SEQ ID NO: 785668 - DNA, 33 bp, Homo sapien
tcaccagtgatagaaattttataccaattaggc

SEQ ID NO: 785669 - DNA, 33 bp, Homo sapien
actaagttttatacaacgttctcaggactcaag

SEQ ID NO: 785670 - DNA, 33 bp, Homo sapien
actaagttttatacaatgttctcaggactcaag

SEQ ID NO: 785671 - DNA, 33 bp, Homo sapien
ctctcctggattgcaacatactcttctgctatc

SEQ ID NO: 785672 - DNA, 33 bp, Homo sapien
ctctcctggattgcaatatactcttctgctatc

SEQ ID NO: 785673 - DNA, 33 bp, Homo sapien
tgcacttcatgtccctcaggctgtctgatccct

SEQ ID NO: 785674 - DNA, 33 bp, Homo sapien
tgcacttcatgtcccttaggctgtctgatccct

SEQ ID NO: 785675 - DNA, 33 bp, Homo sapien
cactaaagaactgacaacttaatgcgttctgga

SEQ ID NO: 785676 - DNA, 33 bp, Homo sapien
cactaaagaactgacagcttaatgcgttctgga

SEQ ID NO: 785677 - DNA, 33 bp, Homo sapien
ataacaaactcaaagccaacattacagtgaatg

SEQ ID NO: 785678 - DNA, 33 bp, Homo sapien
ataacaaactcaaagcgaacattacagtgaatg

SEQ ID NO: 785679 - DNA, 33 bp, Homo sapien
ttgaaaaatgtctcaaatcaattcaatttaaaa

SEQ ID NO: 785680 - DNA, 33 bp, Homo sapien
ttgaaaaatgtctcaagtcaattcaatttaaaa

SEQ ID NO: 785681 - DNA, 33 bp, Homo sapien
atatcttgactatcaggaagaatagggctataa

SEQ ID NO: 785682 - DNA, 33 bp, Homo sapien
atatcttgactatcagtaagaatagggctataa

SEQ ID NO: 785683 - DNA, 33 bp, Homo sapien
gattgagtgggtggcccgactaattgaggctcc

SEQ ID NO: 785684 - DNA, 33 bp, Homo sapien
gattgagtgggtggcctgactaattgaggctcc

SEQ ID NO: 785685 - DNA, 33 bp, Homo sapien
tctactgaacattctacgatgcacaggacagtt

SEQ ID NO: 785686 - DNA, 33 bp, Homo sapien
tctactgaacattctatgatgcacaggacagtt

SEQ ID NO: 785687 - DNA, 33 bp, Homo sapien
atggtcaggaaaaagaaaattggacggatagta

SEQ ID NO: 785688 - DNA, 33 bp, Homo sapien
atggtcaggaaaaagagaattggacggatagta

SEQ ID NO: 785689 - DNA, 33 bp, Homo sapien
tgtacaactggattccgggaacttatctttgcc

SEQ ID NO: 785690 - DNA, 33 bp, Homo sapien
tgtacaactggattcctggaacttatctttgcc

SEQ ID NO: 785691 - DNA, 33 bp, Homo sapien
gtactttaaaagacacactgactttattgcatt

SEQ ID NO: 785692 - DNA, 33 bp, Homo sapien
gtactttaaaagacactctgactttattgcatt

SEQ ID NO: 785693 - DNA, 33 bp, Homo sapien
aagaatgacatcactacagttaataaatggaaa

SEQ ID NO: 785694 - DNA, 33 bp, Homo sapien
aagaatgacatcactagagttaataaatggaaa

SEQ ID NO: 785695 - DNA, 33 bp, Homo sapien
agagaccaaacagctacagatttcagacaggct

SEQ ID NO: 785696 - DNA, 33 bp, Homo sapien
agagaccaaacagctatagatttcagacaggct

SEQ ID NO: 785697 - DNA, 33 bp, Homo sapien; identical to SEQ ID NO: 785695

SEQ ID NO: 785698 - DNA, 33 bp, Homo sapien; identical to SEQ ID NO: 785696

SEQ ID NO: 785699 - DNA, 33 bp, Homo sapien
cttcccgtacaatctacatacattttgtcagtt

SEQ ID NO: 785700 - DNA, 33 bp, Homo sapien
cttcccgtacaatctatatacattttgtcagtt

SEQ ID NO: 785701 - DNA, 33 bp, Homo sapien
tgatgtaagattgctaaagatggaagctggaga

SEQ ID NO: 785702 - DNA, 33 bp, Homo sapien
tgatgtaagattgctagagatggaagctggaga

SEQ ID NO: 785703 - DNA, 33 bp, Homo sapien
gatccccaccttttaacgcttcttcagagattt

SEQ ID NO: 785704 - DNA, 33 bp, Homo sapien
gatccccaccttttaaggcttcttcagagattt

SEQ ID NO: 785705 - DNA, 33 bp, Homo sapien
taaaagtgaaaaaggaaggtggttaggtcacaa

SEQ ID NO: 785706 - DNA, 33 bp, Homo sapien
taaaagtgaaaaaggatggtggttaggtcacaa

SEQ ID NO: 785707 - DNA, 33 bp, Homo sapien
gtattcatcgtattgaacatttatactttgggt

SEQ ID NO: 785708 - DNA, 33 bp, Homo sapien
gtattcatcgtattgagcatttatactttgggt

SEQ ID NO: 785709 - DNA, 33 bp, Homo sapien
acatgaaccattttaactctcataaatacacat

SEQ ID NO: 785710 - DNA, 33 bp, Homo sapien
acatgaaccattttaagtctcataaatacacat

SEQ ID NO: 785711 - DNA, 33 bp, Homo sapien
atcgaccagcaatgacgatcacaataagaatga

SEQ ID NO: 785712 - DNA, 33 bp, Homo sapien
atcgaccagcaatgactatcacaataagaatga

SEQ ID NO: 785713 - DNA, 33 bp, Homo sapien
cttacaccgtgggaaacaaaaaatgttcttagt

SEQ ID NO: 785714 - DNA, 33 bp, Homo sapien
cttacaccgtgggaaataaaaaatgttcttagt

SEQ ID NO: 785715 - DNA, 33 bp, Homo sapien
tggtgtggagtggagaccttggaaaattccaga

SEQ ID NO: 785716 - DNA, 33 bp, Homo sapien
tggtgtggagtggagatcttggaaaattccaga

SEQ ID NO: 785717 - DNA, 33 bp, Homo sapien
tgaataagtaagtaaacggatagtggaagctag

SEQ ID NO: 785718 - DNA, 33 bp, Homo sapien
tgaataagtaagtaaatggatagtggaagctag

SEQ ID NO: 785719 - DNA, 33 bp, Homo sapien
aataaatcatcagaagaaacaaagtgatctctt

SEQ ID NO: 785720 - DNA, 33 bp, Homo sapien
aataaatcatcagaagcaacaaagtgatctctt

SEQ ID NO: 785721 - DNA, 33 bp, Homo sapien
gccactatccctacacagaggagatgctgcaga

SEQ ID NO: 785722 - DNA, 33 bp, Homo sapien
gccactatccctacacggaggagatgctgcaga

SEQ ID NO: 785723 - DNA, 33 bp, Homo sapien
tagcaacactaagcaaaaaatttgagtgaaaaa

SEQ ID NO: 785724 - DNA, 33 bp, Homo sapien
tagcaacactaagcaagaaatttgagtgaaaaa

SEQ ID NO: 785725 - DNA, 33 bp, Homo sapien
ggagtgtgatttaaaaccgcagaataatgtagt

SEQ ID NO: 785726 - DNA, 33 bp, Homo sapien
ggagtgtgatttaaaagcgcagaataatgtagt

SEQ ID NO: 785727 - DNA, 33 bp, Homo sapien
tattgtgcctcttctgaattctaaatgctcctg

SEQ ID NO: 785728 - DNA, 33 bp, Homo sapien
tattgtgcctcttctggattctaaatgctcctg

SEQ ID NO: 785729 - DNA, 33 bp, Homo sapien
ctgatatacatggtcaatatcttcctggcagag

SEQ ID NO: 785730 - DNA, 33 bp, Homo sapien
ctgatatacatggtcagtatcttcctggcagag

SEQ ID NO: 785731 - DNA, 33 bp, Homo sapien
tctcaatttcacttcaaaataaatctacctctt

SEQ ID NO: 785732 - DNA, 33 bp, Homo sapien
tctcaatttcacttcagaataaatctacctctt

SEQ ID NO: 785733 - DNA, 33 bp, Homo sapien
cagtgatcaatgaacaacctaccctaagttaat

SEQ ID NO: 785734 - DNA, 33 bp, Homo sapien
cagtgatcaatgaacaccctaccctaagttaat

SEQ ID NO: 785735 - DNA, 33 bp, Homo sapien
atggaaaagtgatcaacataggcagaaatgtgg

SEQ ID NO: 785736 - DNA, 33 bp, Homo sapien
atggaaaagtgatcaatataggcagaaatgtgg

SEQ ID NO: 785737 - DNA, 33 bp, Homo sapien
aaggggccatcagaaagaaagcctgcagtcact

SEQ ID NO: 785738 - DNA, 33 bp, Homo sapien
aaggggccatcagaaataaagcctgcagtcact

SEQ ID NO: 785739 - DNA, 33 bp, Homo sapien
tatcctgacaaagaaggagatgtctgttctcat

SEQ ID NO: 785740 - DNA, 33 bp, Homo sapien
tatcctgacaaagaagtagatgtctgttctcat

SEQ ID NO: 785741 - DNA, 33 bp, Homo sapien
ttttgatctcggtataactgagtacatttttca

SEQ ID NO: 785742 - DNA, 33 bp, Homo sapien
ttttgatctcggtatatctgagtacatttttca

SEQ ID NO: 785743 - DNA, 33 bp, Homo sapien
gctacaaattctcaagaaccatttacctaaatt

SEQ ID NO: 785744 - DNA, 33 bp, Homo sapien
gctacaaattctcaaggaccatttacctaaatt

SEQ ID NO: 785745 - DNA, 33 bp, Homo sapien
atagatacacatagaaatcaatagccaagttat

SEQ ID NO: 785746 - DNA, 33 bp, Homo sapien
atagatacacatagaactcaatagccaagttat

SEQ ID NO: 785747 - DNA, 33 bp, Homo sapien
tatctatgcctgtccaaaaaacagtaaacatca

SEQ ID NO: 785748 - DNA, 33 bp, Homo sapien
tatctatgcctgtccagaaaacagtaaacatca

SEQ ID NO: 785749 - DNA, 33 bp, Homo sapien
cattaaaaatcactgactacagatcatcataat

SEQ ID NO: 785750 - DNA, 33 bp, Homo sapien
cattaaaaatcactgattacagatcatcataat

SEQ ID NO: 785751 - DNA, 33 bp, Homo sapien
ttcccttgaacttcaactgtcggaattctttaa

SEQ ID NO: 785752 - DNA, 33 bp, Homo sapien
ttcccttgaacttcaattgtcggaattctttaa

SEQ ID NO: 785753 - DNA, 33 bp, Homo sapien
acctcaccatatttcactaattttgttagaaca

SEQ ID NO: 785754 - DNA, 33 bp, Homo sapien
acctcaccatatttcattaattttgttagaaca

SEQ ID NO: 785755 - DNA, 33 bp, Homo sapien
caattcttctcctcgacgacacctggctacgca

SEQ ID NO: 785756 - DNA, 33 bp, Homo sapien
caattcttctcctcgatgacacctggctacgca

SEQ ID NO: 785757 - DNA, 33 bp, Homo sapien
ttcagtctattcaaaagtgtccattgcaatgcc

SEQ ID NO: 785758 - DNA, 33 bp, Homo sapien
ttcagtctattcaaaattgtccattgcaatgcc

SEQ ID NO: 785759 - DNA, 33 bp, Homo sapien
gactttttgatcaggaaacatgaatttaattgt

SEQ ID NO: 785760 - DNA, 33 bp, Homo sapien
gactttttgatcaggagacatgaatttaattgt

SEQ ID NO: 785761 - DNA, 33 bp, Homo sapien
tttatttctctaggaaaggaagaatgtaagggt

SEQ ID NO: 785762 - DNA, 33 bp, Homo sapien
tttatttctctaggaagggaagaatgtaagggt

SEQ ID NO: 785763 - DNA, 33 bp, Homo sapien
aaaggcacattccacacagtatttatacggcaa

SEQ ID NO: 785764 - DNA, 33 bp, Homo sapien
aaaggcacattccacagagtatttatacggcaa

SEQ ID NO: 785765 - DNA, 33 bp, Homo sapien
atttaaagcatataaaacaccatgcaagagagc

SEQ ID NO: 785766 - DNA, 33 bp, Homo sapien
atttaaagcatataaagcaccatgcaagagagc

SEQ ID NO: 785767 - DNA, 33 bp, Homo sapien
taaggaatatataaggaactcaaaccactcaat

SEQ ID NO: 785768 - DNA, 33 bp, Homo sapien
taaggaatatataagggactcaaaccactcaat

SEQ ID NO: 785769 - DNA, 33 bp, Homo sapien
atattcattccaaaacagttagttgctaaggta

SEQ ID NO: 785770 - DNA, 33 bp, Homo sapien
atattcattccaaaaccgttagttgctaaggta

SEQ ID NO: 785771 - DNA, 33 bp, Homo sapien
gagaggtttcaatagacggtacactcggttgtt

SEQ ID NO: 785772 - DNA, 33 bp, Homo sapien
gagaggtttcaatagatggtacactcggttgtt

SEQ ID NO: 785773 - DNA, 33 bp, Homo sapien; identical to SEQ ID NO: 785771

SEQ ID NO: 785774 - DNA, 33 bp, Homo sapien; identical to SEQ ID NO: 785772

SEQ ID NO: 785775 - DNA, 33 bp, Homo sapien
gtaggcagacagaataagtgatgctttatgttc

SEQ ID NO: 785776 - DNA, 33 bp, Homo sapien
gtaggcagacagaatatgtgatgctttatgttc

SEQ ID NO: 785777 - DNA, 33 bp, Homo sapien
caataatttttactgagaatgagactcttacta

SEQ ID NO: 785778 - DNA, 33 bp, Homo sapien
caataatttttactgataatgagactcttacta

SEQ ID NO: 785779 - DNA, 33 bp, Homo sapien
atatcgcaacttctaaaaattacctactaccaa

SEQ ID NO: 785780 - DNA, 33 bp, Homo sapien
atatcgcaacttctaacaattacctactaccaa

SEQ ID NO: 785781 - DNA, 33 bp, Homo sapien
gtttcaaaaggtgagaataacaggagatttggg

SEQ ID NO: 785782 - DNA, 33 bp, Homo sapien
gtttcaaaaggtgagactaacaggagatttggg

SEQ ID NO: 785783 - DNA, 33 bp, Homo sapien
tagatgtttccgtacacccttgaaatgtaggca

SEQ ID NO: 785784 - DNA, 33 bp, Homo sapien
tagatgtttccgtacatccttgaaatgtaggca

SEQ ID NO: 785785 - DNA, 33 bp, Homo sapien
tcatactgaaatttgacccccaataagatggtt

SEQ ID NO: 785786 - DNA, 33 bp, Homo sapien
tcatactgaaatttgatccccaataagatggtt

SEQ ID NO: 785787 - DNA, 33 bp, Homo sapien
aattgatcccaaaataaatagacttttgattaa

SEQ ID NO: 785788 - DNA, 33 bp, Homo sapien
aattgatcccaaaatacatagacttttgattaa

SEQ ID NO: 785789 - DNA, 33 bp, Homo sapien
ggggaaaaaatcttcaaggcatgtgagaggtct

SEQ ID NO: 785790 - DNA, 33 bp, Homo sapien
ggggaaaaaatcttcagggcatgtgagaggtct

SEQ ID NO: 785791 - DNA, 33 bp, Homo sapien
ctaaaacaagctgtgcagagaaaatttcagagc

SEQ ID NO: 785792 - DNA, 33 bp, Homo sapien
ctaaaacaagctgtgcggagaaaatttcagagc

SEQ ID NO: 785793 - DNA, 33 bp, Homo sapien
caaaggagatcaactaaagcctcttgccaatct

SEQ ID NO: 785794 - DNA, 33 bp, Homo sapien
caaaggagatcaactagagcctcttgccaatct

SEQ ID NO: 785795 - DNA, 33 bp, Homo sapien
ggattctttttccacccgactatgacagatagc

SEQ ID NO: 785796 - DNA, 33 bp, Homo sapien
ggattctttttccacctgactatgacagatagc

SEQ ID NO: 785797 - DNA, 33 bp, Homo sapien
actagtgataatgtaactgcacctaagaagctg

SEQ ID NO: 785798 - DNA, 33 bp, Homo sapien
actagtgataatgtaagtgcacctaagaagctg

SEQ ID NO: 785799 - DNA, 33 bp, Homo sapien
gcttactgccattgcacacatttcaagataaag

SEQ ID NO: 785800 - DNA, 33 bp, Homo sapien
gcttactgccattgcagacatttcaagataaag

SEQ ID NO: 785801 - DNA, 33 bp, Homo sapien
ttctgataaactgctaagagttcatctttggtg

SEQ ID NO: 785802 - DNA, 33 bp, Homo sapien
ttctgataaactgctaggagttcatctttggtg

SEQ ID NO: 785803 - DNA, 33 bp, Homo sapien
taggaaaagagccagacgacaaatttaaataga

SEQ ID NO: 785804 - DNA, 33 bp, Homo sapien
taggaaaagagccagatgacaaatttaaataga

SEQ ID NO: 785805 - DNA, 33 bp, Homo sapien
aaaaaaaatcttgctacgaccattggaattttc

SEQ ID NO: 785806 - DNA, 33 bp, Homo sapien
aaaaaaaatcttgctatgaccattggaattttc

SEQ ID NO: 785807 - DNA, 33 bp, Homo sapien
gcaggtatggtaaagaaaggttcatgaattacc

SEQ ID NO: 785808 - DNA, 33 bp, Homo sapien
gcaggtatggtaaagacaggttcatgaattacc

SEQ ID NO: 785809 - DNA, 33 bp, Homo sapien
tttcacctttgtactacagatgaacttctttcc

SEQ ID NO: 785810 - DNA, 33 bp, Homo sapien
tttcacctttgtactatagatgaacttctttcc

SEQ ID NO: 785811 - DNA, 33 bp, Homo sapien
ttgaatgatatacaaacggaagtgatgggctcc

SEQ ID NO: 785812 - DNA, 33 bp, Homo sapien
ttgaatgatatacaaatggaagtgatgggctcc

SEQ ID NO: 785813 - DNA, 33 bp, Homo sapien
ctagaaattggttcaaaaccattcgaaattagt

SEQ ID NO: 785814 - DNA, 33 bp, Homo sapien
ctagaaattggttcaagaccattcgaaattagt

SEQ ID NO: 785815 - DNA, 33 bp, Homo sapien
aaaaatgaggcccagactaagtacacagctaat

SEQ ID NO: 785816 - DNA, 33 bp, Homo sapien
aaaaatgaggcccagattaagtacacagctaat

SEQ ID NO: 785817 - DNA, 33 bp, Homo sapien
ggagactgaagatcacagagataattttttcca

SEQ ID NO: 785818 - DNA, 33 bp, Homo sapien
ggagactgaagatcacggagataattttttcca

SEQ ID NO: 785819 - DNA, 33 bp, Homo sapien
aataccttgtacttacaaccatattaggataca

SEQ ID NO: 785820 - DNA, 33 bp, Homo sapien
aataccttgtacttacgaccatattaggataca

SEQ ID NO: 785821 - DNA, 33 bp, Homo sapien
agctcccaatgccctcaattacaactgaccact

SEQ ID NO: 785822 - DNA, 33 bp, Homo sapien
agctcccaatgccctcgattacaactgaccact

SEQ ID NO: 785823 - DNA, 33 bp, Homo sapien
gtttgaatttcttaacactcatattactatcct

SEQ ID NO: 785824 - DNA, 33 bp, Homo sapien
gtttgaatttcttaacgctcatattactatcct

SEQ ID NO: 785825 - DNA, 33 bp, Homo sapien
gtttggggtatgaaaagttactctctaagttga

SEQ ID NO: 785826 - DNA, 33 bp, Homo sapien
gtttggggtatgaaaatttactctctaagttga

SEQ ID NO: 785827 - DNA, 33 bp, Homo sapien
cctttaccacctttcacggtcattctttctacc

SEQ ID NO: 785828 - DNA, 33 bp, Homo sapien
cctttaccacctttcatggtcattctttctacc

SEQ ID NO: 785829 - DNA, 33 bp, Homo sapien
tcctttacaggatccacaaggtaatctgtctta

SEQ ID NO: 785830 - DNA, 33 bp, Homo sapien
tcctttacaggatccagaaggtaatctgtctta

SEQ ID NO: 785831 - DNA, 33 bp, Homo sapien
tgtattccataattcaaagacttttacaagcca

SEQ ID NO: 785832 - DNA, 33 bp, Homo sapien
tgtattccataattcagagacttttacaagcca

SEQ ID NO: 785833 - DNA, 33 bp, Homo sapien
caccatgaccagagaaagatagcttgtcataac

SEQ ID NO: 785834 - DNA, 33 bp, Homo sapien
caccatgaccagagaaggatagcttgtcataac

SEQ ID NO: 785835 - DNA, 33 bp, Homo sapien
cacttgcctacaaataaattagaatctgaagaa

SEQ ID NO: 785836 - DNA, 33 bp, Homo sapien
cacttgcctacaaatagattagaatctgaagaa

SEQ ID NO: 785837 - DNA, 33 bp, Homo sapien
tggagagagggctcacaacattatccttgaagc

SEQ ID NO: 785838 - DNA, 33 bp, Homo sapien
tggagagagggctcactacattatccttgaagc

SEQ ID NO: 785839 - DNA, 33 bp, Homo sapien
gcgagtgtcttcactacagcagaatgataatta

SEQ ID NO: 785840 - DNA, 33 bp, Homo sapien
gcgagtgtcttcactagagcagaatgataatta

SEQ ID NO: 785841 - DNA, 33 bp, Homo sapien
atatcacccttgacaacgataataatcagagtg

SEQ ID NO: 785842 - DNA, 33 bp, Homo sapien
atatcacccttgacaatgataataatcagagtg

SEQ ID NO: 785843 - DNA, 33 bp, Homo sapien
gattggaagagataacagagaaatgtctgaaat

SEQ ID NO: 785844 - DNA, 33 bp, Homo sapien
gattggaagagataacggagaaatgtctgaaat

SEQ ID NO: 785845 - DNA, 33 bp, Homo sapien
aggacactttgccaatcatacgcaggatgggag

SEQ ID NO: 785846 - DNA, 33 bp, Homo sapien
aggacactttgccaattatacgcaggatgggag

SEQ ID NO: 785847 - DNA, 33 bp, Homo sapien
gttctgaccaaaggtaataccatcatacttttc

SEQ ID NO: 785848 - DNA, 33 bp, Homo sapien
gttctgaccaaaggtagtaccatcatacttttc

SEQ ID NO: 785849 - DNA, 33 bp, Homo sapien
atctttaatagagaaaatatctgtgttagagct

SEQ ID NO: 785850 - DNA, 33 bp, Homo sapien
atctttaatagagaaagtatctgtgttagagct

SEQ ID NO: 785851 - DNA, 33 bp, Homo sapien
tgactaattttccatacgaccacagcaaaaaaa

SEQ ID NO: 785852 - DNA, 33 bp, Homo sapien
tgactaattttccatatgaccacagcaaaaaaa

SEQ ID NO: 785853 - DNA, 33 bp, Homo sapien
cctgtcagcttgaggaaaagtcttttggttctg

SEQ ID NO: 785854 - DNA, 33 bp, Homo sapien
cctgtcagcttgaggagaagtcttttggttctg

SEQ ID NO: 785855 - DNA, 33 bp, Homo sapien
aaaaaactgaatacaaaaactctgaaagaaagt

SEQ ID NO: 785856 - DNA, 33 bp, Homo sapien
aaaaaactgaatacaagaactctgaaagaaagt

SEQ ID NO: 785857 - DNA, 33 bp, Homo sapien
caaattaatagactcaactttgtgtgtgtttta

SEQ ID NO: 785858 - DNA, 33 bp, Homo sapien
caaattaatagactcagctttgtgtgtgtttta

SEQ ID NO: 785859 - DNA, 33 bp, Homo sapien
tggtcctcagaagggcaaaagtgcatgacagtt

SEQ ID NO: 785860 - DNA, 33 bp, Homo sapien
tggtcctcagaagggcgaaagtgcatgacagtt

SEQ ID NO: 785861 - DNA, 33 bp, Homo sapien
tgcactaatctcagagaaaagtcagagctgcac

SEQ ID NO: 785862 - DNA, 33 bp, Homo sapien
tgcactaatctcagagcaaagtcagagctgcac

SEQ ID NO: 785863 - DNA, 33 bp, Homo sapien
aatataacttcctgaacgtgccttgtttcttgt

SEQ ID NO: 785864 - DNA, 33 bp, Homo sapien
aatataacttcctgaatgtgccttgtttcttgt

SEQ ID NO: 785865 - DNA, 33 bp, Homo sapien
tgagaaatgtagatcacggcaaaaataaataca

SEQ ID NO: 785866 - DNA, 33 bp, Homo sapien
tgagaaatgtagatcatggcaaaaataaataca

SEQ ID NO: 785867 - DNA, 33 bp, Homo sapien
tatcacacctaacatacaactgacacccaacaa

SEQ ID NO: 785868 - DNA, 33 bp, Homo sapien
tatcacacctaacatataactgacacccaacaa

SEQ ID NO: 785869 - DNA, 33 bp, Homo sapien
cttgtttctccttaaaatgtactcacaaatttt

SEQ ID NO: 785870 - DNA, 33 bp, Homo sapien
cttgtttctccttaaactgtactcacaaatttt

SEQ ID NO: 785871 - DNA, 33 bp, Homo sapien
gatgtaaagatttagcaaggtctttacaacata

SEQ ID NO: 785872 - DNA, 33 bp, Homo sapien
gatgtaaagatttagcgaggtctttacaacata

SEQ ID NO: 785873 - DNA, 33 bp, Homo sapien
cttaaccaaagatcacacaaaataggcaataga

SEQ ID NO: 785874 - DNA, 33 bp, Homo sapien
cttaaccaaagatcacgcaaaataggcaataga

SEQ ID NO: 785875 - DNA, 33 bp, Homo sapien
gaatttattgggtgaaaggaaaagagaggggtc

SEQ ID NO: 785876 - DNA, 33 bp, Homo sapien
gaatttattgggtgaatggaaaagagaggggtc

SEQ ID NO: 785877 - DNA, 33 bp, Homo sapien
tgaaatgattgagagaaaatgattaagagatat

SEQ ID NO: 785878 - DNA, 33 bp, Homo sapien
tgaaatgattgagagagaatgattaagagatat

SEQ ID NO: 785879 - DNA, 33 bp, Homo sapien
atattgtgtgaattaacggtatgtgtatatata

SEQ ID NO: 785880 - DNA, 33 bp, Homo sapien
atattgtgtgaattaatggtatgtgtatatata

SEQ ID NO: 785881 - DNA, 33 bp, Homo sapien
tccgtgccatgtttaacagctataataccgcga

SEQ ID NO: 785882 - DNA, 33 bp, Homo sapien
tccgtgccatgtttaagagctataataccgcga

SEQ ID NO: 785883 - DNA, 33 bp, Homo sapien
ataagactgaaatggaagttcaaggagaggata

SEQ ID NO: 785884 - DNA, 33 bp, Homo sapien
ataagactgaaatggatgttcaaggagaggata

SEQ ID NO: 785885 - DNA, 33 bp, Homo sapien
ccactctgaaaacttacatgactttatggtaca

SEQ ID NO: 785886 - DNA, 33 bp, Homo sapien
ccactctgaaaacttatatgactttatggtaca

SEQ ID NO: 785887 - DNA, 33 bp, Homo sapien
ggccagagaatgtggaagaaaggctagattctc

SEQ ID NO: 785888 - DNA, 33 bp, Homo sapien
ggccagagaatgtggacgaaaggctagattctc

SEQ ID NO: 785889 - DNA, 33 bp, Homo sapien
gtacaagaaggggaaaatgtgcaagaaatgttt

SEQ ID NO: 785890 - DNA, 33 bp, Homo sapien
gtacaagaaggggaaagtgtgcaagaaatgttt

SEQ ID NO: 785891 - DNA, 33 bp, Homo sapien
gatttttaataaagtagctgtgtcttgggtcat

SEQ ID NO: 785892 - DNA, 33 bp, Homo sapien
gatttttaataaagtatctgtgtcttgggtcat

SEQ ID NO: 785893 - DNA, 33 bp, Homo sapien
gcttccatcattgataagattcctagcaagtgc

SEQ ID NO: 785894 - DNA, 33 bp, Homo sapien
gcttccatcattgatatgattcctagcaagtgc

SEQ ID NO: 785895 - DNA, 33 bp, Homo sapien
aaaacaattccagaaaccagtcaccattggaat

SEQ ID NO: 785896 - DNA, 33 bp, Homo sapien
aaaacaattccagaaagcagtcaccattggaat

SEQ ID NO: 785897 - DNA, 33 bp, Homo sapien
ccctagactgttttacaagtatccttttgttgt

SEQ ID NO: 785898 - DNA, 33 bp, Homo sapien
ccctagactgttttaccagtatccttttgttgt

SEQ ID NO: 785899 - DNA, 33 bp, Homo sapien
atgtgtgacatagtaaatgggaagacagtccca

SEQ ID NO: 785900 - DNA, 33 bp, Homo sapien
atgtgtgacatagtaagtgggaagacagtccca

SEQ ID NO: 785901 - DNA, 33 bp, Homo sapien
ctcatgttatccaaagccttatgaaattcattc

SEQ ID NO: 785902 - DNA, 33 bp, Homo sapien
ctcatgttatccaaaggcttatgaaattcattc

SEQ ID NO: 785903 - DNA, 33 bp, Homo sapien
acacagtgcttcttgacctagcccatatgtggt

SEQ ID NO: 785904 - DNA, 33 bp, Homo sapien
acacagtgcttcttgagctagcccatatgtggt

SEQ ID NO: 785905 - DNA, 33 bp, Homo sapien
cagataatggaaataacgctgattggttgagag

SEQ ID NO: 785906 - DNA, 33 bp, Homo sapien
cagataatggaaataatgctgattggttgagag

SEQ ID NO: 785907 - DNA, 33 bp, Homo sapien
ttgaatttatataatcagaggagagaaaaggaa

SEQ ID NO: 785908 - DNA, 33 bp, Homo sapien
ttgaatttatataatcggaggagagaaaaggaa

SEQ ID NO: 785909 - DNA, 33 bp, Homo sapien
atggatccggagcatacaaatagcatggctttg

SEQ ID NO: 785910 - DNA, 33 bp, Homo sapien
atggatccggagcatataaatagcatggctttg

SEQ ID NO: 785911 - DNA, 33 bp, Homo sapien
catataccaatggtgacgtgatgtaatgcgaga

SEQ ID NO: 785912 - DNA, 33 bp, Homo sapien
catataccaatggtgatgtgatgtaatgcgaga

SEQ ID NO: 785913 - DNA, 33 bp, Homo sapien
attattaggaccaaagaagaaacttagacaaat

SEQ ID NO: 785914 - DNA, 33 bp, Homo sapien
attattaggaccaaaggagaaacttagacaaat

SEQ ID NO: 785915 - DNA, 33 bp, Homo sapien
ctgaaattaaaattcaatatccatctgtccaat

SEQ ID NO: 785916 - DNA, 33 bp, Homo sapien
ctgaaattaaaattcagtatccatctgtccaat

SEQ ID NO: 785917 - DNA, 33 bp, Homo sapien
caggcttctgcttgggaacttccatggagcagg

SEQ ID NO: 785918 - DNA, 33 bp, Homo sapien
caggcttctgcttggggacttccatggagcagg

SEQ ID NO: 785919 - DNA, 33 bp, Homo sapien
aatcaacttccataaaccactacatttgattcc

SEQ ID NO: 785920 - DNA, 33 bp, Homo sapien
aatcaacttccataaatcactacatttgattcc

SEQ ID NO: 785921 - DNA, 33 bp, Homo sapien
gcaagattaggatggaatatggaaacagggcct

SEQ ID NO: 785922 - DNA, 33 bp, Homo sapien
gcaagattaggatggagtatggaaacagggcct

SEQ ID NO: 785923 - DNA, 33 bp, Homo sapien
gttactacactagatacgaagaatggcgataaa

SEQ ID NO: 785924 - DNA, 33 bp, Homo sapien
gttactacactagatatgaagaatggcgataaa

SEQ ID NO: 785925 - DNA, 33 bp, Homo sapien
tttagccaggtggagacgtcagaaagctactga

SEQ ID NO: 785926 - DNA, 33 bp, Homo sapien
tttagccaggtggagatgtcagaaagctactga

SEQ ID NO: 785927 - DNA, 33 bp, Homo sapien
tataaatcagggtttcccaactaatgtttcaca

SEQ ID NO: 785928 - DNA, 33 bp, Homo sapien
tataaatcagggtttctcaactaatgtttcaca

SEQ ID NO: 785929 - DNA, 33 bp, Homo sapien
agagaattgaatccagaacctgagactactttt

SEQ ID NO: 785930 - DNA, 33 bp, Homo sapien
agagaattgaatccaggacctgagactactttt

SEQ ID NO: 785931 - DNA, 33 bp, Homo sapien
agctgaatggtaagaacagatgaacacaaagaa

SEQ ID NO: 785932 - DNA, 33 bp, Homo sapien
agctgaatggtaagaagagatgaacacaaagaa

SEQ ID NO: 785933 - DNA, 33 bp, Homo sapien
aaaataagcaggcaagaaaactattgtgtaaaa

SEQ ID NO: 785934 - DNA, 33 bp, Homo sapien
aaaataagcaggcaaggaaactattgtgtaaaa

SEQ ID NO: 785935 - DNA, 33 bp, Homo sapien
agtaaagctaaggcaacgcagaaacagatgttt

SEQ ID NO: 785936 - DNA, 33 bp, Homo sapien
agtaaagctaaggcaaggcagaaacagatgttt

SEQ ID NO: 785937 - DNA, 33 bp, Homo sapien
tcataaatactcctgccaaagaacctagtccca

SEQ ID NO: 785938 - DNA, 33 bp, Homo sapien
tcataaatactcctgctaaagaacctagtccca

SEQ ID NO: 785939 - DNA, 33 bp, Homo sapien
cgttgtcccgcttaaaatcacaaggatattctc

SEQ ID NO: 785940 - DNA, 33 bp, Homo sapien
cgttgtcccgcttaaagtcacaaggatattctc

SEQ ID NO: 785941 - DNA, 33 bp, Homo sapien
aatccagtcattagaaagggcaaggttcacagt

SEQ ID NO: 785942 - DNA, 33 bp, Homo sapien
aatccagtcattagaatgggcaaggttcacagt

SEQ ID NO: 785943 - DNA, 33 bp, Homo sapien
gccttaaactttagacaatataccaattcaatg

SEQ ID NO: 785944 - DNA, 33 bp, Homo sapien
gccttaaactttagactatataccaattcaatg

SEQ ID NO: 785945 - DNA, 33 bp, Homo sapien
tctgaaggctcaaatgcataggacatcaaagat

SEQ ID NO: 785946 - DNA, 33 bp, Homo sapien
tctgaaggctcaaatggataggacatcaaagat

SEQ ID NO: 785947 - DNA, 33 bp, Homo sapien
aaagtaacttgaatcagactgctctcttaccat

SEQ ID NO: 785948 - DNA, 33 bp, Homo sapien
aaagtaacttgaatcatactgctctcttaccat

SEQ ID NO: 785949 - DNA, 33 bp, Homo sapien
tacccagaggttgccaagttgccattctggttc

SEQ ID NO: 785950 - DNA, 33 bp, Homo sapien
tacccagaggttgccatgttgccattctggttc

SEQ ID NO: 785951 - DNA, 33 bp, Homo sapien
taatattctgtgattcaaagtttcattcctctt

SEQ ID NO: 785952 - DNA, 33 bp, Homo sapien
taatattctgtgattcgaagtttcattcctctt

SEQ ID NO: 785953 - DNA, 33 bp, Homo sapien
caaaggtatcaggagcaaagaaatgataccttt

SEQ ID NO: 785954 - DNA, 33 bp, Homo sapien
caaaggtatcaggagcgaagaaatgataccttt

SEQ ID NO: 785955 - DNA, 33 bp, Homo sapien
atgcatcaggcatttcaataattactttacatg

SEQ ID NO: 785956 - DNA, 33 bp, Homo sapien
atgcatcaggcatttccataattactttacatg

SEQ ID NO: 785957 - DNA, 33 bp, Homo sapien
tctcttgctgtagatacgtaagaagtgcctttt

SEQ ID NO: 785958 - DNA, 33 bp, Homo sapien
tctcttgctgtagatatgtaagaagtgcctttt

SEQ ID NO: 785959 - DNA, 33 bp, Homo sapien
aatcattctaccattccaaagacatatgcacgt

SEQ ID NO: 785960 - DNA, 33 bp, Homo sapien
aatcattctaccattctaaagacatatgcacgt

SEQ ID NO: 785961 - DNA, 33 bp, Homo sapien
aatgtaggcattaaaacatcactttgtactcca

SEQ ID NO: 785962 - DNA, 33 bp, Homo sapien
aatgtaggcattaaaagatcactttgtactcca

SEQ ID NO: 785963 - DNA, 33 bp, Homo sapien
aacaatattttgtacaatctctgtgtgtagaga

SEQ ID NO: 785964 - DNA, 33 bp, Homo sapien
aacaatattttgtacagtctctgtgtgtagaga

SEQ ID NO: 785965 - DNA, 33 bp, Homo sapien
gatagaagtggatgctcacctagatattgaagg

SEQ ID NO: 785966 - DNA, 33 bp, Homo sapien
gatagaagtggatgcttacctagatattgaagg

SEQ ID NO: 785967 - DNA, 33 bp, Homo sapien
ggaattttcagacaaaactcagactctaagcta

SEQ ID NO: 785968 - DNA, 33 bp, Homo sapien
ggaattttcagacaaatctcagactctaagcta

SEQ ID NO: 785969 - DNA, 33 bp, Homo sapien
aggaagtgtaagtaaacgtctgatgccacatta

SEQ ID NO: 785970 - DNA, 33 bp, Homo sapien
aggaagtgtaagtaaatgtctgatgccacatta

SEQ ID NO: 785971 - DNA, 33 bp, Homo sapien
agatgattcagagagaaatatagcaaaggctgt

SEQ ID NO: 785972 - DNA, 33 bp, Homo sapien
agatgattcagagagagatatagcaaaggctgt

SEQ ID NO: 785973 - DNA, 33 bp, Homo sapien
attgtacttgcactacagaaatatcattggaac

SEQ ID NO: 785974 - DNA, 33 bp, Homo sapien
attgtacttgcactacggaaatatcattggaac

SEQ ID NO: 785975 - DNA, 33 bp, Homo sapien
tctcccagttaatcacaaaactacatactcata

SEQ ID NO: 785976 - DNA, 33 bp, Homo sapien
tctcccagttaatcacgaaactacatactcata

SEQ ID NO: 785977 - DNA, 33 bp, Homo sapien
tggaaactagttgtaaatattcttgaattacaa

SEQ ID NO: 785978 - DNA, 33 bp, Homo sapien
tggaaactagttgtaagtattcttgaattacaa

SEQ ID NO: 785979 - DNA, 33 bp, Homo sapien
taattgtaggtgacaaatgaaatccttaggact

SEQ ID NO: 785980 - DNA, 33 bp, Homo sapien
taattgtaggtgacaactgaaatccttaggact

SEQ ID NO: 785981 - DNA, 33 bp, Homo sapien
taattctaaaagcaaacggctaaagtctataat

SEQ ID NO: 785982 - DNA, 33 bp, Homo sapien
taattctaaaagcaaagggctaaagtctataat

SEQ ID NO: 785983 - DNA, 33 bp, Homo sapien
gatatgtttgttttacacagcccagtctcatgt

SEQ ID NO: 785984 - DNA, 33 bp, Homo sapien
gatatgtttgttttacccagcccagtctcatgt

SEQ ID NO: 785985 - DNA, 33 bp, Homo sapien
ttcacacaccccagaggaatgtggctggactcc

SEQ ID NO: 785986 - DNA, 33 bp, Homo sapien
ttcacacaccccagagtaatgtggctggactcc

SEQ ID NO: 785987 - DNA, 33 bp, Homo sapien
tccttgcaattctatcagactccaaactcatta

SEQ ID NO: 785988 - DNA, 33 bp, Homo sapien
tccttgcaattctatcggactccaaactcatta

SEQ ID NO: 785989 - DNA, 33 bp, Homo sapien
caaaatgctaaacacaatgaggaaatacaattt

SEQ ID NO: 785990 - DNA, 33 bp, Homo sapien
caaaatgctaaacacagtgaggaaatacaattt

SEQ ID NO: 785991 - DNA, 33 bp, Homo sapien
tatcatgcagaactccaagtagttaatttaagg

SEQ ID NO: 785992 - DNA, 33 bp, Homo sapien
tatcatgcagaactcccagtagttaatttaagg

SEQ ID NO: 785993 - DNA, 33 bp, Homo sapien
cttaactgtgtctttgaaaagatttctgtcttg

SEQ ID NO: 785994 - DNA, 33 bp, Homo sapien
cttaactgtgtctttggaaagatttctgtcttg

SEQ ID NO: 785995 - DNA, 33 bp, Homo sapien
tcacctctactcctacacttcaaagttcctgag

SEQ ID NO: 785996 - DNA, 33 bp, Homo sapien
tcacctctactcctactcttcaaagttcctgag

SEQ ID NO: 785997 - DNA, 33 bp, Homo sapien
ttccttggcgtttttgaatagatttttattgct

SEQ ID NO: 785998 - DNA, 33 bp, Homo sapien
ttccttggcgtttttggatagatttttattgct

SEQ ID NO: 785999 - DNA, 33 bp, Homo sapien
gtttattcaaagtggacggattgctgatagaac

SEQ ID NO: 786000 - DNA, 33 bp, Homo sapien
gtttattcaaagtggatggattgctgatagaac

SEQ ID NO: 786001 - DNA, 33 bp, Homo sapien
attgctgatagaacccacctgaaagattcttaa

SEQ ID NO: 786002 - DNA, 33 bp, Homo sapien
attgctgatagaacccgcctgaaagattcttaa

SEQ ID NO: 786003 - DNA, 33 bp, Homo sapien
gattggcatcaaacaacgtgttgtcatcatcct

SEQ ID NO: 786004 - DNA, 33 bp, Homo sapien
gattggcatcaaacaatgtgttgtcatcatcct

SEQ ID NO: 786005 - DNA, 33 bp, Homo sapien
gtgcacatctttcttagaatgccttttaacata

SEQ ID NO: 786006 - DNA, 33 bp, Homo sapien
gtgcacatctttcttataatgccttttaacata

SEQ ID NO: 786007 - DNA, 33 bp, Homo sapien
ttttgtcagtttcataaccttgtatcaccattg

SEQ ID NO: 786008 - DNA, 33 bp, Homo sapien
ttttgtcagtttcatagccttgtatcaccattg

SEQ ID NO: 786009 - DNA, 33 bp, Homo sapien
aatgggaatgaataaggacatggcataggaaaa

SEQ ID NO: 786010 - DNA, 33 bp, Homo sapien
aatgggaatgaataagtacatggcataggaaaa

SEQ ID NO: 786011 - DNA, 33 bp, Homo sapien
tgtgcacagagcttaccgtaaaattattagaag

SEQ ID NO: 786012 - DNA, 33 bp, Homo sapien
tgtgcacagagcttactgtaaaattattagaag

SEQ ID NO: 786013 - DNA, 33 bp, Homo sapien
actggaaacttagccaaagctttatctgaaaaa

SEQ ID NO: 786014 - DNA, 33 bp, Homo sapien
actggaaacttagccagagctttatctgaaaaa

SEQ ID NO: 786015 - DNA, 33 bp, Homo sapien
aaaattaaaataaagtaactagctcacattcaa

SEQ ID NO: 786016 - DNA, 33 bp, Homo sapien
aaaattaaaataaagttactagctcacattcaa

SEQ ID NO: 786017 - DNA, 33 bp, Homo sapien
tcatgttgccttgaaaactcctgtgttctgtta

SEQ ID NO: 786018 - DNA, 33 bp, Homo sapien
tcatgttgccttgaaacctcctgtgttctgtta

SEQ ID NO: 786019 - DNA, 33 bp, Homo sapien
cagcttaaagtgaaagcaacgtggttagttggg

SEQ ID NO: 786020 - DNA, 33 bp, Homo sapien
cagcttaaagtgaaaggaacgtggttagttggg

SEQ ID NO: 786021 - DNA, 33 bp, Homo sapien
acacagtacaatatcacgctttacacttcagag

SEQ ID NO: 786022 - DNA, 33 bp, Homo sapien
acacagtacaatatcatgctttacacttcagag

SEQ ID NO: 786023 - DNA, 33 bp, Homo sapien
aaaatcttcaccaataataggtttctgaatttt

SEQ ID NO: 786024 - DNA, 33 bp, Homo sapien
aaaatcttcaccaatagtaggtttctgaatttt

SEQ ID NO: 786025 - DNA, 33 bp, Homo sapien
tcccatgctaggacccagaatttagtctaggag

SEQ ID NO: 786026 - DNA, 33 bp, Homo sapien
tcccatgctaggaccctgaatttagtctaggag

SEQ ID NO: 786027 - DNA, 33 bp, Homo sapien
catggtgtgaaagccaaaaggcctataaagaga

SEQ ID NO: 786028 - DNA, 33 bp, Homo sapien
catggtgtgaaagccagaaggcctataaagaga

SEQ ID NO: 786029 - DNA, 33 bp, Homo sapien
tacccatctaattctgcaatcattgagatcact

SEQ ID NO: 786030 - DNA, 33 bp, Homo sapien
tacccatctaattctgtaatcattgagatcact

SEQ ID NO: 786031 - DNA, 33 bp, Homo sapien
agtgctgactgccaaagacattttaaggacaaa

SEQ ID NO: 786032 - DNA, 33 bp, Homo sapien
agtgctgactgccaaatacattttaaggacaaa

SEQ ID NO: 786033 - DNA, 33 bp, Homo sapien
acataacagaaacaaaagcccaggaatggaggt

SEQ ID NO: 786034 - DNA, 33 bp, Homo sapien
acataacagaaacaaacgcccaggaatggaggt

SEQ ID NO: 786035 - DNA, 33 bp, Homo sapien
aaaaatatcaaatcaagtcttctctggcagacg

SEQ ID NO: 786036 - DNA, 33 bp, Homo sapien
aaaaatatcaaatcaattcttctctggcagacg

SEQ ID NO: 786037 - DNA, 33 bp, Homo sapien
ccaacctcgacttgcggatgaaactacactaat

SEQ ID NO: 786038 - DNA, 33 bp, Homo sapien
ccaacctcgacttgcgtatgaaactacactaat

SEQ ID NO: 786039 - DNA, 33 bp, Homo sapien
cataattatactgaaaaaaacagctgaggactt

SEQ ID NO: 786040 - DNA, 33 bp, Homo sapien
cataattatactgaaagaaacagctgaggactt

SEQ ID NO: 786041 - DNA, 33 bp, Homo sapien
ttgagaatggaatgcaccagtggctcaactgtg

SEQ ID NO: 786042 - DNA, 33 bp, Homo sapien
ttgagaatggaatgcatcagtggctcaactgtg

SEQ ID NO: 786043 - DNA, 33 bp, Homo sapien
cattcagatacaagaccacaaagacagttatgt

SEQ ID NO: 786044 - DNA, 33 bp, Homo sapien
cattcagatacaagactacaaagacagttatgt

SEQ ID NO: 786045 - DNA, 33 bp, Homo sapien
tttctatcagttaacaagtttctcagcattatt

SEQ ID NO: 786046 - DNA, 33 bp, Homo sapien
tttctatcagttaacatgtttctcagcattatt

SEQ ID NO: 786047 - DNA, 33 bp, Homo sapien
tcaatggcaatttttgcactttaatacagtaca

SEQ ID NO: 786048 - DNA, 33 bp, Homo sapien
tcaatggcaatttttggactttaatacagtaca

SEQ ID NO: 786049 - DNA, 33 bp, Homo sapien
aactgtcattttaaaaccatggcccttcgtatt

SEQ ID NO: 786050 - DNA, 33 bp, Homo sapien
aactgtcattttaaaagcatggcccttcgtatt

SEQ ID NO: 786051 - DNA, 33 bp, Homo sapien
gaagcttccagtcatgccagaagtcagagaggt

SEQ ID NO: 786052 - DNA, 33 bp, Homo sapien
gaagcttccagtcatggcagaagtcagagaggt

SEQ ID NO: 786053 - DNA, 33 bp, Homo sapien
taatatttgtaagttacctagagcagcatatga

SEQ ID NO: 786054 - DNA, 33 bp, Homo sapien
taatatttgtaagttagctagagcagcatatga

SEQ ID NO: 786055 - DNA, 33 bp, Homo sapien
gcagtgaggttaagtaccatatacaaggtagca

SEQ ID NO: 786056 - DNA, 33 bp, Homo sapien
gcagtgaggttaagtatcatatacaaggtagca

SEQ ID NO: 786057 - DNA, 33 bp, Homo sapien
atcagagaccctcttacgaagctgaaatgatgt

SEQ ID NO: 786058 - DNA, 33 bp, Homo sapien
atcagagaccctcttatgaagctgaaatgatgt

SEQ ID NO: 786059 - DNA, 33 bp, Homo sapien
atctctagctcatggaacagaccagctaaaaca

SEQ ID NO: 786060 - DNA, 33 bp, Homo sapien
atctctagctcatggatcagaccagctaaaaca

SEQ ID NO: 786061 - DNA, 33 bp, Homo sapien
gtccaatgaccagtagaaagttgtaacaggaac

SEQ ID NO: 786062 - DNA, 33 bp, Homo sapien
gtccaatgaccagtaggaagttgtaacaggaac

SEQ ID NO: 786063 - DNA, 33 bp, Homo sapien
tctctctcttctcacgaaagtaatatagctctg

SEQ ID NO: 786064 - DNA, 33 bp, Homo sapien
tctctctcttctcacggaagtaatatagctctg

SEQ ID NO: 786065 - DNA, 33 bp, Homo sapien
ctacattagtgcctgcccatttcctctccccac

SEQ ID NO: 786066 - DNA, 33 bp, Homo sapien
ctacattagtgcctgcgcatttcctctccccac

SEQ ID NO: 786067 - DNA, 33 bp, Homo sapien
agaaagcttctctggaactgtgaaaggaatgga

SEQ ID NO: 786068 - DNA, 33 bp, Homo sapien
agaaagcttctctggagctgtgaaaggaatgga

SEQ ID NO: 786069 - DNA, 33 bp, Homo sapien
tttacgtgcaaatatacggaatgtgctaaattt

SEQ ID NO: 786070 - DNA, 33 bp, Homo sapien
tttacgtgcaaatatatggaatgtgctaaattt

SEQ ID NO: 786071 - DNA, 33 bp, Homo sapien
cttttctctagttaaaaacatgggctaactgaa

SEQ ID NO: 786072 - DNA, 33 bp, Homo sapien
cttttctctagttaaagacatgggctaactgaa

SEQ ID NO: 786073 - DNA, 33 bp, Homo sapien
taaatttgtaccattacaggtgaattgtaatct

SEQ ID NO: 786074 - DNA, 33 bp, Homo sapien
taaatttgtaccattataggtgaattgtaatct

SEQ ID NO: 786075 - DNA, 33 bp, Homo sapien
tgcagatttatcattacaggcttagttctgtgt

SEQ ID NO: 786076 - DNA, 33 bp, Homo sapien
tgcagatttatcattataggcttagttctgtgt

SEQ ID NO: 786077 - DNA, 33 bp, Homo sapien
tcccaccattccttcactcacccctttctctag

SEQ ID NO: 786078 - DNA, 33 bp, Homo sapien
tcccaccattccttcagtcacccctttctctag

SEQ ID NO: 786079 - DNA, 33 bp, Homo sapien
aattaatatgtctgagccataaataaactatct

SEQ ID NO: 786080 - DNA, 33 bp, Homo sapien
aattaatatgtctgagtcataaataaactatct

SEQ ID NO: 786081 - DNA, 33 bp, Homo sapien
caagttgggttcaaaacgcttctctatctggat

SEQ ID NO: 786082 - DNA, 33 bp, Homo sapien
caagttgggttcaaaatgcttctctatctggat

SEQ ID NO: 786083 - DNA, 33 bp, Homo sapien
tcagtaaatgttactgaaaccattggaaatcct

SEQ ID NO: 786084 - DNA, 33 bp, Homo sapien
tcagtaaatgttactggaaccattggaaatcct

SEQ ID NO: 786085 - DNA, 33 bp, Homo sapien
ccttgtgtcactgttccccttagaatttcaagc

SEQ ID NO: 786086 - DNA, 33 bp, Homo sapien
ccttgtgtcactgttcgccttagaatttcaagc

SEQ ID NO: 786087 - DNA, 33 bp, Homo sapien
ataccactgtattaaaagcatactggaagcact

SEQ ID NO: 786088 - DNA, 33 bp, Homo sapien
ataccactgtattaaatgcatactggaagcact

SEQ ID NO: 786089 - DNA, 33 bp, Homo sapien
ctgattcaagctgagaaaggacttgaggaactt

SEQ ID NO: 786090 - DNA, 33 bp, Homo sapien
ctgattcaagctgagagaggacttgaggaactt

SEQ ID NO: 786091 - DNA, 33 bp, Homo sapien
ccccttagcatgacaactatgtgcctttctgca

SEQ ID NO: 786092 - DNA, 33 bp, Homo sapien
ccccttagcatgacaattatgtgcctttctgca

SEQ ID NO: 786093 - DNA, 33 bp, Homo sapien
gcagtgattaacgatgcatgcaaagcccttttt

SEQ ID NO: 786094 - DNA, 33 bp, Homo sapien
gcagtgattaacgatgtatgcaaagcccttttt

SEQ ID NO: 786095 - DNA, 33 bp, Homo sapien
aatgttcagccaataaagaaccactggattcaa

SEQ ID NO: 786096 - DNA, 33 bp, Homo sapien
aatgttcagccaataacgaaccactggattcaa

SEQ ID NO: 786097 - DNA, 33 bp, Homo sapien
tatttcttactcatcacgtaagcacagatatct

SEQ ID NO: 786098 - DNA, 33 bp, Homo sapien
tatttcttactcatcatgtaagcacagatatct

SEQ ID NO: 786099 - DNA, 33 bp, Homo sapien
tcatcaatgagcttagccaaccagcaaatgata

SEQ ID NO: 786100 - DNA, 33 bp, Homo sapien
tcatcaatgagcttaggcaaccagcaaatgata

SEQ ID NO: 786101 - DNA, 33 bp, Homo sapien
atgtatgagatgtaaaatgtaggagaaataaaa

SEQ ID NO: 786102 - DNA, 33 bp, Homo sapien
atgtatgagatgtaaagtgtaggagaaataaaa

SEQ ID NO: 786103 - DNA, 33 bp, Homo sapien
gataagtcaaagataacgcccatgtttctaatt

SEQ ID NO: 786104 - DNA, 33 bp, Homo sapien
gataagtcaaagataatgcccatgtttctaatt

SEQ ID NO: 786105 - DNA, 33 bp, Homo sapien
tgttaattgattgtgccatatgtgttagaccat

SEQ ID NO: 786106 - DNA, 33 bp, Homo sapien
tgttaattgattgtgctatatgtgttagaccat

SEQ ID NO: 786107 - DNA, 33 bp, Homo sapien
gctgtgctcactcacaatctgtctacaaaatag

SEQ ID NO: 786108 - DNA, 33 bp, Homo sapien
gctgtgctcactcacagtctgtctacaaaatag

SEQ ID NO: 786109 - DNA, 33 bp, Homo sapien
cccttttgaaatgaaggaagtcagtccacagta

SEQ ID NO: 786110 - DNA, 33 bp, Homo sapien
cccttttgaaatgaagtaagtcagtccacagta

SEQ ID NO: 786111 - DNA, 33 bp, Homo sapien
attagatatgttttccactttaatccctttatc

SEQ ID NO: 786112 - DNA, 33 bp, Homo sapien
attagatatgttttccgctttaatccctttatc

SEQ ID NO: 786113 - DNA, 33 bp, Homo sapien
ccacgagtagaaggaacactgaggagagagtgc

SEQ ID NO: 786114 - DNA, 33 bp, Homo sapien
ccacgagtagaaggaatactgaggagagagtgc

SEQ ID NO: 786115 - DNA, 33 bp, Homo sapien
tgggaaaaaaaatacccagatggtcacatagat

SEQ ID NO: 786116 - DNA, 33 bp, Homo sapien
tgggaaaaaaaatacctagatggtcacatagat

SEQ ID NO: 786117 - DNA, 33 bp, Homo sapien
tatctagtacactcagcacgtcacacaattctt

SEQ ID NO: 786118 - DNA, 33 bp, Homo sapien
tatctagtacactcaggacgtcacacaattctt

SEQ ID NO: 786119 - DNA, 33 bp, Homo sapien
gtgtcagactctatgaaggtattattactctct

SEQ ID NO: 786120 - DNA, 33 bp, Homo sapien
gtgtcagactctatgagggtattattactctct

SEQ ID NO: 786121 - DNA, 33 bp, Homo sapien
tcgactaccagctgataaaatacctgcaaagtg

SEQ ID NO: 786122 - DNA, 33 bp, Homo sapien
tcgactaccagctgatgaaatacctgcaaagtg

SEQ ID NO: 786123 - DNA, 33 bp, Homo sapien
gattgggctgcaaaatgaatacctagcataata

SEQ ID NO: 786124 - DNA, 33 bp, Homo sapien
gattgggctgcaaaattaatacctagcataata

SEQ ID NO: 786125 - DNA, 33 bp, Homo sapien
tagctaggaattatggaattgatcattgtggtg

SEQ ID NO: 786126 - DNA, 33 bp, Homo sapien
tagctaggaattatggtattgatcattgtggtg

SEQ ID NO: 786127 - DNA, 33 bp, Homo sapien
acaggtagtttagaaacgtatgccaaaataaaa

SEQ ID NO: 786128 - DNA, 33 bp, Homo sapien
acaggtagtttagaaaggtatgccaaaataaaa

SEQ ID NO: 786129 - DNA, 33 bp, Homo sapien
acttgatcattttaaagtcctaagatgtgctct

SEQ ID NO: 786130 - DNA, 33 bp, Homo sapien
acttgatcattttaaattcctaagatgtgctct

SEQ ID NO: 786131 - DNA, 33 bp, Homo sapien
tgcatacattgttgaactatcatttaactgcag

SEQ ID NO: 786132 - DNA, 33 bp, Homo sapien
tgcatacattgttgaagtatcatttaactgcag

SEQ ID NO: 786133 - DNA, 33 bp, Homo sapien
ctaatatttgctacacacattttctccagtaat

SEQ ID NO: 786134 - DNA, 33 bp, Homo sapien
ctaatatttgctacactcattttctccagtaat

SEQ ID NO: 786135 - DNA, 33 bp, Homo sapien
aagaacaatttctaaaactttctctataaattt

SEQ ID NO: 786136 - DNA, 33 bp, Homo sapien
aagaacaatttctaaacctttctctataaattt

SEQ ID NO: 786137 - DNA, 33 bp, Homo sapien
catttaagatgcattaaatgttgtgaataaatc

SEQ ID NO: 786138 - DNA, 33 bp, Homo sapien
catttaagatgcattagatgttgtgaataaatc

SEQ ID NO: 786139 - DNA, 33 bp, Homo sapien
ttgatgattcctttgacgttgtatttaaaatct

SEQ ID NO: 786140 - DNA, 33 bp, Homo sapien
ttgatgattcctttgatgttgtatttaaaatct

SEQ ID NO: 786141 - DNA, 33 bp, Homo sapien
cagaaacgtcaggaaacaaagaatacaatggaa

SEQ ID NO: 786142 - DNA, 33 bp, Homo sapien
cagaaacgtcaggaaataaagaatacaatggaa

SEQ ID NO: 786143 - DNA, 33 bp, Homo sapien
ttgagttcagttgtacagagtttagacatagaa

SEQ ID NO: 786144 - DNA, 33 bp, Homo sapien
ttgagttcagttgtacggagtttagacatagaa

SEQ ID NO: 786145 - DNA, 33 bp, Homo sapien
tgttattccccagaaaataaagtcacgcacagc

SEQ ID NO: 786146 - DNA, 33 bp, Homo sapien
tgttattccccagaaattaaagtcacgcacagc

SEQ ID NO: 786147 - DNA, 33 bp, Homo sapien
gatttcatgttcataaatactttaggcgctttt

SEQ ID NO: 786148 - DNA, 33 bp, Homo sapien
gatttcatgttcataagtactttaggcgctttt

SEQ ID NO: 786149 - DNA, 33 bp, Homo sapien
catatacccacagaacagtatcaatacatgggt

SEQ ID NO: 786150 - DNA, 33 bp, Homo sapien
catatacccacagaacggtatcaatacatgggt

SEQ ID NO: 786151 - DNA, 33 bp, Homo sapien
gaactatgagccaaataaaattcttttctttat

SEQ ID NO: 786152 - DNA, 33 bp, Homo sapien
gaactatgagccaaatcaaattcttttctttat

SEQ ID NO: 786153 - DNA, 33 bp, Homo sapien
aaagagacttcaaggcaaaaatgataagaacag

SEQ ID NO: 786154 - DNA, 33 bp, Homo sapien
aaagagacttcaaggcgaaaatgataagaacag

SEQ ID NO: 786155 - DNA, 33 bp, Homo sapien
tattacaagcttataaggggcaagactaatagg

SEQ ID NO: 786156 - DNA, 33 bp, Homo sapien
tattacaagcttataatgggcaagactaatagg

SEQ ID NO: 786157 - DNA, 33 bp, Homo sapien
ggggagccagaagaggaatgcattgggaacgtg

SEQ ID NO: 786158 - DNA, 33 bp, Homo sapien
ggggagccagaagagggatgcattgggaacgtg

SEQ ID NO: 786159 - DNA, 33 bp, Homo sapien
cacccaataggtaccaaaattcatgctatacct

SEQ ID NO: 786160 - DNA, 33 bp, Homo sapien
cacccaataggtaccagaattcatgctatacct

SEQ ID NO: 786161 - DNA, 33 bp, Homo sapien
tccatgtgcacatatgcactgtaaaatgactac

SEQ ID NO: 786162 - DNA, 33 bp, Homo sapien
tccatgtgcacatatgtactgtaaaatgactac

SEQ ID NO: 786163 - DNA, 33 bp, Homo sapien
gctgtaacaaatcatacataaaccttgatgttg

SEQ ID NO: 786164 - DNA, 33 bp, Homo sapien
gctgtaacaaatcatatataaaccttgatgttg

SEQ ID NO: 786165 - DNA, 33 bp, Homo sapien
cccataagtatagacccgaggtatttttttgac

SEQ ID NO: 786166 - DNA, 33 bp, Homo sapien
cccataagtatagacctgaggtatttttttgac

SEQ ID NO: 786167 - DNA, 33 bp, Homo sapien
caagaaacaagtcaacaccctagcatggtatac

SEQ ID NO: 786168 - DNA, 33 bp, Homo sapien
caagaaacaagtcaacgccctagcatggtatac

SEQ ID NO: 786169 - DNA, 33 bp, Homo sapien
ggacatttgtgtgttacgttgactactgtgtac

SEQ ID NO: 786170 - DNA, 33 bp, Homo sapien
ggacatttgtgtgttatgttgactactgtgtac

SEQ ID NO: 786171 - DNA, 33 bp, Homo sapien
attggtggaatggctccctcttttcaaatatat

SEQ ID NO: 786172 - DNA, 33 bp, Homo sapien
attggtggaatggctctctcttttcaaatatat

SEQ ID NO: 786173 - DNA, 33 bp, Homo sapien
acataatgtcctgggtaaaagaagctgcagtaa

SEQ ID NO: 786174 - DNA, 33 bp, Homo sapien
acataatgtcctgggtcaaagaagctgcagtaa

SEQ ID NO: 786175 - DNA, 33 bp, Homo sapien
catcaaaattgtaaaaagacgtgaatactttga

SEQ ID NO: 786176 - DNA, 33 bp, Homo sapien
catcaaaattgtaaaaggacgtgaatactttga

SEQ ID NO: 786177 - DNA, 33 bp, Homo sapien
tgtgagatgaaagtccaccaacaggctttgcgt

SEQ ID NO: 786178 - DNA, 33 bp, Homo sapien
tgtgagatgaaagtccgccaacaggctttgcgt

SEQ ID NO: 786179 - DNA, 33 bp, Homo sapien
gttgaggttcttggacactgggttaccagagta

SEQ ID NO: 786180 - DNA, 33 bp, Homo sapien
gttgaggttcttggacgctgggttaccagagta

SEQ ID NO: 786181 - DNA, 33 bp, Homo sapien
aattcaatgtcaatcaaaacaacagtctatttt

SEQ ID NO: 786182 - DNA, 33 bp, Homo sapien
aattcaatgtcaatcagaacaacagtctatttt

SEQ ID NO: 786183 - DNA, 33 bp, Homo sapien
attgtcccttatttcacggcattttggtaaaat

SEQ ID NO: 786184 - DNA, 33 bp, Homo sapien
attgtcccttatttcagggcattttggtaaaat

SEQ ID NO: 786185 - DNA, 33 bp, Homo sapien
ctctcacatcttttaacatacaggttggtggta

SEQ ID NO: 786186 - DNA, 33 bp, Homo sapien
ctctcacatcttttaatatacaggttggtggta

SEQ ID NO: 786187 - DNA, 33 bp, Homo sapien
gacttttgtggttctgcaattaaatgctgcctt

SEQ ID NO: 786188 - DNA, 33 bp, Homo sapien
gacttttgtggttctgtaattaaatgctgcctt

SEQ ID NO: 786189 - DNA, 33 bp, Homo sapien
aatcagatacctagaactgcccatgttggttaa

SEQ ID NO: 786190 - DNA, 33 bp, Homo sapien
aatcagatacctagaattgcccatgttggttaa

SEQ ID NO: 786191 - DNA, 33 bp, Homo sapien
gctagtagtatgtaccaaaagaagtctacatca

SEQ ID NO: 786192 - DNA, 33 bp, Homo sapien
gctagtagtatgtacctaaagaagtctacatca

SEQ ID NO: 786193 - DNA, 33 bp, Homo sapien
aaacatctctctacgtgaaggtaatattctgca

SEQ ID NO: 786194 - DNA, 33 bp, Homo sapien
aaacatctctctacgttaaggtaatattctgca

SEQ ID NO: 786195 - DNA, 33 bp, Homo sapien
ggggtcactatgatgacaatgaagctcctaact

SEQ ID NO: 786196 - DNA, 33 bp, Homo sapien
ggggtcactatgatgagaatgaagctcctaact

SEQ ID NO: 786197 - DNA, 33 bp, Homo sapien
gttctagagagacttaaatatgcgtagtcttct

SEQ ID NO: 786198 - DNA, 33 bp, Homo sapien
gttctagagagacttacatatgcgtagtcttct

SEQ ID NO: 786199 - DNA, 33 bp, Homo sapien
cttcatttttaaagccacattatcttcagcacc

SEQ ID NO: 786200 - DNA, 33 bp, Homo sapien
cttcatttttaaagccccattatcttcagcacc

SEQ ID NO: 786201 - DNA, 33 bp, Homo sapien
tagatgtaactggaaacgttggagatgtatttc

SEQ ID NO: 786202 - DNA, 33 bp, Homo sapien
tagatgtaactggaaaggttggagatgtatttc

SEQ ID NO: 786203 - DNA, 33 bp, Homo sapien
tggaaatcatccaatcggaagagcatacagaaa

SEQ ID NO: 786204 - DNA, 33 bp, Homo sapien
tggaaatcatccaatctgaagagcatacagaaa

SEQ ID NO: 786205 - DNA, 33 bp, Homo sapien
attattttttagtctcacgtatcactttgtaat

SEQ ID NO: 786206 - DNA, 33 bp, Homo sapien
attattttttagtctcccgtatcactttgtaat

SEQ ID NO: 786207 - DNA, 33 bp, Homo sapien
ttccatcaaactaaaaagtttctacactgcaaa

SEQ ID NO: 786208 - DNA, 33 bp, Homo sapien
ttccatcaaactaaaacgtttctacactgcaaa

SEQ ID NO: 786209 - DNA, 33 bp, Homo sapien
tgtggaatgataaaatcaggacaattaacatat

SEQ ID NO: 786210 - DNA, 33 bp, Homo sapien
tgtggaatgataaaattaggacaattaacatat

SEQ ID NO: 786211 - DNA, 33 bp, Homo sapien
cctctcaagataaaatcaataaccaaagtgaat

SEQ ID NO: 786212 - DNA, 33 bp, Homo sapien
cctctcaagataaaatgaataaccaaagtgaat

SEQ ID NO: 786213 - DNA, 33 bp, Homo sapien
gcaaatccaagaagatcaacaaaatccaagtat

SEQ ID NO: 786214 - DNA, 33 bp, Homo sapien
gcaaatccaagaagatgaacaaaatccaagtat

SEQ ID NO: 786215 - DNA, 33 bp, Homo sapien
aggctattagttggaacaaaatgtgatgtatcg

SEQ ID NO: 786216 - DNA, 33 bp, Homo sapien
aggctattagttggaataaaatgtgatgtatcg

SEQ ID NO: 786217 - DNA, 33 bp, Homo sapien
agacagagagacaatcacagacacattctctct

SEQ ID NO: 786218 - DNA, 33 bp, Homo sapien
agacagagagacaatcgcagacacattctctct

SEQ ID NO: 786219 - DNA, 33 bp, Homo sapien
gaaaatttttcagtgccagtatattggtgaaac

SEQ ID NO: 786220 - DNA, 33 bp, Homo sapien
gaaaatttttcagtgctagtatattggtgaaac

SEQ ID NO: 786221 - DNA, 33 bp, Homo sapien
gaggtaaaaccatggacagagcttcttgaaatg

SEQ ID NO: 786222 - DNA, 33 bp, Homo sapien
gaggtaaaaccatggatagagcttcttgaaatg

SEQ ID NO: 786223 - DNA, 33 bp, Homo sapien
agatatattaagtgccaattaagtccagttgga

SEQ ID NO: 786224 - DNA, 33 bp, Homo sapien
agatatattaagtgccgattaagtccagttgga

SEQ ID NO: 786225 - DNA, 33 bp, Homo sapien
agtatggatgaaagaaatcaagaggatgtggag

SEQ ID NO: 786226 - DNA, 33 bp, Homo sapien
agtatggatgaaagaagtcaagaggatgtggag

SEQ ID NO: 786227 - DNA, 33 bp, Homo sapien
tgcctgagacatgtacaataaagcctgtgattt

SEQ ID NO: 786228 - DNA, 33 bp, Homo sapien
tgcctgagacatgtacgataaagcctgtgattt

SEQ ID NO: 786229 - DNA, 33 bp, Homo sapien
ctcatatatcagaatcaccatggtttttaattg

SEQ ID NO: 786230 - DNA, 33 bp, Homo sapien
ctcatatatcagaatctccatggtttttaattg

SEQ ID NO: 786231 - DNA, 33 bp, Homo sapien
cgtcactcatgataagaccacatttctctcctc

SEQ ID NO: 786232 - DNA, 33 bp, Homo sapien
cgtcactcatgataagtccacatttctctcctc

SEQ ID NO: 786233 - DNA, 33 bp, Homo sapien
ccttgaccaaacccacaattttcatattggaga

SEQ ID NO: 786234 - DNA, 33 bp, Homo sapien
ccttgaccaaacccaccattttcatattggaga

SEQ ID NO: 786235 - DNA, 33 bp, Homo sapien
aggctaaaatcctgaccatgacaaaaataaatt

SEQ ID NO: 786236 - DNA, 33 bp, Homo sapien
aggctaaaatcctgactatgacaaaaataaatt

SEQ ID NO: 786237 - DNA, 33 bp, Homo sapien
atgtatacttggaaccactttgatacctgtgca

SEQ ID NO: 786238 - DNA, 33 bp, Homo sapien
atgtatacttggaacctctttgatacctgtgca

SEQ ID NO: 786239 - DNA, 33 bp, Homo sapien
gtgccagcaataagtcccagttttaggcagccc

SEQ ID NO: 786240 - DNA, 33 bp, Homo sapien
gtgccagcaataagtctcagttttaggcagccc

SEQ ID NO: 786241 - DNA, 33 bp, Homo sapien
ctggtaccaaaagctggcagagacaaaacaaaa

SEQ ID NO: 786242 - DNA, 33 bp, Homo sapien
ctggtaccaaaagctgtcagagacaaaacaaaa

SEQ ID NO: 786243 - DNA, 33 bp, Homo sapien
gtcaccaagtgccctacgttcaataataggaaa

SEQ ID NO: 786244 - DNA, 33 bp, Homo sapien
gtcaccaagtgccctatgttcaataataggaaa

SEQ ID NO: 786245 - DNA, 33 bp, Homo sapien
tcaacacagtgccatcactaatcattgcaatat

SEQ ID NO: 786246 - DNA, 33 bp, Homo sapien
tcaacacagtgccatctctaatcattgcaatat

SEQ ID NO: 786247 - DNA, 33 bp, Homo sapien
tggaccttcgtctccaatcaaatctcatgttca

SEQ ID NO: 786248 - DNA, 33 bp, Homo sapien
tggaccttcgtctccagtcaaatctcatgttca

SEQ ID NO: 786249 - DNA, 33 bp, Homo sapien
accacatccaaaccaacagccagttatcatacc

SEQ ID NO: 786250 - DNA, 33 bp, Homo sapien
accacatccaaaccaatagccagttatcatacc

SEQ ID NO: 786251 - DNA, 33 bp, Homo sapien
taaatacaaaggattcaaaatttacagtttaca

SEQ ID NO: 786252 - DNA, 33 bp, Homo sapien
taaatacaaaggattcgaaatttacagtttaca

SEQ ID NO: 786253 - DNA, 33 bp, Homo sapien
cctgtgagattccaggcattgagcagtgcaagt

SEQ ID NO: 786254 - DNA, 33 bp, Homo sapien
cctgtgagattccaggtattgagcagtgcaagt

SEQ ID NO: 786255 - DNA, 33 bp, Homo sapien
agacagtgagcaaaaacggcaccttcgcaaacc

SEQ ID NO: 786256 - DNA, 33 bp, Homo sapien
agacagtgagcaaaaatggcaccttcgcaaacc

SEQ ID NO: 786257 - DNA, 33 bp, Homo sapien
tgatccgcccttaagcgcacaccaccttaatat

SEQ ID NO: 786258 - DNA, 33 bp, Homo sapien
tgatccgcccttaagctcacaccaccttaatat

SEQ ID NO: 786259 - DNA, 33 bp, Homo sapien
attcagttttgaagaacagaccaatgttaggaa

SEQ ID NO: 786260 - DNA, 33 bp, Homo sapien
attcagttttgaagaatagaccaatgttaggaa

SEQ ID NO: 786261 - DNA, 33 bp, Homo sapien
tttcactctttctcaaaaatccatgatagtgtt

SEQ ID NO: 786262 - DNA, 33 bp, Homo sapien
tttcactctttctcaagaatccatgatagtgtt

SEQ ID NO: 786263 - DNA, 33 bp, Homo sapien
tagtataatttgtgacagtaagacaaaggcaaa

SEQ ID NO: 786264 - DNA, 33 bp, Homo sapien
tagtataatttgtgacggtaagacaaaggcaaa

SEQ ID NO: 786265 - DNA, 33 bp, Homo sapien
gagatcagatagtgcaaaagagtagattagata

SEQ ID NO: 786266 - DNA, 33 bp, Homo sapien
gagatcagatagtgcagaagagtagattagata

SEQ ID NO: 786267 - DNA, 33 bp, Homo sapien
aaacctcaattttgaaactctattctccagaac

SEQ ID NO: 786268 - DNA, 33 bp, Homo sapien
aaacctcaattttgaacctctattctccagaac

SEQ ID NO: 786269 - DNA, 33 bp, Homo sapien
attggagttttgttgcaataagccaagtaacat

SEQ ID NO: 786270 - DNA, 33 bp, Homo sapien
attggagttttgttgccataagccaagtaacat

SEQ ID NO: 786271 - DNA, 33 bp, Homo sapien
ctgctcactgttacaccgcattgtctcattact

SEQ ID NO: 786272 - DNA, 33 bp, Homo sapien
ctgctcactgttacactgcattgtctcattact

SEQ ID NO: 786273 - DNA, 33 bp, Homo sapien
tgctgttattgcactgcatattttgctataata

SEQ ID NO: 786274 - DNA, 33 bp, Homo sapien
tgctgttattgcactgtatattttgctataata

SEQ ID NO: 786275 - DNA, 33 bp, Homo sapien
gatttggaaatctggaacagccatatatctaaa

SEQ ID NO: 786276 - DNA, 33 bp, Homo sapien
gatttggaaatctggagcagccatatatctaaa

SEQ ID NO: 786277 - DNA, 33 bp, Homo sapien
attggaaatgctttcccaactttgtgatgattt

SEQ ID NO: 786278 - DNA, 33 bp, Homo sapien
attggaaatgctttcctaactttgtgatgattt

SEQ ID NO: 786279 - DNA, 33 bp, Homo sapien
taaatgaccagcatgaagcctaatgagagtatt

SEQ ID NO: 786280 - DNA, 33 bp, Homo sapien
taaatgaccagcatgaggcctaatgagagtatt

SEQ ID NO: 786281 - DNA, 33 bp, Homo sapien
ttctttctttccaatacagctgcagcagcaccg

SEQ ID NO: 786282 - DNA, 33 bp, Homo sapien
ttctttctttccaatagagctgcagcagcaccg

SEQ ID NO: 786283 - DNA, 33 bp, Homo sapien
atttatgtaactcttaagcccaagaatgctatt

SEQ ID NO: 786284 - DNA, 33 bp, Homo sapien
atttatgtaactcttaggcccaagaatgctatt

SEQ ID NO: 786285 - DNA, 33 bp, Homo sapien
aggagccggaaaaggagaattcattattggaca

SEQ ID NO: 786286 - DNA, 33 bp, Homo sapien
aggagccggaaaaggataattcattattggaca

SEQ ID NO: 786287 - DNA, 33 bp, Homo sapien
atcacagtacaagtgacgaacttattattaaat

SEQ ID NO: 786288 - DNA, 33 bp, Homo sapien
atcacagtacaagtgatgaacttattattaaat

SEQ ID NO: 786289 - DNA, 33 bp, Homo sapien
tagaactttgacaacaactccctttctgttctg

SEQ ID NO: 786290 - DNA, 33 bp, Homo sapien
tagaactttgacaacatctccctttctgttctg

SEQ ID NO: 786291 - DNA, 33 bp, Homo sapien
aagtgtagaagtcataacagtaaaacagataat

SEQ ID NO: 786292 - DNA, 33 bp, Homo sapien
aagtgtagaagtcataccagtaaaacagataat

SEQ ID NO: 786293 - DNA, 33 bp, Homo sapien
tgcatacagcaatatacgcagaaaacatttatg

SEQ ID NO: 786294 - DNA, 33 bp, Homo sapien
tgcatacagcaatataggcagaaaacatttatg

SEQ ID NO: 786295 - DNA, 33 bp, Homo sapien
attcttttagcccatcgattctctaccagcagc

SEQ ID NO: 786296 - DNA, 33 bp, Homo sapien
attcttttagcccatctattctctaccagcagc

SEQ ID NO: 786297 - DNA, 33 bp, Homo sapien
ccgatggtgacagctacaacctaacatgaaaat

SEQ ID NO: 786298 - DNA, 33 bp, Homo sapien
ccgatggtgacagctataacctaacatgaaaat

SEQ ID NO: 786299 - DNA, 33 bp, Homo sapien
aattgttagagtcaaaacaaagaaaatagtact

SEQ ID NO: 786300 - DNA, 33 bp, Homo sapien
aattgttagagtcaaagcaaagaaaatagtact

SEQ ID NO: 786301 - DNA, 33 bp, Homo sapien
ttttgaagttgcgataaactgtattatgatatg

SEQ ID NO: 786302 - DNA, 33 bp, Homo sapien
ttttgaagttgcgatacactgtattatgatatg

SEQ ID NO: 786303 - DNA, 33 bp, Homo sapien
aggacagtagagaaaactgaggaaatctgaata

SEQ ID NO: 786304 - DNA, 33 bp, Homo sapien
aggacagtagagaaaattgaggaaatctgaata

SEQ ID NO: 786305 - DNA, 33 bp, Homo sapien
ttgttcattgtagtaaaatttgttcaaaagtgt

SEQ ID NO: 786306 - DNA, 33 bp, Homo sapien
ttgttcattgtagtaacatttgttcaaaagtgt

SEQ ID NO: 786307 - DNA, 33 bp, Homo sapien
tatgctctttgatgagaagttcagattaggttg

SEQ ID NO: 786308 - DNA, 33 bp, Homo sapien
tatgctctttgatgaggagttcagattaggttg

SEQ ID NO: 786309 - DNA, 33 bp, Homo sapien
atatttccttccttgaacctaattgcatatgcc

SEQ ID NO: 786310 - DNA, 33 bp, Homo sapien
atatttccttccttgagcctaattgcatatgcc

SEQ ID NO: 786311 - DNA, 33 bp, Homo sapien
atgcttccgagtattgcactaggtgtgcctggc

SEQ ID NO: 786312 - DNA, 33 bp, Homo sapien
atgcttccgagtattggactaggtgtgcctggc

SEQ ID NO: 786313 - DNA, 33 bp, Homo sapien
gtgcaactcaaaggaacattcagaaacatattg

SEQ ID NO: 786314 - DNA, 33 bp, Homo sapien
gtgcaactcaaaggaatattcagaaacatattg

SEQ ID NO: 786315 - DNA, 33 bp, Homo sapien
gatatatatgtcaaaaatttaatgtctacatat

SEQ ID NO: 786316 - DNA, 33 bp, Homo sapien
gatatatatgtcaaaattttaatgtctacatat

SEQ ID NO: 786317 - DNA, 33 bp, Homo sapien
ttatctttaaagtcaccgaaattctagaagaac

SEQ ID NO: 786318 - DNA, 33 bp, Homo sapien
ttatctttaaagtcactgaaattctagaagaac

SEQ ID NO: 786319 - DNA, 33 bp, Homo sapien
gtttttgttttgttagaagaagatggcactttg

SEQ ID NO: 786320 - DNA, 33 bp, Homo sapien
gtttttgttttgttagtagaagatggcactttg

SEQ ID NO: 786321 - DNA, 33 bp, Homo sapien
ggtttaaatgtccttaggctttcactgcagacc

SEQ ID NO: 786322 - DNA, 33 bp, Homo sapien
ggtttaaatgtccttatgctttcactgcagacc

SEQ ID NO: 786323 - DNA, 33 bp, Homo sapien
tcaggtactatgagacccttagctatgtttttc

SEQ ID NO: 786324 - DNA, 33 bp, Homo sapien
tcaggtactatgagacgcttagctatgtttttc

SEQ ID NO: 786325 - DNA, 33 bp, Homo sapien
ttttggctcaaatttacaagtgaagaaatcaag

SEQ ID NO: 786326 - DNA, 33 bp, Homo sapien
ttttggctcaaatttataagtgaagaaatcaag

SEQ ID NO: 786327 - DNA, 33 bp, Homo sapien
acaacccagagaaacaaaacactcataatgttt

SEQ ID NO: 786328 - DNA, 33 bp, Homo sapien
acaacccagagaaacagaacactcataatgttt

SEQ ID NO: 786329 - DNA, 33 bp, Homo sapien
tagacaatagaaaaaaaaatgtgcctgtaatcc

SEQ ID NO: 786330 - DNA, 33 bp, Homo sapien
tagacaatagaaaaaataatgtgcctgtaatcc

SEQ ID NO: 786331 - DNA, 33 bp, Homo sapien
tatgtggtaattatacagagaaatgtttaggtg

SEQ ID NO: 786332 - DNA, 33 bp, Homo sapien
tatgtggtaattatacggagaaatgtttaggtg

SEQ ID NO: 786333 - DNA, 33 bp, Homo sapien
gcaacactgagaaataaaaagcttggagaaaaa

SEQ ID NO: 786334 - DNA, 33 bp, Homo sapien
gcaacactgagaaatagaaagcttggagaaaaa

SEQ ID NO: 786335 - DNA, 33 bp, Homo sapien
cttaaaacacaaatcaaagtagaaaaagctata

SEQ ID NO: 786336 - DNA, 33 bp, Homo sapien
cttaaaacacaaatcatagtagaaaaagctata

SEQ ID NO: 786337 - DNA, 33 bp, Homo sapien
gagcaaatgataggcacatgaaatacccaacat

SEQ ID NO: 786338 - DNA, 33 bp, Homo sapien
gagcaaatgataggcatatgaaatacccaacat

SEQ ID NO: 786339 - DNA, 33 bp, Homo sapien
aattcagaaactgaaggcctaacatccaatacc

SEQ ID NO: 786340 - DNA, 33 bp, Homo sapien
aattcagaaactgaagtcctaacatccaatacc

SEQ ID NO: 786341 - DNA, 33 bp, Homo sapien
tccatcctgacttctgaaattcagtttctgcac

SEQ ID NO: 786342 - DNA, 33 bp, Homo sapien
tccatcctgacttctggaattcagtttctgcac

SEQ ID NO: 786343 - DNA, 33 bp, Homo sapien
gactctggaatcctgacgtcacttttgaaattc

SEQ ID NO: 786344 - DNA, 33 bp, Homo sapien
gactctggaatcctgatgtcacttttgaaattc

SEQ ID NO: 786345 - DNA, 33 bp, Homo sapien
gctgccaccattctgacgaagcactttggttga

SEQ ID NO: 786346 - DNA, 33 bp, Homo sapien
gctgccaccattctgatgaagcactttggttga

SEQ ID NO: 786347 - DNA, 33 bp, Homo sapien
ggtaaagagtaccaagcatatcactgcattatt

SEQ ID NO: 786348 - DNA, 33 bp, Homo sapien
ggtaaagagtaccaaggatatcactgcattatt

SEQ ID NO: 786349 - DNA, 33 bp, Homo sapien
tgaatcaattccctaaaagtggctaatgaaaag

SEQ ID NO: 786350 - DNA, 33 bp, Homo sapien
tgaatcaattccctaacagtggctaatgaaaag

SEQ ID NO: 786351 - DNA, 33 bp, Homo sapien
gtcttggtcccgggcacggatcccatgttaaat

SEQ ID NO: 786352 - DNA, 33 bp, Homo sapien
gtcttggtcccgggcatggatcccatgttaaat

SEQ ID NO: 786353 - DNA, 33 bp, Homo sapien
ccaatgtggatcatagaaactagaactcctctc

SEQ ID NO: 786354 - DNA, 33 bp, Homo sapien
ccaatgtggatcatagcaactagaactcctctc

SEQ ID NO: 786355 - DNA, 33 bp, Homo sapien
cacaatttactgcccaaagaagcatggacccct

SEQ ID NO: 786356 - DNA, 33 bp, Homo sapien
cacaatttactgcccatagaagcatggacccct

SEQ ID NO: 786357 - DNA, 33 bp, Homo sapien
gcacaagtggtggttacaaagagagctattcca

SEQ ID NO: 786358 - DNA, 33 bp, Homo sapien
gcacaagtggtggttagaaagagagctattcca

SEQ ID NO: 786359 - DNA, 33 bp, Homo sapien
atatactgccttttcaggggagagttagtgagc

SEQ ID NO: 786360 - DNA, 33 bp, Homo sapien
atatactgccttttcatgggagagttagtgagc

SEQ ID NO: 786361 - DNA, 33 bp, Homo sapien
cagttagaaaaggatacgagtacctctatgtct

SEQ ID NO: 786362 - DNA, 33 bp, Homo sapien
cagttagaaaaggatatgagtacctctatgtct

SEQ ID NO: 786363 - DNA, 33 bp, Homo sapien
gagattgtcatgccaccatctgaccaaagaatt

SEQ ID NO: 786364 - DNA, 33 bp, Homo sapien
gagattgtcatgccacgatctgaccaaagaatt

SEQ ID NO: 786365 - DNA, 33 bp, Homo sapien
tcttgtataagtgatacaaacattgagctaaat

SEQ ID NO: 786366 - DNA, 33 bp, Homo sapien
tcttgtataagtgatataaacattgagctaaat

SEQ ID NO: 786367 - DNA, 33 bp, Homo sapien
cttcactactatggacaagtgcttaaacctacc

SEQ ID NO: 786368 - DNA, 33 bp, Homo sapien
cttcactactatggacgagtgcttaaacctacc

SEQ ID NO: 786369 - DNA, 33 bp, Homo sapien
ggagtagaatgtggagaccaaagccttttgatt

SEQ ID NO: 786370 - DNA, 33 bp, Homo sapien
ggagtagaatgtggaggccaaagccttttgatt

SEQ ID NO: 786371 - DNA, 33 bp, Homo sapien
tgtgattctagtgctacacagaaatcacatctc

SEQ ID NO: 786372 - DNA, 33 bp, Homo sapien
tgtgattctagtgctatacagaaatcacatctc

SEQ ID NO: 786373 - DNA, 33 bp, Homo sapien
accttgagagtagtgacattcacattaatatta

SEQ ID NO: 786374 - DNA, 33 bp, Homo sapien
accttgagagtagtgatattcacattaatatta

SEQ ID NO: 786375 - DNA, 33 bp, Homo sapien
aaacataagcaactcactatttttcaaaaaaga

SEQ ID NO: 786376 - DNA, 33 bp, Homo sapien
aaacataagcaactcattatttttcaaaaaaga

SEQ ID NO: 786377 - DNA, 33 bp, Homo sapien
ttaaaaactgtattcaatcatcacctatttaat

SEQ ID NO: 786378 - DNA, 33 bp, Homo sapien
ttaaaaactgtattcagtcatcacctatttaat

SEQ ID NO: 786379 - DNA, 33 bp, Homo sapien
aattactgtatatggaaattttgcaagtttttc

SEQ ID NO: 786380 - DNA, 33 bp, Homo sapien
aattactgtatatggacattttgcaagtttttc

SEQ ID NO: 786381 - DNA, 33 bp, Homo sapien
aagacataccaatggaccagagactttttcagt

SEQ ID NO: 786382 - DNA, 33 bp, Homo sapien
aagacataccaatggatcagagactttttcagt

SEQ ID NO: 786383 - DNA, 33 bp, Homo sapien
aggaagcggctaagcacaagttattgctttagg

SEQ ID NO: 786384 - DNA, 33 bp, Homo sapien
aggaagcggctaagcagaagttattgctttagg

SEQ ID NO: 786385 - DNA, 33 bp, Homo sapien
acatgagcttatttcccgactggttctcaaaat

SEQ ID NO: 786386 - DNA, 33 bp, Homo sapien
acatgagcttatttcctgactggttctcaaaat

SEQ ID NO: 786387 - DNA, 33 bp, Homo sapien
ctgaatatacgcacgacgcttttttgtttgttt

SEQ ID NO: 786388 - DNA, 33 bp, Homo sapien
ctgaatatacgcacgatgcttttttgtttgttt

SEQ ID NO: 786389 - DNA, 33 bp, Homo sapien
gtgagacttagccaaccggaaaatatggaaggt

SEQ ID NO: 786390 - DNA, 33 bp, Homo sapien
gtgagacttagccaactggaaaatatggaaggt

SEQ ID NO: 786391 - DNA, 33 bp, Homo sapien
tgttaaactttttccaatatgtcctgtttaaaa

SEQ ID NO: 786392 - DNA, 33 bp, Homo sapien
tgttaaactttttccagtatgtcctgtttaaaa

SEQ ID NO: 786393 - DNA, 33 bp, Homo sapien
ggttcagtgaaggaagcccttgctgagtaaggt

SEQ ID NO: 786394 - DNA, 33 bp, Homo sapien
ggttcagtgaaggaagtccttgctgagtaaggt

SEQ ID NO: 786395 - DNA, 33 bp, Homo sapien
gcaccagacttattaaagattattgttgcaagt

SEQ ID NO: 786396 - DNA, 33 bp, Homo sapien
gcaccagacttattaacgattattgttgcaagt

SEQ ID NO: 786397 - DNA, 33 bp, Homo sapien
catttctttctataccaatgactcaagtgagga

SEQ ID NO: 786398 - DNA, 33 bp, Homo sapien
catttctttctataccgatgactcaagtgagga

SEQ ID NO: 786399 - DNA, 33 bp, Homo sapien
aatatgttgctgtatggagtactgtgggcaatt

SEQ ID NO: 786400 - DNA, 33 bp, Homo sapien
aatatgttgctgtatgtagtactgtgggcaatt

SEQ ID NO: 786401 - DNA, 33 bp, Homo sapien
cttgtcttctttctaactctcctactgtcacac

SEQ ID NO: 786402 - DNA, 33 bp, Homo sapien
cttgtcttctttctaagtctcctactgtcacac

SEQ ID NO: 786403 - DNA, 33 bp, Homo sapien
agggagacttgaagaaatctgccaaattgctat

SEQ ID NO: 786404 - DNA, 33 bp, Homo sapien
agggagacttgaagaactctgccaaattgctat

SEQ ID NO: 786405 - DNA, 33 bp, Homo sapien
gtcactctaaaattaaagagagtaagtggctgc

SEQ ID NO: 786406 - DNA, 33 bp, Homo sapien
gtcactctaaaattaaggagagtaagtggctgc

SEQ ID NO: 786407 - DNA, 33 bp, Homo sapien
tagggcagactgaaaccggatgactaatttttg

SEQ ID NO: 786408 - DNA, 33 bp, Homo sapien
tagggcagactgaaactggatgactaatttttg

SEQ ID NO: 786409 - DNA, 33 bp, Homo sapien
ctatataacctatggaaatctttctgtatactt

SEQ ID NO: 786410 - DNA, 33 bp, Homo sapien
ctatataacctatggacatctttctgtatactt

SEQ ID NO: 786411 - DNA, 33 bp, Homo sapien
actatcctggtatatgcagtctcccagtggtat

SEQ ID NO: 786412 - DNA, 33 bp, Homo sapien
actatcctggtatatggagtctcccagtggtat

SEQ ID NO: 786413 - DNA, 33 bp, Homo sapien
tcttggagctgtggaaaatgggaataaaagaat

SEQ ID NO: 786414 - DNA, 33 bp, Homo sapien
tcttggagctgtggaagatgggaataaaagaat

SEQ ID NO: 786415 - DNA, 33 bp, Homo sapien
tgctgacttcaaccaccgaaccttggccaaggc

SEQ ID NO: 786416 - DNA, 33 bp, Homo sapien
tgctgacttcaaccactgaaccttggccaaggc

SEQ ID NO: 786417 - DNA, 33 bp, Homo sapien
ggcagccaaaggcataaggcctgacatatgata

SEQ ID NO: 786418 - DNA, 33 bp, Homo sapien
ggcagccaaaggcatacggcctgacatatgata

SEQ ID NO: 786419 - DNA, 33 bp, Homo sapien
agactgaatatatagacggctatcgaggacagt

SEQ ID NO: 786420 - DNA, 33 bp, Homo sapien
agactgaatatatagatggctatcgaggacagt

SEQ ID NO: 786421 - DNA, 33 bp, Homo sapien
aggtttccatagacgaggctacaatctgtgcca

SEQ ID NO: 786422 - DNA, 33 bp, Homo sapien
aggtttccatagacgatgctacaatctgtgcca

SEQ ID NO: 786423 - DNA, 33 bp, Homo sapien
atcctggagaaatatcagaaactgtaagtaagt

SEQ ID NO: 786424 - DNA, 33 bp, Homo sapien
atcctggagaaatatctgaaactgtaagtaagt

SEQ ID NO: 786425 - DNA, 33 bp, Homo sapien
tctgagatgaggtccacgagagaattaaaccct

SEQ ID NO: 786426 - DNA, 33 bp, Homo sapien
tctgagatgaggtccatgagagaattaaaccct

SEQ ID NO: 786427 - DNA, 33 bp, Homo sapien
tgatgggggcctatggcaatctggaaaaataat

SEQ ID NO: 786428 - DNA, 33 bp, Homo sapien
tgatgggggcctatggtaatctggaaaaataat

SEQ ID NO: 786429 - DNA, 33 bp, Homo sapien
tttcaaagcttttcatcaatacatatggataac

SEQ ID NO: 786430 - DNA, 33 bp, Homo sapien
tttcaaagcttttcatgaatacatatggataac

SEQ ID NO: 786431 - DNA, 33 bp, Homo sapien
gttttggacttacctaataccagttctatgtct

SEQ ID NO: 786432 - DNA, 33 bp, Homo sapien
gttttggacttacctagtaccagttctatgtct

SEQ ID NO: 786433 - DNA, 33 bp, Homo sapien
ttttataccttgtttcccatttccatcttagac

SEQ ID NO: 786434 - DNA, 33 bp, Homo sapien
ttttataccttgtttctcatttccatcttagac

SEQ ID NO: 786435 - DNA, 33 bp, Homo sapien
agaagaatttggagggacagcatggaaaatgct

SEQ ID NO: 786436 - DNA, 33 bp, Homo sapien
agaagaatttggaggggcagcatggaaaatgct

SEQ ID NO: 786437 - DNA, 33 bp, Homo sapien
atttcaaaatttctggaagtactcacattcgat

SEQ ID NO: 786438 - DNA, 33 bp, Homo sapien
atttcaaaatttctgggagtactcacattcgat

SEQ ID NO: 786439 - DNA, 33 bp, Homo sapien
gacttcataacaaaaaggtggtacaaaacacca

SEQ ID NO: 786440 - DNA, 33 bp, Homo sapien
gacttcataacaaaaatgtggtacaaaacacca

SEQ ID NO: 786441 - DNA, 33 bp, Homo sapien
gagcctgttaaggatacgcaggatgggccagtt

SEQ ID NO: 786442 - DNA, 33 bp, Homo sapien
gagcctgttaaggatatgcaggatgggccagtt

SEQ ID NO: 786443 - DNA, 33 bp, Homo sapien
aaaaacctgaaaccaaatatgttgatattcagc

SEQ ID NO: 786444 - DNA, 33 bp, Homo sapien
aaaaacctgaaaccaagtatgttgatattcagc

SEQ ID NO: 786445 - DNA, 33 bp, Homo sapien
attaaattcaaggaaccatcacaaatggatggt

SEQ ID NO: 786446 - DNA, 33 bp, Homo sapien
attaaattcaaggaactatcacaaatggatggt

SEQ ID NO: 786447 - DNA, 33 bp, Homo sapien
aattgaaaatattcaacagtcatgagcattcca

SEQ ID NO: 786448 - DNA, 33 bp, Homo sapien
aattgaaaatattcaagagtcatgagcattcca

SEQ ID NO: 786449 - DNA, 33 bp, Homo sapien
agcctacatttattgacggctctttatgctctt

SEQ ID NO: 786450 - DNA, 33 bp, Homo sapien
agcctacatttattgatggctctttatgctctt

SEQ ID NO: 786451 - DNA, 33 bp, Homo sapien
ttgctgtctcaaagcaataatgctctattcaaa

SEQ ID NO: 786452 - DNA, 33 bp, Homo sapien
ttgctgtctcaaagcagtaatgctctattcaaa

SEQ ID NO: 786453 - DNA, 33 bp, Homo sapien
agctatacctcattcaatcaaggttatcctagg

SEQ ID NO: 786454 - DNA, 33 bp, Homo sapien
agctatacctcattcagtcaaggttatcctagg

SEQ ID NO: 786455 - DNA, 33 bp, Homo sapien
tatgcttctggttatgcaacagttgactctcaa

SEQ ID NO: 786456 - DNA, 33 bp, Homo sapien
tatgcttctggttatgtaacagttgactctcaa

SEQ ID NO: 786457 - DNA, 33 bp, Homo sapien
gctattagagtgacaactggtgatcgcatattt

SEQ ID NO: 786458 - DNA, 33 bp, Homo sapien
gctattagagtgacaattggtgatcgcatattt

SEQ ID NO: 786459 - DNA, 33 bp, Homo sapien
tgttttcaccctctgaacttaatacactattct

SEQ ID NO: 786460 - DNA, 33 bp, Homo sapien
tgttttcaccctctgatcttaatacactattct

SEQ ID NO: 786461 - DNA, 33 bp, Homo sapien
tctggtaggagtgcaccagtcgtcttagttcct

SEQ ID NO: 786462 - DNA, 33 bp, Homo sapien
tctggtaggagtgcactagtcgtcttagttcct

SEQ ID NO: 786463 - DNA, 33 bp, Homo sapien
tactttgtcagtgcagaaaataatacaggaaag

SEQ ID NO: 786464 - DNA, 33 bp, Homo sapien
tactttgtcagtgcaggaaataatacaggaaag

SEQ ID NO: 786465 - DNA, 33 bp, Homo sapien
tgatagagaatggaaccgtgactaaagtaagat

SEQ ID NO: 786466 - DNA, 33 bp, Homo sapien
tgatagagaatggaactgtgactaaagtaagat

SEQ ID NO: 786467 - DNA, 33 bp, Homo sapien
attgcaattgataacacctataatttacacaca

SEQ ID NO: 786468 - DNA, 33 bp, Homo sapien
attgcaattgataacatctataatttacacaca

SEQ ID NO: 786469 - DNA, 33 bp, Homo sapien
atagaaaagcaagaaaattagaaccagacattt

SEQ ID NO: 786470 - DNA, 33 bp, Homo sapien
atagaaaagcaagaaatttagaaccagacattt

SEQ ID NO: 786471 - DNA, 33 bp, Homo sapien
gttgggctggtcttaacgtgcggtactgtggaa

SEQ ID NO: 786472 - DNA, 33 bp, Homo sapien
gttgggctggtcttaatgtgcggtactgtggaa

SEQ ID NO: 786473 - DNA, 33 bp, Homo sapien
gattgcgttttagacacgtggcttgtggggatg

SEQ ID NO: 786474 - DNA, 33 bp, Homo sapien
gattgcgttttagacatgtggcttgtggggatg

SEQ ID NO: 786475 - DNA, 33 bp, Homo sapien
tatgttctttatgacaatctaactaatgcctga

SEQ ID NO: 786476 - DNA, 33 bp, Homo sapien
tatgttctttatgacagtctaactaatgcctga

SEQ ID NO: 786477 - DNA, 33 bp, Homo sapien
cagcaagacgaactgaactgcaaaagagctgag

SEQ ID NO: 786478 - DNA, 33 bp, Homo sapien
cagcaagacgaactgagctgcaaaagagctgag

SEQ ID NO: 786479 - DNA, 33 bp, Homo sapien
gattccaagtgtgttaccaaaaaatttgtatca

SEQ ID NO: 786480 - DNA, 33 bp, Homo sapien
gattccaagtgtgttatcaaaaaatttgtatca

SEQ ID NO: 786481 - DNA, 33 bp, Homo sapien
aggtacagagtatgaagaaggtctcagtttctt

SEQ ID NO: 786482 - DNA, 33 bp, Homo sapien
aggtacagagtatgaataaggtctcagtttctt

SEQ ID NO: 786483 - DNA, 33 bp, Homo sapien
tatatgcaaatcatgaagaaaattttgtcaaaa

SEQ ID NO: 786484 - DNA, 33 bp, Homo sapien
tatatgcaaatcatgaggaaaattttgtcaaaa

SEQ ID NO: 786485 - DNA, 33 bp, Homo sapien
gttttccagactctagaacagtaatgcttaaat

SEQ ID NO: 786486 - DNA, 33 bp, Homo sapien
gttttccagactctaggacagtaatgcttaaat

SEQ ID NO: 786487 - DNA, 33 bp, Homo sapien
tcccccattgtaagacaagaaggctggaggaag

SEQ ID NO: 786488 - DNA, 33 bp, Homo sapien
tcccccattgtaagacgagaaggctggaggaag

SEQ ID NO: 786489 - DNA, 33 bp, Homo sapien
ggaatattgacaagaccagcaattgagacagtg

SEQ ID NO: 786490 - DNA, 33 bp, Homo sapien
ggaatattgacaagactagcaattgagacagtg

SEQ ID NO: 786491 - DNA, 33 bp, Homo sapien
gctgttctgtgtaaataagcagaaaactcagga

SEQ ID NO: 786492 - DNA, 33 bp, Homo sapien
gctgttctgtgtaaatgagcagaaaactcagga

SEQ ID NO: 786493 - DNA, 33 bp, Homo sapien
taagatgggagattcaaaattgttagttttagg

SEQ ID NO: 786494 - DNA, 33 bp, Homo sapien
taagatgggagattcagaattgttagttttagg

SEQ ID NO: 786495 - DNA, 33 bp, Homo sapien
ccctgtgataggcagaaaataaagagatcgaca

SEQ ID NO: 786496 - DNA, 33 bp, Homo sapien
ccctgtgataggcagagaataaagagatcgaca

SEQ ID NO: 786497 - DNA, 33 bp, Homo sapien
gatagttgggtgaacaaaaggaaccaagaagag

SEQ ID NO: 786498 - DNA, 33 bp, Homo sapien
gatagttgggtgaacagaaggaaccaagaagag

SEQ ID NO: 786499 - DNA, 33 bp, Homo sapien
tgtgtcttacgaatgacgactcctcttatataa

SEQ ID NO: 786500 - DNA, 33 bp, Homo sapien
tgtgtcttacgaatgatgactcctcttatataa

SEQ ID NO: 786501 - DNA, 33 bp, Homo sapien
taaacctactgaaaaaattgtcaaactctaggt

SEQ ID NO: 786502 - DNA, 33 bp, Homo sapien
taaacctactgaaaaatttgtcaaactctaggt

SEQ ID NO: 786503 - DNA, 33 bp, Homo sapien
gtcaataaatttagcaaaagcattgatgccttc

SEQ ID NO: 786504 - DNA, 33 bp, Homo sapien
gtcaataaatttagcacaagcattgatgccttc

SEQ ID NO: 786505 - DNA, 33 bp, Homo sapien
ttcactattatgaggacagcatgggaaagacac

SEQ ID NO: 786506 - DNA, 33 bp, Homo sapien
ttcactattatgaggatagcatgggaaagacac

SEQ ID NO: 786507 - DNA, 33 bp, Homo sapien
tactgtgaaaagcaggaactagtgtggcacagt

SEQ ID NO: 786508 - DNA, 33 bp, Homo sapien
tactgtgaaaagcagggactagtgtggcacagt

SEQ ID NO: 786509 - DNA, 33 bp, Homo sapien
tccaatcaggcttggaaggtatgctcattctgt

SEQ ID NO: 786510 - DNA, 33 bp, Homo sapien
tccaatcaggcttggatggtatgctcattctgt

SEQ ID NO: 786511 - DNA, 33 bp, Homo sapien
ttgcccaggcaatggaactaggaagtaatctta

SEQ ID NO: 786512 - DNA, 33 bp, Homo sapien
ttgcccaggcaatggagctaggaagtaatctta

SEQ ID NO: 786513 - DNA, 33 bp, Homo sapien
acgaagcagcccatcactcatttgttacacaaa

SEQ ID NO: 786514 - DNA, 33 bp, Homo sapien
acgaagcagcccatcattcatttgttacacaaa

SEQ ID NO: 786515 - DNA, 33 bp, Homo sapien
aacacagaagtctctaaaggaagagttttcaaa

SEQ ID NO: 786516 - DNA, 33 bp, Homo sapien
aacacagaagtctctagaggaagagttttcaaa

SEQ ID NO: 786517 - DNA, 33 bp, Homo sapien
gaattaaatgaaaccaaaaaggttcttcacatc

SEQ ID NO: 786518 - DNA, 33 bp, Homo sapien
gaattaaatgaaaccagaaaggttcttcacatc

SEQ ID NO: 786519 - DNA, 33 bp, Homo sapien
agcaaaggtaaaaccagcacattatctgatttc

SEQ ID NO: 786520 - DNA, 33 bp, Homo sapien
agcaaaggtaaaaccatcacattatctgatttc

SEQ ID NO: 786521 - DNA, 33 bp, Homo sapien
tcatgtgtaataactgcaaataaaggcaagtat

SEQ ID NO: 786522 - DNA, 33 bp, Homo sapien
tcatgtgtaataactgtaaataaaggcaagtat

SEQ ID NO: 786523 - DNA, 33 bp, Homo sapien
cctagatatataaagccattggcataaagctat

SEQ ID NO: 786524 - DNA, 33 bp, Homo sapien
cctagatatataaagctattggcataaagctat

SEQ ID NO: 786525 - DNA, 33 bp, Homo sapien
gttgcttcacagccaagtacactttcactgcac

SEQ ID NO: 786526 - DNA, 33 bp, Homo sapien
gttgcttcacagccaattacactttcactgcac

SEQ ID NO: 786527 - DNA, 33 bp, Homo sapien
cttctctccaaagatacgctcagagtttgctag

SEQ ID NO: 786528 - DNA, 33 bp, Homo sapien
cttctctccaaagatatgctcagagtttgctag

SEQ ID NO: 786529 - DNA, 33 bp, Homo sapien
ggagcctaatgttaaccccaaaatcagggggaa

SEQ ID NO: 786530 - DNA, 33 bp, Homo sapien
ggagcctaatgttaactccaaaatcagggggaa

SEQ ID NO: 786531 - DNA, 33 bp, Homo sapien
gtagcattggcataagcagctgaaaatgcattg

SEQ ID NO: 786532 - DNA, 33 bp, Homo sapien
gtagcattggcataagtagctgaaaatgcattg

SEQ ID NO: 786533 - DNA, 33 bp, Homo sapien
aatatattatcatagcaaaagcagaggattaag

SEQ ID NO: 786534 - DNA, 33 bp, Homo sapien
aatatattatcatagcgaaagcagaggattaag

SEQ ID NO: 786535 - DNA, 33 bp, Homo sapien
ttggattagagaattgcaggtaaaacccctcac

SEQ ID NO: 786536 - DNA, 33 bp, Homo sapien
ttggattagagaattgtaggtaaaacccctcac

SEQ ID NO: 786537 - DNA, 33 bp, Homo sapien
gagtcttgttctaatacatacaccttggctggc

SEQ ID NO: 786538 - DNA, 33 bp, Homo sapien
gagtcttgttctaatatatacaccttggctggc

SEQ ID NO: 786539 - DNA, 33 bp, Homo sapien
atattctcttgctaaactgacctctgtatcatt

SEQ ID NO: 786540 - DNA, 33 bp, Homo sapien
atattctcttgctaaattgacctctgtatcatt

SEQ ID NO: 786541 - DNA, 33 bp, Homo sapien
aaacaaacaatatacaatgaagctccaatatgt

SEQ ID NO: 786542 - DNA, 33 bp, Homo sapien
aaacaaacaatatacagtgaagctccaatatgt

SEQ ID NO: 786543 - DNA, 33 bp, Homo sapien
aaagataacttgtctcacttctttctttaaaat

SEQ ID NO: 786544 - DNA, 33 bp, Homo sapien
aaagataacttgtctcccttctttctttaaaat

SEQ ID NO: 786545 - DNA, 33 bp, Homo sapien
cttctaatgtccaaaaacggaaatctgatccat

SEQ ID NO: 786546 - DNA, 33 bp, Homo sapien
cttctaatgtccaaaaccggaaatctgatccat

SEQ ID NO: 786547 - DNA, 33 bp, Homo sapien
agttatctgatgtctaatagaaaagcaagtcct

SEQ ID NO: 786548 - DNA, 33 bp, Homo sapien
agttatctgatgtctagtagaaaagcaagtcct

SEQ ID NO: 786549 - DNA, 33 bp, Homo sapien
ggcaaacataggccacaagaaatggaagcaaag

SEQ ID NO: 786550 - DNA, 33 bp, Homo sapien
ggcaaacataggccacgagaaatggaagcaaag

SEQ ID NO: 786551 - DNA, 33 bp, Homo sapien
cacgagtgccattgcaaattactttgaatacaa

SEQ ID NO: 786552 - DNA, 33 bp, Homo sapien
cacgagtgccattgcatattactttgaatacaa

SEQ ID NO: 786553 - DNA, 33 bp, Homo sapien
aaaatcctgtccactgaaactgacataccagtt

SEQ ID NO: 786554 - DNA, 33 bp, Homo sapien
aaaatcctgtccactggaactgacataccagtt

SEQ ID NO: 786555 - DNA, 33 bp, Homo sapien
ggtgtttcaggcaatccatgtagcaacaatgaa

SEQ ID NO: 786556 - DNA, 33 bp, Homo sapien
ggtgtttcaggcaatctatgtagcaacaatgaa

SEQ ID NO: 786557 - DNA, 33 bp, Homo sapien
tgagcaaccacaggataaaaaggctcaaagacc

SEQ ID NO: 786558 - DNA, 33 bp, Homo sapien
tgagcaaccacaggatgaaaaggctcaaagacc

SEQ ID NO: 786559 - DNA, 33 bp, Homo sapien
aacctcactgtgcttacatttgtgaatgctcac

SEQ ID NO: 786560 - DNA, 33 bp, Homo sapien
aacctcactgtgcttatatttgtgaatgctcac

SEQ ID NO: 786561 - DNA, 33 bp, Homo sapien
aattccataaaattataacagatctgaaaaatt

SEQ ID NO: 786562 - DNA, 33 bp, Homo sapien
aattccataaaattatgacagatctgaaaaatt

SEQ ID NO: 786563 - DNA, 33 bp, Homo sapien
tcctgcttcagagctccatgctttaagaaaaac

SEQ ID NO: 786564 - DNA, 33 bp, Homo sapien
tcctgcttcagagctctatgctttaagaaaaac

SEQ ID NO: 786565 - DNA, 33 bp, Homo sapien
ttttcaaataagtccaagtttcatggaggcttt

SEQ ID NO: 786566 - DNA, 33 bp, Homo sapien
ttttcaaataagtccacgtttcatggaggcttt

SEQ ID NO: 786567 - DNA, 33 bp, Homo sapien
tactgacaattgtgtacccttcctatatatcaa

SEQ ID NO: 786568 - DNA, 33 bp, Homo sapien
tactgacaattgtgtatccttcctatatatcaa

SEQ ID NO: 786569 - DNA, 33 bp, Homo sapien
cattctagatattgcactaaaaaattcactaaa

SEQ ID NO: 786570 - DNA, 33 bp, Homo sapien
cattctagatattgcagtaaaaaattcactaaa

SEQ ID NO: 786571 - DNA, 33 bp, Homo sapien
cataatccactaaagaaattgcaagagcagaaa

SEQ ID NO: 786572 - DNA, 33 bp, Homo sapien
cataatccactaaagagattgcaagagcagaaa

SEQ ID NO: 786573 - DNA, 33 bp, Homo sapien
aacagtgaactataaactagcatcaaatattgc

SEQ ID NO: 786574 - DNA, 33 bp, Homo sapien
aacagtgaactataaagtagcatcaaatattgc

SEQ ID NO: 786575 - DNA, 33 bp, Homo sapien
attttgagacgttcaacatttcagtgaaggaag

SEQ ID NO: 786576 - DNA, 33 bp, Homo sapien
attttgagacgttcaagatttcagtgaaggaag

SEQ ID NO: 786577 - DNA, 33 bp, Homo sapien
tcatgattaaacttgaaggaataggagctgctt

SEQ ID NO: 786578 - DNA, 33 bp, Homo sapien
tcatgattaaacttgagggaataggagctgctt

SEQ ID NO: 786579 - DNA, 33 bp, Homo sapien
ctacactgtagtctaccaaatatgcagtattat

SEQ ID NO: 786580 - DNA, 33 bp, Homo sapien
ctacactgtagtctactaaatatgcagtattat

SEQ ID NO: 786581 - DNA, 33 bp, Homo sapien
attcatcccatggctagccaaaaatggtttgag

SEQ ID NO: 786582 - DNA, 33 bp, Homo sapien
attcatcccatggctatccaaaaatggtttgag

SEQ ID NO: 786583 - DNA, 33 bp, Homo sapien
gtatgataactgtaatcaacgagaaattcactg

SEQ ID NO: 786584 - DNA, 33 bp, Homo sapien
gtatgataactgtaatgaacgagaaattcactg

SEQ ID NO: 786585 - DNA, 33 bp, Homo sapien
tttttcctatttgaaaagccaaccacttaacac

SEQ ID NO: 786586 - DNA, 33 bp, Homo sapien
tttttcctatttgaaaggccaaccacttaacac

SEQ ID NO: 786587 - DNA, 33 bp, Homo sapien
cctgtgaccctaagtaaccaacaatgagatttt

SEQ ID NO: 786588 - DNA, 33 bp, Homo sapien
cctgtgaccctaagtagccaacaatgagatttt

SEQ ID NO: 786589 - DNA, 33 bp, Homo sapien
gcatatgttttcttaaatggtgagaaattggct

SEQ ID NO: 786590 - DNA, 33 bp, Homo sapien
gcatatgttttcttaagtggtgagaaattggct

SEQ ID NO: 786591 - DNA, 33 bp, Homo sapien
atcaaaaagcactgaaatgtatttacccattat

SEQ ID NO: 786592 - DNA, 33 bp, Homo sapien
atcaaaaagcactgaattgtatttacccattat

SEQ ID NO: 786593 - DNA, 33 bp, Homo sapien
ctgaatatgatattgccaataagacaactcatg

SEQ ID NO: 786594 - DNA, 33 bp, Homo sapien
ctgaatatgatattgctaataagacaactcatg

SEQ ID NO: 786595 - DNA, 33 bp, Homo sapien
ggaaatgggcaagagaaaatctgacagactgag

SEQ ID NO: 786596 - DNA, 33 bp, Homo sapien
ggaaatgggcaagagacaatctgacagactgag

SEQ ID NO: 786597 - DNA, 33 bp, Homo sapien
tctaggtgctgatcataataaagtttctaaact

SEQ ID NO: 786598 - DNA, 33 bp, Homo sapien
tctaggtgctgatcatcataaagtttctaaact

SEQ ID NO: 786599 - DNA, 33 bp, Homo sapien
gtcttcctctaggtaaatgaggcagtgaacaca

SEQ ID NO: 786600 - DNA, 33 bp, Homo sapien
gtcttcctctaggtaagtgaggcagtgaacaca

SEQ ID NO: 786601 - DNA, 33 bp, Homo sapien
gaacagtttctagaggcattaggaatatgttaa

SEQ ID NO: 786602 - DNA, 33 bp, Homo sapien
gaacagtttctagaggtattaggaatatgttaa

SEQ ID NO: 786603 - DNA, 33 bp, Homo sapien
tttctcttgctaaaggacatggattttttaaac

SEQ ID NO: 786604 - DNA, 33 bp, Homo sapien
tttctcttgctaaaggccatggattttttaaac

SEQ ID NO: 786605 - DNA, 33 bp, Homo sapien
tgtaagtcttgaatccactaaactgaggtaaaa

SEQ ID NO: 786606 - DNA, 33 bp, Homo sapien
tgtaagtcttgaatccgctaaactgaggtaaaa

SEQ ID NO: 786607 - DNA, 33 bp, Homo sapien
ttcacttgtgtacccccagaacttagaacaatg

SEQ ID NO: 786608 - DNA, 33 bp, Homo sapien
ttcacttgtgtacccctagaacttagaacaatg

SEQ ID NO: 786609 - DNA, 33 bp, Homo sapien
gtggatactatgatgaagtccagataaatgatg

SEQ ID NO: 786610 - DNA, 33 bp, Homo sapien
gtggatactatgatgaggtccagataaatgatg

SEQ ID NO: 786611 - DNA, 33 bp, Homo sapien
ggcttttgagctcacagattgtagactgctgtg

SEQ ID NO: 786612 - DNA, 33 bp, Homo sapien
ggcttttgagctcacatattgtagactgctgtg

SEQ ID NO: 786613 - DNA, 33 bp, Homo sapien
agctactcaggagactaaggcaacaggattgct

SEQ ID NO: 786614 - DNA, 33 bp, Homo sapien
agctactcaggagactgaggcaacaggattgct

SEQ ID NO: 786615 - DNA, 33 bp, Homo sapien
tgtagtaaagagaaaagatttcgtccattgcca

SEQ ID NO: 786616 - DNA, 33 bp, Homo sapien
tgtagtaaagagaaaatatttcgtccattgcca

SEQ ID NO: 786617 - DNA, 33 bp, Homo sapien
aaagctaaacacaaaacagaataataatgcagg

SEQ ID NO: 786618 - DNA, 33 bp, Homo sapien
aaagctaaacacaaaagagaataataatgcagg

SEQ ID NO: 786619 - DNA, 33 bp, Homo sapien
gtgtgcatttgtcttcaaaaattttctcccatt

SEQ ID NO: 786620 - DNA, 33 bp, Homo sapien
gtgtgcatttgtcttccaaaattttctcccatt

SEQ ID NO: 786621 - DNA, 33 bp, Homo sapien
attctctctagtatagacacctgaagaacatct

SEQ ID NO: 786622 - DNA, 33 bp, Homo sapien
attctctctagtataggcacctgaagaacatct

SEQ ID NO: 786623 - DNA, 33 bp, Homo sapien
tagcaaaccaaaattacgtaagtggaattatat

SEQ ID NO: 786624 - DNA, 33 bp, Homo sapien
tagcaaaccaaaattatgtaagtggaattatat

SEQ ID NO: 786625 - DNA, 33 bp, Homo sapien
actggtttttaaatgccgattttatcctgaaac

SEQ ID NO: 786626 - DNA, 33 bp, Homo sapien
actggtttttaaatgctgattttatcctgaaac

SEQ ID NO: 786627 - DNA, 33 bp, Homo sapien
aatctactcagtgaaaccataaaacatataaac

SEQ ID NO: 786628 - DNA, 33 bp, Homo sapien
aatctactcagtgaaatcataaaacatataaac

SEQ ID NO: 786629 - DNA, 33 bp, Homo sapien
ttgacctcactttcctcactcattcagaagtgt

SEQ ID NO: 786630 - DNA, 33 bp, Homo sapien
ttgacctcactttccttactcattcagaagtgt

SEQ ID NO: 786631 - DNA, 33 bp, Homo sapien
agaggccatataaaaacagtgaaagcttccttt

SEQ ID NO: 786632 - DNA, 33 bp, Homo sapien
agaggccatataaaaagagtgaaagcttccttt

SEQ ID NO: 786633 - DNA, 33 bp, Homo sapien
aagggatcaaaattccagagagagcagaagctt

SEQ ID NO: 786634 - DNA, 33 bp, Homo sapien
aagggatcaaaattccggagagagcagaagctt

SEQ ID NO: 786635 - DNA, 33 bp, Homo sapien
gccatagcaaagttgaacgaaacagcctgagag

SEQ ID NO: 786636 - DNA, 33 bp, Homo sapien
gccatagcaaagttgagcgaaacagcctgagag

SEQ ID NO: 786637 - DNA, 33 bp, Homo sapien
caggattcctttacccagcacactctaaactct

SEQ ID NO: 786638 - DNA, 33 bp, Homo sapien
caggattcctttacccggcacactctaaactct

SEQ ID NO: 786639 - DNA, 33 bp, Homo sapien
aagagcaataactgaaatcaacaataatcaatc

SEQ ID NO: 786640 - DNA, 33 bp, Homo sapien
aagagcaataactgaattcaacaataatcaatc

SEQ ID NO: 786641 - DNA, 33 bp, Homo sapien
aatcaaatcagcagaacgtgaggagtaaattca

SEQ ID NO: 786642 - DNA, 33 bp, Homo sapien
aatcaaatcagcagaatgtgaggagtaaattca

SEQ ID NO: 786643 - DNA, 33 bp, Homo sapien
tcacactatgtaaaatcagatagcactgagaat

SEQ ID NO: 786644 - DNA, 33 bp, Homo sapien
tcacactatgtaaaattagatagcactgagaat

SEQ ID NO: 786645 - DNA, 33 bp, Homo sapien
gtcttgccttcaactccctaccatcacaaacta

SEQ ID NO: 786646 - DNA, 33 bp, Homo sapien
gtcttgccttcaactctctaccatcacaaacta

SEQ ID NO: 786647 - DNA, 33 bp, Homo sapien
catgtactttaaggtccagtgatagagtgtctc

SEQ ID NO: 786648 - DNA, 33 bp, Homo sapien
catgtactttaaggtctagtgatagagtgtctc

SEQ ID NO: 786649 - DNA, 33 bp, Homo sapien
tcatattttcattttacgacccaacctcagaag

SEQ ID NO: 786650 - DNA, 33 bp, Homo sapien
tcatattttcattttatgacccaacctcagaag

SEQ ID NO: 786651 - DNA, 33 bp, Homo sapien
taaaatattttacttgaacaatccaactaagtt

SEQ ID NO: 786652 - DNA, 33 bp, Homo sapien
taaaatattttacttgcacaatccaactaagtt

SEQ ID NO: 786653 - DNA, 33 bp, Homo sapien
attggtcatactgttcaactgacttgagaacct

SEQ ID NO: 786654 - DNA, 33 bp, Homo sapien
attggtcatactgttcgactgacttgagaacct

SEQ ID NO: 786655 - DNA, 33 bp, Homo sapien
agagtacaggggaataaattgaggctgtcaata

SEQ ID NO: 786656 - DNA, 33 bp, Homo sapien
agagtacaggggaatacattgaggctgtcaata

SEQ ID NO: 786657 - DNA, 33 bp, Homo sapien
tgttctcagaaaaatgccatcatacaatttggg

SEQ ID NO: 786658 - DNA, 33 bp, Homo sapien
tgttctcagaaaaatgtcatcatacaatttggg

SEQ ID NO: 786659 - DNA, 33 bp, Homo sapien
acctttggcatttgaacgacagttgtagagact

SEQ ID NO: 786660 - DNA, 33 bp, Homo sapien
acctttggcatttgaatgacagttgtagagact

SEQ ID NO: 786661 - DNA, 33 bp, Homo sapien
gcacagaaagaagaaaaagcagtcataaaggaa

SEQ ID NO: 786662 - DNA, 33 bp, Homo sapien
gcacagaaagaagaaagagcagtcataaaggaa

SEQ ID NO: 786663 - DNA, 33 bp, Homo sapien
tcttcaacttcaatccactttaccattttacac

SEQ ID NO: 786664 - DNA, 33 bp, Homo sapien
tcttcaacttcaatccgctttaccattttacac

SEQ ID NO: 786665 - DNA, 33 bp, Homo sapien
gagggaacagcttatacggcagaaaagaacatt

SEQ ID NO: 786666 - DNA, 33 bp, Homo sapien
gagggaacagcttatatggcagaaaagaacatt

SEQ ID NO: 786667 - DNA, 33 bp, Homo sapien
gttaaacttgcggtaaactacatgcacttattt

SEQ ID NO: 786668 - DNA, 33 bp, Homo sapien
gttaaacttgcggtaagctacatgcacttattt

SEQ ID NO: 786669 - DNA, 33 bp, Homo sapien
agtctcaaagagacctcaacagtttagaacccc

SEQ ID NO: 786670 - DNA, 33 bp, Homo sapien
agtctcaaagagacctgaacagtttagaacccc

SEQ ID NO: 786671 - DNA, 33 bp, Homo sapien
acagcaaataggtaaaaagcaattcccaagaga

SEQ ID NO: 786672 - DNA, 33 bp, Homo sapien
acagcaaataggtaaagagcaattcccaagaga

SEQ ID NO: 786673 - DNA, 33 bp, Homo sapien
tgttctctttagagaacccttgagaagctactg

SEQ ID NO: 786674 - DNA, 33 bp, Homo sapien
tgttctctttagagaatccttgagaagctactg

SEQ ID NO: 786675 - DNA, 33 bp, Homo sapien
aaaataagaatgttcaaacaaaaagtagggtaa

SEQ ID NO: 786676 - DNA, 33 bp, Homo sapien
aaaataagaatgttcagacaaaaagtagggtaa

SEQ ID NO: 786677 - DNA, 33 bp, Homo sapien
ttaacaacacatttagaatagcttttcacataa

SEQ ID NO: 786678 - DNA, 33 bp, Homo sapien
ttaacaacacatttaggatagcttttcacataa

SEQ ID NO: 786679 - DNA, 33 bp, Homo sapien
catgaagagtcctacaatgaaaactctctctcc

SEQ ID NO: 786680 - DNA, 33 bp, Homo sapien
catgaagagtcctacagtgaaaactctctctcc

SEQ ID NO: 786681 - DNA, 33 bp, Homo sapien
ccatattttgggataacatgccttgaattccat

SEQ ID NO: 786682 - DNA, 33 bp, Homo sapien
ccatattttgggataagatgccttgaattccat

SEQ ID NO: 786683 - DNA, 33 bp, Homo sapien
tcaaataaacaatcaacgagctaacttcctcac

SEQ ID NO: 786684 - DNA, 33 bp, Homo sapien
tcaaataaacaatcaatgagctaacttcctcac

SEQ ID NO: 786685 - DNA, 33 bp, Homo sapien
ctcaagagagtgaggcactttgttttttcagat

SEQ ID NO: 786686 - DNA, 33 bp, Homo sapien
ctcaagagagtgaggcgctttgttttttcagat

SEQ ID NO: 786687 - DNA, 33 bp, Homo sapien
aggttccaaccaaatgccactcttttagatttg

SEQ ID NO: 786688 - DNA, 33 bp, Homo sapien
aggttccaaccaaatggcactcttttagatttg

SEQ ID NO: 786689 - DNA, 33 bp, Homo sapien
acagcttccattttacccatcatccccattttg

SEQ ID NO: 786690 - DNA, 33 bp, Homo sapien
acagcttccattttactcatcatccccattttg

SEQ ID NO: 786691 - DNA, 33 bp, Homo sapien
ttctatttctattaaacaacagtgatccagaaa

SEQ ID NO: 786692 - DNA, 33 bp, Homo sapien
ttctatttctattaaataacagtgatccagaaa

SEQ ID NO: 786693 - DNA, 33 bp, Homo sapien
taaactgcacccggtacgtcaccttgtagtaag

SEQ ID NO: 786694 - DNA, 33 bp, Homo sapien
taaactgcacccggtatgtcaccttgtagtaag

SEQ ID NO: 786695 - DNA, 33 bp, Homo sapien
acttatattcagtaaaattgtatgccttactac

SEQ ID NO: 786696 - DNA, 33 bp, Homo sapien
acttatattcagtaaatttgtatgccttactac

SEQ ID NO: 786697 - DNA, 33 bp, Homo sapien
tatctttttgatgatacgtggaggtagacttgc

SEQ ID NO: 786698 - DNA, 33 bp, Homo sapien
tatctttttgatgatatgtggaggtagacttgc

SEQ ID NO: 786699 - DNA, 33 bp, Homo sapien
aattagaaactaaataacagaaagcaagcaact

SEQ ID NO: 786700 - DNA, 33 bp, Homo sapien
aattagaaactaaatatcagaaagcaagcaact

SEQ ID NO: 786701 - DNA, 33 bp, Homo sapien
tcatcaattctaccaaataaatatactgactca

SEQ ID NO: 786702 - DNA, 33 bp, Homo sapien
tcatcaattctaccaattaaatatactgactca

SEQ ID NO: 786703 - DNA, 33 bp, Homo sapien
cctcttgtgaatgatacgggccaatggcaccct

SEQ ID NO: 786704 - DNA, 33 bp, Homo sapien
cctcttgtgaatgatatgggccaatggcaccct

SEQ ID NO: 786705 - DNA, 33 bp, Homo sapien
tgctgcccataattcaatatcatcaagctttgt

SEQ ID NO: 786706 - DNA, 33 bp, Homo sapien
tgctgcccataattcagtatcatcaagctttgt

SEQ ID NO: 786707 - DNA, 33 bp, Homo sapien
gtgccagttattttcactcctcctgcctttgga

SEQ ID NO: 786708 - DNA, 33 bp, Homo sapien
gtgccagttattttcattcctcctgcctttgga

SEQ ID NO: 786709 - DNA, 33 bp, Homo sapien
tcttcaggtttgtccaactaagatcatatcatc

SEQ ID NO: 786710 - DNA, 33 bp, Homo sapien
tcttcaggtttgtccagctaagatcatatcatc

SEQ ID NO: 786711 - DNA, 33 bp, Homo sapien
tgttttagcattctggaaatctgacttgtgagt

SEQ ID NO: 786712 - DNA, 33 bp, Homo sapien
tgttttagcattctgggaatctgacttgtgagt

SEQ ID NO: 786713 - DNA, 33 bp, Homo sapien
cccgagccaaattctgcatcattccgctggtca

SEQ ID NO: 786714 - DNA, 33 bp, Homo sapien
cccgagccaaattctgtatcattccgctggtca

SEQ ID NO: 786715 - DNA, 33 bp, Homo sapien
ctgcattatacgcatccaatggctcgagggata

SEQ ID NO: 786716 - DNA, 33 bp, Homo sapien
ctgcattatacgcatctaatggctcgagggata

SEQ ID NO: 786717 - DNA, 33 bp, Homo sapien
catagtagaaaaaggacgttttaggacaggaga

SEQ ID NO: 786718 - DNA, 33 bp, Homo sapien
catagtagaaaaaggatgttttaggacaggaga

SEQ ID NO: 786719 - DNA, 33 bp, Homo sapien
cacgtttgtatggtccagaaaactgagagcagc

SEQ ID NO: 786720 - DNA, 33 bp, Homo sapien
cacgtttgtatggtccggaaaactgagagcagc

SEQ ID NO: 786721 - DNA, 33 bp, Homo sapien
ctgtttacagtcagtacgaagcttgttaatctg

SEQ ID NO: 786722 - DNA, 33 bp, Homo sapien
ctgtttacagtcagtatgaagcttgttaatctg

SEQ ID NO: 786723 - DNA, 33 bp, Homo sapien
tccttgacatctttaaatagtaagccagcaggt

SEQ ID NO: 786724 - DNA, 33 bp, Homo sapien
tccttgacatctttaactagtaagccagcaggt

SEQ ID NO: 786725 - DNA, 33 bp, Homo sapien
gttgctgttgaaattacacagaagagatagcag

SEQ ID NO: 786726 - DNA, 33 bp, Homo sapien
gttgctgttgaaattatacagaagagatagcag

SEQ ID NO: 786727 - DNA, 33 bp, Homo sapien
agagagataacaccatcacttaaattcacacca

SEQ ID NO: 786728 - DNA, 33 bp, Homo sapien
agagagataacaccatgacttaaattcacacca

SEQ ID NO: 786729 - DNA, 33 bp, Homo sapien
aattaaagaatgactgaaagattggaagatcct

SEQ ID NO: 786730 - DNA, 33 bp, Homo sapien
aattaaagaatgactggaagattggaagatcct

SEQ ID NO: 786731 - DNA, 33 bp, Homo sapien
ttcttttctctgctaccctggccaccttattgt

SEQ ID NO: 786732 - DNA, 33 bp, Homo sapien
ttcttttctctgctactctggccaccttattgt

SEQ ID NO: 786733 - DNA, 33 bp, Homo sapien
cagacagaaggtgataatacaggtgacatgagc

SEQ ID NO: 786734 - DNA, 33 bp, Homo sapien
cagacagaaggtgatagtacaggtgacatgagc

SEQ ID NO: 786735 - DNA, 33 bp, Homo sapien
gctatgtatcatttggaagccattctgagtcag

SEQ ID NO: 786736 - DNA, 33 bp, Homo sapien
gctatgtatcatttggcagccattctgagtcag

SEQ ID NO: 786737 - DNA, 33 bp, Homo sapien
taaatgcccctctcctaacctttctctagcaca

SEQ ID NO: 786738 - DNA, 33 bp, Homo sapien
taaatgcccctctccttacctttctctagcaca

SEQ ID NO: 786739 - DNA, 33 bp, Homo sapien
agtaaatgcttatagaaattgaggtatcagtgg

SEQ ID NO: 786740 - DNA, 33 bp, Homo sapien
agtaaatgcttatagagattgaggtatcagtgg

SEQ ID NO: 786741 - DNA, 33 bp, Homo sapien
ctatggaaagtaaaacactacattctattggct

SEQ ID NO: 786742 - DNA, 33 bp, Homo sapien
ctatggaaagtaaaacgctacattctattggct

SEQ ID NO: 786743 - DNA, 33 bp, Homo sapien
ggcagtaactgattcacgaaaaagacagattca

SEQ ID NO: 786744 - DNA, 33 bp, Homo sapien
ggcagtaactgattcatgaaaaagacagattca

SEQ ID NO: 786745 - DNA, 33 bp, Homo sapien
ttctgttccttcttaactacctgtccaaatccc

SEQ ID NO: 786746 - DNA, 33 bp, Homo sapien
ttctgttccttcttaattacctgtccaaatccc

SEQ ID NO: 786747 - DNA, 33 bp, Homo sapien
tcatcttgacaggagaaatcatggggacggtgt

SEQ ID NO: 786748 - DNA, 33 bp, Homo sapien
tcatcttgacaggagagatcatggggacggtgt

SEQ ID NO: 786749 - DNA, 33 bp, Homo sapien
agcatcatttcactaccattaggggtgccagtc

SEQ ID NO: 786750 - DNA, 33 bp, Homo sapien
agcatcatttcactactattaggggtgccagtc

SEQ ID NO: 786751 - DNA, 33 bp, Homo sapien
tatgtgtatcttgctcaataacttccattttgc

SEQ ID NO: 786752 - DNA, 33 bp, Homo sapien
tatgtgtatcttgctctataacttccattttgc

SEQ ID NO: 786753 - DNA, 33 bp, Homo sapien
tctggggtggtaaagaaatttcaatcaagtgtc

SEQ ID NO: 786754 - DNA, 33 bp, Homo sapien
tctggggtggtaaagatatttcaatcaagtgtc

SEQ ID NO: 786755 - DNA, 33 bp, Homo sapien
gcttttatatactaaacctcaaactagaactat

SEQ ID NO: 786756 - DNA, 33 bp, Homo sapien
gcttttatatactaaatctcaaactagaactat

SEQ ID NO: 786757 - DNA, 33 bp, Homo sapien
acacataccatcatagacaacaataaatagtaa

SEQ ID NO: 786758 - DNA, 33 bp, Homo sapien
acacataccatcataggcaacaataaatagtaa

SEQ ID NO: 786759 - DNA, 33 bp, Homo sapien
atgcttgaattcttaaccggaatattgttttgt

SEQ ID NO: 786760 - DNA, 33 bp, Homo sapien
atgcttgaattcttaatcggaatattgttttgt

SEQ ID NO: 786761 - DNA, 33 bp, Homo sapien
agtgttctccatcctccgagaatcatttaggaa

SEQ ID NO: 786762 - DNA, 33 bp, Homo sapien
agtgttctccatcctctgagaatcatttaggaa

SEQ ID NO: 786763 - DNA, 33 bp, Homo sapien
ggagggctttccatgccaaatctcttgtgattc

SEQ ID NO: 786764 - DNA, 33 bp, Homo sapien
ggagggctttccatgctaaatctcttgtgattc

SEQ ID NO: 786765 - DNA, 33 bp, Homo sapien
tgaactttcaatggccaagccttttgagcatta

SEQ ID NO: 786766 - DNA, 33 bp, Homo sapien
tgaactttcaatggcctagccttttgagcatta

SEQ ID NO: 786767 - DNA, 33 bp, Homo sapien
ctctcccacatttaagacaaaaatatagtcacc

SEQ ID NO: 786768 - DNA, 33 bp, Homo sapien
ctctcccacatttaaggcaaaaatatagtcacc

SEQ ID NO: 786769 - DNA, 33 bp, Homo sapien
tcgcccgcgtattacactcggaggctggcaaaa

SEQ ID NO: 786770 - DNA, 33 bp, Homo sapien
tcgcccgcgtattacattcggaggctggcaaaa

SEQ ID NO: 786771 - DNA, 33 bp, Homo sapien
caccaatccctgtgtacaaagctatggacctta

SEQ ID NO: 786772 - DNA, 33 bp, Homo sapien
caccaatccctgtgtataaagctatggacctta

SEQ ID NO: 786773 - DNA, 33 bp, Homo sapien
caccttgatgaagtagaagcacatggcatttta

SEQ ID NO: 786774 - DNA, 33 bp, Homo sapien
caccttgatgaagtaggagcacatggcatttta

SEQ ID NO: 786775 - DNA, 33 bp, Homo sapien
gcataaatgaatgaaaaaagttagctgaggaat

SEQ ID NO: 786776 - DNA, 33 bp, Homo sapien
gcataaatgaatgaaacaagttagctgaggaat

SEQ ID NO: 786777 - DNA, 33 bp, Homo sapien
tcatttttatgctgtcaaaatcaacaacttcta

SEQ ID NO: 786778 - DNA, 33 bp, Homo sapien
tcatttttatgctgtcgaaatcaacaacttcta

SEQ ID NO: 786779 - DNA, 33 bp, Homo sapien
ttcaagaaaggagggaactggactcaaaaaata

SEQ ID NO: 786780 - DNA, 33 bp, Homo sapien
ttcaagaaaggagggagctggactcaaaaaata

SEQ ID NO: 786781 - DNA, 33 bp, Homo sapien
tccttgagtcacttgaagaagctctacttttaa

SEQ ID NO: 786782 - DNA, 33 bp, Homo sapien
tccttgagtcacttgatgaagctctacttttaa

SEQ ID NO: 786783 - DNA, 33 bp, Homo sapien
atagaaagcagacataaaacagtaaaagccatg

SEQ ID NO: 786784 - DNA, 33 bp, Homo sapien
atagaaagcagacatacaacagtaaaagccatg

SEQ ID NO: 786785 - DNA, 33 bp, Homo sapien
tgtacagacttcttaccctgtatcatacatggc

SEQ ID NO: 786786 - DNA, 33 bp, Homo sapien
tgtacagacttcttactctgtatcatacatggc

SEQ ID NO: 786787 - DNA, 33 bp, Homo sapien
ataggtaactattatccgacctcacagcaagaa

SEQ ID NO: 786788 - DNA, 33 bp, Homo sapien
ataggtaactattatctgacctcacagcaagaa

SEQ ID NO: 786789 - DNA, 33 bp, Homo sapien
ttttcattgagtatgaccttagctggtggcata

SEQ ID NO: 786790 - DNA, 33 bp, Homo sapien
ttttcattgagtatgatcttagctggtggcata

SEQ ID NO: 786791 - DNA, 33 bp, Homo sapien
gttccaagaattatgtcaagtactgaaataaaa

SEQ ID NO: 786792 - DNA, 33 bp, Homo sapien
gttccaagaattatgtgaagtactgaaataaaa

SEQ ID NO: 786793 - DNA, 33 bp, Homo sapien
cattctaatagttccaaaatttcaaacatttcc

SEQ ID NO: 786794 - DNA, 33 bp, Homo sapien
cattctaatagttccacaatttcaaacatttcc

SEQ ID NO: 786795 - DNA, 33 bp, Homo sapien
gtctccaaaggtcacccgcaatccatgttagga

SEQ ID NO: 786796 - DNA, 33 bp, Homo sapien
gtctccaaaggtcacctgcaatccatgttagga

SEQ ID NO: 786797 - DNA, 33 bp, Homo sapien
gtatgcattatctttaacttcataactacatat

SEQ ID NO: 786798 - DNA, 33 bp, Homo sapien
gtatgcattatctttatcttcataactacatat

SEQ ID NO: 786799 - DNA, 33 bp, Homo sapien
gtcaatagagtggccacagtaattcttccaaaa

SEQ ID NO: 786800 - DNA, 33 bp, Homo sapien
gtcaatagagtggccatagtaattcttccaaaa

SEQ ID NO: 786801 - DNA, 33 bp, Homo sapien
gccctacaaaactagcagatggtttagggaagc

SEQ ID NO: 786802 - DNA, 33 bp, Homo sapien
gccctacaaaactagcggatggtttagggaagc

SEQ ID NO: 786803 - DNA, 33 bp, Homo sapien
cactaatgttatggtaactttgtaggctcctga

SEQ ID NO: 786804 - DNA, 33 bp, Homo sapien
cactaatgttatggtacctttgtaggctcctga

SEQ ID NO: 786805 - DNA, 33 bp, Homo sapien
gaagccatcaagatgaagtaaatgtatagtcaa

SEQ ID NO: 786806 - DNA, 33 bp, Homo sapien
gaagccatcaagatgaggtaaatgtatagtcaa

SEQ ID NO: 786807 - DNA, 33 bp, Homo sapien
gtaacggtttccatgaacattataataaagtga

SEQ ID NO: 786808 - DNA, 33 bp, Homo sapien
gtaacggtttccatgatcattataataaagtga

SEQ ID NO: 786809 - DNA, 33 bp, Homo sapien
tggtatcaaagttttaccttccattgaaatcca

SEQ ID NO: 786810 - DNA, 33 bp, Homo sapien
tggtatcaaagttttatcttccattgaaatcca

SEQ ID NO: 786811 - DNA, 33 bp, Homo sapien
acctcagagctgttacccattcaatgtaggcta

SEQ ID NO: 786812 - DNA, 33 bp, Homo sapien
acctcagagctgttactcattcaatgtaggcta

SEQ ID NO: 786813 - DNA, 33 bp, Homo sapien
tctgaagataaggtgaaatattttccatatatt

SEQ ID NO: 786814 - DNA, 33 bp, Homo sapien
tctgaagataaggtgatatattttccatatatt

SEQ ID NO: 786815 - DNA, 33 bp, Homo sapien
tgttacaattgcttccaatatttagtgtagtat

SEQ ID NO: 786816 - DNA, 33 bp, Homo sapien
tgttacaattgcttccgatatttagtgtagtat

SEQ ID NO: 786817 - DNA, 33 bp, Homo sapien
ggacctgaaaatacagcctgaaccaaaccctga

SEQ ID NO: 786818 - DNA, 33 bp, Homo sapien
ggacctgaaaatacaggctgaaccaaaccctga

SEQ ID NO: 786819 - DNA, 33 bp, Homo sapien
acatggatatacgagcaatgtaccctgcccaga

SEQ ID NO: 786820 - DNA, 33 bp, Homo sapien
acatggatatacgagctatgtaccctgcccaga

SEQ ID NO: 786821 - DNA, 33 bp, Homo sapien
ctttgaattggactcactgaaaatagctagaag

SEQ ID NO: 786822 - DNA, 33 bp, Homo sapien
ctttgaattggactcattgaaaatagctagaag

SEQ ID NO: 786823 - DNA, 33 bp, Homo sapien
aaatacattagctatcgctccagcaactaagtt

SEQ ID NO: 786824 - DNA, 33 bp, Homo sapien
aaatacattagctatctctccagcaactaagtt

SEQ ID NO: 786825 - DNA, 33 bp, Homo sapien
aatgccaaattttgtgaaaaagttaagaaaata

SEQ ID NO: 786826 - DNA, 33 bp, Homo sapien
aatgccaaattttgtgcaaaagttaagaaaata

SEQ ID NO: 786827 - DNA, 33 bp, Homo sapien
tttattttaaagtggaatatatgtgttgacaga

SEQ ID NO: 786828 - DNA, 33 bp, Homo sapien
tttattttaaagtggagtatatgtgttgacaga

SEQ ID NO: 786829 - DNA, 33 bp, Homo sapien
ggcttgaagtcagttcaacgggatcctaggttt

SEQ ID NO: 786830 - DNA, 33 bp, Homo sapien
ggcttgaagtcagttcgacgggatcctaggttt

SEQ ID NO: 786831 - DNA, 33 bp, Homo sapien
atacccatgttttcacaggagaaggtataccca

SEQ ID NO: 786832 - DNA, 33 bp, Homo sapien
atacccatgttttcactggagaaggtataccca

SEQ ID NO: 786833 - DNA, 33 bp, Homo sapien
agtctttgtgccctcacataatcaatctttcta

SEQ ID NO: 786834 - DNA, 33 bp, Homo sapien
agtctttgtgccctcatataatcaatctttcta

SEQ ID NO: 786835 - DNA, 33 bp, Homo sapien
ctttatgtggtatcagcacattttccagtctaa

SEQ ID NO: 786836 - DNA, 33 bp, Homo sapien
ctttatgtggtatcagtacattttccagtctaa

SEQ ID NO: 786837 - DNA, 33 bp, Homo sapien
agggtaaatttgagacagccttcttctcaacaa

SEQ ID NO: 786838 - DNA, 33 bp, Homo sapien
agggtaaatttgagacggccttcttctcaacaa

SEQ ID NO: 786839 - DNA, 33 bp, Homo sapien
atcacttcagagttcaaagtaaataatcaaact

SEQ ID NO: 786840 - DNA, 33 bp, Homo sapien
atcacttcagagttcagagtaaataatcaaact

SEQ ID NO: 786841 - DNA, 33 bp, Homo sapien
agacgatgcaacagagacgtatgaatgagaatg

SEQ ID NO: 786842 - DNA, 33 bp, Homo sapien
agacgatgcaacagaggcgtatgaatgagaatg

SEQ ID NO: 786843 - DNA, 33 bp, Homo sapien
tctgcagaatgacaaaacattagggaaacctga

SEQ ID NO: 786844 - DNA, 33 bp, Homo sapien
tctgcagaatgacaaaccattagggaaacctga

SEQ ID NO: 786845 - DNA, 33 bp, Homo sapien
ttttatactcttgaagacttatgtttgtgatgt

SEQ ID NO: 786846 - DNA, 33 bp, Homo sapien
ttttatactcttgaagtcttatgtttgtgatgt

SEQ ID NO: 786847 - DNA, 33 bp, Homo sapien
acttggtgttgcattacctgtctagttatttat

SEQ ID NO: 786848 - DNA, 33 bp, Homo sapien
acttggtgttgcattatctgtctagttatttat

SEQ ID NO: 786849 - DNA, 33 bp, Homo sapien
tatggaaggctgatgagctaaattatgactatt

SEQ ID NO: 786850 - DNA, 33 bp, Homo sapien
tatggaaggctgatgatctaaattatgactatt

SEQ ID NO: 786851 - DNA, 33 bp, Homo sapien
attccttagttttgtaaccccatgtgcctagca

SEQ ID NO: 786852 - DNA, 33 bp, Homo sapien
attccttagttttgtatccccatgtgcctagca

SEQ ID NO: 786853 - DNA, 33 bp, Homo sapien
tttctcaagcaagatacgtactgtcagtagaaa

SEQ ID NO: 786854 - DNA, 33 bp, Homo sapien
tttctcaagcaagatatgtactgtcagtagaaa

SEQ ID NO: 786855 - DNA, 33 bp, Homo sapien
tggcacatttcaaaataagtcccagtcatcttt

SEQ ID NO: 786856 - DNA, 33 bp, Homo sapien
tggcacatttcaaaatgagtcccagtcatcttt

SEQ ID NO: 786857 - DNA, 33 bp, Homo sapien
tactaacttgcattgacgaattacgaaaaagac

SEQ ID NO: 786858 - DNA, 33 bp, Homo sapien
tactaacttgcattgatgaattacgaaaaagac

SEQ ID NO: 786859 - DNA, 33 bp, Homo sapien
cgtggtctgaaaaaacactgggttggactggta

SEQ ID NO: 786860 - DNA, 33 bp, Homo sapien
cgtggtctgaaaaaacgctgggttggactggta

SEQ ID NO: 786861 - DNA, 33 bp, Homo sapien
ttgactaggtacctcacagaaaagccaaattgc

SEQ ID NO: 786862 - DNA, 33 bp, Homo sapien
ttgactaggtacctcatagaaaagccaaattgc

SEQ ID NO: 786863 - DNA, 33 bp, Homo sapien
ataagtatctgcatcacgtgtggttataacact

SEQ ID NO: 786864 - DNA, 33 bp, Homo sapien
ataagtatctgcatcatgtgtggttataacact

SEQ ID NO: 786865 - DNA, 33 bp, Homo sapien
tttacaataatgcaaaaaaatactttggaggtg

SEQ ID NO: 786866 - DNA, 33 bp, Homo sapien
tttacaataatgcaaacaaatactttggaggtg

SEQ ID NO: 786867 - DNA, 33 bp, Homo sapien
gcccgcattggtttcccaaagtgctggcattac

SEQ ID NO: 786868 - DNA, 33 bp, Homo sapien
gcccgcattggtttccgaaagtgctggcattac

SEQ ID NO: 786869 - DNA, 33 bp, Homo sapien
cttctctcgtattaacagtagggtagttgcaaa

SEQ ID NO: 786870 - DNA, 33 bp, Homo sapien
cttctctcgtattaacggtagggtagttgcaaa

SEQ ID NO: 786871 - DNA, 33 bp, Homo sapien
gtgatcattaatgccaaaaacaaacatactgtc

SEQ ID NO: 786872 - DNA, 33 bp, Homo sapien
gtgatcattaatgccagaaacaaacatactgtc

SEQ ID NO: 786873 - DNA, 33 bp, Homo sapien
acttgctaatgggtaacgtgtacctgttgacca

SEQ ID NO: 786874 - DNA, 33 bp, Homo sapien
acttgctaatgggtaatgtgtacctgttgacca

SEQ ID NO: 786875 - DNA, 33 bp, Homo sapien
tttcatattaagcatcaaaaaagttcctcattg

SEQ ID NO: 786876 - DNA, 33 bp, Homo sapien
tttcatattaagcatctaaaaagttcctcattg

SEQ ID NO: 786877 - DNA, 33 bp, Homo sapien
ctcattgaaattggcaacagtgctggaaagtgc

SEQ ID NO: 786878 - DNA, 33 bp, Homo sapien
ctcattgaaattggcatcagtgctggaaagtgc

SEQ ID NO: 786879 - DNA, 33 bp, Homo sapien
tatagacagaatatgacaccatgaaagaaaaca

SEQ ID NO: 786880 - DNA, 33 bp, Homo sapien
tatagacagaatatgataccatgaaagaaaaca

SEQ ID NO: 786881 - DNA, 33 bp, Homo sapien
taaacaacccttttcacgcttattggccttcag

SEQ ID NO: 786882 - DNA, 33 bp, Homo sapien
taaacaacccttttcatgcttattggccttcag

SEQ ID NO: 786883 - DNA, 33 bp, Homo sapien
gcccctcggtggagcacgtgtttagggtctgca

SEQ ID NO: 786884 - DNA, 33 bp, Homo sapien
gcccctcggtggagcatgtgtttagggtctgca

SEQ ID NO: 786885 - DNA, 33 bp, Homo sapien
aaaatgtatttgaaaaagtctaagatggaaata

SEQ ID NO: 786886 - DNA, 33 bp, Homo sapien
aaaatgtatttgaaaatgtctaagatggaaata

SEQ ID NO: 786887 - DNA, 33 bp, Homo sapien
catcagataacttgccaatacctgaatacatca

SEQ ID NO: 786888 - DNA, 33 bp, Homo sapien
catcagataacttgccgatacctgaatacatca

SEQ ID NO: 786889 - DNA, 33 bp, Homo sapien
cttaattctctaaaaaagatttgtgttgtataa

SEQ ID NO: 786890 - DNA, 33 bp, Homo sapien
cttaattctctaaaaacgatttgtgttgtataa

SEQ ID NO: 786891 - DNA, 33 bp, Homo sapien
tcctgttaactgttgactatagactttactttg

SEQ ID NO: 786892 - DNA, 33 bp, Homo sapien
tcctgttaactgttgagtatagactttactttg

SEQ ID NO: 786893 - DNA, 33 bp, Homo sapien
tgatttgtatagactgcacttttatgcatattg

SEQ ID NO: 786894 - DNA, 33 bp, Homo sapien
tgatttgtatagactgtacttttatgcatattg

SEQ ID NO: 786895 - DNA, 33 bp, Homo sapien
agaagtaaagagaacactggatacagtataata

SEQ ID NO: 786896 - DNA, 33 bp, Homo sapien
agaagtaaagagaacattggatacagtataata

SEQ ID NO: 786897 - DNA, 33 bp, Homo sapien
gggaaacctgtttctacgtggactccaatcaca

SEQ ID NO: 786898 - DNA, 33 bp, Homo sapien
gggaaacctgtttctatgtggactccaatcaca

SEQ ID NO: 786899 - DNA, 33 bp, Homo sapien
acctgattttttttctcacttggatcagcagta

SEQ ID NO: 786900 - DNA, 33 bp, Homo sapien
acctgattttttttctgacttggatcagcagta

SEQ ID NO: 786901 - DNA, 33 bp, Homo sapien
ttacaatgtgatgtcacaatatttcatgattct

SEQ ID NO: 786902 - DNA, 33 bp, Homo sapien
ttacaatgtgatgtcataatatttcatgattct

SEQ ID NO: 786903 - DNA, 33 bp, Homo sapien
agagacttacgtatcaacagattttggtacctg

SEQ ID NO: 786904 - DNA, 33 bp, Homo sapien
agagacttacgtatcatcagattttggtacctg

SEQ ID NO: 786905 - DNA, 33 bp, Homo sapien
tttagctattattaagaaacgtaggcacacgga

SEQ ID NO: 786906 - DNA, 33 bp, Homo sapien
tttagctattattaaggaacgtaggcacacgga

SEQ ID NO: 786907 - DNA, 33 bp, Homo sapien
gctgagaacattgagacaaacttggaagtctgc

SEQ ID NO: 786908 - DNA, 33 bp, Homo sapien
gctgagaacattgagataaacttggaagtctgc

SEQ ID NO: 786909 - DNA, 33 bp, Homo sapien
agacactcctgaactccgacacaacaagaaagg

SEQ ID NO: 786910 - DNA, 33 bp, Homo sapien
agacactcctgaactctgacacaacaagaaagg

SEQ ID NO: 786911 - DNA, 33 bp, Homo sapien
cctgataaaaatcatcccttacaacaatggaaa

SEQ ID NO: 786912 - DNA, 33 bp, Homo sapien
cctgataaaaatcatctcttacaacaatggaaa

SEQ ID NO: 786913 - DNA, 33 bp, Homo sapien
tattgataacctttcagacacatttatcatcaa

SEQ ID NO: 786914 - DNA, 33 bp, Homo sapien
tattgataacctttcatacacatttatcatcaa

SEQ ID NO: 786915 - DNA, 33 bp, Homo sapien
atgtttatgttcgagaagaaaccagttaggcca

SEQ ID NO: 786916 - DNA, 33 bp, Homo sapien
atgtttatgttcgagacgaaaccagttaggcca

SEQ ID NO: 786917 - DNA, 33 bp, Homo sapien
ttttcaaatagcagtccgaaaggcaccagaaat

SEQ ID NO: 786918 - DNA, 33 bp, Homo sapien
ttttcaaatagcagtctgaaaggcaccagaaat

SEQ ID NO: 786919 - DNA, 33 bp, Homo sapien
tcacattaacatggctcaatactttaacgggtt

SEQ ID NO: 786920 - DNA, 33 bp, Homo sapien
tcacattaacatggctgaatactttaacgggtt

SEQ ID NO: 786921 - DNA, 33 bp, Homo sapien
gaaagtcaaattggcacgataaatattcattgt

SEQ ID NO: 786922 - DNA, 33 bp, Homo sapien
gaaagtcaaattggcatgataaatattcattgt

SEQ ID NO: 786923 - DNA, 33 bp, Homo sapien
tctcctagaatatagacgtcacagctattatta

SEQ ID NO: 786924 - DNA, 33 bp, Homo sapien
tctcctagaatatagatgtcacagctattatta

SEQ ID NO: 786925 - DNA, 33 bp, Homo sapien
gggacaaatggtgtaggagaagactgagtggag

SEQ ID NO: 786926 - DNA, 33 bp, Homo sapien
gggacaaatggtgtagtagaagactgagtggag

SEQ ID NO: 786927 - DNA, 33 bp, Homo sapien
caagacaatttacaaacgctaacctgcctattt

SEQ ID NO: 786928 - DNA, 33 bp, Homo sapien
caagacaatttacaaatgctaacctgcctattt

SEQ ID NO: 786929 - DNA, 33 bp, Homo sapien
aagagcaagaaaacacgagaaattttgggtaga

SEQ ID NO: 786930 - DNA, 33 bp, Homo sapien
aagagcaagaaaacactagaaattttgggtaga

SEQ ID NO: 786931 - DNA, 33 bp, Homo sapien
ttttggtttgttggaactgggattgaaagagag

SEQ ID NO: 786932 - DNA, 33 bp, Homo sapien
ttttggtttgttggaattgggattgaaagagag

SEQ ID NO: 786933 - DNA, 33 bp, Homo sapien
agccattgcacctgacagatacctttcaatttc

SEQ ID NO: 786934 - DNA, 33 bp, Homo sapien
agccattgcacctgaccgatacctttcaatttc

SEQ ID NO: 786935 - DNA, 33 bp, Homo sapien
tggagctataattggacatctttactgccaatc

SEQ ID NO: 786936 - DNA, 33 bp, Homo sapien
tggagctataattggatatctttactgccaatc

SEQ ID NO: 786937 - DNA, 33 bp, Homo sapien
tacctggcggacaagacgggccgctttgtccat

SEQ ID NO: 786938 - DNA, 33 bp, Homo sapien
tacctggcggacaagatgggccgctttgtccat

SEQ ID NO: 786939 - DNA, 33 bp, Homo sapien
aacatctatagccttactaaagcaaatgaaaat

SEQ ID NO: 786940 - DNA, 33 bp, Homo sapien
aacatctatagccttattaaagcaaatgaaaat

SEQ ID NO: 786941 - DNA, 33 bp, Homo sapien
tgggcacagtgtaatacgctggtctgataccca

SEQ ID NO: 786942 - DNA, 33 bp, Homo sapien
tgggcacagtgtaatatgctggtctgataccca

SEQ ID NO: 786943 - DNA, 33 bp, Homo sapien
gacacaggcatgatgtaaaggctgtgcaccaaa

SEQ ID NO: 786944 - DNA, 33 bp, Homo sapien
gacacaggcatgatgttaaggctgtgcaccaaa

SEQ ID NO: 786945 - DNA, 33 bp, Homo sapien
tgatgtggtgcagaaagacccctctcctcttcc

SEQ ID NO: 786946 - DNA, 33 bp, Homo sapien
tgatgtggtgcagaaatacccctctcctcttcc

SEQ ID NO: 786947 - DNA, 33 bp, Homo sapien
ggtgaccagtatcaacaggaggatttcagatga

SEQ ID NO: 786948 - DNA, 33 bp, Homo sapien
ggtgaccagtatcaacgggaggatttcagatga

SEQ ID NO: 786949 - DNA, 33 bp, Homo sapien
aacaagtcaatatatgcatgtggttaatataat

SEQ ID NO: 786950 - DNA, 33 bp, Homo sapien
aacaagtcaatatatgtatgtggttaatataat

SEQ ID NO: 786951 - DNA, 33 bp, Homo sapien
gaccttcaaagctcacactctattccacttctc

SEQ ID NO: 786952 - DNA, 33 bp, Homo sapien
gaccttcaaagctcacgctctattccacttctc

SEQ ID NO: 786953 - DNA, 33 bp, Homo sapien
tgaggctgttaactctaaaaactgatggaaaga

SEQ ID NO: 786954 - DNA, 33 bp, Homo sapien
tgaggctgttaactctcaaaactgatggaaaga

SEQ ID NO: 786955 - DNA, 33 bp, Homo sapien
taattggcaagaaccaggtattagtatttaagg

SEQ ID NO: 786956 - DNA, 33 bp, Homo sapien
taattggcaagaaccatgtattagtatttaagg

SEQ ID NO: 786957 - DNA, 33 bp, Homo sapien
ctcacttacttacgaacagatttgattatatgg

SEQ ID NO: 786958 - DNA, 33 bp, Homo sapien
ctcacttacttacgaatagatttgattatatgg

SEQ ID NO: 786959 - DNA, 33 bp, Homo sapien
aaaccatctctgagaacagcttccatttgtccc

SEQ ID NO: 786960 - DNA, 33 bp, Homo sapien
aaaccatctctgagaatagcttccatttgtccc

SEQ ID NO: 786961 - DNA, 33 bp, Homo sapien
gatccaaaagtttcaaagtctatctgaaaaaca

SEQ ID NO: 786962 - DNA, 33 bp, Homo sapien
gatccaaaagtttcaatgtctatctgaaaaaca

SEQ ID NO: 786963 - DNA, 33 bp, Homo sapien
gcacattgaaatccccacgtttcacttctgtaa

SEQ ID NO: 786964 - DNA, 33 bp, Homo sapien
gcacattgaaatccccgcgtttcacttctgtaa

SEQ ID NO: 786965 - DNA, 33 bp, Homo sapien
catctctctcctccaaatcataatatctgttga

SEQ ID NO: 786966 - DNA, 33 bp, Homo sapien
catctctctcctccaagtcataatatctgttga

SEQ ID NO: 786967 - DNA, 33 bp, Homo sapien
ttctagacattctagcacaaaaataatgtatgg

SEQ ID NO: 786968 - DNA, 33 bp, Homo sapien
ttctagacattctagcgcaaaaataatgtatgg

SEQ ID NO: 786969 - DNA, 33 bp, Homo sapien
ttaaatatctgactgccaaattgatgtgtctag

SEQ ID NO: 786970 - DNA, 33 bp, Homo sapien
ttaaatatctgactgcgaaattgatgtgtctag

SEQ ID NO: 786971 - DNA, 33 bp, Homo sapien
aataattgctgaatcgccaactgttgctgggtt

SEQ ID NO: 786972 - DNA, 33 bp, Homo sapien
aataattgctgaatcgtcaactgttgctgggtt

SEQ ID NO: 786973 - DNA, 33 bp, Homo sapien
tggttgggaccaacaaagcaccttaggtttgaa

SEQ ID NO: 786974 - DNA, 33 bp, Homo sapien
tggttgggaccaacaaggcaccttaggtttgaa

SEQ ID NO: 786975 - DNA, 33 bp, Homo sapien
tattactaggaaactgcaggaggctatcaccac

SEQ ID NO: 786976 - DNA, 33 bp, Homo sapien
tattactaggaaactgtaggaggctatcaccac

SEQ ID NO: 786977 - DNA, 33 bp, Homo sapien
aacctacagaagttataagtccgagattacaaa

SEQ ID NO: 786978 - DNA, 33 bp, Homo sapien
aacctacagaagttatgagtccgagattacaaa

SEQ ID NO: 786979 - DNA, 33 bp, Homo sapien
tgcaatgtgtacatccagaaatgcctttaatct

SEQ ID NO: 786980 - DNA, 33 bp, Homo sapien
tgcaatgtgtacatcccgaaatgcctttaatct

SEQ ID NO: 786981 - DNA, 33 bp, Homo sapien
atgctcatcaacctagacattctaaaaaagcaa

SEQ ID NO: 786982 - DNA, 33 bp, Homo sapien
atgctcatcaacctaggcattctaaaaaagcaa

SEQ ID NO: 786983 - DNA, 33 bp, Homo sapien
tttttgaggaacatagacatttcaaaaggcatg

SEQ ID NO: 786984 - DNA, 33 bp, Homo sapien
tttttgaggaacatagtcatttcaaaaggcatg

SEQ ID NO: 786985 - DNA, 33 bp, Homo sapien
cttgataatgaaaatgcacagttggaaaagcta

SEQ ID NO: 786986 - DNA, 33 bp, Homo sapien
cttgataatgaaaatggacagttggaaaagcta

SEQ ID NO: 786987 - DNA, 33 bp, Homo sapien
actcagaacacttaaaattagcatagaattgaa

SEQ ID NO: 786988 - DNA, 33 bp, Homo sapien
actcagaacacttaaagttagcatagaattgaa

SEQ ID NO: 786989 - DNA, 33 bp, Homo sapien
cacacttagtgtgcataaaagtgaccatgagtg

SEQ ID NO: 786990 - DNA, 33 bp, Homo sapien
cacacttagtgtgcatcaaagtgaccatgagtg

SEQ ID NO: 786991 - DNA, 33 bp, Homo sapien
ctctgaactattcatcaaaacactcacatcctg

SEQ ID NO: 786992 - DNA, 33 bp, Homo sapien
ctctgaactattcatcgaaacactcacatcctg

SEQ ID NO: 786993 - DNA, 33 bp, Homo sapien
caattaatttctaagcaccaacagcaattctgc

SEQ ID NO: 786994 - DNA, 33 bp, Homo sapien
caattaatttctaagcgccaacagcaattctgc

SEQ ID NO: 786995 - DNA, 33 bp, Homo sapien
taaatccagatacccaatatacatagtggaaag

SEQ ID NO: 786996 - DNA, 33 bp, Homo sapien
taaatccagatacccagtatacatagtggaaag

SEQ ID NO: 786997 - DNA, 33 bp, Homo sapien
tttgcagctattactcaaatatctcattaattt

SEQ ID NO: 786998 - DNA, 33 bp, Homo sapien
tttgcagctattactcgaatatctcattaattt

SEQ ID NO: 786999 - DNA, 33 bp, Homo sapien
taaaagaaggcttgaaatatctttcgtagatca

SEQ ID NO: 787000 - DNA, 33 bp, Homo sapien
taaaagaaggcttgaagtatctttcgtagatca

SEQ ID NO: 787001 - DNA, 33 bp, Homo sapien
ttaacagaatatttaacgtggccctccagtaga

SEQ ID NO: 787002 - DNA, 33 bp, Homo sapien
ttaacagaatatttaatgtggccctccagtaga

SEQ ID NO: 787003 - DNA, 33 bp, Homo sapien
tttcatgaaatccaagaaataattggacaacca

SEQ ID NO: 787004 - DNA, 33 bp, Homo sapien
tttcatgaaatccaaggaataattggacaacca

SEQ ID NO: 787005 - DNA, 33 bp, Homo sapien
aacaaattaccataaactgaatgatgacttaaa

SEQ ID NO: 787006 - DNA, 33 bp, Homo sapien
aacaaattaccataaattgaatgatgacttaaa

SEQ ID NO: 787007 - DNA, 33 bp, Homo sapien
gccaccgcagctggcacaaatcttattttctaa

SEQ ID NO: 787008 - DNA, 33 bp, Homo sapien
gccaccgcagctggcagaaatcttattttctaa

SEQ ID NO: 787009 - DNA, 33 bp, Homo sapien
atagtggacaaacataagtgtgagatttcatct

SEQ ID NO: 787010 - DNA, 33 bp, Homo sapien
atagtggacaaacatatgtgtgagatttcatct

SEQ ID NO: 787011 - DNA, 33 bp, Homo sapien
gaaactaataagctaactctttgccaatctttc

SEQ ID NO: 787012 - DNA, 33 bp, Homo sapien
gaaactaataagctaattctttgccaatctttc

SEQ ID NO: 787013 - DNA, 33 bp, Homo sapien
tactctaaacacttaacggtcttcttgtcactt

SEQ ID NO: 787014 - DNA, 33 bp, Homo sapien
tactctaaacacttaatggtcttcttgtcactt

SEQ ID NO: 787015 - DNA, 33 bp, Homo sapien
gattctcaatctattacatgcatttggcaaaac

SEQ ID NO: 787016 - DNA, 33 bp, Homo sapien
gattctcaatctattagatgcatttggcaaaac

SEQ ID NO: 787017 - DNA, 33 bp, Homo sapien
caatgatttgttctcacgaaccagaagagaaca

SEQ ID NO: 787018 - DNA, 33 bp, Homo sapien
caatgatttgttctcatgaaccagaagagaaca

SEQ ID NO: 787019 - DNA, 33 bp, Homo sapien
ctttccaacaaccaacactctagaaaacaaaca

SEQ ID NO: 787020 - DNA, 33 bp, Homo sapien
ctttccaacaaccaacgctctagaaaacaaaca

SEQ ID NO: 787021 - DNA, 33 bp, Homo sapien
tttactgtgaccaagactcaagtcaagatttga

SEQ ID NO: 787022 - DNA, 33 bp, Homo sapien
tttactgtgaccaagattcaagtcaagatttga

SEQ ID NO: 787023 - DNA, 33 bp, Homo sapien
ttaatttgcttgtctggagggttggcatccttg

SEQ ID NO: 787024 - DNA, 33 bp, Homo sapien
ttaatttgcttgtctgtagggttggcatccttg

SEQ ID NO: 787025 - DNA, 33 bp, Homo sapien
tagcagagaggaaccacggagaaatcagagact

SEQ ID NO: 787026 - DNA, 33 bp, Homo sapien
tagcagagaggaaccatggagaaatcagagact

SEQ ID NO: 787027 - DNA, 33 bp, Homo sapien
cgatccttttcacagcagatgttctaatggctg

SEQ ID NO: 787028 - DNA, 33 bp, Homo sapien
cgatccttttcacagcggatgttctaatggctg

SEQ ID NO: 787029 - DNA, 33 bp, Homo sapien
aggcaaacagaaaaaaagcttaactacctgtgg

SEQ ID NO: 787030 - DNA, 33 bp, Homo sapien
aggcaaacagaaaaaaggcttaactacctgtgg

SEQ ID NO: 787031 - DNA, 33 bp, Homo sapien
gtaactcaagaaagacaaatgtaccacagagac

SEQ ID NO: 787032 - DNA, 33 bp, Homo sapien
gtaactcaagaaagaccaatgtaccacagagac

SEQ ID NO: 787033 - DNA, 33 bp, Homo sapien
tggaggatagcgcttacggaagatgacagatat

SEQ ID NO: 787034 - DNA, 33 bp, Homo sapien
tggaggatagcgcttatggaagatgacagatat

SEQ ID NO: 787035 - DNA, 33 bp, Homo sapien
cacaatccctgcagaagattgaaagtttgtttt

SEQ ID NO: 787036 - DNA, 33 bp, Homo sapien
cacaatccctgcagaatattgaaagtttgtttt

SEQ ID NO: 787037 - DNA, 33 bp, Homo sapien
ttcacacttattttggccaaagtagcattcatt

SEQ ID NO: 787038 - DNA, 33 bp, Homo sapien
ttcacacttattttggtcaaagtagcattcatt

SEQ ID NO: 787039 - DNA, 33 bp, Homo sapien
taagttttaaaggtaactggcatcttgggcctt

SEQ ID NO: 787040 - DNA, 33 bp, Homo sapien
taagttttaaaggtaattggcatcttgggcctt

SEQ ID NO: 787041 - DNA, 33 bp, Homo sapien
tcagcaaaacacctagaataagtaagatacatt

SEQ ID NO: 787042 - DNA, 33 bp, Homo sapien
tcagcaaaacacctagtataagtaagatacatt

SEQ ID NO: 787043 - DNA, 33 bp, Homo sapien
tgcataagtgcaaatcacagccctggctctgtc

SEQ ID NO: 787044 - DNA, 33 bp, Homo sapien
tgcataagtgcaaatcgcagccctggctctgtc

SEQ ID NO: 787045 - DNA, 33 bp, Homo sapien
tgctggtcctggaagaatagcaggaaggctggt

SEQ ID NO: 787046 - DNA, 33 bp, Homo sapien
tgctggtcctggaagagtagcaggaaggctggt

SEQ ID NO: 787047 - DNA, 33 bp, Homo sapien
cgagctaaattctcctaagccagctatcatcag

SEQ ID NO: 787048 - DNA, 33 bp, Homo sapien
cgagctaaattctcctgagccagctatcatcag

SEQ ID NO: 787049 - DNA, 33 bp, Homo sapien
tatgatgtcaacacggaagagctacaggagata

SEQ ID NO: 787050 - DNA, 33 bp, Homo sapien
tatgatgtcaacacgggagagctacaggagata

SEQ ID NO: 787051 - DNA, 33 bp, Homo sapien
ggactactgtgccccaaaattcaaatagcaaac

SEQ ID NO: 787052 - DNA, 33 bp, Homo sapien
ggactactgtgccccagaattcaaatagcaaac

SEQ ID NO: 787053 - DNA, 33 bp, Homo sapien
tagcttgtaaattcaccgaatgcaagggaacaa

SEQ ID NO: 787054 - DNA, 33 bp, Homo sapien
tagcttgtaaattcactgaatgcaagggaacaa

SEQ ID NO: 787055 - DNA, 33 bp, Homo sapien
atgtgatgtcttagtcactgcccctgaaagttt

SEQ ID NO: 787056 - DNA, 33 bp, Homo sapien
atgtgatgtcttagtcgctgcccctgaaagttt

SEQ ID NO: 787057 - DNA, 33 bp, Homo sapien
ggattgcttttttctacagctgacccagaaaga

SEQ ID NO: 787058 - DNA, 33 bp, Homo sapien
ggattgcttttttctatagctgacccagaaaga

SEQ ID NO: 787059 - DNA, 33 bp, Homo sapien
acccaactccaaatcacgttccaattgttactg

SEQ ID NO: 787060 - DNA, 33 bp, Homo sapien
acccaactccaaatcatgttccaattgttactg

SEQ ID NO: 787061 - DNA, 33 bp, Homo sapien
tcaatatccaagtaaaacattttgctggtttaa

SEQ ID NO: 787062 - DNA, 33 bp, Homo sapien
tcaatatccaagtaaatcattttgctggtttaa

SEQ ID NO: 787063 - DNA, 33 bp, Homo sapien
ataaatatgaaaaaaactgaatgtggcaattaa

SEQ ID NO: 787064 - DNA, 33 bp, Homo sapien
ataaatatgaaaaaaattgaatgtggcaattaa

SEQ ID NO: 787065 - DNA, 33 bp, Homo sapien
gagatctgattttgtgcatgcttgaatccctgt

SEQ ID NO: 787066 - DNA, 33 bp, Homo sapien
gagatctgattttgtgtatgcttgaatccctgt

SEQ ID NO: 787067 - DNA, 33 bp, Homo sapien
tcgcatgccttctacacagaaaaccctgtttta

SEQ ID NO: 787068 - DNA, 33 bp, Homo sapien
tcgcatgccttctacatagaaaaccctgtttta

SEQ ID NO: 787069 - DNA, 33 bp, Homo sapien
aaaggtaaaatgacttcaagagctaagaaaatt

SEQ ID NO: 787070 - DNA, 33 bp, Homo sapien
aaaggtaaaatgacttgaagagctaagaaaatt

SEQ ID NO: 787071 - DNA, 33 bp, Homo sapien
tgccaggaatgtgaacggagtacctatcttgga

SEQ ID NO: 787072 - DNA, 33 bp, Homo sapien
tgccaggaatgtgaactgagtacctatcttgga

SEQ ID NO: 787073 - DNA, 33 bp, Homo sapien
ttgagtaactgagagtaaaatgtcttatatcaa

SEQ ID NO: 787074 - DNA, 33 bp, Homo sapien
ttgagtaactgagagttaaatgtcttatatcaa

SEQ ID NO: 787075 - DNA, 33 bp, Homo sapien
tcccatttccaatcaagaaattaagaatacagg

SEQ ID NO: 787076 - DNA, 33 bp, Homo sapien
tcccatttccaatcaataaattaagaatacagg

SEQ ID NO: 787077 - DNA, 33 bp, Homo sapien
tcttggttcataaaaactatttctttgtcccat

SEQ ID NO: 787078 - DNA, 33 bp, Homo sapien
tcttggttcataaaaattatttctttgtcccat

SEQ ID NO: 787079 - DNA, 33 bp, Homo sapien
ctttcatctcaggcaacctttttttgtttttgt

SEQ ID NO: 787080 - DNA, 33 bp, Homo sapien
ctttcatctcaggcaatctttttttgtttttgt

SEQ ID NO: 787081 - DNA, 33 bp, Homo sapien
agttgtaagaccaataccttttcctgaacaagt

SEQ ID NO: 787082 - DNA, 33 bp, Homo sapien
agttgtaagaccaatatcttttcctgaacaagt

SEQ ID NO: 787083 - DNA, 33 bp, Homo sapien
ctgcaggaaaaattggaaatgtttatgcttttt

SEQ ID NO: 787084 - DNA, 33 bp, Homo sapien
ctgcaggaaaaattggtaatgtttatgcttttt

SEQ ID NO: 787085 - DNA, 33 bp, Homo sapien
gtcacaaatacaaatgaacattgcttgccgaaa

SEQ ID NO: 787086 - DNA, 33 bp, Homo sapien
gtcacaaatacaaatggacattgcttgccgaaa

SEQ ID NO: 787087 - DNA, 33 bp, Homo sapien
ttttgattacaggtaaagatcactggaaatatt

SEQ ID NO: 787088 - DNA, 33 bp, Homo sapien
ttttgattacaggtaaggatcactggaaatatt

SEQ ID NO: 787089 - DNA, 33 bp, Homo sapien
tacataataaatgcaacaatcagtagtcttttt

SEQ ID NO: 787090 - DNA, 33 bp, Homo sapien
tacataataaatgcaataatcagtagtcttttt

SEQ ID NO: 787091 - DNA, 33 bp, Homo sapien
cttctgggaaagtatcccctgaggctgttggtc

SEQ ID NO: 787092 - DNA, 33 bp, Homo sapien
cttctgggaaagtatctcctgaggctgttggtc

SEQ ID NO: 787093 - DNA, 33 bp, Homo sapien
tttatttcaatgtttacgtttcaacatggatac

SEQ ID NO: 787094 - DNA, 33 bp, Homo sapien
tttatttcaatgtttaggtttcaacatggatac

SEQ ID NO: 787095 - DNA, 33 bp, Homo sapien
aaaacagatgccaggactacacggtatgcttag

SEQ ID NO: 787096 - DNA, 33 bp, Homo sapien
aaaacagatgccaggattacacggtatgcttag

SEQ ID NO: 787097 - DNA, 33 bp, Homo sapien
catgcaccactaattacgtgacaagcccttgct

SEQ ID NO: 787098 - DNA, 33 bp, Homo sapien
catgcaccactaattatgtgacaagcccttgct

SEQ ID NO: 787099 - DNA, 33 bp, Homo sapien
actccagtaggtccacaaacatcagtccatgta

SEQ ID NO: 787100 - DNA, 33 bp, Homo sapien
actccagtaggtccacgaacatcagtccatgta

SEQ ID NO: 787101 - DNA, 33 bp, Homo sapien
ctagaggcatcaaacaactggacttcaaactgt

SEQ ID NO: 787102 - DNA, 33 bp, Homo sapien
ctagaggcatcaaacagctggacttcaaactgt

SEQ ID NO: 787103 - DNA, 33 bp, Homo sapien
tcttccttaagcggacccttacatattgctttg

SEQ ID NO: 787104 - DNA, 33 bp, Homo sapien
tcttccttaagcggactcttacatattgctttg

SEQ ID NO: 787105 - DNA, 33 bp, Homo sapien
gtctgctccagtgagcacagcattcagttatca

SEQ ID NO: 787106 - DNA, 33 bp, Homo sapien
gtctgctccagtgagcgcagcattcagttatca

SEQ ID NO: 787107 - DNA, 33 bp, Homo sapien
cagattgaatgcaaagaaagatagggaagtcta

SEQ ID NO: 787108 - DNA, 33 bp, Homo sapien
cagattgaatgcaaaggaagatagggaagtcta

SEQ ID NO: 787109 - DNA, 33 bp, Homo sapien
agaggtattttcgggaactttgtgaagtcaaaa

SEQ ID NO: 787110 - DNA, 33 bp, Homo sapien
agaggtattttcgggagctttgtgaagtcaaaa

SEQ ID NO: 787111 - DNA, 33 bp, Homo sapien
aaagccaccattagcacatcaagcacagctgta

SEQ ID NO: 787112 - DNA, 33 bp, Homo sapien
aaagccaccattagcatatcaagcacagctgta

SEQ ID NO: 787113 - DNA, 33 bp, Homo sapien
ttggagagtaacaaatgatactttaacagcaac

SEQ ID NO: 787114 - DNA, 33 bp, Homo sapien
ttggagagtaacaaattatactttaacagcaac

SEQ ID NO: 787115 - DNA, 33 bp, Homo sapien
ataaatagaaagaagaaattgaagatgttgaca

SEQ ID NO: 787116 - DNA, 33 bp, Homo sapien
ataaatagaaagaagagattgaagatgttgaca

SEQ ID NO: 787117 - DNA, 33 bp, Homo sapien
tctgaagactgaaccacaaatatatggaacaca

SEQ ID NO: 787118 - DNA, 33 bp, Homo sapien
tctgaagactgaaccagaaatatatggaacaca

SEQ ID NO: 787119 - DNA, 33 bp, Homo sapien
ataggaactcagagaagaggaagtttttaagag

SEQ ID NO: 787120 - DNA, 33 bp, Homo sapien
ataggaactcagagaataggaagtttttaagag

SEQ ID NO: 787121 - DNA, 33 bp, Homo sapien
tgcaacacacaaaaaaatggtagcccatgggac

SEQ ID NO: 787122 - DNA, 33 bp, Homo sapien
tgcaacacacaaaaaagtggtagcccatgggac

SEQ ID NO: 787123 - DNA, 33 bp, Homo sapien
tgatttttgtatatgacggaagagacaggtcca

SEQ ID NO: 787124 - DNA, 33 bp, Homo sapien
tgatttttgtatatgatggaagagacaggtcca

SEQ ID NO: 787125 - DNA, 33 bp, Homo sapien
tcttggttcattgacaatcatctctttactgta

SEQ ID NO: 787126 - DNA, 33 bp, Homo sapien
tcttggttcattgacagtcatctctttactgta

SEQ ID NO: 787127 - DNA, 33 bp, Homo sapien
aatcccaacagaaggcaagaaaacaacaggata

SEQ ID NO: 787128 - DNA, 33 bp, Homo sapien
aatcccaacagaaggccagaaaacaacaggata

SEQ ID NO: 787129 - DNA, 33 bp, Homo sapien
tccaatgcatttagaaacaaccagtcatctccc

SEQ ID NO: 787130 - DNA, 33 bp, Homo sapien
tccaatgcatttagaagcaaccagtcatctccc

SEQ ID NO: 787131 - DNA, 33 bp, Homo sapien
ctaactgcaagatcaacgattaataccaaagtg

SEQ ID NO: 787132 - DNA, 33 bp, Homo sapien
ctaactgcaagatcaatgattaataccaaagtg

SEQ ID NO: 787133 - DNA, 33 bp, Homo sapien
ttgtccaattcaaagcaatttggcaccacattt

SEQ ID NO: 787134 - DNA, 33 bp, Homo sapien
ttgtccaattcaaagccatttggcaccacattt

SEQ ID NO: 787135 - DNA, 33 bp, Homo sapien
gttttgatggaagaagcctccagggttacaaat

SEQ ID NO: 787136 - DNA, 33 bp, Homo sapien
gttttgatggaagaagtctccagggttacaaat

SEQ ID NO: 787137 - DNA, 33 bp, Homo sapien
ggttgccataacgacacagattgtgaggcttaa

SEQ ID NO: 787138 - DNA, 33 bp, Homo sapien
ggttgccataacgacatagattgtgaggcttaa

SEQ ID NO: 787139 - DNA, 33 bp, Homo sapien
aataatatttgtaacacaatcttcattgtctta

SEQ ID NO: 787140 - DNA, 33 bp, Homo sapien
aataatatttgtaacataatcttcattgtctta

SEQ ID NO: 787141 - DNA, 33 bp, Homo sapien
ttaggctgaagtacccacaaaaaagtctttctt

SEQ ID NO: 787142 - DNA, 33 bp, Homo sapien
ttaggctgaagtacccgcaaaaaagtctttctt

SEQ ID NO: 787143 - DNA, 33 bp, Homo sapien
aaaaaaataagtcaacagataccagccatgaaa

SEQ ID NO: 787144 - DNA, 33 bp, Homo sapien
aaaaaaataagtcaaccgataccagccatgaaa

SEQ ID NO: 787145 - DNA, 33 bp, Homo sapien
cttcttcatgtaatccagaagttagagaaagag

SEQ ID NO: 787146 - DNA, 33 bp, Homo sapien
cttcttcatgtaatccggaagttagagaaagag

SEQ ID NO: 787147 - DNA, 33 bp, Homo sapien
tgaatcagagttctaaatgtatatgacttaatg

SEQ ID NO: 787148 - DNA, 33 bp, Homo sapien
tgaatcagagttctaagtgtatatgacttaatg

SEQ ID NO: 787149 - DNA, 33 bp, Homo sapien
cagaaatagagggaacaaatgtccatcattcca

SEQ ID NO: 787150 - DNA, 33 bp, Homo sapien
cagaaatagagggaactaatgtccatcattcca

SEQ ID NO: 787151 - DNA, 33 bp, Homo sapien
ccttgtcttcatccaaatatttcttttcgcttt

SEQ ID NO: 787152 - DNA, 33 bp, Homo sapien
ccttgtcttcatccaagtatttcttttcgcttt

SEQ ID NO: 787153 - DNA, 33 bp, Homo sapien
gatggatgactagatgaagccaggaggaatatc

SEQ ID NO: 787154 - DNA, 33 bp, Homo sapien
gatggatgactagatggagccaggaggaatatc

SEQ ID NO: 787155 - DNA, 33 bp, Homo sapien
taattaacagaaaatacgaagctgtaagattaa

SEQ ID NO: 787156 - DNA, 33 bp, Homo sapien
taattaacagaaaatatgaagctgtaagattaa

SEQ ID NO: 787157 - DNA, 33 bp, Homo sapien
gttttatactaaactgaaatccataaagaagta

SEQ ID NO: 787158 - DNA, 33 bp, Homo sapien
gttttatactaaactggaatccataaagaagta

SEQ ID NO: 787159 - DNA, 33 bp, Homo sapien
tctcatgctttaatgcactttgctgggttactg

SEQ ID NO: 787160 - DNA, 33 bp, Homo sapien
tctcatgctttaatgctctttgctgggttactg

SEQ ID NO: 787161 - DNA, 33 bp, Homo sapien
gaactctaaaataatcaactgttacttaaagga

SEQ ID NO: 787162 - DNA, 33 bp, Homo sapien
gaactctaaaataatccactgttacttaaagga

SEQ ID NO: 787163 - DNA, 33 bp, Homo sapien
aattaaaaacctaagacgaagaagatacgatac

SEQ ID NO: 787164 - DNA, 33 bp, Homo sapien
aattaaaaacctaagatgaagaagatacgatac

SEQ ID NO: 787165 - DNA, 33 bp, Homo sapien
atgagacagaaaaaaacgcacgtctttcaagtg

SEQ ID NO: 787166 - DNA, 33 bp, Homo sapien
atgagacagaaaaaaatgcacgtctttcaagtg

SEQ ID NO: 787167 - DNA, 33 bp, Homo sapien
agcgtgggagaagaaactacacagctatgaata

SEQ ID NO: 787168 - DNA, 33 bp, Homo sapien
agcgtgggagaagaaattacacagctatgaata

SEQ ID NO: 787169 - DNA, 33 bp, Homo sapien
ggagacaaagcagtccaacatttctgacatttc

SEQ ID NO: 787170 - DNA, 33 bp, Homo sapien
ggagacaaagcagtccgacatttctgacatttc

SEQ ID NO: 787171 - DNA, 33 bp, Homo sapien
aaacttgagatattccaattgagcaaatgagga

SEQ ID NO: 787172 - DNA, 33 bp, Homo sapien
aaacttgagatattccgattgagcaaatgagga

SEQ ID NO: 787173 - DNA, 33 bp, Homo sapien
aatgtgaccttatctgcaaaccaggtttttgta

SEQ ID NO: 787174 - DNA, 33 bp, Homo sapien
aatgtgaccttatctggaaaccaggtttttgta

SEQ ID NO: 787175 - DNA, 33 bp, Homo sapien
ttttacaatgcaagcacaggtagcactctataa

SEQ ID NO: 787176 - DNA, 33 bp, Homo sapien
ttttacaatgcaagcagaggtagcactctataa

SEQ ID NO: 787177 - DNA, 33 bp, Homo sapien
ataatctgctttgtcagagtgctactacttcta

SEQ ID NO: 787178 - DNA, 33 bp, Homo sapien
ataatctgctttgtcatagtgctactacttcta

SEQ ID NO: 787179 - DNA, 33 bp, Homo sapien
tagcaataggccatgaactatttgcacctgaga

SEQ ID NO: 787180 - DNA, 33 bp, Homo sapien
tagcaataggccatgagctatttgcacctgaga

SEQ ID NO: 787181 - DNA, 33 bp, Homo sapien
tagggctaggttttatcaaagaaaagaggccca

SEQ ID NO: 787182 - DNA, 33 bp, Homo sapien
tagggctaggttttatgaaagaaaagaggccca

SEQ ID NO: 787183 - DNA, 33 bp, Homo sapien
gccttaagaattgtaaatgaaagacagatgcat

SEQ ID NO: 787184 - DNA, 33 bp, Homo sapien
gccttaagaattgtaagtgaaagacagatgcat

SEQ ID NO: 787185 - DNA, 33 bp, Homo sapien
tgggttcaggcattcaaaggtaacctctacttt

SEQ ID NO: 787186 - DNA, 33 bp, Homo sapien
tgggttcaggcattcagaggtaacctctacttt

SEQ ID NO: 787187 - DNA, 33 bp, Homo sapien
ttagggtagtgtgttacaaagaaatagataacc

SEQ ID NO: 787188 - DNA, 33 bp, Homo sapien
ttagggtagtgtgttataaagaaatagataacc

SEQ ID NO: 787189 - DNA, 33 bp, Homo sapien
agtactagtttctccaaggatgattgtagggga

SEQ ID NO: 787190 - DNA, 33 bp, Homo sapien
agtactagtttctccagggatgattgtagggga

SEQ ID NO: 787191 - DNA, 33 bp, Homo sapien
tggttccgtgtattcacctgatggagttgttcc

SEQ ID NO: 787192 - DNA, 33 bp, Homo sapien
tggttccgtgtattcatctgatggagttgttcc

SEQ ID NO: 787193 - DNA, 33 bp, Homo sapien
atattcatccatataaaattctctgtcaaccaa

SEQ ID NO: 787194 - DNA, 33 bp, Homo sapien
atattcatccatataacattctctgtcaaccaa

SEQ ID NO: 787195 - DNA, 33 bp, Homo sapien
gaagtccaatattgacaaagcattaaccttcta

SEQ ID NO: 787196 - DNA, 33 bp, Homo sapien
gaagtccaatattgacgaagcattaaccttcta

SEQ ID NO: 787197 - DNA, 33 bp, Homo sapien
atcttgtgctatggtacctgatgcttaaatact

SEQ ID NO: 787198 - DNA, 33 bp, Homo sapien
atcttgtgctatggtatctgatgcttaaatact

SEQ ID NO: 787199 - DNA, 33 bp, Homo sapien
attgtggtgacaaaacaaagccatttatccact

SEQ ID NO: 787200 - DNA, 33 bp, Homo sapien
attgtggtgacaaaacgaagccatttatccact

SEQ ID NO: 787201 - DNA, 33 bp, Homo sapien
aaccactcatggacaaaaatacctttatgggag

SEQ ID NO: 787202 - DNA, 33 bp, Homo sapien
aaccactcatggacaagaatacctttatgggag

SEQ ID NO: 787203 - DNA, 33 bp, Homo sapien
tttatcactaagtggaagatgttaatctgaaaa

SEQ ID NO: 787204 - DNA, 33 bp, Homo sapien
tttatcactaagtggaggatgttaatctgaaaa

SEQ ID NO: 787205 - DNA, 33 bp, Homo sapien
atatatgtcaccctcaagataggctcttccaaa

SEQ ID NO: 787206 - DNA, 33 bp, Homo sapien
atatatgtcaccctcaggataggctcttccaaa

SEQ ID NO: 787207 - DNA, 33 bp, Homo sapien
agctttcagacaggaacagctggaccaatggaa

SEQ ID NO: 787208 - DNA, 33 bp, Homo sapien
agctttcagacaggaatagctggaccaatggaa

SEQ ID NO: 787209 - DNA, 33 bp, Homo sapien
gaaacaatatccttcacggtgtagtatttttta

SEQ ID NO: 787210 - DNA, 33 bp, Homo sapien
gaaacaatatccttcatggtgtagtatttttta

SEQ ID NO: 787211 - DNA, 33 bp, Homo sapien
aattagtgatgaacaacaaaggttttgtaaggg

SEQ ID NO: 787212 - DNA, 33 bp, Homo sapien
aattagtgatgaacaataaaggttttgtaaggg

SEQ ID NO: 787213 - DNA, 33 bp, Homo sapien
ctaacaaagggaaatacagccagaaattgtagc

SEQ ID NO: 787214 - DNA, 33 bp, Homo sapien
ctaacaaagggaaatatagccagaaattgtagc

SEQ ID NO: 787215 - DNA, 33 bp, Homo sapien
tcttcatttaaaatccagaaagaatcattttct

SEQ ID NO: 787216 - DNA, 33 bp, Homo sapien
tcttcatttaaaatccggaaagaatcattttct

SEQ ID NO: 787217 - DNA, 33 bp, Homo sapien
acctgaaagatatggaaggtagaacagagctct

SEQ ID NO: 787218 - DNA, 33 bp, Homo sapien
acctgaaagatatggagggtagaacagagctct

SEQ ID NO: 787219 - DNA, 33 bp, Homo sapien
aggacatttcctaacactcgccactttcttttt

SEQ ID NO: 787220 - DNA, 33 bp, Homo sapien
aggacatttcctaacattcgccactttcttttt

SEQ ID NO: 787221 - DNA, 33 bp, Homo sapien
acagttctataccacaagaaattcccatgtgat

SEQ ID NO: 787222 - DNA, 33 bp, Homo sapien
acagttctataccacaggaaattcccatgtgat

SEQ ID NO: 787223 - DNA, 33 bp, Homo sapien
tgatgatgagtttagacgctggtattgtagcag

SEQ ID NO: 787224 - DNA, 33 bp, Homo sapien
tgatgatgagtttagatgctggtattgtagcag

SEQ ID NO: 787225 - DNA, 33 bp, Homo sapien
cttctatataaattgaacttctccctgactctt

SEQ ID NO: 787226 - DNA, 33 bp, Homo sapien
cttctatataaattgagcttctccctgactctt

SEQ ID NO: 787227 - DNA, 33 bp, Homo sapien
tggcattcatcacagcacacaggtttcttccac

SEQ ID NO: 787228 - DNA, 33 bp, Homo sapien
tggcattcatcacagctcacaggtttcttccac

SEQ ID NO: 787229 - DNA, 33 bp, Homo sapien
gtaaaagctgcagtaaacaagtcaatgtggcat

SEQ ID NO: 787230 - DNA, 33 bp, Homo sapien
gtaaaagctgcagtaatcaagtcaatgtggcat

SEQ ID NO: 787231 - DNA, 33 bp, Homo sapien
taaagctatctgataccatgttaagcaataaat

SEQ ID NO: 787232 - DNA, 33 bp, Homo sapien
taaagctatctgatactatgttaagcaataaat

SEQ ID NO: 787233 - DNA, 33 bp, Homo sapien
tcatatttttctgcaccactgctatttctcagc

SEQ ID NO: 787234 - DNA, 33 bp, Homo sapien
tcatatttttctgcactactgctatttctcagc

SEQ ID NO: 787235 - DNA, 33 bp, Homo sapien
ttccaagatagcaccaagttgttgtgtcctcac

SEQ ID NO: 787236 - DNA, 33 bp, Homo sapien
ttccaagatagcaccaggttgttgtgtcctcac

SEQ ID NO: 787237 - DNA, 33 bp, Homo sapien
gcaatgtggaaaatcacgaagcataacgaaagt

SEQ ID NO: 787238 - DNA, 33 bp, Homo sapien
gcaatgtggaaaatcaggaagcataacgaaagt

SEQ ID NO: 787239 - DNA, 33 bp, Homo sapien
aaccttaaatgcatgcacgatgtagtttgcaaa

SEQ ID NO: 787240 - DNA, 33 bp, Homo sapien
aaccttaaatgcatgcgcgatgtagtttgcaaa

SEQ ID NO: 787241 - DNA, 33 bp, Homo sapien
gggttcataatgcacacagacaaagcaaaagca

SEQ ID NO: 787242 - DNA, 33 bp, Homo sapien
gggttcataatgcacagagacaaagcaaaagca

SEQ ID NO: 787243 - DNA, 33 bp, Homo sapien
ggagaagcaatagtgtcaaaatttaagccaata

SEQ ID NO: 787244 - DNA, 33 bp, Homo sapien
ggagaagcaatagtgtgaaaatttaagccaata

SEQ ID NO: 787245 - DNA, 33 bp, Homo sapien
aaattatacctttctcacatcactgatcaaaca

SEQ ID NO: 787246 - DNA, 33 bp, Homo sapien
aaattatacctttctcgcatcactgatcaaaca

SEQ ID NO: 787247 - DNA, 33 bp, Homo sapien
ctttcaccactgatacccaacatagtattggat

SEQ ID NO: 787248 - DNA, 33 bp, Homo sapien
ctttcaccactgatactcaacatagtattggat

SEQ ID NO: 787249 - DNA, 33 bp, Homo sapien
cacaaataacacaggaatatatttcacagggct

SEQ ID NO: 787250 - DNA, 33 bp, Homo sapien
cacaaataacacaggagtatatttcacagggct

SEQ ID NO: 787251 - DNA, 33 bp, Homo sapien
aaatataatgttaaaacgaggcttgagcatctg

SEQ ID NO: 787252 - DNA, 33 bp, Homo sapien
aaatataatgttaaaatgaggcttgagcatctg

SEQ ID NO: 787253 - DNA, 33 bp, Homo sapien
ggcacacagttattcccagacagaagataccca

SEQ ID NO: 787254 - DNA, 33 bp, Homo sapien
ggcacacagttattcctagacagaagataccca

SEQ ID NO: 787255 - DNA, 33 bp, Homo sapien
cttctaatggccaaagacaaaacaaatagaagg

SEQ ID NO: 787256 - DNA, 33 bp, Homo sapien
cttctaatggccaaagccaaaacaaatagaagg

SEQ ID NO: 787257 - DNA, 33 bp, Homo sapien
tgaggaaaaagaagtaactttcagaaagcagag

SEQ ID NO: 787258 - DNA, 33 bp, Homo sapien
tgaggaaaaagaagtacctttcagaaagcagag

SEQ ID NO: 787259 - DNA, 33 bp, Homo sapien
cccagagaaggcagaaagtctcagaaataagta

SEQ ID NO: 787260 - DNA, 33 bp, Homo sapien
cccagagaaggcagaaggtctcagaaataagta

SEQ ID NO: 787261 - DNA, 33 bp, Homo sapien
tggctaggcaatttctaaatccatagggtaagt

SEQ ID NO: 787262 - DNA, 33 bp, Homo sapien
tggctaggcaatttctcaatccatagggtaagt

SEQ ID NO: 787263 - DNA, 33 bp, Homo sapien
ttgcagaaagccagtacgagaaatttcactgaa

SEQ ID NO: 787264 - DNA, 33 bp, Homo sapien
ttgcagaaagccagtatgagaaatttcactgaa

SEQ ID NO: 787265 - DNA, 33 bp, Homo sapien
gaagaccaatcattacagatacccattaactaa

SEQ ID NO: 787266 - DNA, 33 bp, Homo sapien
gaagaccaatcattacggatacccattaactaa

SEQ ID NO: 787267 - DNA, 33 bp, Homo sapien
tacaactcatattctaagtttgatgtgagaaat

SEQ ID NO: 787268 - DNA, 33 bp, Homo sapien
tacaactcatattctaggtttgatgtgagaaat

SEQ ID NO: 787269 - DNA, 33 bp, Homo sapien
caatctcaattaattccataactgaacaaagca

SEQ ID NO: 787270 - DNA, 33 bp, Homo sapien
caatctcaattaattctataactgaacaaagca

SEQ ID NO: 787271 - DNA, 33 bp, Homo sapien
tgaaacccctcttccacagtttgtgcttttgtc

SEQ ID NO: 787272 - DNA, 33 bp, Homo sapien
tgaaacccctcttccatagtttgtgcttttgtc

SEQ ID NO: 787273 - DNA, 33 bp, Homo sapien
ccagagtgcaacaacaatattaaggcaatatat

SEQ ID NO: 787274 - DNA, 33 bp, Homo sapien
ccagagtgcaacaacagtattaaggcaatatat

SEQ ID NO: 787275 - DNA, 33 bp, Homo sapien
taaactaaatcttacactccctcaccatttcac

SEQ ID NO: 787276 - DNA, 33 bp, Homo sapien
taaactaaatcttacattccctcaccatttcac

SEQ ID NO: 787277 - DNA, 33 bp, Homo sapien
tcattggatcttactaggaaaacaaaaaatttc

SEQ ID NO: 787278 - DNA, 33 bp, Homo sapien
tcattggatcttactatgaaaacaaaaaatttc

SEQ ID NO: 787279 - DNA, 33 bp, Homo sapien
aaatcctttatgttacactcttgcaacagtgtg

SEQ ID NO: 787280 - DNA, 33 bp, Homo sapien
aaatcctttatgttacgctcttgcaacagtgtg

SEQ ID NO: 787281 - DNA, 33 bp, Homo sapien
ctacatcatatcagatcagttttccttacaatt

SEQ ID NO: 787282 - DNA, 33 bp, Homo sapien
ctacatcatatcagatgagttttccttacaatt

SEQ ID NO: 787283 - DNA, 33 bp, Homo sapien
tctagaaaaatgttcagagtctatgtttcctgt

SEQ ID NO: 787284 - DNA, 33 bp, Homo sapien
tctagaaaaatgttcatagtctatgtttcctgt

SEQ ID NO: 787285 - DNA, 33 bp, Homo sapien
atagtttttgtgaccaacaattaatgcacaaga

SEQ ID NO: 787286 - DNA, 33 bp, Homo sapien
atagtttttgtgaccagcaattaatgcacaaga

SEQ ID NO: 787287 - DNA, 33 bp, Homo sapien
tggctggggttgaaggcactgctcacatccatg

SEQ ID NO: 787288 - DNA, 33 bp, Homo sapien
tggctggggttgaaggtactgctcacatccatg

SEQ ID NO: 787289 - DNA, 33 bp, Homo sapien
cgtcacataagatcaccgggaacttaacaagta

SEQ ID NO: 787290 - DNA, 33 bp, Homo sapien
cgtcacataagatcactgggaacttaacaagta

SEQ ID NO: 787291 - DNA, 33 bp, Homo sapien
tatactatgaaaataacgtttaaatgatagttc

SEQ ID NO: 787292 - DNA, 33 bp, Homo sapien
tatactatgaaaataaggtttaaatgatagttc

SEQ ID NO: 787293 - DNA, 33 bp, Homo sapien
ttacacagctacagggaacataagaggtgcctt

SEQ ID NO: 787294 - DNA, 33 bp, Homo sapien
ttacacagctacagggtacataagaggtgcctt

SEQ ID NO: 787295 - DNA, 33 bp, Homo sapien
tttggatattcatacccctacaatattgtatat

SEQ ID NO: 787296 - DNA, 33 bp, Homo sapien
tttggatattcatacctctacaatattgtatat

SEQ ID NO: 787297 - DNA, 33 bp, Homo sapien
aagagaggaaacaaacactatcctccaaatgaa

SEQ ID NO: 787298 - DNA, 33 bp, Homo sapien
aagagaggaaacaaacgctatcctccaaatgaa

SEQ ID NO: 787299 - DNA, 33 bp, Homo sapien
caaatgctgacaaagacgcggcaaaaagagaat

SEQ ID NO: 787300 - DNA, 33 bp, Homo sapien
caaatgctgacaaagatgcggcaaaaagagaat

SEQ ID NO: 787301 - DNA, 33 bp, Homo sapien
tatagtagtatagcaaataaacactgtagatta

SEQ ID NO: 787302 - DNA, 33 bp, Homo sapien
tatagtagtatagcaagtaaacactgtagatta

SEQ ID NO: 787303 - DNA, 33 bp, Homo sapien
gtatgtcttgaagaagcctatacttttataaaa

SEQ ID NO: 787304 - DNA, 33 bp, Homo sapien
gtatgtcttgaagaaggctatacttttataaaa

SEQ ID NO: 787305 - DNA, 33 bp, Homo sapien
tgattagtgtaatgaacggatgtcagggaagaa

SEQ ID NO: 787306 - DNA, 33 bp, Homo sapien
tgattagtgtaatgaatggatgtcagggaagaa

SEQ ID NO: 787307 - DNA, 33 bp, Homo sapien
ggattatgaatagagaaaaagtgtgtagttgaa

SEQ ID NO: 787308 - DNA, 33 bp, Homo sapien
ggattatgaatagagacaaagtgtgtagttgaa

SEQ ID NO: 787309 - DNA, 33 bp, Homo sapien
tcaatcctgtgaccaaaattctttaaacctgta

SEQ ID NO: 787310 - DNA, 33 bp, Homo sapien
tcaatcctgtgaccaacattctttaaacctgta

SEQ ID NO: 787311 - DNA, 33 bp, Homo sapien
ttaccaattcataccactattgattttattcaa

SEQ ID NO: 787312 - DNA, 33 bp, Homo sapien
ttaccaattcataccattattgattttattcaa

SEQ ID NO: 787313 - DNA, 33 bp, Homo sapien
gaaaaaaatgtttgcaagtggcttaataaagat

SEQ ID NO: 787314 - DNA, 33 bp, Homo sapien
gaaaaaaatgtttgcaggtggcttaataaagat

SEQ ID NO: 787315 - DNA, 33 bp, Homo sapien
aaattctaaggttatcaaaaattggatgaggta

SEQ ID NO: 787316 - DNA, 33 bp, Homo sapien
aaattctaaggttatcgaaaattggatgaggta

SEQ ID NO: 787317 - DNA, 33 bp, Homo sapien
ccacttttgtcaagtacgttatcgtatgtttaa

SEQ ID NO: 787318 - DNA, 33 bp, Homo sapien
ccacttttgtcaagtatgttatcgtatgtttaa

SEQ ID NO: 787319 - DNA, 33 bp, Homo sapien
tattttatcattttcacgagcagttcctattaa

SEQ ID NO: 787320 - DNA, 33 bp, Homo sapien
tattttatcattttcatgagcagttcctattaa

SEQ ID NO: 787321 - DNA, 33 bp, Homo sapien
catgtatttttacaaaatgtgatagttttatac

SEQ ID NO: 787322 - DNA, 33 bp, Homo sapien
catgtatttttacaaattgtgatagttttatac

SEQ ID NO: 787323 - DNA, 33 bp, Homo sapien
gactgaaagccagtacacacaaaaaagagactt

SEQ ID NO: 787324 - DNA, 33 bp, Homo sapien
gactgaaagccagtacgcacaaaaaagagactt

SEQ ID NO: 787325 - DNA, 33 bp, Homo sapien
tgtgattatgaggacaacacatttagagtaggg

SEQ ID NO: 787326 - DNA, 33 bp, Homo sapien
tgtgattatgaggacatcacatttagagtaggg

SEQ ID NO: 787327 - DNA, 33 bp, Homo sapien
gccttgatcttgtctaccattgtaaattagctt

SEQ ID NO: 787328 - DNA, 33 bp, Homo sapien
gccttgatcttgtctatcattgtaaattagctt

SEQ ID NO: 787329 - DNA, 33 bp, Homo sapien
tgaagatggatcaggacgtcacgactttttgta

SEQ ID NO: 787330 - DNA, 33 bp, Homo sapien
tgaagatggatcaggatgtcacgactttttgta

SEQ ID NO: 787331 - DNA, 33 bp, Homo sapien
caatgaaatacccatcaaaataccaatatcatt

SEQ ID NO: 787332 - DNA, 33 bp, Homo sapien
caatgaaatacccatcgaaataccaatatcatt

SEQ ID NO: 787333 - DNA, 33 bp, Homo sapien
gaaactaaaaacaagaccacatagccaaagcaa

SEQ ID NO: 787334 - DNA, 33 bp, Homo sapien
gaaactaaaaacaagatcacatagccaaagcaa

SEQ ID NO: 787335 - DNA, 33 bp, Homo sapien
aaagaactgctatacacaatgataacactcttg

SEQ ID NO: 787336 - DNA, 33 bp, Homo sapien
aaagaactgctatacagaatgataacactcttg

SEQ ID NO: 787337 - DNA, 33 bp, Homo sapien
cttaaatctatcatctgactgaatccttacaat

SEQ ID NO: 787338 - DNA, 33 bp, Homo sapien
cttaaatctatcatcttactgaatccttacaat

SEQ ID NO: 787339 - DNA, 33 bp, Homo sapien
tttatccatgtgtatccaggaactatataagtg

SEQ ID NO: 787340 - DNA, 33 bp, Homo sapien
tttatccatgtgtatctaggaactatataagtg

SEQ ID NO: 787341 - DNA, 33 bp, Homo sapien
tcaattcaatttcctcgccacattgtcccaatc

SEQ ID NO: 787342 - DNA, 33 bp, Homo sapien
tcaattcaatttcctctccacattgtcccaatc

SEQ ID NO: 787343 - DNA, 33 bp, Homo sapien
actatggaaagtgtgaaaaactggtgaaggtaa

SEQ ID NO: 787344 - DNA, 33 bp, Homo sapien
actatggaaagtgtgataaactggtgaaggtaa

SEQ ID NO: 787345 - DNA, 33 bp, Homo sapien
tcctggggccagggaagcataggagaaagtgaa

SEQ ID NO: 787346 - DNA, 33 bp, Homo sapien
tcctggggccagggaatcataggagaaagtgaa

SEQ ID NO: 787347 - DNA, 33 bp, Homo sapien
agagtcctctcctggaatataaatgcacagcat

SEQ ID NO: 787348 - DNA, 33 bp, Homo sapien
agagtcctctcctggattataaatgcacagcat

SEQ ID NO: 787349 - DNA, 33 bp, Homo sapien
taacaataagtagtcacagtgaatactctcttt

SEQ ID NO: 787350 - DNA, 33 bp, Homo sapien
taacaataagtagtcagagtgaatactctcttt

SEQ ID NO: 787351 - DNA, 33 bp, Homo sapien
ctgggagaaaggaaaccaaattgtgcgctctct

SEQ ID NO: 787352 - DNA, 33 bp, Homo sapien
ctgggagaaaggaaacgaaattgtgcgctctct

SEQ ID NO: 787353 - DNA, 33 bp, Homo sapien
cttcagttgacacaaacacctcaatttactatt

SEQ ID NO: 787354 - DNA, 33 bp, Homo sapien
cttcagttgacacaaatacctcaatttactatt

SEQ ID NO: 787355 - DNA, 33 bp, Homo sapien
taaaccaaatagacaactggaaggagatataag

SEQ ID NO: 787356 - DNA, 33 bp, Homo sapien
taaaccaaatagacaattggaaggagatataag

SEQ ID NO: 787357 - DNA, 33 bp, Homo sapien
agtcagagccagaccaagataggagaaaaagaa

SEQ ID NO: 787358 - DNA, 33 bp, Homo sapien
agtcagagccagaccaggataggagaaaaagaa

SEQ ID NO: 787359 - DNA, 33 bp, Homo sapien
ggtctcaatcaatttaaagagttcattttgcca

SEQ ID NO: 787360 - DNA, 33 bp, Homo sapien
ggtctcaatcaatttagagagttcattttgcca

SEQ ID NO: 787361 - DNA, 33 bp, Homo sapien
agcagttctggatacacgggcaactagtgtcta

SEQ ID NO: 787362 - DNA, 33 bp, Homo sapien
agcagttctggatacatgggcaactagtgtcta

SEQ ID NO: 787363 - DNA, 33 bp, Homo sapien
atactaaggaattccacctttatcagagcctaa

SEQ ID NO: 787364 - DNA, 33 bp, Homo sapien
atactaaggaattccatctttatcagagcctaa

SEQ ID NO: 787365 - DNA, 33 bp, Homo sapien
ttttgagattggctgcactaggttaatcttggg

SEQ ID NO: 787366 - DNA, 33 bp, Homo sapien
ttttgagattggctgcgctaggttaatcttggg

SEQ ID NO: 787367 - DNA, 33 bp, Homo sapien
aggaagctgggaaacactaggcagaaaaatgaa

SEQ ID NO: 787368 - DNA, 33 bp, Homo sapien
aggaagctgggaaacattaggcagaaaaatgaa

SEQ ID NO: 787369 - DNA, 33 bp, Homo sapien
ttattctggcagattcacatactgggtaattta

SEQ ID NO: 787370 - DNA, 33 bp, Homo sapien
ttattctggcagattcgcatactgggtaattta

SEQ ID NO: 787371 - DNA, 33 bp, Homo sapien
gaagcttatctcattcaccagcactatgccttt

SEQ ID NO: 787372 - DNA, 33 bp, Homo sapien
gaagcttatctcattcgccagcactatgccttt

SEQ ID NO: 787373 - DNA, 33 bp, Homo sapien
attaagtactaggccacagaatctgcattgaga

SEQ ID NO: 787374 - DNA, 33 bp, Homo sapien
attaagtactaggccatagaatctgcattgaga

SEQ ID NO: 787375 - DNA, 33 bp, Homo sapien
tcagattagttagctcactgcttctcaatttta

SEQ ID NO: 787376 - DNA, 33 bp, Homo sapien
tcagattagttagctcgctgcttctcaatttta

SEQ ID NO: 787377 - DNA, 33 bp, Homo sapien
ttctctaagaaacacactcagggataaaccagc

SEQ ID NO: 787378 - DNA, 33 bp, Homo sapien
ttctctaagaaacacagtcagggataaaccagc

SEQ ID NO: 787379 - DNA, 33 bp, Homo sapien
atatctagcatgagtaagtacctgcatttatgt

SEQ ID NO: 787380 - DNA, 33 bp, Homo sapien
atatctagcatgagtacgtacctgcatttatgt

SEQ ID NO: 787381 - DNA, 33 bp, Homo sapien
taggttgtcacctttacagagaggtagatggta

SEQ ID NO: 787382 - DNA, 33 bp, Homo sapien
taggttgtcacctttatagagaggtagatggta

SEQ ID NO: 787383 - DNA, 33 bp, Homo sapien
ctatcaaaacatgggccacacgttttgatggtt

SEQ ID NO: 787384 - DNA, 33 bp, Homo sapien
ctatcaaaacatgggctacacgttttgatggtt

SEQ ID NO: 787385 - DNA, 33 bp, Homo sapien
tgggtataagagaatgaaaccacaaagtactga

SEQ ID NO: 787386 - DNA, 33 bp, Homo sapien
tgggtataagagaatgcaaccacaaagtactga

SEQ ID NO: 787387 - DNA, 33 bp, Homo sapien
ggagtttagcatgaagcatactattgtcaacac

SEQ ID NO: 787388 - DNA, 33 bp, Homo sapien
ggagtttagcatgaaggatactattgtcaacac

SEQ ID NO: 787389 - DNA, 33 bp, Homo sapien
ctgagataatacagaacgttcaaataaagacaa

SEQ ID NO: 787390 - DNA, 33 bp, Homo sapien
ctgagataatacagaatgttcaaataaagacaa

SEQ ID NO: 787391 - DNA, 33 bp, Homo sapien
gacacctagtattaacaatcataagtccaccct

SEQ ID NO: 787392 - DNA, 33 bp, Homo sapien
gacacctagtattaaccatcataagtccaccct

SEQ ID NO: 787393 - DNA, 33 bp, Homo sapien
aagtttaatattctcactctagtcagtgtattt

SEQ ID NO: 787394 - DNA, 33 bp, Homo sapien
aagtttaatattctcattctagtcagtgtattt

SEQ ID NO: 787395 - DNA, 33 bp, Homo sapien
gttgttatatgcagcaagtaagtgtatttgaaa

SEQ ID NO: 787396 - DNA, 33 bp, Homo sapien
gttgttatatgcagcacgtaagtgtatttgaaa

SEQ ID NO: 787397 - DNA, 33 bp, Homo sapien
ctgcaagaaaattccccatcttcactatgtttg

SEQ ID NO: 787398 - DNA, 33 bp, Homo sapien
ctgcaagaaaattccctatcttcactatgtttg

SEQ ID NO: 787399 - DNA, 33 bp, Homo sapien
aaaaactttagagatacggattcaagtgtgata

SEQ ID NO: 787400 - DNA, 33 bp, Homo sapien
aaaaactttagagatatggattcaagtgtgata

SEQ ID NO: 787401 - DNA, 33 bp, Homo sapien
gaagctgtttgtatcaagacggcaaatccctca

SEQ ID NO: 787402 - DNA, 33 bp, Homo sapien
gaagctgtttgtatcacgacggcaaatccctca

SEQ ID NO: 787403 - DNA, 33 bp, Homo sapien
gaaatccatagtcttacgaaggcagagttttgt

SEQ ID NO: 787404 - DNA, 33 bp, Homo sapien
gaaatccatagtcttaggaaggcagagttttgt

SEQ ID NO: 787405 - DNA, 33 bp, Homo sapien
aactgtcattgcatcaagggcataagtgggagt

SEQ ID NO: 787406 - DNA, 33 bp, Homo sapien
aactgtcattgcatcaggggcataagtgggagt

SEQ ID NO: 787407 - DNA, 33 bp, Homo sapien
gtacttctgagaattacgtaaaaccttgaaaaa

SEQ ID NO: 787408 - DNA, 33 bp, Homo sapien
gtacttctgagaattaggtaaaaccttgaaaaa

SEQ ID NO: 787409 - DNA, 33 bp, Homo sapien
ctgtgtttttgtgaagaaagttccatagttcac

SEQ ID NO: 787410 - DNA, 33 bp, Homo sapien
ctgtgtttttgtgaaggaagttccatagttcac

SEQ ID NO: 787411 - DNA, 33 bp, Homo sapien
tggtaggcaccttataacacacatctcctaagg

SEQ ID NO: 787412 - DNA, 33 bp, Homo sapien
tggtaggcaccttataccacacatctcctaagg

SEQ ID NO: 787413 - DNA, 33 bp, Homo sapien
ggtataatccacatcccctacctatagaacaac

SEQ ID NO: 787414 - DNA, 33 bp, Homo sapien
ggtataatccacatcctctacctatagaacaac

SEQ ID NO: 787415 - DNA, 33 bp, Homo sapien
tctggtcattactatactagattttgaacataa

SEQ ID NO: 787416 - DNA, 33 bp, Homo sapien
tctggtcattactatattagattttgaacataa

SEQ ID NO: 787417 - DNA, 33 bp, Homo sapien
tagggattttgtaatacacagttagtctggtca

SEQ ID NO: 787418 - DNA, 33 bp, Homo sapien
tagggattttgtaatatacagttagtctggtca

SEQ ID NO: 787419 - DNA, 33 bp, Homo sapien
ttcttctctagcaggcactataatcataaatct

SEQ ID NO: 787420 - DNA, 33 bp, Homo sapien
ttcttctctagcaggcgctataatcataaatct

SEQ ID NO: 787421 - DNA, 33 bp, Homo sapien
tgctctgtagcaaaaaccttttcaagctctgaa

SEQ ID NO: 787422 - DNA, 33 bp, Homo sapien
tgctctgtagcaaaaatcttttcaagctctgaa

SEQ ID NO: 787423 - DNA, 33 bp, Homo sapien
gcctttaagcctctcaaaacggtttagccatgt

SEQ ID NO: 787424 - DNA, 33 bp, Homo sapien
gcctttaagcctctcacaacggtttagccatgt

SEQ ID NO: 787425 - DNA, 33 bp, Homo sapien
tctttccttctagtaacctccagtatctattgt

SEQ ID NO: 787426 - DNA, 33 bp, Homo sapien
tctttccttctagtaatctccagtatctattgt

SEQ ID NO: 787427 - DNA, 33 bp, Homo sapien
gtgattgactggttctaaaggagaattagagaa

SEQ ID NO: 787428 - DNA, 33 bp, Homo sapien
gtgattgactggttctcaaggagaattagagaa

SEQ ID NO: 787429 - DNA, 33 bp, Homo sapien
acacacagttggtctccaatacatctagcagca

SEQ ID NO: 787430 - DNA, 33 bp, Homo sapien
acacacagttggtctctaatacatctagcagca

SEQ ID NO: 787431 - DNA, 33 bp, Homo sapien
tctcatcacataaaacactttagactttgagga

SEQ ID NO: 787432 - DNA, 33 bp, Homo sapien
tctcatcacataaaactctttagactttgagga

SEQ ID NO: 787433 - DNA, 33 bp, Homo sapien
accaccttgctacctcactttatagaggtttaa

SEQ ID NO: 787434 - DNA, 33 bp, Homo sapien
accaccttgctacctcgctttatagaggtttaa

SEQ ID NO: 787435 - DNA, 33 bp, Homo sapien
acatttattggatacacagcttgtgaatatttt

SEQ ID NO: 787436 - DNA, 33 bp, Homo sapien
acatttattggatacatagcttgtgaatatttt

SEQ ID NO: 787437 - DNA, 33 bp, Homo sapien
acttgtcagaaagttgcagttggaattactgct

SEQ ID NO: 787438 - DNA, 33 bp, Homo sapien
acttgtcagaaagttgtagttggaattactgct

SEQ ID NO: 787439 - DNA, 33 bp, Homo sapien
atcttcagggctggacgaactccataattcagg

SEQ ID NO: 787440 - DNA, 33 bp, Homo sapien
atcttcagggctggactaactccataattcagg

SEQ ID NO: 787441 - DNA, 33 bp, Homo sapien
tccccccgcaacctgaaagcgccagcacaaagc

SEQ ID NO: 787442 - DNA, 33 bp, Homo sapien
tccccccgcaacctgatagcgccagcacaaagc

SEQ ID NO: 787443 - DNA, 33 bp, Homo sapien
tcagttctttagactacattttgaagacctgag

SEQ ID NO: 787444 - DNA, 33 bp, Homo sapien
tcagttctttagactatattttgaagacctgag

SEQ ID NO: 787445 - DNA, 33 bp, Homo sapien
taatttaagtggaatgcaatgccttgactggac

SEQ ID NO: 787446 - DNA, 33 bp, Homo sapien
taatttaagtggaatgtaatgccttgactggac

SEQ ID NO: 787447 - DNA, 33 bp, Homo sapien
ttaatgttttgtttgacgtgtacaccagggtta

SEQ ID NO: 787448 - DNA, 33 bp, Homo sapien
ttaatgttttgtttgatgtgtacaccagggtta

SEQ ID NO: 787449 - DNA, 33 bp, Homo sapien
gcatgaaaggtactgaaaaaagtgctgatattg

SEQ ID NO: 787450 - DNA, 33 bp, Homo sapien
gcatgaaaggtactgagaaaagtgctgatattg

SEQ ID NO: 787451 - DNA, 33 bp, Homo sapien
aaagtagctgaacgaactcctacaatagttcaa

SEQ ID NO: 787452 - DNA, 33 bp, Homo sapien
aaagtagctgaacgaattcctacaatagttcaa

SEQ ID NO: 787453 - DNA, 33 bp, Homo sapien
tcttacattcaagttcacgctgatgcaagaggt

SEQ ID NO: 787454 - DNA, 33 bp, Homo sapien
tcttacattcaagttcgcgctgatgcaagaggt

SEQ ID NO: 787455 - DNA, 33 bp, Homo sapien
tacttgcatataattaccctttgctgactacag

SEQ ID NO: 787456 - DNA, 33 bp, Homo sapien
tacttgcatataattatcctttgctgactacag

SEQ ID NO: 787457 - DNA, 33 bp, Homo sapien
cattctaggttattcacggttgcggaggaaaca

SEQ ID NO: 787458 - DNA, 33 bp, Homo sapien
cattctaggttattcatggttgcggaggaaaca

SEQ ID NO: 787459 - DNA, 33 bp, Homo sapien
tctttgtagatgtgtcccatgactttctttcca

SEQ ID NO: 787460 - DNA, 33 bp, Homo sapien
tctttgtagatgtgtcgcatgactttctttcca

SEQ ID NO: 787461 - DNA, 33 bp, Homo sapien
ctgtgtccttacactgaatcatgcagaacattc

SEQ ID NO: 787462 - DNA, 33 bp, Homo sapien
ctgtgtccttacactggatcatgcagaacattc

SEQ ID NO: 787463 - DNA, 33 bp, Homo sapien
tttgatgagttccaaaacaatgaaggactattt

SEQ ID NO: 787464 - DNA, 33 bp, Homo sapien
tttgatgagttccaaagcaatgaaggactattt

SEQ ID NO: 787465 - DNA, 33 bp, Homo sapien
ttcttcaggtcaagaagttaaagtttcaggtca

SEQ ID NO: 787466 - DNA, 33 bp, Homo sapien
ttcttcaggtcaagaatttaaagtttcaggtca

SEQ ID NO: 787467 - DNA, 33 bp, Homo sapien
atagaatccagcagaaaattagcatgaatcagt

SEQ ID NO: 787468 - DNA, 33 bp, Homo sapien
atagaatccagcagaacattagcatgaatcagt

SEQ ID NO: 787469 - DNA, 33 bp, Homo sapien
tttgaacatgaacataaagtaatggaagctgcc

SEQ ID NO: 787470 - DNA, 33 bp, Homo sapien
tttgaacatgaacatatagtaatggaagctgcc

SEQ ID NO: 787471 - DNA, 33 bp, Homo sapien
gtatagatacaagaaaaccgtgcagtagccatc

SEQ ID NO: 787472 - DNA, 33 bp, Homo sapien
gtatagatacaagaaagccgtgcagtagccatc

SEQ ID NO: 787473 - DNA, 33 bp, Homo sapien
ttgttcccagttataaatcctagtagcaatttt

SEQ ID NO: 787474 - DNA, 33 bp, Homo sapien
ttgttcccagttataagtcctagtagcaatttt

SEQ ID NO: 787475 - DNA, 33 bp, Homo sapien
ggatgagtactcatccagaagctcagctgatgt

SEQ ID NO: 787476 - DNA, 33 bp, Homo sapien
ggatgagtactcatccggaagctcagctgatgt

SEQ ID NO: 787477 - DNA, 33 bp, Homo sapien
cagcagatttctaaaacgcactcgtcttgcctt

SEQ ID NO: 787478 - DNA, 33 bp, Homo sapien
cagcagatttctaaaatgcactcgtcttgcctt

SEQ ID NO: 787479 - DNA, 33 bp, Homo sapien
catttgccttatgcctcacataaacgtatacca

SEQ ID NO: 787480 - DNA, 33 bp, Homo sapien
catttgccttatgccttacataaacgtatacca

SEQ ID NO: 787481 - DNA, 33 bp, Homo sapien
gttgcccaatgagtcacagagtagctatccaac

SEQ ID NO: 787482 - DNA, 33 bp, Homo sapien
gttgcccaatgagtcatagagtagctatccaac

SEQ ID NO: 787483 - DNA, 33 bp, Homo sapien
aagaaaccacagactacgatttgcagaaaaaat

SEQ ID NO: 787484 - DNA, 33 bp, Homo sapien
aagaaaccacagactatgatttgcagaaaaaat

SEQ ID NO: 787485 - DNA, 33 bp, Homo sapien
ataagtcaagcactgcaaatcattcctgagtgc

SEQ ID NO: 787486 - DNA, 33 bp, Homo sapien
ataagtcaagcactgcgaatcattcctgagtgc

SEQ ID NO: 787487 - DNA, 33 bp, Homo sapien
cacagtacaatatgtgcattacctcttccagat

SEQ ID NO: 787488 - DNA, 33 bp, Homo sapien
cacagtacaatatgtggattacctcttccagat

SEQ ID NO: 787489 - DNA, 33 bp, Homo sapien
agtaaagccttgctcaatcagatgtagagtagc

SEQ ID NO: 787490 - DNA, 33 bp, Homo sapien
agtaaagccttgctcattcagatgtagagtagc

SEQ ID NO: 787491 - DNA, 33 bp, Homo sapien
gatgtagagtagcaaaggatcactccgcttaat

SEQ ID NO: 787492 - DNA, 33 bp, Homo sapien
gatgtagagtagcaaatgatcactccgcttaat

SEQ ID NO: 787493 - DNA, 33 bp, Homo sapien
tttaaaaagcttaatgaaaaaaacagtgtttaa

SEQ ID NO: 787494 - DNA, 33 bp, Homo sapien
tttaaaaagcttaatgtaaaaaacagtgtttaa

SEQ ID NO: 787495 - DNA, 33 bp, Homo sapien
gctgcaatatctacaagtgggataatgagtcct

SEQ ID NO: 787496 - DNA, 33 bp, Homo sapien
gctgcaatatctacaattgggataatgagtcct

SEQ ID NO: 787497 - DNA, 33 bp, Homo sapien
gtaactttagtccagacgattcatttgtaatga

SEQ ID NO: 787498 - DNA, 33 bp, Homo sapien
gtaactttagtccagatgattcatttgtaatga

SEQ ID NO: 787499 - DNA, 33 bp, Homo sapien
cacgggccgcatggctgactgaagtatgtagtt

SEQ ID NO: 787500 - DNA, 33 bp, Homo sapien
cacgggccgcatggcttactgaagtatgtagtt

SEQ ID NO: 787501 - DNA, 33 bp, Homo sapien
ctgtgtcttatcctgtgaagtaggttctaattt

SEQ ID NO: 787502 - DNA, 33 bp, Homo sapien
ctgtgtcttatcctgttaagtaggttctaattt

SEQ ID NO: 787503 - DNA, 33 bp, Homo sapien
gcatatatcattccccaataccaggaggcatta

SEQ ID NO: 787504 - DNA, 33 bp, Homo sapien
gcatatatcattccccgataccaggaggcatta

SEQ ID NO: 787505 - DNA, 33 bp, Homo sapien
ttgcagatctgcacccaatttcttacattaaga

SEQ ID NO: 787506 - DNA, 33 bp, Homo sapien
ttgcagatctgcacccgatttcttacattaaga

SEQ ID NO: 787507 - DNA, 33 bp, Homo sapien
taggaaaatatcagtaggtggaaaccagttgag

SEQ ID NO: 787508 - DNA, 33 bp, Homo sapien
taggaaaatatcagtatgtggaaaccagttgag

SEQ ID NO: 787509 - DNA, 33 bp, Homo sapien
agtcatgagaactgagactcaaagcagttgatt

SEQ ID NO: 787510 - DNA, 33 bp, Homo sapien
agtcatgagaactgaggctcaaagcagttgatt

SEQ ID NO: 787511 - DNA, 33 bp, Homo sapien
ctcactatacagctggaattttctaagccttct

SEQ ID NO: 787512 - DNA, 33 bp, Homo sapien
ctcactatacagctgggattttctaagccttct

SEQ ID NO: 787513 - DNA, 33 bp, Homo sapien
ttgtgaagtgctctaactcttttttaagctgtg

SEQ ID NO: 787514 - DNA, 33 bp, Homo sapien
ttgtgaagtgctctaattcttttttaagctgtg

SEQ ID NO: 787515 - DNA, 33 bp, Homo sapien
ccatagtttattgctcacttcaccaaattcttc

SEQ ID NO: 787516 - DNA, 33 bp, Homo sapien
ccatagtttattgctcccttcaccaaattcttc

SEQ ID NO: 787517 - DNA, 33 bp, Homo sapien
tgatgctgctcctgtcacggtgctctttccact

SEQ ID NO: 787518 - DNA, 33 bp, Homo sapien
tgatgctgctcctgtcgcggtgctctttccact

SEQ ID NO: 787519 - DNA, 33 bp, Homo sapien
aggcagtatttagaaaacttagagagcaggagt

SEQ ID NO: 787520 - DNA, 33 bp, Homo sapien
aggcagtatttagaaagcttagagagcaggagt

SEQ ID NO: 787521 - DNA, 33 bp, Homo sapien
ttttaaaatatgttgggaatgtactcagaatat

SEQ ID NO: 787522 - DNA, 33 bp, Homo sapien
ttttaaaatatgttggtaatgtactcagaatat

SEQ ID NO: 787523 - DNA, 33 bp, Homo sapien
agtaaagttatttggtaaaagcaactacagaga

SEQ ID NO: 787524 - DNA, 33 bp, Homo sapien
agtaaagttatttggtgaaagcaactacagaga

SEQ ID NO: 787525 - DNA, 33 bp, Homo sapien
ttaatcttttgcaggacgttttcaatccacatt

SEQ ID NO: 787526 - DNA, 33 bp, Homo sapien
ttaatcttttgcaggatgttttcaatccacatt

SEQ ID NO: 787527 - DNA, 33 bp, Homo sapien
tagaattaacaggtaacgttaaaataatctgat

SEQ ID NO: 787528 - DNA, 33 bp, Homo sapien
tagaattaacaggtaaggttaaaataatctgat

SEQ ID NO: 787529 - DNA, 33 bp, Homo sapien
cgtttagttccataaaaataactgaatgacaaa

SEQ ID NO: 787530 - DNA, 33 bp, Homo sapien
cgtttagttccataaatataactgaatgacaaa

SEQ ID NO: 787531 - DNA, 33 bp, Homo sapien
taaaaaacttgacttgcataagtaatggtacag

SEQ ID NO: 787532 - DNA, 33 bp, Homo sapien
taaaaaacttgacttgtataagtaatggtacag

SEQ ID NO: 787533 - DNA, 33 bp, Homo sapien
gtattatcgccaaagacaaagaaggaatccaaa

SEQ ID NO: 787534 - DNA, 33 bp, Homo sapien
gtattatcgccaaagataaagaaggaatccaaa

SEQ ID NO: 787535 - DNA, 33 bp, Homo sapien
aatgtacattttggaacagcatctgataaactc

SEQ ID NO: 787536 - DNA, 33 bp, Homo sapien
aatgtacattttggaatagcatctgataaactc

SEQ ID NO: 787537 - DNA, 33 bp, Homo sapien
ttggcgcaagataatgaatgacatttatctctt

SEQ ID NO: 787538 - DNA, 33 bp, Homo sapien
ttggcgcaagataatggatgacatttatctctt

SEQ ID NO: 787539 - DNA, 33 bp, Homo sapien
attaatgagggtgttaaagatacaaagagcaga

SEQ ID NO: 787540 - DNA, 33 bp, Homo sapien
attaatgagggtgttacagatacaaagagcaga

SEQ ID NO: 787541 - DNA, 33 bp, Homo sapien
ctggagatctatgcagcatacactaacagaaat

SEQ ID NO: 787542 - DNA, 33 bp, Homo sapien
ctggagatctatgcagtatacactaacagaaat

SEQ ID NO: 787543 - DNA, 33 bp, Homo sapien
ttatttagaatagagcaagagcaaaagagaaat

SEQ ID NO: 787544 - DNA, 33 bp, Homo sapien
ttatttagaatagagcgagagcaaaagagaaat

SEQ ID NO: 787545 - DNA, 33 bp, Homo sapien
cctttcaaccatgccaagttttaacttgaaaat

SEQ ID NO: 787546 - DNA, 33 bp, Homo sapien
cctttcaaccatgccaggttttaacttgaaaat

SEQ ID NO: 787547 - DNA, 33 bp, Homo sapien
catcaaccaagtgaatcaagaaaggtattgatt

SEQ ID NO: 787548 - DNA, 33 bp, Homo sapien
catcaaccaagtgaatgaagaaaggtattgatt

SEQ ID NO: 787549 - DNA, 33 bp, Homo sapien
ctatttagtgacaaaaatgtttagctaattagc

SEQ ID NO: 787550 - DNA, 33 bp, Homo sapien
ctatttagtgacaaaactgtttagctaattagc

SEQ ID NO: 787551 - DNA, 33 bp, Homo sapien
taggaaagcattgataagtttaggagatatgtg

SEQ ID NO: 787552 - DNA, 33 bp, Homo sapien
taggaaagcattgataggtttaggagatatgtg

SEQ ID NO: 787553 - DNA, 33 bp, Homo sapien
agacctgcctagaagtcaagtagtttccagtac

SEQ ID NO: 787554 - DNA, 33 bp, Homo sapien
agacctgcctagaagttaagtagtttccagtac

SEQ ID NO: 787555 - DNA, 33 bp, Homo sapien
tgaagaaataacaatcacattggaaaacctatt

SEQ ID NO: 787556 - DNA, 33 bp, Homo sapien
tgaagaaataacaatcgcattggaaaacctatt

SEQ ID NO: 787557 - DNA, 33 bp, Homo sapien
ctctgtttgatatccacgttttcatttctttgg

SEQ ID NO: 787558 - DNA, 33 bp, Homo sapien
ctctgtttgatatccatgttttcatttctttgg

SEQ ID NO: 787559 - DNA, 33 bp, Homo sapien
atttatttacaatactaagctacagaaacaaca

SEQ ID NO: 787560 - DNA, 33 bp, Homo sapien
atttatttacaatactgagctacagaaacaaca

SEQ ID NO: 787561 - DNA, 33 bp, Homo sapien
atgttgataaaacacaataccgataacagcatc

SEQ ID NO: 787562 - DNA, 33 bp, Homo sapien
atgttgataaaacacagtaccgataacagcatc

SEQ ID NO: 787563 - DNA, 33 bp, Homo sapien
gtcaatatctcaaccaataatgatttctgtatc

SEQ ID NO: 787564 - DNA, 33 bp, Homo sapien
gtcaatatctcaaccagtaatgatttctgtatc

SEQ ID NO: 787565 - DNA, 33 bp, Homo sapien
tttacctaggaattataaacgcatattaaaata

SEQ ID NO: 787566 - DNA, 33 bp, Homo sapien
tttacctaggaattattaacgcatattaaaata

SEQ ID NO: 787567 - DNA, 33 bp, Homo sapien
ccattagaatggcatacagtagcttcttctaat

SEQ ID NO: 787568 - DNA, 33 bp, Homo sapien
ccattagaatggcatatagtagcttcttctaat

SEQ ID NO: 787569 - DNA, 33 bp, Homo sapien
cctgcctcctgtttgcacctggttttctcaatg

SEQ ID NO: 787570 - DNA, 33 bp, Homo sapien
cctgcctcctgtttgcgcctggttttctcaatg

SEQ ID NO: 787571 - DNA, 33 bp, Homo sapien
tttatcattacagtctgaattgtagccttagtt

SEQ ID NO: 787572 - DNA, 33 bp, Homo sapien
tttatcattacagtcttaattgtagccttagtt

SEQ ID NO: 787573 - DNA, 33 bp, Homo sapien
ctactgaaatatcacaaatgagtaccggatttt

SEQ ID NO: 787574 - DNA, 33 bp, Homo sapien
ctactgaaatatcacagatgagtaccggatttt

SEQ ID NO: 787575 - DNA, 33 bp, Homo sapien
ctgggttgggtcaagacagaataacaagaaatc

SEQ ID NO: 787576 - DNA, 33 bp, Homo sapien
ctgggttgggtcaagatagaataacaagaaatc

SEQ ID NO: 787577 - DNA, 33 bp, Homo sapien
gtaaaatatgcaaaaaagagaatggtctatcaa

SEQ ID NO: 787578 - DNA, 33 bp, Homo sapien
gtaaaatatgcaaaaaggagaatggtctatcaa

SEQ ID NO: 787579 - DNA, 33 bp, Homo sapien
atagctaaaagctgcgcacataatcattgctat

SEQ ID NO: 787580 - DNA, 33 bp, Homo sapien
atagctaaaagctgcgtacataatcattgctat

SEQ ID NO: 787581 - DNA, 33 bp, Homo sapien
ctaaatattaagaaagccttatcaactttgtgt

SEQ ID NO: 787582 - DNA, 33 bp, Homo sapien
ctaaatattaagaaaggcttatcaactttgtgt

SEQ ID NO: 787583 - DNA, 33 bp, Homo sapien
tacttcagagttttgaagctgactgttgtaaaa

SEQ ID NO: 787584 - DNA, 33 bp, Homo sapien
tacttcagagttttgatgctgactgttgtaaaa

SEQ ID NO: 787585 - DNA, 33 bp, Homo sapien
ctgttgtcttcctataaaatgttgaaaggtaaa

SEQ ID NO: 787586 - DNA, 33 bp, Homo sapien
ctgttgtcttcctatacaatgttgaaaggtaaa

SEQ ID NO: 787587 - DNA, 33 bp, Homo sapien
ctctgtcttcaacaaaactattaacaaaaactt

SEQ ID NO: 787588 - DNA, 33 bp, Homo sapien
ctctgtcttcaacaaagctattaacaaaaactt

SEQ ID NO: 787589 - DNA, 33 bp, Homo sapien
gggagatgttcagagactagttgaacccttata

SEQ ID NO: 787590 - DNA, 33 bp, Homo sapien
gggagatgttcagagattagttgaacccttata

SEQ ID NO: 787591 - DNA, 33 bp, Homo sapien
taaggtacaaggagcaatgaggtgcctttgtgc

SEQ ID NO: 787592 - DNA, 33 bp, Homo sapien
taaggtacaaggagcattgaggtgcctttgtgc

SEQ ID NO: 787593 - DNA, 33 bp, Homo sapien
aatcctatgaatcttaactgccaaatttccagg

SEQ ID NO: 787594 - DNA, 33 bp, Homo sapien
aatcctatgaatcttagctgccaaatttccagg

SEQ ID NO: 787595 - DNA, 33 bp, Homo sapien
cagaagacagataacactggacacacttataga

SEQ ID NO: 787596 - DNA, 33 bp, Homo sapien
cagaagacagataacattggacacacttataga

SEQ ID NO: 787597 - DNA, 33 bp, Homo sapien
taaatagcgttgaaccacaaaataaaaatattc

SEQ ID NO: 787598 - DNA, 33 bp, Homo sapien
taaatagcgttgaaccgcaaaataaaaatattc

SEQ ID NO: 787599 - DNA, 33 bp, Homo sapien
gttttagaagacattgaaaataggcagttgctt

SEQ ID NO: 787600 - DNA, 33 bp, Homo sapien
gttttagaagacattggaaataggcagttgctt

SEQ ID NO: 787601 - DNA, 33 bp, Homo sapien
gattggggcacacgagcccttgtttcatagttc

SEQ ID NO: 787602 - DNA, 33 bp, Homo sapien
gattggggcacacgagtccttgtttcatagttc

SEQ ID NO: 787603 - DNA, 33 bp, Homo sapien
tttctgaatctaaaaaaggcattattgcatcaa

SEQ ID NO: 787604 - DNA, 33 bp, Homo sapien
tttctgaatctaaaaagggcattattgcatcaa

SEQ ID NO: 787605 - DNA, 33 bp, Homo sapien
aatcaactttgatggaaaacaaatatagtaaat

SEQ ID NO: 787606 - DNA, 33 bp, Homo sapien
aatcaactttgatggagaacaaatatagtaaat

SEQ ID NO: 787607 - DNA, 33 bp, Homo sapien
attccttattttcagacagtaaatagcaatggg

SEQ ID NO: 787608 - DNA, 33 bp, Homo sapien
attccttattttcagatagtaaatagcaatggg

SEQ ID NO: 787609 - DNA, 33 bp, Homo sapien
gatgtcatatatttgactaaacacaattttaga

SEQ ID NO: 787610 - DNA, 33 bp, Homo sapien
gatgtcatatatttgattaaacacaattttaga

SEQ ID NO: 787611 - DNA, 33 bp, Homo sapien
aaccactgaacacagacgtaatattttctaaag

SEQ ID NO: 787612 - DNA, 33 bp, Homo sapien
aaccactgaacacagatgtaatattttctaaag

SEQ ID NO: 787613 - DNA, 33 bp, Homo sapien
tagaattagaaaatcaccatttagcaaccgcca

SEQ ID NO: 787614 - DNA, 33 bp, Homo sapien
tagaattagaaaatcagcatttagcaaccgcca

SEQ ID NO: 787615 - DNA, 33 bp, Homo sapien
tgttctcttttatgcactacgactatacttttg

SEQ ID NO: 787616 - DNA, 33 bp, Homo sapien
tgttctcttttatgcagtacgactatacttttg

SEQ ID NO: 787617 - DNA, 33 bp, Homo sapien
gagtgaaatctgagaaccagctcaaaactgtta

SEQ ID NO: 787618 - DNA, 33 bp, Homo sapien
gagtgaaatctgagaagcagctcaaaactgtta

SEQ ID NO: 787619 - DNA, 33 bp, Homo sapien
ataggaagtagaattgcaagacttgatgactga

SEQ ID NO: 787620 - DNA, 33 bp, Homo sapien
ataggaagtagaattgtaagacttgatgactga

SEQ ID NO: 787621 - DNA, 33 bp, Homo sapien
atgactgactacttaacgcaagactgagagata

SEQ ID NO: 787622 - DNA, 33 bp, Homo sapien
atgactgactacttaatgcaagactgagagata

SEQ ID NO: 787623 - DNA, 33 bp, Homo sapien
ctcccttccatactacagctggaccatgtttac

SEQ ID NO: 787624 - DNA, 33 bp, Homo sapien
ctcccttccatactacggctggaccatgtttac

SEQ ID NO: 787625 - DNA, 33 bp, Homo sapien
caacctgagtttctataacacatcagtttcagt

SEQ ID NO: 787626 - DNA, 33 bp, Homo sapien
caacctgagtttctatgacacatcagtttcagt

SEQ ID NO: 787627 - DNA, 33 bp, Homo sapien
ctacaccagatgcatacgtatcaaaaaaaaaag

SEQ ID NO: 787628 - DNA, 33 bp, Homo sapien
ctacaccagatgcatatgtatcaaaaaaaaaag

SEQ ID NO: 787629 - DNA, 33 bp, Homo sapien
atacataaaacaccaacgacggaattagctcaa

SEQ ID NO: 787630 - DNA, 33 bp, Homo sapien
atacataaaacaccaatgacggaattagctcaa

SEQ ID NO: 787631 - DNA, 33 bp, Homo sapien
ttctatcatttatgacaattctggctagtgagt

SEQ ID NO: 787632 - DNA, 33 bp, Homo sapien
ttctatcatttatgaccattctggctagtgagt

SEQ ID NO: 787633 - DNA, 33 bp, Homo sapien
tcgtagtaaaaatggacctcatgagaaagactt

SEQ ID NO: 787634 - DNA, 33 bp, Homo sapien
tcgtagtaaaaatggatctcatgagaaagactt

SEQ ID NO: 787635 - DNA, 33 bp, Homo sapien
gatacaatggtggtacaggtattggataaatac

SEQ ID NO: 787636 - DNA, 33 bp, Homo sapien
gatacaatggtggtaccggtattggataaatac

SEQ ID NO: 787637 - DNA, 33 bp, Homo sapien
agacacactgtgttcacagattgaaagaaccaa

SEQ ID NO: 787638 - DNA, 33 bp, Homo sapien
agacacactgtgttcatagattgaaagaaccaa

SEQ ID NO: 787639 - DNA, 33 bp, Homo sapien
attattattttattgccattcttgcaggattaa

SEQ ID NO: 787640 - DNA, 33 bp, Homo sapien
attattattttattgctattcttgcaggattaa

SEQ ID NO: 787641 - DNA, 33 bp, Homo sapien
gatggggctttccaaccggcacctccagccata

SEQ ID NO: 787642 - DNA, 33 bp, Homo sapien
gatggggctttccaactggcacctccagccata

SEQ ID NO: 787643 - DNA, 33 bp, Homo sapien
caaaaatattctgccaatatacataacctgtaa

SEQ ID NO: 787644 - DNA, 33 bp, Homo sapien
caaaaatattctgccagtatacataacctgtaa

SEQ ID NO: 787645 - DNA, 33 bp, Homo sapien
gcacaaactggaaaaaatatttgctgagtgtat

SEQ ID NO: 787646 - DNA, 33 bp, Homo sapien
gcacaaactggaaaaagtatttgctgagtgtat

SEQ ID NO: 787647 - DNA, 33 bp, Homo sapien
agatatacagaccaaacgatttacaacctattt

SEQ ID NO: 787648 - DNA, 33 bp, Homo sapien
agatatacagaccaaatgatttacaacctattt

SEQ ID NO: 787649 - DNA, 33 bp, Homo sapien
ctgccaaatcttagcccaattttagtggaaatg

SEQ ID NO: 787650 - DNA, 33 bp, Homo sapien
ctgccaaatcttagcctaattttagtggaaatg

SEQ ID NO: 787651 - DNA, 33 bp, Homo sapien
gcctctgtgtcaaaggaaagtctcaggaaataa

SEQ ID NO: 787652 - DNA, 33 bp, Homo sapien
gcctctgtgtcaaagggaagtctcaggaaataa

SEQ ID NO: 787653 - DNA, 33 bp, Homo sapien
atactccattgtgctcaagactctaaaggtatg

SEQ ID NO: 787654 - DNA, 33 bp, Homo sapien
atactccattgtgctcgagactctaaaggtatg

SEQ ID NO: 787655 - DNA, 33 bp, Homo sapien
agcattgacgaggagaacttctttggatgaaac

SEQ ID NO: 787656 - DNA, 33 bp, Homo sapien
agcattgacgaggagatcttctttggatgaaac

SEQ ID NO: 787657 - DNA, 33 bp, Homo sapien
ccgttgctcaccttcaggcaatttgtcaccatc

SEQ ID NO: 787658 - DNA, 33 bp, Homo sapien
ccgttgctcaccttcatgcaatttgtcaccatc

SEQ ID NO: 787659 - DNA, 33 bp, Homo sapien
tctgctgaagtaaaagcacaataaattagcagg

SEQ ID NO: 787660 - DNA, 33 bp, Homo sapien
tctgctgaagtaaaaggacaataaattagcagg

SEQ ID NO: 787661 - DNA, 33 bp, Homo sapien
tttctctctaatgagaatcagtaaaaccaatct

SEQ ID NO: 787662 - DNA, 33 bp, Homo sapien
tttctctctaatgagagtcagtaaaaccaatct

SEQ ID NO: 787663 - DNA, 33 bp, Homo sapien
ttgcaatgtcttatgacaagtgactaaagtaac

SEQ ID NO: 787664 - DNA, 33 bp, Homo sapien
ttgcaatgtcttatgataagtgactaaagtaac

SEQ ID NO: 787665 - DNA, 33 bp, Homo sapien
taactctgggatgccacagttacattgttctgt

SEQ ID NO: 787666 - DNA, 33 bp, Homo sapien
taactctgggatgccatagttacattgttctgt

SEQ ID NO: 787667 - DNA, 33 bp, Homo sapien
agtttaattggtcatcgctctaggttcacatag

SEQ ID NO: 787668 - DNA, 33 bp, Homo sapien
agtttaattggtcatctctctaggttcacatag

SEQ ID NO: 787669 - DNA, 33 bp, Homo sapien
tacagtctcaccaaccacatataagctttccat

SEQ ID NO: 787670 - DNA, 33 bp, Homo sapien
tacagtctcaccaaccgcatataagctttccat

SEQ ID NO: 787671 - DNA, 33 bp, Homo sapien
caagacaagtcaacaaacaatagtgctggaatc

SEQ ID NO: 787672 - DNA, 33 bp, Homo sapien
caagacaagtcaacaagcaatagtgctggaatc

SEQ ID NO: 787673 - DNA, 33 bp, Homo sapien
ataaagcaggtttcctaactaactagagaaaat

SEQ ID NO: 787674 - DNA, 33 bp, Homo sapien
ataaagcaggtttcctgactaactagagaaaat

SEQ ID NO: 787675 - DNA, 33 bp, Homo sapien
gcagagatgtaggttaaggatcctgcttttttt

SEQ ID NO: 787676 - DNA, 33 bp, Homo sapien
gcagagatgtaggttagggatcctgcttttttt

SEQ ID NO: 787677 - DNA, 33 bp, Homo sapien
gcaggcttcatttaccaccgcagaaaagtaaaa

SEQ ID NO: 787678 - DNA, 33 bp, Homo sapien
gcaggcttcatttaccgccgcagaaaagtaaaa

SEQ ID NO: 787679 - DNA, 33 bp, Homo sapien
gaacgactcaatcctaataaaacccaatatttc

SEQ ID NO: 787680 - DNA, 33 bp, Homo sapien
gaacgactcaatcctagtaaaacccaatatttc

SEQ ID NO: 787681 - DNA, 33 bp, Homo sapien
aaaaattgggcagggtcaaataaacgtccagaa

SEQ ID NO: 787682 - DNA, 33 bp, Homo sapien
aaaaattgggcagggtgaaataaacgtccagaa

SEQ ID NO: 787683 - DNA, 33 bp, Homo sapien
ctcttttacccataaaactgatgagatgaatca

SEQ ID NO: 787684 - DNA, 33 bp, Homo sapien
ctcttttacccataaagctgatgagatgaatca

SEQ ID NO: 787685 - DNA, 33 bp, Homo sapien
tctcaccacaaaaaatcatacttatttgaggtg

SEQ ID NO: 787686 - DNA, 33 bp, Homo sapien
tctcaccacaaaaaatgatacttatttgaggtg

SEQ ID NO: 787687 - DNA, 33 bp, Homo sapien
tgggaagaagataaaacgacaagctacattctt

SEQ ID NO: 787688 - DNA, 33 bp, Homo sapien
tgggaagaagataaaatgacaagctacattctt

SEQ ID NO: 787689 - DNA, 33 bp, Homo sapien
ataaattggcagagataaaaaaatcctagatta

SEQ ID NO: 787690 - DNA, 33 bp, Homo sapien
ataaattggcagagatcaaaaaatcctagatta

SEQ ID NO: 787691 - DNA, 33 bp, Homo sapien
tacctgtgaacagagagagttagataatataac

SEQ ID NO: 787692 - DNA, 33 bp, Homo sapien
tacctgtgaacagagatagttagataatataac

SEQ ID NO: 787693 - DNA, 33 bp, Homo sapien
ctgactggctaatggaaaaaagctggtgaaaaa

SEQ ID NO: 787694 - DNA, 33 bp, Homo sapien
ctgactggctaatggacaaaagctggtgaaaaa

SEQ ID NO: 787695 - DNA, 33 bp, Homo sapien
cttttaaaaatgcccaagctttgaacttttcag

SEQ ID NO: 787696 - DNA, 33 bp, Homo sapien
cttttaaaaatgcccaggctttgaacttttcag

SEQ ID NO: 787697 - DNA, 33 bp, Homo sapien
gccatcaaggaagagcaatgcactattatatca

SEQ ID NO: 787698 - DNA, 33 bp, Homo sapien
gccatcaaggaagagcgatgcactattatatca

SEQ ID NO: 787699 - DNA, 33 bp, Homo sapien
attgctattgtctgaacatttatgtgccccctg

SEQ ID NO: 787700 - DNA, 33 bp, Homo sapien
attgctattgtctgaatatttatgtgccccctg

SEQ ID NO: 787701 - DNA, 33 bp, Homo sapien
agtgccaatagagtacagatttagataattaaa

SEQ ID NO: 787702 - DNA, 33 bp, Homo sapien
agtgccaatagagtacggatttagataattaaa

SEQ ID NO: 787703 - DNA, 33 bp, Homo sapien
caaaattatgccatgactactaagctgaatgat

SEQ ID NO: 787704 - DNA, 33 bp, Homo sapien
caaaattatgccatgattactaagctgaatgat

SEQ ID NO: 787705 - DNA, 33 bp, Homo sapien
gaattagaagaggacaccacacaaaattacatg

SEQ ID NO: 787706 - DNA, 33 bp, Homo sapien
gaattagaagaggacagcacacaaaattacatg

SEQ ID NO: 787707 - DNA, 33 bp, Homo sapien
atagtaatgtcactgaacatgagaactggaata

SEQ ID NO: 787708 - DNA, 33 bp, Homo sapien
atagtaatgtcactgagcatgagaactggaata

SEQ ID NO: 787709 - DNA, 33 bp, Homo sapien
tgtggcattatagaacaaaaaggcatgggagtc

SEQ ID NO: 787710 - DNA, 33 bp, Homo sapien
tgtggcattatagaacgaaaaggcatgggagtc

SEQ ID NO: 787711 - DNA, 33 bp, Homo sapien
ttgacctgttctgtagaatttgttgtcttagtt

SEQ ID NO: 787712 - DNA, 33 bp, Homo sapien
ttgacctgttctgtagcatttgttgtcttagtt

SEQ ID NO: 787713 - DNA, 33 bp, Homo sapien
tcagtaaatggtcaaacaatatcaatgacttat

SEQ ID NO: 787714 - DNA, 33 bp, Homo sapien
tcagtaaatggtcaaataatatcaatgacttat

SEQ ID NO: 787715 - DNA, 33 bp, Homo sapien
gacatctattgttccacgcttatattaatctgt

SEQ ID NO: 787716 - DNA, 33 bp, Homo sapien
gacatctattgttccaggcttatattaatctgt

SEQ ID NO: 787717 - DNA, 33 bp, Homo sapien
attaaggtataaagtacgatggtttaccaattt

SEQ ID NO: 787718 - DNA, 33 bp, Homo sapien
attaaggtataaagtatgatggtttaccaattt

SEQ ID NO: 787719 - DNA, 33 bp, Homo sapien
ctatagtcgttcgtcccgacctaaatcagaagt

SEQ ID NO: 787720 - DNA, 33 bp, Homo sapien
ctatagtcgttcgtcctgacctaaatcagaagt

SEQ ID NO: 787721 - DNA, 33 bp, Homo sapien
tagcattcatgattacacaactagagcgtatac

SEQ ID NO: 787722 - DNA, 33 bp, Homo sapien
tagcattcatgattactcaactagagcgtatac

SEQ ID NO: 787723 - DNA, 33 bp, Homo sapien
agactaatgcaaagacaaaatttggttgaaacg

SEQ ID NO: 787724 - DNA, 33 bp, Homo sapien
agactaatgcaaagacgaaatttggttgaaacg

SEQ ID NO: 787725 - DNA, 33 bp, Homo sapien
tgcttcttcctacttcgcttggtttgtaggtgc

SEQ ID NO: 787726 - DNA, 33 bp, Homo sapien
tgcttcttcctacttctcttggtttgtaggtgc

SEQ ID NO: 787727 - DNA, 33 bp, Homo sapien
ggaaaatcaatacatacgtgaaccaggagacat

SEQ ID NO: 787728 - DNA, 33 bp, Homo sapien
ggaaaatcaatacatatgtgaaccaggagacat

SEQ ID NO: 787729 - DNA, 33 bp, Homo sapien
aaatcaagtgtataaaagtgcaaagttttacgt

SEQ ID NO: 787730 - DNA, 33 bp, Homo sapien
aaatcaagtgtataaaggtgcaaagttttacgt

SEQ ID NO: 787731 - DNA, 33 bp, Homo sapien
tggaggcagcacaccacctaatttcaaattcta

SEQ ID NO: 787732 - DNA, 33 bp, Homo sapien
tggaggcagcacaccatctaatttcaaattcta

SEQ ID NO: 787733 - DNA, 33 bp, Homo sapien
catggctaataactgacacctttctggacactc

SEQ ID NO: 787734 - DNA, 33 bp, Homo sapien
catggctaataactgatacctttctggacactc

SEQ ID NO: 787735 - DNA, 33 bp, Homo sapien
ctttttcatctgaatcccgtcaacatcaactcc

SEQ ID NO: 787736 - DNA, 33 bp, Homo sapien
ctttttcatctgaatctcgtcaacatcaactcc

SEQ ID NO: 787737 - DNA, 33 bp, Homo sapien
tccaggatttataacactctgctgtcacaagca

SEQ ID NO: 787738 - DNA, 33 bp, Homo sapien
tccaggatttataacagtctgctgtcacaagca

SEQ ID NO: 787739 - DNA, 33 bp, Homo sapien
aatcagctctggcaaactggaatgagctccagc

SEQ ID NO: 787740 - DNA, 33 bp, Homo sapien
aatcagctctggcaaagtggaatgagctccagc

SEQ ID NO: 787741 - DNA, 33 bp, Homo sapien
cactattttaaaagacactctgacaacatttag

SEQ ID NO: 787742 - DNA, 33 bp, Homo sapien
cactattttaaaagacgctctgacaacatttag

SEQ ID NO: 787743 - DNA, 33 bp, Homo sapien
tcaagtcaactgccaagaccaatattgatgaac

SEQ ID NO: 787744 - DNA, 33 bp, Homo sapien
tcaagtcaactgccaataccaatattgatgaac

SEQ ID NO: 787745 - DNA, 33 bp, Homo sapien
aatcaatgccccacaacccctcaattgtatatg

SEQ ID NO: 787746 - DNA, 33 bp, Homo sapien
aatcaatgccccacaatccctcaattgtatatg

SEQ ID NO: 787747 - DNA, 33 bp, Homo sapien
aaaataaaagcgaaaaataaatgcactttctta

SEQ ID NO: 787748 - DNA, 33 bp, Homo sapien
aaaataaaagcgaaaactaaatgcactttctta

SEQ ID NO: 787749 - DNA, 33 bp, Homo sapien
atataaaatcactgcaaattactggtggtttga

SEQ ID NO: 787750 - DNA, 33 bp, Homo sapien
atataaaatcactgcatattactggtggtttga

SEQ ID NO: 787751 - DNA, 33 bp, Homo sapien
tacccagagaatttgccagtttacttgtggttt

SEQ ID NO: 787752 - DNA, 33 bp, Homo sapien
tacccagagaatttgcgagtttacttgtggttt

SEQ ID NO: 787753 - DNA, 33 bp, Homo sapien
atcattctgcttaatactaccctcaactaagaa

SEQ ID NO: 787754 - DNA, 33 bp, Homo sapien
atcattctgcttaatattaccctcaactaagaa

SEQ ID NO: 787755 - DNA, 33 bp, Homo sapien
tattctagataaacacagtcttccttgtatagt

SEQ ID NO: 787756 - DNA, 33 bp, Homo sapien
tattctagataaacacggtcttccttgtatagt

SEQ ID NO: 787757 - DNA, 33 bp, Homo sapien
ttctttataatccttaggctgatggagaattgt

SEQ ID NO: 787758 - DNA, 33 bp, Homo sapien
ttctttataatccttatgctgatggagaattgt

SEQ ID NO: 787759 - DNA, 33 bp, Homo sapien
atgtcttgtgaacataccaaagttccgaatttt

SEQ ID NO: 787760 - DNA, 33 bp, Homo sapien
atgtcttgtgaacatagcaaagttccgaatttt

SEQ ID NO: 787761 - DNA, 33 bp, Homo sapien
ttaggaagtctggagaaagcactttagagggcc

SEQ ID NO: 787762 - DNA, 33 bp, Homo sapien
ttaggaagtctggagagagcactttagagggcc

SEQ ID NO: 787763 - DNA, 33 bp, Homo sapien
agactgaattgctgcacgggcatatacaacagc

SEQ ID NO: 787764 - DNA, 33 bp, Homo sapien
agactgaattgctgcaggggcatatacaacagc

SEQ ID NO: 787765 - DNA, 33 bp, Homo sapien
gtgatataggagtataagaaggatgacagattt

SEQ ID NO: 787766 - DNA, 33 bp, Homo sapien
gtgatataggagtataggaaggatgacagattt

SEQ ID NO: 787767 - DNA, 33 bp, Homo sapien
aatgataaagaaagccaaagttttgatgtcctt

SEQ ID NO: 787768 - DNA, 33 bp, Homo sapien
aatgataaagaaagcctaagttttgatgtcctt

SEQ ID NO: 787769 - DNA, 33 bp, Homo sapien
ttgctctgaatgaaataaagtccttaactgttt

SEQ ID NO: 787770 - DNA, 33 bp, Homo sapien
ttgctctgaatgaaatcaagtccttaactgttt

SEQ ID NO: 787771 - DNA, 33 bp, Homo sapien
ctggtaaagggtaaaactggaattgaatcttaa

SEQ ID NO: 787772 - DNA, 33 bp, Homo sapien
ctggtaaagggtaaaattggaattgaatcttaa

SEQ ID NO: 787773 - DNA, 33 bp, Homo sapien
tggaagccaaggttcaactcaggactcctggac

SEQ ID NO: 787774 - DNA, 33 bp, Homo sapien
tggaagccaaggttcagctcaggactcctggac

SEQ ID NO: 787775 - DNA, 33 bp, Homo sapien
tactgtgggaaagacacgaggaaacactagaat

SEQ ID NO: 787776 - DNA, 33 bp, Homo sapien
tactgtgggaaagacatgaggaaacactagaat

SEQ ID NO: 787777 - DNA, 33 bp, Homo sapien
cccagtagcttaagaacagttttctatagggga

SEQ ID NO: 787778 - DNA, 33 bp, Homo sapien
cccagtagcttaagaatagttttctatagggga

SEQ ID NO: 787779 - DNA, 33 bp, Homo sapien
tcatggagatgggtgacaagtacttaaatttgt

SEQ ID NO: 787780 - DNA, 33 bp, Homo sapien
tcatggagatgggtgagaagtacttaaatttgt

SEQ ID NO: 787781 - DNA, 33 bp, Homo sapien
gcacaaggtaacagcaagtctcccctgaagaaa

SEQ ID NO: 787782 - DNA, 33 bp, Homo sapien
gcacaaggtaacagcaggtctcccctgaagaaa

SEQ ID NO: 787783 - DNA, 33 bp, Homo sapien
ataaacccttcttttacggatgagaagcagagg

SEQ ID NO: 787784 - DNA, 33 bp, Homo sapien
ataaacccttcttttatggatgagaagcagagg

SEQ ID NO: 787785 - DNA, 33 bp, Homo sapien
aaccctctacatctgaaaagtatcgataaaccc

SEQ ID NO: 787786 - DNA, 33 bp, Homo sapien
aaccctctacatctgagaagtatcgataaaccc

SEQ ID NO: 787787 - DNA, 33 bp, Homo sapien
cctcctatcaaatctacggtggcattagattct

SEQ ID NO: 787788 - DNA, 33 bp, Homo sapien
cctcctatcaaatctatggtggcattagattct

SEQ ID NO: 787789 - DNA, 33 bp, Homo sapien
ctcctatttctacccactgaagactacccaaat

SEQ ID NO: 787790 - DNA, 33 bp, Homo sapien
ctcctatttctacccattgaagactacccaaat

SEQ ID NO: 787791 - DNA, 33 bp, Homo sapien
tgaattaagccaagtaaaccaatctaggcctac

SEQ ID NO: 787792 - DNA, 33 bp, Homo sapien
tgaattaagccaagtagaccaatctaggcctac

SEQ ID NO: 787793 - DNA, 33 bp, Homo sapien
agaagagtttagaggacatcgttcaaaggatgc

SEQ ID NO: 787794 - DNA, 33 bp, Homo sapien
agaagagtttagaggatatcgttcaaaggatgc

SEQ ID NO: 787795 - DNA, 33 bp, Homo sapien
agtgagtgtaacatcaagcataagataaatgag

SEQ ID NO: 787796 - DNA, 33 bp, Homo sapien
agtgagtgtaacatcaggcataagataaatgag

SEQ ID NO: 787797 - DNA, 33 bp, Homo sapien
aagatggacaagaagacagatgttgctataggt

SEQ ID NO: 787798 - DNA, 33 bp, Homo sapien
aagatggacaagaagatagatgttgctataggt

SEQ ID NO: 787799 - DNA, 33 bp, Homo sapien
gctattgctcaaatcacgtttaaatgtattgaa

SEQ ID NO: 787800 - DNA, 33 bp, Homo sapien
gctattgctcaaatcatgtttaaatgtattgaa

SEQ ID NO: 787801 - DNA, 33 bp, Homo sapien
tgatggctgaagaacaaaattagataactagta

SEQ ID NO: 787802 - DNA, 33 bp, Homo sapien
tgatggctgaagaacagaattagataactagta

SEQ ID NO: 787803 - DNA, 33 bp, Homo sapien
ggctttgtggggtatacgaataaagagatgtat

SEQ ID NO: 787804 - DNA, 33 bp, Homo sapien
ggctttgtggggtatatgaataaagagatgtat

SEQ ID NO: 787805 - DNA, 33 bp, Homo sapien
ttacaaattgcaataccgaaggcccaggataat

SEQ ID NO: 787806 - DNA, 33 bp, Homo sapien
ttacaaattgcaatactgaaggcccaggataat

SEQ ID NO: 787807 - DNA, 33 bp, Homo sapien
atgaaatatgaaccagcaatgttaatgggcaga

SEQ ID NO: 787808 - DNA, 33 bp, Homo sapien
atgaaatatgaaccagtaatgttaatgggcaga

SEQ ID NO: 787809 - DNA, 33 bp, Homo sapien
tgctctgcactatcacccagagatttattttgc

SEQ ID NO: 787810 - DNA, 33 bp, Homo sapien
tgctctgcactatcactcagagatttattttgc

SEQ ID NO: 787811 - DNA, 33 bp, Homo sapien
ccttgttgtgagacaaaaacccggatttaactg

SEQ ID NO: 787812 - DNA, 33 bp, Homo sapien
ccttgttgtgagacaagaacccggatttaactg

SEQ ID NO: 787813 - DNA, 33 bp, Homo sapien
cttggagacatccctaggtgaattctctttcat

SEQ ID NO: 787814 - DNA, 33 bp, Homo sapien
cttggagacatccctatgtgaattctctttcat

SEQ ID NO: 787815 - DNA, 33 bp, Homo sapien
tgtaatgctctatctacgagatcacagtccaag

SEQ ID NO: 787816 - DNA, 33 bp, Homo sapien
tgtaatgctctatctatgagatcacagtccaag

SEQ ID NO: 787817 - DNA, 33 bp, Homo sapien
taatggggggattatacggaattttagaagtta

SEQ ID NO: 787818 - DNA, 33 bp, Homo sapien
taatggggggattatatggaattttagaagtta

SEQ ID NO: 787819 - DNA, 33 bp, Homo sapien
aaatacaaatgtgatacggtcaatgttgtagga

SEQ ID NO: 787820 - DNA, 33 bp, Homo sapien
aaatacaaatgtgatatggtcaatgttgtagga

SEQ ID NO: 787821 - DNA, 33 bp, Homo sapien
tgctcctctatgcaccacagtgcctgggccggg

SEQ ID NO: 787822 - DNA, 33 bp, Homo sapien
tgctcctctatgcaccgcagtgcctgggccggg

SEQ ID NO: 787823 - DNA, 33 bp, Homo sapien
ctgtattaatataagccattaggtgtagcaaca

SEQ ID NO: 787824 - DNA, 33 bp, Homo sapien
ctgtattaatataagctattaggtgtagcaaca

SEQ ID NO: 787825 - DNA, 33 bp, Homo sapien
taaaaatatccaccccaaataaggtgaagtaaa

SEQ ID NO: 787826 - DNA, 33 bp, Homo sapien
taaaaatatccaccccgaataaggtgaagtaaa

SEQ ID NO: 787827 - DNA, 33 bp, Homo sapien
taagttaccatttttggaatcaaccagcatgga

SEQ ID NO: 787828 - DNA, 33 bp, Homo sapien
taagttaccatttttgtaatcaaccagcatgga

SEQ ID NO: 787829 - DNA, 33 bp, Homo sapien
ttttgtaagatctgcaagttggcaaagcacaaa

SEQ ID NO: 787830 - DNA, 33 bp, Homo sapien
ttttgtaagatctgcaggttggcaaagcacaaa

SEQ ID NO: 787831 - DNA, 33 bp, Homo sapien
aaaaatctgcctccaacacaaaaatctaaattg

SEQ ID NO: 787832 - DNA, 33 bp, Homo sapien
aaaaatctgcctccaatacaaaaatctaaattg

SEQ ID NO: 787833 - DNA, 33 bp, Homo sapien
agtactctctctcaaccgtgggttctcaagtgt

SEQ ID NO: 787834 - DNA, 33 bp, Homo sapien
agtactctctctcaactgtgggttctcaagtgt

SEQ ID NO: 787835 - DNA, 33 bp, Homo sapien
aacaaggtgactggcacatcataataggtacat

SEQ ID NO: 787836 - DNA, 33 bp, Homo sapien
aacaaggtgactggcatatcataataggtacat

SEQ ID NO: 787837 - DNA, 33 bp, Homo sapien
tgtagttgaaaacaaacgagcaaatacaaaagc

SEQ ID NO: 787838 - DNA, 33 bp, Homo sapien
tgtagttgaaaacaaatgagcaaatacaaaagc

SEQ ID NO: 787839 - DNA, 33 bp, Homo sapien
aggtagctgtttattagtaaggacagggagtat

SEQ ID NO: 787840 - DNA, 33 bp, Homo sapien
aggtagctgtttattattaaggacagggagtat

SEQ ID NO: 787841 - DNA, 33 bp, Homo sapien
gcaactacacaaagacgcacaaaggagccacat

SEQ ID NO: 787842 - DNA, 33 bp, Homo sapien
gcaactacacaaagactcacaaaggagccacat

SEQ ID NO: 787843 - DNA, 33 bp, Homo sapien
tctcaatatagaaaaaattgtcgagtgaaacac

SEQ ID NO: 787844 - DNA, 33 bp, Homo sapien
tctcaatatagaaaaagttgtcgagtgaaacac

SEQ ID NO: 787845 - DNA, 33 bp, Homo sapien
tactgaaaacttacaaacaagaatgtacaagct

SEQ ID NO: 787846 - DNA, 33 bp, Homo sapien
tactgaaaacttacaagcaagaatgtacaagct

SEQ ID NO: 787847 - DNA, 33 bp, Homo sapien
ttgcaatttgtatgcacggattcataaagttta

SEQ ID NO: 787848 - DNA, 33 bp, Homo sapien
ttgcaatttgtatgcatggattcataaagttta

SEQ ID NO: 787849 - DNA, 33 bp, Homo sapien
tatctgaatttggatacagggttatggagcaaa

SEQ ID NO: 787850 - DNA, 33 bp, Homo sapien
tatctgaatttggatatagggttatggagcaaa

SEQ ID NO: 787851 - DNA, 33 bp, Homo sapien
ctaattcatttctcacactgcaatgatactaaa

SEQ ID NO: 787852 - DNA, 33 bp, Homo sapien
ctaattcatttctcacgctgcaatgatactaaa

SEQ ID NO: 787853 - DNA, 33 bp, Homo sapien
gaaattcaggtcatacactaagtttgcttggac

SEQ ID NO: 787854 - DNA, 33 bp, Homo sapien
gaaattcaggtcatacgctaagtttgcttggac

SEQ ID NO: 787855 - DNA, 33 bp, Homo sapien
tgtgtcatcactagagaagatccacagcctcta

SEQ ID NO: 787856 - DNA, 33 bp, Homo sapien
tgtgtcatcactagagcagatccacagcctcta

SEQ ID NO: 787857 - DNA, 33 bp, Homo sapien
atgactgactatttaaccaagatgtaattggag

SEQ ID NO: 787858 - DNA, 33 bp, Homo sapien
atgactgactatttaatcaagatgtaattggag

SEQ ID NO: 787859 - DNA, 33 bp, Homo sapien
gctatgttagtgacagcagtctccccttctcca

SEQ ID NO: 787860 - DNA, 33 bp, Homo sapien
gctatgttagtgacagtagtctccccttctcca

SEQ ID NO: 787861 - DNA, 33 bp, Homo sapien
gatgctgaggacaccacgtgatgggtgagagta

SEQ ID NO: 787862 - DNA, 33 bp, Homo sapien
gatgctgaggacaccatgtgatgggtgagagta

SEQ ID NO: 787863 - DNA, 33 bp, Homo sapien
aaatttgttcttagtcacatactgcttttcatt

SEQ ID NO: 787864 - DNA, 33 bp, Homo sapien
aaatttgttcttagtcccatactgcttttcatt

SEQ ID NO: 787865 - DNA, 33 bp, Homo sapien
atttatatacagagtaccatctttcttactaag

SEQ ID NO: 787866 - DNA, 33 bp, Homo sapien
atttatatacagagtatcatctttcttactaag

SEQ ID NO: 787867 - DNA, 33 bp, Homo sapien
ctagaattttattggaacaactgagtggatagt

SEQ ID NO: 787868 - DNA, 33 bp, Homo sapien
ctagaattttattggagcaactgagtggatagt

SEQ ID NO: 787869 - DNA, 33 bp, Homo sapien
tgctaagtgatgacaacactattacctaactgg

SEQ ID NO: 787870 - DNA, 33 bp, Homo sapien
tgctaagtgatgacaatactattacctaactgg

SEQ ID NO: 787871 - DNA, 33 bp, Homo sapien
ttaaactactgtagtaactctatagaacttact

SEQ ID NO: 787872 - DNA, 33 bp, Homo sapien
ttaaactactgtagtacctctatagaacttact

SEQ ID NO: 787873 - DNA, 33 bp, Homo sapien
gctatgttactaatgacgtcagaattgcaaaac

SEQ ID NO: 787874 - DNA, 33 bp, Homo sapien
gctatgttactaatgatgtcagaattgcaaaac

SEQ ID NO: 787875 - DNA, 33 bp, Homo sapien
cctactacgtgtgcaacgttatgtttaaaaaat

SEQ ID NO: 787876 - DNA, 33 bp, Homo sapien
cctactacgtgtgcaatgttatgtttaaaaaat

SEQ ID NO: 787877 - DNA, 33 bp, Homo sapien
agaattgttagtcaaccctaaatcctatatttt

SEQ ID NO: 787878 - DNA, 33 bp, Homo sapien
agaattgttagtcaacgctaaatcctatatttt

SEQ ID NO: 787879 - DNA, 33 bp, Homo sapien
gagccaggaacaagtaggaaggatgaaaaagtt

SEQ ID NO: 787880 - DNA, 33 bp, Homo sapien
gagccaggaacaagtatgaaggatgaaaaagtt

SEQ ID NO: 787881 - DNA, 33 bp, Homo sapien
ttactctgttttctaaccattaactccagaaat

SEQ ID NO: 787882 - DNA, 33 bp, Homo sapien
ttactctgttttctaatcattaactccagaaat

SEQ ID NO: 787883 - DNA, 33 bp, Homo sapien
acaccaccacagatcactaataactaccttcct

SEQ ID NO: 787884 - DNA, 33 bp, Homo sapien
acaccaccacagatcagtaataactaccttcct

SEQ ID NO: 787885 - DNA, 33 bp, Homo sapien
cccatgctgtgtaaggcatcctctgttaaagct

SEQ ID NO: 787886 - DNA, 33 bp, Homo sapien
cccatgctgtgtaaggtatcctctgttaaagct

SEQ ID NO: 787887 - DNA, 33 bp, Homo sapien
aactaagtgtcaaacacctgaggctccatagat

SEQ ID NO: 787888 - DNA, 33 bp, Homo sapien
aactaagtgtcaaacagctgaggctccatagat

SEQ ID NO: 787889 - DNA, 33 bp, Homo sapien
aaaatgtccaggttaactctcttatgttcctct

SEQ ID NO: 787890 - DNA, 33 bp, Homo sapien
aaaatgtccaggttaattctcttatgttcctct

SEQ ID NO: 787891 - DNA, 33 bp, Homo sapien
gagagaggtagaataaatgggttataccctaca

SEQ ID NO: 787892 - DNA, 33 bp, Homo sapien
gagagaggtagaataagtgggttataccctaca

SEQ ID NO: 787893 - DNA, 33 bp, Homo sapien
ctatttctgtgtacaaatacttaccccaaatgt

SEQ ID NO: 787894 - DNA, 33 bp, Homo sapien
ctatttctgtgtacaactacttaccccaaatgt

SEQ ID NO: 787895 - DNA, 33 bp, Homo sapien
atgtagatatagaaaaaaggctaagaacataga

SEQ ID NO: 787896 - DNA, 33 bp, Homo sapien
atgtagatatagaaaagaggctaagaacataga

SEQ ID NO: 787897 - DNA, 33 bp, Homo sapien
caattatatgctgacaatggcaaaatggatgcc

SEQ ID NO: 787898 - DNA, 33 bp, Homo sapien
caattatatgctgacagtggcaaaatggatgcc

SEQ ID NO: 787899 - DNA, 33 bp, Homo sapien
ctcatggagctattaaaaactgttgtctgaaat

SEQ ID NO: 787900 - DNA, 33 bp, Homo sapien
ctcatggagctattaagaactgttgtctgaaat

SEQ ID NO: 787901 - DNA, 33 bp, Homo sapien
gagttgatcaataggaagcaggtggttagttag

SEQ ID NO: 787902 - DNA, 33 bp, Homo sapien
gagttgatcaataggacgcaggtggttagttag

SEQ ID NO: 787903 - DNA, 33 bp, Homo sapien
cccaatcaaaggtgcccagcacagcaatgacat

SEQ ID NO: 787904 - DNA, 33 bp, Homo sapien
cccaatcaaaggtgccgagcacagcaatgacat

SEQ ID NO: 787905 - DNA, 33 bp, Homo sapien
tttacctgcttagaaagtatctcttaccttaga

SEQ ID NO: 787906 - DNA, 33 bp, Homo sapien
tttacctgcttagaaattatctcttaccttaga

SEQ ID NO: 787907 - DNA, 33 bp, Homo sapien
gaaaaagcaagatttaagtatggattaaggaag

SEQ ID NO: 787908 - DNA, 33 bp, Homo sapien
gaaaaagcaagatttaggtatggattaaggaag

SEQ ID NO: 787909 - DNA, 33 bp, Homo sapien
gagtggagagatttgcaatgaaccaacacatgc

SEQ ID NO: 787910 - DNA, 33 bp, Homo sapien
gagtggagagatttgctatgaaccaacacatgc

SEQ ID NO: 787911 - DNA, 33 bp, Homo sapien
ggaagaggtaatcatcaaggatggcagctaggg

SEQ ID NO: 787912 - DNA, 33 bp, Homo sapien
ggaagaggtaatcatcgaggatggcagctaggg

SEQ ID NO: 787913 - DNA, 33 bp, Homo sapien
cttctcaaataatgtaagagatgtcagaattat

SEQ ID NO: 787914 - DNA, 33 bp, Homo sapien
cttctcaaataatgtacgagatgtcagaattat

SEQ ID NO: 787915 - DNA, 33 bp, Homo sapien
aaatgatcaaatctcacctcatttcaaataaat

SEQ ID NO: 787916 - DNA, 33 bp, Homo sapien
aaatgatcaaatctcatctcatttcaaataaat

SEQ ID NO: 787917 - DNA, 33 bp, Homo sapien
ctggccagggtaaatacgacctggtgtaaaatg

SEQ ID NO: 787918 - DNA, 33 bp, Homo sapien
ctggccagggtaaatatgacctggtgtaaaatg

SEQ ID NO: 787919 - DNA, 33 bp, Homo sapien
attttgtttaacctaacgttctccaggctcatt

SEQ ID NO: 787920 - DNA, 33 bp, Homo sapien
attttgtttaacctaatgttctccaggctcatt

SEQ ID NO: 787921 - DNA, 33 bp, Homo sapien
aactaccactcactgcaataaatagatttccaa

SEQ ID NO: 787922 - DNA, 33 bp, Homo sapien
aactaccactcactgcgataaatagatttccaa

SEQ ID NO: 787923 - DNA, 33 bp, Homo sapien
cacatatgcagtaaaagttaggctgtgtggtga

SEQ ID NO: 787924 - DNA, 33 bp, Homo sapien
cacatatgcagtaaaatttaggctgtgtggtga

SEQ ID NO: 787925 - DNA, 33 bp, Homo sapien
ccaatgaaacaggatacaaaggccagaaataag

SEQ ID NO: 787926 - DNA, 33 bp, Homo sapien
ccaatgaaacaggatagaaaggccagaaataag

SEQ ID NO: 787927 - DNA, 33 bp, Homo sapien
ccaggtatgtggtttgcagtctcaaggagtgtc

SEQ ID NO: 787928 - DNA, 33 bp, Homo sapien
ccaggtatgtggtttgtagtctcaaggagtgtc

SEQ ID NO: 787929 - DNA, 33 bp, Homo sapien
gtacgtgtttagccaacttgatcttttaggttt

SEQ ID NO: 787930 - DNA, 33 bp, Homo sapien
gtacgtgtttagccaatttgatcttttaggttt

SEQ ID NO: 787931 - DNA, 33 bp, Homo sapien
gttttagcagaaaaaacgttgattgctgcattg

SEQ ID NO: 787932 - DNA, 33 bp, Homo sapien
gttttagcagaaaaaatgttgattgctgcattg

SEQ ID NO: 787933 - DNA, 33 bp, Homo sapien
tttgcttatgatcagcacgccacttttgaaaaa

SEQ ID NO: 787934 - DNA, 33 bp, Homo sapien
tttgcttatgatcagcgcgccacttttgaaaaa

SEQ ID NO: 787935 - DNA, 33 bp, Homo sapien
tgggtagatcttatccgatcagtttgtatcctg

SEQ ID NO: 787936 - DNA, 33 bp, Homo sapien
tgggtagatcttatcctatcagtttgtatcctg

SEQ ID NO: 787937 - DNA, 33 bp, Homo sapien
aaactttcaagcttaacgtgaaaaatttgtttc

SEQ ID NO: 787938 - DNA, 33 bp, Homo sapien
aaactttcaagcttaatgtgaaaaatttgtttc

SEQ ID NO: 787939 - DNA, 33 bp, Homo sapien
caagcaggtaactataataggcaaaggaagcaa

SEQ ID NO: 787940 - DNA, 33 bp, Homo sapien
caagcaggtaactatagtaggcaaaggaagcaa

SEQ ID NO: 787941 - DNA, 33 bp, Homo sapien
gccagtgtcaattgccactcattgtatttgcaa

SEQ ID NO: 787942 - DNA, 33 bp, Homo sapien
gccagtgtcaattgcctctcattgtatttgcaa

SEQ ID NO: 787943 - DNA, 33 bp, Homo sapien
taagcagaaactgaaacagagatggcacggcag

SEQ ID NO: 787944 - DNA, 33 bp, Homo sapien
taagcagaaactgaaatagagatggcacggcag

SEQ ID NO: 787945 - DNA, 33 bp, Homo sapien
aggcccacatgaacaaaaatgttatagcaatat

SEQ ID NO: 787946 - DNA, 33 bp, Homo sapien
aggcccacatgaacaacaatgttatagcaatat

SEQ ID NO: 787947 - DNA, 33 bp, Homo sapien
aattgatattcttgacaagccaactgtataccc

SEQ ID NO: 787948 - DNA, 33 bp, Homo sapien
aattgatattcttgactagccaactgtataccc

SEQ ID NO: 787949 - DNA, 33 bp, Homo sapien
tgtccaaagaagaacaataaggcaaaaatgcta

SEQ ID NO: 787950 - DNA, 33 bp, Homo sapien
tgtccaaagaagaacattaaggcaaaaatgcta

SEQ ID NO: 787951 - DNA, 33 bp, Homo sapien
gacccagggcctgacaatgaggctatgtttgca

SEQ ID NO: 787952 - DNA, 33 bp, Homo sapien
gacccagggcctgacagtgaggctatgtttgca

SEQ ID NO: 787953 - DNA, 33 bp, Homo sapien
aagtgtgatatacagaacaataggatcaacatc

SEQ ID NO: 787954 - DNA, 33 bp, Homo sapien
aagtgtgatatacagagcaataggatcaacatc

SEQ ID NO: 787955 - DNA, 33 bp, Homo sapien
ccatacagaatgttaactaattatgctgccacg

SEQ ID NO: 787956 - DNA, 33 bp, Homo sapien
ccatacagaatgttaattaattatgctgccacg

SEQ ID NO: 787957 - DNA, 33 bp, Homo sapien
caaattagtgtaattcgaactattcaactcagg

SEQ ID NO: 787958 - DNA, 33 bp, Homo sapien
caaattagtgtaattctaactattcaactcagg

SEQ ID NO: 787959 - DNA, 33 bp, Homo sapien
taattttctaccgaaactcatacagcaggacaa

SEQ ID NO: 787960 - DNA, 33 bp, Homo sapien
taattttctaccgaaagtcatacagcaggacaa

SEQ ID NO: 787961 - DNA, 33 bp, Homo sapien
tctgatgcccgatccaatcagaagtcccacaga

SEQ ID NO: 787962 - DNA, 33 bp, Homo sapien
tctgatgcccgatccagtcagaagtcccacaga

SEQ ID NO: 787963 - DNA, 33 bp, Homo sapien
ggaagtaagtgacaacaaggagccataaatcct

SEQ ID NO: 787964 - DNA, 33 bp, Homo sapien
ggaagtaagtgacaacgaggagccataaatcct

SEQ ID NO: 787965 - DNA, 33 bp, Homo sapien
ccttctctacctctaacgatcagaacctactga

SEQ ID NO: 787966 - DNA, 33 bp, Homo sapien
ccttctctacctctaatgatcagaacctactga

SEQ ID NO: 787967 - DNA, 33 bp, Homo sapien
ttgttgttattatttcaaaggaagtctaaatct

SEQ ID NO: 787968 - DNA, 33 bp, Homo sapien
ttgttgttattatttctaaggaagtctaaatct

SEQ ID NO: 787969 - DNA, 33 bp, Homo sapien
cagacagcacagtagcccaattgctattattac

SEQ ID NO: 787970 - DNA, 33 bp, Homo sapien
cagacagcacagtagctcaattgctattattac

SEQ ID NO: 787971 - DNA, 33 bp, Homo sapien
ttttttctgattgttacgtgtgtgtcctgaagg

SEQ ID NO: 787972 - DNA, 33 bp, Homo sapien
ttttttctgattgttaggtgtgtgtcctgaagg

SEQ ID NO: 787973 - DNA, 33 bp, Homo sapien
tccttcagaattgccaacttttacaaatggatg

SEQ ID NO: 787974 - DNA, 33 bp, Homo sapien
tccttcagaattgccagcttttacaaatggatg

SEQ ID NO: 787975 - DNA, 33 bp, Homo sapien
gtacttcaaagaaagacgattacttgtgtccct

SEQ ID NO: 787976 - DNA, 33 bp, Homo sapien
gtacttcaaagaaagatgattacttgtgtccct

SEQ ID NO: 787977 - DNA, 33 bp, Homo sapien
tacatgattcctaaaagtatcatatgcattttt

SEQ ID NO: 787978 - DNA, 33 bp, Homo sapien
tacatgattcctaaaattatcatatgcattttt

SEQ ID NO: 787979 - DNA, 33 bp, Homo sapien
aaaatctgctatgagtcaatagttggatgtttc

SEQ ID NO: 787980 - DNA, 33 bp, Homo sapien
aaaatctgctatgagttaatagttggatgtttc

SEQ ID NO: 787981 - DNA, 33 bp, Homo sapien
gcaaatgaaatataaacgcttctggaaaaagaa

SEQ ID NO: 787982 - DNA, 33 bp, Homo sapien
gcaaatgaaatataaatgcttctggaaaaagaa

SEQ ID NO: 787983 - DNA, 33 bp, Homo sapien
gactttgctggctacaaaactacttggagttag

SEQ ID NO: 787984 - DNA, 33 bp, Homo sapien
gactttgctggctacagaactacttggagttag

SEQ ID NO: 787985 - DNA, 33 bp, Homo sapien
ttgaagtgatggcacacattgctttgtttccct

SEQ ID NO: 787986 - DNA, 33 bp, Homo sapien
ttgaagtgatggcacatattgctttgtttccct

SEQ ID NO: 787987 - DNA, 33 bp, Homo sapien
gatatatcttaccacaaacttcttttgctagaa

SEQ ID NO: 787988 - DNA, 33 bp, Homo sapien
gatatatcttaccacagacttcttttgctagaa

SEQ ID NO: 787989 - DNA, 33 bp, Homo sapien
agtgtagtgctccagcaacaagatttaagtaat

SEQ ID NO: 787990 - DNA, 33 bp, Homo sapien
agtgtagtgctccagccacaagatttaagtaat

SEQ ID NO: 787991 - DNA, 33 bp, Homo sapien
cctgagtgggtgctcaatgagagaagacagcta

SEQ ID NO: 787992 - DNA, 33 bp, Homo sapien
cctgagtgggtgctcagtgagagaagacagcta

SEQ ID NO: 787993 - DNA, 33 bp, Homo sapien
caatgacacatggagcggcctattgcaatttat

SEQ ID NO: 787994 - DNA, 33 bp, Homo sapien
caatgacacatggagctgcctattgcaatttat

SEQ ID NO: 787995 - DNA, 33 bp, Homo sapien
gtgtgcaaaatgaggacagtcataagctacaag

SEQ ID NO: 787996 - DNA, 33 bp, Homo sapien
gtgtgcaaaatgaggagagtcataagctacaag

SEQ ID NO: 787997 - DNA, 33 bp, Homo sapien
caaatgatatagtccactggaaactactaacag

SEQ ID NO: 787998 - DNA, 33 bp, Homo sapien
caaatgatatagtccattggaaactactaacag

SEQ ID NO: 787999 - DNA, 33 bp, Homo sapien
tggtcaataagatgtaagcaaaaattgtttaga

SEQ ID NO: 788000 - DNA, 33 bp, Homo sapien
tggtcaataagatgtaggcaaaaattgtttaga

SEQ ID NO: 788001 - DNA, 33 bp, Homo sapien
tccaaaccatctcaaagtctttgcttgtagaca

SEQ ID NO: 788002 - DNA, 33 bp, Homo sapien
tccaaaccatctcaaattctttgcttgtagaca

SEQ ID NO: 788003 - DNA, 33 bp, Homo sapien
agaagtttcagtattacgtaaccaattggcaag

SEQ ID NO: 788004 - DNA, 33 bp, Homo sapien
agaagtttcagtattatgtaaccaattggcaag

SEQ ID NO: 788005 - DNA, 33 bp, Homo sapien
catcccaccaggcaacaataaaggaccaagaac

SEQ ID NO: 788006 - DNA, 33 bp, Homo sapien
catcccaccaggcaaccataaaggaccaagaac

SEQ ID NO: 788007 - DNA, 33 bp, Homo sapien
gtaatagccacatcatcacaatgttaggactag

SEQ ID NO: 788008 - DNA, 33 bp, Homo sapien
gtaatagccacatcattacaatgttaggactag

SEQ ID NO: 788009 - DNA, 33 bp, Homo sapien
ggacagccagaaggaacggaggcagaagacagg

SEQ ID NO: 788010 - DNA, 33 bp, Homo sapien
ggacagccagaaggaatggaggcagaagacagg

SEQ ID NO: 788011 - DNA, 33 bp, Homo sapien
aacacacatttcagagcagttacttgttccata

SEQ ID NO: 788012 - DNA, 33 bp, Homo sapien
aacacacatttcagaggagttacttgttccata

SEQ ID NO: 788013 - DNA, 33 bp, Homo sapien
aaatatcgatcaaaaaagtcatgttgttccagg

SEQ ID NO: 788014 - DNA, 33 bp, Homo sapien
aaatatcgatcaaaaaggtcatgttgttccagg

SEQ ID NO: 788015 - DNA, 33 bp, Homo sapien
atggtgatctgtattcaaagaaaaaatatctgg

SEQ ID NO: 788016 - DNA, 33 bp, Homo sapien
atggtgatctgtattcgaagaaaaaatatctgg

SEQ ID NO: 788017 - DNA, 33 bp, Homo sapien
tctcagctccccatgaagaataatttaaaaata

SEQ ID NO: 788018 - DNA, 33 bp, Homo sapien
tctcagctccccatgaggaataatttaaaaata

SEQ ID NO: 788019 - DNA, 33 bp, Homo sapien
cttcttggatttagtacaggtctttcagatttt

SEQ ID NO: 788020 - DNA, 33 bp, Homo sapien
cttcttggatttagtagaggtctttcagatttt

SEQ ID NO: 788021 - DNA, 33 bp, Homo sapien
acaaagaatattagcacacaatgtgatatgtga

SEQ ID NO: 788022 - DNA, 33 bp, Homo sapien
acaaagaatattagcatacaatgtgatatgtga

SEQ ID NO: 788023 - DNA, 33 bp, Homo sapien
atgactcgctcatggccccggtttaccaagctt

SEQ ID NO: 788024 - DNA, 33 bp, Homo sapien
atgactcgctcatggctccggtttaccaagctt

SEQ ID NO: 788025 - DNA, 33 bp, Homo sapien
ctgaccttaacctgcccatgatttaagtcttga

SEQ ID NO: 788026 - DNA, 33 bp, Homo sapien
ctgaccttaacctgcctatgatttaagtcttga

SEQ ID NO: 788027 - DNA, 33 bp, Homo sapien
attcactcctaccaaaatgtttcttgggtacct

SEQ ID NO: 788028 - DNA, 33 bp, Homo sapien
attcactcctaccaaagtgtttcttgggtacct

SEQ ID NO: 788029 - DNA, 33 bp, Homo sapien
atagctagctagatgaaaactttgcctacttta

SEQ ID NO: 788030 - DNA, 33 bp, Homo sapien
atagctagctagatgagaactttgcctacttta

SEQ ID NO: 788031 - DNA, 33 bp, Homo sapien
aagatatatgtgctgacagcaaggtaagtttca

SEQ ID NO: 788032 - DNA, 33 bp, Homo sapien
aagatatatgtgctgatagcaaggtaagtttca

SEQ ID NO: 788033 - DNA, 33 bp, Homo sapien
gatccctttgatgacccgagaaggttagtcttt

SEQ ID NO: 788034 - DNA, 33 bp, Homo sapien
gatccctttgatgacctgagaaggttagtcttt

SEQ ID NO: 788035 - DNA, 33 bp, Homo sapien
aaacaaatagcactcactctgacatcatctact

SEQ ID NO: 788036 - DNA, 33 bp, Homo sapien
aaacaaatagcactcattctgacatcatctact

SEQ ID NO: 788037 - DNA, 33 bp, Homo sapien
aatccctgtagacttaaaccgtgtaagttgtga

SEQ ID NO: 788038 - DNA, 33 bp, Homo sapien
aatccctgtagacttagaccgtgtaagttgtga

SEQ ID NO: 788039 - DNA, 33 bp, Homo sapien
cagagctgaacattgaagttgattaccaataca

SEQ ID NO: 788040 - DNA, 33 bp, Homo sapien
cagagctgaacattgaggttgattaccaataca

SEQ ID NO: 788041 - DNA, 33 bp, Homo sapien
tctctagaagaataagaattgttccattaccag

SEQ ID NO: 788042 - DNA, 33 bp, Homo sapien
tctctagaagaataaggattgttccattaccag

SEQ ID NO: 788043 - DNA, 33 bp, Homo sapien
tggtagttatcgagtaaatcagagttgattaaa

SEQ ID NO: 788044 - DNA, 33 bp, Homo sapien
tggtagttatcgagtacatcagagttgattaaa

SEQ ID NO: 788045 - DNA, 33 bp, Homo sapien
tttccatcttggtaagacctccagcttttatgc

SEQ ID NO: 788046 - DNA, 33 bp, Homo sapien
tttccatcttggtaagtcctccagcttttatgc

SEQ ID NO: 788047 - DNA, 33 bp, Homo sapien
tgttttaaggagcaaacgaattaacatatgtga

SEQ ID NO: 788048 - DNA, 33 bp, Homo sapien
tgttttaaggagcaaatgaattaacatatgtga

SEQ ID NO: 788049 - DNA, 33 bp, Homo sapien
tgatatgatcaacgtagagtagaaaatagtgtg

SEQ ID NO: 788050 - DNA, 33 bp, Homo sapien
tgatatgatcaacgtatagtagaaaatagtgtg

SEQ ID NO: 788051 - DNA, 33 bp, Homo sapien
tttttattgggtgataaactttccttctgacaa

SEQ ID NO: 788052 - DNA, 33 bp, Homo sapien
tttttattgggtgatagactttccttctgacaa

SEQ ID NO: 788053 - DNA, 33 bp, Homo sapien
gcccatcctacattcaaaagaaaatagatcctc

SEQ ID NO: 788054 - DNA, 33 bp, Homo sapien
gcccatcctacattcataagaaaatagatcctc

SEQ ID NO: 788055 - DNA, 33 bp, Homo sapien
tttgattaaaattggaagactaaacagagaagc

SEQ ID NO: 788056 - DNA, 33 bp, Homo sapien
tttgattaaaattggaggactaaacagagaagc

SEQ ID NO: 788057 - DNA, 33 bp, Homo sapien
accacaaagtacagaacagagaagtgaaatttc

SEQ ID NO: 788058 - DNA, 33 bp, Homo sapien
accacaaagtacagaatagagaagtgaaatttc

SEQ ID NO: 788059 - DNA, 33 bp, Homo sapien
gcttcctttggcaacacggtgtaacacaaacag

SEQ ID NO: 788060 - DNA, 33 bp, Homo sapien
gcttcctttggcaacagggtgtaacacaaacag

SEQ ID NO: 788061 - DNA, 33 bp, Homo sapien
tcctgaataatgctgacaatattactcgcctag

SEQ ID NO: 788062 - DNA, 33 bp, Homo sapien
tcctgaataatgctgagaatattactcgcctag

SEQ ID NO: 788063 - DNA, 33 bp, Homo sapien
tccaagccgctgttcccactactaatagagtca

SEQ ID NO: 788064 - DNA, 33 bp, Homo sapien
tccaagccgctgttcctactactaatagagtca

SEQ ID NO: 788065 - DNA, 33 bp, Homo sapien
agagccagagtggtaccagatggtctcttgaga

SEQ ID NO: 788066 - DNA, 33 bp, Homo sapien
agagccagagtggtacgagatggtctcttgaga

SEQ ID NO: 788067 - DNA, 33 bp, Homo sapien
catatcttaaactcagaagaattctcaagagac

SEQ ID NO: 788068 - DNA, 33 bp, Homo sapien
catatcttaaactcaggagaattctcaagagac

SEQ ID NO: 788069 - DNA, 33 bp, Homo sapien
ttaccttttggatcaaatgaaaaattctcattc

SEQ ID NO: 788070 - DNA, 33 bp, Homo sapien
ttaccttttggatcaagtgaaaaattctcattc

SEQ ID NO: 788071 - DNA, 33 bp, Homo sapien
gtgaacttgcttcacactatgtcatttatttgt

SEQ ID NO: 788072 - DNA, 33 bp, Homo sapien
gtgaacttgcttcacattatgtcatttatttgt

SEQ ID NO: 788073 - DNA, 33 bp, Homo sapien
gtaaaggacactgatacaggtaaagaagtctgc

SEQ ID NO: 788074 - DNA, 33 bp, Homo sapien
gtaaaggacactgatataggtaaagaagtctgc

SEQ ID NO: 788075 - DNA, 33 bp, Homo sapien
ccatggtctggccaaacggcctccaacgacagg

SEQ ID NO: 788076 - DNA, 33 bp, Homo sapien
ccatggtctggccaaatggcctccaacgacagg

SEQ ID NO: 788077 - DNA, 33 bp, Homo sapien
agttctgctgcctgaaatatataccatgttata

SEQ ID NO: 788078 - DNA, 33 bp, Homo sapien
agttctgctgcctgaagtatataccatgttata

SEQ ID NO: 788079 - DNA, 33 bp, Homo sapien
tctttcccagcctttacgtcttaggcagcctat

SEQ ID NO: 788080 - DNA, 33 bp, Homo sapien
tctttcccagcctttatgtcttaggcagcctat

SEQ ID NO: 788081 - DNA, 33 bp, Homo sapien
ggctgcaggggatagactacatatggtgattac

SEQ ID NO: 788082 - DNA, 33 bp, Homo sapien
ggctgcaggggatagattacatatggtgattac

SEQ ID NO: 788083 - DNA, 33 bp, Homo sapien
aaatcgaaagacacaaatatatataggaagatg

SEQ ID NO: 788084 - DNA, 33 bp, Homo sapien
aaatcgaaagacacaactatatataggaagatg

SEQ ID NO: 788085 - DNA, 33 bp, Homo sapien
ccctttctgtctctgaataacaacaggttgcaa

SEQ ID NO: 788086 - DNA, 33 bp, Homo sapien
ccctttctgtctctgagtaacaacaggttgcaa

SEQ ID NO: 788087 - DNA, 33 bp, Homo sapien
taaatgaggcaaaatacgtaaaagcacttaaat

SEQ ID NO: 788088 - DNA, 33 bp, Homo sapien
taaatgaggcaaaatatgtaaaagcacttaaat

SEQ ID NO: 788089 - DNA, 33 bp, Homo sapien
atgaaaaagtgttgtcaaagcctatttaggcac

SEQ ID NO: 788090 - DNA, 33 bp, Homo sapien
atgaaaaagtgttgtcgaagcctatttaggcac

SEQ ID NO: 788091 - DNA, 33 bp, Homo sapien
agctcttgagcacttacgctttatttgtgtacc

SEQ ID NO: 788092 - DNA, 33 bp, Homo sapien
agctcttgagcacttatgctttatttgtgtacc

SEQ ID NO: 788093 - DNA, 33 bp, Homo sapien
agttcagtggcaggagaaaggagacctgatttg

SEQ ID NO: 788094 - DNA, 33 bp, Homo sapien
agttcagtggcaggaggaaggagacctgatttg

SEQ ID NO: 788095 - DNA, 33 bp, Homo sapien
cagatgaaaagaacaaatagtcatcttaaagag

SEQ ID NO: 788096 - DNA, 33 bp, Homo sapien
cagatgaaaagaacaagtagtcatcttaaagag

SEQ ID NO: 788097 - DNA, 33 bp, Homo sapien
aggccatcattacagacagtcacagaaggcaca

SEQ ID NO: 788098 - DNA, 33 bp, Homo sapien
aggccatcattacagagagtcacagaaggcaca

SEQ ID NO: 788099 - DNA, 33 bp, Homo sapien
cttaacttcttttataactcaggtagttcattg

SEQ ID NO: 788100 - DNA, 33 bp, Homo sapien
cttaacttcttttatacctcaggtagttcattg

SEQ ID NO: 788101 - DNA, 33 bp, Homo sapien
aacaaagctacagaggcatggtgccaaggcagc

SEQ ID NO: 788102 - DNA, 33 bp, Homo sapien
aacaaagctacagaggtatggtgccaaggcagc

SEQ ID NO: 788103 - DNA, 33 bp, Homo sapien
tgttagaattttaaaacgagaactacctgaatg

SEQ ID NO: 788104 - DNA, 33 bp, Homo sapien
tgttagaattttaaaaggagaactacctgaatg

SEQ ID NO: 788105 - DNA, 33 bp, Homo sapien
caatattatatagcaacggtccatagtattttc

SEQ ID NO: 788106 - DNA, 33 bp, Homo sapien
caatattatatagcaatggtccatagtattttc

SEQ ID NO: 788107 - DNA, 33 bp, Homo sapien
cctcaaaataggaaaaagtctaagcatgttaaa

SEQ ID NO: 788108 - DNA, 33 bp, Homo sapien
cctcaaaataggaaaatgtctaagcatgttaaa

SEQ ID NO: 788109 - DNA, 33 bp, Homo sapien
tatagccagcaaatacagaattacagaaatcaa

SEQ ID NO: 788110 - DNA, 33 bp, Homo sapien
tatagccagcaaatacggaattacagaaatcaa

SEQ ID NO: 788111 - DNA, 33 bp, Homo sapien
taaccattaggtttcaactagaagactcaaaga

SEQ ID NO: 788112 - DNA, 33 bp, Homo sapien
taaccattaggtttcacctagaagactcaaaga

SEQ ID NO: 788113 - DNA, 33 bp, Homo sapien
gaagcagtaacgaccaacttccaaatttcagtg

SEQ ID NO: 788114 - DNA, 33 bp, Homo sapien
gaagcagtaacgaccagcttccaaatttcagtg

SEQ ID NO: 788115 - DNA, 33 bp, Homo sapien
tattcatacttaaaataatgaggttgtttagac

SEQ ID NO: 788116 - DNA, 33 bp, Homo sapien
tattcatacttaaaattatgaggttgtttagac

SEQ ID NO: 788117 - DNA, 33 bp, Homo sapien
aattagatgcagagcaagacttttcccaaatga

SEQ ID NO: 788118 - DNA, 33 bp, Homo sapien
aattagatgcagagcaggacttttcccaaatga

SEQ ID NO: 788119 - DNA, 33 bp, Homo sapien
atagaaatggctagaaaagccaaggtaaagtgt

SEQ ID NO: 788120 - DNA, 33 bp, Homo sapien
atagaaatggctagaagagccaaggtaaagtgt

SEQ ID NO: 788121 - DNA, 33 bp, Homo sapien
gctccgagccctgtacacacaagggatccccct

SEQ ID NO: 788122 - DNA, 33 bp, Homo sapien
gctccgagccctgtacgcacaagggatccccct

SEQ ID NO: 788123 - DNA, 33 bp, Homo sapien
gccacagcgcccggccagaaaactcttaaatgg

SEQ ID NO: 788124 - DNA, 33 bp, Homo sapien
gccacagcgcccggccggaaaactcttaaatgg

SEQ ID NO: 788125 - DNA, 33 bp, Homo sapien
attctctctgttctaccatctttaaacatctaa

SEQ ID NO: 788126 - DNA, 33 bp, Homo sapien
attctctctgttctactatctttaaacatctaa

SEQ ID NO: 788127 - DNA, 33 bp, Homo sapien
cgtttttttcctaatcaaaacactgtctcttgt

SEQ ID NO: 788128 - DNA, 33 bp, Homo sapien
cgtttttttcctaatcgaaacactgtctcttgt

SEQ ID NO: 788129 - DNA, 33 bp, Homo sapien
gaacatgtcattactacaaaaggttattgtgag

SEQ ID NO: 788130 - DNA, 33 bp, Homo sapien
gaacatgtcattactagaaaaggttattgtgag

SEQ ID NO: 788131 - DNA, 33 bp, Homo sapien
aactctgctaacgccagaattttttaagtcact

SEQ ID NO: 788132 - DNA, 33 bp, Homo sapien
aactctgctaacgccataattttttaagtcact

SEQ ID NO: 788133 - DNA, 33 bp, Homo sapien
agaggggtaatcctaaacacaaggcaatacaaa

SEQ ID NO: 788134 - DNA, 33 bp, Homo sapien
agaggggtaatcctaaccacaaggcaatacaaa

SEQ ID NO: 788135 - DNA, 33 bp, Homo sapien
tgtcattgtttagacacgaggaaacaaaaatag

SEQ ID NO: 788136 - DNA, 33 bp, Homo sapien
tgtcattgtttagacatgaggaaacaaaaatag

SEQ ID NO: 788137 - DNA, 33 bp, Homo sapien
aggaaagaaacggtcacgtggattcaactgctg

SEQ ID NO: 788138 - DNA, 33 bp, Homo sapien
aggaaagaaacggtcatgtggattcaactgctg

SEQ ID NO: 788139 - DNA, 33 bp, Homo sapien
aattaataccagtgaaatgaagcccgccttttt

SEQ ID NO: 788140 - DNA, 33 bp, Homo sapien
aattaataccagtgaagtgaagcccgccttttt

SEQ ID NO: 788141 - DNA, 33 bp, Homo sapien
tctttttacttggaaacttgagttgcttcacaa

SEQ ID NO: 788142 - DNA, 33 bp, Homo sapien
tctttttacttggaaatttgagttgcttcacaa

SEQ ID NO: 788143 - DNA, 33 bp, Homo sapien
tgctgatgttttgtaagatcagcccgctgtccc

SEQ ID NO: 788144 - DNA, 33 bp, Homo sapien
tgctgatgttttgtaatatcagcccgctgtccc

SEQ ID NO: 788145 - DNA, 33 bp, Homo sapien
tttgttcgttctaaaactgttccgttctccccc

SEQ ID NO: 788146 - DNA, 33 bp, Homo sapien
tttgttcgttctaaaagtgttccgttctccccc

SEQ ID NO: 788147 - DNA, 33 bp, Homo sapien
tgtatttacaccaacacagtcataagacaaaat

SEQ ID NO: 788148 - DNA, 33 bp, Homo sapien
tgtatttacaccaacatagtcataagacaaaat

SEQ ID NO: 788149 - DNA, 33 bp, Homo sapien
gtgtgtacaaaatatacggttgtagcaagacct

SEQ ID NO: 788150 - DNA, 33 bp, Homo sapien
gtgtgtacaaaatatatggttgtagcaagacct

SEQ ID NO: 788151 - DNA, 33 bp, Homo sapien
tacctcatcaatacaaactgattcatctgtgct

SEQ ID NO: 788152 - DNA, 33 bp, Homo sapien
tacctcatcaatacaacctgattcatctgtgct

SEQ ID NO: 788153 - DNA, 33 bp, Homo sapien
acatctgactgtgaaccatttcttttgaattac

SEQ ID NO: 788154 - DNA, 33 bp, Homo sapien
acatctgactgtgaactatttcttttgaattac

SEQ ID NO: 788155 - DNA, 33 bp, Homo sapien
gtatggacatatttccaatttaaaaagcaagat

SEQ ID NO: 788156 - DNA, 33 bp, Homo sapien
gtatggacatatttcccatttaaaaagcaagat

SEQ ID NO: 788157 - DNA, 33 bp, Homo sapien
agttggaaaaacctgaaagtacctgctattgtc

SEQ ID NO: 788158 - DNA, 33 bp, Homo sapien
agttggaaaaacctgacagtacctgctattgtc

SEQ ID NO: 788159 - DNA, 33 bp, Homo sapien
ggcaaagaactcatgacgcaatcttacctctat

SEQ ID NO: 788160 - DNA, 33 bp, Homo sapien
ggcaaagaactcatgatgcaatcttacctctat

SEQ ID NO: 788161 - DNA, 33 bp, Homo sapien
ttgattaggtagataaggtaatgaccatctttt

SEQ ID NO: 788162 - DNA, 33 bp, Homo sapien
ttgattaggtagataatgtaatgaccatctttt

SEQ ID NO: 788163 - DNA, 33 bp, Homo sapien
gataaagcacagccatcaagttatagttgactt

SEQ ID NO: 788164 - DNA, 33 bp, Homo sapien
gataaagcacagccatgaagttatagttgactt

SEQ ID NO: 788165 - DNA, 33 bp, Homo sapien
taagaaggagttaggaaggttttctaagcaaaa

SEQ ID NO: 788166 - DNA, 33 bp, Homo sapien
taagaaggagttaggatggttttctaagcaaaa

SEQ ID NO: 788167 - DNA, 33 bp, Homo sapien
aaaggagcatgatttacattagaatttaccttc

SEQ ID NO: 788168 - DNA, 33 bp, Homo sapien
aaaggagcatgatttagattagaatttaccttc

SEQ ID NO: 788169 - DNA, 33 bp, Homo sapien
actttttaactgaatgcataactgccttaagaa

SEQ ID NO: 788170 - DNA, 33 bp, Homo sapien
actttttaactgaatgtataactgccttaagaa

SEQ ID NO: 788171 - DNA, 33 bp, Homo sapien
ataacttccaaacttacgctgtagcaactaatt

SEQ ID NO: 788172 - DNA, 33 bp, Homo sapien
ataacttccaaacttatgctgtagcaactaatt

SEQ ID NO: 788173 - DNA, 33 bp, Homo sapien
gtgagccaacattcaaaaaggtcatgctagttc

SEQ ID NO: 788174 - DNA, 33 bp, Homo sapien
gtgagccaacattcaacaaggtcatgctagttc

SEQ ID NO: 788175 - DNA, 33 bp, Homo sapien
agaattagagtagctcccagtatctgtctctcc

SEQ ID NO: 788176 - DNA, 33 bp, Homo sapien
agaattagagtagctctcagtatctgtctctcc

SEQ ID NO: 788177 - DNA, 33 bp, Homo sapien
atatgagatttctttgaatgcaagtattttttc

SEQ ID NO: 788178 - DNA, 33 bp, Homo sapien
atatgagatttctttggatgcaagtattttttc

SEQ ID NO: 788179 - DNA, 33 bp, Homo sapien
caacttctacaaggcaaatttactgatctttat

SEQ ID NO: 788180 - DNA, 33 bp, Homo sapien
caacttctacaaggcagatttactgatctttat

SEQ ID NO: 788181 - DNA, 33 bp, Homo sapien
gagttttaagactgcaataatcagtgttggaag

SEQ ID NO: 788182 - DNA, 33 bp, Homo sapien
gagttttaagactgcagtaatcagtgttggaag

SEQ ID NO: 788183 - DNA, 33 bp, Homo sapien
aatgcagacagtgttcaaacgcttcgagtttga

SEQ ID NO: 788184 - DNA, 33 bp, Homo sapien
aatgcagacagtgttcgaacgcttcgagtttga

SEQ ID NO: 788185 - DNA, 33 bp, Homo sapien
taaagcaagtgccattaaagcaataatttatat

SEQ ID NO: 788186 - DNA, 33 bp, Homo sapien
taaagcaagtgccattgaagcaataatttatat

SEQ ID NO: 788187 - DNA, 33 bp, Homo sapien
cagaacatctgtaacaagcatatagacagagag

SEQ ID NO: 788188 - DNA, 33 bp, Homo sapien
cagaacatctgtaacaggcatatagacagagag

SEQ ID NO: 788189 - DNA, 33 bp, Homo sapien
gaatatcttagtttgccataattctacacttac

SEQ ID NO: 788190 - DNA, 33 bp, Homo sapien
gaatatcttagtttgcgataattctacacttac

SEQ ID NO: 788191 - DNA, 33 bp, Homo sapien
cctctgcattattacccggcgttctaagatcat

SEQ ID NO: 788192 - DNA, 33 bp, Homo sapien
cctctgcattattacctggcgttctaagatcat

SEQ ID NO: 788193 - DNA, 33 bp, Homo sapien
gagtcttctgctttatcaggcctgtcagctaga

SEQ ID NO: 788194 - DNA, 33 bp, Homo sapien
gagtcttctgctttattaggcctgtcagctaga

SEQ ID NO: 788195 - DNA, 33 bp, Homo sapien
gctgatctggtatccaagtttcaagaccaagtc

SEQ ID NO: 788196 - DNA, 33 bp, Homo sapien
gctgatctggtatccaggtttcaagaccaagtc

SEQ ID NO: 788197 - DNA, 33 bp, Homo sapien; identical to SEQ ID NO: 788195

SEQ ID NO: 788198 - DNA, 33 bp, Homo sapien; identical to SEQ ID NO: 788196

SEQ ID NO: 788199 - DNA, 33 bp, Homo sapien
ctgtaaaccaggtctgaaacagctgtcggcatc

SEQ ID NO: 788200 - DNA, 33 bp, Homo sapien
ctgtaaaccaggtctgcaacagctgtcggcatc

SEQ ID NO: 788201 - DNA, 33 bp, Homo sapien
taagccttatctgacgaaagagaaaggagaaag

SEQ ID NO: 788202 - DNA, 33 bp, Homo sapien
taagccttatctgacgcaagagaaaggagaaag

SEQ ID NO: 788203 - DNA, 33 bp, Homo sapien
acagctcatttcctcacctcactcctcatccca

SEQ ID NO: 788204 - DNA, 33 bp, Homo sapien
acagctcatttcctcatctcactcctcatccca

SEQ ID NO: 788205 - DNA, 33 bp, Homo sapien
gcactgctctaccaaaccttcggatagcattcc

SEQ ID NO: 788206 - DNA, 33 bp, Homo sapien
gcactgctctaccaaagcttcggatagcattcc

SEQ ID NO: 788207 - DNA, 33 bp, Homo sapien
tttggtagagcagtgcaaaaggcaaaaagagaa

SEQ ID NO: 788208 - DNA, 33 bp, Homo sapien
tttggtagagcagtgcgaaaggcaaaaagagaa

SEQ ID NO: 788209 - DNA, 33 bp, Homo sapien
acttccatgtttgaaaagtattagggagtaaat

SEQ ID NO: 788210 - DNA, 33 bp, Homo sapien
acttccatgtttgaaaggtattagggagtaaat

SEQ ID NO: 788211 - DNA, 33 bp, Homo sapien
aaaggacttgcgcatactatcccaaaacaaggc

SEQ ID NO: 788212 - DNA, 33 bp, Homo sapien
aaaggacttgcgcatattatcccaaaacaaggc

SEQ ID NO: 788213 - DNA, 33 bp, Homo sapien
attttaaaatggatcaatacagagggttaaatg

SEQ ID NO: 788214 - DNA, 33 bp, Homo sapien
attttaaaatggatcagtacagagggttaaatg

SEQ ID NO: 788215 - DNA, 33 bp, Homo sapien
cccttctattctggaaaatgtagggattctttt

SEQ ID NO: 788216 - DNA, 33 bp, Homo sapien
cccttctattctggaatatgtagggattctttt

SEQ ID NO: 788217 - DNA, 33 bp, Homo sapien
catctgcaatcaaaagaaagagttaggcctctg

SEQ ID NO: 788218 - DNA, 33 bp, Homo sapien
catctgcaatcaaaaggaagagttaggcctctg

SEQ ID NO: 788219 - DNA, 33 bp, Homo sapien
gatgtaaaaatacacacgaaatttagcagcttt

SEQ ID NO: 788220 - DNA, 33 bp, Homo sapien
gatgtaaaaatacacatgaaatttagcagcttt

SEQ ID NO: 788221 - DNA, 33 bp, Homo sapien
aatcataacccagaccaataacattagaatcta

SEQ ID NO: 788222 - DNA, 33 bp, Homo sapien
aatcataacccagaccgataacattagaatcta

SEQ ID NO: 788223 - DNA, 33 bp, Homo sapien
atacttagtaccattaaattctgcaaaattggc

SEQ ID NO: 788224 - DNA, 33 bp, Homo sapien
atacttagtaccattacattctgcaaaattggc

SEQ ID NO: 788225 - DNA, 33 bp, Homo sapien
gaggcacacagctataaaattcccttcaggttg

SEQ ID NO: 788226 - DNA, 33 bp, Homo sapien
gaggcacacagctatagaattcccttcaggttg

SEQ ID NO: 788227 - DNA, 33 bp, Homo sapien
aggaatgcttgtaaaacttagtaaatgtaattt

SEQ ID NO: 788228 - DNA, 33 bp, Homo sapien
aggaatgcttgtaaaagttagtaaatgtaattt

SEQ ID NO: 788229 - DNA, 33 bp, Homo sapien
actcaagaacgaatcacctcttaaaagccttac

SEQ ID NO: 788230 - DNA, 33 bp, Homo sapien
actcaagaacgaatcagctcttaaaagccttac

SEQ ID NO: 788231 - DNA, 33 bp, Homo sapien
ggtatctttatagcatgaccctaccctcggtac

SEQ ID NO: 788232 - DNA, 33 bp, Homo sapien
ggtatctttatagcattaccctaccctcggtac

SEQ ID NO: 788233 - DNA, 33 bp, Homo sapien
atgacagtgagtaagcaagttttcatgagatct

SEQ ID NO: 788234 - DNA, 33 bp, Homo sapien
atgacagtgagtaagcgagttttcatgagatct

SEQ ID NO: 788235 - DNA, 33 bp, Homo sapien
ttttagaaccactctaactggaatctttgtgta

SEQ ID NO: 788236 - DNA, 33 bp, Homo sapien
ttttagaaccactctatctggaatctttgtgta

SEQ ID NO: 788237 - DNA, 33 bp, Homo sapien
gtatacagggtgaataataggcatgggtatagg

SEQ ID NO: 788238 - DNA, 33 bp, Homo sapien
gtatacagggtgaatagtaggcatgggtatagg

SEQ ID NO: 788239 - DNA, 33 bp, Homo sapien
taaccatcaccaaccaatggcgattctatagat

SEQ ID NO: 788240 - DNA, 33 bp, Homo sapien
taaccatcaccaaccagtggcgattctatagat

SEQ ID NO: 788241 - DNA, 33 bp, Homo sapien
gaatgtcagaacaaagaattgcttgatgaaatt

SEQ ID NO: 788242 - DNA, 33 bp, Homo sapien
gaatgtcagaacaaaggattgcttgatgaaatt

SEQ ID NO: 788243 - DNA, 33 bp, Homo sapien
tgataatagagaaaagaacgctcagaaaaatcc

SEQ ID NO: 788244 - DNA, 33 bp, Homo sapien
tgataatagagaaaaggacgctcagaaaaatcc

SEQ ID NO: 788245 - DNA, 33 bp, Homo sapien
gcctttttgctactataaagaaacataagcaaa

SEQ ID NO: 788246 - DNA, 33 bp, Homo sapien
gcctttttgctactatgaagaaacataagcaaa

SEQ ID NO: 788247 - DNA, 33 bp, Homo sapien
tgaaaaagtaactcaacgtgacatcaatagtaa

SEQ ID NO: 788248 - DNA, 33 bp, Homo sapien
tgaaaaagtaactcaatgtgacatcaatagtaa

SEQ ID NO: 788249 - DNA, 33 bp, Homo sapien
agtttttctgagtaccaagtccttttagtgaat

SEQ ID NO: 788250 - DNA, 33 bp, Homo sapien
agtttttctgagtaccgagtccttttagtgaat

SEQ ID NO: 788251 - DNA, 33 bp, Homo sapien
ttctggttatcctgtcacagtggagtttatgaa

SEQ ID NO: 788252 - DNA, 33 bp, Homo sapien
ttctggttatcctgtcgcagtggagtttatgaa

SEQ ID NO: 788253 - DNA, 33 bp, Homo sapien
ttcaagtgatggtaccaatttcatcaaatctga

SEQ ID NO: 788254 - DNA, 33 bp, Homo sapien
ttcaagtgatggtaccgatttcatcaaatctga

SEQ ID NO: 788255 - DNA, 33 bp, Homo sapien
tgtgtattagtttctcactctatcttgaatttc

SEQ ID NO: 788256 - DNA, 33 bp, Homo sapien
tgtgtattagtttctctctctatcttgaatttc

SEQ ID NO: 788257 - DNA, 33 bp, Homo sapien
ggccatctactggctagatctggtataaagtgg

SEQ ID NO: 788258 - DNA, 33 bp, Homo sapien
ggccatctactggctatatctggtataaagtgg

SEQ ID NO: 788259 - DNA, 33 bp, Homo sapien
ggtctacctcactcaaatgtacagttcaacctc

SEQ ID NO: 788260 - DNA, 33 bp, Homo sapien
ggtctacctcactcaagtgtacagttcaacctc

SEQ ID NO: 788261 - DNA, 33 bp, Homo sapien
gaaactaggatgtaccccaatgtccttcagctg

SEQ ID NO: 788262 - DNA, 33 bp, Homo sapien
gaaactaggatgtacctcaatgtccttcagctg

SEQ ID NO: 788263 - DNA, 33 bp, Homo sapien
tctgactcagtaggtacggggtgggagccaata

SEQ ID NO: 788264 - DNA, 33 bp, Homo sapien
tctgactcagtaggtatggggtgggagccaata

SEQ ID NO: 788265 - DNA, 33 bp, Homo sapien
gaagttctttgcaaaccggaaagcagtggctct

SEQ ID NO: 788266 - DNA, 33 bp, Homo sapien
gaagttctttgcaaactggaaagcagtggctct

SEQ ID NO: 788267 - DNA, 33 bp, Homo sapien
tgtgggtacaaggataggtggagaattagagcc

SEQ ID NO: 788268 - DNA, 33 bp, Homo sapien
tgtgggtacaaggatatgtggagaattagagcc

SEQ ID NO: 788269 - DNA, 33 bp, Homo sapien
actgccagataaaaaccaggggtgcttttggga

SEQ ID NO: 788270 - DNA, 33 bp, Homo sapien
actgccagataaaaactaggggtgcttttggga

SEQ ID NO: 788271 - DNA, 33 bp, Homo sapien
caatggctgattgttaaaaagagccaggcacct

SEQ ID NO: 788272 - DNA, 33 bp, Homo sapien
caatggctgattgttagaaagagccaggcacct

SEQ ID NO: 788273 - DNA, 33 bp, Homo sapien
catttgtgtcgtggggaaggatacctcatgaat

SEQ ID NO: 788274 - DNA, 33 bp, Homo sapien
catttgtgtcgtgggggaggatacctcatgaat

SEQ ID NO: 788275 - DNA, 33 bp, Homo sapien
atccattccaactaataagcactaaatatttta

SEQ ID NO: 788276 - DNA, 33 bp, Homo sapien
atccattccaactaatgagcactaaatatttta

SEQ ID NO: 788277 - DNA, 33 bp, Homo sapien
tgtgccgtgtcacccacagtcatgaagaaaaca

SEQ ID NO: 788278 - DNA, 33 bp, Homo sapien
tgtgccgtgtcacccatagtcatgaagaaaaca

SEQ ID NO: 788279 - DNA, 33 bp, Homo sapien
actccaaagtgggggacggcagtgaagattgta

SEQ ID NO: 788280 - DNA, 33 bp, Homo sapien
actccaaagtgggggatggcagtgaagattgta

SEQ ID NO: 788281 - DNA, 33 bp, Homo sapien
tggatgaggaagagataacatagctccagcaac

SEQ ID NO: 788282 - DNA, 33 bp, Homo sapien
tggatgaggaagagatgacatagctccagcaac

SEQ ID NO: 788283 - DNA, 33 bp, Homo sapien
aatgggttttcaatacaatcacttgacaaacat

SEQ ID NO: 788284 - DNA, 33 bp, Homo sapien
aatgggttttcaatacgatcacttgacaaacat

SEQ ID NO: 788285 - DNA, 33 bp, Homo sapien
ataaactttcagaataccctatgtgaggagaac

SEQ ID NO: 788286 - DNA, 33 bp, Homo sapien
ataaactttcagaatagcctatgtgaggagaac

SEQ ID NO: 788287 - DNA, 33 bp, Homo sapien
aattagcagcatggaagaacttgagtcatattt

SEQ ID NO: 788288 - DNA, 33 bp, Homo sapien
aattagcagcatggaataacttgagtcatattt

SEQ ID NO: 788289 - DNA, 33 bp, Homo sapien
ctctgccacagtcaaactatggttctagcaaaa

SEQ ID NO: 788290 - DNA, 33 bp, Homo sapien
ctctgccacagtcaaattatggttctagcaaaa

SEQ ID NO: 788291 - DNA, 33 bp, Homo sapien
catcccacgtgaaaggccaggctaaggaaaggc

SEQ ID NO: 788292 - DNA, 33 bp, Homo sapien
catcccacgtgaaagggcaggctaaggaaaggc

SEQ ID NO: 788293 - DNA, 33 bp, Homo sapien
tagatttaggctccaacttcctttctgtaaagc

SEQ ID NO: 788294 - DNA, 33 bp, Homo sapien
tagatttaggctccaatttcctttctgtaaagc

SEQ ID NO: 788295 - DNA, 33 bp, Homo sapien
agagggggcaagggtaaatcttcatacagagga

SEQ ID NO: 788296 - DNA, 33 bp, Homo sapien
agagggggcaagggtagatcttcatacagagga

SEQ ID NO: 788297 - DNA, 33 bp, Homo sapien
acttcacaccatcacaaatttcccacgagagct

SEQ ID NO: 788298 - DNA, 33 bp, Homo sapien
acttcacaccatcacagatttcccacgagagct

SEQ ID NO: 788299 - DNA, 33 bp, Homo sapien
gtgctttccaaaatccaataccacagggcccct

SEQ ID NO: 788300 - DNA, 33 bp, Homo sapien
gtgctttccaaaatccgataccacagggcccct

SEQ ID NO: 788301 - DNA, 33 bp, Homo sapien
gaaaatctccagaagacggtcatgagtacttcc

SEQ ID NO: 788302 - DNA, 33 bp, Homo sapien
gaaaatctccagaagatggtcatgagtacttcc

SEQ ID NO: 788303 - DNA, 33 bp, Homo sapien
ccctctgctattttcacctggtgtagacttcag

SEQ ID NO: 788304 - DNA, 33 bp, Homo sapien
ccctctgctattttcatctggtgtagacttcag

SEQ ID NO: 788305 - DNA, 33 bp, Homo sapien
tttaataaatacaagccgcaaaataaatttaat

SEQ ID NO: 788306 - DNA, 33 bp, Homo sapien
tttaataaatacaagctgcaaaataaatttaat

SEQ ID NO: 788307 - DNA, 33 bp, Homo sapien
tcccagctcactggaaaaaacctaaacatctta

SEQ ID NO: 788308 - DNA, 33 bp, Homo sapien
tcccagctcactggaataaacctaaacatctta

SEQ ID NO: 788309 - DNA, 33 bp, Homo sapien
aaggtcaacaaatgaaaatgagtgggaacatag

SEQ ID NO: 788310 - DNA, 33 bp, Homo sapien
aaggtcaacaaatgaagatgagtgggaacatag

SEQ ID NO: 788311 - DNA, 33 bp, Homo sapien
cagtgaaattatggcaatccttttaactctttc

SEQ ID NO: 788312 - DNA, 33 bp, Homo sapien
cagtgaaattatggcagtccttttaactctttc

SEQ ID NO: 788313 - DNA, 33 bp, Homo sapien
aaggtcaaagattcacagaaatatagaaactac

SEQ ID NO: 788314 - DNA, 33 bp, Homo sapien
aaggtcaaagattcacggaaatatagaaactac

SEQ ID NO: 788315 - DNA, 33 bp, Homo sapien
aatctagtcagtaagcaccatgagtattcttcc

SEQ ID NO: 788316 - DNA, 33 bp, Homo sapien
aatctagtcagtaagcgccatgagtattcttcc

SEQ ID NO: 788317 - DNA, 33 bp, Homo sapien
caggcacttacactctctcacatattcacacgt

SEQ ID NO: 788318 - DNA, 33 bp, Homo sapien
caggcacttacactctttcacatattcacacgt

SEQ ID NO: 788319 - DNA, 33 bp, Homo sapien
agcagaagtgatgttacacgtacaggcacttac

SEQ ID NO: 788320 - DNA, 33 bp, Homo sapien
agcagaagtgatgttatacgtacaggcacttac

SEQ ID NO: 788321 - DNA, 33 bp, Homo sapien
tatcataggactgttacagcgattaaatataat

SEQ ID NO: 788322 - DNA, 33 bp, Homo sapien
tatcataggactgttatagcgattaaatataat

SEQ ID NO: 788323 - DNA, 33 bp, Homo sapien
accatgctgaagagaaacgtttgattgtctctt

SEQ ID NO: 788324 - DNA, 33 bp, Homo sapien
accatgctgaagagaagcgtttgattgtctctt

SEQ ID NO: 788325 - DNA, 33 bp, Homo sapien
tataaaaatctacacaagccagcagagagcagg

SEQ ID NO: 788326 - DNA, 33 bp, Homo sapien
tataaaaatctacacaggccagcagagagcagg

SEQ ID NO: 788327 - DNA, 33 bp, Homo sapien
gtttgggggatttgccaactactaaaagtttgc

SEQ ID NO: 788328 - DNA, 33 bp, Homo sapien
gtttgggggatttgcctactactaaaagtttgc

SEQ ID NO: 788329 - DNA, 33 bp, Homo sapien
ttatttcaattcaaaaatccagcaatgggactt

SEQ ID NO: 788330 - DNA, 33 bp, Homo sapien
ttatttcaattcaaaactccagcaatgggactt

SEQ ID NO: 788331 - DNA, 33 bp, Homo sapien
tggccaaggaatcaaacgttctgaaaaagtata

SEQ ID NO: 788332 - DNA, 33 bp, Homo sapien
tggccaaggaatcaaatgttctgaaaaagtata

SEQ ID NO: 788333 - DNA, 33 bp, Homo sapien
agttatacttctcttacgattctatgtattttg

SEQ ID NO: 788334 - DNA, 33 bp, Homo sapien
agttatacttctcttatgattctatgtattttg

SEQ ID NO: 788335 - DNA, 33 bp, Homo sapien
tctttgaacatgggtgcaggaaaccagtatatc

SEQ ID NO: 788336 - DNA, 33 bp, Homo sapien
tctttgaacatgggtgtaggaaaccagtatatc

SEQ ID NO: 788337 - DNA, 33 bp, Homo sapien
atctttaagaaagaagacgaatgtgctttcaag

SEQ ID NO: 788338 - DNA, 33 bp, Homo sapien
atctttaagaaagaaggcgaatgtgctttcaag

SEQ ID NO: 788339 - DNA, 33 bp, Homo sapien
gtctcaaacaaaattacggttaaatcaagtgaa

SEQ ID NO: 788340 - DNA, 33 bp, Homo sapien
gtctcaaacaaaattatggttaaatcaagtgaa

SEQ ID NO: 788341 - DNA, 33 bp, Homo sapien
tcacagcagaggtcagccatgattctgtagagt

SEQ ID NO: 788342 - DNA, 33 bp, Homo sapien
tcacagcagaggtcaggcatgattctgtagagt

SEQ ID NO: 788343 - DNA, 33 bp, Homo sapien
gtattgcctacatccaactgtgtacgccctcag

SEQ ID NO: 788344 - DNA, 33 bp, Homo sapien
gtattgcctacatccagctgtgtacgccctcag

SEQ ID NO: 788345 - DNA, 33 bp, Homo sapien
gaatgttatatatgaaagttaagggacctgggt

SEQ ID NO: 788346 - DNA, 33 bp, Homo sapien
gaatgttatatatgaaggttaagggacctgggt

SEQ ID NO: 788347 - DNA, 33 bp, Homo sapien
gccgcaggacagaggaacacataagagctatct

SEQ ID NO: 788348 - DNA, 33 bp, Homo sapien
gccgcaggacagaggagcacataagagctatct

SEQ ID NO: 788349 - DNA, 33 bp, Homo sapien
caaggttctgtggaaactagtgaagaattgaag

SEQ ID NO: 788350 - DNA, 33 bp, Homo sapien
caaggttctgtggaaattagtgaagaattgaag

SEQ ID NO: 788351 - DNA, 33 bp, Homo sapien
ttttgccaaatttgggcacatctacaaagactt

SEQ ID NO: 788352 - DNA, 33 bp, Homo sapien
ttttgccaaatttggggacatctacaaagactt

SEQ ID NO: 788353 - DNA, 33 bp, Homo sapien
ggaagaacttgaccaacgttgacagctaagttt

SEQ ID NO: 788354 - DNA, 33 bp, Homo sapien
ggaagaacttgaccaatgttgacagctaagttt

SEQ ID NO: 788355 - DNA, 33 bp, Homo sapien
aaatgtgatccagagcaatttccatcagacaat

SEQ ID NO: 788356 - DNA, 33 bp, Homo sapien
aaatgtgatccagagctatttccatcagacaat

SEQ ID NO: 788357 - DNA, 33 bp, Homo sapien
gtctccttggagtaaacggaattatgtaatact

SEQ ID NO: 788358 - DNA, 33 bp, Homo sapien
gtctccttggagtaaatggaattatgtaatact

SEQ ID NO: 788359 - DNA, 33 bp, Homo sapien
actcctcctcactctccctttagtgtctaccct

SEQ ID NO: 788360 - DNA, 33 bp, Homo sapien
actcctcctcactctctctttagtgtctaccct

SEQ ID NO: 788361 - DNA, 33 bp, Homo sapien
agtccatgctagaaagaagttggagataacgct

SEQ ID NO: 788362 - DNA, 33 bp, Homo sapien
agtccatgctagaaaggagttggagataacgct

SEQ ID NO: 788363 - DNA, 33 bp, Homo sapien
cccatggccaaacgtaacagtggggcatgggag

SEQ ID NO: 788364 - DNA, 33 bp, Homo sapien
cccatggccaaacgtagcagtggggcatgggag

SEQ ID NO: 788365 - DNA, 33 bp, Homo sapien
ctcaaacaaaacaaaaactgacagcatgcaact

SEQ ID NO: 788366 - DNA, 33 bp, Homo sapien
ctcaaacaaaacaaaagctgacagcatgcaact

SEQ ID NO: 788367 - DNA, 33 bp, Homo sapien
atcaaatgttaagaacagtggattgcagaattt

SEQ ID NO: 788368 - DNA, 33 bp, Homo sapien
atcaaatgttaagaacggtggattgcagaattt

SEQ ID NO: 788369 - DNA, 33 bp, Homo sapien
agcagtttgtggtaaaactgcttcacatggatt

SEQ ID NO: 788370 - DNA, 33 bp, Homo sapien
agcagtttgtggtaaacctgcttcacatggatt

SEQ ID NO: 788371 - DNA, 33 bp, Homo sapien
tttcacatatctaaaacccaagacctgcacaaa

SEQ ID NO: 788372 - DNA, 33 bp, Homo sapien
tttcacatatctaaaagccaagacctgcacaaa

SEQ ID NO: 788373 - DNA, 33 bp, Homo sapien
ctgctttatttataaacgcgactgaggctgaga

SEQ ID NO: 788374 - DNA, 33 bp, Homo sapien
ctgctttatttataaatgcgactgaggctgaga

SEQ ID NO: 788375 - DNA, 33 bp, Homo sapien
ataccagaacctcaaactgctttcagcatctcc

SEQ ID NO: 788376 - DNA, 33 bp, Homo sapien
ataccagaacctcaaattgctttcagcatctcc

SEQ ID NO: 788377 - DNA, 33 bp, Homo sapien
catcaactggtgaaagcataaaaaaaagtggta

SEQ ID NO: 788378 - DNA, 33 bp, Homo sapien
catcaactggtgaaaggataaaaaaaagtggta

SEQ ID NO: 788379 - DNA, 33 bp, Homo sapien
tttattattattgttacgaaagtttgttatttc

SEQ ID NO: 788380 - DNA, 33 bp, Homo sapien
tttattattattgttatgaaagtttgttatttc

SEQ ID NO: 788381 - DNA, 33 bp, Homo sapien
tcctcaattcctgttaacatttctgaaatatat

SEQ ID NO: 788382 - DNA, 33 bp, Homo sapien
tcctcaattcctgttagcatttctgaaatatat

SEQ ID NO: 788383 - DNA, 33 bp, Homo sapien
gttaaggggtaagcacacaaaaacaggttcatt

SEQ ID NO: 788384 - DNA, 33 bp, Homo sapien
gttaaggggtaagcacgcaaaaacaggttcatt

SEQ ID NO: 788385 - DNA, 33 bp, Homo sapien
taatttaaaaaaacgactaaatgtgaagctaga

SEQ ID NO: 788386 - DNA, 33 bp, Homo sapien
taatttaaaaaaacgattaaatgtgaagctaga

SEQ ID NO: 788387 - DNA, 33 bp, Homo sapien
ataggtgagaaatctacgacaagaaggcaaatg

SEQ ID NO: 788388 - DNA, 33 bp, Homo sapien
ataggtgagaaatctatgacaagaaggcaaatg

SEQ ID NO: 788389 - DNA, 33 bp, Homo sapien
agtcacatttggaagacgagaaggctaattctt

SEQ ID NO: 788390 - DNA, 33 bp, Homo sapien
agtcacatttggaagaggagaaggctaattctt

SEQ ID NO: 788391 - DNA, 33 bp, Homo sapien
tatctcctatgctaggcaagacaaaaggattga

SEQ ID NO: 788392 - DNA, 33 bp, Homo sapien
tatctcctatgctaggtaagacaaaaggattga

SEQ ID NO: 788393 - DNA, 33 bp, Homo sapien
gtgccattaatttcaacaaactcattttacact

SEQ ID NO: 788394 - DNA, 33 bp, Homo sapien
gtgccattaatttcaagaaactcattttacact

SEQ ID NO: 788395 - DNA, 33 bp, Homo sapien
gtcctgtaggagttaaatgtgtatgcagaaatg

SEQ ID NO: 788396 - DNA, 33 bp, Homo sapien
gtcctgtaggagttaagtgtgtatgcagaaatg

SEQ ID NO: 788397 - DNA, 33 bp, Homo sapien
gtggccctggactagaactccagagaattccag

SEQ ID NO: 788398 - DNA, 33 bp, Homo sapien
gtggccctggactagacctccagagaattccag

SEQ ID NO: 788399 - DNA, 33 bp, Homo sapien
gctttccattgtgagaagttacagaagttttaa

SEQ ID NO: 788400 - DNA, 33 bp, Homo sapien
gctttccattgtgagaggttacagaagttttaa

SEQ ID NO: 788401 - DNA, 33 bp, Homo sapien
tcccagagaggcttctcaatttctctataagag

SEQ ID NO: 788402 - DNA, 33 bp, Homo sapien
tcccagagaggcttcttaatttctctataagag

SEQ ID NO: 788403 - DNA, 33 bp, Homo sapien
tatctcacagttcctaagctaaacagttaggac

SEQ ID NO: 788404 - DNA, 33 bp, Homo sapien
tatctcacagttcctaggctaaacagttaggac

SEQ ID NO: 788405 - DNA, 33 bp, Homo sapien
agaaagatatatgtaacgagttgtcagctctta

SEQ ID NO: 788406 - DNA, 33 bp, Homo sapien
agaaagatatatgtaaggagttgtcagctctta

SEQ ID NO: 788407 - DNA, 33 bp, Homo sapien
ggcttctgccctcgtaacaatattggaggcctt

SEQ ID NO: 788408 - DNA, 33 bp, Homo sapien
ggcttctgccctcgtagcaatattggaggcctt

SEQ ID NO: 788409 - DNA, 33 bp, Homo sapien
gttccatgttttctcaactactaggcttctgcc

SEQ ID NO: 788410 - DNA, 33 bp, Homo sapien
gttccatgttttctcatctactaggcttctgcc

SEQ ID NO: 788411 - DNA, 33 bp, Homo sapien
cggaggttgcactgaactgagatcacactactg

SEQ ID NO: 788412 - DNA, 33 bp, Homo sapien
cggaggttgcactgaattgagatcacactactg

SEQ ID NO: 788413 - DNA, 33 bp, Homo sapien
tggatgtccaactgtacgacagctttagtgttt

SEQ ID NO: 788414 - DNA, 33 bp, Homo sapien
tggatgtccaactgtatgacagctttagtgttt

SEQ ID NO: 788415 - DNA, 33 bp, Homo sapien
cttgtagccatattaacatttttggtctttacc

SEQ ID NO: 788416 - DNA, 33 bp, Homo sapien
cttgtagccatattaagatttttggtctttacc

SEQ ID NO: 788417 - DNA, 33 bp, Homo sapien
aaaatacagaaacaaactgaaagctgaggctaa

SEQ ID NO: 788418 - DNA, 33 bp, Homo sapien
aaaatacagaaacaaagtgaaagctgaggctaa

SEQ ID NO: 788419 - DNA, 33 bp, Homo sapien
aaaaggcaagttataacgtcatagctttaatga

SEQ ID NO: 788420 - DNA, 33 bp, Homo sapien
aaaaggcaagttataatgtcatagctttaatga

SEQ ID NO: 788421 - DNA, 33 bp, Homo sapien
ataatcgacatacatgaataattaagagatgac

SEQ ID NO: 788422 - DNA, 33 bp, Homo sapien
ataatcgacatacatggataattaagagatgac

SEQ ID NO: 788423 - DNA, 33 bp, Homo sapien
catgatagttcaaactaaagtcagattattttt

SEQ ID NO: 788424 - DNA, 33 bp, Homo sapien
catgatagttcaaactgaagtcagattattttt

SEQ ID NO: 788425 - DNA, 33 bp, Homo sapien
ttaaaaaatgatgtagcatcacaagccaatgat

SEQ ID NO: 788426 - DNA, 33 bp, Homo sapien
ttaaaaaatgatgtagtatcacaagccaatgat

SEQ ID NO: 788427 - DNA, 33 bp, Homo sapien
ttacagaaatgtaaaacgaatgccaattgtgta

SEQ ID NO: 788428 - DNA, 33 bp, Homo sapien
ttacagaaatgtaaaatgaatgccaattgtgta

SEQ ID NO: 788429 - DNA, 33 bp, Homo sapien
catttagtttataagaacatctgcttctaatac

SEQ ID NO: 788430 - DNA, 33 bp, Homo sapien
catttagtttataagagcatctgcttctaatac

SEQ ID NO: 788431 - DNA, 33 bp, Homo sapien
ggaagcttaaatgtgagatctacttaggggata

SEQ ID NO: 788432 - DNA, 33 bp, Homo sapien
ggaagcttaaatgtgatatctacttaggggata

SEQ ID NO: 788433 - DNA, 33 bp, Homo sapien
tgcaggttgtatcacactatcaacggattatta

SEQ ID NO: 788434 - DNA, 33 bp, Homo sapien
tgcaggttgtatcacattatcaacggattatta

SEQ ID NO: 788435 - DNA, 33 bp, Homo sapien
gtggtgcaccaagtgaaaaacatgatcactcta

SEQ ID NO: 788436 - DNA, 33 bp, Homo sapien
gtggtgcaccaagtgagaaacatgatcactcta

SEQ ID NO: 788437 - DNA, 33 bp, Homo sapien
gtagttctgctttattcaacctaattatgcaac

SEQ ID NO: 788438 - DNA, 33 bp, Homo sapien
gtagttctgctttatttaacctaattatgcaac

SEQ ID NO: 788439 - DNA, 33 bp, Homo sapien
tgcaacatcaaagtctcacttgactctttcctg

SEQ ID NO: 788440 - DNA, 33 bp, Homo sapien
tgcaacatcaaagtcttacttgactctttcctg

SEQ ID NO: 788441 - DNA, 33 bp, Homo sapien
caatcaaacctagtgaatataagcctatgttca

SEQ ID NO: 788442 - DNA, 33 bp, Homo sapien
caatcaaacctagtgagtataagcctatgttca

SEQ ID NO: 788443 - DNA, 33 bp, Homo sapien
cacttcattacaatcaacattattatttcatct

SEQ ID NO: 788444 - DNA, 33 bp, Homo sapien
cacttcattacaatcaccattattatttcatct

SEQ ID NO: 788445 - DNA, 33 bp, Homo sapien
tatatgatgatgaatacggcgttataagcccat

SEQ ID NO: 788446 - DNA, 33 bp, Homo sapien
tatatgatgatgaatatggcgttataagcccat

SEQ ID NO: 788447 - DNA, 33 bp, Homo sapien
gcaatagtgcataagtaaacatttctacaaata

SEQ ID NO: 788448 - DNA, 33 bp, Homo sapien
gcaatagtgcataagtgaacatttctacaaata

SEQ ID NO: 788449 - DNA, 33 bp, Homo sapien
ccatttcaatttttaacattggtcctgaaaatg

SEQ ID NO: 788450 - DNA, 33 bp, Homo sapien
ccatttcaatttttaatattggtcctgaaaatg

SEQ ID NO: 788451 - DNA, 33 bp, Homo sapien
atcttacctctcattgcagctttttttttaagt

SEQ ID NO: 788452 - DNA, 33 bp, Homo sapien
atcttacctctcattgtagctttttttttaagt

SEQ ID NO: 788453 - DNA, 33 bp, Homo sapien
tgaatagaaccatgcaaaatacacatatagcat

SEQ ID NO: 788454 - DNA, 33 bp, Homo sapien
tgaatagaaccatgcagaatacacatatagcat

SEQ ID NO: 788455 - DNA, 33 bp, Homo sapien
ttggtggattatcgaaagacctcaaatgggtca

SEQ ID NO: 788456 - DNA, 33 bp, Homo sapien
ttggtggattatcgaacgacctcaaatgggtca

SEQ ID NO: 788457 - DNA, 33 bp, Homo sapien
atactgatgaacgaaaatgttctccatgattct

SEQ ID NO: 788458 - DNA, 33 bp, Homo sapien
atactgatgaacgaaagtgttctccatgattct

SEQ ID NO: 788459 - DNA, 33 bp, Homo sapien
tgaaagaacataagtacgtcaggactaacaagt

SEQ ID NO: 788460 - DNA, 33 bp, Homo sapien
tgaaagaacataagtatgtcaggactaacaagt

SEQ ID NO: 788461 - DNA, 33 bp, Homo sapien
gctatgatttttcttacccattcatacctatga

SEQ ID NO: 788462 - DNA, 33 bp, Homo sapien
gctatgatttttcttagccattcatacctatga

SEQ ID NO: 788463 - DNA, 33 bp, Homo sapien
agacctctaagtttccaaacagtcccataaata

SEQ ID NO: 788464 - DNA, 33 bp, Homo sapien
agacctctaagtttccgaacagtcccataaata

SEQ ID NO: 788465 - DNA, 33 bp, Homo sapien
aaaggttgctcagctacaataagtcggaaaagg

SEQ ID NO: 788466 - DNA, 33 bp, Homo sapien
aaaggttgctcagctataataagtcggaaaagg

SEQ ID NO: 788467 - DNA, 33 bp, Homo sapien
atgtagggtcaagagacgacttttaaaaataca

SEQ ID NO: 788468 - DNA, 33 bp, Homo sapien
atgtagggtcaagagatgacttttaaaaataca

SEQ ID NO: 788469 - DNA, 33 bp, Homo sapien
cagtcaagatgagatcaacaaatttaacatctt

SEQ ID NO: 788470 - DNA, 33 bp, Homo sapien
cagtcaagatgagatcgacaaatttaacatctt

SEQ ID NO: 788471 - DNA, 33 bp, Homo sapien
tcaatcttattctgataaagatagatctgtctt

SEQ ID NO: 788472 - DNA, 33 bp, Homo sapien
tcaatcttattctgatgaagatagatctgtctt

SEQ ID NO: 788473 - DNA, 33 bp, Homo sapien
caaattccttttcatcccagatatgctagcaat

SEQ ID NO: 788474 - DNA, 33 bp, Homo sapien
caaattccttttcatctcagatatgctagcaat

SEQ ID NO: 788475 - DNA, 33 bp, Homo sapien
attatgtttgacatcaagacagtcaagtcagtc

SEQ ID NO: 788476 - DNA, 33 bp, Homo sapien
attatgtttgacatcaggacagtcaagtcagtc

SEQ ID NO: 788477 - DNA, 33 bp, Homo sapien
attttgaaaaactagcaccaattatctgcaata

SEQ ID NO: 788478 - DNA, 33 bp, Homo sapien
attttgaaaaactagcgccaattatctgcaata

SEQ ID NO: 788479 - DNA, 33 bp, Homo sapien
tgtataattgctttcactatgatctatagactg

SEQ ID NO: 788480 - DNA, 33 bp, Homo sapien
tgtataattgctttcattatgatctatagactg

SEQ ID NO: 788481 - DNA, 33 bp, Homo sapien
ttttcagttatgtaaaatgcgagactgtgtgat

SEQ ID NO: 788482 - DNA, 33 bp, Homo sapien
ttttcagttatgtaaagtgcgagactgtgtgat

SEQ ID NO: 788483 - DNA, 33 bp, Homo sapien
tttggaagaccttacaatctgtctaggtgatat

SEQ ID NO: 788484 - DNA, 33 bp, Homo sapien
tttggaagaccttacagtctgtctaggtgatat

SEQ ID NO: 788485 - DNA, 33 bp, Homo sapien
acacacacagaacaaaacaggttaagatagctg

SEQ ID NO: 788486 - DNA, 33 bp, Homo sapien
acacacacagaacaaaccaggttaagatagctg

SEQ ID NO: 788487 - DNA, 33 bp, Homo sapien
gctggtgaattcctgacacccggcaaaaccata

SEQ ID NO: 788488 - DNA, 33 bp, Homo sapien
gctggtgaattcctgatacccggcaaaaccata

SEQ ID NO: 788489 - DNA, 33 bp, Homo sapien
gctattctcaatcttagctcttaaaaggctgtg

SEQ ID NO: 788490 - DNA, 33 bp, Homo sapien
gctattctcaatcttatctcttaaaaggctgtg

SEQ ID NO: 788491 - DNA, 33 bp, Homo sapien
atgatcaagtgggttgaatgtatcaggtatgca

SEQ ID NO: 788492 - DNA, 33 bp, Homo sapien
atgatcaagtgggttgtatgtatcaggtatgca

SEQ ID NO: 788493 - DNA, 33 bp, Homo sapien
cactcactcacttttccaagtcttccttatcta

SEQ ID NO: 788494 - DNA, 33 bp, Homo sapien
cactcactcacttttcgaagtcttccttatcta

SEQ ID NO: 788495 - DNA, 33 bp, Homo sapien
acccccaaaataccaaagaatagatccaacaaa

SEQ ID NO: 788496 - DNA, 33 bp, Homo sapien
acccccaaaataccaaggaatagatccaacaaa

SEQ ID NO: 788497 - DNA, 33 bp, Homo sapien
tgaaataggctctacaaaggcatttatttttcc

SEQ ID NO: 788498 - DNA, 33 bp, Homo sapien
tgaaataggctctacacaggcatttatttttcc

SEQ ID NO: 788499 - DNA, 33 bp, Homo sapien
cagtaacagaacaataatacacccagtaactta

SEQ ID NO: 788500 - DNA, 33 bp, Homo sapien
cagtaacagaacaatattacacccagtaactta

SEQ ID NO: 788501 - DNA, 33 bp, Homo sapien
ggtcagtacttggaaagaagtcgttttctctac

SEQ ID NO: 788502 - DNA, 33 bp, Homo sapien
ggtcagtacttggaaataagtcgttttctctac

SEQ ID NO: 788503 - DNA, 33 bp, Homo sapien
atgtgcttttcttggccatttacgtatctttgg

SEQ ID NO: 788504 - DNA, 33 bp, Homo sapien
atgtgcttttcttggctatttacgtatctttgg

SEQ ID NO: 788505 - DNA, 33 bp, Homo sapien
atcaagagttttgacaagtaactgactgaagag

SEQ ID NO: 788506 - DNA, 33 bp, Homo sapien
atcaagagttttgacaggtaactgactgaagag

SEQ ID NO: 788507 - DNA, 33 bp, Homo sapien
ggggtattttttggcacaattgtcattaacaac

SEQ ID NO: 788508 - DNA, 33 bp, Homo sapien
ggggtattttttggcataattgtcattaacaac

SEQ ID NO: 788509 - DNA, 33 bp, Homo sapien
tcaatttatgggtgacaggcatacagctgttat

SEQ ID NO: 788510 - DNA, 33 bp, Homo sapien
tcaatttatgggtgacgggcatacagctgttat

SEQ ID NO: 788511 - DNA, 33 bp, Homo sapien
ttaagacacgtaaatcacagcgccgcaggctgg

SEQ ID NO: 788512 - DNA, 33 bp, Homo sapien
ttaagacacgtaaatctcagcgccgcaggctgg

SEQ ID NO: 788513 - DNA, 33 bp, Homo sapien
agtttagaagttgccaatctgttctaaaaaata

SEQ ID NO: 788514 - DNA, 33 bp, Homo sapien
agtttagaagttgccactctgttctaaaaaata

SEQ ID NO: 788515 - DNA, 33 bp, Homo sapien
ctttctagccagataaccaaataaagttttatt

SEQ ID NO: 788516 - DNA, 33 bp, Homo sapien
ctttctagccagataagcaaataaagttttatt

SEQ ID NO: 788517 - DNA, 33 bp, Homo sapien
tggtcatttctgacaaaaaggccagaattaaca

SEQ ID NO: 788518 - DNA, 33 bp, Homo sapien
tggtcatttctgacaacaaggccagaattaaca

SEQ ID NO: 788519 - DNA, 33 bp, Homo sapien
agttactgacttttaactcacagagaaaaaaat

SEQ ID NO: 788520 - DNA, 33 bp, Homo sapien
agttactgacttttaattcacagagaaaaaaat

SEQ ID NO: 788521 - DNA, 33 bp, Homo sapien
ggttcacggtgatgaccgtaccactcgtaaggt

SEQ ID NO: 788522 - DNA, 33 bp, Homo sapien
ggttcacggtgatgactgtaccactcgtaaggt

SEQ ID NO: 788523 - DNA, 33 bp, Homo sapien
aattgtggctgaaattcaactactattggctag

SEQ ID NO: 788524 - DNA, 33 bp, Homo sapien
aattgtggctgaaattgaactactattggctag

SEQ ID NO: 788525 - DNA, 33 bp, Homo sapien
caaaaagctccaggaaataataagcaattatag

SEQ ID NO: 788526 - DNA, 33 bp, Homo sapien
caaaaagctccaggaactaataagcaattatag

SEQ ID NO: 788527 - DNA, 33 bp, Homo sapien
ctctcacagatctacccatgaattctcatggtc

SEQ ID NO: 788528 - DNA, 33 bp, Homo sapien
ctctcacagatctaccgatgaattctcatggtc

SEQ ID NO: 788529 - DNA, 33 bp, Homo sapien
catggctgactggaacaattactctagattaat

SEQ ID NO: 788530 - DNA, 33 bp, Homo sapien
catggctgactggaaccattactctagattaat

SEQ ID NO: 788531 - DNA, 33 bp, Homo sapien
tgtggtgcgtcaaggcaagagtaagccaaagaa

SEQ ID NO: 788532 - DNA, 33 bp, Homo sapien
tgtggtgcgtcaaggcgagagtaagccaaagaa

SEQ ID NO: 788533 - DNA, 33 bp, Homo sapien
ctaatctaaaaagtgaagggtttattgctggcc

SEQ ID NO: 788534 - DNA, 33 bp, Homo sapien
ctaatctaaaaagtgaggggtttattgctggcc

SEQ ID NO: 788535 - DNA, 33 bp, Homo sapien
aaattgaacatagcatcatctttaatttctgag

SEQ ID NO: 788536 - DNA, 33 bp, Homo sapien
aaattgaacatagcatgatctttaatttctgag

SEQ ID NO: 788537 - DNA, 33 bp, Homo sapien
gcaaatgaacagaaacagtaaaccaaatatcac

SEQ ID NO: 788538 - DNA, 33 bp, Homo sapien
gcaaatgaacagaaacggtaaaccaaatatcac

SEQ ID NO: 788539 - DNA, 33 bp, Homo sapien
ggagtgtagctgtgagaacgatcagaagtcact

SEQ ID NO: 788540 - DNA, 33 bp, Homo sapien
ggagtgtagctgtgaggacgatcagaagtcact

SEQ ID NO: 788541 - DNA, 33 bp, Homo sapien
tcagcaagatctttatcacccatatcttctgtt

SEQ ID NO: 788542 - DNA, 33 bp, Homo sapien
tcagcaagatctttatgacccatatcttctgtt

SEQ ID NO: 788543 - DNA, 33 bp, Homo sapien
aaagtcattggaacaaatcacgtagacctgcac

SEQ ID NO: 788544 - DNA, 33 bp, Homo sapien
aaagtcattggaacaattcacgtagacctgcac

SEQ ID NO: 788545 - DNA, 33 bp, Homo sapien
ctgatttacacagcgcccaaagattggttggac

SEQ ID NO: 788546 - DNA, 33 bp, Homo sapien
ctgatttacacagcgctcaaagattggttggac

SEQ ID NO: 788547 - DNA, 33 bp, Homo sapien
gccttcagtttgtggccgaaggtccgacagccc

SEQ ID NO: 788548 - DNA, 33 bp, Homo sapien
gccttcagtttgtggctgaaggtccgacagccc

SEQ ID NO: 788549 - DNA, 33 bp, Homo sapien
taccctactatggagactactacaataaaggca

SEQ ID NO: 788550 - DNA, 33 bp, Homo sapien
taccctactatggagattactacaataaaggca

SEQ ID NO: 788551 - DNA, 33 bp, Homo sapien
aggattctgcgcaatgaaatttgacctttggct

SEQ ID NO: 788552 - DNA, 33 bp, Homo sapien
aggattctgcgcaatggaatttgacctttggct

SEQ ID NO: 788553 - DNA, 33 bp, Homo sapien
ctatagagcctattgacctgaagactataagac

SEQ ID NO: 788554 - DNA, 33 bp, Homo sapien
ctatagagcctattgagctgaagactataagac

SEQ ID NO: 788555 - DNA, 33 bp, Homo sapien
attaataatataatacaccaaagccattaaatt

SEQ ID NO: 788556 - DNA, 33 bp, Homo sapien
attaataatataatacgccaaagccattaaatt

SEQ ID NO: 788557 - DNA, 33 bp, Homo sapien
ttagtgaggagcaagacatttgcatagcattat

SEQ ID NO: 788558 - DNA, 33 bp, Homo sapien
ttagtgaggagcaagatatttgcatagcattat

SEQ ID NO: 788559 - DNA, 33 bp, Homo sapien
agaaattcacaccttacgcaaatgacataccta

SEQ ID NO: 788560 - DNA, 33 bp, Homo sapien
agaaattcacaccttatgcaaatgacataccta

SEQ ID NO: 788561 - DNA, 33 bp, Homo sapien
taaaagcctttgtattcaactgtaaaacggcaa

SEQ ID NO: 788562 - DNA, 33 bp, Homo sapien
taaaagcctttgtattgaactgtaaaacggcaa

SEQ ID NO: 788563 - DNA, 33 bp, Homo sapien
tgagtaggcgagtgttaaaatatgcaatctagc

SEQ ID NO: 788564 - DNA, 33 bp, Homo sapien
tgagtaggcgagtgttgaaatatgcaatctagc

SEQ ID NO: 788565 - DNA, 33 bp, Homo sapien
cttgcttctccaaggccgcattgacattgcaag

SEQ ID NO: 788566 - DNA, 33 bp, Homo sapien
cttgcttctccaaggctgcattgacattgcaag

SEQ ID NO: 788567 - DNA, 33 bp, Homo sapien
gttcctaaaatgtttgcaatcagaaacttcaat

SEQ ID NO: 788568 - DNA, 33 bp, Homo sapien
gttcctaaaatgtttggaatcagaaacttcaat

SEQ ID NO: 788569 - DNA, 33 bp, Homo sapien
agtgttctccatgttacggctgctatgctatcc

SEQ ID NO: 788570 - DNA, 33 bp, Homo sapien
agtgttctccatgttatggctgctatgctatcc

SEQ ID NO: 788571 - DNA, 33 bp, Homo sapien
ggggacaatcttcaaactggttaagacaagttt

SEQ ID NO: 788572 - DNA, 33 bp, Homo sapien
ggggacaatcttcaaagtggttaagacaagttt

SEQ ID NO: 788573 - DNA, 33 bp, Homo sapien
gagagaatttgtgcaaatgtccaagaagtgttc

SEQ ID NO: 788574 - DNA, 33 bp, Homo sapien
gagagaatttgtgcaagtgtccaagaagtgttc

SEQ ID NO: 788575 - DNA, 33 bp, Homo sapien
caaatttgaaaaaatacgtgctctaacaaatga

SEQ ID NO: 788576 - DNA, 33 bp, Homo sapien
caaatttgaaaaaatatgtgctctaacaaatga

SEQ ID NO: 788577 - DNA, 33 bp, Homo sapien
aaattccagacaataaagatggcatggtacaga

SEQ ID NO: 788578 - DNA, 33 bp, Homo sapien
aaattccagacaataaggatggcatggtacaga

SEQ ID NO: 788579 - DNA, 33 bp, Homo sapien
aatatggtgaattaggcaaatagttttcctaat

SEQ ID NO: 788580 - DNA, 33 bp, Homo sapien
aatatggtgaattaggtaaatagttttcctaat

SEQ ID NO: 788581 - DNA, 33 bp, Homo sapien
gaactacctatctaaagttcctagctgggtgta

SEQ ID NO: 788582 - DNA, 33 bp, Homo sapien
gaactacctatctaaatttcctagctgggtgta

SEQ ID NO: 788583 - DNA, 33 bp, Homo sapien
tgtgacactaggaatgaaagtccttaggagatt

SEQ ID NO: 788584 - DNA, 33 bp, Homo sapien
tgtgacactaggaatggaagtccttaggagatt

SEQ ID NO: 788585 - DNA, 33 bp, Homo sapien
cttttaatgcgctgaagagaaaacttttgtcat

SEQ ID NO: 788586 - DNA, 33 bp, Homo sapien
cttttaatgcgctgaatagaaaacttttgtcat

SEQ ID NO: 788587 - DNA, 33 bp, Homo sapien
ggtgtcattccaacccaaagatcaagtgaatgt

SEQ ID NO: 788588 - DNA, 33 bp, Homo sapien
ggtgtcattccaacccgaagatcaagtgaatgt

SEQ ID NO: 788589 - DNA, 33 bp, Homo sapien
ttctccaactctctaaatgccagctggatgtcc

SEQ ID NO: 788590 - DNA, 33 bp, Homo sapien
ttctccaactctctaagtgccagctggatgtcc

SEQ ID NO: 788591 - DNA, 33 bp, Homo sapien
gctacaggactatctgaatgctgatgttctaag

SEQ ID NO: 788592 - DNA, 33 bp, Homo sapien
gctacaggactatctggatgctgatgttctaag

SEQ ID NO: 788593 - DNA, 33 bp, Homo sapien
tttcaagtatagtgtacgtaatgtgggttgtat

SEQ ID NO: 788594 - DNA, 33 bp, Homo sapien
tttcaagtatagtgtatgtaatgtgggttgtat

SEQ ID NO: 788595 - DNA, 33 bp, Homo sapien
ctgcactttaaaaaccacctatgcagtgattat

SEQ ID NO: 788596 - DNA, 33 bp, Homo sapien
ctgcactttaaaaaccgcctatgcagtgattat

SEQ ID NO: 788597 - DNA, 33 bp, Homo sapien
acatgcatttcattcaaattagaactctgtttt

SEQ ID NO: 788598 - DNA, 33 bp, Homo sapien
acatgcatttcattcagattagaactctgtttt

SEQ ID NO: 788599 - DNA, 33 bp, Homo sapien
tggattatggtaatgcacttaactatattgatc

SEQ ID NO: 788600 - DNA, 33 bp, Homo sapien
tggattatggtaatgcgcttaactatattgatc

SEQ ID NO: 788601 - DNA, 33 bp, Homo sapien
cattttgatgggcttacgttcactttcacttgc

SEQ ID NO: 788602 - DNA, 33 bp, Homo sapien
cattttgatgggcttatgttcactttcacttgc

SEQ ID NO: 788603 - DNA, 33 bp, Homo sapien
cataataatactgaaaccaggaaagagcagcta

SEQ ID NO: 788604 - DNA, 33 bp, Homo sapien
cataataatactgaaagcaggaaagagcagcta

SEQ ID NO: 788605 - DNA, 33 bp, Homo sapien
tgaacaactactattacgctgacagatttatat

SEQ ID NO: 788606 - DNA, 33 bp, Homo sapien
tgaacaactactattatgctgacagatttatat

SEQ ID NO: 788607 - DNA, 33 bp, Homo sapien
aaagccggtctgttgtcaaggtaagggctgagg

SEQ ID NO: 788608 - DNA, 33 bp, Homo sapien
aaagccggtctgttgttaaggtaagggctgagg

SEQ ID NO: 788609 - DNA, 33 bp, Homo sapien
gactggatgcagcccaaaaaatgctgacagaac

SEQ ID NO: 788610 - DNA, 33 bp, Homo sapien
gactggatgcagcccagaaaatgctgacagaac

SEQ ID NO: 788611 - DNA, 33 bp, Homo sapien
cttctctagccatcttcaactctcaatcttttt

SEQ ID NO: 788612 - DNA, 33 bp, Homo sapien
cttctctagccatcttgaactctcaatcttttt

SEQ ID NO: 788613 - DNA, 33 bp, Homo sapien
attagacaggatgcagaagtaagtggtcagttt

SEQ ID NO: 788614 - DNA, 33 bp, Homo sapien
attagacaggatgcaggagtaagtggtcagttt

SEQ ID NO: 788615 - DNA, 33 bp, Homo sapien
catatgaagatagtaaacacctttgggatggtt

SEQ ID NO: 788616 - DNA, 33 bp, Homo sapien
catatgaagatagtaatcacctttgggatggtt

SEQ ID NO: 788617 - DNA, 33 bp, Homo sapien
caaattttaaaactgccaggtcactgtgtaaga

SEQ ID NO: 788618 - DNA, 33 bp, Homo sapien
caaattttaaaactgctaggtcactgtgtaaga

SEQ ID NO: 788619 - DNA, 33 bp, Homo sapien
aaagaagagaaagacaactatcactcaagaaaa

SEQ ID NO: 788620 - DNA, 33 bp, Homo sapien
aaagaagagaaagacagctatcactcaagaaaa

SEQ ID NO: 788621 - DNA, 33 bp, Homo sapien
gatctttgggtgtgcaaaaagaagagaaagaca

SEQ ID NO: 788622 - DNA, 33 bp, Homo sapien
gatctttgggtgtgcagaaagaagagaaagaca

SEQ ID NO: 788623 - DNA, 33 bp, Homo sapien
tcctgagttcatatgaaatagttcaaccacaca

SEQ ID NO: 788624 - DNA, 33 bp, Homo sapien
tcctgagttcatatgatatagttcaaccacaca

SEQ ID NO: 788625 - DNA, 33 bp, Homo sapien
tgtaatccacaagcgaagaatcctataattatc

SEQ ID NO: 788626 - DNA, 33 bp, Homo sapien
tgtaatccacaagcgatgaatcctataattatc

SEQ ID NO: 788627 - DNA, 33 bp, Homo sapien
ctcagatcaatactccactaaagatctgaggaa

SEQ ID NO: 788628 - DNA, 33 bp, Homo sapien
ctcagatcaatactccgctaaagatctgaggaa

SEQ ID NO: 788629 - DNA, 33 bp, Homo sapien
ttctttctgggtctctaaaagcacttactctta

SEQ ID NO: 788630 - DNA, 33 bp, Homo sapien
ttctttctgggtctctgaaagcacttactctta

SEQ ID NO: 788631 - DNA, 33 bp, Homo sapien
aagccagccatcaggtaaaataaataaataaat

SEQ ID NO: 788632 - DNA, 33 bp, Homo sapien
aagccagccatcaggttaaataaataaataaat

SEQ ID NO: 788633 - DNA, 33 bp, Homo sapien
gatgtgcagaactttacaatgtattgaaatcct

SEQ ID NO: 788634 - DNA, 33 bp, Homo sapien
gatgtgcagaactttataatgtattgaaatcct

SEQ ID NO: 788635 - DNA, 33 bp, Homo sapien
ctttatcacaaaagtacagctgaacggattgtg

SEQ ID NO: 788636 - DNA, 33 bp, Homo sapien
ctttatcacaaaagtagagctgaacggattgtg

SEQ ID NO: 788637 - DNA, 33 bp, Homo sapien
acaattcattttgaaaagtcattggggtggcac

SEQ ID NO: 788638 - DNA, 33 bp, Homo sapien
acaattcattttgaaacgtcattggggtggcac

SEQ ID NO: 788639 - DNA, 33 bp, Homo sapien
ggtctgcttgggatgcaaccactagacactcac

SEQ ID NO: 788640 - DNA, 33 bp, Homo sapien
ggtctgcttgggatgcgaccactagacactcac

SEQ ID NO: 788641 - DNA, 33 bp, Homo sapien
ttgaaggtagagtgaacatgacccagttttggt

SEQ ID NO: 788642 - DNA, 33 bp, Homo sapien
ttgaaggtagagtgaatatgacccagttttggt

SEQ ID NO: 788643 - DNA, 33 bp, Homo sapien
ttggaagttggaagtaaatggaggcctcctttg

SEQ ID NO: 788644 - DNA, 33 bp, Homo sapien
ttggaagttggaagtagatggaggcctcctttg

SEQ ID NO: 788645 - DNA, 33 bp, Homo sapien
atggcaccacaatgtacataattcaactgatga

SEQ ID NO: 788646 - DNA, 33 bp, Homo sapien
atggcaccacaatgtatataattcaactgatga

SEQ ID NO: 788647 - DNA, 33 bp, Homo sapien
aaattttaaaagaaacccatcaatatgttggca

SEQ ID NO: 788648 - DNA, 33 bp, Homo sapien
aaattttaaaagaaactcatcaatatgttggca

SEQ ID NO: 788649 - DNA, 33 bp, Homo sapien
aggagccaagaacatacccttttgggatccacc

SEQ ID NO: 788650 - DNA, 33 bp, Homo sapien
aggagccaagaacatatccttttgggatccacc

SEQ ID NO: 788651 - DNA, 33 bp, Homo sapien
aagaacaaagcagagacgagaaagcagagaaga

SEQ ID NO: 788652 - DNA, 33 bp, Homo sapien
aagaacaaagcagagatgagaaagcagagaaga

SEQ ID NO: 788653 - DNA, 33 bp, Homo sapien
gtgtgaatttatgggcacttgttctgattcttt

SEQ ID NO: 788654 - DNA, 33 bp, Homo sapien
gtgtgaatttatgggcgcttgttctgattcttt

SEQ ID NO: 788655 - DNA, 33 bp, Homo sapien
tgttcttactcagcacactcatttctgtatccc

SEQ ID NO: 788656 - DNA, 33 bp, Homo sapien
tgttcttactcagcacgctcatttctgtatccc

SEQ ID NO: 788657 - DNA, 33 bp, Homo sapien
tctaatacactaagccgctaacattgtctgatt

SEQ ID NO: 788658 - DNA, 33 bp, Homo sapien
tctaatacactaagcctctaacattgtctgatt

SEQ ID NO: 788659 - DNA, 33 bp, Homo sapien
aacagatgtgtccagaagtattagacccagcat

SEQ ID NO: 788660 - DNA, 33 bp, Homo sapien
aacagatgtgtccagacgtattagacccagcat

SEQ ID NO: 788661 - DNA, 33 bp, Homo sapien
taactaatacatataccaaggcatttattcata

SEQ ID NO: 788662 - DNA, 33 bp, Homo sapien
taactaatacatatactaaggcatttattcata

SEQ ID NO: 788663 - DNA, 33 bp, Homo sapien
accacagagtcccaaaaagggtgttacagcatg

SEQ ID NO: 788664 - DNA, 33 bp, Homo sapien
accacagagtcccaaagagggtgttacagcatg

SEQ ID NO: 788665 - DNA, 33 bp, Homo sapien
ttaaaaatccaaattcaagagtcaattacttaa

SEQ ID NO: 788666 - DNA, 33 bp, Homo sapien
ttaaaaatccaaattcgagagtcaattacttaa

SEQ ID NO: 788667 - DNA, 33 bp, Homo sapien
atcaagagtgactcaccaatcttgccctacaag

SEQ ID NO: 788668 - DNA, 33 bp, Homo sapien
atcaagagtgactcactaatcttgccctacaag

SEQ ID NO: 788669 - DNA, 33 bp, Homo sapien
ccctagcataattctaaacatacagaatcaatt

SEQ ID NO: 788670 - DNA, 33 bp, Homo sapien
ccctagcataattctagacatacagaatcaatt

SEQ ID NO: 788671 - DNA, 33 bp, Homo sapien
cgagtgtgtggaagaacaacatttacagaaaat

SEQ ID NO: 788672 - DNA, 33 bp, Homo sapien
cgagtgtgtggaagaagaacatttacagaaaat

SEQ ID NO: 788673 - DNA, 33 bp, Homo sapien
tttatatgtatattacactttatgatgcgccaa

SEQ ID NO: 788674 - DNA, 33 bp, Homo sapien
tttatatgtatattacgctttatgatgcgccaa

SEQ ID NO: 788675 - DNA, 33 bp, Homo sapien
gaaactcgtaactttcacttggttgtagaagcc

SEQ ID NO: 788676 - DNA, 33 bp, Homo sapien
gaaactcgtaactttcgcttggttgtagaagcc

SEQ ID NO: 788677 - DNA, 33 bp, Homo sapien
agtgatggtggtcgacaaaaagaagaaaggaaa

SEQ ID NO: 788678 - DNA, 33 bp, Homo sapien
agtgatggtggtcgacgaaaagaagaaaggaaa

SEQ ID NO: 788679 - DNA, 33 bp, Homo sapien
aatacaaaattaagtacagagtcttggaaggga

SEQ ID NO: 788680 - DNA, 33 bp, Homo sapien
aatacaaaattaagtagagagtcttggaaggga

SEQ ID NO: 788681 - DNA, 33 bp, Homo sapien
gtttggaactctaatcccagaaaagaagaaaaa

SEQ ID NO: 788682 - DNA, 33 bp, Homo sapien
gtttggaactctaatctcagaaaagaagaaaaa

SEQ ID NO: 788683 - DNA, 33 bp, Homo sapien
ctacccacaattaagcagccagatagaacatct

SEQ ID NO: 788684 - DNA, 33 bp, Homo sapien
ctacccacaattaagccgccagatagaacatct

SEQ ID NO: 788685 - DNA, 33 bp, Homo sapien
ggtagatttttgacaacgtatgtagtgaaggat

SEQ ID NO: 788686 - DNA, 33 bp, Homo sapien
ggtagatttttgacaatgtatgtagtgaaggat

SEQ ID NO: 788687 - DNA, 33 bp, Homo sapien
tgaacaagtgtagttgaagtaagtagctatcaa

SEQ ID NO: 788688 - DNA, 33 bp, Homo sapien
tgaacaagtgtagttggagtaagtagctatcaa

SEQ ID NO: 788689 - DNA, 33 bp, Homo sapien
gggccagccatgtggcagaggtaatggttaagg

SEQ ID NO: 788690 - DNA, 33 bp, Homo sapien
gggccagccatgtggcggaggtaatggttaagg

SEQ ID NO: 788691 - DNA, 33 bp, Homo sapien
aaatcagaaacttatcaatgtggagcaaggtgg

SEQ ID NO: 788692 - DNA, 33 bp, Homo sapien
aaatcagaaacttatctatgtggagcaaggtgg

SEQ ID NO: 788693 - DNA, 33 bp, Homo sapien
aaaactgcccttggagaaaaattcagagcctta

SEQ ID NO: 788694 - DNA, 33 bp, Homo sapien
aaaactgcccttggaggaaaattcagagcctta

SEQ ID NO: 788695 - DNA, 33 bp, Homo sapien
ctatgttctttttgcaagttataaggaaataat

SEQ ID NO: 788696 - DNA, 33 bp, Homo sapien
ctatgttctttttgcaggttataaggaaataat

SEQ ID NO: 788697 - DNA, 33 bp, Homo sapien
tagaattgggatggataaagttgtccaaaatta

SEQ ID NO: 788698 - DNA, 33 bp, Homo sapien
tagaattgggatggattaagttgtccaaaatta

SEQ ID NO: 788699 - DNA, 33 bp, Homo sapien
ctacagcaaagaataagaacagttgtttagtac

SEQ ID NO: 788700 - DNA, 33 bp, Homo sapien
ctacagcaaagaataataacagttgtttagtac

SEQ ID NO: 788701 - DNA, 33 bp, Homo sapien
aaagtatcaagattccactcacttgtggagaag

SEQ ID NO: 788702 - DNA, 33 bp, Homo sapien
aaagtatcaagattcctctcacttgtggagaag

SEQ ID NO: 788703 - DNA, 33 bp, Homo sapien
aagtgaagtcacgccaagtgattgaactccttg

SEQ ID NO: 788704 - DNA, 33 bp, Homo sapien
aagtgaagtcacgccaggtgattgaactccttg

SEQ ID NO: 788705 - DNA, 33 bp, Homo sapien
aacttctaaccatttcccacactatatacaaaa

SEQ ID NO: 788706 - DNA, 33 bp, Homo sapien
aacttctaaccatttctcacactatatacaaaa

SEQ ID NO: 788707 - DNA, 33 bp, Homo sapien
ctcctattcatcacggcatctttcattgcagtc

SEQ ID NO: 788708 - DNA, 33 bp, Homo sapien
ctcctattcatcacggtatctttcattgcagtc

SEQ ID NO: 788709 - DNA, 33 bp, Homo sapien
atatattccatactgacacacagaatactatga

SEQ ID NO: 788710 - DNA, 33 bp, Homo sapien
atatattccatactgatacacagaatactatga

SEQ ID NO: 788711 - DNA, 33 bp, Homo sapien
ataagctgactattaaaaacattgtaagtattg

SEQ ID NO: 788712 - DNA, 33 bp, Homo sapien
ataagctgactattaagaacattgtaagtattg

SEQ ID NO: 788713 - DNA, 33 bp, Homo sapien
ttttcctaaactgtgaatatactgaaaaagtat

SEQ ID NO: 788714 - DNA, 33 bp, Homo sapien
ttttcctaaactgtgagtatactgaaaaagtat

SEQ ID NO: 788715 - DNA, 33 bp, Homo sapien
ctgtgttacacagataagatagaagagaaaatt

SEQ ID NO: 788716 - DNA, 33 bp, Homo sapien
ctgtgttacacagatatgatagaagagaaaatt

SEQ ID NO: 788717 - DNA, 33 bp, Homo sapien
tcagggaccaaggcagaatctctttttgtcttt

SEQ ID NO: 788718 - DNA, 33 bp, Homo sapien
tcagggaccaaggcaggatctctttttgtcttt

SEQ ID NO: 788719 - DNA, 33 bp, Homo sapien
aagactacattcctccactcctcttgcaaaggg

SEQ ID NO: 788720 - DNA, 33 bp, Homo sapien
aagactacattcctccgctcctcttgcaaaggg

SEQ ID NO: 788721 - DNA, 33 bp, Homo sapien
gcaggattggagcaatcaacatacagaactaga

SEQ ID NO: 788722 - DNA, 33 bp, Homo sapien
gcaggattggagcaattaacatacagaactaga

SEQ ID NO: 788723 - DNA, 33 bp, Homo sapien
cagactaacagcatcaagaataggaagttataa

SEQ ID NO: 788724 - DNA, 33 bp, Homo sapien
cagactaacagcatcatgaataggaagttataa

SEQ ID NO: 788725 - DNA, 33 bp, Homo sapien
tcagtttagtgaaccaccaatcaagcccaatgc

SEQ ID NO: 788726 - DNA, 33 bp, Homo sapien
tcagtttagtgaaccatcaatcaagcccaatgc

SEQ ID NO: 788727 - DNA, 33 bp, Homo sapien
tttattgctgtgtttccataatgtaaatgtcaa

SEQ ID NO: 788728 - DNA, 33 bp, Homo sapien
tttattgctgtgtttctataatgtaaatgtcaa

SEQ ID NO: 788729 - DNA, 33 bp, Homo sapien
aaggagaaaagtggcaccacatatctcttcata

SEQ ID NO: 788730 - DNA, 33 bp, Homo sapien
aaggagaaaagtggcagcacatatctcttcata

SEQ ID NO: 788731 - DNA, 33 bp, Homo sapien
acagaaaagtgattacacagacttctcaaaaaa

SEQ ID NO: 788732 - DNA, 33 bp, Homo sapien
acagaaaagtgattactcagacttctcaaaaaa

SEQ ID NO: 788733 - DNA, 33 bp, Homo sapien
tttggtagcatatactaaacagtcttgcctttt

SEQ ID NO: 788734 - DNA, 33 bp, Homo sapien
tttggtagcatatacttaacagtcttgcctttt

SEQ ID NO: 788735 - DNA, 33 bp, Homo sapien
caaattacaggaagaagaatgtgacagctgctt

SEQ ID NO: 788736 - DNA, 33 bp, Homo sapien
caaattacaggaagaataatgtgacagctgctt

SEQ ID NO: 788737 - DNA, 33 bp, Homo sapien
tattagaataaatgtcagaacaagaaatgtaca

SEQ ID NO: 788738 - DNA, 33 bp, Homo sapien
tattagaataaatgtcggaacaagaaatgtaca

SEQ ID NO: 788739 - DNA, 33 bp, Homo sapien
caagaaatgtacaattaaagtcaggtttgtaaa

SEQ ID NO: 788740 - DNA, 33 bp, Homo sapien
caagaaatgtacaattcaagtcaggtttgtaaa

SEQ ID NO: 788741 - DNA, 33 bp, Homo sapien
tgtcttataattggtccaataacctcatctgat

SEQ ID NO: 788742 - DNA, 33 bp, Homo sapien
tgtcttataattggtctaataacctcatctgat

SEQ ID NO: 788743 - DNA, 33 bp, Homo sapien
aaatttctgtagacccccagagaactaatgttg

SEQ ID NO: 788744 - DNA, 33 bp, Homo sapien
aaatttctgtagaccctcagagaactaatgttg

SEQ ID NO: 788745 - DNA, 33 bp, Homo sapien
acctctgttctactctaaaatcttggcagtctc

SEQ ID NO: 788746 - DNA, 33 bp, Homo sapien
acctctgttctactctcaaatcttggcagtctc

SEQ ID NO: 788747 - DNA, 33 bp, Homo sapien
atctacaatcttaacccagtggaaatacaagat

SEQ ID NO: 788748 - DNA, 33 bp, Homo sapien
atctacaatcttaaccgagtggaaatacaagat

SEQ ID NO: 788749 - DNA, 33 bp, Homo sapien
tgcaggagaatgatcaaccatataaaatatcct

SEQ ID NO: 788750 - DNA, 33 bp, Homo sapien
tgcaggagaatgatcatccatataaaatatcct

SEQ ID NO: 788751 - DNA, 33 bp, Homo sapien
aagaactgtacactaaaacatacaagttgctga

SEQ ID NO: 788752 - DNA, 33 bp, Homo sapien
aagaactgtacactaagacatacaagttgctga

SEQ ID NO: 788753 - DNA, 33 bp, Homo sapien
tcgtattagtctaccactgggctaatatggaca

SEQ ID NO: 788754 - DNA, 33 bp, Homo sapien
tcgtattagtctaccattgggctaatatggaca

SEQ ID NO: 788755 - DNA, 33 bp, Homo sapien
aaaggagataggaagaagtaacactggtgtccc

SEQ ID NO: 788756 - DNA, 33 bp, Homo sapien
aaaggagataggaagaggtaacactggtgtccc

SEQ ID NO: 788757 - DNA, 33 bp, Homo sapien
tgagtcagcaatggaaaaaacaggataaagaag

SEQ ID NO: 788758 - DNA, 33 bp, Homo sapien
tgagtcagcaatggaagaaacaggataaagaag

SEQ ID NO: 788759 - DNA, 33 bp, Homo sapien
ctccatagcctcaggaacctttgagcacattta

SEQ ID NO: 788760 - DNA, 33 bp, Homo sapien
ctccatagcctcaggagcctttgagcacattta

SEQ ID NO: 788761 - DNA, 33 bp, Homo sapien
tgaggcttcacacttacgctgccctcagatatt

SEQ ID NO: 788762 - DNA, 33 bp, Homo sapien
tgaggcttcacacttatgctgccctcagatatt

SEQ ID NO: 788763 - DNA, 33 bp, Homo sapien
agctgaacagatgtacactcactgctgcagttg

SEQ ID NO: 788764 - DNA, 33 bp, Homo sapien
agctgaacagatgtaccctcactgctgcagttg

SEQ ID NO: 788765 - DNA, 33 bp, Homo sapien
aaaaatctgttatctacgtcatcagctttcacc

SEQ ID NO: 788766 - DNA, 33 bp, Homo sapien
aaaaatctgttatctatgtcatcagctttcacc

SEQ ID NO: 788767 - DNA, 33 bp, Homo sapien
aggaacaaggtaactcactgtaagatgcctcag

SEQ ID NO: 788768 - DNA, 33 bp, Homo sapien
aggaacaaggtaactcgctgtaagatgcctcag

SEQ ID NO: 788769 - DNA, 33 bp, Homo sapien
taagcaaggtttaaacaagactataaagcatgg

SEQ ID NO: 788770 - DNA, 33 bp, Homo sapien
taagcaaggtttaaacgagactataaagcatgg

SEQ ID NO: 788771 - DNA, 33 bp, Homo sapien
ccaggcaccaatgtcaactgttttttagggtca

SEQ ID NO: 788772 - DNA, 33 bp, Homo sapien
ccaggcaccaatgtcagctgttttttagggtca

SEQ ID NO: 788773 - DNA, 33 bp, Homo sapien
agacaatcaagatataagacagttcactcctga

SEQ ID NO: 788774 - DNA, 33 bp, Homo sapien
agacaatcaagatataggacagttcactcctga

SEQ ID NO: 788775 - DNA, 33 bp, Homo sapien
gaattccgcataagtgaactcataagtacgtag

SEQ ID NO: 788776 - DNA, 33 bp, Homo sapien
gaattccgcataagtggactcataagtacgtag

SEQ ID NO: 788777 - DNA, 33 bp, Homo sapien
cagtgtcttcatggcacaacagaggctttagcc

SEQ ID NO: 788778 - DNA, 33 bp, Homo sapien
cagtgtcttcatggcataacagaggctttagcc

SEQ ID NO: 788779 - DNA, 33 bp, Homo sapien
aggaagctatgatgaaatgagcttagcagctga

SEQ ID NO: 788780 - DNA, 33 bp, Homo sapien
aggaagctatgatgaactgagcttagcagctga

SEQ ID NO: 788781 - DNA, 33 bp, Homo sapien
aatacagggggccaagaagtgacagtctgcagg

SEQ ID NO: 788782 - DNA, 33 bp, Homo sapien
aatacagggggccaagcagtgacagtctgcagg

SEQ ID NO: 788783 - DNA, 33 bp, Homo sapien
gcaatataatcatggaatatctaaatacaatct

SEQ ID NO: 788784 - DNA, 33 bp, Homo sapien
gcaatataatcatggactatctaaatacaatct

SEQ ID NO: 788785 - DNA, 33 bp, Homo sapien
agatagcaaaagtttccagccctcatgtggaca

SEQ ID NO: 788786 - DNA, 33 bp, Homo sapien
agatagcaaaagtttctagccctcatgtggaca

SEQ ID NO: 788787 - DNA, 33 bp, Homo sapien
gatttcatagaagtaaagtctgatggaagtgaa

SEQ ID NO: 788788 - DNA, 33 bp, Homo sapien
gatttcatagaagtaatgtctgatggaagtgaa

SEQ ID NO: 788789 - DNA, 33 bp, Homo sapien
taatgactctggatgaaatcctaaaactggaag

SEQ ID NO: 788790 - DNA, 33 bp, Homo sapien
taatgactctggatgagatcctaaaactggaag

SEQ ID NO: 788791 - DNA, 33 bp, Homo sapien
gaaagagaatgagaaagaagtcatgagatctgg

SEQ ID NO: 788792 - DNA, 33 bp, Homo sapien
gaaagagaatgagaaataagtcatgagatctgg

SEQ ID NO: 788793 - DNA, 33 bp, Homo sapien
cctggggaatttgcagacatagcacgaactcct

SEQ ID NO: 788794 - DNA, 33 bp, Homo sapien
cctggggaatttgcaggcatagcacgaactcct

SEQ ID NO: 788795 - DNA, 33 bp, Homo sapien
gtaggcactttgtaaacattaaatggacagcag

SEQ ID NO: 788796 - DNA, 33 bp, Homo sapien
gtaggcactttgtaaatattaaatggacagcag

SEQ ID NO: 788797 - DNA, 33 bp, Homo sapien
attatttagtctattacgcgtttactagagaaa

SEQ ID NO: 788798 - DNA, 33 bp, Homo sapien
attatttagtctattatgcgtttactagagaaa

SEQ ID NO: 788799 - DNA, 33 bp, Homo sapien
gtactctgctgcagaaccacctaagatgagtac

SEQ ID NO: 788800 - DNA, 33 bp, Homo sapien
gtactctgctgcagaagcacctaagatgagtac

SEQ ID NO: 788801 - DNA, 33 bp, Homo sapien
tatgtactactcaagacagaacctgcttgcaag

SEQ ID NO: 788802 - DNA, 33 bp, Homo sapien
tatgtactactcaagatagaacctgcttgcaag

SEQ ID NO: 788803 - DNA, 33 bp, Homo sapien
acagcatctctcatcaatcttccccagctacta

SEQ ID NO: 788804 - DNA, 33 bp, Homo sapien
acagcatctctcatcactcttccccagctacta

SEQ ID NO: 788805 - DNA, 33 bp, Homo sapien
aagcatgatataaaaccctgaagtcacaaaatt

SEQ ID NO: 788806 - DNA, 33 bp, Homo sapien
aagcatgatataaaacgctgaagtcacaaaatt

SEQ ID NO: 788807 - DNA, 33 bp, Homo sapien
ttagactactgattgtaaacctttgttctttac

SEQ ID NO: 788808 - DNA, 33 bp, Homo sapien
ttagactactgattgttaacctttgttctttac

SEQ ID NO: 788809 - DNA, 33 bp, Homo sapien
cagtgttccaagtacccggcagaagcaaagcta

SEQ ID NO: 788810 - DNA, 33 bp, Homo sapien
cagtgttccaagtacctggcagaagcaaagcta

SEQ ID NO: 788811 - DNA, 33 bp, Homo sapien
tcaatatgataaaaggccacttgtcttagtcca

SEQ ID NO: 788812 - DNA, 33 bp, Homo sapien
tcaatatgataaaaggtcacttgtcttagtcca

SEQ ID NO: 788813 - DNA, 33 bp, Homo sapien
atgaataaagggaatacgtgcggaacgaagaaa

SEQ ID NO: 788814 - DNA, 33 bp, Homo sapien
atgaataaagggaatatgtgcggaacgaagaaa

SEQ ID NO: 788815 - DNA, 33 bp, Homo sapien
gcttaaccaaacactcaaaactgatgcagggca

SEQ ID NO: 788816 - DNA, 33 bp, Homo sapien
gcttaaccaaacactcgaaactgatgcagggca

SEQ ID NO: 788817 - DNA, 33 bp, Homo sapien
ttaaatgctatgacacacgtattatgttattat

SEQ ID NO: 788818 - DNA, 33 bp, Homo sapien
ttaaatgctatgacactcgtattatgttattat

SEQ ID NO: 788819 - DNA, 33 bp, Homo sapien
ttgcttattattaaaaagccatttagcagaatg

SEQ ID NO: 788820 - DNA, 33 bp, Homo sapien
ttgcttattattaaaatgccatttagcagaatg

SEQ ID NO: 788821 - DNA, 33 bp, Homo sapien
tagcaataaaggcaaacctgaaatagaccaacc

SEQ ID NO: 788822 - DNA, 33 bp, Homo sapien
tagcaataaaggcaaagctgaaatagaccaacc

SEQ ID NO: 788823 - DNA, 33 bp, Homo sapien
agttaggtcagtatccagcacatagtgagcatt

SEQ ID NO: 788824 - DNA, 33 bp, Homo sapien
agttaggtcagtatccggcacatagtgagcatt

SEQ ID NO: 788825 - DNA, 33 bp, Homo sapien
tatatacttcatcttacggttttcaaggaattt

SEQ ID NO: 788826 - DNA, 33 bp, Homo sapien
tatatacttcatcttatggttttcaaggaattt

SEQ ID NO: 788827 - DNA, 33 bp, Homo sapien
taaggagttaagtacacggaagtcatctcacag

SEQ ID NO: 788828 - DNA, 33 bp, Homo sapien
taaggagttaagtacatggaagtcatctcacag

SEQ ID NO: 788829 - DNA, 33 bp, Homo sapien
cagatcatccatttgacatagagacctcatctc

SEQ ID NO: 788830 - DNA, 33 bp, Homo sapien
cagatcatccatttgatatagagacctcatctc

SEQ ID NO: 788831 - DNA, 33 bp, Homo sapien
tacaatctctaagcccacttacaaggccaacac

SEQ ID NO: 788832 - DNA, 33 bp, Homo sapien
tacaatctctaagcccgcttacaaggccaacac

SEQ ID NO: 788833 - DNA, 33 bp, Homo sapien
tttggaaattttcaggaaagtgttctcataaca

SEQ ID NO: 788834 - DNA, 33 bp, Homo sapien
tttggaaattttcagggaagtgttctcataaca

SEQ ID NO: 788835 - DNA, 33 bp, Homo sapien
attttcaaaaagctaacctgaagtcatgatggg

SEQ ID NO: 788836 - DNA, 33 bp, Homo sapien
attttcaaaaagctaatctgaagtcatgatggg

SEQ ID NO: 788837 - DNA, 33 bp, Homo sapien
tgactcatcattttacacatatgagcatattga

SEQ ID NO: 788838 - DNA, 33 bp, Homo sapien
tgactcatcattttacgcatatgagcatattga

SEQ ID NO: 788839 - DNA, 33 bp, Homo sapien
aacaatgctgcagggactaactttgctgactca

SEQ ID NO: 788840 - DNA, 33 bp, Homo sapien
aacaatgctgcagggagtaactttgctgactca

SEQ ID NO: 788841 - DNA, 33 bp, Homo sapien
agattacaagttgacaagaacacatgttgtttt

SEQ ID NO: 788842 - DNA, 33 bp, Homo sapien
agattacaagttgacaggaacacatgttgtttt

SEQ ID NO: 788843 - DNA, 33 bp, Homo sapien
tgctcagtgcttctcaaggactgaaaccctgaa

SEQ ID NO: 788844 - DNA, 33 bp, Homo sapien
tgctcagtgcttctcagggactgaaaccctgaa

SEQ ID NO: 788845 - DNA, 33 bp, Homo sapien
ctgcctggctcaaagccaagtttggatggcgtc

SEQ ID NO: 788846 - DNA, 33 bp, Homo sapien
ctgcctggctcaaagctaagtttggatggcgtc

SEQ ID NO: 788847 - DNA, 33 bp, Homo sapien
acctatggatccttacaaataagtgctctgaat

SEQ ID NO: 788848 - DNA, 33 bp, Homo sapien
acctatggatccttaccaataagtgctctgaat

SEQ ID NO: 788849 - DNA, 33 bp, Homo sapien
atgaagtttccaccacagtattttggcacatag

SEQ ID NO: 788850 - DNA, 33 bp, Homo sapien
atgaagtttccaccacggtattttggcacatag

SEQ ID NO: 788851 - DNA, 33 bp, Homo sapien
gattagatactatcatcactcctcttacgaatg

SEQ ID NO: 788852 - DNA, 33 bp, Homo sapien
gattagatactatcattactcctcttacgaatg

SEQ ID NO: 788853 - DNA, 33 bp, Homo sapien
tccctcttgactataccctagatcaagccaacc

SEQ ID NO: 788854 - DNA, 33 bp, Homo sapien
tccctcttgactatactctagatcaagccaacc

SEQ ID NO: 788855 - DNA, 33 bp, Homo sapien
taacaaaaaaggagcacgatcgaattccaaaag

SEQ ID NO: 788856 - DNA, 33 bp, Homo sapien
taacaaaaaaggagcatgatcgaattccaaaag

SEQ ID NO: 788857 - DNA, 33 bp, Homo sapien
aagaatgttatgatggaactttcagggaaggaa

SEQ ID NO: 788858 - DNA, 33 bp, Homo sapien
aagaatgttatgatggtactttcagggaaggaa

SEQ ID NO: 788859 - DNA, 33 bp, Homo sapien
aatcttttatttttacaaacaattcagtgctat

SEQ ID NO: 788860 - DNA, 33 bp, Homo sapien
aatcttttatttttacgaacaattcagtgctat

SEQ ID NO: 788861 - DNA, 33 bp, Homo sapien
tttgacaagatctgtaggtaaaagcagcataat

SEQ ID NO: 788862 - DNA, 33 bp, Homo sapien
tttgacaagatctgtatgtaaaagcagcataat

SEQ ID NO: 788863 - DNA, 33 bp, Homo sapien
aatcctgttcatcaaaataagaagaatatcaca

SEQ ID NO: 788864 - DNA, 33 bp, Homo sapien
aatcctgttcatcaaagtaagaagaatatcaca

SEQ ID NO: 788865 - DNA, 33 bp, Homo sapien
aaacttggcctagttaagactgcaaaacaggca

SEQ ID NO: 788866 - DNA, 33 bp, Homo sapien
aaacttggcctagttaggactgcaaaacaggca

SEQ ID NO: 788867 - DNA, 33 bp, Homo sapien
caggatgtgataggccaatactcttacctgaac

SEQ ID NO: 788868 - DNA, 33 bp, Homo sapien
caggatgtgataggcccatactcttacctgaac

SEQ ID NO: 788869 - DNA, 33 bp, Homo sapien
caatctccctctgaagacatttatcagatcttg

SEQ ID NO: 788870 - DNA, 33 bp, Homo sapien
caatctccctctgaagtcatttatcagatcttg

SEQ ID NO: 788871 - DNA, 33 bp, Homo sapien
ctgtgtccaaccttgaagaagacccggctgtgg

SEQ ID NO: 788872 - DNA, 33 bp, Homo sapien
ctgtgtccaaccttgaggaagacccggctgtgg

SEQ ID NO: 788873 - DNA, 33 bp, Homo sapien
aaaggattggttataaactcgtaattggcagat

SEQ ID NO: 788874 - DNA, 33 bp, Homo sapien
aaaggattggttataagctcgtaattggcagat

SEQ ID NO: 788875 - DNA, 33 bp, Homo sapien
ctagttaatgtacagcactctccattctagcct

SEQ ID NO: 788876 - DNA, 33 bp, Homo sapien
ctagttaatgtacagcgctctccattctagcct

SEQ ID NO: 788877 - DNA, 33 bp, Homo sapien
aggtaaataaacagaacgtagctccctggtcca

SEQ ID NO: 788878 - DNA, 33 bp, Homo sapien
aggtaaataaacagaatgtagctccctggtcca

SEQ ID NO: 788879 - DNA, 33 bp, Homo sapien
aatctaaatgctaacactggaaggagacttaga

SEQ ID NO: 788880 - DNA, 33 bp, Homo sapien
aatctaaatgctaacattggaaggagacttaga

SEQ ID NO: 788881 - DNA, 33 bp, Homo sapien
gttattcaggctgaataacaaaacagtctcttg

SEQ ID NO: 788882 - DNA, 33 bp, Homo sapien
gttattcaggctgaatgacaaaacagtctcttg

SEQ ID NO: 788883 - DNA, 33 bp, Homo sapien
ctgctttgcatagggaaaatcattgcctatatc

SEQ ID NO: 788884 - DNA, 33 bp, Homo sapien
ctgctttgcatagggagaatcattgcctatatc

SEQ ID NO: 788885 - DNA, 33 bp, Homo sapien
tcatggcctcagtgataagatttttgtttcaaa

SEQ ID NO: 788886 - DNA, 33 bp, Homo sapien
tcatggcctcagtgatgagatttttgtttcaaa

SEQ ID NO: 788887 - DNA, 33 bp, Homo sapien
aatcaacagtcatttaataaacacaaatcacac

SEQ ID NO: 788888 - DNA, 33 bp, Homo sapien
aatcaacagtcatttactaaacacaaatcacac

SEQ ID NO: 788889 - DNA, 33 bp, Homo sapien
tatactccaatttttacctcatcatctccgtga

SEQ ID NO: 788890 - DNA, 33 bp, Homo sapien
tatactccaatttttatctcatcatctccgtga

SEQ ID NO: 788891 - DNA, 33 bp, Homo sapien
tatttgttggccactccatgttttcttttgcaa

SEQ ID NO: 788892 - DNA, 33 bp, Homo sapien
tatttgttggccactctatgttttcttttgcaa

SEQ ID NO: 788893 - DNA, 33 bp, Homo sapien
gacctccttcagaggcaaatgaatacataaact

SEQ ID NO: 788894 - DNA, 33 bp, Homo sapien
gacctccttcagaggcgaatgaatacataaact

SEQ ID NO: 788895 - DNA, 33 bp, Homo sapien
atgaggttaaattacaatgccagcctcagggct

SEQ ID NO: 788896 - DNA, 33 bp, Homo sapien
atgaggttaaattacagtgccagcctcagggct

SEQ ID NO: 788897 - DNA, 33 bp, Homo sapien
tgaaacttagggagaacggattgaccatctgtt

SEQ ID NO: 788898 - DNA, 33 bp, Homo sapien
tgaaacttagggagaatggattgaccatctgtt

SEQ ID NO: 788899 - DNA, 33 bp, Homo sapien
cctaagtgtgctgatacaatagtcaacaacaca

SEQ ID NO: 788900 - DNA, 33 bp, Homo sapien
cctaagtgtgctgatataatagtcaacaacaca

SEQ ID NO: 788901 - DNA, 33 bp, Homo sapien
tttccaggttgataaacgcaatctgttctgtct

SEQ ID NO: 788902 - DNA, 33 bp, Homo sapien
tttccaggttgataaatgcaatctgttctgtct

SEQ ID NO: 788903 - DNA, 33 bp, Homo sapien
ttattatattgttctgcagtttgctctctcttg

SEQ ID NO: 788904 - DNA, 33 bp, Homo sapien
ttattatattgttctgtagtttgctctctcttg

SEQ ID NO: 788905 - DNA, 33 bp, Homo sapien
agggaaataaaacacactctagatcgtattggt

SEQ ID NO: 788906 - DNA, 33 bp, Homo sapien
agggaaataaaacacattctagatcgtattggt

SEQ ID NO: 788907 - DNA, 33 bp, Homo sapien
acatgaaatcctcaacagcttgtcctagtgaac

SEQ ID NO: 788908 - DNA, 33 bp, Homo sapien
acatgaaatcctcaacggcttgtcctagtgaac

SEQ ID NO: 788909 - DNA, 33 bp, Homo sapien
gcctatgtccctgagaacttgaggtgctttcta

SEQ ID NO: 788910 - DNA, 33 bp, Homo sapien
gcctatgtccctgagaccttgaggtgctttcta

SEQ ID NO: 788911 - DNA, 33 bp, Homo sapien
gaatacaatacacaggaaagagaacgggacagt

SEQ ID NO: 788912 - DNA, 33 bp, Homo sapien
gaatacaatacacaggcaagagaacgggacagt

SEQ ID NO: 788913 - DNA, 33 bp, Homo sapien
gccaaatgatgagtaacataggtcaggagacaa

SEQ ID NO: 788914 - DNA, 33 bp, Homo sapien
gccaaatgatgagtaatataggtcaggagacaa

SEQ ID NO: 788915 - DNA, 33 bp, Homo sapien
gaactgccagtttcacacaagaaggaatgaaca

SEQ ID NO: 788916 - DNA, 33 bp, Homo sapien
gaactgccagtttcacgcaagaaggaatgaaca

SEQ ID NO: 788917 - DNA, 33 bp, Homo sapien
atttcttgctgttcctcaagtgagttcttctct

SEQ ID NO: 788918 - DNA, 33 bp, Homo sapien
atttcttgctgttccttaagtgagttcttctct

SEQ ID NO: 788919 - DNA, 33 bp, Homo sapien
atatgactatttgtaaaaattctaactgaacga

SEQ ID NO: 788920 - DNA, 33 bp, Homo sapien
atatgactatttgtaataattctaactgaacga

SEQ ID NO: 788921 - DNA, 33 bp, Homo sapien
gttgagtattggtgaacgttaagtctttcttct

SEQ ID NO: 788922 - DNA, 33 bp, Homo sapien
gttgagtattggtgaatgttaagtctttcttct

SEQ ID NO: 788923 - DNA, 33 bp, Homo sapien
gcaatagcagcaagacaattcaaagtaaaaaag

SEQ ID NO: 788924 - DNA, 33 bp, Homo sapien
gcaatagcagcaagaccattcaaagtaaaaaag

SEQ ID NO: 788925 - DNA, 33 bp, Homo sapien
tgctatgcgtcttaaaagcagtgttcccaaagt

SEQ ID NO: 788926 - DNA, 33 bp, Homo sapien
tgctatgcgtcttaaaggcagtgttcccaaagt

SEQ ID NO: 788927 - DNA, 33 bp, Homo sapien
ctaatttattctgatacggtagacgaggtattt

SEQ ID NO: 788928 - DNA, 33 bp, Homo sapien
ctaatttattctgatatggtagacgaggtattt

SEQ ID NO: 788929 - DNA, 33 bp, Homo sapien
caagaagacccttgaacggcctaaagcatcagt

SEQ ID NO: 788930 - DNA, 33 bp, Homo sapien
caagaagacccttgaatggcctaaagcatcagt

SEQ ID NO: 788931 - DNA, 33 bp, Homo sapien
attgtccaggtccctgaattctgtcatgtctga

SEQ ID NO: 788932 - DNA, 33 bp, Homo sapien
attgtccaggtccctgcattctgtcatgtctga

SEQ ID NO: 788933 - DNA, 33 bp, Homo sapien
tactgtgagcataatccaggaagaaccccttct

SEQ ID NO: 788934 - DNA, 33 bp, Homo sapien
tactgtgagcataatctaggaagaaccccttct

SEQ ID NO: 788935 - DNA, 33 bp, Homo sapien
atcttaaaatgaacaaatcacctggataaacat

SEQ ID NO: 788936 - DNA, 33 bp, Homo sapien
atcttaaaatgaacaagtcacctggataaacat

SEQ ID NO: 788937 - DNA, 33 bp, Homo sapien
actgaagctttatcagcagagggcgctgaagag

SEQ ID NO: 788938 - DNA, 33 bp, Homo sapien
actgaagctttatcagtagagggcgctgaagag

SEQ ID NO: 788939 - DNA, 33 bp, Homo sapien
ggcttctcatcacaaaagaaacaaagcactatc

SEQ ID NO: 788940 - DNA, 33 bp, Homo sapien
ggcttctcatcacaaaggaaacaaagcactatc

SEQ ID NO: 788941 - DNA, 33 bp, Homo sapien
catcggaacattgaagactgagaatgtgaatca

SEQ ID NO: 788942 - DNA, 33 bp, Homo sapien
catcggaacattgaagcctgagaatgtgaatca

SEQ ID NO: 788943 - DNA, 33 bp, Homo sapien
gtaatgggcagatgaacgaatgggagtttgtaa

SEQ ID NO: 788944 - DNA, 33 bp, Homo sapien
gtaatgggcagatgaatgaatgggagtttgtaa

SEQ ID NO: 788945 - DNA, 33 bp, Homo sapien
ccagatggaattaaaaggcagagaaagggcaaa

SEQ ID NO: 788946 - DNA, 33 bp, Homo sapien
ccagatggaattaaaatgcagagaaagggcaaa

SEQ ID NO: 788947 - DNA, 33 bp, Homo sapien
tagcctgtaccttttaaatcaaaactcagggaa

SEQ ID NO: 788948 - DNA, 33 bp, Homo sapien
tagcctgtaccttttacatcaaaactcagggaa

SEQ ID NO: 788949 - DNA, 33 bp, Homo sapien
accatttaagattgtaagttaccccataagtat

SEQ ID NO: 788950 - DNA, 33 bp, Homo sapien
accatttaagattgtatgttaccccataagtat

SEQ ID NO: 788951 - DNA, 33 bp, Homo sapien
tttcttgtcttaggaacgttggaattctcctct

SEQ ID NO: 788952 - DNA, 33 bp, Homo sapien
tttcttgtcttaggaatgttggaattctcctct

SEQ ID NO: 788953 - DNA, 33 bp, Homo sapien
taatcacagactcttcaccctcatggcacttgt

SEQ ID NO: 788954 - DNA, 33 bp, Homo sapien
taatcacagactcttcgccctcatggcacttgt

SEQ ID NO: 788955 - DNA, 33 bp, Homo sapien
gatgtgtcattagaaagtcagctggttttctca

SEQ ID NO: 788956 - DNA, 33 bp, Homo sapien
gatgtgtcattagaaattcagctggttttctca

SEQ ID NO: 788957 - DNA, 33 bp, Homo sapien
tgtatgactccatgggaagaggacgcttagaag

SEQ ID NO: 788958 - DNA, 33 bp, Homo sapien
tgtatgactccatggggagaggacgcttagaag

SEQ ID NO: 788959 - DNA, 33 bp, Homo sapien
agtatgaagaaacacaaaataccttttagctta

SEQ ID NO: 788960 - DNA, 33 bp, Homo sapien
agtatgaagaaacacagaataccttttagctta

SEQ ID NO: 788961 - DNA, 33 bp, Homo sapien
gcactgatcttctccaaggcaccttgaggtagg

SEQ ID NO: 788962 - DNA, 33 bp, Homo sapien
gcactgatcttctccagggcaccttgaggtagg

SEQ ID NO: 788963 - DNA, 33 bp, Homo sapien
aatgcattataacccagtgaatattaaccatga

SEQ ID NO: 788964 - DNA, 33 bp, Homo sapien
aatgcattataacccattgaatattaaccatga

SEQ ID NO: 788965 - DNA, 33 bp, Homo sapien
agagagacaagggccaatcgatgttccctgttt

SEQ ID NO: 788966 - DNA, 33 bp, Homo sapien
agagagacaagggccagtcgatgttccctgttt

SEQ ID NO: 788967 - DNA, 33 bp, Homo sapien
actccagaggctcccaaagttttctctatgtat

SEQ ID NO: 788968 - DNA, 33 bp, Homo sapien
actccagaggctcccagagttttctctatgtat

SEQ ID NO: 788969 - DNA, 33 bp, Homo sapien
tgctgtcaacaatagaccgaatgtgtatatagt

SEQ ID NO: 788970 - DNA, 33 bp, Homo sapien
tgctgtcaacaatagatcgaatgtgtatatagt

SEQ ID NO: 788971 - DNA, 33 bp, Homo sapien
taatctccaaatatgccatgatgtattcttgct

SEQ ID NO: 788972 - DNA, 33 bp, Homo sapien
taatctccaaatatgctatgatgtattcttgct

SEQ ID NO: 788973 - DNA, 33 bp, Homo sapien
cattttaggaccctcacgctcaccctgtgttcc

SEQ ID NO: 788974 - DNA, 33 bp, Homo sapien
cattttaggaccctcatgctcaccctgtgttcc

SEQ ID NO: 788975 - DNA, 33 bp, Homo sapien
aaccgtattaaactccaccaacaaatgtgtgag

SEQ ID NO: 788976 - DNA, 33 bp, Homo sapien
aaccgtattaaactccgccaacaaatgtgtgag

SEQ ID NO: 788977 - DNA, 33 bp, Homo sapien
tggagagaactctggaaaaggacgtgcatttca

SEQ ID NO: 788978 - DNA, 33 bp, Homo sapien
tggagagaactctggacaaggacgtgcatttca

SEQ ID NO: 788979 - DNA, 33 bp, Homo sapien
tctttattttttgatcagaacattcagaaattt

SEQ ID NO: 788980 - DNA, 33 bp, Homo sapien
tctttattttttgatcggaacattcagaaattt

SEQ ID NO: 788981 - DNA, 33 bp, Homo sapien
tattctatcttctaatcacagattaaccaaaaa

SEQ ID NO: 788982 - DNA, 33 bp, Homo sapien
tattctatcttctaattacagattaaccaaaaa

SEQ ID NO: 788983 - DNA, 33 bp, Homo sapien
ggaatatactcataaaccatacaccactctcac

SEQ ID NO: 788984 - DNA, 33 bp, Homo sapien
ggaatatactcataaatcatacaccactctcac

SEQ ID NO: 788985 - DNA, 33 bp, Homo sapien
cggctcagcctcctgacggtgacctacttggtt

SEQ ID NO: 788986 - DNA, 33 bp, Homo sapien
cggctcagcctcctgatggtgacctacttggtt

SEQ ID NO: 788987 - DNA, 33 bp, Homo sapien
tggtgcctacactaacagcatttacattctttt

SEQ ID NO: 788988 - DNA, 33 bp, Homo sapien
tggtgcctacactaactgcatttacattctttt

SEQ ID NO: 788989 - DNA, 33 bp, Homo sapien
agttttgcccaagtaccactatatccaaagctt

SEQ ID NO: 788990 - DNA, 33 bp, Homo sapien
agttttgcccaagtactactatatccaaagctt

SEQ ID NO: 788991 - DNA, 33 bp, Homo sapien
gttacatttaaaagacactttacagtccatcat

SEQ ID NO: 788992 - DNA, 33 bp, Homo sapien
gttacatttaaaagacgctttacagtccatcat

SEQ ID NO: 788993 - DNA, 33 bp, Homo sapien
caaggtaataggcagaaattgcaataaatacag

SEQ ID NO: 788994 - DNA, 33 bp, Homo sapien
caaggtaataggcagacattgcaataaatacag

SEQ ID NO: 788995 - DNA, 33 bp, Homo sapien
cctctctgccttttctagtctaaagacaggccc

SEQ ID NO: 788996 - DNA, 33 bp, Homo sapien
cctctctgccttttcttgtctaaagacaggccc

SEQ ID NO: 788997 - DNA, 33 bp, Homo sapien
aggtttagaattgagaaacctttagacagcggc

SEQ ID NO: 788998 - DNA, 33 bp, Homo sapien
aggtttagaattgagacacctttagacagcggc

SEQ ID NO: 788999 - DNA, 33 bp, Homo sapien
tcatagtgtaggggaaaggtgtgatcaaggaaa

SEQ ID NO: 789000 - DNA, 33 bp, Homo sapien
tcatagtgtaggggaagggtgtgatcaaggaaa

SEQ ID NO: 789001 - DNA, 33 bp, Homo sapien
tacctggctcagtacaagtaggagagaatggta

SEQ ID NO: 789002 - DNA, 33 bp, Homo sapien
tacctggctcagtacacgtaggagagaatggta

SEQ ID NO: 789003 - DNA, 33 bp, Homo sapien
tcatatcctttgagggaattaggaatacagctt

SEQ ID NO: 789004 - DNA, 33 bp, Homo sapien
tcatatcctttgaggggattaggaatacagctt

SEQ ID NO: 789005 - DNA, 33 bp, Homo sapien
attctcacccccagctaaaagtgttcacgaacc

SEQ ID NO: 789006 - DNA, 33 bp, Homo sapien
attctcacccccagctgaaagtgttcacgaacc

SEQ ID NO: 789007 - DNA, 33 bp, Homo sapien
ttttatcctccactataagcacagaatatctca

SEQ ID NO: 789008 - DNA, 33 bp, Homo sapien
ttttatcctccactatgagcacagaatatctca

SEQ ID NO: 789009 - DNA, 33 bp, Homo sapien
agtgaaagtagagagacggaaaagaacgttcaa

SEQ ID NO: 789010 - DNA, 33 bp, Homo sapien
agtgaaagtagagagatggaaaagaacgttcaa

SEQ ID NO: 789011 - DNA, 33 bp, Homo sapien
tgagtgctggctccgaacctgatattagctgtg

SEQ ID NO: 789012 - DNA, 33 bp, Homo sapien
tgagtgctggctccgaccctgatattagctgtg

SEQ ID NO: 789013 - DNA, 33 bp, Homo sapien
acagctctcatttgaaacttgctgcatattttc

SEQ ID NO: 789014 - DNA, 33 bp, Homo sapien
acagctctcatttgaaccttgctgcatattttc

SEQ ID NO: 789015 - DNA, 33 bp, Homo sapien
ttcttctcactctagacgctacttttgggcccc

SEQ ID NO: 789016 - DNA, 33 bp, Homo sapien
ttcttctcactctagatgctacttttgggcccc

SEQ ID NO: 789017 - DNA, 33 bp, Homo sapien
aaatctgggcatttacaattattctccccttaa

SEQ ID NO: 789018 - DNA, 33 bp, Homo sapien
aaatctgggcatttacgattattctccccttaa

SEQ ID NO: 789019 - DNA, 33 bp, Homo sapien
tgccttgatctaaccactataggactctgccca

SEQ ID NO: 789020 - DNA, 33 bp, Homo sapien
tgccttgatctaaccattataggactctgccca

SEQ ID NO: 789021 - DNA, 33 bp, Homo sapien
tgagcaagcagaaggacagtatagacaactcca

SEQ ID NO: 789022 - DNA, 33 bp, Homo sapien
tgagcaagcagaaggagagtatagacaactcca

SEQ ID NO: 789023 - DNA, 33 bp, Homo sapien
ctgcttgctcatcttcaagtctgtttttaactc

SEQ ID NO: 789024 - DNA, 33 bp, Homo sapien
ctgcttgctcatcttccagtctgtttttaactc

SEQ ID NO: 789025 - DNA, 33 bp, Homo sapien
atttgctgatgggtagaatttaggatatgaagg

SEQ ID NO: 789026 - DNA, 33 bp, Homo sapien
atttgctgatgggtaggatttaggatatgaagg

SEQ ID NO: 789027 - DNA, 33 bp, Homo sapien
aagcatatctggtgtaagagcagaagaagggct

SEQ ID NO: 789028 - DNA, 33 bp, Homo sapien
aagcatatctggtgtaggagcagaagaagggct

SEQ ID NO: 789029 - DNA, 33 bp, Homo sapien
ctgctgtctatttctaagtaatcctctgcttag

SEQ ID NO: 789030 - DNA, 33 bp, Homo sapien
ctgctgtctatttctatgtaatcctctgcttag

SEQ ID NO: 789031 - DNA, 33 bp, Homo sapien
cactgataggaacagccctactgtttgcctgag

SEQ ID NO: 789032 - DNA, 33 bp, Homo sapien
cactgataggaacagctctactgtttgcctgag

SEQ ID NO: 789033 - DNA, 33 bp, Homo sapien
gctcttggtacacatacaagcatacagccaacc

SEQ ID NO: 789034 - DNA, 33 bp, Homo sapien
gctcttggtacacatataagcatacagccaacc

SEQ ID NO: 789035 - DNA, 33 bp, Homo sapien
tgtgtctctcttaaaaacaaggattacaaacaa

SEQ ID NO: 789036 - DNA, 33 bp, Homo sapien
tgtgtctctcttaaaagcaaggattacaaacaa

SEQ ID NO: 789037 - DNA, 33 bp, Homo sapien
aaatgtgtcaactctaatactcagcctgtctgg

SEQ ID NO: 789038 - DNA, 33 bp, Homo sapien
aaatgtgtcaactctagtactcagcctgtctgg

SEQ ID NO: 789039 - DNA, 33 bp, Homo sapien
acaagataagttagtgcaggagaaataaaactt

SEQ ID NO: 789040 - DNA, 33 bp, Homo sapien
acaagataagttagtgtaggagaaataaaactt

SEQ ID NO: 789041 - DNA, 33 bp, Homo sapien
cagactgccttgatcactaaaggattttcagtt

SEQ ID NO: 789042 - DNA, 33 bp, Homo sapien
cagactgccttgatcagtaaaggattttcagtt

SEQ ID NO: 789043 - DNA, 33 bp, Homo sapien
actttagcttatagaccaaactccttagtaatg

SEQ ID NO: 789044 - DNA, 33 bp, Homo sapien
actttagcttatagacgaaactccttagtaatg

SEQ ID NO: 789045 - DNA, 33 bp, Homo sapien
aacatgacctcacataacaaacactgaaaaacc

SEQ ID NO: 789046 - DNA, 33 bp, Homo sapien
aacatgacctcacatagcaaacactgaaaaacc

SEQ ID NO: 789047 - DNA, 33 bp, Homo sapien
tctgcttcggcataaaccacagcactaactact

SEQ ID NO: 789048 - DNA, 33 bp, Homo sapien
tctgcttcggcataaatcacagcactaactact

SEQ ID NO: 789049 - DNA, 33 bp, Homo sapien
tgagaacattaagaaacaaagcaaaacagaact

SEQ ID NO: 789050 - DNA, 33 bp, Homo sapien
tgagaacattaagaaagaaagcaaaacagaact

SEQ ID NO: 789051 - DNA, 33 bp, Homo sapien
aatgtctagaaaatcacagacaaccaacaaaag

SEQ ID NO: 789052 - DNA, 33 bp, Homo sapien
aatgtctagaaaatcagagacaaccaacaaaag

SEQ ID NO: 789053 - DNA, 33 bp, Homo sapien
taccaagcaacaagacaaaagagccaataatta

SEQ ID NO: 789054 - DNA, 33 bp, Homo sapien
taccaagcaacaagacgaaagagccaataatta

SEQ ID NO: 789055 - DNA, 33 bp, Homo sapien
catttcagctagaggaactttggtgaagtgtgg

SEQ ID NO: 789056 - DNA, 33 bp, Homo sapien
catttcagctagaggagctttggtgaagtgtgg

SEQ ID NO: 789057 - DNA, 33 bp, Homo sapien
ggaacgcttcaagtcaagctaattgtgattatg

SEQ ID NO: 789058 - DNA, 33 bp, Homo sapien
ggaacgcttcaagtcaggctaattgtgattatg

SEQ ID NO: 789059 - DNA, 33 bp, Homo sapien
tcttgctaccctgaaaagtcaaaactatgaaat

SEQ ID NO: 789060 - DNA, 33 bp, Homo sapien
tcttgctaccctgaaacgtcaaaactatgaaat

SEQ ID NO: 789061 - DNA, 33 bp, Homo sapien
ccaaggtctctgtaaactcaggagacaaactcc

SEQ ID NO: 789062 - DNA, 33 bp, Homo sapien
ccaaggtctctgtaaagtcaggagacaaactcc

SEQ ID NO: 789063 - DNA, 33 bp, Homo sapien
aaagaaatgcacttacacaaatttggaagatag

SEQ ID NO: 789064 - DNA, 33 bp, Homo sapien
aaagaaatgcacttacgcaaatttggaagatag

SEQ ID NO: 789065 - DNA, 33 bp, Homo sapien
ccctactgagagtacacgaggcagtgaagaaat

SEQ ID NO: 789066 - DNA, 33 bp, Homo sapien
ccctactgagagtacatgaggcagtgaagaaat

SEQ ID NO: 789067 - DNA, 33 bp, Homo sapien
ttctgctgaatctcccaaagtttatcagaatca

SEQ ID NO: 789068 - DNA, 33 bp, Homo sapien
ttctgctgaatctcccgaagtttatcagaatca

SEQ ID NO: 789069 - DNA, 33 bp, Homo sapien
aggtgggcctaacatcactaaccttgcagtata

SEQ ID NO: 789070 - DNA, 33 bp, Homo sapien
aggtgggcctaacatcgctaaccttgcagtata

SEQ ID NO: 789071 - DNA, 33 bp, Homo sapien
gattggcaggtcccaaaagggttagtatgtagt

SEQ ID NO: 789072 - DNA, 33 bp, Homo sapien
gattggcaggtcccaacagggttagtatgtagt

SEQ ID NO: 789073 - DNA, 33 bp, Homo sapien
tatctgttgaattaaaaagaattgactgctgag

SEQ ID NO: 789074 - DNA, 33 bp, Homo sapien
tatctgttgaattaaatagaattgactgctgag

SEQ ID NO: 789075 - DNA, 33 bp, Homo sapien
ttttcctaacttcaaccctggaagaaccacatg

SEQ ID NO: 789076 - DNA, 33 bp, Homo sapien
ttttcctaacttcaactctggaagaaccacatg

SEQ ID NO: 789077 - DNA, 33 bp, Homo sapien
atgtattggaatcaaacagaagttaagcttacc

SEQ ID NO: 789078 - DNA, 33 bp, Homo sapien
atgtattggaatcaaatagaagttaagcttacc

SEQ ID NO: 789079 - DNA, 33 bp, Homo sapien
tatttctgtaagctgaactctccccattggctg

SEQ ID NO: 789080 - DNA, 33 bp, Homo sapien
tatttctgtaagctgagctctccccattggctg

SEQ ID NO: 789081 - DNA, 33 bp, Homo sapien
atggcactgaagtcagcagttttctctttcctc

SEQ ID NO: 789082 - DNA, 33 bp, Homo sapien
atggcactgaagtcagtagttttctctttcctc

SEQ ID NO: 789083 - DNA, 33 bp, Homo sapien
ggaagaattccccaaacgtcaagaggaacatca

SEQ ID NO: 789084 - DNA, 33 bp, Homo sapien
ggaagaattccccaaatgtcaagaggaacatca

SEQ ID NO: 789085 - DNA, 33 bp, Homo sapien
ctcaaagtcgaatgaaactgtgttattcagctc

SEQ ID NO: 789086 - DNA, 33 bp, Homo sapien
ctcaaagtcgaatgaagctgtgttattcagctc

SEQ ID NO: 789087 - DNA, 33 bp, Homo sapien
cactgcacagcaagaacatggactcactggaga

SEQ ID NO: 789088 - DNA, 33 bp, Homo sapien
cactgcacagcaagaatatggactcactggaga

SEQ ID NO: 789089 - DNA, 33 bp, Homo sapien
taaatgtccaggagtacatcttcaatcaaattt

SEQ ID NO: 789090 - DNA, 33 bp, Homo sapien
taaatgtccaggagtatatcttcaatcaaattt

SEQ ID NO: 789091 - DNA, 33 bp, Homo sapien
aaaatcaactttatgcacattctaaatctctca

SEQ ID NO: 789092 - DNA, 33 bp, Homo sapien
aaaatcaactttatgctcattctaaatctctca

SEQ ID NO: 789093 - DNA, 33 bp, Homo sapien
ttaaccatcagctctgaaattatagagtaagga

SEQ ID NO: 789094 - DNA, 33 bp, Homo sapien
ttaaccatcagctctgtaattatagagtaagga

SEQ ID NO: 789095 - DNA, 33 bp, Homo sapien
gtcagcatttccattcaccctatgatgctatgt

SEQ ID NO: 789096 - DNA, 33 bp, Homo sapien
gtcagcatttccattcgccctatgatgctatgt

SEQ ID NO: 789097 - DNA, 33 bp, Homo sapien
tgagatgtgacttccaaaattattcctggggtt

SEQ ID NO: 789098 - DNA, 33 bp, Homo sapien
tgagatgtgacttccagaattattcctggggtt

SEQ ID NO: 789099 - DNA, 33 bp, Homo sapien
attcacactcagttcaacttctaactacattgc

SEQ ID NO: 789100 - DNA, 33 bp, Homo sapien
attcacactcagttcagcttctaactacattgc

SEQ ID NO: 789101 - DNA, 33 bp, Homo sapien
aaaggaacaaccactgcaagatgtatatgatta

SEQ ID NO: 789102 - DNA, 33 bp, Homo sapien
aaaggaacaaccactggaagatgtatatgatta

SEQ ID NO: 789103 - DNA, 33 bp, Homo sapien
acattaatccagagcaaatcaacttgtcccgca

SEQ ID NO: 789104 - DNA, 33 bp, Homo sapien
acattaatccagagcagatcaacttgtcccgca

SEQ ID NO: 789105 - DNA, 33 bp, Homo sapien
agaaagaaaaggaaaccgaaatgtgcaaaggca

SEQ ID NO: 789106 - DNA, 33 bp, Homo sapien
agaaagaaaaggaaactgaaatgtgcaaaggca

SEQ ID NO: 789107 - DNA, 33 bp, Homo sapien
aggggacacacaaaaaaaaggagatcccagatg

SEQ ID NO: 789108 - DNA, 33 bp, Homo sapien
aggggacacacaaaaagaaggagatcccagatg

SEQ ID NO: 789109 - DNA, 33 bp, Homo sapien
gaataaagtataagcaagacaaatgaaaagtaa

SEQ ID NO: 789110 - DNA, 33 bp, Homo sapien
gaataaagtataagcaggacaaatgaaaagtaa

SEQ ID NO: 789111 - DNA, 33 bp, Homo sapien
caagagtcaaagcaaaattaatcccattcccca

SEQ ID NO: 789112 - DNA, 33 bp, Homo sapien
caagagtcaaagcaaagttaatcccattcccca

SEQ ID NO: 789113 - DNA, 33 bp, Homo sapien
aaattctgagaccttcaaattctccagccttca

SEQ ID NO: 789114 - DNA, 33 bp, Homo sapien
aaattctgagaccttccaattctccagccttca

SEQ ID NO: 789115 - DNA, 33 bp, Homo sapien
aataaatagaaagttaagaagcatttacgagag

SEQ ID NO: 789116 - DNA, 33 bp, Homo sapien
aataaatagaaagttaggaagcatttacgagag

SEQ ID NO: 789117 - DNA, 33 bp, Homo sapien
acagaactgatagattcaaaataccttctcacc

SEQ ID NO: 789118 - DNA, 33 bp, Homo sapien
acagaactgatagattgaaaataccttctcacc

SEQ ID NO: 789119 - DNA, 33 bp, Homo sapien
attaatagtcatatcaaggtgattacagtctac

SEQ ID NO: 789120 - DNA, 33 bp, Homo sapien
attaatagtcatatcacggtgattacagtctac

SEQ ID NO: 789121 - DNA, 33 bp, Homo sapien
atttcaggacaagtctaaataatgggatgtatc

SEQ ID NO: 789122 - DNA, 33 bp, Homo sapien
atttcaggacaagtctgaataatgggatgtatc

SEQ ID NO: 789123 - DNA, 33 bp, Homo sapien
agtgattttggtttcaagatggttccatgcatt

SEQ ID NO: 789124 - DNA, 33 bp, Homo sapien
agtgattttggtttcacgatggttccatgcatt

SEQ ID NO: 789125 - DNA, 33 bp, Homo sapien
attgcttttatattaactgttgaggctagccta

SEQ ID NO: 789126 - DNA, 33 bp, Homo sapien
attgcttttatattaattgttgaggctagccta

SEQ ID NO: 789127 - DNA, 33 bp, Homo sapien
acatggtaaaaagaaaccattagtgtccaatat

SEQ ID NO: 789128 - DNA, 33 bp, Homo sapien
acatggtaaaaagaaatcattagtgtccaatat

SEQ ID NO: 789129 - DNA, 33 bp, Homo sapien
caacactgtgcaccaacagaatacacactctgt

SEQ ID NO: 789130 - DNA, 33 bp, Homo sapien
caacactgtgcaccaagagaatacacactctgt

SEQ ID NO: 789131 - DNA, 33 bp, Homo sapien
cttggctggcttcggtaacagtctccccagagc

SEQ ID NO: 789132 - DNA, 33 bp, Homo sapien
cttggctggcttcggtgacagtctccccagagc

SEQ ID NO: 789133 - DNA, 33 bp, Homo sapien
aagaatggcaggagccagaaataggctaaaagg

SEQ ID NO: 789134 - DNA, 33 bp, Homo sapien
aagaatggcaggagccggaaataggctaaaagg

SEQ ID NO: 789135 - DNA, 33 bp, Homo sapien
gtagataagtaaataaacaaaaaggcagtgaaa

SEQ ID NO: 789136 - DNA, 33 bp, Homo sapien
gtagataagtaaataagcaaaaaggcagtgaaa

SEQ ID NO: 789137 - DNA, 33 bp, Homo sapien
caatatcattccttcaaagaacttaggcccata

SEQ ID NO: 789138 - DNA, 33 bp, Homo sapien
caatatcattccttcagagaacttaggcccata

SEQ ID NO: 789139 - DNA, 33 bp, Homo sapien
aatgacttatgcaaaccattaaaagacgtatca

SEQ ID NO: 789140 - DNA, 33 bp, Homo sapien
aatgacttatgcaaactattaaaagacgtatca

SEQ ID NO: 789141 - DNA, 33 bp, Homo sapien
cctaccatagggcagaaccaccatagattctcc

SEQ ID NO: 789142 - DNA, 33 bp, Homo sapien
cctaccatagggcagagccaccatagattctcc

SEQ ID NO: 789143 - DNA, 33 bp, Homo sapien
aaattctagtaggagcacttgatttgagtttgt

SEQ ID NO: 789144 - DNA, 33 bp, Homo sapien
aaattctagtaggagcgcttgatttgagtttgt

SEQ ID NO: 789145 - DNA, 33 bp, Homo sapien
tccatatatgctgcacaaataaatatgagttga

SEQ ID NO: 789146 - DNA, 33 bp, Homo sapien
tccatatatgctgcactaataaatatgagttga

SEQ ID NO: 789147 - DNA, 33 bp, Homo sapien
atgtactccataaataaatacctacagtgtacc

SEQ ID NO: 789148 - DNA, 33 bp, Homo sapien
atgtactccataaatatatacctacagtgtacc

SEQ ID NO: 789149 - DNA, 33 bp, Homo sapien
tcatcctattgtactacgaaacagtaggtctta

SEQ ID NO: 789150 - DNA, 33 bp, Homo sapien
tcatcctattgtactatgaaacagtaggtctta

SEQ ID NO: 789151 - DNA, 33 bp, Homo sapien
cctatggacttttccacgaggttgcttgggctt

SEQ ID NO: 789152 - DNA, 33 bp, Homo sapien
cctatggacttttccatgaggttgcttgggctt

SEQ ID NO: 789153 - DNA, 33 bp, Homo sapien
tgatctttggtcaatacagtcttcagtattcat

SEQ ID NO: 789154 - DNA, 33 bp, Homo sapien
tgatctttggtcaatatagtcttcagtattcat

SEQ ID NO: 789155 - DNA, 33 bp, Homo sapien
aggtatctccgaaacactgtggatctagagatg

SEQ ID NO: 789156 - DNA, 33 bp, Homo sapien
aggtatctccgaaacattgtggatctagagatg

SEQ ID NO: 789157 - DNA, 33 bp, Homo sapien
ctcttccatcttctaaaccagtaacatcacatc

SEQ ID NO: 789158 - DNA, 33 bp, Homo sapien
ctcttccatcttctaagccagtaacatcacatc

SEQ ID NO: 789159 - DNA, 33 bp, Homo sapien
ggattggtgtctgtcaatatcagcatgatcttc

SEQ ID NO: 789160 - DNA, 33 bp, Homo sapien
ggattggtgtctgtcagtatcagcatgatcttc

SEQ ID NO: 789161 - DNA, 33 bp, Homo sapien
acaagcagctgacttaagtataacagatgactt

SEQ ID NO: 789162 - DNA, 33 bp, Homo sapien
acaagcagctgacttaggtataacagatgactt

SEQ ID NO: 789163 - DNA, 33 bp, Homo sapien
tttcctcattggcaaaatgtgagaattcagcta

SEQ ID NO: 789164 - DNA, 33 bp, Homo sapien
tttcctcattggcaaagtgtgagaattcagcta

SEQ ID NO: 789165 - DNA, 33 bp, Homo sapien
tgagaaaaccaattaaataacttgtccacagcc

SEQ ID NO: 789166 - DNA, 33 bp, Homo sapien
tgagaaaaccaattaagtaacttgtccacagcc

SEQ ID NO: 789167 - DNA, 33 bp, Homo sapien
agagaaattccagataaaccaaacactagatgt

SEQ ID NO: 789168 - DNA, 33 bp, Homo sapien
agagaaattccagatagaccaaacactagatgt

SEQ ID NO: 789169 - DNA, 33 bp, Homo sapien
caattatagtagtgtaacagtaaaagcatggaa

SEQ ID NO: 789170 - DNA, 33 bp, Homo sapien
caattatagtagtgtatcagtaaaagcatggaa

SEQ ID NO: 789171 - DNA, 33 bp, Homo sapien
caaattttctgggttacatggttagtgtatgtt

SEQ ID NO: 789172 - DNA, 33 bp, Homo sapien
caaattttctgggttatatggttagtgtatgtt

SEQ ID NO: 789173 - DNA, 33 bp, Homo sapien
taaaacaaaaagacagacagtcaaaagccttag

SEQ ID NO: 789174 - DNA, 33 bp, Homo sapien
taaaacaaaaagacagccagtcaaaagccttag

SEQ ID NO: 789175 - DNA, 33 bp, Homo sapien
tttaaagacataaaaactgatagacataccgta

SEQ ID NO: 789176 - DNA, 33 bp, Homo sapien
tttaaagacataaaaagtgatagacataccgta

SEQ ID NO: 789177 - DNA, 33 bp, Homo sapien
tcagctagatgccgccagaatatttgactctct

SEQ ID NO: 789178 - DNA, 33 bp, Homo sapien
tcagctagatgccgccggaatatttgactctct

SEQ ID NO: 789179 - DNA, 33 bp, Homo sapien
tggctgtagccccagaatcattttgaaaaggaa

SEQ ID NO: 789180 - DNA, 33 bp, Homo sapien
tggctgtagccccagattcattttgaaaaggaa

SEQ ID NO: 789181 - DNA, 33 bp, Homo sapien
ttgataaacctcggtgaaaaatttgtgttgaaa

SEQ ID NO: 789182 - DNA, 33 bp, Homo sapien
ttgataaacctcggtgcaaaatttgtgttgaaa

SEQ ID NO: 789183 - DNA, 33 bp, Homo sapien
gacttaagcaaaacaacagagaatgccccaaac

SEQ ID NO: 789184 - DNA, 33 bp, Homo sapien
gacttaagcaaaacaatagagaatgccccaaac

SEQ ID NO: 789185 - DNA, 33 bp, Homo sapien
aagctgatggaaatcaagaagagcttaaaagct

SEQ ID NO: 789186 - DNA, 33 bp, Homo sapien
aagctgatggaaatcacgaagagcttaaaagct

SEQ ID NO: 789187 - DNA, 33 bp, Homo sapien
tgtagccaggccaagacgaagctcagtaagtca

SEQ ID NO: 789188 - DNA, 33 bp, Homo sapien
tgtagccaggccaagatgaagctcagtaagtca

SEQ ID NO: 789189 - DNA, 33 bp, Homo sapien
tgtccttaaatcttccaaatgttcacttactcc

SEQ ID NO: 789190 - DNA, 33 bp, Homo sapien
tgtccttaaatcttcccaatgttcacttactcc

SEQ ID NO: 789191 - DNA, 33 bp, Homo sapien
tttagctcctttccaaatcaccactaagacata

SEQ ID NO: 789192 - DNA, 33 bp, Homo sapien
tttagctcctttccaagtcaccactaagacata

SEQ ID NO: 789193 - DNA, 33 bp, Homo sapien
ggacactcactttttaccagtatgtcttcagga

SEQ ID NO: 789194 - DNA, 33 bp, Homo sapien
ggacactcactttttatcagtatgtcttcagga

SEQ ID NO: 789195 - DNA, 33 bp, Homo sapien
aaataaatagccaggtaaagaattttgctagaa

SEQ ID NO: 789196 - DNA, 33 bp, Homo sapien
aaataaatagccaggtgaagaattttgctagaa

SEQ ID NO: 789197 - DNA, 33 bp, Homo sapien
gaagtcagaattcaaacggaccagaactattcc

SEQ ID NO: 789198 - DNA, 33 bp, Homo sapien
gaagtcagaattcaaatggaccagaactattcc

SEQ ID NO: 789199 - DNA, 33 bp, Homo sapien
gttttggggtgtcacaaactctgtctatagaag

SEQ ID NO: 789200 - DNA, 33 bp, Homo sapien
gttttggggtgtcacatactctgtctatagaag

SEQ ID NO: 789201 - DNA, 33 bp, Homo sapien
taactctgttgagtaaataaactcatggaaaac

SEQ ID NO: 789202 - DNA, 33 bp, Homo sapien
taactctgttgagtaagtaaactcatggaaaac

SEQ ID NO: 789203 - DNA, 33 bp, Homo sapien
tccttatgagccttgcagacaaagaggtatcct

SEQ ID NO: 789204 - DNA, 33 bp, Homo sapien
tccttatgagccttgcggacaaagaggtatcct

SEQ ID NO: 789205 - DNA, 33 bp, Homo sapien
acataaatggtttagtaaaatttccacgcttaa

SEQ ID NO: 789206 - DNA, 33 bp, Homo sapien
acataaatggtttagtgaaatttccacgcttaa

SEQ ID NO: 789207 - DNA, 33 bp, Homo sapien
tttctcataagcaaccaaaaacgaaggtgttat

SEQ ID NO: 789208 - DNA, 33 bp, Homo sapien
tttctcataagcaacctaaaacgaaggtgttat

SEQ ID NO: 789209 - DNA, 33 bp, Homo sapien
agttctaaaaatcataaggcagaaattgaaaaa

SEQ ID NO: 789210 - DNA, 33 bp, Homo sapien
agttctaaaaatcatacggcagaaattgaaaaa

SEQ ID NO: 789211 - DNA, 33 bp, Homo sapien
atttaagtgactcaaaatagtgtcataagatta

SEQ ID NO: 789212 - DNA, 33 bp, Homo sapien
atttaagtgactcaaagtagtgtcataagatta

SEQ ID NO: 789213 - DNA, 33 bp, Homo sapien
cagcaattggacacctaaatttatgtttcatct

SEQ ID NO: 789214 - DNA, 33 bp, Homo sapien
cagcaattggacacctgaatttatgtttcatct

SEQ ID NO: 789215 - DNA, 33 bp, Homo sapien
gatagtttggacttggaaaaggtacactaaaga

SEQ ID NO: 789216 - DNA, 33 bp, Homo sapien
gatagtttggacttggcaaaggtacactaaaga

SEQ ID NO: 789217 - DNA, 33 bp, Homo sapien
tgataaaaggcagtgcgaaagataaaaagggaa

SEQ ID NO: 789218 - DNA, 33 bp, Homo sapien
tgataaaaggcagtgctaaagataaaaagggaa

SEQ ID NO: 789219 - DNA, 33 bp, Homo sapien
agtatgacaggatcagaccaggaggcttgcatg

SEQ ID NO: 789220 - DNA, 33 bp, Homo sapien
agtatgacaggatcagtccaggaggcttgcatg

SEQ ID NO: 789221 - DNA, 33 bp, Homo sapien
ttcaagacagacatacacactgacttagcaata

SEQ ID NO: 789222 - DNA, 33 bp, Homo sapien
ttcaagacagacatacgcactgacttagcaata

SEQ ID NO: 789223 - DNA, 33 bp, Homo sapien
catatattcagtgctgcaaaactgttagttata

SEQ ID NO: 789224 - DNA, 33 bp, Homo sapien
catatattcagtgctgtaaaactgttagttata

SEQ ID NO: 789225 - DNA, 33 bp, Homo sapien
acaggtgcctgggagaaaagctaatgcaaagat

SEQ ID NO: 789226 - DNA, 33 bp, Homo sapien
acaggtgcctgggagagaagctaatgcaaagat

SEQ ID NO: 789227 - DNA, 33 bp, Homo sapien
tatttcacactaactagaattgctaacattaaa

SEQ ID NO: 789228 - DNA, 33 bp, Homo sapien
tatttcacactaactataattgctaacattaaa

SEQ ID NO: 789229 - DNA, 33 bp, Homo sapien
tagagtctaatcccaacacttgtgaatctgggc

SEQ ID NO: 789230 - DNA, 33 bp, Homo sapien
tagagtctaatcccaatacttgtgaatctgggc

SEQ ID NO: 789231 - DNA, 33 bp, Homo sapien
tctcaattgttattagccctgcccttgccccag

SEQ ID NO: 789232 - DNA, 33 bp, Homo sapien
tctcaattgttattaggcctgcccttgccccag

SEQ ID NO: 789233 - DNA, 33 bp, Homo sapien
atactgaaattataaagccctgttctggcatac

SEQ ID NO: 789234 - DNA, 33 bp, Homo sapien
atactgaaattataaatccctgttctggcatac

SEQ ID NO: 789235 - DNA, 33 bp, Homo sapien
atattggtttccccagccagtcattttcttagg

SEQ ID NO: 789236 - DNA, 33 bp, Homo sapien
atattggtttccccaggcagtcattttcttagg

SEQ ID NO: 789237 - DNA, 33 bp, Homo sapien
aaacagcattaggtgccataggggcaggactta

SEQ ID NO: 789238 - DNA, 33 bp, Homo sapien
aaacagcattaggtgctataggggcaggactta

SEQ ID NO: 789239 - DNA, 33 bp, Homo sapien
gaaatagccattacaaatacgtccagagaacta

SEQ ID NO: 789240 - DNA, 33 bp, Homo sapien
gaaatagccattacaagtacgtccagagaacta

SEQ ID NO: 789241 - DNA, 33 bp, Homo sapien
taccaggagctctggacggacaatgaacttcaa

SEQ ID NO: 789242 - DNA, 33 bp, Homo sapien
taccaggagctctggatggacaatgaacttcaa

SEQ ID NO: 789243 - DNA, 33 bp, Homo sapien
agacctattctgcatgaacccttatgatcttaa

SEQ ID NO: 789244 - DNA, 33 bp, Homo sapien
agacctattctgcatggacccttatgatcttaa

SEQ ID NO: 789245 - DNA, 33 bp, Homo sapien
acttacagccttccataaattctataaaccctg

SEQ ID NO: 789246 - DNA, 33 bp, Homo sapien
acttacagccttccatcaattctataaaccctg

SEQ ID NO: 789247 - DNA, 33 bp, Homo sapien
taggtgccagatcttgcaaagccttgtcggtgg

SEQ ID NO: 789248 - DNA, 33 bp, Homo sapien
taggtgccagatcttggaaagccttgtcggtgg

SEQ ID NO: 789249 - DNA, 33 bp, Homo sapien
acccattttgtatgtacagatcatccccaaata

SEQ ID NO: 789250 - DNA, 33 bp, Homo sapien
acccattttgtatgtatagatcatccccaaata

SEQ ID NO: 789251 - DNA, 33 bp, Homo sapien
tgtggttataccactggaaacatcttgtagttt

SEQ ID NO: 789252 - DNA, 33 bp, Homo sapien
tgtggttataccactgtaaacatcttgtagttt

SEQ ID NO: 789253 - DNA, 33 bp, Homo sapien
ttccttctttaacacactccaaaatgccagtat

SEQ ID NO: 789254 - DNA, 33 bp, Homo sapien
ttccttctttaacacattccaaaatgccagtat

SEQ ID NO: 789255 - DNA, 33 bp, Homo sapien
ttttgagctactgacacgcattatgcacagtgg

SEQ ID NO: 789256 - DNA, 33 bp, Homo sapien
ttttgagctactgacaggcattatgcacagtgg

SEQ ID NO: 789257 - DNA, 33 bp, Homo sapien
acttcctgattctcctcaactcatttctggtct

SEQ ID NO: 789258 - DNA, 33 bp, Homo sapien
acttcctgattctcctgaactcatttctggtct

SEQ ID NO: 789259 - DNA, 33 bp, Homo sapien
tactgccatgtggttaaacaaggtcaggctccc

SEQ ID NO: 789260 - DNA, 33 bp, Homo sapien
tactgccatgtggttagacaaggtcaggctccc

SEQ ID NO: 789261 - DNA, 33 bp, Homo sapien
ttgctttcacctgagaggttaattttggtaaag

SEQ ID NO: 789262 - DNA, 33 bp, Homo sapien
ttgctttcacctgagatgttaattttggtaaag

SEQ ID NO: 789263 - DNA, 33 bp, Homo sapien
tatctattccttcatcaatatgccttaattgct

SEQ ID NO: 789264 - DNA, 33 bp, Homo sapien
tatctattccttcatccatatgccttaattgct

SEQ ID NO: 789265 - DNA, 33 bp, Homo sapien
atcatatctcgagcaccgtgatgataataacac

SEQ ID NO: 789266 - DNA, 33 bp, Homo sapien
atcatatctcgagcactgtgatgataataacac

SEQ ID NO: 789267 - DNA, 33 bp, Homo sapien
ccgcaaagtttaaagagtaactgaattatgcaa

SEQ ID NO: 789268 - DNA, 33 bp, Homo sapien
ccgcaaagtttaaagattaactgaattatgcaa

SEQ ID NO: 789269 - DNA, 33 bp, Homo sapien
cacaaaaagatgaatggatcctgttttcactta

SEQ ID NO: 789270 - DNA, 33 bp, Homo sapien
cacaaaaagatgaatgtatcctgttttcactta

SEQ ID NO: 789271 - DNA, 33 bp, Homo sapien
ttttcttgactgattacacatgagctgatgcct

SEQ ID NO: 789272 - DNA, 33 bp, Homo sapien
ttttcttgactgattatacatgagctgatgcct

SEQ ID NO: 789273 - DNA, 33 bp, Homo sapien
tataccataattgtgcaattttttacaatctgc

SEQ ID NO: 789274 - DNA, 33 bp, Homo sapien
tataccataattgtgccattttttacaatctgc

SEQ ID NO: 789275 - DNA, 33 bp, Homo sapien
tttgcttattgctgccagagaaaatcacaaaac

SEQ ID NO: 789276 - DNA, 33 bp, Homo sapien
tttgcttattgctgccggagaaaatcacaaaac

SEQ ID NO: 789277 - DNA, 33 bp, Homo sapien
cttacacgttcacttgaatccatactatccttt

SEQ ID NO: 789278 - DNA, 33 bp, Homo sapien
cttacacgttcacttggatccatactatccttt

SEQ ID NO: 789279 - DNA, 33 bp, Homo sapien
atgggctgatcaacagcacatggtaaaatcatt

SEQ ID NO: 789280 - DNA, 33 bp, Homo sapien
atgggctgatcaacagtacatggtaaaatcatt

SEQ ID NO: 789281 - DNA, 33 bp, Homo sapien
catgcttatgattaggaagaatgaatattttga

SEQ ID NO: 789282 - DNA, 33 bp, Homo sapien
catgcttatgattagggagaatgaatattttga

SEQ ID NO: 789283 - DNA, 33 bp, Homo sapien
tttccacttgagaagaaactgtgtaaaaggaac

SEQ ID NO: 789284 - DNA, 33 bp, Homo sapien
tttccacttgagaagatactgtgtaaaaggaac

SEQ ID NO: 789285 - DNA, 33 bp, Homo sapien
taaaaggacaaacatcaaacagaatttatgaga

SEQ ID NO: 789286 - DNA, 33 bp, Homo sapien
taaaaggacaaacatcgaacagaatttatgaga

SEQ ID NO: 789287 - DNA, 33 bp, Homo sapien
tagaatgaatttcagacggtcaaatttcaggca

SEQ ID NO: 789288 - DNA, 33 bp, Homo sapien
tagaatgaatttcagatggtcaaatttcaggca

SEQ ID NO: 789289 - DNA, 33 bp, Homo sapien
ttgccatatcccgtaaatgttcttgctctttcc

SEQ ID NO: 789290 - DNA, 33 bp, Homo sapien
ttgccatatcccgtaactgttcttgctctttcc

SEQ ID NO: 789291 - DNA, 33 bp, Homo sapien
gattacatactggatacgggttttgggtcagaa

SEQ ID NO: 789292 - DNA, 33 bp, Homo sapien
gattacatactggatatgggttttgggtcagaa

SEQ ID NO: 789293 - DNA, 33 bp, Homo sapien
ttcatttgtcacagaccgggttcttacaaagta

SEQ ID NO: 789294 - DNA, 33 bp, Homo sapien
ttcatttgtcacagactgggttcttacaaagta

SEQ ID NO: 789295 - DNA, 33 bp, Homo sapien
gagtatctccaacatacagcaaagagatatgga

SEQ ID NO: 789296 - DNA, 33 bp, Homo sapien
gagtatctccaacatagagcaaagagatatgga

SEQ ID NO: 789297 - DNA, 33 bp, Homo sapien
agaaaagggcctaggacgaagatacaaggcttt

SEQ ID NO: 789298 - DNA, 33 bp, Homo sapien
agaaaagggcctaggatgaagatacaaggcttt

SEQ ID NO: 789299 - DNA, 33 bp, Homo sapien
tttttcttatcctacacgtctaatccatcacca

SEQ ID NO: 789300 - DNA, 33 bp, Homo sapien
tttttcttatcctacatgtctaatccatcacca

SEQ ID NO: 789301 - DNA, 33 bp, Homo sapien
ttttatctcacagttgaaactcgatgtattagt

SEQ ID NO: 789302 - DNA, 33 bp, Homo sapien
ttttatctcacagttgcaactcgatgtattagt

SEQ ID NO: 789303 - DNA, 33 bp, Homo sapien
aatcccaaaattcctacagcaagcaggaagtgt

SEQ ID NO: 789304 - DNA, 33 bp, Homo sapien
aatcccaaaattcctatagcaagcaggaagtgt

SEQ ID NO: 789305 - DNA, 33 bp, Homo sapien
accaatctataaaccaatctgaatctgtgccta

SEQ ID NO: 789306 - DNA, 33 bp, Homo sapien
accaatctataaaccagtctgaatctgtgccta

SEQ ID NO: 789307 - DNA, 33 bp, Homo sapien
gaccaagcctgagtaccatagcctgctgcagga

SEQ ID NO: 789308 - DNA, 33 bp, Homo sapien
gaccaagcctgagtactatagcctgctgcagga

SEQ ID NO: 789309 - DNA, 33 bp, Homo sapien
aaatttgtgtctttcacgcccacagacggagat

SEQ ID NO: 789310 - DNA, 33 bp, Homo sapien
aaatttgtgtctttcatgcccacagacggagat

SEQ ID NO: 789311 - DNA, 33 bp, Homo sapien
accaccattatatccacatacgtcatatcattg

SEQ ID NO: 789312 - DNA, 33 bp, Homo sapien
accaccattatatccatatacgtcatatcattg

SEQ ID NO: 789313 - DNA, 33 bp, Homo sapien
aagattgccttgccgacagaattaaatttatgt

SEQ ID NO: 789314 - DNA, 33 bp, Homo sapien
aagattgccttgccgagagaattaaatttatgt

SEQ ID NO: 789315 - DNA, 33 bp, Homo sapien
ctgtcccgctggctcaaattggtgtgccttcca

SEQ ID NO: 789316 - DNA, 33 bp, Homo sapien
ctgtcccgctggctcagattggtgtgccttcca

SEQ ID NO: 789317 - DNA, 33 bp, Homo sapien
tttactaaacatctcaagtcttatcagccatat

SEQ ID NO: 789318 - DNA, 33 bp, Homo sapien
tttactaaacatctcaggtcttatcagccatat

SEQ ID NO: 789319 - DNA, 33 bp, Homo sapien
ctgtctgctccacacaagcaggcgacatttatg

SEQ ID NO: 789320 - DNA, 33 bp, Homo sapien
ctgtctgctccacacaggcaggcgacatttatg

SEQ ID NO: 789321 - DNA, 33 bp, Homo sapien
tatttcttggcttcaccaatacttcttgttttc

SEQ ID NO: 789322 - DNA, 33 bp, Homo sapien
tatttcttggcttcacgaatacttcttgttttc

SEQ ID NO: 789323 - DNA, 33 bp, Homo sapien
caacaacagaaagtaccgaacaactttgaggat

SEQ ID NO: 789324 - DNA, 33 bp, Homo sapien
caacaacagaaagtactgaacaactttgaggat

SEQ ID NO: 789325 - DNA, 33 bp, Homo sapien
tctgcacactagttgacgcaatgtctctttttt

SEQ ID NO: 789326 - DNA, 33 bp, Homo sapien
tctgcacactagttgatgcaatgtctctttttt

SEQ ID NO: 789327 - DNA, 33 bp, Homo sapien
tctgggctaaaatataagacaggcatttacctt

SEQ ID NO: 789328 - DNA, 33 bp, Homo sapien
tctgggctaaaatataggacaggcatttacctt

SEQ ID NO: 789329 - DNA, 33 bp, Homo sapien
aaaatggtctccatcacagatagaaaatacata

SEQ ID NO: 789330 - DNA, 33 bp, Homo sapien
aaaatggtctccatcatagatagaaaatacata

SEQ ID NO: 789331 - DNA, 33 bp, Homo sapien
ttttatacataaacaacgtgtctaaactatgaa

SEQ ID NO: 789332 - DNA, 33 bp, Homo sapien
ttttatacataaacaatgtgtctaaactatgaa

SEQ ID NO: 789333 - DNA, 33 bp, Homo sapien
gcataaacataaaatgcaaaggaaacaggcaaa

SEQ ID NO: 789334 - DNA, 33 bp, Homo sapien
gcataaacataaaatggaaaggaaacaggcaaa

SEQ ID NO: 789335 - DNA, 33 bp, Homo sapien
taagatgaacatggcaagacatgaaaatctaac

SEQ ID NO: 789336 - DNA, 33 bp, Homo sapien
taagatgaacatggcacgacatgaaaatctaac

SEQ ID NO: 789337 - DNA, 33 bp, Homo sapien
cagctggacattattacataggcagacaggagc

SEQ ID NO: 789338 - DNA, 33 bp, Homo sapien
cagctggacattattatataggcagacaggagc

SEQ ID NO: 789339 - DNA, 33 bp, Homo sapien
cagtgggctctaaggacgagtggaggtaaaaac

SEQ ID NO: 789340 - DNA, 33 bp, Homo sapien
cagtgggctctaaggatgagtggaggtaaaaac

SEQ ID NO: 789341 - DNA, 33 bp, Homo sapien
agatgagcaagatgaaaacaggccccagtatct

SEQ ID NO: 789342 - DNA, 33 bp, Homo sapien
agatgagcaagatgaagacaggccccagtatct

SEQ ID NO: 789343 - DNA, 33 bp, Homo sapien
ctgattacaacctagcaaaagtctatgtgaatt

SEQ ID NO: 789344 - DNA, 33 bp, Homo sapien
ctgattacaacctagcgaaagtctatgtgaatt

SEQ ID NO: 789345 - DNA, 33 bp, Homo sapien
gggtgcttgttatgtactaatgaacaaaacaga

SEQ ID NO: 789346 - DNA, 33 bp, Homo sapien
gggtgcttgttatgtattaatgaacaaaacaga

SEQ ID NO: 789347 - DNA, 33 bp, Homo sapien
atttcgtttatgaaaacgttttggcagcctatt

SEQ ID NO: 789348 - DNA, 33 bp, Homo sapien
atttcgtttatgaaaatgttttggcagcctatt

SEQ ID NO: 789349 - DNA, 33 bp, Homo sapien
ctctaatgaactgcccagactcccgtttgcatt

SEQ ID NO: 789350 - DNA, 33 bp, Homo sapien
ctctaatgaactgcccggactcccgtttgcatt

SEQ ID NO: 789351 - DNA, 33 bp, Homo sapien
cattgggagaaccggaaatggtgagattaatta

SEQ ID NO: 789352 - DNA, 33 bp, Homo sapien
cattgggagaaccggagatggtgagattaatta

SEQ ID NO: 789353 - DNA, 33 bp, Homo sapien
ccccattctgttttacacaaatttactcattga

SEQ ID NO: 789354 - DNA, 33 bp, Homo sapien
ccccattctgttttacgcaaatttactcattga

SEQ ID NO: 789355 - DNA, 33 bp, Homo sapien
aagaaagacacttactcacactaattttcttta

SEQ ID NO: 789356 - DNA, 33 bp, Homo sapien
aagaaagacacttactgacactaattttcttta

SEQ ID NO: 789357 - DNA, 33 bp, Homo sapien
tgtgctaggttcagcaatagtgactgaaatact

SEQ ID NO: 789358 - DNA, 33 bp, Homo sapien
tgtgctaggttcagcagtagtgactgaaatact

SEQ ID NO: 789359 - DNA, 33 bp, Homo sapien
atacttgcaaaatgatcagaaacaaggatccat

SEQ ID NO: 789360 - DNA, 33 bp, Homo sapien
atacttgcaaaatgattagaaacaaggatccat

SEQ ID NO: 789361 - DNA, 33 bp, Homo sapien
gacaaatttctctacacgacttacaataccgct

SEQ ID NO: 789362 - DNA, 33 bp, Homo sapien
gacaaatttctctacatgacttacaataccgct

SEQ ID NO: 789363 - DNA, 33 bp, Homo sapien
aaggctggaaaccatgaaaagggaaagagaata

SEQ ID NO: 789364 - DNA, 33 bp, Homo sapien
aaggctggaaaccatggaaagggaaagagaata

SEQ ID NO: 789365 - DNA, 33 bp, Homo sapien
gaaagtcactaatgtaaaaagaactggaacagc

SEQ ID NO: 789366 - DNA, 33 bp, Homo sapien
gaaagtcactaatgtagaaagaactggaacagc

SEQ ID NO: 789367 - DNA, 33 bp, Homo sapien
ttcttttccccaattcccttgattcccaataaa

SEQ ID NO: 789368 - DNA, 33 bp, Homo sapien
ttcttttccccaattctcttgattcccaataaa

SEQ ID NO: 789369 - DNA, 33 bp, Homo sapien
cactcagacttacagtaaattaagtatctgtgt

SEQ ID NO: 789370 - DNA, 33 bp, Homo sapien
cactcagacttacagtgaattaagtatctgtgt

SEQ ID NO: 789371 - DNA, 33 bp, Homo sapien
ctagtttgtatataaaataaggcacaagtataa

SEQ ID NO: 789372 - DNA, 33 bp, Homo sapien
ctagtttgtatataaagtaaggcacaagtataa

SEQ ID NO: 789373 - DNA, 33 bp, Homo sapien
aagtaccaggaagcatcactattgaagggacat

SEQ ID NO: 789374 - DNA, 33 bp, Homo sapien
aagtaccaggaagcatgactattgaagggacat

SEQ ID NO: 789375 - DNA, 33 bp, Homo sapien
actttaccatagaaacactcttccatcaaatgt

SEQ ID NO: 789376 - DNA, 33 bp, Homo sapien
actttaccatagaaacgctcttccatcaaatgt

SEQ ID NO: 789377 - DNA, 33 bp, Homo sapien
cactttaattctaccaaggaagtcacagtatca

SEQ ID NO: 789378 - DNA, 33 bp, Homo sapien
cactttaattctaccagggaagtcacagtatca

SEQ ID NO: 789379 - DNA, 33 bp, Homo sapien
agcatcatataccaaaaaaaggagtcacatacc

SEQ ID NO: 789380 - DNA, 33 bp, Homo sapien
agcatcatataccaaacaaaggagtcacatacc

SEQ ID NO: 789381 - DNA, 33 bp, Homo sapien
aggactagatggcaaactttagaataaaacaat

SEQ ID NO: 789382 - DNA, 33 bp, Homo sapien
aggactagatggcaaagtttagaataaaacaat

SEQ ID NO: 789383 - DNA, 33 bp, Homo sapien
gagacgaaggttttggcttctgagttcaggaag

SEQ ID NO: 789384 - DNA, 33 bp, Homo sapien
gagacgaaggttttgggttctgagttcaggaag

SEQ ID NO: 789385 - DNA, 33 bp, Homo sapien
gttagtatatgaaaccaatgcctggccaagtca

SEQ ID NO: 789386 - DNA, 33 bp, Homo sapien
gttagtatatgaaaccgatgcctggccaagtca

SEQ ID NO: 789387 - DNA, 33 bp, Homo sapien
tgttgacaagaactgacgtccacaagagcaaaa

SEQ ID NO: 789388 - DNA, 33 bp, Homo sapien
tgttgacaagaactgatgtccacaagagcaaaa

SEQ ID NO: 789389 - DNA, 33 bp, Homo sapien
tagatattgggaagataaatctcagggtttgtt

SEQ ID NO: 789390 - DNA, 33 bp, Homo sapien
tagatattgggaagatgaatctcagggtttgtt

SEQ ID NO: 789391 - DNA, 33 bp, Homo sapien
ttctgcatcagaacacaatttgattgaacacta

SEQ ID NO: 789392 - DNA, 33 bp, Homo sapien
ttctgcatcagaacaccatttgattgaacacta

SEQ ID NO: 789393 - DNA, 33 bp, Homo sapien
taaaatcaactggtagaaagtcaaactaacata

SEQ ID NO: 789394 - DNA, 33 bp, Homo sapien
taaaatcaactggtaggaagtcaaactaacata

SEQ ID NO: 789395 - DNA, 33 bp, Homo sapien
aagtttccaggtgaacaaactgttttgtgaagg

SEQ ID NO: 789396 - DNA, 33 bp, Homo sapien
aagtttccaggtgaaccaactgttttgtgaagg

SEQ ID NO: 789397 - DNA, 33 bp, Homo sapien
aaggtgcaatccattgaaccaacaagagcatta

SEQ ID NO: 789398 - DNA, 33 bp, Homo sapien
aaggtgcaatccattgtaccaacaagagcatta

SEQ ID NO: 789399 - DNA, 33 bp, Homo sapien
ccagaaagctcattccacaattctgccctgaac

SEQ ID NO: 789400 - DNA, 33 bp, Homo sapien
ccagaaagctcattccgcaattctgccctgaac

SEQ ID NO: 789401 - DNA, 33 bp, Homo sapien
gctgatgtcacggggactaaattcaattaagga

SEQ ID NO: 789402 - DNA, 33 bp, Homo sapien
gctgatgtcacggggattaaattcaattaagga

SEQ ID NO: 789403 - DNA, 33 bp, Homo sapien
cgttcccagacatacaaaatttcccagtctttt

SEQ ID NO: 789404 - DNA, 33 bp, Homo sapien
cgttcccagacatacagaatttcccagtctttt

SEQ ID NO: 789405 - DNA, 33 bp, Homo sapien
cactgaaaaagcagtcaccttttggttttggac

SEQ ID NO: 789406 - DNA, 33 bp, Homo sapien
cactgaaaaagcagtcgccttttggttttggac

SEQ ID NO: 789407 - DNA, 33 bp, Homo sapien
taagcaagtaatatcaatgacaacgtagttgat

SEQ ID NO: 789408 - DNA, 33 bp, Homo sapien
taagcaagtaatatcagtgacaacgtagttgat

SEQ ID NO: 789409 - DNA, 33 bp, Homo sapien
attttttcttgccttaaaacaaataatggatta

SEQ ID NO: 789410 - DNA, 33 bp, Homo sapien
attttttcttgccttacaacaaataatggatta

SEQ ID NO: 789411 - DNA, 33 bp, Homo sapien
gttctcaactgtgattcaaatacgtgatagtta

SEQ ID NO: 789412 - DNA, 33 bp, Homo sapien
gttctcaactgtgattgaaatacgtgatagtta

SEQ ID NO: 789413 - DNA, 33 bp, Homo sapien
gtgcagtgattaaacgcccttaagtgctgttat

SEQ ID NO: 789414 - DNA, 33 bp, Homo sapien
gtgcagtgattaaacgtccttaagtgctgttat

SEQ ID NO: 789415 - DNA, 33 bp, Homo sapien
tatatgccatatatcacattcctttcgcaactt

SEQ ID NO: 789416 - DNA, 33 bp, Homo sapien
tatatgccatatatcatattcctttcgcaactt

SEQ ID NO: 789417 - DNA, 33 bp, Homo sapien
ctcgttttgagaattaccatctggcatccttta

SEQ ID NO: 789418 - DNA, 33 bp, Homo sapien
ctcgttttgagaattatcatctggcatccttta

SEQ ID NO: 789419 - DNA, 33 bp, Homo sapien
tagaaatgtgttagagaaaaatacagaatactt

SEQ ID NO: 789420 - DNA, 33 bp, Homo sapien
tagaaatgtgttagaggaaaatacagaatactt

SEQ ID NO: 789421 - DNA, 33 bp, Homo sapien
ttttcctgaactatacatggtaggatactctct

SEQ ID NO: 789422 - DNA, 33 bp, Homo sapien
ttttcctgaactatacgtggtaggatactctct

SEQ ID NO: 789423 - DNA, 33 bp, Homo sapien
tttaaggaagaaatcaatcctcagagttacagc

SEQ ID NO: 789424 - DNA, 33 bp, Homo sapien
tttaaggaagaaatcagtcctcagagttacagc

SEQ ID NO: 789425 - DNA, 33 bp, Homo sapien
gtggtcatggagttgagagggaaaaagagtaga

SEQ ID NO: 789426 - DNA, 33 bp, Homo sapien
gtggtcatggagttgatagggaaaaagagtaga

SEQ ID NO: 789427 - DNA, 33 bp, Homo sapien
gtaaggtgctagtgaacgaacacaaggatgact

SEQ ID NO: 789428 - DNA, 33 bp, Homo sapien
gtaaggtgctagtgaatgaacacaaggatgact

SEQ ID NO: 789429 - DNA, 33 bp, Homo sapien
ctccctctcacacattcaacaactaagcaccta

SEQ ID NO: 789430 - DNA, 33 bp, Homo sapien
ctccctctcacacattgaacaactaagcaccta

SEQ ID NO: 789431 - DNA, 33 bp, Homo sapien
cttcaactcccttgtccctggtgactttcacct

SEQ ID NO: 789432 - DNA, 33 bp, Homo sapien
cttcaactcccttgtctctggtgactttcacct

SEQ ID NO: 789433 - DNA, 33 bp, Homo sapien
tccccataaggtctcactaaagctgaacctcct

SEQ ID NO: 789434 - DNA, 33 bp, Homo sapien
tccccataaggtctcattaaagctgaacctcct

SEQ ID NO: 789435 - DNA, 33 bp, Homo sapien
gtcggaatagaagaaacaacctgtgccacagct

SEQ ID NO: 789436 - DNA, 33 bp, Homo sapien
gtcggaatagaagaaataacctgtgccacagct

SEQ ID NO: 789437 - DNA, 33 bp, Homo sapien
caagacattaacttcccaaactgtgctttcttt

SEQ ID NO: 789438 - DNA, 33 bp, Homo sapien
caagacattaacttcctaaactgtgctttcttt

SEQ ID NO: 789439 - DNA, 33 bp, Homo sapien
catcaaaactggatatgctttctacattgtatc

SEQ ID NO: 789440 - DNA, 33 bp, Homo sapien
catcaaaactggatattctttctacattgtatc

SEQ ID NO: 789441 - DNA, 33 bp, Homo sapien
cctagactcattggaagttaagctttttccact

SEQ ID NO: 789442 - DNA, 33 bp, Homo sapien
cctagactcattggaatttaagctttttccact

SEQ ID NO: 789443 - DNA, 33 bp, Homo sapien
tggagtttggtgtcaacagtggatctgagaaca

SEQ ID NO: 789444 - DNA, 33 bp, Homo sapien
tggagtttggtgtcaatagtggatctgagaaca

SEQ ID NO: 789445 - DNA, 33 bp, Homo sapien
caggcataacacccaaatgcactagaccagcag

SEQ ID NO: 789446 - DNA, 33 bp, Homo sapien
caggcataacacccaagtgcactagaccagcag

SEQ ID NO: 789447 - DNA, 33 bp, Homo sapien
acatgggcaaagcatacggcttaaagcaatcta

SEQ ID NO: 789448 - DNA, 33 bp, Homo sapien
acatgggcaaagcatatggcttaaagcaatcta

SEQ ID NO: 789449 - DNA, 33 bp, Homo sapien
gttttgcatagttgacaccttcgtaattaatgt

SEQ ID NO: 789450 - DNA, 33 bp, Homo sapien
gttttgcatagttgacgccttcgtaattaatgt

SEQ ID NO: 789451 - DNA, 33 bp, Homo sapien
ttaaaggggaaagcttcaaaataagtgtatctt

SEQ ID NO: 789452 - DNA, 33 bp, Homo sapien
ttaaaggggaaagcttgaaaataagtgtatctt

SEQ ID NO: 789453 - DNA, 33 bp, Homo sapien
aggaacctgatttgaaaaacaaaggggccagag

SEQ ID NO: 789454 - DNA, 33 bp, Homo sapien
aggaacctgatttgaagaacaaaggggccagag

SEQ ID NO: 789455 - DNA, 33 bp, Homo sapien
atgagaagtctgtggaaaaacataattcaacat

SEQ ID NO: 789456 - DNA, 33 bp, Homo sapien
atgagaagtctgtggagaaacataattcaacat

SEQ ID NO: 789457 - DNA, 33 bp, Homo sapien
tagctgttgtgaataacgctataatgaaatagc

SEQ ID NO: 789458 - DNA, 33 bp, Homo sapien
tagctgttgtgaataatgctataatgaaatagc

SEQ ID NO: 789459 - DNA, 33 bp, Homo sapien
agacaaagagttaagaatcacatcaagccatgt

SEQ ID NO: 789460 - DNA, 33 bp, Homo sapien
agacaaagagttaagagtcacatcaagccatgt

SEQ ID NO: 789461 - DNA, 33 bp, Homo sapien
ctggtacctccaataaatacagaattttaatca

SEQ ID NO: 789462 - DNA, 33 bp, Homo sapien
ctggtacctccaataagtacagaattttaatca

SEQ ID NO: 789463 - DNA, 33 bp, Homo sapien
acttaaacggccctaaatattctaatggtcttt

SEQ ID NO: 789464 - DNA, 33 bp, Homo sapien
acttaaacggccctaagtattctaatggtcttt

SEQ ID NO: 789465 - DNA, 33 bp, Homo sapien
aaaactctgatgggccaccttatatttttttct

SEQ ID NO: 789466 - DNA, 33 bp, Homo sapien
aaaactctgatgggccgccttatatttttttct

SEQ ID NO: 789467 - DNA, 33 bp, Homo sapien
ttcccaagtaaagcacagaatgttgatccatgc

SEQ ID NO: 789468 - DNA, 33 bp, Homo sapien
ttcccaagtaaagcacggaatgttgatccatgc

SEQ ID NO: 789469 - DNA, 33 bp, Homo sapien
tattgtccaaatgtccacaatctgaaatttttc

SEQ ID NO: 789470 - DNA, 33 bp, Homo sapien
tattgtccaaatgtcctcaatctgaaatttttc

SEQ ID NO: 789471 - DNA, 33 bp, Homo sapien
ttgccaagtgaatggacgtcagaaaaatttcag

SEQ ID NO: 789472 - DNA, 33 bp, Homo sapien
ttgccaagtgaatggatgtcagaaaaatttcag

SEQ ID NO: 789473 - DNA, 33 bp, Homo sapien
aatcacatcatgtgtcagaagaaaattgtcacc

SEQ ID NO: 789474 - DNA, 33 bp, Homo sapien
aatcacatcatgtgtcggaagaaaattgtcacc

SEQ ID NO: 789475 - DNA, 33 bp, Homo sapien
tctagctcttcctgggacagtaataggctatgc

SEQ ID NO: 789476 - DNA, 33 bp, Homo sapien
tctagctcttcctgggtcagtaataggctatgc

SEQ ID NO: 789477 - DNA, 33 bp, Homo sapien
tcatttaagaaatgcgcatctgtgataagccat

SEQ ID NO: 789478 - DNA, 33 bp, Homo sapien
tcatttaagaaatgcgtatctgtgataagccat

SEQ ID NO: 789479 - DNA, 33 bp, Homo sapien
tcaccaggtgcgagaaccttgggacctctcatt

SEQ ID NO: 789480 - DNA, 33 bp, Homo sapien
tcaccaggtgcgagaatcttgggacctctcatt

SEQ ID NO: 789481 - DNA, 33 bp, Homo sapien
tctttcactaaggcaaataagtagttttcaaga

SEQ ID NO: 789482 - DNA, 33 bp, Homo sapien
tctttcactaaggcaagtaagtagttttcaaga

SEQ ID NO: 789483 - DNA, 33 bp, Homo sapien
caaaccctgctataaccacactctggctaccgc

SEQ ID NO: 789484 - DNA, 33 bp, Homo sapien
caaaccctgctataactacactctggctaccgc

SEQ ID NO: 789485 - DNA, 33 bp, Homo sapien
aaaaaataagagtagacatttggaatgtactgg

SEQ ID NO: 789486 - DNA, 33 bp, Homo sapien
aaaaaataagagtagatatttggaatgtactgg

SEQ ID NO: 789487 - DNA, 33 bp, Homo sapien
agaatattttaactgcaagatcagaagaaagaa

SEQ ID NO: 789488 - DNA, 33 bp, Homo sapien
agaatattttaactgcgagatcagaagaaagaa

SEQ ID NO: 789489 - DNA, 33 bp, Homo sapien
gactgagaactccataaagacaaagaatcccca

SEQ ID NO: 789490 - DNA, 33 bp, Homo sapien
gactgagaactccatagagacaaagaatcccca

SEQ ID NO: 789491 - DNA, 33 bp, Homo sapien
ttgttctgttctctgacacagattttctctcag

SEQ ID NO: 789492 - DNA, 33 bp, Homo sapien
ttgttctgttctctgatacagattttctctcag

SEQ ID NO: 789493 - DNA, 33 bp, Homo sapien
gtctctttcatgagcagtactccagctggatgg

SEQ ID NO: 789494 - DNA, 33 bp, Homo sapien
gtctctttcatgagcattactccagctggatgg

SEQ ID NO: 789495 - DNA, 33 bp, Homo sapien
ctatctatagagctgacaaagaaatacctaatc

SEQ ID NO: 789496 - DNA, 33 bp, Homo sapien
ctatctatagagctgataaagaaatacctaatc

SEQ ID NO: 789497 - DNA, 33 bp, Homo sapien
tcccaaggagatgctcaatgaacatttgttact

SEQ ID NO: 789498 - DNA, 33 bp, Homo sapien
tcccaaggagatgctccatgaacatttgttact

SEQ ID NO: 789499 - DNA, 33 bp, Homo sapien
atgagccagtgtaatacacagatgtcctgaata

SEQ ID NO: 789500 - DNA, 33 bp, Homo sapien
atgagccagtgtaatatacagatgtcctgaata

SEQ ID NO: 789501 - DNA, 33 bp, Homo sapien
gcattagtgaatctagcccagtgtatatagact

SEQ ID NO: 789502 - DNA, 33 bp, Homo sapien
gcattagtgaatctagtccagtgtatatagact

SEQ ID NO: 789503 - DNA, 33 bp, Homo sapien
attatcgcacttcgccaatctgatttttatgat

SEQ ID NO: 789504 - DNA, 33 bp, Homo sapien
attatcgcacttcgcctatctgatttttatgat

SEQ ID NO: 789505 - DNA, 33 bp, Homo sapien
ccatgtgtttaaagaacctatacatcaggctaa

SEQ ID NO: 789506 - DNA, 33 bp, Homo sapien
ccatgtgtttaaagaatctatacatcaggctaa

SEQ ID NO: 789507 - DNA, 33 bp, Homo sapien
tttctaagatgacacaacacaattaagcaagtc

SEQ ID NO: 789508 - DNA, 33 bp, Homo sapien
tttctaagatgacacagcacaattaagcaagtc

SEQ ID NO: 789509 - DNA, 33 bp, Homo sapien
gataactaacaactgaaggaatggagttaacat

SEQ ID NO: 789510 - DNA, 33 bp, Homo sapien
gataactaacaactgagggaatggagttaacat

SEQ ID NO: 789511 - DNA, 33 bp, Homo sapien
ttctttctaaaaactcactgtattaggatgcac

SEQ ID NO: 789512 - DNA, 33 bp, Homo sapien
ttctttctaaaaactctctgtattaggatgcac

SEQ ID NO: 789513 - DNA, 33 bp, Homo sapien
acactagttctgtggacgttagtagtttttacc

SEQ ID NO: 789514 - DNA, 33 bp, Homo sapien
acactagttctgtggatgttagtagtttttacc

SEQ ID NO: 789515 - DNA, 33 bp, Homo sapien
taggtactgtggaaaacaaactcagtctaacac

SEQ ID NO: 789516 - DNA, 33 bp, Homo sapien
taggtactgtggaaaagaaactcagtctaacac

SEQ ID NO: 789517 - DNA, 33 bp, Homo sapien
agccagtctcaaaaaaggagaagctgctgtact

SEQ ID NO: 789518 - DNA, 33 bp, Homo sapien
agccagtctcaaaaaatgagaagctgctgtact

SEQ ID NO: 789519 - DNA, 33 bp, Homo sapien
aagaacaggactgtcccaaatcaagcgggatta

SEQ ID NO: 789520 - DNA, 33 bp, Homo sapien
aagaacaggactgtcctaaatcaagcgggatta

SEQ ID NO: 789521 - DNA, 33 bp, Homo sapien
atttgttagttcacaaagacttactattttaat

SEQ ID NO: 789522 - DNA, 33 bp, Homo sapien
atttgttagttcacaaggacttactattttaat

SEQ ID NO: 789523 - DNA, 33 bp, Homo sapien
ataaagggaatatagaactctgctaaggaaagg

SEQ ID NO: 789524 - DNA, 33 bp, Homo sapien
ataaagggaatatagatctctgctaaggaaagg

SEQ ID NO: 789525 - DNA, 33 bp, Homo sapien
ggtcgtgtctcttggacggggtatgaatttttc

SEQ ID NO: 789526 - DNA, 33 bp, Homo sapien
ggtcgtgtctcttggatggggtatgaatttttc

SEQ ID NO: 789527 - DNA, 33 bp, Homo sapien
aatatttgaaggtgagacatagactgaggcagt

SEQ ID NO: 789528 - DNA, 33 bp, Homo sapien
aatatttgaaggtgaggcatagactgaggcagt

SEQ ID NO: 789529 - DNA, 33 bp, Homo sapien
agcaattggttctcacaagctggcttcagcttc

SEQ ID NO: 789530 - DNA, 33 bp, Homo sapien
agcaattggttctcacgagctggcttcagcttc

SEQ ID NO: 789531 - DNA, 33 bp, Homo sapien
gtaataatattggcaacgactacccctccaaat

SEQ ID NO: 789532 - DNA, 33 bp, Homo sapien
gtaataatattggcaatgactacccctccaaat

SEQ ID NO: 789533 - DNA, 33 bp, Homo sapien
aaggcatttctcagaaaaatttcagacagcagg

SEQ ID NO: 789534 - DNA, 33 bp, Homo sapien
aaggcatttctcagaagaatttcagacagcagg

SEQ ID NO: 789535 - DNA, 33 bp, Homo sapien
tttttcctggttatgaccctacttctctttatc

SEQ ID NO: 789536 - DNA, 33 bp, Homo sapien
tttttcctggttatgatcctacttctctttatc

SEQ ID NO: 789537 - DNA, 33 bp, Homo sapien
aagacaaaacaaaacacggttgtctggtatggt

SEQ ID NO: 789538 - DNA, 33 bp, Homo sapien
aagacaaaacaaaacatggttgtctggtatggt

SEQ ID NO: 789539 - DNA, 33 bp, Homo sapien
gctttcttttctactgaacagactgaaccatca

SEQ ID NO: 789540 - DNA, 33 bp, Homo sapien
gctttcttttctactggacagactgaaccatca

SEQ ID NO: 789541 - DNA, 33 bp, Homo sapien
atgttgctctgccctaactatttgctttcctca

SEQ ID NO: 789542 - DNA, 33 bp, Homo sapien
atgttgctctgccctagctatttgctttcctca

SEQ ID NO: 789543 - DNA, 33 bp, Homo sapien
tctcatgcaaccttgacgtgaatcctcagagga

SEQ ID NO: 789544 - DNA, 33 bp, Homo sapien
tctcatgcaaccttgatgtgaatcctcagagga

SEQ ID NO: 789545 - DNA, 33 bp, Homo sapien
acaatggagttccaaccgaacacctacttataa

SEQ ID NO: 789546 - DNA, 33 bp, Homo sapien
acaatggagttccaactgaacacctacttataa

SEQ ID NO: 789547 - DNA, 33 bp, Homo sapien
tagggttcctaaatgacgtaatgatgtagagct

SEQ ID NO: 789548 - DNA, 33 bp, Homo sapien
tagggttcctaaatgaggtaatgatgtagagct

SEQ ID NO: 789549 - DNA, 33 bp, Homo sapien
ttcctcctgcaacaaactgtgagaaatataaaa

SEQ ID NO: 789550 - DNA, 33 bp, Homo sapien
ttcctcctgcaacaaattgtgagaaatataaaa

SEQ ID NO: 789551 - DNA, 33 bp, Homo sapien
tctgctgaagtgtgaaatgtgaaggcactgccc

SEQ ID NO: 789552 - DNA, 33 bp, Homo sapien
tctgctgaagtgtgaattgtgaaggcactgccc

SEQ ID NO: 789553 - DNA, 33 bp, Homo sapien
gctattgccttgtttaaagtaagcaggagacat

SEQ ID NO: 789554 - DNA, 33 bp, Homo sapien
gctattgccttgtttagagtaagcaggagacat

SEQ ID NO: 789555 - DNA, 33 bp, Homo sapien
tgaagcataaacagatcaaatgacttattcaca

SEQ ID NO: 789556 - DNA, 33 bp, Homo sapien
tgaagcataaacagattaaatgacttattcaca

SEQ ID NO: 789557 - DNA, 33 bp, Homo sapien
attgattcaagaaatacgtagaaggtaaaatag

SEQ ID NO: 789558 - DNA, 33 bp, Homo sapien
attgattcaagaaatatgtagaaggtaaaatag

SEQ ID NO: 789559 - DNA, 33 bp, Homo sapien
gtgcatggcacatgaaagtgaagagtgagtgac

SEQ ID NO: 789560 - DNA, 33 bp, Homo sapien
gtgcatggcacatgaacgtgaagagtgagtgac

SEQ ID NO: 789561 - DNA, 33 bp, Homo sapien
cagccaggctcacacacgcatcaggactatcag

SEQ ID NO: 789562 - DNA, 33 bp, Homo sapien
cagccaggctcacacaggcatcaggactatcag

SEQ ID NO: 789563 - DNA, 33 bp, Homo sapien
ctaaatgttcagcaaacagtagcaaagctagga

SEQ ID NO: 789564 - DNA, 33 bp, Homo sapien
ctaaatgttcagcaaatagtagcaaagctagga

SEQ ID NO: 789565 - DNA, 33 bp, Homo sapien
actgactatggaacaaacttcatggtagacact

SEQ ID NO: 789566 - DNA, 33 bp, Homo sapien
actgactatggaacaagcttcatggtagacact

SEQ ID NO: 789567 - DNA, 33 bp, Homo sapien
gtggctctgaatcccacatagtacaaaagctaa

SEQ ID NO: 789568 - DNA, 33 bp, Homo sapien
gtggctctgaatcccatatagtacaaaagctaa

SEQ ID NO: 789569 - DNA, 33 bp, Homo sapien
ctaagtgttttggctaaatttcatttggcatgt

SEQ ID NO: 789570 - DNA, 33 bp, Homo sapien
ctaagtgttttggctagatttcatttggcatgt

SEQ ID NO: 789571 - DNA, 33 bp, Homo sapien
taggggccgtcacaaccagaattgagtggtgag

SEQ ID NO: 789572 - DNA, 33 bp, Homo sapien
taggggccgtcacaacgagaattgagtggtgag

SEQ ID NO: 789573 - DNA, 33 bp, Homo sapien
tatctgcacattcaaccaacggtggatgaaaaa

SEQ ID NO: 789574 - DNA, 33 bp, Homo sapien
tatctgcacattcaactaacggtggatgaaaaa

SEQ ID NO: 789575 - DNA, 33 bp, Homo sapien
agtgctcctagtttcaccaatcaggataacctt

SEQ ID NO: 789576 - DNA, 33 bp, Homo sapien
agtgctcctagtttcatcaatcaggataacctt

SEQ ID NO: 789577 - DNA, 33 bp, Homo sapien
atagcacactgtacaccgaaaatgttgacatct

SEQ ID NO: 789578 - DNA, 33 bp, Homo sapien
atagcacactgtacactgaaaatgttgacatct

SEQ ID NO: 789579 - DNA, 33 bp, Homo sapien
tctctgcagactcttacagacaaaagacttaga

SEQ ID NO: 789580 - DNA, 33 bp, Homo sapien
tctctgcagactcttagagacaaaagacttaga

SEQ ID NO: 789581 - DNA, 33 bp, Homo sapien
atgattttgtctctccacttgtctctcaggtct

SEQ ID NO: 789582 - DNA, 33 bp, Homo sapien
atgattttgtctctccgcttgtctctcaggtct

SEQ ID NO: 789583 - DNA, 33 bp, Homo sapien
aggttctaaacttgtacgttttctagaatcccc

SEQ ID NO: 789584 - DNA, 33 bp, Homo sapien
aggttctaaacttgtaggttttctagaatcccc

SEQ ID NO: 789585 - DNA, 33 bp, Homo sapien
acaagtttagaacctaaagcagctcctgggaga

SEQ ID NO: 789586 - DNA, 33 bp, Homo sapien
acaagtttagaacctacagcagctcctgggaga

SEQ ID NO: 789587 - DNA, 33 bp, Homo sapien
tacactaataactcaacgaaatggtctgtcatc

SEQ ID NO: 789588 - DNA, 33 bp, Homo sapien
tacactaataactcaaggaaatggtctgtcatc

SEQ ID NO: 789589 - DNA, 33 bp, Homo sapien
ggccaagtaatgataactgttaacatcggctgg

SEQ ID NO: 789590 - DNA, 33 bp, Homo sapien
ggccaagtaatgataattgttaacatcggctgg

SEQ ID NO: 789591 - DNA, 33 bp, Homo sapien
aagaactaagtaagcacggaaagagcttggaat

SEQ ID NO: 789592 - DNA, 33 bp, Homo sapien
aagaactaagtaagcatggaaagagcttggaat

SEQ ID NO: 789593 - DNA, 33 bp, Homo sapien
atactaaacttaccagaatgtcagagaggaaaa

SEQ ID NO: 789594 - DNA, 33 bp, Homo sapien
atactaaacttaccaggatgtcagagaggaaaa

SEQ ID NO: 789595 - DNA, 33 bp, Homo sapien
ttagcttctgatttaacatctctagctgatgaa

SEQ ID NO: 789596 - DNA, 33 bp, Homo sapien
ttagcttctgatttaatatctctagctgatgaa

SEQ ID NO: 789597 - DNA, 33 bp, Homo sapien
gatagcttgactgaaacagtgttcaaggccact

SEQ ID NO: 789598 - DNA, 33 bp, Homo sapien
gatagcttgactgaaagagtgttcaaggccact

SEQ ID NO: 789599 - DNA, 33 bp, Homo sapien
ctgatagggtcatctgaatattacaatgactga

SEQ ID NO: 789600 - DNA, 33 bp, Homo sapien
ctgatagggtcatctggatattacaatgactga

SEQ ID NO: 789601 - DNA, 33 bp, Homo sapien
tggcagccccagttgcaaagtgtcaggactgac

SEQ ID NO: 789602 - DNA, 33 bp, Homo sapien
tggcagccccagttgcgaagtgtcaggactgac

SEQ ID NO: 789603 - DNA, 33 bp, Homo sapien
acatttccctgacttacaatcatgcaggcttcc

SEQ ID NO: 789604 - DNA, 33 bp, Homo sapien
acatttccctgacttagaatcatgcaggcttcc

SEQ ID NO: 789605 - DNA, 33 bp, Homo sapien
actgaagagagaccagaaaaactgagagtgttt

SEQ ID NO: 789606 - DNA, 33 bp, Homo sapien
actgaagagagaccagcaaaactgagagtgttt

SEQ ID NO: 789607 - DNA, 33 bp, Homo sapien
ctctagtggcctggaaactccttttttgatgac

SEQ ID NO: 789608 - DNA, 33 bp, Homo sapien
ctctagtggcctggaatctccttttttgatgac

SEQ ID NO: 789609 - DNA, 33 bp, Homo sapien
cttgggaaacaagaacaaggatggagttccaag

SEQ ID NO: 789610 - DNA, 33 bp, Homo sapien
cttgggaaacaagaacgaggatggagttccaag

SEQ ID NO: 789611 - DNA, 33 bp, Homo sapien
aagaaattagatgtagaaaagtgaagtaatttg

SEQ ID NO: 789612 - DNA, 33 bp, Homo sapien
aagaaattagatgtaggaaagtgaagtaatttg

SEQ ID NO: 789613 - DNA, 33 bp, Homo sapien
ctgttttgatgcaagacaatcagtgaattagag

SEQ ID NO: 789614 - DNA, 33 bp, Homo sapien
ctgttttgatgcaagagaatcagtgaattagag

SEQ ID NO: 789615 - DNA, 33 bp, Homo sapien
actgtaatgaacactgaactggaagtcagggga

SEQ ID NO: 789616 - DNA, 33 bp, Homo sapien
actgtaatgaacactggactggaagtcagggga

SEQ ID NO: 789617 - DNA, 33 bp, Homo sapien
aaatacctatgattgacctcccttattttcaga

SEQ ID NO: 789618 - DNA, 33 bp, Homo sapien
aaatacctatgattgatctcccttattttcaga

SEQ ID NO: 789619 - DNA, 33 bp, Homo sapien
tggaacttatttggacggcttactaaaactcga

SEQ ID NO: 789620 - DNA, 33 bp, Homo sapien
tggaacttatttggactgcttactaaaactcga

SEQ ID NO: 789621 - DNA, 33 bp, Homo sapien
aggtctgaaggcctgacaaccatgagtaccaat

SEQ ID NO: 789622 - DNA, 33 bp, Homo sapien
aggtctgaaggcctgagaaccatgagtaccaat

SEQ ID NO: 789623 - DNA, 33 bp, Homo sapien
cactctgagcaattaaacatccctcaactgaga

SEQ ID NO: 789624 - DNA, 33 bp, Homo sapien
cactctgagcaattaatcatccctcaactgaga

SEQ ID NO: 789625 - DNA, 33 bp, Homo sapien
gagacaagcatggtgaactcacagtgttgtgga

SEQ ID NO: 789626 - DNA, 33 bp, Homo sapien
gagacaagcatggtgacctcacagtgttgtgga

SEQ ID NO: 789627 - DNA, 33 bp, Homo sapien
ttaaatcctgagatgaatacttctaaaatagga

SEQ ID NO: 789628 - DNA, 33 bp, Homo sapien
ttaaatcctgagatgactacttctaaaatagga

SEQ ID NO: 789629 - DNA, 33 bp, Homo sapien
agctaggccgaagttacccaaaactgaggagtc

SEQ ID NO: 789630 - DNA, 33 bp, Homo sapien
agctaggccgaagttatccaaaactgaggagtc

SEQ ID NO: 789631 - DNA, 33 bp, Homo sapien
atgtcatcagtcatcactcaaatttcttagctc

SEQ ID NO: 789632 - DNA, 33 bp, Homo sapien
atgtcatcagtcatcagtcaaatttcttagctc

SEQ ID NO: 789633 - DNA, 33 bp, Homo sapien
tttgctcagtagaaaacgatgtactttagacac

SEQ ID NO: 789634 - DNA, 33 bp, Homo sapien
tttgctcagtagaaaaggatgtactttagacac

SEQ ID NO: 789635 - DNA, 33 bp, Homo sapien
aatacgaagacactgaacatactcttggtgtgg

SEQ ID NO: 789636 - DNA, 33 bp, Homo sapien
aatacgaagacactgagcatactcttggtgtgg

SEQ ID NO: 789637 - DNA, 33 bp, Homo sapien
accataattttcaaaagttcctcacatcttaca

SEQ ID NO: 789638 - DNA, 33 bp, Homo sapien
accataattttcaaaatttcctcacatcttaca

SEQ ID NO: 789639 - DNA, 33 bp, Homo sapien
ggcttattaggaaccaggccatacagcgggagg

SEQ ID NO: 789640 - DNA, 33 bp, Homo sapien
ggcttattaggaaccatgccatacagcgggagg

SEQ ID NO: 789641 - DNA, 33 bp, Homo sapien
ctggtgagaggcttcaaagtcttttacacacac

SEQ ID NO: 789642 - DNA, 33 bp, Homo sapien
ctggtgagaggcttcatagtcttttacacacac

SEQ ID NO: 789643 - DNA, 33 bp, Homo sapien
tataaatacttgtcaaagctgagcacatgatcc

SEQ ID NO: 789644 - DNA, 33 bp, Homo sapien
tataaatacttgtcaaggctgagcacatgatcc

SEQ ID NO: 789645 - DNA, 33 bp, Homo sapien
gtgtgtggcttcagaacgtttccctactgagat

SEQ ID NO: 789646 - DNA, 33 bp, Homo sapien
gtgtgtggcttcagaatgtttccctactgagat

SEQ ID NO: 789647 - DNA, 33 bp, Homo sapien
gtaaaatatttttgagcatgttcttcaaatata

SEQ ID NO: 789648 - DNA, 33 bp, Homo sapien
gtaaaatatttttgaggatgttcttcaaatata

SEQ ID NO: 789649 - DNA, 33 bp, Homo sapien
tccctggcttttccaggaattctgggtgcatgt

SEQ ID NO: 789650 - DNA, 33 bp, Homo sapien
tccctggcttttccagtaattctgggtgcatgt

SEQ ID NO: 789651 - DNA, 33 bp, Homo sapien
agccacgaagagctcacgtcaggcgggaagagc

SEQ ID NO: 789652 - DNA, 33 bp, Homo sapien
agccacgaagagctcatgtcaggcgggaagagc

SEQ ID NO: 789653 - DNA, 33 bp, Homo sapien
tggtagtttgagaaaacaaagtcaattttttgc

SEQ ID NO: 789654 - DNA, 33 bp, Homo sapien
tggtagtttgagaaaagaaagtcaattttttgc

SEQ ID NO: 789655 - DNA, 33 bp, Homo sapien
catatattacagccatcaagtagttttctttat

SEQ ID NO: 789656 - DNA, 33 bp, Homo sapien
catatattacagccatgaagtagttttctttat

SEQ ID NO: 789657 - DNA, 33 bp, Homo sapien
atagctccacttatgcacctatttttgttcaac

SEQ ID NO: 789658 - DNA, 33 bp, Homo sapien
atagctccacttatgcgcctatttttgttcaac

SEQ ID NO: 789659 - DNA, 33 bp, Homo sapien
atttgtcaattacaaaagcaataaacaattgct

SEQ ID NO: 789660 - DNA, 33 bp, Homo sapien
atttgtcaattacaaacgcaataaacaattgct

SEQ ID NO: 789661 - DNA, 33 bp, Homo sapien
acatgtgttaaccacaaatgggatttaacaatg

SEQ ID NO: 789662 - DNA, 33 bp, Homo sapien
acatgtgttaaccacagatgggatttaacaatg

SEQ ID NO: 789663 - DNA, 33 bp, Homo sapien
gagctccttagatgaccgagcaaaactggacca

SEQ ID NO: 789664 - DNA, 33 bp, Homo sapien
gagctccttagatgactgagcaaaactggacca

SEQ ID NO: 789665 - DNA, 33 bp, Homo sapien
actgtatggctggtatcaatggcacttgggaat

SEQ ID NO: 789666 - DNA, 33 bp, Homo sapien
actgtatggctggtatgaatggcacttgggaat

SEQ ID NO: 789667 - DNA, 33 bp, Homo sapien
gtgccatcagaggtagaagtacccattcatagg

SEQ ID NO: 789668 - DNA, 33 bp, Homo sapien
gtgccatcagaggtagcagtacccattcatagg

SEQ ID NO: 789669 - DNA, 33 bp, Homo sapien
gttttctgcttgtgtggagatactcagggacag

SEQ ID NO: 789670 - DNA, 33 bp, Homo sapien
gttttctgcttgtgtgtagatactcagggacag

SEQ ID NO: 789671 - DNA, 33 bp, Homo sapien
gggaatatgtgattggcacatgaaaggcacatg

SEQ ID NO: 789672 - DNA, 33 bp, Homo sapien
gggaatatgtgattggtacatgaaaggcacatg

SEQ ID NO: 789673 - DNA, 33 bp, Homo sapien
taggactatccccataacaataacggtaaccat

SEQ ID NO: 789674 - DNA, 33 bp, Homo sapien
taggactatccccatagcaataacggtaaccat

SEQ ID NO: 789675 - DNA, 33 bp, Homo sapien
ccattacaagtggacactggaacatggactctg

SEQ ID NO: 789676 - DNA, 33 bp, Homo sapien
ccattacaagtggacattggaacatggactctg

SEQ ID NO: 789677 - DNA, 33 bp, Homo sapien
aactagtgatttttcacggcaaatggaccaaac

SEQ ID NO: 789678 - DNA, 33 bp, Homo sapien
aactagtgatttttcatggcaaatggaccaaac

SEQ ID NO: 789679 - DNA, 33 bp, Homo sapien
gaattttccatactcaaaatgaaggagggatgc

SEQ ID NO: 789680 - DNA, 33 bp, Homo sapien
gaattttccatactcacaatgaaggagggatgc

SEQ ID NO: 789681 - DNA, 33 bp, Homo sapien
agtgtaatacaggtgacgcagtataatgtcatg

SEQ ID NO: 789682 - DNA, 33 bp, Homo sapien
agtgtaatacaggtgatgcagtataatgtcatg

SEQ ID NO: 789683 - DNA, 33 bp, Homo sapien
atgcattgcttaacagaaatatgttgtgagaaa

SEQ ID NO: 789684 - DNA, 33 bp, Homo sapien
atgcattgcttaacaggaatatgttgtgagaaa

SEQ ID NO: 789685 - DNA, 33 bp, Homo sapien
cggcaacctgagcagactaatgtaagcaccaac

SEQ ID NO: 789686 - DNA, 33 bp, Homo sapien
cggcaacctgagcagagtaatgtaagcaccaac

SEQ ID NO: 789687 - DNA, 33 bp, Homo sapien
tgacttcatagacttacaggcagaaggaaatca

SEQ ID NO: 789688 - DNA, 33 bp, Homo sapien
tgacttcatagacttataggcagaaggaaatca

SEQ ID NO: 789689 - DNA, 33 bp, Homo sapien
tctgtggtattagttgcaatgcctcttttgtgt

SEQ ID NO: 789690 - DNA, 33 bp, Homo sapien
tctgtggtattagttgtaatgcctcttttgtgt

SEQ ID NO: 789691 - DNA, 33 bp, Homo sapien
cctgacacgtccatccaactgctgtgtccggtt

SEQ ID NO: 789692 - DNA, 33 bp, Homo sapien
cctgacacgtccatcctactgctgtgtccggtt

SEQ ID NO: 789693 - DNA, 33 bp, Homo sapien
aaactccattttgtggaacttcagcttgttggg

SEQ ID NO: 789694 - DNA, 33 bp, Homo sapien
aaactccattttgtggtacttcagcttgttggg

SEQ ID NO: 789695 - DNA, 33 bp, Homo sapien
gaggaagcattacagacagaagagtaaggtgtg

SEQ ID NO: 789696 - DNA, 33 bp, Homo sapien
gaggaagcattacagagagaagagtaaggtgtg

SEQ ID NO: 789697 - DNA, 33 bp, Homo sapien
gaaggtgactttattcaaaagcttagtttaggg

SEQ ID NO: 789698 - DNA, 33 bp, Homo sapien
gaaggtgactttattccaaagcttagtttaggg

SEQ ID NO: 789699 - DNA, 33 bp, Homo sapien
tatcaaggtgtggtaccaaagcctggggcatac

SEQ ID NO: 789700 - DNA, 33 bp, Homo sapien
tatcaaggtgtggtactaaagcctggggcatac

SEQ ID NO: 789701 - DNA, 33 bp, Homo sapien
gagacaagtactcttaacacaaaagcaaaacaa

SEQ ID NO: 789702 - DNA, 33 bp, Homo sapien
gagacaagtactcttaccacaaaagcaaaacaa

SEQ ID NO: 789703 - DNA, 33 bp, Homo sapien
tccctctttcacctgacagttcttctaatatct

SEQ ID NO: 789704 - DNA, 33 bp, Homo sapien
tccctctttcacctgagagttcttctaatatct

SEQ ID NO: 789705 - DNA, 33 bp, Homo sapien
caaacacagcattgaacagcgtttagattagat

SEQ ID NO: 789706 - DNA, 33 bp, Homo sapien
caaacacagcattgaagagcgtttagattagat

SEQ ID NO: 789707 - DNA, 33 bp, Homo sapien
tccatcactaaataaaattctctaccttcacca

SEQ ID NO: 789708 - DNA, 33 bp, Homo sapien
tccatcactaaataaagttctctaccttcacca

SEQ ID NO: 789709 - DNA, 33 bp, Homo sapien
tttttcaagctcacaaactactggtcttgagta

SEQ ID NO: 789710 - DNA, 33 bp, Homo sapien
tttttcaagctcacaagctactggtcttgagta

SEQ ID NO: 789711 - DNA, 33 bp, Homo sapien
taaaagcctgacaatcaattgtaaaataaatct

SEQ ID NO: 789712 - DNA, 33 bp, Homo sapien
taaaagcctgacaatcgattgtaaaataaatct

SEQ ID NO: 789713 - DNA, 33 bp, Homo sapien
aacaaatactgggatgcacataaccagtgtaac

SEQ ID NO: 789714 - DNA, 33 bp, Homo sapien
aacaaatactgggatggacataaccagtgtaac

SEQ ID NO: 789715 - DNA, 33 bp, Homo sapien
tatcacaaatgtataaagaaacttgagttatta

SEQ ID NO: 789716 - DNA, 33 bp, Homo sapien
tatcacaaatgtataaggaaacttgagttatta

SEQ ID NO: 789717 - DNA, 33 bp, Homo sapien
gttggaatttccaaaagattatgctcctttcag

SEQ ID NO: 789718 - DNA, 33 bp, Homo sapien
gttggaatttccaaaatattatgctcctttcag

SEQ ID NO: 789719 - DNA, 33 bp, Homo sapien
tgtcttttgaaagttgcagcctattctaaagtt

SEQ ID NO: 789720 - DNA, 33 bp, Homo sapien
tgtcttttgaaagttggagcctattctaaagtt

SEQ ID NO: 789721 - DNA, 33 bp, Homo sapien
ccaagtggttcagatacaatcaattccatccct

SEQ ID NO: 789722 - DNA, 33 bp, Homo sapien
ccaagtggttcagatagaatcaattccatccct

SEQ ID NO: 789723 - DNA, 33 bp, Homo sapien
ccaatgtcaggactaactatagagatggatatt

SEQ ID NO: 789724 - DNA, 33 bp, Homo sapien
ccaatgtcaggactaattatagagatggatatt

SEQ ID NO: 789725 - DNA, 33 bp, Homo sapien
ttaaaatggcacttgaaggactactgtcttggt

SEQ ID NO: 789726 - DNA, 33 bp, Homo sapien
ttaaaatggcacttgagggactactgtcttggt

SEQ ID NO: 789727 - DNA, 33 bp, Homo sapien
tttagggtagtatataagaaaaaaggaccgtct

SEQ ID NO: 789728 - DNA, 33 bp, Homo sapien
tttagggtagtatataggaaaaaaggaccgtct

SEQ ID NO: 789729 - DNA, 33 bp, Homo sapien
gcatcatagtatatcacctcctgtctctcaatg

SEQ ID NO: 789730 - DNA, 33 bp, Homo sapien
gcatcatagtatatcatctcctgtctctcaatg

SEQ ID NO: 789731 - DNA, 33 bp, Homo sapien
agccatgtccagctacaggagtacaagtatggg

SEQ ID NO: 789732 - DNA, 33 bp, Homo sapien
agccatgtccagctacgggagtacaagtatggg

SEQ ID NO: 789733 - DNA, 33 bp, Homo sapien
cctcaaatttcaccaactctgacagtttcacaa

SEQ ID NO: 789734 - DNA, 33 bp, Homo sapien
cctcaaatttcaccaagtctgacagtttcacaa

SEQ ID NO: 789735 - DNA, 33 bp, Homo sapien
cttcacagttttgggcaactcagagaagtccat

SEQ ID NO: 789736 - DNA, 33 bp, Homo sapien
cttcacagttttgggccactcagagaagtccat

SEQ ID NO: 789737 - DNA, 33 bp, Homo sapien
attggatctgccgggtcaaatggcccaagtggc

SEQ ID NO: 789738 - DNA, 33 bp, Homo sapien
attggatctgccgggtgaaatggcccaagtggc

SEQ ID NO: 789739 - DNA, 33 bp, Homo sapien; identical to SEQ ID NO: 789737

SEQ ID NO: 789740 - DNA, 33 bp, Homo sapien; identical to SEQ ID NO: 789738

SEQ ID NO: 789741 - DNA, 33 bp, Homo sapien
ttagcagttagtacaaaccccatattggctccc

SEQ ID NO: 789742 - DNA, 33 bp, Homo sapien
ttagcagttagtacaacccccatattggctccc

SEQ ID NO: 789743 - DNA, 33 bp, Homo sapien
agatcatcttgttgaactgaatcacttaccatt

SEQ ID NO: 789744 - DNA, 33 bp, Homo sapien
agatcatcttgttgaattgaatcacttaccatt

SEQ ID NO: 789745 - DNA, 33 bp, Homo sapien
ccatgaacataaatccaattttccaggttttca

SEQ ID NO: 789746 - DNA, 33 bp, Homo sapien
ccatgaacataaatccgattttccaggttttca

SEQ ID NO: 789747 - DNA, 33 bp, Homo sapien
tctcaacataggtcaacggcttcacacacaaca

SEQ ID NO: 789748 - DNA, 33 bp, Homo sapien
tctcaacataggtcaatggcttcacacacaaca

SEQ ID NO: 789749 - DNA, 33 bp, Homo sapien
agctatgtcatctcaaacttgtgtgtctcctgg

SEQ ID NO: 789750 - DNA, 33 bp, Homo sapien
agctatgtcatctcaaccttgtgtgtctcctgg

SEQ ID NO: 789751 - DNA, 33 bp, Homo sapien
cctcttaccctccacactgaagtaggctccaat

SEQ ID NO: 789752 - DNA, 33 bp, Homo sapien
cctcttaccctccacagtgaagtaggctccaat

SEQ ID NO: 789753 - DNA, 33 bp, Homo sapien
atcccagaaataaggccacaaacctacttgaca

SEQ ID NO: 789754 - DNA, 33 bp, Homo sapien
atcccagaaataaggctacaaacctacttgaca

SEQ ID NO: 789755 - DNA, 33 bp, Homo sapien
acaattaatcacagacacataggcttccttttt

SEQ ID NO: 789756 - DNA, 33 bp, Homo sapien
acaattaatcacagacgcataggcttccttttt

SEQ ID NO: 789757 - DNA, 33 bp, Homo sapien
tttattggttaacatcaatggcccaggtctaat

SEQ ID NO: 789758 - DNA, 33 bp, Homo sapien
tttattggttaacatcgatggcccaggtctaat

SEQ ID NO: 789759 - DNA, 33 bp, Homo sapien
cactttgcaacatttgaacaatgatgaagtcac

SEQ ID NO: 789760 - DNA, 33 bp, Homo sapien
cactttgcaacatttggacaatgatgaagtcac

SEQ ID NO: 789761 - DNA, 33 bp, Homo sapien
caaaatataagtggacacttctcctgaggcttt

SEQ ID NO: 789762 - DNA, 33 bp, Homo sapien
caaaatataagtggacgcttctcctgaggcttt

SEQ ID NO: 789763 - DNA, 33 bp, Homo sapien
gttagtggttatgttaagctacacaatttgaga

SEQ ID NO: 789764 - DNA, 33 bp, Homo sapien
gttagtggttatgttaggctacacaatttgaga

SEQ ID NO: 789765 - DNA, 33 bp, Homo sapien
gataagggaattgctacgtatttcattttttaa

SEQ ID NO: 789766 - DNA, 33 bp, Homo sapien
gataagggaattgctaggtatttcattttttaa

SEQ ID NO: 789767 - DNA, 33 bp, Homo sapien
cagctttaatataatgaatttgtgggtccttca

SEQ ID NO: 789768 - DNA, 33 bp, Homo sapien
cagctttaatataatgcatttgtgggtccttca

SEQ ID NO: 789769 - DNA, 33 bp, Homo sapien
ctaaccagaagacacactatttagatgaagagt

SEQ ID NO: 789770 - DNA, 33 bp, Homo sapien
ctaaccagaagacacagtatttagatgaagagt

SEQ ID NO: 789771 - DNA, 33 bp, Homo sapien
ttcggacccagattcaaaacaggaactggaatg

SEQ ID NO: 789772 - DNA, 33 bp, Homo sapien
ttcggacccagattcagaacaggaactggaatg

SEQ ID NO: 789773 - DNA, 33 bp, Homo sapien
tttaagacaagttgaacacaagtggaattgtta

SEQ ID NO: 789774 - DNA, 33 bp, Homo sapien
tttaagacaagttgaatacaagtggaattgtta

SEQ ID NO: 789775 - DNA, 33 bp, Homo sapien
aacttgcatttgttcaaagcactaaatcaatta

SEQ ID NO: 789776 - DNA, 33 bp, Homo sapien
aacttgcatttgttcagagcactaaatcaatta

SEQ ID NO: 789777 - DNA, 33 bp, Homo sapien
ctcataaaacaatctgatttccttaccaaccca

SEQ ID NO: 789778 - DNA, 33 bp, Homo sapien
ctcataaaacaatctgctttccttaccaaccca

SEQ ID NO: 789779 - DNA, 33 bp, Homo sapien
ttattgcactctcatagagcttttggtgttcta

SEQ ID NO: 789780 - DNA, 33 bp, Homo sapien
ttattgcactctcatatagcttttggtgttcta

SEQ ID NO: 789781 - DNA, 33 bp, Homo sapien
gtggggcatgggcacaagattacatattcatac

SEQ ID NO: 789782 - DNA, 33 bp, Homo sapien
gtggggcatgggcacaggattacatattcatac

SEQ ID NO: 789783 - DNA, 33 bp, Homo sapien
acttttttctttaacaaggtgtccagacctcca

SEQ ID NO: 789784 - DNA, 33 bp, Homo sapien
acttttttctttaacagggtgtccagacctcca

SEQ ID NO: 789785 - DNA, 33 bp, Homo sapien
acaagtgtcaaacccaatctggcttctcatgaa

SEQ ID NO: 789786 - DNA, 33 bp, Homo sapien
acaagtgtcaaacccattctggcttctcatgaa

SEQ ID NO: 789787 - DNA, 33 bp, Homo sapien
ctaaccacagaagaaaggtctattaataattta

SEQ ID NO: 789788 - DNA, 33 bp, Homo sapien
ctaaccacagaagaaatgtctattaataattta

SEQ ID NO: 789789 - DNA, 33 bp, Homo sapien
cactttgcgggatacaagaactcacatgcatct

SEQ ID NO: 789790 - DNA, 33 bp, Homo sapien
cactttgcgggatacaggaactcacatgcatct

SEQ ID NO: 789791 - DNA, 33 bp, Homo sapien
agtgtgaatgtgtaaaagttcaacccccttgtc

SEQ ID NO: 789792 - DNA, 33 bp, Homo sapien
agtgtgaatgtgtaaaggttcaacccccttgtc

SEQ ID NO: 789793 - DNA, 33 bp, Homo sapien
catgtttgcagagatgaatgttgttttctctat

SEQ ID NO: 789794 - DNA, 33 bp, Homo sapien
catgtttgcagagatgcatgttgttttctctat

SEQ ID NO: 789795 - DNA, 33 bp, Homo sapien
taatggatctttacaaaaacttggcttccacca

SEQ ID NO: 789796 - DNA, 33 bp, Homo sapien
taatggatctttacaataacttggcttccacca

SEQ ID NO: 789797 - DNA, 33 bp, Homo sapien
gtataaaagcaaaatcaataaagctgctagaaa

SEQ ID NO: 789798 - DNA, 33 bp, Homo sapien
gtataaaagcaaaatcgataaagctgctagaaa

SEQ ID NO: 789799 - DNA, 33 bp, Homo sapien
catctcccagggtatacagagcggcatggaatt

SEQ ID NO: 789800 - DNA, 33 bp, Homo sapien
catctcccagggtatagagagcggcatggaatt

SEQ ID NO: 789801 - DNA, 33 bp, Homo sapien
ttatttgaagattaacaggatactgtcaaggta

SEQ ID NO: 789802 - DNA, 33 bp, Homo sapien
ttatttgaagattaacgggatactgtcaaggta

SEQ ID NO: 789803 - DNA, 33 bp, Homo sapien
cattgtagtagtgggcacgtaaggaataagtgg

SEQ ID NO: 789804 - DNA, 33 bp, Homo sapien
cattgtagtagtgggcgcgtaaggaataagtgg

SEQ ID NO: 789805 - DNA, 33 bp, Homo sapien
ttgtctttttgcattcgatctatactatccacc

SEQ ID NO: 789806 - DNA, 33 bp, Homo sapien
ttgtctttttgcattctatctatactatccacc

SEQ ID NO: 789807 - DNA, 33 bp, Homo sapien
aggtctcttttggggacgtgtgttttgaggcaa

SEQ ID NO: 789808 - DNA, 33 bp, Homo sapien
aggtctcttttggggatgtgtgttttgaggcaa

SEQ ID NO: 789809 - DNA, 33 bp, Homo sapien
tgttacaaagtactccgctatgaccctatccta

SEQ ID NO: 789810 - DNA, 33 bp, Homo sapien
tgttacaaagtactcctctatgaccctatccta

SEQ ID NO: 789811 - DNA, 33 bp, Homo sapien
ctgctagaatcaaacaccatcagtaggataact

SEQ ID NO: 789812 - DNA, 33 bp, Homo sapien
ctgctagaatcaaacagcatcagtaggataact

SEQ ID NO: 789813 - DNA, 33 bp, Homo sapien
agaaacttcttcacaactagtcatcaaaacctg

SEQ ID NO: 789814 - DNA, 33 bp, Homo sapien
agaaacttcttcacaagtagtcatcaaaacctg

SEQ ID NO: 789815 - DNA, 33 bp, Homo sapien
ataaagctctaaatgtaaaaaatttcttctgaa

SEQ ID NO: 789816 - DNA, 33 bp, Homo sapien
ataaagctctaaatgttaaaaatttcttctgaa

SEQ ID NO: 789817 - DNA, 33 bp, Homo sapien
acttcctctacctttactaaaaatgaagatgcc

SEQ ID NO: 789818 - DNA, 33 bp, Homo sapien
acttcctctacctttattaaaaatgaagatgcc

SEQ ID NO: 789819 - DNA, 33 bp, Homo sapien
ggtacacaggataacacagatttccaaaaagct

SEQ ID NO: 789820 - DNA, 33 bp, Homo sapien
ggtacacaggataacatagatttccaaaaagct

SEQ ID NO: 789821 - DNA, 33 bp, Homo sapien
tcctcactgtaggactcaactcacaggagctgt

SEQ ID NO: 789822 - DNA, 33 bp, Homo sapien
tcctcactgtaggacttaactcacaggagctgt

SEQ ID NO: 789823 - DNA, 33 bp, Homo sapien
caggaaaagcacggaccatgtgaaaatcaactc

SEQ ID NO: 789824 - DNA, 33 bp, Homo sapien
caggaaaagcacggactatgtgaaaatcaactc

SEQ ID NO: 789825 - DNA, 33 bp, Homo sapien
actcactctccacttacagtgagctttaggaca

SEQ ID NO: 789826 - DNA, 33 bp, Homo sapien
actcactctccacttatagtgagctttaggaca

SEQ ID NO: 789827 - DNA, 33 bp, Homo sapien
catgatattggacttacaagtgactcaatcttg

SEQ ID NO: 789828 - DNA, 33 bp, Homo sapien
catgatattggacttagaagtgactcaatcttg

SEQ ID NO: 789829 - DNA, 33 bp, Homo sapien
caaattagacacaccacactttgatcaagcttt

SEQ ID NO: 789830 - DNA, 33 bp, Homo sapien
caaattagacacaccatactttgatcaagcttt

SEQ ID NO: 789831 - DNA, 33 bp, Homo sapien
agaatcagtactctcagaatgtgccaaacacat

SEQ ID NO: 789832 - DNA, 33 bp, Homo sapien
agaatcagtactctcataatgtgccaaacacat

SEQ ID NO: 789833 - DNA, 33 bp, Homo sapien
ccctccacttaatcaagaatcaatgctattcca

SEQ ID NO: 789834 - DNA, 33 bp, Homo sapien
ccctccacttaatcaataatcaatgctattcca

SEQ ID NO: 789835 - DNA, 33 bp, Homo sapien
actgttctaaacactacacggtaactcattcta

SEQ ID NO: 789836 - DNA, 33 bp, Homo sapien
actgttctaaacactatacggtaactcattcta

SEQ ID NO: 789837 - DNA, 33 bp, Homo sapien
tccaggacctcacaacaaattaagcagcagagt

SEQ ID NO: 789838 - DNA, 33 bp, Homo sapien
tccaggacctcacaacgaattaagcagcagagt

SEQ ID NO: 789839 - DNA, 33 bp, Homo sapien
tttgagactctaaaaaatattatgaatgagtca

SEQ ID NO: 789840 - DNA, 33 bp, Homo sapien
tttgagactctaaaaagtattatgaatgagtca

SEQ ID NO: 789841 - DNA, 33 bp, Homo sapien
ctggttgtactgaaaacattgtgggttgtaaat

SEQ ID NO: 789842 - DNA, 33 bp, Homo sapien
ctggttgtactgaaaatattgtgggttgtaaat

SEQ ID NO: 789843 - DNA, 33 bp, Homo sapien
aaaaaatgcttccatcaaacaacaattgaaaac

SEQ ID NO: 789844 - DNA, 33 bp, Homo sapien
aaaaaatgcttccatcgaacaacaattgaaaac

SEQ ID NO: 789845 - DNA, 33 bp, Homo sapien
gttttctttgttaatgacacccaatgccttctt

SEQ ID NO: 789846 - DNA, 33 bp, Homo sapien
gttttctttgttaatggcacccaatgccttctt

SEQ ID NO: 789847 - DNA, 33 bp, Homo sapien
taagtcaaaccaaggccctaatatgagagacct

SEQ ID NO: 789848 - DNA, 33 bp, Homo sapien
taagtcaaaccaaggctctaatatgagagacct

SEQ ID NO: 789849 - DNA, 33 bp, Homo sapien
attgccttttaagaaagggaatggttagagaag

SEQ ID NO: 789850 - DNA, 33 bp, Homo sapien
attgccttttaagaaatggaatggttagagaag

SEQ ID NO: 789851 - DNA, 33 bp, Homo sapien
ctcttgaggtgagagacattaattgccttttaa

SEQ ID NO: 789852 - DNA, 33 bp, Homo sapien
ctcttgaggtgagagatattaattgccttttaa

SEQ ID NO: 789853 - DNA, 33 bp, Homo sapien
aaaagcagaattgaagaaaccatctatttgatt

SEQ ID NO: 789854 - DNA, 33 bp, Homo sapien
aaaagcagaattgaaggaaccatctatttgatt

SEQ ID NO: 789855 - DNA, 33 bp, Homo sapien
cttttaatgtaactcaaagctgaaaggacaaac

SEQ ID NO: 789856 - DNA, 33 bp, Homo sapien
cttttaatgtaactcagagctgaaaggacaaac

SEQ ID NO: 789857 - DNA, 33 bp, Homo sapien
tgattcctgcctccaccaagactcaaatagggg

SEQ ID NO: 789858 - DNA, 33 bp, Homo sapien
tgattcctgcctccacgaagactcaaatagggg

SEQ ID NO: 789859 - DNA, 33 bp, Homo sapien
atggattcttggcaacgactatacttttttcat

SEQ ID NO: 789860 - DNA, 33 bp, Homo sapien
atggattcttggcaactactatacttttttcat

SEQ ID NO: 789861 - DNA, 33 bp, Homo sapien
cctgttcacataaataagtttttggaaagttct

SEQ ID NO: 789862 - DNA, 33 bp, Homo sapien
cctgttcacataaatacgtttttggaaagttct

SEQ ID NO: 789863 - DNA, 33 bp, Homo sapien
cctaactgctgtctccaaaggtaatcactcttg

SEQ ID NO: 789864 - DNA, 33 bp, Homo sapien
cctaactgctgtctccgaaggtaatcactcttg

SEQ ID NO: 789865 - DNA, 33 bp, Homo sapien
atttcctgaccttacgaatcttgttgaggtcaa

SEQ ID NO: 789866 - DNA, 33 bp, Homo sapien
atttcctgaccttacgtatcttgttgaggtcaa

SEQ ID NO: 789867 - DNA, 33 bp, Homo sapien
tggagttggtagcctccagctgctgtcactcat

SEQ ID NO: 789868 - DNA, 33 bp, Homo sapien
tggagttggtagcctctagctgctgtcactcat

SEQ ID NO: 789869 - DNA, 33 bp, Homo sapien
gagagagagagactgcaactcatacggtgtgtg

SEQ ID NO: 789870 - DNA, 33 bp, Homo sapien
gagagagagagactgcgactcatacggtgtgtg

SEQ ID NO: 789871 - DNA, 33 bp, Homo sapien
agatcccatttggaagcaactagcatacaaagc

SEQ ID NO: 789872 - DNA, 33 bp, Homo sapien
agatcccatttggaagtaactagcatacaaagc

SEQ ID NO: 789873 - DNA, 33 bp, Homo sapien
aactcagttttaattcaagaatctatgcttggg

SEQ ID NO: 789874 - DNA, 33 bp, Homo sapien
aactcagttttaattcgagaatctatgcttggg

SEQ ID NO: 789875 - DNA, 33 bp, Homo sapien
gaatgatctatactcaaagtttgacttctgtca

SEQ ID NO: 789876 - DNA, 33 bp, Homo sapien
gaatgatctatactcacagtttgacttctgtca

SEQ ID NO: 789877 - DNA, 33 bp, Homo sapien
ggatttctgtggctaaaacttgtattgactgct

SEQ ID NO: 789878 - DNA, 33 bp, Homo sapien
ggatttctgtggctaagacttgtattgactgct

SEQ ID NO: 789879 - DNA, 33 bp, Homo sapien
gtatcagctaaccacaaaagtgggctacaataa

SEQ ID NO: 789880 - DNA, 33 bp, Homo sapien
gtatcagctaaccacagaagtgggctacaataa

SEQ ID NO: 789881 - DNA, 33 bp, Homo sapien
gaagagaattctgttaccgggtgaataattaaa

SEQ ID NO: 789882 - DNA, 33 bp, Homo sapien
gaagagaattctgttatcgggtgaataattaaa

SEQ ID NO: 789883 - DNA, 33 bp, Homo sapien
gagtggtaatgctgaaactttgtctttagagtg

SEQ ID NO: 789884 - DNA, 33 bp, Homo sapien
gagtggtaatgctgaagctttgtctttagagtg

SEQ ID NO: 789885 - DNA, 33 bp, Homo sapien
tcacatccttcctctacgggaaaccttcaaagg

SEQ ID NO: 789886 - DNA, 33 bp, Homo sapien
tcacatccttcctctatgggaaaccttcaaagg

SEQ ID NO: 789887 - DNA, 33 bp, Homo sapien
gtacaaggaataaataaatagcttgtttgggaa

SEQ ID NO: 789888 - DNA, 33 bp, Homo sapien
gtacaaggaataaatacatagcttgtttgggaa

SEQ ID NO: 789889 - DNA, 33 bp, Homo sapien
agtggcaaagatcataagggcgaagacgacgac

SEQ ID NO: 789890 - DNA, 33 bp, Homo sapien
agtggcaaagatcataggggcgaagacgacgac

SEQ ID NO: 789891 - DNA, 33 bp, Homo sapien
cagaaatattctgtaacatgcagtccaatagag

SEQ ID NO: 789892 - DNA, 33 bp, Homo sapien
cagaaatattctgtaatatgcagtccaatagag

SEQ ID NO: 789893 - DNA, 33 bp, Homo sapien
aaacccaaaatgagtcaaaggaaagatataata

SEQ ID NO: 789894 - DNA, 33 bp, Homo sapien
aaacccaaaatgagtcgaaggaaagatataata

SEQ ID NO: 789895 - DNA, 33 bp, Homo sapien
aaatacaaggagcaataaaatgagaagttggtt

SEQ ID NO: 789896 - DNA, 33 bp, Homo sapien
aaatacaaggagcaatgaaatgagaagttggtt

SEQ ID NO: 789897 - DNA, 33 bp, Homo sapien
actgagagatcttagaactggaaacaaagccat

SEQ ID NO: 789898 - DNA, 33 bp, Homo sapien
actgagagatcttagagctggaaacaaagccat

SEQ ID NO: 789899 - DNA, 33 bp, Homo sapien
gggaagttcagtcttccagttggtcattcctat

SEQ ID NO: 789900 - DNA, 33 bp, Homo sapien
gggaagttcagtcttctagttggtcattcctat

SEQ ID NO: 789901 - DNA, 33 bp, Homo sapien
agatccagagaatcacagcacaaacctctgagg

SEQ ID NO: 789902 - DNA, 33 bp, Homo sapien
agatccagagaatcacggcacaaacctctgagg

SEQ ID NO: 789903 - DNA, 33 bp, Homo sapien
aatccccttgcaatcacagaaaaaggatcaccc

SEQ ID NO: 789904 - DNA, 33 bp, Homo sapien
aatccccttgcaatcatagaaaaaggatcaccc

SEQ ID NO: 789905 - DNA, 33 bp, Homo sapien
agtttagaatatgaaaaaactcacttcctgctt

SEQ ID NO: 789906 - DNA, 33 bp, Homo sapien
agtttagaatatgaaacaactcacttcctgctt

SEQ ID NO: 789907 - DNA, 33 bp, Homo sapien
actaacttaatcttcacacaaattgggaagaga

SEQ ID NO: 789908 - DNA, 33 bp, Homo sapien
actaacttaatcttcatacaaattgggaagaga

SEQ ID NO: 789909 - DNA, 33 bp, Homo sapien
attaatgaaatgaaacaagaacagaagtgtaga

SEQ ID NO: 789910 - DNA, 33 bp, Homo sapien
attaatgaaatgaaacgagaacagaagtgtaga

SEQ ID NO: 789911 - DNA, 33 bp, Homo sapien; identical to SEQ ID NO: 789909

SEQ ID NO: 789912 - DNA, 33 bp, Homo sapien; identical to SEQ ID NO: 789910

SEQ ID NO: 789913 - DNA, 33 bp, Homo sapien
tatggaggctgatagcacttcactcttactaac

SEQ ID NO: 789914 - DNA, 33 bp, Homo sapien
tatggaggctgatagcgcttcactcttactaac

SEQ ID NO: 789915 - DNA, 33 bp, Homo sapien
gccagtcagttccatgaaagttttaacagtact

SEQ ID NO: 789916 - DNA, 33 bp, Homo sapien
gccagtcagttccatggaagttttaacagtact

SEQ ID NO: 789917 - DNA, 33 bp, Homo sapien
tatgctttattctccacccaaatgtcttaattt

SEQ ID NO: 789918 - DNA, 33 bp, Homo sapien
tatgctttattctccatccaaatgtcttaattt

SEQ ID NO: 789919 - DNA, 33 bp, Homo sapien
tctggttccaggtctcgcatgaggttgcactca

SEQ ID NO: 789920 - DNA, 33 bp, Homo sapien
tctggttccaggtctctcatgaggttgcactca

SEQ ID NO: 789921 - DNA, 33 bp, Homo sapien
aaagggattcacaatacgcagcattaagacata

SEQ ID NO: 789922 - DNA, 33 bp, Homo sapien
aaagggattcacaataggcagcattaagacata

SEQ ID NO: 789923 - DNA, 33 bp, Homo sapien
tagtccatgtttgttacgtctcgagctgagctt

SEQ ID NO: 789924 - DNA, 33 bp, Homo sapien
tagtccatgtttgttatgtctcgagctgagctt

SEQ ID NO: 789925 - DNA, 33 bp, Homo sapien
ctctattggagacatgacaaaaatgctgggtga

SEQ ID NO: 789926 - DNA, 33 bp, Homo sapien
ctctattggagacatggcaaaaatgctgggtga

SEQ ID NO: 789927 - DNA, 33 bp, Homo sapien
tacctactaatgaatgaatggataagctaattg

SEQ ID NO: 789928 - DNA, 33 bp, Homo sapien
tacctactaatgaatggatggataagctaattg

SEQ ID NO: 789929 - DNA, 33 bp, Homo sapien
ggtatctgtacccattaaacattttctctccat

SEQ ID NO: 789930 - DNA, 33 bp, Homo sapien
ggtatctgtacccattcaacattttctctccat

SEQ ID NO: 789931 - DNA, 33 bp, Homo sapien
gagagacaggaatatcaaaaaggcgctcctgct

SEQ ID NO: 789932 - DNA, 33 bp, Homo sapien
gagagacaggaatatcgaaaaggcgctcctgct

SEQ ID NO: 789933 - DNA, 33 bp, Homo sapien
tcaatctgtgctacccaaacatgcaaattttac

SEQ ID NO: 789934 - DNA, 33 bp, Homo sapien
tcaatctgtgctacccgaacatgcaaattttac

SEQ ID NO: 789935 - DNA, 33 bp, Homo sapien
ttttcctgccaagccaagttgatacagtttagc

SEQ ID NO: 789936 - DNA, 33 bp, Homo sapien
ttttcctgccaagccaggttgatacagtttagc

SEQ ID NO: 789937 - DNA, 33 bp, Homo sapien
ggccagaacatcagtcaaatctcagtggtctcc

SEQ ID NO: 789938 - DNA, 33 bp, Homo sapien
ggccagaacatcagtcgaatctcagtggtctcc

SEQ ID NO: 789939 - DNA, 33 bp, Homo sapien
cttctatgtattcaaccagctccaagtgtaggt

SEQ ID NO: 789940 - DNA, 33 bp, Homo sapien
cttctatgtattcaactagctccaagtgtaggt

SEQ ID NO: 789941 - DNA, 33 bp, Homo sapien
gctccaatgtaggcaccgcatttacagtctaag

SEQ ID NO: 789942 - DNA, 33 bp, Homo sapien
gctccaatgtaggcactgcatttacagtctaag

SEQ ID NO: 789943 - DNA, 33 bp, Homo sapien
atcctgctggacaggaagaatgaggctcttgcc

SEQ ID NO: 789944 - DNA, 33 bp, Homo sapien
atcctgctggacaggacgaatgaggctcttgcc

SEQ ID NO: 789945 - DNA, 33 bp, Homo sapien
acctgcctgaagtccaactatttccaggtactg

SEQ ID NO: 789946 - DNA, 33 bp, Homo sapien
acctgcctgaagtccagctatttccaggtactg

SEQ ID NO: 789947 - DNA, 33 bp, Homo sapien
tgcagcttccaaagaaagtgatcatggactctg

SEQ ID NO: 789948 - DNA, 33 bp, Homo sapien
tgcagcttccaaagaaggtgatcatggactctg

SEQ ID NO: 789949 - DNA, 33 bp, Homo sapien
cttattagccagtaaaatgtcaactatccttaa

SEQ ID NO: 789950 - DNA, 33 bp, Homo sapien
cttattagccagtaaagtgtcaactatccttaa

SEQ ID NO: 789951 - DNA, 33 bp, Homo sapien
cttcctctaccttctcaactgctgtaccctgtg

SEQ ID NO: 789952 - DNA, 33 bp, Homo sapien
cttcctctaccttctctactgctgtaccctgtg

SEQ ID NO: 789953 - DNA, 33 bp, Homo sapien
taaccaccagaagaaactaaataggctcagatc

SEQ ID NO: 789954 - DNA, 33 bp, Homo sapien
taaccaccagaagaaagtaaataggctcagatc

SEQ ID NO: 789955 - DNA, 33 bp, Homo sapien
tgcaataagccacagagaaagccgtaaggaagg

SEQ ID NO: 789956 - DNA, 33 bp, Homo sapien
tgcaataagccacagataaagccgtaaggaagg

SEQ ID NO: 789957 - DNA, 33 bp, Homo sapien
tcagccagattgaacaaagttccctcatcttta

SEQ ID NO: 789958 - DNA, 33 bp, Homo sapien
tcagccagattgaacagagttccctcatcttta

SEQ ID NO: 789959 - DNA, 33 bp, Homo sapien
aatcacttggaagctacgtgccacctactgacc

SEQ ID NO: 789960 - DNA, 33 bp, Homo sapien
aatcacttggaagctatgtgccacctactgacc

SEQ ID NO: 789961 - DNA, 33 bp, Homo sapien
ggggagagtaagctgacgggatacctctcattt

SEQ ID NO: 789962 - DNA, 33 bp, Homo sapien
ggggagagtaagctgatgggatacctctcattt

SEQ ID NO: 789963 - DNA, 33 bp, Homo sapien
gaagcatgcatgtacaatactaaaaactttttc

SEQ ID NO: 789964 - DNA, 33 bp, Homo sapien
gaagcatgcatgtacagtactaaaaactttttc

SEQ ID NO: 789965 - DNA, 33 bp, Homo sapien
gaaacttcttttgagcgattaggtttggatcat

SEQ ID NO: 789966 - DNA, 33 bp, Homo sapien
gaaacttcttttgagctattaggtttggatcat

SEQ ID NO: 789967 - DNA, 33 bp, Homo sapien
gatgatttaaatggaaaataagactccattggg

SEQ ID NO: 789968 - DNA, 33 bp, Homo sapien
gatgatttaaatggaacataagactccattggg

SEQ ID NO: 789969 - DNA, 33 bp, Homo sapien
aaagtaatttggaagcagcaagtaaggacaata

SEQ ID NO: 789970 - DNA, 33 bp, Homo sapien
aaagtaatttggaagcggcaagtaaggacaata

SEQ ID NO: 789971 - DNA, 33 bp, Homo sapien
cacaggcctaaagtaacctattattctgaagct

SEQ ID NO: 789972 - DNA, 33 bp, Homo sapien
cacaggcctaaagtaatctattattctgaagct

SEQ ID NO: 789973 - DNA, 33 bp, Homo sapien
caagttcacccagctggaaggtagcaattggat

SEQ ID NO: 789974 - DNA, 33 bp, Homo sapien
caagttcacccagctgtaaggtagcaattggat

SEQ ID NO: 789975 - DNA, 33 bp, Homo sapien
cctcatagggttgtgaaaattcaattagttaat

SEQ ID NO: 789976 - DNA, 33 bp, Homo sapien
cctcatagggttgtgagaattcaattagttaat

SEQ ID NO: 789977 - DNA, 33 bp, Homo sapien
tcatcatgaaaaagacgaccttatgttcaggat

SEQ ID NO: 789978 - DNA, 33 bp, Homo sapien
tcatcatgaaaaagactaccttatgttcaggat

SEQ ID NO: 789979 - DNA, 33 bp, Homo sapien
agctgaaactcgtgtccaggcactctaattcca

SEQ ID NO: 789980 - DNA, 33 bp, Homo sapien
agctgaaactcgtgtctaggcactctaattcca

SEQ ID NO: 789981 - DNA, 33 bp, Homo sapien
aaaccattcacacaaagtctatccatatgatcc

SEQ ID NO: 789982 - DNA, 33 bp, Homo sapien
aaaccattcacacaaattctatccatatgatcc

SEQ ID NO: 789983 - DNA, 33 bp, Homo sapien
aagcacaatttagtcaagttacttcttgtgcct

SEQ ID NO: 789984 - DNA, 33 bp, Homo sapien
aagcacaatttagtcaggttacttcttgtgcct

SEQ ID NO: 789985 - DNA, 33 bp, Homo sapien
atgggcttctgccaaaagttgagctactgtctt

SEQ ID NO: 789986 - DNA, 33 bp, Homo sapien
atgggcttctgccaaaggttgagctactgtctt

SEQ ID NO: 789987 - DNA, 33 bp, Homo sapien
agactggcagctggaccaaattttagaatcatt

SEQ ID NO: 789988 - DNA, 33 bp, Homo sapien
agactggcagctggacgaaattttagaatcatt

SEQ ID NO: 789989 - DNA, 33 bp, Homo sapien
tctctagaaggacataacaagaaactgattgct

SEQ ID NO: 789990 - DNA, 33 bp, Homo sapien
tctctagaaggacataccaagaaactgattgct

SEQ ID NO: 789991 - DNA, 33 bp, Homo sapien
tattgatagacaaataggtttctaatctcttgc

SEQ ID NO: 789992 - DNA, 33 bp, Homo sapien
tattgatagacaaatatgtttctaatctcttgc

SEQ ID NO: 789993 - DNA, 33 bp, Homo sapien
tgtaagtgaaatgtaaagtaagaatataagcat

SEQ ID NO: 789994 - DNA, 33 bp, Homo sapien
tgtaagtgaaatgtaacgtaagaatataagcat

SEQ ID NO: 789995 - DNA, 33 bp, Homo sapien
atgtaaaacctcaagtcaaatgtcagaccgcac

SEQ ID NO: 789996 - DNA, 33 bp, Homo sapien
atgtaaaacctcaagtgaaatgtcagaccgcac

SEQ ID NO: 789997 - DNA, 33 bp, Homo sapien; identical to SEQ ID NO: 789995

SEQ ID NO: 789998 - DNA, 33 bp, Homo sapien; identical to SEQ ID NO: 789996

SEQ ID NO: 789999 - DNA, 33 bp, Homo sapien
aagagatggcattgtacagccttttcaaatgat

SEQ ID NO: 790000 - DNA, 33 bp, Homo sapien
aagagatggcattgtagagccttttcaaatgat

SEQ ID NO: 790001 - DNA, 33 bp, Homo sapien
tgagggtggatgagaccgaatcaagccacaaga

SEQ ID NO: 790002 - DNA, 33 bp, Homo sapien
tgagggtggatgagactgaatcaagccacaaga

SEQ ID NO: 790003 - DNA, 33 bp, Homo sapien
taactggcttcagaaacagcatagtgttgggca

SEQ ID NO: 790004 - DNA, 33 bp, Homo sapien
taactggcttcagaaagagcatagtgttgggca

SEQ ID NO: 790005 - DNA, 33 bp, Homo sapien
ataattttttccttacccagacaggctgtgaaa

SEQ ID NO: 790006 - DNA, 33 bp, Homo sapien
ataattttttccttactcagacaggctgtgaaa

SEQ ID NO: 790007 - DNA, 33 bp, Homo sapien
tggcatctgcaggtaactggagcttttggtact

SEQ ID NO: 790008 - DNA, 33 bp, Homo sapien
tggcatctgcaggtaattggagcttttggtact

SEQ ID NO: 790009 - DNA, 33 bp, Homo sapien
ttccctagtccatcccagcattccagcttgttt

SEQ ID NO: 790010 - DNA, 33 bp, Homo sapien
ttccctagtccatcccggcattccagcttgttt

SEQ ID NO: 790011 - DNA, 33 bp, Homo sapien
tcccccaaactcttccactcctgtatgcaacta

SEQ ID NO: 790012 - DNA, 33 bp, Homo sapien
tcccccaaactcttccgctcctgtatgcaacta

SEQ ID NO: 790013 - DNA, 33 bp, Homo sapien
gtggcagtaagctggacgggagaaccacaacca

SEQ ID NO: 790014 - DNA, 33 bp, Homo sapien
gtggcagtaagctggatgggagaaccacaacca

SEQ ID NO: 790015 - DNA, 33 bp, Homo sapien
gacagaggccactaaacctccatagtctctcct

SEQ ID NO: 790016 - DNA, 33 bp, Homo sapien
gacagaggccactaaatctccatagtctctcct

SEQ ID NO: 790017 - DNA, 33 bp, Homo sapien
ttcatttggcgtttaccattaatacttctttgt

SEQ ID NO: 790018 - DNA, 33 bp, Homo sapien
ttcatttggcgtttactattaatacttctttgt

SEQ ID NO: 790019 - DNA, 33 bp, Homo sapien
tgtatgaaaaaccataagggaattgaattattt

SEQ ID NO: 790020 - DNA, 33 bp, Homo sapien
tgtatgaaaaaccatacgggaattgaattattt

SEQ ID NO: 790021 - DNA, 33 bp, Homo sapien
cctctcagtgactgaaccaatagccaatagcca

SEQ ID NO: 790022 - DNA, 33 bp, Homo sapien
cctctcagtgactgaatcaatagccaatagcca

SEQ ID NO: 790023 - DNA, 33 bp, Homo sapien
ttttgcaaaaaaggaggctatagatgatgtggt

SEQ ID NO: 790024 - DNA, 33 bp, Homo sapien
ttttgcaaaaaaggagtctatagatgatgtggt

SEQ ID NO: 790025 - DNA, 33 bp, Homo sapien
gtggttttgaattaggaaagtggttgtggagat

SEQ ID NO: 790026 - DNA, 33 bp, Homo sapien
gtggttttgaattaggtaagtggttgtggagat

SEQ ID NO: 790027 - DNA, 33 bp, Homo sapien
ggacagaagaatggcacggcccggtggcggtgg

SEQ ID NO: 790028 - DNA, 33 bp, Homo sapien
ggacagaagaatggcatggcccggtggcggtgg

SEQ ID NO: 790029 - DNA, 33 bp, Homo sapien
gacccttcacaattctcaacagttttcctagat

SEQ ID NO: 790030 - DNA, 33 bp, Homo sapien
gacccttcacaattctgaacagttttcctagat

SEQ ID NO: 790031 - DNA, 33 bp, Homo sapien
cagctgtgaccaattaccacttcagagagatag

SEQ ID NO: 790032 - DNA, 33 bp, Homo sapien
cagctgtgaccaattatcacttcagagagatag

SEQ ID NO: 790033 - DNA, 33 bp, Homo sapien
acaggaaaagcatgaactggacgagggaaacag

SEQ ID NO: 790034 - DNA, 33 bp, Homo sapien
acaggaaaagcatgaagtggacgagggaaacag

SEQ ID NO: 790035 - DNA, 33 bp, Homo sapien
ttcccacctctccaccaaaactgctgctaaatc

SEQ ID NO: 790036 - DNA, 33 bp, Homo sapien
ttcccacctctccaccgaaactgctgctaaatc

SEQ ID NO: 790037 - DNA, 33 bp, Homo sapien
agtaactgctgaccaactgacagattagtatgt

SEQ ID NO: 790038 - DNA, 33 bp, Homo sapien
agtaactgctgaccaattgacagattagtatgt

SEQ ID NO: 790039 - DNA, 33 bp, Homo sapien
acgagaagaaaatatcaaatttgtgtgtgtctg

SEQ ID NO: 790040 - DNA, 33 bp, Homo sapien
acgagaagaaaatatcgaatttgtgtgtgtctg

SEQ ID NO: 790041 - DNA, 33 bp, Homo sapien
agagtaatgtgaaatacatcacagggcaatttg

SEQ ID NO: 790042 - DNA, 33 bp, Homo sapien
agagtaatgtgaaatatatcacagggcaatttg

SEQ ID NO: 790043 - DNA, 33 bp, Homo sapien
acccaggaaatgccggcacatagcaataattat

SEQ ID NO: 790044 - DNA, 33 bp, Homo sapien
acccaggaaatgccggtacatagcaataattat

SEQ ID NO: 790045 - DNA, 33 bp, Homo sapien
gaggccacccagggaccaaccaccaagtgctga

SEQ ID NO: 790046 - DNA, 33 bp, Homo sapien
gaggccacccagggacgaaccaccaagtgctga

SEQ ID NO: 790047 - DNA, 33 bp, Homo sapien
tagatagcatgctccactaggacagggcccagg

SEQ ID NO: 790048 - DNA, 33 bp, Homo sapien
tagatagcatgctccagtaggacagggcccagg

SEQ ID NO: 790049 - DNA, 33 bp, Homo sapien
gtttcagttcacctccgagggtcctcgacaaat

SEQ ID NO: 790050 - DNA, 33 bp, Homo sapien
gtttcagttcacctcctagggtcctcgacaaat

SEQ ID NO: 790051 - DNA, 33 bp, Homo sapien
cctgaaggtactgtgacggagaccaccaacaga

SEQ ID NO: 790052 - DNA, 33 bp, Homo sapien
cctgaaggtactgtgatggagaccaccaacaga

SEQ ID NO: 790053 - DNA, 33 bp, Homo sapien
ttttggcttcggtgaacaaaaatcgcatatatc

SEQ ID NO: 790054 - DNA, 33 bp, Homo sapien
ttttggcttcggtgaagaaaaatcgcatatatc

SEQ ID NO: 790055 - DNA, 33 bp, Homo sapien
cttactcctatcaaagccttctataagccagcc

SEQ ID NO: 790056 - DNA, 33 bp, Homo sapien
cttactcctatcaaagtcttctataagccagcc

SEQ ID NO: 790057 - DNA, 33 bp, Homo sapien
ggagagttcagactaacgcagagtggaattaaa

SEQ ID NO: 790058 - DNA, 33 bp, Homo sapien
ggagagttcagactaatgcagagtggaattaaa

SEQ ID NO: 790059 - DNA, 33 bp, Homo sapien
aattctaaactgaagacgttggattttgttagc

SEQ ID NO: 790060 - DNA, 33 bp, Homo sapien
aattctaaactgaagatgttggattttgttagc

SEQ ID NO: 790061 - DNA, 33 bp, Homo sapien
attatgggctcttagaggatgtctcccacagtg

SEQ ID NO: 790062 - DNA, 33 bp, Homo sapien
attatgggctcttagatgatgtctcccacagtg

SEQ ID NO: 790063 - DNA, 33 bp, Homo sapien
gacattgttcatactcaataattgtactaaact

SEQ ID NO: 790064 - DNA, 33 bp, Homo sapien
gacattgttcatactctataattgtactaaact

SEQ ID NO: 790065 - DNA, 33 bp, Homo sapien
aaataaactgcttccactcactttcttgtctca

SEQ ID NO: 790066 - DNA, 33 bp, Homo sapien
aaataaactgcttccattcactttcttgtctca

SEQ ID NO: 790067 - DNA, 33 bp, Homo sapien
cattttctctgagttcaatgcttcccatctcca

SEQ ID NO: 790068 - DNA, 33 bp, Homo sapien
cattttctctgagttcgatgcttcccatctcca

SEQ ID NO: 790069 - DNA, 33 bp, Homo sapien
gccaatgatgctacaaggagctttcaacaaaca

SEQ ID NO: 790070 - DNA, 33 bp, Homo sapien
gccaatgatgctacaatgagctttcaacaaaca

SEQ ID NO: 790071 - DNA, 33 bp, Homo sapien
tacccatagtatttctcaagagcagatgacaat

SEQ ID NO: 790072 - DNA, 33 bp, Homo sapien
tacccatagtatttctgaagagcagatgacaat

SEQ ID NO: 790073 - DNA, 33 bp, Homo sapien
gtttggcaaggagcacactgtcgggtgatttcc

SEQ ID NO: 790074 - DNA, 33 bp, Homo sapien
gtttggcaaggagcacgctgtcgggtgatttcc

SEQ ID NO: 790075 - DNA, 33 bp, Homo sapien
ttgaactagagcagaactcattttagcattttc

SEQ ID NO: 790076 - DNA, 33 bp, Homo sapien
ttgaactagagcagaattcattttagcattttc

SEQ ID NO: 790077 - DNA, 33 bp, Homo sapien
gtgtattcattggtaaacaaaacgtattccctg

SEQ ID NO: 790078 - DNA, 33 bp, Homo sapien
gtgtattcattggtaagcaaaacgtattccctg

SEQ ID NO: 790079 - DNA, 33 bp, Homo sapien
acacaggctctggttccagaaaagtgaaggcta

SEQ ID NO: 790080 - DNA, 33 bp, Homo sapien
acacaggctctggttctagaaaagtgaaggcta

SEQ ID NO: 790081 - DNA, 33 bp, Homo sapien
gcaagtgacagaaaacacaaaactggcttaaac

SEQ ID NO: 790082 - DNA, 33 bp, Homo sapien
gcaagtgacagaaaacgcaaaactggcttaaac

SEQ ID NO: 790083 - DNA, 33 bp, Homo sapien
aaaggaatggctaatgaagaaatttccagtctt

SEQ ID NO: 790084 - DNA, 33 bp, Homo sapien
aaaggaatggctaatgtagaaatttccagtctt

SEQ ID NO: 790085 - DNA, 33 bp, Homo sapien
tcaaatctgtaacagaactatttttctacctat

SEQ ID NO: 790086 - DNA, 33 bp, Homo sapien
tcaaatctgtaacagacctatttttctacctat

SEQ ID NO: 790087 - DNA, 33 bp, Homo sapien
aggagaaatggtttggaagtgataattggatgc

SEQ ID NO: 790088 - DNA, 33 bp, Homo sapien
aggagaaatggtttggcagtgataattggatgc

SEQ ID NO: 790089 - DNA, 33 bp, Homo sapien
ttgacccacgtgtctacctttatctatatgtct

SEQ ID NO: 790090 - DNA, 33 bp, Homo sapien
ttgacccacgtgtctatctttatctatatgtct

SEQ ID NO: 790091 - DNA, 33 bp, Homo sapien
cttccctaattaaaacactgtgcacattaaaca

SEQ ID NO: 790092 - DNA, 33 bp, Homo sapien
cttccctaattaaaactctgtgcacattaaaca

SEQ ID NO: 790093 - DNA, 33 bp, Homo sapien
gcatatacatgcaatgaaacatcatttagacct

SEQ ID NO: 790094 - DNA, 33 bp, Homo sapien
gcatatacatgcaatggaacatcatttagacct

SEQ ID NO: 790095 - DNA, 33 bp, Homo sapien
agcagagttagcatcacaaactagatggacata

SEQ ID NO: 790096 - DNA, 33 bp, Homo sapien
agcagagttagcatcagaaactagatggacata

SEQ ID NO: 790097 - DNA, 33 bp, Homo sapien
taaaatagccaagaggcagaaacaacacaaagc

SEQ ID NO: 790098 - DNA, 33 bp, Homo sapien
taaaatagccaagagggagaaacaacacaaagc

SEQ ID NO: 790099 - DNA, 33 bp, Homo sapien
tgtggagatggatctaagggtaagttacattgt

SEQ ID NO: 790100 - DNA, 33 bp, Homo sapien
tgtggagatggatctacgggtaagttacattgt

SEQ ID NO: 790101 - DNA, 33 bp, Homo sapien
gtacccagaaacccaaatgaacaaaaaataaag

SEQ ID NO: 790102 - DNA, 33 bp, Homo sapien
gtacccagaaacccaagtgaacaaaaaataaag

SEQ ID NO: 790103 - DNA, 33 bp, Homo sapien
tactaattcctattcacggaccttatctggacc

SEQ ID NO: 790104 - DNA, 33 bp, Homo sapien
tactaattcctattcatggaccttatctggacc

SEQ ID NO: 790105 - DNA, 33 bp, Homo sapien
ggagtcatcagcaaaaactagagtatgggacac

SEQ ID NO: 790106 - DNA, 33 bp, Homo sapien
ggagtcatcagcaaaatctagagtatgggacac

SEQ ID NO: 790107 - DNA, 33 bp, Homo sapien
ttttttagtcctcatggcaatggtggaaactgt

SEQ ID NO: 790108 - DNA, 33 bp, Homo sapien
ttttttagtcctcatgtcaatggtggaaactgt

SEQ ID NO: 790109 - DNA, 33 bp, Homo sapien
ggattaggctccataagaaaaaggctgaggaaa

SEQ ID NO: 790110 - DNA, 33 bp, Homo sapien
ggattaggctccataataaaaaggctgaggaaa

SEQ ID NO: 790111 - DNA, 33 bp, Homo sapien
ctgtgagactgcagtaaagacttagatgctacc

SEQ ID NO: 790112 - DNA, 33 bp, Homo sapien
ctgtgagactgcagtagagacttagatgctacc

SEQ ID NO: 790113 - DNA, 33 bp, Homo sapien
gctggaatcctctgacaccatcgccataaaata

SEQ ID NO: 790114 - DNA, 33 bp, Homo sapien
gctggaatcctctgacgccatcgccataaaata

SEQ ID NO: 790115 - DNA, 33 bp, Homo sapien
cctgggcaacaagagtaacattcggtctcaaaa

SEQ ID NO: 790116 - DNA, 33 bp, Homo sapien
cctgggcaacaagagtgacattcggtctcaaaa

SEQ ID NO: 790117 - DNA, 33 bp, Homo sapien
ctgacactgaccaaaaataactccaatttactt

SEQ ID NO: 790118 - DNA, 33 bp, Homo sapien
ctgacactgaccaaaagtaactccaatttactt

SEQ ID NO: 790119 - DNA, 33 bp, Homo sapien
cagtctgcctttccacaagcataagcatttaaa

SEQ ID NO: 790120 - DNA, 33 bp, Homo sapien
cagtctgcctttccacgagcataagcatttaaa

SEQ ID NO: 790121 - DNA, 33 bp, Homo sapien
cattattaaacagcccaggcaatgttgggtcca

SEQ ID NO: 790122 - DNA, 33 bp, Homo sapien
cattattaaacagcccgggcaatgttgggtcca

SEQ ID NO: 790123 - DNA, 33 bp, Homo sapien
gtgttgttaaaaaagaatactgtcctctcagat

SEQ ID NO: 790124 - DNA, 33 bp, Homo sapien
gtgttgttaaaaaagattactgtcctctcagat

SEQ ID NO: 790125 - DNA, 33 bp, Homo sapien
aaccccaacatgatcgcacctgaacatgagtca

SEQ ID NO: 790126 - DNA, 33 bp, Homo sapien
aaccccaacatgatcgtacctgaacatgagtca

SEQ ID NO: 790127 - DNA, 33 bp, Homo sapien
taggaatgtgtcataacaaagtaagattggatt

SEQ ID NO: 790128 - DNA, 33 bp, Homo sapien
taggaatgtgtcataataaagtaagattggatt

SEQ ID NO: 790129 - DNA, 33 bp, Homo sapien
ggagagggactgctcaactttttctgtaaaggg

SEQ ID NO: 790130 - DNA, 33 bp, Homo sapien
ggagagggactgctcatctttttctgtaaaggg

SEQ ID NO: 790131 - DNA, 33 bp, Homo sapien
caatccctctactgtacactggatccttcactg

SEQ ID NO: 790132 - DNA, 33 bp, Homo sapien
caatccctctactgtatactggatccttcactg

SEQ ID NO: 790133 - DNA, 33 bp, Homo sapien
tggcagtgaaccagcaaaccgaagagaccatac

SEQ ID NO: 790134 - DNA, 33 bp, Homo sapien
tggcagtgaaccagcataccgaagagaccatac

SEQ ID NO: 790135 - DNA, 33 bp, Homo sapien
tggagaattaaatgaccgtatttttcactggca

SEQ ID NO: 790136 - DNA, 33 bp, Homo sapien
tggagaattaaatgactgtatttttcactggca

SEQ ID NO: 790137 - DNA, 33 bp, Homo sapien
taatatagtaagtaacaattgctctgtgtgcag

SEQ ID NO: 790138 - DNA, 33 bp, Homo sapien
taatatagtaagtaacgattgctctgtgtgcag

SEQ ID NO: 790139 - DNA, 33 bp, Homo sapien
ctcagtctgttcactacgtcattcagagtatgc

SEQ ID NO: 790140 - DNA, 33 bp, Homo sapien
ctcagtctgttcactaggtcattcagagtatgc

SEQ ID NO: 790141 - DNA, 33 bp, Homo sapien
ccaatctttgaaatcaactctttccacagacca

SEQ ID NO: 790142 - DNA, 33 bp, Homo sapien
ccaatctttgaaatcatctctttccacagacca

SEQ ID NO: 790143 - DNA, 33 bp, Homo sapien
tatatatccataattaaccagaactaaaactca

SEQ ID NO: 790144 - DNA, 33 bp, Homo sapien
tatatatccataattacccagaactaaaactca

SEQ ID NO: 790145 - DNA, 33 bp, Homo sapien
aggaaattaaatatagaaagctccatcactcca

SEQ ID NO: 790146 - DNA, 33 bp, Homo sapien
aggaaattaaatataggaagctccatcactcca

SEQ ID NO: 790147 - DNA, 33 bp, Homo sapien
agtccagctcagttacaataaatatctagatct

SEQ ID NO: 790148 - DNA, 33 bp, Homo sapien
agtccagctcagttacgataaatatctagatct

SEQ ID NO: 790149 - DNA, 33 bp, Homo sapien
cagtgtgactgccagaagatgaggcggtactag

SEQ ID NO: 790150 - DNA, 33 bp, Homo sapien
cagtgtgactgccagaggatgaggcggtactag

SEQ ID NO: 790151 - DNA, 33 bp, Homo sapien
atcctattacagcaacaggtcactatcattgct

SEQ ID NO: 790152 - DNA, 33 bp, Homo sapien
atcctattacagcaaccggtcactatcattgct

SEQ ID NO: 790153 - DNA, 33 bp, Homo sapien
cattcaaagtcagtcccgaaaaagagaagtcca

SEQ ID NO: 790154 - DNA, 33 bp, Homo sapien
cattcaaagtcagtcctgaaaaagagaagtcca

SEQ ID NO: 790155 - DNA, 33 bp, Homo sapien
ccatccaaggcaatcaaaaaatgcaaactccct

SEQ ID NO: 790156 - DNA, 33 bp, Homo sapien
ccatccaaggcaatcagaaaatgcaaactccct

SEQ ID NO: 790157 - DNA, 33 bp, Homo sapien
actagactgggtaaaacgcaaaaggctatgtca

SEQ ID NO: 790158 - DNA, 33 bp, Homo sapien
actagactgggtaaaatgcaaaaggctatgtca

SEQ ID NO: 790159 - DNA, 33 bp, Homo sapien
gtcagattcatttttacctaacagtaaattagt

SEQ ID NO: 790160 - DNA, 33 bp, Homo sapien
gtcagattcatttttatctaacagtaaattagt

SEQ ID NO: 790161 - DNA, 33 bp, Homo sapien
tattctggctcctagaaccatctgtgcaggggc

SEQ ID NO: 790162 - DNA, 33 bp, Homo sapien
tattctggctcctagatccatctgtgcaggggc

SEQ ID NO: 790163 - DNA, 33 bp, Homo sapien
ttaggactctggtgaaagtaacaaaaacctaac

SEQ ID NO: 790164 - DNA, 33 bp, Homo sapien
ttaggactctggtgaaggtaacaaaaacctaac

SEQ ID NO: 790165 - DNA, 33 bp, Homo sapien
acatagagaaaatagactacttggttctgaaag

SEQ ID NO: 790166 - DNA, 33 bp, Homo sapien
acatagagaaaatagattacttggttctgaaag

SEQ ID NO: 790167 - DNA, 33 bp, Homo sapien
aatttcagcatttcaacagagcgggctgaggag

SEQ ID NO: 790168 - DNA, 33 bp, Homo sapien
aatttcagcatttcaatagagcgggctgaggag

SEQ ID NO: 790169 - DNA, 33 bp, Homo sapien
ctatgatagtgattaaacaagtgatcaaactgg

SEQ ID NO: 790170 - DNA, 33 bp, Homo sapien
ctatgatagtgattaagcaagtgatcaaactgg

SEQ ID NO: 790171 - DNA, 33 bp, Homo sapien
actaggacttcccaaaaagcctcacctgcacag

SEQ ID NO: 790172 - DNA, 33 bp, Homo sapien
actaggacttcccaaagagcctcacctgcacag

SEQ ID NO: 790173 - DNA, 33 bp, Homo sapien
gaggtcatacttttaacggttctcaattcttca

SEQ ID NO: 790174 - DNA, 33 bp, Homo sapien
gaggtcatacttttaagggttctcaattcttca

SEQ ID NO: 790175 - DNA, 33 bp, Homo sapien
gtaaattgtataatctaaattcctcgtgggcag

SEQ ID NO: 790176 - DNA, 33 bp, Homo sapien
gtaaattgtataatctgaattcctcgtgggcag

SEQ ID NO: 790177 - DNA, 33 bp, Homo sapien
ttaatgtccctgaatacacggcttttaaaagat

SEQ ID NO: 790178 - DNA, 33 bp, Homo sapien
ttaatgtccctgaatatacggcttttaaaagat

SEQ ID NO: 790179 - DNA, 33 bp, Homo sapien
cagaaaatgtcttcagaaacattgcctccctgc

SEQ ID NO: 790180 - DNA, 33 bp, Homo sapien
cagaaaatgtcttcaggaacattgcctccctgc

SEQ ID NO: 790181 - DNA, 33 bp, Homo sapien
tcaaagaaagcaacttaaacttgtactgaacac

SEQ ID NO: 790182 - DNA, 33 bp, Homo sapien
tcaaagaaagcaacttgaacttgtactgaacac

SEQ ID NO: 790183 - DNA, 33 bp, Homo sapien
ttggaaactgatgttacattaggttccaattcg

SEQ ID NO: 790184 - DNA, 33 bp, Homo sapien
ttggaaactgatgttatattaggttccaattcg

SEQ ID NO: 790185 - DNA, 33 bp, Homo sapien
gttttagctgctgtaaaatagctactttgcgtt

SEQ ID NO: 790186 - DNA, 33 bp, Homo sapien
gttttagctgctgtaagatagctactttgcgtt

SEQ ID NO: 790187 - DNA, 33 bp, Homo sapien
cataagccaatgctgcaaagccaaacatggaat

SEQ ID NO: 790188 - DNA, 33 bp, Homo sapien
cataagccaatgctgcgaagccaaacatggaat

SEQ ID NO: 790189 - DNA, 33 bp, Homo sapien
tcattgaagaaatgggcttaaatctgcatttga

SEQ ID NO: 790190 - DNA, 33 bp, Homo sapien
tcattgaagaaatgggtttaaatctgcatttga

SEQ ID NO: 790191 - DNA, 33 bp, Homo sapien
aattactaagaaattccaggccttgtggctgca

SEQ ID NO: 790192 - DNA, 33 bp, Homo sapien
aattactaagaaattctaggccttgtggctgca

SEQ ID NO: 790193 - DNA, 33 bp, Homo sapien
aaggacagaagggaccagaccgctggatgcaac

SEQ ID NO: 790194 - DNA, 33 bp, Homo sapien
aaggacagaagggaccggaccgctggatgcaac

SEQ ID NO: 790195 - DNA, 33 bp, Homo sapien
agaaagggagcagccaatgaagcagaacgaaat

SEQ ID NO: 790196 - DNA, 33 bp, Homo sapien
agaaagggagcagccagtgaagcagaacgaaat

SEQ ID NO: 790197 - DNA, 33 bp, Homo sapien
aatcaaactacagaataacccattaggacacta

SEQ ID NO: 790198 - DNA, 33 bp, Homo sapien
aatcaaactacagaatgacccattaggacacta

SEQ ID NO: 790199 - DNA, 33 bp, Homo sapien
atcacactgaccagacaaggccctcctgccact

SEQ ID NO: 790200 - DNA, 33 bp, Homo sapien
atcacactgaccagacgaggccctcctgccact

SEQ ID NO: 790201 - DNA, 33 bp, Homo sapien
caatctcggtctcccaagttcaaacaattctcc

SEQ ID NO: 790202 - DNA, 33 bp, Homo sapien
caatctcggtctcccaggttcaaacaattctcc

SEQ ID NO: 790203 - DNA, 33 bp, Homo sapien; identical to SEQ ID NO: 790201

SEQ ID NO: 790204 - DNA, 33 bp, Homo sapien; identical to SEQ ID NO: 790202

SEQ ID NO: 790205 - DNA, 33 bp, Homo sapien
agtgcaggatcgtctccaggagagccatatacc

SEQ ID NO: 790206 - DNA, 33 bp, Homo sapien
agtgcaggatcgtctctaggagagccatatacc

SEQ ID NO: 790207 - DNA, 33 bp, Homo sapien
gcagcggcagcaaagacaaacctggcaaggtag

SEQ ID NO: 790208 - DNA, 33 bp, Homo sapien
gcagcggcagcaaagataaacctggcaaggtag

SEQ ID NO: 790209 - DNA, 33 bp, Homo sapien
ctgggaccaggagccaataacaatgacagccag

SEQ ID NO: 790210 - DNA, 33 bp, Homo sapien
ctgggaccaggagccagtaacaatgacagccag

SEQ ID NO: 790211 - DNA, 33 bp, Homo sapien
tcacaacccccgaagtcacccttctgaggtaat

SEQ ID NO: 790212 - DNA, 33 bp, Homo sapien
tcacaacccccgaagtgacccttctgaggtaat

SEQ ID NO: 790213 - DNA, 33 bp, Homo sapien
tgggtaagttggactacggggtagatgttttca

SEQ ID NO: 790214 - DNA, 33 bp, Homo sapien
tgggtaagttggactagggggtagatgttttca

SEQ ID NO: 790215 - DNA, 33 bp, Homo sapien
tgagcatattgactaacgtccctttcgaggggt

SEQ ID NO: 790216 - DNA, 33 bp, Homo sapien
tgagcatattgactaatgtccctttcgaggggt

SEQ ID NO: 790217 - DNA, 33 bp, Homo sapien
ctaaatatcagacataaaagccagaatgaaagg

SEQ ID NO: 790218 - DNA, 33 bp, Homo sapien
ctaaatatcagacatagaagccagaatgaaagg

SEQ ID NO: 790219 - DNA, 33 bp, Homo sapien
gagctagaatctgggcaaagtttgggaagacac

SEQ ID NO: 790220 - DNA, 33 bp, Homo sapien
gagctagaatctgggcgaagtttgggaagacac

SEQ ID NO: 790221 - DNA, 33 bp, Homo sapien
cggacagtactgatcccaataggagccattaac

SEQ ID NO: 790222 - DNA, 33 bp, Homo sapien
cggacagtactgatcctaataggagccattaac

SEQ ID NO: 790223 - DNA, 33 bp, Homo sapien
gaagagttgatgttgcaatcctgagtctgaaag

SEQ ID NO: 790224 - DNA, 33 bp, Homo sapien
gaagagttgatgttgccatcctgagtctgaaag

SEQ ID NO: 790225 - DNA, 33 bp, Homo sapien
ttgctctaattttgtcacgcgttcgcctgtgga

SEQ ID NO: 790226 - DNA, 33 bp, Homo sapien
ttgctctaattttgtcgcgcgttcgcctgtgga

SEQ ID NO: 790227 - DNA, 33 bp, Homo sapien
ggccataaagcaaggaagtggcagaggaggaac

SEQ ID NO: 790228 - DNA, 33 bp, Homo sapien
ggccataaagcaaggacgtggcagaggaggaac

SEQ ID NO: 790229 - DNA, 33 bp, Homo sapien
acctgtcctgtgggaggaagagagaaggtggcc

SEQ ID NO: 790230 - DNA, 33 bp, Homo sapien
acctgtcctgtgggagtaagagagaaggtggcc

SEQ ID NO: 790231 - DNA, 33 bp, Homo sapien
agaggtaaatggaagcactaaggtagatggcgg

SEQ ID NO: 790232 - DNA, 33 bp, Homo sapien
agaggtaaatggaagcgctaaggtagatggcgg

SEQ ID NO: 790233 - DNA, 33 bp, Homo sapien
ttggcccaaacccatacaatgtacagcaccaag

SEQ ID NO: 790234 - DNA, 33 bp, Homo sapien
ttggcccaaacccatagaatgtacagcaccaag

SEQ ID NO: 790235 - DNA, 33 bp, Homo sapien
caaaaaaggtaaatgcagaattggatgaagtgg

SEQ ID NO: 790236 - DNA, 33 bp, Homo sapien
caaaaaaggtaaatgcggaattggatgaagtgg

SEQ ID NO: 790237 - DNA, 33 bp, Homo sapien
tgctcctttgttggatcacttggatatgaagca

SEQ ID NO: 790238 - DNA, 33 bp, Homo sapien
tgctcctttgttggattacttggatatgaagca

SEQ ID NO: 790239 - DNA, 33 bp, Homo sapien
cttacgaacaaagaagaagtagtttcaccccct

SEQ ID NO: 790240 - DNA, 33 bp, Homo sapien
cttacgaacaaagaagtagtagtttcaccccct

SEQ ID NO: 790241 - DNA, 33 bp, Homo sapien
agaagctcagccaatgaaacgagatgaagtgaa

SEQ ID NO: 790242 - DNA, 33 bp, Homo sapien
agaagctcagccaatggaacgagatgaagtgaa

SEQ ID NO: 790243 - DNA, 33 bp, Homo sapien
cagcaaccagcttcaacggttatcacagatgga

SEQ ID NO: 790244 - DNA, 33 bp, Homo sapien
cagcaaccagcttcaagggttatcacagatgga

SEQ ID NO: 790245 - DNA, 33 bp, Homo sapien
acaaaatgaagaactacaatgcactagatttat

SEQ ID NO: 790246 - DNA, 33 bp, Homo sapien
acaaaatgaagaactagaatgcactagatttat

SEQ ID NO: 790247 - DNA, 33 bp, Homo sapien
ctgccacagaccatcacctattcttcacaagca

SEQ ID NO: 790248 - DNA, 33 bp, Homo sapien
ctgccacagaccatcatctattcttcacaagca

SEQ ID NO: 790249 - DNA, 33 bp, Homo sapien
tgacttgtgtccaatccctgctttcatcttcac

SEQ ID NO: 790250 - DNA, 33 bp, Homo sapien
tgacttgtgtccaatctctgctttcatcttcac

SEQ ID NO: 790251 - DNA, 33 bp, Homo sapien
agtagagctcttggctcaccaactttttcttcc

SEQ ID NO: 790252 - DNA, 33 bp, Homo sapien
agtagagctcttggcttaccaactttttcttcc

SEQ ID NO: 790253 - DNA, 33 bp, Homo sapien
gaacttcctgtacagacggaaatgttctagagt

SEQ ID NO: 790254 - DNA, 33 bp, Homo sapien
gaacttcctgtacagatggaaatgttctagagt

SEQ ID NO: 790255 - DNA, 33 bp, Homo sapien
acaattgaaacttcccagcatatgacagcttca

SEQ ID NO: 790256 - DNA, 33 bp, Homo sapien
acaattgaaacttcccggcatatgacagcttca

SEQ ID NO: 790257 - DNA, 33 bp, Homo sapien
ctacccatctcagttcccttttgccgtacaagg

SEQ ID NO: 790258 - DNA, 33 bp, Homo sapien
ctacccatctcagttctcttttgccgtacaagg

SEQ ID NO: 790259 - DNA, 33 bp, Homo sapien
atgttactctgctgtcaccttctcttatgtttt

SEQ ID NO: 790260 - DNA, 33 bp, Homo sapien
atgttactctgctgtcgccttctcttatgtttt

SEQ ID NO: 790261 - DNA, 33 bp, Homo sapien
gggcctctgcagtgataagcatcctagttctta

SEQ ID NO: 790262 - DNA, 33 bp, Homo sapien
gggcctctgcagtgatgagcatcctagttctta

SEQ ID NO: 790263 - DNA, 33 bp, Homo sapien
cacacatatgtgaaaaaaagttcaaatctacgt

SEQ ID NO: 790264 - DNA, 33 bp, Homo sapien
cacacatatgtgaaaagaagttcaaatctacgt

SEQ ID NO: 790265 - DNA, 33 bp, Homo sapien
tttcacagtcacaaccacaccaaaaaaccaggt

SEQ ID NO: 790266 - DNA, 33 bp, Homo sapien
tttcacagtcacaaccgcaccaaaaaaccaggt

SEQ ID NO: 790267 - DNA, 33 bp, Homo sapien
ctccaaaacctattcacacagaggaaaaatcta

SEQ ID NO: 790268 - DNA, 33 bp, Homo sapien
ctccaaaacctattcatacagaggaaaaatcta

SEQ ID NO: 790269 - DNA, 33 bp, Homo sapien
aacagacgccacctcaagtcaggaggtccaaga

SEQ ID NO: 790270 - DNA, 33 bp, Homo sapien
aacagacgccacctcatgtcaggaggtccaaga

SEQ ID NO: 790271 - DNA, 33 bp, Homo sapien
cttaagccaggcagaagtatgttgaggagtgaa

SEQ ID NO: 790272 - DNA, 33 bp, Homo sapien
cttaagccaggcagaattatgttgaggagtgaa

SEQ ID NO: 790273 - DNA, 33 bp, Homo sapien
gaatgaatgaggtaataaaccaatccaccagtc

SEQ ID NO: 790274 - DNA, 33 bp, Homo sapien
gaatgaatgaggtaatcaaccaatccaccagtc

SEQ ID NO: 790275 - DNA, 33 bp, Homo sapien
agcctcagtgctagtaaccttagttcttattct

SEQ ID NO: 790276 - DNA, 33 bp, Homo sapien
agcctcagtgctagtagccttagttcttattct

SEQ ID NO: 790277 - DNA, 33 bp, Homo sapien
aactagcattcagcccagcaatcacattactgg

SEQ ID NO: 790278 - DNA, 33 bp, Homo sapien
aactagcattcagcccggcaatcacattactgg

SEQ ID NO: 790279 - DNA, 33 bp, Homo sapien
ggaagagaagatcaaccgtctgcagggtcctag

SEQ ID NO: 790280 - DNA, 33 bp, Homo sapien
ggaagagaagatcaactgtctgcagggtcctag

SEQ ID NO: 790281 - DNA, 33 bp, Homo sapien
ctctttccttcctgacagcactcttcttaaacc

SEQ ID NO: 790282 - DNA, 33 bp, Homo sapien
ctctttccttcctgacggcactcttcttaaacc

SEQ ID NO: 790283 - DNA, 33 bp, Homo sapien
ctgatctttaatcatcacattagtgtcagctgt

SEQ ID NO: 790284 - DNA, 33 bp, Homo sapien
ctgatctttaatcatcgcattagtgtcagctgt

SEQ ID NO: 790285 - DNA, 33 bp, Homo sapien
ttccatttcacttaagaaaaactgtgtgtgttc

SEQ ID NO: 790286 - DNA, 33 bp, Homo sapien
ttccatttcacttaaggaaaactgtgtgtgttc

SEQ ID NO: 790287 - DNA, 33 bp, Homo sapien
gctgaaaacagcacacccctatcttcccaaatt

SEQ ID NO: 790288 - DNA, 33 bp, Homo sapien
gctgaaaacagcacactcctatcttcccaaatt

SEQ ID NO: 790289 - DNA, 33 bp, Homo sapien
gtgattttcaggccgacggatggaactattttt

SEQ ID NO: 790290 - DNA, 33 bp, Homo sapien
gtgattttcaggccgatggatggaactattttt

SEQ ID NO: 790291 - DNA, 33 bp, Homo sapien
aagcaacaccctgaaacgtcctttgaaaccttg

SEQ ID NO: 790292 - DNA, 33 bp, Homo sapien
aagcaacaccctgaaatgtcctttgaaaccttg

SEQ ID NO: 790293 - DNA, 33 bp, Homo sapien
tggtactgatgtcccccactccataactgcagg

SEQ ID NO: 790294 - DNA, 33 bp, Homo sapien
tggtactgatgtccccgactccataactgcagg

SEQ ID NO: 790295 - DNA, 33 bp, Homo sapien
cagatgaatggatatacagagtgtggtacatat

SEQ ID NO: 790296 - DNA, 33 bp, Homo sapien
cagatgaatggatatagagagtgtggtacatat

SEQ ID NO: 790297 - DNA, 33 bp, Homo sapien
gaggtgccagtgatgcacatagtggagaagatt

SEQ ID NO: 790298 - DNA, 33 bp, Homo sapien
gaggtgccagtgatgcgcatagtggagaagatt

SEQ ID NO: 790299 - DNA, 33 bp, Homo sapien
aactgaatcatgttaaagcacttgtctgaatgg

SEQ ID NO: 790300 - DNA, 33 bp, Homo sapien
aactgaatcatgttaaggcacttgtctgaatgg

SEQ ID NO: 790301 - DNA, 33 bp, Homo sapien
ggtagagtaaatattaccttcccacaagcagat

SEQ ID NO: 790302 - DNA, 33 bp, Homo sapien
ggtagagtaaatattagcttcccacaagcagat

SEQ ID NO: 790303 - DNA, 33 bp, Homo sapien
gagacaagcagaaggcagaaacctcttattttt

SEQ ID NO: 790304 - DNA, 33 bp, Homo sapien
gagacaagcagaaggcggaaacctcttattttt

SEQ ID NO: 790305 - DNA, 33 bp, Homo sapien
tttcacaggtggttaccgggcagcctccaagaa

SEQ ID NO: 790306 - DNA, 33 bp, Homo sapien
tttcacaggtggttactgggcagcctccaagaa

SEQ ID NO: 790307 - DNA, 33 bp, Homo sapien
ggtgccaaacagtgcaagtgatccataccagca

SEQ ID NO: 790308 - DNA, 33 bp, Homo sapien
ggtgccaaacagtgcaggtgatccataccagca

SEQ ID NO: 790309 - DNA, 33 bp, Homo sapien
agtagtgacagataaacagatatgatgctaggg

SEQ ID NO: 790310 - DNA, 33 bp, Homo sapien
agtagtgacagataaatagatatgatgctaggg

SEQ ID NO: 790311 - DNA, 33 bp, Homo sapien
actgattcaacagaaaattctcaagaatgtctg

SEQ ID NO: 790312 - DNA, 33 bp, Homo sapien
actgattcaacagaaatttctcaagaatgtctg

SEQ ID NO: 790313 - DNA, 33 bp, Homo sapien
taaggaacactggtcaacccttccgagcacaca

SEQ ID NO: 790314 - DNA, 33 bp, Homo sapien
taaggaacactggtcaccccttccgagcacaca

SEQ ID NO: 790315 - DNA, 33 bp, Homo sapien
gaccagtgttccttaacggcacccagcatcggg

SEQ ID NO: 790316 - DNA, 33 bp, Homo sapien
gaccagtgttccttaatggcacccagcatcggg

SEQ ID NO: 790317 - DNA, 33 bp, Homo sapien
tgtgtcctggttgttacaatttgctttctgcct

SEQ ID NO: 790318 - DNA, 33 bp, Homo sapien
tgtgtcctggttgttataatttgctttctgcct

SEQ ID NO: 790319 - DNA, 33 bp, Homo sapien
tatctggttgagaccaaattgtaggtctaattc

SEQ ID NO: 790320 - DNA, 33 bp, Homo sapien
tatctggttgagaccagattgtaggtctaattc

SEQ ID NO: 790321 - DNA, 33 bp, Homo sapien
gcacccttagaagaaacgggctggaagaaaaag

SEQ ID NO: 790322 - DNA, 33 bp, Homo sapien
gcacccttagaagaaatgggctggaagaaaaag

SEQ ID NO: 790323 - DNA, 33 bp, Homo sapien
gttatttggagtatgaaggatggagaccaaaca

SEQ ID NO: 790324 - DNA, 33 bp, Homo sapien
gttatttggagtatgatggatggagaccaaaca

SEQ ID NO: 790325 - DNA, 33 bp, Homo sapien
ctctttctagcactaaatgtgaagtaatgaagc

SEQ ID NO: 790326 - DNA, 33 bp, Homo sapien
ctctttctagcactaagtgtgaagtaatgaagc

SEQ ID NO: 790327 - DNA, 33 bp, Homo sapien
ctgtaaaagatttgaacttagtagcaaccacac

SEQ ID NO: 790328 - DNA, 33 bp, Homo sapien
ctgtaaaagatttgaagttagtagcaaccacac

SEQ ID NO: 790329 - DNA, 33 bp, Homo sapien
ggaactgagatctttaagttggtggctgtcaga

SEQ ID NO: 790330 - DNA, 33 bp, Homo sapien
ggaactgagatctttaggttggtggctgtcaga

SEQ ID NO: 790331 - DNA, 33 bp, Homo sapien
gttttttcatcgctaaagtcaagacatcagatg

SEQ ID NO: 790332 - DNA, 33 bp, Homo sapien
gttttttcatcgctaatgtcaagacatcagatg

SEQ ID NO: 790333 - DNA, 33 bp, Homo sapien
gttctttgcgtgggtgccacaacacttctccag

SEQ ID NO: 790334 - DNA, 33 bp, Homo sapien
gttctttgcgtgggtggcacaacacttctccag

SEQ ID NO: 790335 - DNA, 33 bp, Homo sapien
aaagatagctaaacaacaggaagaggtgcttcc

SEQ ID NO: 790336 - DNA, 33 bp, Homo sapien
aaagatagctaaacaataggaagaggtgcttcc

SEQ ID NO: 790337 - DNA, 33 bp, Homo sapien
gactgtctccccataaagccagctttgcttccc

SEQ ID NO: 790338 - DNA, 33 bp, Homo sapien
gactgtctccccataaggccagctttgcttccc

SEQ ID NO: 790339 - DNA, 33 bp, Homo sapien
aatggaagggtgataactgattagtaaccatcc

SEQ ID NO: 790340 - DNA, 33 bp, Homo sapien
aatggaagggtgataagtgattagtaaccatcc

SEQ ID NO: 790341 - DNA, 33 bp, Homo sapien
taaacagttggaaaatcaagggtgtcttgcaat

SEQ ID NO: 790342 - DNA, 33 bp, Homo sapien
taaacagttggaaaatgaagggtgtcttgcaat

SEQ ID NO: 790343 - DNA, 33 bp, Homo sapien
catagatttagctgcaatcttctccaaatagct

SEQ ID NO: 790344 - DNA, 33 bp, Homo sapien
catagatttagctgcagtcttctccaaatagct

SEQ ID NO: 790345 - DNA, 33 bp, Homo sapien
cttcggcttccattcccattaagggtcctctcc

SEQ ID NO: 790346 - DNA, 33 bp, Homo sapien
cttcggcttccattcctattaagggtcctctcc

SEQ ID NO: 790347 - DNA, 33 bp, Homo sapien
ttagtgcaggacacaccacaggaatattaacgg

SEQ ID NO: 790348 - DNA, 33 bp, Homo sapien
ttagtgcaggacacacgacaggaatattaacgg

SEQ ID NO: 790349 - DNA, 33 bp, Homo sapien
agttaaatgggcctcacatcagaaaacatgaag

SEQ ID NO: 790350 - DNA, 33 bp, Homo sapien
agttaaatgggcctcatatcagaaaacatgaag

SEQ ID NO: 790351 - DNA, 33 bp, Homo sapien
agaaacaaaaattccaatgccaaattccatgtg

SEQ ID NO: 790352 - DNA, 33 bp, Homo sapien
agaaacaaaaattccagtgccaaattccatgtg

SEQ ID NO: 790353 - DNA, 33 bp, Homo sapien
tctttattattgtgaccatttgcctagtgttaa

SEQ ID NO: 790354 - DNA, 33 bp, Homo sapien
tctttattattgtgactatttgcctagtgttaa

SEQ ID NO: 790355 - DNA, 33 bp, Homo sapien
agtagatgccaatatcccatataccacataaat

SEQ ID NO: 790356 - DNA, 33 bp, Homo sapien
agtagatgccaatatcgcatataccacataaat

SEQ ID NO: 790357 - DNA, 33 bp, Homo sapien
gtatttcgtaccacaagggctgttattcaccat

SEQ ID NO: 790358 - DNA, 33 bp, Homo sapien
gtatttcgtaccacaatggctgttattcaccat

SEQ ID NO: 790359 - DNA, 33 bp, Homo sapien
tattgcttatttacaaagttaacaaactcaaca

SEQ ID NO: 790360 - DNA, 33 bp, Homo sapien
tattgcttatttacaacgttaacaaactcaaca

SEQ ID NO: 790361 - DNA, 33 bp, Homo sapien
acaggtttagaaattacggcataagaaggggga

SEQ ID NO: 790362 - DNA, 33 bp, Homo sapien
acaggtttagaaattatggcataagaaggggga

SEQ ID NO: 790363 - DNA, 33 bp, Homo sapien
ccgaagcatccctaaaatcatgaaaaaagatgg

SEQ ID NO: 790364 - DNA, 33 bp, Homo sapien
ccgaagcatccctaaagtcatgaaaaaagatgg

SEQ ID NO: 790365 - DNA, 33 bp, Homo sapien
cagagtcagagtgggaaggtactacaaagttat

SEQ ID NO: 790366 - DNA, 33 bp, Homo sapien
cagagtcagagtgggagggtactacaaagttat

SEQ ID NO: 790367 - DNA, 33 bp, Homo sapien
cctttgcattgtgaacagtatgttaagcctcat

SEQ ID NO: 790368 - DNA, 33 bp, Homo sapien
cctttgcattgtgaacggtatgttaagcctcat

SEQ ID NO: 790369 - DNA, 33 bp, Homo sapien
acacacacactaaggaagcctagataaaatatg

SEQ ID NO: 790370 - DNA, 33 bp, Homo sapien
acacacacactaaggacgcctagataaaatatg

SEQ ID NO: 790371 - DNA, 33 bp, Homo sapien
tggaagagctgttgtgaatcttctagtaattaa

SEQ ID NO: 790372 - DNA, 33 bp, Homo sapien
tggaagagctgttgtgcatcttctagtaattaa

SEQ ID NO: 790373 - DNA, 33 bp, Homo sapien
agtctactctggtctccatgagagtgaagtccc

SEQ ID NO: 790374 - DNA, 33 bp, Homo sapien
agtctactctggtctcgatgagagtgaagtccc

SEQ ID NO: 790375 - DNA, 33 bp, Homo sapien
tttttggttcatggaacacatatttcggcctgt

SEQ ID NO: 790376 - DNA, 33 bp, Homo sapien
tttttggttcatggaatacatatttcggcctgt

SEQ ID NO: 790377 - DNA, 33 bp, Homo sapien
atgtgtcagtttgaaaaagaaagcgcttagcat

SEQ ID NO: 790378 - DNA, 33 bp, Homo sapien
atgtgtcagtttgaaagagaaagcgcttagcat

SEQ ID NO: 790379 - DNA, 33 bp, Homo sapien
atcagaactcactgtaaacaaactgcagtttgc

SEQ ID NO: 790380 - DNA, 33 bp, Homo sapien
atcagaactcactgtacacaaactgcagtttgc

SEQ ID NO: 790381 - DNA, 33 bp, Homo sapien
tgtttattaaatgctagctatgtcacaggccat

SEQ ID NO: 790382 - DNA, 33 bp, Homo sapien
tgtttattaaatgctatctatgtcacaggccat

SEQ ID NO: 790383 - DNA, 33 bp, Homo sapien
tacttctgttcaacctaagccagaatatatagc

SEQ ID NO: 790384 - DNA, 33 bp, Homo sapien
tacttctgttcaacctgagccagaatatatagc

SEQ ID NO: 790385 - DNA, 33 bp, Homo sapien
ttttatgtgtattttcaccatcctcaaaaggct

SEQ ID NO: 790386 - DNA, 33 bp, Homo sapien
ttttatgtgtattttcgccatcctcaaaaggct

SEQ ID NO: 790387 - DNA, 33 bp, Homo sapien
atggattcaaaggatcaaatgtcatcagccttc

SEQ ID NO: 790388 - DNA, 33 bp, Homo sapien
atggattcaaaggatccaatgtcatcagccttc

SEQ ID NO: 790389 - DNA, 33 bp, Homo sapien
agggctttttggtgacaagcagcaaacacccaa

SEQ ID NO: 790390 - DNA, 33 bp, Homo sapien
agggctttttggtgacgagcagcaaacacccaa

SEQ ID NO: 790391 - DNA, 33 bp, Homo sapien
cagtgagcataaaaccagactcaagtcacacac

SEQ ID NO: 790392 - DNA, 33 bp, Homo sapien
cagtgagcataaaaccggactcaagtcacacac

SEQ ID NO: 790393 - DNA, 33 bp, Homo sapien
tagatcccaatttcaccactgagttgccatgga

SEQ ID NO: 790394 - DNA, 33 bp, Homo sapien
tagatcccaatttcactactgagttgccatgga

SEQ ID NO: 790395 - DNA, 33 bp, Homo sapien
tgtatagctgatgtctaaaacacataaaaattt

SEQ ID NO: 790396 - DNA, 33 bp, Homo sapien
tgtatagctgatgtctcaaacacataaaaattt

SEQ ID NO: 790397 - DNA, 33 bp, Homo sapien
ggtcagctgggtcaaaatccaaagatttagatg

SEQ ID NO: 790398 - DNA, 33 bp, Homo sapien
ggtcagctgggtcaaattccaaagatttagatg

SEQ ID NO: 790399 - DNA, 33 bp, Homo sapien
attatggaagaagggcaaatgcataagaaaggt

SEQ ID NO: 790400 - DNA, 33 bp, Homo sapien
attatggaagaagggcgaatgcataagaaaggt

SEQ ID NO: 790401 - DNA, 33 bp, Homo sapien
agtgccataaaactgcaacctggttatacctac

SEQ ID NO: 790402 - DNA, 33 bp, Homo sapien
agtgccataaaactgccacctggttatacctac

SEQ ID NO: 790403 - DNA, 33 bp, Homo sapien
gttttctcatgccaaaatgtacctgttattaat

SEQ ID NO: 790404 - DNA, 33 bp, Homo sapien
gttttctcatgccaaagtgtacctgttattaat

SEQ ID NO: 790405 - DNA, 33 bp, Homo sapien
ccttctatgttacacacgaatgagaatataaag

SEQ ID NO: 790406 - DNA, 33 bp, Homo sapien
ccttctatgttacacatgaatgagaatataaag

SEQ ID NO: 790407 - DNA, 33 bp, Homo sapien
aacttctgagagtttaagtatcattccatcaaa

SEQ ID NO: 790408 - DNA, 33 bp, Homo sapien
aacttctgagagtttatgtatcattccatcaaa

SEQ ID NO: 790409 - DNA, 33 bp, Homo sapien
cttcatacttactgagcatcccatgtgctgcat

SEQ ID NO: 790410 - DNA, 33 bp, Homo sapien
cttcatacttactgaggatcccatgtgctgcat

SEQ ID NO: 790411 - DNA, 33 bp, Homo sapien
ctccataaaacactaacaaccctgtagccttag

SEQ ID NO: 790412 - DNA, 33 bp, Homo sapien
ctccataaaacactaataaccctgtagccttag

SEQ ID NO: 790413 - DNA, 33 bp, Homo sapien
ttgttattgctactgacatagttctctgctgga

SEQ ID NO: 790414 - DNA, 33 bp, Homo sapien
ttgttattgctactgatatagttctctgctgga

SEQ ID NO: 790415 - DNA, 33 bp, Homo sapien
aaaactgcatggtttcacaatgaacagctatta

SEQ ID NO: 790416 - DNA, 33 bp, Homo sapien
aaaactgcatggtttctcaatgaacagctatta

SEQ ID NO: 790417 - DNA, 33 bp, Homo sapien
ataagtgtttacaggacatgacccttggagtta

SEQ ID NO: 790418 - DNA, 33 bp, Homo sapien
ataagtgtttacaggagatgacccttggagtta

SEQ ID NO: 790419 - DNA, 33 bp, Homo sapien
gcagtcggcattaagcactgaagagaaagaaag

SEQ ID NO: 790420 - DNA, 33 bp, Homo sapien
gcagtcggcattaagcgctgaagagaaagaaag

SEQ ID NO: 790421 - DNA, 33 bp, Homo sapien
tggtggctggaatgaaagctacctacttcagca

SEQ ID NO: 790422 - DNA, 33 bp, Homo sapien
tggtggctggaatgaaggctacctacttcagca

SEQ ID NO: 790423 - DNA, 33 bp, Homo sapien
atgggaccaagggacacaggattgagaaggctg

SEQ ID NO: 790424 - DNA, 33 bp, Homo sapien
atgggaccaagggacagaggattgagaaggctg

SEQ ID NO: 790425 - DNA, 33 bp, Homo sapien
atacaggttcaaatgacgtgggaagcaagaaat

SEQ ID NO: 790426 - DNA, 33 bp, Homo sapien
atacaggttcaaatgatgtgggaagcaagaaat

SEQ ID NO: 790427 - DNA, 33 bp, Homo sapien
tcactgcaggctcgcagtcctgagctcaaagga

SEQ ID NO: 790428 - DNA, 33 bp, Homo sapien
tcactgcaggctcgcattcctgagctcaaagga

SEQ ID NO: 790429 - DNA, 33 bp, Homo sapien
gcattctttatgctcagatagggtgaaatccta

SEQ ID NO: 790430 - DNA, 33 bp, Homo sapien
gcattctttatgctcatatagggtgaaatccta

SEQ ID NO: 790431 - DNA, 33 bp, Homo sapien
aacccgaggggacagcaatgcaaatgtccaggc

SEQ ID NO: 790432 - DNA, 33 bp, Homo sapien
aacccgaggggacagcgatgcaaatgtccaggc

SEQ ID NO: 790433 - DNA, 33 bp, Homo sapien
tagacctggttgtggaagcatgctgagtacatt

SEQ ID NO: 790434 - DNA, 33 bp, Homo sapien
tagacctggttgtggaggcatgctgagtacatt

SEQ ID NO: 790435 - DNA, 33 bp, Homo sapien
aattgtcctttgtgagccacttgaaatgtactc

SEQ ID NO: 790436 - DNA, 33 bp, Homo sapien
aattgtcctttgtgagtcacttgaaatgtactc

SEQ ID NO: 790437 - DNA, 33 bp, Homo sapien
acttctgaaattttaaatatatgatgttcccaa

SEQ ID NO: 790438 - DNA, 33 bp, Homo sapien
acttctgaaattttaagtatatgatgttcccaa

SEQ ID NO: 790439 - DNA, 33 bp, Homo sapien
ctatatttgccaaagaactacctcaagctcccg

SEQ ID NO: 790440 - DNA, 33 bp, Homo sapien
ctatatttgccaaagatctacctcaagctcccg

SEQ ID NO: 790441 - DNA, 33 bp, Homo sapien
tgccacaccagaagggcatagttggaactcaga

SEQ ID NO: 790442 - DNA, 33 bp, Homo sapien
tgccacaccagaagggtatagttggaactcaga

SEQ ID NO: 790443 - DNA, 33 bp, Homo sapien
caaatgattttagctgaacatcaaaatttgaga

SEQ ID NO: 790444 - DNA, 33 bp, Homo sapien
caaatgattttagctgcacatcaaaatttgaga

SEQ ID NO: 790445 - DNA, 33 bp, Homo sapien
ctgaattttggtcacactgatcttttagattag

SEQ ID NO: 790446 - DNA, 33 bp, Homo sapien
ctgaattttggtcacattgatcttttagattag

SEQ ID NO: 790447 - DNA, 33 bp, Homo sapien
gtaagggcgagagaaaagcacttactgggagct

SEQ ID NO: 790448 - DNA, 33 bp, Homo sapien
gtaagggcgagagaaaggcacttactgggagct

SEQ ID NO: 790449 - DNA, 33 bp, Homo sapien
ttacagaatcaatgcaatccttctcagaatacc

SEQ ID NO: 790450 - DNA, 33 bp, Homo sapien
ttacagaatcaatgcagtccttctcagaatacc

SEQ ID NO: 790451 - DNA, 33 bp, Homo sapien
atcacatgtacatggacaggaaaactttttgtt

SEQ ID NO: 790452 - DNA, 33 bp, Homo sapien
atcacatgtacatggataggaaaactttttgtt

SEQ ID NO: 790453 - DNA, 33 bp, Homo sapien
ccaagtcctgaagttgcaagaaccatgatctcc

SEQ ID NO: 790454 - DNA, 33 bp, Homo sapien
ccaagtcctgaagttgtaagaaccatgatctcc

SEQ ID NO: 790455 - DNA, 33 bp, Homo sapien
atttggtcagggaggaatactgttcaggaatac

SEQ ID NO: 790456 - DNA, 33 bp, Homo sapien
atttggtcagggaggagtactgttcaggaatac

SEQ ID NO: 790457 - DNA, 33 bp, Homo sapien
gttgtgatggttataccggtcttctttatacta

SEQ ID NO: 790458 - DNA, 33 bp, Homo sapien
gttgtgatggttatactggtcttctttatacta

SEQ ID NO: 790459 - DNA, 33 bp, Homo sapien
ggatctgttgttgataaacagtcctctttatta

SEQ ID NO: 790460 - DNA, 33 bp, Homo sapien
ggatctgttgttgatacacagtcctctttatta

SEQ ID NO: 790461 - DNA, 33 bp, Homo sapien
ccaaatacattatctacctacttttgagcaact

SEQ ID NO: 790462 - DNA, 33 bp, Homo sapien
ccaaatacattatctatctacttttgagcaact

SEQ ID NO: 790463 - DNA, 33 bp, Homo sapien
aatgaagggatcaaacaaccaagtatagagata

SEQ ID NO: 790464 - DNA, 33 bp, Homo sapien
aatgaagggatcaaacgaccaagtatagagata

SEQ ID NO: 790465 - DNA, 33 bp, Homo sapien
aagcggtttgctgacaatacacataggtaaggg

SEQ ID NO: 790466 - DNA, 33 bp, Homo sapien
aagcggtttgctgacagtacacataggtaaggg

SEQ ID NO: 790467 - DNA, 33 bp, Homo sapien
gggccaaagaacagtaacttctgcttattatga

SEQ ID NO: 790468 - DNA, 33 bp, Homo sapien
gggccaaagaacagtagcttctgcttattatga

SEQ ID NO: 790469 - DNA, 33 bp, Homo sapien
aagggcaattttatgaaagtttttgtgggaaat

SEQ ID NO: 790470 - DNA, 33 bp, Homo sapien
aagggcaattttatgacagtttttgtgggaaat

SEQ ID NO: 790471 - DNA, 33 bp, Homo sapien
aaaactgcattgacataatgacattccctggac

SEQ ID NO: 790472 - DNA, 33 bp, Homo sapien
aaaactgcattgacatgatgacattccctggac

SEQ ID NO: 790473 - DNA, 33 bp, Homo sapien
aggtcacatttatcccagacagcagactgactt

SEQ ID NO: 790474 - DNA, 33 bp, Homo sapien
aggtcacatttatcccggacagcagactgactt

SEQ ID NO: 790475 - DNA, 33 bp, Homo sapien
agaacttaaaatttaaagcacaaacacacacag

SEQ ID NO: 790476 - DNA, 33 bp, Homo sapien
agaacttaaaatttaaggcacaaacacacacag

SEQ ID NO: 790477 - DNA, 33 bp, Homo sapien
aaggcagctggattcacagaaaggtctaagaca

SEQ ID NO: 790478 - DNA, 33 bp, Homo sapien
aaggcagctggattcatagaaaggtctaagaca

SEQ ID NO: 790479 - DNA, 33 bp, Homo sapien
tgcctgtagaacatccaaatgatcatgtcctga

SEQ ID NO: 790480 - DNA, 33 bp, Homo sapien
tgcctgtagaacatcccaatgatcatgtcctga

SEQ ID NO: 790481 - DNA, 33 bp, Homo sapien
ccttcctcccattttaactacagggattttcta

SEQ ID NO: 790482 - DNA, 33 bp, Homo sapien
ccttcctcccattttacctacagggattttcta

SEQ ID NO: 790483 - DNA, 33 bp, Homo sapien
aatctgcaaaatctctcaacttttgtgacaaaa

SEQ ID NO: 790484 - DNA, 33 bp, Homo sapien
aatctgcaaaatctctgaacttttgtgacaaaa

SEQ ID NO: 790485 - DNA, 33 bp, Homo sapien
ttagcttttcttaaacactctatatttcacatt

SEQ ID NO: 790486 - DNA, 33 bp, Homo sapien
ttagcttttcttaaaccctctatatttcacatt

SEQ ID NO: 790487 - DNA, 33 bp, Homo sapien
ccaattggctaaatgacaactctctgaatttgt

SEQ ID NO: 790488 - DNA, 33 bp, Homo sapien
ccaattggctaaatgagaactctctgaatttgt

SEQ ID NO: 790489 - DNA, 33 bp, Homo sapien
tcctaagttagctgtgaagaatcttttggttat

SEQ ID NO: 790490 - DNA, 33 bp, Homo sapien
tcctaagttagctgtgcagaatcttttggttat

SEQ ID NO: 790491 - DNA, 33 bp, Homo sapien
atgtttattatatcaaaactttctgtgaggtgg

SEQ ID NO: 790492 - DNA, 33 bp, Homo sapien
atgtttattatatcaagactttctgtgaggtgg

SEQ ID NO: 790493 - DNA, 33 bp, Homo sapien
gtaacagctatcaacaatgtgaaacaactggac

SEQ ID NO: 790494 - DNA, 33 bp, Homo sapien
gtaacagctatcaacagtgtgaaacaactggac

SEQ ID NO: 790495 - DNA, 33 bp, Homo sapien
atgcaaccctcgaatgaaacttccagatgctgt

SEQ ID NO: 790496 - DNA, 33 bp, Homo sapien
atgcaaccctcgaatgcaacttccagatgctgt

SEQ ID NO: 790497 - DNA, 33 bp, Homo sapien
caagggcagggtttgcaaagtatcttgagcact

SEQ ID NO: 790498 - DNA, 33 bp, Homo sapien
caagggcagggtttgccaagtatcttgagcact

SEQ ID NO: 790499 - DNA, 33 bp, Homo sapien
tttatcaaacctagtaccagacttatatgatgt

SEQ ID NO: 790500 - DNA, 33 bp, Homo sapien
tttatcaaacctagtatcagacttatatgatgt

SEQ ID NO: 790501 - DNA, 33 bp, Homo sapien
ctccacagatcactcacaagtaaattatttgct

SEQ ID NO: 790502 - DNA, 33 bp, Homo sapien
ctccacagatcactcataagtaaattatttgct

SEQ ID NO: 790503 - DNA, 33 bp, Homo sapien
tttcctttacaataagcagttttgacaacactt

SEQ ID NO: 790504 - DNA, 33 bp, Homo sapien
tttcctttacaataaggagttttgacaacactt

SEQ ID NO: 790505 - DNA, 33 bp, Homo sapien
aaatttctggatagaacgcaagggcttaaaaag

SEQ ID NO: 790506 - DNA, 33 bp, Homo sapien
aaatttctggatagaatgcaagggcttaaaaag

SEQ ID NO: 790507 - DNA, 33 bp, Homo sapien
gaggggaacacttcaggccagtgaaacgtccag

SEQ ID NO: 790508 - DNA, 33 bp, Homo sapien
gaggggaacacttcagtccagtgaaacgtccag

SEQ ID NO: 790509 - DNA, 33 bp, Homo sapien
tttttcttgagattgccaaattgcacttgaaat

SEQ ID NO: 790510 - DNA, 33 bp, Homo sapien
tttttcttgagattgctaaattgcacttgaaat

SEQ ID NO: 790511 - DNA, 33 bp, Homo sapien
ttgtgcttttttcagaactgaatccattgcttt

SEQ ID NO: 790512 - DNA, 33 bp, Homo sapien
ttgtgcttttttcagagctgaatccattgcttt

SEQ ID NO: 790513 - DNA, 33 bp, Homo sapien
gtagtacgtagcatacagtaggttttggataat

SEQ ID NO: 790514 - DNA, 33 bp, Homo sapien
gtagtacgtagcatacggtaggttttggataat

SEQ ID NO: 790515 - DNA, 33 bp, Homo sapien
taacctgtgtaagaagaaagaaatagctggtaa

SEQ ID NO: 790516 - DNA, 33 bp, Homo sapien
taacctgtgtaagaagtaagaaatagctggtaa

SEQ ID NO: 790517 - DNA, 33 bp, Homo sapien
tttttaaactccattggatctacggctgtgaac

SEQ ID NO: 790518 - DNA, 33 bp, Homo sapien
tttttaaactccattgtatctacggctgtgaac

SEQ ID NO: 790519 - DNA, 33 bp, Homo sapien
ttttggtagagatgacagcttactattttgccc

SEQ ID NO: 790520 - DNA, 33 bp, Homo sapien
ttttggtagagatgacggcttactattttgccc

SEQ ID NO: 790521 - DNA, 33 bp, Homo sapien
ttgattatatactaaacgaggggtagattattc

SEQ ID NO: 790522 - DNA, 33 bp, Homo sapien
ttgattatatactaaatgaggggtagattattc

SEQ ID NO: 790523 - DNA, 33 bp, Homo sapien
gcccctttcttggaacactcatgaataatctac

SEQ ID NO: 790524 - DNA, 33 bp, Homo sapien
gcccctttcttggaacgctcatgaataatctac

SEQ ID NO: 790525 - DNA, 33 bp, Homo sapien
atctttgtggaagaaacgatactgatcaaaatc

SEQ ID NO: 790526 - DNA, 33 bp, Homo sapien
atctttgtggaagaaatgatactgatcaaaatc

SEQ ID NO: 790527 - DNA, 33 bp, Homo sapien
tgccggatgactaataccttttaattgagtggt

SEQ ID NO: 790528 - DNA, 33 bp, Homo sapien
tgccggatgactaatagcttttaattgagtggt

SEQ ID NO: 790529 - DNA, 33 bp, Homo sapien
ccatgagcacttataacacaggaagtatgatat

SEQ ID NO: 790530 - DNA, 33 bp, Homo sapien
ccatgagcacttataagacaggaagtatgatat

SEQ ID NO: 790531 - DNA, 33 bp, Homo sapien
catgccaactaaattgcagtgtatgggagtgag

SEQ ID NO: 790532 - DNA, 33 bp, Homo sapien
catgccaactaaattgtagtgtatgggagtgag

SEQ ID NO: 790533 - DNA, 33 bp, Homo sapien
atgctgatatgaaggaaaaagctgataaatgct

SEQ ID NO: 790534 - DNA, 33 bp, Homo sapien
atgctgatatgaaggacaaagctgataaatgct

SEQ ID NO: 790535 - DNA, 33 bp, Homo sapien
aggccattgtttgctaaagtgaaacctcctctg

SEQ ID NO: 790536 - DNA, 33 bp, Homo sapien
aggccattgtttgctacagtgaaacctcctctg

SEQ ID NO: 790537 - DNA, 33 bp, Homo sapien
ctttctgaaccaagaaacaatcgatcaatcaat

SEQ ID NO: 790538 - DNA, 33 bp, Homo sapien
ctttctgaaccaagaatcaatcgatcaatcaat

SEQ ID NO: 790539 - DNA, 33 bp, Homo sapien
ttaagttgctacgcccaatggtagtttgtcaca

SEQ ID NO: 790540 - DNA, 33 bp, Homo sapien
ttaagttgctacgcccgatggtagtttgtcaca

SEQ ID NO: 790541 - DNA, 33 bp, Homo sapien
tgtttcacgtgtacataggcatacccactcaca

SEQ ID NO: 790542 - DNA, 33 bp, Homo sapien
tgtttcacgtgtacattggcatacccactcaca

SEQ ID NO: 790543 - DNA, 33 bp, Homo sapien
tattatcctctttctcagaagaactggtcagtt

SEQ ID NO: 790544 - DNA, 33 bp, Homo sapien
tattatcctctttctcggaagaactggtcagtt

SEQ ID NO: 790545 - DNA, 33 bp, Homo sapien
ggtcaatgtattgaaagttagtaacaagcattt

SEQ ID NO: 790546 - DNA, 33 bp, Homo sapien
ggtcaatgtattgaaatttagtaacaagcattt

SEQ ID NO: 790547 - DNA, 33 bp, Homo sapien
tgacattcaaaatggactcagcagcaagaaaat

SEQ ID NO: 790548 - DNA, 33 bp, Homo sapien
tgacattcaaaatggattcagcagcaagaaaat

SEQ ID NO: 790549 - DNA, 33 bp, Homo sapien
aaaatctcagaacgtaccctagtcattaaaaga

SEQ ID NO: 790550 - DNA, 33 bp, Homo sapien
aaaatctcagaacgtatcctagtcattaaaaga

SEQ ID NO: 790551 - DNA, 33 bp, Homo sapien
ctacattagcaatgaagagtctagtaactctaa

SEQ ID NO: 790552 - DNA, 33 bp, Homo sapien
ctacattagcaatgaatagtctagtaactctaa

SEQ ID NO: 790553 - DNA, 33 bp, Homo sapien
cttagctgataacttaactacatgaaattttaa

SEQ ID NO: 790554 - DNA, 33 bp, Homo sapien
cttagctgataacttacctacatgaaattttaa

SEQ ID NO: 790555 - DNA, 33 bp, Homo sapien
ttcagcctgcataagcaatagattagaagttct

SEQ ID NO: 790556 - DNA, 33 bp, Homo sapien
ttcagcctgcataagcgatagattagaagttct

SEQ ID NO: 790557 - DNA, 33 bp, Homo sapien
acatatctctgtggaaattatcagttatgcagc

SEQ ID NO: 790558 - DNA, 33 bp, Homo sapien
acatatctctgtggaacttatcagttatgcagc

SEQ ID NO: 790559 - DNA, 33 bp, Homo sapien
ttgaataattaacccccgacagatcaatgagat

SEQ ID NO: 790560 - DNA, 33 bp, Homo sapien
ttgaataattaacccctgacagatcaatgagat

SEQ ID NO: 790561 - DNA, 33 bp, Homo sapien
tatacattactcaaggaaaaccaacagtgcata

SEQ ID NO: 790562 - DNA, 33 bp, Homo sapien
tatacattactcaagggaaaccaacagtgcata

SEQ ID NO: 790563 - DNA, 33 bp, Homo sapien
tgcatattcatggtctcaaattacagtacatta

SEQ ID NO: 790564 - DNA, 33 bp, Homo sapien
tgcatattcatggtctgaaattacagtacatta

SEQ ID NO: 790565 - DNA, 33 bp, Homo sapien
tagagtgccacactggacagagatgctttgttg

SEQ ID NO: 790566 - DNA, 33 bp, Homo sapien
tagagtgccacactgggcagagatgctttgttg

SEQ ID NO: 790567 - DNA, 33 bp, Homo sapien
atcttaaagacattaacagctggagggtattac

SEQ ID NO: 790568 - DNA, 33 bp, Homo sapien
atcttaaagacattaatagctggagggtattac

SEQ ID NO: 790569 - DNA, 33 bp, Homo sapien
gtatttgggactatcaatgaatatacagctctc

SEQ ID NO: 790570 - DNA, 33 bp, Homo sapien
gtatttgggactatcactgaatatacagctctc

SEQ ID NO: 790571 - DNA, 33 bp, Homo sapien
cgaatctgaatgctaaagagaaagaggaattcc

SEQ ID NO: 790572 - DNA, 33 bp, Homo sapien
cgaatctgaatgctaaggagaaagaggaattcc

SEQ ID NO: 790573 - DNA, 33 bp, Homo sapien
caccctctgctcactccatttttgaacaggagg

SEQ ID NO: 790574 - DNA, 33 bp, Homo sapien
caccctctgctcactctatttttgaacaggagg

SEQ ID NO: 790575 - DNA, 33 bp, Homo sapien
caggaatcagaacaccactaatatactccatga

SEQ ID NO: 790576 - DNA, 33 bp, Homo sapien
caggaatcagaacacctctaatatactccatga

SEQ ID NO: 790577 - DNA, 33 bp, Homo sapien
tcatctattactcctacctacaaattctaggat

SEQ ID NO: 790578 - DNA, 33 bp, Homo sapien
tcatctattactcctatctacaaattctaggat

SEQ ID NO: 790579 - DNA, 33 bp, Homo sapien
aatagacagaaaggatcaagaaaagaaaactga

SEQ ID NO: 790580 - DNA, 33 bp, Homo sapien
aatagacagaaaggatgaagaaaagaaaactga

SEQ ID NO: 790581 - DNA, 33 bp, Homo sapien
tttaatgtgctaaactaaaggatgcttgactgg

SEQ ID NO: 790582 - DNA, 33 bp, Homo sapien
tttaatgtgctaaactgaaggatgcttgactgg

SEQ ID NO: 790583 - DNA, 33 bp, Homo sapien
ttatcctctttgtccaatcatacttccccacaa

SEQ ID NO: 790584 - DNA, 33 bp, Homo sapien
ttatcctctttgtccagtcatacttccccacaa

SEQ ID NO: 790585 - DNA, 33 bp, Homo sapien
agaccttgtctcgaagaaaaaaaaaatgcaagg

SEQ ID NO: 790586 - DNA, 33 bp, Homo sapien
agaccttgtctcgaagtaaaaaaaaatgcaagg

SEQ ID NO: 790587 - DNA, 33 bp, Homo sapien
tgctacaatctggaaagggaactactaactagc

SEQ ID NO: 790588 - DNA, 33 bp, Homo sapien
tgctacaatctggaaatggaactactaactagc

SEQ ID NO: 790589 - DNA, 33 bp, Homo sapien
attggagttgtgaacacgtatgtaggcagaaag

SEQ ID NO: 790590 - DNA, 33 bp, Homo sapien
attggagttgtgaacatgtatgtaggcagaaag

SEQ ID NO: 790591 - DNA, 33 bp, Homo sapien
tacagcctctagaaaactgacttatcgagtccc

SEQ ID NO: 790592 - DNA, 33 bp, Homo sapien
tacagcctctagaaaattgacttatcgagtccc

SEQ ID NO: 790593 - DNA, 33 bp, Homo sapien
aatttgtccaaagttacatagtcataatggcag

SEQ ID NO: 790594 - DNA, 33 bp, Homo sapien
aatttgtccaaagttagatagtcataatggcag

SEQ ID NO: 790595 - DNA, 33 bp, Homo sapien
cttcataacaatgtttgaaaagccaataagtga

SEQ ID NO: 790596 - DNA, 33 bp, Homo sapien
cttcataacaatgttttaaaagccaataagtga

SEQ ID NO: 790597 - DNA, 33 bp, Homo sapien
agtgaccagctgttaacgttatttgccctctaa

SEQ ID NO: 790598 - DNA, 33 bp, Homo sapien
agtgaccagctgttaatgttatttgccctctaa

SEQ ID NO: 790599 - DNA, 33 bp, Homo sapien
accttggtgaggaatgacatccaatgtgtacat

SEQ ID NO: 790600 - DNA, 33 bp, Homo sapien
accttggtgaggaatggcatccaatgtgtacat

SEQ ID NO: 790601 - DNA, 33 bp, Homo sapien
acccgagaaagtacccagctccatctttttggt

SEQ ID NO: 790602 - DNA, 33 bp, Homo sapien
acccgagaaagtacccggctccatctttttggt

SEQ ID NO: 790603 - DNA, 33 bp, Homo sapien
ccaacacaactcttcccagaaagaaatctcctg

SEQ ID NO: 790604 - DNA, 33 bp, Homo sapien
ccaacacaactcttcctagaaagaaatctcctg

SEQ ID NO: 790605 - DNA, 33 bp, Homo sapien
ttaactacatcccagaataaagctcaataatat

SEQ ID NO: 790606 - DNA, 33 bp, Homo sapien
ttaactacatcccagagtaaagctcaataatat

SEQ ID NO: 790607 - DNA, 33 bp, Homo sapien
ttcctagttcataaaacggattaacagtctctt

SEQ ID NO: 790608 - DNA, 33 bp, Homo sapien
ttcctagttcataaaatggattaacagtctctt

SEQ ID NO: 790609 - DNA, 33 bp, Homo sapien
taggattgaagagcacacatctgcaggctttgc

SEQ ID NO: 790610 - DNA, 33 bp, Homo sapien
taggattgaagagcacgcatctgcaggctttgc

SEQ ID NO: 790611 - DNA, 33 bp, Homo sapien
atagacttcttggcaaagtattttgaaaatatt

SEQ ID NO: 790612 - DNA, 33 bp, Homo sapien
atagacttcttggcaatgtattttgaaaatatt

SEQ ID NO: 790613 - DNA, 33 bp, Homo sapien
ggatttgcaatactctaaagctagttcccacct

SEQ ID NO: 790614 - DNA, 33 bp, Homo sapien
ggatttgcaatactctgaagctagttcccacct

SEQ ID NO: 790615 - DNA, 33 bp, Homo sapien
cccattttctgctctacaaggctgagttaatgg

SEQ ID NO: 790616 - DNA, 33 bp, Homo sapien
cccattttctgctctagaaggctgagttaatgg

SEQ ID NO: 790617 - DNA, 33 bp, Homo sapien
gtgagcagagaaacggcaacttgcagaagaaat

SEQ ID NO: 790618 - DNA, 33 bp, Homo sapien
gtgagcagagaaacgggaacttgcagaagaaat

SEQ ID NO: 790619 - DNA, 33 bp, Homo sapien
tactagtttgttctcaaagccagagctccttca

SEQ ID NO: 790620 - DNA, 33 bp, Homo sapien
tactagtttgttctcagagccagagctccttca

SEQ ID NO: 790621 - DNA, 33 bp, Homo sapien
caatatttgaatgcaaatacaccatcattgtga

SEQ ID NO: 790622 - DNA, 33 bp, Homo sapien
caatatttgaatgcaattacaccatcattgtga

SEQ ID NO: 790623 - DNA, 33 bp, Homo sapien
ggctataacatccaggaaaaagcaaagcacagc

SEQ ID NO: 790624 - DNA, 33 bp, Homo sapien
ggctataacatccagggaaaagcaaagcacagc

SEQ ID NO: 790625 - DNA, 33 bp, Homo sapien
tataaggatgcggggccattgcgcgcgctctct

SEQ ID NO: 790626 - DNA, 33 bp, Homo sapien
tataaggatgcggggctattgcgcgcgctctct

SEQ ID NO: 790627 - DNA, 33 bp, Homo sapien
ccaggtctggaagacaaccttgacatttctctt

SEQ ID NO: 790628 - DNA, 33 bp, Homo sapien
ccaggtctggaagacagccttgacatttctctt

SEQ ID NO: 790629 - DNA, 33 bp, Homo sapien
ttatttatttttttcacaagagtcttgctagaa

SEQ ID NO: 790630 - DNA, 33 bp, Homo sapien
ttatttatttttttcagaagagtcttgctagaa

SEQ ID NO: 790631 - DNA, 33 bp, Homo sapien
agatcgctagggcagacgtaaaatgctaccagt

SEQ ID NO: 790632 - DNA, 33 bp, Homo sapien
agatcgctagggcagatgtaaaatgctaccagt

SEQ ID NO: 790633 - DNA, 33 bp, Homo sapien
gtaggtaactctttcccacgaacctcccaaaaa

SEQ ID NO: 790634 - DNA, 33 bp, Homo sapien
gtaggtaactctttccgacgaacctcccaaaaa

SEQ ID NO: 790635 - DNA, 33 bp, Homo sapien
tgtaacatttctcaacaagggtagggggtgctg

SEQ ID NO: 790636 - DNA, 33 bp, Homo sapien
tgtaacatttctcaacgagggtagggggtgctg

SEQ ID NO: 790637 - DNA, 33 bp, Homo sapien
ctttgctggcttgaaaatagttatctctaagtt

SEQ ID NO: 790638 - DNA, 33 bp, Homo sapien
ctttgctggcttgaaagtagttatctctaagtt

SEQ ID NO: 790639 - DNA, 33 bp, Homo sapien
ttgcctgattaaaatacctagtgaaatgttgcc

SEQ ID NO: 790640 - DNA, 33 bp, Homo sapien
ttgcctgattaaaatatctagtgaaatgttgcc

SEQ ID NO: 790641 - DNA, 33 bp, Homo sapien
ctgaccttttgactcactacctcagataacatg

SEQ ID NO: 790642 - DNA, 33 bp, Homo sapien
ctgaccttttgactcagtacctcagataacatg

SEQ ID NO: 790643 - DNA, 33 bp, Homo sapien
tttaaagacaatgtctcaagtttctgtaccatt

SEQ ID NO: 790644 - DNA, 33 bp, Homo sapien
tttaaagacaatgtctgaagtttctgtaccatt

SEQ ID NO: 790645 - DNA, 33 bp, Homo sapien
cttcaataaatgctcagcacctaatcgcctttg

SEQ ID NO: 790646 - DNA, 33 bp, Homo sapien
cttcaataaatgctcatcacctaatcgcctttg

SEQ ID NO: 790647 - DNA, 33 bp, Homo sapien
cctggttctttcaccaatctacacactcaatgt

SEQ ID NO: 790648 - DNA, 33 bp, Homo sapien
cctggttctttcaccagtctacacactcaatgt

SEQ ID NO: 790649 - DNA, 33 bp, Homo sapien
tcctatttttaagggcaacaaaaggatatactg

SEQ ID NO: 790650 - DNA, 33 bp, Homo sapien
tcctatttttaagggccacaaaaggatatactg

SEQ ID NO: 790651 - DNA, 33 bp, Homo sapien
tctcataaagtccatgaaatgtgaacaactata

SEQ ID NO: 790652 - DNA, 33 bp, Homo sapien
tctcataaagtccatggaatgtgaacaactata

SEQ ID NO: 790653 - DNA, 33 bp, Homo sapien
acaacgttggctgtaaatagttcatctgattca

SEQ ID NO: 790654 - DNA, 33 bp, Homo sapien
acaacgttggctgtaagtagttcatctgattca

SEQ ID NO: 790655 - DNA, 33 bp, Homo sapien
aattgaaccacccaaagtgaagtttccatatat

SEQ ID NO: 790656 - DNA, 33 bp, Homo sapien
aattgaaccacccaaattgaagtttccatatat

SEQ ID NO: 790657 - DNA, 33 bp, Homo sapien
gaaggcaaatctataacggtgtgggccctggag

SEQ ID NO: 790658 - DNA, 33 bp, Homo sapien
gaaggcaaatctataatggtgtgggccctggag

SEQ ID NO: 790659 - DNA, 33 bp, Homo sapien
gctctatgcaggaaacgcctaactcagcacgtc

SEQ ID NO: 790660 - DNA, 33 bp, Homo sapien
gctctatgcaggaaactcctaactcagcacgtc

SEQ ID NO: 790661 - DNA, 33 bp, Homo sapien
atggggaatcaataccaatatgaatgtatacaa

SEQ ID NO: 790662 - DNA, 33 bp, Homo sapien
atggggaatcaataccgatatgaatgtatacaa

SEQ ID NO: 790663 - DNA, 33 bp, Homo sapien
tagctatggctgataaagattaatgattaatgc

SEQ ID NO: 790664 - DNA, 33 bp, Homo sapien
tagctatggctgataaggattaatgattaatgc

SEQ ID NO: 790665 - DNA, 33 bp, Homo sapien
tgtaaatatgggcaaaatgcttattgtgtgcac

SEQ ID NO: 790666 - DNA, 33 bp, Homo sapien
tgtaaatatgggcaaactgcttattgtgtgcac

SEQ ID NO: 790667 - DNA, 33 bp, Homo sapien
aagatttatttctgctcaagtgtgtcatacata

SEQ ID NO: 790668 - DNA, 33 bp, Homo sapien
aagatttatttctgcttaagtgtgtcatacata

SEQ ID NO: 790669 - DNA, 33 bp, Homo sapien
taaatgtttttttctgaatctcttggtcatagt

SEQ ID NO: 790670 - DNA, 33 bp, Homo sapien
taaatgtttttttctggatctcttggtcatagt

SEQ ID NO: 790671 - DNA, 33 bp, Homo sapien
ggaatacaggttttagacaaggcatttgtagag

SEQ ID NO: 790672 - DNA, 33 bp, Homo sapien
ggaatacaggttttaggcaaggcatttgtagag

SEQ ID NO: 790673 - DNA, 33 bp, Homo sapien
cggtatgtcttgaagacggtgggaattgaaaag

SEQ ID NO: 790674 - DNA, 33 bp, Homo sapien
cggtatgtcttgaagatggtgggaattgaaaag

SEQ ID NO: 790675 - DNA, 33 bp, Homo sapien
attgtggctgtttctacatagtcaagatcatta

SEQ ID NO: 790676 - DNA, 33 bp, Homo sapien
attgtggctgtttctagatagtcaagatcatta

SEQ ID NO: 790677 - DNA, 33 bp, Homo sapien
agcaattggaactatgaaaactaaaattctagt

SEQ ID NO: 790678 - DNA, 33 bp, Homo sapien
agcaattggaactatggaaactaaaattctagt

SEQ ID NO: 790679 - DNA, 33 bp, Homo sapien
accccatagtcttctgaaaagaatgcatctgtt

SEQ ID NO: 790680 - DNA, 33 bp, Homo sapien
accccatagtcttctggaaagaatgcatctgtt

SEQ ID NO: 790681 - DNA, 33 bp, Homo sapien
tttatgttacaagtgaaaagaattggtaagtaa

SEQ ID NO: 790682 - DNA, 33 bp, Homo sapien
tttatgttacaagtgacaagaattggtaagtaa

SEQ ID NO: 790683 - DNA, 33 bp, Homo sapien
atattcctgtaactgaccttagtttagtttctt

SEQ ID NO: 790684 - DNA, 33 bp, Homo sapien
atattcctgtaactgatcttagtttagtttctt

SEQ ID NO: 790685 - DNA, 33 bp, Homo sapien
ttagttcaattatacaagagagagagcatctcc

SEQ ID NO: 790686 - DNA, 33 bp, Homo sapien
ttagttcaattatacaggagagagagcatctcc

SEQ ID NO: 790687 - DNA, 33 bp, Homo sapien
acagaaaaattgataaaatgatacagagatttt

SEQ ID NO: 790688 - DNA, 33 bp, Homo sapien
acagaaaaattgataacatgatacagagatttt

SEQ ID NO: 790689 - DNA, 33 bp, Homo sapien
gccagttggtttttcaggacaaatatggaccag

SEQ ID NO: 790690 - DNA, 33 bp, Homo sapien
gccagttggtttttcatgacaaatatggaccag

SEQ ID NO: 790691 - DNA, 33 bp, Homo sapien
agttctgtgtgattaacaggtacaggaggacaa

SEQ ID NO: 790692 - DNA, 33 bp, Homo sapien
agttctgtgtgattaataggtacaggaggacaa

SEQ ID NO: 790693 - DNA, 33 bp, Homo sapien
tttgatggatacttcacgtaataagtcccaacc

SEQ ID NO: 790694 - DNA, 33 bp, Homo sapien
tttgatggatacttcatgtaataagtcccaacc

SEQ ID NO: 790695 - DNA, 33 bp, Homo sapien
actgacagtaccacacaggatctcataaatagt

SEQ ID NO: 790696 - DNA, 33 bp, Homo sapien
actgacagtaccacacgggatctcataaatagt

SEQ ID NO: 790697 - DNA, 33 bp, Homo sapien
ggcaacaactaagactaaaatagaagcctatca

SEQ ID NO: 790698 - DNA, 33 bp, Homo sapien
ggcaacaactaagactcaaatagaagcctatca

SEQ ID NO: 790699 - DNA, 33 bp, Homo sapien
aatactgttaccgtaaaagcatatttcaaaata

SEQ ID NO: 790700 - DNA, 33 bp, Homo sapien
aatactgttaccgtaagagcatatttcaaaata

SEQ ID NO: 790701 - DNA, 33 bp, Homo sapien
ataaatggttacacaaaggacagaatttgggga

SEQ ID NO: 790702 - DNA, 33 bp, Homo sapien
ataaatggttacacaatggacagaatttgggga

SEQ ID NO: 790703 - DNA, 33 bp, Homo sapien
aaatatattttctttcgctaccagctgataggg

SEQ ID NO: 790704 - DNA, 33 bp, Homo sapien
aaatatattttctttctctaccagctgataggg

SEQ ID NO: 790705 - DNA, 33 bp, Homo sapien
tctcaggaaaaagagcacagaggtgaagcacca

SEQ ID NO: 790706 - DNA, 33 bp, Homo sapien
tctcaggaaaaagagcccagaggtgaagcacca

SEQ ID NO: 790707 - DNA, 33 bp, Homo sapien
ttgcactggtataagacatttgtcactagtaag

SEQ ID NO: 790708 - DNA, 33 bp, Homo sapien
ttgcactggtataagatatttgtcactagtaag

SEQ ID NO: 790709 - DNA, 33 bp, Homo sapien
atgagttacccagaaacgtgtggaatcttcttc

SEQ ID NO: 790710 - DNA, 33 bp, Homo sapien
atgagttacccagaaatgtgtggaatcttcttc

SEQ ID NO: 790711 - DNA, 33 bp, Homo sapien
aaatagaaggggctaccaaaaacagagggagaa

SEQ ID NO: 790712 - DNA, 33 bp, Homo sapien
aaatagaaggggctactaaaaacagagggagaa

SEQ ID NO: 790713 - DNA, 33 bp, Homo sapien
ccaagagctgtatccccaccaaataatagtgaa

SEQ ID NO: 790714 - DNA, 33 bp, Homo sapien
ccaagagctgtatccctaccaaataatagtgaa

SEQ ID NO: 790715 - DNA, 33 bp, Homo sapien
tgcaatagaaagctagcatatcaactaacaact

SEQ ID NO: 790716 - DNA, 33 bp, Homo sapien
tgcaatagaaagctagtatatcaactaacaact

SEQ ID NO: 790717 - DNA, 33 bp, Homo sapien
tgaagcactaacatccaaacaggacccatccct

SEQ ID NO: 790718 - DNA, 33 bp, Homo sapien
tgaagcactaacatccgaacaggacccatccct

SEQ ID NO: 790719 - DNA, 33 bp, Homo sapien
tgggaagaaaattttgcagaaatgttcagaggc

SEQ ID NO: 790720 - DNA, 33 bp, Homo sapien
tgggaagaaaattttggagaaatgttcagaggc

SEQ ID NO: 790721 - DNA, 33 bp, Homo sapien
gacttatggcagcccaacgtcttgaacagtccc

SEQ ID NO: 790722 - DNA, 33 bp, Homo sapien
gacttatggcagcccagcgtcttgaacagtccc

SEQ ID NO: 790723 - DNA, 33 bp, Homo sapien
ttctattggtgtgaacagcaccgggacggaaaa

SEQ ID NO: 790724 - DNA, 33 bp, Homo sapien
ttctattggtgtgaacggcaccgggacggaaaa

SEQ ID NO: 790725 - DNA, 33 bp, Homo sapien
gtccagtgcaaaagaaagaagactacacacact

SEQ ID NO: 790726 - DNA, 33 bp, Homo sapien
gtccagtgcaaaagaaggaagactacacacact

SEQ ID NO: 790727 - DNA, 33 bp, Homo sapien
aagagccaaagtttatcaaaagtgagttttgaa

SEQ ID NO: 790728 - DNA, 33 bp, Homo sapien
aagagccaaagtttatgaaaagtgagttttgaa

SEQ ID NO: 790729 - DNA, 33 bp, Homo sapien
gtccacagtgctgtgaagaagctccagctagcc

SEQ ID NO: 790730 - DNA, 33 bp, Homo sapien
gtccacagtgctgtgaggaagctccagctagcc

SEQ ID NO: 790731 - DNA, 33 bp, Homo sapien
cactggctactgttaaataacaagctgggatgg

SEQ ID NO: 790732 - DNA, 33 bp, Homo sapien
cactggctactgttaagtaacaagctgggatgg

SEQ ID NO: 790733 - DNA, 33 bp, Homo sapien
tagctaaaagctcttaccaacaactcactggta

SEQ ID NO: 790734 - DNA, 33 bp, Homo sapien
tagctaaaagctcttagcaacaactcactggta

SEQ ID NO: 790735 - DNA, 33 bp, Homo sapien
ttgagcttctaaggtacggaagaaatttggagt

SEQ ID NO: 790736 - DNA, 33 bp, Homo sapien
ttgagcttctaaggtatggaagaaatttggagt

SEQ ID NO: 790737 - DNA, 33 bp, Homo sapien
tgaaaattgtgaagaactaagtgaatgactgga

SEQ ID NO: 790738 - DNA, 33 bp, Homo sapien
tgaaaattgtgaagaagtaagtgaatgactgga

SEQ ID NO: 790739 - DNA, 33 bp, Homo sapien
caaaatttcaaagtgaaaatgaacaatgtaatc

SEQ ID NO: 790740 - DNA, 33 bp, Homo sapien
caaaatttcaaagtgagaatgaacaatgtaatc

SEQ ID NO: 790741 - DNA, 33 bp, Homo sapien
ttaggaaaaaagtgaacgaatgtatacatggta

SEQ ID NO: 790742 - DNA, 33 bp, Homo sapien
ttaggaaaaaagtgaatgaatgtatacatggta

SEQ ID NO: 790743 - DNA, 33 bp, Homo sapien
gtaagcataggcagaaaccatagatttaggcat

SEQ ID NO: 790744 - DNA, 33 bp, Homo sapien
gtaagcataggcagaagccatagatttaggcat

SEQ ID NO: 790745 - DNA, 33 bp, Homo sapien
tttgtacacagtgacacagggtttcatttaata

SEQ ID NO: 790746 - DNA, 33 bp, Homo sapien
tttgtacacagtgacatagggtttcatttaata

SEQ ID NO: 790747 - DNA, 33 bp, Homo sapien
atgtaaaggatctatacggagaaaactacagaa

SEQ ID NO: 790748 - DNA, 33 bp, Homo sapien
atgtaaaggatctatatggagaaaactacagaa

SEQ ID NO: 790749 - DNA, 33 bp, Homo sapien
ccttttgctatgtttacatttaacaggcatttc

SEQ ID NO: 790750 - DNA, 33 bp, Homo sapien
ccttttgctatgtttatatttaacaggcatttc

SEQ ID NO: 790751 - DNA, 33 bp, Homo sapien
taagttacactgctcccggacagtgatctcaac

SEQ ID NO: 790752 - DNA, 33 bp, Homo sapien
taagttacactgctcctggacagtgatctcaac

SEQ ID NO: 790753 - DNA, 33 bp, Homo sapien
gaaagatgatgagctaaggaaggagcacagcct

SEQ ID NO: 790754 - DNA, 33 bp, Homo sapien
gaaagatgatgagctacggaaggagcacagcct

SEQ ID NO: 790755 - DNA, 33 bp, Homo sapien
tcacaaagatttaaaaatggaccacagctgggt

SEQ ID NO: 790756 - DNA, 33 bp, Homo sapien
tcacaaagatttaaaagtggaccacagctgggt

SEQ ID NO: 790757 - DNA, 33 bp, Homo sapien
taaacagaagtggaaccattgggtcataagata

SEQ ID NO: 790758 - DNA, 33 bp, Homo sapien
taaacagaagtggaactattgggtcataagata

SEQ ID NO: 790759 - DNA, 33 bp, Homo sapien
gattaagacaggtaacaagccaatactgggcat

SEQ ID NO: 790760 - DNA, 33 bp, Homo sapien
gattaagacaggtaacgagccaatactgggcat

SEQ ID NO: 790761 - DNA, 33 bp, Homo sapien
ggaagcagagtttagcaagcagaagaaatatga

SEQ ID NO: 790762 - DNA, 33 bp, Homo sapien
ggaagcagagtttagcgagcagaagaaatatga

SEQ ID NO: 790763 - DNA, 33 bp, Homo sapien
agtcattgtagaattgaaattaaaattgtttga

SEQ ID NO: 790764 - DNA, 33 bp, Homo sapien
agtcattgtagaattggaattaaaattgtttga

SEQ ID NO: 790765 - DNA, 33 bp, Homo sapien
ctgccctctgtaagaccaggtgaaaaaagctac

SEQ ID NO: 790766 - DNA, 33 bp, Homo sapien
ctgccctctgtaagacgaggtgaaaaaagctac

SEQ ID NO: 790767 - DNA, 33 bp, Homo sapien
cttggtgtctcgcataagttttgaggacaattg

SEQ ID NO: 790768 - DNA, 33 bp, Homo sapien
cttggtgtctcgcataggttttgaggacaattg

SEQ ID NO: 790769 - DNA, 33 bp, Homo sapien
gcaagaaatgtctctcccttatccaacatacct

SEQ ID NO: 790770 - DNA, 33 bp, Homo sapien
gcaagaaatgtctctcgcttatccaacatacct

SEQ ID NO: 790771 - DNA, 33 bp, Homo sapien
tgtgctttactgacaacgcctacacatgcaagt

SEQ ID NO: 790772 - DNA, 33 bp, Homo sapien
tgtgctttactgacaatgcctacacatgcaagt

SEQ ID NO: 790773 - DNA, 33 bp, Homo sapien
gatgttatactaaggacgcacctgcttgctttg

SEQ ID NO: 790774 - DNA, 33 bp, Homo sapien
gatgttatactaaggatgcacctgcttgctttg

SEQ ID NO: 790775 - DNA, 33 bp, Homo sapien
atttctcaggatgtacagaaacgcctgcatgtt

SEQ ID NO: 790776 - DNA, 33 bp, Homo sapien
atttctcaggatgtacggaaacgcctgcatgtt

SEQ ID NO: 790777 - DNA, 33 bp, Homo sapien
aatcgttaaaaatgcacagattctgatttctgt

SEQ ID NO: 790778 - DNA, 33 bp, Homo sapien
aatcgttaaaaatgcatagattctgatttctgt

SEQ ID NO: 790779 - DNA, 33 bp, Homo sapien
ccgctccctgtacctcaagtagctgacccccta

SEQ ID NO: 790780 - DNA, 33 bp, Homo sapien
ccgctccctgtacctcgagtagctgacccccta

SEQ ID NO: 790781 - DNA, 33 bp, Homo sapien
ttgtcacaggaaaagacgggtctgattcctgag

SEQ ID NO: 790782 - DNA, 33 bp, Homo sapien
ttgtcacaggaaaagatgggtctgattcctgag

SEQ ID NO: 790783 - DNA, 33 bp, Homo sapien
agcgctgaaagggaaacaggatgaggcaaaaag

SEQ ID NO: 790784 - DNA, 33 bp, Homo sapien
agcgctgaaagggaaataggatgaggcaaaaag

SEQ ID NO: 790785 - DNA, 33 bp, Homo sapien
tggatgtctcaaagccccaacgttttcagtttc

SEQ ID NO: 790786 - DNA, 33 bp, Homo sapien
tggatgtctcaaagcctcaacgttttcagtttc

SEQ ID NO: 790787 - DNA, 33 bp, Homo sapien
tgagacatccatgtgaaagccagtgggcaatta

SEQ ID NO: 790788 - DNA, 33 bp, Homo sapien
tgagacatccatgtgagagccagtgggcaatta

SEQ ID NO: 790789 - DNA, 33 bp, Homo sapien
gtttgggaaacagacacaagaaacacataaacc

SEQ ID NO: 790790 - DNA, 33 bp, Homo sapien
gtttgggaaacagacataagaaacacataaacc

SEQ ID NO: 790791 - DNA, 33 bp, Homo sapien
gtagaaataagccatccctggtgtgccatattc

SEQ ID NO: 790792 - DNA, 33 bp, Homo sapien
gtagaaataagccatcgctggtgtgccatattc

SEQ ID NO: 790793 - DNA, 33 bp, Homo sapien
taattgaagtagataaacccagatatgaaaatg

SEQ ID NO: 790794 - DNA, 33 bp, Homo sapien
taattgaagtagataatcccagatatgaaaatg

SEQ ID NO: 790795 - DNA, 33 bp, Homo sapien
aagtttatataaagggaatcatgcagtaggtac

SEQ ID NO: 790796 - DNA, 33 bp, Homo sapien
aagtttatataaagggtatcatgcagtaggtac

SEQ ID NO: 790797 - DNA, 33 bp, Homo sapien
aaattagaaaacagtgaaacatcagaatggaaa

SEQ ID NO: 790798 - DNA, 33 bp, Homo sapien
aaattagaaaacagtggaacatcagaatggaaa

SEQ ID NO: 790799 - DNA, 33 bp, Homo sapien
ctcttcaagtggctcaaaattatttcagttgaa

SEQ ID NO: 790800 - DNA, 33 bp, Homo sapien
ctcttcaagtggctcagaattatttcagttgaa

SEQ ID NO: 790801 - DNA, 33 bp, Homo sapien
gttgtgctgtgtcctcacttcaggaaataacta

SEQ ID NO: 790802 - DNA, 33 bp, Homo sapien
gttgtgctgtgtcctcccttcaggaaataacta

SEQ ID NO: 790803 - DNA, 33 bp, Homo sapien
aacagcttcagagatacgatccactgtagatgc

SEQ ID NO: 790804 - DNA, 33 bp, Homo sapien
aacagcttcagagatatgatccactgtagatgc

SEQ ID NO: 790805 - DNA, 33 bp, Homo sapien
tctctgagcatatagaaaacttcatgttgttca

SEQ ID NO: 790806 - DNA, 33 bp, Homo sapien
tctctgagcatatagagaacttcatgttgttca

SEQ ID NO: 790807 - DNA, 33 bp, Homo sapien
aaaaggaaatggaattcaaaggaatagtgacat

SEQ ID NO: 790808 - DNA, 33 bp, Homo sapien
aaaaggaaatggaatttaaaggaatagtgacat

SEQ ID NO: 790809 - DNA, 33 bp, Homo sapien
tcacctgttcttacacagatgtccttccagtca

SEQ ID NO: 790810 - DNA, 33 bp, Homo sapien
tcacctgttcttacacggatgtccttccagtca

SEQ ID NO: 790811 - DNA, 33 bp, Homo sapien
aatattatcaactatgcagacaaaggaatttct

SEQ ID NO: 790812 - DNA, 33 bp, Homo sapien
aatattatcaactatggagacaaaggaatttct

SEQ ID NO: 790813 - DNA, 33 bp, Homo sapien
tgagggtaacataaagacatttcaggaatgcaa

SEQ ID NO: 790814 - DNA, 33 bp, Homo sapien
tgagggtaacataaagtcatttcaggaatgcaa

SEQ ID NO: 790815 - DNA, 33 bp, Homo sapien
aaatgagacttaataccaggattagcagaaaag

SEQ ID NO: 790816 - DNA, 33 bp, Homo sapien
aaatgagacttaatacgaggattagcagaaaag

SEQ ID NO: 790817 - DNA, 33 bp, Homo sapien
gcatccatcgtttgacactaacagttttgaagg

SEQ ID NO: 790818 - DNA, 33 bp, Homo sapien
gcatccatcgtttgaccctaacagttttgaagg

SEQ ID NO: 790819 - DNA, 33 bp, Homo sapien
tcttttttcaggttgtcaattcctggctgacaa

SEQ ID NO: 790820 - DNA, 33 bp, Homo sapien
tcttttttcaggttgttaattcctggctgacaa

SEQ ID NO: 790821 - DNA, 33 bp, Homo sapien
agaaggagatgatgataaagttccaagctttaa

SEQ ID NO: 790822 - DNA, 33 bp, Homo sapien
agaaggagatgatgatgaagttccaagctttaa

SEQ ID NO: 790823 - DNA, 33 bp, Homo sapien
cattagttcaatataacgggataacaaggccct

SEQ ID NO: 790824 - DNA, 33 bp, Homo sapien
cattagttcaatataatgggataacaaggccct

SEQ ID NO: 790825 - DNA, 33 bp, Homo sapien
aacccgtagaaggctaaatatgagttagaaata

SEQ ID NO: 790826 - DNA, 33 bp, Homo sapien
aacccgtagaaggctatatatgagttagaaata

SEQ ID NO: 790827 - DNA, 33 bp, Homo sapien
aagctcaaaaatacaactaaatcacatcaaaga

SEQ ID NO: 790828 - DNA, 33 bp, Homo sapien
aagctcaaaaatacaattaaatcacatcaaaga

SEQ ID NO: 790829 - DNA, 33 bp, Homo sapien
tgcttttttcctattcacgagttcaaaataaat

SEQ ID NO: 790830 - DNA, 33 bp, Homo sapien
tgcttttttcctattcgcgagttcaaaataaat

SEQ ID NO: 790831 - DNA, 33 bp, Homo sapien
ttggattccttagggaaaatgcaatatagggaa

SEQ ID NO: 790832 - DNA, 33 bp, Homo sapien
ttggattccttagggagaatgcaatatagggaa

SEQ ID NO: 790833 - DNA, 33 bp, Homo sapien
tgatctctgatttccactgatctgttaggtgaa

SEQ ID NO: 790834 - DNA, 33 bp, Homo sapien
tgatctctgatttccattgatctgttaggtgaa

SEQ ID NO: 790835 - DNA, 33 bp, Homo sapien
cgacatgacctgattcaaataaggaaggcaaca

SEQ ID NO: 790836 - DNA, 33 bp, Homo sapien
cgacatgacctgattcgaataaggaaggcaaca

SEQ ID NO: 790837 - DNA, 33 bp, Homo sapien
aggatgattcaaatacacattatttcagcttga

SEQ ID NO: 790838 - DNA, 33 bp, Homo sapien
aggatgattcaaatacgcattatttcagcttga

SEQ ID NO: 790839 - DNA, 33 bp, Homo sapien
agttcaaatcttataacgtgcaggagttggtct

SEQ ID NO: 790840 - DNA, 33 bp, Homo sapien
agttcaaatcttataatgtgcaggagttggtct

SEQ ID NO: 790841 - DNA, 33 bp, Homo sapien
gttttctagtctaaaaatcaggttcacatccat

SEQ ID NO: 790842 - DNA, 33 bp, Homo sapien
gttttctagtctaaaagtcaggttcacatccat

SEQ ID NO: 790843 - DNA, 33 bp, Homo sapien
tgcagttggcaactctcaaaatctttaatgttt

SEQ ID NO: 790844 - DNA, 33 bp, Homo sapien
tgcagttggcaactcttaaaatctttaatgttt

SEQ ID NO: 790845 - DNA, 33 bp, Homo sapien
aaggtcatataacctacggagcaaagcagaaga

SEQ ID NO: 790846 - DNA, 33 bp, Homo sapien
aaggtcatataacctatggagcaaagcagaaga

SEQ ID NO: 790847 - DNA, 33 bp, Homo sapien
ttagcatttgaagccacggatggagcaaagtag

SEQ ID NO: 790848 - DNA, 33 bp, Homo sapien
ttagcatttgaagccatggatggagcaaagtag

SEQ ID NO: 790849 - DNA, 33 bp, Homo sapien
agtattagtggtttcaaaagtattactatgtag

SEQ ID NO: 790850 - DNA, 33 bp, Homo sapien
agtattagtggtttcagaagtattactatgtag

SEQ ID NO: 790851 - DNA, 33 bp, Homo sapien
gactatatggggtgtaaggtattctctaaagag

SEQ ID NO: 790852 - DNA, 33 bp, Homo sapien
gactatatggggtgtagggtattctctaaagag

SEQ ID NO: 790853 - DNA, 33 bp, Homo sapien
atgtcattgtttatgccaagaatattgctttag

SEQ ID NO: 790854 - DNA, 33 bp, Homo sapien
atgtcattgtttatgctaagaatattgctttag

SEQ ID NO: 790855 - DNA, 33 bp, Homo sapien
gtatttgccaaaataacagattgctgatttttt

SEQ ID NO: 790856 - DNA, 33 bp, Homo sapien
gtatttgccaaaataagagattgctgatttttt

SEQ ID NO: 790857 - DNA, 33 bp, Homo sapien
gaaaacacctaaagccacttacagataactgca

SEQ ID NO: 790858 - DNA, 33 bp, Homo sapien
gaaaacacctaaagccgcttacagataactgca

SEQ ID NO: 790859 - DNA, 33 bp, Homo sapien
tttatatatgtattgcacctagtaatgctaggt

SEQ ID NO: 790860 - DNA, 33 bp, Homo sapien
tttatatatgtattgctcctagtaatgctaggt

SEQ ID NO: 790861 - DNA, 33 bp, Homo sapien
tctcagctgtgataaagtgacatgagctagata

SEQ ID NO: 790862 - DNA, 33 bp, Homo sapien
tctcagctgtgataaattgacatgagctagata

SEQ ID NO: 790863 - DNA, 33 bp, Homo sapien
cagtcttcaaattaaacagatctgcagctagtt

SEQ ID NO: 790864 - DNA, 33 bp, Homo sapien
cagtcttcaaattaaatagatctgcagctagtt

SEQ ID NO: 790865 - DNA, 33 bp, Homo sapien
gtgggcctgggttatccctaaacaactacactt

SEQ ID NO: 790866 - DNA, 33 bp, Homo sapien
gtgggcctgggttatctctaaacaactacactt

SEQ ID NO: 790867 - DNA, 33 bp, Homo sapien
cctttctgtggagtgaccttattggaacattca

SEQ ID NO: 790868 - DNA, 33 bp, Homo sapien
cctttctgtggagtgatcttattggaacattca

SEQ ID NO: 790869 - DNA, 33 bp, Homo sapien
ggagatgagtaggacagtgtcaggtaaagagca

SEQ ID NO: 790870 - DNA, 33 bp, Homo sapien
ggagatgagtaggacattgtcaggtaaagagca

SEQ ID NO: 790871 - DNA, 33 bp, Homo sapien
aaagctaccataaacaataaagctcctcagtag

SEQ ID NO: 790872 - DNA, 33 bp, Homo sapien
aaagctaccataaacagtaaagctcctcagtag

SEQ ID NO: 790873 - DNA, 33 bp, Homo sapien
ggtattcacagagtatcagctaaaaagcaatac

SEQ ID NO: 790874 - DNA, 33 bp, Homo sapien
ggtattcacagagtatgagctaaaaagcaatac

SEQ ID NO: 790875 - DNA, 33 bp, Homo sapien
aaaaattgagtaggacacagaaggttagaatta

SEQ ID NO: 790876 - DNA, 33 bp, Homo sapien
aaaaattgagtaggacgcagaaggttagaatta

SEQ ID NO: 790877 - DNA, 33 bp, Homo sapien
atttgtattctatgaactgtctatccacgttct

SEQ ID NO: 790878 - DNA, 33 bp, Homo sapien
atttgtattctatgaattgtctatccacgttct

SEQ ID NO: 790879 - DNA, 33 bp, Homo sapien
ccaccaatgactgaccacataattctcagagtt

SEQ ID NO: 790880 - DNA, 33 bp, Homo sapien
ccaccaatgactgaccgcataattctcagagtt

SEQ ID NO: 790881 - DNA, 33 bp, Homo sapien
tcagccttcacgaacacggtagtagagggccac

SEQ ID NO: 790882 - DNA, 33 bp, Homo sapien
tcagccttcacgaacatggtagtagagggccac

SEQ ID NO: 790883 - DNA, 33 bp, Homo sapien
gcccaactctgaactacaaagaatggttaaagg

SEQ ID NO: 790884 - DNA, 33 bp, Homo sapien
gcccaactctgaactataaagaatggttaaagg

SEQ ID NO: 790885 - DNA, 33 bp, Homo sapien
gaattggcaagactccagcgtttaaattggtgc

SEQ ID NO: 790886 - DNA, 33 bp, Homo sapien
gaattggcaagactccggcgtttaaattggtgc

SEQ ID NO: 790887 - DNA, 33 bp, Homo sapien
tttacttcatcagtaggattttagtcaagaatt

SEQ ID NO: 790888 - DNA, 33 bp, Homo sapien
tttacttcatcagtagtattttagtcaagaatt

SEQ ID NO: 790889 - DNA, 33 bp, Homo sapien
gaccccactgaatgtacaggtcatcattcacac

SEQ ID NO: 790890 - DNA, 33 bp, Homo sapien
gaccccactgaatgtagaggtcatcattcacac

SEQ ID NO: 790891 - DNA, 33 bp, Homo sapien
gtggatggtcagcaaaagcaagaagaaacatgg

SEQ ID NO: 790892 - DNA, 33 bp, Homo sapien
gtggatggtcagcaaaggcaagaagaaacatgg

SEQ ID NO: 790893 - DNA, 33 bp, Homo sapien
tgcttgtcattcctctcagacctcctagtggta

SEQ ID NO: 790894 - DNA, 33 bp, Homo sapien
tgcttgtcattcctcttagacctcctagtggta

SEQ ID NO: 790895 - DNA, 33 bp, Homo sapien
agtgctactgtaataacggcctgcattagtgaa

SEQ ID NO: 790896 - DNA, 33 bp, Homo sapien
agtgctactgtaataatggcctgcattagtgaa

SEQ ID NO: 790897 - DNA, 33 bp, Homo sapien
taggaagaaaatgaagcctatttcaactgtaat

SEQ ID NO: 790898 - DNA, 33 bp, Homo sapien
taggaagaaaatgaaggctatttcaactgtaat

SEQ ID NO: 790899 - DNA, 33 bp, Homo sapien
aactatacatccaaaacattatgttgagtacaa

SEQ ID NO: 790900 - DNA, 33 bp, Homo sapien
aactatacatccaaaatattatgttgagtacaa

SEQ ID NO: 790901 - DNA, 33 bp, Homo sapien
agcttcaggtttttcaataactcacactgtgac

SEQ ID NO: 790902 - DNA, 33 bp, Homo sapien
agcttcaggtttttcagtaactcacactgtgac

SEQ ID NO: 790903 - DNA, 33 bp, Homo sapien
catttctgcaagtagacggggaaccaatcataa

SEQ ID NO: 790904 - DNA, 33 bp, Homo sapien
catttctgcaagtagatggggaaccaatcataa

SEQ ID NO: 790905 - DNA, 33 bp, Homo sapien
tttccagatcctcttacgtcctgaccttccaaa

SEQ ID NO: 790906 - DNA, 33 bp, Homo sapien
tttccagatcctcttatgtcctgaccttccaaa

SEQ ID NO: 790907 - DNA, 33 bp, Homo sapien
agttaggaagctctacagcatttgattggttgt

SEQ ID NO: 790908 - DNA, 33 bp, Homo sapien
agttaggaagctctactgcatttgattggttgt

SEQ ID NO: 790909 - DNA, 33 bp, Homo sapien
ttggggagaatggaagaagggccagtcctagaa

SEQ ID NO: 790910 - DNA, 33 bp, Homo sapien
ttggggagaatggaaggagggccagtcctagaa

SEQ ID NO: 790911 - DNA, 33 bp, Homo sapien
atgttacccaaggtcaatgaagttaaaatctag

SEQ ID NO: 790912 - DNA, 33 bp, Homo sapien
atgttacccaaggtcagtgaagttaaaatctag

SEQ ID NO: 790913 - DNA, 33 bp, Homo sapien
cagtgtgataatatttaaaactggggtctttca

SEQ ID NO: 790914 - DNA, 33 bp, Homo sapien
cagtgtgataatatttgaaactggggtctttca

SEQ ID NO: 790915 - DNA, 33 bp, Homo sapien
acaagtaaaggaaacacggtgagtgctgtggca

SEQ ID NO: 790916 - DNA, 33 bp, Homo sapien
acaagtaaaggaaacatggtgagtgctgtggca

SEQ ID NO: 790917 - DNA, 33 bp, Homo sapien
cttgatattctcataaccttttgcgtaacatct

SEQ ID NO: 790918 - DNA, 33 bp, Homo sapien
cttgatattctcataatcttttgcgtaacatct

SEQ ID NO: 790919 - DNA, 33 bp, Homo sapien
aatttttgctgtcctgaacttgcaccctaagct

SEQ ID NO: 790920 - DNA, 33 bp, Homo sapien
aatttttgctgtcctgcacttgcaccctaagct

SEQ ID NO: 790921 - DNA, 33 bp, Homo sapien
tgttactgaaattaaacggatttggacaccacc

SEQ ID NO: 790922 - DNA, 33 bp, Homo sapien
tgttactgaaattaaatggatttggacaccacc

SEQ ID NO: 790923 - DNA, 33 bp, Homo sapien
cttaaatctaatgaaccaacctctgctggcttc

SEQ ID NO: 790924 - DNA, 33 bp, Homo sapien
cttaaatctaatgaactaacctctgctggcttc

SEQ ID NO: 790925 - DNA, 33 bp, Homo sapien
cagtaccgcttgaagacagactgcagtaaaaga

SEQ ID NO: 790926 - DNA, 33 bp, Homo sapien
cagtaccgcttgaagatagactgcagtaaaaga

SEQ ID NO: 790927 - DNA, 33 bp, Homo sapien
agatgagttttcagctgaataatcaagcagaac

SEQ ID NO: 790928 - DNA, 33 bp, Homo sapien
agatgagttttcagcttaataatcaagcagaac

SEQ ID NO: 790929 - DNA, 33 bp, Homo sapien
tggatttgtcgtgttacgttccaagatctgtgt

SEQ ID NO: 790930 - DNA, 33 bp, Homo sapien
tggatttgtcgtgttatgttccaagatctgtgt

SEQ ID NO: 790931 - DNA, 33 bp, Homo sapien
actatgtactcagagaacttaacttgcattttc

SEQ ID NO: 790932 - DNA, 33 bp, Homo sapien
actatgtactcagagagcttaacttgcattttc

SEQ ID NO: 790933 - DNA, 33 bp, Homo sapien
ttctccacaatatcagcagatcttacactctat

SEQ ID NO: 790934 - DNA, 33 bp, Homo sapien
ttctccacaatatcagtagatcttacactctat

SEQ ID NO: 790935 - DNA, 33 bp, Homo sapien
cctggcagcacagacacagatggggaattgagt

SEQ ID NO: 790936 - DNA, 33 bp, Homo sapien
cctggcagcacagacagagatggggaattgagt

SEQ ID NO: 790937 - DNA, 33 bp, Homo sapien
ggagatgatgagtaccacgcaattatcagtata

SEQ ID NO: 790938 - DNA, 33 bp, Homo sapien
ggagatgatgagtaccgcgcaattatcagtata

SEQ ID NO: 790939 - DNA, 33 bp, Homo sapien
gatttcctgctgatggaaaaagaagtagctcac

SEQ ID NO: 790940 - DNA, 33 bp, Homo sapien
gatttcctgctgatgggaaaagaagtagctcac

SEQ ID NO: 790941 - DNA, 33 bp, Homo sapien
tccttcacataacacactgtggaaaggttttga

SEQ ID NO: 790942 - DNA, 33 bp, Homo sapien
tccttcacataacacattgtggaaaggttttga

SEQ ID NO: 790943 - DNA, 33 bp, Homo sapien
agaatggcctttggaaacatctctacccatttt

SEQ ID NO: 790944 - DNA, 33 bp, Homo sapien
agaatggcctttggaagcatctctacccatttt

SEQ ID NO: 790945 - DNA, 33 bp, Homo sapien
gtgtcatgttagtaaacctgtaaaatggtataa

SEQ ID NO: 790946 - DNA, 33 bp, Homo sapien
gtgtcatgttagtaaatctgtaaaatggtataa

SEQ ID NO: 790947 - DNA, 33 bp, Homo sapien
ttattctgtatggaaaaatccttatttctaccc

SEQ ID NO: 790948 - DNA, 33 bp, Homo sapien
ttattctgtatggaaagatccttatttctaccc

SEQ ID NO: 790949 - DNA, 33 bp, Homo sapien
ttaatttctatggaagaatgaatctgtccagaa

SEQ ID NO: 790950 - DNA, 33 bp, Homo sapien
ttaatttctatggaagtatgaatctgtccagaa

SEQ ID NO: 790951 - DNA, 33 bp, Homo sapien
ttctgcttctgtcagacatttcttattctgttt

SEQ ID NO: 790952 - DNA, 33 bp, Homo sapien
ttctgcttctgtcagatatttcttattctgttt

SEQ ID NO: 790953 - DNA, 33 bp, Homo sapien
gaagtgtaaaaatggaacagaggaaactgaatg

SEQ ID NO: 790954 - DNA, 33 bp, Homo sapien
gaagtgtaaaaatggagcagaggaaactgaatg

SEQ ID NO: 790955 - DNA, 33 bp, Homo sapien
gatcacagggtatccaaaactctgatttctagg

SEQ ID NO: 790956 - DNA, 33 bp, Homo sapien
gatcacagggtatccataactctgatttctagg

SEQ ID NO: 790957 - DNA, 33 bp, Homo sapien
tcatgcaatctaaagcaatcagttttatatcct

SEQ ID NO: 790958 - DNA, 33 bp, Homo sapien
tcatgcaatctaaagccatcagttttatatcct

SEQ ID NO: 790959 - DNA, 33 bp, Homo sapien
atctcataattttgcgaccaaaagggaattatc

SEQ ID NO: 790960 - DNA, 33 bp, Homo sapien
atctcataattttgcgcccaaaagggaattatc

SEQ ID NO: 790961 - DNA, 33 bp, Homo sapien
agacttggagttagaacagaatacacttgtgtc

SEQ ID NO: 790962 - DNA, 33 bp, Homo sapien
agacttggagttagaatagaatacacttgtgtc

SEQ ID NO: 790963 - DNA, 33 bp, Homo sapien
ctatgggaaaatgaagaaggcactaataggaac

SEQ ID NO: 790964 - DNA, 33 bp, Homo sapien
ctatgggaaaatgaagcaggcactaataggaac

SEQ ID NO: 790965 - DNA, 33 bp, Homo sapien
tcctggacagaggaacaggaaaagatttaatga

SEQ ID NO: 790966 - DNA, 33 bp, Homo sapien
tcctggacagaggaactggaaaagatttaatga

SEQ ID NO: 790967 - DNA, 33 bp, Homo sapien
ctctttctgggtaaacaataatgtgttttgaat

SEQ ID NO: 790968 - DNA, 33 bp, Homo sapien
ctctttctgggtaaaccataatgtgttttgaat

SEQ ID NO: 790969 - DNA, 33 bp, Homo sapien
agtataaccaaaatgaccttgaaaacaaagaac

SEQ ID NO: 790970 - DNA, 33 bp, Homo sapien
agtataaccaaaatgatcttgaaaacaaagaac

SEQ ID NO: 790971 - DNA, 33 bp, Homo sapien
tgaacataaggccaaccaaccatctgatctcaa

SEQ ID NO: 790972 - DNA, 33 bp, Homo sapien
tgaacataaggccaacgaaccatctgatctcaa

SEQ ID NO: 790973 - DNA, 33 bp, Homo sapien
taccattagacccatcaatccaaccattactgg

SEQ ID NO: 790974 - DNA, 33 bp, Homo sapien
taccattagacccatcgatccaaccattactgg

SEQ ID NO: 790975 - DNA, 33 bp, Homo sapien
ggtcctaggatcccaaacttggagccctgcaga

SEQ ID NO: 790976 - DNA, 33 bp, Homo sapien
ggtcctaggatcccaatcttggagccctgcaga

SEQ ID NO: 790977 - DNA, 33 bp, Homo sapien
taggcaggttccagctaagaggcttttgaggat

SEQ ID NO: 790978 - DNA, 33 bp, Homo sapien
taggcaggttccagctgagaggcttttgaggat

SEQ ID NO: 790979 - DNA, 33 bp, Homo sapien
tatttgatcatggtagacaagtttttgatatgc

SEQ ID NO: 790980 - DNA, 33 bp, Homo sapien
tatttgatcatggtaggcaagtttttgatatgc

SEQ ID NO: 790981 - DNA, 33 bp, Homo sapien
tcagatatctgacaaaggagacaaaaaataagc

SEQ ID NO: 790982 - DNA, 33 bp, Homo sapien
tcagatatctgacaaatgagacaaaaaataagc

SEQ ID NO: 790983 - DNA, 33 bp, Homo sapien
aaggcaaaagaatggggatacacaacaaggtat

SEQ ID NO: 790984 - DNA, 33 bp, Homo sapien
aaggcaaaagaatgggtatacacaacaaggtat

SEQ ID NO: 790985 - DNA, 33 bp, Homo sapien
tgatgaaaggctgacacaaatggattatatcag

SEQ ID NO: 790986 - DNA, 33 bp, Homo sapien
tgatgaaaggctgacagaaatggattatatcag

SEQ ID NO: 790987 - DNA, 33 bp, Homo sapien
agttaagcccaatagacaacaagtggattccca

SEQ ID NO: 790988 - DNA, 33 bp, Homo sapien
agttaagcccaatagataacaagtggattccca

SEQ ID NO: 790989 - DNA, 33 bp, Homo sapien
ccagaaatcaccaggtaaaatcagatggaataa

SEQ ID NO: 790990 - DNA, 33 bp, Homo sapien
ccagaaatcaccaggtcaaatcagatggaataa

SEQ ID NO: 790991 - DNA, 33 bp, Homo sapien
gaataattggagcaagcagatgagtaatcaagt

SEQ ID NO: 790992 - DNA, 33 bp, Homo sapien
gaataattggagcaaggagatgagtaatcaagt

SEQ ID NO: 790993 - DNA, 33 bp, Homo sapien
ggtaagtgtgctttagaaaattaataggaagat

SEQ ID NO: 790994 - DNA, 33 bp, Homo sapien
ggtaagtgtgctttaggaaattaataggaagat

SEQ ID NO: 790995 - DNA, 33 bp, Homo sapien
tgtattcatctttgcagtctctgaaacttgtac

SEQ ID NO: 790996 - DNA, 33 bp, Homo sapien
tgtattcatctttgcattctctgaaacttgtac

SEQ ID NO: 790997 - DNA, 33 bp, Homo sapien
gtaaagattcattcaaaggtcacaaagacccaa

SEQ ID NO: 790998 - DNA, 33 bp, Homo sapien
gtaaagattcattcaatggtcacaaagacccaa

SEQ ID NO: 790999 - DNA, 33 bp, Homo sapien
tgtatccatcacctaaataacgtacatagtacc

SEQ ID NO: 791000 - DNA, 33 bp, Homo sapien
tgtatccatcacctaagtaacgtacatagtacc

SEQ ID NO: 791001 - DNA, 33 bp, Homo sapien
gcaaaccccaaaataaatccacctatctacagc

SEQ ID NO: 791002 - DNA, 33 bp, Homo sapien
gcaaaccccaaaataagtccacctatctacagc

SEQ ID NO: 791003 - DNA, 33 bp, Homo sapien
attttgccgtgtctccactcaaatctcatctta

SEQ ID NO: 791004 - DNA, 33 bp, Homo sapien
attttgccgtgtctccgctcaaatctcatctta

SEQ ID NO: 791005 - DNA, 33 bp, Homo sapien
tcaggggagtcttcacaaggtagcctccaaaga

SEQ ID NO: 791006 - DNA, 33 bp, Homo sapien
tcaggggagtcttcacgaggtagcctccaaaga

SEQ ID NO: 791007 - DNA, 33 bp, Homo sapien
acatcacttttcttcaagttactcaaagtgttt

SEQ ID NO: 791008 - DNA, 33 bp, Homo sapien
acatcacttttcttcaggttactcaaagtgttt

SEQ ID NO: 791009 - DNA, 33 bp, Homo sapien
ctgaaatatcctttcaaccatgtcaccaaatct

SEQ ID NO: 791010 - DNA, 33 bp, Homo sapien
ctgaaatatcctttcacccatgtcaccaaatct

SEQ ID NO: 791011 - DNA, 33 bp, Homo sapien
tcttgttagttcttcactctatgaataaactac

SEQ ID NO: 791012 - DNA, 33 bp, Homo sapien
tcttgttagttcttcagtctatgaataaactac

SEQ ID NO: 791013 - DNA, 33 bp, Homo sapien
aaattatcaagattgcaaaaattatcaaaaaac

SEQ ID NO: 791014 - DNA, 33 bp, Homo sapien
aaattatcaagattgcgaaaattatcaaaaaac

SEQ ID NO: 791015 - DNA, 33 bp, Homo sapien
aaacaaaactagctacactcttaacgtacaatt

SEQ ID NO: 791016 - DNA, 33 bp, Homo sapien
aaacaaaactagctacgctcttaacgtacaatt

SEQ ID NO: 791017 - DNA, 33 bp, Homo sapien
atgatggaatgttacacggattttagatggagc

SEQ ID NO: 791018 - DNA, 33 bp, Homo sapien
atgatggaatgttacatggattttagatggagc

SEQ ID NO: 791019 - DNA, 33 bp, Homo sapien
tgtgttttaaatcggaaagggtccactcgttct

SEQ ID NO: 791020 - DNA, 33 bp, Homo sapien
tgtgttttaaatcggagagggtccactcgttct

SEQ ID NO: 791021 - DNA, 33 bp, Homo sapien
attgaccattctgaaaaccttagcaccattaag

SEQ ID NO: 791022 - DNA, 33 bp, Homo sapien
attgaccattctgaaagccttagcaccattaag

SEQ ID NO: 791023 - DNA, 33 bp, Homo sapien
aagtacagcaagcttacggctcacttccccggc

SEQ ID NO: 791024 - DNA, 33 bp, Homo sapien
aagtacagcaagcttatggctcacttccccggc

SEQ ID NO: 791025 - DNA, 33 bp, Homo sapien
gacaacagcatctcacagcatctctaaaagaga

SEQ ID NO: 791026 - DNA, 33 bp, Homo sapien
gacaacagcatctcacggcatctctaaaagaga

SEQ ID NO: 791027 - DNA, 33 bp, Homo sapien
ctttagacctggtaaacagaaataaaagctaag

SEQ ID NO: 791028 - DNA, 33 bp, Homo sapien
ctttagacctggtaaatagaaataaaagctaag

SEQ ID NO: 791029 - DNA, 33 bp, Homo sapien
ttaaagacagctcagtaaacaggtctcagaagt

SEQ ID NO: 791030 - DNA, 33 bp, Homo sapien
ttaaagacagctcagtcaacaggtctcagaagt

SEQ ID NO: 791031 - DNA, 33 bp, Homo sapien
tctgaaattaaactcacggcagtgtcataatct

SEQ ID NO: 791032 - DNA, 33 bp, Homo sapien
tctgaaattaaactcatggcagtgtcataatct

SEQ ID NO: 791033 - DNA, 33 bp, Homo sapien
aggtgaattagaacacagcaggtacctatctgg

SEQ ID NO: 791034 - DNA, 33 bp, Homo sapien
aggtgaattagaacacggcaggtacctatctgg

SEQ ID NO: 791035 - DNA, 33 bp, Homo sapien
gagttcaaaacaagaactggaaaagaattgact

SEQ ID NO: 791036 - DNA, 33 bp, Homo sapien
gagttcaaaacaagaattggaaaagaattgact

SEQ ID NO: 791037 - DNA, 33 bp, Homo sapien
gctttggaaaccagaggaaagattttggatata

SEQ ID NO: 791038 - DNA, 33 bp, Homo sapien
gctttggaaaccagagtaaagattttggatata

SEQ ID NO: 791039 - DNA, 33 bp, Homo sapien
atatggtagttctaagcctgagtgatgtaacga

SEQ ID NO: 791040 - DNA, 33 bp, Homo sapien
atatggtagttctaagtctgagtgatgtaacga

SEQ ID NO: 791041 - DNA, 33 bp, Homo sapien
ttttccagactccaaccatgccattttccctgc

SEQ ID NO: 791042 - DNA, 33 bp, Homo sapien
ttttccagactccaacgatgccattttccctgc

SEQ ID NO: 791043 - DNA, 33 bp, Homo sapien
ggcctttttctctgtacgttttcaatctccgtc

SEQ ID NO: 791044 - DNA, 33 bp, Homo sapien
ggcctttttctctgtatgttttcaatctccgtc

SEQ ID NO: 791045 - DNA, 33 bp, Homo sapien
ctgtatgaggactgaaagctgttgcaaatgtcc

SEQ ID NO: 791046 - DNA, 33 bp, Homo sapien
ctgtatgaggactgaatgctgttgcaaatgtcc

SEQ ID NO: 791047 - DNA, 33 bp, Homo sapien
cctccagatgctcaggaacctcacactgccact

SEQ ID NO: 791048 - DNA, 33 bp, Homo sapien
cctccagatgctcagggacctcacactgccact

SEQ ID NO: 791049 - DNA, 33 bp, Homo sapien
actgtgccttcagtgcgctgggcttcagcctgt

SEQ ID NO: 791050 - DNA, 33 bp, Homo sapien
actgtgccttcagtgctctgggcttcagcctgt

SEQ ID NO: 791051 - DNA, 33 bp, Homo sapien
cacttggcaaaaaagaatatgtgtgaagttcat

SEQ ID NO: 791052 - DNA, 33 bp, Homo sapien
cacttggcaaaaaagagtatgtgtgaagttcat

SEQ ID NO: 791053 - DNA, 33 bp, Homo sapien
ctgggacaaaacttaccgctctgataaagaatt

SEQ ID NO: 791054 - DNA, 33 bp, Homo sapien
ctgggacaaaacttactgctctgataaagaatt

SEQ ID NO: 791055 - DNA, 33 bp, Homo sapien
ttggacagtcatataaactgattcaaactagag

SEQ ID NO: 791056 - DNA, 33 bp, Homo sapien
ttggacagtcatataacctgattcaaactagag

SEQ ID NO: 791057 - DNA, 33 bp, Homo sapien
cattgaaaatacaatacaccaggcttgagaatg

SEQ ID NO: 791058 - DNA, 33 bp, Homo sapien
cattgaaaatacaatataccaggcttgagaatg

SEQ ID NO: 791059 - DNA, 33 bp, Homo sapien
cataatactacccctacatggtttgtcattcat

SEQ ID NO: 791060 - DNA, 33 bp, Homo sapien
cataatactacccctagatggtttgtcattcat

SEQ ID NO: 791061 - DNA, 33 bp, Homo sapien
tcaacacccacatgccaaagtaagatgagaaag

SEQ ID NO: 791062 - DNA, 33 bp, Homo sapien
tcaacacccacatgcccaagtaagatgagaaag

SEQ ID NO: 791063 - DNA, 33 bp, Homo sapien
acacaagatgatttggaaggattttcagggtca

SEQ ID NO: 791064 - DNA, 33 bp, Homo sapien
acacaagatgatttgggaggattttcagggtca

SEQ ID NO: 791065 - DNA, 33 bp, Homo sapien
ggcaaaacagaaataaactgatagctgcctttt

SEQ ID NO: 791066 - DNA, 33 bp, Homo sapien
ggcaaaacagaaataacctgatagctgcctttt

SEQ ID NO: 791067 - DNA, 33 bp, Homo sapien
ataaaagcttcagtaaagttttgtagttctatt

SEQ ID NO: 791068 - DNA, 33 bp, Homo sapien
ataaaagcttcagtaatgttttgtagttctatt

SEQ ID NO: 791069 - DNA, 33 bp, Homo sapien
tctacagaattctccacgcaataaccacaaaat

SEQ ID NO: 791070 - DNA, 33 bp, Homo sapien
tctacagaattctccatgcaataaccacaaaat

SEQ ID NO: 791071 - DNA, 33 bp, Homo sapien
aggtagcagttacatcaatcaaagtgacagtat

SEQ ID NO: 791072 - DNA, 33 bp, Homo sapien
aggtagcagttacatccatcaaagtgacagtat

SEQ ID NO: 791073 - DNA, 33 bp, Homo sapien
atagaggtaggtaatgcatactgagttcattgt

SEQ ID NO: 791074 - DNA, 33 bp, Homo sapien
atagaggtaggtaatgtatactgagttcattgt

SEQ ID NO: 791075 - DNA, 33 bp, Homo sapien
tattttctccggtgaaataggagcacttactgc

SEQ ID NO: 791076 - DNA, 33 bp, Homo sapien
tattttctccggtgaagtaggagcacttactgc

SEQ ID NO: 791077 - DNA, 33 bp, Homo sapien
gcctggacatacttacagcaccccagagcacct

SEQ ID NO: 791078 - DNA, 33 bp, Homo sapien
gcctggacatacttacggcaccccagagcacct

SEQ ID NO: 791079 - DNA, 33 bp, Homo sapien
ctaagtggcaagattgaatggtggcaatctgtg

SEQ ID NO: 791080 - DNA, 33 bp, Homo sapien
ctaagtggcaagattgtatggtggcaatctgtg

SEQ ID NO: 791081 - DNA, 33 bp, Homo sapien
ccaggtggcattattacaaatcaagaatgcaac

SEQ ID NO: 791082 - DNA, 33 bp, Homo sapien
ccaggtggcattattagaaatcaagaatgcaac

SEQ ID NO: 791083 - DNA, 33 bp, Homo sapien
tatgaatcttcccttacacaaaaactcagagca

SEQ ID NO: 791084 - DNA, 33 bp, Homo sapien
tatgaatcttcccttagacaaaaactcagagca

SEQ ID NO: 791085 - DNA, 33 bp, Homo sapien
tttgttagtgcctacaactcttagatagtggaa

SEQ ID NO: 791086 - DNA, 33 bp, Homo sapien
tttgttagtgcctacagctcttagatagtggaa

SEQ ID NO: 791087 - DNA, 33 bp, Homo sapien
accacctggcattagaagtcttactctgttgga

SEQ ID NO: 791088 - DNA, 33 bp, Homo sapien
accacctggcattagaggtcttactctgttgga

SEQ ID NO: 791089 - DNA, 33 bp, Homo sapien
aatatcacctgtcttaacttccaagtgaattgg

SEQ ID NO: 791090 - DNA, 33 bp, Homo sapien
aatatcacctgtcttaccttccaagtgaattgg

SEQ ID NO: 791091 - DNA, 33 bp, Homo sapien
gaataattcaagctaactgatgcaaaaagataa

SEQ ID NO: 791092 - DNA, 33 bp, Homo sapien
gaataattcaagctaattgatgcaaaaagataa

SEQ ID NO: 791093 - DNA, 33 bp, Homo sapien
tcatctcatttaattcccacatcagtatccctg

SEQ ID NO: 791094 - DNA, 33 bp, Homo sapien
tcatctcatttaattcgcacatcagtatccctg

SEQ ID NO: 791095 - DNA, 33 bp, Homo sapien
ttatagtatttgctaaatggacgtggctaataa

SEQ ID NO: 791096 - DNA, 33 bp, Homo sapien
ttatagtatttgctaattggacgtggctaataa

SEQ ID NO: 791097 - DNA, 33 bp, Homo sapien
tatcatcccccaattcactgtcaattctaatgt

SEQ ID NO: 791098 - DNA, 33 bp, Homo sapien
tatcatcccccaattcgctgtcaattctaatgt

SEQ ID NO: 791099 - DNA, 33 bp, Homo sapien
aaagctgcttctcaggaaaagttcacatgcttt

SEQ ID NO: 791100 - DNA, 33 bp, Homo sapien
aaagctgcttctcagggaaagttcacatgcttt

SEQ ID NO: 791101 - DNA, 33 bp, Homo sapien
tatctgattagagcagccatagaaaagtaagta

SEQ ID NO: 791102 - DNA, 33 bp, Homo sapien
tatctgattagagcagtcatagaaaagtaagta

SEQ ID NO: 791103 - DNA, 33 bp, Homo sapien
agtcccagatttagtgaagatgacagccctctt

SEQ ID NO: 791104 - DNA, 33 bp, Homo sapien
agtcccagatttagtggagatgacagccctctt

SEQ ID NO: 791105 - DNA, 33 bp, Homo sapien
tagaaattcaagttcacgattacctacagggta

SEQ ID NO: 791106 - DNA, 33 bp, Homo sapien
tagaaattcaagttcatgattacctacagggta

SEQ ID NO: 791107 - DNA, 33 bp, Homo sapien
ggaagatgtttccattcaacattatcattctct

SEQ ID NO: 791108 - DNA, 33 bp, Homo sapien
ggaagatgtttccatttaacattatcattctct

SEQ ID NO: 791109 - DNA, 33 bp, Homo sapien
tggactcttttttcaaaccatttctcataccac

SEQ ID NO: 791110 - DNA, 33 bp, Homo sapien
tggactcttttttcaatccatttctcataccac

SEQ ID NO: 791111 - DNA, 33 bp, Homo sapien
ggtacctggaactcaacgaaggttaagacaata

SEQ ID NO: 791112 - DNA, 33 bp, Homo sapien
ggtacctggaactcaaggaaggttaagacaata

SEQ ID NO: 791113 - DNA, 33 bp, Homo sapien
gaaagattgtccaatacagtcctaaagagtcaa

SEQ ID NO: 791114 - DNA, 33 bp, Homo sapien
gaaagattgtccaatatagtcctaaagagtcaa

SEQ ID NO: 791115 - DNA, 33 bp, Homo sapien
caatactgctgttggaacttttggctaagtggt

SEQ ID NO: 791116 - DNA, 33 bp, Homo sapien
caatactgctgttggagcttttggctaagtggt

SEQ ID NO: 791117 - DNA, 33 bp, Homo sapien
agtggttattatttgggcatgaatagagccatt

SEQ ID NO: 791118 - DNA, 33 bp, Homo sapien
agtggttattatttggtcatgaatagagccatt

SEQ ID NO: 791119 - DNA, 33 bp, Homo sapien
taaagtgtcatgcaaaagtggagtggttattat

SEQ ID NO: 791120 - DNA, 33 bp, Homo sapien
taaagtgtcatgcaaatgtggagtggttattat

SEQ ID NO: 791121 - DNA, 33 bp, Homo sapien
acctggtttctatacacggctctaccattcatc

SEQ ID NO: 791122 - DNA, 33 bp, Homo sapien
acctggtttctatacatggctctaccattcatc

SEQ ID NO: 791123 - DNA, 33 bp, Homo sapien
ataggcccttaccttaacccaaatcactcttta

SEQ ID NO: 791124 - DNA, 33 bp, Homo sapien
ataggcccttaccttaccccaaatcactcttta

SEQ ID NO: 791125 - DNA, 33 bp, Homo sapien
cttgaaggctgtctaccaaatcagctggtctgc

SEQ ID NO: 791126 - DNA, 33 bp, Homo sapien
cttgaaggctgtctacgaaatcagctggtctgc

SEQ ID NO: 791127 - DNA, 33 bp, Homo sapien
tggagagttaaagataagatatttgaaatcttt

SEQ ID NO: 791128 - DNA, 33 bp, Homo sapien
tggagagttaaagatatgatatttgaaatcttt

SEQ ID NO: 791129 - DNA, 33 bp, Homo sapien
aactctgaggagtctacaaattctacacatgaa

SEQ ID NO: 791130 - DNA, 33 bp, Homo sapien
aactctgaggagtctataaattctacacatgaa

SEQ ID NO: 791131 - DNA, 33 bp, Homo sapien
agagaggctaccgttgcacttcagtatgcagca

SEQ ID NO: 791132 - DNA, 33 bp, Homo sapien
agagaggctaccgttgtacttcagtatgcagca

SEQ ID NO: 791133 - DNA, 33 bp, Homo sapien
gggtccaggaatctcactattgacaggccctcc

SEQ ID NO: 791134 - DNA, 33 bp, Homo sapien
gggtccaggaatctcagtattgacaggccctcc

SEQ ID NO: 791135 - DNA, 33 bp, Homo sapien
tgctggtgcttttcaacctggagggcctgtcaa

SEQ ID NO: 791136 - DNA, 33 bp, Homo sapien
tgctggtgcttttcaatctggagggcctgtcaa

SEQ ID NO: 791137 - DNA, 33 bp, Homo sapien
tttagctgtgttagggaacaaaatttcaaaggt

SEQ ID NO: 791138 - DNA, 33 bp, Homo sapien
tttagctgtgttaggggacaaaatttcaaaggt

SEQ ID NO: 791139 - DNA, 33 bp, Homo sapien
ccaggtaccaggcaagacactgaggaatgaaag

SEQ ID NO: 791140 - DNA, 33 bp, Homo sapien
ccaggtaccaggcaagtcactgaggaatgaaag

SEQ ID NO: 791141 - DNA, 33 bp, Homo sapien
acaactggctttcaaagactctgtgaatgttct

SEQ ID NO: 791142 - DNA, 33 bp, Homo sapien
acaactggctttcaaatactctgtgaatgttct

SEQ ID NO: 791143 - DNA, 33 bp, Homo sapien
gcagagatcaggttcagcagtttccctagggac

SEQ ID NO: 791144 - DNA, 33 bp, Homo sapien
gcagagatcaggttcatcagtttccctagggac

SEQ ID NO: 791145 - DNA, 33 bp, Homo sapien
agtggaaccccagcaacatggagatttgaggtc

SEQ ID NO: 791146 - DNA, 33 bp, Homo sapien
agtggaaccccagcaatatggagatttgaggtc

SEQ ID NO: 791147 - DNA, 33 bp, Homo sapien
tatttaggatatccataatcttgaacatttatc

SEQ ID NO: 791148 - DNA, 33 bp, Homo sapien
tatttaggatatccatgatcttgaacatttatc

SEQ ID NO: 791149 - DNA, 33 bp, Homo sapien
tcaagagatggattatcactagcctttgcctac

SEQ ID NO: 791150 - DNA, 33 bp, Homo sapien
tcaagagatggattattactagcctttgcctac

SEQ ID NO: 791151 - DNA, 33 bp, Homo sapien
ttctcaggaaaatccaatgcagatgaacctgaa

SEQ ID NO: 791152 - DNA, 33 bp, Homo sapien
ttctcaggaaaatccagtgcagatgaacctgaa

SEQ ID NO: 791153 - DNA, 33 bp, Homo sapien
tgtgggagctataaagcctaaaattcatagcct

SEQ ID NO: 791154 - DNA, 33 bp, Homo sapien
tgtgggagctataaagtctaaaattcatagcct

SEQ ID NO: 791155 - DNA, 33 bp, Homo sapien
tctccctatgtgaacaccttgattagacaatcg

SEQ ID NO: 791156 - DNA, 33 bp, Homo sapien
tctccctatgtgaacatcttgattagacaatcg

SEQ ID NO: 791157 - DNA, 33 bp, Homo sapien
tcatttttttccaaagcccgacactgccatgtt

SEQ ID NO: 791158 - DNA, 33 bp, Homo sapien
tcatttttttccaaagtccgacactgccatgtt

SEQ ID NO: 791159 - DNA, 33 bp, Homo sapien
agcagaaagaaactcaagaaggcagcagatgga

SEQ ID NO: 791160 - DNA, 33 bp, Homo sapien
agcagaaagaaactcaggaaggcagcagatgga

SEQ ID NO: 791161 - DNA, 33 bp, Homo sapien
ccatgtctttacaaaagccttctcaccttgaaa

SEQ ID NO: 791162 - DNA, 33 bp, Homo sapien
ccatgtctttacaaaatccttctcaccttgaaa

SEQ ID NO: 791163 - DNA, 33 bp, Homo sapien
tgttcacttttctcctcaaatttcccaccacac

SEQ ID NO: 791164 - DNA, 33 bp, Homo sapien
tgttcacttttctccttaaatttcccaccacac

SEQ ID NO: 791165 - DNA, 33 bp, Homo sapien
tagttcaggcagtggaaaatactttgatattac

SEQ ID NO: 791166 - DNA, 33 bp, Homo sapien
tagttcaggcagtggacaatactttgatattac

SEQ ID NO: 791167 - DNA, 33 bp, Homo sapien
cttctgctttctttcaaatctctcatgctccct

SEQ ID NO: 791168 - DNA, 33 bp, Homo sapien
cttctgctttctttcagatctctcatgctccct

SEQ ID NO: 791169 - DNA, 33 bp, Homo sapien
ggccattccagaaggaaggaacaggatgtgcaa

SEQ ID NO: 791170 - DNA, 33 bp, Homo sapien
ggccattccagaaggacggaacaggatgtgcaa

SEQ ID NO: 791171 - DNA, 33 bp, Homo sapien
gtttaaaataggaaataatagccctggagtgga

SEQ ID NO: 791172 - DNA, 33 bp, Homo sapien
gtttaaaataggaaatgatagccctggagtgga

SEQ ID NO: 791173 - DNA, 33 bp, Homo sapien
gaaagaaattggtataacttactggcatgtaca

SEQ ID NO: 791174 - DNA, 33 bp, Homo sapien
gaaagaaattggtataccttactggcatgtaca

SEQ ID NO: 791175 - DNA, 33 bp, Homo sapien
agtcagggcagtggtcaactattaaaaaaatta

SEQ ID NO: 791176 - DNA, 33 bp, Homo sapien
agtcagggcagtggtcgactattaaaaaaatta

SEQ ID NO: 791177 - DNA, 33 bp, Homo sapien
catcacattctggtgtcaaactttaagcagtca

SEQ ID NO: 791178 - DNA, 33 bp, Homo sapien
catcacattctggtgttaaactttaagcagtca

SEQ ID NO: 791179 - DNA, 33 bp, Homo sapien
cggcaacatctgggaaactgtcggaagtgcaca

SEQ ID NO: 791180 - DNA, 33 bp, Homo sapien
cggcaacatctgggaacctgtcggaagtgcaca

SEQ ID NO: 791181 - DNA, 33 bp, Homo sapien
gggattacaggtatgcactggctaacttttgta

SEQ ID NO: 791182 - DNA, 33 bp, Homo sapien
gggattacaggtatgcgctggctaacttttgta

SEQ ID NO: 791183 - DNA, 33 bp, Homo sapien
ggcgagttttcttaacaaaatgagtcctgcaat

SEQ ID NO: 791184 - DNA, 33 bp, Homo sapien
ggcgagttttcttaacgaaatgagtcctgcaat

SEQ ID NO: 791185 - DNA, 33 bp, Homo sapien
ttctcgagtgggggtaacacaaagtatatcatc

SEQ ID NO: 791186 - DNA, 33 bp, Homo sapien
ttctcgagtgggggtagcacaaagtatatcatc

SEQ ID NO: 791187 - DNA, 33 bp, Homo sapien
aagtcactaaatggcaataggaatttactcgga

SEQ ID NO: 791188 - DNA, 33 bp, Homo sapien
aagtcactaaatggcagtaggaatttactcgga

SEQ ID NO: 791189 - DNA, 33 bp, Homo sapien
tccctcagagatgaaaagagaggggaaggaaaa

SEQ ID NO: 791190 - DNA, 33 bp, Homo sapien
tccctcagagatgaaaggagaggggaaggaaaa

SEQ ID NO: 791191 - DNA, 33 bp, Homo sapien
tcctcagttgtgatacaggagtcatgaaagtaa

SEQ ID NO: 791192 - DNA, 33 bp, Homo sapien
tcctcagttgtgatacgggagtcatgaaagtaa

SEQ ID NO: 791193 - DNA, 33 bp, Homo sapien
cataacatcattggaacatacctgtgagtgaag

SEQ ID NO: 791194 - DNA, 33 bp, Homo sapien
cataacatcattggaatatacctgtgagtgaag

SEQ ID NO: 791195 - DNA, 33 bp, Homo sapien
caatctgaaatttttcgaaaacccatgaggcat

SEQ ID NO: 791196 - DNA, 33 bp, Homo sapien
caatctgaaatttttctaaaacccatgaggcat

SEQ ID NO: 791197 - DNA, 33 bp, Homo sapien
ggtgagtaaagctgaagtgtaattgcttctgga

SEQ ID NO: 791198 - DNA, 33 bp, Homo sapien
ggtgagtaaagctgaattgtaattgcttctgga

SEQ ID NO: 791199 - DNA, 33 bp, Homo sapien
aatcatctaataacaccgccaactaatttcctt

SEQ ID NO: 791200 - DNA, 33 bp, Homo sapien
aatcatctaataacactgccaactaatttcctt

SEQ ID NO: 791201 - DNA, 33 bp, Homo sapien
gtttcttggacacctacagtatggaaactaaat

SEQ ID NO: 791202 - DNA, 33 bp, Homo sapien
gtttcttggacacctatagtatggaaactaaat

SEQ ID NO: 791203 - DNA, 33 bp, Homo sapien
aaagcccagtgggagacaaaacatcacagcaac

SEQ ID NO: 791204 - DNA, 33 bp, Homo sapien
aaagcccagtgggagataaaacatcacagcaac

SEQ ID NO: 791205 - DNA, 33 bp, Homo sapien
ggtggactgcagaaaaatcacgagaccacgtga

SEQ ID NO: 791206 - DNA, 33 bp, Homo sapien
ggtggactgcagaaaactcacgagaccacgtga

SEQ ID NO: 791207 - DNA, 33 bp, Homo sapien
tgcatacgtggcaacaaagaaaaagtggaggga

SEQ ID NO: 791208 - DNA, 33 bp, Homo sapien
tgcatacgtggcaacatagaaaaagtggaggga

SEQ ID NO: 791209 - DNA, 33 bp, Homo sapien
aaccatgcatggaaaaaccattcttttgaggac

SEQ ID NO: 791210 - DNA, 33 bp, Homo sapien
aaccatgcatggaaaagccattcttttgaggac

SEQ ID NO: 791211 - DNA, 33 bp, Homo sapien
gtaccaaatagacaagccttagatgttcttaca

SEQ ID NO: 791212 - DNA, 33 bp, Homo sapien
gtaccaaatagacaaggcttagatgttcttaca

SEQ ID NO: 791213 - DNA, 33 bp, Homo sapien
gctatagaatttcccacacatcatttttctaag

SEQ ID NO: 791214 - DNA, 33 bp, Homo sapien
gctatagaatttcccatacatcatttttctaag

SEQ ID NO: 791215 - DNA, 33 bp, Homo sapien
tactcaattagtgaaactatctacctataccaa

SEQ ID NO: 791216 - DNA, 33 bp, Homo sapien
tactcaattagtgaaagtatctacctataccaa

SEQ ID NO: 791217 - DNA, 33 bp, Homo sapien
gtgggaatggagtttccattacttcttcacctt

SEQ ID NO: 791218 - DNA, 33 bp, Homo sapien
gtgggaatggagtttctattacttcttcacctt

SEQ ID NO: 791219 - DNA, 33 bp, Homo sapien
aaagctcaattcgaaccggaataaacacagacc

SEQ ID NO: 791220 - DNA, 33 bp, Homo sapien
aaagctcaattcgaacgggaataaacacagacc

SEQ ID NO: 791221 - DNA, 33 bp, Homo sapien
ctgaatctccaaagtccattgtatcactgtata

SEQ ID NO: 791222 - DNA, 33 bp, Homo sapien
ctgaatctccaaagtctattgtatcactgtata

SEQ ID NO: 791223 - DNA, 33 bp, Homo sapien
ggctcttgacctttcccctcagccaggcaattc

SEQ ID NO: 791224 - DNA, 33 bp, Homo sapien
ggctcttgacctttcctctcagccaggcaattc

SEQ ID NO: 791225 - DNA, 33 bp, Homo sapien
gtggctcttggttaaactaaaaccgacaaagca

SEQ ID NO: 791226 - DNA, 33 bp, Homo sapien
gtggctcttggttaaattaaaaccgacaaagca

SEQ ID NO: 791227 - DNA, 33 bp, Homo sapien
gcttcactttccacaactgaagttactcatggt

SEQ ID NO: 791228 - DNA, 33 bp, Homo sapien
gcttcactttccacaattgaagttactcatggt

SEQ ID NO: 791229 - DNA, 33 bp, Homo sapien
taatgagatctggaaaattattcaaaatacatt

SEQ ID NO: 791230 - DNA, 33 bp, Homo sapien
taatgagatctggaaagttattcaaaatacatt

SEQ ID NO: 791231 - DNA, 33 bp, Homo sapien
ctgaccacactgatgaagcaattcttaatgatc

SEQ ID NO: 791232 - DNA, 33 bp, Homo sapien
ctgaccacactgatgaggcaattcttaatgatc

SEQ ID NO: 791233 - DNA, 33 bp, Homo sapien
ttcctaatttaagctaagaaggttgtatctttc

SEQ ID NO: 791234 - DNA, 33 bp, Homo sapien
ttcctaatttaagctatgaaggttgtatctttc

SEQ ID NO: 791235 - DNA, 33 bp, Homo sapien
aagggatggagttaggaatacaagatttaactc

SEQ ID NO: 791236 - DNA, 33 bp, Homo sapien
aagggatggagttaggtatacaagatttaactc

SEQ ID NO: 791237 - DNA, 33 bp, Homo sapien
atcatctgtaaatactcaacttataggctactg

SEQ ID NO: 791238 - DNA, 33 bp, Homo sapien
atcatctgtaaatactgaacttataggctactg

SEQ ID NO: 791239 - DNA, 33 bp, Homo sapien
gagaccatttagtcaaaaccagtcattttatag

SEQ ID NO: 791240 - DNA, 33 bp, Homo sapien
gagaccatttagtcaacaccagtcattttatag

SEQ ID NO: 791241 - DNA, 33 bp, Homo sapien
gaggatccctttgccaactggccgcattagctg

SEQ ID NO: 791242 - DNA, 33 bp, Homo sapien
gaggatccctttgccatctggccgcattagctg

SEQ ID NO: 791243 - DNA, 33 bp, Homo sapien
cttccacattagactactaaaaagcctgaatat

SEQ ID NO: 791244 - DNA, 33 bp, Homo sapien
cttccacattagactattaaaaagcctgaatat

SEQ ID NO: 791245 - DNA, 33 bp, Homo sapien
gtaataaatttctggagaaaacacactgttaag

SEQ ID NO: 791246 - DNA, 33 bp, Homo sapien
gtaataaatttctggataaaacacactgttaag

SEQ ID NO: 791247 - DNA, 33 bp, Homo sapien
ggctttttgatgctacagcaatatgatcttggt

SEQ ID NO: 791248 - DNA, 33 bp, Homo sapien
ggctttttgatgctacggcaatatgatcttggt

SEQ ID NO: 791249 - DNA, 33 bp, Homo sapien
ctcattataggtgaggcaccattttaagtgctt

SEQ ID NO: 791250 - DNA, 33 bp, Homo sapien
ctcattataggtgaggtaccattttaagtgctt

SEQ ID NO: 791251 - DNA, 33 bp, Homo sapien
aaaggcagatagtggaaagtttttaaatatgag

SEQ ID NO: 791252 - DNA, 33 bp, Homo sapien
aaaggcagatagtggagagtttttaaatatgag

SEQ ID NO: 791253 - DNA, 33 bp, Homo sapien
acctgagcaaagaaacacgcccaggcccttccg

SEQ ID NO: 791254 - DNA, 33 bp, Homo sapien
acctgagcaaagaaactcgcccaggcccttccg

SEQ ID NO: 791255 - DNA, 33 bp, Homo sapien
catctatattttaacaaggtccccaaatgagtc

SEQ ID NO: 791256 - DNA, 33 bp, Homo sapien
catctatattttaacatggtccccaaatgagtc

SEQ ID NO: 791257 - DNA, 33 bp, Homo sapien
aactttattgtagcagcacatcatctggggcat

SEQ ID NO: 791258 - DNA, 33 bp, Homo sapien
aactttattgtagcaggacatcatctggggcat

SEQ ID NO: 791259 - DNA, 33 bp, Homo sapien
ttgtagggcacccgcactaaacccaggaggcaa

SEQ ID NO: 791260 - DNA, 33 bp, Homo sapien
ttgtagggcacccgcagtaaacccaggaggcaa

SEQ ID NO: 791261 - DNA, 33 bp, Homo sapien
ccccatggagaagtagaattaggcattttcaaa

SEQ ID NO: 791262 - DNA, 33 bp, Homo sapien
ccccatggagaagtagtattaggcattttcaaa

SEQ ID NO: 791263 - DNA, 33 bp, Homo sapien
gtattttgtgtacatacggaacacctacaaagt

SEQ ID NO: 791264 - DNA, 33 bp, Homo sapien
gtattttgtgtacatatggaacacctacaaagt

SEQ ID NO: 791265 - DNA, 33 bp, Homo sapien
tttggtggctccgtaactgagcaattttttggt

SEQ ID NO: 791266 - DNA, 33 bp, Homo sapien
tttggtggctccgtaattgagcaattttttggt

SEQ ID NO: 791267 - DNA, 33 bp, Homo sapien
ggacaagagtaacaacgactttaggatctaatc

SEQ ID NO: 791268 - DNA, 33 bp, Homo sapien
ggacaagagtaacaactactttaggatctaatc

SEQ ID NO: 791269 - DNA, 33 bp, Homo sapien
tggatatcatgtaagtaacaggaatagtcatat

SEQ ID NO: 791270 - DNA, 33 bp, Homo sapien
tggatatcatgtaagtgacaggaatagtcatat

SEQ ID NO: 791271 - DNA, 33 bp, Homo sapien
ttgctttttgttgcaccgaaatgcagctttcaa

SEQ ID NO: 791272 - DNA, 33 bp, Homo sapien
ttgctttttgttgcacggaaatgcagctttcaa

SEQ ID NO: 791273 - DNA, 33 bp, Homo sapien
ctctcaattcacaataaagcacaataatcaatc

SEQ ID NO: 791274 - DNA, 33 bp, Homo sapien
ctctcaattcacaatatagcacaataatcaatc

SEQ ID NO: 791275 - DNA, 33 bp, Homo sapien
tacaaaaacaaacctccccaactacatgcactt

SEQ ID NO: 791276 - DNA, 33 bp, Homo sapien
tacaaaaacaaacctctccaactacatgcactt

SEQ ID NO: 791277 - DNA, 33 bp, Homo sapien
aatactcctgcgtccaatattaacaaccaaacc

SEQ ID NO: 791278 - DNA, 33 bp, Homo sapien
aatactcctgcgtccattattaacaaccaaacc

SEQ ID NO: 791279 - DNA, 33 bp, Homo sapien
aaattgaagatgtcagcagagtttctgacttca

SEQ ID NO: 791280 - DNA, 33 bp, Homo sapien
aaattgaagatgtcaggagagtttctgacttca

SEQ ID NO: 791281 - DNA, 33 bp, Homo sapien
ctatgcttcaccataaatacacaaacacattca

SEQ ID NO: 791282 - DNA, 33 bp, Homo sapien
ctatgcttcaccataattacacaaacacattca

SEQ ID NO: 791283 - DNA, 33 bp, Homo sapien
ctccagagcatttgaagaactcattttgacaat

SEQ ID NO: 791284 - DNA, 33 bp, Homo sapien
ctccagagcatttgaataactcattttgacaat

SEQ ID NO: 791285 - DNA, 33 bp, Homo sapien
cagattaaggtcagagaaggaactagagcagga

SEQ ID NO: 791286 - DNA, 33 bp, Homo sapien
cagattaaggtcagaggaggaactagagcagga

SEQ ID NO: 791287 - DNA, 33 bp, Homo sapien
tacccctctgttctcaagcttctttctgagaca

SEQ ID NO: 791288 - DNA, 33 bp, Homo sapien
tacccctctgttctcatgcttctttctgagaca

SEQ ID NO: 791289 - DNA, 33 bp, Homo sapien
atataccccaggccataaacatttgttgtctca

SEQ ID NO: 791290 - DNA, 33 bp, Homo sapien
atataccccaggccatgaacatttgttgtctca

SEQ ID NO: 791291 - DNA, 33 bp, Homo sapien
gataggtgtagggtgcaataatcaaattacaga

SEQ ID NO: 791292 - DNA, 33 bp, Homo sapien
gataggtgtagggtgcgataatcaaattacaga

SEQ ID NO: 791293 - DNA, 33 bp, Homo sapien
gctcacagatggtttacggagtgaccctttgtc

SEQ ID NO: 791294 - DNA, 33 bp, Homo sapien
gctcacagatggtttatggagtgaccctttgtc

SEQ ID NO: 791295 - DNA, 33 bp, Homo sapien
aatgcttgaactttgaagtgactgagggatgaa

SEQ ID NO: 791296 - DNA, 33 bp, Homo sapien
aatgcttgaactttgaggtgactgagggatgaa

SEQ ID NO: 791297 - DNA, 33 bp, Homo sapien
gataattaaaacagcccatctcaagtatgctag

SEQ ID NO: 791298 - DNA, 33 bp, Homo sapien
gataattaaaacagcctatctcaagtatgctag

SEQ ID NO: 791299 - DNA, 33 bp, Homo sapien
gggtcttggaacatataataaggaaacatataa

SEQ ID NO: 791300 - DNA, 33 bp, Homo sapien
gggtcttggaacatatgataaggaaacatataa

SEQ ID NO: 791301 - DNA, 33 bp, Homo sapien
cttcatatattttagaagccacaagacattatt

SEQ ID NO: 791302 - DNA, 33 bp, Homo sapien
cttcatatattttagatgccacaagacattatt

SEQ ID NO: 791303 - DNA, 33 bp, Homo sapien
caagaaagtgttttgacgtatccagacaaaagg

SEQ ID NO: 791304 - DNA, 33 bp, Homo sapien
caagaaagtgttttgaggtatccagacaaaagg

SEQ ID NO: 791305 - DNA, 33 bp, Homo sapien
tctatgccctgacctccatcaaaaacatggccc

SEQ ID NO: 791306 - DNA, 33 bp, Homo sapien
tctatgccctgacctctatcaaaaacatggccc

SEQ ID NO: 791307 - DNA, 33 bp, Homo sapien
tgcatccataaaaaccacaggctggagaaggct

SEQ ID NO: 791308 - DNA, 33 bp, Homo sapien
tgcatccataaaaaccgcaggctggagaaggct

SEQ ID NO: 791309 - DNA, 33 bp, Homo sapien
tggctgctaagtgttcaagggaattaatgaaat

SEQ ID NO: 791310 - DNA, 33 bp, Homo sapien
tggctgctaagtgttccagggaattaatgaaat

SEQ ID NO: 791311 - DNA, 33 bp, Homo sapien
agactatttttgtgcccgatttgcttgctggaa

SEQ ID NO: 791312 - DNA, 33 bp, Homo sapien
agactatttttgtgcctgatttgcttgctggaa

SEQ ID NO: 791313 - DNA, 33 bp, Homo sapien
tgtatagtacttgcccacggctctccttctctt

SEQ ID NO: 791314 - DNA, 33 bp, Homo sapien
tgtatagtacttgcccgcggctctccttctctt

SEQ ID NO: 791315 - DNA, 33 bp, Homo sapien
gcagaactcagccttacgaattatgcgtacttt

SEQ ID NO: 791316 - DNA, 33 bp, Homo sapien
gcagaactcagccttatgaattatgcgtacttt

SEQ ID NO: 791317 - DNA, 33 bp, Homo sapien
aagtggagctgcaatcccttcttgtaacctgca

SEQ ID NO: 791318 - DNA, 33 bp, Homo sapien
aagtggagctgcaatctcttcttgtaacctgca

SEQ ID NO: 791319 - DNA, 33 bp, Homo sapien
gtgtatacacaacgtcaaatacaaaaacatgaa

SEQ ID NO: 791320 - DNA, 33 bp, Homo sapien
gtgtatacacaacgtcgaatacaaaaacatgaa

SEQ ID NO: 791321 - DNA, 33 bp, Homo sapien
gctctcagtaggtgtaaaagccaagtgataggt

SEQ ID NO: 791322 - DNA, 33 bp, Homo sapien
gctctcagtaggtgtacaagccaagtgataggt

SEQ ID NO: 791323 - DNA, 33 bp, Homo sapien
ttcttagtttttggaaatgaaccaatttgctca

SEQ ID NO: 791324 - DNA, 33 bp, Homo sapien
ttcttagtttttggaagtgaaccaatttgctca

SEQ ID NO: 791325 - DNA, 33 bp, Homo sapien
tacacaggtgcctggaaaccctgagaattttat

SEQ ID NO: 791326 - DNA, 33 bp, Homo sapien
tacacaggtgcctggacaccctgagaattttat

SEQ ID NO: 791327 - DNA, 33 bp, Homo sapien
gatataagatttgaaccaagacctgattctaaa

SEQ ID NO: 791328 - DNA, 33 bp, Homo sapien
gatataagatttgaacgaagacctgattctaaa

SEQ ID NO: 791329 - DNA, 33 bp, Homo sapien
gatgagattataggcaaccaatcttaacatctt

SEQ ID NO: 791330 - DNA, 33 bp, Homo sapien
gatgagattataggcatccaatcttaacatctt

SEQ ID NO: 791331 - DNA, 33 bp, Homo sapien
agcttgtttcttcgacaactccttgatccctag

SEQ ID NO: 791332 - DNA, 33 bp, Homo sapien
agcttgtttcttcgacgactccttgatccctag

SEQ ID NO: 791333 - DNA, 33 bp, Homo sapien
tgaagcctgtttcatcaagcatcctcctagtca

SEQ ID NO: 791334 - DNA, 33 bp, Homo sapien
tgaagcctgtttcatcgagcatcctcctagtca

SEQ ID NO: 791335 - DNA, 33 bp, Homo sapien
gaattacctaatagaacagtttttgtcctcctt

SEQ ID NO: 791336 - DNA, 33 bp, Homo sapien
gaattacctaatagaatagtttttgtcctcctt

SEQ ID NO: 791337 - DNA, 33 bp, Homo sapien
ctttctacaaccccccaagtccagctattaaga

SEQ ID NO: 791338 - DNA, 33 bp, Homo sapien
ctttctacaaccccccgagtccagctattaaga

SEQ ID NO: 791339 - DNA, 33 bp, Homo sapien
tccagctattaagaacaaagttaggaggtatca

SEQ ID NO: 791340 - DNA, 33 bp, Homo sapien
tccagctattaagaacgaagttaggaggtatca

SEQ ID NO: 791341 - DNA, 33 bp, Homo sapien
ttccttcatgaaaataacaacgagttaaccttc

SEQ ID NO: 791342 - DNA, 33 bp, Homo sapien
ttccttcatgaaaatatcaacgagttaaccttc

SEQ ID NO: 791343 - DNA, 33 bp, Homo sapien
tgttagatatatcatacggcaataatttggctc

SEQ ID NO: 791344 - DNA, 33 bp, Homo sapien
tgttagatatatcatagggcaataatttggctc

SEQ ID NO: 791345 - DNA, 33 bp, Homo sapien
aaggctcacattataccatttctttggcttcat

SEQ ID NO: 791346 - DNA, 33 bp, Homo sapien
aaggctcacattatactatttctttggcttcat

SEQ ID NO: 791347 - DNA, 33 bp, Homo sapien
gcactaagaagcaaaagggtggagttcaacggg

SEQ ID NO: 791348 - DNA, 33 bp, Homo sapien
gcactaagaagcaaaatggtggagttcaacggg

SEQ ID NO: 791349 - DNA, 33 bp, Homo sapien
gggtattagacctttaacaaatgcatagtttgc

SEQ ID NO: 791350 - DNA, 33 bp, Homo sapien
gggtattagacctttatcaaatgcatagtttgc

SEQ ID NO: 791351 - DNA, 33 bp, Homo sapien
atttttacaaacagagaagtctttcaaaaccaa

SEQ ID NO: 791352 - DNA, 33 bp, Homo sapien
atttttacaaacagagcagtctttcaaaaccaa

SEQ ID NO: 791353 - DNA, 33 bp, Homo sapien
tacatattcactcacaactttgccagtatttgc

SEQ ID NO: 791354 - DNA, 33 bp, Homo sapien
tacatattcactcacacctttgccagtatttgc

SEQ ID NO: 791355 - DNA, 33 bp, Homo sapien
gaggcttagaatcatcgcggaagacttaacaca

SEQ ID NO: 791356 - DNA, 33 bp, Homo sapien
gaggcttagaatcatctcggaagacttaacaca

SEQ ID NO: 791357 - DNA, 33 bp, Homo sapien
tgtacttacctaagaacgcacaagctcactaat

SEQ ID NO: 791358 - DNA, 33 bp, Homo sapien
tgtacttacctaagaatgcacaagctcactaat

SEQ ID NO: 791359 - DNA, 33 bp, Homo sapien
ctggcacatggcactaacagttgtcaacacaaa

SEQ ID NO: 791360 - DNA, 33 bp, Homo sapien
ctggcacatggcactagcagttgtcaacacaaa

SEQ ID NO: 791361 - DNA, 33 bp, Homo sapien
cccctaccctgatcccaaatgttcttaaattat

SEQ ID NO: 791362 - DNA, 33 bp, Homo sapien
cccctaccctgatcccgaatgttcttaaattat

SEQ ID NO: 791363 - DNA, 33 bp, Homo sapien
gttctctctcagactgccaggagcagcgcttaa

SEQ ID NO: 791364 - DNA, 33 bp, Homo sapien
gttctctctcagactgtcaggagcagcgcttaa

SEQ ID NO: 791365 - DNA, 33 bp, Homo sapien
aatgagacgcacccaagtgatagcttaaccttt

SEQ ID NO: 791366 - DNA, 33 bp, Homo sapien
aatgagacgcacccaattgatagcttaaccttt

SEQ ID NO: 791367 - DNA, 33 bp, Homo sapien
ataaataaataaatacaaagacagctaaaacca

SEQ ID NO: 791368 - DNA, 33 bp, Homo sapien
ataaataaataaatacgaagacagctaaaacca

SEQ ID NO: 791369 - DNA, 33 bp, Homo sapien
aaagatcaaactttgccagatgaacaaaacccc

SEQ ID NO: 791370 - DNA, 33 bp, Homo sapien
aaagatcaaactttgctagatgaacaaaacccc

SEQ ID NO: 791371 - DNA, 33 bp, Homo sapien
aggctcagaaaatctaataaatctgtctgaggc

SEQ ID NO: 791372 - DNA, 33 bp, Homo sapien
aggctcagaaaatctagtaaatctgtctgaggc

SEQ ID NO: 791373 - DNA, 33 bp, Homo sapien
gagtagcttctagtaaatgccaagacccagacc

SEQ ID NO: 791374 - DNA, 33 bp, Homo sapien
gagtagcttctagtaagtgccaagacccagacc

SEQ ID NO: 791375 - DNA, 33 bp, Homo sapien
tgtctgactcattccaccttacaaaataccata

SEQ ID NO: 791376 - DNA, 33 bp, Homo sapien
tgtctgactcattccatcttacaaaataccata

SEQ ID NO: 791377 - DNA, 33 bp, Homo sapien
ggcatggttccccctcaatgataggagccccat

SEQ ID NO: 791378 - DNA, 33 bp, Homo sapien
ggcatggttccccctcgatgataggagccccat

SEQ ID NO: 791379 - DNA, 33 bp, Homo sapien
cttaatatcctcaaccagaaaatatagaagttg

SEQ ID NO: 791380 - DNA, 33 bp, Homo sapien
cttaatatcctcaaccggaaaatatagaagttg

SEQ ID NO: 791381 - DNA, 33 bp, Homo sapien
aacagttctgaaataacccctttcttcagctgt

SEQ ID NO: 791382 - DNA, 33 bp, Homo sapien
aacagttctgaaataatccctttcttcagctgt

SEQ ID NO: 791383 - DNA, 33 bp, Homo sapien
aatgatggtagcactaagactcagactcagtct

SEQ ID NO: 791384 - DNA, 33 bp, Homo sapien
aatgatggtagcactaggactcagactcagtct

SEQ ID NO: 791385 - DNA, 33 bp, Homo sapien
acatgctattatcagaagaaagggaaaagggat

SEQ ID NO: 791386 - DNA, 33 bp, Homo sapien
acatgctattatcagaggaaagggaaaagggat

SEQ ID NO: 791387 - DNA, 33 bp, Homo sapien
ggtaagttccctggaaagtcaacacatgaatgc

SEQ ID NO: 791388 - DNA, 33 bp, Homo sapien
ggtaagttccctggaaggtcaacacatgaatgc

SEQ ID NO: 791389 - DNA, 33 bp, Homo sapien
gccctttcacatcctacctcacatgccccagga

SEQ ID NO: 791390 - DNA, 33 bp, Homo sapien
gccctttcacatcctatctcacatgccccagga

SEQ ID NO: 791391 - DNA, 33 bp, Homo sapien
tgtgtctaagctaagacgagtacgtttacttta

SEQ ID NO: 791392 - DNA, 33 bp, Homo sapien
tgtgtctaagctaagatgagtacgtttacttta

SEQ ID NO: 791393 - DNA, 33 bp, Homo sapien
aatgaggtaatacacaacaagaggtaacattaa

SEQ ID NO: 791394 - DNA, 33 bp, Homo sapien
aatgaggtaatacacatcaagaggtaacattaa

SEQ ID NO: 791395 - DNA, 33 bp, Homo sapien
gagctgtttaaaaggaaagaatgggtaagtcat

SEQ ID NO: 791396 - DNA, 33 bp, Homo sapien
gagctgtttaaaaggagagaatgggtaagtcat

SEQ ID NO: 791397 - DNA, 33 bp, Homo sapien
gaaggaatgtaagaacgcagaaaaactggaatt

SEQ ID NO: 791398 - DNA, 33 bp, Homo sapien
gaaggaatgtaagaactcagaaaaactggaatt

SEQ ID NO: 791399 - DNA, 33 bp, Homo sapien
agaatagcctgggggaaacaggtgacttgcgct

SEQ ID NO: 791400 - DNA, 33 bp, Homo sapien
agaatagcctgggggagacaggtgacttgcgct

SEQ ID NO: 791401 - DNA, 33 bp, Homo sapien
ttcattggataaccctaaagcatcaaacattta

SEQ ID NO: 791402 - DNA, 33 bp, Homo sapien
ttcattggataacccttaagcatcaaacattta

SEQ ID NO: 791403 - DNA, 33 bp, Homo sapien
ttaggtgtatttgacaatggtcatgtttccaga

SEQ ID NO: 791404 - DNA, 33 bp, Homo sapien
ttaggtgtatttgacagtggtcatgtttccaga

SEQ ID NO: 791405 - DNA, 33 bp, Homo sapien
tgaaatgttgttacaccgtgcatgactgtcgtc

SEQ ID NO: 791406 - DNA, 33 bp, Homo sapien
tgaaatgttgttacacggtgcatgactgtcgtc

SEQ ID NO: 791407 - DNA, 33 bp, Homo sapien
tcaggaaaaactgcacaggggaaattgatgaaa

SEQ ID NO: 791408 - DNA, 33 bp, Homo sapien
tcaggaaaaactgcacgggggaaattgatgaaa

SEQ ID NO: 791409 - DNA, 33 bp, Homo sapien
gggagaagcacaagaaaaagcaccaaatgtttt

SEQ ID NO: 791410 - DNA, 33 bp, Homo sapien
gggagaagcacaagaagaagcaccaaatgtttt

SEQ ID NO: 791411 - DNA, 33 bp, Homo sapien
tatcctgactattgaccccttttcagatgtata

SEQ ID NO: 791412 - DNA, 33 bp, Homo sapien
tatcctgactattgactccttttcagatgtata

SEQ ID NO: 791413 - DNA, 33 bp, Homo sapien
tgcaagtcttgctgccaactctgccaggctgcc

SEQ ID NO: 791414 - DNA, 33 bp, Homo sapien
tgcaagtcttgctgccgactctgccaggctgcc

SEQ ID NO: 791415 - DNA, 33 bp, Homo sapien
cagctgtgcttctagtcaaaatgtgggcttaaa

SEQ ID NO: 791416 - DNA, 33 bp, Homo sapien
cagctgtgcttctagttaaaatgtgggcttaaa

SEQ ID NO: 791417 - DNA, 33 bp, Homo sapien
cctcatggctccagtacctgcttctggcgaggg

SEQ ID NO: 791418 - DNA, 33 bp, Homo sapien
cctcatggctccagtatctgcttctggcgaggg

SEQ ID NO: 791419 - DNA, 33 bp, Homo sapien
ttctggatctttgcaacatataatgacagtgta

SEQ ID NO: 791420 - DNA, 33 bp, Homo sapien
ttctggatctttgcaatatataatgacagtgta

SEQ ID NO: 791421 - DNA, 33 bp, Homo sapien
gaacctgggacaatccaccctcttgttgagatg

SEQ ID NO: 791422 - DNA, 33 bp, Homo sapien
gaacctgggacaatccgccctcttgttgagatg

SEQ ID NO: 791423 - DNA, 33 bp, Homo sapien; identical to SEQ ID NO: 791421

SEQ ID NO: 791424 - DNA, 33 bp, Homo sapien; identical to SEQ ID NO: 791422

SEQ ID NO: 791425 - DNA, 33 bp, Homo sapien
taagtacgactgagcacaaactaaaacagtaac

SEQ ID NO: 791426 - DNA, 33 bp, Homo sapien
taagtacgactgagcataaactaaaacagtaac

SEQ ID NO: 791427 - DNA, 33 bp, Homo sapien
cacgggtcaattttaacgagttcagaatttctt

SEQ ID NO: 791428 - DNA, 33 bp, Homo sapien
cacgggtcaattttaatgagttcagaatttctt

SEQ ID NO: 791429 - DNA, 33 bp, Homo sapien
atgtttataaagtctacgataatgcataacatt

SEQ ID NO: 791430 - DNA, 33 bp, Homo sapien
atgtttataaagtctatgataatgcataacatt

SEQ ID NO: 791431 - DNA, 33 bp, Homo sapien
ataccaataaggcagcaaggagttgtcagggag

SEQ ID NO: 791432 - DNA, 33 bp, Homo sapien
ataccaataaggcagcgaggagttgtcagggag

SEQ ID NO: 791433 - DNA, 33 bp, Homo sapien
gtagtaatgccaggaaactagcaataactgtca

SEQ ID NO: 791434 - DNA, 33 bp, Homo sapien
gtagtaatgccaggaacctagcaataactgtca

SEQ ID NO: 791435 - DNA, 33 bp, Homo sapien
aaccctatgcactgtaataattgtaacaacagt

SEQ ID NO: 791436 - DNA, 33 bp, Homo sapien
aaccctatgcactgtagtaattgtaacaacagt

SEQ ID NO: 791437 - DNA, 33 bp, Homo sapien
ctatatcatcagttcaaagtccaaaaatctcat

SEQ ID NO: 791438 - DNA, 33 bp, Homo sapien
ctatatcatcagttcagagtccaaaaatctcat

SEQ ID NO: 791439 - DNA, 33 bp, Homo sapien
atgcaacttttgtggactatctgtagaaatttc

SEQ ID NO: 791440 - DNA, 33 bp, Homo sapien
atgcaacttttgtggagtatctgtagaaatttc

SEQ ID NO: 791441 - DNA, 33 bp, Homo sapien
ttaagaacatcacttacagaggacagaggtgga

SEQ ID NO: 791442 - DNA, 33 bp, Homo sapien
ttaagaacatcacttatagaggacagaggtgga

SEQ ID NO: 791443 - DNA, 33 bp, Homo sapien
agatattcactttttaaatcaaaaacctctctt

SEQ ID NO: 791444 - DNA, 33 bp, Homo sapien
agatattcactttttagatcaaaaacctctctt

SEQ ID NO: 791445 - DNA, 33 bp, Homo sapien
aaattgtgaaagaaaaatccttgaaactctgac

SEQ ID NO: 791446 - DNA, 33 bp, Homo sapien
aaattgtgaaagaaaagtccttgaaactctgac

SEQ ID NO: 791447 - DNA, 33 bp, Homo sapien
aatttctgcaggacagcctataaaattgtggta

SEQ ID NO: 791448 - DNA, 33 bp, Homo sapien
aatttctgcaggacagtctataaaattgtggta

SEQ ID NO: 791449 - DNA, 33 bp, Homo sapien
catattctttttagtaactcctagagcaaggtt

SEQ ID NO: 791450 - DNA, 33 bp, Homo sapien
catattctttttagtacctcctagagcaaggtt

SEQ ID NO: 791451 - DNA, 33 bp, Homo sapien
tgttagtcacttctacccattactgctatgaca

SEQ ID NO: 791452 - DNA, 33 bp, Homo sapien
tgttagtcacttctactcattactgctatgaca

SEQ ID NO: 791453 - DNA, 33 bp, Homo sapien
cctttttgtaatattcacatcagttcttggtgt

SEQ ID NO: 791454 - DNA, 33 bp, Homo sapien
cctttttgtaatattcgcatcagttcttggtgt

SEQ ID NO: 791455 - DNA, 33 bp, Homo sapien
tgagacttacagataaacctcttggagtggtga

SEQ ID NO: 791456 - DNA, 33 bp, Homo sapien
tgagacttacagataaccctcttggagtggtga

SEQ ID NO: 791457 - DNA, 33 bp, Homo sapien
taaatcggacattcccacaactcgctgctcagg

SEQ ID NO: 791458 - DNA, 33 bp, Homo sapien
taaatcggacattcccgcaactcgctgctcagg

SEQ ID NO: 791459 - DNA, 33 bp, Homo sapien
atggccaaagatgtaaacaaccactcataccta

SEQ ID NO: 791460 - DNA, 33 bp, Homo sapien
atggccaaagatgtaatcaaccactcataccta

SEQ ID NO: 791461 - DNA, 33 bp, Homo sapien
ttattcctgtagagtccacaaattagtcacaac

SEQ ID NO: 791462 - DNA, 33 bp, Homo sapien
ttattcctgtagagtcgacaaattagtcacaac

SEQ ID NO: 791463 - DNA, 33 bp, Homo sapien
aaaattcggatcctgacaattagaagagcaaca

SEQ ID NO: 791464 - DNA, 33 bp, Homo sapien
aaaattcggatcctgataattagaagagcaaca

SEQ ID NO: 791465 - DNA, 33 bp, Homo sapien
tgtgagagcagcactggaatcactaaaatgtgc

SEQ ID NO: 791466 - DNA, 33 bp, Homo sapien
tgtgagagcagcactgtaatcactaaaatgtgc

SEQ ID NO: 791467 - DNA, 33 bp, Homo sapien
tgttggattggatctacaataagcatccctgcc

SEQ ID NO: 791468 - DNA, 33 bp, Homo sapien
tgttggattggatctataataagcatccctgcc

SEQ ID NO: 791469 - DNA, 33 bp, Homo sapien
ggcaaagacagtttctcaattatgatctactat

SEQ ID NO: 791470 - DNA, 33 bp, Homo sapien
ggcaaagacagtttctgaattatgatctactat

SEQ ID NO: 791471 - DNA, 33 bp, Homo sapien
agttactcaaactgtcactggtgatgacacagg

SEQ ID NO: 791472 - DNA, 33 bp, Homo sapien
agttactcaaactgtctctggtgatgacacagg

SEQ ID NO: 791473 - DNA, 33 bp, Homo sapien
aaaaacagaagaaacaaaagcaccataatggtt

SEQ ID NO: 791474 - DNA, 33 bp, Homo sapien
aaaaacagaagaaacagaagcaccataatggtt

SEQ ID NO: 791475 - DNA, 33 bp, Homo sapien
ttgggtgtttctgaaacagttaaagcaaggaat

SEQ ID NO: 791476 - DNA, 33 bp, Homo sapien
ttgggtgtttctgaaagagttaaagcaaggaat

SEQ ID NO: 791477 - DNA, 33 bp, Homo sapien
ggttggaggttccaacaactctgggctggaggt

SEQ ID NO: 791478 - DNA, 33 bp, Homo sapien
ggttggaggttccaacgactctgggctggaggt

SEQ ID NO: 791479 - DNA, 33 bp, Homo sapien
aagattaatgtggatcaaccatcttaacagaag

SEQ ID NO: 791480 - DNA, 33 bp, Homo sapien
aagattaatgtggatcgaccatcttaacagaag

SEQ ID NO: 791481 - DNA, 33 bp, Homo sapien
taaagaatgaactctaactctagcaaaatttac

SEQ ID NO: 791482 - DNA, 33 bp, Homo sapien
taaagaatgaactctagctctagcaaaatttac

SEQ ID NO: 791483 - DNA, 33 bp, Homo sapien
ggactccttaaaatcaaatgaagccaagttgtc

SEQ ID NO: 791484 - DNA, 33 bp, Homo sapien
ggactccttaaaatcagatgaagccaagttgtc

SEQ ID NO: 791485 - DNA, 33 bp, Homo sapien
agttagaactctgcaaaccaagccctaagggat

SEQ ID NO: 791486 - DNA, 33 bp, Homo sapien
agttagaactctgcaatccaagccctaagggat

SEQ ID NO: 791487 - DNA, 33 bp, Homo sapien
ctccaggaagagtagtcaaatctcagtgacacc

SEQ ID NO: 791488 - DNA, 33 bp, Homo sapien
ctccaggaagagtagtgaaatctcagtgacacc

SEQ ID NO: 791489 - DNA, 33 bp, Homo sapien
gattctaagtggaaaactgtcacctccaacata

SEQ ID NO: 791490 - DNA, 33 bp, Homo sapien
gattctaagtggaaaattgtcacctccaacata

SEQ ID NO: 791491 - DNA, 33 bp, Homo sapien
caacacatttttcatcacagtgtgttactctag

SEQ ID NO: 791492 - DNA, 33 bp, Homo sapien
caacacatttttcatctcagtgtgttactctag

SEQ ID NO: 791493 - DNA, 33 bp, Homo sapien
actgagttagtacacactgatgaacctcttttt

SEQ ID NO: 791494 - DNA, 33 bp, Homo sapien
actgagttagtacacattgatgaacctcttttt

SEQ ID NO: 791495 - DNA, 33 bp, Homo sapien
actcatagccaccaaaaaaacggcgatccataa

SEQ ID NO: 791496 - DNA, 33 bp, Homo sapien
actcatagccaccaaacaaacggcgatccataa

SEQ ID NO: 791497 - DNA, 33 bp, Homo sapien
tatttattgaaaaccaccaaaatgtacaacaaa

SEQ ID NO: 791498 - DNA, 33 bp, Homo sapien
tatttattgaaaaccatcaaaatgtacaacaaa

SEQ ID NO: 791499 - DNA, 33 bp, Homo sapien
caacctagagaaaacaaagagaaaggagaccac

SEQ ID NO: 791500 - DNA, 33 bp, Homo sapien
caacctagagaaaacagagagaaaggagaccac

SEQ ID NO: 791501 - DNA, 33 bp, Homo sapien
atatcataagctaatcaatacagaaacagaaaa

SEQ ID NO: 791502 - DNA, 33 bp, Homo sapien
atatcataagctaatcgatacagaaacagaaaa

SEQ ID NO: 791503 - DNA, 33 bp, Homo sapien
caactccagccaaacactaggaggaaaactgta

SEQ ID NO: 791504 - DNA, 33 bp, Homo sapien
caactccagccaaacattaggaggaaaactgta

SEQ ID NO: 791505 - DNA, 33 bp, Homo sapien
atacagggcttggctacgttgactaggctggtc

SEQ ID NO: 791506 - DNA, 33 bp, Homo sapien
atacagggcttggctatgttgactaggctggtc

SEQ ID NO: 791507 - DNA, 33 bp, Homo sapien
gagagaaatactcctacgcatattgtcacctct

SEQ ID NO: 791508 - DNA, 33 bp, Homo sapien
gagagaaatactcctatgcatattgtcacctct

SEQ ID NO: 791509 - DNA, 33 bp, Homo sapien
tccaatggaaaactataaaactatgtcacatct

SEQ ID NO: 791510 - DNA, 33 bp, Homo sapien
tccaatggaaaactatgaaactatgtcacatct

SEQ ID NO: 791511 - DNA, 33 bp, Homo sapien
agtttgcaggacattccacaaggagccaaagca

SEQ ID NO: 791512 - DNA, 33 bp, Homo sapien
agtttgcaggacattctacaaggagccaaagca

SEQ ID NO: 791513 - DNA, 33 bp, Homo sapien
taaaaaattctgtttaactatctgtgtctagat

SEQ ID NO: 791514 - DNA, 33 bp, Homo sapien
taaaaaattctgtttacctatctgtgtctagat

SEQ ID NO: 791515 - DNA, 33 bp, Homo sapien
gatttcacccaaagcacactttctacaagttat

SEQ ID NO: 791516 - DNA, 33 bp, Homo sapien
gatttcacccaaagcagactttctacaagttat

SEQ ID NO: 791517 - DNA, 33 bp, Homo sapien
agctgcagagaagcaacaaagattatcctaaga

SEQ ID NO: 791518 - DNA, 33 bp, Homo sapien
agctgcagagaagcaagaaagattatcctaaga

SEQ ID NO: 791519 - DNA, 33 bp, Homo sapien
tggcaggcaatgaagaagttgaatgacttgcac

SEQ ID NO: 791520 - DNA, 33 bp, Homo sapien
tggcaggcaatgaagacgttgaatgacttgcac

SEQ ID NO: 791521 - DNA, 33 bp, Homo sapien
gagtgccgaaacgtaaagatgtcgtcgcagaga

SEQ ID NO: 791522 - DNA, 33 bp, Homo sapien
gagtgccgaaacgtaaggatgtcgtcgcagaga

SEQ ID NO: 791523 - DNA, 33 bp, Homo sapien
agtggaatagcaataacaatacaaagtagagaa

SEQ ID NO: 791524 - DNA, 33 bp, Homo sapien
agtggaatagcaataagaatacaaagtagagaa

SEQ ID NO: 791525 - DNA, 33 bp, Homo sapien
taactattacaatgacactgtaagatgttaaac

SEQ ID NO: 791526 - DNA, 33 bp, Homo sapien
taactattacaatgactctgtaagatgttaaac

SEQ ID NO: 791527 - DNA, 33 bp, Homo sapien
attatcctcaacaaataatgacaagcacaaggt

SEQ ID NO: 791528 - DNA, 33 bp, Homo sapien
attatcctcaacaaatgatgacaagcacaaggt

SEQ ID NO: 791529 - DNA, 33 bp, Homo sapien
gagtcaaccatggtggcagctggaaggtctaag

SEQ ID NO: 791530 - DNA, 33 bp, Homo sapien
gagtcaaccatggtggtagctggaaggtctaag

SEQ ID NO: 791531 - DNA, 33 bp, Homo sapien
catagttgtcactgacgattctattcccatttc

SEQ ID NO: 791532 - DNA, 33 bp, Homo sapien
catagttgtcactgactattctattcccatttc

SEQ ID NO: 791533 - DNA, 33 bp, Homo sapien
aaactctaaactgaataacttgtatgacctcgt

SEQ ID NO: 791534 - DNA, 33 bp, Homo sapien
aaactctaaactgaatgacttgtatgacctcgt

SEQ ID NO: 791535 - DNA, 33 bp, Homo sapien
aaaatgctgtagttaaaaaggttctaagcatga

SEQ ID NO: 791536 - DNA, 33 bp, Homo sapien
aaaatgctgtagttaagaaggttctaagcatga

SEQ ID NO: 791537 - DNA, 33 bp, Homo sapien
tttccttgataattaccgactgaagttttacaa

SEQ ID NO: 791538 - DNA, 33 bp, Homo sapien
tttccttgataattactgactgaagttttacaa

SEQ ID NO: 791539 - DNA, 33 bp, Homo sapien
gctgcaagtctatggaagtatttcaaagagaat

SEQ ID NO: 791540 - DNA, 33 bp, Homo sapien
gctgcaagtctatggacgtatttcaaagagaat

SEQ ID NO: 791541 - DNA, 33 bp, Homo sapien
gctttgtctgaatgtaacttgttttggaaccat

SEQ ID NO: 791542 - DNA, 33 bp, Homo sapien
gctttgtctgaatgtaccttgttttggaaccat

SEQ ID NO: 791543 - DNA, 33 bp, Homo sapien
cagtaggtccaggctacgaggcaaatgattctt

SEQ ID NO: 791544 - DNA, 33 bp, Homo sapien
cagtaggtccaggctatgaggcaaatgattctt

SEQ ID NO: 791545 - DNA, 33 bp, Homo sapien
aaagctgtttagaagccctttttgtgcaaaaaa

SEQ ID NO: 791546 - DNA, 33 bp, Homo sapien
aaagctgtttagaagctctttttgtgcaaaaaa

SEQ ID NO: 791547 - DNA, 33 bp, Homo sapien
tgagttcatacactgacgaggaaagccagggag

SEQ ID NO: 791548 - DNA, 33 bp, Homo sapien
tgagttcatacactgatgaggaaagccagggag

SEQ ID NO: 791549 - DNA, 33 bp, Homo sapien
aggagatgctcaaataacaaaacaaaggatata

SEQ ID NO: 791550 - DNA, 33 bp, Homo sapien
aggagatgctcaaatagcaaaacaaaggatata

SEQ ID NO: 791551 - DNA, 33 bp, Homo sapien
caccacagggattgcacaaccccagctccacta

SEQ ID NO: 791552 - DNA, 33 bp, Homo sapien
caccacagggattgcagaaccccagctccacta

SEQ ID NO: 791553 - DNA, 33 bp, Homo sapien
acttgttagtcccataagagcagagcacagcct

SEQ ID NO: 791554 - DNA, 33 bp, Homo sapien
acttgttagtcccataggagcagagcacagcct

SEQ ID NO: 791555 - DNA, 33 bp, Homo sapien
tgctaccaccaaatgaggaccttaaagctatct

SEQ ID NO: 791556 - DNA, 33 bp, Homo sapien
tgctaccaccaaatgatgaccttaaagctatct

SEQ ID NO: 791557 - DNA, 33 bp, Homo sapien
tgctgcacaaggtatacgcctatgatgctacct

SEQ ID NO: 791558 - DNA, 33 bp, Homo sapien
tgctgcacaaggtatatgcctatgatgctacct

SEQ ID NO: 791559 - DNA, 33 bp, Homo sapien
ttctgccataagcacccacctatctgtgcctgt

SEQ ID NO: 791560 - DNA, 33 bp, Homo sapien
ttctgccataagcacctacctatctgtgcctgt

SEQ ID NO: 791561 - DNA, 33 bp, Homo sapien
ggaggctctaggaaccaaggaaggcaggaagag

SEQ ID NO: 791562 - DNA, 33 bp, Homo sapien
ggaggctctaggaaccgaggaaggcaggaagag

SEQ ID NO: 791563 - DNA, 33 bp, Homo sapien
aataagtggttcataaatgtaggatataacact

SEQ ID NO: 791564 - DNA, 33 bp, Homo sapien
aataagtggttcataattgtaggatataacact

SEQ ID NO: 791565 - DNA, 33 bp, Homo sapien
tgtggaacaatatcacacatattggatgacttc

SEQ ID NO: 791566 - DNA, 33 bp, Homo sapien
tgtggaacaatatcacgcatattggatgacttc

SEQ ID NO: 791567 - DNA, 33 bp, Homo sapien
gtttaatgaagtgatcagaaaacagtgatgtga

SEQ ID NO: 791568 - DNA, 33 bp, Homo sapien
gtttaatgaagtgatctgaaaacagtgatgtga

SEQ ID NO: 791569 - DNA, 33 bp, Homo sapien
aaaaggcaacagcatagacagaatcaaaatatc

SEQ ID NO: 791570 - DNA, 33 bp, Homo sapien
aaaaggcaacagcatatacagaatcaaaatatc

SEQ ID NO: 791571 - DNA, 33 bp, Homo sapien
tgcctcattcataaaacggagacaaaatgctgc

SEQ ID NO: 791572 - DNA, 33 bp, Homo sapien
tgcctcattcataaaagggagacaaaatgctgc

SEQ ID NO: 791573 - DNA, 33 bp, Homo sapien
tcagccttatgagttacaaagccattggataat

SEQ ID NO: 791574 - DNA, 33 bp, Homo sapien
tcagccttatgagttataaagccattggataat

SEQ ID NO: 791575 - DNA, 33 bp, Homo sapien
ttttaaaaactacagacgtcagcatgtttaaac

SEQ ID NO: 791576 - DNA, 33 bp, Homo sapien
ttttaaaaactacagatgtcagcatgtttaaac

SEQ ID NO: 791577 - DNA, 33 bp, Homo sapien
tgacatctcaatgaaaaagtagttcgggaatat

SEQ ID NO: 791578 - DNA, 33 bp, Homo sapien
tgacatctcaatgaaacagtagttcgggaatat

SEQ ID NO: 791579 - DNA, 33 bp, Homo sapien
agatatattaagctcacgcagatagttgtgcta

SEQ ID NO: 791580 - DNA, 33 bp, Homo sapien
agatatattaagctcatgcagatagttgtgcta

SEQ ID NO: 791581 - DNA, 33 bp, Homo sapien
agactcaaactattgaggcatacttggatggat

SEQ ID NO: 791582 - DNA, 33 bp, Homo sapien
agactcaaactattgatgcatacttggatggat

SEQ ID NO: 791583 - DNA, 33 bp, Homo sapien
agtgacaataccaaatgatggccatgatacaga

SEQ ID NO: 791584 - DNA, 33 bp, Homo sapien
agtgacaataccaaattatggccatgatacaga

SEQ ID NO: 791585 - DNA, 33 bp, Homo sapien
gtggttcttgaccacaaagaaagcagtgagtcc

SEQ ID NO: 791586 - DNA, 33 bp, Homo sapien
gtggttcttgaccacagagaaagcagtgagtcc

SEQ ID NO: 791587 - DNA, 33 bp, Homo sapien
ttttcttgtgctggaaatggatcatggactcac

SEQ ID NO: 791588 - DNA, 33 bp, Homo sapien
ttttcttgtgctggaagtggatcatggactcac

SEQ ID NO: 791589 - DNA, 33 bp, Homo sapien
tctctgtgctttggacccaagctaccctgtaac

SEQ ID NO: 791590 - DNA, 33 bp, Homo sapien
tctctgtgctttggactcaagctaccctgtaac

SEQ ID NO: 791591 - DNA, 33 bp, Homo sapien
actcctaacctagtgacgaattagtaatattgt

SEQ ID NO: 791592 - DNA, 33 bp, Homo sapien
actcctaacctagtgatgaattagtaatattgt

SEQ ID NO: 791593 - DNA, 33 bp, Homo sapien
tgtgtgtttcagaaggcataaggcataggtcag

SEQ ID NO: 791594 - DNA, 33 bp, Homo sapien
tgtgtgtttcagaaggtataaggcataggtcag

SEQ ID NO: 791595 - DNA, 33 bp, Homo sapien
tcatacaattttaagaacataccacacagatct

SEQ ID NO: 791596 - DNA, 33 bp, Homo sapien
tcatacaattttaagagcataccacacagatct

SEQ ID NO: 791597 - DNA, 33 bp, Homo sapien
cataggttctagaggcacaaagaaaaagaccct

SEQ ID NO: 791598 - DNA, 33 bp, Homo sapien
cataggttctagaggcgcaaagaaaaagaccct

SEQ ID NO: 791599 - DNA, 33 bp, Homo sapien
cagacatgctataaggcccccagcccagtcact

SEQ ID NO: 791600 - DNA, 33 bp, Homo sapien
cagacatgctataaggtccccagcccagtcact

SEQ ID NO: 791601 - DNA, 33 bp, Homo sapien
atcatgttttctgatacctatgtattgaattaa

SEQ ID NO: 791602 - DNA, 33 bp, Homo sapien
atcatgttttctgatagctatgtattgaattaa

SEQ ID NO: 791603 - DNA, 33 bp, Homo sapien
cagtgatcactttaaacgtgtctactggcgtca

SEQ ID NO: 791604 - DNA, 33 bp, Homo sapien
cagtgatcactttaaatgtgtctactggcgtca

SEQ ID NO: 791605 - DNA, 33 bp, Homo sapien
gacatcaatttcattaagctattccaattgttt

SEQ ID NO: 791606 - DNA, 33 bp, Homo sapien
gacatcaatttcattatgctattccaattgttt

SEQ ID NO: 791607 - DNA, 33 bp, Homo sapien
agcagtgaaggatgcaaaggattaaaataggta

SEQ ID NO: 791608 - DNA, 33 bp, Homo sapien
agcagtgaaggatgcataggattaaaataggta

SEQ ID NO: 791609 - DNA, 33 bp, Homo sapien
ctcagggaatggaaacaccaaagaagagggaga

SEQ ID NO: 791610 - DNA, 33 bp, Homo sapien
ctcagggaatggaaacgccaaagaagagggaga

SEQ ID NO: 791611 - DNA, 33 bp, Homo sapien
cacttctggtttcttacgacatactgtcacttc

SEQ ID NO: 791612 - DNA, 33 bp, Homo sapien
cacttctggtttcttaggacatactgtcacttc

SEQ ID NO: 791613 - DNA, 33 bp, Homo sapien
gatataacaatcataaacaatcataaagaacaa

SEQ ID NO: 791614 - DNA, 33 bp, Homo sapien
gatataacaatcataagcaatcataaagaacaa

SEQ ID NO: 791615 - DNA, 33 bp, Homo sapien
accagttagaaacaagacatcaccaatgaagag

SEQ ID NO: 791616 - DNA, 33 bp, Homo sapien
accagttagaaacaagtcatcaccaatgaagag

SEQ ID NO: 791617 - DNA, 33 bp, Homo sapien
atagaatacagagcatcatcagttttaaactca

SEQ ID NO: 791618 - DNA, 33 bp, Homo sapien
atagaatacagagcatgatcagttttaaactca

SEQ ID NO: 791619 - DNA, 33 bp, Homo sapien
ccagtggaatataaaaatcaatggcattaatga

SEQ ID NO: 791620 - DNA, 33 bp, Homo sapien
ccagtggaatataaaagtcaatggcattaatga

SEQ ID NO: 791621 - DNA, 33 bp, Homo sapien
tttaattgcccctttcccttcctgtcctggccc

SEQ ID NO: 791622 - DNA, 33 bp, Homo sapien
tttaattgcccctttctcttcctgtcctggccc

SEQ ID NO: 791623 - DNA, 33 bp, Homo sapien
gagtcagcactgtattcaaggccaaagccatga

SEQ ID NO: 791624 - DNA, 33 bp, Homo sapien
gagtcagcactgtatttaaggccaaagccatga

SEQ ID NO: 791625 - DNA, 33 bp, Homo sapien
aaacatcgaggcaggaactacaagaaacagcta

SEQ ID NO: 791626 - DNA, 33 bp, Homo sapien
aaacatcgaggcaggacctacaagaaacagcta

SEQ ID NO: 791627 - DNA, 33 bp, Homo sapien
catacctagtggagacaaagattctggaagcag

SEQ ID NO: 791628 - DNA, 33 bp, Homo sapien
catacctagtggagacgaagattctggaagcag

SEQ ID NO: 791629 - DNA, 33 bp, Homo sapien
tgcacacagagaaagacaggctgttttcctctt

SEQ ID NO: 791630 - DNA, 33 bp, Homo sapien
tgcacacagagaaagagaggctgttttcctctt

SEQ ID NO: 791631 - DNA, 33 bp, Homo sapien
gctgactcaattggcaacttgatcttggacatc

SEQ ID NO: 791632 - DNA, 33 bp, Homo sapien
gctgactcaattggcaccttgatcttggacatc

SEQ ID NO: 791633 - DNA, 33 bp, Homo sapien
ttcagctcttcttcagaaacgcaacactcaaag

SEQ ID NO: 791634 - DNA, 33 bp, Homo sapien
ttcagctcttcttcagtaacgcaacactcaaag

SEQ ID NO: 791635 - DNA, 33 bp, Homo sapien
ggaaggaataggaaagcatgcactttaaataat

SEQ ID NO: 791636 - DNA, 33 bp, Homo sapien
ggaaggaataggaaaggatgcactttaaataat

SEQ ID NO: 791637 - DNA, 33 bp, Homo sapien
tgaaatacgcttatcaaaatattgtgacagtaa

SEQ ID NO: 791638 - DNA, 33 bp, Homo sapien
tgaaatacgcttatcataatattgtgacagtaa

SEQ ID NO: 791639 - DNA, 33 bp, Homo sapien
gtcaaagttttacttacgttcatcacttcttca

SEQ ID NO: 791640 - DNA, 33 bp, Homo sapien
gtcaaagttttacttatgttcatcacttcttca

SEQ ID NO: 791641 - DNA, 33 bp, Homo sapien
agtttgaaggaccataaaagagagataagttgg

SEQ ID NO: 791642 - DNA, 33 bp, Homo sapien
agtttgaaggaccatagaagagagataagttgg

SEQ ID NO: 791643 - DNA, 33 bp, Homo sapien
aataaacacattaaagcctcagtggtgaattta

SEQ ID NO: 791644 - DNA, 33 bp, Homo sapien
aataaacacattaaaggctcagtggtgaattta

SEQ ID NO: 791645 - DNA, 33 bp, Homo sapien
gagtggtgttttctgacagaacattgcagacca

SEQ ID NO: 791646 - DNA, 33 bp, Homo sapien
gagtggtgttttctgatagaacattgcagacca

SEQ ID NO: 791647 - DNA, 33 bp, Homo sapien
acatacaacttagtaccaagcgattactattct

SEQ ID NO: 791648 - DNA, 33 bp, Homo sapien
acatacaacttagtacgaagcgattactattct

SEQ ID NO: 791649 - DNA, 33 bp, Homo sapien
gggatgctaactcacacaaaaatcatttaacct

SEQ ID NO: 791650 - DNA, 33 bp, Homo sapien
gggatgctaactcacagaaaaatcatttaacct

SEQ ID NO: 791651 - DNA, 33 bp, Homo sapien
ttacctaattttaaaacttgcagttggccattg

SEQ ID NO: 791652 - DNA, 33 bp, Homo sapien
ttacctaattttaaaatttgcagttggccattg

SEQ ID NO: 791653 - DNA, 33 bp, Homo sapien
ggacagaaaatgcgtacacattagaaaggaaga

SEQ ID NO: 791654 - DNA, 33 bp, Homo sapien
ggacagaaaatgcgtatacattagaaaggaaga

SEQ ID NO: 791655 - DNA, 33 bp, Homo sapien
ttccgggactctaccactaaaggaggactgatc

SEQ ID NO: 791656 - DNA, 33 bp, Homo sapien
ttccgggactctaccattaaaggaggactgatc

SEQ ID NO: 791657 - DNA, 33 bp, Homo sapien
ccaagaagaaatcatgaaaaatacctggagaat

SEQ ID NO: 791658 - DNA, 33 bp, Homo sapien
ccaagaagaaatcatggaaaatacctggagaat

SEQ ID NO: 791659 - DNA, 33 bp, Homo sapien
ttggggatataaagagaacgctcatggttttgt

SEQ ID NO: 791660 - DNA, 33 bp, Homo sapien
ttggggatataaagaggacgctcatggttttgt

SEQ ID NO: 791661 - DNA, 33 bp, Homo sapien
gaaaatgtggcctacaccctggatactattctc

SEQ ID NO: 791662 - DNA, 33 bp, Homo sapien
gaaaatgtggcctacatcctggatactattctc

SEQ ID NO: 791663 - DNA, 33 bp, Homo sapien
ccccaaccctaaaggaactctgaagacaccagg

SEQ ID NO: 791664 - DNA, 33 bp, Homo sapien
ccccaaccctaaaggatctctgaagacaccagg

SEQ ID NO: 791665 - DNA, 33 bp, Homo sapien
ttttgacacccagtgaggtaaagccaagatctg

SEQ ID NO: 791666 - DNA, 33 bp, Homo sapien
ttttgacacccagtgatgtaaagccaagatctg

SEQ ID NO: 791667 - DNA, 33 bp, Homo sapien
ctgaaaggagaaaccagattgcacattaaatct

SEQ ID NO: 791668 - DNA, 33 bp, Homo sapien
ctgaaaggagaaaccatattgcacattaaatct

SEQ ID NO: 791669 - DNA, 33 bp, Homo sapien
agtagaatattcaagacctgccaaaaaattgaa

SEQ ID NO: 791670 - DNA, 33 bp, Homo sapien
agtagaatattcaagagctgccaaaaaattgaa

SEQ ID NO: 791671 - DNA, 33 bp, Homo sapien
gctagctagttgggcaacttggctccgtaactc

SEQ ID NO: 791672 - DNA, 33 bp, Homo sapien
gctagctagttgggcagcttggctccgtaactc

SEQ ID NO: 791673 - DNA, 33 bp, Homo sapien
aagaaactcttatacacgtcttttgttcttcac

SEQ ID NO: 791674 - DNA, 33 bp, Homo sapien
aagaaactcttatacatgtcttttgttcttcac

SEQ ID NO: 791675 - DNA, 33 bp, Homo sapien
taaatgccagcaggacaggtaacttcacttttc

SEQ ID NO: 791676 - DNA, 33 bp, Homo sapien
taaatgccagcaggacgggtaacttcacttttc

SEQ ID NO: 791677 - DNA, 33 bp, Homo sapien
aacttgactgaaaagcacttatcaaaataggag

SEQ ID NO: 791678 - DNA, 33 bp, Homo sapien
aacttgactgaaaagcccttatcaaaataggag

SEQ ID NO: 791679 - DNA, 33 bp, Homo sapien
gtcgggatacataaatgaaagtaggcagatcct

SEQ ID NO: 791680 - DNA, 33 bp, Homo sapien
gtcgggatacataaattaaagtaggcagatcct

SEQ ID NO: 791681 - DNA, 33 bp, Homo sapien
agaattatgaaaatcacacccaagaaacataaa

SEQ ID NO: 791682 - DNA, 33 bp, Homo sapien
agaattatgaaaatcagacccaagaaacataaa

SEQ ID NO: 791683 - DNA, 33 bp, Homo sapien
atggataatttttaaccagagcaaacagaaatc

SEQ ID NO: 791684 - DNA, 33 bp, Homo sapien
atggataatttttaactagagcaaacagaaatc

SEQ ID NO: 791685 - DNA, 33 bp, Homo sapien
gggcaaaatggcaagacactgtctctatgaaaa

SEQ ID NO: 791686 - DNA, 33 bp, Homo sapien
gggcaaaatggcaagatactgtctctatgaaaa

SEQ ID NO: 791687 - DNA, 33 bp, Homo sapien
atctcatggaaatacacctatcaaaattcatgg

SEQ ID NO: 791688 - DNA, 33 bp, Homo sapien
atctcatggaaatacagctatcaaaattcatgg

SEQ ID NO: 791689 - DNA, 33 bp, Homo sapien
acagattatcagagaaaactgctctggataaaa

SEQ ID NO: 791690 - DNA, 33 bp, Homo sapien
acagattatcagagaagactgctctggataaaa

SEQ ID NO: 791691 - DNA, 33 bp, Homo sapien
aggtgtgatattctgcaaaagtcacaacgtcac

SEQ ID NO: 791692 - DNA, 33 bp, Homo sapien
aggtgtgatattctgcgaaagtcacaacgtcac

SEQ ID NO: 791693 - DNA, 33 bp, Homo sapien
tggaaaggttgttatcacatcctgaggggtttt

SEQ ID NO: 791694 - DNA, 33 bp, Homo sapien
tggaaaggttgttatcccatcctgaggggtttt

SEQ ID NO: 791695 - DNA, 33 bp, Homo sapien
cctaatttgttctacactatcttctaaatattt

SEQ ID NO: 791696 - DNA, 33 bp, Homo sapien
cctaatttgttctacagtatcttctaaatattt

SEQ ID NO: 791697 - DNA, 33 bp, Homo sapien
gatattatcagtaacccagaaaagtaggtagtt

SEQ ID NO: 791698 - DNA, 33 bp, Homo sapien
gatattatcagtaaccgagaaaagtaggtagtt

SEQ ID NO: 791699 - DNA, 33 bp, Homo sapien
acaaaggaagtatataactacttggaatgtgca

SEQ ID NO: 791700 - DNA, 33 bp, Homo sapien
acaaaggaagtatatagctacttggaatgtgca

SEQ ID NO: 791701 - DNA, 33 bp, Homo sapien
tggtgctctagctctgaaagttataagattaat

SEQ ID NO: 791702 - DNA, 33 bp, Homo sapien
tggtgctctagctctgcaagttataagattaat

SEQ ID NO: 791703 - DNA, 33 bp, Homo sapien
ttctcggtagccttgacaaaaattaattgaaca

SEQ ID NO: 791704 - DNA, 33 bp, Homo sapien
ttctcggtagccttgagaaaaattaattgaaca

SEQ ID NO: 791705 - DNA, 33 bp, Homo sapien
tacatagtgttaaaaaatgaatttagtgacatg

SEQ ID NO: 791706 - DNA, 33 bp, Homo sapien
tacatagtgttaaaaagtgaatttagtgacatg

SEQ ID NO: 791707 - DNA, 33 bp, Homo sapien
cagttctcctctcaaagtcgtgatcacaaatca

SEQ ID NO: 791708 - DNA, 33 bp, Homo sapien
cagttctcctctcaaattcgtgatcacaaatca

SEQ ID NO: 791709 - DNA, 33 bp, Homo sapien
taccagattcagaaaaacaattccaaaaatcac

SEQ ID NO: 791710 - DNA, 33 bp, Homo sapien
taccagattcagaaaagcaattccaaaaatcac

SEQ ID NO: 791711 - DNA, 33 bp, Homo sapien
gggttgatgctaaatacgcaaaaagaaaacacc

SEQ ID NO: 791712 - DNA, 33 bp, Homo sapien
gggttgatgctaaatatgcaaaaagaaaacacc

SEQ ID NO: 791713 - DNA, 33 bp, Homo sapien
tcttttattgtcagtaaatgagcttctactcag

SEQ ID NO: 791714 - DNA, 33 bp, Homo sapien
tcttttattgtcagtacatgagcttctactcag

SEQ ID NO: 791715 - DNA, 33 bp, Homo sapien
atactggattttattagagcttagccactcaac

SEQ ID NO: 791716 - DNA, 33 bp, Homo sapien
atactggattttattatagcttagccactcaac

SEQ ID NO: 791717 - DNA, 33 bp, Homo sapien
aaagccatcttagcaactgagactattaaaacc

SEQ ID NO: 791718 - DNA, 33 bp, Homo sapien
aaagccatcttagcaattgagactattaaaacc

SEQ ID NO: 791719 - DNA, 33 bp, Homo sapien
ctattttctgcctaaaaagtaaatgaaactaga

SEQ ID NO: 791720 - DNA, 33 bp, Homo sapien
ctattttctgcctaaagagtaaatgaaactaga

SEQ ID NO: 791721 - DNA, 33 bp, Homo sapien
tctttctagctttatcaatcacatttaattaaa

SEQ ID NO: 791722 - DNA, 33 bp, Homo sapien
tctttctagctttatctatcacatttaattaaa

SEQ ID NO: 791723 - DNA, 33 bp, Homo sapien
cagagtgaaaagactacctacagaatgagaaaa

SEQ ID NO: 791724 - DNA, 33 bp, Homo sapien
cagagtgaaaagactagctacagaatgagaaaa

SEQ ID NO: 791725 - DNA, 33 bp, Homo sapien
cagtgttttgtgttataaagtcatactccaggg

SEQ ID NO: 791726 - DNA, 33 bp, Homo sapien
cagtgttttgtgttatgaagtcatactccaggg

SEQ ID NO: 791727 - DNA, 33 bp, Homo sapien
cacatctatgcacagccaggattcagaagccct

SEQ ID NO: 791728 - DNA, 33 bp, Homo sapien
cacatctatgcacagcgaggattcagaagccct

SEQ ID NO: 791729 - DNA, 33 bp, Homo sapien
tcttgcaaaaatttgactaatacaagaattgac

SEQ ID NO: 791730 - DNA, 33 bp, Homo sapien
tcttgcaaaaatttgagtaatacaagaattgac

SEQ ID NO: 791731 - DNA, 33 bp, Homo sapien
aaagcctaaagcagaacagtgaataagtccagg

SEQ ID NO: 791732 - DNA, 33 bp, Homo sapien
aaagcctaaagcagaagagtgaataagtccagg

SEQ ID NO: 791733 - DNA, 33 bp, Homo sapien
aaaggacttggaataacagtggtaaacccacat

SEQ ID NO: 791734 - DNA, 33 bp, Homo sapien
aaaggacttggaataatagtggtaaacccacat

SEQ ID NO: 791735 - DNA, 33 bp, Homo sapien
gttgagggtcctataaagttgtactcttaatgg

SEQ ID NO: 791736 - DNA, 33 bp, Homo sapien
gttgagggtcctataaggttgtactcttaatgg

SEQ ID NO: 791737 - DNA, 33 bp, Homo sapien
agttactcacgtatcacagctttctaattcttt

SEQ ID NO: 791738 - DNA, 33 bp, Homo sapien
agttactcacgtatcatagctttctaattcttt

SEQ ID NO: 791739 - DNA, 33 bp, Homo sapien
ccatctccattaagacactttgtccactggatc

SEQ ID NO: 791740 - DNA, 33 bp, Homo sapien
ccatctccattaagaccctttgtccactggatc

SEQ ID NO: 791741 - DNA, 33 bp, Homo sapien
aattatttaactcccacaacacttatagtctta

SEQ ID NO: 791742 - DNA, 33 bp, Homo sapien
aattatttaactcccagaacacttatagtctta

SEQ ID NO: 791743 - DNA, 33 bp, Homo sapien
tatctcattttattgacgaggaaacaaaagtct

SEQ ID NO: 791744 - DNA, 33 bp, Homo sapien
tatctcattttattgatgaggaaacaaaagtct

SEQ ID NO: 791745 - DNA, 33 bp, Homo sapien
ctttttaatatcaagaataacaacaaaaaacct

SEQ ID NO: 791746 - DNA, 33 bp, Homo sapien
ctttttaatatcaagagtaacaacaaaaaacct

SEQ ID NO: 791747 - DNA, 33 bp, Homo sapien
taaatgaatatagtagaaagtttaaagaaatgc

SEQ ID NO: 791748 - DNA, 33 bp, Homo sapien
taaatgaatatagtagcaagtttaaagaaatgc

SEQ ID NO: 791749 - DNA, 33 bp, Homo sapien
acttgcctaaagtcacaaagttaataagtgaag

SEQ ID NO: 791750 - DNA, 33 bp, Homo sapien
acttgcctaaagtcacgaagttaataagtgaag

SEQ ID NO: 791751 - DNA, 33 bp, Homo sapien
tacaaaatgtgtgataaaagttttggcacatac

SEQ ID NO: 791752 - DNA, 33 bp, Homo sapien
tacaaaatgtgtgatacaagttttggcacatac

SEQ ID NO: 791753 - DNA, 33 bp, Homo sapien
tgtgggaaggacaaagacaaggggcatttaaca

SEQ ID NO: 791754 - DNA, 33 bp, Homo sapien
tgtgggaaggacaaaggcaaggggcatttaaca

SEQ ID NO: 791755 - DNA, 33 bp, Homo sapien
gctgttaagtgcggaaatgaaacaaatttacaa

SEQ ID NO: 791756 - DNA, 33 bp, Homo sapien
gctgttaagtgcggaagtgaaacaaatttacaa

SEQ ID NO: 791757 - DNA, 33 bp, Homo sapien
cacttttcctagatgtaaagtctcatgcagcga

SEQ ID NO: 791758 - DNA, 33 bp, Homo sapien
cacttttcctagatgtgaagtctcatgcagcga

SEQ ID NO: 791759 - DNA, 33 bp, Homo sapien
aagtactgtaatttcacgtattgtttgcgtaaa

SEQ ID NO: 791760 - DNA, 33 bp, Homo sapien
aagtactgtaatttcatgtattgtttgcgtaaa

SEQ ID NO: 791761 - DNA, 33 bp, Homo sapien
ttttcaactctacttacaatttggcaagaaaca

SEQ ID NO: 791762 - DNA, 33 bp, Homo sapien
ttttcaactctacttataatttggcaagaaaca

SEQ ID NO: 791763 - DNA, 33 bp, Homo sapien
tgtctttgaaacagaaaattcatgaaaggattc

SEQ ID NO: 791764 - DNA, 33 bp, Homo sapien
tgtctttgaaacagaagattcatgaaaggattc

SEQ ID NO: 791765 - DNA, 33 bp, Homo sapien
cagatctatagccatacatgtattcacacatgt

SEQ ID NO: 791766 - DNA, 33 bp, Homo sapien
cagatctatagccatatatgtattcacacatgt

SEQ ID NO: 791767 - DNA, 33 bp, Homo sapien
tattagtaataaaacacaatgcagttcatattg

SEQ ID NO: 791768 - DNA, 33 bp, Homo sapien
tattagtaataaaacataatgcagttcatattg

SEQ ID NO: 791769 - DNA, 33 bp, Homo sapien
gggtaggacattgtgtgaatctctgggaataag

SEQ ID NO: 791770 - DNA, 33 bp, Homo sapien
gggtaggacattgtgttaatctctgggaataag

SEQ ID NO: 791771 - DNA, 33 bp, Homo sapien
tgtactgcttactagaaaagttgaagaaatcac

SEQ ID NO: 791772 - DNA, 33 bp, Homo sapien
tgtactgcttactagagaagttgaagaaatcac

SEQ ID NO: 791773 - DNA, 33 bp, Homo sapien
tttcaattattgaatactaaaggtgcaagtgtc

SEQ ID NO: 791774 - DNA, 33 bp, Homo sapien
tttcaattattgaatattaaaggtgcaagtgtc

SEQ ID NO: 791775 - DNA, 33 bp, Homo sapien
gcaagacaagaaaaaacgtgtggtcacctctat

SEQ ID NO: 791776 - DNA, 33 bp, Homo sapien
gcaagacaagaaaaaatgtgtggtcacctctat

SEQ ID NO: 791777 - DNA, 33 bp, Homo sapien
ataagtagattccaaaaagcaaaacaagtttaa

SEQ ID NO: 791778 - DNA, 33 bp, Homo sapien
ataagtagattccaaagagcaaaacaagtttaa

SEQ ID NO: 791779 - DNA, 33 bp, Homo sapien
ttgaaacatacatacaaaacaatgaagtgtgat

SEQ ID NO: 791780 - DNA, 33 bp, Homo sapien
ttgaaacatacatacagaacaatgaagtgtgat

SEQ ID NO: 791781 - DNA, 33 bp, Homo sapien
ggcaaaggggtcatctaaattagttgtagtcag

SEQ ID NO: 791782 - DNA, 33 bp, Homo sapien
ggcaaaggggtcatctgaattagttgtagtcag

SEQ ID NO: 791783 - DNA, 33 bp, Homo sapien
tgttcagaaataacaaagatcaaccagcttggc

SEQ ID NO: 791784 - DNA, 33 bp, Homo sapien
tgttcagaaataacaacgatcaaccagcttggc

SEQ ID NO: 791785 - DNA, 33 bp, Homo sapien
gagagctaagtaacagcaaatctaacccaggat

SEQ ID NO: 791786 - DNA, 33 bp, Homo sapien
gagagctaagtaacaggaaatctaacccaggat

SEQ ID NO: 791787 - DNA, 33 bp, Homo sapien
gcaaataaaacatataaaagagtgttcaaagat

SEQ ID NO: 791788 - DNA, 33 bp, Homo sapien
gcaaataaaacatatagaagagtgttcaaagat

SEQ ID NO: 791789 - DNA, 33 bp, Homo sapien
ctaagtaacataatgccgcaaataaaacatata

SEQ ID NO: 791790 - DNA, 33 bp, Homo sapien
ctaagtaacataatgcggcaaataaaacatata

SEQ ID NO: 791791 - DNA, 33 bp, Homo sapien
gcagagtttacagctacacattacatgaggact

SEQ ID NO: 791792 - DNA, 33 bp, Homo sapien
gcagagtttacagctatacattacatgaggact

SEQ ID NO: 791793 - DNA, 33 bp, Homo sapien
gagagaaaagaatggaagcaaaggaaagaaggg

SEQ ID NO: 791794 - DNA, 33 bp, Homo sapien
gagagaaaagaatggaggcaaaggaaagaaggg

SEQ ID NO: 791795 - DNA, 33 bp, Homo sapien
aagaattatgtgcttacgaagttttctcaggaa

SEQ ID NO: 791796 - DNA, 33 bp, Homo sapien
aagaattatgtgcttatgaagttttctcaggaa

SEQ ID NO: 791797 - DNA, 33 bp, Homo sapien
cagctgcataaggctacctagttttggagaatg

SEQ ID NO: 791798 - DNA, 33 bp, Homo sapien
cagctgcataaggctagctagttttggagaatg

SEQ ID NO: 791799 - DNA, 33 bp, Homo sapien
gtactactcatggaacaaatagacaacttgtca

SEQ ID NO: 791800 - DNA, 33 bp, Homo sapien
gtactactcatggaaccaatagacaacttgtca

SEQ ID NO: 791801 - DNA, 33 bp, Homo sapien
atggagatcacaaaagaacttcactgtcttgtt

SEQ ID NO: 791802 - DNA, 33 bp, Homo sapien
atggagatcacaaaaggacttcactgtcttgtt

SEQ ID NO: 791803 - DNA, 33 bp, Homo sapien
attaactacaaagtcacgtaaaggtcaagtcaa

SEQ ID NO: 791804 - DNA, 33 bp, Homo sapien
attaactacaaagtcatgtaaaggtcaagtcaa

SEQ ID NO: 791805 - DNA, 33 bp, Homo sapien
taaaatgtgaaagtcacaaggagaaatcacacc

SEQ ID NO: 791806 - DNA, 33 bp, Homo sapien
taaaatgtgaaagtcataaggagaaatcacacc

SEQ ID NO: 791807 - DNA, 33 bp, Homo sapien
aatcttatgcagttcaagttagaaaaattggat

SEQ ID NO: 791808 - DNA, 33 bp, Homo sapien
aatcttatgcagttcacgttagaaaaattggat

SEQ ID NO: 791809 - DNA, 33 bp, Homo sapien
aggtgaaagtgctataacgatctgaagttacca

SEQ ID NO: 791810 - DNA, 33 bp, Homo sapien
aggtgaaagtgctatagcgatctgaagttacca

SEQ ID NO: 791811 - DNA, 33 bp, Homo sapien
tcattcactctgcctacgatgctttgcttgcac

SEQ ID NO: 791812 - DNA, 33 bp, Homo sapien
tcattcactctgcctaggatgctttgcttgcac

SEQ ID NO: 791813 - DNA, 33 bp, Homo sapien
gtaacatgtgctgcccaagaaaagtgctcatga

SEQ ID NO: 791814 - DNA, 33 bp, Homo sapien
gtaacatgtgctgcccgagaaaagtgctcatga

SEQ ID NO: 791815 - DNA, 33 bp, Homo sapien
tttgcgtcaatacttacggatattggtctgtag

SEQ ID NO: 791816 - DNA, 33 bp, Homo sapien
tttgcgtcaatacttatggatattggtctgtag

SEQ ID NO: 791817 - DNA, 33 bp, Homo sapien
cttccaaaaacttgaaaaagaggagatacttcc

SEQ ID NO: 791818 - DNA, 33 bp, Homo sapien
cttccaaaaacttgaacaagaggagatacttcc

SEQ ID NO: 791819 - DNA, 33 bp, Homo sapien
aggttaataaaacatacgccagtaagagaacaa

SEQ ID NO: 791820 - DNA, 33 bp, Homo sapien
aggttaataaaacatatgccagtaagagaacaa

SEQ ID NO: 791821 - DNA, 33 bp, Homo sapien
ggactgtgctctcatccagaagcttaacaggga

SEQ ID NO: 791822 - DNA, 33 bp, Homo sapien
ggactgtgctctcatctagaagcttaacaggga

SEQ ID NO: 791823 - DNA, 33 bp, Homo sapien
gactctctctattccaacccatagagtggaaac

SEQ ID NO: 791824 - DNA, 33 bp, Homo sapien
gactctctctattccatcccatagagtggaaac

SEQ ID NO: 791825 - DNA, 33 bp, Homo sapien
aacatagctaagtaggaaaccaagaaaaagaga

SEQ ID NO: 791826 - DNA, 33 bp, Homo sapien
aacatagctaagtaggcaaccaagaaaaagaga

SEQ ID NO: 791827 - DNA, 33 bp, Homo sapien
tttgctgaacctcatccacaaaatgtgttatag

SEQ ID NO: 791828 - DNA, 33 bp, Homo sapien
tttgctgaacctcatcgacaaaatgtgttatag

SEQ ID NO: 791829 - DNA, 33 bp, Homo sapien
gtgtaaaactgaatacaactactacagcaatga

SEQ ID NO: 791830 - DNA, 33 bp, Homo sapien
gtgtaaaactgaataccactactacagcaatga

SEQ ID NO: 791831 - DNA, 33 bp, Homo sapien
gtcctctaacagcaatcattcactccgcctccc

SEQ ID NO: 791832 - DNA, 33 bp, Homo sapien
gtcctctaacagcaatgattcactccgcctccc

SEQ ID NO: 791833 - DNA, 33 bp, Homo sapien
tggtaatgcaaactgccatttcgggaagtggtt

SEQ ID NO: 791834 - DNA, 33 bp, Homo sapien
tggtaatgcaaactgcgatttcgggaagtggtt

SEQ ID NO: 791835 - DNA, 33 bp, Homo sapien
tattggtggatttttgcattcgttccagtttgg

SEQ ID NO: 791836 - DNA, 33 bp, Homo sapien
tattggtggatttttggattcgttccagtttgg

SEQ ID NO: 791837 - DNA, 33 bp, Homo sapien
caatcctgagcaagagaacaacaaagctggaag

SEQ ID NO: 791838 - DNA, 33 bp, Homo sapien
caatcctgagcaagaggacaacaaagctggaag

SEQ ID NO: 791839 - DNA, 33 bp, Homo sapien
agaattcagcaatgaaactgttaagtcctgggc

SEQ ID NO: 791840 - DNA, 33 bp, Homo sapien
agaattcagcaatgaagctgttaagtcctgggc

SEQ ID NO: 791841 - DNA, 33 bp, Homo sapien
ccgaaatgattttctaccctactatgtgatcca

SEQ ID NO: 791842 - DNA, 33 bp, Homo sapien
ccgaaatgattttctatcctactatgtgatcca

SEQ ID NO: 791843 - DNA, 33 bp, Homo sapien
gtgagagagaggcatccgaaagaggaaggctgc

SEQ ID NO: 791844 - DNA, 33 bp, Homo sapien
gtgagagagaggcatctgaaagaggaaggctgc

SEQ ID NO: 791845 - DNA, 33 bp, Homo sapien
acaagacttaagacacagcagacagtaagatgt

SEQ ID NO: 791846 - DNA, 33 bp, Homo sapien
acaagacttaagacacggcagacagtaagatgt

SEQ ID NO: 791847 - DNA, 33 bp, Homo sapien
tacactgacggagggaactcagcagcaattttt

SEQ ID NO: 791848 - DNA, 33 bp, Homo sapien
tacactgacggagggagctcagcagcaattttt

SEQ ID NO: 791849 - DNA, 33 bp, Homo sapien
cttattgtcacataataaaaggcctatttacca

SEQ ID NO: 791850 - DNA, 33 bp, Homo sapien
cttattgtcacataattaaaggcctatttacca

SEQ ID NO: 791851 - DNA, 33 bp, Homo sapien
ttatagatatgctacaacttctgtaattgtccc

SEQ ID NO: 791852 - DNA, 33 bp, Homo sapien
ttatagatatgctacaccttctgtaattgtccc

SEQ ID NO: 791853 - DNA, 33 bp, Homo sapien
gttgaaactctaacctcaatgtaatagtttata

SEQ ID NO: 791854 - DNA, 33 bp, Homo sapien
gttgaaactctaaccttaatgtaatagtttata

SEQ ID NO: 791855 - DNA, 33 bp, Homo sapien
aaccctttttccagtacaaagacagagataggt

SEQ ID NO: 791856 - DNA, 33 bp, Homo sapien
aaccctttttccagtataaagacagagataggt

SEQ ID NO: 791857 - DNA, 33 bp, Homo sapien
gtaagctgccgaggaacggtgcttgcaccctct

SEQ ID NO: 791858 - DNA, 33 bp, Homo sapien
gtaagctgccgaggaatggtgcttgcaccctct

SEQ ID NO: 791859 - DNA, 33 bp, Homo sapien
ttattttttggtctacaggttctactaattgaa

SEQ ID NO: 791860 - DNA, 33 bp, Homo sapien
ttattttttggtctactggttctactaattgaa

SEQ ID NO: 791861 - DNA, 33 bp, Homo sapien
tatgttccttaacttacgcactacagttagatt

SEQ ID NO: 791862 - DNA, 33 bp, Homo sapien
tatgttccttaacttatgcactacagttagatt

SEQ ID NO: 791863 - DNA, 33 bp, Homo sapien
tatttacattttaatgacaactacattttacca

SEQ ID NO: 791864 - DNA, 33 bp, Homo sapien
tatttacattttaatggcaactacattttacca

SEQ ID NO: 791865 - DNA, 33 bp, Homo sapien
gggatctagggtcttaccatttctgtgccacag

SEQ ID NO: 791866 - DNA, 33 bp, Homo sapien
gggatctagggtcttatcatttctgtgccacag

SEQ ID NO: 791867 - DNA, 33 bp, Homo sapien
acagaaaccaagtggaagaaaagagattgtaga

SEQ ID NO: 791868 - DNA, 33 bp, Homo sapien
acagaaaccaagtggaggaaaagagattgtaga

SEQ ID NO: 791869 - DNA, 33 bp, Homo sapien
ttgatgagattctgaaactagattgcaactact

SEQ ID NO: 791870 - DNA, 33 bp, Homo sapien
ttgatgagattctgaagctagattgcaactact

SEQ ID NO: 791871 - DNA, 33 bp, Homo sapien
gggccagcaagccttacagaacaagagcgactc

SEQ ID NO: 791872 - DNA, 33 bp, Homo sapien
gggccagcaagccttagagaacaagagcgactc

SEQ ID NO: 791873 - DNA, 33 bp, Homo sapien
gatggaggagccctaaatctggagctgtttagg

SEQ ID NO: 791874 - DNA, 33 bp, Homo sapien
gatggaggagccctaagtctggagctgtttagg

SEQ ID NO: 791875 - DNA, 33 bp, Homo sapien
gggtccatgacagataagcgaggtacaagggat

SEQ ID NO: 791876 - DNA, 33 bp, Homo sapien
gggtccatgacagatatgcgaggtacaagggat

SEQ ID NO: 791877 - DNA, 33 bp, Homo sapien
acattactgcacacccaaaataggcactcagca

SEQ ID NO: 791878 - DNA, 33 bp, Homo sapien
acattactgcacacccgaaataggcactcagca

SEQ ID NO: 791879 - DNA, 33 bp, Homo sapien
aacaaaggaattaagcagaacaagaaggtaagt

SEQ ID NO: 791880 - DNA, 33 bp, Homo sapien
aacaaaggaattaagcggaacaagaaggtaagt

SEQ ID NO: 791881 - DNA, 33 bp, Homo sapien
atcactcagaaaatgacagtgagaaagacatgg

SEQ ID NO: 791882 - DNA, 33 bp, Homo sapien
atcactcagaaaatgatagtgagaaagacatgg

SEQ ID NO: 791883 - DNA, 33 bp, Homo sapien
tcatccctgtatccgcagcacctaggaaggtgt

SEQ ID NO: 791884 - DNA, 33 bp, Homo sapien
tcatccctgtatccgcggcacctaggaaggtgt

SEQ ID NO: 791885 - DNA, 33 bp, Homo sapien
ataagaggccaggaccgcattcttgttcattgc

SEQ ID NO: 791886 - DNA, 33 bp, Homo sapien
ataagaggccaggacctcattcttgttcattgc

SEQ ID NO: 791887 - DNA, 33 bp, Homo sapien
ggtttggagtgggcatgaaccagttccctggtt

SEQ ID NO: 791888 - DNA, 33 bp, Homo sapien
ggtttggagtgggcattaaccagttccctggtt

SEQ ID NO: 791889 - DNA, 33 bp, Homo sapien
ttaatcgttcacatgacagggaatttaatttgt

SEQ ID NO: 791890 - DNA, 33 bp, Homo sapien
ttaatcgttcacatgatagggaatttaatttgt

SEQ ID NO: 791891 - DNA, 33 bp, Homo sapien
agttgcattgctgctcgacctacgttgtccagg

SEQ ID NO: 791892 - DNA, 33 bp, Homo sapien
agttgcattgctgctctacctacgttgtccagg

SEQ ID NO: 791893 - DNA, 33 bp, Homo sapien
tgctagccatctccagcagagagtgcattcact

SEQ ID NO: 791894 - DNA, 33 bp, Homo sapien
tgctagccatctccagtagagagtgcattcact

SEQ ID NO: 791895 - DNA, 33 bp, Homo sapien
cccattctacagatgacgaaattgaagtttggg

SEQ ID NO: 791896 - DNA, 33 bp, Homo sapien
cccattctacagatgaggaaattgaagtttggg

SEQ ID NO: 791897 - DNA, 33 bp, Homo sapien
ctctgtgcctttaaaaaaacttgataatatggc

SEQ ID NO: 791898 - DNA, 33 bp, Homo sapien
ctctgtgcctttaaaacaacttgataatatggc

SEQ ID NO: 791899 - DNA, 33 bp, Homo sapien
aatttttgaccaagagaagctgatataatgaat

SEQ ID NO: 791900 - DNA, 33 bp, Homo sapien
aatttttgaccaagaggagctgatataatgaat

SEQ ID NO: 791901 - DNA, 33 bp, Homo sapien
atctccttctaagtataacaaagacaatcaaag

SEQ ID NO: 791902 - DNA, 33 bp, Homo sapien
atctccttctaagtattacaaagacaatcaaag

SEQ ID NO: 791903 - DNA, 33 bp, Homo sapien
ccacaggacagaaaaaaaatgtctgcagagtct

SEQ ID NO: 791904 - DNA, 33 bp, Homo sapien
ccacaggacagaaaaagaatgtctgcagagtct

SEQ ID NO: 791905 - DNA, 33 bp, Homo sapien
tccttcctcagtttcaatccatacaatgaaatg

SEQ ID NO: 791906 - DNA, 33 bp, Homo sapien
tccttcctcagtttcagtccatacaatgaaatg

SEQ ID NO: 791907 - DNA, 33 bp, Homo sapien
tgttacattcttttcccgaggctaggcagcgtc

SEQ ID NO: 791908 - DNA, 33 bp, Homo sapien
tgttacattcttttcctgaggctaggcagcgtc

SEQ ID NO: 791909 - DNA, 33 bp, Homo sapien
aagaagccggaagagtgaagaacaaatgaattc

SEQ ID NO: 791910 - DNA, 33 bp, Homo sapien
aagaagccggaagagttaagaacaaatgaattc

SEQ ID NO: 791911 - DNA, 33 bp, Homo sapien
ccaatatggtagccataaggctattgagcactt

SEQ ID NO: 791912 - DNA, 33 bp, Homo sapien
ccaatatggtagccattaggctattgagcactt

SEQ ID NO: 791913 - DNA, 33 bp, Homo sapien
agtgggagacaaattcaccggcacctgcatatg

SEQ ID NO: 791914 - DNA, 33 bp, Homo sapien
agtgggagacaaattcgccggcacctgcatatg

SEQ ID NO: 791915 - DNA, 33 bp, Homo sapien
caaatttactgctagacactgacatttgttttc

SEQ ID NO: 791916 - DNA, 33 bp, Homo sapien
caaatttactgctagagactgacatttgttttc

SEQ ID NO: 791917 - DNA, 33 bp, Homo sapien
cattttatgactatcaagacctctgtgtgcaga

SEQ ID NO: 791918 - DNA, 33 bp, Homo sapien
cattttatgactatcaggacctctgtgtgcaga

SEQ ID NO: 791919 - DNA, 33 bp, Homo sapien
tatgagaaaggacatacagttctgctttgcaaa

SEQ ID NO: 791920 - DNA, 33 bp, Homo sapien
tatgagaaaggacatagagttctgctttgcaaa

SEQ ID NO: 791921 - DNA, 33 bp, Homo sapien
ttcaaagtacaggtaggaaagaaccatacaagc

SEQ ID NO: 791922 - DNA, 33 bp, Homo sapien
ttcaaagtacaggtagtaaagaaccatacaagc

SEQ ID NO: 791923 - DNA, 33 bp, Homo sapien
tcttgcaatgaatcagaaattgggacatatgtc

SEQ ID NO: 791924 - DNA, 33 bp, Homo sapien
tcttgcaatgaatcaggaattgggacatatgtc

SEQ ID NO: 791925 - DNA, 33 bp, Homo sapien
ggcccacggtgcactgaaggaagcacaattgta

SEQ ID NO: 791926 - DNA, 33 bp, Homo sapien
ggcccacggtgcactgcaggaagcacaattgta

SEQ ID NO: 791927 - DNA, 33 bp, Homo sapien
agtcacatctgtgcaaggatctatttttagtgg

SEQ ID NO: 791928 - DNA, 33 bp, Homo sapien
agtcacatctgtgcaatgatctatttttagtgg

SEQ ID NO: 791929 - DNA, 33 bp, Homo sapien
ggtgatatgagatttcaaagcaatataagggaa

SEQ ID NO: 791930 - DNA, 33 bp, Homo sapien
ggtgatatgagatttcgaagcaatataagggaa

SEQ ID NO: 791931 - DNA, 33 bp, Homo sapien
aatccaactataattgacaacattttccacttc

SEQ ID NO: 791932 - DNA, 33 bp, Homo sapien
aatccaactataattgccaacattttccacttc

SEQ ID NO: 791933 - DNA, 33 bp, Homo sapien
taggttccctttgcacagaatagtatccatgag

SEQ ID NO: 791934 - DNA, 33 bp, Homo sapien
taggttccctttgcacggaatagtatccatgag

SEQ ID NO: 791935 - DNA, 33 bp, Homo sapien
aagtgcttgcatacaactctgtccaaagtgtgg

SEQ ID NO: 791936 - DNA, 33 bp, Homo sapien
aagtgcttgcatacaattctgtccaaagtgtgg

SEQ ID NO: 791937 - DNA, 33 bp, Homo sapien
accaaccactatctgacggccacagttacagag

SEQ ID NO: 791938 - DNA, 33 bp, Homo sapien
accaaccactatctgatggccacagttacagag

SEQ ID NO: 791939 - DNA, 33 bp, Homo sapien
ctttaaattgtggaaacgccctgaagtatacta

SEQ ID NO: 791940 - DNA, 33 bp, Homo sapien
ctttaaattgtggaaatgccctgaagtatacta

SEQ ID NO: 791941 - DNA, 33 bp, Homo sapien
catcaattttggatctaaagtgtctgttactac

SEQ ID NO: 791942 - DNA, 33 bp, Homo sapien
catcaattttggatctgaagtgtctgttactac

SEQ ID NO: 791943 - DNA, 33 bp, Homo sapien
agacgttgggaagaaaaggaccacaggagggta

SEQ ID NO: 791944 - DNA, 33 bp, Homo sapien
agacgttgggaagaaagggaccacaggagggta

SEQ ID NO: 791945 - DNA, 33 bp, Homo sapien
ttaaggttccaggctaggatttcaatctcattt

SEQ ID NO: 791946 - DNA, 33 bp, Homo sapien
ttaaggttccaggctatgatttcaatctcattt

SEQ ID NO: 791947 - DNA, 33 bp, Homo sapien
ttttccaacggagtaacgccatcactaagtcat

SEQ ID NO: 791948 - DNA, 33 bp, Homo sapien
ttttccaacggagtaatgccatcactaagtcat

SEQ ID NO: 791949 - DNA, 33 bp, Homo sapien
accatctgtattgccacgctctatgtcctgctc

SEQ ID NO: 791950 - DNA, 33 bp, Homo sapien
accatctgtattgccatgctctatgtcctgctc

SEQ ID NO: 791951 - DNA, 33 bp, Homo sapien
ctccctgaataatatccgaattcactgcttaaa

SEQ ID NO: 791952 - DNA, 33 bp, Homo sapien
ctccctgaataatatctgaattcactgcttaaa

SEQ ID NO: 791953 - DNA, 33 bp, Homo sapien
ctgaggaggttgaagaaatggctgtgttgaaga

SEQ ID NO: 791954 - DNA, 33 bp, Homo sapien
ctgaggaggttgaagatatggctgtgttgaaga

SEQ ID NO: 791955 - DNA, 33 bp, Homo sapien
agggatcaggtttcagaaagttcttatgtaata

SEQ ID NO: 791956 - DNA, 33 bp, Homo sapien
agggatcaggtttcagtaagttcttatgtaata

SEQ ID NO: 791957 - DNA, 33 bp, Homo sapien
atgtcagctagtcaccgcctatgggaccttgtg

SEQ ID NO: 791958 - DNA, 33 bp, Homo sapien
atgtcagctagtcacctcctatgggaccttgtg

SEQ ID NO: 791959 - DNA, 33 bp, Homo sapien
ctccgagccacataaactcatttccatacagac

SEQ ID NO: 791960 - DNA, 33 bp, Homo sapien
ctccgagccacataaagtcatttccatacagac

SEQ ID NO: 791961 - DNA, 33 bp, Homo sapien
tagggctttctccaagactccggtaaatgactg

SEQ ID NO: 791962 - DNA, 33 bp, Homo sapien
tagggctttctccaaggctccggtaaatgactg

SEQ ID NO: 791963 - DNA, 33 bp, Homo sapien
attgcgagggtttagtgaactgtcaagcctgag

SEQ ID NO: 791964 - DNA, 33 bp, Homo sapien
attgcgagggtttagttaactgtcaagcctgag

SEQ ID NO: 791965 - DNA, 33 bp, Homo sapien
gtgactttggagatgccgaagcaaatacctgtt

SEQ ID NO: 791966 - DNA, 33 bp, Homo sapien
gtgactttggagatgcggaagcaaatacctgtt

SEQ ID NO: 791967 - DNA, 33 bp, Homo sapien
cacaactgtgactccacgaatcctctagagcag

SEQ ID NO: 791968 - DNA, 33 bp, Homo sapien
cacaactgtgactccatgaatcctctagagcag

SEQ ID NO: 791969 - DNA, 33 bp, Homo sapien
aaacaagcaaaagcaaatgcaacgaggagaaat

SEQ ID NO: 791970 - DNA, 33 bp, Homo sapien
aaacaagcaaaagcaagtgcaacgaggagaaat

SEQ ID NO: 791971 - DNA, 33 bp, Homo sapien
gctctaatcctagcaaggaggaaacaatagaca

SEQ ID NO: 791972 - DNA, 33 bp, Homo sapien
gctctaatcctagcaatgaggaaacaatagaca

SEQ ID NO: 791973 - DNA, 33 bp, Homo sapien
gcagtgtggttccaaccgacaaatagcatttac

SEQ ID NO: 791974 - DNA, 33 bp, Homo sapien
gcagtgtggttccaactgacaaatagcatttac

SEQ ID NO: 791975 - DNA, 33 bp, Homo sapien
tgacagtaaggttaaaatggaggtggctgagga

SEQ ID NO: 791976 - DNA, 33 bp, Homo sapien
tgacagtaaggttaaagtggaggtggctgagga

SEQ ID NO: 791977 - DNA, 33 bp, Homo sapien
gaacttgaacttttaacgggagaagtcctcagc

SEQ ID NO: 791978 - DNA, 33 bp, Homo sapien
gaacttgaacttttaatgggagaagtcctcagc

SEQ ID NO: 791979 - DNA, 33 bp, Homo sapien
tgttgttatatgaccaaaggcacaaaaccctgc

SEQ ID NO: 791980 - DNA, 33 bp, Homo sapien
tgttgttatatgaccacaggcacaaaaccctgc

SEQ ID NO: 791981 - DNA, 33 bp, Homo sapien
aatccattctacatcacggtctatggctggaga

SEQ ID NO: 791982 - DNA, 33 bp, Homo sapien
aatccattctacatcatggtctatggctggaga

SEQ ID NO: 791983 - DNA, 33 bp, Homo sapien
tacttctaaaatcaaacgcaacaacctctgggc

SEQ ID NO: 791984 - DNA, 33 bp, Homo sapien
tacttctaaaatcaaatgcaacaacctctgggc

SEQ ID NO: 791985 - DNA, 33 bp, Homo sapien
tccatcttaactgtgactatttgatcgacagga

SEQ ID NO: 791986 - DNA, 33 bp, Homo sapien
tccatcttaactgtgattatttgatcgacagga

SEQ ID NO: 791987 - DNA, 33 bp, Homo sapien
ccctcataatgatggtaaattaaagtctaaaat

SEQ ID NO: 791988 - DNA, 33 bp, Homo sapien
ccctcataatgatggtcaattaaagtctaaaat

SEQ ID NO: 791989 - DNA, 33 bp, Homo sapien
ttagtctagctcattaaaaccaagacagtttta

SEQ ID NO: 791990 - DNA, 33 bp, Homo sapien
ttagtctagctcattacaaccaagacagtttta

SEQ ID NO: 791991 - DNA, 33 bp, Homo sapien
tcccttagaacagtacaatcacagagccggagg

SEQ ID NO: 791992 - DNA, 33 bp, Homo sapien
tcccttagaacagtaccatcacagagccggagg

SEQ ID NO: 791993 - DNA, 33 bp, Homo sapien
ctttgctctcgcttgaggaacttttcaccactt

SEQ ID NO: 791994 - DNA, 33 bp, Homo sapien
ctttgctctcgcttgatgaacttttcaccactt

SEQ ID NO: 791995 - DNA, 33 bp, Homo sapien
tgctactttcagaaggaagccaaaattcattca

SEQ ID NO: 791996 - DNA, 33 bp, Homo sapien
tgctactttcagaagggagccaaaattcattca

SEQ ID NO: 791997 - DNA, 33 bp, Homo sapien
atttcaagttctgagcaatgagaaggaaaatac

SEQ ID NO: 791998 - DNA, 33 bp, Homo sapien
atttcaagttctgagcgatgagaaggaaaatac

SEQ ID NO: 791999 - DNA, 33 bp, Homo sapien
aagaggagattccccacgttcactttgaataac

SEQ ID NO: 792000 - DNA, 33 bp, Homo sapien
aagaggagattccccaggttcactttgaataac

SEQ ID NO: 792001 - DNA, 33 bp, Homo sapien
ccatttctaaagtgacagaattcgatgagtgaa

SEQ ID NO: 792002 - DNA, 33 bp, Homo sapien
ccatttctaaagtgactgaattcgatgagtgaa

SEQ ID NO: 792003 - DNA, 33 bp, Homo sapien
ctccaggaatttagacacaggatgcagggctag

SEQ ID NO: 792004 - DNA, 33 bp, Homo sapien
ctccaggaatttagacgcaggatgcagggctag

SEQ ID NO: 792005 - DNA, 33 bp, Homo sapien
tctcagaaacaaaaatgatctctttctctccct

SEQ ID NO: 792006 - DNA, 33 bp, Homo sapien
tctcagaaacaaaaattatctctttctctccct

SEQ ID NO: 792007 - DNA, 33 bp, Homo sapien
taccttcaatgtgcacaatgttgcctaaacaag

SEQ ID NO: 792008 - DNA, 33 bp, Homo sapien
taccttcaatgtgcaccatgttgcctaaacaag

SEQ ID NO: 792009 - DNA, 33 bp, Homo sapien
tatcattaacagggacacagacagagatgacag

SEQ ID NO: 792010 - DNA, 33 bp, Homo sapien
tatcattaacagggacccagacagagatgacag

SEQ ID NO: 792011 - DNA, 33 bp, Homo sapien
tgctgagataaagccacaggatccagtagatag

SEQ ID NO: 792012 - DNA, 33 bp, Homo sapien
tgctgagataaagccataggatccagtagatag

SEQ ID NO: 792013 - DNA, 33 bp, Homo sapien
gtaacttgtgcctttacagttgccacaaagatt

SEQ ID NO: 792014 - DNA, 33 bp, Homo sapien
gtaacttgtgcctttagagttgccacaaagatt

SEQ ID NO: 792015 - DNA, 33 bp, Homo sapien
tttattctcatctaacgggcaccaatacctgcc

SEQ ID NO: 792016 - DNA, 33 bp, Homo sapien
tttattctcatctaactggcaccaatacctgcc

SEQ ID NO: 792017 - DNA, 33 bp, Homo sapien
ccccgtaagtcacttacattgtcatcttaatat

SEQ ID NO: 792018 - DNA, 33 bp, Homo sapien
ccccgtaagtcacttatattgtcatcttaatat

SEQ ID NO: 792019 - DNA, 33 bp, Homo sapien
ctcagtgatcctagacactaactttgacaagga

SEQ ID NO: 792020 - DNA, 33 bp, Homo sapien
ctcagtgatcctagacgctaactttgacaagga

SEQ ID NO: 792021 - DNA, 33 bp, Homo sapien
caaacacctctttgccaaagtgctacctgtacg

SEQ ID NO: 792022 - DNA, 33 bp, Homo sapien
caaacacctctttgcccaagtgctacctgtacg

SEQ ID NO: 792023 - DNA, 33 bp, Homo sapien
aaatgaatgacctaaaataatcaatggatatgt

SEQ ID NO: 792024 - DNA, 33 bp, Homo sapien
aaatgaatgacctaaagtaatcaatggatatgt

SEQ ID NO: 792025 - DNA, 33 bp, Homo sapien
tggctgttattgcctacgttatccattttgaca

SEQ ID NO: 792026 - DNA, 33 bp, Homo sapien
tggctgttattgcctatgttatccattttgaca

SEQ ID NO: 792027 - DNA, 33 bp, Homo sapien
aagcttgttgtgattacgacctctgagatacct

SEQ ID NO: 792028 - DNA, 33 bp, Homo sapien
aagcttgttgtgattatgacctctgagatacct

SEQ ID NO: 792029 - DNA, 33 bp, Homo sapien
atttcatttattagcaaatcatcagttgaccca

SEQ ID NO: 792030 - DNA, 33 bp, Homo sapien
atttcatttattagcagatcatcagttgaccca

SEQ ID NO: 792031 - DNA, 33 bp, Homo sapien
aatggtggaatgacaacgtattcatttttgtcc

SEQ ID NO: 792032 - DNA, 33 bp, Homo sapien
aatggtggaatgacaatgtattcatttttgtcc

SEQ ID NO: 792033 - DNA, 33 bp, Homo sapien
tccacacccttctttacgtttagacaattttct

SEQ ID NO: 792034 - DNA, 33 bp, Homo sapien
tccacacccttctttaggtttagacaattttct

SEQ ID NO: 792035 - DNA, 33 bp, Homo sapien
atcctgaagagagacaaaaaagatatttagaga

SEQ ID NO: 792036 - DNA, 33 bp, Homo sapien
atcctgaagagagacagaaaagatatttagaga

SEQ ID NO: 792037 - DNA, 33 bp, Homo sapien
ggctcagacatttataaggacaccataaacagg

SEQ ID NO: 792038 - DNA, 33 bp, Homo sapien
ggctcagacatttatatggacaccataaacagg

SEQ ID NO: 792039 - DNA, 33 bp, Homo sapien
ctgagtccttgctcacactgtccatgtttggag

SEQ ID NO: 792040 - DNA, 33 bp, Homo sapien
ctgagtccttgctcacgctgtccatgtttggag

SEQ ID NO: 792041 - DNA, 33 bp, Homo sapien
tgaagtctgagcaagcaactggcagaagaaccc

SEQ ID NO: 792042 - DNA, 33 bp, Homo sapien
tgaagtctgagcaagcgactggcagaagaaccc

SEQ ID NO: 792043 - DNA, 33 bp, Homo sapien
tcaagatacttgctctcacatatgtccttggag

SEQ ID NO: 792044 - DNA, 33 bp, Homo sapien
tcaagatacttgctcttacatatgtccttggag

SEQ ID NO: 792045 - DNA, 33 bp, Homo sapien
gcttgtaggtgacttacaattcccagccttcgc

SEQ ID NO: 792046 - DNA, 33 bp, Homo sapien
gcttgtaggtgacttataattcccagccttcgc

SEQ ID NO: 792047 - DNA, 33 bp, Homo sapien
gtttaaaatgagctaccctgggcccagctgata

SEQ ID NO: 792048 - DNA, 33 bp, Homo sapien
gtttaaaatgagctactctgggcccagctgata

SEQ ID NO: 792049 - DNA, 33 bp, Homo sapien
aaattgtttcctagcacaatgtaaccagcactt

SEQ ID NO: 792050 - DNA, 33 bp, Homo sapien
aaattgtttcctagcagaatgtaaccagcactt

SEQ ID NO: 792051 - DNA, 33 bp, Homo sapien
ggtaaactgcggatgacgtagaaggtaatgctg

SEQ ID NO: 792052 - DNA, 33 bp, Homo sapien
ggtaaactgcggatgatgtagaaggtaatgctg

SEQ ID NO: 792053 - DNA, 33 bp, Homo sapien
ttgagaatacaaattcaatgtgtcagtaaagag

SEQ ID NO: 792054 - DNA, 33 bp, Homo sapien
ttgagaatacaaattccatgtgtcagtaaagag

SEQ ID NO: 792055 - DNA, 33 bp, Homo sapien
taaactaactgtatgaacctctttaatatattt

SEQ ID NO: 792056 - DNA, 33 bp, Homo sapien
taaactaactgtatgagcctctttaatatattt

SEQ ID NO: 792057 - DNA, 33 bp, Homo sapien
cccttttatcacctgacaagccaactctgccca

SEQ ID NO: 792058 - DNA, 33 bp, Homo sapien
cccttttatcacctgagaagccaactctgccca

SEQ ID NO: 792059 - DNA, 33 bp, Homo sapien
aaatgtaggccctcagacagacagcatgatttt

SEQ ID NO: 792060 - DNA, 33 bp, Homo sapien
aaatgtaggccctcaggcagacagcatgatttt

SEQ ID NO: 792061 - DNA, 33 bp, Homo sapien
tgattcttatcaggcacggtttccttgtcatga

SEQ ID NO: 792062 - DNA, 33 bp, Homo sapien
tgattcttatcaggcatggtttccttgtcatga

SEQ ID NO: 792063 - DNA, 33 bp, Homo sapien
tgatgactggacactggaattcactacatggat

SEQ ID NO: 792064 - DNA, 33 bp, Homo sapien
tgatgactggacactgtaattcactacatggat

SEQ ID NO: 792065 - DNA, 33 bp, Homo sapien
aatcattactgattccaaaggtgggacttttag

SEQ ID NO: 792066 - DNA, 33 bp, Homo sapien
aatcattactgattccgaaggtgggacttttag

SEQ ID NO: 792067 - DNA, 33 bp, Homo sapien
ttgtctgcatatagatcacatttaaaactaaaa

SEQ ID NO: 792068 - DNA, 33 bp, Homo sapien
ttgtctgcatatagatgacatttaaaactaaaa

SEQ ID NO: 792069 - DNA, 33 bp, Homo sapien
cctcaattgtaaaatgaagcagatggatctacc

SEQ ID NO: 792070 - DNA, 33 bp, Homo sapien
cctcaattgtaaaatggagcagatggatctacc

SEQ ID NO: 792071 - DNA, 33 bp, Homo sapien
atggatctacctcatacggctggttgtgaggat

SEQ ID NO: 792072 - DNA, 33 bp, Homo sapien
atggatctacctcatatggctggttgtgaggat

SEQ ID NO: 792073 - DNA, 33 bp, Homo sapien
ctctggcctttctcaacggatggaccctttgct

SEQ ID NO: 792074 - DNA, 33 bp, Homo sapien
ctctggcctttctcaatggatggaccctttgct

SEQ ID NO: 792075 - DNA, 33 bp, Homo sapien
tttatttcgaatgagaaaagaagcaacaaataa

SEQ ID NO: 792076 - DNA, 33 bp, Homo sapien
tttatttcgaatgagagaagaagcaacaaataa

SEQ ID NO: 792077 - DNA, 33 bp, Homo sapien
cttgaaaggcagtgagaaatgctaattcaggcc

SEQ ID NO: 792078 - DNA, 33 bp, Homo sapien
cttgaaaggcagtgaggaatgctaattcaggcc

SEQ ID NO: 792079 - DNA, 33 bp, Homo sapien
caagaagcatgtttaacacacgtggacttagta

SEQ ID NO: 792080 - DNA, 33 bp, Homo sapien
caagaagcatgtttaatacacgtggacttagta

SEQ ID NO: 792081 - DNA, 33 bp, Homo sapien
tcaaactccccccacaaagaggtagcactactc

SEQ ID NO: 792082 - DNA, 33 bp, Homo sapien
tcaaactccccccacagagaggtagcactactc

SEQ ID NO: 792083 - DNA, 33 bp, Homo sapien
tgttggcattcctcatgagtacaataggtctat

SEQ ID NO: 792084 - DNA, 33 bp, Homo sapien
tgttggcattcctcattagtacaataggtctat

SEQ ID NO: 792085 - DNA, 33 bp, Homo sapien
aatgaagatgtgaggccaccacaaaaacggaag

SEQ ID NO: 792086 - DNA, 33 bp, Homo sapien
aatgaagatgtgaggctaccacaaaaacggaag

SEQ ID NO: 792087 - DNA, 33 bp, Homo sapien
gatcacgtaaaataaaacttgtgtcagaggcca

SEQ ID NO: 792088 - DNA, 33 bp, Homo sapien
gatcacgtaaaataaaccttgtgtcagaggcca

SEQ ID NO: 792089 - DNA, 33 bp, Homo sapien
ctgcataggactattacggcatttgagtccagt

SEQ ID NO: 792090 - DNA, 33 bp, Homo sapien
ctgcataggactattatggcatttgagtccagt

SEQ ID NO: 792091 - DNA, 33 bp, Homo sapien
agacctgagaagttgacggcatctaattcagca

SEQ ID NO: 792092 - DNA, 33 bp, Homo sapien
agacctgagaagttgatggcatctaattcagca

SEQ ID NO: 792093 - DNA, 33 bp, Homo sapien
atgcctctgcccaatcaccattgcctatctctt

SEQ ID NO: 792094 - DNA, 33 bp, Homo sapien
atgcctctgcccaatcgccattgcctatctctt

SEQ ID NO: 792095 - DNA, 33 bp, Homo sapien
acaaatgtagcactgaaaggagttttatgaagt

SEQ ID NO: 792096 - DNA, 33 bp, Homo sapien
acaaatgtagcactgagaggagttttatgaagt

SEQ ID NO: 792097 - DNA, 33 bp, Homo sapien
cactgcagcaaggtctcaatatttttaatatga

SEQ ID NO: 792098 - DNA, 33 bp, Homo sapien
cactgcagcaaggtctgaatatttttaatatga

SEQ ID NO: 792099 - DNA, 33 bp, Homo sapien
gattttctattctccacggttcatgaaagtgcc

SEQ ID NO: 792100 - DNA, 33 bp, Homo sapien
gattttctattctccatggttcatgaaagtgcc

SEQ ID NO: 792101 - DNA, 33 bp, Homo sapien
cataagatgatttatgaaaaagttgttcgacag

SEQ ID NO: 792102 - DNA, 33 bp, Homo sapien
cataagatgatttatgcaaaagttgttcgacag

SEQ ID NO: 792103 - DNA, 33 bp, Homo sapien
tctcatctcttggttccctccaaggcttacttt

SEQ ID NO: 792104 - DNA, 33 bp, Homo sapien
tctcatctcttggttctctccaaggcttacttt

SEQ ID NO: 792105 - DNA, 33 bp, Homo sapien
tggaatttaaatagacaaaggtgtggttctttc

SEQ ID NO: 792106 - DNA, 33 bp, Homo sapien
tggaatttaaatagacgaaggtgtggttctttc

SEQ ID NO: 792107 - DNA, 33 bp, Homo sapien
ctttgcagctaaaaaactgagatgatattcata

SEQ ID NO: 792108 - DNA, 33 bp, Homo sapien
ctttgcagctaaaaaattgagatgatattcata

SEQ ID NO: 792109 - DNA, 33 bp, Homo sapien
gaaaaagatgaagagaacatccgatccttcttc

SEQ ID NO: 792110 - DNA, 33 bp, Homo sapien
gaaaaagatgaagagagcatccgatccttcttc

SEQ ID NO: 792111 - DNA, 33 bp, Homo sapien
atgtcctgctgatgggcacggaaaagctaatgg

SEQ ID NO: 792112 - DNA, 33 bp, Homo sapien
atgtcctgctgatgggtacggaaaagctaatgg

SEQ ID NO: 792113 - DNA, 33 bp, Homo sapien
atcttactgggtacacactcaatagcgaggttg

SEQ ID NO: 792114 - DNA, 33 bp, Homo sapien
atcttactgggtacacgctcaatagcgaggttg

SEQ ID NO: 792115 - DNA, 33 bp, Homo sapien
atagaaccctgaccaacgtatctctgatgatga

SEQ ID NO: 792116 - DNA, 33 bp, Homo sapien
atagaaccctgaccaatgtatctctgatgatga

SEQ ID NO: 792117 - DNA, 33 bp, Homo sapien
cactgagataagaaatcagctaacgtagatgaa

SEQ ID NO: 792118 - DNA, 33 bp, Homo sapien
cactgagataagaaattagctaacgtagatgaa

SEQ ID NO: 792119 - DNA, 33 bp, Homo sapien
cccatgcttaggaataccgtgctgctgcctcgg

SEQ ID NO: 792120 - DNA, 33 bp, Homo sapien
cccatgcttaggaatatcgtgctgctgcctcgg

SEQ ID NO: 792121 - DNA, 33 bp, Homo sapien
agttaagtttgtgtgacgtagagtggttaggcc

SEQ ID NO: 792122 - DNA, 33 bp, Homo sapien
agttaagtttgtgtgatgtagagtggttaggcc

SEQ ID NO: 792123 - DNA, 33 bp, Homo sapien
taatatctttctactgaaccttgaagtcaagat

SEQ ID NO: 792124 - DNA, 33 bp, Homo sapien
taatatctttctactggaccttgaagtcaagat

SEQ ID NO: 792125 - DNA, 33 bp, Homo sapien
tctgatttttatctcccgcacgttagagatgaa

SEQ ID NO: 792126 - DNA, 33 bp, Homo sapien
tctgatttttatctcctgcacgttagagatgaa

SEQ ID NO: 792127 - DNA, 33 bp, Homo sapien
cactattttcacataaagttctggaagacaatc

SEQ ID NO: 792128 - DNA, 33 bp, Homo sapien
cactattttcacataaggttctggaagacaatc

SEQ ID NO: 792129 - DNA, 33 bp, Homo sapien
atgtctgcattgcaaaataaagcactaatacct

SEQ ID NO: 792130 - DNA, 33 bp, Homo sapien
atgtctgcattgcaaagtaaagcactaatacct

SEQ ID NO: 792131 - DNA, 33 bp, Homo sapien
tgcctctcccaaaaaacagactctgaggcagca

SEQ ID NO: 792132 - DNA, 33 bp, Homo sapien
tgcctctcccaaaaaagagactctgaggcagca

SEQ ID NO: 792133 - DNA, 33 bp, Homo sapien
ctgttccactccctcaatcccttgccagggtct

SEQ ID NO: 792134 - DNA, 33 bp, Homo sapien
ctgttccactccctcagtcccttgccagggtct

SEQ ID NO: 792135 - DNA, 33 bp, Homo sapien
atgtcaacaagggacacctaatatgtgatttta

SEQ ID NO: 792136 - DNA, 33 bp, Homo sapien
atgtcaacaagggacatctaatatgtgatttta

SEQ ID NO: 792137 - DNA, 33 bp, Homo sapien
ttttctgccttgccaccgtacttggaaacacat

SEQ ID NO: 792138 - DNA, 33 bp, Homo sapien
ttttctgccttgccactgtacttggaaacacat

SEQ ID NO: 792139 - DNA, 33 bp, Homo sapien
cattaccaagatgatgacaatttggtaaaactt

SEQ ID NO: 792140 - DNA, 33 bp, Homo sapien
cattaccaagatgatggcaatttggtaaaactt

SEQ ID NO: 792141 - DNA, 33 bp, Homo sapien
aattaactggcagaaaacaacattcaactactc

SEQ ID NO: 792142 - DNA, 33 bp, Homo sapien
aattaactggcagaaaccaacattcaactactc

SEQ ID NO: 792143 - DNA, 33 bp, Homo sapien
tcctgtgccttctacacgtctttgtttccgttc

SEQ ID NO: 792144 - DNA, 33 bp, Homo sapien
tcctgtgccttctacatgtctttgtttccgttc

SEQ ID NO: 792145 - DNA, 33 bp, Homo sapien
gaaagatgcattcaaaaccataccgataccccc

SEQ ID NO: 792146 - DNA, 33 bp, Homo sapien
gaaagatgcattcaaatccataccgataccccc

SEQ ID NO: 792147 - DNA, 33 bp, Homo sapien
agaactgattatgcaactaagaatttagcatcc

SEQ ID NO: 792148 - DNA, 33 bp, Homo sapien
agaactgattatgcaagtaagaatttagcatcc

SEQ ID NO: 792149 - DNA, 33 bp, Homo sapien
tccaaagtgctctgcaaaataatgatttggacc

SEQ ID NO: 792150 - DNA, 33 bp, Homo sapien
tccaaagtgctctgcagaataatgatttggacc

SEQ ID NO: 792151 - DNA, 33 bp, Homo sapien
tgaagacagcaattacaaactgttatttttgaa

SEQ ID NO: 792152 - DNA, 33 bp, Homo sapien
tgaagacagcaattacgaactgttatttttgaa

SEQ ID NO: 792153 - DNA, 33 bp, Homo sapien
acactgggattcccacagatgcaggcaatttca

SEQ ID NO: 792154 - DNA, 33 bp, Homo sapien
acactgggattcccacggatgcaggcaatttca

SEQ ID NO: 792155 - DNA, 33 bp, Homo sapien
acttgggaatccctggcatatattttgcataag

SEQ ID NO: 792156 - DNA, 33 bp, Homo sapien
acttgggaatccctggtatatattttgcataag

SEQ ID NO: 792157 - DNA, 33 bp, Homo sapien
attaataaaatacaagacttcttatgcaaaata

SEQ ID NO: 792158 - DNA, 33 bp, Homo sapien
attaataaaatacaagtcttcttatgcaaaata

SEQ ID NO: 792159 - DNA, 33 bp, Homo sapien
ttagggatcatcactgcagcttaatgcaattat

SEQ ID NO: 792160 - DNA, 33 bp, Homo sapien
ttagggatcatcactgtagcttaatgcaattat

SEQ ID NO: 792161 - DNA, 33 bp, Homo sapien
gtttgttttttcaccactaagtcataaccttaa

SEQ ID NO: 792162 - DNA, 33 bp, Homo sapien
gtttgttttttcaccattaagtcataaccttaa

SEQ ID NO: 792163 - DNA, 33 bp, Homo sapien
tagtatcatagtcataaggacttggacccctgc

SEQ ID NO: 792164 - DNA, 33 bp, Homo sapien
tagtatcatagtcatatggacttggacccctgc

SEQ ID NO: 792165 - DNA, 33 bp, Homo sapien
cactgattttagtgtgcaatttaaaatggaagg

SEQ ID NO: 792166 - DNA, 33 bp, Homo sapien
cactgattttagtgtggaatttaaaatggaagg

SEQ ID NO: 792167 - DNA, 33 bp, Homo sapien
ctcttgttcacagtcaccatagcacagagatta

SEQ ID NO: 792168 - DNA, 33 bp, Homo sapien
ctcttgttcacagtcatcatagcacagagatta

SEQ ID NO: 792169 - DNA, 33 bp, Homo sapien
aaatatttccacagtgaactaaagagtgtcttt

SEQ ID NO: 792170 - DNA, 33 bp, Homo sapien
aaatatttccacagtgcactaaagagtgtcttt

SEQ ID NO: 792171 - DNA, 33 bp, Homo sapien
actcttccagaccacactggtattcactaataa

SEQ ID NO: 792172 - DNA, 33 bp, Homo sapien
actcttccagaccacagtggtattcactaataa

SEQ ID NO: 792173 - DNA, 33 bp, Homo sapien
aggaaactaaatctgggagagaggttccaaaac

SEQ ID NO: 792174 - DNA, 33 bp, Homo sapien
aggaaactaaatctggtagagaggttccaaaac

SEQ ID NO: 792175 - DNA, 33 bp, Homo sapien
actgtgtacttgaactaaacttgaagacgtgcc

SEQ ID NO: 792176 - DNA, 33 bp, Homo sapien
actgtgtacttgaactcaacttgaagacgtgcc

SEQ ID NO: 792177 - DNA, 33 bp, Homo sapien
atggtgctaaataatgaagtctattacagaaca

SEQ ID NO: 792178 - DNA, 33 bp, Homo sapien
atggtgctaaataatgcagtctattacagaaca

SEQ ID NO: 792179 - DNA, 33 bp, Homo sapien
accagtgtttccaccactagccatgtgtcctgg

SEQ ID NO: 792180 - DNA, 33 bp, Homo sapien
accagtgtttccaccagtagccatgtgtcctgg

SEQ ID NO: 792181 - DNA, 33 bp, Homo sapien
cctttcaacaacactccagtgtgggagagtaat

SEQ ID NO: 792182 - DNA, 33 bp, Homo sapien
cctttcaacaacactctagtgtgggagagtaat

SEQ ID NO: 792183 - DNA, 33 bp, Homo sapien
tgtaggaaagaggtgacagtagcactcaaactt

SEQ ID NO: 792184 - DNA, 33 bp, Homo sapien
tgtaggaaagaggtgagagtagcactcaaactt

SEQ ID NO: 792185 - DNA, 33 bp, Homo sapien
tctcagccacagataaacattggctctttctga

SEQ ID NO: 792186 - DNA, 33 bp, Homo sapien
tctcagccacagataagcattggctctttctga

SEQ ID NO: 792187 - DNA, 33 bp, Homo sapien
attacaaggaaagagaaggtctaatgatgattg

SEQ ID NO: 792188 - DNA, 33 bp, Homo sapien
attacaaggaaagagagggtctaatgatgattg

SEQ ID NO: 792189 - DNA, 33 bp, Homo sapien
tccagttagataacaaactatatggtaacacct

SEQ ID NO: 792190 - DNA, 33 bp, Homo sapien
tccagttagataacaagctatatggtaacacct

SEQ ID NO: 792191 - DNA, 33 bp, Homo sapien
ttgtgtcaagcatgagcagtttcttagatggct

SEQ ID NO: 792192 - DNA, 33 bp, Homo sapien
ttgtgtcaagcatgagtagtttcttagatggct

SEQ ID NO: 792193 - DNA, 33 bp, Homo sapien
ggaggtattaacctagacatttgcactctgaac

SEQ ID NO: 792194 - DNA, 33 bp, Homo sapien
ggaggtattaacctaggcatttgcactctgaac

SEQ ID NO: 792195 - DNA, 33 bp, Homo sapien
gaaatctttggctaaccggtcagagaaaacaac

SEQ ID NO: 792196 - DNA, 33 bp, Homo sapien
gaaatctttggctaactggtcagagaaaacaac

SEQ ID NO: 792197 - DNA, 33 bp, Homo sapien
ccctccactatttccacgaggccaaatttattt

SEQ ID NO: 792198 - DNA, 33 bp, Homo sapien
ccctccactatttccatgaggccaaatttattt

SEQ ID NO: 792199 - DNA, 33 bp, Homo sapien
agattctccgtaacacacatacctcacccgtga

SEQ ID NO: 792200 - DNA, 33 bp, Homo sapien
agattctccgtaacacgcatacctcacccgtga

SEQ ID NO: 792201 - DNA, 33 bp, Homo sapien
tcatagaagcaggaaccggattgagaattgtgc

SEQ ID NO: 792202 - DNA, 33 bp, Homo sapien
tcatagaagcaggaactggattgagaattgtgc

SEQ ID NO: 792203 - DNA, 33 bp, Homo sapien
ggggtgaggctctgcactaatccaacaaacgaa

SEQ ID NO: 792204 - DNA, 33 bp, Homo sapien
ggggtgaggctctgcattaatccaacaaacgaa

SEQ ID NO: 792205 - DNA, 33 bp, Homo sapien
ggcattggttttaagacgtagtagaaggcagca

SEQ ID NO: 792206 - DNA, 33 bp, Homo sapien
ggcattggttttaagatgtagtagaaggcagca

SEQ ID NO: 792207 - DNA, 33 bp, Homo sapien
tagggtgttgatgaaacaaaacctgaactgtat

SEQ ID NO: 792208 - DNA, 33 bp, Homo sapien
tagggtgttgatgaaataaaacctgaactgtat

SEQ ID NO: 792209 - DNA, 33 bp, Homo sapien
ttgggtgatataataaatggtacctacaagtag

SEQ ID NO: 792210 - DNA, 33 bp, Homo sapien
ttgggtgatataataagtggtacctacaagtag

SEQ ID NO: 792211 - DNA, 33 bp, Homo sapien
caaagactggctcaaagatttcaaagtttgttt

SEQ ID NO: 792212 - DNA, 33 bp, Homo sapien
caaagactggctcaaatatttcaaagtttgttt

SEQ ID NO: 792213 - DNA, 33 bp, Homo sapien
ttcgaactataaaggaaccatggccctcatctg

SEQ ID NO: 792214 - DNA, 33 bp, Homo sapien
ttcgaactataaaggacccatggccctcatctg

SEQ ID NO: 792215 - DNA, 33 bp, Homo sapien
tattgtggggtttcaaaatttctctatccaaca

SEQ ID NO: 792216 - DNA, 33 bp, Homo sapien
tattgtggggtttcaagatttctctatccaaca

SEQ ID NO: 792217 - DNA, 33 bp, Homo sapien
aggaatgcagggcaaaagtaggagctctgggca

SEQ ID NO: 792218 - DNA, 33 bp, Homo sapien
aggaatgcagggcaaaggtaggagctctgggca

SEQ ID NO: 792219 - DNA, 33 bp, Homo sapien
tctgcaagttctgaacaacctggccaaggctga

SEQ ID NO: 792220 - DNA, 33 bp, Homo sapien
tctgcaagttctgaactacctggccaaggctga

SEQ ID NO: 792221 - DNA, 33 bp, Homo sapien
gcccatgctgagaaaaataatactttgtctctt

SEQ ID NO: 792222 - DNA, 33 bp, Homo sapien
gcccatgctgagaaaactaatactttgtctctt

SEQ ID NO: 792223 - DNA, 33 bp, Homo sapien
aattaatgtttgcaaactgttttgagatccact

SEQ ID NO: 792224 - DNA, 33 bp, Homo sapien
aattaatgtttgcaaagtgttttgagatccact

SEQ ID NO: 792225 - DNA, 33 bp, Homo sapien
atagattaggttgaagaaatgactaaacttggt

SEQ ID NO: 792226 - DNA, 33 bp, Homo sapien
atagattaggttgaaggaatgactaaacttggt

SEQ ID NO: 792227 - DNA, 33 bp, Homo sapien
tattcaaaacacaacaaagtgaaaatttaggaa

SEQ ID NO: 792228 - DNA, 33 bp, Homo sapien
tattcaaaacacaacagagtgaaaatttaggaa

SEQ ID NO: 792229 - DNA, 33 bp, Homo sapien
atggctgcacttcaaactggcattccacgggac

SEQ ID NO: 792230 - DNA, 33 bp, Homo sapien
atggctgcacttcaaattggcattccacgggac

SEQ ID NO: 792231 - DNA, 33 bp, Homo sapien
aaagaggaccatgatacaggaaagcagaaactg

SEQ ID NO: 792232 - DNA, 33 bp, Homo sapien
aaagaggaccatgatataggaaagcagaaactg

SEQ ID NO: 792233 - DNA, 33 bp, Homo sapien
caggtctagaatgggccccaactgtctgtgttt

SEQ ID NO: 792234 - DNA, 33 bp, Homo sapien
caggtctagaatgggctccaactgtctgtgttt

SEQ ID NO: 792235 - DNA, 33 bp, Homo sapien
tctgcttctcagtgtcagaaaaaccaatcttct

SEQ ID NO: 792236 - DNA, 33 bp, Homo sapien
tctgcttctcagtgtcggaaaaaccaatcttct

SEQ ID NO: 792237 - DNA, 33 bp, Homo sapien
gttctgatttgagagaaaggtacagggacacat

SEQ ID NO: 792238 - DNA, 33 bp, Homo sapien
gttctgatttgagagacaggtacagggacacat

SEQ ID NO: 792239 - DNA, 33 bp, Homo sapien
atagtcctgtctgttacaattagagaaaaataa

SEQ ID NO: 792240 - DNA, 33 bp, Homo sapien
atagtcctgtctgttataattagagaaaaataa

SEQ ID NO: 792241 - DNA, 33 bp, Homo sapien
aaagtcaccaattcaaataattctctcccagag

SEQ ID NO: 792242 - DNA, 33 bp, Homo sapien
aaagtcaccaattcaagtaattctctcccagag

SEQ ID NO: 792243 - DNA, 33 bp, Homo sapien
aacaagatctttttagaatctaggcagaaatga

SEQ ID NO: 792244 - DNA, 33 bp, Homo sapien
aacaagatctttttaggatctaggcagaaatga

SEQ ID NO: 792245 - DNA, 33 bp, Homo sapien
catatcaactgaaatcaaatgtctacaaaggaa

SEQ ID NO: 792246 - DNA, 33 bp, Homo sapien
catatcaactgaaatcgaatgtctacaaaggaa

SEQ ID NO: 792247 - DNA, 33 bp, Homo sapien
caaatattgaccctgaaaagtgacaagtagtga

SEQ ID NO: 792248 - DNA, 33 bp, Homo sapien
caaatattgaccctgacaagtgacaagtagtga

SEQ ID NO: 792249 - DNA, 33 bp, Homo sapien
atgcggctggcctcaaaagaatgacaaggagag

SEQ ID NO: 792250 - DNA, 33 bp, Homo sapien
atgcggctggcctcaacagaatgacaaggagag

SEQ ID NO: 792251 - DNA, 33 bp, Homo sapien
tgattttcgtcaattaaaatctgatatgaaacc

SEQ ID NO: 792252 - DNA, 33 bp, Homo sapien
tgattttcgtcaattacaatctgatatgaaacc

SEQ ID NO: 792253 - DNA, 33 bp, Homo sapien
aagtaagtgacagaaccgggtggtgtcctcggc

SEQ ID NO: 792254 - DNA, 33 bp, Homo sapien
aagtaagtgacagaactgggtggtgtcctcggc

SEQ ID NO: 792255 - DNA, 33 bp, Homo sapien
aaaaacaggtattgataacatttaggatgagtc

SEQ ID NO: 792256 - DNA, 33 bp, Homo sapien
aaaaacaggtattgatcacatttaggatgagtc

SEQ ID NO: 792257 - DNA, 33 bp, Homo sapien
tacgattttgagagtacccctaggcagaaagcc

SEQ ID NO: 792258 - DNA, 33 bp, Homo sapien
tacgattttgagagtagccctaggcagaaagcc

SEQ ID NO: 792259 - DNA, 33 bp, Homo sapien
agtacatggccatcaaccttgacagcaagaaaa

SEQ ID NO: 792260 - DNA, 33 bp, Homo sapien
agtacatggccatcaatcttgacagcaagaaaa

SEQ ID NO: 792261 - DNA, 33 bp, Homo sapien
tctagtaactatttcaagacacttttattttcc

SEQ ID NO: 792262 - DNA, 33 bp, Homo sapien
tctagtaactatttcaggacacttttattttcc

SEQ ID NO: 792263 - DNA, 33 bp, Homo sapien
atgtctccaccaagaacagagtgtgctgaatct

SEQ ID NO: 792264 - DNA, 33 bp, Homo sapien
atgtctccaccaagaatagagtgtgctgaatct

SEQ ID NO: 792265 - DNA, 33 bp, Homo sapien
ttgcaaagcttttgtcccccacagttgagaatg

SEQ ID NO: 792266 - DNA, 33 bp, Homo sapien
ttgcaaagcttttgtctcccacagttgagaatg

SEQ ID NO: 792267 - DNA, 33 bp, Homo sapien
aggactgctttagtacaatgatatctttttcaa

SEQ ID NO: 792268 - DNA, 33 bp, Homo sapien
aggactgctttagtacgatgatatctttttcaa

SEQ ID NO: 792269 - DNA, 33 bp, Homo sapien
gcatgcttagctgtcacggggagaaatgacttg

SEQ ID NO: 792270 - DNA, 33 bp, Homo sapien
gcatgcttagctgtcatggggagaaatgacttg

SEQ ID NO: 792271 - DNA, 33 bp, Homo sapien
aaaatgcccctaactaccagtgtcattaagaca

SEQ ID NO: 792272 - DNA, 33 bp, Homo sapien
aaaatgcccctaactatcagtgtcattaagaca

SEQ ID NO: 792273 - DNA, 33 bp, Homo sapien
tatgacattggctattaaaacaataagtcatac

SEQ ID NO: 792274 - DNA, 33 bp, Homo sapien
tatgacattggctatttaaacaataagtcatac

SEQ ID NO: 792275 - DNA, 33 bp, Homo sapien
gatatatttaaacaaaacttcagtctccttgtc

SEQ ID NO: 792276 - DNA, 33 bp, Homo sapien
gatatatttaaacaaatcttcagtctccttgtc

SEQ ID NO: 792277 - DNA, 33 bp, Homo sapien
ctagtattactgtacccattataaacactgtac

SEQ ID NO: 792278 - DNA, 33 bp, Homo sapien
ctagtattactgtacctattataaacactgtac

SEQ ID NO: 792279 - DNA, 33 bp, Homo sapien
tctttgttaatgaatcgatgtcttatcaatgaa

SEQ ID NO: 792280 - DNA, 33 bp, Homo sapien
tctttgttaatgaatctatgtcttatcaatgaa

SEQ ID NO: 792281 - DNA, 33 bp, Homo sapien
tgtatgtgtatgcaaacgtttactatatacatg

SEQ ID NO: 792282 - DNA, 33 bp, Homo sapien
tgtatgtgtatgcaaatgtttactatatacatg

SEQ ID NO: 792283 - DNA, 33 bp, Homo sapien
ataaatttgttaggtacgtccaggaaactaatt

SEQ ID NO: 792284 - DNA, 33 bp, Homo sapien
ataaatttgttaggtatgtccaggaaactaatt

SEQ ID NO: 792285 - DNA, 33 bp, Homo sapien
cctgtgcaatgtgagacaccttggtttactgga

SEQ ID NO: 792286 - DNA, 33 bp, Homo sapien
cctgtgcaatgtgagagaccttggtttactgga

SEQ ID NO: 792287 - DNA, 33 bp, Homo sapien
agtactcttacccagcaattgaatgtcatgtac

SEQ ID NO: 792288 - DNA, 33 bp, Homo sapien
agtactcttacccagcgattgaatgtcatgtac

SEQ ID NO: 792289 - DNA, 33 bp, Homo sapien
gcaatgtttcagagtacacttggtgaagagaga

SEQ ID NO: 792290 - DNA, 33 bp, Homo sapien
gcaatgtttcagagtatacttggtgaagagaga

SEQ ID NO: 792291 - DNA, 33 bp, Homo sapien
gattatgtgtcattcaaatttttcggcactgta

SEQ ID NO: 792292 - DNA, 33 bp, Homo sapien
gattatgtgtcattcagatttttcggcactgta

SEQ ID NO: 792293 - DNA, 33 bp, Homo sapien
agagaggctcaaagagaaagataatagattagt

SEQ ID NO: 792294 - DNA, 33 bp, Homo sapien
agagaggctcaaagaggaagataatagattagt

SEQ ID NO: 792295 - DNA, 33 bp, Homo sapien
aaggacaactttgatacctaagagaggagcaca

SEQ ID NO: 792296 - DNA, 33 bp, Homo sapien
aaggacaactttgatagctaagagaggagcaca

SEQ ID NO: 792297 - DNA, 33 bp, Homo sapien
atctaatttggatatccaccatttcatacccaa

SEQ ID NO: 792298 - DNA, 33 bp, Homo sapien
atctaatttggatatctaccatttcatacccaa

SEQ ID NO: 792299 - DNA, 33 bp, Homo sapien
aaatagttactgtaaacggctttgtgattgcat

SEQ ID NO: 792300 - DNA, 33 bp, Homo sapien
aaatagttactgtaaagggctttgtgattgcat

SEQ ID NO: 792301 - DNA, 33 bp, Homo sapien
aagagacagtggaaaactttcaaagccaactaa

SEQ ID NO: 792302 - DNA, 33 bp, Homo sapien
aagagacagtggaaaattttcaaagccaactaa

SEQ ID NO: 792303 - DNA, 33 bp, Homo sapien
cataattctttctccaaatctgagggtaaacaa

SEQ ID NO: 792304 - DNA, 33 bp, Homo sapien
cataattctttctccatatctgagggtaaacaa

SEQ ID NO: 792305 - DNA, 33 bp, Homo sapien
gacaacactcagagttgaaaaccgtagggggac

SEQ ID NO: 792306 - DNA, 33 bp, Homo sapien
gacaacactcagagtttaaaaccgtagggggac

SEQ ID NO: 792307 - DNA, 33 bp, Homo sapien
catttattctgttttaagacctgaaagtcactt

SEQ ID NO: 792308 - DNA, 33 bp, Homo sapien
catttattctgttttatgacctgaaagtcactt

SEQ ID NO: 792309 - DNA, 33 bp, Homo sapien
gttttatagtgaagcacaactaaatttgaattt

SEQ ID NO: 792310 - DNA, 33 bp, Homo sapien
gttttatagtgaagcagaactaaatttgaattt

SEQ ID NO: 792311 - DNA, 33 bp, Homo sapien
aagcaaatcataagaaccagaattcccttccta

SEQ ID NO: 792312 - DNA, 33 bp, Homo sapien
aagcaaatcataagaagcagaattcccttccta

SEQ ID NO: 792313 - DNA, 33 bp, Homo sapien
ttaatcaccactgccacagttggtctcaagacc

SEQ ID NO: 792314 - DNA, 33 bp, Homo sapien
ttaatcaccactgccatagttggtctcaagacc

SEQ ID NO: 792315 - DNA, 33 bp, Homo sapien
tggtctcaagaccaaaacagattctcataattg

SEQ ID NO: 792316 - DNA, 33 bp, Homo sapien
tggtctcaagaccaaagcagattctcataattg

SEQ ID NO: 792317 - DNA, 33 bp, Homo sapien
tgtgtggagtgaacccaagaatcatttgagtga

SEQ ID NO: 792318 - DNA, 33 bp, Homo sapien
tgtgtggagtgaacccgagaatcatttgagtga

SEQ ID NO: 792319 - DNA, 33 bp, Homo sapien
gagaccctgtcactaaaggaattcattatttca

SEQ ID NO: 792320 - DNA, 33 bp, Homo sapien
gagaccctgtcactaagggaattcattatttca

SEQ ID NO: 792321 - DNA, 33 bp, Homo sapien
aacttgatgcttcacacagggctaaaaaaaaat

SEQ ID NO: 792322 - DNA, 33 bp, Homo sapien
aacttgatgcttcacatagggctaaaaaaaaat

SEQ ID NO: 792323 - DNA, 33 bp, Homo sapien
gaccaaaatattgttacgtgagtacatgatctt

SEQ ID NO: 792324 - DNA, 33 bp, Homo sapien
gaccaaaatattgttatgtgagtacatgatctt

SEQ ID NO: 792325 - DNA, 33 bp, Homo sapien
gtgctatttgtgacaaactggcattctagaaat

SEQ ID NO: 792326 - DNA, 33 bp, Homo sapien
gtgctatttgtgacaatctggcattctagaaat

SEQ ID NO: 792327 - DNA, 33 bp, Homo sapien
caggcttgattccatcaccttctcctcctgagc

SEQ ID NO: 792328 - DNA, 33 bp, Homo sapien
caggcttgattccatcgccttctcctcctgagc

SEQ ID NO: 792329 - DNA, 33 bp, Homo sapien
ctcaacccaaagcacaccttttgtattaaattt

SEQ ID NO: 792330 - DNA, 33 bp, Homo sapien
ctcaacccaaagcacatcttttgtattaaattt

SEQ ID NO: 792331 - DNA, 33 bp, Homo sapien
ctaatggtttctataaacaggaaagacatttag

SEQ ID NO: 792332 - DNA, 33 bp, Homo sapien
ctaatggtttctataagcaggaaagacatttag

SEQ ID NO: 792333 - DNA, 33 bp, Homo sapien
cagtctgtcgaacaagccacatctcaccagtgc

SEQ ID NO: 792334 - DNA, 33 bp, Homo sapien
cagtctgtcgaacaagtcacatctcaccagtgc

SEQ ID NO: 792335 - DNA, 33 bp, Homo sapien
gtaaccatgcacaatgcaacttttttgaatgcc

SEQ ID NO: 792336 - DNA, 33 bp, Homo sapien
gtaaccatgcacaatggaacttttttgaatgcc

SEQ ID NO: 792337 - DNA, 33 bp, Homo sapien
tgtctgcaggggcagtcaagcatacagttttat

SEQ ID NO: 792338 - DNA, 33 bp, Homo sapien
tgtctgcaggggcagtgaagcatacagttttat

SEQ ID NO: 792339 - DNA, 33 bp, Homo sapien
taattgaattacagagcagttctgagtttcatc

SEQ ID NO: 792340 - DNA, 33 bp, Homo sapien
taattgaattacagaggagttctgagtttcatc

SEQ ID NO: 792341 - DNA, 33 bp, Homo sapien
cttcctttcaactaacaatttcaggttaggctg

SEQ ID NO: 792342 - DNA, 33 bp, Homo sapien
cttcctttcaactaacgatttcaggttaggctg

SEQ ID NO: 792343 - DNA, 33 bp, Homo sapien
atcagatatttttaccgcatagtttctggtcct

SEQ ID NO: 792344 - DNA, 33 bp, Homo sapien
atcagatatttttacctcatagtttctggtcct

SEQ ID NO: 792345 - DNA, 33 bp, Homo sapien
cctctgcaatgtaaagccctagatttaggtcat

SEQ ID NO: 792346 - DNA, 33 bp, Homo sapien
cctctgcaatgtaaagtcctagatttaggtcat

SEQ ID NO: 792347 - DNA, 33 bp, Homo sapien
ctaccctagtgaatacaggcattggttaaatat

SEQ ID NO: 792348 - DNA, 33 bp, Homo sapien
ctaccctagtgaatacgggcattggttaaatat

SEQ ID NO: 792349 - DNA, 33 bp, Homo sapien
atttaaccaatccttaccagtgaacatttggga

SEQ ID NO: 792350 - DNA, 33 bp, Homo sapien
atttaaccaatccttatcagtgaacatttggga

SEQ ID NO: 792351 - DNA, 33 bp, Homo sapien
actcatctccatcacaggtaatcactttcctta

SEQ ID NO: 792352 - DNA, 33 bp, Homo sapien
actcatctccatcacatgtaatcactttcctta

SEQ ID NO: 792353 - DNA, 33 bp, Homo sapien
agtcagaaagccaaagaacactatggagaaata

SEQ ID NO: 792354 - DNA, 33 bp, Homo sapien
agtcagaaagccaaagtacactatggagaaata

SEQ ID NO: 792355 - DNA, 33 bp, Homo sapien
cagtcagggcaaggtaaaactatgactttttca

SEQ ID NO: 792356 - DNA, 33 bp, Homo sapien
cagtcagggcaaggtacaactatgactttttca

SEQ ID NO: 792357 - DNA, 33 bp, Homo sapien
cttactcaaagtgtcacagtgtttgacaggcta

SEQ ID NO: 792358 - DNA, 33 bp, Homo sapien
cttactcaaagtgtcatagtgtttgacaggcta

SEQ ID NO: 792359 - DNA, 33 bp, Homo sapien
tactccatagggtaaaatcattcattaattaca

SEQ ID NO: 792360 - DNA, 33 bp, Homo sapien
tactccatagggtaaagtcattcattaattaca

SEQ ID NO: 792361 - DNA, 33 bp, Homo sapien
acaagtctgcacagtaacccaaggaatttttag

SEQ ID NO: 792362 - DNA, 33 bp, Homo sapien
acaagtctgcacagtatcccaaggaatttttag

SEQ ID NO: 792363 - DNA, 33 bp, Homo sapien
gatacctggtcacttgcaggataaagacgggac

SEQ ID NO: 792364 - DNA, 33 bp, Homo sapien
gatacctggtcacttgtaggataaagacgggac

SEQ ID NO: 792365 - DNA, 33 bp, Homo sapien
tgtaaataaaataagacgcgctcacaaaaaaat

SEQ ID NO: 792366 - DNA, 33 bp, Homo sapien
tgtaaataaaataagatgcgctcacaaaaaaat

SEQ ID NO: 792367 - DNA, 33 bp, Homo sapien
cacataaaaacctgaaggcaaaaatgagtaaaa

SEQ ID NO: 792368 - DNA, 33 bp, Homo sapien
cacataaaaacctgaatgcaaaaatgagtaaaa

SEQ ID NO: 792369 - DNA, 33 bp, Homo sapien
gcatctctcttttgaactgaaggcgtttatgcc

SEQ ID NO: 792370 - DNA, 33 bp, Homo sapien
gcatctctcttttgaattgaaggcgtttatgcc

SEQ ID NO: 792371 - DNA, 33 bp, Homo sapien
aaaggagtgaaataaaattccaatgagcataaa

SEQ ID NO: 792372 - DNA, 33 bp, Homo sapien
aaaggagtgaaataaagttccaatgagcataaa

SEQ ID NO: 792373 - DNA, 33 bp, Homo sapien
tgaagtggaggaggaccgaaaatgtaggcaaaa

SEQ ID NO: 792374 - DNA, 33 bp, Homo sapien
tgaagtggaggaggactgaaaatgtaggcaaaa

SEQ ID NO: 792375 - DNA, 33 bp, Homo sapien
aaagggatttgatgccagaagtccacattagca

SEQ ID NO: 792376 - DNA, 33 bp, Homo sapien
aaagggatttgatgccggaagtccacattagca

SEQ ID NO: 792377 - DNA, 33 bp, Homo sapien
agaagtacagagtcaaatagaaagtgaggaatg

SEQ ID NO: 792378 - DNA, 33 bp, Homo sapien
agaagtacagagtcaagtagaaagtgaggaatg

SEQ ID NO: 792379 - DNA, 33 bp, Homo sapien
tcgtctttcctcagcaatgctctgatctttaca

SEQ ID NO: 792380 - DNA, 33 bp, Homo sapien
tcgtctttcctcagcagtgctctgatctttaca

SEQ ID NO: 792381 - DNA, 33 bp, Homo sapien
tctttacattgtcttcactctgcatttgtctac

SEQ ID NO: 792382 - DNA, 33 bp, Homo sapien
tctttacattgtcttcgctctgcatttgtctac

SEQ ID NO: 792383 - DNA, 33 bp, Homo sapien
tctttccttataatacaaaggtcatagacagct

SEQ ID NO: 792384 - DNA, 33 bp, Homo sapien
tctttccttataataccaaggtcatagacagct

SEQ ID NO: 792385 - DNA, 33 bp, Homo sapien
tagaaataggaaggtaaggcagcctagttcctt

SEQ ID NO: 792386 - DNA, 33 bp, Homo sapien
tagaaataggaaggtagggcagcctagttcctt

SEQ ID NO: 792387 - DNA, 33 bp, Homo sapien
catgaaccccatatgtaaatgcggcagcaagca

SEQ ID NO: 792388 - DNA, 33 bp, Homo sapien
catgaaccccatatgtgaatgcggcagcaagca

SEQ ID NO: 792389 - DNA, 33 bp, Homo sapien
ttcaattgccagttggcaggtgagccagtttca

SEQ ID NO: 792390 - DNA, 33 bp, Homo sapien
ttcaattgccagttggtaggtgagccagtttca

SEQ ID NO: 792391 - DNA, 33 bp, Homo sapien
aacccattccaacatactaactttactctgcct

SEQ ID NO: 792392 - DNA, 33 bp, Homo sapien
aacccattccaacatattaactttactctgcct

SEQ ID NO: 792393 - DNA, 33 bp, Homo sapien
gtacctaggtttatgcccttggacatggtttgg

SEQ ID NO: 792394 - DNA, 33 bp, Homo sapien
gtacctaggtttatgctcttggacatggtttgg

SEQ ID NO: 792395 - DNA, 33 bp, Homo sapien
aaatccaagctatgccaaaggaggctaacaata

SEQ ID NO: 792396 - DNA, 33 bp, Homo sapien
aaatccaagctatgccgaaggaggctaacaata

SEQ ID NO: 792397 - DNA, 33 bp, Homo sapien
taccttaaaagtcaaacagatcagttaaaatgt

SEQ ID NO: 792398 - DNA, 33 bp, Homo sapien
taccttaaaagtcaaatagatcagttaaaatgt

SEQ ID NO: 792399 - DNA, 33 bp, Homo sapien
catttaggctattatccccttgtatgaaatata

SEQ ID NO: 792400 - DNA, 33 bp, Homo sapien
catttaggctattatctccttgtatgaaatata

SEQ ID NO: 792401 - DNA, 33 bp, Homo sapien
actagagagataggaaatagatcagtagttgcc

SEQ ID NO: 792402 - DNA, 33 bp, Homo sapien
actagagagataggaagtagatcagtagttgcc

SEQ ID NO: 792403 - DNA, 33 bp, Homo sapien
catgattttaaagccacgaaagacatatcaaca

SEQ ID NO: 792404 - DNA, 33 bp, Homo sapien
catgattttaaagccatgaaagacatatcaaca

SEQ ID NO: 792405 - DNA, 33 bp, Homo sapien
tgctcatggcttaatccactcagcttgagaaaa

SEQ ID NO: 792406 - DNA, 33 bp, Homo sapien
tgctcatggcttaatctactcagcttgagaaaa

SEQ ID NO: 792407 - DNA, 33 bp, Homo sapien
ttgcatatttcataaactcataggcagccacgt

SEQ ID NO: 792408 - DNA, 33 bp, Homo sapien
ttgcatatttcataaattcataggcagccacgt

SEQ ID NO: 792409 - DNA, 33 bp, Homo sapien
agtacgaatagcaaagaaagtgaggggttgttg

SEQ ID NO: 792410 - DNA, 33 bp, Homo sapien
agtacgaatagcaaaggaagtgaggggttgttg

SEQ ID NO: 792411 - DNA, 33 bp, Homo sapien
atgatctcgtcttacacaaaatactttgattta

SEQ ID NO: 792412 - DNA, 33 bp, Homo sapien
atgatctcgtcttacataaaatactttgattta

SEQ ID NO: 792413 - DNA, 33 bp, Homo sapien
tctgtaagttagccccagagattttaatcctat

SEQ ID NO: 792414 - DNA, 33 bp, Homo sapien
tctgtaagttagccccggagattttaatcctat

SEQ ID NO: 792415 - DNA, 33 bp, Homo sapien
atgcttggaggcataaaaaggaaagatcctatg

SEQ ID NO: 792416 - DNA, 33 bp, Homo sapien
atgcttggaggcataagaaggaaagatcctatg

SEQ ID NO: 792417 - DNA, 33 bp, Homo sapien
atgatctggaaaagtacgcaagagttccattag

SEQ ID NO: 792418 - DNA, 33 bp, Homo sapien
atgatctggaaaagtaggcaagagttccattag

SEQ ID NO: 792419 - DNA, 33 bp, Homo sapien
tctgttatgtttctaacgggacaagtcatcata

SEQ ID NO: 792420 - DNA, 33 bp, Homo sapien
tctgttatgtttctaatgggacaagtcatcata

SEQ ID NO: 792421 - DNA, 33 bp, Homo sapien
cttgaataggatgcagcattttgtctttagagc

SEQ ID NO: 792422 - DNA, 33 bp, Homo sapien
cttgaataggatgcaggattttgtctttagagc

SEQ ID NO: 792423 - DNA, 33 bp, Homo sapien
atatctctgtcaataacatcttgctatctagtc

SEQ ID NO: 792424 - DNA, 33 bp, Homo sapien
atatctctgtcaataagatcttgctatctagtc

SEQ ID NO: 792425 - DNA, 33 bp, Homo sapien
gcactcagaaatggcaatctctctctctccttc

SEQ ID NO: 792426 - DNA, 33 bp, Homo sapien
gcactcagaaatggcagtctctctctctccttc

SEQ ID NO: 792427 - DNA, 33 bp, Homo sapien
cagatattgtacatacaaagaaatgaggaggtt

SEQ ID NO: 792428 - DNA, 33 bp, Homo sapien
cagatattgtacatacgaagaaatgaggaggtt

SEQ ID NO: 792429 - DNA, 33 bp, Homo sapien
gaagtttacaggattacgtccaagtctctattt

SEQ ID NO: 792430 - DNA, 33 bp, Homo sapien
gaagtttacaggattatgtccaagtctctattt

SEQ ID NO: 792431 - DNA, 33 bp, Homo sapien
tcatgcttctatagcacgttacttacgggtttc

SEQ ID NO: 792432 - DNA, 33 bp, Homo sapien
tcatgcttctatagcaggttacttacgggtttc

SEQ ID NO: 792433 - DNA, 33 bp, Homo sapien
atgattgtggtcgtaacaatcatcttctccaac

SEQ ID NO: 792434 - DNA, 33 bp, Homo sapien
atgattgtggtcgtaagaatcatcttctccaac

SEQ ID NO: 792435 - DNA, 33 bp, Homo sapien
ccaccatttagcaggacccgagttcttgttcca

SEQ ID NO: 792436 - DNA, 33 bp, Homo sapien
ccaccatttagcaggatccgagttcttgttcca

SEQ ID NO: 792437 - DNA, 33 bp, Homo sapien
atactgctaatcttcaacgatgggaatggggaa

SEQ ID NO: 792438 - DNA, 33 bp, Homo sapien
atactgctaatcttcagcgatgggaatggggaa

SEQ ID NO: 792439 - DNA, 33 bp, Homo sapien
ttttccactgtaaaacccatgatggaatctttg

SEQ ID NO: 792440 - DNA, 33 bp, Homo sapien
ttttccactgtaaaactcatgatggaatctttg

SEQ ID NO: 792441 - DNA, 33 bp, Homo sapien
tttatccatgtgtctaacagcctattctacatc

SEQ ID NO: 792442 - DNA, 33 bp, Homo sapien
tttatccatgtgtctatcagcctattctacatc

SEQ ID NO: 792443 - DNA, 33 bp, Homo sapien
tccaccgcattatctgcacccggaactcaaatc

SEQ ID NO: 792444 - DNA, 33 bp, Homo sapien
tccaccgcattatctggacccggaactcaaatc

SEQ ID NO: 792445 - DNA, 33 bp, Homo sapien
ttcatttagatgatgagtcatatatccaaggct

SEQ ID NO: 792446 - DNA, 33 bp, Homo sapien
ttcatttagatgatgattcatatatccaaggct

SEQ ID NO: 792447 - DNA, 33 bp, Homo sapien
tagtacatttcatagcaaataataaatctggat

SEQ ID NO: 792448 - DNA, 33 bp, Homo sapien
tagtacatttcatagcgaataataaatctggat

SEQ ID NO: 792449 - DNA, 33 bp, Homo sapien
tgaaacaaacgagctgaagcagaaaaggtactt

SEQ ID NO: 792450 - DNA, 33 bp, Homo sapien
tgaaacaaacgagctggagcagaaaaggtactt

SEQ ID NO: 792451 - DNA, 33 bp, Homo sapien
gacagcaacgaaaaaacgaataccacatgtaaa

SEQ ID NO: 792452 - DNA, 33 bp, Homo sapien
gacagcaacgaaaaaatgaataccacatgtaaa

SEQ ID NO: 792453 - DNA, 33 bp, Homo sapien
gatttcttgcttcacactaaggaattcatgaaa

SEQ ID NO: 792454 - DNA, 33 bp, Homo sapien
gatttcttgcttcacattaaggaattcatgaaa

SEQ ID NO: 792455 - DNA, 33 bp, Homo sapien
ctgaacagcaagtggacattaaccttcacatcc

SEQ ID NO: 792456 - DNA, 33 bp, Homo sapien
ctgaacagcaagtggagattaaccttcacatcc

SEQ ID NO: 792457 - DNA, 33 bp, Homo sapien
taaaggctatgctcatcagatttttgagtttta

SEQ ID NO: 792458 - DNA, 33 bp, Homo sapien
taaaggctatgctcattagatttttgagtttta

SEQ ID NO: 792459 - DNA, 33 bp, Homo sapien
aaccacatgaatttgcacattatcaactcaatt

SEQ ID NO: 792460 - DNA, 33 bp, Homo sapien
aaccacatgaatttgcgcattatcaactcaatt

SEQ ID NO: 792461 - DNA, 33 bp, Homo sapien
atgaaaactatactgcaataccacctcatgccc

SEQ ID NO: 792462 - DNA, 33 bp, Homo sapien
atgaaaactatactgcgataccacctcatgccc

SEQ ID NO: 792463 - DNA, 33 bp, Homo sapien
tataagccttcatatacacaatccaataatttt

SEQ ID NO: 792464 - DNA, 33 bp, Homo sapien
tataagccttcatatatacaatccaataatttt

SEQ ID NO: 792465 - DNA, 33 bp, Homo sapien
ctacataaacatactgaagaaaaactactttcc

SEQ ID NO: 792466 - DNA, 33 bp, Homo sapien
ctacataaacatactggagaaaaactactttcc

SEQ ID NO: 792467 - DNA, 33 bp, Homo sapien
ataccaatcccagatcgatttctctgagtgcaa

SEQ ID NO: 792468 - DNA, 33 bp, Homo sapien
ataccaatcccagatctatttctctgagtgcaa

SEQ ID NO: 792469 - DNA, 33 bp, Homo sapien
tctctgagtgcaaaaaattctcttaaaacctaa

SEQ ID NO: 792470 - DNA, 33 bp, Homo sapien
tctctgagtgcaaaaacttctcttaaaacctaa

SEQ ID NO: 792471 - DNA, 33 bp, Homo sapien
ctcagaggttaccacagtctttgttaaaatgca

SEQ ID NO: 792472 - DNA, 33 bp, Homo sapien
ctcagaggttaccacattctttgttaaaatgca

SEQ ID NO: 792473 - DNA, 33 bp, Homo sapien
ctgatattggtcaatccacctaaagttataaca

SEQ ID NO: 792474 - DNA, 33 bp, Homo sapien
ctgatattggtcaatctacctaaagttataaca

SEQ ID NO: 792475 - DNA, 33 bp, Homo sapien
gatcaacgttctcttacggctttctggattctt

SEQ ID NO: 792476 - DNA, 33 bp, Homo sapien
gatcaacgttctcttatggctttctggattctt

SEQ ID NO: 792477 - DNA, 33 bp, Homo sapien
gattataaaaacatggaaaacgtgcattctgtc

SEQ ID NO: 792478 - DNA, 33 bp, Homo sapien
gattataaaaacatggcaaacgtgcattctgtc

SEQ ID NO: 792479 - DNA, 33 bp, Homo sapien
ttgctttttattcctccataccagcagaagatt

SEQ ID NO: 792480 - DNA, 33 bp, Homo sapien
ttgctttttattcctcgataccagcagaagatt

SEQ ID NO: 792481 - DNA, 33 bp, Homo sapien
tttcttctccaatatacctggacagttgccatt

SEQ ID NO: 792482 - DNA, 33 bp, Homo sapien
tttcttctccaatatagctggacagttgccatt

SEQ ID NO: 792483 - DNA, 33 bp, Homo sapien
aaatagctcaggaaacaaggataaaatgacact

SEQ ID NO: 792484 - DNA, 33 bp, Homo sapien
aaatagctcaggaaacgaggataaaatgacact

SEQ ID NO: 792485 - DNA, 33 bp, Homo sapien
tgttaaagttgagtcagaggtcacaagttactc

SEQ ID NO: 792486 - DNA, 33 bp, Homo sapien
tgttaaagttgagtcataggtcacaagttactc

SEQ ID NO: 792487 - DNA, 33 bp, Homo sapien
gtttagcggctgacgaacaagcatggaaaggac

SEQ ID NO: 792488 - DNA, 33 bp, Homo sapien
gtttagcggctgacgagcaagcatggaaaggac

SEQ ID NO: 792489 - DNA, 33 bp, Homo sapien
gagacattgatgagaaagaagttgggaaatgag

SEQ ID NO: 792490 - DNA, 33 bp, Homo sapien
gagacattgatgagaatgaagttgggaaatgag

SEQ ID NO: 792491 - DNA, 33 bp, Homo sapien
gtttaatctttatgtgcaaggatagggactgtc

SEQ ID NO: 792492 - DNA, 33 bp, Homo sapien
gtttaatctttatgtggaaggatagggactgtc

SEQ ID NO: 792493 - DNA, 33 bp, Homo sapien
caaatatttttcatcacacaaccaaaattcaaa

SEQ ID NO: 792494 - DNA, 33 bp, Homo sapien
caaatatttttcatcagacaaccaaaattcaaa

SEQ ID NO: 792495 - DNA, 33 bp, Homo sapien
tcaatcattttcagaccctaactctttttttgg

SEQ ID NO: 792496 - DNA, 33 bp, Homo sapien
tcaatcattttcagacgctaactctttttttgg

SEQ ID NO: 792497 - DNA, 33 bp, Homo sapien
tttcaagtttctggccaaggctgctgctattga

SEQ ID NO: 792498 - DNA, 33 bp, Homo sapien
tttcaagtttctggccgaggctgctgctattga

SEQ ID NO: 792499 - DNA, 33 bp, Homo sapien
ctgttacaataagccactcgttggcttgcttca

SEQ ID NO: 792500 - DNA, 33 bp, Homo sapien
ctgttacaataagccattcgttggcttgcttca

SEQ ID NO: 792501 - DNA, 33 bp, Homo sapien
attgatccatctggaaactttaaacaatgcatc

SEQ ID NO: 792502 - DNA, 33 bp, Homo sapien
attgatccatctggaatctttaaacaatgcatc

SEQ ID NO: 792503 - DNA, 33 bp, Homo sapien
acagagagttgcatagacggatatgtgataaag

SEQ ID NO: 792504 - DNA, 33 bp, Homo sapien
acagagagttgcatagtcggatatgtgataaag

SEQ ID NO: 792505 - DNA, 33 bp, Homo sapien
cataaccagtgcacaactgagatgccagcattc

SEQ ID NO: 792506 - DNA, 33 bp, Homo sapien
cataaccagtgcacaattgagatgccagcattc

SEQ ID NO: 792507 - DNA, 33 bp, Homo sapien
aattgatggaaaattcccataatctataaatgg

SEQ ID NO: 792508 - DNA, 33 bp, Homo sapien
aattgatggaaaattctcataatctataaatgg

SEQ ID NO: 792509 - DNA, 33 bp, Homo sapien
ttgtatgaaggatgaacgagtcgaaagatctaa

SEQ ID NO: 792510 - DNA, 33 bp, Homo sapien
ttgtatgaaggatgaatgagtcgaaagatctaa

SEQ ID NO: 792511 - DNA, 33 bp, Homo sapien
aatgaattcaagtcagaaaataagcaatgaaag

SEQ ID NO: 792512 - DNA, 33 bp, Homo sapien
aatgaattcaagtcagcaaataagcaatgaaag

SEQ ID NO: 792513 - DNA, 33 bp, Homo sapien
gtaaaatagcctctgacgaacctcctctgaaat

SEQ ID NO: 792514 - DNA, 33 bp, Homo sapien
gtaaaatagcctctgatgaacctcctctgaaat

SEQ ID NO: 792515 - DNA, 33 bp, Homo sapien
caacctcagactttacggccagggtcaactcca

SEQ ID NO: 792516 - DNA, 33 bp, Homo sapien
caacctcagactttactgccagggtcaactcca

SEQ ID NO: 792517 - DNA, 33 bp, Homo sapien
tatttttatacatttcactgctgactagatttc

SEQ ID NO: 792518 - DNA, 33 bp, Homo sapien
tatttttatacatttcgctgctgactagatttc

SEQ ID NO: 792519 - DNA, 33 bp, Homo sapien
cacaatgtcttccacaaaatgctcacatatgtt

SEQ ID NO: 792520 - DNA, 33 bp, Homo sapien
cacaatgtcttccacacaatgctcacatatgtt

SEQ ID NO: 792521 - DNA, 33 bp, Homo sapien
tagcctatagtgctaacagttttcagatagcac

SEQ ID NO: 792522 - DNA, 33 bp, Homo sapien
tagcctatagtgctaatagttttcagatagcac

SEQ ID NO: 792523 - DNA, 33 bp, Homo sapien
gagcattgatgggcgacatatgtgaatgttatg

SEQ ID NO: 792524 - DNA, 33 bp, Homo sapien
gagcattgatgggcgatatatgtgaatgttatg

SEQ ID NO: 792525 - DNA, 33 bp, Homo sapien
ttgtatttttaatagaaaccgtgttgtccagtc

SEQ ID NO: 792526 - DNA, 33 bp, Homo sapien
ttgtatttttaatagagaccgtgttgtccagtc

SEQ ID NO: 792527 - DNA, 33 bp, Homo sapien
ttaagaaattatacacggcaaaatgtgagattt

SEQ ID NO: 792528 - DNA, 33 bp, Homo sapien
ttaagaaattatacactgcaaaatgtgagattt

SEQ ID NO: 792529 - DNA, 33 bp, Homo sapien
gcatgagtatatgatgcagcgttgatgactgga

SEQ ID NO: 792530 - DNA, 33 bp, Homo sapien
gcatgagtatatgatgtagcgttgatgactgga

SEQ ID NO: 792531 - DNA, 33 bp, Homo sapien
agatgaggtgataactaacattggacctttaaa

SEQ ID NO: 792532 - DNA, 33 bp, Homo sapien
agatgaggtgataacttacattggacctttaaa

SEQ ID NO: 792533 - DNA, 33 bp, Homo sapien
acatgcatgattctagcaactggtgacagaatg

SEQ ID NO: 792534 - DNA, 33 bp, Homo sapien
acatgcatgattctaggaactggtgacagaatg

SEQ ID NO: 792535 - DNA, 33 bp, Homo sapien
tgacatgttaaaatgtaaattctagccaggcgc

SEQ ID NO: 792536 - DNA, 33 bp, Homo sapien
tgacatgttaaaatgtgaattctagccaggcgc

SEQ ID NO: 792537 - DNA, 33 bp, Homo sapien
tggttaaaatagataccaacagattgatagaaa

SEQ ID NO: 792538 - DNA, 33 bp, Homo sapien
tggttaaaatagatacgaacagattgatagaaa

SEQ ID NO: 792539 - DNA, 33 bp, Homo sapien
tcacacaaatccaatgacacacaaaagtagttt

SEQ ID NO: 792540 - DNA, 33 bp, Homo sapien
tcacacaaatccaatgtcacacaaaagtagttt

SEQ ID NO: 792541 - DNA, 33 bp, Homo sapien
aaatcacgcttcaccaaaggtattttttgtttg

SEQ ID NO: 792542 - DNA, 33 bp, Homo sapien
aaatcacgcttcaccataggtattttttgtttg

SEQ ID NO: 792543 - DNA, 33 bp, Homo sapien
gtatgccaccgaattacattcagtaacaaagcc

SEQ ID NO: 792544 - DNA, 33 bp, Homo sapien
gtatgccaccgaattatattcagtaacaaagcc

SEQ ID NO: 792545 - DNA, 33 bp, Homo sapien
tgagaagttagattgacggatattgatattctt

SEQ ID NO: 792546 - DNA, 33 bp, Homo sapien
tgagaagttagattgatggatattgatattctt

SEQ ID NO: 792547 - DNA, 33 bp, Homo sapien
aatgactactaagtacaaggaatatgtcagata

SEQ ID NO: 792548 - DNA, 33 bp, Homo sapien
aatgactactaagtaccaggaatatgtcagata

SEQ ID NO: 792549 - DNA, 33 bp, Homo sapien
agctttaccctcaaggacataaattgctatcac

SEQ ID NO: 792550 - DNA, 33 bp, Homo sapien
agctttaccctcaaggccataaattgctatcac

SEQ ID NO: 792551 - DNA, 33 bp, Homo sapien
tatgagctatgggaaaaataaaagtttatattt

SEQ ID NO: 792552 - DNA, 33 bp, Homo sapien
tatgagctatgggaaacataaaagtttatattt

SEQ ID NO: 792553 - DNA, 33 bp, Homo sapien
ggtcaatgagactcaaatctgagacttatatat

SEQ ID NO: 792554 - DNA, 33 bp, Homo sapien
ggtcaatgagactcaactctgagacttatatat

SEQ ID NO: 792555 - DNA, 33 bp, Homo sapien
gaacagtgtatattcacgtcaggtacatttaca

SEQ ID NO: 792556 - DNA, 33 bp, Homo sapien
gaacagtgtatattcatgtcaggtacatttaca

SEQ ID NO: 792557 - DNA, 33 bp, Homo sapien
taaattaatctggcaactagttaaactgagttt

SEQ ID NO: 792558 - DNA, 33 bp, Homo sapien
taaattaatctggcaagtagttaaactgagttt

SEQ ID NO: 792559 - DNA, 33 bp, Homo sapien
cacccttgctctataaacattccttccttctct

SEQ ID NO: 792560 - DNA, 33 bp, Homo sapien
cacccttgctctataatcattccttccttctct

SEQ ID NO: 792561 - DNA, 33 bp, Homo sapien
tttccctttttttgtacggatgaccatctaggg

SEQ ID NO: 792562 - DNA, 33 bp, Homo sapien
tttccctttttttgtatggatgaccatctaggg

SEQ ID NO: 792563 - DNA, 33 bp, Homo sapien
caaattccctgcttgacagatttccttgacttc

SEQ ID NO: 792564 - DNA, 33 bp, Homo sapien
caaattccctgcttgagagatttccttgacttc

SEQ ID NO: 792565 - DNA, 33 bp, Homo sapien
gcagagggaacacaaccgaactcagatctgctg

SEQ ID NO: 792566 - DNA, 33 bp, Homo sapien
gcagagggaacacaactgaactcagatctgctg

SEQ ID NO: 792567 - DNA, 33 bp, Homo sapien
tgcttcacaactaactcaatggctcaacaattc

SEQ ID NO: 792568 - DNA, 33 bp, Homo sapien
tgcttcacaactaacttaatggctcaacaattc

SEQ ID NO: 792569 - DNA, 33 bp, Homo sapien
gtactttaaaaatctacaggactgcagagaaag

SEQ ID NO: 792570 - DNA, 33 bp, Homo sapien
gtactttaaaaatctataggactgcagagaaag

SEQ ID NO: 792571 - DNA, 33 bp, Homo sapien
cttcgagtttcctttaccacagtctttgttagc

SEQ ID NO: 792572 - DNA, 33 bp, Homo sapien
cttcgagtttcctttagcacagtctttgttagc

SEQ ID NO: 792573 - DNA, 33 bp, Homo sapien
ccagggacaggatggaagaatgggagttacact

SEQ ID NO: 792574 - DNA, 33 bp, Homo sapien
ccagggacaggatggaggaatgggagttacact

SEQ ID NO: 792575 - DNA, 33 bp, Homo sapien
aattagtagctttggccgattttaagggaatgt

SEQ ID NO: 792576 - DNA, 33 bp, Homo sapien
aattagtagctttggctgattttaagggaatgt

SEQ ID NO: 792577 - DNA, 33 bp, Homo sapien
gtgctgttctaggaaagcaattcataaataaga

SEQ ID NO: 792578 - DNA, 33 bp, Homo sapien
gtgctgttctaggaaatcaattcataaataaga

SEQ ID NO: 792579 - DNA, 33 bp, Homo sapien
aaatgtttggttctcaaattgaaagctttccat

SEQ ID NO: 792580 - DNA, 33 bp, Homo sapien
aaatgtttggttctcacattgaaagctttccat

SEQ ID NO: 792581 - DNA, 33 bp, Homo sapien
tcatgggggttcagtgcacaggttatttcatca

SEQ ID NO: 792582 - DNA, 33 bp, Homo sapien
tcatgggggttcagtgtacaggttatttcatca

SEQ ID NO: 792583 - DNA, 33 bp, Homo sapien
atatcttccagaccataaaaacatacagaacac

SEQ ID NO: 792584 - DNA, 33 bp, Homo sapien
atatcttccagaccatcaaaacatacagaacac

SEQ ID NO: 792585 - DNA, 33 bp, Homo sapien
attacagtgaactgaaatgggtccatcttgacc

SEQ ID NO: 792586 - DNA, 33 bp, Homo sapien
attacagtgaactgaactgggtccatcttgacc

SEQ ID NO: 792587 - DNA, 33 bp, Homo sapien
catatatgaaaacctgaagtgaatatcatactc

SEQ ID NO: 792588 - DNA, 33 bp, Homo sapien
catatatgaaaacctgcagtgaatatcatactc

SEQ ID NO: 792589 - DNA, 33 bp, Homo sapien
tgatgaagctttgacaatacagcgaattatgta

SEQ ID NO: 792590 - DNA, 33 bp, Homo sapien
tgatgaagctttgacactacagcgaattatgta

SEQ ID NO: 792591 - DNA, 33 bp, Homo sapien
ccatgacacctggtacaagtagcgacaacaaaa

SEQ ID NO: 792592 - DNA, 33 bp, Homo sapien
ccatgacacctggtacgagtagcgacaacaaaa

SEQ ID NO: 792593 - DNA, 33 bp, Homo sapien; identical to SEQ ID NO: 792591

SEQ ID NO: 792594 - DNA, 33 bp, Homo sapien; identical to SEQ ID NO: 792592

SEQ ID NO: 792595 - DNA, 33 bp, Homo sapien
gttattgagaggaaaacgattcacaattatgtc

SEQ ID NO: 792596 - DNA, 33 bp, Homo sapien
gttattgagaggaaaatgattcacaattatgtc

SEQ ID NO: 792597 - DNA, 33 bp, Homo sapien
cctactgaatgatgtgccaaaaggccgagatta

SEQ ID NO: 792598 - DNA, 33 bp, Homo sapien
cctactgaatgatgtgtcaaaaggccgagatta

SEQ ID NO: 792599 - DNA, 33 bp, Homo sapien
aatatcaacgtaagaacgtacacgtagagtaag

SEQ ID NO: 792600 - DNA, 33 bp, Homo sapien
aatatcaacgtaagaatgtacacgtagagtaag

SEQ ID NO: 792601 - DNA, 33 bp, Homo sapien
aaatgtatttattggaatagaataggccattct

SEQ ID NO: 792602 - DNA, 33 bp, Homo sapien
aaatgtatttattggagtagaataggccattct

SEQ ID NO: 792603 - DNA, 33 bp, Homo sapien
aggtggagaaagaaggaaagccatacttgattt

SEQ ID NO: 792604 - DNA, 33 bp, Homo sapien
aggtggagaaagaagggaagccatacttgattt

SEQ ID NO: 792605 - DNA, 33 bp, Homo sapien
attgcaagggagctaaatgaggccgactttccc

SEQ ID NO: 792606 - DNA, 33 bp, Homo sapien
attgcaagggagctaagtgaggccgactttccc

SEQ ID NO: 792607 - DNA, 33 bp, Homo sapien
tgccctcctcttagaaactgagccagtcgaggc

SEQ ID NO: 792608 - DNA, 33 bp, Homo sapien
tgccctcctcttagaacctgagccagtcgaggc

SEQ ID NO: 792609 - DNA, 33 bp, Homo sapien
gaagggtcaaagacaacacagtagttggccagg

SEQ ID NO: 792610 - DNA, 33 bp, Homo sapien
gaagggtcaaagacaatacagtagttggccagg

SEQ ID NO: 792611 - DNA, 33 bp, Homo sapien; identical to SEQ ID NO: 792609

SEQ ID NO: 792612 - DNA, 33 bp, Homo sapien; identical to SEQ ID NO: 792610

SEQ ID NO: 792613 - DNA, 33 bp, Homo sapien
ttaaatcttggaaatggaatgccttcaatattt

SEQ ID NO: 792614 - DNA, 33 bp, Homo sapien
ttaaatcttggaaatgtaatgccttcaatattt

SEQ ID NO: 792615 - DNA, 33 bp, Homo sapien
tctggtaagtgctgagcctaactccaaactaca

SEQ ID NO: 792616 - DNA, 33 bp, Homo sapien
tctggtaagtgctgaggctaactccaaactaca

SEQ ID NO: 792617 - DNA, 33 bp, Homo sapien
tgcaggagtacatgccaaagtttaatttctctc

SEQ ID NO: 792618 - DNA, 33 bp, Homo sapien
tgcaggagtacatgccgaagtttaatttctctc

SEQ ID NO: 792619 - DNA, 33 bp, Homo sapien
gaaaattagcagctcagtaaagaagcaccatgt

SEQ ID NO: 792620 - DNA, 33 bp, Homo sapien
gaaaattagcagctcattaaagaagcaccatgt

SEQ ID NO: 792621 - DNA, 33 bp, Homo sapien
aatgttctatcactttcaaaacttttgagacat

SEQ ID NO: 792622 - DNA, 33 bp, Homo sapien
aatgttctatcacttttaaaacttttgagacat

SEQ ID NO: 792623 - DNA, 33 bp, Homo sapien
caacaaactaaactacagagctacggtaatcaa

SEQ ID NO: 792624 - DNA, 33 bp, Homo sapien
caacaaactaaactactgagctacggtaatcaa

SEQ ID NO: 792625 - DNA, 33 bp, Homo sapien
gattgcaaaagtgttacaaggagaaatatgtta

SEQ ID NO: 792626 - DNA, 33 bp, Homo sapien
gattgcaaaagtgttagaaggagaaatatgtta

SEQ ID NO: 792627 - DNA, 33 bp, Homo sapien
tgaaaatctatcaggaaactcatcaaatctttc

SEQ ID NO: 792628 - DNA, 33 bp, Homo sapien
tgaaaatctatcaggagactcatcaaatctttc

SEQ ID NO: 792629 - DNA, 33 bp, Homo sapien
ctgtcaggatttacagcataccttatttactta

SEQ ID NO: 792630 - DNA, 33 bp, Homo sapien
ctgtcaggatttacaggataccttatttactta

SEQ ID NO: 792631 - DNA, 33 bp, Homo sapien
ttgctcccacaactggcatactggcttcccaca

SEQ ID NO: 792632 - DNA, 33 bp, Homo sapien
ttgctcccacaactggtatactggcttcccaca

SEQ ID NO: 792633 - DNA, 33 bp, Homo sapien
tgggagggttaactaccacctgaaatgctaaga

SEQ ID NO: 792634 - DNA, 33 bp, Homo sapien
tgggagggttaactactacctgaaatgctaaga

SEQ ID NO: 792635 - DNA, 33 bp, Homo sapien
cttccctcaccacatactaaaaaccagctattt

SEQ ID NO: 792636 - DNA, 33 bp, Homo sapien
cttccctcaccacatattaaaaaccagctattt

SEQ ID NO: 792637 - DNA, 33 bp, Homo sapien
tcttactgtcaaataccactatggacagcataa

SEQ ID NO: 792638 - DNA, 33 bp, Homo sapien
tcttactgtcaaatacgactatggacagcataa

SEQ ID NO: 792639 - DNA, 33 bp, Homo sapien
agatactgtgcaaaacgctcaaaggcctaaaaa

SEQ ID NO: 792640 - DNA, 33 bp, Homo sapien
agatactgtgcaaaactctcaaaggcctaaaaa

SEQ ID NO: 792641 - DNA, 33 bp, Homo sapien
acactgatttctcaaccactgaaggtatcttag

SEQ ID NO: 792642 - DNA, 33 bp, Homo sapien
acactgatttctcaactactgaaggtatcttag

SEQ ID NO: 792643 - DNA, 33 bp, Homo sapien
ttgaaagtaaatgtgccaagaaatgggagataa

SEQ ID NO: 792644 - DNA, 33 bp, Homo sapien
ttgaaagtaaatgtgcgaagaaatgggagataa

SEQ ID NO: 792645 - DNA, 33 bp, Homo sapien
cttattcttgatagataagtcaccacaagcatt

SEQ ID NO: 792646 - DNA, 33 bp, Homo sapien
cttattcttgatagattagtcaccacaagcatt

SEQ ID NO: 792647 - DNA, 33 bp, Homo sapien
acaatggttagagatacgttcagttttgcttct

SEQ ID NO: 792648 - DNA, 33 bp, Homo sapien
acaatggttagagatatgttcagttttgcttct

SEQ ID NO: 792649 - DNA, 33 bp, Homo sapien
tatacattttggactcacattcttaccaggggt

SEQ ID NO: 792650 - DNA, 33 bp, Homo sapien
tatacattttggactcgcattcttaccaggggt

SEQ ID NO: 792651 - DNA, 33 bp, Homo sapien
tctcaactgtttggcccctattcctccagcaga

SEQ ID NO: 792652 - DNA, 33 bp, Homo sapien
tctcaactgtttggcctctattcctccagcaga

SEQ ID NO: 792653 - DNA, 33 bp, Homo sapien
gccactgaaaaatacccgattctgccagacact

SEQ ID NO: 792654 - DNA, 33 bp, Homo sapien
gccactgaaaaatacctgattctgccagacact

SEQ ID NO: 792655 - DNA, 33 bp, Homo sapien
tgaaagcaggtgtaaaagtagtggaaccaggaa

SEQ ID NO: 792656 - DNA, 33 bp, Homo sapien
tgaaagcaggtgtaaatgtagtggaaccaggaa

SEQ ID NO: 792657 - DNA, 33 bp, Homo sapien
ctcatcgatggccccactaaaaaatgactcaat

SEQ ID NO: 792658 - DNA, 33 bp, Homo sapien
ctcatcgatggccccagtaaaaaatgactcaat

SEQ ID NO: 792659 - DNA, 33 bp, Homo sapien
gagtatgaaaacagaaaatagccaaacagcact

SEQ ID NO: 792660 - DNA, 33 bp, Homo sapien
gagtatgaaaacagaagatagccaaacagcact

SEQ ID NO: 792661 - DNA, 33 bp, Homo sapien
attatctcagagctcccatagaatcccagttgg

SEQ ID NO: 792662 - DNA, 33 bp, Homo sapien
attatctcagagctccgatagaatcccagttgg

SEQ ID NO: 792663 - DNA, 33 bp, Homo sapien
gacgtggttaataaaactgacacatacccaatt

SEQ ID NO: 792664 - DNA, 33 bp, Homo sapien
gacgtggttaataaaagtgacacatacccaatt

SEQ ID NO: 792665 - DNA, 33 bp, Homo sapien
tacagataagaaggaacgccaagtgaaaaggat

SEQ ID NO: 792666 - DNA, 33 bp, Homo sapien
tacagataagaaggaatgccaagtgaaaaggat

SEQ ID NO: 792667 - DNA, 33 bp, Homo sapien
tgcaaggttaaatttccctttcaaacataagta

SEQ ID NO: 792668 - DNA, 33 bp, Homo sapien
tgcaaggttaaatttctctttcaaacataagta

SEQ ID NO: 792669 - DNA, 33 bp, Homo sapien
ttgaacaggttgctaaagctctatgagtctcaa

SEQ ID NO: 792670 - DNA, 33 bp, Homo sapien
ttgaacaggttgctaaggctctatgagtctcaa

SEQ ID NO: 792671 - DNA, 33 bp, Homo sapien
agcactgaagacctgacgatagttcctagttac

SEQ ID NO: 792672 - DNA, 33 bp, Homo sapien
agcactgaagacctgaggatagttcctagttac

SEQ ID NO: 792673 - DNA, 33 bp, Homo sapien
gtatcaaggtttataccatcacaactaacttag

SEQ ID NO: 792674 - DNA, 33 bp, Homo sapien
gtatcaaggtttatacgatcacaactaacttag

SEQ ID NO: 792675 - DNA, 33 bp, Homo sapien
acatacgctagtttgccattcaaatgcttttca

SEQ ID NO: 792676 - DNA, 33 bp, Homo sapien
acatacgctagtttgcgattcaaatgcttttca

SEQ ID NO: 792677 - DNA, 33 bp, Homo sapien
caattctaacgcctaccgaagctgtgacttgca

SEQ ID NO: 792678 - DNA, 33 bp, Homo sapien
caattctaacgcctactgaagctgtgacttgca

SEQ ID NO: 792679 - DNA, 33 bp, Homo sapien
tgacttctaatgcaaacgtttagtgaagtatac

SEQ ID NO: 792680 - DNA, 33 bp, Homo sapien
tgacttctaatgcaaatgtttagtgaagtatac

SEQ ID NO: 792681 - DNA, 33 bp, Homo sapien
ggagtattgatcctgaaagttagttcttcaggc

SEQ ID NO: 792682 - DNA, 33 bp, Homo sapien
ggagtattgatcctgagagttagttcttcaggc

SEQ ID NO: 792683 - DNA, 33 bp, Homo sapien
tctcatttctggctaccggttgagagagaaatg

SEQ ID NO: 792684 - DNA, 33 bp, Homo sapien
tctcatttctggctactggttgagagagaaatg

SEQ ID NO: 792685 - DNA, 33 bp, Homo sapien
atcaacttgagtttatcactgacagacaaaaaa

SEQ ID NO: 792686 - DNA, 33 bp, Homo sapien
atcaacttgagtttattactgacagacaaaaaa

SEQ ID NO: 792687 - DNA, 33 bp, Homo sapien
catgaagcctagcctgaaactttctttccttaa

SEQ ID NO: 792688 - DNA, 33 bp, Homo sapien
catgaagcctagcctggaactttctttccttaa

SEQ ID NO: 792689 - DNA, 33 bp, Homo sapien
tctgtttcatactaaccgaagaaattttccatg

SEQ ID NO: 792690 - DNA, 33 bp, Homo sapien
tctgtttcatactaactgaagaaattttccatg

SEQ ID NO: 792691 - DNA, 33 bp, Homo sapien
aatcactgaggaagagcatatagatacaaaaag

SEQ ID NO: 792692 - DNA, 33 bp, Homo sapien
aatcactgaggaagaggatatagatacaaaaag

SEQ ID NO: 792693 - DNA, 33 bp, Homo sapien
agtcaggcatgaggaaaagtaagtgccaagttt

SEQ ID NO: 792694 - DNA, 33 bp, Homo sapien
agtcaggcatgaggaacagtaagtgccaagttt

SEQ ID NO: 792695 - DNA, 33 bp, Homo sapien
cctcattccatcacctaaaggacccaaagctta

SEQ ID NO: 792696 - DNA, 33 bp, Homo sapien
cctcattccatcacctgaaggacccaaagctta

SEQ ID NO: 792697 - DNA, 33 bp, Homo sapien
gtagttgagtcagcaagtctcattcatcctgga

SEQ ID NO: 792698 - DNA, 33 bp, Homo sapien
gtagttgagtcagcaattctcattcatcctgga

SEQ ID NO: 792699 - DNA, 33 bp, Homo sapien
ttcaggtgattcactacgaagagtgtgaggatc

SEQ ID NO: 792700 - DNA, 33 bp, Homo sapien
ttcaggtgattcactatgaagagtgtgaggatc

SEQ ID NO: 792701 - DNA, 33 bp, Homo sapien
ttatcgcaaggaagtaggagtctatattcaaag

SEQ ID NO: 792702 - DNA, 33 bp, Homo sapien
ttatcgcaaggaagtatgagtctatattcaaag

SEQ ID NO: 792703 - DNA, 33 bp, Homo sapien
agttactgcagttcatcagctgaataaaagcag

SEQ ID NO: 792704 - DNA, 33 bp, Homo sapien
agttactgcagttcattagctgaataaaagcag

SEQ ID NO: 792705 - DNA, 33 bp, Homo sapien
atgttacagggaaggaacataactatgataagt

SEQ ID NO: 792706 - DNA, 33 bp, Homo sapien
atgttacagggaaggagcataactatgataagt

SEQ ID NO: 792707 - DNA, 33 bp, Homo sapien
agagtcctgaatttcacgtgccatctgaccatt

SEQ ID NO: 792708 - DNA, 33 bp, Homo sapien
agagtcctgaatttcatgtgccatctgaccatt

SEQ ID NO: 792709 - DNA, 33 bp, Homo sapien
gataaggtagcaaaaaatgtaagtcttgttgcc

SEQ ID NO: 792710 - DNA, 33 bp, Homo sapien
gataaggtagcaaaaagtgtaagtcttgttgcc

SEQ ID NO: 792711 - DNA, 33 bp, Homo sapien
tgtgcagcctatgagcaaagcaattgtattttt

SEQ ID NO: 792712 - DNA, 33 bp, Homo sapien
tgtgcagcctatgagcgaagcaattgtattttt

SEQ ID NO: 792713 - DNA, 33 bp, Homo sapien
gattatgttataaaaaatcatggcttctgtttt

SEQ ID NO: 792714 - DNA, 33 bp, Homo sapien
gattatgttataaaaactcatggcttctgtttt

SEQ ID NO: 792715 - DNA, 33 bp, Homo sapien
agcaaactctattaaccgaatcttgtttctggc

SEQ ID NO: 792716 - DNA, 33 bp, Homo sapien
agcaaactctattaactgaatcttgtttctggc

SEQ ID NO: 792717 - DNA, 33 bp, Homo sapien
tgcaaaagttggtatagggacataaacttggac

SEQ ID NO: 792718 - DNA, 33 bp, Homo sapien
tgcaaaagttggtatatggacataaacttggac

SEQ ID NO: 792719 - DNA, 33 bp, Homo sapien
tgagaaccctcaaaacagagacgatatgccggg

SEQ ID NO: 792720 - DNA, 33 bp, Homo sapien
tgagaaccctcaaaacggagacgatatgccggg

SEQ ID NO: 792721 - DNA, 33 bp, Homo sapien
caatttttattgtgaacgataatcctggtatct

SEQ ID NO: 792722 - DNA, 33 bp, Homo sapien
caatttttattgtgaatgataatcctggtatct

SEQ ID NO: 792723 - DNA, 33 bp, Homo sapien
tttagagaaaaagtcacgataaagcaatagaaa

SEQ ID NO: 792724 - DNA, 33 bp, Homo sapien
tttagagaaaaagtcatgataaagcaatagaaa

SEQ ID NO: 792725 - DNA, 33 bp, Homo sapien
cctagaacaagtttaaccacagatctgtcttac

SEQ ID NO: 792726 - DNA, 33 bp, Homo sapien
cctagaacaagtttaatcacagatctgtcttac

SEQ ID NO: 792727 - DNA, 33 bp, Homo sapien
gggactatggaaaagaagttactcaagttcatg

SEQ ID NO: 792728 - DNA, 33 bp, Homo sapien
gggactatggaaaagacgttactcaagttcatg

SEQ ID NO: 792729 - DNA, 33 bp, Homo sapien
cttcttttgctgccaaaacaataaatgccaact

SEQ ID NO: 792730 - DNA, 33 bp, Homo sapien
cttcttttgctgccaagacaataaatgccaact

SEQ ID NO: 792731 - DNA, 33 bp, Homo sapien
tcgccattttcttttcaccattcatcatttttc

SEQ ID NO: 792732 - DNA, 33 bp, Homo sapien
tcgccattttcttttcgccattcatcatttttc

SEQ ID NO: 792733 - DNA, 33 bp, Homo sapien
ggtctcaggtgagtaaaatgatactttaaatca

SEQ ID NO: 792734 - DNA, 33 bp, Homo sapien
ggtctcaggtgagtaagatgatactttaaatca

SEQ ID NO: 792735 - DNA, 33 bp, Homo sapien
tggatattttgcatcacgatatcacgtgagggt

SEQ ID NO: 792736 - DNA, 33 bp, Homo sapien
tggatattttgcatcatgatatcacgtgagggt

SEQ ID NO: 792737 - DNA, 33 bp, Homo sapien
aaagctgtatgacctacataccgtgcatttaaa

SEQ ID NO: 792738 - DNA, 33 bp, Homo sapien
aaagctgtatgacctatataccgtgcatttaaa

SEQ ID NO: 792739 - DNA, 33 bp, Homo sapien
gaggcatgcctaatgacggtagctccagtaata

SEQ ID NO: 792740 - DNA, 33 bp, Homo sapien
gaggcatgcctaatgatggtagctccagtaata

SEQ ID NO: 792741 - DNA, 33 bp, Homo sapien
ctctcttctcaggaaaggttgcattagaaactg

SEQ ID NO: 792742 - DNA, 33 bp, Homo sapien
ctctcttctcaggaaatgttgcattagaaactg

SEQ ID NO: 792743 - DNA, 33 bp, Homo sapien
tgacgaacaacctaaacaccctgacttgatcat

SEQ ID NO: 792744 - DNA, 33 bp, Homo sapien
tgacgaacaacctaaataccctgacttgatcat

SEQ ID NO: 792745 - DNA, 33 bp, Homo sapien
ttaaatttcatgattaagtttgtatcacagagg

SEQ ID NO: 792746 - DNA, 33 bp, Homo sapien
ttaaatttcatgattaggtttgtatcacagagg

SEQ ID NO: 792747 - DNA, 33 bp, Homo sapien
aatgatcaaagctaggacaaggacccagattct

SEQ ID NO: 792748 - DNA, 33 bp, Homo sapien
aatgatcaaagctagggcaaggacccagattct

SEQ ID NO: 792749 - DNA, 33 bp, Homo sapien
gaagcataagcaaaaaccgagccccaactctat

SEQ ID NO: 792750 - DNA, 33 bp, Homo sapien
gaagcataagcaaaaatcgagccccaactctat

SEQ ID NO: 792751 - DNA, 33 bp, Homo sapien
agtggaatgacaggaccaaatgaaataactact

SEQ ID NO: 792752 - DNA, 33 bp, Homo sapien
agtggaatgacaggactaaatgaaataactact

SEQ ID NO: 792753 - DNA, 33 bp, Homo sapien
acaaggcaaagtattacaggtaagtatgatcaa

SEQ ID NO: 792754 - DNA, 33 bp, Homo sapien
acaaggcaaagtattataggtaagtatgatcaa

SEQ ID NO: 792755 - DNA, 33 bp, Homo sapien
cacaccatagaatagaaagctcatcatgatcta

SEQ ID NO: 792756 - DNA, 33 bp, Homo sapien
cacaccatagaatagagagctcatcatgatcta

SEQ ID NO: 792757 - DNA, 33 bp, Homo sapien
tccatcttctcaaagaaccttctctaaccatgc

SEQ ID NO: 792758 - DNA, 33 bp, Homo sapien
tccatcttctcaaagagccttctctaaccatgc

SEQ ID NO: 792759 - DNA, 33 bp, Homo sapien
taattgcaatatcttacctgtgttcttatattg

SEQ ID NO: 792760 - DNA, 33 bp, Homo sapien
taattgcaatatcttatctgtgttcttatattg

SEQ ID NO: 792761 - DNA, 33 bp, Homo sapien
ccaggatttacagttacgctatgtgagaatgag

SEQ ID NO: 792762 - DNA, 33 bp, Homo sapien
ccaggatttacagttatgctatgtgagaatgag

SEQ ID NO: 792763 - DNA, 33 bp, Homo sapien
tataaatgcacagaacaatgaataagagagacc

SEQ ID NO: 792764 - DNA, 33 bp, Homo sapien
tataaatgcacagaaccatgaataagagagacc

SEQ ID NO: 792765 - DNA, 33 bp, Homo sapien
aacttcacaaagctaacgcaagctatgagcctc

SEQ ID NO: 792766 - DNA, 33 bp, Homo sapien
aacttcacaaagctaatgcaagctatgagcctc

SEQ ID NO: 792767 - DNA, 33 bp, Homo sapien
ccgatatattattatcaacagaggctcatagct

SEQ ID NO: 792768 - DNA, 33 bp, Homo sapien
ccgatatattattatccacagaggctcatagct

SEQ ID NO: 792769 - DNA, 33 bp, Homo sapien
tcatgctcagcggaaaagaaatggctctttcag

SEQ ID NO: 792770 - DNA, 33 bp, Homo sapien
tcatgctcagcggaaacgaaatggctctttcag

SEQ ID NO: 792771 - DNA, 33 bp, Homo sapien
aaataagcttctcaaggcactagcttggtgttc

SEQ ID NO: 792772 - DNA, 33 bp, Homo sapien
aaataagcttctcaagtcactagcttggtgttc

SEQ ID NO: 792773 - DNA, 33 bp, Homo sapien
tgagattcctgaattacgtcccttgtttctaac

SEQ ID NO: 792774 - DNA, 33 bp, Homo sapien
tgagattcctgaattatgtcccttgtttctaac

SEQ ID NO: 792775 - DNA, 33 bp, Homo sapien
atttcctgcattcaaaaaattaatcagagatat

SEQ ID NO: 792776 - DNA, 33 bp, Homo sapien
atttcctgcattcaaacaattaatcagagatat

SEQ ID NO: 792777 - DNA, 33 bp, Homo sapien
tccataggtttgaacactgagcataaggaatat

SEQ ID NO: 792778 - DNA, 33 bp, Homo sapien
tccataggtttgaacattgagcataaggaatat

SEQ ID NO: 792779 - DNA, 33 bp, Homo sapien
gtgtgtccatcatctaccttcaataattattaa

SEQ ID NO: 792780 - DNA, 33 bp, Homo sapien
gtgtgtccatcatctagcttcaataattattaa

SEQ ID NO: 792781 - DNA, 33 bp, Homo sapien
ctgttctctttttgtaacacaatcacgtcaagt

SEQ ID NO: 792782 - DNA, 33 bp, Homo sapien
ctgttctctttttgtatcacaatcacgtcaagt

SEQ ID NO: 792783 - DNA, 33 bp, Homo sapien
ttcttgctacctataacgtgctccctggttact

SEQ ID NO: 792784 - DNA, 33 bp, Homo sapien
ttcttgctacctataatgtgctccctggttact

SEQ ID NO: 792785 - DNA, 33 bp, Homo sapien
cgccagtcagtttccacctacaggaggaggaaa

SEQ ID NO: 792786 - DNA, 33 bp, Homo sapien
cgccagtcagtttccatctacaggaggaggaaa

SEQ ID NO: 792787 - DNA, 33 bp, Homo sapien
taaaaggtacatctcacaattgatttggcagaa

SEQ ID NO: 792788 - DNA, 33 bp, Homo sapien
taaaaggtacatctcataattgatttggcagaa

SEQ ID NO: 792789 - DNA, 33 bp, Homo sapien
tttatttatgcctggacggttttttccttgatc

SEQ ID NO: 792790 - DNA, 33 bp, Homo sapien
tttatttatgcctggatggttttttccttgatc

SEQ ID NO: 792791 - DNA, 33 bp, Homo sapien
tcaagtctttgtagaactgctaagaacagatac

SEQ ID NO: 792792 - DNA, 33 bp, Homo sapien
tcaagtctttgtagaattgctaagaacagatac

SEQ ID NO: 792793 - DNA, 33 bp, Homo sapien
agaaataacttaccaaaggcatctgcattaatt

SEQ ID NO: 792794 - DNA, 33 bp, Homo sapien
agaaataacttaccaatggcatctgcattaatt

SEQ ID NO: 792795 - DNA, 33 bp, Homo sapien
tgccattgctctactacgtaatcttttctaata

SEQ ID NO: 792796 - DNA, 33 bp, Homo sapien
tgccattgctctactaggtaatcttttctaata

SEQ ID NO: 792797 - DNA, 33 bp, Homo sapien
gagtccatgaaatacccctgtgtcatataaagc

SEQ ID NO: 792798 - DNA, 33 bp, Homo sapien
gagtccatgaaataccgctgtgtcatataaagc

SEQ ID NO: 792799 - DNA, 33 bp, Homo sapien
ttaattgattggaccaagaatgggcacctgtac

SEQ ID NO: 792800 - DNA, 33 bp, Homo sapien
ttaattgattggaccaggaatgggcacctgtac

SEQ ID NO: 792801 - DNA, 33 bp, Homo sapien
gcctctggcacatacacagctgaaggaggtgag

SEQ ID NO: 792802 - DNA, 33 bp, Homo sapien
gcctctggcacatacatagctgaaggaggtgag

SEQ ID NO: 792803 - DNA, 33 bp, Homo sapien
ttaggatgtaatgatgcattaccagatatattt

SEQ ID NO: 792804 - DNA, 33 bp, Homo sapien
ttaggatgtaatgatgtattaccagatatattt

SEQ ID NO: 792805 - DNA, 33 bp, Homo sapien
ttgcttttattgaacacgaacagcttatcagaa

SEQ ID NO: 792806 - DNA, 33 bp, Homo sapien
ttgcttttattgaacatgaacagcttatcagaa

SEQ ID NO: 792807 - DNA, 33 bp, Homo sapien
tacaatgaggtaacaacttatttctagagttat

SEQ ID NO: 792808 - DNA, 33 bp, Homo sapien
tacaatgaggtaacaatttatttctagagttat

SEQ ID NO: 792809 - DNA, 33 bp, Homo sapien
acacttttatcagaacagtccttttatcaaatg

SEQ ID NO: 792810 - DNA, 33 bp, Homo sapien
acacttttatcagaaccgtccttttatcaaatg

SEQ ID NO: 792811 - DNA, 33 bp, Homo sapien
acatagttgcagtccaaactcctctattgtaca

SEQ ID NO: 792812 - DNA, 33 bp, Homo sapien
acatagttgcagtccagactcctctattgtaca

SEQ ID NO: 792813 - DNA, 33 bp, Homo sapien
tcttgcaagtttaagaaccatctatatactgat

SEQ ID NO: 792814 - DNA, 33 bp, Homo sapien
tcttgcaagtttaagagccatctatatactgat

SEQ ID NO: 792815 - DNA, 33 bp, Homo sapien
agctgtgtggcttacaatccacagaaatttatt

SEQ ID NO: 792816 - DNA, 33 bp, Homo sapien
agctgtgtggcttacagtccacagaaatttatt

SEQ ID NO: 792817 - DNA, 33 bp, Homo sapien
cacctggcctctactgcatcatttttacaggaa

SEQ ID NO: 792818 - DNA, 33 bp, Homo sapien
cacctggcctctactggatcatttttacaggaa

SEQ ID NO: 792819 - DNA, 33 bp, Homo sapien
caaaaaataaaaaaacacaactctgctgccctt

SEQ ID NO: 792820 - DNA, 33 bp, Homo sapien
caaaaaataaaaaaacgcaactctgctgccctt

SEQ ID NO: 792821 - DNA, 33 bp, Homo sapien
aggcacaatattttcaccttttcattcacagtg

SEQ ID NO: 792822 - DNA, 33 bp, Homo sapien
aggcacaatattttcatcttttcattcacagtg

SEQ ID NO: 792823 - DNA, 33 bp, Homo sapien
gccatgtgatgggaaccaagtctgtggttgtga

SEQ ID NO: 792824 - DNA, 33 bp, Homo sapien
gccatgtgatgggaacgaagtctgtggttgtga

SEQ ID NO: 792825 - DNA, 33 bp, Homo sapien
gggtccatcatggtaaagctgagacatgacaga

SEQ ID NO: 792826 - DNA, 33 bp, Homo sapien
gggtccatcatggtaaggctgagacatgacaga

SEQ ID NO: 792827 - DNA, 33 bp, Homo sapien
ttttccttgaatccagcccaaattagattggtt

SEQ ID NO: 792828 - DNA, 33 bp, Homo sapien
ttttccttgaatccagtccaaattagattggtt

SEQ ID NO: 792829 - DNA, 33 bp, Homo sapien
tcattaagttctaattcaatacttcagcaaaaa

SEQ ID NO: 792830 - DNA, 33 bp, Homo sapien
tcattaagttctaattgaatacttcagcaaaaa

SEQ ID NO: 792831 - DNA, 33 bp, Homo sapien
ttgcctaagaattgaaagccacagcaagtagac

SEQ ID NO: 792832 - DNA, 33 bp, Homo sapien
ttgcctaagaattgaaggccacagcaagtagac

SEQ ID NO: 792833 - DNA, 33 bp, Homo sapien
acacctgtttcaagaccaagttaagtttcttta

SEQ ID NO: 792834 - DNA, 33 bp, Homo sapien
acacctgtttcaagactaagttaagtttcttta

SEQ ID NO: 792835 - DNA, 33 bp, Homo sapien
tgggagaaagtgatggaaagaaattaggagcta

SEQ ID NO: 792836 - DNA, 33 bp, Homo sapien
tgggagaaagtgatgggaagaaattaggagcta

SEQ ID NO: 792837 - DNA, 33 bp, Homo sapien
gcataagctgtgtaaccaaaatggcactgtgtg

SEQ ID NO: 792838 - DNA, 33 bp, Homo sapien
gcataagctgtgtaacgaaaatggcactgtgtg

SEQ ID NO: 792839 - DNA, 33 bp, Homo sapien
gacaatctttacttcaccttctaggaaatctct

SEQ ID NO: 792840 - DNA, 33 bp, Homo sapien
gacaatctttacttcagcttctaggaaatctct

SEQ ID NO: 792841 - DNA, 33 bp, Homo sapien
gatacttaacatcatacaaaaccaagatcaagt

SEQ ID NO: 792842 - DNA, 33 bp, Homo sapien
gatacttaacatcatataaaaccaagatcaagt

SEQ ID NO: 792843 - DNA, 33 bp, Homo sapien
aggagtacaaactagaaaattgtttattttgtc

SEQ ID NO: 792844 - DNA, 33 bp, Homo sapien
aggagtacaaactagagaattgtttattttgtc

SEQ ID NO: 792845 - DNA, 33 bp, Homo sapien
gtctgaattccacaaacactgattgccccaagg

SEQ ID NO: 792846 - DNA, 33 bp, Homo sapien
gtctgaattccacaaatactgattgccccaagg

SEQ ID NO: 792847 - DNA, 33 bp, Homo sapien
tttttattgctaataaccaggactctggactcc

SEQ ID NO: 792848 - DNA, 33 bp, Homo sapien
tttttattgctaataatcaggactctggactcc

SEQ ID NO: 792849 - DNA, 33 bp, Homo sapien
ttaccctgtatttggactactggacatattatc

SEQ ID NO: 792850 - DNA, 33 bp, Homo sapien
ttaccctgtatttggagtactggacatattatc

SEQ ID NO: 792851 - DNA, 33 bp, Homo sapien
ctggatggcataaaaacaaatattctcaagcct

SEQ ID NO: 792852 - DNA, 33 bp, Homo sapien
ctggatggcataaaaagaaatattctcaagcct

SEQ ID NO: 792853 - DNA, 33 bp, Homo sapien
cctcaaaggatacagacggttgtaaatcctccc

SEQ ID NO: 792854 - DNA, 33 bp, Homo sapien
cctcaaaggatacagatggttgtaaatcctccc

SEQ ID NO: 792855 - DNA, 33 bp, Homo sapien
atgtgacaaggaagaccgcaaccctatttgctt

SEQ ID NO: 792856 - DNA, 33 bp, Homo sapien
atgtgacaaggaagactgcaaccctatttgctt

SEQ ID NO: 792857 - DNA, 33 bp, Homo sapien
actgcagttcaactcacaggaagccacatccat

SEQ ID NO: 792858 - DNA, 33 bp, Homo sapien
actgcagttcaactcataggaagccacatccat

SEQ ID NO: 792859 - DNA, 33 bp, Homo sapien
tttccagaggattttgcaatgctataactgtat

SEQ ID NO: 792860 - DNA, 33 bp, Homo sapien
tttccagaggattttgtaatgctataactgtat

SEQ ID NO: 792861 - DNA, 33 bp, Homo sapien
ggatgcccagacaaaactatgctgcaggggagg

SEQ ID NO: 792862 - DNA, 33 bp, Homo sapien
ggatgcccagacaaaagtatgctgcaggggagg

SEQ ID NO: 792863 - DNA, 33 bp, Homo sapien
actattctgaacaacaatctgatcatgtagcca

SEQ ID NO: 792864 - DNA, 33 bp, Homo sapien
actattctgaacaacagtctgatcatgtagcca

SEQ ID NO: 792865 - DNA, 33 bp, Homo sapien
tctgaagtgccaaaaaagtatttgtctccttaa

SEQ ID NO: 792866 - DNA, 33 bp, Homo sapien
tctgaagtgccaaaaaggtatttgtctccttaa

SEQ ID NO: 792867 - DNA, 33 bp, Homo sapien
tgaaaaatggcattaacaaaactttaggctttt

SEQ ID NO: 792868 - DNA, 33 bp, Homo sapien
tgaaaaatggcattaagaaaactttaggctttt

SEQ ID NO: 792869 - DNA, 33 bp, Homo sapien
acttactgagaagcacagtctggataaggagct

SEQ ID NO: 792870 - DNA, 33 bp, Homo sapien
acttactgagaagcactgtctggataaggagct

SEQ ID NO: 792871 - DNA, 33 bp, Homo sapien
ttctgtgtccttgccaataaagaatgtccatca

SEQ ID NO: 792872 - DNA, 33 bp, Homo sapien
ttctgtgtccttgccagtaaagaatgtccatca

SEQ ID NO: 792873 - DNA, 33 bp, Homo sapien
ttaagtaaactggatgaagctaatctttcttac

SEQ ID NO: 792874 - DNA, 33 bp, Homo sapien
ttaagtaaactggatggagctaatctttcttac

SEQ ID NO: 792875 - DNA, 33 bp, Homo sapien
ccttgtttgctcaacaaattttaacagatgaaa

SEQ ID NO: 792876 - DNA, 33 bp, Homo sapien
ccttgtttgctcaacagattttaacagatgaaa

SEQ ID NO: 792877 - DNA, 33 bp, Homo sapien
gggagacaatatgaaaaaaaggcaagaagtagc

SEQ ID NO: 792878 - DNA, 33 bp, Homo sapien
gggagacaatatgaaagaaaggcaagaagtagc

SEQ ID NO: 792879 - DNA, 33 bp, Homo sapien
tgtggatattgctgcacgagacagaactcatga

SEQ ID NO: 792880 - DNA, 33 bp, Homo sapien
tgtggatattgctgcatgagacagaactcatga

SEQ ID NO: 792881 - DNA, 33 bp, Homo sapien
gagcctatgctggcaacagagagtcaagcatct

SEQ ID NO: 792882 - DNA, 33 bp, Homo sapien
gagcctatgctggcaagagagagtcaagcatct

SEQ ID NO: 792883 - DNA, 33 bp, Homo sapien
ttacggccacaacagtgaagttctatagctgag

SEQ ID NO: 792884 - DNA, 33 bp, Homo sapien
ttacggccacaacagttaagttctatagctgag

SEQ ID NO: 792885 - DNA, 33 bp, Homo sapien
ctgatcagagtacagaaaaactgagcagcagat

SEQ ID NO: 792886 - DNA, 33 bp, Homo sapien
ctgatcagagtacagacaaactgagcagcagat

SEQ ID NO: 792887 - DNA, 33 bp, Homo sapien
aggggtgttgggctccaagaaaccacacacaga

SEQ ID NO: 792888 - DNA, 33 bp, Homo sapien
aggggtgttgggctccgagaaaccacacacaga

SEQ ID NO: 792889 - DNA, 33 bp, Homo sapien
cataaataagtgccaaaaaattttcctgtaatt

SEQ ID NO: 792890 - DNA, 33 bp, Homo sapien
cataaataagtgccaacaaattttcctgtaatt

SEQ ID NO: 792891 - DNA, 33 bp, Homo sapien
ttattgttaaaaacagaagtccagagaaaacat

SEQ ID NO: 792892 - DNA, 33 bp, Homo sapien
ttattgttaaaaacagcagtccagagaaaacat

SEQ ID NO: 792893 - DNA, 33 bp, Homo sapien
cctaccttctagacagcagtattaagaattaag

SEQ ID NO: 792894 - DNA, 33 bp, Homo sapien
cctaccttctagacaggagtattaagaattaag

SEQ ID NO: 792895 - DNA, 33 bp, Homo sapien
ccatcaaatattggaaaatttacaaccacagag

SEQ ID NO: 792896 - DNA, 33 bp, Homo sapien
ccatcaaatattggaagatttacaaccacagag

SEQ ID NO: 792897 - DNA, 33 bp, Homo sapien
aatgccataacttacccataaaacaatcagagt

SEQ ID NO: 792898 - DNA, 33 bp, Homo sapien
aatgccataacttacctataaaacaatcagagt

SEQ ID NO: 792899 - DNA, 33 bp, Homo sapien
ccaccccagcctggagaaataggcaacattcaa

SEQ ID NO: 792900 - DNA, 33 bp, Homo sapien
ccaccccagcctggagtaataggcaacattcaa

SEQ ID NO: 792901 - DNA, 33 bp, Homo sapien
atctcacagaaatcccggagtggcctcccagga

SEQ ID NO: 792902 - DNA, 33 bp, Homo sapien
atctcacagaaatccctgagtggcctcccagga

SEQ ID NO: 792903 - DNA, 33 bp, Homo sapien
gctcctatgtgtttagaaggagtgatctcattg

SEQ ID NO: 792904 - DNA, 33 bp, Homo sapien
gctcctatgtgtttagcaggagtgatctcattg

SEQ ID NO: 792905 - DNA, 33 bp, Homo sapien
ggtactaggattaataaccaggtgacaaaataa

SEQ ID NO: 792906 - DNA, 33 bp, Homo sapien
ggtactaggattaatacccaggtgacaaaataa

SEQ ID NO: 792907 - DNA, 33 bp, Homo sapien
ttctttatttcactaacagccccctaacagggg

SEQ ID NO: 792908 - DNA, 33 bp, Homo sapien
ttctttatttcactaagagccccctaacagggg

SEQ ID NO: 792909 - DNA, 33 bp, Homo sapien
cttcttccttgtctcgaaggtagaatgtggcag

SEQ ID NO: 792910 - DNA, 33 bp, Homo sapien
cttcttccttgtctcgcaggtagaatgtggcag

SEQ ID NO: 792911 - DNA, 33 bp, Homo sapien
gtaattgtttgccgagcagcaaagttatcaaag

SEQ ID NO: 792912 - DNA, 33 bp, Homo sapien
gtaattgtttgccgagtagcaaagttatcaaag

SEQ ID NO: 792913 - DNA, 33 bp, Homo sapien
aaaagaacagtaagcaaacgaaagaataggtca

SEQ ID NO: 792914 - DNA, 33 bp, Homo sapien
aaaagaacagtaagcagacgaaagaataggtca

SEQ ID NO: 792915 - DNA, 33 bp, Homo sapien
tgcagacacccaaagccaaaatgttcaaaccaa

SEQ ID NO: 792916 - DNA, 33 bp, Homo sapien
tgcagacacccaaagcgaaaatgttcaaaccaa

SEQ ID NO: 792917 - DNA, 33 bp, Homo sapien
ctttgatcttgtcagcacttaagtagcatttct

SEQ ID NO: 792918 - DNA, 33 bp, Homo sapien
ctttgatcttgtcagcccttaagtagcatttct

SEQ ID NO: 792919 - DNA, 33 bp, Homo sapien
ttaagcatactgggccaccttccctaatgtgtg

SEQ ID NO: 792920 - DNA, 33 bp, Homo sapien
ttaagcatactgggccgccttccctaatgtgtg

SEQ ID NO: 792921 - DNA, 33 bp, Homo sapien
gtacttctaagctgctcaagcccttcattttaa

SEQ ID NO: 792922 - DNA, 33 bp, Homo sapien
gtacttctaagctgctgaagcccttcattttaa

SEQ ID NO: 792923 - DNA, 33 bp, Homo sapien
gcaaggtagaaaatatgagcttatcactgtcac

SEQ ID NO: 792924 - DNA, 33 bp, Homo sapien
gcaaggtagaaaatattagcttatcactgtcac

SEQ ID NO: 792925 - DNA, 33 bp, Homo sapien
cccaggggcagcaggtaacattagtttctcatg

SEQ ID NO: 792926 - DNA, 33 bp, Homo sapien
cccaggggcagcaggtgacattagtttctcatg

SEQ ID NO: 792927 - DNA, 33 bp, Homo sapien
ggaaggaacattgagtaaaagcatttcagacca

SEQ ID NO: 792928 - DNA, 33 bp, Homo sapien
ggaaggaacattgagtgaaagcatttcagacca

SEQ ID NO: 792929 - DNA, 33 bp, Homo sapien
gagttatttatcttcacatttggtggtggtctt

SEQ ID NO: 792930 - DNA, 33 bp, Homo sapien
gagttatttatcttcatatttggtggtggtctt

SEQ ID NO: 792931 - DNA, 33 bp, Homo sapien
gcactctacccataacccagttcagccaatata

SEQ ID NO: 792932 - DNA, 33 bp, Homo sapien
gcactctacccataactcagttcagccaatata

SEQ ID NO: 792933 - DNA, 33 bp, Homo sapien
agtcaggcacgctggaacactcattgcagctca

SEQ ID NO: 792934 - DNA, 33 bp, Homo sapien
agtcaggcacgctggagcactcattgcagctca

SEQ ID NO: 792935 - DNA, 33 bp, Homo sapien
gtacccatgttctggacagcttgcccatcaaca

SEQ ID NO: 792936 - DNA, 33 bp, Homo sapien
gtacccatgttctggagagcttgcccatcaaca

SEQ ID NO: 792937 - DNA, 33 bp, Homo sapien
catccgagttagccagaaaggctcaggaaatcc

SEQ ID NO: 792938 - DNA, 33 bp, Homo sapien
catccgagttagccaggaaggctcaggaaatcc

SEQ ID NO: 792939 - DNA, 33 bp, Homo sapien
atgggggcagtagaaggatgcaagactcagccc

SEQ ID NO: 792940 - DNA, 33 bp, Homo sapien
atgggggcagtagaagtatgcaagactcagccc

SEQ ID NO: 792941 - DNA, 33 bp, Homo sapien
tttcagataacaccaacagtgcaagaactgggg

SEQ ID NO: 792942 - DNA, 33 bp, Homo sapien
tttcagataacaccaagagtgcaagaactgggg

SEQ ID NO: 792943 - DNA, 33 bp, Homo sapien
agtcccatcaagcatacgtgcatcaagcatcaa

SEQ ID NO: 792944 - DNA, 33 bp, Homo sapien
agtcccatcaagcatatgtgcatcaagcatcaa

SEQ ID NO: 792945 - DNA, 33 bp, Homo sapien
atttaaagtagtctgcaaaatgcattatataaa

SEQ ID NO: 792946 - DNA, 33 bp, Homo sapien
atttaaagtagtctgcgaaatgcattatataaa

SEQ ID NO: 792947 - DNA, 33 bp, Homo sapien
ttgtgccttgacagagcctacattcttctgaga

SEQ ID NO: 792948 - DNA, 33 bp, Homo sapien
ttgtgccttgacagagtctacattcttctgaga

SEQ ID NO: 792949 - DNA, 33 bp, Homo sapien
attcagaatgaactacagcccatggccacccat

SEQ ID NO: 792950 - DNA, 33 bp, Homo sapien
attcagaatgaactacggcccatggccacccat

SEQ ID NO: 792951 - DNA, 33 bp, Homo sapien
tgatatcattaaaataactcagataagtcagta

SEQ ID NO: 792952 - DNA, 33 bp, Homo sapien
tgatatcattaaaatagctcagataagtcagta

SEQ ID NO: 792953 - DNA, 33 bp, Homo sapien
ggaaagcctgaaaacactgacttaggttacttt

SEQ ID NO: 792954 - DNA, 33 bp, Homo sapien
ggaaagcctgaaaacattgacttaggttacttt

SEQ ID NO: 792955 - DNA, 33 bp, Homo sapien
agtgtgctggaccaccaattaggttacttagaa

SEQ ID NO: 792956 - DNA, 33 bp, Homo sapien
agtgtgctggaccaccgattaggttacttagaa

SEQ ID NO: 792957 - DNA, 33 bp, Homo sapien
atggggttggaaggagaactttggaagtagcta

SEQ ID NO: 792958 - DNA, 33 bp, Homo sapien
atggggttggaaggaggactttggaagtagcta

SEQ ID NO: 792959 - DNA, 33 bp, Homo sapien
agctgcatatgctaaaccaaagcagagatttga

SEQ ID NO: 792960 - DNA, 33 bp, Homo sapien
agctgcatatgctaaatcaaagcagagatttga

SEQ ID NO: 792961 - DNA, 33 bp, Homo sapien
actaaaagtagatccaaaatttgattcagcaat

SEQ ID NO: 792962 - DNA, 33 bp, Homo sapien
actaaaagtagatccacaatttgattcagcaat

SEQ ID NO: 792963 - DNA, 33 bp, Homo sapien
gaacttgtagcccttaataaggaatgtggcata

SEQ ID NO: 792964 - DNA, 33 bp, Homo sapien
gaacttgtagcccttagtaaggaatgtggcata

SEQ ID NO: 792965 - DNA, 33 bp, Homo sapien
caatttggaggtcttaaaaaactagaaatactc

SEQ ID NO: 792966 - DNA, 33 bp, Homo sapien
caatttggaggtcttacaaaactagaaatactc

SEQ ID NO: 792967 - DNA, 33 bp, Homo sapien
agttttggccattgtaataagtatgcaaaggca

SEQ ID NO: 792968 - DNA, 33 bp, Homo sapien
agttttggccattgtattaagtatgcaaaggca

SEQ ID NO: 792969 - DNA, 33 bp, Homo sapien
ccatcaacaatgtgtaagtattcccttttctct

SEQ ID NO: 792970 - DNA, 33 bp, Homo sapien
ccatcaacaatgtgtaggtattcccttttctct

SEQ ID NO: 792971 - DNA, 33 bp, Homo sapien
caagatgacaacaataaacattggaaacaacta

SEQ ID NO: 792972 - DNA, 33 bp, Homo sapien
caagatgacaacaatagacattggaaacaacta

SEQ ID NO: 792973 - DNA, 33 bp, Homo sapien
aacaaacacctgaatacacaagtctcaaaagaa

SEQ ID NO: 792974 - DNA, 33 bp, Homo sapien
aacaaacacctgaatatacaagtctcaaaagaa

SEQ ID NO: 792975 - DNA, 33 bp, Homo sapien
ctgtagttttgtgatacgttttgaaatcaaaaa

SEQ ID NO: 792976 - DNA, 33 bp, Homo sapien
ctgtagttttgtgatatgttttgaaatcaaaaa

SEQ ID NO: 792977 - DNA, 33 bp, Homo sapien
acttcaagcaaagtgacatatgaaaatgccaat

SEQ ID NO: 792978 - DNA, 33 bp, Homo sapien
acttcaagcaaagtgatatatgaaaatgccaat

SEQ ID NO: 792979 - DNA, 33 bp, Homo sapien
ataataacaaatatgacgactcactgagcattt

SEQ ID NO: 792980 - DNA, 33 bp, Homo sapien
ataataacaaatatgatgactcactgagcattt

SEQ ID NO: 792981 - DNA, 33 bp, Homo sapien
gtgccagtgtctggaacctaccttcactacatc

SEQ ID NO: 792982 - DNA, 33 bp, Homo sapien
gtgccagtgtctggaatctaccttcactacatc

SEQ ID NO: 792983 - DNA, 33 bp, Homo sapien
aattgttaaaacgaaaatataacagagagtcta

SEQ ID NO: 792984 - DNA, 33 bp, Homo sapien
aattgttaaaacgaaattataacagagagtcta

SEQ ID NO: 792985 - DNA, 33 bp, Homo sapien
tatgggaaatgcaacaagtagtcccagtaatgg

SEQ ID NO: 792986 - DNA, 33 bp, Homo sapien
tatgggaaatgcaacaggtagtcccagtaatgg

SEQ ID NO: 792987 - DNA, 33 bp, Homo sapien
tctgattgactaagcaaagataaaccctggagt

SEQ ID NO: 792988 - DNA, 33 bp, Homo sapien
tctgattgactaagcacagataaaccctggagt

SEQ ID NO: 792989 - DNA, 33 bp, Homo sapien
cagtcaggattttctcattgcctggctggtgtt

SEQ ID NO: 792990 - DNA, 33 bp, Homo sapien
cagtcaggattttctcgttgcctggctggtgtt

SEQ ID NO: 792991 - DNA, 33 bp, Homo sapien
agtctttggaagtggagcagataaagatggctt

SEQ ID NO: 792992 - DNA, 33 bp, Homo sapien
agtctttggaagtggatcagataaagatggctt

SEQ ID NO: 792993 - DNA, 33 bp, Homo sapien
ctttatacttcccataaattattgtgcattgca

SEQ ID NO: 792994 - DNA, 33 bp, Homo sapien
ctttatacttcccatagattattgtgcattgca

SEQ ID NO: 792995 - DNA, 33 bp, Homo sapien
atcagccagcattcaaaaggcatttattaagca

SEQ ID NO: 792996 - DNA, 33 bp, Homo sapien
atcagccagcattcaacaggcatttattaagca

SEQ ID NO: 792997 - DNA, 33 bp, Homo sapien
gggaagccttctatgaactttgttggctgaatt

SEQ ID NO: 792998 - DNA, 33 bp, Homo sapien
gggaagccttctatgacctttgttggctgaatt

SEQ ID NO: 792999 - DNA, 33 bp, Homo sapien
ttctccctatttccacggctgctttcttcattc

SEQ ID NO: 793000 - DNA, 33 bp, Homo sapien
ttctccctatttccactgctgctttcttcattc

SEQ ID NO: 793001 - DNA, 33 bp, Homo sapien
tataagctttagccatgaattgttcaggttgtt

SEQ ID NO: 793002 - DNA, 33 bp, Homo sapien
tataagctttagccattaattgttcaggttgtt

SEQ ID NO: 793003 - DNA, 33 bp, Homo sapien
tgctaaaatactcacaaatatccaggtatggtg

SEQ ID NO: 793004 - DNA, 33 bp, Homo sapien
tgctaaaatactcacagatatccaggtatggtg

SEQ ID NO: 793005 - DNA, 33 bp, Homo sapien
aaatgagatgatacacagaaagtgcttagagct

SEQ ID NO: 793006 - DNA, 33 bp, Homo sapien
aaatgagatgatacacggaaagtgcttagagct

SEQ ID NO: 793007 - DNA, 33 bp, Homo sapien
aattccactcaacttgaaataattctgaagggc

SEQ ID NO: 793008 - DNA, 33 bp, Homo sapien
aattccactcaacttggaataattctgaagggc

SEQ ID NO: 793009 - DNA, 33 bp, Homo sapien
atgtcacctttcatgccatttcctggtgtgctg

SEQ ID NO: 793010 - DNA, 33 bp, Homo sapien
atgtcacctttcatgcgatttcctggtgtgctg

SEQ ID NO: 793011 - DNA, 33 bp, Homo sapien
aagtaaaactaggctacgtgcagaggcaggcat

SEQ ID NO: 793012 - DNA, 33 bp, Homo sapien
aagtaaaactaggctatgtgcagaggcaggcat

SEQ ID NO: 793013 - DNA, 33 bp, Homo sapien
acaactaatggtagaagcactctggacaacatt

SEQ ID NO: 793014 - DNA, 33 bp, Homo sapien
acaactaatggtagaatcactctggacaacatt

SEQ ID NO: 793015 - DNA, 33 bp, Homo sapien
gagtgaaaggctgctccctactcctttacatgt

SEQ ID NO: 793016 - DNA, 33 bp, Homo sapien
gagtgaaaggctgctctctactcctttacatgt

SEQ ID NO: 793017 - DNA, 33 bp, Homo sapien
gtgttttttacttccaagtagaccacagctgca

SEQ ID NO: 793018 - DNA, 33 bp, Homo sapien
gtgttttttacttccaggtagaccacagctgca

SEQ ID NO: 793019 - DNA, 33 bp, Homo sapien
ttcccgtagtatgcaaaggaaatctgctttgat

SEQ ID NO: 793020 - DNA, 33 bp, Homo sapien
ttcccgtagtatgcaagggaaatctgctttgat

SEQ ID NO: 793021 - DNA, 33 bp, Homo sapien
actttttggcatcatacaataagtgacaaaact

SEQ ID NO: 793022 - DNA, 33 bp, Homo sapien
actttttggcatcatataataagtgacaaaact

SEQ ID NO: 793023 - DNA, 33 bp, Homo sapien
atattctgcaacttcaagtttgggtgtggaacc

SEQ ID NO: 793024 - DNA, 33 bp, Homo sapien
atattctgcaacttcatgtttgggtgtggaacc

SEQ ID NO: 793025 - DNA, 33 bp, Homo sapien
attagatgaaaacacaagaaggatttgaaaaga

SEQ ID NO: 793026 - DNA, 33 bp, Homo sapien
attagatgaaaacacaggaaggatttgaaaaga

SEQ ID NO: 793027 - DNA, 33 bp, Homo sapien
agatgctgactttcaaagtatgatgtgctttta

SEQ ID NO: 793028 - DNA, 33 bp, Homo sapien
agatgctgactttcaaggtatgatgtgctttta

SEQ ID NO: 793029 - DNA, 33 bp, Homo sapien
aataattgacagagaaaatacattagatatcac

SEQ ID NO: 793030 - DNA, 33 bp, Homo sapien
aataattgacagagaatatacattagatatcac

SEQ ID NO: 793031 - DNA, 33 bp, Homo sapien
ttctctgtcaattattcaaattatttagcatct

SEQ ID NO: 793032 - DNA, 33 bp, Homo sapien
ttctctgtcaattattgaaattatttagcatct

SEQ ID NO: 793033 - DNA, 33 bp, Homo sapien
tgactactggataatacgagcaaaaacacataa

SEQ ID NO: 793034 - DNA, 33 bp, Homo sapien
tgactactggataatatgagcaaaaacacataa

SEQ ID NO: 793035 - DNA, 33 bp, Homo sapien
tatttgtcaagatcaacgtcaagaagagtattt

SEQ ID NO: 793036 - DNA, 33 bp, Homo sapien
tatttgtcaagatcaatgtcaagaagagtattt

SEQ ID NO: 793037 - DNA, 33 bp, Homo sapien
tgcattctgaagcaaacgaactcaacaataata

SEQ ID NO: 793038 - DNA, 33 bp, Homo sapien
tgcattctgaagcaaatgaactcaacaataata

SEQ ID NO: 793039 - DNA, 33 bp, Homo sapien
aaagaaaagcgttggcccaggatgaaagcagat

SEQ ID NO: 793040 - DNA, 33 bp, Homo sapien
aaagaaaagcgttggctcaggatgaaagcagat

SEQ ID NO: 793041 - DNA, 33 bp, Homo sapien
cagattgaataagcaacggtaattaacagtgaa

SEQ ID NO: 793042 - DNA, 33 bp, Homo sapien
cagattgaataagcaatggtaattaacagtgaa

SEQ ID NO: 793043 - DNA, 33 bp, Homo sapien
atctcttgcatagttaagtcttccctgatgggc

SEQ ID NO: 793044 - DNA, 33 bp, Homo sapien
atctcttgcatagttacgtcttccctgatgggc

SEQ ID NO: 793045 - DNA, 33 bp, Homo sapien
acttggatgtactttccaccatgagactccccc

SEQ ID NO: 793046 - DNA, 33 bp, Homo sapien
acttggatgtactttctaccatgagactccccc

SEQ ID NO: 793047 - DNA, 33 bp, Homo sapien
cttataatttggaaagaccattattaagtgcca

SEQ ID NO: 793048 - DNA, 33 bp, Homo sapien
cttataatttggaaaggccattattaagtgcca

SEQ ID NO: 793049 - DNA, 33 bp, Homo sapien
aattgaactcttcatacactatgccaagagaaa

SEQ ID NO: 793050 - DNA, 33 bp, Homo sapien
aattgaactcttcatatactatgccaagagaaa

SEQ ID NO: 793051 - DNA, 33 bp, Homo sapien
gatcagatatctatcactaacagaaactacaaa

SEQ ID NO: 793052 - DNA, 33 bp, Homo sapien
gatcagatatctatcattaacagaaactacaaa

SEQ ID NO: 793053 - DNA, 33 bp, Homo sapien
aggtcagaggccttgaacctagatgagccatgg

SEQ ID NO: 793054 - DNA, 33 bp, Homo sapien
aggtcagaggccttgagcctagatgagccatgg

SEQ ID NO: 793055 - DNA, 33 bp, Homo sapien
atctgattacagctccactcattgtgattatta

SEQ ID NO: 793056 - DNA, 33 bp, Homo sapien
atctgattacagctccgctcattgtgattatta

SEQ ID NO: 793057 - DNA, 33 bp, Homo sapien
aataatccaagcttaaatcagtgctaaatttac

SEQ ID NO: 793058 - DNA, 33 bp, Homo sapien
aataatccaagcttaagtcagtgctaaatttac

SEQ ID NO: 793059 - DNA, 33 bp, Homo sapien
accagcttttagtagacagagactgactcaagg

SEQ ID NO: 793060 - DNA, 33 bp, Homo sapien
accagcttttagtagatagagactgactcaagg

SEQ ID NO: 793061 - DNA, 33 bp, Homo sapien
ctacatgacagttcaaatgagagccaggcccac

SEQ ID NO: 793062 - DNA, 33 bp, Homo sapien
ctacatgacagttcaactgagagccaggcccac

SEQ ID NO: 793063 - DNA, 33 bp, Homo sapien
cccatttcctggttgaaagatcgctccctttca

SEQ ID NO: 793064 - DNA, 33 bp, Homo sapien
cccatttcctggttgatagatcgctccctttca

SEQ ID NO: 793065 - DNA, 33 bp, Homo sapien
aaggtgtcaacaggggaatttgaaaatgatcaa

SEQ ID NO: 793066 - DNA, 33 bp, Homo sapien
aaggtgtcaacaggggcatttgaaaatgatcaa

SEQ ID NO: 793067 - DNA, 33 bp, Homo sapien
gactggattacattcaactagtcctgtcatttc

SEQ ID NO: 793068 - DNA, 33 bp, Homo sapien
gactggattacattcacctagtcctgtcatttc

SEQ ID NO: 793069 - DNA, 33 bp, Homo sapien
ttaggtatttttagcacgtgtctctaatgtgaa

SEQ ID NO: 793070 - DNA, 33 bp, Homo sapien
ttaggtatttttagcatgtgtctctaatgtgaa

SEQ ID NO: 793071 - DNA, 33 bp, Homo sapien
ttgtcgctgtgaaaacaacactaatgtgactgg

SEQ ID NO: 793072 - DNA, 33 bp, Homo sapien
ttgtcgctgtgaaaacgacactaatgtgactgg

SEQ ID NO: 793073 - DNA, 33 bp, Homo sapien
acgcagcaattgataactgatccaacacactct

SEQ ID NO: 793074 - DNA, 33 bp, Homo sapien
acgcagcaattgataagtgatccaacacactct

SEQ ID NO: 793075 - DNA, 33 bp, Homo sapien
caagctgtataactgaacttgttacactttgct

SEQ ID NO: 793076 - DNA, 33 bp, Homo sapien
caagctgtataactgatcttgttacactttgct

SEQ ID NO: 793077 - DNA, 33 bp, Homo sapien
ttctgtgcacagttccagaggtaaaggacaatg

SEQ ID NO: 793078 - DNA, 33 bp, Homo sapien
ttctgtgcacagttcctgaggtaaaggacaatg

SEQ ID NO: 793079 - DNA, 33 bp, Homo sapien
aagaagaaatgatgtccaccaactaggcatgaa

SEQ ID NO: 793080 - DNA, 33 bp, Homo sapien
aagaagaaatgatgtcgaccaactaggcatgaa

SEQ ID NO: 793081 - DNA, 33 bp, Homo sapien
atgctttatctaataaccaatttgggaagaata

SEQ ID NO: 793082 - DNA, 33 bp, Homo sapien
atgctttatctaataatcaatttgggaagaata

SEQ ID NO: 793083 - DNA, 33 bp, Homo sapien
tgactggctgatctagacatggaatggtatgga

SEQ ID NO: 793084 - DNA, 33 bp, Homo sapien
tgactggctgatctagtcatggaatggtatgga

SEQ ID NO: 793085 - DNA, 33 bp, Homo sapien
tttgaaaattcagttacagcacagtgtaggata

SEQ ID NO: 793086 - DNA, 33 bp, Homo sapien
tttgaaaattcagttatagcacagtgtaggata

SEQ ID NO: 793087 - DNA, 33 bp, Homo sapien
acaggaaactctagaactcataaacaaagacta

SEQ ID NO: 793088 - DNA, 33 bp, Homo sapien
acaggaaactctagaagtcataaacaaagacta

SEQ ID NO: 793089 - DNA, 33 bp, Homo sapien
tgtacacattttggcaagaagaggggattttgt

SEQ ID NO: 793090 - DNA, 33 bp, Homo sapien
tgtacacattttggcaggaagaggggattttgt

SEQ ID NO: 793091 - DNA, 33 bp, Homo sapien
tgtgactactaggcaacaaacatgaagattaaa

SEQ ID NO: 793092 - DNA, 33 bp, Homo sapien
tgtgactactaggcaataaacatgaagattaaa

SEQ ID NO: 793093 - DNA, 33 bp, Homo sapien
actaagttacaggtccaaaaatgatgatgatta

SEQ ID NO: 793094 - DNA, 33 bp, Homo sapien
actaagttacaggtccgaaaatgatgatgatta

SEQ ID NO: 793095 - DNA, 33 bp, Homo sapien
gaaacagtaactagcaaatacacagtgctgggc

SEQ ID NO: 793096 - DNA, 33 bp, Homo sapien
gaaacagtaactagcagatacacagtgctgggc

SEQ ID NO: 793097 - DNA, 33 bp, Homo sapien
aaaacatatggctttacctactttgatattttt

SEQ ID NO: 793098 - DNA, 33 bp, Homo sapien
aaaacatatggctttatctactttgatattttt

SEQ ID NO: 793099 - DNA, 33 bp, Homo sapien
ctttacatgaagagtaacaccatttaaatgcat

SEQ ID NO: 793100 - DNA, 33 bp, Homo sapien
ctttacatgaagagtagcaccatttaaatgcat

SEQ ID NO: 793101 - DNA, 33 bp, Homo sapien
gaattctgaggctgggaactattcctgatctct

SEQ ID NO: 793102 - DNA, 33 bp, Homo sapien
gaattctgaggctggggactattcctgatctct

SEQ ID NO: 793103 - DNA, 33 bp, Homo sapien
caaggttggtgattcaatcagaaagacatttaa

SEQ ID NO: 793104 - DNA, 33 bp, Homo sapien
caaggttggtgattcagtcagaaagacatttaa

SEQ ID NO: 793105 - DNA, 33 bp, Homo sapien
catggagtgctaagtacgggggaatacagtggc

SEQ ID NO: 793106 - DNA, 33 bp, Homo sapien
catggagtgctaagtatgggggaatacagtggc

SEQ ID NO: 793107 - DNA, 33 bp, Homo sapien
tatgatggagcatttcaaagagtaggtatacat

SEQ ID NO: 793108 - DNA, 33 bp, Homo sapien
tatgatggagcatttccaagagtaggtatacat

SEQ ID NO: 793109 - DNA, 33 bp, Homo sapien
attttctgcctcttccacaacttccttcttctc

SEQ ID NO: 793110 - DNA, 33 bp, Homo sapien
attttctgcctcttccgcaacttccttcttctc

SEQ ID NO: 793111 - DNA, 33 bp, Homo sapien
cttaaaaagagttcacaggctacaaagtacttt

SEQ ID NO: 793112 - DNA, 33 bp, Homo sapien
cttaaaaagagttcactggctacaaagtacttt

SEQ ID NO: 793113 - DNA, 33 bp, Homo sapien
ttcttttcaaaagtaacaagctgtaagaattat

SEQ ID NO: 793114 - DNA, 33 bp, Homo sapien
ttcttttcaaaagtaataagctgtaagaattat

SEQ ID NO: 793115 - DNA, 33 bp, Homo sapien
cacaccaccaagaaaactgtgttctcctctgaa

SEQ ID NO: 793116 - DNA, 33 bp, Homo sapien
cacaccaccaagaaaattgtgttctcctctgaa

SEQ ID NO: 793117 - DNA, 33 bp, Homo sapien
tttcagatacagtacccatatgacattgatcat

SEQ ID NO: 793118 - DNA, 33 bp, Homo sapien
tttcagatacagtacctatatgacattgatcat

SEQ ID NO: 793119 - DNA, 33 bp, Homo sapien
ttttagctgtcccacaggatggatgtataggca

SEQ ID NO: 793120 - DNA, 33 bp, Homo sapien
ttttagctgtcccacatgatggatgtataggca

SEQ ID NO: 793121 - DNA, 33 bp, Homo sapien
tgagtgtagtttaacaaaagcccagagaatagt

SEQ ID NO: 793122 - DNA, 33 bp, Homo sapien
tgagtgtagtttaacagaagcccagagaatagt

SEQ ID NO: 793123 - DNA, 33 bp, Homo sapien
atgtttaattacttcaaaaatgcaagagttccc

SEQ ID NO: 793124 - DNA, 33 bp, Homo sapien
atgtttaattacttcagaaatgcaagagttccc

SEQ ID NO: 793125 - DNA, 33 bp, Homo sapien
aaggggaactgcaagaagaagatgtcatgctcc

SEQ ID NO: 793126 - DNA, 33 bp, Homo sapien
aaggggaactgcaagaggaagatgtcatgctcc

SEQ ID NO: 793127 - DNA, 33 bp, Homo sapien
caaggaaagtgaaggaaaaaatgatcaacatga

SEQ ID NO: 793128 - DNA, 33 bp, Homo sapien
caaggaaagtgaaggagaaaatgatcaacatga

SEQ ID NO: 793129 - DNA, 33 bp, Homo sapien
ttagttggtattttccgctgtatagtactaagt

SEQ ID NO: 793130 - DNA, 33 bp, Homo sapien
ttagttggtattttcctctgtatagtactaagt

SEQ ID NO: 793131 - DNA, 33 bp, Homo sapien
gaagcttaggggcaccaataaaaactatagctg

SEQ ID NO: 793132 - DNA, 33 bp, Homo sapien
gaagcttaggggcaccgataaaaactatagctg

SEQ ID NO: 793133 - DNA, 33 bp, Homo sapien
tgcagcaactgtggaaaacggtatactggttcc

SEQ ID NO: 793134 - DNA, 33 bp, Homo sapien
tgcagcaactgtggaagacggtatactggttcc

SEQ ID NO: 793135 - DNA, 33 bp, Homo sapien
attttctacagatcttaaagagttatatgccat

SEQ ID NO: 793136 - DNA, 33 bp, Homo sapien
attttctacagatcttgaagagttatatgccat

SEQ ID NO: 793137 - DNA, 33 bp, Homo sapien
gaacttgttcccaacactgaagagtttttagaa

SEQ ID NO: 793138 - DNA, 33 bp, Homo sapien
gaacttgttcccaacattgaagagtttttagaa

SEQ ID NO: 793139 - DNA, 33 bp, Homo sapien
tagtttagtgctagtaataaatatcagtctgat

SEQ ID NO: 793140 - DNA, 33 bp, Homo sapien
tagtttagtgctagtagtaaatatcagtctgat

SEQ ID NO: 793141 - DNA, 33 bp, Homo sapien
attatgtcttttaaggccctgcaagaactgaac

SEQ ID NO: 793142 - DNA, 33 bp, Homo sapien
attatgtcttttaaggtcctgcaagaactgaac

SEQ ID NO: 793143 - DNA, 33 bp, Homo sapien
cttcctccacatttctcaattgtgcatacctta

SEQ ID NO: 793144 - DNA, 33 bp, Homo sapien
cttcctccacatttctgaattgtgcatacctta

SEQ ID NO: 793145 - DNA, 33 bp, Homo sapien
aactatcatttgaccaagcagtcctattactgg

SEQ ID NO: 793146 - DNA, 33 bp, Homo sapien
aactatcatttgaccaggcagtcctattactgg

SEQ ID NO: 793147 - DNA, 33 bp, Homo sapien
ccttagttctgaaccagaaacacttgcttccag

SEQ ID NO: 793148 - DNA, 33 bp, Homo sapien
ccttagttctgaaccataaacacttgcttccag

SEQ ID NO: 793149 - DNA, 33 bp, Homo sapien
catttcttgcccatcacaaccttttgcagggca

SEQ ID NO: 793150 - DNA, 33 bp, Homo sapien
catttcttgcccatcagaaccttttgcagggca

SEQ ID NO: 793151 - DNA, 33 bp, Homo sapien
ttcattctacaaaaacaatgatgaaaatgatca

SEQ ID NO: 793152 - DNA, 33 bp, Homo sapien
ttcattctacaaaaaccatgatgaaaatgatca

SEQ ID NO: 793153 - DNA, 33 bp, Homo sapien
tttcctcatccggaataaatagtgacaatatag

SEQ ID NO: 793154 - DNA, 33 bp, Homo sapien
tttcctcatccggaatgaatagtgacaatatag

SEQ ID NO: 793155 - DNA, 33 bp, Homo sapien
attgggctgtaccaataaatagcatcttaagag

SEQ ID NO: 793156 - DNA, 33 bp, Homo sapien
attgggctgtaccaatcaatagcatcttaagag

SEQ ID NO: 793157 - DNA, 33 bp, Homo sapien
agttctgcacgtgatcaaagcatcggtgttcag

SEQ ID NO: 793158 - DNA, 33 bp, Homo sapien
agttctgcacgtgatcgaagcatcggtgttcag

SEQ ID NO: 793159 - DNA, 33 bp, Homo sapien
tcttgtggagggagtccagggagcgaaagagtg

SEQ ID NO: 793160 - DNA, 33 bp, Homo sapien
tcttgtggagggagtcgagggagcgaaagagtg

SEQ ID NO: 793161 - DNA, 33 bp, Homo sapien
tacagggcacctctcacggtagggacaaggaag

SEQ ID NO: 793162 - DNA, 33 bp, Homo sapien
tacagggcacctctcatggtagggacaaggaag

SEQ ID NO: 793163 - DNA, 33 bp, Homo sapien
tgaaaagcaggtcctagtaatgtcctcatttta

SEQ ID NO: 793164 - DNA, 33 bp, Homo sapien
tgaaaagcaggtcctattaatgtcctcatttta

SEQ ID NO: 793165 - DNA, 33 bp, Homo sapien
ctagaaaatatctagaaatgggctacaaatcca

SEQ ID NO: 793166 - DNA, 33 bp, Homo sapien
ctagaaaatatctagacatgggctacaaatcca

SEQ ID NO: 793167 - DNA, 33 bp, Homo sapien
gagcttgggcctggaacgtaagtttgggaggca

SEQ ID NO: 793168 - DNA, 33 bp, Homo sapien
gagcttgggcctggaatgtaagtttgggaggca

SEQ ID NO: 793169 - DNA, 33 bp, Homo sapien
ctgactatactgacaactgattgggcatagggg

SEQ ID NO: 793170 - DNA, 33 bp, Homo sapien
ctgactatactgacaattgattgggcatagggg

SEQ ID NO: 793171 - DNA, 33 bp, Homo sapien
tatcatcattccaggcgcttttctgtgtgctta

SEQ ID NO: 793172 - DNA, 33 bp, Homo sapien
tatcatcattccaggctcttttctgtgtgctta

SEQ ID NO: 793173 - DNA, 33 bp, Homo sapien
tcctgctgggtgtagaagtgcccactggataca

SEQ ID NO: 793174 - DNA, 33 bp, Homo sapien
tcctgctgggtgtagaggtgcccactggataca

SEQ ID NO: 793175 - DNA, 33 bp, Homo sapien
acaaaagaacacaaaaatatggtttctaaggta

SEQ ID NO: 793176 - DNA, 33 bp, Homo sapien
acaaaagaacacaaaattatggtttctaaggta

SEQ ID NO: 793177 - DNA, 33 bp, Homo sapien
atcttacggaagtgcaaaattattcaggggtgt

SEQ ID NO: 793178 - DNA, 33 bp, Homo sapien
atcttacggaagtgcagaattattcaggggtgt

SEQ ID NO: 793179 - DNA, 33 bp, Homo sapien
aagtgactgtagttgaccagtgccttctgtgca

SEQ ID NO: 793180 - DNA, 33 bp, Homo sapien
aagtgactgtagttgatcagtgccttctgtgca

SEQ ID NO: 793181 - DNA, 33 bp, Homo sapien
gcaaccaccctgttgacgtgtacactatggaac

SEQ ID NO: 793182 - DNA, 33 bp, Homo sapien
gcaaccaccctgttgatgtgtacactatggaac

SEQ ID NO: 793183 - DNA, 33 bp, Homo sapien
tataattaatttgctccacttcttattctcatt

SEQ ID NO: 793184 - DNA, 33 bp, Homo sapien
tataattaatttgctctacttcttattctcatt

SEQ ID NO: 793185 - DNA, 33 bp, Homo sapien
ttcaatctatggtaatgacatgctccgataaaa

SEQ ID NO: 793186 - DNA, 33 bp, Homo sapien
ttcaatctatggtaattacatgctccgataaaa

SEQ ID NO: 793187 - DNA, 33 bp, Homo sapien
ctcttctgctccaactaacttaccacaagatgg

SEQ ID NO: 793188 - DNA, 33 bp, Homo sapien
ctcttctgctccaactgacttaccacaagatgg

SEQ ID NO: 793189 - DNA, 33 bp, Homo sapien
cagcgttgtccctagccagccaatcttccccac

SEQ ID NO: 793190 - DNA, 33 bp, Homo sapien
cagcgttgtccctagctagccaatcttccccac

SEQ ID NO: 793191 - DNA, 33 bp, Homo sapien
actatctgtggtatccaactaaaaatactcaac

SEQ ID NO: 793192 - DNA, 33 bp, Homo sapien
actatctgtggtatccgactaaaaatactcaac

SEQ ID NO: 793193 - DNA, 33 bp, Homo sapien
ttaagtggctttgaggaaggaatatgacattcc

SEQ ID NO: 793194 - DNA, 33 bp, Homo sapien
ttaagtggctttgaggtaggaatatgacattcc

SEQ ID NO: 793195 - DNA, 33 bp, Homo sapien
ttactcccttcaggaaaatttcttgaatgaata

SEQ ID NO: 793196 - DNA, 33 bp, Homo sapien
ttactcccttcaggaacatttcttgaatgaata

SEQ ID NO: 793197 - DNA, 33 bp, Homo sapien
aagtttccaatccgaggatggtgagattgctgc

SEQ ID NO: 793198 - DNA, 33 bp, Homo sapien
aagtttccaatccgagtatggtgagattgctgc

SEQ ID NO: 793199 - DNA, 33 bp, Homo sapien
tcagccttggctactcgcaactgcaagcctatg

SEQ ID NO: 793200 - DNA, 33 bp, Homo sapien
tcagccttggctactctcaactgcaagcctatg

SEQ ID NO: 793201 - DNA, 33 bp, Homo sapien
tgtggattcaatcaacagcagatcaataatatt

SEQ ID NO: 793202 - DNA, 33 bp, Homo sapien
tgtggattcaatcaacggcagatcaataatatt

SEQ ID NO: 793203 - DNA, 33 bp, Homo sapien
gtcatttttttttctaacctgctgaggctgaat

SEQ ID NO: 793204 - DNA, 33 bp, Homo sapien
gtcatttttttttctatcctgctgaggctgaat

SEQ ID NO: 793205 - DNA, 33 bp, Homo sapien
tggagtaactgcagcaatgagtgcccgggctgt

SEQ ID NO: 793206 - DNA, 33 bp, Homo sapien
tggagtaactgcagcagtgagtgcccgggctgt

SEQ ID NO: 793207 - DNA, 33 bp, Homo sapien
gaggcttataatcacaccaaaagacagaaccct

SEQ ID NO: 793208 - DNA, 33 bp, Homo sapien
gaggcttataatcacagcaaaagacagaaccct

SEQ ID NO: 793209 - DNA, 33 bp, Homo sapien
tcaaggattaatatgagaattgcatcagttatg

SEQ ID NO: 793210 - DNA, 33 bp, Homo sapien
tcaaggattaatatgataattgcatcagttatg

SEQ ID NO: 793211 - DNA, 33 bp, Homo sapien
caagcttctaaatgaaatgaatgaaaaatgtct

SEQ ID NO: 793212 - DNA, 33 bp, Homo sapien
caagcttctaaatgaactgaatgaaaaatgtct

SEQ ID NO: 793213 - DNA, 33 bp, Homo sapien
tgttaagcactttgaacaatacagagatgaaaa

SEQ ID NO: 793214 - DNA, 33 bp, Homo sapien
tgttaagcactttgaagaatacagagatgaaaa

SEQ ID NO: 793215 - DNA, 33 bp, Homo sapien
tgtaagagacaaaaaaatctagattggtcttga

SEQ ID NO: 793216 - DNA, 33 bp, Homo sapien
tgtaagagacaaaaaagtctagattggtcttga

SEQ ID NO: 793217 - DNA, 33 bp, Homo sapien
attctcacttcctagaaccagtaggtgatcagt

SEQ ID NO: 793218 - DNA, 33 bp, Homo sapien
attctcacttcctagagccagtaggtgatcagt

SEQ ID NO: 793219 - DNA, 33 bp, Homo sapien
tgttctccagatctcaaacagcagaggtatggg

SEQ ID NO: 793220 - DNA, 33 bp, Homo sapien
tgttctccagatctcacacagcagaggtatggg

SEQ ID NO: 793221 - DNA, 33 bp, Homo sapien
gaagcattgctcccccaatcccatgcacatttg

SEQ ID NO: 793222 - DNA, 33 bp, Homo sapien
gaagcattgctccccccatcccatgcacatttg

SEQ ID NO: 793223 - DNA, 33 bp, Homo sapien
aatgctggaactttgacccaattatcagcaagt

SEQ ID NO: 793224 - DNA, 33 bp, Homo sapien
aatgctggaactttgatccaattatcagcaagt

SEQ ID NO: 793225 - DNA, 33 bp, Homo sapien
gtctccaagcccttggaatatagtgcttgataa

SEQ ID NO: 793226 - DNA, 33 bp, Homo sapien
gtctccaagcccttgggatatagtgcttgataa

SEQ ID NO: 793227 - DNA, 33 bp, Homo sapien
aactattaactagcaaccacattaaaaagcaga

SEQ ID NO: 793228 - DNA, 33 bp, Homo sapien
aactattaactagcaatcacattaaaaagcaga

SEQ ID NO: 793229 - DNA, 33 bp, Homo sapien
ttgatgcaggggtgaacacataatggatagact

SEQ ID NO: 793230 - DNA, 33 bp, Homo sapien
ttgatgcaggggtgaatacataatggatagact

SEQ ID NO: 793231 - DNA, 33 bp, Homo sapien
ggatgctgggctgtcaagaagcaagacaaatcc

SEQ ID NO: 793232 - DNA, 33 bp, Homo sapien
ggatgctgggctgtcaggaagcaagacaaatcc

SEQ ID NO: 793233 - DNA, 33 bp, Homo sapien
cagtaagaggagaaaaatcagattgagagcctg

SEQ ID NO: 793234 - DNA, 33 bp, Homo sapien
cagtaagaggagaaaagtcagattgagagcctg

SEQ ID NO: 793235 - DNA, 33 bp, Homo sapien
ttagttttagaaattaagagggaatcaagagtt

SEQ ID NO: 793236 - DNA, 33 bp, Homo sapien
ttagttttagaaattacgagggaatcaagagtt

SEQ ID NO: 793237 - DNA, 33 bp, Homo sapien
agattggtgatagtcacggaggtatccaaggga

SEQ ID NO: 793238 - DNA, 33 bp, Homo sapien
agattggtgatagtcatggaggtatccaaggga

SEQ ID NO: 793239 - DNA, 33 bp, Homo sapien
aataaatcagtgactcagacagtctattaacta

SEQ ID NO: 793240 - DNA, 33 bp, Homo sapien
aataaatcagtgactcggacagtctattaacta

SEQ ID NO: 793241 - DNA, 33 bp, Homo sapien
ctactaccaagattcaactcagaagaaatagaa

SEQ ID NO: 793242 - DNA, 33 bp, Homo sapien
ctactaccaagattcacctcagaagaaatagaa

SEQ ID NO: 793243 - DNA, 33 bp, Homo sapien
tcattgtactgttttacgtttgtgctccgataa

SEQ ID NO: 793244 - DNA, 33 bp, Homo sapien
tcattgtactgttttatgtttgtgctccgataa

SEQ ID NO: 793245 - DNA, 33 bp, Homo sapien
tcaagccgtatgacacagtaaagctgaccttca

SEQ ID NO: 793246 - DNA, 33 bp, Homo sapien
tcaagccgtatgacacggtaaagctgaccttca

SEQ ID NO: 793247 - DNA, 33 bp, Homo sapien
tcgtgtatgtgctctaaacttagtgattgcata

SEQ ID NO: 793248 - DNA, 33 bp, Homo sapien
tcgtgtatgtgctctagacttagtgattgcata

SEQ ID NO: 793249 - DNA, 33 bp, Homo sapien
taaatgatatgagtgaccaagttagcaaataag

SEQ ID NO: 793250 - DNA, 33 bp, Homo sapien
taaatgatatgagtgagcaagttagcaaataag

SEQ ID NO: 793251 - DNA, 33 bp, Homo sapien
acaggtaaccacactcaaactttcaaacattct

SEQ ID NO: 793252 - DNA, 33 bp, Homo sapien
acaggtaaccacactcgaactttcaaacattct

SEQ ID NO: 793253 - DNA, 33 bp, Homo sapien
attgtgttccatcttaccatttttttttggtta

SEQ ID NO: 793254 - DNA, 33 bp, Homo sapien
attgtgttccatcttatcatttttttttggtta

SEQ ID NO: 793255 - DNA, 33 bp, Homo sapien
actccaatgataataggaacagctttcatttat

SEQ ID NO: 793256 - DNA, 33 bp, Homo sapien
actccaatgataatagtaacagctttcatttat

SEQ ID NO: 793257 - DNA, 33 bp, Homo sapien
tgtttcctcaaccccaatatttcacctttcctg

SEQ ID NO: 793258 - DNA, 33 bp, Homo sapien
tgtttcctcaaccccagtatttcacctttcctg

SEQ ID NO: 793259 - DNA, 33 bp, Homo sapien
tggttccaactactaactcctcaaatatgcttt

SEQ ID NO: 793260 - DNA, 33 bp, Homo sapien
tggttccaactactaattcctcaaatatgcttt

SEQ ID NO: 793261 - DNA, 33 bp, Homo sapien
attttgctcagcaacactgtattcaacacatgg

SEQ ID NO: 793262 - DNA, 33 bp, Homo sapien
attttgctcagcaacattgtattcaacacatgg

SEQ ID NO: 793263 - DNA, 33 bp, Homo sapien
aagaaacatcatacacaacatggtaacagctaa

SEQ ID NO: 793264 - DNA, 33 bp, Homo sapien
aagaaacatcatacacgacatggtaacagctaa

SEQ ID NO: 793265 - DNA, 33 bp, Homo sapien
gaatcaaaagaaagtaaggactaatggccttta

SEQ ID NO: 793266 - DNA, 33 bp, Homo sapien
gaatcaaaagaaagtatggactaatggccttta

SEQ ID NO: 793267 - DNA, 33 bp, Homo sapien
gtattcaggatgggcacggtagttcatgtctgt

SEQ ID NO: 793268 - DNA, 33 bp, Homo sapien
gtattcaggatgggcatggtagttcatgtctgt

SEQ ID NO: 793269 - DNA, 33 bp, Homo sapien
tcactttggacaagaactagttatcagaatgaa

SEQ ID NO: 793270 - DNA, 33 bp, Homo sapien
tcactttggacaagaattagttatcagaatgaa

SEQ ID NO: 793271 - DNA, 33 bp, Homo sapien
ttgaatacagggcccaagactgcaacctcatat

SEQ ID NO: 793272 - DNA, 33 bp, Homo sapien
ttgaatacagggcccatgactgcaacctcatat

SEQ ID NO: 793273 - DNA, 33 bp, Homo sapien
tgggccctgtattcaacatggcagtcattgctg

SEQ ID NO: 793274 - DNA, 33 bp, Homo sapien
tgggccctgtattcaagatggcagtcattgctg

SEQ ID NO: 793275 - DNA, 33 bp, Homo sapien
gcctttgctaggtgacacaaatgccaagtgatt

SEQ ID NO: 793276 - DNA, 33 bp, Homo sapien
gcctttgctaggtgactcaaatgccaagtgatt

SEQ ID NO: 793277 - DNA, 33 bp, Homo sapien
attctctccttacaggcattttgcccatcagca

SEQ ID NO: 793278 - DNA, 33 bp, Homo sapien
attctctccttacaggtattttgcccatcagca

SEQ ID NO: 793279 - DNA, 33 bp, Homo sapien
tgcatcattgttcaaggctcctcctgctcaata

SEQ ID NO: 793280 - DNA, 33 bp, Homo sapien
tgcatcattgttcaagtctcctcctgctcaata

SEQ ID NO: 793281 - DNA, 33 bp, Homo sapien
acaggtttgcgatttacgcattttttgattaaa

SEQ ID NO: 793282 - DNA, 33 bp, Homo sapien
acaggtttgcgatttatgcattttttgattaaa

SEQ ID NO: 793283 - DNA, 33 bp, Homo sapien
tgatattccaggaaccaatgaagtagatacttc

SEQ ID NO: 793284 - DNA, 33 bp, Homo sapien
tgatattccaggaaccgatgaagtagatacttc

SEQ ID NO: 793285 - DNA, 33 bp, Homo sapien
taaccctgaagaggtgacacagttaataaaaaa

SEQ ID NO: 793286 - DNA, 33 bp, Homo sapien
taaccctgaagaggtggcacagttaataaaaaa

SEQ ID NO: 793287 - DNA, 33 bp, Homo sapien
caaacccatcaagctacattttcacaaaactag

SEQ ID NO: 793288 - DNA, 33 bp, Homo sapien
caaacccatcaagctatattttcacaaaactag

SEQ ID NO: 793289 - DNA, 33 bp, Homo sapien
atatggctataaaagaacatcccactgccactc

SEQ ID NO: 793290 - DNA, 33 bp, Homo sapien
atatggctataaaagagcatcccactgccactc

SEQ ID NO: 793291 - DNA, 33 bp, Homo sapien
tctacgtaaagcctaccgctaacattgatggta

SEQ ID NO: 793292 - DNA, 33 bp, Homo sapien
tctacgtaaagcctactgctaacattgatggta

SEQ ID NO: 793293 - DNA, 33 bp, Homo sapien
ggggtggaaatccaaacaggacatcaacagaac

SEQ ID NO: 793294 - DNA, 33 bp, Homo sapien
ggggtggaaatccaaagaggacatcaacagaac

SEQ ID NO: 793295 - DNA, 33 bp, Homo sapien
ttataatgtacattaactcattcatctggcaat

SEQ ID NO: 793296 - DNA, 33 bp, Homo sapien
ttataatgtacattaattcattcatctggcaat

SEQ ID NO: 793297 - DNA, 33 bp, Homo sapien
gtggggtgtccatatacaggggtgtggagtatg

SEQ ID NO: 793298 - DNA, 33 bp, Homo sapien
gtggggtgtccatatataggggtgtggagtatg

SEQ ID NO: 793299 - DNA, 33 bp, Homo sapien
caaaccactggagagacagatgaaaataatgaa

SEQ ID NO: 793300 - DNA, 33 bp, Homo sapien
caaaccactggagagatagatgaaaataatgaa

SEQ ID NO: 793301 - DNA, 33 bp, Homo sapien
aaaaggctggtagatacctttagtgctgatgta

SEQ ID NO: 793302 - DNA, 33 bp, Homo sapien
aaaaggctggtagatatctttagtgctgatgta

SEQ ID NO: 793303 - DNA, 33 bp, Homo sapien
ccatgacaaactccaccacatacctatgtttcc

SEQ ID NO: 793304 - DNA, 33 bp, Homo sapien
ccatgacaaactccactacatacctatgtttcc

SEQ ID NO: 793305 - DNA, 33 bp, Homo sapien
tatgtttccatcatcccgctttattaagcttag

SEQ ID NO: 793306 - DNA, 33 bp, Homo sapien
tatgtttccatcatcctgctttattaagcttag

SEQ ID NO: 793307 - DNA, 33 bp, Homo sapien
atgattacaaatacagccatagtcccctgttcc

SEQ ID NO: 793308 - DNA, 33 bp, Homo sapien
atgattacaaatacagtcatagtcccctgttcc

SEQ ID NO: 793309 - DNA, 33 bp, Homo sapien
aggaaaggctctcagcagaagtgacattggagt

SEQ ID NO: 793310 - DNA, 33 bp, Homo sapien
aggaaaggctctcagcggaagtgacattggagt

SEQ ID NO: 793311 - DNA, 33 bp, Homo sapien
tttaacaaggtaccaacgtctgtgaaatgtcac

SEQ ID NO: 793312 - DNA, 33 bp, Homo sapien
tttaacaaggtaccaatgtctgtgaaatgtcac

SEQ ID NO: 793313 - DNA, 33 bp, Homo sapien
ttaaacaatactgtaaataaataacgtgtatag

SEQ ID NO: 793314 - DNA, 33 bp, Homo sapien
ttaaacaatactgtaagtaaataacgtgtatag

SEQ ID NO: 793315 - DNA, 33 bp, Homo sapien
gtgttcctaagttaccaatcactactgtgtgca

SEQ ID NO: 793316 - DNA, 33 bp, Homo sapien
gtgttcctaagttaccgatcactactgtgtgca

SEQ ID NO: 793317 - DNA, 33 bp, Homo sapien
tcctccctggaataaaatgaacacttggttatt

SEQ ID NO: 793318 - DNA, 33 bp, Homo sapien
tcctccctggaataaagtgaacacttggttatt

SEQ ID NO: 793319 - DNA, 33 bp, Homo sapien
tcaacacgtgctttccaaagtgacacagcaagt

SEQ ID NO: 793320 - DNA, 33 bp, Homo sapien
tcaacacgtgctttccgaagtgacacagcaagt

SEQ ID NO: 793321 - DNA, 33 bp, Homo sapien
aaaaccagcaagcttacattgctatctcatggc

SEQ ID NO: 793322 - DNA, 33 bp, Homo sapien
aaaaccagcaagcttatattgctatctcatggc

SEQ ID NO: 793323 - DNA, 33 bp, Homo sapien
ggcagatgatagaagaacctgacagtgataact

SEQ ID NO: 793324 - DNA, 33 bp, Homo sapien
ggcagatgatagaagagcctgacagtgataact

SEQ ID NO: 793325 - DNA, 33 bp, Homo sapien
aatggtgtaatatttgcagtatgaacatcatca

SEQ ID NO: 793326 - DNA, 33 bp, Homo sapien
aatggtgtaatatttgtagtatgaacatcatca

SEQ ID NO: 793327 - DNA, 33 bp, Homo sapien
gataccaaggccagacaaggaacttcaaggaaa

SEQ ID NO: 793328 - DNA, 33 bp, Homo sapien
gataccaaggccagacgaggaacttcaaggaaa

SEQ ID NO: 793329 - DNA, 33 bp, Homo sapien
acctaccgtggccacaatgtctggcagggaata

SEQ ID NO: 793330 - DNA, 33 bp, Homo sapien
acctaccgtggccacagtgtctggcagggaata

SEQ ID NO: 793331 - DNA, 33 bp, Homo sapien
ggaagtagtattctcacgctgaatcgcaataag

SEQ ID NO: 793332 - DNA, 33 bp, Homo sapien
ggaagtagtattctcaggctgaatcgcaataag

SEQ ID NO: 793333 - DNA, 33 bp, Homo sapien
gaatccacatatcttccatacggatttatctaa

SEQ ID NO: 793334 - DNA, 33 bp, Homo sapien
gaatccacatatcttctatacggatttatctaa

SEQ ID NO: 793335 - DNA, 33 bp, Homo sapien
gtgggaggcctcaccccactcatggcccagacc

SEQ ID NO: 793336 - DNA, 33 bp, Homo sapien
gtgggaggcctcaccctactcatggcccagacc

SEQ ID NO: 793337 - DNA, 33 bp, Homo sapien
cacttactaactgcataaccttgtgcaagctac

SEQ ID NO: 793338 - DNA, 33 bp, Homo sapien
cacttactaactgcatgaccttgtgcaagctac

SEQ ID NO: 793339 - DNA, 33 bp, Homo sapien
ccctggaacaaccttcaatcaaagaggatagta

SEQ ID NO: 793340 - DNA, 33 bp, Homo sapien
ccctggaacaaccttcgatcaaagaggatagta

SEQ ID NO: 793341 - DNA, 33 bp, Homo sapien
ctcatgcctctctaaaatatgtaaaaccaagct

SEQ ID NO: 793342 - DNA, 33 bp, Homo sapien
ctcatgcctctctaaagtatgtaaaaccaagct

SEQ ID NO: 793343 - DNA, 33 bp, Homo sapien
tatttcaaaaggggtcaaatctataccatatct

SEQ ID NO: 793344 - DNA, 33 bp, Homo sapien
tatttcaaaaggggtcgaatctataccatatct

SEQ ID NO: 793345 - DNA, 33 bp, Homo sapien
ataggttaacactaaaaatttcctgtgaatgag

SEQ ID NO: 793346 - DNA, 33 bp, Homo sapien
ataggttaacactaaacatttcctgtgaatgag

SEQ ID NO: 793347 - DNA, 33 bp, Homo sapien
ctttaaaaggcttacacgatggttcagtaacat

SEQ ID NO: 793348 - DNA, 33 bp, Homo sapien
ctttaaaaggcttacatgatggttcagtaacat

SEQ ID NO: 793349 - DNA, 33 bp, Homo sapien
ggcttctagctttatccatgtctctgcaaagca

SEQ ID NO: 793350 - DNA, 33 bp, Homo sapien
ggcttctagctttatctatgtctctgcaaagca

SEQ ID NO: 793351 - DNA, 33 bp, Homo sapien
atgaggaaaatgtgtccaggtaatgtcagagac

SEQ ID NO: 793352 - DNA, 33 bp, Homo sapien
atgaggaaaatgtgtcgaggtaatgtcagagac

SEQ ID NO: 793353 - DNA, 33 bp, Homo sapien
ctatgaataaataacccaaaggagctgaagtga

SEQ ID NO: 793354 - DNA, 33 bp, Homo sapien
ctatgaataaataaccgaaaggagctgaagtga

SEQ ID NO: 793355 - DNA, 33 bp, Homo sapien
ttatgtagtcatggcaatactgtggaaatgggt

SEQ ID NO: 793356 - DNA, 33 bp, Homo sapien
ttatgtagtcatggcattactgtggaaatgggt

SEQ ID NO: 793357 - DNA, 33 bp, Homo sapien
atttgaaaagaatataataagtgaaagcataag

SEQ ID NO: 793358 - DNA, 33 bp, Homo sapien
atttgaaaagaatatagtaagtgaaagcataag

SEQ ID NO: 793359 - DNA, 33 bp, Homo sapien
agagatggaatgatccggagtgcattatgccaa

SEQ ID NO: 793360 - DNA, 33 bp, Homo sapien
agagatggaatgatcctgagtgcattatgccaa

SEQ ID NO: 793361 - DNA, 33 bp, Homo sapien
ttatactgctcttatacaacttatgatgcatta

SEQ ID NO: 793362 - DNA, 33 bp, Homo sapien
ttatactgctcttatagaacttatgatgcatta

SEQ ID NO: 793363 - DNA, 33 bp, Homo sapien
ctcctgccagtaccaacgaggaagccagagggt

SEQ ID NO: 793364 - DNA, 33 bp, Homo sapien
ctcctgccagtaccaatgaggaagccagagggt

SEQ ID NO: 793365 - DNA, 33 bp, Homo sapien
aaaagcaaagaatcatcagtctacatttccatc

SEQ ID NO: 793366 - DNA, 33 bp, Homo sapien
aaaagcaaagaatcattagtctacatttccatc

SEQ ID NO: 793367 - DNA, 33 bp, Homo sapien
caaatttttcactcacaaaatgtgttttttcac

SEQ ID NO: 793368 - DNA, 33 bp, Homo sapien
caaatttttcactcacgaaatgtgttttttcac

SEQ ID NO: 793369 - DNA, 33 bp, Homo sapien
ctttgagcatgggtaaaaagagtgacagagttt

SEQ ID NO: 793370 - DNA, 33 bp, Homo sapien
ctttgagcatgggtaagaagagtgacagagttt

SEQ ID NO: 793371 - DNA, 33 bp, Homo sapien
ctgtcaagctttgctccccttcaggactgggag

SEQ ID NO: 793372 - DNA, 33 bp, Homo sapien
ctgtcaagctttgctctccttcaggactgggag

SEQ ID NO: 793373 - DNA, 33 bp, Homo sapien
gagagaagcttccaaaatgcaggccacaaggcg

SEQ ID NO: 793374 - DNA, 33 bp, Homo sapien
gagagaagcttccaaagtgcaggccacaaggcg

SEQ ID NO: 793375 - DNA, 33 bp, Homo sapien
ccttccctcctttttcgctgagcatttaattca

SEQ ID NO: 793376 - DNA, 33 bp, Homo sapien
ccttccctcctttttctctgagcatttaattca

SEQ ID NO: 793377 - DNA, 33 bp, Homo sapien
ctcagaggctcaccaacgccctcgatctagtac

SEQ ID NO: 793378 - DNA, 33 bp, Homo sapien
ctcagaggctcaccaatgccctcgatctagtac

SEQ ID NO: 793379 - DNA, 33 bp, Homo sapien
cacctacttaccacggacaacctattattttaa

SEQ ID NO: 793380 - DNA, 33 bp, Homo sapien
cacctacttaccacgggcaacctattattttaa

SEQ ID NO: 793381 - DNA, 33 bp, Homo sapien
ggaatccacattaacactgaattcttacccgta

SEQ ID NO: 793382 - DNA, 33 bp, Homo sapien
ggaatccacattaacattgaattcttacccgta

SEQ ID NO: 793383 - DNA, 33 bp, Homo sapien
ctacttataattgagaacatgcagtgtttggtt

SEQ ID NO: 793384 - DNA, 33 bp, Homo sapien
ctacttataattgagagcatgcagtgtttggtt

SEQ ID NO: 793385 - DNA, 33 bp, Homo sapien
ctacagccgtagtgcacctgaactgaatctctc

SEQ ID NO: 793386 - DNA, 33 bp, Homo sapien
ctacagccgtagtgcatctgaactgaatctctc

SEQ ID NO: 793387 - DNA, 33 bp, Homo sapien
gtggcctaaaatcacaactctaaaatcagctca

SEQ ID NO: 793388 - DNA, 33 bp, Homo sapien
gtggcctaaaatcacagctctaaaatcagctca

SEQ ID NO: 793389 - DNA, 33 bp, Homo sapien
tcaaccttttccataactgtcttaaactgaact

SEQ ID NO: 793390 - DNA, 33 bp, Homo sapien
tcaaccttttccataattgtcttaaactgaact

SEQ ID NO: 793391 - DNA, 33 bp, Homo sapien
accaagaaagatgaaaagctaagaagggataat

SEQ ID NO: 793392 - DNA, 33 bp, Homo sapien
accaagaaagatgaaaggctaagaagggataat

SEQ ID NO: 793393 - DNA, 33 bp, Homo sapien
tgtaacttagtaatggcattattggaacatatg

SEQ ID NO: 793394 - DNA, 33 bp, Homo sapien
tgtaacttagtaatgggattattggaacatatg

SEQ ID NO: 793395 - DNA, 33 bp, Homo sapien
ctaaattgatctgaaacttaagcaaagtaatca

SEQ ID NO: 793396 - DNA, 33 bp, Homo sapien
ctaaattgatctgaaatttaagcaaagtaatca

SEQ ID NO: 793397 - DNA, 33 bp, Homo sapien
ggtgagatcaatgccaaaataattcacaacagt

SEQ ID NO: 793398 - DNA, 33 bp, Homo sapien
ggtgagatcaatgccataataattcacaacagt

SEQ ID NO: 793399 - DNA, 33 bp, Homo sapien
acattttaagtatttacggattccaatgtaata

SEQ ID NO: 793400 - DNA, 33 bp, Homo sapien
acattttaagtatttatggattccaatgtaata

SEQ ID NO: 793401 - DNA, 33 bp, Homo sapien
aaaacatacaatagaactccatcactgctgagg

SEQ ID NO: 793402 - DNA, 33 bp, Homo sapien
aaaacatacaatagaagtccatcactgctgagg

SEQ ID NO: 793403 - DNA, 33 bp, Homo sapien
tacttttttgtaaagacaccagaatctatactc

SEQ ID NO: 793404 - DNA, 33 bp, Homo sapien
tacttttttgtaaagagaccagaatctatactc

SEQ ID NO: 793405 - DNA, 33 bp, Homo sapien
attgatttatgttacccagaaccaaagtaactt

SEQ ID NO: 793406 - DNA, 33 bp, Homo sapien
attgatttatgttacctagaaccaaagtaactt

SEQ ID NO: 793407 - DNA, 33 bp, Homo sapien
agaagggtccccagatcagaggaacccaaaggc

SEQ ID NO: 793408 - DNA, 33 bp, Homo sapien
agaagggtccccagatgagaggaacccaaaggc

SEQ ID NO: 793409 - DNA, 33 bp, Homo sapien
aaagtggcttagtctccagatacacccaaaaga

SEQ ID NO: 793410 - DNA, 33 bp, Homo sapien
aaagtggcttagtctctagatacacccaaaaga

SEQ ID NO: 793411 - DNA, 33 bp, Homo sapien
agagggaagggtattacacatgaacccacttct

SEQ ID NO: 793412 - DNA, 33 bp, Homo sapien
agagggaagggtattatacatgaacccacttct

SEQ ID NO: 793413 - DNA, 33 bp, Homo sapien
acttgagtctgagaaccgaaccacttcaggagc

SEQ ID NO: 793414 - DNA, 33 bp, Homo sapien
acttgagtctgagaactgaaccacttcaggagc

SEQ ID NO: 793415 - DNA, 33 bp, Homo sapien
agagactacagatcagaaactccaagcaacagc

SEQ ID NO: 793416 - DNA, 33 bp, Homo sapien
agagactacagatcagcaactccaagcaacagc

SEQ ID NO: 793417 - DNA, 33 bp, Homo sapien
accattcgcagtttaaaagaaacgttaggaaat

SEQ ID NO: 793418 - DNA, 33 bp, Homo sapien
accattcgcagtttaagagaaacgttaggaaat

SEQ ID NO: 793419 - DNA, 33 bp, Homo sapien
gtttggtaagtcaaagccaaatgacaacaagct

SEQ ID NO: 793420 - DNA, 33 bp, Homo sapien
gtttggtaagtcaaagtcaaatgacaacaagct

SEQ ID NO: 793421 - DNA, 33 bp, Homo sapien
ctggagagattcactacagtagggagaaaaggg

SEQ ID NO: 793422 - DNA, 33 bp, Homo sapien
ctggagagattcactagagtagggagaaaaggg

SEQ ID NO: 793423 - DNA, 33 bp, Homo sapien
tcaccctgaatccacaaaaatatttctgcaatg

SEQ ID NO: 793424 - DNA, 33 bp, Homo sapien
tcaccctgaatccacacaaatatttctgcaatg

SEQ ID NO: 793425 - DNA, 33 bp, Homo sapien
tttgttactgattcaccgccagtatgaaaaatc

SEQ ID NO: 793426 - DNA, 33 bp, Homo sapien
tttgttactgattcactgccagtatgaaaaatc

SEQ ID NO: 793427 - DNA, 33 bp, Homo sapien
agtcattcagtagtgacaattactttcaggttc

SEQ ID NO: 793428 - DNA, 33 bp, Homo sapien
agtcattcagtagtgagaattactttcaggttc

SEQ ID NO: 793429 - DNA, 33 bp, Homo sapien
gcaacagcctctcaccgagtccagcagatacat

SEQ ID NO: 793430 - DNA, 33 bp, Homo sapien
gcaacagcctctcacctagtccagcagatacat

SEQ ID NO: 793431 - DNA, 33 bp, Homo sapien
aaactcctccttggaacactcaagttctccaag

SEQ ID NO: 793432 - DNA, 33 bp, Homo sapien
aaactcctccttggaatactcaagttctccaag

SEQ ID NO: 793433 - DNA, 33 bp, Homo sapien
acattttagaagcataataggaggcaaaaaaaa

SEQ ID NO: 793434 - DNA, 33 bp, Homo sapien
acattttagaagcatactaggaggcaaaaaaaa

SEQ ID NO: 793435 - DNA, 33 bp, Homo sapien
gagagctgataataagaatccctttgctggtga

SEQ ID NO: 793436 - DNA, 33 bp, Homo sapien
gagagctgataataagcatccctttgctggtga

SEQ ID NO: 793437 - DNA, 33 bp, Homo sapien
ctcaatgaattacctgaagaaatctgactggca

SEQ ID NO: 793438 - DNA, 33 bp, Homo sapien
ctcaatgaattacctgcagaaatctgactggca

SEQ ID NO: 793439 - DNA, 33 bp, Homo sapien
atatgccttgaaagaaacttaacatcacatcaa

SEQ ID NO: 793440 - DNA, 33 bp, Homo sapien
atatgccttgaaagaagcttaacatcacatcaa

SEQ ID NO: 793441 - DNA, 33 bp, Homo sapien
tagagaactataatataaactgctttacacgtt

SEQ ID NO: 793442 - DNA, 33 bp, Homo sapien
tagagaactataatattaactgctttacacgtt

SEQ ID NO: 793443 - DNA, 33 bp, Homo sapien
aaccttgtgacagtccaagaaagaatcaccgtc

SEQ ID NO: 793444 - DNA, 33 bp, Homo sapien
aaccttgtgacagtcccagaaagaatcaccgtc

SEQ ID NO: 793445 - DNA, 33 bp, Homo sapien
tctgtttgacaaactgaaacaccatcctaatta

SEQ ID NO: 793446 - DNA, 33 bp, Homo sapien
tctgtttgacaaactggaacaccatcctaatta

SEQ ID NO: 793447 - DNA, 33 bp, Homo sapien
gggctatgttttataactggagtatttgcatcc

SEQ ID NO: 793448 - DNA, 33 bp, Homo sapien
gggctatgttttataattggagtatttgcatcc

SEQ ID NO: 793449 - DNA, 33 bp, Homo sapien
tctgaggtagagccaaatcatattttgagtgtg

SEQ ID NO: 793450 - DNA, 33 bp, Homo sapien
tctgaggtagagccaattcatattttgagtgtg

SEQ ID NO: 793451 - DNA, 33 bp, Homo sapien
tcactctggctgtacaatgaaaaaaataggctt

SEQ ID NO: 793452 - DNA, 33 bp, Homo sapien
tcactctggctgtacagtgaaaaaaataggctt

SEQ ID NO: 793453 - DNA, 33 bp, Homo sapien
actagaaatttatcaccagaagatgtactaggc

SEQ ID NO: 793454 - DNA, 33 bp, Homo sapien
actagaaatttatcactagaagatgtactaggc

SEQ ID NO: 793455 - DNA, 33 bp, Homo sapien
ggagcagtttttcaaaacaagattatacatgtg

SEQ ID NO: 793456 - DNA, 33 bp, Homo sapien
ggagcagtttttcaaagcaagattatacatgtg

SEQ ID NO: 793457 - DNA, 33 bp, Homo sapien
agatgtaaacagcaaaatcagcaagcattcttt

SEQ ID NO: 793458 - DNA, 33 bp, Homo sapien
agatgtaaacagcaaagtcagcaagcattcttt

SEQ ID NO: 793459 - DNA, 33 bp, Homo sapien
acctaagcatcccataccctctttagaaatgac

SEQ ID NO: 793460 - DNA, 33 bp, Homo sapien
acctaagcatcccatagcctctttagaaatgac

SEQ ID NO: 793461 - DNA, 33 bp, Homo sapien
gtcaccagtttcaatacaggaataagctgtgct

SEQ ID NO: 793462 - DNA, 33 bp, Homo sapien
gtcaccagtttcaatataggaataagctgtgct

SEQ ID NO: 793463 - DNA, 33 bp, Homo sapien
tgttcacactgtgtatcaagtctttttgcctaa

SEQ ID NO: 793464 - DNA, 33 bp, Homo sapien
tgttcacactgtgtattaagtctttttgcctaa

SEQ ID NO: 793465 - DNA, 33 bp, Homo sapien
tgctatggtatgcatcacctagctatgaaatgg

SEQ ID NO: 793466 - DNA, 33 bp, Homo sapien
tgctatggtatgcatctcctagctatgaaatgg

SEQ ID NO: 793467 - DNA, 33 bp, Homo sapien
ttcaaataattgaaaacgtcaggaaattcatag

SEQ ID NO: 793468 - DNA, 33 bp, Homo sapien
ttcaaataattgaaaatgtcaggaaattcatag

SEQ ID NO: 793469 - DNA, 33 bp, Homo sapien
gaagatgaaaagatctgaagggcagatgcaagg

SEQ ID NO: 793470 - DNA, 33 bp, Homo sapien
gaagatgaaaagatcttaagggcagatgcaagg

SEQ ID NO: 793471 - DNA, 33 bp, Homo sapien
ttgctcaatccctgtcccagattttcatgagca

SEQ ID NO: 793472 - DNA, 33 bp, Homo sapien
ttgctcaatccctgtctcagattttcatgagca

SEQ ID NO: 793473 - DNA, 33 bp, Homo sapien
taatgcttgtcctttacctataatggcctatag

SEQ ID NO: 793474 - DNA, 33 bp, Homo sapien
taatgcttgtcctttatctataatggcctatag

SEQ ID NO: 793475 - DNA, 33 bp, Homo sapien
ctctgtcctggaataaccctgcaattaggaagt

SEQ ID NO: 793476 - DNA, 33 bp, Homo sapien
ctctgtcctggaataatcctgcaattaggaagt

SEQ ID NO: 793477 - DNA, 33 bp, Homo sapien
tctttggtaagcattacgtggtcaaagctctga

SEQ ID NO: 793478 - DNA, 33 bp, Homo sapien
tctttggtaagcattatgtggtcaaagctctga

SEQ ID NO: 793479 - DNA, 33 bp, Homo sapien
catatccttatacacaaaagtgcctgaacccaa

SEQ ID NO: 793480 - DNA, 33 bp, Homo sapien
catatccttatacacagaagtgcctgaacccaa

SEQ ID NO: 793481 - DNA, 33 bp, Homo sapien
gaaccctgaagagaaaactagtgtctaattcaa

SEQ ID NO: 793482 - DNA, 33 bp, Homo sapien
gaaccctgaagagaaacctagtgtctaattcaa

SEQ ID NO: 793483 - DNA, 33 bp, Homo sapien
tctaatttttgagatacagggacttctctggag

SEQ ID NO: 793484 - DNA, 33 bp, Homo sapien
tctaatttttgagatatagggacttctctggag

SEQ ID NO: 793485 - DNA, 33 bp, Homo sapien
aaataggtttcctataggcaacatacatctgac

SEQ ID NO: 793486 - DNA, 33 bp, Homo sapien
aaataggtttcctatatgcaacatacatctgac

SEQ ID NO: 793487 - DNA, 33 bp, Homo sapien
tcatctggttgactcacgtcttgttctatttaa

SEQ ID NO: 793488 - DNA, 33 bp, Homo sapien
tcatctggttgactcatgtcttgttctatttaa

SEQ ID NO: 793489 - DNA, 33 bp, Homo sapien
tccaacataacacttaaaggcaccaatatgctt

SEQ ID NO: 793490 - DNA, 33 bp, Homo sapien
tccaacataacacttagaggcaccaatatgctt

SEQ ID NO: 793491 - DNA, 33 bp, Homo sapien
aggactgaatgtgagaatacctcatgctgaggc

SEQ ID NO: 793492 - DNA, 33 bp, Homo sapien
aggactgaatgtgagattacctcatgctgaggc

SEQ ID NO: 793493 - DNA, 33 bp, Homo sapien
accctccactcttttcaatcacttgtcacattt

SEQ ID NO: 793494 - DNA, 33 bp, Homo sapien
accctccactcttttctatcacttgtcacattt

SEQ ID NO: 793495 - DNA, 33 bp, Homo sapien
gagagagaaatatgaaagtttgctggtataaag

SEQ ID NO: 793496 - DNA, 33 bp, Homo sapien
gagagagaaatatgaaggtttgctggtataaag

SEQ ID NO: 793497 - DNA, 33 bp, Homo sapien
tagtggaaaataggcaggaaggggcaaacagat

SEQ ID NO: 793498 - DNA, 33 bp, Homo sapien
tagtggaaaataggcatgaaggggcaaacagat

SEQ ID NO: 793499 - DNA, 33 bp, Homo sapien
acaccacataactaaacgaattgttgtctacct

SEQ ID NO: 793500 - DNA, 33 bp, Homo sapien
acaccacataactaaatgaattgttgtctacct

SEQ ID NO: 793501 - DNA, 33 bp, Homo sapien
tacaagaaaattgagtctgaattaatttctgcc

SEQ ID NO: 793502 - DNA, 33 bp, Homo sapien
tacaagaaaattgagtttgaattaatttctgcc

SEQ ID NO: 793503 - DNA, 33 bp, Homo sapien
agtagaccgtttaatacctcaggtggactatta

SEQ ID NO: 793504 - DNA, 33 bp, Homo sapien
agtagaccgtttaatagctcaggtggactatta

SEQ ID NO: 793505 - DNA, 33 bp, Homo sapien
agaaaatcaagtatcacagccacagaagaacaa

SEQ ID NO: 793506 - DNA, 33 bp, Homo sapien
agaaaatcaagtatcatagccacagaagaacaa

SEQ ID NO: 793507 - DNA, 33 bp, Homo sapien
cattacctggaggttagaagactcctttcagca

SEQ ID NO: 793508 - DNA, 33 bp, Homo sapien
cattacctggaggttataagactcctttcagca

SEQ ID NO: 793509 - DNA, 33 bp, Homo sapien
agtttattctgccttaaatacttgtcctcaaga

SEQ ID NO: 793510 - DNA, 33 bp, Homo sapien
agtttattctgccttagatacttgtcctcaaga

SEQ ID NO: 793511 - DNA, 33 bp, Homo sapien
ttgttatagttataccagagaaaatagatttca

SEQ ID NO: 793512 - DNA, 33 bp, Homo sapien
ttgttatagttataccggagaaaatagatttca

SEQ ID NO: 793513 - DNA, 33 bp, Homo sapien
aaactgacttcaccgacgtatgggtctacttaa

SEQ ID NO: 793514 - DNA, 33 bp, Homo sapien
aaactgacttcaccgaggtatgggtctacttaa

SEQ ID NO: 793515 - DNA, 33 bp, Homo sapien
tacttctccttgtctcactgatcttagataagc

SEQ ID NO: 793516 - DNA, 33 bp, Homo sapien
tacttctccttgtctcgctgatcttagataagc

SEQ ID NO: 793517 - DNA, 33 bp, Homo sapien
tcctactccctttcagaagcaaattagaaaagg

SEQ ID NO: 793518 - DNA, 33 bp, Homo sapien
tcctactccctttcagtagcaaattagaaaagg

SEQ ID NO: 793519 - DNA, 33 bp, Homo sapien
aaagacatcgcttagaactgaaatcttgtcccc

SEQ ID NO: 793520 - DNA, 33 bp, Homo sapien
aaagacatcgcttagagctgaaatcttgtcccc

SEQ ID NO: 793521 - DNA, 33 bp, Homo sapien
caaattatcagaaaccccttctctttggatgta

SEQ ID NO: 793522 - DNA, 33 bp, Homo sapien
caaattatcagaaacctcttctctttggatgta

SEQ ID NO: 793523 - DNA, 33 bp, Homo sapien
cactatctattcctcacgctcttgcaagcaatc

SEQ ID NO: 793524 - DNA, 33 bp, Homo sapien
cactatctattcctcatgctcttgcaagcaatc

SEQ ID NO: 793525 - DNA, 33 bp, Homo sapien
actttttctgtggtcaacactcaacctctttcc

SEQ ID NO: 793526 - DNA, 33 bp, Homo sapien
actttttctgtggtcaccactcaacctctttcc

SEQ ID NO: 793527 - DNA, 33 bp, Homo sapien
cacattcaaaccctcacggtcatcaaacagcat

SEQ ID NO: 793528 - DNA, 33 bp, Homo sapien
cacattcaaaccctcatggtcatcaaacagcat

SEQ ID NO: 793529 - DNA, 33 bp, Homo sapien
gtgctacaaactttaactggattgcaaaaaatg

SEQ ID NO: 793530 - DNA, 33 bp, Homo sapien
gtgctacaaactttaattggattgcaaaaaatg

SEQ ID NO: 793531 - DNA, 33 bp, Homo sapien
atgcccttcagacacacaacaaagcttagcaga

SEQ ID NO: 793532 - DNA, 33 bp, Homo sapien
atgcccttcagacacagaacaaagcttagcaga

SEQ ID NO: 793533 - DNA, 33 bp, Homo sapien
acccctgtatctaccaaagttgtctccaaagtg

SEQ ID NO: 793534 - DNA, 33 bp, Homo sapien
acccctgtatctaccatagttgtctccaaagtg

SEQ ID NO: 793535 - DNA, 33 bp, Homo sapien
tcctccatttaactccacaaactatgcttgtta

SEQ ID NO: 793536 - DNA, 33 bp, Homo sapien
tcctccatttaactccgcaaactatgcttgtta

SEQ ID NO: 793537 - DNA, 33 bp, Homo sapien
agaacttcaaaagcaaagatgaaggatttattg

SEQ ID NO: 793538 - DNA, 33 bp, Homo sapien
agaacttcaaaagcaatgatgaaggatttattg

SEQ ID NO: 793539 - DNA, 33 bp, Homo sapien
ttagctgcacagcgaaactattctctgcctgcc

SEQ ID NO: 793540 - DNA, 33 bp, Homo sapien
ttagctgcacagcgaacctattctctgcctgcc

SEQ ID NO: 793541 - DNA, 33 bp, Homo sapien
ttgaggaaatagaggtcaaagtatctgaatata

SEQ ID NO: 793542 - DNA, 33 bp, Homo sapien
ttgaggaaatagaggtgaaagtatctgaatata

SEQ ID NO: 793543 - DNA, 33 bp, Homo sapien
cttgaggtgtctcttaacacatggttctacgtg

SEQ ID NO: 793544 - DNA, 33 bp, Homo sapien
cttgaggtgtctcttaccacatggttctacgtg

SEQ ID NO: 793545 - DNA, 33 bp, Homo sapien
gcacactgaattctcacccttgaaatcatgttg

SEQ ID NO: 793546 - DNA, 33 bp, Homo sapien
gcacactgaattctcatccttgaaatcatgttg

SEQ ID NO: 793547 - DNA, 33 bp, Homo sapien
atggctcgtaactccactcatattctagataca

SEQ ID NO: 793548 - DNA, 33 bp, Homo sapien
atggctcgtaactccagtcatattctagataca

SEQ ID NO: 793549 - DNA, 33 bp, Homo sapien
gaatcaggaatgcagacattaaagttttactca

SEQ ID NO: 793550 - DNA, 33 bp, Homo sapien
gaatcaggaatgcagatattaaagttttactca

SEQ ID NO: 793551 - DNA, 33 bp, Homo sapien
caattccctgctagacccaaagtttcttaatct

SEQ ID NO: 793552 - DNA, 33 bp, Homo sapien
caattccctgctagacgcaaagtttcttaatct

SEQ ID NO: 793553 - DNA, 33 bp, Homo sapien
ttggtagaatatagaccaaattggctaaaaatg

SEQ ID NO: 793554 - DNA, 33 bp, Homo sapien
ttggtagaatatagactaaattggctaaaaatg

SEQ ID NO: 793555 - DNA, 33 bp, Homo sapien
caagatctatttgagggaaacaacaaaattctg

SEQ ID NO: 793556 - DNA, 33 bp, Homo sapien
caagatctatttgaggtaaacaacaaaattctg

SEQ ID NO: 793557 - DNA, 33 bp, Homo sapien
attgcatcagtacttcaatttgggaagaaataa

SEQ ID NO: 793558 - DNA, 33 bp, Homo sapien
attgcatcagtacttcgatttgggaagaaataa

SEQ ID NO: 793559 - DNA, 33 bp, Homo sapien
aagagaacactattcaccaataaagaagtgaag

SEQ ID NO: 793560 - DNA, 33 bp, Homo sapien
aagagaacactattcatcaataaagaagtgaag

SEQ ID NO: 793561 - DNA, 33 bp, Homo sapien
gccagacagctggcttaaaattcaaaaagttct

SEQ ID NO: 793562 - DNA, 33 bp, Homo sapien
gccagacagctggcttcaaattcaaaaagttct

SEQ ID NO: 793563 - DNA, 33 bp, Homo sapien
ctgacttcctgtgcaacagattagttttgctcc

SEQ ID NO: 793564 - DNA, 33 bp, Homo sapien
ctgacttcctgtgcaatagattagttttgctcc

SEQ ID NO: 793565 - DNA, 33 bp, Homo sapien
atagaatgaagcaaaagtggtggggtgcagatt

SEQ ID NO: 793566 - DNA, 33 bp, Homo sapien
atagaatgaagcaaaattggtggggtgcagatt

SEQ ID NO: 793567 - DNA, 33 bp, Homo sapien
atagtaactgttttaaaaatccatgattgcctg

SEQ ID NO: 793568 - DNA, 33 bp, Homo sapien
atagtaactgttttaagaatccatgattgcctg

SEQ ID NO: 793569 - DNA, 33 bp, Homo sapien
ctgatctaccaattccacttcttagtattcact

SEQ ID NO: 793570 - DNA, 33 bp, Homo sapien
ctgatctaccaattccgcttcttagtattcact

SEQ ID NO: 793571 - DNA, 33 bp, Homo sapien
gctgtttttgataacacagctgaatctggagga

SEQ ID NO: 793572 - DNA, 33 bp, Homo sapien
gctgtttttgataacatagctgaatctggagga

SEQ ID NO: 793573 - DNA, 33 bp, Homo sapien
ccactaatggctgaagcagattaattatgccag

SEQ ID NO: 793574 - DNA, 33 bp, Homo sapien
ccactaatggctgaagtagattaattatgccag

SEQ ID NO: 793575 - DNA, 33 bp, Homo sapien
acactgcctgaattgacggcccgggtggatgac

SEQ ID NO: 793576 - DNA, 33 bp, Homo sapien
acactgcctgaattgatggcccgggtggatgac

SEQ ID NO: 793577 - DNA, 33 bp, Homo sapien
agatggaaaaaagcataagtttcatagtggaag

SEQ ID NO: 793578 - DNA, 33 bp, Homo sapien
agatggaaaaaagcattagtttcatagtggaag

SEQ ID NO: 793579 - DNA, 33 bp, Homo sapien
cattaaatatatgatacgtcctagccgggcaga

SEQ ID NO: 793580 - DNA, 33 bp, Homo sapien
cattaaatatatgatatgtcctagccgggcaga

SEQ ID NO: 793581 - DNA, 33 bp, Homo sapien
tttcttctttgaaggaacgatttgctacttttt

SEQ ID NO: 793582 - DNA, 33 bp, Homo sapien
tttcttctttgaaggagcgatttgctacttttt

SEQ ID NO: 793583 - DNA, 33 bp, Homo sapien
gaatagacaataagagaacaaacgtatgagaga

SEQ ID NO: 793584 - DNA, 33 bp, Homo sapien
gaatagacaataagaggacaaacgtatgagaga

SEQ ID NO: 793585 - DNA, 33 bp, Homo sapien
tcctgctgagagattacctttcaagtggcttgc

SEQ ID NO: 793586 - DNA, 33 bp, Homo sapien
tcctgctgagagattatctttcaagtggcttgc

SEQ ID NO: 793587 - DNA, 33 bp, Homo sapien
cttgcctgtgcatgcaatcccaatctatgtcct

SEQ ID NO: 793588 - DNA, 33 bp, Homo sapien
cttgcctgtgcatgcagtcccaatctatgtcct

SEQ ID NO: 793589 - DNA, 33 bp, Homo sapien
tggttgtatagccagactcagactcacctgagc

SEQ ID NO: 793590 - DNA, 33 bp, Homo sapien
tggttgtatagccagattcagactcacctgagc

SEQ ID NO: 793591 - DNA, 33 bp, Homo sapien
tgactttatcaaagtcaagatgccaagcattaa

SEQ ID NO: 793592 - DNA, 33 bp, Homo sapien
tgactttatcaaagtcgagatgccaagcattaa

SEQ ID NO: 793593 - DNA, 33 bp, Homo sapien
aataatggtcatgttaaatctttgctcacccat

SEQ ID NO: 793594 - DNA, 33 bp, Homo sapien
aataatggtcatgttacatctttgctcacccat

SEQ ID NO: 793595 - DNA, 33 bp, Homo sapien
tctcctataataacaacgccgtcttctggaata

SEQ ID NO: 793596 - DNA, 33 bp, Homo sapien
tctcctataataacaatgccgtcttctggaata

SEQ ID NO: 793597 - DNA, 33 bp, Homo sapien
tatggtaagagccctacatagttggaccgtttt

SEQ ID NO: 793598 - DNA, 33 bp, Homo sapien
tatggtaagagccctatatagttggaccgtttt

SEQ ID NO: 793599 - DNA, 33 bp, Homo sapien
ttctgcttagaatggccctcccaggttacattc

SEQ ID NO: 793600 - DNA, 33 bp, Homo sapien
ttctgcttagaatggctctcccaggttacattc

SEQ ID NO: 793601 - DNA, 33 bp, Homo sapien
ttaaactagagtataaagaaagatgagtttctc

SEQ ID NO: 793602 - DNA, 33 bp, Homo sapien
ttaaactagagtataaggaaagatgagtttctc

SEQ ID NO: 793603 - DNA, 33 bp, Homo sapien
gaagggccacatcaccaataaagggaaaccctt

SEQ ID NO: 793604 - DNA, 33 bp, Homo sapien
gaagggccacatcacctataaagggaaaccctt

SEQ ID NO: 793605 - DNA, 33 bp, Homo sapien
tcttttataaggcactaaaccattcatgagggg

SEQ ID NO: 793606 - DNA, 33 bp, Homo sapien
tcttttataaggcactcaaccattcatgagggg

SEQ ID NO: 793607 - DNA, 33 bp, Homo sapien
gcatcgtcacatggccaaagggatgaaaactat

SEQ ID NO: 793608 - DNA, 33 bp, Homo sapien
gcatcgtcacatggccgaagggatgaaaactat

SEQ ID NO: 793609 - DNA, 33 bp, Homo sapien
ggtgacacagccacatcaatttgcacagttctg

SEQ ID NO: 793610 - DNA, 33 bp, Homo sapien
ggtgacacagccacatgaatttgcacagttctg

SEQ ID NO: 793611 - DNA, 33 bp, Homo sapien
caatgaactgaaaatagtaagagcaaggtagca

SEQ ID NO: 793612 - DNA, 33 bp, Homo sapien
caatgaactgaaaatattaagagcaaggtagca

SEQ ID NO: 793613 - DNA, 33 bp, Homo sapien
ttgagttgtgatctgaacatcatttttactcaa

SEQ ID NO: 793614 - DNA, 33 bp, Homo sapien
ttgagttgtgatctgatcatcatttttactcaa

SEQ ID NO: 793615 - DNA, 33 bp, Homo sapien
taatttgtttcaccaagagtaggcaacatcctc

SEQ ID NO: 793616 - DNA, 33 bp, Homo sapien
taatttgtttcaccaatagtaggcaacatcctc

SEQ ID NO: 793617 - DNA, 33 bp, Homo sapien
atcacttatttagtgaatatgtgtcaagtgcca

SEQ ID NO: 793618 - DNA, 33 bp, Homo sapien
atcacttatttagtgagtatgtgtcaagtgcca

SEQ ID NO: 793619 - DNA, 33 bp, Homo sapien
ccagtcttggtccaaaagtcatcctcccatcaa

SEQ ID NO: 793620 - DNA, 33 bp, Homo sapien
ccagtcttggtccaaaggtcatcctcccatcaa

SEQ ID NO: 793621 - DNA, 33 bp, Homo sapien
cctcacatttctgtacggaagaagaaaatacgc

SEQ ID NO: 793622 - DNA, 33 bp, Homo sapien
cctcacatttctgtactgaagaagaaaatacgc

SEQ ID NO: 793623 - DNA, 33 bp, Homo sapien
acacaaacatcaaatcgataacaatatcatttt

SEQ ID NO: 793624 - DNA, 33 bp, Homo sapien
acacaaacatcaaatctataacaatatcatttt

SEQ ID NO: 793625 - DNA, 33 bp, Homo sapien
aatctgaactggtggaccttgataaaatcattt

SEQ ID NO: 793626 - DNA, 33 bp, Homo sapien
aatctgaactggtggatcttgataaaatcattt

SEQ ID NO: 793627 - DNA, 33 bp, Homo sapien
taaacctagtggcacaactactcttagcactga

SEQ ID NO: 793628 - DNA, 33 bp, Homo sapien
taaacctagtggcacatctactcttagcactga

SEQ ID NO: 793629 - DNA, 33 bp, Homo sapien
aaaacattcctgtcacaaacacatagaagatat

SEQ ID NO: 793630 - DNA, 33 bp, Homo sapien
aaaacattcctgtcaccaacacatagaagatat

SEQ ID NO: 793631 - DNA, 33 bp, Homo sapien
ataatggaaggataaccgatacaggaagaggct

SEQ ID NO: 793632 - DNA, 33 bp, Homo sapien
ataatggaaggataactgatacaggaagaggct

SEQ ID NO: 793633 - DNA, 33 bp, Homo sapien
agatttttttctgttcacaattccatgttatgc

SEQ ID NO: 793634 - DNA, 33 bp, Homo sapien
agatttttttctgttcgcaattccatgttatgc

SEQ ID NO: 793635 - DNA, 33 bp, Homo sapien
aagtgaacatgatgaactaaatgtgatgaaact

SEQ ID NO: 793636 - DNA, 33 bp, Homo sapien
aagtgaacatgatgaagtaaatgtgatgaaact

SEQ ID NO: 793637 - DNA, 33 bp, Homo sapien
gccagcataactttaaaccaccgttaatcatgt

SEQ ID NO: 793638 - DNA, 33 bp, Homo sapien
gccagcataactttaagccaccgttaatcatgt

SEQ ID NO: 793639 - DNA, 33 bp, Homo sapien
gcctcaatagaagaaggcaaggcaactgttaat

SEQ ID NO: 793640 - DNA, 33 bp, Homo sapien
gcctcaatagaagaagtcaaggcaactgttaat

SEQ ID NO: 793641 - DNA, 33 bp, Homo sapien
atttccatttttgatgaaatatgtacatgaagt

SEQ ID NO: 793642 - DNA, 33 bp, Homo sapien
atttccatttttgatggaatatgtacatgaagt

SEQ ID NO: 793643 - DNA, 33 bp, Homo sapien
aaaggtccttaggttacaatgcacaaaactggg

SEQ ID NO: 793644 - DNA, 33 bp, Homo sapien
aaaggtccttaggttagaatgcacaaaactggg

SEQ ID NO: 793645 - DNA, 33 bp, Homo sapien
tggaaattgctaaaacaggaaataaagcagcag

SEQ ID NO: 793646 - DNA, 33 bp, Homo sapien
tggaaattgctaaaacgggaaataaagcagcag

SEQ ID NO: 793647 - DNA, 33 bp, Homo sapien
ttactagagtagtacaatcaatgcatgaattca

SEQ ID NO: 793648 - DNA, 33 bp, Homo sapien
ttactagagtagtacagtcaatgcatgaattca

SEQ ID NO: 793649 - DNA, 33 bp, Homo sapien
gaagacaggtggaacgaaatctggtgtatgaaa

SEQ ID NO: 793650 - DNA, 33 bp, Homo sapien
gaagacaggtggaacggaatctggtgtatgaaa

SEQ ID NO: 793651 - DNA, 33 bp, Homo sapien
gagttcaggttttaacaggtggagattgagttg

SEQ ID NO: 793652 - DNA, 33 bp, Homo sapien
gagttcaggttttaacgggtggagattgagttg

SEQ ID NO: 793653 - DNA, 33 bp, Homo sapien
atgtatttagatgtgaacctcaactggccaagt

SEQ ID NO: 793654 - DNA, 33 bp, Homo sapien
atgtatttagatgtgagcctcaactggccaagt

SEQ ID NO: 793655 - DNA, 33 bp, Homo sapien
cttaattcatcagtgcccaatgaggacagaggt

SEQ ID NO: 793656 - DNA, 33 bp, Homo sapien
cttaattcatcagtgctcaatgaggacagaggt

SEQ ID NO: 793657 - DNA, 33 bp, Homo sapien
cactcattttttcacaatcttcctccagggaac

SEQ ID NO: 793658 - DNA, 33 bp, Homo sapien
cactcattttttcacagtcttcctccagggaac

SEQ ID NO: 793659 - DNA, 33 bp, Homo sapien
ttttgaaaaatttagacggcagtattcttggta

SEQ ID NO: 793660 - DNA, 33 bp, Homo sapien
ttttgaaaaatttagatggcagtattcttggta

SEQ ID NO: 793661 - DNA, 33 bp, Homo sapien
tggggagttgctggaactataaaaggtaagttt

SEQ ID NO: 793662 - DNA, 33 bp, Homo sapien
tggggagttgctggaagtataaaaggtaagttt

SEQ ID NO: 793663 - DNA, 33 bp, Homo sapien
atactgaggacagtagaaagtgtttttcaagta

SEQ ID NO: 793664 - DNA, 33 bp, Homo sapien
atactgaggacagtaggaagtgtttttcaagta

SEQ ID NO: 793665 - DNA, 33 bp, Homo sapien
ttctggtcctaaatgaaaaagtaagtccatgag

SEQ ID NO: 793666 - DNA, 33 bp, Homo sapien
ttctggtcctaaatgagaaagtaagtccatgag

SEQ ID NO: 793667 - DNA, 33 bp, Homo sapien
cattttcagaagatcacgtgaacctctgaagtt

SEQ ID NO: 793668 - DNA, 33 bp, Homo sapien
cattttcagaagatcatgtgaacctctgaagtt

SEQ ID NO: 793669 - DNA, 33 bp, Homo sapien
aatcttgactcagtataaacttcagaggttcac

SEQ ID NO: 793670 - DNA, 33 bp, Homo sapien
aatcttgactcagtatgaacttcagaggttcac

SEQ ID NO: 793671 - DNA, 33 bp, Homo sapien
aacgggatcacatcaacttaaaaagaaacaatc

SEQ ID NO: 793672 - DNA, 33 bp, Homo sapien
aacgggatcacatcaagttaaaaagaaacaatc

SEQ ID NO: 793673 - DNA, 33 bp, Homo sapien
ttctaattcatcaaaaggtgacctggaaaaatc

SEQ ID NO: 793674 - DNA, 33 bp, Homo sapien
ttctaattcatcaaaatgtgacctggaaaaatc

SEQ ID NO: 793675 - DNA, 33 bp, Homo sapien
agttgtgggaccaataaattctagacttttggt

SEQ ID NO: 793676 - DNA, 33 bp, Homo sapien
agttgtgggaccaatacattctagacttttggt

SEQ ID NO: 793677 - DNA, 33 bp, Homo sapien
ggagaacccggaaaaacggacacagatgtgacc

SEQ ID NO: 793678 - DNA, 33 bp, Homo sapien
ggagaacccggaaaaatggacacagatgtgacc

SEQ ID NO: 793679 - DNA, 33 bp, Homo sapien
acagtaaacaattggtaaaaagtctgtcatgag

SEQ ID NO: 793680 - DNA, 33 bp, Homo sapien
acagtaaacaattggttaaaagtctgtcatgag

SEQ ID NO: 793681 - DNA, 33 bp, Homo sapien
actatggtccaaataaaccaaatctaaattgaa

SEQ ID NO: 793682 - DNA, 33 bp, Homo sapien
actatggtccaaataagccaaatctaaattgaa

SEQ ID NO: 793683 - DNA, 33 bp, Homo sapien
tggcccaacatatcaacctgtgcagggcatttg

SEQ ID NO: 793684 - DNA, 33 bp, Homo sapien
tggcccaacatatcaagctgtgcagggcatttg

SEQ ID NO: 793685 - DNA, 33 bp, Homo sapien
tggctaatgaattagaggtagcacttgagggta

SEQ ID NO: 793686 - DNA, 33 bp, Homo sapien
tggctaatgaattagatgtagcacttgagggta

SEQ ID NO: 793687 - DNA, 33 bp, Homo sapien
tatctctctgctcaaacctctttcctcatctcc

SEQ ID NO: 793688 - DNA, 33 bp, Homo sapien
tatctctctgctcaaagctctttcctcatctcc

SEQ ID NO: 793689 - DNA, 33 bp, Homo sapien
gggagactgctgtatacgaacaaattcctttgt

SEQ ID NO: 793690 - DNA, 33 bp, Homo sapien
gggagactgctgtatatgaacaaattcctttgt

SEQ ID NO: 793691 - DNA, 33 bp, Homo sapien
cagtatacagctcctacgacaagagttattctg

SEQ ID NO: 793692 - DNA, 33 bp, Homo sapien
cagtatacagctcctatgacaagagttattctg

SEQ ID NO: 793693 - DNA, 33 bp, Homo sapien
aatggagctgggctacaaaacgaagagcatttc

SEQ ID NO: 793694 - DNA, 33 bp, Homo sapien
aatggagctgggctacgaaacgaagagcatttc

SEQ ID NO: 793695 - DNA, 33 bp, Homo sapien
atgatggtttgaaacacgaaaatcagtaaatgt

SEQ ID NO: 793696 - DNA, 33 bp, Homo sapien
atgatggtttgaaacatgaaaatcagtaaatgt

SEQ ID NO: 793697 - DNA, 33 bp, Homo sapien
gaggtttctgatagcacaagaatggagtaaaat

SEQ ID NO: 793698 - DNA, 33 bp, Homo sapien
gaggtttctgatagcagaagaatggagtaaaat

SEQ ID NO: 793699 - DNA, 33 bp, Homo sapien
aaatgcacatttgtcacgaattcaggtttggta

SEQ ID NO: 793700 - DNA, 33 bp, Homo sapien
aaatgcacatttgtcatgaattcaggtttggta

SEQ ID NO: 793701 - DNA, 33 bp, Homo sapien
gcattggccattggaaaataacagaaaatgatt

SEQ ID NO: 793702 - DNA, 33 bp, Homo sapien
gcattggccattggaatataacagaaaatgatt

SEQ ID NO: 793703 - DNA, 33 bp, Homo sapien
gatgctttgtaggttaacactgactcatcattc

SEQ ID NO: 793704 - DNA, 33 bp, Homo sapien
gatgctttgtaggttaccactgactcatcattc

SEQ ID NO: 793705 - DNA, 33 bp, Homo sapien
agttcttttagagcaacaggaaaacagactaat

SEQ ID NO: 793706 - DNA, 33 bp, Homo sapien
agttcttttagagcaataggaaaacagactaat

SEQ ID NO: 793707 - DNA, 33 bp, Homo sapien
gcacaaactggctcaccgtattatttcagttcc

SEQ ID NO: 793708 - DNA, 33 bp, Homo sapien
gcacaaactggctcactgtattatttcagttcc

SEQ ID NO: 793709 - DNA, 33 bp, Homo sapien
gtatggagtgaaggaaagagattctacagttag

SEQ ID NO: 793710 - DNA, 33 bp, Homo sapien
gtatggagtgaaggaaggagattctacagttag

SEQ ID NO: 793711 - DNA, 33 bp, Homo sapien
aagagtgaggtttgcacctcttagtaggacaat

SEQ ID NO: 793712 - DNA, 33 bp, Homo sapien
aagagtgaggtttgcatctcttagtaggacaat

SEQ ID NO: 793713 - DNA, 33 bp, Homo sapien
cttttcactttatcaccgtatgggagaaaaagt

SEQ ID NO: 793714 - DNA, 33 bp, Homo sapien
cttttcactttatcactgtatgggagaaaaagt

SEQ ID NO: 793715 - DNA, 33 bp, Homo sapien
atctagccggaggaaaataagccattatacgga

SEQ ID NO: 793716 - DNA, 33 bp, Homo sapien
atctagccggaggaaagtaagccattatacgga

SEQ ID NO: 793717 - DNA, 33 bp, Homo sapien
aaacagcttgaaaatcactgatctgtataaaaa

SEQ ID NO: 793718 - DNA, 33 bp, Homo sapien
aaacagcttgaaaatcgctgatctgtataaaaa

SEQ ID NO: 793719 - DNA, 33 bp, Homo sapien
gtgggagcatacagagaaagagtgttttcgtgt

SEQ ID NO: 793720 - DNA, 33 bp, Homo sapien
gtgggagcatacagagtaagagtgttttcgtgt

SEQ ID NO: 793721 - DNA, 33 bp, Homo sapien
ctgtatgtaactgggcaacaaatatcagtctct

SEQ ID NO: 793722 - DNA, 33 bp, Homo sapien
ctgtatgtaactgggcgacaaatatcagtctct

SEQ ID NO: 793723 - DNA, 33 bp, Homo sapien
agctggtttagattaccgaatgacattaaaaag

SEQ ID NO: 793724 - DNA, 33 bp, Homo sapien
agctggtttagattactgaatgacattaaaaag

SEQ ID NO: 793725 - DNA, 33 bp, Homo sapien
ttcacaagccccctataagctggctcaagcaca

SEQ ID NO: 793726 - DNA, 33 bp, Homo sapien
ttcacaagccccctatgagctggctcaagcaca

SEQ ID NO: 793727 - DNA, 33 bp, Homo sapien
tgtgagattatttaaacgtagattctcagttaa

SEQ ID NO: 793728 - DNA, 33 bp, Homo sapien
tgtgagattatttaaatgtagattctcagttaa

SEQ ID NO: 793729 - DNA, 33 bp, Homo sapien
gatgcttggccccatacagcagctggcagagga

SEQ ID NO: 793730 - DNA, 33 bp, Homo sapien
gatgcttggccccatatagcagctggcagagga

SEQ ID NO: 793731 - DNA, 33 bp, Homo sapien
ccttcatcagtaaccaataaaatcacaaacagc

SEQ ID NO: 793732 - DNA, 33 bp, Homo sapien
ccttcatcagtaaccagtaaaatcacaaacagc

SEQ ID NO: 793733 - DNA, 33 bp, Homo sapien
gtttcaggaggccctggagcgtcgacatgtaag

SEQ ID NO: 793734 - DNA, 33 bp, Homo sapien
gtttcaggaggccctgtagcgtcgacatgtaag

SEQ ID NO: 793735 - DNA, 33 bp, Homo sapien
cagttacacattgacccagaaaaggtgatgtga

SEQ ID NO: 793736 - DNA, 33 bp, Homo sapien
cagttacacattgacctagaaaaggtgatgtga

SEQ ID NO: 793737 - DNA, 33 bp, Homo sapien
aaaacctgaagtgtaacataaagaagctttaca

SEQ ID NO: 793738 - DNA, 33 bp, Homo sapien
aaaacctgaagtgtaatataaagaagctttaca

SEQ ID NO: 793739 - DNA, 33 bp, Homo sapien
aagctatggaacatatcagaattatggtcacgt

SEQ ID NO: 793740 - DNA, 33 bp, Homo sapien
aagctatggaacatattagaattatggtcacgt

SEQ ID NO: 793741 - DNA, 33 bp, Homo sapien
tttggtagactaagagaagactatagctaacaa

SEQ ID NO: 793742 - DNA, 33 bp, Homo sapien
tttggtagactaagaggagactatagctaacaa

SEQ ID NO: 793743 - DNA, 33 bp, Homo sapien
aatcatggcaaacatcacattagatacctcata

SEQ ID NO: 793744 - DNA, 33 bp, Homo sapien
aatcatggcaaacatcgcattagatacctcata

SEQ ID NO: 793745 - DNA, 33 bp, Homo sapien
agagaagtgtaagttacctgattggtgaatttg

SEQ ID NO: 793746 - DNA, 33 bp, Homo sapien
agagaagtgtaagttatctgattggtgaatttg

SEQ ID NO: 793747 - DNA, 33 bp, Homo sapien
tagtaagggctataaaagtgaagcactgaaatc

SEQ ID NO: 793748 - DNA, 33 bp, Homo sapien
tagtaagggctataaacgtgaagcactgaaatc

SEQ ID NO: 793749 - DNA, 33 bp, Homo sapien
tttttctggctttatcaatttatagtataatta

SEQ ID NO: 793750 - DNA, 33 bp, Homo sapien
tttttctggctttatcgatttatagtataatta

SEQ ID NO: 793751 - DNA, 33 bp, Homo sapien
ggtagttgctgataacactttacattgaaaata

SEQ ID NO: 793752 - DNA, 33 bp, Homo sapien
ggtagttgctgataacgctttacattgaaaata

SEQ ID NO: 793753 - DNA, 33 bp, Homo sapien
ctttgcaacctttcacagacatcacccagcaga

SEQ ID NO: 793754 - DNA, 33 bp, Homo sapien
ctttgcaacctttcaccgacatcacccagcaga

SEQ ID NO: 793755 - DNA, 33 bp, Homo sapien
ttccaccctggttgtaccatgattaattctttt

SEQ ID NO: 793756 - DNA, 33 bp, Homo sapien
ttccaccctggttgtatcatgattaattctttt

SEQ ID NO: 793757 - DNA, 33 bp, Homo sapien
tatctttacttagtctaaaaactgttcatatgg

SEQ ID NO: 793758 - DNA, 33 bp, Homo sapien
tatctttacttagtctgaaaactgttcatatgg

SEQ ID NO: 793759 - DNA, 33 bp, Homo sapien
tgtggacttgagaaaaagtatatacaattggtt

SEQ ID NO: 793760 - DNA, 33 bp, Homo sapien
tgtggacttgagaaaaggtatatacaattggtt

SEQ ID NO: 793761 - DNA, 33 bp, Homo sapien
ccacaatgaatgcctgcagatacataatctaat

SEQ ID NO: 793762 - DNA, 33 bp, Homo sapien
ccacaatgaatgcctgtagatacataatctaat

SEQ ID NO: 793763 - DNA, 33 bp, Homo sapien
tgcatgaagaattaaaagaactgaaagaaggct

SEQ ID NO: 793764 - DNA, 33 bp, Homo sapien
tgcatgaagaattaaaggaactgaaagaaggct

SEQ ID NO: 793765 - DNA, 33 bp, Homo sapien
tgcagcaatctagaaacgtcagaatgaaaattt

SEQ ID NO: 793766 - DNA, 33 bp, Homo sapien
tgcagcaatctagaaatgtcagaatgaaaattt

SEQ ID NO: 793767 - DNA, 33 bp, Homo sapien
gatagcaacaatagacgctggagactgatggga

SEQ ID NO: 793768 - DNA, 33 bp, Homo sapien
gatagcaacaatagactctggagactgatggga

SEQ ID NO: 793769 - DNA, 33 bp, Homo sapien
aataatgggtcatgaacaattgcatgaccagaa

SEQ ID NO: 793770 - DNA, 33 bp, Homo sapien
aataatgggtcatgaagaattgcatgaccagaa

SEQ ID NO: 793771 - DNA, 33 bp, Homo sapien
caaaaacagactaagacacattcaacttctttt

SEQ ID NO: 793772 - DNA, 33 bp, Homo sapien
caaaaacagactaagatacattcaacttctttt

SEQ ID NO: 793773 - DNA, 33 bp, Homo sapien
aatttctttagtcctcagaacaacacttctaca

SEQ ID NO: 793774 - DNA, 33 bp, Homo sapien
aatttctttagtcctcggaacaacacttctaca

SEQ ID NO: 793775 - DNA, 33 bp, Homo sapien
tggtaaagtaagctaaatcaaaattcaggaggg

SEQ ID NO: 793776 - DNA, 33 bp, Homo sapien
tggtaaagtaagctaagtcaaaattcaggaggg

SEQ ID NO: 793777 - DNA, 33 bp, Homo sapien
ttatatggttttaagcaaagtcatttcaaacag

SEQ ID NO: 793778 - DNA, 33 bp, Homo sapien
ttatatggttttaagccaagtcatttcaaacag

SEQ ID NO: 793779 - DNA, 33 bp, Homo sapien
gtcttttggctggccacgttgaatgaatttggc

SEQ ID NO: 793780 - DNA, 33 bp, Homo sapien
gtcttttggctggccatgttgaatgaatttggc

SEQ ID NO: 793781 - DNA, 33 bp, Homo sapien
tgggttccacagaaaacgcaggtctccacagtt

SEQ ID NO: 793782 - DNA, 33 bp, Homo sapien
tgggttccacagaaaatgcaggtctccacagtt

SEQ ID NO: 793783 - DNA, 33 bp, Homo sapien
tttaaaaaaattaacaatacagtcttggcctca

SEQ ID NO: 793784 - DNA, 33 bp, Homo sapien
tttaaaaaaattaacactacagtcttggcctca

SEQ ID NO: 793785 - DNA, 33 bp, Homo sapien
ataaatcaatcatacaacctttcatttgggacc

SEQ ID NO: 793786 - DNA, 33 bp, Homo sapien
ataaatcaatcatacagcctttcatttgggacc

SEQ ID NO: 793787 - DNA, 33 bp, Homo sapien
aaacttctagttgtcagtctgggatgagtagtg

SEQ ID NO: 793788 - DNA, 33 bp, Homo sapien
aaacttctagttgtcattctgggatgagtagtg

SEQ ID NO: 793789 - DNA, 33 bp, Homo sapien
tttactgaccctcttgaattacggtatagtata

SEQ ID NO: 793790 - DNA, 33 bp, Homo sapien
tttactgaccctcttggattacggtatagtata

SEQ ID NO: 793791 - DNA, 33 bp, Homo sapien
cctttctagatattgcagaaaacaattgagaga

SEQ ID NO: 793792 - DNA, 33 bp, Homo sapien
cctttctagatattgcggaaaacaattgagaga

SEQ ID NO: 793793 - DNA, 33 bp, Homo sapien
cagagacaactattggcatacgtctaaggccta

SEQ ID NO: 793794 - DNA, 33 bp, Homo sapien
cagagacaactattgggatacgtctaaggccta

SEQ ID NO: 793795 - DNA, 33 bp, Homo sapien
gttgttttctgggccacaggtaagcaagcgtaa

SEQ ID NO: 793796 - DNA, 33 bp, Homo sapien
gttgttttctgggccataggtaagcaagcgtaa

SEQ ID NO: 793797 - DNA, 33 bp, Homo sapien
aaagcggtgagcctacaaactccaaggatcaag

SEQ ID NO: 793798 - DNA, 33 bp, Homo sapien
aaagcggtgagcctacgaactccaaggatcaag

SEQ ID NO: 793799 - DNA, 33 bp, Homo sapien
gctatttactagttataagaaggtgagagcctc

SEQ ID NO: 793800 - DNA, 33 bp, Homo sapien
gctatttactagttatgagaaggtgagagcctc

SEQ ID NO: 793801 - DNA, 33 bp, Homo sapien
attgggactagaagaaagaggcacatctctgtt

SEQ ID NO: 793802 - DNA, 33 bp, Homo sapien
attgggactagaagaaggaggcacatctctgtt

SEQ ID NO: 793803 - DNA, 33 bp, Homo sapien
cagcctggcctttctacgcttcttcccaaaatg

SEQ ID NO: 793804 - DNA, 33 bp, Homo sapien
cagcctggcctttctatgcttcttcccaaaatg

SEQ ID NO: 793805 - DNA, 33 bp, Homo sapien
acgtaatagagaacaacgtcagagaggcatttt

SEQ ID NO: 793806 - DNA, 33 bp, Homo sapien
acgtaatagagaacaatgtcagagaggcatttt

SEQ ID NO: 793807 - DNA, 33 bp, Homo sapien
gttatttaaggcagcactatttatctaccaacc

SEQ ID NO: 793808 - DNA, 33 bp, Homo sapien
gttatttaaggcagcattatttatctaccaacc

SEQ ID NO: 793809 - DNA, 33 bp, Homo sapien
tgctctctcagtctacacatatactctgcaata

SEQ ID NO: 793810 - DNA, 33 bp, Homo sapien
tgctctctcagtctacgcatatactctgcaata

SEQ ID NO: 793811 - DNA, 33 bp, Homo sapien
ttctgtgcaagttaaaaacattgatctggacaa

SEQ ID NO: 793812 - DNA, 33 bp, Homo sapien
ttctgtgcaagttaaagacattgatctggacaa

SEQ ID NO: 793813 - DNA, 33 bp, Homo sapien
atttgtacgcccattaagcatcaatagaaataa

SEQ ID NO: 793814 - DNA, 33 bp, Homo sapien
atttgtacgcccattaggcatcaatagaaataa

SEQ ID NO: 793815 - DNA, 33 bp, Homo sapien
gaaacctagaagaaaacgcacagagtacaagca

SEQ ID NO: 793816 - DNA, 33 bp, Homo sapien
gaaacctagaagaaaatgcacagagtacaagca

SEQ ID NO: 793817 - DNA, 33 bp, Homo sapien
tctacttggttgctgaccactgctctttggaag

SEQ ID NO: 793818 - DNA, 33 bp, Homo sapien
tctacttggttgctgatcactgctctttggaag

SEQ ID NO: 793819 - DNA, 33 bp, Homo sapien
agtgtgggttctttggccagttttactattaag

SEQ ID NO: 793820 - DNA, 33 bp, Homo sapien
agtgtgggttctttggtcagttttactattaag

SEQ ID NO: 793821 - DNA, 33 bp, Homo sapien
atatccactctaatgacaggtggcaatggcaga

SEQ ID NO: 793822 - DNA, 33 bp, Homo sapien
atatccactctaatgataggtggcaatggcaga

SEQ ID NO: 793823 - DNA, 33 bp, Homo sapien
agttgaggaattagcccagataaaatacaagcg

SEQ ID NO: 793824 - DNA, 33 bp, Homo sapien
agttgaggaattagcctagataaaatacaagcg

SEQ ID NO: 793825 - DNA, 33 bp, Homo sapien
agatggtaacacattacagtttgggtttgcatt

SEQ ID NO: 793826 - DNA, 33 bp, Homo sapien
agatggtaacacattagagtttgggtttgcatt

SEQ ID NO: 793827 - DNA, 33 bp, Homo sapien
caaagtcagtgctaagaagaaattttatagcaa

SEQ ID NO: 793828 - DNA, 33 bp, Homo sapien
caaagtcagtgctaagcagaaattttatagcaa

SEQ ID NO: 793829 - DNA, 33 bp, Homo sapien
aaaaacacaagatgtcacctcatctataaaaag

SEQ ID NO: 793830 - DNA, 33 bp, Homo sapien
aaaaacacaagatgtctcctcatctataaaaag

SEQ ID NO: 793831 - DNA, 33 bp, Homo sapien
tgcataactgtaagataaaatttgatctcacaa

SEQ ID NO: 793832 - DNA, 33 bp, Homo sapien
tgcataactgtaagatgaaatttgatctcacaa

SEQ ID NO: 793833 - DNA, 33 bp, Homo sapien
gatcaggagagaaataaaaatgaaaactgaatt

SEQ ID NO: 793834 - DNA, 33 bp, Homo sapien
gatcaggagagaaatagaaatgaaaactgaatt

SEQ ID NO: 793835 - DNA, 33 bp, Homo sapien
agtctcaatacagccaccttttgtagtaggaaa

SEQ ID NO: 793836 - DNA, 33 bp, Homo sapien
agtctcaatacagccatcttttgtagtaggaaa

SEQ ID NO: 793837 - DNA, 33 bp, Homo sapien
gagataagtaagaggacagcaagttgtttgtgg

SEQ ID NO: 793838 - DNA, 33 bp, Homo sapien
gagataagtaagaggagagcaagttgtttgtgg

SEQ ID NO: 793839 - DNA, 33 bp, Homo sapien
tcttagtacacgctgcaatttatataacaaagt

SEQ ID NO: 793840 - DNA, 33 bp, Homo sapien
tcttagtacacgctgcgatttatataacaaagt

SEQ ID NO: 793841 - DNA, 33 bp, Homo sapien
agaaatggatcttgaaaacaaagttctgatatt

SEQ ID NO: 793842 - DNA, 33 bp, Homo sapien
agaaatggatcttgaatacaaagttctgatatt

SEQ ID NO: 793843 - DNA, 33 bp, Homo sapien
cagccaatcaagatcaccattctttgtccctcc

SEQ ID NO: 793844 - DNA, 33 bp, Homo sapien
cagccaatcaagatcagcattctttgtccctcc

SEQ ID NO: 793845 - DNA, 33 bp, Homo sapien
agagctattggttagcaaaattgccaaaagttc

SEQ ID NO: 793846 - DNA, 33 bp, Homo sapien
agagctattggttagccaaattgccaaaagttc

SEQ ID NO: 793847 - DNA, 33 bp, Homo sapien
acaatatatcccacaaaacccaattgtactaag

SEQ ID NO: 793848 - DNA, 33 bp, Homo sapien
acaatatatcccacaatacccaattgtactaag

SEQ ID NO: 793849 - DNA, 33 bp, Homo sapien
gccttaattattaaaacgttgtgactttggcac

SEQ ID NO: 793850 - DNA, 33 bp, Homo sapien
gccttaattattaaaatgttgtgactttggcac

SEQ ID NO: 793851 - DNA, 33 bp, Homo sapien
aacaagacttttcaggaaacacttataaatatt

SEQ ID NO: 793852 - DNA, 33 bp, Homo sapien
aacaagacttttcagggaacacttataaatatt

SEQ ID NO: 793853 - DNA, 33 bp, Homo sapien
aaagatggttctaagccgaatcctctcaggcac

SEQ ID NO: 793854 - DNA, 33 bp, Homo sapien
aaagatggttctaagctgaatcctctcaggcac

SEQ ID NO: 793855 - DNA, 33 bp, Homo sapien
atgcagtacgtctaaacgcataaaataacttcc

SEQ ID NO: 793856 - DNA, 33 bp, Homo sapien
atgcagtacgtctaaatgcataaaataacttcc

SEQ ID NO: 793857 - DNA, 33 bp, Homo sapien
aaatttgtacattcaaaaacaacaaatcactga

SEQ ID NO: 793858 - DNA, 33 bp, Homo sapien
aaatttgtacattcaagaacaacaaatcactga

SEQ ID NO: 793859 - DNA, 33 bp, Homo sapien
agagctgtttcagggaacaaagtgcctaatttg

SEQ ID NO: 793860 - DNA, 33 bp, Homo sapien
agagctgtttcagggagcaaagtgcctaatttg

SEQ ID NO: 793861 - DNA, 33 bp, Homo sapien
cacaatctgtaactcacacaaataattcactct

SEQ ID NO: 793862 - DNA, 33 bp, Homo sapien
cacaatctgtaactcagacaaataattcactct

SEQ ID NO: 793863 - DNA, 33 bp, Homo sapien
caattttttgtagtaaatataagggcgagattg

SEQ ID NO: 793864 - DNA, 33 bp, Homo sapien
caattttttgtagtaagtataagggcgagattg

SEQ ID NO: 793865 - DNA, 33 bp, Homo sapien
gttatagtccttcataacaagcatggccctatt

SEQ ID NO: 793866 - DNA, 33 bp, Homo sapien
gttatagtccttcataccaagcatggccctatt

SEQ ID NO: 793867 - DNA, 33 bp, Homo sapien
tgtatggatcttctcaagcaaggccacttcttc

SEQ ID NO: 793868 - DNA, 33 bp, Homo sapien
tgtatggatcttctcaggcaaggccacttcttc

SEQ ID NO: 793869 - DNA, 33 bp, Homo sapien
gactcactgtcagttaagagttcctttgtagac

SEQ ID NO: 793870 - DNA, 33 bp, Homo sapien
gactcactgtcagttaggagttcctttgtagac

SEQ ID NO: 793871 - DNA, 33 bp, Homo sapien
ccaggtcagggtaagacggaaagcaaggtagct

SEQ ID NO: 793872 - DNA, 33 bp, Homo sapien
ccaggtcagggtaagatggaaagcaaggtagct

SEQ ID NO: 793873 - DNA, 33 bp, Homo sapien
aactgaaaatgaatgaagattttgagtgtccat

SEQ ID NO: 793874 - DNA, 33 bp, Homo sapien
aactgaaaatgaatgacgattttgagtgtccat

SEQ ID NO: 793875 - DNA, 33 bp, Homo sapien
ctaaatttctttagagactcatgcagttattct

SEQ ID NO: 793876 - DNA, 33 bp, Homo sapien
ctaaatttctttagagtctcatgcagttattct

SEQ ID NO: 793877 - DNA, 33 bp, Homo sapien
tttcaccccagaacaactgagctgtttgttacc

SEQ ID NO: 793878 - DNA, 33 bp, Homo sapien
tttcaccccagaacaattgagctgtttgttacc

SEQ ID NO: 793879 - DNA, 33 bp, Homo sapien
aattggttctattatgaatggtagacaagactg

SEQ ID NO: 793880 - DNA, 33 bp, Homo sapien
aattggttctattatgtatggtagacaagactg

SEQ ID NO: 793881 - DNA, 33 bp, Homo sapien
atcaggtcatctggacaaatcttgaaacacatt

SEQ ID NO: 793882 - DNA, 33 bp, Homo sapien
atcaggtcatctggacgaatcttgaaacacatt

SEQ ID NO: 793883 - DNA, 33 bp, Homo sapien
agttttcccacagtacaaagccatcagcaagtc

SEQ ID NO: 793884 - DNA, 33 bp, Homo sapien
agttttcccacagtacgaagccatcagcaagtc

SEQ ID NO: 793885 - DNA, 33 bp, Homo sapien
atctggttctctaaaactgtgtatcacgtcccc

SEQ ID NO: 793886 - DNA, 33 bp, Homo sapien
atctggttctctaaaattgtgtatcacgtcccc

SEQ ID NO: 793887 - DNA, 33 bp, Homo sapien
aaattctccgaaaaaaatgttatagatcaaaat

SEQ ID NO: 793888 - DNA, 33 bp, Homo sapien
aaattctccgaaaaaagtgttatagatcaaaat

SEQ ID NO: 793889 - DNA, 33 bp, Homo sapien
gtgcttgcactaatctcaaggtgatatattgtt

SEQ ID NO: 793890 - DNA, 33 bp, Homo sapien
gtgcttgcactaatcttaaggtgatatattgtt

SEQ ID NO: 793891 - DNA, 33 bp, Homo sapien
aggtgatatattgttacctgagagtgaaattag

SEQ ID NO: 793892 - DNA, 33 bp, Homo sapien
aggtgatatattgttatctgagagtgaaattag

SEQ ID NO: 793893 - DNA, 33 bp, Homo sapien
atagactgggctttcagcatttaaacagaatgt

SEQ ID NO: 793894 - DNA, 33 bp, Homo sapien
atagactgggctttcatcatttaaacagaatgt

SEQ ID NO: 793895 - DNA, 33 bp, Homo sapien
catcttcctcagggtacatctaaatttcagctg

SEQ ID NO: 793896 - DNA, 33 bp, Homo sapien
catcttcctcagggtatatctaaatttcagctg

SEQ ID NO: 793897 - DNA, 33 bp, Homo sapien
aattgccttctttaaaatcttctaatactcgaa

SEQ ID NO: 793898 - DNA, 33 bp, Homo sapien
aattgccttctttaaactcttctaatactcgaa

SEQ ID NO: 793899 - DNA, 33 bp, Homo sapien
aggagacaccatacctgaagctttctgtggttc

SEQ ID NO: 793900 - DNA, 33 bp, Homo sapien
aggagacaccataccttaagctttctgtggttc

SEQ ID NO: 793901 - DNA, 33 bp, Homo sapien
aaattagtaaaagtaacgcttcaagtggctgag

SEQ ID NO: 793902 - DNA, 33 bp, Homo sapien
aaattagtaaaagtaaggcttcaagtggctgag

SEQ ID NO: 793903 - DNA, 33 bp, Homo sapien
agatataattaagttccaagtctggtgaaaact

SEQ ID NO: 793904 - DNA, 33 bp, Homo sapien
agatataattaagttctaagtctggtgaaaact

SEQ ID NO: 793905 - DNA, 33 bp, Homo sapien
atttcgagtgataaaaattccacatttccagac

SEQ ID NO: 793906 - DNA, 33 bp, Homo sapien
atttcgagtgataaaacttccacatttccagac

SEQ ID NO: 793907 - DNA, 33 bp, Homo sapien
ggacattcactatttccagttcactgacaaaat

SEQ ID NO: 793908 - DNA, 33 bp, Homo sapien
ggacattcactatttctagttcactgacaaaat

SEQ ID NO: 793909 - DNA, 33 bp, Homo sapien
ataatggcagtgtctacgatctggaagaaaggg

SEQ ID NO: 793910 - DNA, 33 bp, Homo sapien
ataatggcagtgtctatgatctggaagaaaggg

SEQ ID NO: 793911 - DNA, 33 bp, Homo sapien
cattgtaatgtgtttaactatgatactaatgtc

SEQ ID NO: 793912 - DNA, 33 bp, Homo sapien
cattgtaatgtgtttacctatgatactaatgtc

SEQ ID NO: 793913 - DNA, 33 bp, Homo sapien
aaaaagtaacacagcactctcccagagaataaa

SEQ ID NO: 793914 - DNA, 33 bp, Homo sapien
aaaaagtaacacagcagtctcccagagaataaa

SEQ ID NO: 793915 - DNA, 33 bp, Homo sapien
tgtgtagtgaaaaacacgacacattagcagagt

SEQ ID NO: 793916 - DNA, 33 bp, Homo sapien
tgtgtagtgaaaaacatgacacattagcagagt

SEQ ID NO: 793917 - DNA, 33 bp, Homo sapien
ctcctgaatgtagggacggtgtcatttcaaaaa

SEQ ID NO: 793918 - DNA, 33 bp, Homo sapien
ctcctgaatgtagggatggtgtcatttcaaaaa

SEQ ID NO: 793919 - DNA, 33 bp, Homo sapien
aattcaatgcttatgaaagaagggaaatcctaa

SEQ ID NO: 793920 - DNA, 33 bp, Homo sapien
aattcaatgcttatgagagaagggaaatcctaa

SEQ ID NO: 793921 - DNA, 33 bp, Homo sapien
attcccaaatgaagtacgaatgttggcagggga

SEQ ID NO: 793922 - DNA, 33 bp, Homo sapien
attcccaaatgaagtatgaatgttggcagggga

SEQ ID NO: 793923 - DNA, 33 bp, Homo sapien
cttctaattagcagaaattaggaatgaaattgg

SEQ ID NO: 793924 - DNA, 33 bp, Homo sapien
cttctaattagcagaagttaggaatgaaattgg

SEQ ID NO: 793925 - DNA, 33 bp, Homo sapien
agtattgtgtgtggaaaaaagtacggatgaggt

SEQ ID NO: 793926 - DNA, 33 bp, Homo sapien
agtattgtgtgtggaagaaagtacggatgaggt

SEQ ID NO: 793927 - DNA, 33 bp, Homo sapien
tagctgcagttaatgacacaagagactccaatt

SEQ ID NO: 793928 - DNA, 33 bp, Homo sapien
tagctgcagttaatgatacaagagactccaatt

SEQ ID NO: 793929 - DNA, 33 bp, Homo sapien
ctggattcaagtcagacatcttactatgaactc

SEQ ID NO: 793930 - DNA, 33 bp, Homo sapien
ctggattcaagtcagagatcttactatgaactc

SEQ ID NO: 793931 - DNA, 33 bp, Homo sapien
ataacactgcaaggaacatggtagcacagacat

SEQ ID NO: 793932 - DNA, 33 bp, Homo sapien
ataacactgcaaggaatatggtagcacagacat

SEQ ID NO: 793933 - DNA, 33 bp, Homo sapien
ttctactcctttcaaacggtggcacttaattct

SEQ ID NO: 793934 - DNA, 33 bp, Homo sapien
ttctactcctttcaaatggtggcacttaattct

SEQ ID NO: 793935 - DNA, 33 bp, Homo sapien
tattttccaagcactacgctaaagcttttacac

SEQ ID NO: 793936 - DNA, 33 bp, Homo sapien
tattttccaagcactatgctaaagcttttacac

SEQ ID NO: 793937 - DNA, 33 bp, Homo sapien
cttatcttattgtagcactgatggagctatttt

SEQ ID NO: 793938 - DNA, 33 bp, Homo sapien
cttatcttattgtagcgctgatggagctatttt

SEQ ID NO: 793939 - DNA, 33 bp, Homo sapien
agcttttaattaatccacctacgaaatggagat

SEQ ID NO: 793940 - DNA, 33 bp, Homo sapien
agcttttaattaatccgcctacgaaatggagat

SEQ ID NO: 793941 - DNA, 33 bp, Homo sapien
acattgaaaaagtgtacgtctaaggttatcagt

SEQ ID NO: 793942 - DNA, 33 bp, Homo sapien
acattgaaaaagtgtatgtctaaggttatcagt

SEQ ID NO: 793943 - DNA, 33 bp, Homo sapien
gtttcatgtatccgggaagtttcacatgctttt

SEQ ID NO: 793944 - DNA, 33 bp, Homo sapien
gtttcatgtatccgggcagtttcacatgctttt

SEQ ID NO: 793945 - DNA, 33 bp, Homo sapien
tggtgataagtcctaagcaagtgtaaaatttag

SEQ ID NO: 793946 - DNA, 33 bp, Homo sapien
tggtgataagtcctaatcaagtgtaaaatttag

SEQ ID NO: 793947 - DNA, 33 bp, Homo sapien
gtgttctaatctttcacggaaggcagaacttag

SEQ ID NO: 793948 - DNA, 33 bp, Homo sapien
gtgttctaatctttcatggaaggcagaacttag

SEQ ID NO: 793949 - DNA, 33 bp, Homo sapien
ctcttgttacggattccaaggtgttcacagttt

SEQ ID NO: 793950 - DNA, 33 bp, Homo sapien
ctcttgttacggattctaaggtgttcacagttt

SEQ ID NO: 793951 - DNA, 33 bp, Homo sapien
tcctatcatcctctgaaatgtcttttgtttaaa

SEQ ID NO: 793952 - DNA, 33 bp, Homo sapien
tcctatcatcctctgagatgtcttttgtttaaa

SEQ ID NO: 793953 - DNA, 33 bp, Homo sapien
ttcattcaagtttacaccaatttttgaatacaa

SEQ ID NO: 793954 - DNA, 33 bp, Homo sapien
ttcattcaagtttacagcaatttttgaatacaa

SEQ ID NO: 793955 - DNA, 33 bp, Homo sapien
aatatctaagttttaacggaagcataagcagca

SEQ ID NO: 793956 - DNA, 33 bp, Homo sapien
aatatctaagttttaagggaagcataagcagca

SEQ ID NO: 793957 - DNA, 33 bp, Homo sapien
attttatgctctgtcaccttttgaatgctttac

SEQ ID NO: 793958 - DNA, 33 bp, Homo sapien
attttatgctctgtcatcttttgaatgctttac

SEQ ID NO: 793959 - DNA, 33 bp, Homo sapien
ttcagtttttgtatgaaagtactactggcttca

SEQ ID NO: 793960 - DNA, 33 bp, Homo sapien
ttcagtttttgtatgagagtactactggcttca

SEQ ID NO: 793961 - DNA, 33 bp, Homo sapien
caggcattccttaacaatcttacagaaaatgca

SEQ ID NO: 793962 - DNA, 33 bp, Homo sapien
caggcattccttaacactcttacagaaaatgca

SEQ ID NO: 793963 - DNA, 33 bp, Homo sapien
atgtgtatattactccacaagcatttatttttt

SEQ ID NO: 793964 - DNA, 33 bp, Homo sapien
atgtgtatattactccgcaagcatttatttttt

SEQ ID NO: 793965 - DNA, 33 bp, Homo sapien
ctcgtatcacaaaagaagccatgcaaactcatc

SEQ ID NO: 793966 - DNA, 33 bp, Homo sapien
ctcgtatcacaaaagaggccatgcaaactcatc

SEQ ID NO: 793967 - DNA, 33 bp, Homo sapien
tatctctcaccttatacaacagtcaactccaga

SEQ ID NO: 793968 - DNA, 33 bp, Homo sapien
tatctctcaccttatagaacagtcaactccaga

SEQ ID NO: 793969 - DNA, 33 bp, Homo sapien
ttaatttactgaaagactcatacatttccatca

SEQ ID NO: 793970 - DNA, 33 bp, Homo sapien
ttaatttactgaaagagtcatacatttccatca

SEQ ID NO: 793971 - DNA, 33 bp, Homo sapien
gattctaaaagtttaagctcctttatcttcaaa

SEQ ID NO: 793972 - DNA, 33 bp, Homo sapien
gattctaaaagtttaatctcctttatcttcaaa

SEQ ID NO: 793973 - DNA, 33 bp, Homo sapien
aaaaacaaacagcaataataagcacccatgtgc

SEQ ID NO: 793974 - DNA, 33 bp, Homo sapien
aaaaacaaacagcaatgataagcacccatgtgc

SEQ ID NO: 793975 - DNA, 33 bp, Homo sapien
ttgtgaaatttgtttcgaagcattaattatcaa

SEQ ID NO: 793976 - DNA, 33 bp, Homo sapien
ttgtgaaatttgtttctaagcattaattatcaa

SEQ ID NO: 793977 - DNA, 33 bp, Homo sapien
taactaaaaatatcaccatggcaactttgataa

SEQ ID NO: 793978 - DNA, 33 bp, Homo sapien
taactaaaaatatcactatggcaactttgataa

SEQ ID NO: 793979 - DNA, 33 bp, Homo sapien
tacactaacagcaatgacaaaaaagagtgtaaa

SEQ ID NO: 793980 - DNA, 33 bp, Homo sapien
tacactaacagcaatgtcaaaaaagagtgtaaa

SEQ ID NO: 793981 - DNA, 33 bp, Homo sapien
aataagataccaactacgctggctttaatagta

SEQ ID NO: 793982 - DNA, 33 bp, Homo sapien
aataagataccaactatgctggctttaatagta

SEQ ID NO: 793983 - DNA, 33 bp, Homo sapien
aaaaaaaccctagtggccatgcacgctgagaat

SEQ ID NO: 793984 - DNA, 33 bp, Homo sapien
aaaaaaaccctagtggtcatgcacgctgagaat

SEQ ID NO: 793985 - DNA, 33 bp, Homo sapien
attaaagagcaaaatacgcagattgttcaatat

SEQ ID NO: 793986 - DNA, 33 bp, Homo sapien
attaaagagcaaaatatgcagattgttcaatat

SEQ ID NO: 793987 - DNA, 33 bp, Homo sapien
gaactctcataaaaacaatctctgctagggcag

SEQ ID NO: 793988 - DNA, 33 bp, Homo sapien
gaactctcataaaaactatctctgctagggcag

SEQ ID NO: 793989 - DNA, 33 bp, Homo sapien
gcccctgggtacaggtaaaagacctacactgta

SEQ ID NO: 793990 - DNA, 33 bp, Homo sapien
gcccctgggtacaggtgaaagacctacactgta

SEQ ID NO: 793991 - DNA, 33 bp, Homo sapien
ctgggttcagatcagactcctggtgtgggagac

SEQ ID NO: 793992 - DNA, 33 bp, Homo sapien
ctgggttcagatcagagtcctggtgtgggagac

SEQ ID NO: 793993 - DNA, 33 bp, Homo sapien
agtttcctaaactcaacactccttagcttgttg

SEQ ID NO: 793994 - DNA, 33 bp, Homo sapien
agtttcctaaactcaagactccttagcttgttg

SEQ ID NO: 793995 - DNA, 33 bp, Homo sapien
agtttctctttgtggaagtagtattaagagcaa

SEQ ID NO: 793996 - DNA, 33 bp, Homo sapien
agtttctctttgtggaggtagtattaagagcaa

SEQ ID NO: 793997 - DNA, 33 bp, Homo sapien
attttgctctggcacaatggaatttttgctgat

SEQ ID NO: 793998 - DNA, 33 bp, Homo sapien
attttgctctggcacattggaatttttgctgat

SEQ ID NO: 793999 - DNA, 33 bp, Homo sapien
agcgtcaaaaatcttacaaatgtacttgatatt

SEQ ID NO: 794000 - DNA, 33 bp, Homo sapien
agcgtcaaaaatcttagaaatgtacttgatatt

SEQ ID NO: 794001 - DNA, 33 bp, Homo sapien
agcatactaaagcctacgtgaggcagcaagtgc

SEQ ID NO: 794002 - DNA, 33 bp, Homo sapien
agcatactaaagcctatgtgaggcagcaagtgc

SEQ ID NO: 794003 - DNA, 33 bp, Homo sapien
aaaatcaaaacaattaagctcatggtgatagag

SEQ ID NO: 794004 - DNA, 33 bp, Homo sapien
aaaatcaaaacaattacgctcatggtgatagag

SEQ ID NO: 794005 - DNA, 33 bp, Homo sapien
tttagggaatacttatcaagaacaggtcaggcc

SEQ ID NO: 794006 - DNA, 33 bp, Homo sapien
tttagggaatacttatgaagaacaggtcaggcc

SEQ ID NO: 794007 - DNA, 33 bp, Homo sapien
aaagaaggctgctgaaactggagtaaagatcat

SEQ ID NO: 794008 - DNA, 33 bp, Homo sapien
aaagaaggctgctgaagctggagtaaagatcat

SEQ ID NO: 794009 - DNA, 33 bp, Homo sapien
ttcaaagcctatatcactcacaagtgtgcttat

SEQ ID NO: 794010 - DNA, 33 bp, Homo sapien
ttcaaagcctatatcattcacaagtgtgcttat

SEQ ID NO: 794011 - DNA, 33 bp, Homo sapien
ttctactctatctttaggtatacaaacactatc

SEQ ID NO: 794012 - DNA, 33 bp, Homo sapien
ttctactctatctttatgtatacaaacactatc

SEQ ID NO: 794013 - DNA, 33 bp, Homo sapien
gcagaaggccatttaacgtgaaaaaaagcacct

SEQ ID NO: 794014 - DNA, 33 bp, Homo sapien
gcagaaggccatttaatgtgaaaaaaagcacct

SEQ ID NO: 794015 - DNA, 33 bp, Homo sapien
atggagagtgagaacaagggaaggaatgtctga

SEQ ID NO: 794016 - DNA, 33 bp, Homo sapien
atggagagtgagaacaggggaaggaatgtctga

SEQ ID NO: 794017 - DNA, 33 bp, Homo sapien
atttctgtctctaataactttatggagagattt

SEQ ID NO: 794018 - DNA, 33 bp, Homo sapien
atttctgtctctaatacctttatggagagattt

SEQ ID NO: 794019 - DNA, 33 bp, Homo sapien
gtagctaatgtaagttcaaatatgtcctacaaa

SEQ ID NO: 794020 - DNA, 33 bp, Homo sapien
gtagctaatgtaagttgaaatatgtcctacaaa

SEQ ID NO: 794021 - DNA, 33 bp, Homo sapien
tttaaaacaaaagtccagtcaagtcacttctct

SEQ ID NO: 794022 - DNA, 33 bp, Homo sapien
tttaaaacaaaagtccggtcaagtcacttctct

SEQ ID NO: 794023 - DNA, 33 bp, Homo sapien
atcacactactcagaacggtgatgcacaattta

SEQ ID NO: 794024 - DNA, 33 bp, Homo sapien
atcacactactcagaatggtgatgcacaattta

SEQ ID NO: 794025 - DNA, 33 bp, Homo sapien
acttaatgactaatgagtaggtagtatagacag

SEQ ID NO: 794026 - DNA, 33 bp, Homo sapien
acttaatgactaatgattaggtagtatagacag

SEQ ID NO: 794027 - DNA, 33 bp, Homo sapien
tattataccagaacgcaaaataaactttgtttc

SEQ ID NO: 794028 - DNA, 33 bp, Homo sapien
tattataccagaacgcgaaataaactttgtttc

SEQ ID NO: 794029 - DNA, 33 bp, Homo sapien
atgattgaaggaatacagtaacttacataataa

SEQ ID NO: 794030 - DNA, 33 bp, Homo sapien
atgattgaaggaatacggtaacttacataataa

SEQ ID NO: 794031 - DNA, 33 bp, Homo sapien
taagatttcaacatatgaggagcccataacaat

SEQ ID NO: 794032 - DNA, 33 bp, Homo sapien
taagatttcaacatattaggagcccataacaat

SEQ ID NO: 794033 - DNA, 33 bp, Homo sapien
tcaacagttcaacagcaaaatgaaataaattgt

SEQ ID NO: 794034 - DNA, 33 bp, Homo sapien
tcaacagttcaacagctaaatgaaataaattgt

SEQ ID NO: 794035 - DNA, 33 bp, Homo sapien
agcagattagtggacggaagttgtcactaatga

SEQ ID NO: 794036 - DNA, 33 bp, Homo sapien
agcagattagtggacgtaagttgtcactaatga

SEQ ID NO: 794037 - DNA, 33 bp, Homo sapien
ccaagatgggaaagcactatacataggagaaac

SEQ ID NO: 794038 - DNA, 33 bp, Homo sapien
ccaagatgggaaagcattatacataggagaaac

SEQ ID NO: 794039 - DNA, 33 bp, Homo sapien
ttaaaatgctcaaaccaattattgtgaacattc

SEQ ID NO: 794040 - DNA, 33 bp, Homo sapien
ttaaaatgctcaaaccgattattgtgaacattc

SEQ ID NO: 794041 - DNA, 33 bp, Homo sapien
taggaattaagctgcaatatgtgattcgttccc

SEQ ID NO: 794042 - DNA, 33 bp, Homo sapien
taggaattaagctgcattatgtgattcgttccc

SEQ ID NO: 794043 - DNA, 33 bp, Homo sapien
gattcatttccatctacattatgaattctattt

SEQ ID NO: 794044 - DNA, 33 bp, Homo sapien
gattcatttccatctagattatgaattctattt

SEQ ID NO: 794045 - DNA, 33 bp, Homo sapien
ttggtgggcatataacaatactagaaaacaaaa

SEQ ID NO: 794046 - DNA, 33 bp, Homo sapien
ttggtgggcatataacgatactagaaaacaaaa

SEQ ID NO: 794047 - DNA, 33 bp, Homo sapien
ggcacaatattttttcaaacgctagataaacaa

SEQ ID NO: 794048 - DNA, 33 bp, Homo sapien
ggcacaatattttttccaacgctagataaacaa

SEQ ID NO: 794049 - DNA, 33 bp, Homo sapien
ttattcaacaagaaaacatagctatcctgtgtg

SEQ ID NO: 794050 - DNA, 33 bp, Homo sapien
ttattcaacaagaaaatatagctatcctgtgtg

SEQ ID NO: 794051 - DNA, 33 bp, Homo sapien
gtctgccgctttgaaaaagtagggacttattcc

SEQ ID NO: 794052 - DNA, 33 bp, Homo sapien
gtctgccgctttgaaagagtagggacttattcc

SEQ ID NO: 794053 - DNA, 33 bp, Homo sapien
attcagccatacaaaaatggaatcatgtccttt

SEQ ID NO: 794054 - DNA, 33 bp, Homo sapien
attcagccatacaaaagtggaatcatgtccttt

SEQ ID NO: 794055 - DNA, 33 bp, Homo sapien
aatcaaatcaaatagccactgtactctaagaat

SEQ ID NO: 794056 - DNA, 33 bp, Homo sapien
aatcaaatcaaatagctactgtactctaagaat

SEQ ID NO: 794057 - DNA, 33 bp, Homo sapien
ggagagtctaacactacgatattacccataaaa

SEQ ID NO: 794058 - DNA, 33 bp, Homo sapien
ggagagtctaacactaggatattacccataaaa

SEQ ID NO: 794059 - DNA, 33 bp, Homo sapien
cgggactttatatcacagcatattagaataatt

SEQ ID NO: 794060 - DNA, 33 bp, Homo sapien
cgggactttatatcactgcatattagaataatt

SEQ ID NO: 794061 - DNA, 33 bp, Homo sapien
tctcattggcaagtaagatgagattgtagtgtt

SEQ ID NO: 794062 - DNA, 33 bp, Homo sapien
tctcattggcaagtaatatgagattgtagtgtt

SEQ ID NO: 794063 - DNA, 33 bp, Homo sapien
tcttgaaagaaaagcacattcgtagccttcctt

SEQ ID NO: 794064 - DNA, 33 bp, Homo sapien
tcttgaaagaaaagcagattcgtagccttcctt

SEQ ID NO: 794065 - DNA, 33 bp, Homo sapien
ttgttgctatatcaggaaaaaaaaagattattg

SEQ ID NO: 794066 - DNA, 33 bp, Homo sapien
ttgttgctatatcagggaaaaaaaagattattg

SEQ ID NO: 794067 - DNA, 33 bp, Homo sapien
ttctaccaataatggacgagggaccctgtttct

SEQ ID NO: 794068 - DNA, 33 bp, Homo sapien
ttctaccaataatggatgagggaccctgtttct

SEQ ID NO: 794069 - DNA, 33 bp, Homo sapien
aaatagttataaaagcaaaaggtatgtctgcac

SEQ ID NO: 794070 - DNA, 33 bp, Homo sapien
aaatagttataaaagccaaaggtatgtctgcac

SEQ ID NO: 794071 - DNA, 33 bp, Homo sapien
aacaacaaactagaccaagcagaacaaagaact

SEQ ID NO: 794072 - DNA, 33 bp, Homo sapien
aacaacaaactagaccgagcagaacaaagaact

SEQ ID NO: 794073 - DNA, 33 bp, Homo sapien
tatacagatttaagacaattctatcaaattacc

SEQ ID NO: 794074 - DNA, 33 bp, Homo sapien
tatacagatttaagactattctatcaaattacc

SEQ ID NO: 794075 - DNA, 33 bp, Homo sapien
gtctcaacaagacggtcaaaatatatacctgga

SEQ ID NO: 794076 - DNA, 33 bp, Homo sapien
gtctcaacaagacggttaaaatatatacctgga

SEQ ID NO: 794077 - DNA, 33 bp, Homo sapien
gtccatctagcaaatcacagagaacttagaacc

SEQ ID NO: 794078 - DNA, 33 bp, Homo sapien
gtccatctagcaaatcgcagagaacttagaacc

SEQ ID NO: 794079 - DNA, 33 bp, Homo sapien
tcataaagcaagtcctcagatctacaaagagac

SEQ ID NO: 794080 - DNA, 33 bp, Homo sapien
tcataaagcaagtcctgagatctacaaagagac

SEQ ID NO: 794081 - DNA, 33 bp, Homo sapien
cttcttcgataagggaaatcctagaagtaatgg

SEQ ID NO: 794082 - DNA, 33 bp, Homo sapien
cttcttcgataagggacatcctagaagtaatgg

SEQ ID NO: 794083 - DNA, 33 bp, Homo sapien
cttataaccattataaaactcagggtgtaaaga

SEQ ID NO: 794084 - DNA, 33 bp, Homo sapien
cttataaccattataacactcagggtgtaaaga

SEQ ID NO: 794085 - DNA, 33 bp, Homo sapien
attgggtgggagaatccaatgatacaattttta

SEQ ID NO: 794086 - DNA, 33 bp, Homo sapien
attgggtgggagaatctaatgatacaattttta

SEQ ID NO: 794087 - DNA, 33 bp, Homo sapien
tgatacttcttaataacgcaaagcaccattttt

SEQ ID NO: 794088 - DNA, 33 bp, Homo sapien
tgatacttcttaataatgcaaagcaccattttt

SEQ ID NO: 794089 - DNA, 33 bp, Homo sapien
aactaacgattcatctcaagttctaaatacaag

SEQ ID NO: 794090 - DNA, 33 bp, Homo sapien
aactaacgattcatctgaagttctaaatacaag

SEQ ID NO: 794091 - DNA, 33 bp, Homo sapien
atgaggacttcatcaacagtactgggaatgaaa

SEQ ID NO: 794092 - DNA, 33 bp, Homo sapien
atgaggacttcatcaatagtactgggaatgaaa

SEQ ID NO: 794093 - DNA, 33 bp, Homo sapien
aattaacattattcagcacttagaagtatagtt

SEQ ID NO: 794094 - DNA, 33 bp, Homo sapien
aattaacattattcaggacttagaagtatagtt

SEQ ID NO: 794095 - DNA, 33 bp, Homo sapien
gaaaatttatgacagggaaagtaaggcttgctt

SEQ ID NO: 794096 - DNA, 33 bp, Homo sapien
gaaaatttatgacaggtaaagtaaggcttgctt

SEQ ID NO: 794097 - DNA, 33 bp, Homo sapien
ctcaaacacctaaatacgacacagaaactatta

SEQ ID NO: 794098 - DNA, 33 bp, Homo sapien
ctcaaacacctaaatatgacacagaaactatta

SEQ ID NO: 794099 - DNA, 33 bp, Homo sapien
ttgtgtctgataattacaacatctgaagagtct

SEQ ID NO: 794100 - DNA, 33 bp, Homo sapien
ttgtgtctgataattagaacatctgaagagtct

SEQ ID NO: 794101 - DNA, 33 bp, Homo sapien
ctatgcattcttattacacctctttctgtctac

SEQ ID NO: 794102 - DNA, 33 bp, Homo sapien
ctatgcattcttattatacctctttctgtctac

SEQ ID NO: 794103 - DNA, 33 bp, Homo sapien
tcaagaagttacaggggatcagaagcagagaaa

SEQ ID NO: 794104 - DNA, 33 bp, Homo sapien
tcaagaagttacagggtatcagaagcagagaaa

SEQ ID NO: 794105 - DNA, 33 bp, Homo sapien
gaaagactgggagttagagaagacaagtggggt

SEQ ID NO: 794106 - DNA, 33 bp, Homo sapien
gaaagactgggagttatagaagacaagtggggt

SEQ ID NO: 794107 - DNA, 33 bp, Homo sapien
acagcctattttcacacatctttttgagtcaat

SEQ ID NO: 794108 - DNA, 33 bp, Homo sapien
acagcctattttcacatatctttttgagtcaat

SEQ ID NO: 794109 - DNA, 33 bp, Homo sapien
ccaatgggctggaggacgttcccaaaaatcagt

SEQ ID NO: 794110 - DNA, 33 bp, Homo sapien
ccaatgggctggaggaggttcccaaaaatcagt

SEQ ID NO: 794111 - DNA, 33 bp, Homo sapien
caaacctgcacatttaactcatgtatcccagaa

SEQ ID NO: 794112 - DNA, 33 bp, Homo sapien
caaacctgcacatttagctcatgtatcccagaa

SEQ ID NO: 794113 - DNA, 33 bp, Homo sapien
tctaacacaatgtaagcaagctaagaatctcga

SEQ ID NO: 794114 - DNA, 33 bp, Homo sapien
tctaacacaatgtaaggaagctaagaatctcga

SEQ ID NO: 794115 - DNA, 33 bp, Homo sapien; identical to SEQ ID NO: 794113

SEQ ID NO: 794116 - DNA, 33 bp, Homo sapien; identical to SEQ ID NO: 794114

SEQ ID NO: 794117 - DNA, 33 bp, Homo sapien
aaaacaagacatctgaactggtaaattaaagtg

SEQ ID NO: 794118 - DNA, 33 bp, Homo sapien
aaaacaagacatctgatctggtaaattaaagtg

SEQ ID NO: 794119 - DNA, 33 bp, Homo sapien
cagtaagacatgaaaaacaatggaatgctaaac

SEQ ID NO: 794120 - DNA, 33 bp, Homo sapien
cagtaagacatgaaaaccaatggaatgctaaac

SEQ ID NO: 794121 - DNA, 33 bp, Homo sapien
tcactcaagggaagcacagagactaatcacatg

SEQ ID NO: 794122 - DNA, 33 bp, Homo sapien
tcactcaagggaagcagagagactaatcacatg

SEQ ID NO: 794123 - DNA, 33 bp, Homo sapien
tcaatgagattaggccagctgtttgataattgg

SEQ ID NO: 794124 - DNA, 33 bp, Homo sapien
tcaatgagattaggccggctgtttgataattgg

SEQ ID NO: 794125 - DNA, 33 bp, Homo sapien
aggagggaaaggagaccgagacagaagcatggt

SEQ ID NO: 794126 - DNA, 33 bp, Homo sapien
aggagggaaaggagactgagacagaagcatggt

SEQ ID NO: 794127 - DNA, 33 bp, Homo sapien
gctataggaaattctcaacattcacagtagtta

SEQ ID NO: 794128 - DNA, 33 bp, Homo sapien
gctataggaaattctcgacattcacagtagtta

SEQ ID NO: 794129 - DNA, 33 bp, Homo sapien
ctttcaagtgagcaaacctctggttgacattac

SEQ ID NO: 794130 - DNA, 33 bp, Homo sapien
ctttcaagtgagcaaatctctggttgacattac

SEQ ID NO: 794131 - DNA, 33 bp, Homo sapien
ttctttagtccctttaactacaggcacaactgc

SEQ ID NO: 794132 - DNA, 33 bp, Homo sapien
ttctttagtccctttatctacaggcacaactgc

SEQ ID NO: 794133 - DNA, 33 bp, Homo sapien
actgcttaaagaaaccagatggcccaggattcc

SEQ ID NO: 794134 - DNA, 33 bp, Homo sapien
actgcttaaagaaaccggatggcccaggattcc

SEQ ID NO: 794135 - DNA, 33 bp, Homo sapien
taattggcagaatggcaactatatggcagattt

SEQ ID NO: 794136 - DNA, 33 bp, Homo sapien
taattggcagaatggctactatatggcagattt

SEQ ID NO: 794137 - DNA, 33 bp, Homo sapien
acaccatttttacttaccagatgaagtatcaca

SEQ ID NO: 794138 - DNA, 33 bp, Homo sapien
acaccatttttacttatcagatgaagtatcaca

SEQ ID NO: 794139 - DNA, 33 bp, Homo sapien
ttcacagcatgattgactaagcagcacctttta

SEQ ID NO: 794140 - DNA, 33 bp, Homo sapien
ttcacagcatgattgagtaagcagcacctttta

SEQ ID NO: 794141 - DNA, 33 bp, Homo sapien
gagcttcagccaactggagaattgaatctcaac

SEQ ID NO: 794142 - DNA, 33 bp, Homo sapien
gagcttcagccaactgtagaattgaatctcaac

SEQ ID NO: 794143 - DNA, 33 bp, Homo sapien
ccttctaaggcctttcaccttagcctatagatg

SEQ ID NO: 794144 - DNA, 33 bp, Homo sapien
ccttctaaggcctttctccttagcctatagatg

SEQ ID NO: 794145 - DNA, 33 bp, Homo sapien
tgttttatagatgccaaaaatcagggaaccata

SEQ ID NO: 794146 - DNA, 33 bp, Homo sapien
tgttttatagatgccagaaatcagggaaccata

SEQ ID NO: 794147 - DNA, 33 bp, Homo sapien
caatggacaacagatagactatttggatgacaa

SEQ ID NO: 794148 - DNA, 33 bp, Homo sapien
caatggacaacagatatactatttggatgacaa

SEQ ID NO: 794149 - DNA, 33 bp, Homo sapien
gctagtaatggagctaacttacaaaggataaaa

SEQ ID NO: 794150 - DNA, 33 bp, Homo sapien
gctagtaatggagctaccttacaaaggataaaa

SEQ ID NO: 794151 - DNA, 33 bp, Homo sapien
tatagtttcaaaagacaccattgcttagtagaa

SEQ ID NO: 794152 - DNA, 33 bp, Homo sapien
tatagtttcaaaagacgccattgcttagtagaa

SEQ ID NO: 794153 - DNA, 33 bp, Homo sapien
tatactgcaaatgctcgaatggacagcaaaaca

SEQ ID NO: 794154 - DNA, 33 bp, Homo sapien
tatactgcaaatgctctaatggacagcaaaaca

SEQ ID NO: 794155 - DNA, 33 bp, Homo sapien
aaatcaaattatagcaacctctgtataatggaa

SEQ ID NO: 794156 - DNA, 33 bp, Homo sapien
aaatcaaattatagcaccctctgtataatggaa

SEQ ID NO: 794157 - DNA, 33 bp, Homo sapien
tttctcttctgtcaaacgggcaaattggacttt

SEQ ID NO: 794158 - DNA, 33 bp, Homo sapien
tttctcttctgtcaaatgggcaaattggacttt

SEQ ID NO: 794159 - DNA, 33 bp, Homo sapien
gtgtgaggaaattatcactcccttcagcaggca

SEQ ID NO: 794160 - DNA, 33 bp, Homo sapien
gtgtgaggaaattatcgctcccttcagcaggca

SEQ ID NO: 794161 - DNA, 33 bp, Homo sapien
gtggttcactctcaaactgtgccctaagctgct

SEQ ID NO: 794162 - DNA, 33 bp, Homo sapien
gtggttcactctcaaattgtgccctaagctgct

SEQ ID NO: 794163 - DNA, 33 bp, Homo sapien
aaataagtttcatatacagtgattagtaagttt

SEQ ID NO: 794164 - DNA, 33 bp, Homo sapien
aaataagtttcatatagagtgattagtaagttt

SEQ ID NO: 794165 - DNA, 33 bp, Homo sapien
aatccagagaatagaaagaaatatcaggtgtca

SEQ ID NO: 794166 - DNA, 33 bp, Homo sapien
aatccagagaatagaatgaaatatcaggtgtca

SEQ ID NO: 794167 - DNA, 33 bp, Homo sapien
tttggcttcctgaaaacttagagtcaaatttaa

SEQ ID NO: 794168 - DNA, 33 bp, Homo sapien
tttggcttcctgaaaagttagagtcaaatttaa

SEQ ID NO: 794169 - DNA, 33 bp, Homo sapien
gggtgctttgtgaaaaagaaactgatgattgat

SEQ ID NO: 794170 - DNA, 33 bp, Homo sapien
gggtgctttgtgaaaaggaaactgatgattgat

SEQ ID NO: 794171 - DNA, 33 bp, Homo sapien
gtattttaaagttccacgttgtttcaagccatc

SEQ ID NO: 794172 - DNA, 33 bp, Homo sapien
gtattttaaagttccatgttgtttcaagccatc

SEQ ID NO: 794173 - DNA, 33 bp, Homo sapien
ctgaactgtgtagttacgagcaagtcaattaag

SEQ ID NO: 794174 - DNA, 33 bp, Homo sapien
ctgaactgtgtagttatgagcaagtcaattaag

SEQ ID NO: 794175 - DNA, 33 bp, Homo sapien
agagtagtaaagacaaaggagaatagctaccaa

SEQ ID NO: 794176 - DNA, 33 bp, Homo sapien
agagtagtaaagacaagggagaatagctaccaa

SEQ ID NO: 794177 - DNA, 33 bp, Homo sapien
tctttatagatcttcaatcaagaaaacggcctt

SEQ ID NO: 794178 - DNA, 33 bp, Homo sapien
tctttatagatcttcagtcaagaaaacggcctt

SEQ ID NO: 794179 - DNA, 33 bp, Homo sapien
gtagttatcactttacaacagttaccaaacagc

SEQ ID NO: 794180 - DNA, 33 bp, Homo sapien
gtagttatcactttacgacagttaccaaacagc

SEQ ID NO: 794181 - DNA, 33 bp, Homo sapien
ctcttcagtaatttctcaatgttctgttgataa

SEQ ID NO: 794182 - DNA, 33 bp, Homo sapien
ctcttcagtaatttcttaatgttctgttgataa

SEQ ID NO: 794183 - DNA, 33 bp, Homo sapien
acaagacttactaagagcatcctttcattgaac

SEQ ID NO: 794184 - DNA, 33 bp, Homo sapien
acaagacttactaagatcatcctttcattgaac

SEQ ID NO: 794185 - DNA, 33 bp, Homo sapien
gtggtttaccactgtcactcaagttacataaaa

SEQ ID NO: 794186 - DNA, 33 bp, Homo sapien
gtggtttaccactgtcgctcaagttacataaaa

SEQ ID NO: 794187 - DNA, 33 bp, Homo sapien
atcaaataatactgcaaaagagtaaaagtaagt

SEQ ID NO: 794188 - DNA, 33 bp, Homo sapien
atcaaataatactgcagaagagtaaaagtaagt

SEQ ID NO: 794189 - DNA, 33 bp, Homo sapien
gaaataaagcaaaccacagttcatttttctttt

SEQ ID NO: 794190 - DNA, 33 bp, Homo sapien
gaaataaagcaaaccatagttcatttttctttt

SEQ ID NO: 794191 - DNA, 33 bp, Homo sapien
tagtgactacttatgcgaaaaacgatgacacag

SEQ ID NO: 794192 - DNA, 33 bp, Homo sapien
tagtgactacttatgctaaaaacgatgacacag

SEQ ID NO: 794193 - DNA, 33 bp, Homo sapien
tggacttgtaagccatgagatgacagaacttct

SEQ ID NO: 794194 - DNA, 33 bp, Homo sapien
tggacttgtaagccattagatgacagaacttct

SEQ ID NO: 794195 - DNA, 33 bp, Homo sapien
atcatcttagctcttgaactatcatgtatcagt

SEQ ID NO: 794196 - DNA, 33 bp, Homo sapien
atcatcttagctcttggactatcatgtatcagt

SEQ ID NO: 794197 - DNA, 33 bp, Homo sapien
agttcagcacaagggacgaaacaagggggtaga

SEQ ID NO: 794198 - DNA, 33 bp, Homo sapien
agttcagcacaagggatgaaacaagggggtaga

SEQ ID NO: 794199 - DNA, 33 bp, Homo sapien
agatcatattatataaccatctcctatttgtct

SEQ ID NO: 794200 - DNA, 33 bp, Homo sapien
agatcatattatataagcatctcctatttgtct

SEQ ID NO: 794201 - DNA, 33 bp, Homo sapien
gattgcttacaaagacacttgaggtctgcaatt

SEQ ID NO: 794202 - DNA, 33 bp, Homo sapien
gattgcttacaaagacgcttgaggtctgcaatt

SEQ ID NO: 794203 - DNA, 33 bp, Homo sapien
ctttctatagaaatcaatgaatacaatcttagc

SEQ ID NO: 794204 - DNA, 33 bp, Homo sapien
ctttctatagaaatcagtgaatacaatcttagc

SEQ ID NO: 794205 - DNA, 33 bp, Homo sapien
aaatctaaacctaatacgtttactctcagtttt

SEQ ID NO: 794206 - DNA, 33 bp, Homo sapien
aaatctaaacctaatatgtttactctcagtttt

SEQ ID NO: 794207 - DNA, 33 bp, Homo sapien
agagctgtggaatttgaaattcatgagtggaaa

SEQ ID NO: 794208 - DNA, 33 bp, Homo sapien
agagctgtggaatttggaattcatgagtggaaa

SEQ ID NO: 794209 - DNA, 33 bp, Homo sapien
aattcatgagtggaaactgaattaaagactcct

SEQ ID NO: 794210 - DNA, 33 bp, Homo sapien
aattcatgagtggaaattgaattaaagactcct

SEQ ID NO: 794211 - DNA, 33 bp, Homo sapien
ggtttagtgttcaaatcatcccgtcactcaggt

SEQ ID NO: 794212 - DNA, 33 bp, Homo sapien
ggtttagtgttcaaatgatcccgtcactcaggt

SEQ ID NO: 794213 - DNA, 33 bp, Homo sapien
gtgtggtaagaatgagcactcaatgtaaatcct

SEQ ID NO: 794214 - DNA, 33 bp, Homo sapien
gtgtggtaagaatgagtactcaatgtaaatcct

SEQ ID NO: 794215 - DNA, 33 bp, Homo sapien
atgttaaatggacaaaagagtacaagcttccca

SEQ ID NO: 794216 - DNA, 33 bp, Homo sapien
atgttaaatggacaaaggagtacaagcttccca

SEQ ID NO: 794217 - DNA, 33 bp, Homo sapien
ctatttcataatattaactcgccaaactgcatt

SEQ ID NO: 794218 - DNA, 33 bp, Homo sapien
ctatttcataatattatctcgccaaactgcatt

SEQ ID NO: 794219 - DNA, 33 bp, Homo sapien
tttgacaaagtaatcaaggtcccaagctccttc

SEQ ID NO: 794220 - DNA, 33 bp, Homo sapien
tttgacaaagtaatcacggtcccaagctccttc

SEQ ID NO: 794221 - DNA, 33 bp, Homo sapien
gtaacattctgtctaccataaattcatcataat

SEQ ID NO: 794222 - DNA, 33 bp, Homo sapien
gtaacattctgtctactataaattcatcataat

SEQ ID NO: 794223 - DNA, 33 bp, Homo sapien
tttcatctatcagttacgaggcatacatcttaa

SEQ ID NO: 794224 - DNA, 33 bp, Homo sapien
tttcatctatcagttaggaggcatacatcttaa

SEQ ID NO: 794225 - DNA, 33 bp, Homo sapien
gtcccaggctccaggacagtacattcagactaa

SEQ ID NO: 794226 - DNA, 33 bp, Homo sapien
gtcccaggctccaggatagtacattcagactaa

SEQ ID NO: 794227 - DNA, 33 bp, Homo sapien
tatcaggagataagtacatgaggaggatggagg

SEQ ID NO: 794228 - DNA, 33 bp, Homo sapien
tatcaggagataagtatatgaggaggatggagg

SEQ ID NO: 794229 - DNA, 33 bp, Homo sapien
gcatacaagctaagcacaaaaaaccctttattt

SEQ ID NO: 794230 - DNA, 33 bp, Homo sapien
gcatacaagctaagcagaaaaaaccctttattt

SEQ ID NO: 794231 - DNA, 33 bp, Homo sapien
ctgaaacaaaatgtacagaccaggtgactctga

SEQ ID NO: 794232 - DNA, 33 bp, Homo sapien
ctgaaacaaaatgtacggaccaggtgactctga

SEQ ID NO: 794233 - DNA, 33 bp, Homo sapien
agtttggctaaagcataaattttgtggagttac

SEQ ID NO: 794234 - DNA, 33 bp, Homo sapien
agtttggctaaagcatgaattttgtggagttac

SEQ ID NO: 794235 - DNA, 33 bp, Homo sapien
cttcatctatctctaacgttgtgacaacacttg

SEQ ID NO: 794236 - DNA, 33 bp, Homo sapien
cttcatctatctctaatgttgtgacaacacttg

SEQ ID NO: 794237 - DNA, 33 bp, Homo sapien
ttgaggtccatgttgtcaagatgtaaaataatt

SEQ ID NO: 794238 - DNA, 33 bp, Homo sapien
ttgaggtccatgttgttaagatgtaaaataatt

SEQ ID NO: 794239 - DNA, 33 bp, Homo sapien
ggaagtaagtttaaggccacacatgaggatttc

SEQ ID NO: 794240 - DNA, 33 bp, Homo sapien
ggaagtaagtttaagggcacacatgaggatttc

SEQ ID NO: 794241 - DNA, 33 bp, Homo sapien
ctgaaacaaaatgggaaaatgagaagaggtgat

SEQ ID NO: 794242 - DNA, 33 bp, Homo sapien
ctgaaacaaaatgggacaatgagaagaggtgat

SEQ ID NO: 794243 - DNA, 33 bp, Homo sapien
ggagcccaggtgataacagcagaagaacaactc

SEQ ID NO: 794244 - DNA, 33 bp, Homo sapien
ggagcccaggtgataatagcagaagaacaactc

SEQ ID NO: 794245 - DNA, 33 bp, Homo sapien
ttagtagtagtgtaaaagaggtaaggctgtgta

SEQ ID NO: 794246 - DNA, 33 bp, Homo sapien
ttagtagtagtgtaaaggaggtaaggctgtgta

SEQ ID NO: 794247 - DNA, 33 bp, Homo sapien
tatttgattgtgtgcaagagtgttaacataaat

SEQ ID NO: 794248 - DNA, 33 bp, Homo sapien
tatttgattgtgtgcatgagtgttaacataaat

SEQ ID NO: 794249 - DNA, 33 bp, Homo sapien
ggggagtagagacattaaacttacaatagcatg

SEQ ID NO: 794250 - DNA, 33 bp, Homo sapien
ggggagtagagacattcaacttacaatagcatg

SEQ ID NO: 794251 - DNA, 33 bp, Homo sapien
accaccaaagttttgggaaatccaaagtggcct

SEQ ID NO: 794252 - DNA, 33 bp, Homo sapien
accaccaaagttttggtaaatccaaagtggcct

SEQ ID NO: 794253 - DNA, 33 bp, Homo sapien
cccaccaactttccaaaagactagtgactccac

SEQ ID NO: 794254 - DNA, 33 bp, Homo sapien
cccaccaactttccaacagactagtgactccac

SEQ ID NO: 794255 - DNA, 33 bp, Homo sapien
caactgtttggaaaaagtgtatgtgcttctgag

SEQ ID NO: 794256 - DNA, 33 bp, Homo sapien
caactgtttggaaaaattgtatgtgcttctgag

SEQ ID NO: 794257 - DNA, 33 bp, Homo sapien
ggttactttaatagcacggtaataaaaaagata

SEQ ID NO: 794258 - DNA, 33 bp, Homo sapien
ggttactttaatagcagggtaataaaaaagata

SEQ ID NO: 794259 - DNA, 33 bp, Homo sapien
gatgccattagaaagacagtgaagagtatagca

SEQ ID NO: 794260 - DNA, 33 bp, Homo sapien
gatgccattagaaagagagtgaagagtatagca

SEQ ID NO: 794261 - DNA, 33 bp, Homo sapien
ctttcattcaatctaactgtcaggtatgaacat

SEQ ID NO: 794262 - DNA, 33 bp, Homo sapien
ctttcattcaatctaattgtcaggtatgaacat

SEQ ID NO: 794263 - DNA, 33 bp, Homo sapien
gtcatctttggtctataagtaggatcactttgc

SEQ ID NO: 794264 - DNA, 33 bp, Homo sapien
gtcatctttggtctatgagtaggatcactttgc

SEQ ID NO: 794265 - DNA, 33 bp, Homo sapien
tcacatctttgagccacgccaaactggacacta

SEQ ID NO: 794266 - DNA, 33 bp, Homo sapien
tcacatctttgagccatgccaaactggacacta

SEQ ID NO: 794267 - DNA, 33 bp, Homo sapien
tttgttccatattcacaaccacaaatgtagcaa

SEQ ID NO: 794268 - DNA, 33 bp, Homo sapien
tttgttccatattcacgaccacaaatgtagcaa

SEQ ID NO: 794269 - DNA, 33 bp, Homo sapien
gactagtggacctggtaaaaattcgagtttggt

SEQ ID NO: 794270 - DNA, 33 bp, Homo sapien
gactagtggacctggtgaaaattcgagtttggt

SEQ ID NO: 794271 - DNA, 33 bp, Homo sapien
atccaggtaaacttagacgttgacatccactga

SEQ ID NO: 794272 - DNA, 33 bp, Homo sapien
atccaggtaaacttagtcgttgacatccactga

SEQ ID NO: 794273 - DNA, 33 bp, Homo sapien
agcacaagatcaagaggaacgtcctcctatatg

SEQ ID NO: 794274 - DNA, 33 bp, Homo sapien
agcacaagatcaagagtaacgtcctcctatatg

SEQ ID NO: 794275 - DNA, 33 bp, Homo sapien
tgaaatctcagcgaccaaacacaatgtatgttt

SEQ ID NO: 794276 - DNA, 33 bp, Homo sapien
tgaaatctcagcgaccgaacacaatgtatgttt

SEQ ID NO: 794277 - DNA, 33 bp, Homo sapien
actagccaaagtcccaaagttgtagtgatagat

SEQ ID NO: 794278 - DNA, 33 bp, Homo sapien
actagccaaagtcccatagttgtagtgatagat

SEQ ID NO: 794279 - DNA, 33 bp, Homo sapien
atacacattttcctcaatcatacacagaacttt

SEQ ID NO: 794280 - DNA, 33 bp, Homo sapien
atacacattttcctcagtcatacacagaacttt

SEQ ID NO: 794281 - DNA, 33 bp, Homo sapien
tccagtagcattagtcaaaaagaagatgtttgc

SEQ ID NO: 794282 - DNA, 33 bp, Homo sapien
tccagtagcattagtcgaaaagaagatgtttgc

SEQ ID NO: 794283 - DNA, 33 bp, Homo sapien
tctgtgagatactacacgaagcaaacgttacca

SEQ ID NO: 794284 - DNA, 33 bp, Homo sapien
tctgtgagatactacatgaagcaaacgttacca

SEQ ID NO: 794285 - DNA, 33 bp, Homo sapien
cccaccacaggcttcaactttggttcatgctga

SEQ ID NO: 794286 - DNA, 33 bp, Homo sapien
cccaccacaggcttcatctttggttcatgctga

SEQ ID NO: 794287 - DNA, 33 bp, Homo sapien
aaactgctttacaaaacggctgtactattttgc

SEQ ID NO: 794288 - DNA, 33 bp, Homo sapien
aaactgctttacaaaatggctgtactattttgc

SEQ ID NO: 794289 - DNA, 33 bp, Homo sapien
agaaagccaatgctaaaaggttaaatactgtat

SEQ ID NO: 794290 - DNA, 33 bp, Homo sapien
agaaagccaatgctaataggttaaatactgtat

SEQ ID NO: 794291 - DNA, 33 bp, Homo sapien
agacaacacgaacaaactgaagcacatcctatg

SEQ ID NO: 794292 - DNA, 33 bp, Homo sapien
agacaacacgaacaaattgaagcacatcctatg

SEQ ID NO: 794293 - DNA, 33 bp, Homo sapien
gagaaagttgacaaaacaaggtggcaaacagga

SEQ ID NO: 794294 - DNA, 33 bp, Homo sapien
gagaaagttgacaaaagaaggtggcaaacagga

SEQ ID NO: 794295 - DNA, 33 bp, Homo sapien
agatttggtcctgctacccaagatcaagagttt

SEQ ID NO: 794296 - DNA, 33 bp, Homo sapien
agatttggtcctgctatccaagatcaagagttt

SEQ ID NO: 794297 - DNA, 33 bp, Homo sapien
agaatctgaaagagtacgcttgaggaataggtt

SEQ ID NO: 794298 - DNA, 33 bp, Homo sapien
agaatctgaaagagtatgcttgaggaataggtt

SEQ ID NO: 794299 - DNA, 33 bp, Homo sapien
tgaaccatacttctcaactcttcccatattgtt

SEQ ID NO: 794300 - DNA, 33 bp, Homo sapien
tgaaccatacttctcagctcttcccatattgtt

SEQ ID NO: 794301 - DNA, 33 bp, Homo sapien
aggagagagtgatcaaagtagcttaaatgttat

SEQ ID NO: 794302 - DNA, 33 bp, Homo sapien
aggagagagtgatcaaggtagcttaaatgttat

SEQ ID NO: 794303 - DNA, 33 bp, Homo sapien
tttggaagccacagaaactcaatagttcttaaa

SEQ ID NO: 794304 - DNA, 33 bp, Homo sapien
tttggaagccacagaagctcaatagttcttaaa

SEQ ID NO: 794305 - DNA, 33 bp, Homo sapien
ccaaacttgccttgaagaaatgagataatcaat

SEQ ID NO: 794306 - DNA, 33 bp, Homo sapien
ccaaacttgccttgaataaatgagataatcaat

SEQ ID NO: 794307 - DNA, 33 bp, Homo sapien
gactgtaccctcacaacgcaaagttcctttaag

SEQ ID NO: 794308 - DNA, 33 bp, Homo sapien
gactgtaccctcacaatgcaaagttcctttaag

SEQ ID NO: 794309 - DNA, 33 bp, Homo sapien
gtgaagttacagagaacgatacgggattaagtg

SEQ ID NO: 794310 - DNA, 33 bp, Homo sapien
gtgaagttacagagaatgatacgggattaagtg

SEQ ID NO: 794311 - DNA, 33 bp, Homo sapien
gccaatactggttatcaagagagagagagagag

SEQ ID NO: 794312 - DNA, 33 bp, Homo sapien
gccaatactggttatcgagagagagagagagag

SEQ ID NO: 794313 - DNA, 33 bp, Homo sapien
agggattccaaagttacgtgtacaaaggcagga

SEQ ID NO: 794314 - DNA, 33 bp, Homo sapien
agggattccaaagttatgtgtacaaaggcagga

SEQ ID NO: 794315 - DNA, 33 bp, Homo sapien
tctatagtggcaccaacggaatagaatgcctga

SEQ ID NO: 794316 - DNA, 33 bp, Homo sapien
tctatagtggcaccaatggaatagaatgcctga

SEQ ID NO: 794317 - DNA, 33 bp, Homo sapien
aactctgcagtattgacgtgaagagaattgtag

SEQ ID NO: 794318 - DNA, 33 bp, Homo sapien
aactctgcagtattgatgtgaagagaattgtag

SEQ ID NO: 794319 - DNA, 33 bp, Homo sapien
actggtagaacaggcaagaaagacaacatggat

SEQ ID NO: 794320 - DNA, 33 bp, Homo sapien
actggtagaacaggcacgaaagacaacatggat

SEQ ID NO: 794321 - DNA, 33 bp, Homo sapien
ccatgattgtctcgtacctgtgtgtgcataaat

SEQ ID NO: 794322 - DNA, 33 bp, Homo sapien
ccatgattgtctcgtagctgtgtgtgcataaat

SEQ ID NO: 794323 - DNA, 33 bp, Homo sapien
ccaattcaatttcaccaaggtcctttgagaact

SEQ ID NO: 794324 - DNA, 33 bp, Homo sapien
ccaattcaatttcaccgaggtcctttgagaact

SEQ ID NO: 794325 - DNA, 33 bp, Homo sapien
aagagctgactgaagacgttccggggcctgcat

SEQ ID NO: 794326 - DNA, 33 bp, Homo sapien
aagagctgactgaagatgttccggggcctgcat

SEQ ID NO: 794327 - DNA, 33 bp, Homo sapien
aagatgcccagtttcaaactcttctccttactc

SEQ ID NO: 794328 - DNA, 33 bp, Homo sapien
aagatgcccagtttcagactcttctccttactc

SEQ ID NO: 794329 - DNA, 33 bp, Homo sapien
gtctctagcttgcaaacgtgcttgggatgttcg

SEQ ID NO: 794330 - DNA, 33 bp, Homo sapien
gtctctagcttgcaaaggtgcttgggatgttcg

SEQ ID NO: 794331 - DNA, 33 bp, Homo sapien
cacttatcagctaaataaccttgaatctgtgac

SEQ ID NO: 794332 - DNA, 33 bp, Homo sapien
cacttatcagctaaatgaccttgaatctgtgac

SEQ ID NO: 794333 - DNA, 33 bp, Homo sapien
cttctgagaaaagtccacatcttctttgggatg

SEQ ID NO: 794334 - DNA, 33 bp, Homo sapien
cttctgagaaaagtccgcatcttctttgggatg

SEQ ID NO: 794335 - DNA, 33 bp, Homo sapien
aggttagagtgaatccaaaatgagtacgaccac

SEQ ID NO: 794336 - DNA, 33 bp, Homo sapien
aggttagagtgaatccgaaatgagtacgaccac

SEQ ID NO: 794337 - DNA, 33 bp, Homo sapien
agaagacagccaagagcattgtaggaaagtaag

SEQ ID NO: 794338 - DNA, 33 bp, Homo sapien
agaagacagccaagagtattgtaggaaagtaag

SEQ ID NO: 794339 - DNA, 33 bp, Homo sapien
aggacttggtgcctgaacgatgaagggcagggg

SEQ ID NO: 794340 - DNA, 33 bp, Homo sapien
aggacttggtgcctgagcgatgaagggcagggg

SEQ ID NO: 794341 - DNA, 33 bp, Homo sapien
agttctgaaaagaaaacgggtcaggcagagtgg

SEQ ID NO: 794342 - DNA, 33 bp, Homo sapien
agttctgaaaagaaaatgggtcaggcagagtgg

SEQ ID NO: 794343 - DNA, 33 bp, Homo sapien
aatgtgcttcattcccactaaaagaagaaagga

SEQ ID NO: 794344 - DNA, 33 bp, Homo sapien
aatgtgcttcattcccgctaaaagaagaaagga

SEQ ID NO: 794345 - DNA, 33 bp, Homo sapien
tactcagtcctttctaactcaagttcttataac

SEQ ID NO: 794346 - DNA, 33 bp, Homo sapien
tactcagtcctttctatctcaagttcttataac

SEQ ID NO: 794347 - DNA, 33 bp, Homo sapien
tatccaaatggaataaaatgaagaatgagcaga

SEQ ID NO: 794348 - DNA, 33 bp, Homo sapien
tatccaaatggaataagatgaagaatgagcaga

SEQ ID NO: 794349 - DNA, 33 bp, Homo sapien
caaaataccaatctcactcttaaaaaataatag

SEQ ID NO: 794350 - DNA, 33 bp, Homo sapien
caaaataccaatctcagtcttaaaaaataatag

SEQ ID NO: 794351 - DNA, 33 bp, Homo sapien
aatctcttgttgacaacgccacagtttacttct

SEQ ID NO: 794352 - DNA, 33 bp, Homo sapien
aatctcttgttgacaatgccacagtttacttct

SEQ ID NO: 794353 - DNA, 33 bp, Homo sapien
aaaacttttcttcagccaagagggcacttgtta

SEQ ID NO: 794354 - DNA, 33 bp, Homo sapien
aaaacttttcttcagctaagagggcacttgtta

SEQ ID NO: 794355 - DNA, 33 bp, Homo sapien
taaatgtctgttgttaaaagacaaggtatatag

SEQ ID NO: 794356 - DNA, 33 bp, Homo sapien
taaatgtctgttgttagaagacaaggtatatag

SEQ ID NO: 794357 - DNA, 33 bp, Homo sapien
agatggacccaccataggcagaacaaattctct

SEQ ID NO: 794358 - DNA, 33 bp, Homo sapien
agatggacccaccatatgcagaacaaattctct

SEQ ID NO: 794359 - DNA, 33 bp, Homo sapien
acacaaagacagttggaattcatgtaatatctt

SEQ ID NO: 794360 - DNA, 33 bp, Homo sapien
acacaaagacagttgggattcatgtaatatctt

SEQ ID NO: 794361 - DNA, 33 bp, Homo sapien
ttttccttttggtttaggatcactcaccatgaa

SEQ ID NO: 794362 - DNA, 33 bp, Homo sapien
ttttccttttggtttatgatcactcaccatgaa

SEQ ID NO: 794363 - DNA, 33 bp, Homo sapien
ttagactgagaggtcagtaaggagcttcgtttt

SEQ ID NO: 794364 - DNA, 33 bp, Homo sapien
ttagactgagaggtcattaaggagcttcgtttt

SEQ ID NO: 794365 - DNA, 33 bp, Homo sapien
gcattctccttcccacccagactagactcaaga

SEQ ID NO: 794366 - DNA, 33 bp, Homo sapien
gcattctccttcccactcagactagactcaaga

SEQ ID NO: 794367 - DNA, 33 bp, Homo sapien
gaaggaggtatgaagacaaaaagtccggtatct

SEQ ID NO: 794368 - DNA, 33 bp, Homo sapien
gaaggaggtatgaagagaaaaagtccggtatct

SEQ ID NO: 794369 - DNA, 33 bp, Homo sapien
aaaggcatgcaacctccctgaaagttgtccctg

SEQ ID NO: 794370 - DNA, 33 bp, Homo sapien
aaaggcatgcaacctctctgaaagttgtccctg

SEQ ID NO: 794371 - DNA, 33 bp, Homo sapien
catttagggaaatttacggaccagaatataatc

SEQ ID NO: 794372 - DNA, 33 bp, Homo sapien
catttagggaaatttatggaccagaatataatc

SEQ ID NO: 794373 - DNA, 33 bp, Homo sapien
ttaattcatgtgaagaaatagttcaagtttaga

SEQ ID NO: 794374 - DNA, 33 bp, Homo sapien
ttaattcatgtgaagacatagttcaagtttaga

SEQ ID NO: 794375 - DNA, 33 bp, Homo sapien
gtctcagtttccaatacgcaaaattaggataat

SEQ ID NO: 794376 - DNA, 33 bp, Homo sapien
gtctcagtttccaatatgcaaaattaggataat

SEQ ID NO: 794377 - DNA, 33 bp, Homo sapien
gtatttttaacaatgagccaaatgtgtctagct

SEQ ID NO: 794378 - DNA, 33 bp, Homo sapien
gtatttttaacaatgatccaaatgtgtctagct

SEQ ID NO: 794379 - DNA, 33 bp, Homo sapien
ttcagtccatgtgctacgtccttgtccgggtcc

SEQ ID NO: 794380 - DNA, 33 bp, Homo sapien
ttcagtccatgtgctatgtccttgtccgggtcc

SEQ ID NO: 794381 - DNA, 33 bp, Homo sapien
cagcaccttgctaactcaaaacgtggtcagaac

SEQ ID NO: 794382 - DNA, 33 bp, Homo sapien
cagcaccttgctaactgaaaacgtggtcagaac

SEQ ID NO: 794383 - DNA, 33 bp, Homo sapien
ttaaactctgacaaccaagaaaaatcacacctc

SEQ ID NO: 794384 - DNA, 33 bp, Homo sapien
ttaaactctgacaacccagaaaaatcacacctc

SEQ ID NO: 794385 - DNA, 33 bp, Homo sapien
ggaacggattagatcacagatttgtgcagatta

SEQ ID NO: 794386 - DNA, 33 bp, Homo sapien
ggaacggattagatcatagatttgtgcagatta

SEQ ID NO: 794387 - DNA, 33 bp, Homo sapien
atttcacatacccttaaaatttttgaatcgatt

SEQ ID NO: 794388 - DNA, 33 bp, Homo sapien
atttcacatacccttataatttttgaatcgatt

SEQ ID NO: 794389 - DNA, 33 bp, Homo sapien
atcgacaaaagcattaccatcacgaagcctttc

SEQ ID NO: 794390 - DNA, 33 bp, Homo sapien
atcgacaaaagcattatcatcacgaagcctttc

SEQ ID NO: 794391 - DNA, 33 bp, Homo sapien
ttttgttcctggaaaaagtaaaatgtgaccttc

SEQ ID NO: 794392 - DNA, 33 bp, Homo sapien
ttttgttcctggaaaaggtaaaatgtgaccttc

SEQ ID NO: 794393 - DNA, 33 bp, Homo sapien
gaaggtagccaaaatcaaagaaaactaatggtt

SEQ ID NO: 794394 - DNA, 33 bp, Homo sapien
gaaggtagccaaaatccaagaaaactaatggtt

SEQ ID NO: 794395 - DNA, 33 bp, Homo sapien
ctactccacctctaaagagagcatcttacagcc

SEQ ID NO: 794396 - DNA, 33 bp, Homo sapien
ctactccacctctaaatagagcatcttacagcc

SEQ ID NO: 794397 - DNA, 33 bp, Homo sapien
aattttccacaattacagagttccatagaacac

SEQ ID NO: 794398 - DNA, 33 bp, Homo sapien
aattttccacaattacggagttccatagaacac

SEQ ID NO: 794399 - DNA, 33 bp, Homo sapien
agagttccaaaccacaaccatcggtactaatgc

SEQ ID NO: 794400 - DNA, 33 bp, Homo sapien
agagttccaaaccacagccatcggtactaatgc

SEQ ID NO: 794401 - DNA, 33 bp, Homo sapien
ttgtattgcagataagcaacattgaatttaggg

SEQ ID NO: 794402 - DNA, 33 bp, Homo sapien
ttgtattgcagataaggaacattgaatttaggg

SEQ ID NO: 794403 - DNA, 33 bp, Homo sapien
tgttgtagaaaatgaggactacccagaacaata

SEQ ID NO: 794404 - DNA, 33 bp, Homo sapien
tgttgtagaaaatgagtactacccagaacaata

SEQ ID NO: 794405 - DNA, 33 bp, Homo sapien
ttttaggagactcaacaaaaagctagtgcccta

SEQ ID NO: 794406 - DNA, 33 bp, Homo sapien
ttttaggagactcaacgaaaagctagtgcccta

SEQ ID NO: 794407 - DNA, 33 bp, Homo sapien
aagatgacgagtaagaaacagaaaatagggaga

SEQ ID NO: 794408 - DNA, 33 bp, Homo sapien
aagatgacgagtaagagacagaaaatagggaga

SEQ ID NO: 794409 - DNA, 33 bp, Homo sapien
ttcaagacttttgacaagtgaagttcagcagag

SEQ ID NO: 794410 - DNA, 33 bp, Homo sapien
ttcaagacttttgacaggtgaagttcagcagag

SEQ ID NO: 794411 - DNA, 33 bp, Homo sapien
atgaactataaggctggacttttttgtgttcat

SEQ ID NO: 794412 - DNA, 33 bp, Homo sapien
atgaactataaggctgtacttttttgtgttcat

SEQ ID NO: 794413 - DNA, 33 bp, Homo sapien
gatagagcaaaatcccagaacaacaggaagaat

SEQ ID NO: 794414 - DNA, 33 bp, Homo sapien
gatagagcaaaatcccggaacaacaggaagaat

SEQ ID NO: 794415 - DNA, 33 bp, Homo sapien
ctctctgttccaaagacgggtaaacaaagagaa

SEQ ID NO: 794416 - DNA, 33 bp, Homo sapien
ctctctgttccaaagatgggtaaacaaagagaa

SEQ ID NO: 794417 - DNA, 33 bp, Homo sapien
ggtattaatgtcactaaggaactgatccttaat

SEQ ID NO: 794418 - DNA, 33 bp, Homo sapien
ggtattaatgtcactagggaactgatccttaat

SEQ ID NO: 794419 - DNA, 33 bp, Homo sapien
ttggaatctggatggagagagagagtgaaagag

SEQ ID NO: 794420 - DNA, 33 bp, Homo sapien
ttggaatctggatggatagagagagtgaaagag

SEQ ID NO: 794421 - DNA, 33 bp, Homo sapien
ctacaatgacctctaaatgctcaagtgaaagga

SEQ ID NO: 794422 - DNA, 33 bp, Homo sapien
ctacaatgacctctaagtgctcaagtgaaagga

SEQ ID NO: 794423 - DNA, 33 bp, Homo sapien
agaagataacagagaacagaagggatatcgtgg

SEQ ID NO: 794424 - DNA, 33 bp, Homo sapien
agaagataacagagaatagaagggatatcgtgg

SEQ ID NO: 794425 - DNA, 33 bp, Homo sapien
ttttcttcttggatccaatttttgaatttaaat

SEQ ID NO: 794426 - DNA, 33 bp, Homo sapien
ttttcttcttggatcccatttttgaatttaaat

SEQ ID NO: 794427 - DNA, 33 bp, Homo sapien
tatgttcctctagttaaaaggcatcttttgttg

SEQ ID NO: 794428 - DNA, 33 bp, Homo sapien
tatgttcctctagttagaaggcatcttttgttg

SEQ ID NO: 794429 - DNA, 33 bp, Homo sapien
actttggaaagcatcccgaggtgaagataagca

SEQ ID NO: 794430 - DNA, 33 bp, Homo sapien
actttggaaagcatcctgaggtgaagataagca

SEQ ID NO: 794431 - DNA, 33 bp, Homo sapien
gctacccagatccctcagaaggcatatccctgc

SEQ ID NO: 794432 - DNA, 33 bp, Homo sapien
gctacccagatccctcggaaggcatatccctgc

SEQ ID NO: 794433 - DNA, 33 bp, Homo sapien
gaaagaaagccagtagaacatactcttcagctc

SEQ ID NO: 794434 - DNA, 33 bp, Homo sapien
gaaagaaagccagtaggacatactcttcagctc

SEQ ID NO: 794435 - DNA, 33 bp, Homo sapien
ttgagcaaaaaatgtcacaggcccggtggaaaa

SEQ ID NO: 794436 - DNA, 33 bp, Homo sapien
ttgagcaaaaaatgtcgcaggcccggtggaaaa

SEQ ID NO: 794437 - DNA, 33 bp, Homo sapien
atttcaacaccggagaagatccaaagaagacta

SEQ ID NO: 794438 - DNA, 33 bp, Homo sapien
atttcaacaccggagatgatccaaagaagacta

SEQ ID NO: 794439 - DNA, 33 bp, Homo sapien
ccgctgttccgtactaacctaccaatcacttgt

SEQ ID NO: 794440 - DNA, 33 bp, Homo sapien
ccgctgttccgtactagcctaccaatcacttgt

SEQ ID NO: 794441 - DNA, 33 bp, Homo sapien
agtctttagttggcaaccaagctcaaaagaact

SEQ ID NO: 794442 - DNA, 33 bp, Homo sapien
agtctttagttggcaatcaagctcaaaagaact

SEQ ID NO: 794443 - DNA, 33 bp, Homo sapien
cttagagtctgggataagacagttgttcagtat

SEQ ID NO: 794444 - DNA, 33 bp, Homo sapien
cttagagtctgggatatgacagttgttcagtat

SEQ ID NO: 794445 - DNA, 33 bp, Homo sapien
gtggtggatattataaccatcctgatttgatca

SEQ ID NO: 794446 - DNA, 33 bp, Homo sapien
gtggtggatattataagcatcctgatttgatca

SEQ ID NO: 794447 - DNA, 33 bp, Homo sapien
agataatccgctagtcaaggagattatttatat

SEQ ID NO: 794448 - DNA, 33 bp, Homo sapien
agataatccgctagtcgaggagattatttatat

SEQ ID NO: 794449 - DNA, 33 bp, Homo sapien
cttctgtggaaacacacaaacagacatttagca

SEQ ID NO: 794450 - DNA, 33 bp, Homo sapien
cttctgtggaaacacataaacagacatttagca

SEQ ID NO: 794451 - DNA, 33 bp, Homo sapien
attaaatcaacaaagaaaattagcaacaagcag

SEQ ID NO: 794452 - DNA, 33 bp, Homo sapien
attaaatcaacaaagataattagcaacaagcag

SEQ ID NO: 794453 - DNA, 33 bp, Homo sapien
tgtacaagcgctgatacgttttgataagaaaaa

SEQ ID NO: 794454 - DNA, 33 bp, Homo sapien
tgtacaagcgctgatatgttttgataagaaaaa

SEQ ID NO: 794455 - DNA, 33 bp, Homo sapien
ttcatccccaagagagaagaatcccactaatgc

SEQ ID NO: 794456 - DNA, 33 bp, Homo sapien
ttcatccccaagagaggagaatcccactaatgc

SEQ ID NO: 794457 - DNA, 33 bp, Homo sapien
atatttattgcttccaaatcaccagtttaaatt

SEQ ID NO: 794458 - DNA, 33 bp, Homo sapien
atatttattgcttccagatcaccagtttaaatt

SEQ ID NO: 794459 - DNA, 33 bp, Homo sapien
tagcttttcatgtgaccaatgttccttagagct

SEQ ID NO: 794460 - DNA, 33 bp, Homo sapien
tagcttttcatgtgactaatgttccttagagct

SEQ ID NO: 794461 - DNA, 33 bp, Homo sapien
tgcttattttttttgacgtcagacaaggcaatg

SEQ ID NO: 794462 - DNA, 33 bp, Homo sapien
tgcttattttttttgatgtcagacaaggcaatg

SEQ ID NO: 794463 - DNA, 33 bp, Homo sapien
tgaggcaaggggtgaagaatcacacaaactttc

SEQ ID NO: 794464 - DNA, 33 bp, Homo sapien
tgaggcaaggggtgaataatcacacaaactttc

SEQ ID NO: 794465 - DNA, 33 bp, Homo sapien
tcctcagagttgaaagaaaatccagagggaaat

SEQ ID NO: 794466 - DNA, 33 bp, Homo sapien
tcctcagagttgaaaggaaatccagagggaaat

SEQ ID NO: 794467 - DNA, 33 bp, Homo sapien
tgctatagatttgagacgtcatgaatttgctta

SEQ ID NO: 794468 - DNA, 33 bp, Homo sapien
tgctatagatttgagatgtcatgaatttgctta

SEQ ID NO: 794469 - DNA, 33 bp, Homo sapien
gaaaactaacacagagacctttccaaatcgcac

SEQ ID NO: 794470 - DNA, 33 bp, Homo sapien
gaaaactaacacagagccctttccaaatcgcac

SEQ ID NO: 794471 - DNA, 33 bp, Homo sapien
cattttgtctcgaataaacgccaggtaggcttt

SEQ ID NO: 794472 - DNA, 33 bp, Homo sapien
cattttgtctcgaatacacgccaggtaggcttt

SEQ ID NO: 794473 - DNA, 33 bp, Homo sapien
acatgaaaagaaccagaatccttggaaatatca

SEQ ID NO: 794474 - DNA, 33 bp, Homo sapien
acatgaaaagaaccagcatccttggaaatatca

SEQ ID NO: 794475 - DNA, 33 bp, Homo sapien
gaatgagctgatctccacagtctcacttccatc

SEQ ID NO: 794476 - DNA, 33 bp, Homo sapien
gaatgagctgatctccgcagtctcacttccatc

SEQ ID NO: 794477 - DNA, 33 bp, Homo sapien
ctgtttatgtggatacaataagagttaatttgg

SEQ ID NO: 794478 - DNA, 33 bp, Homo sapien
ctgtttatgtggatacgataagagttaatttgg

SEQ ID NO: 794479 - DNA, 33 bp, Homo sapien
gtcctgggaagagatacggtgaactagcaatat

SEQ ID NO: 794480 - DNA, 33 bp, Homo sapien
gtcctgggaagagatatggtgaactagcaatat

SEQ ID NO: 794481 - DNA, 33 bp, Homo sapien
aggttgaagtttttgacccatgacagactccag

SEQ ID NO: 794482 - DNA, 33 bp, Homo sapien
aggttgaagtttttgatccatgacagactccag

SEQ ID NO: 794483 - DNA, 33 bp, Homo sapien
tatttccctctaagcacgactttggctgcattc

SEQ ID NO: 794484 - DNA, 33 bp, Homo sapien
tatttccctctaagcatgactttggctgcattc

SEQ ID NO: 794485 - DNA, 33 bp, Homo sapien
gaatccacttccttcaagtgtccaaccatcagc

SEQ ID NO: 794486 - DNA, 33 bp, Homo sapien
gaatccacttccttcaggtgtccaaccatcagc

SEQ ID NO: 794487 - DNA, 33 bp, Homo sapien
gacctctcctacaataaaatcaattcaaatgcc

SEQ ID NO: 794488 - DNA, 33 bp, Homo sapien
gacctctcctacaatagaatcaattcaaatgcc

SEQ ID NO: 794489 - DNA, 33 bp, Homo sapien
atatgtccttggtacaataaatcttcattaagt

SEQ ID NO: 794490 - DNA, 33 bp, Homo sapien
atatgtccttggtacagtaaatcttcattaagt

SEQ ID NO: 794491 - DNA, 33 bp, Homo sapien
caggaaaattagcttgcacagaagaattaagat

SEQ ID NO: 794492 - DNA, 33 bp, Homo sapien
caggaaaattagcttggacagaagaattaagat

SEQ ID NO: 794493 - DNA, 33 bp, Homo sapien
aaaaagcagacaaagaacactacacacagtata

SEQ ID NO: 794494 - DNA, 33 bp, Homo sapien
aaaaagcagacaaagatcactacacacagtata

SEQ ID NO: 794495 - DNA, 33 bp, Homo sapien
gtaacaactaggagtcacttttattcagctttg

SEQ ID NO: 794496 - DNA, 33 bp, Homo sapien
gtaacaactaggagtcgcttttattcagctttg

SEQ ID NO: 794497 - DNA, 33 bp, Homo sapien
ataagtaggtaatgcccaaaattgatgattgat

SEQ ID NO: 794498 - DNA, 33 bp, Homo sapien
ataagtaggtaatgcctaaaattgatgattgat

SEQ ID NO: 794499 - DNA, 33 bp, Homo sapien
tttgctctactttctacgagttctttttctgtt

SEQ ID NO: 794500 - DNA, 33 bp, Homo sapien
tttgctctactttctaggagttctttttctgtt

SEQ ID NO: 794501 - DNA, 33 bp, Homo sapien
tatatattttaggctactaacaggttgtaggat

SEQ ID NO: 794502 - DNA, 33 bp, Homo sapien
tatatattttaggctagtaacaggttgtaggat

SEQ ID NO: 794503 - DNA, 33 bp, Homo sapien
ggttttccagctgaacgaattgtacagaacttg

SEQ ID NO: 794504 - DNA, 33 bp, Homo sapien
ggttttccagctgaactaattgtacagaacttg

SEQ ID NO: 794505 - DNA, 33 bp, Homo sapien
ctgtggtcaccgagaaatgtgaaacaggacccc

SEQ ID NO: 794506 - DNA, 33 bp, Homo sapien
ctgtggtcaccgagaagtgtgaaacaggacccc

SEQ ID NO: 794507 - DNA, 33 bp, Homo sapien
tgtcacataaaattaaccatgaaaagcctactc

SEQ ID NO: 794508 - DNA, 33 bp, Homo sapien
tgtcacataaaattaagcatgaaaagcctactc

SEQ ID NO: 794509 - DNA, 33 bp, Homo sapien
cactatattcacatttaaaaaatttggttgcac

SEQ ID NO: 794510 - DNA, 33 bp, Homo sapien
cactatattcacattttaaaaatttggttgcac

SEQ ID NO: 794511 - DNA, 33 bp, Homo sapien
agcaccaccacatcaacagcctttttctcaaac

SEQ ID NO: 794512 - DNA, 33 bp, Homo sapien
agcaccaccacatcaatagcctttttctcaaac

SEQ ID NO: 794513 - DNA, 33 bp, Homo sapien
cttccactgttcataacaatcacccagggacct

SEQ ID NO: 794514 - DNA, 33 bp, Homo sapien
cttccactgttcataataatcacccagggacct

SEQ ID NO: 794515 - DNA, 33 bp, Homo sapien
ggatttggaataaggacggaggtttggaggatt

SEQ ID NO: 794516 - DNA, 33 bp, Homo sapien
ggatttggaataaggatggaggtttggaggatt

SEQ ID NO: 794517 - DNA, 33 bp, Homo sapien
caattgattcttgacagtgggaaaacattcatt

SEQ ID NO: 794518 - DNA, 33 bp, Homo sapien
caattgattcttgacattgggaaaacattcatt

SEQ ID NO: 794519 - DNA, 33 bp, Homo sapien
gagactgttgagtgaccaaaagtttgcttctct

SEQ ID NO: 794520 - DNA, 33 bp, Homo sapien
gagactgttgagtgactaaaagtttgcttctct

SEQ ID NO: 794521 - DNA, 33 bp, Homo sapien
agagcctaactgcatactaaattgattacataa

SEQ ID NO: 794522 - DNA, 33 bp, Homo sapien
agagcctaactgcatattaaattgattacataa

SEQ ID NO: 794523 - DNA, 33 bp, Homo sapien
tccaaagtcaccacgactcgcagccaggtgtat

SEQ ID NO: 794524 - DNA, 33 bp, Homo sapien
tccaaagtcaccacgattcgcagccaggtgtat

SEQ ID NO: 794525 - DNA, 33 bp, Homo sapien
cggtcacagttaacttaaagagcatactgaata

SEQ ID NO: 794526 - DNA, 33 bp, Homo sapien
cggtcacagttaactttaagagcatactgaata

SEQ ID NO: 794527 - DNA, 33 bp, Homo sapien
tactggttgagcatcccaaatttgaaaatctga

SEQ ID NO: 794528 - DNA, 33 bp, Homo sapien
tactggttgagcatccgaaatttgaaaatctga

SEQ ID NO: 794529 - DNA, 33 bp, Homo sapien
atgtctaagtgtccctcaatcttagtcaatgac

SEQ ID NO: 794530 - DNA, 33 bp, Homo sapien
atgtctaagtgtccctgaatcttagtcaatgac

SEQ ID NO: 794531 - DNA, 33 bp, Homo sapien
gagctacaaagaaacacagacagtgccaagaag

SEQ ID NO: 794532 - DNA, 33 bp, Homo sapien
gagctacaaagaaacatagacagtgccaagaag

SEQ ID NO: 794533 - DNA, 33 bp, Homo sapien
gcttaccattggccaaactgtctatccctgagg

SEQ ID NO: 794534 - DNA, 33 bp, Homo sapien
gcttaccattggccaatctgtctatccctgagg

SEQ ID NO: 794535 - DNA, 33 bp, Homo sapien
tatggtcacttaacaacggtcttgggcaaagaa

SEQ ID NO: 794536 - DNA, 33 bp, Homo sapien
tatggtcacttaacaatggtcttgggcaaagaa

SEQ ID NO: 794537 - DNA, 33 bp, Homo sapien
taccttacttatgctaccttacttctctatcct

SEQ ID NO: 794538 - DNA, 33 bp, Homo sapien
taccttacttatgctatcttacttctctatcct

SEQ ID NO: 794539 - DNA, 33 bp, Homo sapien
ttgttcactgttaacagcctcactgccttaaac

SEQ ID NO: 794540 - DNA, 33 bp, Homo sapien
ttgttcactgttaacatcctcactgccttaaac

SEQ ID NO: 794541 - DNA, 33 bp, Homo sapien
tctggggatagagaatgatgggagctagttgct

SEQ ID NO: 794542 - DNA, 33 bp, Homo sapien
tctggggatagagaattatgggagctagttgct

SEQ ID NO: 794543 - DNA, 33 bp, Homo sapien
cagacctgaatgacagaagggagtgagtcctga

SEQ ID NO: 794544 - DNA, 33 bp, Homo sapien
cagacctgaatgacaggagggagtgagtcctga

SEQ ID NO: 794545 - DNA, 33 bp, Homo sapien
gaatctgaaatatacacgaaggacaactatctg

SEQ ID NO: 794546 - DNA, 33 bp, Homo sapien
gaatctgaaatatacatgaaggacaactatctg

SEQ ID NO: 794547 - DNA, 33 bp, Homo sapien
gagacatctttcctcaaagttttccagaaatcc

SEQ ID NO: 794548 - DNA, 33 bp, Homo sapien
gagacatctttcctcagagttttccagaaatcc

SEQ ID NO: 794549 - DNA, 33 bp, Homo sapien
aaacacaagtcaaatacaaacttttggaatgac

SEQ ID NO: 794550 - DNA, 33 bp, Homo sapien
aaacacaagtcaaatataaacttttggaatgac

SEQ ID NO: 794551 - DNA, 33 bp, Homo sapien
tttcatcaggtacccaaaagaaacctcactagg

SEQ ID NO: 794552 - DNA, 33 bp, Homo sapien
tttcatcaggtacccagaagaaacctcactagg

SEQ ID NO: 794553 - DNA, 33 bp, Homo sapien
agctcttaggaggagtaaaaaataaagtcggcc

SEQ ID NO: 794554 - DNA, 33 bp, Homo sapien
agctcttaggaggagtgaaaaataaagtcggcc

SEQ ID NO: 794555 - DNA, 33 bp, Homo sapien
gaaaaaggagaacttgaaatgtcttggtttgaa

SEQ ID NO: 794556 - DNA, 33 bp, Homo sapien
gaaaaaggagaacttgcaatgtcttggtttgaa

SEQ ID NO: 794557 - DNA, 33 bp, Homo sapien
aggccaataaaagaaaatgaactactgctatct

SEQ ID NO: 794558 - DNA, 33 bp, Homo sapien
aggccaataaaagaaagtgaactactgctatct

SEQ ID NO: 794559 - DNA, 33 bp, Homo sapien
gctgacatgcagaaggaccctgaagacatctga

SEQ ID NO: 794560 - DNA, 33 bp, Homo sapien
gctgacatgcagaaggcccctgaagacatctga

SEQ ID NO: 794561 - DNA, 33 bp, Homo sapien
gtttgtacttcggatacaaatatgtgcataaaa

SEQ ID NO: 794562 - DNA, 33 bp, Homo sapien
gtttgtacttcggatataaatatgtgcataaaa

SEQ ID NO: 794563 - DNA, 33 bp, Homo sapien
gttagttttcttttccacttgattctatttgca

SEQ ID NO: 794564 - DNA, 33 bp, Homo sapien
gttagttttcttttccgcttgattctatttgca

SEQ ID NO: 794565 - DNA, 33 bp, Homo sapien
tgaaggtcctgcttataacatgagacaaactgt

SEQ ID NO: 794566 - DNA, 33 bp, Homo sapien
tgaaggtcctgcttatcacatgagacaaactgt

SEQ ID NO: 794567 - DNA, 33 bp, Homo sapien
tacagataatttcttacaacaacgtatggcatt

SEQ ID NO: 794568 - DNA, 33 bp, Homo sapien
tacagataatttcttagaacaacgtatggcatt

SEQ ID NO: 794569 - DNA, 33 bp, Homo sapien
gctattcttcatgcaaccagaagctcactaatc

SEQ ID NO: 794570 - DNA, 33 bp, Homo sapien
gctattcttcatgcaatcagaagctcactaatc

SEQ ID NO: 794571 - DNA, 33 bp, Homo sapien
cttcaccttacaaggaatatctcaacaggcccc

SEQ ID NO: 794572 - DNA, 33 bp, Homo sapien
cttcaccttacaaggagtatctcaacaggcccc

SEQ ID NO: 794573 - DNA, 33 bp, Homo sapien
attgtttgagttcttacgatgataggaatatca

SEQ ID NO: 794574 - DNA, 33 bp, Homo sapien
attgtttgagttcttatgatgataggaatatca

SEQ ID NO: 794575 - DNA, 33 bp, Homo sapien
ttattagtggaaactcaaacaaaattcatatcc

SEQ ID NO: 794576 - DNA, 33 bp, Homo sapien
ttattagtggaaactcgaacaaaattcatatcc

SEQ ID NO: 794577 - DNA, 33 bp, Homo sapien
aattacaattgttcaaatatttatccagccaat

SEQ ID NO: 794578 - DNA, 33 bp, Homo sapien
aattacaattgttcaagtatttatccagccaat

SEQ ID NO: 794579 - DNA, 33 bp, Homo sapien
aattccaaaagtgtcagtccaactaattgaccc

SEQ ID NO: 794580 - DNA, 33 bp, Homo sapien
aattccaaaagtgtcattccaactaattgaccc

SEQ ID NO: 794581 - DNA, 33 bp, Homo sapien
actggtttattgttaacagggctctccgggtcg

SEQ ID NO: 794582 - DNA, 33 bp, Homo sapien
actggtttattgttaatagggctctccgggtcg

SEQ ID NO: 794583 - DNA, 33 bp, Homo sapien
agcaggatctgtggaccaagttagtgccactaa

SEQ ID NO: 794584 - DNA, 33 bp, Homo sapien
agcaggatctgtggacgaagttagtgccactaa

SEQ ID NO: 794585 - DNA, 33 bp, Homo sapien
gatcatgccattcttacgcttaaaacccttcag

SEQ ID NO: 794586 - DNA, 33 bp, Homo sapien
gatcatgccattcttatgcttaaaacccttcag

SEQ ID NO: 794587 - DNA, 33 bp, Homo sapien
cattcagaccatagcaatcactgaatgtttaac

SEQ ID NO: 794588 - DNA, 33 bp, Homo sapien
cattcagaccatagcagtcactgaatgtttaac

SEQ ID NO: 794589 - DNA, 33 bp, Homo sapien
gcctgcatagtataagaaggaaaattgaaatga

SEQ ID NO: 794590 - DNA, 33 bp, Homo sapien
gcctgcatagtataagtaggaaaattgaaatga

SEQ ID NO: 794591 - DNA, 33 bp, Homo sapien
ggtgtttttgtgagaaaccttgtagctgttact

SEQ ID NO: 794592 - DNA, 33 bp, Homo sapien
ggtgtttttgtgagaagccttgtagctgttact

SEQ ID NO: 794593 - DNA, 33 bp, Homo sapien
gtgtgagaatgtgggcgctatttaacttgggcc

SEQ ID NO: 794594 - DNA, 33 bp, Homo sapien
gtgtgagaatgtgggctctatttaacttgggcc

SEQ ID NO: 794595 - DNA, 33 bp, Homo sapien
agatagagcattattgaaatgggcttattcaaa

SEQ ID NO: 794596 - DNA, 33 bp, Homo sapien
agatagagcattattggaatgggcttattcaaa

SEQ ID NO: 794597 - DNA, 33 bp, Homo sapien
tttggtgataattggaccaaattgattgcaatt

SEQ ID NO: 794598 - DNA, 33 bp, Homo sapien
tttggtgataattggatcaaattgattgcaatt

SEQ ID NO: 794599 - DNA, 33 bp, Homo sapien
cgtgaattatatggtcacccaagtttgaaggaa

SEQ ID NO: 794600 - DNA, 33 bp, Homo sapien
cgtgaattatatggtcgcccaagtttgaaggaa

SEQ ID NO: 794601 - DNA, 33 bp, Homo sapien
gtaattacattgcggccgagtacagtggctcac

SEQ ID NO: 794602 - DNA, 33 bp, Homo sapien
gtaattacattgcggctgagtacagtggctcac

SEQ ID NO: 794603 - DNA, 33 bp, Homo sapien
tatgttctctatgtaaaagcctctcaaagaaaa

SEQ ID NO: 794604 - DNA, 33 bp, Homo sapien
tatgttctctatgtaacagcctctcaaagaaaa

SEQ ID NO: 794605 - DNA, 33 bp, Homo sapien
cttttgaattgtatgtcaaacggaatcagatag

SEQ ID NO: 794606 - DNA, 33 bp, Homo sapien
cttttgaattgtatgttaaacggaatcagatag

SEQ ID NO: 794607 - DNA, 33 bp, Homo sapien
tagtccaacctgtagccactcggtccagactga

SEQ ID NO: 794608 - DNA, 33 bp, Homo sapien
tagtccaacctgtagctactcggtccagactga

SEQ ID NO: 794609 - DNA, 33 bp, Homo sapien
atacagacttcggtataagtacttagcataaaa

SEQ ID NO: 794610 - DNA, 33 bp, Homo sapien
atacagacttcggtatcagtacttagcataaaa

SEQ ID NO: 794611 - DNA, 33 bp, Homo sapien
gtgtggcgggcttaggcaaagagcatagtgtgc

SEQ ID NO: 794612 - DNA, 33 bp, Homo sapien
gtgtggcgggcttagggaaagagcatagtgtgc

SEQ ID NO: 794613 - DNA, 33 bp, Homo sapien
atacagacacaaataaccttgctcttttgctct

SEQ ID NO: 794614 - DNA, 33 bp, Homo sapien
atacagacacaaataagcttgctcttttgctct

SEQ ID NO: 794615 - DNA, 33 bp, Homo sapien
catgaaagtttcacacggctgagcctttggaag

SEQ ID NO: 794616 - DNA, 33 bp, Homo sapien
catgaaagtttcacactgctgagcctttggaag

SEQ ID NO: 794617 - DNA, 33 bp, Homo sapien
ggacaggtcacaatacgctggacactgagatga

SEQ ID NO: 794618 - DNA, 33 bp, Homo sapien
ggacaggtcacaatactctggacactgagatga

SEQ ID NO: 794619 - DNA, 33 bp, Homo sapien
tttgagagggcacagcaacaaaacagtcagcca

SEQ ID NO: 794620 - DNA, 33 bp, Homo sapien
tttgagagggcacagcgacaaaacagtcagcca

SEQ ID NO: 794621 - DNA, 33 bp, Homo sapien
tttcaggaatgtgtaacaagctactagaagttt

SEQ ID NO: 794622 - DNA, 33 bp, Homo sapien
tttcaggaatgtgtaataagctactagaagttt

SEQ ID NO: 794623 - DNA, 33 bp, Homo sapien
ctgctgtgagatatggcacgttattcaccgaac

SEQ ID NO: 794624 - DNA, 33 bp, Homo sapien
ctgctgtgagatatgggacgttattcaccgaac

SEQ ID NO: 794625 - DNA, 33 bp, Homo sapien
aagtaatatggaaagtaaagacggaaaatgaga

SEQ ID NO: 794626 - DNA, 33 bp, Homo sapien
aagtaatatggaaagtgaagacggaaaatgaga

SEQ ID NO: 794627 - DNA, 33 bp, Homo sapien
tatggtgcatccttcaaactgtccctgacatga

SEQ ID NO: 794628 - DNA, 33 bp, Homo sapien
tatggtgcatccttcagactgtccctgacatga

SEQ ID NO: 794629 - DNA, 33 bp, Homo sapien
ctggaatcctaaatgcaaaaggaagcagtagtt

SEQ ID NO: 794630 - DNA, 33 bp, Homo sapien
ctggaatcctaaatgcgaaaggaagcagtagtt

SEQ ID NO: 794631 - DNA, 33 bp, Homo sapien
ttctgtgtaaatgaaccgtgtaattggtaatag

SEQ ID NO: 794632 - DNA, 33 bp, Homo sapien
ttctgtgtaaatgaactgtgtaattggtaatag

SEQ ID NO: 794633 - DNA, 33 bp, Homo sapien
gtctacgagcttgcaacagtgcttagaaaattt

SEQ ID NO: 794634 - DNA, 33 bp, Homo sapien
gtctacgagcttgcaatagtgcttagaaaattt

SEQ ID NO: 794635 - DNA, 33 bp, Homo sapien
ataatatcataattaccgcggcttatgaaaaaa

SEQ ID NO: 794636 - DNA, 33 bp, Homo sapien
ataatatcataattactgcggcttatgaaaaaa

SEQ ID NO: 794637 - DNA, 33 bp, Homo sapien
aatacatgtcaacatccaaatggtataattaaa

SEQ ID NO: 794638 - DNA, 33 bp, Homo sapien
aatacatgtcaacatctaaatggtataattaaa

SEQ ID NO: 794639 - DNA, 33 bp, Homo sapien
atttaaaagggggacacgcctgatgaaagaata

SEQ ID NO: 794640 - DNA, 33 bp, Homo sapien
atttaaaagggggacatgcctgatgaaagaata

SEQ ID NO: 794641 - DNA, 33 bp, Homo sapien
agaaggataagagtcaaaatgcaaccatttcaa

SEQ ID NO: 794642 - DNA, 33 bp, Homo sapien
agaaggataagagtcataatgcaaccatttcaa

SEQ ID NO: 794643 - DNA, 33 bp, Homo sapien
cttttatctatatccacctgactgtccatctct

SEQ ID NO: 794644 - DNA, 33 bp, Homo sapien
cttttatctatatccatctgactgtccatctct

SEQ ID NO: 794645 - DNA, 33 bp, Homo sapien
tagtgggtacaataccaaatagaccttgctgaa

SEQ ID NO: 794646 - DNA, 33 bp, Homo sapien
tagtgggtacaataccgaatagaccttgctgaa

SEQ ID NO: 794647 - DNA, 33 bp, Homo sapien
atattattgctgcaacagagaagagggaaaaag

SEQ ID NO: 794648 - DNA, 33 bp, Homo sapien
atattattgctgcaacggagaagagggaaaaag

SEQ ID NO: 794649 - DNA, 33 bp, Homo sapien
gaccaaaatcacgtcaccacaattgtaactcac

SEQ ID NO: 794650 - DNA, 33 bp, Homo sapien
gaccaaaatcacgtcatcacaattgtaactcac

SEQ ID NO: 794651 - DNA, 33 bp, Homo sapien
gaggatatctgagaaacggtgtctttttatctg

SEQ ID NO: 794652 - DNA, 33 bp, Homo sapien
gaggatatctgagaaatggtgtctttttatctg

SEQ ID NO: 794653 - DNA, 33 bp, Homo sapien
gaatctgctcctccccaaacgggttccctggat

SEQ ID NO: 794654 - DNA, 33 bp, Homo sapien
gaatctgctcctccccgaacgggttccctggat

SEQ ID NO: 794655 - DNA, 33 bp, Homo sapien
ttctctccactgttaaacattttagcccaaata

SEQ ID NO: 794656 - DNA, 33 bp, Homo sapien
ttctctccactgttaaccattttagcccaaata

SEQ ID NO: 794657 - DNA, 33 bp, Homo sapien
agcccccagagcctagccatcatcaaatccagt

SEQ ID NO: 794658 - DNA, 33 bp, Homo sapien
agcccccagagcctagtcatcatcaaatccagt

SEQ ID NO: 794659 - DNA, 33 bp, Homo sapien
aggctggagtggagataagagggcaaaaacaaa

SEQ ID NO: 794660 - DNA, 33 bp, Homo sapien
aggctggagtggagatgagagggcaaaaacaaa

SEQ ID NO: 794661 - DNA, 33 bp, Homo sapien
ttttcataggagaaaaactcagtgttggccatg

SEQ ID NO: 794662 - DNA, 33 bp, Homo sapien
ttttcataggagaaaatctcagtgttggccatg

SEQ ID NO: 794663 - DNA, 33 bp, Homo sapien
gccaaacatttattcactcattgttcagatgtg

SEQ ID NO: 794664 - DNA, 33 bp, Homo sapien
gccaaacatttattcattcattgttcagatgtg

SEQ ID NO: 794665 - DNA, 33 bp, Homo sapien
cagctgcctcactgtaagaaaaggaataaaatg

SEQ ID NO: 794666 - DNA, 33 bp, Homo sapien
cagctgcctcactgtaggaaaaggaataaaatg

SEQ ID NO: 794667 - DNA, 33 bp, Homo sapien
gcaagagagtgggaaacactggccagctgcctc

SEQ ID NO: 794668 - DNA, 33 bp, Homo sapien
gcaagagagtgggaaatactggccagctgcctc

SEQ ID NO: 794669 - DNA, 33 bp, Homo sapien
cggggctgagaatcaccgatctaatcctacctt

SEQ ID NO: 794670 - DNA, 33 bp, Homo sapien
cggggctgagaatcactgatctaatcctacctt

SEQ ID NO: 794671 - DNA, 33 bp, Homo sapien
gctgtatattgaaagacgtggagttaggatgtg

SEQ ID NO: 794672 - DNA, 33 bp, Homo sapien
gctgtatattgaaagatgtggagttaggatgtg

SEQ ID NO: 794673 - DNA, 33 bp, Homo sapien
tgtaaacctttaccaccgtgaactattaacata

SEQ ID NO: 794674 - DNA, 33 bp, Homo sapien
tgtaaacctttaccactgtgaactattaacata

SEQ ID NO: 794675 - DNA, 33 bp, Homo sapien
cttgactaatagccaaagattggtcaataactc

SEQ ID NO: 794676 - DNA, 33 bp, Homo sapien
cttgactaatagccaaggattggtcaataactc

SEQ ID NO: 794677 - DNA, 33 bp, Homo sapien
ttttgaccctgaaaccacttcaattaattacta

SEQ ID NO: 794678 - DNA, 33 bp, Homo sapien
ttttgaccctgaaaccgcttcaattaattacta

SEQ ID NO: 794679 - DNA, 33 bp, Homo sapien
tttctttctgggtgtccataggatcatactaaa

SEQ ID NO: 794680 - DNA, 33 bp, Homo sapien
tttctttctgggtgtctataggatcatactaaa

SEQ ID NO: 794681 - DNA, 33 bp, Homo sapien
aaagatggtaaaaactcacaagagcatataagt

SEQ ID NO: 794682 - DNA, 33 bp, Homo sapien
aaagatggtaaaaacttacaagagcatataagt

SEQ ID NO: 794683 - DNA, 33 bp, Homo sapien
aagagtaagaggaaatcaaattatcttgatgaa

SEQ ID NO: 794684 - DNA, 33 bp, Homo sapien
aagagtaagaggaaatgaaattatcttgatgaa

SEQ ID NO: 794685 - DNA, 33 bp, Homo sapien
gcatgctggttctccacgccaagctctgttggc

SEQ ID NO: 794686 - DNA, 33 bp, Homo sapien
gcatgctggttctccatgccaagctctgttggc

SEQ ID NO: 794687 - DNA, 33 bp, Homo sapien
cattttctgttatgaaactttctcatatagggt

SEQ ID NO: 794688 - DNA, 33 bp, Homo sapien
cattttctgttatgaatctttctcatatagggt

SEQ ID NO: 794689 - DNA, 33 bp, Homo sapien
cttcataaaacagtgacgaaatgtgtgttatag

SEQ ID NO: 794690 - DNA, 33 bp, Homo sapien
cttcataaaacagtgatgaaatgtgtgttatag

SEQ ID NO: 794691 - DNA, 33 bp, Homo sapien
cattaaaagtccactgaaaggttaacaagatac

SEQ ID NO: 794692 - DNA, 33 bp, Homo sapien
cattaaaagtccactgtaaggttaacaagatac

SEQ ID NO: 794693 - DNA, 33 bp, Homo sapien
gactaaaatgttgtacaggttatagggaactgc

SEQ ID NO: 794694 - DNA, 33 bp, Homo sapien
gactaaaatgttgtactggttatagggaactgc

SEQ ID NO: 794695 - DNA, 33 bp, Homo sapien
tattaggacaaaaatcacggtcctccagcagtt

SEQ ID NO: 794696 - DNA, 33 bp, Homo sapien
tattaggacaaaaatcgcggtcctccagcagtt

SEQ ID NO: 794697 - DNA, 33 bp, Homo sapien
ctaacaggaacacccacattggactgtgatatg

SEQ ID NO: 794698 - DNA, 33 bp, Homo sapien
ctaacaggaacacccatattggactgtgatatg

SEQ ID NO: 794699 - DNA, 33 bp, Homo sapien
ggctcccctccagatcagaaaaataagttcctc

SEQ ID NO: 794700 - DNA, 33 bp, Homo sapien
ggctcccctccagatcggaaaaataagttcctc

SEQ ID NO: 794701 - DNA, 33 bp, Homo sapien
attgctagtcttaatccgaaataagcaattacc

SEQ ID NO: 794702 - DNA, 33 bp, Homo sapien
attgctagtcttaatctgaaataagcaattacc

SEQ ID NO: 794703 - DNA, 33 bp, Homo sapien
aaaagtctgctctggacgtctttaccttcactc

SEQ ID NO: 794704 - DNA, 33 bp, Homo sapien
aaaagtctgctctggatgtctttaccttcactc

SEQ ID NO: 794705 - DNA, 33 bp, Homo sapien
tcattgtcagcctcggccaaacacactctaagc

SEQ ID NO: 794706 - DNA, 33 bp, Homo sapien
tcattgtcagcctcggtcaaacacactctaagc

SEQ ID NO: 794707 - DNA, 33 bp, Homo sapien
attttcattaacttagccatttgttcatttatt

SEQ ID NO: 794708 - DNA, 33 bp, Homo sapien
attttcattaacttaggcatttgttcatttatt

SEQ ID NO: 794709 - DNA, 33 bp, Homo sapien
tcatgacaagtgctacaaacaggctctgagcta

SEQ ID NO: 794710 - DNA, 33 bp, Homo sapien
tcatgacaagtgctacgaacaggctctgagcta

SEQ ID NO: 794711 - DNA, 33 bp, Homo sapien
gtatgaggacgctagaatagaggcagattatgg

SEQ ID NO: 794712 - DNA, 33 bp, Homo sapien
gtatgaggacgctagagtagaggcagattatgg

SEQ ID NO: 794713 - DNA, 33 bp, Homo sapien
tagctggctctgtaaggcattccataatctgcc

SEQ ID NO: 794714 - DNA, 33 bp, Homo sapien
tagctggctctgtaagtcattccataatctgcc

SEQ ID NO: 794715 - DNA, 33 bp, Homo sapien
aaaattcaccagcaaactgtgagaataccaaga

SEQ ID NO: 794716 - DNA, 33 bp, Homo sapien
aaaattcaccagcaaattgtgagaataccaaga

SEQ ID NO: 794717 - DNA, 33 bp, Homo sapien
ccaactggttaaagcacattggttatacctgtt

SEQ ID NO: 794718 - DNA, 33 bp, Homo sapien
ccaactggttaaagcagattggttatacctgtt

SEQ ID NO: 794719 - DNA, 33 bp, Homo sapien
gagtttcaaggctgctcagaatgtttcctcttt

SEQ ID NO: 794720 - DNA, 33 bp, Homo sapien
gagtttcaaggctgcttagaatgtttcctcttt

SEQ ID NO: 794721 - DNA, 33 bp, Homo sapien
atagttaatggtgtaactccaggtgccagcaag

SEQ ID NO: 794722 - DNA, 33 bp, Homo sapien
atagttaatggtgtaattccaggtgccagcaag

SEQ ID NO: 794723 - DNA, 33 bp, Homo sapien
tagttgatgcttacaaacacccagtgtaggctt

SEQ ID NO: 794724 - DNA, 33 bp, Homo sapien
tagttgatgcttacaatcacccagtgtaggctt

SEQ ID NO: 794725 - DNA, 33 bp, Homo sapien
tctgcaaaggacataaccaaaagagtgaaaagc

SEQ ID NO: 794726 - DNA, 33 bp, Homo sapien
tctgcaaaggacataatcaaaagagtgaaaagc

SEQ ID NO: 794727 - DNA, 33 bp, Homo sapien
tgggtaaggaaatgaaaaagatggaggaattat

SEQ ID NO: 794728 - DNA, 33 bp, Homo sapien
tgggtaaggaaatgaacaagatggaggaattat

SEQ ID NO: 794729 - DNA, 33 bp, Homo sapien
ttatgaaagtgtcagaaggcctccaatgccttc

SEQ ID NO: 794730 - DNA, 33 bp, Homo sapien
ttatgaaagtgtcagagggcctccaatgccttc

SEQ ID NO: 794731 - DNA, 33 bp, Homo sapien
atgccaaaacatactaagttgacaattgcgtct

SEQ ID NO: 794732 - DNA, 33 bp, Homo sapien
atgccaaaacatactaggttgacaattgcgtct

SEQ ID NO: 794733 - DNA, 33 bp, Homo sapien
catttcaagtttttaaatggagagtagatgggg

SEQ ID NO: 794734 - DNA, 33 bp, Homo sapien
catttcaagtttttaactggagagtagatgggg

SEQ ID NO: 794735 - DNA, 33 bp, Homo sapien
ccctttgtttttctaacacttgctgacttcatt

SEQ ID NO: 794736 - DNA, 33 bp, Homo sapien
ccctttgtttttctaatacttgctgacttcatt

SEQ ID NO: 794737 - DNA, 33 bp, Homo sapien
tctgtacagttttctacagaacgtctatcactg

SEQ ID NO: 794738 - DNA, 33 bp, Homo sapien
tctgtacagttttctagagaacgtctatcactg

SEQ ID NO: 794739 - DNA, 33 bp, Homo sapien
gtccccactgactgaacgcaccaccaccacaga

SEQ ID NO: 794740 - DNA, 33 bp, Homo sapien
gtccccactgactgaatgcaccaccaccacaga

SEQ ID NO: 794741 - DNA, 33 bp, Homo sapien
tgcttctctctcaaaaccactttaattctcatt

SEQ ID NO: 794742 - DNA, 33 bp, Homo sapien
tgcttctctctcaaaatcactttaattctcatt

SEQ ID NO: 794743 - DNA, 33 bp, Homo sapien
atttaaacttctggaaacctttgtacttatatt

SEQ ID NO: 794744 - DNA, 33 bp, Homo sapien
atttaaacttctggaagcctttgtacttatatt

SEQ ID NO: 794745 - DNA, 33 bp, Homo sapien
cctttatattcctaccactacttccttagccca

SEQ ID NO: 794746 - DNA, 33 bp, Homo sapien
cctttatattcctaccgctacttccttagccca

SEQ ID NO: 794747 - DNA, 33 bp, Homo sapien
tagttaacagtatgaacatgagccacatcacct

SEQ ID NO: 794748 - DNA, 33 bp, Homo sapien
tagttaacagtatgaatatgagccacatcacct

SEQ ID NO: 794749 - DNA, 33 bp, Homo sapien
gtttgaggttgaggacaaaggccatcctagagc

SEQ ID NO: 794750 - DNA, 33 bp, Homo sapien
gtttgaggttgaggacgaaggccatcctagagc

SEQ ID NO: 794751 - DNA, 33 bp, Homo sapien
ggacacaccttctataacttttcacattgctag

SEQ ID NO: 794752 - DNA, 33 bp, Homo sapien
ggacacaccttctatagcttttcacattgctag

SEQ ID NO: 794753 - DNA, 33 bp, Homo sapien
attgttgtagcagcgaatatgtatctcttttaa

SEQ ID NO: 794754 - DNA, 33 bp, Homo sapien
attgttgtagcagcgactatgtatctcttttaa

SEQ ID NO: 794755 - DNA, 33 bp, Homo sapien
gacttgcaaggtacatcaggtaaagatttttat

SEQ ID NO: 794756 - DNA, 33 bp, Homo sapien
gacttgcaaggtacatgaggtaaagatttttat

SEQ ID NO: 794757 - DNA, 33 bp, Homo sapien
tgtagcctcaagctccaagagtcagttgatcct

SEQ ID NO: 794758 - DNA, 33 bp, Homo sapien
tgtagcctcaagctccgagagtcagttgatcct

SEQ ID NO: 794759 - DNA, 33 bp, Homo sapien
acaaaataatttttaacgtgaatgcacctaaca

SEQ ID NO: 794760 - DNA, 33 bp, Homo sapien
acaaaataatttttaatgtgaatgcacctaaca

SEQ ID NO: 794761 - DNA, 33 bp, Homo sapien
agtgtgtgttaaagtcaccaagttggattcaac

SEQ ID NO: 794762 - DNA, 33 bp, Homo sapien
agtgtgtgttaaagtctccaagttggattcaac

SEQ ID NO: 794763 - DNA, 33 bp, Homo sapien
aattttaatgaagtccagcttatgagttgttgc

SEQ ID NO: 794764 - DNA, 33 bp, Homo sapien
aattttaatgaagtccggcttatgagttgttgc

SEQ ID NO: 794765 - DNA, 33 bp, Homo sapien
actaaacatactcttaacacatgatccaatgac

SEQ ID NO: 794766 - DNA, 33 bp, Homo sapien
actaaacatactcttaccacatgatccaatgac

SEQ ID NO: 794767 - DNA, 33 bp, Homo sapien
cttgctctgactgctacgcaaggaatgcaagga

SEQ ID NO: 794768 - DNA, 33 bp, Homo sapien
cttgctctgactgctatgcaaggaatgcaagga

SEQ ID NO: 794769 - DNA, 33 bp, Homo sapien
acagtttttagacttacaactgaccatgctatg

SEQ ID NO: 794770 - DNA, 33 bp, Homo sapien
acagtttttagacttataactgaccatgctatg

SEQ ID NO: 794771 - DNA, 33 bp, Homo sapien
tttgtacattctgttaaaggaagcaccaggcca

SEQ ID NO: 794772 - DNA, 33 bp, Homo sapien
tttgtacattctgttagaggaagcaccaggcca

SEQ ID NO: 794773 - DNA, 33 bp, Homo sapien
aatatcgaatcatatacagaaagtgactcaatg

SEQ ID NO: 794774 - DNA, 33 bp, Homo sapien
aatatcgaatcatatagagaaagtgactcaatg

SEQ ID NO: 794775 - DNA, 33 bp, Homo sapien
tattagatgcaaacaccatctttaatctataat

SEQ ID NO: 794776 - DNA, 33 bp, Homo sapien
tattagatgcaaacacgatctttaatctataat

SEQ ID NO: 794777 - DNA, 33 bp, Homo sapien
aaatgttttctgctgaatatccatgcttggctc

SEQ ID NO: 794778 - DNA, 33 bp, Homo sapien
aaatgttttctgctgagtatccatgcttggctc

SEQ ID NO: 794779 - DNA, 33 bp, Homo sapien
aatcactgacgtaaccaaaggtgatggagtctc

SEQ ID NO: 794780 - DNA, 33 bp, Homo sapien
aatcactgacgtaaccgaaggtgatggagtctc

SEQ ID NO: 794781 - DNA, 33 bp, Homo sapien
ccgatgttccctcccacctgcatctataacagc

SEQ ID NO: 794782 - DNA, 33 bp, Homo sapien
ccgatgttccctcccatctgcatctataacagc

SEQ ID NO: 794783 - DNA, 33 bp, Homo sapien
tcagtattatttgacaaggcagtttaaagttac

SEQ ID NO: 794784 - DNA, 33 bp, Homo sapien
tcagtattatttgacagggcagtttaaagttac

SEQ ID NO: 794785 - DNA, 33 bp, Homo sapien
gagttatcaaaattatcactgacaactgggatt

SEQ ID NO: 794786 - DNA, 33 bp, Homo sapien
gagttatcaaaattattactgacaactgggatt

SEQ ID NO: 794787 - DNA, 33 bp, Homo sapien
agaaacatttgtattacgtcaaacgctctgtaa

SEQ ID NO: 794788 - DNA, 33 bp, Homo sapien
agaaacatttgtattaggtcaaacgctctgtaa

SEQ ID NO: 794789 - DNA, 33 bp, Homo sapien
ggatcacttgcttggacgatatctgccaaattt

SEQ ID NO: 794790 - DNA, 33 bp, Homo sapien
ggatcacttgcttggatgatatctgccaaattt

SEQ ID NO: 794791 - DNA, 33 bp, Homo sapien
ttctctgatagaaccacgtaggcgagatcacct

SEQ ID NO: 794792 - DNA, 33 bp, Homo sapien
ttctctgatagaaccatgtaggcgagatcacct

SEQ ID NO: 794793 - DNA, 33 bp, Homo sapien
gaacagtagcatctaactaacaaggttgatatg

SEQ ID NO: 794794 - DNA, 33 bp, Homo sapien
gaacagtagcatctaattaacaaggttgatatg

SEQ ID NO: 794795 - DNA, 33 bp, Homo sapien
atttgacacgtaactaaggacctgcttagaatt

SEQ ID NO: 794796 - DNA, 33 bp, Homo sapien
atttgacacgtaactagggacctgcttagaatt

SEQ ID NO: 794797 - DNA, 33 bp, Homo sapien
cctagttgggaagatcagagaagtcctcatggg

SEQ ID NO: 794798 - DNA, 33 bp, Homo sapien
cctagttgggaagatcggagaagtcctcatggg

SEQ ID NO: 794799 - DNA, 33 bp, Homo sapien
ccatttcccttgccaaatcattctcatctttga

SEQ ID NO: 794800 - DNA, 33 bp, Homo sapien
ccatttcccttgccaagtcattctcatctttga

SEQ ID NO: 794801 - DNA, 33 bp, Homo sapien
tgcggtgtcaatagcaaaagcctgtatgtgttt

SEQ ID NO: 794802 - DNA, 33 bp, Homo sapien
tgcggtgtcaatagcacaagcctgtatgtgttt

SEQ ID NO: 794803 - DNA, 33 bp, Homo sapien
gaaggtcaagcttattaaaagtttagttaaggt

SEQ ID NO: 794804 - DNA, 33 bp, Homo sapien
gaaggtcaagcttattgaaagtttagttaaggt

SEQ ID NO: 794805 - DNA, 33 bp, Homo sapien
tcaacattttccatcacattaaaaaagtgaaag

SEQ ID NO: 794806 - DNA, 33 bp, Homo sapien
tcaacattttccatcatattaaaaaagtgaaag

SEQ ID NO: 794807 - DNA, 33 bp, Homo sapien
catatggctccacatacagattatagagctctt

SEQ ID NO: 794808 - DNA, 33 bp, Homo sapien
catatggctccacatagagattatagagctctt

SEQ ID NO: 794809 - DNA, 33 bp, Homo sapien
aatggactaatatatacggctgtcttcactctt

SEQ ID NO: 794810 - DNA, 33 bp, Homo sapien
aatggactaatatatagggctgtcttcactctt

SEQ ID NO: 794811 - DNA, 33 bp, Homo sapien
ccactacccagtgggaactttgtctgagggctc

SEQ ID NO: 794812 - DNA, 33 bp, Homo sapien
ccactacccagtgggacctttgtctgagggctc

SEQ ID NO: 794813 - DNA, 33 bp, Homo sapien
ggagaagttaatatgacgactgtggaagcagag

SEQ ID NO: 794814 - DNA, 33 bp, Homo sapien
ggagaagttaatatgatgactgtggaagcagag

SEQ ID NO: 794815 - DNA, 33 bp, Homo sapien
gctcatgtattcacaagtatccttataaaagaa

SEQ ID NO: 794816 - DNA, 33 bp, Homo sapien
gctcatgtattcacaattatccttataaaagaa

SEQ ID NO: 794817 - DNA, 33 bp, Homo sapien
tgttataatcctccagaaaaagacacctccata

SEQ ID NO: 794818 - DNA, 33 bp, Homo sapien
tgttataatcctccaggaaaagacacctccata

SEQ ID NO: 794819 - DNA, 33 bp, Homo sapien
aggtgatggtaacccaatgagtttgatattatt

SEQ ID NO: 794820 - DNA, 33 bp, Homo sapien
aggtgatggtaacccactgagtttgatattatt

SEQ ID NO: 794821 - DNA, 33 bp, Homo sapien
ctctaatgctttaacaatctgtgttattttaca

SEQ ID NO: 794822 - DNA, 33 bp, Homo sapien
ctctaatgctttaacagtctgtgttattttaca

SEQ ID NO: 794823 - DNA, 33 bp, Homo sapien
gttacattagaggcatcaaaagaaaaagtcatt

SEQ ID NO: 794824 - DNA, 33 bp, Homo sapien
gttacattagaggcatgaaaagaaaaagtcatt

SEQ ID NO: 794825 - DNA, 33 bp, Homo sapien
acataaatcgggcactcaaaaaatggtactctt

SEQ ID NO: 794826 - DNA, 33 bp, Homo sapien
acataaatcgggcacttaaaaaatggtactctt

SEQ ID NO: 794827 - DNA, 33 bp, Homo sapien
tattgaaatcgtcataagttttttgtttctgat

SEQ ID NO: 794828 - DNA, 33 bp, Homo sapien
tattgaaatcgtcatacgttttttgtttctgat

SEQ ID NO: 794829 - DNA, 33 bp, Homo sapien
tcaacatcatatatacaggattcatctatggtg

SEQ ID NO: 794830 - DNA, 33 bp, Homo sapien
tcaacatcatatatacgggattcatctatggtg

SEQ ID NO: 794831 - DNA, 33 bp, Homo sapien
taaatcttatgccacactaaaattatgttacat

SEQ ID NO: 794832 - DNA, 33 bp, Homo sapien
taaatcttatgccacattaaaattatgttacat

SEQ ID NO: 794833 - DNA, 33 bp, Homo sapien
agggtcgagtccttagcatggtgccacactgga

SEQ ID NO: 794834 - DNA, 33 bp, Homo sapien
agggtcgagtccttagtatggtgccacactgga

SEQ ID NO: 794835 - DNA, 33 bp, Homo sapien
accttagaatgcctcacacaagaacaacagcca

SEQ ID NO: 794836 - DNA, 33 bp, Homo sapien
accttagaatgcctcatacaagaacaacagcca

SEQ ID NO: 794837 - DNA, 33 bp, Homo sapien
agcataaaaagaggcacctcactgtgcaggtca

SEQ ID NO: 794838 - DNA, 33 bp, Homo sapien
agcataaaaagaggcatctcactgtgcaggtca

SEQ ID NO: 794839 - DNA, 33 bp, Homo sapien
ggattactaaaggcacaaactaggactctgaat

SEQ ID NO: 794840 - DNA, 33 bp, Homo sapien
ggattactaaaggcacgaactaggactctgaat

SEQ ID NO: 794841 - DNA, 33 bp, Homo sapien
acatttattaaaccacaatttttcagctctcaa

SEQ ID NO: 794842 - DNA, 33 bp, Homo sapien
acatttattaaaccaccatttttcagctctcaa

SEQ ID NO: 794843 - DNA, 33 bp, Homo sapien
ggatacataatagatacgcgatattaaatagat

SEQ ID NO: 794844 - DNA, 33 bp, Homo sapien
ggatacataatagatatgcgatattaaatagat

SEQ ID NO: 794845 - DNA, 33 bp, Homo sapien
atttagtcagtgtttacctaaatgagttcaagc

SEQ ID NO: 794846 - DNA, 33 bp, Homo sapien
atttagtcagtgtttatctaaatgagttcaagc

SEQ ID NO: 794847 - DNA, 33 bp, Homo sapien
catcacttaggagaaaacattttcgcatcaaat

SEQ ID NO: 794848 - DNA, 33 bp, Homo sapien
catcacttaggagaaagcattttcgcatcaaat

SEQ ID NO: 794849 - DNA, 33 bp, Homo sapien
atgcaccttcccttcccagctatcctgataaac

SEQ ID NO: 794850 - DNA, 33 bp, Homo sapien
atgcaccttcccttcctagctatcctgataaac

SEQ ID NO: 794851 - DNA, 33 bp, Homo sapien
ttattattggccaagacgcttaggatatgacgc

SEQ ID NO: 794852 - DNA, 33 bp, Homo sapien
ttattattggccaagatgcttaggatatgacgc

SEQ ID NO: 794853 - DNA, 33 bp, Homo sapien
tctgctctcttgaacaactgcttatctgtcttg

SEQ ID NO: 794854 - DNA, 33 bp, Homo sapien
tctgctctcttgaacacctgcttatctgtcttg

SEQ ID NO: 794855 - DNA, 33 bp, Homo sapien
acaactcatcacctaacacactgtctgacacac

SEQ ID NO: 794856 - DNA, 33 bp, Homo sapien
acaactcatcacctaatacactgtctgacacac

SEQ ID NO: 794857 - DNA, 33 bp, Homo sapien
ttggactcctgtgcaggatactaggatgttgga

SEQ ID NO: 794858 - DNA, 33 bp, Homo sapien
ttggactcctgtgcagtatactaggatgttgga

SEQ ID NO: 794859 - DNA, 33 bp, Homo sapien
agttgtaaaaaatttcaaacaatccaggcattt

SEQ ID NO: 794860 - DNA, 33 bp, Homo sapien
agttgtaaaaaatttccaacaatccaggcattt

SEQ ID NO: 794861 - DNA, 33 bp, Homo sapien
agtttgctgaaggctaagatgattgttagtatt

SEQ ID NO: 794862 - DNA, 33 bp, Homo sapien
agtttgctgaaggctaggatgattgttagtatt

SEQ ID NO: 794863 - DNA, 33 bp, Homo sapien
acacaaaaaaggtgatcaaagcattatttatat

SEQ ID NO: 794864 - DNA, 33 bp, Homo sapien
acacaaaaaaggtgattaaagcattatttatat

SEQ ID NO: 794865 - DNA, 33 bp, Homo sapien
gaaactggattagttccctcagaaatggattgg

SEQ ID NO: 794866 - DNA, 33 bp, Homo sapien
gaaactggattagttctctcagaaatggattgg

SEQ ID NO: 794867 - DNA, 33 bp, Homo sapien
agctttggtgaggtcaaacaaaccatattcaaa

SEQ ID NO: 794868 - DNA, 33 bp, Homo sapien
agctttggtgaggtcagacaaaccatattcaaa

SEQ ID NO: 794869 - DNA, 33 bp, Homo sapien
gaaagaggtaaaactacgttacttatggtttca

SEQ ID NO: 794870 - DNA, 33 bp, Homo sapien
gaaagaggtaaaactatgttacttatggtttca

SEQ ID NO: 794871 - DNA, 33 bp, Homo sapien
gtgaagttctatagtacggaatcatcaatttgt

SEQ ID NO: 794872 - DNA, 33 bp, Homo sapien
gtgaagttctatagtatggaatcatcaatttgt

SEQ ID NO: 794873 - DNA, 33 bp, Homo sapien
tgtattggtgtatgtacgtttccatgtgtgtgt

SEQ ID NO: 794874 - DNA, 33 bp, Homo sapien
tgtattggtgtatgtatgtttccatgtgtgtgt

SEQ ID NO: 794875 - DNA, 33 bp, Homo sapien
ttaaaatgccaaattgcaaagagtctgctcaat

SEQ ID NO: 794876 - DNA, 33 bp, Homo sapien
ttaaaatgccaaattggaaagagtctgctcaat

SEQ ID NO: 794877 - DNA, 33 bp, Homo sapien
aaatggaatgtgaaaacacaaaagtgaccagcc

SEQ ID NO: 794878 - DNA, 33 bp, Homo sapien
aaatggaatgtgaaaagacaaaagtgaccagcc

SEQ ID NO: 794879 - DNA, 33 bp, Homo sapien
gttaacacttacgaaaagattttgcatgtgacc

SEQ ID NO: 794880 - DNA, 33 bp, Homo sapien
gttaacacttacgaaacgattttgcatgtgacc

SEQ ID NO: 794881 - DNA, 33 bp, Homo sapien
tgtgtagttcttggacaaaagaattcaggtttg

SEQ ID NO: 794882 - DNA, 33 bp, Homo sapien
tgtgtagttcttggaccaaagaattcaggtttg

SEQ ID NO: 794883 - DNA, 33 bp, Homo sapien
aagagaaaacaggtgacaataagcatgagtcat

SEQ ID NO: 794884 - DNA, 33 bp, Homo sapien
aagagaaaacaggtgagaataagcatgagtcat

SEQ ID NO: 794885 - DNA, 33 bp, Homo sapien
gctgatatgtagaagactaatctttgtattctc

SEQ ID NO: 794886 - DNA, 33 bp, Homo sapien
gctgatatgtagaagagtaatctttgtattctc

SEQ ID NO: 794887 - DNA, 33 bp, Homo sapien
ctaattcaatgtgcacagatcgtcagaaacacc

SEQ ID NO: 794888 - DNA, 33 bp, Homo sapien
ctaattcaatgtgcacggatcgtcagaaacacc

SEQ ID NO: 794889 - DNA, 33 bp, Homo sapien
ttgttgattgatggtacataagaaggcaattta

SEQ ID NO: 794890 - DNA, 33 bp, Homo sapien
ttgttgattgatggtatataagaaggcaattta

SEQ ID NO: 794891 - DNA, 33 bp, Homo sapien
tttgttaactatgacccggagttcagtttagaa

SEQ ID NO: 794892 - DNA, 33 bp, Homo sapien
tttgttaactatgacctggagttcagtttagaa

SEQ ID NO: 794893 - DNA, 33 bp, Homo sapien
tgaaagtgaaagaaggcactgaagatacataaa

SEQ ID NO: 794894 - DNA, 33 bp, Homo sapien
tgaaagtgaaagaaggtactgaagatacataaa

SEQ ID NO: 794895 - DNA, 33 bp, Homo sapien
taccagacttacttgaaaggacacttcatcaat

SEQ ID NO: 794896 - DNA, 33 bp, Homo sapien
taccagacttacttgagaggacacttcatcaat

SEQ ID NO: 794897 - DNA, 33 bp, Homo sapien
ccagaggcattgggaacaagagtttcaggggaa

SEQ ID NO: 794898 - DNA, 33 bp, Homo sapien
ccagaggcattgggaagaagagtttcaggggaa

SEQ ID NO: 794899 - DNA, 33 bp, Homo sapien
ctggagtaaggtcataccagtttttctgtcaac

SEQ ID NO: 794900 - DNA, 33 bp, Homo sapien
ctggagtaaggtcatatcagtttttctgtcaac

SEQ ID NO: 794901 - DNA, 33 bp, Homo sapien
accttggaaaatatgacgacttgtggatggttg

SEQ ID NO: 794902 - DNA, 33 bp, Homo sapien
accttggaaaatatgatgacttgtggatggttg

SEQ ID NO: 794903 - DNA, 33 bp, Homo sapien
gttaggactagacctaatacacattcaggtggc

SEQ ID NO: 794904 - DNA, 33 bp, Homo sapien
gttaggactagacctagtacacattcaggtggc

SEQ ID NO: 794905 - DNA, 33 bp, Homo sapien
tggtttctcaaaaagaaaatcaggctactggca

SEQ ID NO: 794906 - DNA, 33 bp, Homo sapien
tggtttctcaaaaagacaatcaggctactggca

SEQ ID NO: 794907 - DNA, 33 bp, Homo sapien
aggcttttatttgatacaggtgttggcatataa

SEQ ID NO: 794908 - DNA, 33 bp, Homo sapien
aggcttttatttgatataggtgttggcatataa

SEQ ID NO: 794909 - DNA, 33 bp, Homo sapien
cagatgaaaaagttaccaattaaactgctttcc

SEQ ID NO: 794910 - DNA, 33 bp, Homo sapien
cagatgaaaaagttactaattaaactgctttcc

SEQ ID NO: 794911 - DNA, 33 bp, Homo sapien
ttgtcatgttcctagagattaatgccttgtttg

SEQ ID NO: 794912 - DNA, 33 bp, Homo sapien
ttgtcatgttcctagatattaatgccttgtttg

SEQ ID NO: 794913 - DNA, 33 bp, Homo sapien
actgcagtacaataaccgggggacttcaacacc

SEQ ID NO: 794914 - DNA, 33 bp, Homo sapien
actgcagtacaataactgggggacttcaacacc

SEQ ID NO: 794915 - DNA, 33 bp, Homo sapien
gaacctcaaaagttgccaatattttgcaagtgc

SEQ ID NO: 794916 - DNA, 33 bp, Homo sapien
gaacctcaaaagttgcgaatattttgcaagtgc

SEQ ID NO: 794917 - DNA, 33 bp, Homo sapien
acacttccactaacaacgtataagtgtcctttt

SEQ ID NO: 794918 - DNA, 33 bp, Homo sapien
acacttccactaacaatgtataagtgtcctttt

SEQ ID NO: 794919 - DNA, 33 bp, Homo sapien
aaaatcataacatttgcaggagtaagttttagc

SEQ ID NO: 794920 - DNA, 33 bp, Homo sapien
aaaatcataacatttgtaggagtaagttttagc

SEQ ID NO: 794921 - DNA, 33 bp, Homo sapien
ttttaaatacgtagcaagtatgaagcttaggac

SEQ ID NO: 794922 - DNA, 33 bp, Homo sapien
ttttaaatacgtagcaggtatgaagcttaggac

SEQ ID NO: 794923 - DNA, 33 bp, Homo sapien
ctatcaggcaggcctacagagaatgattctcca

SEQ ID NO: 794924 - DNA, 33 bp, Homo sapien
ctatcaggcaggcctatagagaatgattctcca

SEQ ID NO: 794925 - DNA, 33 bp, Homo sapien
ttttttagcgatgacaacttttctagttcacta

SEQ ID NO: 794926 - DNA, 33 bp, Homo sapien
ttttttagcgatgacagcttttctagttcacta

SEQ ID NO: 794927 - DNA, 33 bp, Homo sapien
gagtttgactcttttcaccaacaaggtcaaaac

SEQ ID NO: 794928 - DNA, 33 bp, Homo sapien
gagtttgactcttttcgccaacaaggtcaaaac

SEQ ID NO: 794929 - DNA, 33 bp, Homo sapien
cagcggtcttttccacagaataataaaaggcta

SEQ ID NO: 794930 - DNA, 33 bp, Homo sapien
cagcggtcttttccacggaataataaaaggcta

SEQ ID NO: 794931 - DNA, 33 bp, Homo sapien
gctatcagtgaccagaagagcctggaataacac

SEQ ID NO: 794932 - DNA, 33 bp, Homo sapien
gctatcagtgaccagatgagcctggaataacac

SEQ ID NO: 794933 - DNA, 33 bp, Homo sapien
agctatggatttcttacaaccaatagaatggaa

SEQ ID NO: 794934 - DNA, 33 bp, Homo sapien
agctatggatttcttataaccaatagaatggaa

SEQ ID NO: 794935 - DNA, 33 bp, Homo sapien
tctcctgctccaccaaggtaggatgtgcttgct

SEQ ID NO: 794936 - DNA, 33 bp, Homo sapien
tctcctgctccaccaatgtaggatgtgcttgct

SEQ ID NO: 794937 - DNA, 33 bp, Homo sapien
cttgagttcgtgctgaaatagctgagggacaat

SEQ ID NO: 794938 - DNA, 33 bp, Homo sapien
cttgagttcgtgctgagatagctgagggacaat

SEQ ID NO: 794939 - DNA, 33 bp, Homo sapien
agacagcttctaacatcactcccagtgacctag

SEQ ID NO: 794940 - DNA, 33 bp, Homo sapien
agacagcttctaacatgactcccagtgacctag

SEQ ID NO: 794941 - DNA, 33 bp, Homo sapien
cataaattagtccctgaattggatcggtgtgga

SEQ ID NO: 794942 - DNA, 33 bp, Homo sapien
cataaattagtccctggattggatcggtgtgga

SEQ ID NO: 794943 - DNA, 33 bp, Homo sapien
cacccagatttcaaataatatgtcatgcctgtg

SEQ ID NO: 794944 - DNA, 33 bp, Homo sapien
cacccagatttcaaatgatatgtcatgcctgtg

SEQ ID NO: 794945 - DNA, 33 bp, Homo sapien
acaatttcaccaccaacgccagacacattatca

SEQ ID NO: 794946 - DNA, 33 bp, Homo sapien
acaatttcaccaccaatgccagacacattatca

SEQ ID NO: 794947 - DNA, 33 bp, Homo sapien
ctaggcgtgaattttacgtttgctctgtggctt

SEQ ID NO: 794948 - DNA, 33 bp, Homo sapien
ctaggcgtgaattttatgtttgctctgtggctt

SEQ ID NO: 794949 - DNA, 33 bp, Homo sapien
ttatttgcccattttacagctaaagattccaag

SEQ ID NO: 794950 - DNA, 33 bp, Homo sapien
ttatttgcccattttatagctaaagattccaag

SEQ ID NO: 794951 - DNA, 33 bp, Homo sapien
ctgacctggatactgaaaacgctggcacttgcc

SEQ ID NO: 794952 - DNA, 33 bp, Homo sapien
ctgacctggatactgagaacgctggcacttgcc

SEQ ID NO: 794953 - DNA, 33 bp, Homo sapien
aggcactcaccctcgccagcttcagtcacacac

SEQ ID NO: 794954 - DNA, 33 bp, Homo sapien
aggcactcaccctcgctagcttcagtcacacac

SEQ ID NO: 794955 - DNA, 33 bp, Homo sapien
ttgtctaagtgaaaaggaatcataagttctttg

SEQ ID NO: 794956 - DNA, 33 bp, Homo sapien
ttgtctaagtgaaaagtaatcataagttctttg

SEQ ID NO: 794957 - DNA, 33 bp, Homo sapien
ttgcagacgtcacttaaacagagtcataacgtc

SEQ ID NO: 794958 - DNA, 33 bp, Homo sapien
ttgcagacgtcacttatacagagtcataacgtc

SEQ ID NO: 794959 - DNA, 33 bp, Homo sapien
cctgcgctgtctctacacttctggttactatat

SEQ ID NO: 794960 - DNA, 33 bp, Homo sapien
cctgcgctgtctctacgcttctggttactatat

SEQ ID NO: 794961 - DNA, 33 bp, Homo sapien
tttggaatttgaaggacgattacctgggagcct

SEQ ID NO: 794962 - DNA, 33 bp, Homo sapien
tttggaatttgaaggatgattacctgggagcct

SEQ ID NO: 794963 - DNA, 33 bp, Homo sapien
gatgatccccaaatgccgatgcctcctaacttc

SEQ ID NO: 794964 - DNA, 33 bp, Homo sapien
gatgatccccaaatgctgatgcctcctaacttc

SEQ ID NO: 794965 - DNA, 33 bp, Homo sapien
aatcaaaactcagggacacgatgtggcaaagaa

SEQ ID NO: 794966 - DNA, 33 bp, Homo sapien
aatcaaaactcagggatacgatgtggcaaagaa

SEQ ID NO: 794967 - DNA, 33 bp, Homo sapien
ttgtcaacagatgtcacattctgctaaactgac

SEQ ID NO: 794968 - DNA, 33 bp, Homo sapien
ttgtcaacagatgtcatattctgctaaactgac

SEQ ID NO: 794969 - DNA, 33 bp, Homo sapien
aaaccaagattaggaactgtgaaaagacgctct

SEQ ID NO: 794970 - DNA, 33 bp, Homo sapien
aaaccaagattaggaagtgtgaaaagacgctct

SEQ ID NO: 794971 - DNA, 33 bp, Homo sapien
accaagaaaatcaacaatgagaccatcaattta

SEQ ID NO: 794972 - DNA, 33 bp, Homo sapien
accaagaaaatcaacagtgagaccatcaattta

SEQ ID NO: 794973 - DNA, 33 bp, Homo sapien
taaaatgattaggagacgtctaaaaatgtgaaa

SEQ ID NO: 794974 - DNA, 33 bp, Homo sapien
taaaatgattaggagatgtctaaaaatgtgaaa

SEQ ID NO: 794975 - DNA, 33 bp, Homo sapien
taagggctttcagagccaatgatgaataagctc

SEQ ID NO: 794976 - DNA, 33 bp, Homo sapien
taagggctttcagagctaatgatgaataagctc

SEQ ID NO: 794977 - DNA, 33 bp, Homo sapien
aaatattttgtacttcacttccactggaacttc

SEQ ID NO: 794978 - DNA, 33 bp, Homo sapien
aaatattttgtacttcgcttccactggaacttc

SEQ ID NO: 794979 - DNA, 33 bp, Homo sapien
ggtcaaatgtcaccaccgctgctagtaagtaga

SEQ ID NO: 794980 - DNA, 33 bp, Homo sapien
ggtcaaatgtcaccactgctgctagtaagtaga

SEQ ID NO: 794981 - DNA, 33 bp, Homo sapien
acaggcctacactctcaatggcttcctcattag

SEQ ID NO: 794982 - DNA, 33 bp, Homo sapien
acaggcctacactctcgatggcttcctcattag

SEQ ID NO: 794983 - DNA, 33 bp, Homo sapien
aatagatactttaggcacgattaaatgtgcacc

SEQ ID NO: 794984 - DNA, 33 bp, Homo sapien
aatagatactttaggcgcgattaaatgtgcacc

SEQ ID NO: 794985 - DNA, 33 bp, Homo sapien
caaaaaattccaagcacagtgtctcttgcctgt

SEQ ID NO: 794986 - DNA, 33 bp, Homo sapien
caaaaaattccaagcatagtgtctcttgcctgt

SEQ ID NO: 794987 - DNA, 33 bp, Homo sapien
ttctcaatatgggtgacacagaggtgaataagt

SEQ ID NO: 794988 - DNA, 33 bp, Homo sapien
ttctcaatatgggtgatacagaggtgaataagt

SEQ ID NO: 794989 - DNA, 33 bp, Homo sapien
aatttataaatgtaacaggcagaatatttcaga

SEQ ID NO: 794990 - DNA, 33 bp, Homo sapien
aatttataaatgtaacgggcagaatatttcaga

SEQ ID NO: 794991 - DNA, 33 bp, Homo sapien
acttctgaattattagaccatgatacattttat

SEQ ID NO: 794992 - DNA, 33 bp, Homo sapien
acttctgaattattaggccatgatacattttat

SEQ ID NO: 794993 - DNA, 33 bp, Homo sapien
aaacaatacacaacacaagagtttttaattcta

SEQ ID NO: 794994 - DNA, 33 bp, Homo sapien
aaacaatacacaacaccagagtttttaattcta

SEQ ID NO: 794995 - DNA, 33 bp, Homo sapien
catgatctacagtccaatgaagatctctggcaa

SEQ ID NO: 794996 - DNA, 33 bp, Homo sapien
catgatctacagtccagtgaagatctctggcaa

SEQ ID NO: 794997 - DNA, 33 bp, Homo sapien
gactgcctgtcattccacacacagctccaagac

SEQ ID NO: 794998 - DNA, 33 bp, Homo sapien
gactgcctgtcattcctcacacagctccaagac

SEQ ID NO: 794999 - DNA, 33 bp, Homo sapien
gtgcctgccaactgtacaaggtaatttaataat

SEQ ID NO: 795000 - DNA, 33 bp, Homo sapien
gtgcctgccaactgtagaaggtaatttaataat

SEQ ID NO: 795001 - DNA, 33 bp, Homo sapien
ggtgtaagtataaaaccgatggcagttggagaa

SEQ ID NO: 795002 - DNA, 33 bp, Homo sapien
ggtgtaagtataaaactgatggcagttggagaa

SEQ ID NO: 795003 - DNA, 33 bp, Homo sapien
ctgcttctcaaaatatcaacggccttacttaca

SEQ ID NO: 795004 - DNA, 33 bp, Homo sapien
ctgcttctcaaaatattaacggccttacttaca

SEQ ID NO: 795005 - DNA, 33 bp, Homo sapien
cttcagttgaatgtcaccatagaaagtaactaa

SEQ ID NO: 795006 - DNA, 33 bp, Homo sapien
cttcagttgaatgtcatcatagaaagtaactaa

SEQ ID NO: 795007 - DNA, 33 bp, Homo sapien
caaggatttctgaatgcaatgcggctttacatt

SEQ ID NO: 795008 - DNA, 33 bp, Homo sapien
caaggatttctgaatggaatgcggctttacatt

SEQ ID NO: 795009 - DNA, 33 bp, Homo sapien
cctcttatctgatttaaagtgttgaaagatgaa

SEQ ID NO: 795010 - DNA, 33 bp, Homo sapien
cctcttatctgatttacagtgttgaaagatgaa

SEQ ID NO: 795011 - DNA, 33 bp, Homo sapien
gtcatgtacaaattgacgagcattacaaatggg

SEQ ID NO: 795012 - DNA, 33 bp, Homo sapien
gtcatgtacaaattgatgagcattacaaatggg

SEQ ID NO: 795013 - DNA, 33 bp, Homo sapien
attggacaaaaggccacgatctaatgctaatgg

SEQ ID NO: 795014 - DNA, 33 bp, Homo sapien
attggacaaaaggccatgatctaatgctaatgg

SEQ ID NO: 795015 - DNA, 33 bp, Homo sapien
attcagttagaggctgcattagctctggaatga

SEQ ID NO: 795016 - DNA, 33 bp, Homo sapien
attcagttagaggctggattagctctggaatga

SEQ ID NO: 795017 - DNA, 33 bp, Homo sapien
tgggtttctagatgaaaggaaaggagtcaccag

SEQ ID NO: 795018 - DNA, 33 bp, Homo sapien
tgggtttctagatgaacggaaaggagtcaccag

SEQ ID NO: 795019 - DNA, 33 bp, Homo sapien
gttccaccctatcatcaaccatcagacagagga

SEQ ID NO: 795020 - DNA, 33 bp, Homo sapien
gttccaccctatcatcgaccatcagacagagga

SEQ ID NO: 795021 - DNA, 33 bp, Homo sapien
aagttcctttaccaaccgtggtttgtttcaaag

SEQ ID NO: 795022 - DNA, 33 bp, Homo sapien
aagttcctttaccaactgtggtttgtttcaaag

SEQ ID NO: 795023 - DNA, 33 bp, Homo sapien
taaattgatagaatcactgagtagacatttcac

SEQ ID NO: 795024 - DNA, 33 bp, Homo sapien
taaattgatagaatcattgagtagacatttcac

SEQ ID NO: 795025 - DNA, 33 bp, Homo sapien
ctcctctcctcaaatagaagtactgtgggtatt

SEQ ID NO: 795026 - DNA, 33 bp, Homo sapien
ctcctctcctcaaatataagtactgtgggtatt

SEQ ID NO: 795027 - DNA, 33 bp, Homo sapien
tcttaactatatggtagcacaagcaagtttaaa

SEQ ID NO: 795028 - DNA, 33 bp, Homo sapien
tcttaactatatggtatcacaagcaagtttaaa

SEQ ID NO: 795029 - DNA, 33 bp, Homo sapien
tgttcatgtttcacctcactggatttgacattt

SEQ ID NO: 795030 - DNA, 33 bp, Homo sapien
tgttcatgtttcaccttactggatttgacattt

SEQ ID NO: 795031 - DNA, 33 bp, Homo sapien
cttagaacctatgcttcaaatttcctggctatg

SEQ ID NO: 795032 - DNA, 33 bp, Homo sapien
cttagaacctatgcttgaaatttcctggctatg

SEQ ID NO: 795033 - DNA, 33 bp, Homo sapien
aacttagtgggcaatcagaattatatcaattga

SEQ ID NO: 795034 - DNA, 33 bp, Homo sapien
aacttagtgggcaatcggaattatatcaattga

SEQ ID NO: 795035 - DNA, 33 bp, Homo sapien
ttctttcatgtctaacaagagccctcttcactc

SEQ ID NO: 795036 - DNA, 33 bp, Homo sapien
ttctttcatgtctaacgagagccctcttcactc

SEQ ID NO: 795037 - DNA, 33 bp, Homo sapien
gaatcactgaagtctcaaggttgatagtaagat

SEQ ID NO: 795038 - DNA, 33 bp, Homo sapien
gaatcactgaagtctccaggttgatagtaagat

SEQ ID NO: 795039 - DNA, 33 bp, Homo sapien
ccaaaagcaaagtgtacgtggagaaggtgaggg

SEQ ID NO: 795040 - DNA, 33 bp, Homo sapien
ccaaaagcaaagtgtatgtggagaaggtgaggg

SEQ ID NO: 795041 - DNA, 33 bp, Homo sapien
gctcagactgctctggaaaacctgctgtctttg

SEQ ID NO: 795042 - DNA, 33 bp, Homo sapien
gctcagactgctctggcaaacctgctgtctttg

SEQ ID NO: 795043 - DNA, 33 bp, Homo sapien
gagcagtctgagccaaaggttgagtagagagca

SEQ ID NO: 795044 - DNA, 33 bp, Homo sapien
gagcagtctgagccaagggttgagtagagagca

SEQ ID NO: 795045 - DNA, 33 bp, Homo sapien
ttggaggatgccataaatgacctcagagattct

SEQ ID NO: 795046 - DNA, 33 bp, Homo sapien
ttggaggatgccataagtgacctcagagattct

SEQ ID NO: 795047 - DNA, 33 bp, Homo sapien
ggtttgaggaatggaccacttagcagggctaaa

SEQ ID NO: 795048 - DNA, 33 bp, Homo sapien
ggtttgaggaatggactacttagcagggctaaa

SEQ ID NO: 795049 - DNA, 33 bp, Homo sapien
ataccactctttggacaacacattagcctaatt

SEQ ID NO: 795050 - DNA, 33 bp, Homo sapien
ataccactctttggacgacacattagcctaatt

SEQ ID NO: 795051 - DNA, 33 bp, Homo sapien
ttcccaagctacacaacaaggctgaagagaaga

SEQ ID NO: 795052 - DNA, 33 bp, Homo sapien
ttcccaagctacacaagaaggctgaagagaaga

SEQ ID NO: 795053 - DNA, 33 bp, Homo sapien
caataggctgagcaatcaactggggtagggctg

SEQ ID NO: 795054 - DNA, 33 bp, Homo sapien
caataggctgagcaatgaactggggtagggctg

SEQ ID NO: 795055 - DNA, 33 bp, Homo sapien
gatcacatcagagttgaaaatatatgcctcagt

SEQ ID NO: 795056 - DNA, 33 bp, Homo sapien
gatcacatcagagttgtaaatatatgcctcagt

SEQ ID NO: 795057 - DNA, 33 bp, Homo sapien
agggaaatagagatgaaggcaatagaggcaggc

SEQ ID NO: 795058 - DNA, 33 bp, Homo sapien
agggaaatagagatgagggcaatagaggcaggc

SEQ ID NO: 795059 - DNA, 33 bp, Homo sapien
cctttaactgtgataaacatccacttaaatgaa

SEQ ID NO: 795060 - DNA, 33 bp, Homo sapien
cctttaactgtgataatcatccacttaaatgaa

SEQ ID NO: 795061 - DNA, 33 bp, Homo sapien
cacacaggagagaaaaacacaggagtcttcatg

SEQ ID NO: 795062 - DNA, 33 bp, Homo sapien
cacacaggagagaaaaccacaggagtcttcatg

SEQ ID NO: 795063 - DNA, 33 bp, Homo sapien
tagattctggttggccaaggactgaagagtttc

SEQ ID NO: 795064 - DNA, 33 bp, Homo sapien
tagattctggttggccgaggactgaagagtttc

SEQ ID NO: 795065 - DNA, 33 bp, Homo sapien
caggcctaatgaggcaagtgctaccagatccct

SEQ ID NO: 795066 - DNA, 33 bp, Homo sapien
caggcctaatgaggcaggtgctaccagatccct

SEQ ID NO: 795067 - DNA, 33 bp, Homo sapien
aatagagctaaataagaaaccgtctttgacagg

SEQ ID NO: 795068 - DNA, 33 bp, Homo sapien
aatagagctaaataagcaaccgtctttgacagg

SEQ ID NO: 795069 - DNA, 33 bp, Homo sapien
atcatgctaatagaagaaggataatctgaatca

SEQ ID NO: 795070 - DNA, 33 bp, Homo sapien
atcatgctaatagaagcaggataatctgaatca

SEQ ID NO: 795071 - DNA, 33 bp, Homo sapien
ccttcacaacatttaacgccatgctttgtttct

SEQ ID NO: 795072 - DNA, 33 bp, Homo sapien
ccttcacaacatttaatgccatgctttgtttct

SEQ ID NO: 795073 - DNA, 33 bp, Homo sapien
aagccaggaattctgcaacctcaggatcttgac

SEQ ID NO: 795074 - DNA, 33 bp, Homo sapien
aagccaggaattctgcgacctcaggatcttgac

SEQ ID NO: 795075 - DNA, 33 bp, Homo sapien
ttttgagtctgcgctacgtgtcacgaacttggt

SEQ ID NO: 795076 - DNA, 33 bp, Homo sapien
ttttgagtctgcgctatgtgtcacgaacttggt

SEQ ID NO: 795077 - DNA, 33 bp, Homo sapien
tcagagtctgttttcccaagagttagttctagg

SEQ ID NO: 795078 - DNA, 33 bp, Homo sapien
tcagagtctgttttccgaagagttagttctagg

SEQ ID NO: 795079 - DNA, 33 bp, Homo sapien
tatttattctttgccacgcactattctaagcat

SEQ ID NO: 795080 - DNA, 33 bp, Homo sapien
tatttattctttgccatgcactattctaagcat

SEQ ID NO: 795081 - DNA, 33 bp, Homo sapien
cagtcatgtcctaagaacaacagcaataataat

SEQ ID NO: 795082 - DNA, 33 bp, Homo sapien
cagtcatgtcctaagagcaacagcaataataat

SEQ ID NO: 795083 - DNA, 33 bp, Homo sapien
accaatatgctctcacgctaccttaatcacctc

SEQ ID NO: 795084 - DNA, 33 bp, Homo sapien
accaatatgctctcactctaccttaatcacctc

SEQ ID NO: 795085 - DNA, 33 bp, Homo sapien
cgccacaggaaatggaagttttacataaggacc

SEQ ID NO: 795086 - DNA, 33 bp, Homo sapien
cgccacaggaaatggaggttttacataaggacc

SEQ ID NO: 795087 - DNA, 33 bp, Homo sapien
ttagaagcatgtcgtaagtaaaccggaaacaat

SEQ ID NO: 795088 - DNA, 33 bp, Homo sapien
ttagaagcatgtcgtaggtaaaccggaaacaat

SEQ ID NO: 795089 - DNA, 33 bp, Homo sapien
gccttataaattagaccaacgaaagacagatta

SEQ ID NO: 795090 - DNA, 33 bp, Homo sapien
gccttataaattagactaacgaaagacagatta

SEQ ID NO: 795091 - DNA, 33 bp, Homo sapien
gtatttcattgccacacagtctattttaatgaa

SEQ ID NO: 795092 - DNA, 33 bp, Homo sapien
gtatttcattgccacagagtctattttaatgaa

SEQ ID NO: 795093 - DNA, 33 bp, Homo sapien
aaccaacaggcctcaacgctaatctccatgcca

SEQ ID NO: 795094 - DNA, 33 bp, Homo sapien
aaccaacaggcctcaatgctaatctccatgcca

SEQ ID NO: 795095 - DNA, 33 bp, Homo sapien
tttaatctccacaacaatcttataaggtagaaa

SEQ ID NO: 795096 - DNA, 33 bp, Homo sapien
tttaatctccacaacagtcttataaggtagaaa

SEQ ID NO: 795097 - DNA, 33 bp, Homo sapien
gtttcatttctaaatcacagcgaatacctctat

SEQ ID NO: 795098 - DNA, 33 bp, Homo sapien
gtttcatttctaaatcgcagcgaatacctctat

SEQ ID NO: 795099 - DNA, 33 bp, Homo sapien
atgtaaaacacctatagaagagcttgacacatg

SEQ ID NO: 795100 - DNA, 33 bp, Homo sapien
atgtaaaacacctatataagagcttgacacatg

SEQ ID NO: 795101 - DNA, 33 bp, Homo sapien
ttaaagaacttctacaatcactacaaacctctg

SEQ ID NO: 795102 - DNA, 33 bp, Homo sapien
ttaaagaacttctacattcactacaaacctctg

SEQ ID NO: 795103 - DNA, 33 bp, Homo sapien
gtgcttttataatctaaacatcaacttggaaca

SEQ ID NO: 795104 - DNA, 33 bp, Homo sapien
gtgcttttataatctagacatcaacttggaaca

SEQ ID NO: 795105 - DNA, 33 bp, Homo sapien
catgactgtagtaggagaaaggatgtgagatct

SEQ ID NO: 795106 - DNA, 33 bp, Homo sapien
catgactgtagtaggataaaggatgtgagatct

SEQ ID NO: 795107 - DNA, 33 bp, Homo sapien
tgcatttgacataaaagacagtggtggacatta

SEQ ID NO: 795108 - DNA, 33 bp, Homo sapien
tgcatttgacataaaatacagtggtggacatta

SEQ ID NO: 795109 - DNA, 33 bp, Homo sapien
tgtggtctggctccatgaacattgctacagtat

SEQ ID NO: 795110 - DNA, 33 bp, Homo sapien
tgtggtctggctccattaacattgctacagtat

SEQ ID NO: 795111 - DNA, 33 bp, Homo sapien
gaatttggagcctttgaaatagaagtattgtcc

SEQ ID NO: 795112 - DNA, 33 bp, Homo sapien
gaatttggagcctttgtaatagaagtattgtcc

SEQ ID NO: 795113 - DNA, 33 bp, Homo sapien
aagagagagggatagaaagtggcatcaaaattt

SEQ ID NO: 795114 - DNA, 33 bp, Homo sapien
aagagagagggatagagagtggcatcaaaattt

SEQ ID NO: 795115 - DNA, 33 bp, Homo sapien
tcttatatttgtgttacattcctggatctctat

SEQ ID NO: 795116 - DNA, 33 bp, Homo sapien
tcttatatttgtgttatattcctggatctctat

SEQ ID NO: 795117 - DNA, 33 bp, Homo sapien
ttatcagaaacacagacggaaaatgaaactact

SEQ ID NO: 795118 - DNA, 33 bp, Homo sapien
ttatcagaaacacagatggaaaatgaaactact

SEQ ID NO: 795119 - DNA, 33 bp, Homo sapien
tgctgctacttctgatcacaaacataccgacaa

SEQ ID NO: 795120 - DNA, 33 bp, Homo sapien
tgctgctacttctgatgacaaacataccgacaa

SEQ ID NO: 795121 - DNA, 33 bp, Homo sapien
tggagaatctaatttcaagagttaccacatcat

SEQ ID NO: 795122 - DNA, 33 bp, Homo sapien
tggagaatctaatttcgagagttaccacatcat

SEQ ID NO: 795123 - DNA, 33 bp, Homo sapien
ctgaatcaatgttaggaaaaaagaatatgttgt

SEQ ID NO: 795124 - DNA, 33 bp, Homo sapien
ctgaatcaatgttagggaaaaagaatatgttgt

SEQ ID NO: 795125 - DNA, 33 bp, Homo sapien
tgactgtttgaaacaacggactatggtggaaat

SEQ ID NO: 795126 - DNA, 33 bp, Homo sapien
tgactgtttgaaacaatggactatggtggaaat

SEQ ID NO: 795127 - DNA, 33 bp, Homo sapien
tataatcatcacaaaaaattatcagataacaaa

SEQ ID NO: 795128 - DNA, 33 bp, Homo sapien
tataatcatcacaaaatattatcagataacaaa

SEQ ID NO: 795129 - DNA, 33 bp, Homo sapien
atacatgtgtaatcaaatactgaccttttggta

SEQ ID NO: 795130 - DNA, 33 bp, Homo sapien
atacatgtgtaatcaagtactgaccttttggta

SEQ ID NO: 795131 - DNA, 33 bp, Homo sapien
tccacgattctcttagcccctcttacagaacag

SEQ ID NO: 795132 - DNA, 33 bp, Homo sapien
tccacgattctcttagtccctcttacagaacag

SEQ ID NO: 795133 - DNA, 33 bp, Homo sapien
agctcagactctcttcaatataaatgtacaaat

SEQ ID NO: 795134 - DNA, 33 bp, Homo sapien
agctcagactctcttcgatataaatgtacaaat

SEQ ID NO: 795135 - DNA, 33 bp, Homo sapien
tctctatggtttagaccactttaagtacctttt

SEQ ID NO: 795136 - DNA, 33 bp, Homo sapien
tctctatggtttagactactttaagtacctttt

SEQ ID NO: 795137 - DNA, 33 bp, Homo sapien
ggtcagtttgccttagaagagcaccagagttca

SEQ ID NO: 795138 - DNA, 33 bp, Homo sapien
ggtcagtttgccttagcagagcaccagagttca

SEQ ID NO: 795139 - DNA, 33 bp, Homo sapien
acatctcaagagccaaagattgaactcgggcat

SEQ ID NO: 795140 - DNA, 33 bp, Homo sapien
acatctcaagagccaacgattgaactcgggcat

SEQ ID NO: 795141 - DNA, 33 bp, Homo sapien
ggtggagcctccagctaacattttggttacatt

SEQ ID NO: 795142 - DNA, 33 bp, Homo sapien
ggtggagcctccagcttacattttggttacatt

SEQ ID NO: 795143 - DNA, 33 bp, Homo sapien
taatctctggacaggcccactactgaaagaacc

SEQ ID NO: 795144 - DNA, 33 bp, Homo sapien
taatctctggacaggctcactactgaaagaacc

SEQ ID NO: 795145 - DNA, 33 bp, Homo sapien
tgtttaagctttacaaaaatttgacaagctcct

SEQ ID NO: 795146 - DNA, 33 bp, Homo sapien
tgtttaagctttacaacaatttgacaagctcct

SEQ ID NO: 795147 - DNA, 33 bp, Homo sapien
gaagcagctttgaaacaggatccatataattca

SEQ ID NO: 795148 - DNA, 33 bp, Homo sapien
gaagcagctttgaaacgggatccatataattca

SEQ ID NO: 795149 - DNA, 33 bp, Homo sapien
acccacataagcaaaactgtttcaaaaattaaa

SEQ ID NO: 795150 - DNA, 33 bp, Homo sapien
acccacataagcaaaattgtttcaaaaattaaa

SEQ ID NO: 795151 - DNA, 33 bp, Homo sapien
agatattacagtaggcacttttgttttcaattt

SEQ ID NO: 795152 - DNA, 33 bp, Homo sapien
agatattacagtaggcgcttttgttttcaattt

SEQ ID NO: 795153 - DNA, 33 bp, Homo sapien
gttatactgttcatagaaaatggtttcaaattc

SEQ ID NO: 795154 - DNA, 33 bp, Homo sapien
gttatactgttcatagcaaatggtttcaaattc

SEQ ID NO: 795155 - DNA, 33 bp, Homo sapien
ggaaaactgaaagacacgaaactgtaaaacttc

SEQ ID NO: 795156 - DNA, 33 bp, Homo sapien
ggaaaactgaaagacatgaaactgtaaaacttc

SEQ ID NO: 795157 - DNA, 33 bp, Homo sapien
agatctgtttccaagacgacttacctgagctag

SEQ ID NO: 795158 - DNA, 33 bp, Homo sapien
agatctgtttccaagatgacttacctgagctag

SEQ ID NO: 795159 - DNA, 33 bp, Homo sapien
ggaagaaaacagctagacatcagcttgatcata

SEQ ID NO: 795160 - DNA, 33 bp, Homo sapien
ggaagaaaacagctaggcatcagcttgatcata

SEQ ID NO: 795161 - DNA, 33 bp, Homo sapien
aggattatttccttaaatctcatgcacagacct

SEQ ID NO: 795162 - DNA, 33 bp, Homo sapien
aggattatttccttaagtctcatgcacagacct

SEQ ID NO: 795163 - DNA, 33 bp, Homo sapien
cacaacagatatcataataatgaaaaagtgtga

SEQ ID NO: 795164 - DNA, 33 bp, Homo sapien
cacaacagatatcatactaatgaaaaagtgtga

SEQ ID NO: 795165 - DNA, 33 bp, Homo sapien
gcaggattttttcaccagaacagctgtgtgttt

SEQ ID NO: 795166 - DNA, 33 bp, Homo sapien
gcaggattttttcaccggaacagctgtgtgttt

SEQ ID NO: 795167 - DNA, 33 bp, Homo sapien
attttctatttatgacaccactcatttcaccca

SEQ ID NO: 795168 - DNA, 33 bp, Homo sapien
attttctatttatgacgccactcatttcaccca

SEQ ID NO: 795169 - DNA, 33 bp, Homo sapien
gagatggagtttggacaccagaatgttcatttc

SEQ ID NO: 795170 - DNA, 33 bp, Homo sapien
gagatggagtttggacgccagaatgttcatttc

SEQ ID NO: 795171 - DNA, 33 bp, Homo sapien
cattgtttttgactccacatgcttggtgcaaga

SEQ ID NO: 795172 - DNA, 33 bp, Homo sapien
cattgtttttgactccgcatgcttggtgcaaga

SEQ ID NO: 795173 - DNA, 33 bp, Homo sapien
ttaaatggatgtggaaagtacattaacaacacc

SEQ ID NO: 795174 - DNA, 33 bp, Homo sapien
ttaaatggatgtggaacgtacattaacaacacc

SEQ ID NO: 795175 - DNA, 33 bp, Homo sapien
cacagaggatttctcaataggttcttacagtat

SEQ ID NO: 795176 - DNA, 33 bp, Homo sapien
cacagaggatttctcactaggttcttacagtat

SEQ ID NO: 795177 - DNA, 33 bp, Homo sapien
catgggcaaatatttaggcttccttcagaaatc

SEQ ID NO: 795178 - DNA, 33 bp, Homo sapien
catgggcaaatatttatgcttccttcagaaatc

SEQ ID NO: 795179 - DNA, 33 bp, Homo sapien
ctgtcaaatgaagcaaccgcaaataatgaaacc

SEQ ID NO: 795180 - DNA, 33 bp, Homo sapien
ctgtcaaatgaagcaatcgcaaataatgaaacc

SEQ ID NO: 795181 - DNA, 33 bp, Homo sapien
aggacttcagaggttcaactccatccctttatg

SEQ ID NO: 795182 - DNA, 33 bp, Homo sapien
aggacttcagaggttcgactccatccctttatg

SEQ ID NO: 795183 - DNA, 33 bp, Homo sapien
catgaattgtgcaaccgaaaggaatttttagat

SEQ ID NO: 795184 - DNA, 33 bp, Homo sapien
catgaattgtgcaacctaaaggaatttttagat

SEQ ID NO: 795185 - DNA, 33 bp, Homo sapien
aaactaaatggctataccgattgtgccccctta

SEQ ID NO: 795186 - DNA, 33 bp, Homo sapien
aaactaaatggctatatcgattgtgccccctta

SEQ ID NO: 795187 - DNA, 33 bp, Homo sapien
gaagtgtgtgaaagagaagactagcagtgagca

SEQ ID NO: 795188 - DNA, 33 bp, Homo sapien
gaagtgtgtgaaagaggagactagcagtgagca

SEQ ID NO: 795189 - DNA, 33 bp, Homo sapien
aggtgaaatcgtgagacggttgagatagcccag

SEQ ID NO: 795190 - DNA, 33 bp, Homo sapien
aggtgaaatcgtgagatggttgagatagcccag

SEQ ID NO: 795191 - DNA, 33 bp, Homo sapien
gtctcaagcaggctgacgctaacaggtcttgga

SEQ ID NO: 795192 - DNA, 33 bp, Homo sapien
gtctcaagcaggctgatgctaacaggtcttgga

SEQ ID NO: 795193 - DNA, 33 bp, Homo sapien
acccagtttactggccaaacttgccatgttggc

SEQ ID NO: 795194 - DNA, 33 bp, Homo sapien
acccagtttactggccgaacttgccatgttggc

SEQ ID NO: 795195 - DNA, 33 bp, Homo sapien
gtctcttagacccacaccatcctcctcatctag

SEQ ID NO: 795196 - DNA, 33 bp, Homo sapien
gtctcttagacccacatcatcctcctcatctag

SEQ ID NO: 795197 - DNA, 33 bp, Homo sapien
caactatgaagatagaagtcggttgttcaggga

SEQ ID NO: 795198 - DNA, 33 bp, Homo sapien
caactatgaagatagaggtcggttgttcaggga

SEQ ID NO: 795199 - DNA, 33 bp, Homo sapien
tgtctagtccttacccacaagcaatgcaacccc

SEQ ID NO: 795200 - DNA, 33 bp, Homo sapien
tgtctagtccttacccgcaagcaatgcaacccc

SEQ ID NO: 795201 - DNA, 33 bp, Homo sapien
ggaagtcagcagatcaacccaattaagcccagc

SEQ ID NO: 795202 - DNA, 33 bp, Homo sapien
ggaagtcagcagatcatcccaattaagcccagc

SEQ ID NO: 795203 - DNA, 33 bp, Homo sapien
gcttctgtgtggacgaagtttttgtaaatgttc

SEQ ID NO: 795204 - DNA, 33 bp, Homo sapien
gcttctgtgtggacgatgtttttgtaaatgttc

SEQ ID NO: 795205 - DNA, 33 bp, Homo sapien
ataaaactacaacaaaagtccaccaaattaact

SEQ ID NO: 795206 - DNA, 33 bp, Homo sapien
ataaaactacaacaaacgtccaccaaattaact

SEQ ID NO: 795207 - DNA, 33 bp, Homo sapien
cttccttctacttccacagtcatctccatctta

SEQ ID NO: 795208 - DNA, 33 bp, Homo sapien
cttccttctacttccagagtcatctccatctta

SEQ ID NO: 795209 - DNA, 33 bp, Homo sapien
aggcttagaggcaaaccgttagaaacatatatt

SEQ ID NO: 795210 - DNA, 33 bp, Homo sapien
aggcttagaggcaaactgttagaaacatatatt

SEQ ID NO: 795211 - DNA, 33 bp, Homo sapien
atggtgccacagtgtaaaactggacaagtctct

SEQ ID NO: 795212 - DNA, 33 bp, Homo sapien
atggtgccacagtgtacaactggacaagtctct

SEQ ID NO: 795213 - DNA, 33 bp, Homo sapien
tgtggagactgtcaaacggggttaccagagtgg

SEQ ID NO: 795214 - DNA, 33 bp, Homo sapien
tgtggagactgtcaaatggggttaccagagtgg

SEQ ID NO: 795215 - DNA, 33 bp, Homo sapien
gactattgacttgctgcaaaatcatatctttga

SEQ ID NO: 795216 - DNA, 33 bp, Homo sapien
gactattgacttgctgtaaaatcatatctttga

SEQ ID NO: 795217 - DNA, 33 bp, Homo sapien
attaggcagacaaccacgtgtggccgaaagaaa

SEQ ID NO: 795218 - DNA, 33 bp, Homo sapien
attaggcagacaaccatgtgtggccgaaagaaa

SEQ ID NO: 795219 - DNA, 33 bp, Homo sapien
gcagtgtccctactcacgggggacgagactcag

SEQ ID NO: 795220 - DNA, 33 bp, Homo sapien
gcagtgtccctactcatgggggacgagactcag

SEQ ID NO: 795221 - DNA, 33 bp, Homo sapien
ctctgctaaggcagaaattactgataagggaat

SEQ ID NO: 795222 - DNA, 33 bp, Homo sapien
ctctgctaaggcagaagttactgataagggaat

SEQ ID NO: 795223 - DNA, 33 bp, Homo sapien
aagtcaatgactcccccaatctgttttctcctt

SEQ ID NO: 795224 - DNA, 33 bp, Homo sapien
aagtcaatgactcccctaatctgttttctcctt

SEQ ID NO: 795225 - DNA, 33 bp, Homo sapien
ttacaactcaaagtatcagatagaacacaatgc

SEQ ID NO: 795226 - DNA, 33 bp, Homo sapien
ttacaactcaaagtatgagatagaacacaatgc

SEQ ID NO: 795227 - DNA, 33 bp, Homo sapien
ttcctttgaatccttacgtaaaagcgcccatct

SEQ ID NO: 795228 - DNA, 33 bp, Homo sapien
ttcctttgaatccttatgtaaaagcgcccatct

SEQ ID NO: 795229 - DNA, 33 bp, Homo sapien
atatgtgtgagaatagcatgtacaatttggcat

SEQ ID NO: 795230 - DNA, 33 bp, Homo sapien
atatgtgtgagaataggatgtacaatttggcat

SEQ ID NO: 795231 - DNA, 33 bp, Homo sapien
atcgaaatgactggtaagcaaacaagtgaaatt

SEQ ID NO: 795232 - DNA, 33 bp, Homo sapien
atcgaaatgactggtaggcaaacaagtgaaatt

SEQ ID NO: 795233 - DNA, 33 bp, Homo sapien
tgctggagacagaataataggaaaaaatgatta

SEQ ID NO: 795234 - DNA, 33 bp, Homo sapien
tgctggagacagaatagtaggaaaaaatgatta

SEQ ID NO: 795235 - DNA, 33 bp, Homo sapien
ctagctgacccgaaaaaaccacttgttcacatg

SEQ ID NO: 795236 - DNA, 33 bp, Homo sapien
ctagctgacccgaaaagaccacttgttcacatg

SEQ ID NO: 795237 - DNA, 33 bp, Homo sapien
agggctcccctgtgtacctcctgctttccaggg

SEQ ID NO: 795238 - DNA, 33 bp, Homo sapien
agggctcccctgtgtatctcctgctttccaggg

SEQ ID NO: 795239 - DNA, 33 bp, Homo sapien
gaacggtctggtcaccaagctgttgtcacaaaa

SEQ ID NO: 795240 - DNA, 33 bp, Homo sapien
gaacggtctggtcaccgagctgttgtcacaaaa

SEQ ID NO: 795241 - DNA, 33 bp, Homo sapien
gattctctaaggaaaaatcagttacagcggagg

SEQ ID NO: 795242 - DNA, 33 bp, Homo sapien
gattctctaaggaaaagtcagttacagcggagg

SEQ ID NO: 795243 - DNA, 33 bp, Homo sapien
tacaaactccagcacacattcactatgccccac

SEQ ID NO: 795244 - DNA, 33 bp, Homo sapien
tacaaactccagcacatattcactatgccccac

SEQ ID NO: 795245 - DNA, 33 bp, Homo sapien
tcagttttatctttggaactttaaacagcataa

SEQ ID NO: 795246 - DNA, 33 bp, Homo sapien
tcagttttatctttgggactttaaacagcataa

SEQ ID NO: 795247 - DNA, 33 bp, Homo sapien
aatctcagagttagaacagaattcagcagcccc

SEQ ID NO: 795248 - DNA, 33 bp, Homo sapien
aatctcagagttagaagagaattcagcagcccc

SEQ ID NO: 795249 - DNA, 33 bp, Homo sapien
gctatggaatcaaccacgttttacttggagctc

SEQ ID NO: 795250 - DNA, 33 bp, Homo sapien
gctatggaatcaaccatgttttacttggagctc

SEQ ID NO: 795251 - DNA, 33 bp, Homo sapien
gtctaaattacacctaagacattttgtaactag

SEQ ID NO: 795252 - DNA, 33 bp, Homo sapien
gtctaaattacacctatgacattttgtaactag

SEQ ID NO: 795253 - DNA, 33 bp, Homo sapien
aggctccttcacttacaagatatcagaagcagc

SEQ ID NO: 795254 - DNA, 33 bp, Homo sapien
aggctccttcacttacgagatatcagaagcagc

SEQ ID NO: 795255 - DNA, 33 bp, Homo sapien
ctggaacagatcttcaatatagttgttcaactg

SEQ ID NO: 795256 - DNA, 33 bp, Homo sapien
ctggaacagatcttcagtatagttgttcaactg

SEQ ID NO: 795257 - DNA, 33 bp, Homo sapien
agtccagagaaaacaaatatgtctcctaaaaat

SEQ ID NO: 795258 - DNA, 33 bp, Homo sapien
agtccagagaaaacaactatgtctcctaaaaat

SEQ ID NO: 795259 - DNA, 33 bp, Homo sapien
tgattgataatggggtcacatgaagacttggtt

SEQ ID NO: 795260 - DNA, 33 bp, Homo sapien
tgattgataatggggttacatgaagacttggtt

SEQ ID NO: 795261 - DNA, 33 bp, Homo sapien
cacaagcagaagttaaatcccaacctttctgtc

SEQ ID NO: 795262 - DNA, 33 bp, Homo sapien
cacaagcagaagttaagtcccaacctttctgtc

SEQ ID NO: 795263 - DNA, 33 bp, Homo sapien
cttatagtaaaaatcaaaattgttcagcaggag

SEQ ID NO: 795264 - DNA, 33 bp, Homo sapien
cttatagtaaaaatcagaattgttcagcaggag

SEQ ID NO: 795265 - DNA, 33 bp, Homo sapien
ataactgagatgggcactctcatccaggaaata

SEQ ID NO: 795266 - DNA, 33 bp, Homo sapien
ataactgagatgggcagtctcatccaggaaata

SEQ ID NO: 795267 - DNA, 33 bp, Homo sapien
aattcatcattggacaaccgttagcctcagcag

SEQ ID NO: 795268 - DNA, 33 bp, Homo sapien
aattcatcattggacagccgttagcctcagcag

SEQ ID NO: 795269 - DNA, 33 bp, Homo sapien
cagaaggtactgagtacgtaaagatggaatata

SEQ ID NO: 795270 - DNA, 33 bp, Homo sapien
cagaaggtactgagtatgtaaagatggaatata

SEQ ID NO: 795271 - DNA, 33 bp, Homo sapien
gtggccgcagagccaaatgtggtcagagctgaa

SEQ ID NO: 795272 - DNA, 33 bp, Homo sapien
gtggccgcagagccaagtgtggtcagagctgaa

SEQ ID NO: 795273 - DNA, 33 bp, Homo sapien
gccaataccaatctcaataacacatgttcatag

SEQ ID NO: 795274 - DNA, 33 bp, Homo sapien
gccaataccaatctcagtaacacatgttcatag

SEQ ID NO: 795275 - DNA, 33 bp, Homo sapien
gaattaaatgaaacaaactctatgaaaatggtc

SEQ ID NO: 795276 - DNA, 33 bp, Homo sapien
gaattaaatgaaacaacctctatgaaaatggtc

SEQ ID NO: 795277 - DNA, 33 bp, Homo sapien
atatatctgactatgacgtttctctatcacctt

SEQ ID NO: 795278 - DNA, 33 bp, Homo sapien
atatatctgactatgaggtttctctatcacctt

SEQ ID NO: 795279 - DNA, 33 bp, Homo sapien
cacttttctggcaaaaattgtgaatggtaagaa

SEQ ID NO: 795280 - DNA, 33 bp, Homo sapien
cacttttctggcaaaagttgtgaatggtaagaa

SEQ ID NO: 795281 - DNA, 33 bp, Homo sapien
caatgtttttgccaacaatctctacatggaaga

SEQ ID NO: 795282 - DNA, 33 bp, Homo sapien
caatgtttttgccaacgatctctacatggaaga

SEQ ID NO: 795283 - DNA, 33 bp, Homo sapien
ttggtcttgaaaagtcaactcacgatgggattg

SEQ ID NO: 795284 - DNA, 33 bp, Homo sapien
ttggtcttgaaaagtcgactcacgatgggattg

SEQ ID NO: 795285 - DNA, 33 bp, Homo sapien
tatgggttaagcaaaacactgtggctaaagatt

SEQ ID NO: 795286 - DNA, 33 bp, Homo sapien
tatgggttaagcaaaatactgtggctaaagatt

SEQ ID NO: 795287 - DNA, 33 bp, Homo sapien
tcacaaagctactctcaatgactctgagaaatc

SEQ ID NO: 795288 - DNA, 33 bp, Homo sapien
tcacaaagctactctccatgactctgagaaatc

SEQ ID NO: 795289 - DNA, 33 bp, Homo sapien
taaggttgttttaagcacttattgagacggaca

SEQ ID NO: 795290 - DNA, 33 bp, Homo sapien
taaggttgttttaagcgcttattgagacggaca

SEQ ID NO: 795291 - DNA, 33 bp, Homo sapien
gttaagagcaggaaggacagataatacctaaac

SEQ ID NO: 795292 - DNA, 33 bp, Homo sapien
gttaagagcaggaagggcagataatacctaaac

SEQ ID NO: 795293 - DNA, 33 bp, Homo sapien
gtctaaattaagacaaacacacgaataaaagca

SEQ ID NO: 795294 - DNA, 33 bp, Homo sapien
gtctaaattaagacaatcacacgaataaaagca

SEQ ID NO: 795295 - DNA, 33 bp, Homo sapien
tgcatcatctggtacactacacccttcctatta

SEQ ID NO: 795296 - DNA, 33 bp, Homo sapien
tgcatcatctggtacagtacacccttcctatta

SEQ ID NO: 795297 - DNA, 33 bp, Homo sapien
aaatgttgtggcccatcatgcctgtaaaaatat

SEQ ID NO: 795298 - DNA, 33 bp, Homo sapien
aaatgttgtggcccatgatgcctgtaaaaatat

SEQ ID NO: 795299 - DNA, 33 bp, Homo sapien
gattaacgagacaaaaccataacaaacgtattc

SEQ ID NO: 795300 - DNA, 33 bp, Homo sapien
gattaacgagacaaaagcataacaaacgtattc

SEQ ID NO: 795301 - DNA, 33 bp, Homo sapien
aaggtaatgtaattcacagtagggccggaattt

SEQ ID NO: 795302 - DNA, 33 bp, Homo sapien
aaggtaatgtaattcatagtagggccggaattt

SEQ ID NO: 795303 - DNA, 33 bp, Homo sapien
cttggagctcagatatcaaaaggcatgtttcaa

SEQ ID NO: 795304 - DNA, 33 bp, Homo sapien
cttggagctcagatattaaaaggcatgtttcaa

SEQ ID NO: 795305 - DNA, 33 bp, Homo sapien
tggcaattacaacttgcataaacaggttcagga

SEQ ID NO: 795306 - DNA, 33 bp, Homo sapien
tggcaattacaacttgtataaacaggttcagga

SEQ ID NO: 795307 - DNA, 33 bp, Homo sapien
taagagaatgaatgtccagccaaccactggatt

SEQ ID NO: 795308 - DNA, 33 bp, Homo sapien
taagagaatgaatgtctagccaaccactggatt

SEQ ID NO: 795309 - DNA, 33 bp, Homo sapien
gcattaggcagtcagccacatcaagagacttca

SEQ ID NO: 795310 - DNA, 33 bp, Homo sapien
gcattaggcagtcagcgacatcaagagacttca

SEQ ID NO: 795311 - DNA, 33 bp, Homo sapien
aagtcaaacccaacaaaaagtcatttgatcact

SEQ ID NO: 795312 - DNA, 33 bp, Homo sapien
aagtcaaacccaacaagaagtcatttgatcact

SEQ ID NO: 795313 - DNA, 33 bp, Homo sapien
agttgggaccaaggacacttctggccctcaatt

SEQ ID NO: 795314 - DNA, 33 bp, Homo sapien
agttgggaccaaggacgcttctggccctcaatt

SEQ ID NO: 795315 - DNA, 33 bp, Homo sapien
tgggccgtgccagaaacaaagggccccttaact

SEQ ID NO: 795316 - DNA, 33 bp, Homo sapien
tgggccgtgccagaaagaaagggccccttaact

SEQ ID NO: 795317 - DNA, 33 bp, Homo sapien
ctattttcactgttcaaacacccttaactttat

SEQ ID NO: 795318 - DNA, 33 bp, Homo sapien
ctattttcactgttcagacacccttaactttat

SEQ ID NO: 795319 - DNA, 33 bp, Homo sapien
actggagactacgagcacactcaagggcaacac

SEQ ID NO: 795320 - DNA, 33 bp, Homo sapien
actggagactacgagcgcactcaagggcaacac

SEQ ID NO: 795321 - DNA, 33 bp, Homo sapien
cccagattctgagcaaattctctttgaaaggca

SEQ ID NO: 795322 - DNA, 33 bp, Homo sapien
cccagattctgagcaagttctctttgaaaggca

SEQ ID NO: 795323 - DNA, 33 bp, Homo sapien
cacttgggaggcactacgttgtaaaaatatttt

SEQ ID NO: 795324 - DNA, 33 bp, Homo sapien
cacttgggaggcactatgttgtaaaaatatttt

SEQ ID NO: 795325 - DNA, 33 bp, Homo sapien
aggccattctgaagtgcagcaaatgagtttaag

SEQ ID NO: 795326 - DNA, 33 bp, Homo sapien
aggccattctgaagtgtagcaaatgagtttaag

SEQ ID NO: 795327 - DNA, 33 bp, Homo sapien
taattactaaaagcatcaagcccctggtatgag

SEQ ID NO: 795328 - DNA, 33 bp, Homo sapien
taattactaaaagcattaagcccctggtatgag

SEQ ID NO: 795329 - DNA, 33 bp, Homo sapien
tgctggtttttacggaaagttactgctggggtt

SEQ ID NO: 795330 - DNA, 33 bp, Homo sapien
tgctggtttttacggagagttactgctggggtt

SEQ ID NO: 795331 - DNA, 33 bp, Homo sapien
ctcttaccggctactaataaattgtgcaggtac

SEQ ID NO: 795332 - DNA, 33 bp, Homo sapien
ctcttaccggctactagtaaattgtgcaggtac

SEQ ID NO: 795333 - DNA, 33 bp, Homo sapien
atagagtaacccatgaaaacatctcaaaggaga

SEQ ID NO: 795334 - DNA, 33 bp, Homo sapien
atagagtaacccatgagaacatctcaaaggaga

SEQ ID NO: 795335 - DNA, 33 bp, Homo sapien
gtgaatgaggccattcagaaaagaccacaaagt

SEQ ID NO: 795336 - DNA, 33 bp, Homo sapien
gtgaatgaggccattcggaaaagaccacaaagt

SEQ ID NO: 795337 - DNA, 33 bp, Homo sapien
tttccactaatgaaaacaatggatctagacaat

SEQ ID NO: 795338 - DNA, 33 bp, Homo sapien
tttccactaatgaaaataatggatctagacaat

SEQ ID NO: 795339 - DNA, 33 bp, Homo sapien
ataactagacattaaacgcatcataacggaagt

SEQ ID NO: 795340 - DNA, 33 bp, Homo sapien
ataactagacattaaatgcatcataacggaagt

SEQ ID NO: 795341 - DNA, 33 bp, Homo sapien
gaaggacaagtgcttgaatttagttttttttaa

SEQ ID NO: 795342 - DNA, 33 bp, Homo sapien
gaaggacaagtgcttggatttagttttttttaa

SEQ ID NO: 795343 - DNA, 33 bp, Homo sapien
gtgaattggaacagacagggattgctgggtttt

SEQ ID NO: 795344 - DNA, 33 bp, Homo sapien
gtgaattggaacagaccgggattgctgggtttt

SEQ ID NO: 795345 - DNA, 33 bp, Homo sapien
agacttgaaggataatcaatgtggagattttat

SEQ ID NO: 795346 - DNA, 33 bp, Homo sapien
agacttgaaggataatgaatgtggagattttat

SEQ ID NO: 795347 - DNA, 33 bp, Homo sapien
ttatctaatgagagtaccttactgcttttagaa

SEQ ID NO: 795348 - DNA, 33 bp, Homo sapien
ttatctaatgagagtatcttactgcttttagaa

SEQ ID NO: 795349 - DNA, 33 bp, Homo sapien
ataccttatgcttgaacgtgacctattttgtca

SEQ ID NO: 795350 - DNA, 33 bp, Homo sapien
ataccttatgcttgaatgtgacctattttgtca

SEQ ID NO: 795351 - DNA, 33 bp, Homo sapien
tgaagctttagttgtccaccatgttatacattt

SEQ ID NO: 795352 - DNA, 33 bp, Homo sapien
tgaagctttagttgtctaccatgttatacattt

SEQ ID NO: 795353 - DNA, 33 bp, Homo sapien
tagaagttgaattaggaccataaaaaatcaaaa

SEQ ID NO: 795354 - DNA, 33 bp, Homo sapien
tagaagttgaattagggccataaaaaatcaaaa

SEQ ID NO: 795355 - DNA, 33 bp, Homo sapien
ttgcttcttacttacaaggaaaaatgcaactga

SEQ ID NO: 795356 - DNA, 33 bp, Homo sapien
ttgcttcttacttacagggaaaaatgcaactga

SEQ ID NO: 795357 - DNA, 33 bp, Homo sapien
tctgaggagaaaggaacaggagctcaagcaaac

SEQ ID NO: 795358 - DNA, 33 bp, Homo sapien
tctgaggagaaaggaataggagctcaagcaaac

SEQ ID NO: 795359 - DNA, 33 bp, Homo sapien
aaatttttaactccataataggcatttgctgcc

SEQ ID NO: 795360 - DNA, 33 bp, Homo sapien
aaatttttaactccatgataggcatttgctgcc

SEQ ID NO: 795361 - DNA, 33 bp, Homo sapien
gagttctaaagtggaactacgtcaggacaaaga

SEQ ID NO: 795362 - DNA, 33 bp, Homo sapien
gagttctaaagtggaattacgtcaggacaaaga

SEQ ID NO: 795363 - DNA, 33 bp, Homo sapien
ggaatccttattgttacgcatgtccgtataaga

SEQ ID NO: 795364 - DNA, 33 bp, Homo sapien
ggaatccttattgttatgcatgtccgtataaga

SEQ ID NO: 795365 - DNA, 33 bp, Homo sapien
ggcttagtgtgagtaaaaaatgcaggtgcgctg

SEQ ID NO: 795366 - DNA, 33 bp, Homo sapien
ggcttagtgtgagtaacaaatgcaggtgcgctg

SEQ ID NO: 795367 - DNA, 33 bp, Homo sapien
atccacaaaacttgaacgacttactgaacttct

SEQ ID NO: 795368 - DNA, 33 bp, Homo sapien
atccacaaaacttgaatgacttactgaacttct

SEQ ID NO: 795369 - DNA, 33 bp, Homo sapien
ttatccagagttagacacaaagctaaactgctg

SEQ ID NO: 795370 - DNA, 33 bp, Homo sapien
ttatccagagttagacccaaagctaaactgctg

SEQ ID NO: 795371 - DNA, 33 bp, Homo sapien
ctgctcaataccatcaactagggtccatttcca

SEQ ID NO: 795372 - DNA, 33 bp, Homo sapien
ctgctcaataccatcagctagggtccatttcca

SEQ ID NO: 795373 - DNA, 33 bp, Homo sapien
actcattactcactcactgactcatccagatca

SEQ ID NO: 795374 - DNA, 33 bp, Homo sapien
actcattactcactcagtgactcatccagatca

SEQ ID NO: 795375 - DNA, 33 bp, Homo sapien
catccaatcaactgaaagctttaaatgaaacaa

SEQ ID NO: 795376 - DNA, 33 bp, Homo sapien
catccaatcaactgaaggctttaaatgaaacaa

SEQ ID NO: 795377 - DNA, 33 bp, Homo sapien
ctgatttacatagggcacaaaaaattggttaga

SEQ ID NO: 795378 - DNA, 33 bp, Homo sapien
ctgatttacatagggcgcaaaaaattggttaga

SEQ ID NO: 795379 - DNA, 33 bp, Homo sapien
ttatgatacatcttaccagagaggatgtcctgc

SEQ ID NO: 795380 - DNA, 33 bp, Homo sapien
ttatgatacatcttactagagaggatgtcctgc

SEQ ID NO: 795381 - DNA, 33 bp, Homo sapien
gacttcttcaaatcaacagtcttaaaaaggacc

SEQ ID NO: 795382 - DNA, 33 bp, Homo sapien
gacttcttcaaatcaatagtcttaaaaaggacc

SEQ ID NO: 795383 - DNA, 33 bp, Homo sapien
agaatcatgaagaaagaaaatgtgaacagacca

SEQ ID NO: 795384 - DNA, 33 bp, Homo sapien
agaatcatgaagaaaggaaatgtgaacagacca

SEQ ID NO: 795385 - DNA, 33 bp, Homo sapien
aacacatgatttttaccataagcagcctggggg

SEQ ID NO: 795386 - DNA, 33 bp, Homo sapien
aacacatgatttttactataagcagcctggggg

SEQ ID NO: 795387 - DNA, 33 bp, Homo sapien
ttcaggcattatgacgaacatgggaactctcta

SEQ ID NO: 795388 - DNA, 33 bp, Homo sapien
ttcaggcattatgacgcacatgggaactctcta

SEQ ID NO: 795389 - DNA, 33 bp, Homo sapien
cacttaagttcaaaacacaatatcataaaccaa

SEQ ID NO: 795390 - DNA, 33 bp, Homo sapien
cacttaagttcaaaacgcaatatcataaaccaa

SEQ ID NO: 795391 - DNA, 33 bp, Homo sapien
atttctaattcttgtggagacctcaacctgggt

SEQ ID NO: 795392 - DNA, 33 bp, Homo sapien
atttctaattcttgtgtagacctcaacctgggt

SEQ ID NO: 795393 - DNA, 33 bp, Homo sapien
tattcgtcattgtcctatgatgatacttcacaa

SEQ ID NO: 795394 - DNA, 33 bp, Homo sapien
tattcgtcattgtcctgtgatgatacttcacaa

SEQ ID NO: 795395 - DNA, 33 bp, Homo sapien
tctctactgtattggacaaaactagaggggaaa

SEQ ID NO: 795396 - DNA, 33 bp, Homo sapien
tctctactgtattggataaaactagaggggaaa

SEQ ID NO: 795397 - DNA, 33 bp, Homo sapien
cagtgcattttcctaaagtgaaatagccatccc

SEQ ID NO: 795398 - DNA, 33 bp, Homo sapien
cagtgcattttcctaatgtgaaatagccatccc

SEQ ID NO: 795399 - DNA, 33 bp, Homo sapien
cagctcccagattctactacatggttctacttc

SEQ ID NO: 795400 - DNA, 33 bp, Homo sapien
cagctcccagattctattacatggttctacttc

SEQ ID NO: 795401 - DNA, 33 bp, Homo sapien
ctaggcacaaaaaaaaatttcagatgtgaaggt

SEQ ID NO: 795402 - DNA, 33 bp, Homo sapien
ctaggcacaaaaaaaattttcagatgtgaaggt

SEQ ID NO: 795403 - DNA, 33 bp, Homo sapien
tccagccatgaagtgacgttgtagagtggtgaa

SEQ ID NO: 795404 - DNA, 33 bp, Homo sapien
tccagccatgaagtgatgttgtagagtggtgaa

SEQ ID NO: 795405 - DNA, 33 bp, Homo sapien
acatggctggtagtgactattgaatgttacaaa

SEQ ID NO: 795406 - DNA, 33 bp, Homo sapien
acatggctggtagtgattattgaatgttacaaa

SEQ ID NO: 795407 - DNA, 33 bp, Homo sapien
gcaaaacataatccgaaatggaccaaccccagg

SEQ ID NO: 795408 - DNA, 33 bp, Homo sapien
gcaaaacataatccgagatggaccaaccccagg

SEQ ID NO: 795409 - DNA, 33 bp, Homo sapien
aatggtgttaaagaaacctcagtgctgtttggg

SEQ ID NO: 795410 - DNA, 33 bp, Homo sapien
aatggtgttaaagaaatctcagtgctgtttggg

SEQ ID NO: 795411 - DNA, 33 bp, Homo sapien
aatgtcactttgccaaaccacaactccttttgg

SEQ ID NO: 795412 - DNA, 33 bp, Homo sapien
aatgtcactttgccaagccacaactccttttgg

SEQ ID NO: 795413 - DNA, 33 bp, Homo sapien
agggaccaataaatgcgcactctctgagagact

SEQ ID NO: 795414 - DNA, 33 bp, Homo sapien
agggaccaataaatgctcactctctgagagact

SEQ ID NO: 795415 - DNA, 33 bp, Homo sapien
tgacaagcagagatgaagcaaacagtgccagta

SEQ ID NO: 795416 - DNA, 33 bp, Homo sapien
tgacaagcagagatgaggcaaacagtgccagta

SEQ ID NO: 795417 - DNA, 33 bp, Homo sapien
ccttccttttgtcctccactctcaatttttctc

SEQ ID NO: 795418 - DNA, 33 bp, Homo sapien
ccttccttttgtcctctactctcaatttttctc

SEQ ID NO: 795419 - DNA, 33 bp, Homo sapien
ggttctcactcacccactgatatgctttggctg

SEQ ID NO: 795420 - DNA, 33 bp, Homo sapien
ggttctcactcacccattgatatgctttggctg

SEQ ID NO: 795421 - DNA, 33 bp, Homo sapien
ggagtgcacagttaacaacactggttctcactc

SEQ ID NO: 795422 - DNA, 33 bp, Homo sapien
ggagtgcacagttaacgacactggttctcactc

SEQ ID NO: 795423 - DNA, 33 bp, Homo sapien
ttcctatcgttagcatcaaaaaaggcagatagt

SEQ ID NO: 795424 - DNA, 33 bp, Homo sapien
ttcctatcgttagcattaaaaaaggcagatagt

SEQ ID NO: 795425 - DNA, 33 bp, Homo sapien
agaatctgagagcaacaataacctcaagttcat

SEQ ID NO: 795426 - DNA, 33 bp, Homo sapien
agaatctgagagcaacgataacctcaagttcat

SEQ ID NO: 795427 - DNA, 33 bp, Homo sapien
tctttttacagtgaaaagacaccttttggtaaa

SEQ ID NO: 795428 - DNA, 33 bp, Homo sapien
tctttttacagtgaaaggacaccttttggtaaa

SEQ ID NO: 795429 - DNA, 33 bp, Homo sapien
tataactgagtcattacgtgaattgccttcata

SEQ ID NO: 795430 - DNA, 33 bp, Homo sapien
tataactgagtcattatgtgaattgccttcata

SEQ ID NO: 795431 - DNA, 33 bp, Homo sapien
gccaaggaatgcaaaacaaaccagactaagggc

SEQ ID NO: 795432 - DNA, 33 bp, Homo sapien
gccaaggaatgcaaaagaaaccagactaagggc

SEQ ID NO: 795433 - DNA, 33 bp, Homo sapien
caaaaagaaatgaaagcagtattctgagttgag

SEQ ID NO: 795434 - DNA, 33 bp, Homo sapien
caaaaagaaatgaaaggagtattctgagttgag

SEQ ID NO: 795435 - DNA, 33 bp, Homo sapien
ttcattcgcctggaaagttagaattacaaatta

SEQ ID NO: 795436 - DNA, 33 bp, Homo sapien
ttcattcgcctggaaatttagaattacaaatta

SEQ ID NO: 795437 - DNA, 33 bp, Homo sapien
aagtgaggtaattgaaaatgtttacagcattat

SEQ ID NO: 795438 - DNA, 33 bp, Homo sapien
aagtgaggtaattgaagatgtttacagcattat

SEQ ID NO: 795439 - DNA, 33 bp, Homo sapien
aggaaaactgtccattcaagaaaaggtcaattt

SEQ ID NO: 795440 - DNA, 33 bp, Homo sapien
aggaaaactgtccattgaagaaaaggtcaattt

SEQ ID NO: 795441 - DNA, 33 bp, Homo sapien
ccaagcctgaatatacagaaaaagtgtactggt

SEQ ID NO: 795442 - DNA, 33 bp, Homo sapien
ccaagcctgaatatacggaaaaagtgtactggt

SEQ ID NO: 795443 - DNA, 33 bp, Homo sapien
cacacagatctctccacggtcatcttaccaagc

SEQ ID NO: 795444 - DNA, 33 bp, Homo sapien
cacacagatctctccatggtcatcttaccaagc

SEQ ID NO: 795445 - DNA, 33 bp, Homo sapien
catacattgataatggaatgttaaactgtaatt

SEQ ID NO: 795446 - DNA, 33 bp, Homo sapien
catacattgataatgggatgttaaactgtaatt

SEQ ID NO: 795447 - DNA, 33 bp, Homo sapien
aaaagctgttgctgtaactggtggtggaaatta

SEQ ID NO: 795448 - DNA, 33 bp, Homo sapien
aaaagctgttgctgtatctggtggtggaaatta

SEQ ID NO: 795449 - DNA, 33 bp, Homo sapien
gactcatttgagattacaagggagacagacctc

SEQ ID NO: 795450 - DNA, 33 bp, Homo sapien
gactcatttgagattataagggagacagacctc

SEQ ID NO: 795451 - DNA, 33 bp, Homo sapien
taagatggaaattttgctgtgagaatgtcagta

SEQ ID NO: 795452 - DNA, 33 bp, Homo sapien
taagatggaaattttggtgtgagaatgtcagta

SEQ ID NO: 795453 - DNA, 33 bp, Homo sapien
ttgaaagcctttggcacgacctggggtagagat

SEQ ID NO: 795454 - DNA, 33 bp, Homo sapien
ttgaaagcctttggcatgacctggggtagagat

SEQ ID NO: 795455 - DNA, 33 bp, Homo sapien
cagtcctcaagtgtcacgattcttacctactac

SEQ ID NO: 795456 - DNA, 33 bp, Homo sapien
cagtcctcaagtgtcatgattcttacctactac

SEQ ID NO: 795457 - DNA, 33 bp, Homo sapien
ggattatatcagagcaagaatttaaaaaaaaaa

SEQ ID NO: 795458 - DNA, 33 bp, Homo sapien
ggattatatcagagcaggaatttaaaaaaaaaa

SEQ ID NO: 795459 - DNA, 33 bp, Homo sapien
tttcaaaagttaacacaacaaatattacatcta

SEQ ID NO: 795460 - DNA, 33 bp, Homo sapien
tttcaaaagttaacactacaaatattacatcta

SEQ ID NO: 795461 - DNA, 33 bp, Homo sapien
cagacaaagatactgcaagaaaggaaaactaca

SEQ ID NO: 795462 - DNA, 33 bp, Homo sapien
cagacaaagatactgcgagaaaggaaaactaca

SEQ ID NO: 795463 - DNA, 33 bp, Homo sapien
cttttaatgtgttgtcaaattctgtttgctagt

SEQ ID NO: 795464 - DNA, 33 bp, Homo sapien
cttttaatgtgttgtcgaattctgtttgctagt

SEQ ID NO: 795465 - DNA, 33 bp, Homo sapien
taacatggtgcattacactgatttattttcatg

SEQ ID NO: 795466 - DNA, 33 bp, Homo sapien
taacatggtgcattacgctgatttattttcatg

SEQ ID NO: 795467 - DNA, 33 bp, Homo sapien
tctatcttttgcatcacagtttcttatgtctgt

SEQ ID NO: 795468 - DNA, 33 bp, Homo sapien
tctatcttttgcatcagagtttcttatgtctgt

SEQ ID NO: 795469 - DNA, 33 bp, Homo sapien
actcccactttcaggagctaaggtccgaggagg

SEQ ID NO: 795470 - DNA, 33 bp, Homo sapien
actcccactttcaggatctaaggtccgaggagg

SEQ ID NO: 795471 - DNA, 33 bp, Homo sapien
tcatcaaacggacacaaacacaaatgggtccac

SEQ ID NO: 795472 - DNA, 33 bp, Homo sapien
tcatcaaacggacacagacacaaatgggtccac

SEQ ID NO: 795473 - DNA, 33 bp, Homo sapien
aggtgttctgaaattcacgaccttttcttggcc

SEQ ID NO: 795474 - DNA, 33 bp, Homo sapien
aggtgttctgaaattcgcgaccttttcttggcc

SEQ ID NO: 795475 - DNA, 33 bp, Homo sapien
gattgactagataatacggcacagaagtatttc

SEQ ID NO: 795476 - DNA, 33 bp, Homo sapien
gattgactagataatatggcacagaagtatttc

SEQ ID NO: 795477 - DNA, 33 bp, Homo sapien
taaattgctgcttttacagggaggcagggaccc

SEQ ID NO: 795478 - DNA, 33 bp, Homo sapien
taaattgctgcttttatagggaggcagggaccc

SEQ ID NO: 795479 - DNA, 33 bp, Homo sapien
tctgaaaaattgcccacatcctatgttgacaat

SEQ ID NO: 795480 - DNA, 33 bp, Homo sapien
tctgaaaaattgcccatatcctatgttgacaat

SEQ ID NO: 795481 - DNA, 33 bp, Homo sapien
caatttggttcataatgaccctcgagaaagaag

SEQ ID NO: 795482 - DNA, 33 bp, Homo sapien
caatttggttcataattaccctcgagaaagaag

SEQ ID NO: 795483 - DNA, 33 bp, Homo sapien
acccttcaggaagccaaagagaaataaaacgct

SEQ ID NO: 795484 - DNA, 33 bp, Homo sapien
acccttcaggaagccacagagaaataaaacgct

SEQ ID NO: 795485 - DNA, 33 bp, Homo sapien
caggttccaaggattacgttctggacatctttg

SEQ ID NO: 795486 - DNA, 33 bp, Homo sapien
caggttccaaggattaggttctggacatctttg

SEQ ID NO: 795487 - DNA, 33 bp, Homo sapien
gcctcttgagagcctgaacccttagcacctcct

SEQ ID NO: 795488 - DNA, 33 bp, Homo sapien
gcctcttgagagcctgcacccttagcacctcct

SEQ ID NO: 795489 - DNA, 33 bp, Homo sapien
gggagagccaaggatacgtttagagtaaattcc

SEQ ID NO: 795490 - DNA, 33 bp, Homo sapien
gggagagccaaggatatgtttagagtaaattcc

SEQ ID NO: 795491 - DNA, 33 bp, Homo sapien
gtataagttaatgtcaacttcagcctttgtcca

SEQ ID NO: 795492 - DNA, 33 bp, Homo sapien
gtataagttaatgtcagcttcagcctttgtcca

SEQ ID NO: 795493 - DNA, 33 bp, Homo sapien
tcattcatgatacataccattaaaaccagggac

SEQ ID NO: 795494 - DNA, 33 bp, Homo sapien
tcattcatgatacatagcattaaaaccagggac

SEQ ID NO: 795495 - DNA, 33 bp, Homo sapien
ctccatagagacagcactcaggcaagtaagagg

SEQ ID NO: 795496 - DNA, 33 bp, Homo sapien
ctccatagagacagcattcaggcaagtaagagg

SEQ ID NO: 795497 - DNA, 33 bp, Homo sapien
gagtgagattcagttaacagaacaaccattatt

SEQ ID NO: 795498 - DNA, 33 bp, Homo sapien
gagtgagattcagttagcagaacaaccattatt

SEQ ID NO: 795499 - DNA, 33 bp, Homo sapien
tgttctctaatcgatgaaattgagaaatctaat

SEQ ID NO: 795500 - DNA, 33 bp, Homo sapien
tgttctctaatcgatgtaattgagaaatctaat

SEQ ID NO: 795501 - DNA, 33 bp, Homo sapien
atttcagatacttcggccacctcctaccattgt

SEQ ID NO: 795502 - DNA, 33 bp, Homo sapien
atttcagatacttcgggcacctcctaccattgt

SEQ ID NO: 795503 - DNA, 33 bp, Homo sapien
cttttccaaatgctaacaacactgtttcaatta

SEQ ID NO: 795504 - DNA, 33 bp, Homo sapien
cttttccaaatgctaagaacactgtttcaatta

SEQ ID NO: 795505 - DNA, 33 bp, Homo sapien
caaggtgaaatccttagcatgaagcagtgtatt

SEQ ID NO: 795506 - DNA, 33 bp, Homo sapien
caaggtgaaatccttatcatgaagcagtgtatt

SEQ ID NO: 795507 - DNA, 33 bp, Homo sapien
tgtttgtctaaacaccccaaggaaaagtctgaa

SEQ ID NO: 795508 - DNA, 33 bp, Homo sapien
tgtttgtctaaacacctcaaggaaaagtctgaa

SEQ ID NO: 795509 - DNA, 33 bp, Homo sapien
agaactataaaggaaaagtacagaacctatgta

SEQ ID NO: 795510 - DNA, 33 bp, Homo sapien
agaactataaaggaaatgtacagaacctatgta

SEQ ID NO: 795511 - DNA, 33 bp, Homo sapien
gagtacaatggagagacgactgagcatgaagtc

SEQ ID NO: 795512 - DNA, 33 bp, Homo sapien
gagtacaatggagagatgactgagcatgaagtc

SEQ ID NO: 795513 - DNA, 33 bp, Homo sapien
caaagttctccagttacaatgactatccccaaa

SEQ ID NO: 795514 - DNA, 33 bp, Homo sapien
caaagttctccagttataatgactatccccaaa

SEQ ID NO: 795515 - DNA, 33 bp, Homo sapien
gttaatgccgaataaacgttttgccattcttgt

SEQ ID NO: 795516 - DNA, 33 bp, Homo sapien
gttaatgccgaataaatgttttgccattcttgt

SEQ ID NO: 795517 - DNA, 33 bp, Homo sapien
tcttatatttcatcaccgggtgcaaatacataa

SEQ ID NO: 795518 - DNA, 33 bp, Homo sapien
tcttatatttcatcactgggtgcaaatacataa

SEQ ID NO: 795519 - DNA, 33 bp, Homo sapien
caggtgctatggatttaaaagaaaaagtgtgac

SEQ ID NO: 795520 - DNA, 33 bp, Homo sapien
caggtgctatggatttgaaagaaaaagtgtgac

SEQ ID NO: 795521 - DNA, 33 bp, Homo sapien
tatcaaacccaaaggaaatgaatgatttacaag

SEQ ID NO: 795522 - DNA, 33 bp, Homo sapien
tatcaaacccaaaggagatgaatgatttacaag

SEQ ID NO: 795523 - DNA, 33 bp, Homo sapien
aacataacctgttttacgtgagaaaataggaag

SEQ ID NO: 795524 - DNA, 33 bp, Homo sapien
aacataacctgttttatgtgagaaaataggaag

SEQ ID NO: 795525 - DNA, 33 bp, Homo sapien
ataacagctttctaaacgcttcatatcaacaag

SEQ ID NO: 795526 - DNA, 33 bp, Homo sapien
ataacagctttctaaatgcttcatatcaacaag

SEQ ID NO: 795527 - DNA, 33 bp, Homo sapien
tatccatctttctccaacttcattgatggaaga

SEQ ID NO: 795528 - DNA, 33 bp, Homo sapien
tatccatctttctccagcttcattgatggaaga

SEQ ID NO: 795529 - DNA, 33 bp, Homo sapien
tgagctgtacgttggcacattttagccaggcag

SEQ ID NO: 795530 - DNA, 33 bp, Homo sapien
tgagctgtacgttggcccattttagccaggcag

SEQ ID NO: 795531 - DNA, 33 bp, Homo sapien
aatattcagtattcaacgaaagctgaacattag

SEQ ID NO: 795532 - DNA, 33 bp, Homo sapien
aatattcagtattcaatgaaagctgaacattag

SEQ ID NO: 795533 - DNA, 33 bp, Homo sapien
aacatcaagaagtgataaaagtcaaataggaaa

SEQ ID NO: 795534 - DNA, 33 bp, Homo sapien
aacatcaagaagtgatgaaagtcaaataggaaa

SEQ ID NO: 795535 - DNA, 33 bp, Homo sapien
cagtttagtggatcacaactagcattaaaaaaa

SEQ ID NO: 795536 - DNA, 33 bp, Homo sapien
cagtttagtggatcacgactagcattaaaaaaa

SEQ ID NO: 795537 - DNA, 33 bp, Homo sapien
gataagtccgctcccccaagactgcctggtgag

SEQ ID NO: 795538 - DNA, 33 bp, Homo sapien
gataagtccgctcccctaagactgcctggtgag

SEQ ID NO: 795539 - DNA, 33 bp, Homo sapien
tggaacaagaacaatcagaggttgactgagtcc

SEQ ID NO: 795540 - DNA, 33 bp, Homo sapien
tggaacaagaacaatcggaggttgactgagtcc

SEQ ID NO: 795541 - DNA, 33 bp, Homo sapien
actgtaactttgtactcaatcactctttcctcc

SEQ ID NO: 795542 - DNA, 33 bp, Homo sapien
actgtaactttgtacttaatcactctttcctcc

SEQ ID NO: 795543 - DNA, 33 bp, Homo sapien
ggcagctgcagaataccaatatagacaacacac

SEQ ID NO: 795544 - DNA, 33 bp, Homo sapien
ggcagctgcagaatactaatatagacaacacac

SEQ ID NO: 795545 - DNA, 33 bp, Homo sapien
ggggccacagggtgaacgaaacttctagctgag

SEQ ID NO: 795546 - DNA, 33 bp, Homo sapien
ggggccacagggtgaaggaaacttctagctgag

SEQ ID NO: 795547 - DNA, 33 bp, Homo sapien
aacttgatggtaactgaagatgttgagccatta

SEQ ID NO: 795548 - DNA, 33 bp, Homo sapien
aacttgatggtaactgtagatgttgagccatta

SEQ ID NO: 795549 - DNA, 33 bp, Homo sapien
ttctgctgatcaacaggaggctataagttaagt

SEQ ID NO: 795550 - DNA, 33 bp, Homo sapien
ttctgctgatcaacagtaggctataagttaagt

SEQ ID NO: 795551 - DNA, 33 bp, Homo sapien
tgaatgtgcaaatttacgaaaaatactaaatgg

SEQ ID NO: 795552 - DNA, 33 bp, Homo sapien
tgaatgtgcaaatttatgaaaaatactaaatgg

SEQ ID NO: 795553 - DNA, 33 bp, Homo sapien
gttgctcacaagatagaagcttactttccccag

SEQ ID NO: 795554 - DNA, 33 bp, Homo sapien
gttgctcacaagatagcagcttactttccccag

SEQ ID NO: 795555 - DNA, 33 bp, Homo sapien
ctgtctttctgtttaacaggagagaagatagag

SEQ ID NO: 795556 - DNA, 33 bp, Homo sapien
ctgtctttctgtttaataggagagaagatagag

SEQ ID NO: 795557 - DNA, 33 bp, Homo sapien
agagggtagagaataaatgaaaatgatggcact

SEQ ID NO: 795558 - DNA, 33 bp, Homo sapien
agagggtagagaataactgaaaatgatggcact

SEQ ID NO: 795559 - DNA, 33 bp, Homo sapien
agaagtaaagaggaaaaaagtgctttgtcttgg

SEQ ID NO: 795560 - DNA, 33 bp, Homo sapien
agaagtaaagaggaaacaagtgctttgtcttgg

SEQ ID NO: 795561 - DNA, 33 bp, Homo sapien
ttctcaacagttttcccatgtctccttatattt

SEQ ID NO: 795562 - DNA, 33 bp, Homo sapien
ttctcaacagttttccgatgtctccttatattt

SEQ ID NO: 795563 - DNA, 33 bp, Homo sapien
tttccccctgcaagaccgacttttgtcaatgca

SEQ ID NO: 795564 - DNA, 33 bp, Homo sapien
tttccccctgcaagacggacttttgtcaatgca

SEQ ID NO: 795565 - DNA, 33 bp, Homo sapien
gcatttcttatgctaacagcaaatgtgctgaga

SEQ ID NO: 795566 - DNA, 33 bp, Homo sapien
gcatttcttatgctaatagcaaatgtgctgaga

SEQ ID NO: 795567 - DNA, 33 bp, Homo sapien
gaggcacacgggtgtcactgaaatcccaacaaa

SEQ ID NO: 795568 - DNA, 33 bp, Homo sapien
gaggcacacgggtgtcgctgaaatcccaacaaa

SEQ ID NO: 795569 - DNA, 33 bp, Homo sapien
tatggaaaagactcacagaaagaactttgtgta

SEQ ID NO: 795570 - DNA, 33 bp, Homo sapien
tatggaaaagactcacggaaagaactttgtgta

SEQ ID NO: 795571 - DNA, 33 bp, Homo sapien
aaactcctccatcctacacaggaaaacataact

SEQ ID NO: 795572 - DNA, 33 bp, Homo sapien
aaactcctccatcctatacaggaaaacataact

SEQ ID NO: 795573 - DNA, 33 bp, Homo sapien
tctaaatcacttcaagaaatattgtaaaaagca

SEQ ID NO: 795574 - DNA, 33 bp, Homo sapien
tctaaatcacttcaaggaatattgtaaaaagca

SEQ ID NO: 795575 - DNA, 33 bp, Homo sapien
gccacaggtaataggcagatacccagatagaca

SEQ ID NO: 795576 - DNA, 33 bp, Homo sapien
gccacaggtaataggcggatacccagatagaca

SEQ ID NO: 795577 - DNA, 33 bp, Homo sapien
aagtagttgtgttataagtcccaaacttgagtt

SEQ ID NO: 795578 - DNA, 33 bp, Homo sapien
aagtagttgtgttatatgtcccaaacttgagtt

SEQ ID NO: 795579 - DNA, 33 bp, Homo sapien
agagactctacaaaacaaattcaacagttcacc

SEQ ID NO: 795580 - DNA, 33 bp, Homo sapien
agagactctacaaaacgaattcaacagttcacc

SEQ ID NO: 795581 - DNA, 33 bp, Homo sapien
aagtactcatttagaacgctatccatctgcctt

SEQ ID NO: 795582 - DNA, 33 bp, Homo sapien
aagtactcatttagaatgctatccatctgcctt

SEQ ID NO: 795583 - DNA, 33 bp, Homo sapien
tcttttctatttacggaccaatgagatttctaa

SEQ ID NO: 795584 - DNA, 33 bp, Homo sapien
tcttttctatttacgggccaatgagatttctaa

SEQ ID NO: 795585 - DNA, 33 bp, Homo sapien
caaaatgctaagacgaatccctggtatattaac

SEQ ID NO: 795586 - DNA, 33 bp, Homo sapien
caaaatgctaagacgagtccctggtatattaac

SEQ ID NO: 795587 - DNA, 33 bp, Homo sapien
agaacagaaatattaactgagcatattgtttgg

SEQ ID NO: 795588 - DNA, 33 bp, Homo sapien
agaacagaaatattaattgagcatattgtttgg

SEQ ID NO: 795589 - DNA, 33 bp, Homo sapien
ttataaagagacctgaaaaattcagagccacag

SEQ ID NO: 795590 - DNA, 33 bp, Homo sapien
ttataaagagacctgagaaattcagagccacag

SEQ ID NO: 795591 - DNA, 33 bp, Homo sapien
taccaatttaaattccaaaaagcagcatctgga

SEQ ID NO: 795592 - DNA, 33 bp, Homo sapien
taccaatttaaattcccaaaagcagcatctgga

SEQ ID NO: 795593 - DNA, 33 bp, Homo sapien
acatgaagaaaaactccacgtgttgtaaatcta

SEQ ID NO: 795594 - DNA, 33 bp, Homo sapien
acatgaagaaaaactctacgtgttgtaaatcta

SEQ ID NO: 795595 - DNA, 33 bp, Homo sapien
ccgcactgcatttccccaaaacacccctcaaca

SEQ ID NO: 795596 - DNA, 33 bp, Homo sapien
ccgcactgcatttcccgaaaacacccctcaaca

SEQ ID NO: 795597 - DNA, 33 bp, Homo sapien
tacatatacaccatggaagactatacagccata

SEQ ID NO: 795598 - DNA, 33 bp, Homo sapien
tacatatacaccatgggagactatacagccata

SEQ ID NO: 795599 - DNA, 33 bp, Homo sapien
aaagggatataatagacagaaatggttgaaaaa

SEQ ID NO: 795600 - DNA, 33 bp, Homo sapien
aaagggatataatagagagaaatggttgaaaaa

SEQ ID NO: 795601 - DNA, 33 bp, Homo sapien
taaaacattttaaccccatctatgttttaaatt

SEQ ID NO: 795602 - DNA, 33 bp, Homo sapien
taaaacattttaacccgatctatgttttaaatt

SEQ ID NO: 795603 - DNA, 33 bp, Homo sapien
aagtcccagaggcccacacttgaaattgatggg

SEQ ID NO: 795604 - DNA, 33 bp, Homo sapien
aagtcccagaggcccagacttgaaattgatggg

SEQ ID NO: 795605 - DNA, 33 bp, Homo sapien
tttttatgcacactaaagtcagaggaccactat

SEQ ID NO: 795606 - DNA, 33 bp, Homo sapien
tttttatgcacactaaggtcagaggaccactat

SEQ ID NO: 795607 - DNA, 33 bp, Homo sapien
atagtgatgattgtcaactttagctttgtaact

SEQ ID NO: 795608 - DNA, 33 bp, Homo sapien
atagtgatgattgtcatctttagctttgtaact

SEQ ID NO: 795609 - DNA, 33 bp, Homo sapien
atttgtgtctcacaggcaatacccagcttgaaa

SEQ ID NO: 795610 - DNA, 33 bp, Homo sapien
atttgtgtctcacaggtaatacccagcttgaaa

SEQ ID NO: 795611 - DNA, 33 bp, Homo sapien
caagggagacttttataaactgaaaagaagaga

SEQ ID NO: 795612 - DNA, 33 bp, Homo sapien
caagggagacttttatgaactgaaaagaagaga

SEQ ID NO: 795613 - DNA, 33 bp, Homo sapien
ataattgaagactccacgagcaaccttgatgaa

SEQ ID NO: 795614 - DNA, 33 bp, Homo sapien
ataattgaagactccatgagcaaccttgatgaa

SEQ ID NO: 795615 - DNA, 33 bp, Homo sapien
gtgaaaaactatcttaaggagagaacatttatg

SEQ ID NO: 795616 - DNA, 33 bp, Homo sapien
gtgaaaaactatcttagggagagaacatttatg

SEQ ID NO: 795617 - DNA, 33 bp, Homo sapien
gcttatgctatctttacaatttgtatctctaca

SEQ ID NO: 795618 - DNA, 33 bp, Homo sapien
gcttatgctatctttagaatttgtatctctaca

SEQ ID NO: 795619 - DNA, 33 bp, Homo sapien
ccagcactctgatgcactagctattcgtctaat

SEQ ID NO: 795620 - DNA, 33 bp, Homo sapien
ccagcactctgatgcattagctattcgtctaat

SEQ ID NO: 795621 - DNA, 33 bp, Homo sapien
tgggagtcagcaacacagtgataaccattcatg

SEQ ID NO: 795622 - DNA, 33 bp, Homo sapien
tgggagtcagcaacaccgtgataaccattcatg

SEQ ID NO: 795623 - DNA, 33 bp, Homo sapien
tacaaccactaatcgggaaaatacggataggga

SEQ ID NO: 795624 - DNA, 33 bp, Homo sapien
tacaaccactaatcggtaaaatacggataggga

SEQ ID NO: 795625 - DNA, 33 bp, Homo sapien
acttacaatcaacacacgggaggtgggatggct

SEQ ID NO: 795626 - DNA, 33 bp, Homo sapien
acttacaatcaacacaggggaggtgggatggct

SEQ ID NO: 795627 - DNA, 33 bp, Homo sapien
aaggatgtgactggaaaaataattaacagagcc

SEQ ID NO: 795628 - DNA, 33 bp, Homo sapien
aaggatgtgactggaagaataattaacagagcc

SEQ ID NO: 795629 - DNA, 33 bp, Homo sapien
cacccacaaatagaaacacctacatagcctata

SEQ ID NO: 795630 - DNA, 33 bp, Homo sapien
cacccacaaatagaaagacctacatagcctata

SEQ ID NO: 795631 - DNA, 33 bp, Homo sapien
acaaaaagatccattaaatgcctgaacttgccc

SEQ ID NO: 795632 - DNA, 33 bp, Homo sapien
acaaaaagatccattagatgcctgaacttgccc

SEQ ID NO: 795633 - DNA, 33 bp, Homo sapien
ctgttatttattatggcacattgtataagcatt

SEQ ID NO: 795634 - DNA, 33 bp, Homo sapien
ctgttatttattatgggacattgtataagcatt

SEQ ID NO: 795635 - DNA, 33 bp, Homo sapien
ctgcatgctcatgttaataacactttgtcctgc

SEQ ID NO: 795636 - DNA, 33 bp, Homo sapien
ctgcatgctcatgttagtaacactttgtcctgc

SEQ ID NO: 795637 - DNA, 33 bp, Homo sapien
tttgcagaagatggataagggagttgtaggggg

SEQ ID NO: 795638 - DNA, 33 bp, Homo sapien
tttgcagaagatggatgagggagttgtaggggg

SEQ ID NO: 795639 - DNA, 33 bp, Homo sapien
ctctgacaactactcaatctggcctttgtagca

SEQ ID NO: 795640 - DNA, 33 bp, Homo sapien
ctctgacaactactcattctggcctttgtagca

SEQ ID NO: 795641 - DNA, 33 bp, Homo sapien
ggaagtactgagagataaggaagttcccacgac

SEQ ID NO: 795642 - DNA, 33 bp, Homo sapien
ggaagtactgagagatgaggaagttcccacgac

SEQ ID NO: 795643 - DNA, 33 bp, Homo sapien
tggcccttcagagcaaaactaggtattcaccat

SEQ ID NO: 795644 - DNA, 33 bp, Homo sapien
tggcccttcagagcaagactaggtattcaccat

SEQ ID NO: 795645 - DNA, 33 bp, Homo sapien
aatttcattgacccaacttaggctgggtgtcta

SEQ ID NO: 795646 - DNA, 33 bp, Homo sapien
aatttcattgacccaagttaggctgggtgtcta

SEQ ID NO: 795647 - DNA, 33 bp, Homo sapien
ttatcagttcctgtgacgtctacatgtatttct

SEQ ID NO: 795648 - DNA, 33 bp, Homo sapien
ttatcagttcctgtgaggtctacatgtatttct

SEQ ID NO: 795649 - DNA, 33 bp, Homo sapien
tgccaaggttgctgaacgttgctgggaaaaaga

SEQ ID NO: 795650 - DNA, 33 bp, Homo sapien
tgccaaggttgctgaatgttgctgggaaaaaga

SEQ ID NO: 795651 - DNA, 33 bp, Homo sapien
ggctgggccaaagaacacattgctaaatagcac

SEQ ID NO: 795652 - DNA, 33 bp, Homo sapien
ggctgggccaaagaacgcattgctaaatagcac

SEQ ID NO: 795653 - DNA, 33 bp, Homo sapien
actagagttaacaacagtatgtcacacagtttc

SEQ ID NO: 795654 - DNA, 33 bp, Homo sapien
actagagttaacaacattatgtcacacagtttc

SEQ ID NO: 795655 - DNA, 33 bp, Homo sapien
cctttacaacattgaactagaagtgagtccctg

SEQ ID NO: 795656 - DNA, 33 bp, Homo sapien
cctttacaacattgaattagaagtgagtccctg

SEQ ID NO: 795657 - DNA, 33 bp, Homo sapien
tgctaagctagttacccctccactatttgcttc

SEQ ID NO: 795658 - DNA, 33 bp, Homo sapien
tgctaagctagttaccgctccactatttgcttc

SEQ ID NO: 795659 - DNA, 33 bp, Homo sapien
cagcacctactatcaaattaggctagtgttaat

SEQ ID NO: 795660 - DNA, 33 bp, Homo sapien
cagcacctactatcaagttaggctagtgttaat

SEQ ID NO: 795661 - DNA, 33 bp, Homo sapien
taggttgaaaaggctgaacactttgcagttcca

SEQ ID NO: 795662 - DNA, 33 bp, Homo sapien
taggttgaaaaggctgcacactttgcagttcca

SEQ ID NO: 795663 - DNA, 33 bp, Homo sapien
gagagtggagagttgaatacctaatttatgtta

SEQ ID NO: 795664 - DNA, 33 bp, Homo sapien
gagagtggagagttgagtacctaatttatgtta

SEQ ID NO: 795665 - DNA, 33 bp, Homo sapien
tatcaataatttcagactagcattaaagagtgt

SEQ ID NO: 795666 - DNA, 33 bp, Homo sapien
tatcaataatttcagattagcattaaagagtgt

SEQ ID NO: 795667 - DNA, 33 bp, Homo sapien
gtatgtctctgatttgcagatgataagtcacct

SEQ ID NO: 795668 - DNA, 33 bp, Homo sapien
gtatgtctctgatttgtagatgataagtcacct

SEQ ID NO: 795669 - DNA, 33 bp, Homo sapien
tttatctctggacagaagttagtgtgacatatt

SEQ ID NO: 795670 - DNA, 33 bp, Homo sapien
tttatctctggacagaggttagtgtgacatatt

SEQ ID NO: 795671 - DNA, 33 bp, Homo sapien
acatgtggatctgacacagttatatggatttac

SEQ ID NO: 795672 - DNA, 33 bp, Homo sapien
acatgtggatctgacatagttatatggatttac

SEQ ID NO: 795673 - DNA, 33 bp, Homo sapien
agaccaagtctatgtcaattggtctgcctgaaa

SEQ ID NO: 795674 - DNA, 33 bp, Homo sapien
agaccaagtctatgtcgattggtctgcctgaaa

SEQ ID NO: 795675 - DNA, 33 bp, Homo sapien
tcctccaaagttcatacgtcagttaatcctcaa

SEQ ID NO: 795676 - DNA, 33 bp, Homo sapien
tcctccaaagttcatatgtcagttaatcctcaa

SEQ ID NO: 795677 - DNA, 33 bp, Homo sapien
tatgggaaaagaagaaaggcaatattacgctat

SEQ ID NO: 795678 - DNA, 33 bp, Homo sapien
tatgggaaaagaagaagggcaatattacgctat

SEQ ID NO: 795679 - DNA, 33 bp, Homo sapien
atctgttaatcacagcgaaatcaaactataaat

SEQ ID NO: 795680 - DNA, 33 bp, Homo sapien
atctgttaatcacagctaaatcaaactataaat

SEQ ID NO: 795681 - DNA, 33 bp, Homo sapien
gatcaatatgaatcaacttaaagaattttcaaa

SEQ ID NO: 795682 - DNA, 33 bp, Homo sapien
gatcaatatgaatcaatttaaagaattttcaaa

SEQ ID NO: 795683 - DNA, 33 bp, Homo sapien
agaggaatcaatgagacgtaatgcaaggatcaa

SEQ ID NO: 795684 - DNA, 33 bp, Homo sapien
agaggaatcaatgagatgtaatgcaaggatcaa

SEQ ID NO: 795685 - DNA, 33 bp, Homo sapien
tttttaaaaaatgtcagaaagttaggatcatac

SEQ ID NO: 795686 - DNA, 33 bp, Homo sapien
tttttaaaaaatgtcataaagttaggatcatac

SEQ ID NO: 795687 - DNA, 33 bp, Homo sapien
ttgtgaaagaagtaaagtcagcatctacgtaca

SEQ ID NO: 795688 - DNA, 33 bp, Homo sapien
ttgtgaaagaagtaaattcagcatctacgtaca

SEQ ID NO: 795689 - DNA, 33 bp, Homo sapien
atcattgaaatgacagcaaagatttcaggagag

SEQ ID NO: 795690 - DNA, 33 bp, Homo sapien
atcattgaaatgacagtaaagatttcaggagag

SEQ ID NO: 795691 - DNA, 33 bp, Homo sapien
aattgatttgaaaagacagactaggaaaacaca

SEQ ID NO: 795692 - DNA, 33 bp, Homo sapien
aattgatttgaaaagagagactaggaaaacaca

SEQ ID NO: 795693 - DNA, 33 bp, Homo sapien
gtaaagataatgaaaggccagcaggataggagg

SEQ ID NO: 795694 - DNA, 33 bp, Homo sapien
gtaaagataatgaaagtccagcaggataggagg

SEQ ID NO: 795695 - DNA, 33 bp, Homo sapien
tacaatcataagagtagagaaaatggttctttt

SEQ ID NO: 795696 - DNA, 33 bp, Homo sapien
tacaatcataagagtatagaaaatggttctttt

SEQ ID NO: 795697 - DNA, 33 bp, Homo sapien
tggccaagtatatttaaaatgattcttttgttc

SEQ ID NO: 795698 - DNA, 33 bp, Homo sapien
tggccaagtatatttagaatgattcttttgttc

SEQ ID NO: 795699 - DNA, 33 bp, Homo sapien
taaaagtaaaggctgcagataacatatacatct

SEQ ID NO: 795700 - DNA, 33 bp, Homo sapien
taaaagtaaaggctgcggataacatatacatct

SEQ ID NO: 795701 - DNA, 33 bp, Homo sapien
accctgtaaccaattgaaaagtagattacatag

SEQ ID NO: 795702 - DNA, 33 bp, Homo sapien
accctgtaaccaattggaaagtagattacatag

SEQ ID NO: 795703 - DNA, 33 bp, Homo sapien
aaagaaccaggtgccacggctcatgtgtgatta

SEQ ID NO: 795704 - DNA, 33 bp, Homo sapien
aaagaaccaggtgccagggctcatgtgtgatta

SEQ ID NO: 795705 - DNA, 33 bp, Homo sapien
tgtcaatgtcaaacaacgcaaattgactgggtg

SEQ ID NO: 795706 - DNA, 33 bp, Homo sapien
tgtcaatgtcaaacaatgcaaattgactgggtg

SEQ ID NO: 795707 - DNA, 33 bp, Homo sapien
gtgttgttcctgcttcaaataaatcatactaca

SEQ ID NO: 795708 - DNA, 33 bp, Homo sapien
gtgttgttcctgcttccaataaatcatactaca

SEQ ID NO: 795709 - DNA, 33 bp, Homo sapien
caagaatcattggcaacctcactctctaatgca

SEQ ID NO: 795710 - DNA, 33 bp, Homo sapien
caagaatcattggcaagctcactctctaatgca

SEQ ID NO: 795711 - DNA, 33 bp, Homo sapien
ctatcatacctgagccagattgaaacatgaaaa

SEQ ID NO: 795712 - DNA, 33 bp, Homo sapien
ctatcatacctgagccggattgaaacatgaaaa

SEQ ID NO: 795713 - DNA, 33 bp, Homo sapien
aaggttaataactcaccccaaatcaccttgaca

SEQ ID NO: 795714 - DNA, 33 bp, Homo sapien
aaggttaataactcactccaaatcaccttgaca

SEQ ID NO: 795715 - DNA, 33 bp, Homo sapien
cagatctgactccaaacaggatatatttaagtc

SEQ ID NO: 795716 - DNA, 33 bp, Homo sapien
cagatctgactccaaataggatatatttaagtc

SEQ ID NO: 795717 - DNA, 33 bp, Homo sapien
aagcctttaaacattcccttcatttctgctgac

SEQ ID NO: 795718 - DNA, 33 bp, Homo sapien
aagcctttaaacattctcttcatttctgctgac

SEQ ID NO: 795719 - DNA, 33 bp, Homo sapien
tctacctggaaataaaaagttgactcaccgatt

SEQ ID NO: 795720 - DNA, 33 bp, Homo sapien
tctacctggaaataaacagttgactcaccgatt

SEQ ID NO: 795721 - DNA, 33 bp, Homo sapien
agttctctaatgtccaggtatgtatttagtaag

SEQ ID NO: 795722 - DNA, 33 bp, Homo sapien
agttctctaatgtccatgtatgtatttagtaag

SEQ ID NO: 795723 - DNA, 33 bp, Homo sapien
aaggacttgcataacaaccctagttactaaatg

SEQ ID NO: 795724 - DNA, 33 bp, Homo sapien
aaggacttgcataacatccctagttactaaatg

SEQ ID NO: 795725 - DNA, 33 bp, Homo sapien
atgtgctggggagaaacaagactgcaggaaata

SEQ ID NO: 795726 - DNA, 33 bp, Homo sapien
atgtgctggggagaaagaagactgcaggaaata

SEQ ID NO: 795727 - DNA, 33 bp, Homo sapien
ttaaaatatttgtgtgaaaaatttgtaacaaaa

SEQ ID NO: 795728 - DNA, 33 bp, Homo sapien
ttaaaatatttgtgtggaaaatttgtaacaaaa

SEQ ID NO: 795729 - DNA, 33 bp, Homo sapien
tccatgggaagccaaaaatagcagtagaacagt

SEQ ID NO: 795730 - DNA, 33 bp, Homo sapien
tccatgggaagccaaagatagcagtagaacagt

SEQ ID NO: 795731 - DNA, 33 bp, Homo sapien
aaaattattcagctcaacacatcattggtgtat

SEQ ID NO: 795732 - DNA, 33 bp, Homo sapien
aaaattattcagctcagcacatcattggtgtat

SEQ ID NO: 795733 - DNA, 33 bp, Homo sapien
gagtctggtacaaaacgggatcccatagtgtcc

SEQ ID NO: 795734 - DNA, 33 bp, Homo sapien
gagtctggtacaaaactggatcccatagtgtcc

SEQ ID NO: 795735 - DNA, 33 bp, Homo sapien
tgaaggtaaattgcataatacagagtgagcagg

SEQ ID NO: 795736 - DNA, 33 bp, Homo sapien
tgaaggtaaattgcatgatacagagtgagcagg

SEQ ID NO: 795737 - DNA, 33 bp, Homo sapien
cttttcaaattctatagacctgcttagctaaat

SEQ ID NO: 795738 - DNA, 33 bp, Homo sapien
cttttcaaattctatatacctgcttagctaaat

SEQ ID NO: 795739 - DNA, 33 bp, Homo sapien
atcttttgatacccaacgttgtattctatatat

SEQ ID NO: 795740 - DNA, 33 bp, Homo sapien
atcttttgatacccaaggttgtattctatatat

SEQ ID NO: 795741 - DNA, 33 bp, Homo sapien
ctctttgacaaaaggaaagcaaagtcatttatc

SEQ ID NO: 795742 - DNA, 33 bp, Homo sapien
ctctttgacaaaaggagagcaaagtcatttatc

SEQ ID NO: 795743 - DNA, 33 bp, Homo sapien
ggagaaggttgggtaccattatgaggaacatca

SEQ ID NO: 795744 - DNA, 33 bp, Homo sapien
ggagaaggttgggtactattatgaggaacatca

SEQ ID NO: 795745 - DNA, 33 bp, Homo sapien
aaaatattttgcaagaacaccagacttttttat

SEQ ID NO: 795746 - DNA, 33 bp, Homo sapien
aaaatattttgcaagaccaccagacttttttat

SEQ ID NO: 795747 - DNA, 33 bp, Homo sapien
aaactgacaaaagacaaatcaacaggagtaaac

SEQ ID NO: 795748 - DNA, 33 bp, Homo sapien
aaactgacaaaagacagatcaacaggagtaaac

SEQ ID NO: 795749 - DNA, 33 bp, Homo sapien
gcttctaggaacaataaattttggaaaggtaaa

SEQ ID NO: 795750 - DNA, 33 bp, Homo sapien
gcttctaggaacaatacattttggaaaggtaaa

SEQ ID NO: 795751 - DNA, 33 bp, Homo sapien
ttcttttaatcagataaggaacactctaactgt

SEQ ID NO: 795752 - DNA, 33 bp, Homo sapien
ttcttttaatcagatagggaacactctaactgt

SEQ ID NO: 795753 - DNA, 33 bp, Homo sapien
ccctgaatgtggtccaagaaaagaaggatgttt

SEQ ID NO: 795754 - DNA, 33 bp, Homo sapien
ccctgaatgtggtccacgaaaagaaggatgttt

SEQ ID NO: 795755 - DNA, 33 bp, Homo sapien
acaaatgttccaatgcagaaaatcaggagaaag

SEQ ID NO: 795756 - DNA, 33 bp, Homo sapien
acaaatgttccaatgcggaaaatcaggagaaag

SEQ ID NO: 795757 - DNA, 33 bp, Homo sapien
ctcctaaaatgtcacactctctccattctgttt

SEQ ID NO: 795758 - DNA, 33 bp, Homo sapien
ctcctaaaatgtcacagtctctccattctgttt

SEQ ID NO: 795759 - DNA, 33 bp, Homo sapien
aaacacactgactaacggagacacaaatgctca

SEQ ID NO: 795760 - DNA, 33 bp, Homo sapien
aaacacactgactaactgagacacaaatgctca

SEQ ID NO: 795761 - DNA, 33 bp, Homo sapien
ttacttctatgtttcaatcaaccctgaggtgat

SEQ ID NO: 795762 - DNA, 33 bp, Homo sapien
ttacttctatgtttcagtcaaccctgaggtgat

SEQ ID NO: 795763 - DNA, 33 bp, Homo sapien
gctcccagtggcttgcagaataaaatccaaatt

SEQ ID NO: 795764 - DNA, 33 bp, Homo sapien
gctcccagtggcttgcggaataaaatccaaatt

SEQ ID NO: 795765 - DNA, 33 bp, Homo sapien
aaatacaggtcaatgcaacttgtagaaaattag

SEQ ID NO: 795766 - DNA, 33 bp, Homo sapien
aaatacaggtcaatgccacttgtagaaaattag

SEQ ID NO: 795767 - DNA, 33 bp, Homo sapien
attagcaatcagtacaactctaaaaaggaatgg

SEQ ID NO: 795768 - DNA, 33 bp, Homo sapien
attagcaatcagtacagctctaaaaaggaatgg

SEQ ID NO: 795769 - DNA, 33 bp, Homo sapien
ccttcattcctggccaatctttttatgaaagta

SEQ ID NO: 795770 - DNA, 33 bp, Homo sapien
ccttcattcctggccagtctttttatgaaagta

SEQ ID NO: 795771 - DNA, 33 bp, Homo sapien
ggattgggagtgccaacctttaattatgtgaat

SEQ ID NO: 795772 - DNA, 33 bp, Homo sapien
ggattgggagtgccaatctttaattatgtgaat

SEQ ID NO: 795773 - DNA, 33 bp, Homo sapien
gggtgaactcatactcaagtcaagggactgata

SEQ ID NO: 795774 - DNA, 33 bp, Homo sapien
gggtgaactcatactcgagtcaagggactgata

SEQ ID NO: 795775 - DNA, 33 bp, Homo sapien
acatgggtcacataagaaagccttaaagttaac

SEQ ID NO: 795776 - DNA, 33 bp, Homo sapien
acatgggtcacataaggaagccttaaagttaac

SEQ ID NO: 795777 - DNA, 33 bp, Homo sapien
tcaccctggcattccacgagatacctgaaaata

SEQ ID NO: 795778 - DNA, 33 bp, Homo sapien
tcaccctggcattccatgagatacctgaaaata

SEQ ID NO: 795779 - DNA, 33 bp, Homo sapien
tagccatcccattactaacactaggagtctttg

SEQ ID NO: 795780 - DNA, 33 bp, Homo sapien
tagccatcccattactgacactaggagtctttg

SEQ ID NO: 795781 - DNA, 33 bp, Homo sapien
aatatagcatttgacaaggaatcaataaccaga

SEQ ID NO: 795782 - DNA, 33 bp, Homo sapien
aatatagcatttgacagggaatcaataaccaga

SEQ ID NO: 795783 - DNA, 33 bp, Homo sapien
tatcttcatgtcattcacttttttaactcccac

SEQ ID NO: 795784 - DNA, 33 bp, Homo sapien
tatcttcatgtcattctcttttttaactcccac

SEQ ID NO: 795785 - DNA, 33 bp, Homo sapien
tcagacttgctacacaacttttcacctataacc

SEQ ID NO: 795786 - DNA, 33 bp, Homo sapien
tcagacttgctacacaccttttcacctataacc

SEQ ID NO: 795787 - DNA, 33 bp, Homo sapien
tataaccaaaatacaaaccatgactatctcatt

SEQ ID NO: 795788 - DNA, 33 bp, Homo sapien
tataaccaaaatacaacccatgactatctcatt

SEQ ID NO: 795789 - DNA, 33 bp, Homo sapien
ttctttctcaaatccaatcccagacttcttcca

SEQ ID NO: 795790 - DNA, 33 bp, Homo sapien
ttctttctcaaatccagtcccagacttcttcca

SEQ ID NO: 795791 - DNA, 33 bp, Homo sapien
ggttgagcaactgtaacctaggtagttgtactt

SEQ ID NO: 795792 - DNA, 33 bp, Homo sapien
ggttgagcaactgtaatctaggtagttgtactt

SEQ ID NO: 795793 - DNA, 33 bp, Homo sapien
gcaaaggaggtaacaacgtatcagaggttgagc

SEQ ID NO: 795794 - DNA, 33 bp, Homo sapien
gcaaaggaggtaacaaggtatcagaggttgagc

SEQ ID NO: 795795 - DNA, 33 bp, Homo sapien
gtgcattccagcacataaagagatggggcagag

SEQ ID NO: 795796 - DNA, 33 bp, Homo sapien
gtgcattccagcacatgaagagatggggcagag

SEQ ID NO: 795797 - DNA, 33 bp, Homo sapien
aatgtggaattgcaccaaccaaagcctaacaag

SEQ ID NO: 795798 - DNA, 33 bp, Homo sapien
aatgtggaattgcacccaccaaagcctaacaag

SEQ ID NO: 795799 - DNA, 33 bp, Homo sapien
ccccaaacacttttcccaacaacaatttggtac

SEQ ID NO: 795800 - DNA, 33 bp, Homo sapien
ccccaaacacttttcctaacaacaatttggtac

SEQ ID NO: 795801 - DNA, 33 bp, Homo sapien
tatcttactcactctaagtggggaaaagacctc

SEQ ID NO: 795802 - DNA, 33 bp, Homo sapien
tatcttactcactctaggtggggaaaagacctc

SEQ ID NO: 795803 - DNA, 33 bp, Homo sapien
ttggaggtgatcagagacctgaaaatgtgcaat

SEQ ID NO: 795804 - DNA, 33 bp, Homo sapien
ttggaggtgatcagagtcctgaaaatgtgcaat

SEQ ID NO: 795805 - DNA, 33 bp, Homo sapien
ttggagttccatagcacgataattttcagtttt

SEQ ID NO: 795806 - DNA, 33 bp, Homo sapien
ttggagttccatagcatgataattttcagtttt

SEQ ID NO: 795807 - DNA, 33 bp, Homo sapien
ttgaaggttgttgcaacgacattttaaacttcg

SEQ ID NO: 795808 - DNA, 33 bp, Homo sapien
ttgaaggttgttgcaatgacattttaaacttcg

SEQ ID NO: 795809 - DNA, 33 bp, Homo sapien
tggtttcagtacaaaaatcagtgttgtatacag

SEQ ID NO: 795810 - DNA, 33 bp, Homo sapien
tggtttcagtacaaaagtcagtgttgtatacag

SEQ ID NO: 795811 - DNA, 33 bp, Homo sapien
cagacactaggaattaaagggcatttcatatca

SEQ ID NO: 795812 - DNA, 33 bp, Homo sapien
cagacactaggaattacagggcatttcatatca

SEQ ID NO: 795813 - DNA, 33 bp, Homo sapien
gtggcctgactacctcgcaaatttgttcaggac

SEQ ID NO: 795814 - DNA, 33 bp, Homo sapien
gtggcctgactacctctcaaatttgttcaggac

SEQ ID NO: 795815 - DNA, 33 bp, Homo sapien
aaataaaataacagaacagtaaatctgaaaaat

SEQ ID NO: 795816 - DNA, 33 bp, Homo sapien
aaataaaataacagaagagtaaatctgaaaaat

SEQ ID NO: 795817 - DNA, 33 bp, Homo sapien
caatttgtcctcaatcaaatgcaactaaaagcc

SEQ ID NO: 795818 - DNA, 33 bp, Homo sapien
caatttgtcctcaatccaatgcaactaaaagcc

SEQ ID NO: 795819 - DNA, 33 bp, Homo sapien
gatgtttaacctctccaaaaatcatgttgaaat

SEQ ID NO: 795820 - DNA, 33 bp, Homo sapien
gatgtttaacctctcctaaaatcatgttgaaat

SEQ ID NO: 795821 - DNA, 33 bp, Homo sapien
atgtgcagaaatcaaacggtaagaaatgaagca

SEQ ID NO: 795822 - DNA, 33 bp, Homo sapien
atgtgcagaaatcaaatggtaagaaatgaagca

SEQ ID NO: 795823 - DNA, 33 bp, Homo sapien
tgacacacatcttccactcatatttcactggcc

SEQ ID NO: 795824 - DNA, 33 bp, Homo sapien
tgacacacatcttccattcatatttcactggcc

SEQ ID NO: 795825 - DNA, 33 bp, Homo sapien
ctattacaccaagagaagagaatcaatcaaaag

SEQ ID NO: 795826 - DNA, 33 bp, Homo sapien
ctattacaccaagagaggagaatcaatcaaaag

SEQ ID NO: 795827 - DNA, 33 bp, Homo sapien
tgtttcttctgcaatacaccaaagtagaagaac

SEQ ID NO: 795828 - DNA, 33 bp, Homo sapien
tgtttcttctgcaatataccaaagtagaagaac

SEQ ID NO: 795829 - DNA, 33 bp, Homo sapien
gtagatccaccagagtaaaacatacccacctgc

SEQ ID NO: 795830 - DNA, 33 bp, Homo sapien
gtagatccaccagagtgaaacatacccacctgc

SEQ ID NO: 795831 - DNA, 33 bp, Homo sapien
tatttttatattattcaacttgctacaataaac

SEQ ID NO: 795832 - DNA, 33 bp, Homo sapien
tatttttatattattcgacttgctacaataaac

SEQ ID NO: 795833 - DNA, 33 bp, Homo sapien
ggtcacatttttgccaactgatcaatacataac

SEQ ID NO: 795834 - DNA, 33 bp, Homo sapien
ggtcacatttttgccagctgatcaatacataac

SEQ ID NO: 795835 - DNA, 33 bp, Homo sapien
tgtacagaggcttgagaaagtagtgagtgattt

SEQ ID NO: 795836 - DNA, 33 bp, Homo sapien
tgtacagaggcttgaggaagtagtgagtgattt

SEQ ID NO: 795837 - DNA, 33 bp, Homo sapien
aaatgattttaggaagcacgtggaacatagttg

SEQ ID NO: 795838 - DNA, 33 bp, Homo sapien
aaatgattttaggaagtacgtggaacatagttg

SEQ ID NO: 795839 - DNA, 33 bp, Homo sapien
taatgctttggaaataaaagatgctattatcta

SEQ ID NO: 795840 - DNA, 33 bp, Homo sapien
taatgctttggaaatataagatgctattatcta

SEQ ID NO: 795841 - DNA, 33 bp, Homo sapien
ttaggttggcttaagaagtaaagagtagaaagt

SEQ ID NO: 795842 - DNA, 33 bp, Homo sapien
ttaggttggcttaagaggtaaagagtagaaagt

SEQ ID NO: 795843 - DNA, 33 bp, Homo sapien
tagggacatttgcagacgttatgagttatgttt

SEQ ID NO: 795844 - DNA, 33 bp, Homo sapien
tagggacatttgcagatgttatgagttatgttt

SEQ ID NO: 795845 - DNA, 33 bp, Homo sapien
gagttccacacacaaaattatttcacacatgct

SEQ ID NO: 795846 - DNA, 33 bp, Homo sapien
gagttccacacacaaagttatttcacacatgct

SEQ ID NO: 795847 - DNA, 33 bp, Homo sapien
atttccggacacagtaccactaagatttgctct

SEQ ID NO: 795848 - DNA, 33 bp, Homo sapien
atttccggacacagtagcactaagatttgctct

SEQ ID NO: 795849 - DNA, 33 bp, Homo sapien
ggggtccatacagcttcaagagtcacatttgac

SEQ ID NO: 795850 - DNA, 33 bp, Homo sapien
ggggtccatacagcttgaagagtcacatttgac

SEQ ID NO: 795851 - DNA, 33 bp, Homo sapien
taaacctctgagatataaggtagtttgatatac

SEQ ID NO: 795852 - DNA, 33 bp, Homo sapien
taaacctctgagatatgaggtagtttgatatac

SEQ ID NO: 795853 - DNA, 33 bp, Homo sapien
tgtacgtgaagaagtcaagttgtcatcagcttt

SEQ ID NO: 795854 - DNA, 33 bp, Homo sapien
tgtacgtgaagaagtcgagttgtcatcagcttt

SEQ ID NO: 795855 - DNA, 33 bp, Homo sapien
catttgccacaatgtgaataagactggaagaca

SEQ ID NO: 795856 - DNA, 33 bp, Homo sapien
catttgccacaatgtggataagactggaagaca

SEQ ID NO: 795857 - DNA, 33 bp, Homo sapien
caaaccaaaaccttaacgcagtatctatatata

SEQ ID NO: 795858 - DNA, 33 bp, Homo sapien
caaaccaaaaccttaatgcagtatctatatata

SEQ ID NO: 795859 - DNA, 33 bp, Homo sapien
aacaattggcattgtcgcatcttttccatttct

SEQ ID NO: 795860 - DNA, 33 bp, Homo sapien
aacaattggcattgtctcatcttttccatttct

SEQ ID NO: 795861 - DNA, 33 bp, Homo sapien
gtccctattatgtaaaatctaacttcacgtctc

SEQ ID NO: 795862 - DNA, 33 bp, Homo sapien
gtccctattatgtaaagtctaacttcacgtctc

SEQ ID NO: 795863 - DNA, 33 bp, Homo sapien
tcaagtccgtgtgtgaactgatttttcctggat

SEQ ID NO: 795864 - DNA, 33 bp, Homo sapien
tcaagtccgtgtgtgacctgatttttcctggat

SEQ ID NO: 795865 - DNA, 33 bp, Homo sapien
atgaccttctcaagcccaatcttgcatatatta

SEQ ID NO: 795866 - DNA, 33 bp, Homo sapien
atgaccttctcaagccgaatcttgcatatatta

SEQ ID NO: 795867 - DNA, 33 bp, Homo sapien
caaactgctaaagagacaacaatggtcagctta

SEQ ID NO: 795868 - DNA, 33 bp, Homo sapien
caaactgctaaagagataacaatggtcagctta

SEQ ID NO: 795869 - DNA, 33 bp, Homo sapien
gggctcttgaagacgaagttaagttacagatca

SEQ ID NO: 795870 - DNA, 33 bp, Homo sapien
gggctcttgaagacgaggttaagttacagatca

SEQ ID NO: 795871 - DNA, 33 bp, Homo sapien
tgactttggtcaatacaaatgcagacaattcat

SEQ ID NO: 795872 - DNA, 33 bp, Homo sapien
tgactttggtcaataccaatgcagacaattcat

SEQ ID NO: 795873 - DNA, 33 bp, Homo sapien
tcgaaaattgcatacgaaacttcatgttgagat

SEQ ID NO: 795874 - DNA, 33 bp, Homo sapien
tcgaaaattgcatacggaacttcatgttgagat

SEQ ID NO: 795875 - DNA, 33 bp, Homo sapien
caactaattgagctaccccaacaggaggcattc

SEQ ID NO: 795876 - DNA, 33 bp, Homo sapien
caactaattgagctacgccaacaggaggcattc

SEQ ID NO: 795877 - DNA, 33 bp, Homo sapien
accatatctgaatgtacgctgttagaagcagtc

SEQ ID NO: 795878 - DNA, 33 bp, Homo sapien
accatatctgaatgtaggctgttagaagcagtc

SEQ ID NO: 795879 - DNA, 33 bp, Homo sapien
catgtgaaaaggataacaaaacatgaccaatga

SEQ ID NO: 795880 - DNA, 33 bp, Homo sapien
catgtgaaaaggataataaaacatgaccaatga

SEQ ID NO: 795881 - DNA, 33 bp, Homo sapien
gtccaagtaacttactcagatgctggtagtttc

SEQ ID NO: 795882 - DNA, 33 bp, Homo sapien
gtccaagtaacttacttagatgctggtagtttc

SEQ ID NO: 795883 - DNA, 33 bp, Homo sapien
tcacatcaacttcacagagagtaatagagaaac

SEQ ID NO: 795884 - DNA, 33 bp, Homo sapien
tcacatcaacttcacatagagtaatagagaaac

SEQ ID NO: 795885 - DNA, 33 bp, Homo sapien
aaaatattacgctctacctcatagtatttctta

SEQ ID NO: 795886 - DNA, 33 bp, Homo sapien
aaaatattacgctctagctcatagtatttctta

SEQ ID NO: 795887 - DNA, 33 bp, Homo sapien
acagattttgataccaggaaataaagcagtgta

SEQ ID NO: 795888 - DNA, 33 bp, Homo sapien
acagattttgataccatgaaataaagcagtgta

SEQ ID NO: 795889 - DNA, 33 bp, Homo sapien
tatcctttctcaggcaaagaatccttaattgga

SEQ ID NO: 795890 - DNA, 33 bp, Homo sapien
tatcctttctcaggcagagaatccttaattgga

SEQ ID NO: 795891 - DNA, 33 bp, Homo sapien
tgaaattaattgccaaattcagactctgggggt

SEQ ID NO: 795892 - DNA, 33 bp, Homo sapien
tgaaattaattgccaagttcagactctgggggt

SEQ ID NO: 795893 - DNA, 33 bp, Homo sapien
tcttaggtgcggatagaagtagaattgtgggct

SEQ ID NO: 795894 - DNA, 33 bp, Homo sapien
tcttaggtgcggataggagtagaattgtgggct

SEQ ID NO: 795895 - DNA, 33 bp, Homo sapien
atagaaatttgacagaagtttgttacattagag

SEQ ID NO: 795896 - DNA, 33 bp, Homo sapien
atagaaatttgacagaggtttgttacattagag

SEQ ID NO: 795897 - DNA, 33 bp, Homo sapien
ttttccgtagaataaactgcccctctctatacc

SEQ ID NO: 795898 - DNA, 33 bp, Homo sapien
ttttccgtagaataaattgcccctctctatacc

SEQ ID NO: 795899 - DNA, 33 bp, Homo sapien
atacccaataattgctgaaactattcgtaaaat

SEQ ID NO: 795900 - DNA, 33 bp, Homo sapien
atacccaataattgcttaaactattcgtaaaat

SEQ ID NO: 795901 - DNA, 33 bp, Homo sapien
attttcaagtgttttacgagagcagatgtttta

SEQ ID NO: 795902 - DNA, 33 bp, Homo sapien
attttcaagtgttttatgagagcagatgtttta

SEQ ID NO: 795903 - DNA, 33 bp, Homo sapien
taattcagatctttagaaattttcaaatggcca

SEQ ID NO: 795904 - DNA, 33 bp, Homo sapien
taattcagatctttaggaattttcaaatggcca

SEQ ID NO: 795905 - DNA, 33 bp, Homo sapien
tggcttttaaagccgcaataactcagggaattt

SEQ ID NO: 795906 - DNA, 33 bp, Homo sapien
tggcttttaaagccgcgataactcagggaattt

SEQ ID NO: 795907 - DNA, 33 bp, Homo sapien
atattcttcttatgtgaaacatcgacctatatc

SEQ ID NO: 795908 - DNA, 33 bp, Homo sapien
atattcttcttatgtggaacatcgacctatatc

SEQ ID NO: 795909 - DNA, 33 bp, Homo sapien
agaaaatatttgctaactatgcacctgacaaag

SEQ ID NO: 795910 - DNA, 33 bp, Homo sapien
agaaaatatttgctaattatgcacctgacaaag

SEQ ID NO: 795911 - DNA, 33 bp, Homo sapien
ttgtggttttggtttacgtttctctaatcagtg

SEQ ID NO: 795912 - DNA, 33 bp, Homo sapien
ttgtggttttggtttatgtttctctaatcagtg

SEQ ID NO: 795913 - DNA, 33 bp, Homo sapien
gtgtgtctttatggtaatacaacttggattcct

SEQ ID NO: 795914 - DNA, 33 bp, Homo sapien
gtgtgtctttatggtagtacaacttggattcct

SEQ ID NO: 795915 - DNA, 33 bp, Homo sapien
cgaaactctataaatacgactttggatcatcct

SEQ ID NO: 795916 - DNA, 33 bp, Homo sapien
cgaaactctataaatatgactttggatcatcct

SEQ ID NO: 795917 - DNA, 33 bp, Homo sapien
tgtactaatacgttaagaatttaaaggcaacag

SEQ ID NO: 795918 - DNA, 33 bp, Homo sapien
tgtactaatacgttaataatttaaaggcaacag

SEQ ID NO: 795919 - DNA, 33 bp, Homo sapien
taaaattacatgatgaataagttcctggattct

SEQ ID NO: 795920 - DNA, 33 bp, Homo sapien
taaaattacatgatgagtaagttcctggattct

SEQ ID NO: 795921 - DNA, 33 bp, Homo sapien
tcacctgcatcttataaaagtttcctcatcaca

SEQ ID NO: 795922 - DNA, 33 bp, Homo sapien
tcacctgcatcttatagaagtttcctcatcaca

SEQ ID NO: 795923 - DNA, 33 bp, Homo sapien
aaaaacagacaaatggaacaagatgaaactaaa

SEQ ID NO: 795924 - DNA, 33 bp, Homo sapien
aaaaacagacaaatgggacaagatgaaactaaa

SEQ ID NO: 795925 - DNA, 33 bp, Homo sapien
caaatcacatatgcccaaaaacaaacctttgtg

SEQ ID NO: 795926 - DNA, 33 bp, Homo sapien
caaatcacatatgccccaaaacaaacctttgtg

SEQ ID NO: 795927 - DNA, 33 bp, Homo sapien
cctaaactagttaacactggagatctggtaaaa

SEQ ID NO: 795928 - DNA, 33 bp, Homo sapien
cctaaactagttaacattggagatctggtaaaa

SEQ ID NO: 795929 - DNA, 33 bp, Homo sapien
tactataaccagtagaatcaattgctgcttgag

SEQ ID NO: 795930 - DNA, 33 bp, Homo sapien
tactataaccagtagagtcaattgctgcttgag

SEQ ID NO: 795931 - DNA, 33 bp, Homo sapien
gattcacaaatatggaaatttgccttttgtttg

SEQ ID NO: 795932 - DNA, 33 bp, Homo sapien
gattcacaaatatggagatttgccttttgtttg

SEQ ID NO: 795933 - DNA, 33 bp, Homo sapien
agttcaaaaaaatgccacagaatgtacttcatc

SEQ ID NO: 795934 - DNA, 33 bp, Homo sapien
agttcaaaaaaatgccgcagaatgtacttcatc

SEQ ID NO: 795935 - DNA, 33 bp, Homo sapien
catcttcatgaatttcaaatgagggagagagag

SEQ ID NO: 795936 - DNA, 33 bp, Homo sapien
catcttcatgaatttctaatgagggagagagag

SEQ ID NO: 795937 - DNA, 33 bp, Homo sapien
ccattcaagtgtatgaccatattttcaagcaat

SEQ ID NO: 795938 - DNA, 33 bp, Homo sapien
ccattcaagtgtatgatcatattttcaagcaat

SEQ ID NO: 795939 - DNA, 33 bp, Homo sapien
tttggaggaccttatgaaatgtatcaatattca

SEQ ID NO: 795940 - DNA, 33 bp, Homo sapien
tttggaggaccttatggaatgtatcaatattca

SEQ ID NO: 795941 - DNA, 33 bp, Homo sapien
caagagataagttacacaggcttggctcaacct

SEQ ID NO: 795942 - DNA, 33 bp, Homo sapien
caagagataagttacataggcttggctcaacct

SEQ ID NO: 795943 - DNA, 33 bp, Homo sapien
aaacattttctggaaaacaatgggatacaacat

SEQ ID NO: 795944 - DNA, 33 bp, Homo sapien
aaacattttctggaaagcaatgggatacaacat

SEQ ID NO: 795945 - DNA, 33 bp, Homo sapien
caaaggaatctgggtccacctatgggaggttga

SEQ ID NO: 795946 - DNA, 33 bp, Homo sapien
caaaggaatctgggtctacctatgggaggttga

SEQ ID NO: 795947 - DNA, 33 bp, Homo sapien
accatttcaggtaccgacaagaatatataaaac

SEQ ID NO: 795948 - DNA, 33 bp, Homo sapien
accatttcaggtaccgtcaagaatatataaaac

SEQ ID NO: 795949 - DNA, 33 bp, Homo sapien
gctttagctgacaccaatgataatggctgatac

SEQ ID NO: 795950 - DNA, 33 bp, Homo sapien
gctttagctgacaccagtgataatggctgatac

SEQ ID NO: 795951 - DNA, 33 bp, Homo sapien
atttctctagtgttaccctggttttcatctttc

SEQ ID NO: 795952 - DNA, 33 bp, Homo sapien
atttctctagtgttactctggttttcatctttc

SEQ ID NO: 795953 - DNA, 33 bp, Homo sapien
attgtcatctaaagagaatgtgtattggtgtta

SEQ ID NO: 795954 - DNA, 33 bp, Homo sapien
attgtcatctaaagaggatgtgtattggtgtta

SEQ ID NO: 795955 - DNA, 33 bp, Homo sapien
tcttagactctaccaaggggatcaacttgaaag

SEQ ID NO: 795956 - DNA, 33 bp, Homo sapien
tcttagactctaccaatgggatcaacttgaaag

SEQ ID NO: 795957 - DNA, 33 bp, Homo sapien
gcaaatgtcattgcataaaaatatagggatggt

SEQ ID NO: 795958 - DNA, 33 bp, Homo sapien
gcaaatgtcattgcatgaaaatatagggatggt

SEQ ID NO: 795959 - DNA, 33 bp, Homo sapien
tattctgaagtttctcaaagaattaagtgacat

SEQ ID NO: 795960 - DNA, 33 bp, Homo sapien
tattctgaagtttctctaagaattaagtgacat

SEQ ID NO: 795961 - DNA, 33 bp, Homo sapien
cttattattactaacactaccccaactttccaa

SEQ ID NO: 795962 - DNA, 33 bp, Homo sapien
cttattattactaacattaccccaactttccaa

SEQ ID NO: 795963 - DNA, 33 bp, Homo sapien
atgaggccataaatacagtaacagtttgattac

SEQ ID NO: 795964 - DNA, 33 bp, Homo sapien
atgaggccataaatacggtaacagtttgattac

SEQ ID NO: 795965 - DNA, 33 bp, Homo sapien
cactgtctgtgaggcacgatgggaactgaaaac

SEQ ID NO: 795966 - DNA, 33 bp, Homo sapien
cactgtctgtgaggcatgatgggaactgaaaac

SEQ ID NO: 795967 - DNA, 33 bp, Homo sapien
tggaaatatggtgacaactgaaattcaaggtga

SEQ ID NO: 795968 - DNA, 33 bp, Homo sapien
tggaaatatggtgacatctgaaattcaaggtga

SEQ ID NO: 795969 - DNA, 33 bp, Homo sapien
gactcaaaagatattaactagtacagagagtca

SEQ ID NO: 795970 - DNA, 33 bp, Homo sapien
gactcaaaagatattagctagtacagagagtca

SEQ ID NO: 795971 - DNA, 33 bp, Homo sapien
agagggcagaaggaaaaaagggcaaacattttc

SEQ ID NO: 795972 - DNA, 33 bp, Homo sapien
agagggcagaaggaaagaagggcaaacattttc

SEQ ID NO: 795973 - DNA, 33 bp, Homo sapien
ggcaaagggaagttacccagagcttaaactaga

SEQ ID NO: 795974 - DNA, 33 bp, Homo sapien
ggcaaagggaagttacgcagagcttaaactaga

SEQ ID NO: 795975 - DNA, 33 bp, Homo sapien
atcctagcctcttaaacaatgagcatgtattat

SEQ ID NO: 795976 - DNA, 33 bp, Homo sapien
atcctagcctcttaaataatgagcatgtattat

SEQ ID NO: 795977 - DNA, 33 bp, Homo sapien
acacttggagagaaaactcttccacttttcctt

SEQ ID NO: 795978 - DNA, 33 bp, Homo sapien
acacttggagagaaaattcttccacttttcctt

SEQ ID NO: 795979 - DNA, 33 bp, Homo sapien
ctacagaaatggggtaagggagactttttacat

SEQ ID NO: 795980 - DNA, 33 bp, Homo sapien
ctacagaaatggggtaggggagactttttacat

SEQ ID NO: 795981 - DNA, 33 bp, Homo sapien
aactgcacccatgtagacctcatcacctagagc

SEQ ID NO: 795982 - DNA, 33 bp, Homo sapien
aactgcacccatgtaggcctcatcacctagagc

SEQ ID NO: 795983 - DNA, 33 bp, Homo sapien
gatgggaaataaacagaacggcagagaataaaa

SEQ ID NO: 795984 - DNA, 33 bp, Homo sapien
gatgggaaataaacagcacggcagagaataaaa

SEQ ID NO: 795985 - DNA, 33 bp, Homo sapien
agtgcatttttacaagccccatgcctaaatcgt

SEQ ID NO: 795986 - DNA, 33 bp, Homo sapien
agtgcatttttacaagtcccatgcctaaatcgt

SEQ ID NO: 795987 - DNA, 33 bp, Homo sapien
ttgtgttggctacgccacgcgacaggcttctgc

SEQ ID NO: 795988 - DNA, 33 bp, Homo sapien
ttgtgttggctacgccgcgcgacaggcttctgc

SEQ ID NO: 795989 - DNA, 33 bp, Homo sapien
actgaggctgtaaataacaaaggagaattcact

SEQ ID NO: 795990 - DNA, 33 bp, Homo sapien
actgaggctgtaaatagcaaaggagaattcact

SEQ ID NO: 795991 - DNA, 33 bp, Homo sapien
ttgccaatttatctaacgggttgttgattgaaa

SEQ ID NO: 795992 - DNA, 33 bp, Homo sapien
ttgccaatttatctaatgggttgttgattgaaa

SEQ ID NO: 795993 - DNA, 33 bp, Homo sapien
agtgcttaaatatatgaaaatacactcagcttt

SEQ ID NO: 795994 - DNA, 33 bp, Homo sapien
agtgcttaaatatatggaaatacactcagcttt

SEQ ID NO: 795995 - DNA, 33 bp, Homo sapien
gtgagaagatatagacactgttgaatatttggg

SEQ ID NO: 795996 - DNA, 33 bp, Homo sapien
gtgagaagatatagacgctgttgaatatttggg

SEQ ID NO: 795997 - DNA, 33 bp, Homo sapien
aaggtatgatagaaaaaatgttacagctattgc

SEQ ID NO: 795998 - DNA, 33 bp, Homo sapien
aaggtatgatagaaaagatgttacagctattgc

SEQ ID NO: 795999 - DNA, 33 bp, Homo sapien
ttaaagttacggtcaacgaagctgaacaggttt

SEQ ID NO: 796000 - DNA, 33 bp, Homo sapien
ttaaagttacggtcaatgaagctgaacaggttt

SEQ ID NO: 796001 - DNA, 33 bp, Homo sapien
gtgagagctccagggcagagtgggaatcttact

SEQ ID NO: 796002 - DNA, 33 bp, Homo sapien
gtgagagctccagggcggagtgggaatcttact

SEQ ID NO: 796003 - DNA, 33 bp, Homo sapien
gtgtcaccttcagcaacctaatttgaaactctt

SEQ ID NO: 796004 - DNA, 33 bp, Homo sapien
gtgtcaccttcagcaagctaatttgaaactctt

SEQ ID NO: 796005 - DNA, 33 bp, Homo sapien
acaacgctagggcaaaactgtccttagcctgtg

SEQ ID NO: 796006 - DNA, 33 bp, Homo sapien
acaacgctagggcaaatctgtccttagcctgtg

SEQ ID NO: 796007 - DNA, 33 bp, Homo sapien
taaaagtgtaagggaaccttatgagcaaaattc

SEQ ID NO: 796008 - DNA, 33 bp, Homo sapien
taaaagtgtaagggaagcttatgagcaaaattc

SEQ ID NO: 796009 - DNA, 33 bp, Homo sapien
cagtgttggaattgaactgaaggacacccagct

SEQ ID NO: 796010 - DNA, 33 bp, Homo sapien
cagtgttggaattgaattgaaggacacccagct

SEQ ID NO: 796011 - DNA, 33 bp, Homo sapien
tcagattctgaagaaaataagagtaggtacata

SEQ ID NO: 796012 - DNA, 33 bp, Homo sapien
tcagattctgaagaaagtaagagtaggtacata

SEQ ID NO: 796013 - DNA, 33 bp, Homo sapien
cttagtccttttgatacgtcaagtgtccctacc

SEQ ID NO: 796014 - DNA, 33 bp, Homo sapien
cttagtccttttgatatgtcaagtgtccctacc

SEQ ID NO: 796015 - DNA, 33 bp, Homo sapien
atatactcattgtctaaactatgctttacttac

SEQ ID NO: 796016 - DNA, 33 bp, Homo sapien
atatactcattgtctatactatgctttacttac

SEQ ID NO: 796017 - DNA, 33 bp, Homo sapien
caattgagaagatcacacccgtaatcctagcac

SEQ ID NO: 796018 - DNA, 33 bp, Homo sapien
caattgagaagatcacgcccgtaatcctagcac

SEQ ID NO: 796019 - DNA, 33 bp, Homo sapien
actgatctttccttaaatgcagaattttgagtc

SEQ ID NO: 796020 - DNA, 33 bp, Homo sapien
actgatctttccttaagtgcagaattttgagtc

SEQ ID NO: 796021 - DNA, 33 bp, Homo sapien
tgtcacaataaaagacactgcaaaaaaaaggaa

SEQ ID NO: 796022 - DNA, 33 bp, Homo sapien
tgtcacaataaaagacgctgcaaaaaaaaggaa

SEQ ID NO: 796023 - DNA, 33 bp, Homo sapien
gatacaaagtcaacacaactcacttccctgcta

SEQ ID NO: 796024 - DNA, 33 bp, Homo sapien
gatacaaagtcaacacgactcacttccctgcta

SEQ ID NO: 796025 - DNA, 33 bp, Homo sapien
ctaccttaggaagtaactggtctctgcagtaat

SEQ ID NO: 796026 - DNA, 33 bp, Homo sapien
ctaccttaggaagtaattggtctctgcagtaat

SEQ ID NO: 796027 - DNA, 33 bp, Homo sapien
attactatttgatgcacggactttgctgttttc

SEQ ID NO: 796028 - DNA, 33 bp, Homo sapien
attactatttgatgcatggactttgctgttttc

SEQ ID NO: 796029 - DNA, 33 bp, Homo sapien
ctatgtctttaaattcaaggtaaaaatgcattc

SEQ ID NO: 796030 - DNA, 33 bp, Homo sapien
ctatgtctttaaattccaggtaaaaatgcattc

SEQ ID NO: 796031 - DNA, 33 bp, Homo sapien
atgctgtcctatgttacggctgctggggactag

SEQ ID NO: 796032 - DNA, 33 bp, Homo sapien
atgctgtcctatgttatggctgctggggactag

SEQ ID NO: 796033 - DNA, 33 bp, Homo sapien
atgcaaagacaaactcaaaatgtatcaaagacc

SEQ ID NO: 796034 - DNA, 33 bp, Homo sapien
atgcaaagacaaactccaaatgtatcaaagacc

SEQ ID NO: 796035 - DNA, 33 bp, Homo sapien
ggtatgatcacaaaggacagaacatgaccaggg

SEQ ID NO: 796036 - DNA, 33 bp, Homo sapien
ggtatgatcacaaagggcagaacatgaccaggg

SEQ ID NO: 796037 - DNA, 33 bp, Homo sapien
ttagaaatgacctaaacgtcgaatcataagggg

SEQ ID NO: 796038 - DNA, 33 bp, Homo sapien
ttagaaatgacctaaatgtcgaatcataagggg

SEQ ID NO: 796039 - DNA, 33 bp, Homo sapien
gataaaggcagtccacgattgtcaaaataaata

SEQ ID NO: 796040 - DNA, 33 bp, Homo sapien
gataaaggcagtccactattgtcaaaataaata

SEQ ID NO: 796041 - DNA, 33 bp, Homo sapien
tgacattcatttcacactaactacataagaatc

SEQ ID NO: 796042 - DNA, 33 bp, Homo sapien
tgacattcatttcacagtaactacataagaatc

SEQ ID NO: 796043 - DNA, 33 bp, Homo sapien
tttggttcctctgacactgaagatcaaagagga

SEQ ID NO: 796044 - DNA, 33 bp, Homo sapien
tttggttcctctgacattgaagatcaaagagga

SEQ ID NO: 796045 - DNA, 33 bp, Homo sapien
gttggaggcgtgggtcagaaaagaggaggttag

SEQ ID NO: 796046 - DNA, 33 bp, Homo sapien
gttggaggcgtgggtccgaaaagaggaggttag

SEQ ID NO: 796047 - DNA, 33 bp, Homo sapien
ttggctgcataaaaaccaccatatgtaaagtgg

SEQ ID NO: 796048 - DNA, 33 bp, Homo sapien
ttggctgcataaaaactaccatatgtaaagtgg

SEQ ID NO: 796049 - DNA, 33 bp, Homo sapien
ggaaccaccaccttacaacctgggcaagtgtaa

SEQ ID NO: 796050 - DNA, 33 bp, Homo sapien
ggaaccaccaccttaccacctgggcaagtgtaa

SEQ ID NO: 796051 - DNA, 33 bp, Homo sapien
tacaaaaattttactcaaatgagctcctggagt

SEQ ID NO: 796052 - DNA, 33 bp, Homo sapien
tacaaaaattttactctaatgagctcctggagt

SEQ ID NO: 796053 - DNA, 33 bp, Homo sapien
gacgaagtgtagttagaagttgtgttaacttgt

SEQ ID NO: 796054 - DNA, 33 bp, Homo sapien
gacgaagtgtagttaggagttgtgttaacttgt

SEQ ID NO: 796055 - DNA, 33 bp, Homo sapien
atggaatatttgagtcgacgtgattatatctag

SEQ ID NO: 796056 - DNA, 33 bp, Homo sapien
atggaatatttgagtctacgtgattatatctag

SEQ ID NO: 796057 - DNA, 33 bp, Homo sapien
ataatagatgttccacaggttatttggccatta

SEQ ID NO: 796058 - DNA, 33 bp, Homo sapien
ataatagatgttccacgggttatttggccatta

SEQ ID NO: 796059 - DNA, 33 bp, Homo sapien
gtggattgctaatagagaaggacttcaaaatga

SEQ ID NO: 796060 - DNA, 33 bp, Homo sapien
gtggattgctaatagataaggacttcaaaatga

SEQ ID NO: 796061 - DNA, 33 bp, Homo sapien
tgtataaacacatccaactgattacaatgccag

SEQ ID NO: 796062 - DNA, 33 bp, Homo sapien
tgtataaacacatccagctgattacaatgccag

SEQ ID NO: 796063 - DNA, 33 bp, Homo sapien
gagactgggagtttgcaactgtcttgggcaata

SEQ ID NO: 796064 - DNA, 33 bp, Homo sapien
gagactgggagtttgcgactgtcttgggcaata

SEQ ID NO: 796065 - DNA, 33 bp, Homo sapien
tgcaacctcagaaatcaatgctatgtacaaaaa

SEQ ID NO: 796066 - DNA, 33 bp, Homo sapien
tgcaacctcagaaatcgatgctatgtacaaaaa

SEQ ID NO: 796067 - DNA, 33 bp, Homo sapien
actaaaacctctgaaactgatccaaaaccattt

SEQ ID NO: 796068 - DNA, 33 bp, Homo sapien
actaaaacctctgaaattgatccaaaaccattt

SEQ ID NO: 796069 - DNA, 33 bp, Homo sapien
ctctgggccagtgagccatgataatatgatagg

SEQ ID NO: 796070 - DNA, 33 bp, Homo sapien
ctctgggccagtgagcgatgataatatgatagg

SEQ ID NO: 796071 - DNA, 33 bp, Homo sapien
gataggatagaaccacacagcagaaacaaggct

SEQ ID NO: 796072 - DNA, 33 bp, Homo sapien
gataggatagaaccacgcagcagaaacaaggct

SEQ ID NO: 796073 - DNA, 33 bp, Homo sapien
gctccacagttgtattcaaaagcaacaatgtaa

SEQ ID NO: 796074 - DNA, 33 bp, Homo sapien
gctccacagttgtattgaaaagcaacaatgtaa

SEQ ID NO: 796075 - DNA, 33 bp, Homo sapien
gcccgtgatctatcacagagcaataattctgtt

SEQ ID NO: 796076 - DNA, 33 bp, Homo sapien
gcccgtgatctatcacggagcaataattctgtt

SEQ ID NO: 796077 - DNA, 33 bp, Homo sapien
atgtatgtatgttttaagatatcagttctacag

SEQ ID NO: 796078 - DNA, 33 bp, Homo sapien
atgtatgtatgttttaggatatcagttctacag

SEQ ID NO: 796079 - DNA, 33 bp, Homo sapien
agggtaccacaagtaaatactctcttcatcccc

SEQ ID NO: 796080 - DNA, 33 bp, Homo sapien
agggtaccacaagtaagtactctcttcatcccc

SEQ ID NO: 796081 - DNA, 33 bp, Homo sapien
aggctcccatcacctaccaaaattagagaagca

SEQ ID NO: 796082 - DNA, 33 bp, Homo sapien
aggctcccatcacctatcaaaattagagaagca

SEQ ID NO: 796083 - DNA, 33 bp, Homo sapien
aggggggccatatcataagcagccctatgaaga

SEQ ID NO: 796084 - DNA, 33 bp, Homo sapien
aggggggccatatcatgagcagccctatgaaga

SEQ ID NO: 796085 - DNA, 33 bp, Homo sapien
atcacaaaaatactgaagagtgactgctaatgg

SEQ ID NO: 796086 - DNA, 33 bp, Homo sapien
atcacaaaaatactgacgagtgactgctaatgg

SEQ ID NO: 796087 - DNA, 33 bp, Homo sapien
acgcctaagtgacaaacggcattattgccggct

SEQ ID NO: 796088 - DNA, 33 bp, Homo sapien
acgcctaagtgacaaatggcattattgccggct

SEQ ID NO: 796089 - DNA, 33 bp, Homo sapien
aaatggtcaaattcaccgctagataaggtgggt

SEQ ID NO: 796090 - DNA, 33 bp, Homo sapien
aaatggtcaaattcactgctagataaggtgggt

SEQ ID NO: 796091 - DNA, 33 bp, Homo sapien
gaaagccgtataaaaaatgggtgagctaatgtc

SEQ ID NO: 796092 - DNA, 33 bp, Homo sapien
gaaagccgtataaaaagtgggtgagctaatgtc

SEQ ID NO: 796093 - DNA, 33 bp, Homo sapien
cagtttcctcgtttaccacagagacaatatctg

SEQ ID NO: 796094 - DNA, 33 bp, Homo sapien
cagtttcctcgtttactacagagacaatatctg

SEQ ID NO: 796095 - DNA, 33 bp, Homo sapien
gtcagcttctgaattacggctcttgccagggcc

SEQ ID NO: 796096 - DNA, 33 bp, Homo sapien
gtcagcttctgaattatggctcttgccagggcc

SEQ ID NO: 796097 - DNA, 33 bp, Homo sapien
cccggtagaaaacagaacttcgattgctggcgg

SEQ ID NO: 796098 - DNA, 33 bp, Homo sapien
cccggtagaaaacagaccttcgattgctggcgg

SEQ ID NO: 796099 - DNA, 33 bp, Homo sapien
aacattgttgagctgacctataacttcacgagt

SEQ ID NO: 796100 - DNA, 33 bp, Homo sapien
aacattgttgagctgatctataacttcacgagt

SEQ ID NO: 796101 - DNA, 33 bp, Homo sapien
tcactcaatgactgtaacacctttcgacttttg

SEQ ID NO: 796102 - DNA, 33 bp, Homo sapien
tcactcaatgactgtaccacctttcgacttttg

SEQ ID NO: 796103 - DNA, 33 bp, Homo sapien
tcaagtctaggatgataagattttacaacgaat

SEQ ID NO: 796104 - DNA, 33 bp, Homo sapien
tcaagtctaggatgatgagattttacaacgaat

SEQ ID NO: 796105 - DNA, 33 bp, Homo sapien
attataaaatggagtcaataacaggttacagca

SEQ ID NO: 796106 - DNA, 33 bp, Homo sapien
attataaaatggagtcgataacaggttacagca

SEQ ID NO: 796107 - DNA, 33 bp, Homo sapien
caggagctgaaatgacacaatttccttcaggag

SEQ ID NO: 796108 - DNA, 33 bp, Homo sapien
caggagctgaaatgacccaatttccttcaggag

SEQ ID NO: 796109 - DNA, 33 bp, Homo sapien
tactttgtctaaattaaatgctcaaaaaattgc

SEQ ID NO: 796110 - DNA, 33 bp, Homo sapien
tactttgtctaaattagatgctcaaaaaattgc

SEQ ID NO: 796111 - DNA, 33 bp, Homo sapien
ttattagtctttatcactctgtccaaactgaca

SEQ ID NO: 796112 - DNA, 33 bp, Homo sapien
ttattagtctttatcattctgtccaaactgaca

SEQ ID NO: 796113 - DNA, 33 bp, Homo sapien
tgcaacaacctgcaaaataaacagcaccttaat

SEQ ID NO: 796114 - DNA, 33 bp, Homo sapien
tgcaacaacctgcaaagtaaacagcaccttaat

SEQ ID NO: 796115 - DNA, 33 bp, Homo sapien
aagatggcttttctcacgttggtagccacagaa

SEQ ID NO: 796116 - DNA, 33 bp, Homo sapien
aagatggcttttctcaggttggtagccacagaa

SEQ ID NO: 796117 - DNA, 33 bp, Homo sapien
aaaaaaactccgtatcaccttcaggaatattac

SEQ ID NO: 796118 - DNA, 33 bp, Homo sapien
aaaaaaactccgtatcgccttcaggaatattac

SEQ ID NO: 796119 - DNA, 33 bp, Homo sapien
gattaaagtggagaagcactccagagaagaggt

SEQ ID NO: 796120 - DNA, 33 bp, Homo sapien
gattaaagtggagaagtactccagagaagaggt

SEQ ID NO: 796121 - DNA, 33 bp, Homo sapien
cctatcatatcaccacaatcctaaatcaaaaca

SEQ ID NO: 796122 - DNA, 33 bp, Homo sapien
cctatcatatcaccacgatcctaaatcaaaaca

SEQ ID NO: 796123 - DNA, 33 bp, Homo sapien
taccactcagtgcagaatccgcgttcctgtttt

SEQ ID NO: 796124 - DNA, 33 bp, Homo sapien
taccactcagtgcagattccgcgttcctgtttt

SEQ ID NO: 796125 - DNA, 33 bp, Homo sapien
aacccagaccgagtcacaaacggagtgtcaggt

SEQ ID NO: 796126 - DNA, 33 bp, Homo sapien
aacccagaccgagtcataaacggagtgtcaggt

SEQ ID NO: 796127 - DNA, 33 bp, Homo sapien
acaaacagagaaccatcaaaatctgaacgcaga

SEQ ID NO: 796128 - DNA, 33 bp, Homo sapien
acaaacagagaaccatgaaaatctgaacgcaga

SEQ ID NO: 796129 - DNA, 33 bp, Homo sapien
atttgaaaatgtaaaaacaaatgctatatataa

SEQ ID NO: 796130 - DNA, 33 bp, Homo sapien
atttgaaaatgtaaaatcaaatgctatatataa

SEQ ID NO: 796131 - DNA, 33 bp, Homo sapien
tagtgtttttaagatccatccatattgtagcat

SEQ ID NO: 796132 - DNA, 33 bp, Homo sapien
tagtgtttttaagatctatccatattgtagcat

SEQ ID NO: 796133 - DNA, 33 bp, Homo sapien
atggggtgatgtaacaactgcagtgataaactg

SEQ ID NO: 796134 - DNA, 33 bp, Homo sapien
atggggtgatgtaacagctgcagtgataaactg

SEQ ID NO: 796135 - DNA, 33 bp, Homo sapien
aaaggcaatggaataaactttcttcagacctgc

SEQ ID NO: 796136 - DNA, 33 bp, Homo sapien
aaaggcaatggaataagctttcttcagacctgc

SEQ ID NO: 796137 - DNA, 33 bp, Homo sapien
tcagactatcccttataagacctatgcttctcc

SEQ ID NO: 796138 - DNA, 33 bp, Homo sapien
tcagactatcccttatgagacctatgcttctcc

SEQ ID NO: 796139 - DNA, 33 bp, Homo sapien
agtagaataactaggaataaacagaatgactgt

SEQ ID NO: 796140 - DNA, 33 bp, Homo sapien
agtagaataactaggattaaacagaatgactgt

SEQ ID NO: 796141 - DNA, 33 bp, Homo sapien
aatggaggtaggaatgacatggctatctgatgg

SEQ ID NO: 796142 - DNA, 33 bp, Homo sapien
aatggaggtaggaatgccatggctatctgatgg

SEQ ID NO: 796143 - DNA, 33 bp, Homo sapien
tcatcaccataccccaacacctataatagtatc

SEQ ID NO: 796144 - DNA, 33 bp, Homo sapien
tcatcaccataccccagcacctataatagtatc

SEQ ID NO: 796145 - DNA, 33 bp, Homo sapien
tcaaaatgaagaactacaccatttatgcttaat

SEQ ID NO: 796146 - DNA, 33 bp, Homo sapien
tcaaaatgaagaactataccatttatgcttaat

SEQ ID NO: 796147 - DNA, 33 bp, Homo sapien
ctcatagtgcctctgaatactttagagccaggc

SEQ ID NO: 796148 - DNA, 33 bp, Homo sapien
ctcatagtgcctctgagtactttagagccaggc

SEQ ID NO: 796149 - DNA, 33 bp, Homo sapien
tttgtgctcctgtgaaatgtctctcagaagaat

SEQ ID NO: 796150 - DNA, 33 bp, Homo sapien
tttgtgctcctgtgaattgtctctcagaagaat

SEQ ID NO: 796151 - DNA, 33 bp, Homo sapien
tctcttgggcaagtgaataaagaaagaatagac

SEQ ID NO: 796152 - DNA, 33 bp, Homo sapien
tctcttgggcaagtgagtaaagaaagaatagac

SEQ ID NO: 796153 - DNA, 33 bp, Homo sapien
gtccccacttagtccacattttcttagaccact

SEQ ID NO: 796154 - DNA, 33 bp, Homo sapien
gtccccacttagtccatattttcttagaccact

SEQ ID NO: 796155 - DNA, 33 bp, Homo sapien
taattttctactgagacggcatagccttgctac

SEQ ID NO: 796156 - DNA, 33 bp, Homo sapien
taattttctactgagatggcatagccttgctac

SEQ ID NO: 796157 - DNA, 33 bp, Homo sapien
ctatggtttgaatgtacctcaaagtttacgcat

SEQ ID NO: 796158 - DNA, 33 bp, Homo sapien
ctatggtttgaatgtatctcaaagtttacgcat

SEQ ID NO: 796159 - DNA, 33 bp, Homo sapien
caaaccatatcacaaggagttgaagcaggaatg

SEQ ID NO: 796160 - DNA, 33 bp, Homo sapien
caaaccatatcacaagtagttgaagcaggaatg

SEQ ID NO: 796161 - DNA, 33 bp, Homo sapien
aaagcagtgactcaaaaagatatatggacaccc

SEQ ID NO: 796162 - DNA, 33 bp, Homo sapien
aaagcagtgactcaaagagatatatggacaccc

SEQ ID NO: 796163 - DNA, 33 bp, Homo sapien
attttaactaggcatcaatgagaaactaatcct

SEQ ID NO: 796164 - DNA, 33 bp, Homo sapien
attttaactaggcatcgatgagaaactaatcct

SEQ ID NO: 796165 - DNA, 33 bp, Homo sapien
tgagacagtagtgtcaagcagttaatgcacaaa

SEQ ID NO: 796166 - DNA, 33 bp, Homo sapien
tgagacagtagtgtcacgcagttaatgcacaaa

SEQ ID NO: 796167 - DNA, 33 bp, Homo sapien
ctggataatgtcacagactgagaactttcacca

SEQ ID NO: 796168 - DNA, 33 bp, Homo sapien
ctggataatgtcacaggctgagaactttcacca

SEQ ID NO: 796169 - DNA, 33 bp, Homo sapien
gaactaagactaagcacggtaattgtcatggca

SEQ ID NO: 796170 - DNA, 33 bp, Homo sapien
gaactaagactaagcatggtaattgtcatggca

SEQ ID NO: 796171 - DNA, 33 bp, Homo sapien
agcagtaaaacaaataccatatgttctcactta

SEQ ID NO: 796172 - DNA, 33 bp, Homo sapien
agcagtaaaacaaatagcatatgttctcactta

SEQ ID NO: 796173 - DNA, 33 bp, Homo sapien
ctaaactaaggactcacgacgatatctaaaata

SEQ ID NO: 796174 - DNA, 33 bp, Homo sapien
ctaaactaaggactcatgacgatatctaaaata

SEQ ID NO: 796175 - DNA, 33 bp, Homo sapien
tgccttaagggagcagaattgtggagtagagaa

SEQ ID NO: 796176 - DNA, 33 bp, Homo sapien
tgccttaagggagcaggattgtggagtagagaa

SEQ ID NO: 796177 - DNA, 33 bp, Homo sapien
agcctgaataacaactaaccactatgtatagac

SEQ ID NO: 796178 - DNA, 33 bp, Homo sapien
agcctgaataacaactgaccactatgtatagac

SEQ ID NO: 796179 - DNA, 33 bp, Homo sapien
tcaccaaaataagaccagaagtcactagccatg

SEQ ID NO: 796180 - DNA, 33 bp, Homo sapien
tcaccaaaataagacctgaagtcactagccatg

SEQ ID NO: 796181 - DNA, 33 bp, Homo sapien
agacccatatgttaaactgtatgcaaaaaatca

SEQ ID NO: 796182 - DNA, 33 bp, Homo sapien
agacccatatgttaaagtgtatgcaaaaaatca

SEQ ID NO: 796183 - DNA, 33 bp, Homo sapien
tatcttggtctgaaaaagcaagaaaaaggcatc

SEQ ID NO: 796184 - DNA, 33 bp, Homo sapien
tatcttggtctgaaaacgcaagaaaaaggcatc

SEQ ID NO: 796185 - DNA, 33 bp, Homo sapien
caaaacaggattccaaatgtggcagacaaatca

SEQ ID NO: 796186 - DNA, 33 bp, Homo sapien
caaaacaggattccaagtgtggcagacaaatca

SEQ ID NO: 796187 - DNA, 33 bp, Homo sapien
ttcaaatgagaagttcaatgccaattttatttt

SEQ ID NO: 796188 - DNA, 33 bp, Homo sapien
ttcaaatgagaagttcgatgccaattttatttt

SEQ ID NO: 796189 - DNA, 33 bp, Homo sapien
taccgactgagctaacaaggcactttagccata

SEQ ID NO: 796190 - DNA, 33 bp, Homo sapien
taccgactgagctaacgaggcactttagccata

SEQ ID NO: 796191 - DNA, 33 bp, Homo sapien
gacgggactgtttagggaagcaagcctgtgagt

SEQ ID NO: 796192 - DNA, 33 bp, Homo sapien
gacgggactgtttaggtaagcaagcctgtgagt

SEQ ID NO: 796193 - DNA, 33 bp, Homo sapien
acttactaatatcttcgaattgctgtaggatat

SEQ ID NO: 796194 - DNA, 33 bp, Homo sapien
acttactaatatcttctaattgctgtaggatat

SEQ ID NO: 796195 - DNA, 33 bp, Homo sapien
ttgccttgcattttgacaatagcttggtttagt

SEQ ID NO: 796196 - DNA, 33 bp, Homo sapien
ttgccttgcattttgataatagcttggtttagt

SEQ ID NO: 796197 - DNA, 33 bp, Homo sapien
tcattatttttcctacaccctcacatatttata

SEQ ID NO: 796198 - DNA, 33 bp, Homo sapien
tcattatttttcctacgccctcacatatttata

SEQ ID NO: 796199 - DNA, 33 bp, Homo sapien
tgaccaaaggagatagcccttgatgtttcctgt

SEQ ID NO: 796200 - DNA, 33 bp, Homo sapien
tgaccaaaggagatagtccttgatgtttcctgt

SEQ ID NO: 796201 - DNA, 33 bp, Homo sapien
actcagcatgacaagcaccatattttgtggtac

SEQ ID NO: 796202 - DNA, 33 bp, Homo sapien
actcagcatgacaagcgccatattttgtggtac

SEQ ID NO: 796203 - DNA, 33 bp, Homo sapien
tgcttagtcataactgaaaatctatagcaaagg

SEQ ID NO: 796204 - DNA, 33 bp, Homo sapien
tgcttagtcataactggaaatctatagcaaagg

SEQ ID NO: 796205 - DNA, 33 bp, Homo sapien
cagcaacccaattataactccttagttcacttg

SEQ ID NO: 796206 - DNA, 33 bp, Homo sapien
cagcaacccaattatatctccttagttcacttg

SEQ ID NO: 796207 - DNA, 33 bp, Homo sapien
atttggatacacgttcaaatatgcaccaattat

SEQ ID NO: 796208 - DNA, 33 bp, Homo sapien
atttggatacacgttcgaatatgcaccaattat

SEQ ID NO: 796209 - DNA, 33 bp, Homo sapien
caactgaactctttgaactctcagtggtaaaat

SEQ ID NO: 796210 - DNA, 33 bp, Homo sapien
caactgaactctttgacctctcagtggtaaaat

SEQ ID NO: 796211 - DNA, 33 bp, Homo sapien
gacacatagtaggcacaaattagctttattatt

SEQ ID NO: 796212 - DNA, 33 bp, Homo sapien
gacacatagtaggcacgaattagctttattatt

SEQ ID NO: 796213 - DNA, 33 bp, Homo sapien
gcttttctccatttaggcatcagttttattatg

SEQ ID NO: 796214 - DNA, 33 bp, Homo sapien
gcttttctccatttagtcatcagttttattatg

SEQ ID NO: 796215 - DNA, 33 bp, Homo sapien
tgaagggttcctttaacgcagatagtactatgg

SEQ ID NO: 796216 - DNA, 33 bp, Homo sapien
tgaagggttcctttaatgcagatagtactatgg

SEQ ID NO: 796217 - DNA, 33 bp, Homo sapien
ttacttatgctggatccaaatcctagacacaga

SEQ ID NO: 796218 - DNA, 33 bp, Homo sapien
ttacttatgctggatctaaatcctagacacaga

SEQ ID NO: 796219 - DNA, 33 bp, Homo sapien
gatgttagacacctgaaaaaactcttctgtgcc

SEQ ID NO: 796220 - DNA, 33 bp, Homo sapien
gatgttagacacctgagaaaactcttctgtgcc

SEQ ID NO: 796221 - DNA, 33 bp, Homo sapien
gcatagaaatctctaacggaaccaactctccac

SEQ ID NO: 796222 - DNA, 33 bp, Homo sapien
gcatagaaatctctaatggaaccaactctccac

SEQ ID NO: 796223 - DNA, 33 bp, Homo sapien
cagctttctgctaaagcctatgttcacacaaaa

SEQ ID NO: 796224 - DNA, 33 bp, Homo sapien
cagctttctgctaaaggctatgttcacacaaaa

SEQ ID NO: 796225 - DNA, 33 bp, Homo sapien
atgcctaagattcatcaacttttgtgtgaacat

SEQ ID NO: 796226 - DNA, 33 bp, Homo sapien
atgcctaagattcatcgacttttgtgtgaacat

SEQ ID NO: 796227 - DNA, 33 bp, Homo sapien
atcaaatttactacacaagctgcactgacattc

SEQ ID NO: 796228 - DNA, 33 bp, Homo sapien
atcaaatttactacacgagctgcactgacattc

SEQ ID NO: 796229 - DNA, 33 bp, Homo sapien
tgaaaacagctgttacagaaagatgattcaagg

SEQ ID NO: 796230 - DNA, 33 bp, Homo sapien
tgaaaacagctgttacggaaagatgattcaagg

SEQ ID NO: 796231 - DNA, 33 bp, Homo sapien
atcaagataatgtcaccgaaggcctctgggaaa

SEQ ID NO: 796232 - DNA, 33 bp, Homo sapien
atcaagataatgtcactgaaggcctctgggaaa

SEQ ID NO: 796233 - DNA, 33 bp, Homo sapien
cataagattttcatgaagtttaaagtaattctc

SEQ ID NO: 796234 - DNA, 33 bp, Homo sapien
cataagattttcatgaggtttaaagtaattctc

SEQ ID NO: 796235 - DNA, 33 bp, Homo sapien
catggatataagcaaacggatcatggtgcatag

SEQ ID NO: 796236 - DNA, 33 bp, Homo sapien
catggatataagcaaatggatcatggtgcatag

SEQ ID NO: 796237 - DNA, 33 bp, Homo sapien
aaatgaaagagaaacaagttgatttgggggctg

SEQ ID NO: 796238 - DNA, 33 bp, Homo sapien
aaatgaaagagaaacaggttgatttgggggctg

SEQ ID NO: 796239 - DNA, 33 bp, Homo sapien
tggacgcccccattagaacttgaactttgagtt

SEQ ID NO: 796240 - DNA, 33 bp, Homo sapien
tggacgcccccattagtacttgaactttgagtt

SEQ ID NO: 796241 - DNA, 33 bp, Homo sapien
gaaattgagggacataaaaggaaatatgccacc

SEQ ID NO: 796242 - DNA, 33 bp, Homo sapien
gaaattgagggacatagaaggaaatatgccacc

SEQ ID NO: 796243 - DNA, 33 bp, Homo sapien
aactgagactgaaacaagagcctaattagagaa

SEQ ID NO: 796244 - DNA, 33 bp, Homo sapien
aactgagactgaaacaggagcctaattagagaa

SEQ ID NO: 796245 - DNA, 33 bp, Homo sapien
caccaaggtgcagaaacactgactatggcacat

SEQ ID NO: 796246 - DNA, 33 bp, Homo sapien
caccaaggtgcagaaatactgactatggcacat

SEQ ID NO: 796247 - DNA, 33 bp, Homo sapien
ctgaaagtatttgtcaatcccttaatcacccat

SEQ ID NO: 796248 - DNA, 33 bp, Homo sapien
ctgaaagtatttgtcagtcccttaatcacccat

SEQ ID NO: 796249 - DNA, 33 bp, Homo sapien
agctgacagagtgccaacgatcaccgtggacaa

SEQ ID NO: 796250 - DNA, 33 bp, Homo sapien
agctgacagagtgccagcgatcaccgtggacaa

SEQ ID NO: 796251 - DNA, 33 bp, Homo sapien
ttccatgcaaacgacacgaaacagagagtggag

SEQ ID NO: 796252 - DNA, 33 bp, Homo sapien
ttccatgcaaacgacatgaaacagagagtggag

SEQ ID NO: 796253 - DNA, 33 bp, Homo sapien
gagttcaaagtgaatgacatggaaaatagataa

SEQ ID NO: 796254 - DNA, 33 bp, Homo sapien
gagttcaaagtgaatgccatggaaaatagataa

SEQ ID NO: 796255 - DNA, 33 bp, Homo sapien
acagccaaaagtttatcaacacgaacttgattc

SEQ ID NO: 796256 - DNA, 33 bp, Homo sapien
acagccaaaagtttatgaacacgaacttgattc

SEQ ID NO: 796257 - DNA, 33 bp, Homo sapien
ctgggcaggaatcgccaagtaaaaggaagacat

SEQ ID NO: 796258 - DNA, 33 bp, Homo sapien
ctgggcaggaatcgccgagtaaaaggaagacat

SEQ ID NO: 796259 - DNA, 33 bp, Homo sapien
aatggtgtaccaattaacaacattcacattata

SEQ ID NO: 796260 - DNA, 33 bp, Homo sapien
aatggtgtaccaattagcaacattcacattata

SEQ ID NO: 796261 - DNA, 33 bp, Homo sapien
aatgtttgtagcactgcagtattgtgtgaacac

SEQ ID NO: 796262 - DNA, 33 bp, Homo sapien
aatgtttgtagcactgtagtattgtgtgaacac

SEQ ID NO: 796263 - DNA, 33 bp, Homo sapien
atatatctacttagccaaaacaaatggttcaag

SEQ ID NO: 796264 - DNA, 33 bp, Homo sapien
atatatctacttagccgaaacaaatggttcaag

SEQ ID NO: 796265 - DNA, 33 bp, Homo sapien
cctattgtttagccaacagtagtggtggaatgt

SEQ ID NO: 796266 - DNA, 33 bp, Homo sapien
cctattgtttagccaagagtagtggtggaatgt

SEQ ID NO: 796267 - DNA, 33 bp, Homo sapien
tattttttcccagggacgtatctggcataaaat

SEQ ID NO: 796268 - DNA, 33 bp, Homo sapien
tattttttcccagggatgtatctggcataaaat

SEQ ID NO: 796269 - DNA, 33 bp, Homo sapien
ttggaaagtcagtaacaattctcctttaaactg

SEQ ID NO: 796270 - DNA, 33 bp, Homo sapien
ttggaaagtcagtaacgattctcctttaaactg

SEQ ID NO: 796271 - DNA, 33 bp, Homo sapien
tcatgaactgaattaacgtttgagaatgtcagt

SEQ ID NO: 796272 - DNA, 33 bp, Homo sapien
tcatgaactgaattaatgtttgagaatgtcagt

SEQ ID NO: 796273 - DNA, 33 bp, Homo sapien
aaactaacagcaatggcaaatcacatctctaac

SEQ ID NO: 796274 - DNA, 33 bp, Homo sapien
aaactaacagcaatgggaaatcacatctctaac

SEQ ID NO: 796275 - DNA, 33 bp, Homo sapien
gccagttagaagcctacaaaatggaaaagctca

SEQ ID NO: 796276 - DNA, 33 bp, Homo sapien
gccagttagaagcctagaaaatggaaaagctca

SEQ ID NO: 796277 - DNA, 33 bp, Homo sapien
aacaaactagagttaaaccattcaaaaaaggta

SEQ ID NO: 796278 - DNA, 33 bp, Homo sapien
aacaaactagagttaagccattcaaaaaaggta

SEQ ID NO: 796279 - DNA, 33 bp, Homo sapien
tttctccactttataaataatgcatcgttcctg

SEQ ID NO: 796280 - DNA, 33 bp, Homo sapien
tttctccactttataagtaatgcatcgttcctg

SEQ ID NO: 796281 - DNA, 33 bp, Homo sapien
aaatcattttgagaaccatatagaaacaagaga

SEQ ID NO: 796282 - DNA, 33 bp, Homo sapien
aaatcattttgagaacgatatagaaacaagaga

SEQ ID NO: 796283 - DNA, 33 bp, Homo sapien
tagaggaaatgcctaactgtgatagtgattttc

SEQ ID NO: 796284 - DNA, 33 bp, Homo sapien
tagaggaaatgcctaattgtgatagtgattttc

SEQ ID NO: 796285 - DNA, 33 bp, Homo sapien
aacactattggctataaattctgtcaatctagg

SEQ ID NO: 796286 - DNA, 33 bp, Homo sapien
aacactattggctatatattctgtcaatctagg

SEQ ID NO: 796287 - DNA, 33 bp, Homo sapien
attgtctctactaccaaacagtgagcgctagtt

SEQ ID NO: 796288 - DNA, 33 bp, Homo sapien
attgtctctactaccagacagtgagcgctagtt

SEQ ID NO: 796289 - DNA, 33 bp, Homo sapien
ctgtttaagttccttgaaacaaacatctaagta

SEQ ID NO: 796290 - DNA, 33 bp, Homo sapien
ctgtttaagttccttgcaacaaacatctaagta

SEQ ID NO: 796291 - DNA, 33 bp, Homo sapien
tatgagagaagaggaaaggcttcaaaaatacat

SEQ ID NO: 796292 - DNA, 33 bp, Homo sapien
tatgagagaagaggaagggcttcaaaaatacat

SEQ ID NO: 796293 - DNA, 33 bp, Homo sapien
gtgaaaatatttaagtaaaagttgccagtcaca

SEQ ID NO: 796294 - DNA, 33 bp, Homo sapien
gtgaaaatatttaagtgaaagttgccagtcaca

SEQ ID NO: 796295 - DNA, 33 bp, Homo sapien
gtcagatggaagagagaaatacatgaactgctc

SEQ ID NO: 796296 - DNA, 33 bp, Homo sapien
gtcagatggaagagaggaatacatgaactgctc

SEQ ID NO: 796297 - DNA, 33 bp, Homo sapien
acaaaacaaccccaacagtggtgaagaactata

SEQ ID NO: 796298 - DNA, 33 bp, Homo sapien
acaaaacaaccccaacggtggtgaagaactata

SEQ ID NO: 796299 - DNA, 33 bp, Homo sapien
gaaagtgtgttatatacatccattcaaaattat

SEQ ID NO: 796300 - DNA, 33 bp, Homo sapien
gaaagtgtgttatatatatccattcaaaattat

SEQ ID NO: 796301 - DNA, 33 bp, Homo sapien
ttcttcatcagtaaaacagaagtgttgatacca

SEQ ID NO: 796302 - DNA, 33 bp, Homo sapien
ttcttcatcagtaaaatagaagtgttgatacca

SEQ ID NO: 796303 - DNA, 33 bp, Homo sapien
tgcactgttgaggcacagaaaacagcaccacaa

SEQ ID NO: 796304 - DNA, 33 bp, Homo sapien
tgcactgttgaggcacggaaaacagcaccacaa

SEQ ID NO: 796305 - DNA, 33 bp, Homo sapien
ttggtttctaggtcaactgataagctggttctg

SEQ ID NO: 796306 - DNA, 33 bp, Homo sapien
ttggtttctaggtcaattgataagctggttctg

SEQ ID NO: 796307 - DNA, 33 bp, Homo sapien
gctgagggtctaactgcatatgttttaaatcag

SEQ ID NO: 796308 - DNA, 33 bp, Homo sapien
gctgagggtctaactggatatgttttaaatcag

SEQ ID NO: 796309 - DNA, 33 bp, Homo sapien
cctacacacaaactcaatcactatcccagacta

SEQ ID NO: 796310 - DNA, 33 bp, Homo sapien
cctacacacaaactcagtcactatcccagacta

SEQ ID NO: 796311 - DNA, 33 bp, Homo sapien
caggattccttgtctcaacaaattgcaatacta

SEQ ID NO: 796312 - DNA, 33 bp, Homo sapien
caggattccttgtctccacaaattgcaatacta

SEQ ID NO: 796313 - DNA, 33 bp, Homo sapien
agatctgtgtccaggaaagaaaggcttgtcttt

SEQ ID NO: 796314 - DNA, 33 bp, Homo sapien
agatctgtgtccaggagagaaaggcttgtcttt

SEQ ID NO: 796315 - DNA, 33 bp, Homo sapien
gagtaagctggaatacaggttgaagcagtttgg

SEQ ID NO: 796316 - DNA, 33 bp, Homo sapien
gagtaagctggaatacgggttgaagcagtttgg

SEQ ID NO: 796317 - DNA, 33 bp, Homo sapien
tgtgacattttatgtacatttgatgtaactgtt

SEQ ID NO: 796318 - DNA, 33 bp, Homo sapien
tgtgacattttatgtatatttgatgtaactgtt

SEQ ID NO: 796319 - DNA, 33 bp, Homo sapien
atacggaaaataaggcaagccatatggaaaatg

SEQ ID NO: 796320 - DNA, 33 bp, Homo sapien
atacggaaaataaggcgagccatatggaaaatg

SEQ ID NO: 796321 - DNA, 33 bp, Homo sapien
gtacttagtactttaaagcagcacttttcaaat

SEQ ID NO: 796322 - DNA, 33 bp, Homo sapien
gtacttagtactttaaggcagcacttttcaaat

SEQ ID NO: 796323 - DNA, 33 bp, Homo sapien
aaaagttactaatgaacttcaaaggcaattttt

SEQ ID NO: 796324 - DNA, 33 bp, Homo sapien
aaaagttactaatgaagttcaaaggcaattttt

SEQ ID NO: 796325 - DNA, 33 bp, Homo sapien
aatctaataaaaaaaactcaagaagtcaggtgg

SEQ ID NO: 796326 - DNA, 33 bp, Homo sapien
aatctaataaaaaaaattcaagaagtcaggtgg

SEQ ID NO: 796327 - DNA, 33 bp, Homo sapien
catgtgagtatcaaaacagctcagcgttgtctg

SEQ ID NO: 796328 - DNA, 33 bp, Homo sapien
catgtgagtatcaaaatagctcagcgttgtctg

SEQ ID NO: 796329 - DNA, 33 bp, Homo sapien
gaagaaagatttcagacgcactatccggtcaga

SEQ ID NO: 796330 - DNA, 33 bp, Homo sapien
gaagaaagatttcagatgcactatccggtcaga

SEQ ID NO: 796331 - DNA, 33 bp, Homo sapien
ttttttatttgttttccatgacacagcctccgg

SEQ ID NO: 796332 - DNA, 33 bp, Homo sapien
ttttttatttgttttctatgacacagcctccgg

SEQ ID NO: 796333 - DNA, 33 bp, Homo sapien
tgggagtgcatctggaagtgtcagaccgtgccc

SEQ ID NO: 796334 - DNA, 33 bp, Homo sapien
tgggagtgcatctggaggtgtcagaccgtgccc

SEQ ID NO: 796335 - DNA, 33 bp, Homo sapien
gcttcatcgtacaccaacaatatcttccagtat

SEQ ID NO: 796336 - DNA, 33 bp, Homo sapien
gcttcatcgtacaccagcaatatcttccagtat

SEQ ID NO: 796337 - DNA, 33 bp, Homo sapien
ctagcctatcttgtctaacacaaatgaagattg

SEQ ID NO: 796338 - DNA, 33 bp, Homo sapien
ctagcctatcttgtctgacacaaatgaagattg

SEQ ID NO: 796339 - DNA, 33 bp, Homo sapien
actctcccaggtcaagacaggatggcagactgg

SEQ ID NO: 796340 - DNA, 33 bp, Homo sapien
actctcccaggtcaagtcaggatggcagactgg

SEQ ID NO: 796341 - DNA, 33 bp, Homo sapien
cgaggtgccagctaacagatgcagagaggaaaa

SEQ ID NO: 796342 - DNA, 33 bp, Homo sapien
cgaggtgccagctaactgatgcagagaggaaaa

SEQ ID NO: 796343 - DNA, 33 bp, Homo sapien
aaataactgcttttggccaaagtatcaacgtct

SEQ ID NO: 796344 - DNA, 33 bp, Homo sapien
aaataactgcttttggtcaaagtatcaacgtct

SEQ ID NO: 796345 - DNA, 33 bp, Homo sapien
ttaactgtataactgacgtaaggatttctggat

SEQ ID NO: 796346 - DNA, 33 bp, Homo sapien
ttaactgtataactgatgtaaggatttctggat

SEQ ID NO: 796347 - DNA, 33 bp, Homo sapien
ccattctcaacaaagccgagacaggtatgcatt

SEQ ID NO: 796348 - DNA, 33 bp, Homo sapien
ccattctcaacaaagctgagacaggtatgcatt

SEQ ID NO: 796349 - DNA, 33 bp, Homo sapien
ttttctgctccagggacatgctagaatctgctg

SEQ ID NO: 796350 - DNA, 33 bp, Homo sapien
ttttctgctccagggatatgctagaatctgctg

SEQ ID NO: 796351 - DNA, 33 bp, Homo sapien
tttgggtccattcagcacaatcttcctcattct

SEQ ID NO: 796352 - DNA, 33 bp, Homo sapien
tttgggtccattcagcgcaatcttcctcattct

SEQ ID NO: 796353 - DNA, 33 bp, Homo sapien
tagttcataggtagtcggactaaaatgagggga

SEQ ID NO: 796354 - DNA, 33 bp, Homo sapien
tagttcataggtagtctgactaaaatgagggga

SEQ ID NO: 796355 - DNA, 33 bp, Homo sapien
attgttctatattaccaaatcattattttgttc

SEQ ID NO: 796356 - DNA, 33 bp, Homo sapien
attgttctatattaccgaatcattattttgttc

SEQ ID NO: 796357 - DNA, 33 bp, Homo sapien
tcatactaaatctatacctttgctcaggtcatt

SEQ ID NO: 796358 - DNA, 33 bp, Homo sapien
tcatactaaatctatatctttgctcaggtcatt

SEQ ID NO: 796359 - DNA, 33 bp, Homo sapien
cgtttatcttccaagcactaatattaaaatgta

SEQ ID NO: 796360 - DNA, 33 bp, Homo sapien
cgtttatcttccaagcgctaatattaaaatgta

SEQ ID NO: 796361 - DNA, 33 bp, Homo sapien
ctagaagatggaactgaaaaaggactctaggac

SEQ ID NO: 796362 - DNA, 33 bp, Homo sapien
ctagaagatggaactgcaaaaggactctaggac

SEQ ID NO: 796363 - DNA, 33 bp, Homo sapien
actgagttctgagagacgaaatgactttaagtt

SEQ ID NO: 796364 - DNA, 33 bp, Homo sapien
actgagttctgagagatgaaatgactttaagtt

SEQ ID NO: 796365 - DNA, 33 bp, Homo sapien
cctttgcaatcacttgaaagactttttggctgt

SEQ ID NO: 796366 - DNA, 33 bp, Homo sapien
cctttgcaatcacttggaagactttttggctgt

SEQ ID NO: 796367 - DNA, 33 bp, Homo sapien
atcctaaaataaattaaactggcatgacagcaa

SEQ ID NO: 796368 - DNA, 33 bp, Homo sapien
atcctaaaataaattagactggcatgacagcaa

SEQ ID NO: 796369 - DNA, 33 bp, Homo sapien
aagtgaagcggatacaggttcacctgggtctac

SEQ ID NO: 796370 - DNA, 33 bp, Homo sapien
aagtgaagcggatacatgttcacctgggtctac

SEQ ID NO: 796371 - DNA, 33 bp, Homo sapien
gattctaaaactctaaagaatgatgcctgttga

SEQ ID NO: 796372 - DNA, 33 bp, Homo sapien
gattctaaaactctaaggaatgatgcctgttga

SEQ ID NO: 796373 - DNA, 33 bp, Homo sapien
atatacattgggtacaacacagtatttggttta

SEQ ID NO: 796374 - DNA, 33 bp, Homo sapien
atatacattgggtacatcacagtatttggttta

SEQ ID NO: 796375 - DNA, 33 bp, Homo sapien
tgaatctgactgatgcaaggtccttgactcaat

SEQ ID NO: 796376 - DNA, 33 bp, Homo sapien
tgaatctgactgatgcgaggtccttgactcaat

SEQ ID NO: 796377 - DNA, 33 bp, Homo sapien
agggctggaacatttcacaataagattatactt

SEQ ID NO: 796378 - DNA, 33 bp, Homo sapien
agggctggaacatttcccaataagattatactt

SEQ ID NO: 796379 - DNA, 33 bp, Homo sapien
ttctttgaaaatgccaccttgaagagaaaacct

SEQ ID NO: 796380 - DNA, 33 bp, Homo sapien
ttctttgaaaatgccatcttgaagagaaaacct

SEQ ID NO: 796381 - DNA, 33 bp, Homo sapien
atagactggacactaaaatgtactaagagagaa

SEQ ID NO: 796382 - DNA, 33 bp, Homo sapien
atagactggacactaagatgtactaagagagaa

SEQ ID NO: 796383 - DNA, 33 bp, Homo sapien
tgttaatgtattttacaagtgccccaagacaat

SEQ ID NO: 796384 - DNA, 33 bp, Homo sapien
tgttaatgtattttacgagtgccccaagacaat

SEQ ID NO: 796385 - DNA, 33 bp, Homo sapien
ctgaaggagctcagtacattggcctggaattat

SEQ ID NO: 796386 - DNA, 33 bp, Homo sapien
ctgaaggagctcagtatattggcctggaattat

SEQ ID NO: 796387 - DNA, 33 bp, Homo sapien
gaccataaatctgtcaacctgccactattcctt

SEQ ID NO: 796388 - DNA, 33 bp, Homo sapien
gaccataaatctgtcaccctgccactattcctt

SEQ ID NO: 796389 - DNA, 33 bp, Homo sapien
caaaggtgtgtcagtgaatgcttaggcagcaaa

SEQ ID NO: 796390 - DNA, 33 bp, Homo sapien
caaaggtgtgtcagtggatgcttaggcagcaaa

SEQ ID NO: 796391 - DNA, 33 bp, Homo sapien
cacacctttggcaataatacccagatattctct

SEQ ID NO: 796392 - DNA, 33 bp, Homo sapien
cacacctttggcaatagtacccagatattctct

SEQ ID NO: 796393 - DNA, 33 bp, Homo sapien
aggatgcagagttttaaaagtcctgtaggtgat

SEQ ID NO: 796394 - DNA, 33 bp, Homo sapien
aggatgcagagttttacaagtcctgtaggtgat

SEQ ID NO: 796395 - DNA, 33 bp, Homo sapien
tgggaggattttataaaaaactgccctgtgaag

SEQ ID NO: 796396 - DNA, 33 bp, Homo sapien
tgggaggattttataagaaactgccctgtgaag

SEQ ID NO: 796397 - DNA, 33 bp, Homo sapien
tagcaaatcgtccaaaaaagatactaagagatt

SEQ ID NO: 796398 - DNA, 33 bp, Homo sapien
tagcaaatcgtccaaagaagatactaagagatt

SEQ ID NO: 796399 - DNA, 33 bp, Homo sapien
caatcaattttatgtaagtgcttgctaaacaat

SEQ ID NO: 796400 - DNA, 33 bp, Homo sapien
caatcaattttatgtacgtgcttgctaaacaat

SEQ ID NO: 796401 - DNA, 33 bp, Homo sapien
ttttatccacaacaatcactttaactcaacatg

SEQ ID NO: 796402 - DNA, 33 bp, Homo sapien
ttttatccacaacaatgactttaactcaacatg

SEQ ID NO: 796403 - DNA, 33 bp, Homo sapien
ttcagggcttgggtaggcaccacataattatgt

SEQ ID NO: 796404 - DNA, 33 bp, Homo sapien
ttcagggcttgggtagtcaccacataattatgt

SEQ ID NO: 796405 - DNA, 33 bp, Homo sapien
tctgtcttagatcatcaagagtacaacttttga

SEQ ID NO: 796406 - DNA, 33 bp, Homo sapien
tctgtcttagatcatcgagagtacaacttttga

SEQ ID NO: 796407 - DNA, 33 bp, Homo sapien
ggaatagaggtgagaacatcaaggagaagggta

SEQ ID NO: 796408 - DNA, 33 bp, Homo sapien
ggaatagaggtgagaatatcaaggagaagggta

SEQ ID NO: 796409 - DNA, 33 bp, Homo sapien
cacagactaacacacaaggtagtcattcctttt

SEQ ID NO: 796410 - DNA, 33 bp, Homo sapien
cacagactaacacacagggtagtcattcctttt

SEQ ID NO: 796411 - DNA, 33 bp, Homo sapien
tgccaaaatatgtcctcaagatgtggtttaaca

SEQ ID NO: 796412 - DNA, 33 bp, Homo sapien
tgccaaaatatgtccttaagatgtggtttaaca

SEQ ID NO: 796413 - DNA, 33 bp, Homo sapien
cctatggaaatcctaactgagtatctgttaatg

SEQ ID NO: 796414 - DNA, 33 bp, Homo sapien
cctatggaaatcctaattgagtatctgttaatg

SEQ ID NO: 796415 - DNA, 33 bp, Homo sapien
ataagatcatcttttacaagagggctaagcctt

SEQ ID NO: 796416 - DNA, 33 bp, Homo sapien
ataagatcatcttttagaagagggctaagcctt

SEQ ID NO: 796417 - DNA, 33 bp, Homo sapien
gacacagctgttttacaattcgctagagagttt

SEQ ID NO: 796418 - DNA, 33 bp, Homo sapien
gacacagctgttttactattcgctagagagttt

SEQ ID NO: 796419 - DNA, 33 bp, Homo sapien
gggtgatttaccggcacatgtaaacaaaccaag

SEQ ID NO: 796420 - DNA, 33 bp, Homo sapien
gggtgatttaccggcagatgtaaacaaaccaag

SEQ ID NO: 796421 - DNA, 33 bp, Homo sapien
ttaaaggaatatctcactactggaaaggagtga

SEQ ID NO: 796422 - DNA, 33 bp, Homo sapien
ttaaaggaatatctcattactggaaaggagtga

SEQ ID NO: 796423 - DNA, 33 bp, Homo sapien
gatttcagaacttcccacaaggataagcatctg

SEQ ID NO: 796424 - DNA, 33 bp, Homo sapien
gatttcagaacttcccgcaaggataagcatctg

SEQ ID NO: 796425 - DNA, 33 bp, Homo sapien
tccaatattcaaggtaacttttctggttcttac

SEQ ID NO: 796426 - DNA, 33 bp, Homo sapien
tccaatattcaaggtagcttttctggttcttac

SEQ ID NO: 796427 - DNA, 33 bp, Homo sapien
ggcttgccaaccttgaagctttatgattaagcc

SEQ ID NO: 796428 - DNA, 33 bp, Homo sapien
ggcttgccaaccttgaggctttatgattaagcc

SEQ ID NO: 796429 - DNA, 33 bp, Homo sapien
cctaaactcagatgtacatggaaaacggaattg

SEQ ID NO: 796430 - DNA, 33 bp, Homo sapien
cctaaactcagatgtatatggaaaacggaattg

SEQ ID NO: 796431 - DNA, 33 bp, Homo sapien
tgttttcagcttctgaccttcaaaagtgggtta

SEQ ID NO: 796432 - DNA, 33 bp, Homo sapien
tgttttcagcttctgatcttcaaaagtgggtta

SEQ ID NO: 796433 - DNA, 33 bp, Homo sapien
gatgatattgtttacaaagtttgaaggtcacat

SEQ ID NO: 796434 - DNA, 33 bp, Homo sapien
gatgatattgtttacatagtttgaaggtcacat

SEQ ID NO: 796435 - DNA, 33 bp, Homo sapien
cacttctacctagaccactgctttttattagaa

SEQ ID NO: 796436 - DNA, 33 bp, Homo sapien
cacttctacctagaccgctgctttttattagaa

SEQ ID NO: 796437 - DNA, 33 bp, Homo sapien
tgtctggatagaagtaaaaaccagccacaacat

SEQ ID NO: 796438 - DNA, 33 bp, Homo sapien
tgtctggatagaagtacaaaccagccacaacat

SEQ ID NO: 796439 - DNA, 33 bp, Homo sapien
cgcatatatacagacaaacgtataagcatgagt

SEQ ID NO: 796440 - DNA, 33 bp, Homo sapien
cgcatatatacagacacacgtataagcatgagt

SEQ ID NO: 796441 - DNA, 33 bp, Homo sapien
acatggatggccactacagtaatttcctaaaac

SEQ ID NO: 796442 - DNA, 33 bp, Homo sapien
acatggatggccactatagtaatttcctaaaac

SEQ ID NO: 796443 - DNA, 33 bp, Homo sapien
tgggacaagacttccacggacttacatatttac

SEQ ID NO: 796444 - DNA, 33 bp, Homo sapien
tgggacaagacttccatggacttacatatttac

SEQ ID NO: 796445 - DNA, 33 bp, Homo sapien
gttcagcaattacaccagaacagagtaaatatt

SEQ ID NO: 796446 - DNA, 33 bp, Homo sapien
gttcagcaattacaccggaacagagtaaatatt

SEQ ID NO: 796447 - DNA, 33 bp, Homo sapien
aaaaaatcatagccacagaattttttgacatct

SEQ ID NO: 796448 - DNA, 33 bp, Homo sapien
aaaaaatcatagccacggaattttttgacatct

SEQ ID NO: 796449 - DNA, 33 bp, Homo sapien
aacaaacccttgtgcaccaccaggaagaaaaac

SEQ ID NO: 796450 - DNA, 33 bp, Homo sapien
aacaaacccttgtgcatcaccaggaagaaaaac

SEQ ID NO: 796451 - DNA, 33 bp, Homo sapien
tctatgcttatctgaaaatgaatcagtatggac

SEQ ID NO: 796452 - DNA, 33 bp, Homo sapien
tctatgcttatctgaagatgaatcagtatggac

SEQ ID NO: 796453 - DNA, 33 bp, Homo sapien
ctggagcttgctggagccagcacatatgtccaa

SEQ ID NO: 796454 - DNA, 33 bp, Homo sapien
ctggagcttgctggagtcagcacatatgtccaa

SEQ ID NO: 796455 - DNA, 33 bp, Homo sapien
aagaaagcatcagcccaaaggttacaattgctg

SEQ ID NO: 796456 - DNA, 33 bp, Homo sapien
aagaaagcatcagcccgaaggttacaattgctg

SEQ ID NO: 796457 - DNA, 33 bp, Homo sapien
ctaggagactatttgggatcagactttacctgg

SEQ ID NO: 796458 - DNA, 33 bp, Homo sapien
ctaggagactatttggtatcagactttacctgg

SEQ ID NO: 796459 - DNA, 33 bp, Homo sapien
gtggtggggtagtgaaactctggagtcaatatc

SEQ ID NO: 796460 - DNA, 33 bp, Homo sapien
gtggtggggtagtgaacctctggagtcaatatc

SEQ ID NO: 796461 - DNA, 33 bp, Homo sapien
cctggggttgacactaataagctgtgaaagaat

SEQ ID NO: 796462 - DNA, 33 bp, Homo sapien
cctggggttgacactattaagctgtgaaagaat

SEQ ID NO: 796463 - DNA, 33 bp, Homo sapien
gtcttctgtcattgcacacccgagtggcttcat

SEQ ID NO: 796464 - DNA, 33 bp, Homo sapien
gtcttctgtcattgcatacccgagtggcttcat

SEQ ID NO: 796465 - DNA, 33 bp, Homo sapien
tgcaatttgaaagctacgtgtatcaattgactt

SEQ ID NO: 796466 - DNA, 33 bp, Homo sapien
tgcaatttgaaagctatgtgtatcaattgactt

SEQ ID NO: 796467 - DNA, 33 bp, Homo sapien
aatcagaagtcagagaaaactttcataaatatc

SEQ ID NO: 796468 - DNA, 33 bp, Homo sapien
aatcagaagtcagagagaactttcataaatatc

SEQ ID NO: 796469 - DNA, 33 bp, Homo sapien
aacagctatctaaccccaatgcctgtgtccttg

SEQ ID NO: 796470 - DNA, 33 bp, Homo sapien
aacagctatctaaccctaatgcctgtgtccttg

SEQ ID NO: 796471 - DNA, 33 bp, Homo sapien
atgacctttatagatcagaatcatggagggcaa

SEQ ID NO: 796472 - DNA, 33 bp, Homo sapien
atgacctttatagatctgaatcatggagggcaa

SEQ ID NO: 796473 - DNA, 33 bp, Homo sapien
gcatatctctattgaccagtgatgatgagattt

SEQ ID NO: 796474 - DNA, 33 bp, Homo sapien
gcatatctctattgacgagtgatgatgagattt

SEQ ID NO: 796475 - DNA, 33 bp, Homo sapien
tcaagcaacaattaaactattggaggcataata

SEQ ID NO: 796476 - DNA, 33 bp, Homo sapien
tcaagcaacaattaaagtattggaggcataata

SEQ ID NO: 796477 - DNA, 33 bp, Homo sapien
ctttatattcatctgccgacatgtgccaggcag

SEQ ID NO: 796478 - DNA, 33 bp, Homo sapien
ctttatattcatctgctgacatgtgccaggcag

SEQ ID NO: 796479 - DNA, 33 bp, Homo sapien
aatgcataatgttggacgggaaatgtaatatca

SEQ ID NO: 796480 - DNA, 33 bp, Homo sapien
aatgcataatgttggatgggaaatgtaatatca

SEQ ID NO: 796481 - DNA, 33 bp, Homo sapien
atatcaagaattgaggaaaaatgtatgtgtaag

SEQ ID NO: 796482 - DNA, 33 bp, Homo sapien
atatcaagaattgaggcaaaatgtatgtgtaag

SEQ ID NO: 796483 - DNA, 33 bp, Homo sapien
atctggtgagccctaaaagcctttcccacaagt

SEQ ID NO: 796484 - DNA, 33 bp, Homo sapien
atctggtgagccctaagagcctttcccacaagt

SEQ ID NO: 796485 - DNA, 33 bp, Homo sapien
tccacatgctgtgtacaaagtgtactgctaggc

SEQ ID NO: 796486 - DNA, 33 bp, Homo sapien
tccacatgctgtgtacgaagtgtactgctaggc

SEQ ID NO: 796487 - DNA, 33 bp, Homo sapien
cacacctggaattaggaatcaccaatatgagaa

SEQ ID NO: 796488 - DNA, 33 bp, Homo sapien
cacacctggaattagggatcaccaatatgagaa

SEQ ID NO: 796489 - DNA, 33 bp, Homo sapien
gctatggtgccatagccaagatcatcctaaaaa

SEQ ID NO: 796490 - DNA, 33 bp, Homo sapien
gctatggtgccatagcgaagatcatcctaaaaa

SEQ ID NO: 796491 - DNA, 33 bp, Homo sapien
gttctctaatcacaccactatcattgtatccct

SEQ ID NO: 796492 - DNA, 33 bp, Homo sapien
gttctctaatcacaccgctatcattgtatccct

SEQ ID NO: 796493 - DNA, 33 bp, Homo sapien
gtgggagacaggataacccagtgtaagaaacaa

SEQ ID NO: 796494 - DNA, 33 bp, Homo sapien
gtgggagacaggataatccagtgtaagaaacaa

SEQ ID NO: 796495 - DNA, 33 bp, Homo sapien
ttatacagatgctagtaaagaagtcataataat

SEQ ID NO: 796496 - DNA, 33 bp, Homo sapien
ttatacagatgctagtgaagaagtcataataat

SEQ ID NO: 796497 - DNA, 33 bp, Homo sapien
cctggaagactttttcacctggagaagatgtga

SEQ ID NO: 796498 - DNA, 33 bp, Homo sapien
cctggaagactttttcgcctggagaagatgtga

SEQ ID NO: 796499 - DNA, 33 bp, Homo sapien
agaattttcatggatgccatactactttctttg

SEQ ID NO: 796500 - DNA, 33 bp, Homo sapien
agaattttcatggatgtcatactactttctttg

SEQ ID NO: 796501 - DNA, 33 bp, Homo sapien
gtataagccagatgcaataattgtgtgtatata

SEQ ID NO: 796502 - DNA, 33 bp, Homo sapien
gtataagccagatgcagtaattgtgtgtatata

SEQ ID NO: 796503 - DNA, 33 bp, Homo sapien
gttgcaaaacctgttgcacagatccgtggaaac

SEQ ID NO: 796504 - DNA, 33 bp, Homo sapien
gttgcaaaacctgttgtacagatccgtggaaac

SEQ ID NO: 796505 - DNA, 33 bp, Homo sapien
taacacattcaaactaaactgtcctgtgttatc

SEQ ID NO: 796506 - DNA, 33 bp, Homo sapien
taacacattcaaactagactgtcctgtgttatc

SEQ ID NO: 796507 - DNA, 33 bp, Homo sapien
tcaacctctcaataaaactgaacactcatgaaa

SEQ ID NO: 796508 - DNA, 33 bp, Homo sapien
tcaacctctcaataaacctgaacactcatgaaa

SEQ ID NO: 796509 - DNA, 33 bp, Homo sapien
aatgagtccataactaaacttgataaagacaac

SEQ ID NO: 796510 - DNA, 33 bp, Homo sapien
aatgagtccataactagacttgataaagacaac

SEQ ID NO: 796511 - DNA, 33 bp, Homo sapien
aatcattaatcattacccagttaaaacaagttt

SEQ ID NO: 796512 - DNA, 33 bp, Homo sapien
aatcattaatcattactcagttaaaacaagttt

SEQ ID NO: 796513 - DNA, 33 bp, Homo sapien
ggtctttcatgtgtcacgggttataatgctcaa

SEQ ID NO: 796514 - DNA, 33 bp, Homo sapien
ggtctttcatgtgtcaggggttataatgctcaa

SEQ ID NO: 796515 - DNA, 33 bp, Homo sapien
cagaactctctacctacaagcagaagattaaaa

SEQ ID NO: 796516 - DNA, 33 bp, Homo sapien
cagaactctctacctataagcagaagattaaaa

SEQ ID NO: 796517 - DNA, 33 bp, Homo sapien
cacttcataattattaacacttcatgatatcag

SEQ ID NO: 796518 - DNA, 33 bp, Homo sapien
cacttcataattattaccacttcatgatatcag

SEQ ID NO: 796519 - DNA, 33 bp, Homo sapien
agcgtaagtttatttcacattgaagggcatgaa

SEQ ID NO: 796520 - DNA, 33 bp, Homo sapien
agcgtaagtttatttcccattgaagggcatgaa

SEQ ID NO: 796521 - DNA, 33 bp, Homo sapien
agcaccttctgttagcaacacggtgccagtctc

SEQ ID NO: 796522 - DNA, 33 bp, Homo sapien
agcaccttctgttagctacacggtgccagtctc

SEQ ID NO: 796523 - DNA, 33 bp, Homo sapien
caggtcacatagtgcaaagcctcagtccagatt

SEQ ID NO: 796524 - DNA, 33 bp, Homo sapien
caggtcacatagtgcacagcctcagtccagatt

SEQ ID NO: 796525 - DNA, 33 bp, Homo sapien
ctaacaggtaagcagaactttggaatccatatg

SEQ ID NO: 796526 - DNA, 33 bp, Homo sapien
ctaacaggtaagcagacctttggaatccatatg

SEQ ID NO: 796527 - DNA, 33 bp, Homo sapien
tgtagagtcctcttaccgagtgaacactgagtg

SEQ ID NO: 796528 - DNA, 33 bp, Homo sapien
tgtagagtcctcttactgagtgaacactgagtg

SEQ ID NO: 796529 - DNA, 33 bp, Homo sapien
gaagatcacttttaagcattggcagaagaaata

SEQ ID NO: 796530 - DNA, 33 bp, Homo sapien
gaagatcacttttaagtattggcagaagaaata

SEQ ID NO: 796531 - DNA, 33 bp, Homo sapien
agctttatttgccttaactctgccctatgccac

SEQ ID NO: 796532 - DNA, 33 bp, Homo sapien
agctttatttgccttacctctgccctatgccac

SEQ ID NO: 796533 - DNA, 33 bp, Homo sapien
atttaataatgaagaaccacactatatccaact

SEQ ID NO: 796534 - DNA, 33 bp, Homo sapien
atttaataatgaagaatcacactatatccaact

SEQ ID NO: 796535 - DNA, 33 bp, Homo sapien
agtaggagaactaaaaaaggaattcatggtgag

SEQ ID NO: 796536 - DNA, 33 bp, Homo sapien
agtaggagaactaaaagaggaattcatggtgag

SEQ ID NO: 796537 - DNA, 33 bp, Homo sapien
ggattgctggattaaacggcagatctacttttg

SEQ ID NO: 796538 - DNA, 33 bp, Homo sapien
ggattgctggattaaatggcagatctacttttg

SEQ ID NO: 796539 - DNA, 33 bp, Homo sapien
cttaatcttcattgtacctgtaatcatctgata

SEQ ID NO: 796540 - DNA, 33 bp, Homo sapien
cttaatcttcattgtatctgtaatcatctgata

SEQ ID NO: 796541 - DNA, 33 bp, Homo sapien
gtaaagaagtagtagtaaaatcagaagacagtg

SEQ ID NO: 796542 - DNA, 33 bp, Homo sapien
gtaaagaagtagtagtgaaatcagaagacagtg

SEQ ID NO: 796543 - DNA, 33 bp, Homo sapien
aaactagctttgcaatcaactatgttacaactc

SEQ ID NO: 796544 - DNA, 33 bp, Homo sapien
aaactagctttgcaatgaactatgttacaactc

SEQ ID NO: 796545 - DNA, 33 bp, Homo sapien
atcacctcaaagggataatcagatgcccatatt

SEQ ID NO: 796546 - DNA, 33 bp, Homo sapien
atcacctcaaagggatgatcagatgcccatatt

SEQ ID NO: 796547 - DNA, 33 bp, Homo sapien
tttgtctgtctcataacgaactgctaatgacat

SEQ ID NO: 796548 - DNA, 33 bp, Homo sapien
tttgtctgtctcataatgaactgctaatgacat

SEQ ID NO: 796549 - DNA, 33 bp, Homo sapien
gtgctgttctttgccaatcagaaattagctgca

SEQ ID NO: 796550 - DNA, 33 bp, Homo sapien
gtgctgttctttgccagtcagaaattagctgca

SEQ ID NO: 796551 - DNA, 33 bp, Homo sapien
tggcctggggtatgcccgctattacctttgctt

SEQ ID NO: 796552 - DNA, 33 bp, Homo sapien
tggcctggggtatgcctgctattacctttgctt

SEQ ID NO: 796553 - DNA, 33 bp, Homo sapien
acaaatgtactgaacacgctaaggtgaaatgat

SEQ ID NO: 796554 - DNA, 33 bp, Homo sapien
acaaatgtactgaacatgctaaggtgaaatgat

SEQ ID NO: 796555 - DNA, 33 bp, Homo sapien
ctttgctccacaaagcaaaggttgagacccaca

SEQ ID NO: 796556 - DNA, 33 bp, Homo sapien
ctttgctccacaaagcgaaggttgagacccaca

SEQ ID NO: 796557 - DNA, 33 bp, Homo sapien
ctgaacaccatggttgcattaagaatgtgatat

SEQ ID NO: 796558 - DNA, 33 bp, Homo sapien
ctgaacaccatggttgtattaagaatgtgatat

SEQ ID NO: 796559 - DNA, 33 bp, Homo sapien
aagatggagagagttaacaacctctgtcttcaa

SEQ ID NO: 796560 - DNA, 33 bp, Homo sapien
aagatggagagagttaccaacctctgtcttcaa

SEQ ID NO: 796561 - DNA, 33 bp, Homo sapien
ctttggtaagatttggaatgacttcactgtcac

SEQ ID NO: 796562 - DNA, 33 bp, Homo sapien
ctttggtaagatttggcatgacttcactgtcac

SEQ ID NO: 796563 - DNA, 33 bp, Homo sapien
cgttagaaaaaccacaataaaatgctggtgctt

SEQ ID NO: 796564 - DNA, 33 bp, Homo sapien
cgttagaaaaaccacactaaaatgctggtgctt

SEQ ID NO: 796565 - DNA, 33 bp, Homo sapien
tcactaagctctattaccacttggctacccatt

SEQ ID NO: 796566 - DNA, 33 bp, Homo sapien
tcactaagctctattatcacttggctacccatt

SEQ ID NO: 796567 - DNA, 33 bp, Homo sapien
atttgcatgattaaaaaaagagggttggatact

SEQ ID NO: 796568 - DNA, 33 bp, Homo sapien
atttgcatgattaaaagaagagggttggatact

SEQ ID NO: 796569 - DNA, 33 bp, Homo sapien
taaaattgattatacactgacagttaatcggtg

SEQ ID NO: 796570 - DNA, 33 bp, Homo sapien
taaaattgattatacattgacagttaatcggtg

SEQ ID NO: 796571 - DNA, 33 bp, Homo sapien
taggcacatggggctacgaaaatgggaatgagg

SEQ ID NO: 796572 - DNA, 33 bp, Homo sapien
taggcacatggggctatgaaaatgggaatgagg

SEQ ID NO: 796573 - DNA, 33 bp, Homo sapien
actggaaagtggctgaaagttgtttctagggaa

SEQ ID NO: 796574 - DNA, 33 bp, Homo sapien
actggaaagtggctgacagttgtttctagggaa

SEQ ID NO: 796575 - DNA, 33 bp, Homo sapien
tgatggttccacaagacagaggcatgacaatag

SEQ ID NO: 796576 - DNA, 33 bp, Homo sapien
tgatggttccacaagagagaggcatgacaatag

SEQ ID NO: 796577 - DNA, 33 bp, Homo sapien
tgggctgaatgaggcacgtggtaaatgaggcag

SEQ ID NO: 796578 - DNA, 33 bp, Homo sapien
tgggctgaatgaggcaggtggtaaatgaggcag

SEQ ID NO: 796579 - DNA, 33 bp, Homo sapien
tatttacatttttttcacatggccagtaatgag

SEQ ID NO: 796580 - DNA, 33 bp, Homo sapien
tatttacatttttttcgcatggccagtaatgag

SEQ ID NO: 796581 - DNA, 33 bp, Homo sapien
acatataaatgagtgacgcgacaacagggagca

SEQ ID NO: 796582 - DNA, 33 bp, Homo sapien
acatataaatgagtgatgcgacaacagggagca

SEQ ID NO: 796583 - DNA, 33 bp, Homo sapien
agaaggcctgcttatgcaccaggataaaacaaa

SEQ ID NO: 796584 - DNA, 33 bp, Homo sapien
agaaggcctgcttatgtaccaggataaaacaaa

SEQ ID NO: 796585 - DNA, 33 bp, Homo sapien
ccaagatcatcagtaaagtccaaagaactcaca

SEQ ID NO: 796586 - DNA, 33 bp, Homo sapien
ccaagatcatcagtaatgtccaaagaactcaca

SEQ ID NO: 796587 - DNA, 33 bp, Homo sapien
gaagtctgctaacatacggaaaagatgcattta

SEQ ID NO: 796588 - DNA, 33 bp, Homo sapien
gaagtctgctaacatatggaaaagatgcattta

SEQ ID NO: 796589 - DNA, 33 bp, Homo sapien
cagaactagattttccactgtcattcattatgg

SEQ ID NO: 796590 - DNA, 33 bp, Homo sapien
cagaactagattttccgctgtcattcattatgg

SEQ ID NO: 796591 - DNA, 33 bp, Homo sapien
ccatggtactctctaaaaggtgatatttttgta

SEQ ID NO: 796592 - DNA, 33 bp, Homo sapien
ccatggtactctctaacaggtgatatttttgta

SEQ ID NO: 796593 - DNA, 33 bp, Homo sapien
gttcacaatataaagacgtggaaacagcctaaa

SEQ ID NO: 796594 - DNA, 33 bp, Homo sapien
gttcacaatataaagatgtggaaacagcctaaa

SEQ ID NO: 796595 - DNA, 33 bp, Homo sapien
caagaagaaagatgtaccacagcaatcaggatc

SEQ ID NO: 796596 - DNA, 33 bp, Homo sapien
caagaagaaagatgtagcacagcaatcaggatc

SEQ ID NO: 796597 - DNA, 33 bp, Homo sapien
taagaaattaagacaaaattcagcaaatgtcac

SEQ ID NO: 796598 - DNA, 33 bp, Homo sapien
taagaaattaagacaacattcagcaaatgtcac

SEQ ID NO: 796599 - DNA, 33 bp, Homo sapien
tcaacatttatccctgaactattatatcatctg

SEQ ID NO: 796600 - DNA, 33 bp, Homo sapien
tcaacatttatccctggactattatatcatctg

SEQ ID NO: 796601 - DNA, 33 bp, Homo sapien
catgttatgaagaaaaaagatgttgttaagtca

SEQ ID NO: 796602 - DNA, 33 bp, Homo sapien
catgttatgaagaaaagagatgttgttaagtca

SEQ ID NO: 796603 - DNA, 33 bp, Homo sapien
tgtctccccggaacaaggtatacaaagctgtta

SEQ ID NO: 796604 - DNA, 33 bp, Homo sapien
tgtctccccggaacaatgtatacaaagctgtta

SEQ ID NO: 796605 - DNA, 33 bp, Homo sapien
acaatatggtaagtgacgaataaattatttgtg

SEQ ID NO: 796606 - DNA, 33 bp, Homo sapien
acaatatggtaagtgaggaataaattatttgtg

SEQ ID NO: 796607 - DNA, 33 bp, Homo sapien
ctttgctcattccttcaattcaggcaaaaactt

SEQ ID NO: 796608 - DNA, 33 bp, Homo sapien
ctttgctcattccttcgattcaggcaaaaactt

SEQ ID NO: 796609 - DNA, 33 bp, Homo sapien
aatatggtttgatccagaatgaatatctactca

SEQ ID NO: 796610 - DNA, 33 bp, Homo sapien
aatatggtttgatccataatgaatatctactca

SEQ ID NO: 796611 - DNA, 33 bp, Homo sapien
agaatagttgtacctaccgtgtttctgctcggt

SEQ ID NO: 796612 - DNA, 33 bp, Homo sapien
agaatagttgtacctatcgtgtttctgctcggt

SEQ ID NO: 796613 - DNA, 33 bp, Homo sapien
aatattgataaccaagcccttctaagttattac

SEQ ID NO: 796614 - DNA, 33 bp, Homo sapien
aatattgataaccaagtccttctaagttattac

SEQ ID NO: 796615 - DNA, 33 bp, Homo sapien
tgaaaacagcaagttgcataatacatggagact

SEQ ID NO: 796616 - DNA, 33 bp, Homo sapien
tgaaaacagcaagttggataatacatggagact

SEQ ID NO: 796617 - DNA, 33 bp, Homo sapien
tcaataatggcaattaaacttgttacaaattta

SEQ ID NO: 796618 - DNA, 33 bp, Homo sapien
tcaataatggcaattacacttgttacaaattta

SEQ ID NO: 796619 - DNA, 33 bp, Homo sapien
taaaacagagttgatacgaaattggatagtttt

SEQ ID NO: 796620 - DNA, 33 bp, Homo sapien
taaaacagagttgatatgaaattggatagtttt

SEQ ID NO: 796621 - DNA, 33 bp, Homo sapien
caagtgcaaagcgaacaaagataattgaatcat

SEQ ID NO: 796622 - DNA, 33 bp, Homo sapien
caagtgcaaagcgaaccaagataattgaatcat

SEQ ID NO: 796623 - DNA, 33 bp, Homo sapien
agggtcctggatttaaatggatcagactatgga

SEQ ID NO: 796624 - DNA, 33 bp, Homo sapien
agggtcctggatttaactggatcagactatgga

SEQ ID NO: 796625 - DNA, 33 bp, Homo sapien
ttaagtatggtcatggaaaacacagtctttaat

SEQ ID NO: 796626 - DNA, 33 bp, Homo sapien
ttaagtatggtcatgggaaacacagtctttaat

SEQ ID NO: 796627 - DNA, 33 bp, Homo sapien
aaatgtgataaaaaaaattcctggaaaatacag

SEQ ID NO: 796628 - DNA, 33 bp, Homo sapien
aaatgtgataaaaaaatttcctggaaaatacag

SEQ ID NO: 796629 - DNA, 33 bp, Homo sapien
tttcttgcactctgaaaatttagtagaatgaaa

SEQ ID NO: 796630 - DNA, 33 bp, Homo sapien
tttcttgcactctgaagatttagtagaatgaaa

SEQ ID NO: 796631 - DNA, 33 bp, Homo sapien
ctagtcatctactttaaacatgaggatgcaata

SEQ ID NO: 796632 - DNA, 33 bp, Homo sapien
ctagtcatctactttacacatgaggatgcaata

SEQ ID NO: 796633 - DNA, 33 bp, Homo sapien
ttgcactcttacatagcaaccatgaactttaat

SEQ ID NO: 796634 - DNA, 33 bp, Homo sapien
ttgcactcttacataggaaccatgaactttaat

SEQ ID NO: 796635 - DNA, 33 bp, Homo sapien
tacttgtgcagagacacacagaatcatgccttt

SEQ ID NO: 796636 - DNA, 33 bp, Homo sapien
tacttgtgcagagacatacagaatcatgccttt

SEQ ID NO: 796637 - DNA, 33 bp, Homo sapien
aatcactgaagaaagcaccttgccttgcctcaa

SEQ ID NO: 796638 - DNA, 33 bp, Homo sapien
aatcactgaagaaagcgccttgccttgcctcaa

SEQ ID NO: 796639 - DNA, 33 bp, Homo sapien
gacagaagtctatcacaaacacagtattcataa

SEQ ID NO: 796640 - DNA, 33 bp, Homo sapien
gacagaagtctatcacgaacacagtattcataa

SEQ ID NO: 796641 - DNA, 33 bp, Homo sapien
aatatgagaaaactagcaacaggataatgaaca

SEQ ID NO: 796642 - DNA, 33 bp, Homo sapien
aatatgagaaaactaggaacaggataatgaaca

SEQ ID NO: 796643 - DNA, 33 bp, Homo sapien
tggtcttgggagagtccaaaccatctgagctga

SEQ ID NO: 796644 - DNA, 33 bp, Homo sapien
tggtcttgggagagtctaaaccatctgagctga

SEQ ID NO: 796645 - DNA, 33 bp, Homo sapien
ggtctcaccctagtcaagagtaacgggattgtg

SEQ ID NO: 796646 - DNA, 33 bp, Homo sapien
ggtctcaccctagtcatgagtaacgggattgtg

SEQ ID NO: 796647 - DNA, 33 bp, Homo sapien
ttggttattaaactagcacaatatgcaggaaat

SEQ ID NO: 796648 - DNA, 33 bp, Homo sapien
ttggttattaaactaggacaatatgcaggaaat

SEQ ID NO: 796649 - DNA, 33 bp, Homo sapien
gatatttcaaactcccaaagtccaaagcaggct

SEQ ID NO: 796650 - DNA, 33 bp, Homo sapien
gatatttcaaactcccgaagtccaaagcaggct

SEQ ID NO: 796651 - DNA, 33 bp, Homo sapien
cttgtgataaccaagaaaaatgataggatattt

SEQ ID NO: 796652 - DNA, 33 bp, Homo sapien
cttgtgataaccaagacaaatgataggatattt

SEQ ID NO: 796653 - DNA, 33 bp, Homo sapien
tggaatgaagacgacccaggacaaccctgcagg

SEQ ID NO: 796654 - DNA, 33 bp, Homo sapien
tggaatgaagacgacctaggacaaccctgcagg

SEQ ID NO: 796655 - DNA, 33 bp, Homo sapien
ggtaacccaattcaaccgagatttgttggctaa

SEQ ID NO: 796656 - DNA, 33 bp, Homo sapien
ggtaacccaattcaactgagatttgttggctaa

SEQ ID NO: 796657 - DNA, 33 bp, Homo sapien
ctggggatacagtgacagtatacaaatgttgga

SEQ ID NO: 796658 - DNA, 33 bp, Homo sapien
ctggggatacagtgacggtatacaaatgttgga

SEQ ID NO: 796659 - DNA, 33 bp, Homo sapien
tccaaagattgcagaacaaaaagtgggagaaaa

SEQ ID NO: 796660 - DNA, 33 bp, Homo sapien
tccaaagattgcagaataaaaagtgggagaaaa

SEQ ID NO: 796661 - DNA, 33 bp, Homo sapien
cccaaacccataaccaaccccagcttaatgaga

SEQ ID NO: 796662 - DNA, 33 bp, Homo sapien
cccaaacccataaccagccccagcttaatgaga

SEQ ID NO: 796663 - DNA, 33 bp, Homo sapien
ctagactgtcaagctggaatgaaagggcacttc

SEQ ID NO: 796664 - DNA, 33 bp, Homo sapien
ctagactgtcaagctgtaatgaaagggcacttc

SEQ ID NO: 796665 - DNA, 33 bp, Homo sapien
ctaatagttcccaagaagagcttttatttgttc

SEQ ID NO: 796666 - DNA, 33 bp, Homo sapien
ctaatagttcccaagaggagcttttatttgttc

SEQ ID NO: 796667 - DNA, 33 bp, Homo sapien
gactctctggttgacaacactttgcatgtgttg

SEQ ID NO: 796668 - DNA, 33 bp, Homo sapien
gactctctggttgacagcactttgcatgtgttg

SEQ ID NO: 796669 - DNA, 33 bp, Homo sapien
gtatttagtatcagaaccatatgagctttacaa

SEQ ID NO: 796670 - DNA, 33 bp, Homo sapien
gtatttagtatcagaatcatatgagctttacaa

SEQ ID NO: 796671 - DNA, 33 bp, Homo sapien
taatggccactacaaagtaccaatgtctactgg

SEQ ID NO: 796672 - DNA, 33 bp, Homo sapien
taatggccactacaaattaccaatgtctactgg

SEQ ID NO: 796673 - DNA, 33 bp, Homo sapien
ctgtttcaatcatttaccactgttttcaaattc

SEQ ID NO: 796674 - DNA, 33 bp, Homo sapien
ctgtttcaatcatttatcactgttttcaaattc

SEQ ID NO: 796675 - DNA, 33 bp, Homo sapien
aatgactgcaaataacccttctttcccacacaa

SEQ ID NO: 796676 - DNA, 33 bp, Homo sapien
aatgactgcaaataactcttctttcccacacaa

SEQ ID NO: 796677 - DNA, 33 bp, Homo sapien
agcaaacatcattttacctactaaatagctctg

SEQ ID NO: 796678 - DNA, 33 bp, Homo sapien
agcaaacatcattttatctactaaatagctctg

SEQ ID NO: 796679 - DNA, 33 bp, Homo sapien
tctctgattactccagaaaaaacagtgtttatt

SEQ ID NO: 796680 - DNA, 33 bp, Homo sapien
tctctgattactccaggaaaaacagtgtttatt

SEQ ID NO: 796681 - DNA, 33 bp, Homo sapien
ttgtgcaacatgtttagctgctacatacgagtg

SEQ ID NO: 796682 - DNA, 33 bp, Homo sapien
ttgtgcaacatgtttatctgctacatacgagtg

SEQ ID NO: 796683 - DNA, 33 bp, Homo sapien
ttgacctcttacccaactcctagaacaaagtca

SEQ ID NO: 796684 - DNA, 33 bp, Homo sapien
ttgacctcttacccaagtcctagaacaaagtca

SEQ ID NO: 796685 - DNA, 33 bp, Homo sapien
agactgcatggttgatgaaacattgtcaaaaat

SEQ ID NO: 796686 - DNA, 33 bp, Homo sapien
agactgcatggttgattaaacattgtcaaaaat

SEQ ID NO: 796687 - DNA, 33 bp, Homo sapien
aactaatctatgttgagaaaaaatctgaagaat

SEQ ID NO: 796688 - DNA, 33 bp, Homo sapien
aactaatctatgttgataaaaaatctgaagaat

SEQ ID NO: 796689 - DNA, 33 bp, Homo sapien
tatcccttctgacaccaaaagttagacagtttg

SEQ ID NO: 796690 - DNA, 33 bp, Homo sapien
tatcccttctgacaccgaaagttagacagtttg

SEQ ID NO: 796691 - DNA, 33 bp, Homo sapien
gttgctctttttgtgaacttctacacaacacag

SEQ ID NO: 796692 - DNA, 33 bp, Homo sapien
gttgctctttttgtgatcttctacacaacacag

SEQ ID NO: 796693 - DNA, 33 bp, Homo sapien
ctcataattgtagccacgttaaaaactaaaata

SEQ ID NO: 796694 - DNA, 33 bp, Homo sapien
ctcataattgtagccatgttaaaaactaaaata

SEQ ID NO: 796695 - DNA, 33 bp, Homo sapien
tattatatagcattaacggactctcttcttata

SEQ ID NO: 796696 - DNA, 33 bp, Homo sapien
tattatatagcattaatggactctcttcttata

SEQ ID NO: 796697 - DNA, 33 bp, Homo sapien
caactatgcttcatacaactggaagtgcactaa

SEQ ID NO: 796698 - DNA, 33 bp, Homo sapien
caactatgcttcatacgactggaagtgcactaa

SEQ ID NO: 796699 - DNA, 33 bp, Homo sapien
acttccaggtcaagtaaacaaaagactaatttg

SEQ ID NO: 796700 - DNA, 33 bp, Homo sapien
acttccaggtcaagtagacaaaagactaatttg

SEQ ID NO: 796701 - DNA, 33 bp, Homo sapien
ttaaaacaaacatcgactatctgcatattatat

SEQ ID NO: 796702 - DNA, 33 bp, Homo sapien
ttaaaacaaacatcgattatctgcatattatat

SEQ ID NO: 796703 - DNA, 33 bp, Homo sapien
gatttctcagcctgaaaaaaggtgtctatcaaa

SEQ ID NO: 796704 - DNA, 33 bp, Homo sapien
gatttctcagcctgaagaaaggtgtctatcaaa

SEQ ID NO: 796705 - DNA, 33 bp, Homo sapien
aatgtgagaatggaatcagaattctgtacataa

SEQ ID NO: 796706 - DNA, 33 bp, Homo sapien
aatgtgagaatggaatgagaattctgtacataa

SEQ ID NO: 796707 - DNA, 33 bp, Homo sapien
gcatggtagttcaacaaatgacaactcctacat

SEQ ID NO: 796708 - DNA, 33 bp, Homo sapien
gcatggtagttcaacagatgacaactcctacat

SEQ ID NO: 796709 - DNA, 33 bp, Homo sapien
attcagacccaaacacaagaaaaatacaatgcc

SEQ ID NO: 796710 - DNA, 33 bp, Homo sapien
attcagacccaaacacgagaaaaatacaatgcc

SEQ ID NO: 796711 - DNA, 33 bp, Homo sapien
caaggaagcaatattgaaatgtcatggaatgac

SEQ ID NO: 796712 - DNA, 33 bp, Homo sapien
caaggaagcaatattggaatgtcatggaatgac

SEQ ID NO: 796713 - DNA, 33 bp, Homo sapien
tagcgaattgtacagaaacctaacctctggtgc

SEQ ID NO: 796714 - DNA, 33 bp, Homo sapien
tagcgaattgtacagagacctaacctctggtgc

SEQ ID NO: 796715 - DNA, 33 bp, Homo sapien
ttctgtatatttttaccgagtgtatatgtttcc

SEQ ID NO: 796716 - DNA, 33 bp, Homo sapien
ttctgtatatttttactgagtgtatatgtttcc

SEQ ID NO: 796717 - DNA, 33 bp, Homo sapien
tccggcaagtgttccacggcagactataaaggg

SEQ ID NO: 796718 - DNA, 33 bp, Homo sapien
tccggcaagtgttccatggcagactataaaggg

SEQ ID NO: 796719 - DNA, 33 bp, Homo sapien
gaagaaagaagtcaagaagtctgtgagttaaac

SEQ ID NO: 796720 - DNA, 33 bp, Homo sapien
gaagaaagaagtcaagtagtctgtgagttaaac

SEQ ID NO: 796721 - DNA, 33 bp, Homo sapien
gtgcatgctatatgagcaattgtgagctattgt

SEQ ID NO: 796722 - DNA, 33 bp, Homo sapien
gtgcatgctatatgagtaattgtgagctattgt

SEQ ID NO: 796723 - DNA, 33 bp, Homo sapien
agattgtgtcctttccagcaacatggatagaac

SEQ ID NO: 796724 - DNA, 33 bp, Homo sapien
agattgtgtcctttcccgcaacatggatagaac

SEQ ID NO: 796725 - DNA, 33 bp, Homo sapien
caacatggatagaaccagaggccaagcaaacta

SEQ ID NO: 796726 - DNA, 33 bp, Homo sapien
caacatggatagaaccggaggccaagcaaacta

SEQ ID NO: 796727 - DNA, 33 bp, Homo sapien
ttgtcagcacataacaccttccttggacataag

SEQ ID NO: 796728 - DNA, 33 bp, Homo sapien
ttgtcagcacataacagcttccttggacataag

SEQ ID NO: 796729 - DNA, 33 bp, Homo sapien
aagcagctaagagtaacgtagatagtcacagtc

SEQ ID NO: 796730 - DNA, 33 bp, Homo sapien
aagcagctaagagtaatgtagatagtcacagtc

SEQ ID NO: 796731 - DNA, 33 bp, Homo sapien
ttaactcctaaacttcgcagacagtcgtggcac

SEQ ID NO: 796732 - DNA, 33 bp, Homo sapien
ttaactcctaaacttctcagacagtcgtggcac

SEQ ID NO: 796733 - DNA, 33 bp, Homo sapien
atcaggtataaaccaaatgtcacctttctgaaa

SEQ ID NO: 796734 - DNA, 33 bp, Homo sapien
atcaggtataaaccaattgtcacctttctgaaa

SEQ ID NO: 796735 - DNA, 33 bp, Homo sapien
ttcagctactacaccacgccgctctctgttgca

SEQ ID NO: 796736 - DNA, 33 bp, Homo sapien
ttcagctactacaccatgccgctctctgttgca

SEQ ID NO: 796737 - DNA, 33 bp, Homo sapien
gcttggactttgcagacgatgctgaaaacaaat

SEQ ID NO: 796738 - DNA, 33 bp, Homo sapien
gcttggactttgcagatgatgctgaaaacaaat

SEQ ID NO: 796739 - DNA, 33 bp, Homo sapien
atataggtttagactccctctttgaggctaagt

SEQ ID NO: 796740 - DNA, 33 bp, Homo sapien
atataggtttagactctctctttgaggctaagt

SEQ ID NO: 796741 - DNA, 33 bp, Homo sapien
ctctcccttatcctaacgccatgtagacatggc

SEQ ID NO: 796742 - DNA, 33 bp, Homo sapien
ctctcccttatcctaatgccatgtagacatggc

SEQ ID NO: 796743 - DNA, 33 bp, Homo sapien
gactttagagactttacagcaggaaagctattg

SEQ ID NO: 796744 - DNA, 33 bp, Homo sapien
gactttagagactttagagcaggaaagctattg

SEQ ID NO: 796745 - DNA, 33 bp, Homo sapien
tttagcatttacatgaaccttcagtccctcatc

SEQ ID NO: 796746 - DNA, 33 bp, Homo sapien
tttagcatttacatgacccttcagtccctcatc

SEQ ID NO: 796747 - DNA, 33 bp, Homo sapien
ggatcaaggaaagcaaacattgtagcctattcc

SEQ ID NO: 796748 - DNA, 33 bp, Homo sapien
ggatcaaggaaagcaatcattgtagcctattcc

SEQ ID NO: 796749 - DNA, 33 bp, Homo sapien
atttagcagttagattcaacagaacatggtggc

SEQ ID NO: 796750 - DNA, 33 bp, Homo sapien
atttagcagttagattgaacagaacatggtggc

SEQ ID NO: 796751 - DNA, 33 bp, Homo sapien
aaatctggtttctctccccccatttataggctc

SEQ ID NO: 796752 - DNA, 33 bp, Homo sapien
aaatctggtttctctctccccatttataggctc

SEQ ID NO: 796753 - DNA, 33 bp, Homo sapien
ttgtaaaagactgaaacgaaacaacatacatga

SEQ ID NO: 796754 - DNA, 33 bp, Homo sapien
ttgtaaaagactgaaatgaaacaacatacatga

SEQ ID NO: 796755 - DNA, 33 bp, Homo sapien
aaccctgtgatcattcaaagaagtttgcatttt

SEQ ID NO: 796756 - DNA, 33 bp, Homo sapien
aaccctgtgatcattctaagaagtttgcatttt

SEQ ID NO: 796757 - DNA, 33 bp, Homo sapien
ctcaatgagaatacccacagaatggctgcctag

SEQ ID NO: 796758 - DNA, 33 bp, Homo sapien
ctcaatgagaatacccgcagaatggctgcctag

SEQ ID NO: 796759 - DNA, 33 bp, Homo sapien
gacactggacaggttacagagatgtggtgtatg

SEQ ID NO: 796760 - DNA, 33 bp, Homo sapien
gacactggacaggttatagagatgtggtgtatg

SEQ ID NO: 796761 - DNA, 33 bp, Homo sapien
ggtgcaggtcagaatcagagaaagaaaatagcc

SEQ ID NO: 796762 - DNA, 33 bp, Homo sapien
ggtgcaggtcagaatcggagaaagaaaatagcc

SEQ ID NO: 796763 - DNA, 33 bp, Homo sapien
cgctcagatgatttagcataacaggataattgc

SEQ ID NO: 796764 - DNA, 33 bp, Homo sapien
cgctcagatgatttagtataacaggataattgc

SEQ ID NO: 796765 - DNA, 33 bp, Homo sapien
agcttcccacctcttcacattttttgccaatac

SEQ ID NO: 796766 - DNA, 33 bp, Homo sapien
agcttcccacctcttcgcattttttgccaatac

SEQ ID NO: 796767 - DNA, 33 bp, Homo sapien
taagacaggacttctaaactttgtgaagatgga

SEQ ID NO: 796768 - DNA, 33 bp, Homo sapien
taagacaggacttctagactttgtgaagatgga

SEQ ID NO: 796769 - DNA, 33 bp, Homo sapien
cctactgttccctgcaatctcgcagcatttgca

SEQ ID NO: 796770 - DNA, 33 bp, Homo sapien
cctactgttccctgcagtctcgcagcatttgca

SEQ ID NO: 796771 - DNA, 33 bp, Homo sapien
aaactgtccactgtgaactgtgaatcagtaatg

SEQ ID NO: 796772 - DNA, 33 bp, Homo sapien
aaactgtccactgtgagctgtgaatcagtaatg

SEQ ID NO: 796773 - DNA, 33 bp, Homo sapien
ttttataatatcagaaagttttccaggttattt

SEQ ID NO: 796774 - DNA, 33 bp, Homo sapien
ttttataatatcagaacgttttccaggttattt

SEQ ID NO: 796775 - DNA, 33 bp, Homo sapien
accccaacaggaacaccaaatgtaacaactatc

SEQ ID NO: 796776 - DNA, 33 bp, Homo sapien
accccaacaggaacactaaatgtaacaactatc

SEQ ID NO: 796777 - DNA, 33 bp, Homo sapien
cctgttggggtacacccggtgcagctttctatt

SEQ ID NO: 796778 - DNA, 33 bp, Homo sapien
cctgttggggtacacctggtgcagctttctatt

SEQ ID NO: 796779 - DNA, 33 bp, Homo sapien
agccatcttttaaaaaaccacatattgtcacaa

SEQ ID NO: 796780 - DNA, 33 bp, Homo sapien
agccatcttttaaaaagccacatattgtcacaa

SEQ ID NO: 796781 - DNA, 33 bp, Homo sapien
gaatgactctgtaagacggttcaagtaaacaag

SEQ ID NO: 796782 - DNA, 33 bp, Homo sapien
gaatgactctgtaagatggttcaagtaaacaag

SEQ ID NO: 796783 - DNA, 33 bp, Homo sapien
aagaggttgagttggggattacacgatattgag

SEQ ID NO: 796784 - DNA, 33 bp, Homo sapien
aagaggttgagttgggtattacacgatattgag

SEQ ID NO: 796785 - DNA, 33 bp, Homo sapien
atactagaggtacaaacggtgttatgatgtctt

SEQ ID NO: 796786 - DNA, 33 bp, Homo sapien
atactagaggtacaaatggtgttatgatgtctt

SEQ ID NO: 796787 - DNA, 33 bp, Homo sapien
aagctttgcaagagaaaggattttgtcaggctt

SEQ ID NO: 796788 - DNA, 33 bp, Homo sapien
aagctttgcaagagaagggattttgtcaggctt

SEQ ID NO: 796789 - DNA, 33 bp, Homo sapien
ctcaccagcaatatcacaactgccaaatctgag

SEQ ID NO: 796790 - DNA, 33 bp, Homo sapien
ctcaccagcaatatcataactgccaaatctgag

SEQ ID NO: 796791 - DNA, 33 bp, Homo sapien
gcattggctacagagagagtgttgaagaatgac

SEQ ID NO: 796792 - DNA, 33 bp, Homo sapien
gcattggctacagagatagtgttgaagaatgac

SEQ ID NO: 796793 - DNA, 33 bp, Homo sapien
atttgactggccaaaacggaaatacagcataat

SEQ ID NO: 796794 - DNA, 33 bp, Homo sapien
atttgactggccaaaatggaaatacagcataat

SEQ ID NO: 796795 - DNA, 33 bp, Homo sapien
tttatcagggaaatgcaaattgaaatccatgag

SEQ ID NO: 796796 - DNA, 33 bp, Homo sapien
tttatcagggaaatgcgaattgaaatccatgag

SEQ ID NO: 796797 - DNA, 33 bp, Homo sapien
tctaatttgctgaaaactctacagtctaactga

SEQ ID NO: 796798 - DNA, 33 bp, Homo sapien
tctaatttgctgaaaagtctacagtctaactga

SEQ ID NO: 796799 - DNA, 33 bp, Homo sapien
atcctttccttcacagacctctaatgaatattt

SEQ ID NO: 796800 - DNA, 33 bp, Homo sapien
atcctttccttcacaggcctctaatgaatattt

SEQ ID NO: 796801 - DNA, 33 bp, Homo sapien
ggatcctcattatatcccttctactgtcaaaaa

SEQ ID NO: 796802 - DNA, 33 bp, Homo sapien
ggatcctcattatatcgcttctactgtcaaaaa

SEQ ID NO: 796803 - DNA, 33 bp, Homo sapien
ggcaacaaaagaccaagattcagtgagggagaa

SEQ ID NO: 796804 - DNA, 33 bp, Homo sapien
ggcaacaaaagaccaatattcagtgagggagaa

SEQ ID NO: 796805 - DNA, 33 bp, Homo sapien
tatgttttgacatttcaactgtcctcattgcac

SEQ ID NO: 796806 - DNA, 33 bp, Homo sapien
tatgttttgacatttctactgtcctcattgcac

SEQ ID NO: 796807 - DNA, 33 bp, Homo sapien
agatgtaaggcccagacgttattcatataaatt

SEQ ID NO: 796808 - DNA, 33 bp, Homo sapien
agatgtaaggcccagatgttattcatataaatt

SEQ ID NO: 796809 - DNA, 33 bp, Homo sapien
agagttgcctaatacaacaagacatggccaacc

SEQ ID NO: 796810 - DNA, 33 bp, Homo sapien
agagttgcctaatacagcaagacatggccaacc

SEQ ID NO: 796811 - DNA, 33 bp, Homo sapien
ccagtttgcctattacacataaagttgctatgg

SEQ ID NO: 796812 - DNA, 33 bp, Homo sapien
ccagtttgcctattacgcataaagttgctatgg

SEQ ID NO: 796813 - DNA, 33 bp, Homo sapien
gccattgaaacgtgaaccgatagataaattatg

SEQ ID NO: 796814 - DNA, 33 bp, Homo sapien
gccattgaaacgtgaatcgatagataaattatg

SEQ ID NO: 796815 - DNA, 33 bp, Homo sapien
aatggaatatgacttagcaatgtaaagaaataa

SEQ ID NO: 796816 - DNA, 33 bp, Homo sapien
aatggaatatgacttatcaatgtaaagaaataa

SEQ ID NO: 796817 - DNA, 33 bp, Homo sapien
tttgctaaatgagttccctaccttctacatctt

SEQ ID NO: 796818 - DNA, 33 bp, Homo sapien
tttgctaaatgagttctctaccttctacatctt

SEQ ID NO: 796819 - DNA, 33 bp, Homo sapien
aacaaaatttacattccataggcatgaaacact

SEQ ID NO: 796820 - DNA, 33 bp, Homo sapien
aacaaaatttacattctataggcatgaaacact

SEQ ID NO: 796821 - DNA, 33 bp, Homo sapien
atttcatcattagtgaagtaaatcaaagaaact

SEQ ID NO: 796822 - DNA, 33 bp, Homo sapien
atttcatcattagtgaggtaaatcaaagaaact

SEQ ID NO: 796823 - DNA, 33 bp, Homo sapien
ggagaattgtaataaccagaagtatgtggatat

SEQ ID NO: 796824 - DNA, 33 bp, Homo sapien
ggagaattgtaataactagaagtatgtggatat

SEQ ID NO: 796825 - DNA, 33 bp, Homo sapien
tggaaactgttcttaagtctatcattataggac

SEQ ID NO: 796826 - DNA, 33 bp, Homo sapien
tggaaactgttcttaattctatcattataggac

SEQ ID NO: 796827 - DNA, 33 bp, Homo sapien
ataactttcctattcaccattttgtcagagctg

SEQ ID NO: 796828 - DNA, 33 bp, Homo sapien
ataactttcctattcatcattttgtcagagctg

SEQ ID NO: 796829 - DNA, 33 bp, Homo sapien
taattgtactttatcaaggatgactacatttgc

SEQ ID NO: 796830 - DNA, 33 bp, Homo sapien
taattgtactttatcagggatgactacatttgc

SEQ ID NO: 796831 - DNA, 33 bp, Homo sapien
cagttcagtgaaaatacgtgtagcctaagatgt

SEQ ID NO: 796832 - DNA, 33 bp, Homo sapien
cagttcagtgaaaatatgtgtagcctaagatgt

SEQ ID NO: 796833 - DNA, 33 bp, Homo sapien
tgtatatcaaaccaaaatgagttaggcagtata

SEQ ID NO: 796834 - DNA, 33 bp, Homo sapien
tgtatatcaaaccaaagtgagttaggcagtata

SEQ ID NO: 796835 - DNA, 33 bp, Homo sapien
cagtccctcattgaccaaaatatcattatcatt

SEQ ID NO: 796836 - DNA, 33 bp, Homo sapien
cagtccctcattgaccgaaatatcattatcatt

SEQ ID NO: 796837 - DNA, 33 bp, Homo sapien
cacattcagacttgccacttctgtaaggaggca

SEQ ID NO: 796838 - DNA, 33 bp, Homo sapien
cacattcagacttgccccttctgtaaggaggca

SEQ ID NO: 796839 - DNA, 33 bp, Homo sapien
tttctgtaaccagttagctatctagcacctaat

SEQ ID NO: 796840 - DNA, 33 bp, Homo sapien
tttctgtaaccagttatctatctagcacctaat

SEQ ID NO: 796841 - DNA, 33 bp, Homo sapien
agaaagagtcattacaacaaaatctggaacaaa

SEQ ID NO: 796842 - DNA, 33 bp, Homo sapien
agaaagagtcattacagcaaaatctggaacaaa

SEQ ID NO: 796843 - DNA, 33 bp, Homo sapien
cataatccaggtataccggcaatttaagcacct

SEQ ID NO: 796844 - DNA, 33 bp, Homo sapien
cataatccaggtatactggcaatttaagcacct

SEQ ID NO: 796845 - DNA, 33 bp, Homo sapien
cctgctacagtacaaaacacattagtacattct

SEQ ID NO: 796846 - DNA, 33 bp, Homo sapien
cctgctacagtacaaagcacattagtacattct

SEQ ID NO: 796847 - DNA, 33 bp, Homo sapien
tgaaaggaatattggacagcaaaaatgtaagat

SEQ ID NO: 796848 - DNA, 33 bp, Homo sapien
tgaaaggaatattggagagcaaaaatgtaagat

SEQ ID NO: 796849 - DNA, 33 bp, Homo sapien
gtgaggaatatgttggaactctagacatcagtg

SEQ ID NO: 796850 - DNA, 33 bp, Homo sapien
gtgaggaatatgttggtactctagacatcagtg

SEQ ID NO: 796851 - DNA, 33 bp, Homo sapien
gattacaaagattcaaaccctacaagatctagt

SEQ ID NO: 796852 - DNA, 33 bp, Homo sapien
gattacaaagattcaagccctacaagatctagt

SEQ ID NO: 796853 - DNA, 33 bp, Homo sapien
agagttaagttgtagacggtatttgcaaccagg

SEQ ID NO: 796854 - DNA, 33 bp, Homo sapien
agagttaagttgtagatggtatttgcaaccagg

SEQ ID NO: 796855 - DNA, 33 bp, Homo sapien
gcttttaatacagacaacccaaggtcttggatt

SEQ ID NO: 796856 - DNA, 33 bp, Homo sapien
gcttttaatacagacatcccaaggtcttggatt

SEQ ID NO: 796857 - DNA, 33 bp, Homo sapien
tttgcaaacagttcaccggaataaagttgcttt

SEQ ID NO: 796858 - DNA, 33 bp, Homo sapien
tttgcaaacagttcacgggaataaagttgcttt

SEQ ID NO: 796859 - DNA, 33 bp, Homo sapien
cacacattcatgtaccaatccaaatatgaacct

SEQ ID NO: 796860 - DNA, 33 bp, Homo sapien
cacacattcatgtaccgatccaaatatgaacct

SEQ ID NO: 796861 - DNA, 33 bp, Homo sapien
gtgaggttattgtggacgattaaatgggatgta

SEQ ID NO: 796862 - DNA, 33 bp, Homo sapien
gtgaggttattgtggatgattaaatgggatgta

SEQ ID NO: 796863 - DNA, 33 bp, Homo sapien
ccaacttcatctagccacatgaacactgcatca

SEQ ID NO: 796864 - DNA, 33 bp, Homo sapien
ccaacttcatctagccgcatgaacactgcatca

SEQ ID NO: 796865 - DNA, 33 bp, Homo sapien
gcaatcactgctctggaagtcttcaaggctatt

SEQ ID NO: 796866 - DNA, 33 bp, Homo sapien
gcaatcactgctctgggagtcttcaaggctatt

SEQ ID NO: 796867 - DNA, 33 bp, Homo sapien
gtcaaaaagtggtgaaatctgtagtaaaatgaa

SEQ ID NO: 796868 - DNA, 33 bp, Homo sapien
gtcaaaaagtggtgaactctgtagtaaaatgaa

SEQ ID NO: 796869 - DNA, 33 bp, Homo sapien
tgtttttattgctgaaggaagctagaaaagaga

SEQ ID NO: 796870 - DNA, 33 bp, Homo sapien
tgtttttattgctgaatgaagctagaaaagaga

SEQ ID NO: 796871 - DNA, 33 bp, Homo sapien
atgaatcaggaaccaacgaatggaaatgagagt

SEQ ID NO: 796872 - DNA, 33 bp, Homo sapien
atgaatcaggaaccaatgaatggaaatgagagt

SEQ ID NO: 796873 - DNA, 33 bp, Homo sapien
tgaactaatgtaatcaacttgtgaccaggtagc

SEQ ID NO: 796874 - DNA, 33 bp, Homo sapien
tgaactaatgtaatcagcttgtgaccaggtagc

SEQ ID NO: 796875 - DNA, 33 bp, Homo sapien
tgatccagtatgtccactgatacttgatttatc

SEQ ID NO: 796876 - DNA, 33 bp, Homo sapien
tgatccagtatgtccagtgatacttgatttatc

SEQ ID NO: 796877 - DNA, 33 bp, Homo sapien
atcactcattaacctcactagagcaacacaacc

SEQ ID NO: 796878 - DNA, 33 bp, Homo sapien
atcactcattaacctcgctagagcaacacaacc

SEQ ID NO: 796879 - DNA, 33 bp, Homo sapien
tcgtgttttttgcttacggaatcagtgttgtca

SEQ ID NO: 796880 - DNA, 33 bp, Homo sapien
tcgtgttttttgcttatggaatcagtgttgtca

SEQ ID NO: 796881 - DNA, 33 bp, Homo sapien
taagcaccaagcataacaatcctcatatcccat

SEQ ID NO: 796882 - DNA, 33 bp, Homo sapien
taagcaccaagcataataatcctcatatcccat

SEQ ID NO: 796883 - DNA, 33 bp, Homo sapien
gaaggaatatatccaaaagcagctacagaatct

SEQ ID NO: 796884 - DNA, 33 bp, Homo sapien
gaaggaatatatccaagagcagctacagaatct

SEQ ID NO: 796885 - DNA, 33 bp, Homo sapien
gagatcccatttaaaactgttgtctgaacccgt

SEQ ID NO: 796886 - DNA, 33 bp, Homo sapien
gagatcccatttaaaagtgttgtctgaacccgt

SEQ ID NO: 796887 - DNA, 33 bp, Homo sapien
gaccttgaagttcatactaaggttctttggtca

SEQ ID NO: 796888 - DNA, 33 bp, Homo sapien
gaccttgaagttcatagtaaggttctttggtca

SEQ ID NO: 796889 - DNA, 33 bp, Homo sapien
gagcgaggtgttatctaacagaaacctggaaaa

SEQ ID NO: 796890 - DNA, 33 bp, Homo sapien
gagcgaggtgttatctgacagaaacctggaaaa

SEQ ID NO: 796891 - DNA, 33 bp, Homo sapien
ctgatatattgctttaagggagttgcttaaaat

SEQ ID NO: 796892 - DNA, 33 bp, Homo sapien
ctgatatattgctttaggggagttgcttaaaat

SEQ ID NO: 796893 - DNA, 33 bp, Homo sapien
aaccctcacaagctgacggtggagatagaaaat

SEQ ID NO: 796894 - DNA, 33 bp, Homo sapien
aaccctcacaagctgatggtggagatagaaaat

SEQ ID NO: 796895 - DNA, 33 bp, Homo sapien
agaataggaaagaaaggaaagtgtgcttggaag

SEQ ID NO: 796896 - DNA, 33 bp, Homo sapien
agaataggaaagaaagtaaagtgtgcttggaag

SEQ ID NO: 796897 - DNA, 33 bp, Homo sapien
cacgaaactctggaacacttacaattaccagtt

SEQ ID NO: 796898 - DNA, 33 bp, Homo sapien
cacgaaactctggaactcttacaattaccagtt

SEQ ID NO: 796899 - DNA, 33 bp, Homo sapien
aataatctgtataacgaaccttcatgacacaag

SEQ ID NO: 796900 - DNA, 33 bp, Homo sapien
aataatctgtataacgtaccttcatgacacaag

SEQ ID NO: 796901 - DNA, 33 bp, Homo sapien
gcatggtgtggagggacgatgtcgggtgtcatt

SEQ ID NO: 796902 - DNA, 33 bp, Homo sapien
gcatggtgtggagggatgatgtcgggtgtcatt

SEQ ID NO: 796903 - DNA, 33 bp, Homo sapien
tcctaaaatggcaagcagatttcctaacaaggc

SEQ ID NO: 796904 - DNA, 33 bp, Homo sapien
tcctaaaatggcaagcggatttcctaacaaggc

SEQ ID NO: 796905 - DNA, 33 bp, Homo sapien
cttacctagccacaatgatatcacacctaataa

SEQ ID NO: 796906 - DNA, 33 bp, Homo sapien
cttacctagccacaattatatcacacctaataa

SEQ ID NO: 796907 - DNA, 33 bp, Homo sapien
aaaacaatctagtagaatcatattaacagcaga

SEQ ID NO: 796908 - DNA, 33 bp, Homo sapien
aaaacaatctagtagagtcatattaacagcaga

SEQ ID NO: 796909 - DNA, 33 bp, Homo sapien
attcacttgttgaagaagtaaaagaactatata

SEQ ID NO: 796910 - DNA, 33 bp, Homo sapien
attcacttgttgaagaggtaaaagaactatata

SEQ ID NO: 796911 - DNA, 33 bp, Homo sapien
ggtaagtagcctcagacagcttttgtatgtgca

SEQ ID NO: 796912 - DNA, 33 bp, Homo sapien
ggtaagtagcctcagatagcttttgtatgtgca

SEQ ID NO: 796913 - DNA, 33 bp, Homo sapien
gaggattgacttcccaatcttgaagcaaaaaat

SEQ ID NO: 796914 - DNA, 33 bp, Homo sapien
gaggattgacttcccagtcttgaagcaaaaaat

SEQ ID NO: 796915 - DNA, 33 bp, Homo sapien
tgctaggtgcttctgacgtacattacttaagta

SEQ ID NO: 796916 - DNA, 33 bp, Homo sapien
tgctaggtgcttctgatgtacattacttaagta

SEQ ID NO: 796917 - DNA, 33 bp, Homo sapien
cctattccaatcctgcaccgtatatcttctcag

SEQ ID NO: 796918 - DNA, 33 bp, Homo sapien
cctattccaatcctgctccgtatatcttctcag

SEQ ID NO: 796919 - DNA, 33 bp, Homo sapien
gcaaggtttctgttcacgtcttctgtccatttt

SEQ ID NO: 796920 - DNA, 33 bp, Homo sapien
gcaaggtttctgttcatgtcttctgtccatttt

SEQ ID NO: 796921 - DNA, 33 bp, Homo sapien
cttatttgtgtaaatcgatgtcatttttggcaa

SEQ ID NO: 796922 - DNA, 33 bp, Homo sapien
cttatttgtgtaaatctatgtcatttttggcaa

SEQ ID NO: 796923 - DNA, 33 bp, Homo sapien
catactcttttcatacaatccagcaatgatgct

SEQ ID NO: 796924 - DNA, 33 bp, Homo sapien
catactcttttcataccatccagcaatgatgct

SEQ ID NO: 796925 - DNA, 33 bp, Homo sapien
ttttcattacagtcaacatggtagtggttgtgg

SEQ ID NO: 796926 - DNA, 33 bp, Homo sapien
ttttcattacagtcaatatggtagtggttgtgg

SEQ ID NO: 796927 - DNA, 33 bp, Homo sapien
ctacaggcatgccctactaagctcaaaaaaatt

SEQ ID NO: 796928 - DNA, 33 bp, Homo sapien
ctacaggcatgccctattaagctcaaaaaaatt

SEQ ID NO: 796929 - DNA, 33 bp, Homo sapien
cctgaaaaagactcaaatactaaaagactgttg

SEQ ID NO: 796930 - DNA, 33 bp, Homo sapien
cctgaaaaagactcaattactaaaagactgttg

SEQ ID NO: 796931 - DNA, 33 bp, Homo sapien
gatccttgaggaattcaaacttaaattagtcca

SEQ ID NO: 796932 - DNA, 33 bp, Homo sapien
gatccttgaggaattcgaacttaaattagtcca

SEQ ID NO: 796933 - DNA, 33 bp, Homo sapien
aatcccagatatttagaattgtgggaactgctg

SEQ ID NO: 796934 - DNA, 33 bp, Homo sapien
aatcccagatatttagcattgtgggaactgctg

SEQ ID NO: 796935 - DNA, 33 bp, Homo sapien
tactctggctgttaccaggagaccaagaaagca

SEQ ID NO: 796936 - DNA, 33 bp, Homo sapien
tactctggctgttaccgggagaccaagaaagca

SEQ ID NO: 796937 - DNA, 33 bp, Homo sapien
atcctcaggttcctaagcagcatctactggtgg

SEQ ID NO: 796938 - DNA, 33 bp, Homo sapien
atcctcaggttcctaatcagcatctactggtgg

SEQ ID NO: 796939 - DNA, 33 bp, Homo sapien
tgtcatcatgccactacagccttctggatggac

SEQ ID NO: 796940 - DNA, 33 bp, Homo sapien
tgtcatcatgccactatagccttctggatggac

SEQ ID NO: 796941 - DNA, 33 bp, Homo sapien
caaggagcagttactacaggcactgggtgagat

SEQ ID NO: 796942 - DNA, 33 bp, Homo sapien
caaggagcagttactataggcactgggtgagat

SEQ ID NO: 796943 - DNA, 33 bp, Homo sapien
ctcagaacagagagacagaatctgtttgggaga

SEQ ID NO: 796944 - DNA, 33 bp, Homo sapien
ctcagaacagagagacggaatctgtttgggaga

SEQ ID NO: 796945 - DNA, 33 bp, Homo sapien
gcatcttactcctttcacacagtacttcttatc

SEQ ID NO: 796946 - DNA, 33 bp, Homo sapien
gcatcttactcctttcccacagtacttcttatc

SEQ ID NO: 796947 - DNA, 33 bp, Homo sapien
gattgtagttagcagaaaaagtgttaagtaata

SEQ ID NO: 796948 - DNA, 33 bp, Homo sapien
gattgtagttagcagataaagtgttaagtaata

SEQ ID NO: 796949 - DNA, 33 bp, Homo sapien
atttttatctgttacacccttctcaatgcaaaa

SEQ ID NO: 796950 - DNA, 33 bp, Homo sapien
atttttatctgttacatccttctcaatgcaaaa

SEQ ID NO: 796951 - DNA, 33 bp, Homo sapien
catgtgtgatgcctgccatatttagggcatgtg

SEQ ID NO: 796952 - DNA, 33 bp, Homo sapien
catgtgtgatgcctgctatatttagggcatgtg

SEQ ID NO: 796953 - DNA, 33 bp, Homo sapien
attgtcatgtaatggaaaatcagtgtgtataag

SEQ ID NO: 796954 - DNA, 33 bp, Homo sapien
attgtcatgtaatggagaatcagtgtgtataag

SEQ ID NO: 796955 - DNA, 33 bp, Homo sapien
agttgacctttggctacattgtcttagtaacac

SEQ ID NO: 796956 - DNA, 33 bp, Homo sapien
agttgacctttggctatattgtcttagtaacac

SEQ ID NO: 796957 - DNA, 33 bp, Homo sapien
ctttttaaaggtttggacagacatattcacctg

SEQ ID NO: 796958 - DNA, 33 bp, Homo sapien
ctttttaaaggtttggtcagacatattcacctg

SEQ ID NO: 796959 - DNA, 33 bp, Homo sapien
taaaacaccaatttcccaaaccccagtttcctg

SEQ ID NO: 796960 - DNA, 33 bp, Homo sapien
taaaacaccaatttccgaaaccccagtttcctg

SEQ ID NO: 796961 - DNA, 33 bp, Homo sapien
ttcactacctatcttacgttttgccagaccact

SEQ ID NO: 796962 - DNA, 33 bp, Homo sapien
ttcactacctatcttatgttttgccagaccact

SEQ ID NO: 796963 - DNA, 33 bp, Homo sapien
cctaggtaggtaactaaaagacaactctgcaga

SEQ ID NO: 796964 - DNA, 33 bp, Homo sapien
cctaggtaggtaactagaagacaactctgcaga

SEQ ID NO: 796965 - DNA, 33 bp, Homo sapien
aatgaatttctgatggcatcttaaaagacaggt

SEQ ID NO: 796966 - DNA, 33 bp, Homo sapien
aatgaatttctgatggtatcttaaaagacaggt

SEQ ID NO: 796967 - DNA, 33 bp, Homo sapien
tctattcatactggcaagattattgaagctaaa

SEQ ID NO: 796968 - DNA, 33 bp, Homo sapien
tctattcatactggcaggattattgaagctaaa

SEQ ID NO: 796969 - DNA, 33 bp, Homo sapien
aacatatcagtggccacattcataagcaagggc

SEQ ID NO: 796970 - DNA, 33 bp, Homo sapien
aacatatcagtggccatattcataagcaagggc

SEQ ID NO: 796971 - DNA, 33 bp, Homo sapien
ttagagctactgctaaacatcgtggctttacat

SEQ ID NO: 796972 - DNA, 33 bp, Homo sapien
ttagagctactgctaaccatcgtggctttacat

SEQ ID NO: 796973 - DNA, 33 bp, Homo sapien
acctgctacgaaatgaaccttgaggaaaggatg

SEQ ID NO: 796974 - DNA, 33 bp, Homo sapien
acctgctacgaaatgagccttgaggaaaggatg

SEQ ID NO: 796975 - DNA, 33 bp, Homo sapien
ttcttcttgggttataccaatatcatcagttcc

SEQ ID NO: 796976 - DNA, 33 bp, Homo sapien
ttcttcttgggttatatcaatatcatcagttcc

SEQ ID NO: 796977 - DNA, 33 bp, Homo sapien
catgttgaaaaatgaaaatgtatggtatgcaca

SEQ ID NO: 796978 - DNA, 33 bp, Homo sapien
catgttgaaaaatgaatatgtatggtatgcaca

SEQ ID NO: 796979 - DNA, 33 bp, Homo sapien
ataccttgcattggaactaagggtgtgttttat

SEQ ID NO: 796980 - DNA, 33 bp, Homo sapien
ataccttgcattggaattaagggtgtgttttat

SEQ ID NO: 796981 - DNA, 33 bp, Homo sapien
atagaggcatagataacctgagtcaggaataaa

SEQ ID NO: 796982 - DNA, 33 bp, Homo sapien
atagaggcatagataatctgagtcaggaataaa

SEQ ID NO: 796983 - DNA, 33 bp, Homo sapien
aacaaaaatttacaaaatatcatctggagaata

SEQ ID NO: 796984 - DNA, 33 bp, Homo sapien
aacaaaaatttacaaagtatcatctggagaata

SEQ ID NO: 796985 - DNA, 33 bp, Homo sapien
atacttcatgcattaacgttaaagttccacaag

SEQ ID NO: 796986 - DNA, 33 bp, Homo sapien
atacttcatgcattaatgttaaagttccacaag

SEQ ID NO: 796987 - DNA, 33 bp, Homo sapien
tgaagttaataacacaaagtggcaagtgctact

SEQ ID NO: 796988 - DNA, 33 bp, Homo sapien
tgaagttaataacacagagtggcaagtgctact

SEQ ID NO: 796989 - DNA, 33 bp, Homo sapien
cacaaaacagtgattgaatctagggagcagaat

SEQ ID NO: 796990 - DNA, 33 bp, Homo sapien
cacaaaacagtgattgcatctagggagcagaat

SEQ ID NO: 796991 - DNA, 33 bp, Homo sapien
atattactatactaaacgctgtaggcaattgta

SEQ ID NO: 796992 - DNA, 33 bp, Homo sapien
atattactatactaaatgctgtaggcaattgta

SEQ ID NO: 796993 - DNA, 33 bp, Homo sapien
tccagaacaccacttacctcatctaccctctac

SEQ ID NO: 796994 - DNA, 33 bp, Homo sapien
tccagaacaccacttatctcatctaccctctac

SEQ ID NO: 796995 - DNA, 33 bp, Homo sapien
tgattatgcagttccaatatagagtctgatgta

SEQ ID NO: 796996 - DNA, 33 bp, Homo sapien
tgattatgcagttccagtatagagtctgatgta

SEQ ID NO: 796997 - DNA, 33 bp, Homo sapien
tcaacattgcaatgaacattctagccacaacaa

SEQ ID NO: 796998 - DNA, 33 bp, Homo sapien
tcaacattgcaatgaagattctagccacaacaa

SEQ ID NO: 796999 - DNA, 33 bp, Homo sapien
aaaaactaccatcctgaattttaagccctgact

SEQ ID NO: 797000 - DNA, 33 bp, Homo sapien
aaaaactaccatcctgcattttaagccctgact

SEQ ID NO: 797001 - DNA, 33 bp, Homo sapien
aaccagacatcttccaactgttgcctagactct

SEQ ID NO: 797002 - DNA, 33 bp, Homo sapien
aaccagacatcttccacctgttgcctagactct

SEQ ID NO: 797003 - DNA, 33 bp, Homo sapien
cagtatgttcaactgcagaaatttcccagtgtg

SEQ ID NO: 797004 - DNA, 33 bp, Homo sapien
cagtatgttcaactgctgaaatttcccagtgtg

SEQ ID NO: 797005 - DNA, 33 bp, Homo sapien
tgagttattttgtttaaattggagctgtttgct

SEQ ID NO: 797006 - DNA, 33 bp, Homo sapien
tgagttattttgtttatattggagctgtttgct

SEQ ID NO: 797007 - DNA, 33 bp, Homo sapien
gtgaaaattgcactaacaaatcatagagttgag

SEQ ID NO: 797008 - DNA, 33 bp, Homo sapien
gtgaaaattgcactaagaaatcatagagttgag

SEQ ID NO: 797009 - DNA, 33 bp, Homo sapien
gattcttcttacatgaagtggcaaatttttcac

SEQ ID NO: 797010 - DNA, 33 bp, Homo sapien
gattcttcttacatgaggtggcaaatttttcac

SEQ ID NO: 797011 - DNA, 33 bp, Homo sapien
agtaaagaagccaggcaatttgctttgttgtaa

SEQ ID NO: 797012 - DNA, 33 bp, Homo sapien
agtaaagaagccaggcgatttgctttgttgtaa

SEQ ID NO: 797013 - DNA, 33 bp, Homo sapien
gctttggataaatcaagctgtctgtattcattt

SEQ ID NO: 797014 - DNA, 33 bp, Homo sapien
gctttggataaatcaatctgtctgtattcattt

SEQ ID NO: 797015 - DNA, 33 bp, Homo sapien
taatcatataaatagaacaaatagtttagcaaa

SEQ ID NO: 797016 - DNA, 33 bp, Homo sapien
taatcatataaatagagcaaatagtttagcaaa

SEQ ID NO: 797017 - DNA, 33 bp, Homo sapien
ctaagatgaatacaaacgtaactggcagagaaa

SEQ ID NO: 797018 - DNA, 33 bp, Homo sapien
ctaagatgaatacaaatgtaactggcagagaaa

SEQ ID NO: 797019 - DNA, 33 bp, Homo sapien
acaaaattaatgacagcaaaagctaagactaac

SEQ ID NO: 797020 - DNA, 33 bp, Homo sapien
acaaaattaatgacagtaaaagctaagactaac

SEQ ID NO: 797021 - DNA, 33 bp, Homo sapien
aatcccacttgccatgaaaatgatacattagag

SEQ ID NO: 797022 - DNA, 33 bp, Homo sapien
aatcccacttgccatggaaatgatacattagag

SEQ ID NO: 797023 - DNA, 33 bp, Homo sapien
aggccatttactctcaacatctactattgtttg

SEQ ID NO: 797024 - DNA, 33 bp, Homo sapien
aggccatttactctcagcatctactattgtttg

SEQ ID NO: 797025 - DNA, 33 bp, Homo sapien
tttaggaaactgttaactgggcaaatcacttaa

SEQ ID NO: 797026 - DNA, 33 bp, Homo sapien
tttaggaaactgttaattgggcaaatcacttaa

SEQ ID NO: 797027 - DNA, 33 bp, Homo sapien
taaaaccattggcataagaagcagtcttttgac

SEQ ID NO: 797028 - DNA, 33 bp, Homo sapien
taaaaccattggcataggaagcagtcttttgac

SEQ ID NO: 797029 - DNA, 33 bp, Homo sapien
agcagagttcatcctcccttgttttctcatcta

SEQ ID NO: 797030 - DNA, 33 bp, Homo sapien
agcagagttcatcctctcttgttttctcatcta

SEQ ID NO: 797031 - DNA, 33 bp, Homo sapien
aatgtgctttatgtacagaaaatgctttatact

SEQ ID NO: 797032 - DNA, 33 bp, Homo sapien
aatgtgctttatgtacggaaaatgctttatact

SEQ ID NO: 797033 - DNA, 33 bp, Homo sapien
cgtttagctctagtcacatttataattttatgt

SEQ ID NO: 797034 - DNA, 33 bp, Homo sapien
cgtttagctctagtcagatttataattttatgt

SEQ ID NO: 797035 - DNA, 33 bp, Homo sapien
tatctctttgttaaaaactatgaccatcaccaa

SEQ ID NO: 797036 - DNA, 33 bp, Homo sapien
tatctctttgttaaaacctatgaccatcaccaa

SEQ ID NO: 797037 - DNA, 33 bp, Homo sapien
tcttagtagttctgtgaagatccatgtatctta

SEQ ID NO: 797038 - DNA, 33 bp, Homo sapien
tcttagtagttctgtgcagatccatgtatctta

SEQ ID NO: 797039 - DNA, 33 bp, Homo sapien
atagccggagaaaatacagcaggcctggactaa

SEQ ID NO: 797040 - DNA, 33 bp, Homo sapien
atagccggagaaaatatagcaggcctggactaa

SEQ ID NO: 797041 - DNA, 33 bp, Homo sapien
catgtaaaaactgacaatcttccttgatccttc

SEQ ID NO: 797042 - DNA, 33 bp, Homo sapien
catgtaaaaactgacagtcttccttgatccttc

SEQ ID NO: 797043 - DNA, 33 bp, Homo sapien
acccagatgctatccccagatgcctcgggttca

SEQ ID NO: 797044 - DNA, 33 bp, Homo sapien
acccagatgctatccctagatgcctcgggttca

SEQ ID NO: 797045 - DNA, 33 bp, Homo sapien
taaaaagcctcaagaacttaagctgatctgcaa

SEQ ID NO: 797046 - DNA, 33 bp, Homo sapien
taaaaagcctcaagaagttaagctgatctgcaa

SEQ ID NO: 797047 - DNA, 33 bp, Homo sapien
gatgttatttactgagaaaattagtgaagggaa

SEQ ID NO: 797048 - DNA, 33 bp, Homo sapien
gatgttatttactgaggaaattagtgaagggaa

SEQ ID NO: 797049 - DNA, 33 bp, Homo sapien
tcattaagcaggacataaattaactgatcaaaa

SEQ ID NO: 797050 - DNA, 33 bp, Homo sapien
tcattaagcaggacattaattaactgatcaaaa

SEQ ID NO: 797051 - DNA, 33 bp, Homo sapien
cccattcagaaaagtaagtgattaaagaaggat

SEQ ID NO: 797052 - DNA, 33 bp, Homo sapien
cccattcagaaaagtatgtgattaaagaaggat

SEQ ID NO: 797053 - DNA, 33 bp, Homo sapien
catctcggagagctataaagaggttcaaaaata

SEQ ID NO: 797054 - DNA, 33 bp, Homo sapien
catctcggagagctatgaagaggttcaaaaata

SEQ ID NO: 797055 - DNA, 33 bp, Homo sapien
tgatactgttattataagtgaccaaatcatgga

SEQ ID NO: 797056 - DNA, 33 bp, Homo sapien
tgatactgttattataggtgaccaaatcatgga

SEQ ID NO: 797057 - DNA, 33 bp, Homo sapien
acaatggcattttatgcaatacaatcattaaac

SEQ ID NO: 797058 - DNA, 33 bp, Homo sapien
acaatggcattttatggaatacaatcattaaac

SEQ ID NO: 797059 - DNA, 33 bp, Homo sapien
tttcttaaaccatttgaatttggcagtattctt

SEQ ID NO: 797060 - DNA, 33 bp, Homo sapien
tttcttaaaccatttggatttggcagtattctt

SEQ ID NO: 797061 - DNA, 33 bp, Homo sapien
aaaatgatataccttacgactatacccagacta

SEQ ID NO: 797062 - DNA, 33 bp, Homo sapien
aaaatgatataccttatgactatacccagacta

SEQ ID NO: 797063 - DNA, 33 bp, Homo sapien
cttggatatctacttacgatctggatatggaca

SEQ ID NO: 797064 - DNA, 33 bp, Homo sapien
cttggatatctacttatgatctggatatggaca

SEQ ID NO: 797065 - DNA, 33 bp, Homo sapien
ttggatgatttagttaaacagcccagccagttg

SEQ ID NO: 797066 - DNA, 33 bp, Homo sapien
ttggatgatttagttatacagcccagccagttg

SEQ ID NO: 797067 - DNA, 33 bp, Homo sapien
agcaacttcataaatagggttagcaaattatgc

SEQ ID NO: 797068 - DNA, 33 bp, Homo sapien
agcaacttcataaatatggttagcaaattatgc

SEQ ID NO: 797069 - DNA, 33 bp, Homo sapien
agagagaaaatagacactgaggtctccaaaagc

SEQ ID NO: 797070 - DNA, 33 bp, Homo sapien
agagagaaaatagacattgaggtctccaaaagc

SEQ ID NO: 797071 - DNA, 33 bp, Homo sapien
gccactgattctttaaataccatcatatctgct

SEQ ID NO: 797072 - DNA, 33 bp, Homo sapien
gccactgattctttaattaccatcatatctgct

SEQ ID NO: 797073 - DNA, 33 bp, Homo sapien
aaagggtagtctgcaaggaaatctatgggatat

SEQ ID NO: 797074 - DNA, 33 bp, Homo sapien
aaagggtagtctgcaatgaaatctatgggatat

SEQ ID NO: 797075 - DNA, 33 bp, Homo sapien
actgtagcaaactataaagcaaattcttgccat

SEQ ID NO: 797076 - DNA, 33 bp, Homo sapien
actgtagcaaactatagagcaaattcttgccat

SEQ ID NO: 797077 - DNA, 33 bp, Homo sapien
ccaccttatgtgtgcccaacacctcagtgtacc

SEQ ID NO: 797078 - DNA, 33 bp, Homo sapien
ccaccttatgtgtgcctaacacctcagtgtacc

SEQ ID NO: 797079 - DNA, 33 bp, Homo sapien
gacttgacaagagacacagcagaaattaagaaa

SEQ ID NO: 797080 - DNA, 33 bp, Homo sapien
gacttgacaagagacagagcagaaattaagaaa

SEQ ID NO: 797081 - DNA, 33 bp, Homo sapien
gctttcactacacccacatattcttcttacttc

SEQ ID NO: 797082 - DNA, 33 bp, Homo sapien
gctttcactacacccatatattcttcttacttc

SEQ ID NO: 797083 - DNA, 33 bp, Homo sapien
ggacccacttgaggagacattctatctgttatc

SEQ ID NO: 797084 - DNA, 33 bp, Homo sapien
ggacccacttgaggaggcattctatctgttatc

SEQ ID NO: 797085 - DNA, 33 bp, Homo sapien
aggcgttctggttttcacaattttcaggctgtt

SEQ ID NO: 797086 - DNA, 33 bp, Homo sapien
aggcgttctggttttcgcaattttcaggctgtt

SEQ ID NO: 797087 - DNA, 33 bp, Homo sapien
gggatggggagcctaacagaacaaaatagtcaa

SEQ ID NO: 797088 - DNA, 33 bp, Homo sapien
gggatggggagcctaagagaacaaaatagtcaa

SEQ ID NO: 797089 - DNA, 33 bp, Homo sapien
agatactagtttcagcaccatctaacctctcac

SEQ ID NO: 797090 - DNA, 33 bp, Homo sapien
agatactagtttcagcgccatctaacctctcac

SEQ ID NO: 797091 - DNA, 33 bp, Homo sapien
atgcactatccttaccaagtttcttattcctca

SEQ ID NO: 797092 - DNA, 33 bp, Homo sapien
atgcactatccttaccgagtttcttattcctca

SEQ ID NO: 797093 - DNA, 33 bp, Homo sapien
ataaatgaaatggcatcagagattacagaggca

SEQ ID NO: 797094 - DNA, 33 bp, Homo sapien
ataaatgaaatggcattagagattacagaggca

SEQ ID NO: 797095 - DNA, 33 bp, Homo sapien
gtgtcataagtaatgaaagaaccaagaataaat

SEQ ID NO: 797096 - DNA, 33 bp, Homo sapien
gtgtcataagtaatgagagaaccaagaataaat

SEQ ID NO: 797097 - DNA, 33 bp, Homo sapien
caatgaccctatcaaaagctgttgctcagcttc

SEQ ID NO: 797098 - DNA, 33 bp, Homo sapien
caatgaccctatcaaaggctgttgctcagcttc

SEQ ID NO: 797099 - DNA, 33 bp, Homo sapien
agaatatacatccttcacctctacagacagaac

SEQ ID NO: 797100 - DNA, 33 bp, Homo sapien
agaatatacatccttcgcctctacagacagaac

SEQ ID NO: 797101 - DNA, 33 bp, Homo sapien
tatatagagatattcaatagaccatttaactca

SEQ ID NO: 797102 - DNA, 33 bp, Homo sapien
tatatagagatattcagtagaccatttaactca

SEQ ID NO: 797103 - DNA, 33 bp, Homo sapien
ttggaccaaagattaaactatggaatggtaaga

SEQ ID NO: 797104 - DNA, 33 bp, Homo sapien
ttggaccaaagattaagctatggaatggtaaga

SEQ ID NO: 797105 - DNA, 33 bp, Homo sapien
aaatatgacctttataactccatttaatgtgat

SEQ ID NO: 797106 - DNA, 33 bp, Homo sapien
aaatatgacctttatagctccatttaatgtgat

SEQ ID NO: 797107 - DNA, 33 bp, Homo sapien
tacataactgcaaagaagatgttatttttacac

SEQ ID NO: 797108 - DNA, 33 bp, Homo sapien
tacataactgcaaagatgatgttatttttacac

SEQ ID NO: 797109 - DNA, 33 bp, Homo sapien
acaggtgatatttgtgaagtagacgatggagaa

SEQ ID NO: 797110 - DNA, 33 bp, Homo sapien
acaggtgatatttgtgcagtagacgatggagaa

SEQ ID NO: 797111 - DNA, 33 bp, Homo sapien
tagatacagatttgggaattttcgatatcctgt

SEQ ID NO: 797112 - DNA, 33 bp, Homo sapien
tagatacagatttgggcattttcgatatcctgt

SEQ ID NO: 797113 - DNA, 33 bp, Homo sapien
tacctctctgagctcacgcgctactatgtattt

SEQ ID NO: 797114 - DNA, 33 bp, Homo sapien
tacctctctgagctcatgcgctactatgtattt

SEQ ID NO: 797115 - DNA, 33 bp, Homo sapien
agaactttcttgcctaagggtattttgcagttt

SEQ ID NO: 797116 - DNA, 33 bp, Homo sapien
agaactttcttgcctatgggtattttgcagttt

SEQ ID NO: 797117 - DNA, 33 bp, Homo sapien
actgatgctggatctgctttactagcacatttc

SEQ ID NO: 797118 - DNA, 33 bp, Homo sapien
actgatgctggatctgttttactagcacatttc

SEQ ID NO: 797119 - DNA, 33 bp, Homo sapien
gcctcttagaggtaaaactaaagcaccaggata

SEQ ID NO: 797120 - DNA, 33 bp, Homo sapien
gcctcttagaggtaaatctaaagcaccaggata

SEQ ID NO: 797121 - DNA, 33 bp, Homo sapien
gttttgctatgttaacccttcctgtttttctgg

SEQ ID NO: 797122 - DNA, 33 bp, Homo sapien
gttttgctatgttaactcttcctgtttttctgg

SEQ ID NO: 797123 - DNA, 33 bp, Homo sapien
gttctcttttgagacactaatttttctcttgaa

SEQ ID NO: 797124 - DNA, 33 bp, Homo sapien
gttctcttttgagacattaatttttctcttgaa

SEQ ID NO: 797125 - DNA, 33 bp, Homo sapien
ttttagacatatggaaacagtttgagtatgaag

SEQ ID NO: 797126 - DNA, 33 bp, Homo sapien
ttttagacatatggaagcagtttgagtatgaag

SEQ ID NO: 797127 - DNA, 33 bp, Homo sapien
ctatatgtcaccccaccattgatgttccatcac

SEQ ID NO: 797128 - DNA, 33 bp, Homo sapien
ctatatgtcaccccactattgatgttccatcac

SEQ ID NO: 797129 - DNA, 33 bp, Homo sapien
ctatctaagcctacaacgcttaccatatcatgc

SEQ ID NO: 797130 - DNA, 33 bp, Homo sapien
ctatctaagcctacaatgcttaccatatcatgc

SEQ ID NO: 797131 - DNA, 33 bp, Homo sapien
ttaggtgataagacatcagttagtgataaaaat

SEQ ID NO: 797132 - DNA, 33 bp, Homo sapien
ttaggtgataagacatgagttagtgataaaaat

SEQ ID NO: 797133 - DNA, 33 bp, Homo sapien
tttttgactgctacaactccagcacttggaaca

SEQ ID NO: 797134 - DNA, 33 bp, Homo sapien
tttttgactgctacaattccagcacttggaaca

SEQ ID NO: 797135 - DNA, 33 bp, Homo sapien
gtaggtgtgcagttataaatagggtggttagat

SEQ ID NO: 797136 - DNA, 33 bp, Homo sapien
gtaggtgtgcagttatgaatagggtggttagat

SEQ ID NO: 797137 - DNA, 33 bp, Homo sapien
ctccctcagacatctgcatagcttaaatatcat

SEQ ID NO: 797138 - DNA, 33 bp, Homo sapien
ctccctcagacatctgtatagcttaaatatcat

SEQ ID NO: 797139 - DNA, 33 bp, Homo sapien
aacagttgtaaggtcagatatcatgctaactga

SEQ ID NO: 797140 - DNA, 33 bp, Homo sapien
aacagttgtaaggtcatatatcatgctaactga

SEQ ID NO: 797141 - DNA, 33 bp, Homo sapien
atttagagctacgctgaaagaaatcagcccttc

SEQ ID NO: 797142 - DNA, 33 bp, Homo sapien
atttagagctacgctggaagaaatcagcccttc

SEQ ID NO: 797143 - DNA, 33 bp, Homo sapien
ccacagagtttcctaacgtccatcttcactaca

SEQ ID NO: 797144 - DNA, 33 bp, Homo sapien
ccacagagtttcctaatgtccatcttcactaca

SEQ ID NO: 797145 - DNA, 33 bp, Homo sapien
tttatctggcatagtacagacatttacattgat

SEQ ID NO: 797146 - DNA, 33 bp, Homo sapien
tttatctggcatagtagagacatttacattgat

SEQ ID NO: 797147 - DNA, 33 bp, Homo sapien
tattatggacaagtcaatcctcttaagtatttt

SEQ ID NO: 797148 - DNA, 33 bp, Homo sapien
tattatggacaagtcagtcctcttaagtatttt

SEQ ID NO: 797149 - DNA, 33 bp, Homo sapien
ctgtcactgctgtcaagaaatttctatttaact

SEQ ID NO: 797150 - DNA, 33 bp, Homo sapien
ctgtcactgctgtcaataaatttctatttaact

SEQ ID NO: 797151 - DNA, 33 bp, Homo sapien
catctctgcactagtcaccacagcaaagacata

SEQ ID NO: 797152 - DNA, 33 bp, Homo sapien
catctctgcactagtcgccacagcaaagacata

SEQ ID NO: 797153 - DNA, 33 bp, Homo sapien
acaagattctggtgaccaaacccatcatcttaa

SEQ ID NO: 797154 - DNA, 33 bp, Homo sapien
acaagattctggtgactaaacccatcatcttaa

SEQ ID NO: 797155 - DNA, 33 bp, Homo sapien
ctgctccttcccaaaagttctcagctagccctc

SEQ ID NO: 797156 - DNA, 33 bp, Homo sapien
ctgctccttcccaaaatttctcagctagccctc

SEQ ID NO: 797157 - DNA, 33 bp, Homo sapien
gcctgtttggataataaggtgtttaaatggaag

SEQ ID NO: 797158 - DNA, 33 bp, Homo sapien
gcctgtttggataatagggtgtttaaatggaag

SEQ ID NO: 797159 - DNA, 33 bp, Homo sapien
ccatttaatatagaagaccaaattctactgctg

SEQ ID NO: 797160 - DNA, 33 bp, Homo sapien
ccatttaatatagaaggccaaattctactgctg

SEQ ID NO: 797161 - DNA, 33 bp, Homo sapien
catttgaagctataagactatgtaaacagaaaa

SEQ ID NO: 797162 - DNA, 33 bp, Homo sapien
catttgaagctataaggctatgtaaacagaaaa

SEQ ID NO: 797163 - DNA, 33 bp, Homo sapien
ttgtattatttgatcaaagccttcattctttac

SEQ ID NO: 797164 - DNA, 33 bp, Homo sapien
ttgtattatttgatcagagccttcattctttac

SEQ ID NO: 797165 - DNA, 33 bp, Homo sapien
agaatactttaaatacactctaggcaattataa

SEQ ID NO: 797166 - DNA, 33 bp, Homo sapien
agaatactttaaatactctctaggcaattataa

SEQ ID NO: 797167 - DNA, 33 bp, Homo sapien
attctgagcatcaagaaaaatgatctggaagca

SEQ ID NO: 797168 - DNA, 33 bp, Homo sapien
attctgagcatcaagagaaatgatctggaagca

SEQ ID NO: 797169 - DNA, 33 bp, Homo sapien
aaaaattctagcagagaaaatgcttgttaaaaa

SEQ ID NO: 797170 - DNA, 33 bp, Homo sapien
aaaaattctagcagaggaaatgcttgttaaaaa

SEQ ID NO: 797171 - DNA, 33 bp, Homo sapien
gcaagtaaataaaaccagagatgatggtgcaat

SEQ ID NO: 797172 - DNA, 33 bp, Homo sapien
gcaagtaaataaaaccggagatgatggtgcaat

SEQ ID NO: 797173 - DNA, 33 bp, Homo sapien
agcaagcctggaaggaccacagggccacatggt

SEQ ID NO: 797174 - DNA, 33 bp, Homo sapien
agcaagcctggaaggatcacagggccacatggt

SEQ ID NO: 797175 - DNA, 33 bp, Homo sapien
tcatggaatattgtgacagcttttgggattcct

SEQ ID NO: 797176 - DNA, 33 bp, Homo sapien
tcatggaatattgtgatagcttttgggattcct

SEQ ID NO: 797177 - DNA, 33 bp, Homo sapien
atcttttcaccatagcacattgctagcatttca

SEQ ID NO: 797178 - DNA, 33 bp, Homo sapien
atcttttcaccatagcgcattgctagcatttca

SEQ ID NO: 797179 - DNA, 33 bp, Homo sapien
gggttggatggtaaaggaatagcaaaaatgtat

SEQ ID NO: 797180 - DNA, 33 bp, Homo sapien
gggttggatggtaaagtaatagcaaaaatgtat

SEQ ID NO: 797181 - DNA, 33 bp, Homo sapien
catgtagtttgtatcacctagtttctaagagag

SEQ ID NO: 797182 - DNA, 33 bp, Homo sapien
catgtagtttgtatcatctagtttctaagagag

SEQ ID NO: 797183 - DNA, 33 bp, Homo sapien
atgcacactggtaagacgcaggttttcataatt

SEQ ID NO: 797184 - DNA, 33 bp, Homo sapien
atgcacactggtaagatgcaggttttcataatt

SEQ ID NO: 797185 - DNA, 33 bp, Homo sapien
cgtgatagtgaataataaatctcacaagatctg

SEQ ID NO: 797186 - DNA, 33 bp, Homo sapien
cgtgatagtgaataatcaatctcacaagatctg

SEQ ID NO: 797187 - DNA, 33 bp, Homo sapien
ttatcagttctgttcaacagctacgggccacac

SEQ ID NO: 797188 - DNA, 33 bp, Homo sapien
ttatcagttctgttcagcagctacgggccacac

SEQ ID NO: 797189 - DNA, 33 bp, Homo sapien
atggtgctctgccagacatctacaacaaacact

SEQ ID NO: 797190 - DNA, 33 bp, Homo sapien
atggtgctctgccagatatctacaacaaacact

SEQ ID NO: 797191 - DNA, 33 bp, Homo sapien
agccttggaaaatctcactctaaatagaaaggc

SEQ ID NO: 797192 - DNA, 33 bp, Homo sapien
agccttggaaaatctctctctaaatagaaaggc

SEQ ID NO: 797193 - DNA, 33 bp, Homo sapien
actcataatcatcaagaaaactcactaaggatt

SEQ ID NO: 797194 - DNA, 33 bp, Homo sapien
actcataatcatcaagcaaactcactaaggatt

SEQ ID NO: 797195 - DNA, 33 bp, Homo sapien
gaaggatgtttactgacgttgtggaagaaatat

SEQ ID NO: 797196 - DNA, 33 bp, Homo sapien
gaaggatgtttactgatgttgtggaagaaatat

SEQ ID NO: 797197 - DNA, 33 bp, Homo sapien
ctttattagctcaatacgttacccagaaatgat

SEQ ID NO: 797198 - DNA, 33 bp, Homo sapien
ctttattagctcaatatgttacccagaaatgat

SEQ ID NO: 797199 - DNA, 33 bp, Homo sapien
aaagagtatattagacacactgaagcaatggag

SEQ ID NO: 797200 - DNA, 33 bp, Homo sapien
aaagagtatattagacccactgaagcaatggag

SEQ ID NO: 797201 - DNA, 33 bp, Homo sapien
aataaaaatgtttggacagcagtaagtttaata

SEQ ID NO: 797202 - DNA, 33 bp, Homo sapien
aataaaaatgtttggagagcagtaagtttaata

SEQ ID NO: 797203 - DNA, 33 bp, Homo sapien
atttccataagctaaactgttaccaagtgagac

SEQ ID NO: 797204 - DNA, 33 bp, Homo sapien
atttccataagctaaattgttaccaagtgagac

SEQ ID NO: 797205 - DNA, 33 bp, Homo sapien
gtatctgaaaggaatacgtacgtgaaaggtcca

SEQ ID NO: 797206 - DNA, 33 bp, Homo sapien
gtatctgaaaggaatatgtacgtgaaaggtcca

SEQ ID NO: 797207 - DNA, 33 bp, Homo sapien
aaggtctcaagactccagatacttaaatgatac

SEQ ID NO: 797208 - DNA, 33 bp, Homo sapien
aaggtctcaagactccggatacttaaatgatac

SEQ ID NO: 797209 - DNA, 33 bp, Homo sapien
tgacagaacttcaagtaaaaatagattaagcaa

SEQ ID NO: 797210 - DNA, 33 bp, Homo sapien
tgacagaacttcaagtgaaaatagattaagcaa

SEQ ID NO: 797211 - DNA, 33 bp, Homo sapien
tctgtattctttcagcaaagctactaatctgag

SEQ ID NO: 797212 - DNA, 33 bp, Homo sapien
tctgtattctttcagcgaagctactaatctgag

SEQ ID NO: 797213 - DNA, 33 bp, Homo sapien
ggaaggctacaaagaaaggagaacacttataca

SEQ ID NO: 797214 - DNA, 33 bp, Homo sapien
ggaaggctacaaagaagggagaacacttataca

SEQ ID NO: 797215 - DNA, 33 bp, Homo sapien
aaaccaactagaagccaaataactgcctctccc

SEQ ID NO: 797216 - DNA, 33 bp, Homo sapien
aaaccaactagaagcctaataactgcctctccc

SEQ ID NO: 797217 - DNA, 33 bp, Homo sapien
gatacctaagtaattcacaaaaggagtaaaaat

SEQ ID NO: 797218 - DNA, 33 bp, Homo sapien
gatacctaagtaattcgcaaaaggagtaaaaat

SEQ ID NO: 797219 - DNA, 33 bp, Homo sapien
gctatgataggcatggcaattatcttctttttc

SEQ ID NO: 797220 - DNA, 33 bp, Homo sapien
gctatgataggcatggtaattatcttctttttc

SEQ ID NO: 797221 - DNA, 33 bp, Homo sapien
acctgtttatgcaaaaaaccaatgggcagttaa

SEQ ID NO: 797222 - DNA, 33 bp, Homo sapien
acctgtttatgcaaaagaccaatgggcagttaa

SEQ ID NO: 797223 - DNA, 33 bp, Homo sapien
ttacattttgtatctgcaggacttgaaatataa

SEQ ID NO: 797224 - DNA, 33 bp, Homo sapien
ttacattttgtatctgtaggacttgaaatataa

SEQ ID NO: 797225 - DNA, 33 bp, Homo sapien
cacttctcttctttggccactcgtatgagctag

SEQ ID NO: 797226 - DNA, 33 bp, Homo sapien
cacttctcttctttggtcactcgtatgagctag

SEQ ID NO: 797227 - DNA, 33 bp, Homo sapien
aatatgtagcagttgaagattcttgccacttta

SEQ ID NO: 797228 - DNA, 33 bp, Homo sapien
aatatgtagcagttgaggattcttgccacttta

SEQ ID NO: 797229 - DNA, 33 bp, Homo sapien
ttgtacttctcttcaacaggcctggatttcctg

SEQ ID NO: 797230 - DNA, 33 bp, Homo sapien
ttgtacttctcttcaataggcctggatttcctg

SEQ ID NO: 797231 - DNA, 33 bp, Homo sapien
tatgaaaaaaagctcactattactaatcattag

SEQ ID NO: 797232 - DNA, 33 bp, Homo sapien
tatgaaaaaaagctcattattactaatcattag

SEQ ID NO: 797233 - DNA, 33 bp, Homo sapien
tccagtatggtattcacggaagaatttgcccat

SEQ ID NO: 797234 - DNA, 33 bp, Homo sapien
tccagtatggtattcatggaagaatttgcccat

SEQ ID NO: 797235 - DNA, 33 bp, Homo sapien
aacttgctgttcttaccattctcaaactgattg

SEQ ID NO: 797236 - DNA, 33 bp, Homo sapien
aacttgctgttcttacgattctcaaactgattg

SEQ ID NO: 797237 - DNA, 33 bp, Homo sapien
aaaatatgttgactaaccataactgaatacaga

SEQ ID NO: 797238 - DNA, 33 bp, Homo sapien
aaaatatgttgactaatcataactgaatacaga

SEQ ID NO: 797239 - DNA, 33 bp, Homo sapien
atgaggacagaatttccctaacaccataaccag

SEQ ID NO: 797240 - DNA, 33 bp, Homo sapien
atgaggacagaatttcgctaacaccataaccag

SEQ ID NO: 797241 - DNA, 33 bp, Homo sapien
gcattgtgtacaagtaaagaggtaagcatgatt

SEQ ID NO: 797242 - DNA, 33 bp, Homo sapien
gcattgtgtacaagtatagaggtaagcatgatt

SEQ ID NO: 797243 - DNA, 33 bp, Homo sapien
ttaactactactactaaatgaccttacatgccc

SEQ ID NO: 797244 - DNA, 33 bp, Homo sapien
ttaactactactactacatgaccttacatgccc

SEQ ID NO: 797245 - DNA, 33 bp, Homo sapien
ttgatgaagaaggacaatgaggtgagaagtgac

SEQ ID NO: 797246 - DNA, 33 bp, Homo sapien
ttgatgaagaaggacagtgaggtgagaagtgac

SEQ ID NO: 797247 - DNA, 33 bp, Homo sapien
ttgtttcacacgtttaaatactatattctctgt

SEQ ID NO: 797248 - DNA, 33 bp, Homo sapien
ttgtttcacacgtttagatactatattctctgt

SEQ ID NO: 797249 - DNA, 33 bp, Homo sapien
tttataagtggtataacatagtgatgaaacaca

SEQ ID NO: 797250 - DNA, 33 bp, Homo sapien
tttataagtggtataagatagtgatgaaacaca

SEQ ID NO: 797251 - DNA, 33 bp, Homo sapien
tcagaggagaaaaagagctgctctcagataatt

SEQ ID NO: 797252 - DNA, 33 bp, Homo sapien
tcagaggagaaaaagatctgctctcagataatt

SEQ ID NO: 797253 - DNA, 33 bp, Homo sapien
caggcactgcaggaaccaggcaaacttgtgcaa

SEQ ID NO: 797254 - DNA, 33 bp, Homo sapien
caggcactgcaggaacgaggcaaacttgtgcaa

SEQ ID NO: 797255 - DNA, 33 bp, Homo sapien
acacagtgcagttgccacatacctagctaaaca

SEQ ID NO: 797256 - DNA, 33 bp, Homo sapien
acacagtgcagttgccgcatacctagctaaaca

SEQ ID NO: 797257 - DNA, 33 bp, Homo sapien
agagaaactgcataggaaaaatccaggagaaag

SEQ ID NO: 797258 - DNA, 33 bp, Homo sapien
agagaaactgcatagggaaaatccaggagaaag

SEQ ID NO: 797259 - DNA, 33 bp, Homo sapien
tacagtaggatttctaaggtatctagctttatt

SEQ ID NO: 797260 - DNA, 33 bp, Homo sapien
tacagtaggatttctagggtatctagctttatt

SEQ ID NO: 797261 - DNA, 33 bp, Homo sapien
gaaacattaaagactacatgtactgattgttat

SEQ ID NO: 797262 - DNA, 33 bp, Homo sapien
gaaacattaaagactatatgtactgattgttat

SEQ ID NO: 797263 - DNA, 33 bp, Homo sapien
aatacttgaagaagaactggctagaaatgtccc

SEQ ID NO: 797264 - DNA, 33 bp, Homo sapien
aatacttgaagaagaattggctagaaatgtccc

SEQ ID NO: 797265 - DNA, 33 bp, Homo sapien
aaaaatagtcaaacaacctttgaaaagaacatg

SEQ ID NO: 797266 - DNA, 33 bp, Homo sapien
aaaaatagtcaaacaatctttgaaaagaacatg

SEQ ID NO: 797267 - DNA, 33 bp, Homo sapien
ttgcatgagacactcaatccttgcctgcagtat

SEQ ID NO: 797268 - DNA, 33 bp, Homo sapien
ttgcatgagacactcagtccttgcctgcagtat

SEQ ID NO: 797269 - DNA, 33 bp, Homo sapien
tcatttccatagaaaacttttcagttgagaaga

SEQ ID NO: 797270 - DNA, 33 bp, Homo sapien
tcatttccatagaaaagttttcagttgagaaga

SEQ ID NO: 797271 - DNA, 33 bp, Homo sapien
aacttctaaatttcaaacaacttcattttagtg

SEQ ID NO: 797272 - DNA, 33 bp, Homo sapien
aacttctaaatttcaagcaacttcattttagtg

SEQ ID NO: 797273 - DNA, 33 bp, Homo sapien
ctgacaatggtttaaagttgccactctcacttc

SEQ ID NO: 797274 - DNA, 33 bp, Homo sapien
ctgacaatggtttaaatttgccactctcacttc

SEQ ID NO: 797275 - DNA, 33 bp, Homo sapien
aatccactgagatttgaaagttaacattattga

SEQ ID NO: 797276 - DNA, 33 bp, Homo sapien
aatccactgagatttggaagttaacattattga

SEQ ID NO: 797277 - DNA, 33 bp, Homo sapien
aagactcagacaaaataagaagatgattctcct

SEQ ID NO: 797278 - DNA, 33 bp, Homo sapien
aagactcagacaaaatgagaagatgattctcct

SEQ ID NO: 797279 - DNA, 33 bp, Homo sapien
tttttgacattgtactcaccttttagaaaagtc

SEQ ID NO: 797280 - DNA, 33 bp, Homo sapien
tttttgacattgtacttaccttttagaaaagtc

SEQ ID NO: 797281 - DNA, 33 bp, Homo sapien
ctgcactgaggaaaaacacacctacattattac

SEQ ID NO: 797282 - DNA, 33 bp, Homo sapien
ctgcactgaggaaaaatacacctacattattac

SEQ ID NO: 797283 - DNA, 33 bp, Homo sapien
aactcaatcctgttcacaattgccacaaaaaga

SEQ ID NO: 797284 - DNA, 33 bp, Homo sapien
aactcaatcctgttcataattgccacaaaaaga

SEQ ID NO: 797285 - DNA, 33 bp, Homo sapien
aaagccgtttatgaaaatcagtagacatcacgg

SEQ ID NO: 797286 - DNA, 33 bp, Homo sapien
aaagccgtttatgaaactcagtagacatcacgg

SEQ ID NO: 797287 - DNA, 33 bp, Homo sapien
gtgggtggttgtagaactgctgaaacaagtggt

SEQ ID NO: 797288 - DNA, 33 bp, Homo sapien
gtgggtggttgtagaattgctgaaacaagtggt

SEQ ID NO: 797289 - DNA, 33 bp, Homo sapien
aatctttgtttagaaacgctttgtagatggcaa

SEQ ID NO: 797290 - DNA, 33 bp, Homo sapien
aatctttgtttagaaaggctttgtagatggcaa

SEQ ID NO: 797291 - DNA, 33 bp, Homo sapien
ttatgttactttgaaaactgttaaaataatgta

SEQ ID NO: 797292 - DNA, 33 bp, Homo sapien
ttatgttactttgaaagctgttaaaataatgta

SEQ ID NO: 797293 - DNA, 33 bp, Homo sapien
acacaaagtaacaaggcatctaaagacacaggg

SEQ ID NO: 797294 - DNA, 33 bp, Homo sapien
acacaaagtaacaaggtatctaaagacacaggg

SEQ ID NO: 797295 - DNA, 33 bp, Homo sapien
gccaggactcaagagcacctagtggaagacagt

SEQ ID NO: 797296 - DNA, 33 bp, Homo sapien
gccaggactcaagagcgcctagtggaagacagt

SEQ ID NO: 797297 - DNA, 33 bp, Homo sapien
gcaaggcagaagccaaataaggggctagtttca

SEQ ID NO: 797298 - DNA, 33 bp, Homo sapien
gcaaggcagaagccaagtaaggggctagtttca

SEQ ID NO: 797299 - DNA, 33 bp, Homo sapien
tatatgaggacagatacaaagaagtgagtagat

SEQ ID NO: 797300 - DNA, 33 bp, Homo sapien
tatatgaggacagatataaagaagtgagtagat

SEQ ID NO: 797301 - DNA, 33 bp, Homo sapien
aaagatacatattgataagccagtatgcactaa

SEQ ID NO: 797302 - DNA, 33 bp, Homo sapien
aaagatacatattgatgagccagtatgcactaa

SEQ ID NO: 797303 - DNA, 33 bp, Homo sapien
atttggatctttcaccacatttggagagttttc

SEQ ID NO: 797304 - DNA, 33 bp, Homo sapien
atttggatctttcaccgcatttggagagttttc

SEQ ID NO: 797305 - DNA, 33 bp, Homo sapien
tctcagaacttgtcttcaaaatttgtcacattg

SEQ ID NO: 797306 - DNA, 33 bp, Homo sapien
tctcagaacttgtcttgaaaatttgtcacattg

SEQ ID NO: 797307 - DNA, 33 bp, Homo sapien
tcaagaagttggggtgcaatatatctaaagaga

SEQ ID NO: 797308 - DNA, 33 bp, Homo sapien
tcaagaagttggggtgtaatatatctaaagaga

SEQ ID NO: 797309 - DNA, 33 bp, Homo sapien
acagtacacacacataacagctactcagtaaat

SEQ ID NO: 797310 - DNA, 33 bp, Homo sapien
acagtacacacacatagcagctactcagtaaat

SEQ ID NO: 797311 - DNA, 33 bp, Homo sapien
aaaaggatcaccgtagacattgtttaaaatata

SEQ ID NO: 797312 - DNA, 33 bp, Homo sapien
aaaaggatcaccgtagccattgtttaaaatata

SEQ ID NO: 797313 - DNA, 33 bp, Homo sapien
caaaaacagtggagtacgaacaccagggctttt

SEQ ID NO: 797314 - DNA, 33 bp, Homo sapien
caaaaacagtggagtaggaacaccagggctttt

SEQ ID NO: 797315 - DNA, 33 bp, Homo sapien
tgtattgtagaactcaaatcctggaaaggagat

SEQ ID NO: 797316 - DNA, 33 bp, Homo sapien
tgtattgtagaactcagatcctggaaaggagat

SEQ ID NO: 797317 - DNA, 33 bp, Homo sapien
caaagcctcttcatgaactcttcgaattcccaa

SEQ ID NO: 797318 - DNA, 33 bp, Homo sapien
caaagcctcttcatgatctcttcgaattcccaa

SEQ ID NO: 797319 - DNA, 33 bp, Homo sapien
atagatgtgactctacacctctcactaaaatca

SEQ ID NO: 797320 - DNA, 33 bp, Homo sapien
atagatgtgactctacgcctctcactaaaatca

SEQ ID NO: 797321 - DNA, 33 bp, Homo sapien
atggataagacactacaacttctgtgatcttaa

SEQ ID NO: 797322 - DNA, 33 bp, Homo sapien
atggataagacactacgacttctgtgatcttaa

SEQ ID NO: 797323 - DNA, 33 bp, Homo sapien
gatttcataagtctcacgaaggcctgctttgta

SEQ ID NO: 797324 - DNA, 33 bp, Homo sapien
gatttcataagtctcatgaaggcctgctttgta

SEQ ID NO: 797325 - DNA, 33 bp, Homo sapien
tgcaactataacactaagactattttgcagtaa

SEQ ID NO: 797326 - DNA, 33 bp, Homo sapien
tgcaactataacactatgactattttgcagtaa

SEQ ID NO: 797327 - DNA, 33 bp, Homo sapien
tccatatgattagtaacggaaagagatctggtg

SEQ ID NO: 797328 - DNA, 33 bp, Homo sapien
tccatatgattagtaatggaaagagatctggtg

SEQ ID NO: 797329 - DNA, 33 bp, Homo sapien
ttatttgttttaatgcacagtaaagtgattatg

SEQ ID NO: 797330 - DNA, 33 bp, Homo sapien
ttatttgttttaatgcccagtaaagtgattatg

SEQ ID NO: 797331 - DNA, 33 bp, Homo sapien
aaatatgaagagtaaacgaggctttgagactat

SEQ ID NO: 797332 - DNA, 33 bp, Homo sapien
aaatatgaagagtaaatgaggctttgagactat

SEQ ID NO: 797333 - DNA, 33 bp, Homo sapien
agtttcctgtgctcaccgatgacttatttctgc

SEQ ID NO: 797334 - DNA, 33 bp, Homo sapien
agtttcctgtgctcactgatgacttatttctgc

SEQ ID NO: 797335 - DNA, 33 bp, Homo sapien
tctctctacctaccaacaattgtactggcagaa

SEQ ID NO: 797336 - DNA, 33 bp, Homo sapien
tctctctacctaccaataattgtactggcagaa

SEQ ID NO: 797337 - DNA, 33 bp, Homo sapien
acacacgcacacaatgaaagtcgttagaatcaa

SEQ ID NO: 797338 - DNA, 33 bp, Homo sapien
acacacgcacacaatggaagtcgttagaatcaa

SEQ ID NO: 797339 - DNA, 33 bp, Homo sapien
gtcactagatgcaaaacgataagatataaatga

SEQ ID NO: 797340 - DNA, 33 bp, Homo sapien
gtcactagatgcaaaatgataagatataaatga

SEQ ID NO: 797341 - DNA, 33 bp, Homo sapien
caagtatcctacctcccagtgcagcatttattt

SEQ ID NO: 797342 - DNA, 33 bp, Homo sapien
caagtatcctacctcctagtgcagcatttattt

SEQ ID NO: 797343 - DNA, 33 bp, Homo sapien
tccaaaaaaattgcaccattcttccttagttgt

SEQ ID NO: 797344 - DNA, 33 bp, Homo sapien
tccaaaaaaattgcactattcttccttagttgt

SEQ ID NO: 797345 - DNA, 33 bp, Homo sapien
gaaataacgtcaagaacgtagataatagcaaag

SEQ ID NO: 797346 - DNA, 33 bp, Homo sapien
gaaataacgtcaagaatgtagataatagcaaag

SEQ ID NO: 797347 - DNA, 33 bp, Homo sapien
tgtcattagtttcaaaatcaaaatcccagatga

SEQ ID NO: 797348 - DNA, 33 bp, Homo sapien
tgtcattagtttcaaattcaaaatcccagatga

SEQ ID NO: 797349 - DNA, 33 bp, Homo sapien
ttgtacagcagatacccatattggtcacaacat

SEQ ID NO: 797350 - DNA, 33 bp, Homo sapien
ttgtacagcagatacctatattggtcacaacat

SEQ ID NO: 797351 - DNA, 33 bp, Homo sapien
ttgactggcatcacgcaaactcagtgtgctagg

SEQ ID NO: 797352 - DNA, 33 bp, Homo sapien
ttgactggcatcacgcgaactcagtgtgctagg

SEQ ID NO: 797353 - DNA, 33 bp, Homo sapien
taaggaaaattgaagaaggtttatataagacaa

SEQ ID NO: 797354 - DNA, 33 bp, Homo sapien
taaggaaaattgaagatggtttatataagacaa

SEQ ID NO: 797355 - DNA, 33 bp, Homo sapien
gatgagggactttggtaaactgaattcaggaca

SEQ ID NO: 797356 - DNA, 33 bp, Homo sapien
gatgagggactttggttaactgaattcaggaca

SEQ ID NO: 797357 - DNA, 33 bp, Homo sapien
aatcgattttttaaaactaagatgcattcgatt

SEQ ID NO: 797358 - DNA, 33 bp, Homo sapien
aatcgattttttaaaattaagatgcattcgatt

SEQ ID NO: 797359 - DNA, 33 bp, Homo sapien
tctatgttattctaagaaattattgcaagtcat

SEQ ID NO: 797360 - DNA, 33 bp, Homo sapien
tctatgttattctaaggaattattgcaagtcat

SEQ ID NO: 797361 - DNA, 33 bp, Homo sapien
cttcctcatttacttacactgattggacaattc

SEQ ID NO: 797362 - DNA, 33 bp, Homo sapien
cttcctcatttacttatactgattggacaattc

SEQ ID NO: 797363 - DNA, 33 bp, Homo sapien
ctcttaaggaggttcagaaatgtatgaggagtg

SEQ ID NO: 797364 - DNA, 33 bp, Homo sapien
ctcttaaggaggttcataaatgtatgaggagtg

SEQ ID NO: 797365 - DNA, 33 bp, Homo sapien
tatatgctatataccacattgtctggcaaaatc

SEQ ID NO: 797366 - DNA, 33 bp, Homo sapien
tatatgctatataccatattgtctggcaaaatc

SEQ ID NO: 797367 - DNA, 33 bp, Homo sapien
agagctacagatccaaacttgatgagttaggga

SEQ ID NO: 797368 - DNA, 33 bp, Homo sapien
agagctacagatccaagcttgatgagttaggga

SEQ ID NO: 797369 - DNA, 33 bp, Homo sapien
atgaaagcaaaaggaacgggctgcctcctgagg

SEQ ID NO: 797370 - DNA, 33 bp, Homo sapien
atgaaagcaaaaggaatgggctgcctcctgagg

SEQ ID NO: 797371 - DNA, 33 bp, Homo sapien
gcacagtggctctacacgcttcttcatacatcc

SEQ ID NO: 797372 - DNA, 33 bp, Homo sapien
gcacagtggctctacatgcttcttcatacatcc

SEQ ID NO: 797373 - DNA, 33 bp, Homo sapien
ttaggggaaagccagagaaggggcattcctgat

SEQ ID NO: 797374 - DNA, 33 bp, Homo sapien
ttaggggaaagccagataaggggcattcctgat

SEQ ID NO: 797375 - DNA, 33 bp, Homo sapien
atgtggcagagagagaagattcatagctaactc

SEQ ID NO: 797376 - DNA, 33 bp, Homo sapien
atgtggcagagagagaggattcatagctaactc

SEQ ID NO: 797377 - DNA, 33 bp, Homo sapien
ttgagaggaattacccaagaatggagggaaagt

SEQ ID NO: 797378 - DNA, 33 bp, Homo sapien
ttgagaggaattacccgagaatggagggaaagt

SEQ ID NO: 797379 - DNA, 33 bp, Homo sapien
ccaactgtcagaataaccatggacagtggccct

SEQ ID NO: 797380 - DNA, 33 bp, Homo sapien
ccaactgtcagaataatcatggacagtggccct

SEQ ID NO: 797381 - DNA, 33 bp, Homo sapien
tttgctggttctcagacaatccagtcaaaatac

SEQ ID NO: 797382 - DNA, 33 bp, Homo sapien
tttgctggttctcagataatccagtcaaaatac

SEQ ID NO: 797383 - DNA, 33 bp, Homo sapien
ctaagaagccaagaaccaatgacattctcctaa

SEQ ID NO: 797384 - DNA, 33 bp, Homo sapien
ctaagaagccaagaactaatgacattctcctaa

SEQ ID NO: 797385 - DNA, 33 bp, Homo sapien
caattcattattatcaactgctcattgttagtt

SEQ ID NO: 797386 - DNA, 33 bp, Homo sapien
caattcattattatcagctgctcattgttagtt

SEQ ID NO: 797387 - DNA, 33 bp, Homo sapien
ccaaactctaaatcaacgaagtggcagtctttg

SEQ ID NO: 797388 - DNA, 33 bp, Homo sapien
ccaaactctaaatcaaggaagtggcagtctttg

SEQ ID NO: 797389 - DNA, 33 bp, Homo sapien
gacacagcaaaacatactaagtaagtagagcaa

SEQ ID NO: 797390 - DNA, 33 bp, Homo sapien
gacacagcaaaacatattaagtaagtagagcaa

SEQ ID NO: 797391 - DNA, 33 bp, Homo sapien
ccaaagtaaaaatacacaagttggactacctca

SEQ ID NO: 797392 - DNA, 33 bp, Homo sapien
ccaaagtaaaaatacagaagttggactacctca

SEQ ID NO: 797393 - DNA, 33 bp, Homo sapien
tatgcaaacaaaacaaaattacaagtggtgttg

SEQ ID NO: 797394 - DNA, 33 bp, Homo sapien
tatgcaaacaaaacaacattacaagtggtgttg

SEQ ID NO: 797395 - DNA, 33 bp, Homo sapien
gtcagactcaattgcccgatgtacttttctctt

SEQ ID NO: 797396 - DNA, 33 bp, Homo sapien
gtcagactcaattgcctgatgtacttttctctt

SEQ ID NO: 797397 - DNA, 33 bp, Homo sapien
tttcccttctattttcccacctgctgttggctt

SEQ ID NO: 797398 - DNA, 33 bp, Homo sapien
tttcccttctattttctcacctgctgttggctt

SEQ ID NO: 797399 - DNA, 33 bp, Homo sapien
tgtaaggtatcctgtaacaagcaatgtttgtct

SEQ ID NO: 797400 - DNA, 33 bp, Homo sapien
tgtaaggtatcctgtagcaagcaatgtttgtct

SEQ ID NO: 797401 - DNA, 33 bp, Homo sapien
gacctgatctgaatccaaaataccatcttgaag

SEQ ID NO: 797402 - DNA, 33 bp, Homo sapien
gacctgatctgaatcccaaataccatcttgaag

SEQ ID NO: 797403 - DNA, 33 bp, Homo sapien
tttgataaagcaaaaaggtagttctttcccttg

SEQ ID NO: 797404 - DNA, 33 bp, Homo sapien
tttgataaagcaaaaatgtagttctttcccttg

SEQ ID NO: 797405 - DNA, 33 bp, Homo sapien
aacacttaccacacatcaggctttataaatatt

SEQ ID NO: 797406 - DNA, 33 bp, Homo sapien
aacacttaccacacatgaggctttataaatatt

SEQ ID NO: 797407 - DNA, 33 bp, Homo sapien
tttagtgtacctcaaaattagcaatgctttcaa

SEQ ID NO: 797408 - DNA, 33 bp, Homo sapien
tttagtgtacctcaaacttagcaatgctttcaa

SEQ ID NO: 797409 - DNA, 33 bp, Homo sapien
cataatttgaaccgtaaccttctcttgttcaaa

SEQ ID NO: 797410 - DNA, 33 bp, Homo sapien
cataatttgaaccgtagccttctcttgttcaaa

SEQ ID NO: 797411 - DNA, 33 bp, Homo sapien
gcctttaaccactgtactaaacagcttccaaga

SEQ ID NO: 797412 - DNA, 33 bp, Homo sapien
gcctttaaccactgtagtaaacagcttccaaga

SEQ ID NO: 797413 - DNA, 33 bp, Homo sapien
attagttactgtacctaaattctgtctttggtt

SEQ ID NO: 797414 - DNA, 33 bp, Homo sapien
attagttactgtacctgaattctgtctttggtt

SEQ ID NO: 797415 - DNA, 33 bp, Homo sapien
gctggtgagaatgtgagagtaacaagttgaaga

SEQ ID NO: 797416 - DNA, 33 bp, Homo sapien
gctggtgagaatgtgatagtaacaagttgaaga

SEQ ID NO: 797417 - DNA, 33 bp, Homo sapien
cagggaattcaagaaaaagagactgagggtaca

SEQ ID NO: 797418 - DNA, 33 bp, Homo sapien
cagggaattcaagaaagagagactgagggtaca

SEQ ID NO: 797419 - DNA, 33 bp, Homo sapien
gtcacctgtggaaacacaaaagaggcagcatat

SEQ ID NO: 797420 - DNA, 33 bp, Homo sapien
gtcacctgtggaaacataaaagaggcagcatat

SEQ ID NO: 797421 - DNA, 33 bp, Homo sapien
catgctaaaagtggacaagagccttaaaaggca

SEQ ID NO: 797422 - DNA, 33 bp, Homo sapien
catgctaaaagtggacgagagccttaaaaggca

SEQ ID NO: 797423 - DNA, 33 bp, Homo sapien
gtttctctagaaggaactcagaaacaacctcct

SEQ ID NO: 797424 - DNA, 33 bp, Homo sapien
gtttctctagaaggaagtcagaaacaacctcct

SEQ ID NO: 797425 - DNA, 33 bp, Homo sapien
accaggattggcctgaataataaaacaatttgg

SEQ ID NO: 797426 - DNA, 33 bp, Homo sapien
accaggattggcctgagtaataaaacaatttgg

SEQ ID NO: 797427 - DNA, 33 bp, Homo sapien
gctcatgtaccataacaatttctccctcttcct

SEQ ID NO: 797428 - DNA, 33 bp, Homo sapien
gctcatgtaccataacgatttctccctcttcct

SEQ ID NO: 797429 - DNA, 33 bp, Homo sapien
tgattttaaaaatcaacggtcaaatagtacctt

SEQ ID NO: 797430 - DNA, 33 bp, Homo sapien
tgattttaaaaatcaatggtcaaatagtacctt

SEQ ID NO: 797431 - DNA, 33 bp, Homo sapien
aaaaaaaggcaaatcaatgattccagtgtgaat

SEQ ID NO: 797432 - DNA, 33 bp, Homo sapien
aaaaaaaggcaaatcagtgattccagtgtgaat

SEQ ID NO: 797433 - DNA, 33 bp, Homo sapien
tcacttggaaagaccaatgctttattgtgaact

SEQ ID NO: 797434 - DNA, 33 bp, Homo sapien
tcacttggaaagaccagtgctttattgtgaact

SEQ ID NO: 797435 - DNA, 33 bp, Homo sapien
aaagtttcaaacagcggattaattttcttcaaa

SEQ ID NO: 797436 - DNA, 33 bp, Homo sapien
aaagtttcaaacagcgtattaattttcttcaaa

SEQ ID NO: 797437 - DNA, 33 bp, Homo sapien
gtaagcactattgttgcatcaatcattaggaga

SEQ ID NO: 797438 - DNA, 33 bp, Homo sapien
gtaagcactattgttggatcaatcattaggaga

SEQ ID NO: 797439 - DNA, 33 bp, Homo sapien
cactaaagaaacgacacgggcaaattaagtgaa

SEQ ID NO: 797440 - DNA, 33 bp, Homo sapien
cactaaagaaacgacatgggcaaattaagtgaa

SEQ ID NO: 797441 - DNA, 33 bp, Homo sapien
acttcttacaagaaacggcctcaagaaaacagt

SEQ ID NO: 797442 - DNA, 33 bp, Homo sapien
acttcttacaagaaactgcctcaagaaaacagt

SEQ ID NO: 797443 - DNA, 33 bp, Homo sapien
tactctgttgttgataagtgtagtgttccctgt

SEQ ID NO: 797444 - DNA, 33 bp, Homo sapien
tactctgttgttgataggtgtagtgttccctgt

SEQ ID NO: 797445 - DNA, 33 bp, Homo sapien
gatcttacatcttgcaaccttattaaatcactt

SEQ ID NO: 797446 - DNA, 33 bp, Homo sapien
gatcttacatcttgcagccttattaaatcactt

SEQ ID NO: 797447 - DNA, 33 bp, Homo sapien
acaaactgatgctagaaatcatacggaactgca

SEQ ID NO: 797448 - DNA, 33 bp, Homo sapien
acaaactgatgctagatatcatacggaactgca

SEQ ID NO: 797449 - DNA, 33 bp, Homo sapien
tctcactcatttagtgccaccttttatgtaaat

SEQ ID NO: 797450 - DNA, 33 bp, Homo sapien
tctcactcatttagtgtcaccttttatgtaaat

SEQ ID NO: 797451 - DNA, 33 bp, Homo sapien
caagatctcaagagaacgaactctcaccatcac

SEQ ID NO: 797452 - DNA, 33 bp, Homo sapien
caagatctcaagagaatgaactctcaccatcac

SEQ ID NO: 797453 - DNA, 33 bp, Homo sapien
aacttataaacaattggatgctcaatcttttga

SEQ ID NO: 797454 - DNA, 33 bp, Homo sapien
aacttataaacaattgtatgctcaatcttttga

SEQ ID NO: 797455 - DNA, 33 bp, Homo sapien
tggaatttagaattaacaagtattaggtgactt

SEQ ID NO: 797456 - DNA, 33 bp, Homo sapien
tggaatttagaattaagaagtattaggtgactt

SEQ ID NO: 797457 - DNA, 33 bp, Homo sapien
agaaagaaccatattacagaagggataggagag

SEQ ID NO: 797458 - DNA, 33 bp, Homo sapien
agaaagaaccatattatagaagggataggagag

SEQ ID NO: 797459 - DNA, 33 bp, Homo sapien
tttagacataaggctaccacacacaataaacta

SEQ ID NO: 797460 - DNA, 33 bp, Homo sapien
tttagacataaggctatcacacacaataaacta

SEQ ID NO: 797461 - DNA, 33 bp, Homo sapien
ggtaaggagtatcctagaacgatggattctgga

SEQ ID NO: 797462 - DNA, 33 bp, Homo sapien
ggtaaggagtatcctataacgatggattctgga

SEQ ID NO: 797463 - DNA, 33 bp, Homo sapien
tttgcaattcaaaacaactaatgtctggttatt

SEQ ID NO: 797464 - DNA, 33 bp, Homo sapien
tttgcaattcaaaacagctaatgtctggttatt

SEQ ID NO: 797465 - DNA, 33 bp, Homo sapien
agccattaaatcatgaaacactgttgctattta

SEQ ID NO: 797466 - DNA, 33 bp, Homo sapien
agccattaaatcatgagacactgttgctattta

SEQ ID NO: 797467 - DNA, 33 bp, Homo sapien
tctgcaccctgttcgcaatgccagggtacatgt

SEQ ID NO: 797468 - DNA, 33 bp, Homo sapien
tctgcaccctgttcgcgatgccagggtacatgt

SEQ ID NO: 797469 - DNA, 33 bp, Homo sapien
tccttaagaatgttaccagagtcttagcatagg

SEQ ID NO: 797470 - DNA, 33 bp, Homo sapien
tccttaagaatgttactagagtcttagcatagg

SEQ ID NO: 797471 - DNA, 33 bp, Homo sapien
ttctgttcaattacaaaaatttctgctctagat

SEQ ID NO: 797472 - DNA, 33 bp, Homo sapien
ttctgttcaattacaataatttctgctctagat

SEQ ID NO: 797473 - DNA, 33 bp, Homo sapien
taaaaagtttcaaagaatcaatcgaaagaaaaa

SEQ ID NO: 797474 - DNA, 33 bp, Homo sapien
taaaaagtttcaaagactcaatcgaaagaaaaa

SEQ ID NO: 797475 - DNA, 33 bp, Homo sapien
tggcttcttcttataacagtgtctttcacagag

SEQ ID NO: 797476 - DNA, 33 bp, Homo sapien
tggcttcttcttataatagtgtctttcacagag

SEQ ID NO: 797477 - DNA, 33 bp, Homo sapien
aatttgaagttccccaatgacatatgttgagca

SEQ ID NO: 797478 - DNA, 33 bp, Homo sapien
aatttgaagttccccagtgacatatgttgagca

SEQ ID NO: 797479 - DNA, 33 bp, Homo sapien
gcagttagtgggtaggaataaacaggtaaagca

SEQ ID NO: 797480 - DNA, 33 bp, Homo sapien
gcagttagtgggtagggataaacaggtaaagca

SEQ ID NO: 797481 - DNA, 33 bp, Homo sapien
gatcagccttctaataggggccttttctcaatc

SEQ ID NO: 797482 - DNA, 33 bp, Homo sapien
gatcagccttctaatatgggccttttctcaatc

SEQ ID NO: 797483 - DNA, 33 bp, Homo sapien
tttaaagtcagtagtaggtaaaatggattttct

SEQ ID NO: 797484 - DNA, 33 bp, Homo sapien
tttaaagtcagtagtatgtaaaatggattttct

SEQ ID NO: 797485 - DNA, 33 bp, Homo sapien
tcaatgaagtaatcaaacgagttaagaaaatgc

SEQ ID NO: 797486 - DNA, 33 bp, Homo sapien
tcaatgaagtaatcaagcgagttaagaaaatgc

SEQ ID NO: 797487 - DNA, 33 bp, Homo sapien
ctactcctgttgtatagaagaagcatccataaa

SEQ ID NO: 797488 - DNA, 33 bp, Homo sapien
ctactcctgttgtatataagaagcatccataaa

SEQ ID NO: 797489 - DNA, 33 bp, Homo sapien
aaatgtgttgctacttaaaggtgtctttttaaa

SEQ ID NO: 797490 - DNA, 33 bp, Homo sapien
aaatgtgttgctacttgaaggtgtctttttaaa

SEQ ID NO: 797491 - DNA, 33 bp, Homo sapien
ggaatgagtacttagaatagaccttttaaataa

SEQ ID NO: 797492 - DNA, 33 bp, Homo sapien
ggaatgagtacttagactagaccttttaaataa

SEQ ID NO: 797493 - DNA, 33 bp, Homo sapien
ggttaggacgacatataaattttgaggagagac

SEQ ID NO: 797494 - DNA, 33 bp, Homo sapien
ggttaggacgacatatgaattttgaggagagac

SEQ ID NO: 797495 - DNA, 33 bp, Homo sapien
tacctgggctacaaaccctaatatatctgaatt

SEQ ID NO: 797496 - DNA, 33 bp, Homo sapien
tacctgggctacaaactctaatatatctgaatt

SEQ ID NO: 797497 - DNA, 33 bp, Homo sapien
gagacaatcaaggaaaactgaacatggactgag

SEQ ID NO: 797498 - DNA, 33 bp, Homo sapien
gagacaatcaaggaaatctgaacatggactgag

SEQ ID NO: 797499 - DNA, 33 bp, Homo sapien
agccaaattgatatctaaaattgaccatcacaa

SEQ ID NO: 797500 - DNA, 33 bp, Homo sapien
agccaaattgatatctgaaattgaccatcacaa

SEQ ID NO: 797501 - DNA, 33 bp, Homo sapien
aacaatttctataacacgtaccctttcatagga

SEQ ID NO: 797502 - DNA, 33 bp, Homo sapien
aacaatttctataacatgtaccctttcatagga

SEQ ID NO: 797503 - DNA, 33 bp, Homo sapien
agaaacacacaaaaaaatggtcacagtttactg

SEQ ID NO: 797504 - DNA, 33 bp, Homo sapien
agaaacacacaaaaaagtggtcacagtttactg

SEQ ID NO: 797505 - DNA, 33 bp, Homo sapien
atgagaaagaaccagcacatgaaaactgatgta

SEQ ID NO: 797506 - DNA, 33 bp, Homo sapien
atgagaaagaaccagcgcatgaaaactgatgta

SEQ ID NO: 797507 - DNA, 33 bp, Homo sapien
gtaacattgcttatggaaaaaataatgtctgat

SEQ ID NO: 797508 - DNA, 33 bp, Homo sapien
gtaacattgcttatggtaaaaataatgtctgat

SEQ ID NO: 797509 - DNA, 33 bp, Homo sapien
aacaaacttgaaaaaactgagatcatatcgagt

SEQ ID NO: 797510 - DNA, 33 bp, Homo sapien
aacaaacttgaaaaaattgagatcatatcgagt

SEQ ID NO: 797511 - DNA, 33 bp, Homo sapien
aagcaggagaaggacaagtaatcatgaggaagt

SEQ ID NO: 797512 - DNA, 33 bp, Homo sapien
aagcaggagaaggacaggtaatcatgaggaagt

SEQ ID NO: 797513 - DNA, 33 bp, Homo sapien
cttcaacccattctaacctggtttgcctctctt

SEQ ID NO: 797514 - DNA, 33 bp, Homo sapien
cttcaacccattctaatctggtttgcctctctt

SEQ ID NO: 797515 - DNA, 33 bp, Homo sapien
acttttctaagttccaaagactcagattatata

SEQ ID NO: 797516 - DNA, 33 bp, Homo sapien
acttttctaagttccagagactcagattatata

SEQ ID NO: 797517 - DNA, 33 bp, Homo sapien
gagaagagagaaaagactaaagaggacattgtc

SEQ ID NO: 797518 - DNA, 33 bp, Homo sapien
gagaagagagaaaagagtaaagaggacattgtc

SEQ ID NO: 797519 - DNA, 33 bp, Homo sapien
ctatcaacagaatcaacaatctacagaatggga

SEQ ID NO: 797520 - DNA, 33 bp, Homo sapien
ctatcaacagaatcaataatctacagaatggga

SEQ ID NO: 797521 - DNA, 33 bp, Homo sapien
ttaacatttagggtgaatatttgtccaaactgg

SEQ ID NO: 797522 - DNA, 33 bp, Homo sapien
ttaacatttagggtgactatttgtccaaactgg

SEQ ID NO: 797523 - DNA, 33 bp, Homo sapien
aaaattgattaaaaacaaaatctctgccctcag

SEQ ID NO: 797524 - DNA, 33 bp, Homo sapien
aaaattgattaaaaacgaaatctctgccctcag

SEQ ID NO: 797525 - DNA, 33 bp, Homo sapien
tgggcgaatatacagggaatagccttattccat

SEQ ID NO: 797526 - DNA, 33 bp, Homo sapien
tgggcgaatatacaggtaatagccttattccat

SEQ ID NO: 797527 - DNA, 33 bp, Homo sapien
gtttatcaagttgacacgtgaaaggtataagga

SEQ ID NO: 797528 - DNA, 33 bp, Homo sapien
gtttatcaagttgacatgtgaaaggtataagga

SEQ ID NO: 797529 - DNA, 33 bp, Homo sapien
tcatatatataatacactcattcagtttattgt

SEQ ID NO: 797530 - DNA, 33 bp, Homo sapien
tcatatatataatacattcattcagtttattgt

SEQ ID NO: 797531 - DNA, 33 bp, Homo sapien
aattgagattgtttccaaggttttgctgttatt

SEQ ID NO: 797532 - DNA, 33 bp, Homo sapien
aattgagattgtttccgaggttttgctgttatt

SEQ ID NO: 797533 - DNA, 33 bp, Homo sapien
gttgctgcaccagaccaatctgtttcttcttct

SEQ ID NO: 797534 - DNA, 33 bp, Homo sapien
gttgctgcaccagaccgatctgtttcttcttct

SEQ ID NO: 797535 - DNA, 33 bp, Homo sapien
ttaatgctatgcaacacaagaaaaaggaccaag

SEQ ID NO: 797536 - DNA, 33 bp, Homo sapien
ttaatgctatgcaacataagaaaaaggaccaag

SEQ ID NO: 797537 - DNA, 33 bp, Homo sapien
tctaggcttaaatagaaccaatgcccaatatga

SEQ ID NO: 797538 - DNA, 33 bp, Homo sapien
tctaggcttaaatagatccaatgcccaatatga

SEQ ID NO: 797539 - DNA, 33 bp, Homo sapien
ggttaaacttcggcacacttaaagattttagga

SEQ ID NO: 797540 - DNA, 33 bp, Homo sapien
ggttaaacttcggcacgcttaaagattttagga

SEQ ID NO: 797541 - DNA, 33 bp, Homo sapien
gtatctttgaaaagccagcagtgacaagcagaa

SEQ ID NO: 797542 - DNA, 33 bp, Homo sapien
gtatctttgaaaagccggcagtgacaagcagaa

SEQ ID NO: 797543 - DNA, 33 bp, Homo sapien
agagaatgtcagtcaccggtaactattataacc

SEQ ID NO: 797544 - DNA, 33 bp, Homo sapien
agagaatgtcagtcactggtaactattataacc

SEQ ID NO: 797545 - DNA, 33 bp, Homo sapien
ccaaatagcacaaaacaaataggtcatggtgaa

SEQ ID NO: 797546 - DNA, 33 bp, Homo sapien
ccaaatagcacaaaacgaataggtcatggtgaa

SEQ ID NO: 797547 - DNA, 33 bp, Homo sapien
tcacagcctatgtttcaagccctatacattctg

SEQ ID NO: 797548 - DNA, 33 bp, Homo sapien
tcacagcctatgtttcgagccctatacattctg

SEQ ID NO: 797549 - DNA, 33 bp, Homo sapien
cctttgtgttggagaccggggaaagagtgtgag

SEQ ID NO: 797550 - DNA, 33 bp, Homo sapien
cctttgtgttggagactggggaaagagtgtgag

SEQ ID NO: 797551 - DNA, 33 bp, Homo sapien
acatacagcatacatacgggcctggctggttgg

SEQ ID NO: 797552 - DNA, 33 bp, Homo sapien
acatacagcatacatatgggcctggctggttgg

SEQ ID NO: 797553 - DNA, 33 bp, Homo sapien
tattcatagtgagaaaataagacttcccaaaga

SEQ ID NO: 797554 - DNA, 33 bp, Homo sapien
tattcatagtgagaaagtaagacttcccaaaga

SEQ ID NO: 797555 - DNA, 33 bp, Homo sapien
tctcgctcaataaagacctgcaggtgaattcgc

SEQ ID NO: 797556 - DNA, 33 bp, Homo sapien
tctcgctcaataaagatctgcaggtgaattcgc

SEQ ID NO: 797557 - DNA, 33 bp, Homo sapien
gccaagagcactttaaacccaacatgctcacac

SEQ ID NO: 797558 - DNA, 33 bp, Homo sapien
gccaagagcactttaagcccaacatgctcacac

SEQ ID NO: 797559 - DNA, 33 bp, Homo sapien
ggaaaagtgggcaggacatctgactgtcaggtg

SEQ ID NO: 797560 - DNA, 33 bp, Homo sapien
ggaaaagtgggcaggatatctgactgtcaggtg

SEQ ID NO: 797561 - DNA, 33 bp, Homo sapien
ccttgcctattaggaccgaagctgagctctgaa

SEQ ID NO: 797562 - DNA, 33 bp, Homo sapien
ccttgcctattaggactgaagctgagctctgaa

SEQ ID NO: 797563 - DNA, 33 bp, Homo sapien
acacaagtatgatcacggcgtattttgaattgg

SEQ ID NO: 797564 - DNA, 33 bp, Homo sapien
acacaagtatgatcactgcgtattttgaattgg

SEQ ID NO: 797565 - DNA, 33 bp, Homo sapien
gacagaccctattgaccagtgcctgggaccccg

SEQ ID NO: 797566 - DNA, 33 bp, Homo sapien
gacagaccctattgacgagtgcctgggaccccg

SEQ ID NO: 797567 - DNA, 33 bp, Homo sapien
gggggatgagtcttcaaggtcttgtgcctgagc

SEQ ID NO: 797568 - DNA, 33 bp, Homo sapien
gggggatgagtcttcagggtcttgtgcctgagc

SEQ ID NO: 797569 - DNA, 33 bp, Homo sapien
tccaacttggcactaccgtaaataatattgcaa

SEQ ID NO: 797570 - DNA, 33 bp, Homo sapien
tccaacttggcactactgtaaataatattgcaa

SEQ ID NO: 797571 - DNA, 33 bp, Homo sapien
gcttggttgtagatgacaggagccttgaatggc

SEQ ID NO: 797572 - DNA, 33 bp, Homo sapien
gcttggttgtagatgataggagccttgaatggc

SEQ ID NO: 797573 - DNA, 33 bp, Homo sapien
cccgctgtactctgctgaatgaggctagaaaga

SEQ ID NO: 797574 - DNA, 33 bp, Homo sapien
cccgctgtactctgcttaatgaggctagaaaga

SEQ ID NO: 797575 - DNA, 33 bp, Homo sapien
agtggtcacttgtaccggggagtgaataattct

SEQ ID NO: 797576 - DNA, 33 bp, Homo sapien
agtggtcacttgtacctgggagtgaataattct

SEQ ID NO: 797577 - DNA, 33 bp, Homo sapien
attcctgtaatgttccaattgctataattacat

SEQ ID NO: 797578 - DNA, 33 bp, Homo sapien
attcctgtaatgttcctattgctataattacat

SEQ ID NO: 797579 - DNA, 33 bp, Homo sapien
cattgattcatgattacgtggtttgttgttgtc

SEQ ID NO: 797580 - DNA, 33 bp, Homo sapien
cattgattcatgattatgtggtttgttgttgtc

SEQ ID NO: 797581 - DNA, 33 bp, Homo sapien
ttgatttcttctttgacgcacgagttatttttg

SEQ ID NO: 797582 - DNA, 33 bp, Homo sapien
ttgatttcttctttgatgcacgagttatttttg

SEQ ID NO: 797583 - DNA, 33 bp, Homo sapien
tgaccctgcagcagggaatagaaaggcgagggt

SEQ ID NO: 797584 - DNA, 33 bp, Homo sapien
tgaccctgcagcaggggatagaaaggcgagggt

SEQ ID NO: 797585 - DNA, 33 bp, Homo sapien
cagccaagcagtgcaaccagatgtcccctgctc

SEQ ID NO: 797586 - DNA, 33 bp, Homo sapien
cagccaagcagtgcaatcagatgtcccctgctc

SEQ ID NO: 797587 - DNA, 33 bp, Homo sapien
gaatgaattgtgcctacggagtacgcaagctgg

SEQ ID NO: 797588 - DNA, 33 bp, Homo sapien
gaatgaattgtgcctatggagtacgcaagctgg

SEQ ID NO: 797589 - DNA, 33 bp, Homo sapien
ctcccacccggggccaatcatcttgaagaagtc

SEQ ID NO: 797590 - DNA, 33 bp, Homo sapien
ctcccacccggggccagtcatcttgaagaagtc

SEQ ID NO: 797591 - DNA, 33 bp, Homo sapien
caaacaagaagtggaaacctttgctgagttcct

SEQ ID NO: 797592 - DNA, 33 bp, Homo sapien
caaacaagaagtggaagcctttgctgagttcct

SEQ ID NO: 797593 - DNA, 33 bp, Homo sapien
atgaagagaggcttcacggaaggctgtctagga

SEQ ID NO: 797594 - DNA, 33 bp, Homo sapien
atgaagagaggcttcatggaaggctgtctagga

SEQ ID NO: 797595 - DNA, 33 bp, Homo sapien
agacggtaagactggacgactgtggcctgagga

SEQ ID NO: 797596 - DNA, 33 bp, Homo sapien
agacggtaagactggatgactgtggcctgagga

SEQ ID NO: 797597 - DNA, 33 bp, Homo sapien
acctcgttgagcttgacctgaggctttcaaggg

SEQ ID NO: 797598 - DNA, 33 bp, Homo sapien
acctcgttgagcttgatctgaggctttcaaggg

SEQ ID NO: 797599 - DNA, 33 bp, Homo sapien
aggacttcagaaattaaacaggcttctggtctc

SEQ ID NO: 797600 - DNA, 33 bp, Homo sapien
aggacttcagaaattatacaggcttctggtctc

SEQ ID NO: 797601 - DNA, 33 bp, Homo sapien
cacaaggtcacagggaagtttgagaggtcagcc

SEQ ID NO: 797602 - DNA, 33 bp, Homo sapien
cacaaggtcacagggaggtttgagaggtcagcc

SEQ ID NO: 797603 - DNA, 33 bp, Homo sapien
cataaggatgacaaaaacggtcagggtcctgcc

SEQ ID NO: 797604 - DNA, 33 bp, Homo sapien
cataaggatgacaaaatcggtcagggtcctgcc

SEQ ID NO: 797605 - DNA, 33 bp, Homo sapien
gcaaccagtgttggaacccaggtggaaataaga

SEQ ID NO: 797606 - DNA, 33 bp, Homo sapien
gcaaccagtgttggaatccaggtggaaataaga

SEQ ID NO: 797607 - DNA, 33 bp, Homo sapien
agtatgtagctatccaagttaagtgcccacagg

SEQ ID NO: 797608 - DNA, 33 bp, Homo sapien
agtatgtagctatccaggttaagtgcccacagg

SEQ ID NO: 797609 - DNA, 33 bp, Homo sapien
tgccccgaggcccctgccaacaaatgtcacttc

SEQ ID NO: 797610 - DNA, 33 bp, Homo sapien
tgccccgaggcccctgtcaacaaatgtcacttc

SEQ ID NO: 797611 - DNA, 33 bp, Homo sapien
tgcctggcactcagcaacttgacctggtcataa

SEQ ID NO: 797612 - DNA, 33 bp, Homo sapien
tgcctggcactcagcaccttgacctggtcataa

SEQ ID NO: 797613 - DNA, 33 bp, Homo sapien
cctgagatgacggttacaccctgagaagacggt

SEQ ID NO: 797614 - DNA, 33 bp, Homo sapien
cctgagatgacggttataccctgagaagacggt

SEQ ID NO: 797615 - DNA, 33 bp, Homo sapien
ccctctgacccacatcaatatcgggtacctggg

SEQ ID NO: 797616 - DNA, 33 bp, Homo sapien
ccctctgacccacatcgatatcgggtacctggg

SEQ ID NO: 797617 - DNA, 33 bp, Homo sapien
gggcttttgtattataggtctgctgctattctc

SEQ ID NO: 797618 - DNA, 33 bp, Homo sapien
gggcttttgtattatatgtctgctgctattctc

SEQ ID NO: 797619 - DNA, 33 bp, Homo sapien
tttaccaggaagcagcaagagaggcataatgga

SEQ ID NO: 797620 - DNA, 33 bp, Homo sapien
tttaccaggaagcagcgagagaggcataatgga

SEQ ID NO: 797621 - DNA, 33 bp, Homo sapien
cctttcaataaacagcactgaggcaattgttat

SEQ ID NO: 797622 - DNA, 33 bp, Homo sapien
cctttcaataaacagctctgaggcaattgttat

SEQ ID NO: 797623 - DNA, 33 bp, Homo sapien
cttctgcaagtaaccacaattctcagctaggtg

SEQ ID NO: 797624 - DNA, 33 bp, Homo sapien
cttctgcaagtaaccagaattctcagctaggtg

SEQ ID NO: 797625 - DNA, 33 bp, Homo sapien
aaggcctttccaatgcaagacttcccactccta

SEQ ID NO: 797626 - DNA, 33 bp, Homo sapien
aaggcctttccaatgcgagacttcccactccta

SEQ ID NO: 797627 - DNA, 33 bp, Homo sapien
cacatgaaagctaaagcagtttttaccaaatct

SEQ ID NO: 797628 - DNA, 33 bp, Homo sapien
cacatgaaagctaaagtagtttttaccaaatct

SEQ ID NO: 797629 - DNA, 33 bp, Homo sapien
ttgcccactttttcacagggtcatttgattttt

SEQ ID NO: 797630 - DNA, 33 bp, Homo sapien
ttgcccactttttcacggggtcatttgattttt

SEQ ID NO: 797631 - DNA, 33 bp, Homo sapien
cacaaagtatgttatccgaccacaacagaataa

SEQ ID NO: 797632 - DNA, 33 bp, Homo sapien
cacaaagtatgttatctgaccacaacagaataa

SEQ ID NO: 797633 - DNA, 33 bp, Homo sapien
ggacatgatagaaagacgactggaagagaaacg

SEQ ID NO: 797634 - DNA, 33 bp, Homo sapien
ggacatgatagaaagatgactggaagagaaacg

SEQ ID NO: 797635 - DNA, 33 bp, Homo sapien
gcctctgctgtggagaaggtatcaaactcattg

SEQ ID NO: 797636 - DNA, 33 bp, Homo sapien
gcctctgctgtggagagggtatcaaactcattg

SEQ ID NO: 797637 - DNA, 33 bp, Homo sapien
ctggtggctacatccaaaattggaatacaatat

SEQ ID NO: 797638 - DNA, 33 bp, Homo sapien
ctggtggctacatccagaattggaatacaatat

SEQ ID NO: 797639 - DNA, 33 bp, Homo sapien
tcccattgtaagtttccaaatctgatgcttatc

SEQ ID NO: 797640 - DNA, 33 bp, Homo sapien
tcccattgtaagtttctaaatctgatgcttatc

SEQ ID NO: 797641 - DNA, 33 bp, Homo sapien
tctacaggctgtacagaaagtgtagtggcttcc

SEQ ID NO: 797642 - DNA, 33 bp, Homo sapien
tctacaggctgtacaggaagtgtagtggcttcc

SEQ ID NO: 797643 - DNA, 33 bp, Homo sapien
ttaatttctattcgacaaacacttttcccacaa

SEQ ID NO: 797644 - DNA, 33 bp, Homo sapien
ttaatttctattcgacgaacacttttcccacaa

SEQ ID NO: 797645 - DNA, 33 bp, Homo sapien
cctgagaggcatcaaactcaaatatgatcaagg

SEQ ID NO: 797646 - DNA, 33 bp, Homo sapien
cctgagaggcatcaaagtcaaatatgatcaagg

SEQ ID NO: 797647 - DNA, 33 bp, Homo sapien
cccttaccagaaacaaacctactagcatcttga

SEQ ID NO: 797648 - DNA, 33 bp, Homo sapien
cccttaccagaaacaagcctactagcatcttga

SEQ ID NO: 797649 - DNA, 33 bp, Homo sapien
ccatgcagctggtaaacgccaaggcagctggtt

SEQ ID NO: 797650 - DNA, 33 bp, Homo sapien
ccatgcagctggtaaatgccaaggcagctggtt

SEQ ID NO: 797651 - DNA, 33 bp, Homo sapien
actgtacgtcaagaccaattcatgtgaggaggt

SEQ ID NO: 797652 - DNA, 33 bp, Homo sapien
actgtacgtcaagaccgattcatgtgaggaggt

SEQ ID NO: 797653 - DNA, 33 bp, Homo sapien
tcagttatttgaaagacgtgggtatttacaatg

SEQ ID NO: 797654 - DNA, 33 bp, Homo sapien
tcagttatttgaaagatgtgggtatttacaatg

SEQ ID NO: 797655 - DNA, 33 bp, Homo sapien
tttccagttacgaccaacgtactctggttagat

SEQ ID NO: 797656 - DNA, 33 bp, Homo sapien
tttccagttacgaccagcgtactctggttagat

SEQ ID NO: 797657 - DNA, 33 bp, Homo sapien
agggaaagagattcccacttcaaggaaagcctg

SEQ ID NO: 797658 - DNA, 33 bp, Homo sapien
agggaaagagattcccgcttcaaggaaagcctg

SEQ ID NO: 797659 - DNA, 33 bp, Homo sapien
tcttgtgtttactgtccccaacttcctattcct

SEQ ID NO: 797660 - DNA, 33 bp, Homo sapien
tcttgtgtttactgtctccaacttcctattcct

SEQ ID NO: 797661 - DNA, 33 bp, Homo sapien
ccccaatgtaagggaaaaggtcttaaatagaaa

SEQ ID NO: 797662 - DNA, 33 bp, Homo sapien
ccccaatgtaagggaataggtcttaaatagaaa

SEQ ID NO: 797663 - DNA, 33 bp, Homo sapien
gggcagagtgacattgcaaccatgtgattccca

SEQ ID NO: 797664 - DNA, 33 bp, Homo sapien
gggcagagtgacattgtaaccatgtgattccca

SEQ ID NO: 797665 - DNA, 33 bp, Homo sapien
aagtccagactgcttcaaggagccattggccag

SEQ ID NO: 797666 - DNA, 33 bp, Homo sapien
aagtccagactgcttcgaggagccattggccag

SEQ ID NO: 797667 - DNA, 33 bp, Homo sapien
cagagaaaattccagaacttgatgagggcaggg

SEQ ID NO: 797668 - DNA, 33 bp, Homo sapien
cagagaaaattccagatcttgatgagggcaggg

SEQ ID NO: 797669 - DNA, 33 bp, Homo sapien
caccctctggtggccaacctcatttttgcaact

SEQ ID NO: 797670 - DNA, 33 bp, Homo sapien
caccctctggtggccatcctcatttttgcaact

SEQ ID NO: 797671 - DNA, 33 bp, Homo sapien
ggaaaagctaacaataacaaatgttgacaaaga

SEQ ID NO: 797672 - DNA, 33 bp, Homo sapien
ggaaaagctaacaatagcaaatgttgacaaaga

SEQ ID NO: 797673 - DNA, 33 bp, Homo sapien
gacatagaaagcactaaccaaaatataaaagat

SEQ ID NO: 797674 - DNA, 33 bp, Homo sapien
gacatagaaagcactagccaaaatataaaagat

SEQ ID NO: 797675 - DNA, 33 bp, Homo sapien
aataaatcaaaaacatcatacaggatttgaaag

SEQ ID NO: 797676 - DNA, 33 bp, Homo sapien
aataaatcaaaaacatgatacaggatttgaaag

SEQ ID NO: 797677 - DNA, 33 bp, Homo sapien
ggtaccagagaaaagtaaagtcctacttaaata

SEQ ID NO: 797678 - DNA, 33 bp, Homo sapien
ggtaccagagaaaagtgaagtcctacttaaata

SEQ ID NO: 797679 - DNA, 33 bp, Homo sapien
caaacaaaaaaacagggccaaatgactaaaaat

SEQ ID NO: 797680 - DNA, 33 bp, Homo sapien
caaacaaaaaaacaggtccaaatgactaaaaat

SEQ ID NO: 797681 - DNA, 33 bp, Homo sapien
tgttgtattcatccagaaagagagaattaagtt

SEQ ID NO: 797682 - DNA, 33 bp, Homo sapien
tgttgtattcatccaggaagagagaattaagtt

SEQ ID NO: 797683 - DNA, 33 bp, Homo sapien
cagagttcagggctgccgaagaagatggaaatt

SEQ ID NO: 797684 - DNA, 33 bp, Homo sapien
cagagttcagggctgctgaagaagatggaaatt

SEQ ID NO: 797685 - DNA, 33 bp, Homo sapien
gctaatgtaatcaacccagagaagcagagtgga

SEQ ID NO: 797686 - DNA, 33 bp, Homo sapien
gctaatgtaatcaacctagagaagcagagtgga

SEQ ID NO: 797687 - DNA, 33 bp, Homo sapien
aagcagtgttcacacccggaagctcttacaatg

SEQ ID NO: 797688 - DNA, 33 bp, Homo sapien
aagcagtgttcacacctggaagctcttacaatg

SEQ ID NO: 797689 - DNA, 33 bp, Homo sapien
gggcatgaggatatacaagaagggcttcctcag

SEQ ID NO: 797690 - DNA, 33 bp, Homo sapien
gggcatgaggatatacgagaagggcttcctcag

SEQ ID NO: 797691 - DNA, 33 bp, Homo sapien
taaggtgagtaccagcagctagtggatctgtgg

SEQ ID NO: 797692 - DNA, 33 bp, Homo sapien
taaggtgagtaccagcggctagtggatctgtgg

SEQ ID NO: 797693 - DNA, 33 bp, Homo sapien
cacaatgcctggcatacagaaggttcttaatag

SEQ ID NO: 797694 - DNA, 33 bp, Homo sapien
cacaatgcctggcatatagaaggttcttaatag

SEQ ID NO: 797695 - DNA, 33 bp, Homo sapien
caaacatcctggagaacagctgagaacctacca

SEQ ID NO: 797696 - DNA, 33 bp, Homo sapien
caaacatcctggagaatagctgagaacctacca

SEQ ID NO: 797697 - DNA, 33 bp, Homo sapien
agaggccttatccttcaccacataacctggctc

SEQ ID NO: 797698 - DNA, 33 bp, Homo sapien
agaggccttatccttcgccacataacctggctc

SEQ ID NO: 797699 - DNA, 33 bp, Homo sapien
tcaatttaggtgtaagactaatacaggtgtgcc

SEQ ID NO: 797700 - DNA, 33 bp, Homo sapien
tcaatttaggtgtaaggctaatacaggtgtgcc

SEQ ID NO: 797701 - DNA, 33 bp, Homo sapien
gggagttatggtgccgaaagtgtctttttggaa

SEQ ID NO: 797702 - DNA, 33 bp, Homo sapien
gggagttatggtgccgcaagtgtctttttggaa

SEQ ID NO: 797703 - DNA, 33 bp, Homo sapien
caaacacctcccctccacactaggctggcttct

SEQ ID NO: 797704 - DNA, 33 bp, Homo sapien
caaacacctcccctccgcactaggctggcttct

SEQ ID NO: 797705 - DNA, 33 bp, Homo sapien
gctatgtaatgcgagcagagtaggagcatcacc

SEQ ID NO: 797706 - DNA, 33 bp, Homo sapien
gctatgtaatgcgagcggagtaggagcatcacc

SEQ ID NO: 797707 - DNA, 33 bp, Homo sapien
agggaggatcgtcacacggaagatggattctgg

SEQ ID NO: 797708 - DNA, 33 bp, Homo sapien
agggaggatcgtcacatggaagatggattctgg

SEQ ID NO: 797709 - DNA, 33 bp, Homo sapien
ggaggagagtagatgacagtgtcagagccggcg

SEQ ID NO: 797710 - DNA, 33 bp, Homo sapien
ggaggagagtagatgatagtgtcagagccggcg

SEQ ID NO: 797711 - DNA, 33 bp, Homo sapien
ctttcagacctgagaacccaacacaacgagtct

SEQ ID NO: 797712 - DNA, 33 bp, Homo sapien
ctttcagacctgagaatccaacacaacgagtct

SEQ ID NO: 797713 - DNA, 33 bp, Homo sapien
attgtactttccatcactcccctgacatgtagc

SEQ ID NO: 797714 - DNA, 33 bp, Homo sapien
attgtactttccatcattcccctgacatgtagc

SEQ ID NO: 797715 - DNA, 33 bp, Homo sapien
tccctataggaactacaataatgttaggtcact

SEQ ID NO: 797716 - DNA, 33 bp, Homo sapien
tccctataggaactacgataatgttaggtcact

SEQ ID NO: 797717 - DNA, 33 bp, Homo sapien
acttacttagcctagaaaacaaattataagtag

SEQ ID NO: 797718 - DNA, 33 bp, Homo sapien
acttacttagcctagacaacaaattataagtag

SEQ ID NO: 797719 - DNA, 33 bp, Homo sapien
tattgtcttagaaagcaatctcaagcatccttg

SEQ ID NO: 797720 - DNA, 33 bp, Homo sapien
tattgtcttagaaagcgatctcaagcatccttg

SEQ ID NO: 797721 - DNA, 33 bp, Homo sapien
tttgctgctatggtaaataataagtgacctgga

SEQ ID NO: 797722 - DNA, 33 bp, Homo sapien
tttgctgctatggtaagtaataagtgacctgga

SEQ ID NO: 797723 - DNA, 33 bp, Homo sapien
atctaccagttctgacgatcattgtgtgtgtgt

SEQ ID NO: 797724 - DNA, 33 bp, Homo sapien
atctaccagttctgactatcattgtgtgtgtgt

SEQ ID NO: 797725 - DNA, 33 bp, Homo sapien
tcagattgaacatgccactgaaacacctctgta

SEQ ID NO: 797726 - DNA, 33 bp, Homo sapien
tcagattgaacatgccgctgaaacacctctgta

SEQ ID NO: 797727 - DNA, 33 bp, Homo sapien
ttcctgagaattcatacatgttttcaggtgtgt

SEQ ID NO: 797728 - DNA, 33 bp, Homo sapien
ttcctgagaattcatatatgttttcaggtgtgt

SEQ ID NO: 797729 - DNA, 33 bp, Homo sapien
ctccctgtcttatgtaccagtgtctgaccactg

SEQ ID NO: 797730 - DNA, 33 bp, Homo sapien
ctccctgtcttatgtatcagtgtctgaccactg

SEQ ID NO: 797731 - DNA, 33 bp, Homo sapien
agggataggttttggccatgataggtctggcat

SEQ ID NO: 797732 - DNA, 33 bp, Homo sapien
agggataggttttggctatgataggtctggcat

SEQ ID NO: 797733 - DNA, 33 bp, Homo sapien
taggcaaagaactctaccaaaggaacatctgtc

SEQ ID NO: 797734 - DNA, 33 bp, Homo sapien
taggcaaagaactctatcaaaggaacatctgtc

SEQ ID NO: 797735 - DNA, 33 bp, Homo sapien
gggaaaaaaagggtgaagattccaatcaggaca

SEQ ID NO: 797736 - DNA, 33 bp, Homo sapien
gggaaaaaaagggtgaggattccaatcaggaca

SEQ ID NO: 797737 - DNA, 33 bp, Homo sapien
cttttataacctcaaaatagccgtatgaaatat

SEQ ID NO: 797738 - DNA, 33 bp, Homo sapien
cttttataacctcaaagtagccgtatgaaatat

SEQ ID NO: 797739 - DNA, 33 bp, Homo sapien
attggatgtggagtacaagaggaagagcagcca

SEQ ID NO: 797740 - DNA, 33 bp, Homo sapien
attggatgtggagtacgagaggaagagcagcca

SEQ ID NO: 797741 - DNA, 33 bp, Homo sapien
ccaatctgtcaataaaatcttttgccataattt

SEQ ID NO: 797742 - DNA, 33 bp, Homo sapien
ccaatctgtcaataaagtcttttgccataattt

SEQ ID NO: 797743 - DNA, 33 bp, Homo sapien
gatcatctcaaggttcacaaaatcaagctttaa

SEQ ID NO: 797744 - DNA, 33 bp, Homo sapien
gatcatctcaaggttcgcaaaatcaagctttaa

SEQ ID NO: 797745 - DNA, 33 bp, Homo sapien
taaccatccatcttcacgaagtaagaatagtga

SEQ ID NO: 797746 - DNA, 33 bp, Homo sapien
taaccatccatcttcaggaagtaagaatagtga

SEQ ID NO: 797747 - DNA, 33 bp, Homo sapien
agtaagtagccagtgaatagccctcattgatag

SEQ ID NO: 797748 - DNA, 33 bp, Homo sapien
agtaagtagccagtgagtagccctcattgatag

SEQ ID NO: 797749 - DNA, 33 bp, Homo sapien
cttgtttaggcaggcgcagccagatccaagcgt

SEQ ID NO: 797750 - DNA, 33 bp, Homo sapien
cttgtttaggcaggcgtagccagatccaagcgt

SEQ ID NO: 797751 - DNA, 33 bp, Homo sapien
cgactggaaggccccactcacaatctccttgtt

SEQ ID NO: 797752 - DNA, 33 bp, Homo sapien
cgactggaaggccccattcacaatctccttgtt

SEQ ID NO: 797753 - DNA, 33 bp, Homo sapien
ctgaatgtatctgtgacccggttgactaggtaa

SEQ ID NO: 797754 - DNA, 33 bp, Homo sapien
ctgaatgtatctgtgatccggttgactaggtaa

SEQ ID NO: 797755 - DNA, 33 bp, Homo sapien
caagtggagcagagagcatttcagggcatagtg

SEQ ID NO: 797756 - DNA, 33 bp, Homo sapien
caagtggagcagagaggatttcagggcatagtg

SEQ ID NO: 797757 - DNA, 33 bp, Homo sapien
tggagagattccccacaagagtccatatttccc

SEQ ID NO: 797758 - DNA, 33 bp, Homo sapien
tggagagattccccacgagagtccatatttccc

SEQ ID NO: 797759 - DNA, 33 bp, Homo sapien
aggccatcagaatctcaagttgatcttctaatc

SEQ ID NO: 797760 - DNA, 33 bp, Homo sapien
aggccatcagaatctcgagttgatcttctaatc

SEQ ID NO: 797761 - DNA, 33 bp, Homo sapien
agaggtctgatgaacggaaaattattataacct

SEQ ID NO: 797762 - DNA, 33 bp, Homo sapien
agaggtctgatgaacgtaaaattattataacct

SEQ ID NO: 797763 - DNA, 33 bp, Homo sapien
aatgattttttaaataacagcaactgcctagaa

SEQ ID NO: 797764 - DNA, 33 bp, Homo sapien
aatgattttttaaatatcagcaactgcctagaa

SEQ ID NO: 797765 - DNA, 33 bp, Homo sapien
acagatgattcactcacaacaggttgctggtga

SEQ ID NO: 797766 - DNA, 33 bp, Homo sapien
acagatgattcactcagaacaggttgctggtga

SEQ ID NO: 797767 - DNA, 33 bp, Homo sapien
accatctgtttgtgtcaatgaggctctctgtat

SEQ ID NO: 797768 - DNA, 33 bp, Homo sapien
accatctgtttgtgtcgatgaggctctctgtat

SEQ ID NO: 797769 - DNA, 33 bp, Homo sapien
tcccaggtcctagaacagtgtctcgtccataac

SEQ ID NO: 797770 - DNA, 33 bp, Homo sapien
tcccaggtcctagaacggtgtctcgtccataac

SEQ ID NO: 797771 - DNA, 33 bp, Homo sapien
taaccacagccctgtgaaagagtttgctgctgt

SEQ ID NO: 797772 - DNA, 33 bp, Homo sapien
taaccacagccctgtgtaagagtttgctgctgt

SEQ ID NO: 797773 - DNA, 33 bp, Homo sapien
gagtggagagcctgaccggagtttttctctaat

SEQ ID NO: 797774 - DNA, 33 bp, Homo sapien
gagtggagagcctgactggagtttttctctaat

SEQ ID NO: 797775 - DNA, 33 bp, Homo sapien
actgcagggtccccgtaaagaacacctcacact

SEQ ID NO: 797776 - DNA, 33 bp, Homo sapien
actgcagggtccccgtgaagaacacctcacact

SEQ ID NO: 797777 - DNA, 33 bp, Homo sapien
ggcctgtgcaggcagacggaaaccctgggttct

SEQ ID NO: 797778 - DNA, 33 bp, Homo sapien
ggcctgtgcaggcagatggaaaccctgggttct

SEQ ID NO: 797779 - DNA, 33 bp, Homo sapien
tccaaaatccctaaccactgctaatagctagga

SEQ ID NO: 797780 - DNA, 33 bp, Homo sapien
tccaaaatccctaaccgctgctaatagctagga

SEQ ID NO: 797781 - DNA, 33 bp, Homo sapien
agaggttgtcacgttacagttgtatgcttgcat

SEQ ID NO: 797782 - DNA, 33 bp, Homo sapien
agaggttgtcacgttatagttgtatgcttgcat

SEQ ID NO: 797783 - DNA, 33 bp, Homo sapien
tagtgccttgcttcaactgcttcagtctatcag

SEQ ID NO: 797784 - DNA, 33 bp, Homo sapien
tagtgccttgcttcaattgcttcagtctatcag

SEQ ID NO: 797785 - DNA, 33 bp, Homo sapien
cattcagccttcacctcagcaggtatcacaggg

SEQ ID NO: 797786 - DNA, 33 bp, Homo sapien
cattcagccttcaccttagcaggtatcacaggg

SEQ ID NO: 797787 - DNA, 33 bp, Homo sapien
atagctggagataggccaactcctgagcaggtg

SEQ ID NO: 797788 - DNA, 33 bp, Homo sapien
atagctggagataggctaactcctgagcaggtg

SEQ ID NO: 797789 - DNA, 33 bp, Homo sapien
tccctctactggtgtgaagcccagccggcaagg

SEQ ID NO: 797790 - DNA, 33 bp, Homo sapien
tccctctactggtgtggagcccagccggcaagg

SEQ ID NO: 797791 - DNA, 33 bp, Homo sapien
gaaggaagtgagccaactctcatgtccctgaga

SEQ ID NO: 797792 - DNA, 33 bp, Homo sapien
gaaggaagtgagccaattctcatgtccctgaga

SEQ ID NO: 797793 - DNA, 33 bp, Homo sapien
tgtagcctcttttagcggccgagacagcctgac

SEQ ID NO: 797794 - DNA, 33 bp, Homo sapien
tgtagcctcttttagctgccgagacagcctgac

SEQ ID NO: 797795 - DNA, 33 bp, Homo sapien
ttgccaagtgaacaaccatcttacaagtggacc

SEQ ID NO: 797796 - DNA, 33 bp, Homo sapien
ttgccaagtgaacaacgatcttacaagtggacc

SEQ ID NO: 797797 - DNA, 33 bp, Homo sapien
aatcatctcacaaacacaacaagaggatatata

SEQ ID NO: 797798 - DNA, 33 bp, Homo sapien
aatcatctcacaaacataacaagaggatatata

SEQ ID NO: 797799 - DNA, 33 bp, Homo sapien
gtgattatttgcctaacgtctgcctccctcagg

SEQ ID NO: 797800 - DNA, 33 bp, Homo sapien
gtgattatttgcctaatgtctgcctccctcagg

SEQ ID NO: 797801 - DNA, 33 bp, Homo sapien
catctatgtaggtaacagaggcaaagcaagggc

SEQ ID NO: 797802 - DNA, 33 bp, Homo sapien
catctatgtaggtaacggaggcaaagcaagggc

SEQ ID NO: 797803 - DNA, 33 bp, Homo sapien
cagtcattacctttgccagggttgcaaggatgt

SEQ ID NO: 797804 - DNA, 33 bp, Homo sapien
cagtcattacctttgcgagggttgcaaggatgt

SEQ ID NO: 797805 - DNA, 33 bp, Homo sapien
agagggagacaggaaaagcacatatccacacct

SEQ ID NO: 797806 - DNA, 33 bp, Homo sapien
agagggagacaggaaacgcacatatccacacct

SEQ ID NO: 797807 - DNA, 33 bp, Homo sapien
tggggtccttcggggcaatgctccctcagcctc

SEQ ID NO: 797808 - DNA, 33 bp, Homo sapien
tggggtccttcggggcgatgctccctcagcctc

SEQ ID NO: 797809 - DNA, 33 bp, Homo sapien
attgtgaattagctacggctgccatgccttaag

SEQ ID NO: 797810 - DNA, 33 bp, Homo sapien
attgtgaattagctactgctgccatgccttaag

SEQ ID NO: 797811 - DNA, 33 bp, Homo sapien
ttcaaccataaaataacagtagccctaccttga

SEQ ID NO: 797812 - DNA, 33 bp, Homo sapien
ttcaaccataaaataatagtagccctaccttga

SEQ ID NO: 797813 - DNA, 33 bp, Homo sapien
ctctgaaatgctcaaagccttcatctcgatttt

SEQ ID NO: 797814 - DNA, 33 bp, Homo sapien
ctctgaaatgctcaaatccttcatctcgatttt

SEQ ID NO: 797815 - DNA, 33 bp, Homo sapien
ctcaaggaagaaataacggcttttgcttcctgg

SEQ ID NO: 797816 - DNA, 33 bp, Homo sapien
ctcaaggaagaaataatggcttttgcttcctgg

SEQ ID NO: 797817 - DNA, 33 bp, Homo sapien
agatgtgggaactggaggaagagcttgcatttc

SEQ ID NO: 797818 - DNA, 33 bp, Homo sapien
agatgtgggaactggatgaagagcttgcatttc

SEQ ID NO: 797819 - DNA, 33 bp, Homo sapien
aggtctgagctaataccgacaccaggaaaacct

SEQ ID NO: 797820 - DNA, 33 bp, Homo sapien
aggtctgagctaatactgacaccaggaaaacct

SEQ ID NO: 797821 - DNA, 33 bp, Homo sapien
atgaacagaatacatacagatccaggagtctgg

SEQ ID NO: 797822 - DNA, 33 bp, Homo sapien
atgaacagaatacatatagatccaggagtctgg

SEQ ID NO: 797823 - DNA, 33 bp, Homo sapien
caatcaaaagttaacaagcatccaaagaagcag

SEQ ID NO: 797824 - DNA, 33 bp, Homo sapien
caatcaaaagttaacaggcatccaaagaagcag

SEQ ID NO: 797825 - DNA, 33 bp, Homo sapien
aaacattttatgatgagaagaggtcaatttaat

SEQ ID NO: 797826 - DNA, 33 bp, Homo sapien
aaacattttatgatgataagaggtcaatttaat

SEQ ID NO: 797827 - DNA, 33 bp, Homo sapien
caaatattactgtttgcatccaacaagagaaaa

SEQ ID NO: 797828 - DNA, 33 bp, Homo sapien
caaatattactgtttgtatccaacaagagaaaa

SEQ ID NO: 797829 - DNA, 33 bp, Homo sapien
tatgtgtgagtattgacgttggctaggatgatg

SEQ ID NO: 797830 - DNA, 33 bp, Homo sapien
tatgtgtgagtattgaggttggctaggatgatg

SEQ ID NO: 797831 - DNA, 33 bp, Homo sapien
gatttcatttccttatcacaaactgtgtgacaa

SEQ ID NO: 797832 - DNA, 33 bp, Homo sapien
gatttcatttccttatgacaaactgtgtgacaa

SEQ ID NO: 797833 - DNA, 33 bp, Homo sapien
tagtattgatctcttacaatctttcaggtcagt

SEQ ID NO: 797834 - DNA, 33 bp, Homo sapien
tagtattgatctcttataatctttcaggtcagt

SEQ ID NO: 797835 - DNA, 33 bp, Homo sapien
gcctctcagcttctaccccagacctcgatcaaa

SEQ ID NO: 797836 - DNA, 33 bp, Homo sapien
gcctctcagcttctactccagacctcgatcaaa

SEQ ID NO: 797837 - DNA, 33 bp, Homo sapien
ctgagcagaatgaggacctatgagggagcttgg

SEQ ID NO: 797838 - DNA, 33 bp, Homo sapien
ctgagcagaatgaggatctatgagggagcttgg

SEQ ID NO: 797839 - DNA, 33 bp, Homo sapien
ggataagccaaaatgcaataagaaaaaccatcc

SEQ ID NO: 797840 - DNA, 33 bp, Homo sapien
ggataagccaaaatgcgataagaaaaaccatcc

SEQ ID NO: 797841 - DNA, 33 bp, Homo sapien
tcaggagagtgtaataatagtagctgagcctga

SEQ ID NO: 797842 - DNA, 33 bp, Homo sapien
tcaggagagtgtaatattagtagctgagcctga

SEQ ID NO: 797843 - DNA, 33 bp, Homo sapien
atacctgtgttgtagacaatacgaactgagttt

SEQ ID NO: 797844 - DNA, 33 bp, Homo sapien
atacctgtgttgtagataatacgaactgagttt

SEQ ID NO: 797845 - DNA, 33 bp, Homo sapien
agagacttcaggaaccaaacatgacaaagcata

SEQ ID NO: 797846 - DNA, 33 bp, Homo sapien
agagacttcaggaaccgaacatgacaaagcata

SEQ ID NO: 797847 - DNA, 33 bp, Homo sapien
atctaaagtctttgcccagtaagtctaacatct

SEQ ID NO: 797848 - DNA, 33 bp, Homo sapien
atctaaagtctttgcctagtaagtctaacatct

SEQ ID NO: 797849 - DNA, 33 bp, Homo sapien
cagtgagttcaaagaccggtcaattgagattat

SEQ ID NO: 797850 - DNA, 33 bp, Homo sapien
cagtgagttcaaagactggtcaattgagattat

SEQ ID NO: 797851 - DNA, 33 bp, Homo sapien
tgcagttaggagcatgaacactctggtgttggc

SEQ ID NO: 797852 - DNA, 33 bp, Homo sapien
tgcagttaggagcatggacactctggtgttggc

SEQ ID NO: 797853 - DNA, 33 bp, Homo sapien
ctagggtttaaggctgaaaggatatttacggag

SEQ ID NO: 797854 - DNA, 33 bp, Homo sapien
ctagggtttaaggctggaaggatatttacggag

SEQ ID NO: 797855 - DNA, 33 bp, Homo sapien
ttctgtggctcagtaaagtgtcactcatccctg

SEQ ID NO: 797856 - DNA, 33 bp, Homo sapien
ttctgtggctcagtaaggtgtcactcatccctg

SEQ ID NO: 797857 - DNA, 33 bp, Homo sapien
aacaaaattgacaaaactggccatgagttgctc

SEQ ID NO: 797858 - DNA, 33 bp, Homo sapien
aacaaaattgacaaaattggccatgagttgctc

SEQ ID NO: 797859 - DNA, 33 bp, Homo sapien
tgtaagttggtaagacggtagctctttttccta

SEQ ID NO: 797860 - DNA, 33 bp, Homo sapien
tgtaagttggtaagactgtagctctttttccta

SEQ ID NO: 797861 - DNA, 33 bp, Homo sapien
tgcgataccagagcaactaaaacgttaaggcct

SEQ ID NO: 797862 - DNA, 33 bp, Homo sapien
tgcgataccagagcaagtaaaacgttaaggcct

SEQ ID NO: 797863 - DNA, 33 bp, Homo sapien
ccgcttatttacagaaccaaaaatctgccacga

SEQ ID NO: 797864 - DNA, 33 bp, Homo sapien
ccgcttatttacagaagcaaaaatctgccacga

SEQ ID NO: 797865 - DNA, 33 bp, Homo sapien
caaaatattaacagcaatagttacctctggctg

SEQ ID NO: 797866 - DNA, 33 bp, Homo sapien
caaaatattaacagcagtagttacctctggctg

SEQ ID NO: 797867 - DNA, 33 bp, Homo sapien
tgggcaggaacaaagacgtcatcttttcctccc

SEQ ID NO: 797868 - DNA, 33 bp, Homo sapien
tgggcaggaacaaagaggtcatcttttcctccc

SEQ ID NO: 797869 - DNA, 33 bp, Homo sapien
caggaattctgcaaaagaaacatttcattagct

SEQ ID NO: 797870 - DNA, 33 bp, Homo sapien
caggaattctgcaaaataaacatttcattagct

SEQ ID NO: 797871 - DNA, 33 bp, Homo sapien
aaattctattactcagaagcctaagaagttgga

SEQ ID NO: 797872 - DNA, 33 bp, Homo sapien
aaattctattactcaggagcctaagaagttgga

SEQ ID NO: 797873 - DNA, 33 bp, Homo sapien
tagtactggtgatgcaactaatagcaattagaa

SEQ ID NO: 797874 - DNA, 33 bp, Homo sapien
tagtactggtgatgcagctaatagcaattagaa

SEQ ID NO: 797875 - DNA, 33 bp, Homo sapien
aatgtacttggtactcaaatgtttactcataga

SEQ ID NO: 797876 - DNA, 33 bp, Homo sapien
aatgtacttggtactcgaatgtttactcataga

SEQ ID NO: 797877 - DNA, 33 bp, Homo sapien
acctgaggatttgacacatagccaagatctggt

SEQ ID NO: 797878 - DNA, 33 bp, Homo sapien
acctgaggatttgacagatagccaagatctggt

SEQ ID NO: 797879 - DNA, 33 bp, Homo sapien
cctgcacaagtagagccgagctatgcctgcatt

SEQ ID NO: 797880 - DNA, 33 bp, Homo sapien
cctgcacaagtagagctgagctatgcctgcatt

SEQ ID NO: 797881 - DNA, 33 bp, Homo sapien
agaatcatgtgggcacgaggggtaagaggatgt

SEQ ID NO: 797882 - DNA, 33 bp, Homo sapien
agaatcatgtgggcactaggggtaagaggatgt

SEQ ID NO: 797883 - DNA, 33 bp, Homo sapien
acttagatcacatgtcaatgccaaatctatgat

SEQ ID NO: 797884 - DNA, 33 bp, Homo sapien
acttagatcacatgtcgatgccaaatctatgat

SEQ ID NO: 797885 - DNA, 33 bp, Homo sapien
ctggttgttgcagtgggagtagaaaggataccc

SEQ ID NO: 797886 - DNA, 33 bp, Homo sapien
ctggttgttgcagtggtagtagaaaggataccc

SEQ ID NO: 797887 - DNA, 33 bp, Homo sapien
cagttgtgcttatgaccgcgaccacgggttctg

SEQ ID NO: 797888 - DNA, 33 bp, Homo sapien
cagttgtgcttatgactgcgaccacgggttctg

SEQ ID NO: 797889 - DNA, 33 bp, Homo sapien
ccccatcttgtaaaaacggccagtagcctcctt

SEQ ID NO: 797890 - DNA, 33 bp, Homo sapien
ccccatcttgtaaaaatggccagtagcctcctt

SEQ ID NO: 797891 - DNA, 33 bp, Homo sapien
ggaattccacagtgtaccctcatgctgcaggat

SEQ ID NO: 797892 - DNA, 33 bp, Homo sapien
ggaattccacagtgtatcctcatgctgcaggat

SEQ ID NO: 797893 - DNA, 33 bp, Homo sapien
tgaggtgagaacaaggaagaactaggtaaaagt

SEQ ID NO: 797894 - DNA, 33 bp, Homo sapien
tgaggtgagaacaagggagaactaggtaaaagt

SEQ ID NO: 797895 - DNA, 33 bp, Homo sapien
ttcagaatcaacttagaaagaacttacggagga

SEQ ID NO: 797896 - DNA, 33 bp, Homo sapien
ttcagaatcaacttaggaagaacttacggagga

SEQ ID NO: 797897 - DNA, 33 bp, Homo sapien
gcatattgtagtagctaagaaaacaagactctg

SEQ ID NO: 797898 - DNA, 33 bp, Homo sapien
gcatattgtagtagctgagaaaacaagactctg

SEQ ID NO: 797899 - DNA, 33 bp, Homo sapien
cagcttcagctggagcgctaggctttaagacag

SEQ ID NO: 797900 - DNA, 33 bp, Homo sapien
cagcttcagctggagctctaggctttaagacag

SEQ ID NO: 797901 - DNA, 33 bp, Homo sapien
cacagtgcattatcaaactttttttagacgggg

SEQ ID NO: 797902 - DNA, 33 bp, Homo sapien
cacagtgcattatcaacctttttttagacgggg

SEQ ID NO: 797903 - DNA, 33 bp, Homo sapien
ttggcagaattaggtccaggtcctcttggtggg

SEQ ID NO: 797904 - DNA, 33 bp, Homo sapien
ttggcagaattaggtcgaggtcctcttggtggg

SEQ ID NO: 797905 - DNA, 33 bp, Homo sapien
ctcaagagctgtctaacatctgtcctatccaag

SEQ ID NO: 797906 - DNA, 33 bp, Homo sapien
ctcaagagctgtctaatatctgtcctatccaag

SEQ ID NO: 797907 - DNA, 33 bp, Homo sapien
gagattaaaatttgaacgtgtgaaactgccaat

SEQ ID NO: 797908 - DNA, 33 bp, Homo sapien
gagattaaaatttgaatgtgtgaaactgccaat

SEQ ID NO: 797909 - DNA, 33 bp, Homo sapien
gattttacaacccaaaattggatctggcaatga

SEQ ID NO: 797910 - DNA, 33 bp, Homo sapien
gattttacaacccaaagttggatctggcaatga

SEQ ID NO: 797911 - DNA, 33 bp, Homo sapien
atctaaagtccaatcaatctccttactcagaat

SEQ ID NO: 797912 - DNA, 33 bp, Homo sapien
atctaaagtccaatcagtctccttactcagaat

SEQ ID NO: 797913 - DNA, 33 bp, Homo sapien
gaccagctgacttaccaccttcacagtcttata

SEQ ID NO: 797914 - DNA, 33 bp, Homo sapien
gaccagctgacttaccgccttcacagtcttata

SEQ ID NO: 797915 - DNA, 33 bp, Homo sapien
tgccacgtgcagatgaaatatattcagacaaat

SEQ ID NO: 797916 - DNA, 33 bp, Homo sapien
tgccacgtgcagatgatatatattcagacaaat

SEQ ID NO: 797917 - DNA, 33 bp, Homo sapien
aaactcctaagtaccccgagagcaataggactc

SEQ ID NO: 797918 - DNA, 33 bp, Homo sapien
aaactcctaagtaccctgagagcaataggactc

SEQ ID NO: 797919 - DNA, 33 bp, Homo sapien
caatgaatgaagtaaccgcttccctaaaagata

SEQ ID NO: 797920 - DNA, 33 bp, Homo sapien
caatgaatgaagtaactgcttccctaaaagata

SEQ ID NO: 797921 - DNA, 33 bp, Homo sapien
ttgtttttaaatgggaccaattcaaggagagag

SEQ ID NO: 797922 - DNA, 33 bp, Homo sapien
ttgtttttaaatgggatcaattcaaggagagag

SEQ ID NO: 797923 - DNA, 33 bp, Homo sapien
tgtgccctagttcgtcactaagcggcctaactg

SEQ ID NO: 797924 - DNA, 33 bp, Homo sapien
tgtgccctagttcgtccctaagcggcctaactg

SEQ ID NO: 797925 - DNA, 33 bp, Homo sapien
acatacagatgaaaaacaagaaaagtctccaga

SEQ ID NO: 797926 - DNA, 33 bp, Homo sapien
acatacagatgaaaaagaagaaaagtctccaga

SEQ ID NO: 797927 - DNA, 33 bp, Homo sapien
ctagaagctgaaaagcagatgttgacttgaata

SEQ ID NO: 797928 - DNA, 33 bp, Homo sapien
ctagaagctgaaaagcggatgttgacttgaata

SEQ ID NO: 797929 - DNA, 33 bp, Homo sapien
agtgatacagctatatcagcctaagttccagac

SEQ ID NO: 797930 - DNA, 33 bp, Homo sapien
agtgatacagctatatgagcctaagttccagac

SEQ ID NO: 797931 - DNA, 33 bp, Homo sapien
ctctggatgttgaagaaggagtagtggaatctc

SEQ ID NO: 797932 - DNA, 33 bp, Homo sapien
ctctggatgttgaagagggagtagtggaatctc

SEQ ID NO: 797933 - DNA, 33 bp, Homo sapien
taccatttacagcaccaaggtttcctgaatagt

SEQ ID NO: 797934 - DNA, 33 bp, Homo sapien
taccatttacagcaccgaggtttcctgaatagt

SEQ ID NO: 797935 - DNA, 33 bp, Homo sapien
tgagagctgctttcctcaatttatttccacttt

SEQ ID NO: 797936 - DNA, 33 bp, Homo sapien
tgagagctgctttccttaatttatttccacttt

SEQ ID NO: 797937 - DNA, 33 bp, Homo sapien
catggattttggttcacctgcaatttgaggagc

SEQ ID NO: 797938 - DNA, 33 bp, Homo sapien
catggattttggttcagctgcaatttgaggagc

SEQ ID NO: 797939 - DNA, 33 bp, Homo sapien
atatatcatctgtttcaaaatcgattggttaat

SEQ ID NO: 797940 - DNA, 33 bp, Homo sapien
atatatcatctgtttcgaaatcgattggttaat

SEQ ID NO: 797941 - DNA, 33 bp, Homo sapien
accttcaaaagttcacactgctgaaagaagtca

SEQ ID NO: 797942 - DNA, 33 bp, Homo sapien
accttcaaaagttcacgctgctgaaagaagtca

SEQ ID NO: 797943 - DNA, 33 bp, Homo sapien
atgccattattatgaaatagaccattatgttgg

SEQ ID NO: 797944 - DNA, 33 bp, Homo sapien
atgccattattatgaagtagaccattatgttgg

SEQ ID NO: 797945 - DNA, 33 bp, Homo sapien
agcccaggaaagtgcaacaggcctctgttttcc

SEQ ID NO: 797946 - DNA, 33 bp, Homo sapien
agcccaggaaagtgcaccaggcctctgttttcc

SEQ ID NO: 797947 - DNA, 33 bp, Homo sapien
cccagcacactctcccccaacattttatgattc

SEQ ID NO: 797948 - DNA, 33 bp, Homo sapien
cccagcacactctcccgcaacattttatgattc

SEQ ID NO: 797949 - DNA, 33 bp, Homo sapien
aatgctaattgtcctacggtcactggtgttcct

SEQ ID NO: 797950 - DNA, 33 bp, Homo sapien
aatgctaattgtcctatggtcactggtgttcct

SEQ ID NO: 797951 - DNA, 33 bp, Homo sapien
tgactgctgatcacaaagattaaagcctttgcg

SEQ ID NO: 797952 - DNA, 33 bp, Homo sapien
tgactgctgatcacaatgattaaagcctttgcg

SEQ ID NO: 797953 - DNA, 33 bp, Homo sapien
atacccacaagtactacgaattttcaatgagta

SEQ ID NO: 797954 - DNA, 33 bp, Homo sapien
atacccacaagtactatgaattttcaatgagta

SEQ ID NO: 797955 - DNA, 33 bp, Homo sapien
cacttcccataaagcactccattaaagaaaata

SEQ ID NO: 797956 - DNA, 33 bp, Homo sapien
cacttcccataaagcattccattaaagaaaata

SEQ ID NO: 797957 - DNA, 33 bp, Homo sapien
gcatatgggagggatacggttagttgtggccaa

SEQ ID NO: 797958 - DNA, 33 bp, Homo sapien
gcatatgggagggatatggttagttgtggccaa

SEQ ID NO: 797959 - DNA, 33 bp, Homo sapien
ttcttgctcaattaaacttcaaaacatgtattg

SEQ ID NO: 797960 - DNA, 33 bp, Homo sapien
ttcttgctcaattaaatttcaaaacatgtattg

SEQ ID NO: 797961 - DNA, 33 bp, Homo sapien
tttatcttcagagaaacagtgatctggagaaaa

SEQ ID NO: 797962 - DNA, 33 bp, Homo sapien
tttatcttcagagaaagagtgatctggagaaaa

SEQ ID NO: 797963 - DNA, 33 bp, Homo sapien
aaaattgtagctctggaaccatctgctggctac

SEQ ID NO: 797964 - DNA, 33 bp, Homo sapien
aaaattgtagctctgggaccatctgctggctac

SEQ ID NO: 797965 - DNA, 33 bp, Homo sapien
tgaggtgagcttcctcaacttatatctacatag

SEQ ID NO: 797966 - DNA, 33 bp, Homo sapien
tgaggtgagcttcctctacttatatctacatag

SEQ ID NO: 797967 - DNA, 33 bp, Homo sapien
ggattgagatcatagactatttgtttatgaaga

SEQ ID NO: 797968 - DNA, 33 bp, Homo sapien
ggattgagatcatagattatttgtttatgaaga

SEQ ID NO: 797969 - DNA, 33 bp, Homo sapien
ttgcaaatacaaacaacgcagtaacaaacattg

SEQ ID NO: 797970 - DNA, 33 bp, Homo sapien
ttgcaaatacaaacaatgcagtaacaaacattg

SEQ ID NO: 797971 - DNA, 33 bp, Homo sapien
aagataactattagaacggagtcaaacattaaa

SEQ ID NO: 797972 - DNA, 33 bp, Homo sapien
aagataactattagaatggagtcaaacattaaa

SEQ ID NO: 797973 - DNA, 33 bp, Homo sapien
ggcgttgtatgcatggacatcactcctgggcga

SEQ ID NO: 797974 - DNA, 33 bp, Homo sapien
ggcgttgtatgcatgggcatcactcctgggcga

SEQ ID NO: 797975 - DNA, 33 bp, Homo sapien
tcagagaagacctcccaataaggtgatactaag

SEQ ID NO: 797976 - DNA, 33 bp, Homo sapien
tcagagaagacctcccgataaggtgatactaag

SEQ ID NO: 797977 - DNA, 33 bp, Homo sapien
agtaacctaacctgtaacttggagggactctct

SEQ ID NO: 797978 - DNA, 33 bp, Homo sapien
agtaacctaacctgtagcttggagggactctct

SEQ ID NO: 797979 - DNA, 33 bp, Homo sapien
tcagtctgaatttcaaatcttttcttgatctgt

SEQ ID NO: 797980 - DNA, 33 bp, Homo sapien
tcagtctgaatttcaagtcttttcttgatctgt

SEQ ID NO: 797981 - DNA, 33 bp, Homo sapien
atgtgagccatcttttcgcccctgctaatggag

SEQ ID NO: 797982 - DNA, 33 bp, Homo sapien
atgtgagccatctttttgcccctgctaatggag

SEQ ID NO: 797983 - DNA, 33 bp, Homo sapien
tgagttccagaaggcacgacagaaggttctggg

SEQ ID NO: 797984 - DNA, 33 bp, Homo sapien
tgagttccagaaggcatgacagaaggttctggg

SEQ ID NO: 797985 - DNA, 33 bp, Homo sapien
gcgtcctcctgggcccacgttgccacttctaga

SEQ ID NO: 797986 - DNA, 33 bp, Homo sapien
gcgtcctcctgggccctcgttgccacttctaga

SEQ ID NO: 797987 - DNA, 33 bp, Homo sapien
ggaggtgggtgtgacacgagaatgatctagaag

SEQ ID NO: 797988 - DNA, 33 bp, Homo sapien
ggaggtgggtgtgacatgagaatgatctagaag

SEQ ID NO: 797989 - DNA, 33 bp, Homo sapien
acagggcaaagatgacaatgagactggcctctt

SEQ ID NO: 797990 - DNA, 33 bp, Homo sapien
acagggcaaagatgacgatgagactggcctctt

SEQ ID NO: 797991 - DNA, 33 bp, Homo sapien
aatgcttaggttctcacggaagagccataacac

SEQ ID NO: 797992 - DNA, 33 bp, Homo sapien
aatgcttaggttctcatggaagagccataacac

SEQ ID NO: 797993 - DNA, 33 bp, Homo sapien
atgtggttcctgtgcagaactgagctcaatgaa

SEQ ID NO: 797994 - DNA, 33 bp, Homo sapien
atgtggttcctgtgcataactgagctcaatgaa

SEQ ID NO: 797995 - DNA, 33 bp, Homo sapien
tgatggttcaacccaacagccattacctgtgac

SEQ ID NO: 797996 - DNA, 33 bp, Homo sapien
tgatggttcaacccaagagccattacctgtgac

SEQ ID NO: 797997 - DNA, 33 bp, Homo sapien
gcctgcacagcggccaatcggagggtgaagtga

SEQ ID NO: 797998 - DNA, 33 bp, Homo sapien
gcctgcacagcggccactcggagggtgaagtga

SEQ ID NO: 797999 - DNA, 33 bp, Homo sapien
taacagagggtccagaagtgaggggagccttgt

SEQ ID NO: 798000 - DNA, 33 bp, Homo sapien
taacagagggtccagacgtgaggggagccttgt

SEQ ID NO: 798001 - DNA, 33 bp, Homo sapien
tccaagagggagttcaaataacagagggtccag

SEQ ID NO: 798002 - DNA, 33 bp, Homo sapien
tccaagagggagttcacataacagagggtccag

SEQ ID NO: 798003 - DNA, 33 bp, Homo sapien
ggcacttagcaagtgaatcaacccaaatgatga

SEQ ID NO: 798004 - DNA, 33 bp, Homo sapien
ggcacttagcaagtgagtcaacccaaatgatga

SEQ ID NO: 798005 - DNA, 33 bp, Homo sapien
acctggatgggccacacacgattgggtgactca

SEQ ID NO: 798006 - DNA, 33 bp, Homo sapien
acctggatgggccacatacgattgggtgactca

SEQ ID NO: 798007 - DNA, 33 bp, Homo sapien
aatattttgttgctcacgaaagcttctcattaa

SEQ ID NO: 798008 - DNA, 33 bp, Homo sapien
aatattttgttgctcatgaaagcttctcattaa

SEQ ID NO: 798009 - DNA, 33 bp, Homo sapien
acggtgtggaaagcaaaccttagaagaaatcag

SEQ ID NO: 798010 - DNA, 33 bp, Homo sapien
acggtgtggaaagcaacccttagaagaaatcag

SEQ ID NO: 798011 - DNA, 33 bp, Homo sapien
cattctaattttgcacgagtttttcctgcgcaa

SEQ ID NO: 798012 - DNA, 33 bp, Homo sapien
cattctaattttgcactagtttttcctgcgcaa

SEQ ID NO: 798013 - DNA, 33 bp, Homo sapien
ggaggcttgttgaccacgaaataacggggagtg

SEQ ID NO: 798014 - DNA, 33 bp, Homo sapien
ggaggcttgttgaccaggaaataacggggagtg

SEQ ID NO: 798015 - DNA, 33 bp, Homo sapien
aggactaagtggcttcccagggtgacttccagg

SEQ ID NO: 798016 - DNA, 33 bp, Homo sapien
aggactaagtggcttctcagggtgacttccagg

SEQ ID NO: 798017 - DNA, 33 bp, Homo sapien
taataggaactaaaacccagttctccaacaact

SEQ ID NO: 798018 - DNA, 33 bp, Homo sapien
taataggaactaaaacgcagttctccaacaact

SEQ ID NO: 798019 - DNA, 33 bp, Homo sapien
acagggtttttttcaccaatggcatcatttgaa

SEQ ID NO: 798020 - DNA, 33 bp, Homo sapien
acagggtttttttcacgaatggcatcatttgaa

SEQ ID NO: 798021 - DNA, 33 bp, Homo sapien
ggcctcctccagtgaaagagatttgaagatgat

SEQ ID NO: 798022 - DNA, 33 bp, Homo sapien
ggcctcctccagtgaatgagatttgaagatgat

SEQ ID NO: 798023 - DNA, 33 bp, Homo sapien
ctgatgtaaaccgttcaaaatggtctgcagatg

SEQ ID NO: 798024 - DNA, 33 bp, Homo sapien
ctgatgtaaaccgttcgaaatggtctgcagatg

SEQ ID NO: 798025 - DNA, 33 bp, Homo sapien
tgggttggacagagaacgggaggtgagaaggtg

SEQ ID NO: 798026 - DNA, 33 bp, Homo sapien
tgggttggacagagaatgggaggtgagaaggtg

SEQ ID NO: 798027 - DNA, 33 bp, Homo sapien
gatttctcgcatcccaatactttaaaactttgc

SEQ ID NO: 798028 - DNA, 33 bp, Homo sapien
gatttctcgcatcccagtactttaaaactttgc

SEQ ID NO: 798029 - DNA, 33 bp, Homo sapien
tgtgctgtcctgaaacaacactctggtttaatg

SEQ ID NO: 798030 - DNA, 33 bp, Homo sapien
tgtgctgtcctgaaacgacactctggtttaatg

SEQ ID NO: 798031 - DNA, 33 bp, Homo sapien
caaatgcaccttatggccaaacatctccagggc

SEQ ID NO: 798032 - DNA, 33 bp, Homo sapien
caaatgcaccttatggtcaaacatctccagggc

SEQ ID NO: 798033 - DNA, 33 bp, Homo sapien
tgtgcttggagttccaaatttgcagatggtctc

SEQ ID NO: 798034 - DNA, 33 bp, Homo sapien
tgtgcttggagttccagatttgcagatggtctc

SEQ ID NO: 798035 - DNA, 33 bp, Homo sapien
tggaggatatctgacacggtccttgccttcctt

SEQ ID NO: 798036 - DNA, 33 bp, Homo sapien
tggaggatatctgacatggtccttgccttcctt

SEQ ID NO: 798037 - DNA, 33 bp, Homo sapien
ggtggcactgctaaaaccttgtaatagtaataa

SEQ ID NO: 798038 - DNA, 33 bp, Homo sapien
ggtggcactgctaaaatcttgtaatagtaataa

SEQ ID NO: 798039 - DNA, 33 bp, Homo sapien
tcaaaaggcttaaaaaatcaactcatgacccct

SEQ ID NO: 798040 - DNA, 33 bp, Homo sapien
tcaaaaggcttaaaaagtcaactcatgacccct

SEQ ID NO: 798041 - DNA, 33 bp, Homo sapien
gaatgaaggtgggatagatttggacagatagag

SEQ ID NO: 798042 - DNA, 33 bp, Homo sapien
gaatgaaggtgggatatatttggacagatagag

SEQ ID NO: 798043 - DNA, 33 bp, Homo sapien
caagaaggaggtatgtaaatatcaagtgttaaa

SEQ ID NO: 798044 - DNA, 33 bp, Homo sapien
caagaaggaggtatgtgaatatcaagtgttaaa

SEQ ID NO: 798045 - DNA, 33 bp, Homo sapien
tccacaccagaatgcacaaaacaagtccacctt

SEQ ID NO: 798046 - DNA, 33 bp, Homo sapien
tccacaccagaatgcagaaaacaagtccacctt

SEQ ID NO: 798047 - DNA, 33 bp, Homo sapien
agctgaacagtgaagaccattccgagagttcgc

SEQ ID NO: 798048 - DNA, 33 bp, Homo sapien
agctgaacagtgaagagcattccgagagttcgc

SEQ ID NO: 798049 - DNA, 33 bp, Homo sapien
aggctgaagatggaaacttggaaacccttagca

SEQ ID NO: 798050 - DNA, 33 bp, Homo sapien
aggctgaagatggaaatttggaaacccttagca

SEQ ID NO: 798051 - DNA, 33 bp, Homo sapien
catgcaactcatcagcaaatctctttggcaccg

SEQ ID NO: 798052 - DNA, 33 bp, Homo sapien
catgcaactcatcagcgaatctctttggcaccg

SEQ ID NO: 798053 - DNA, 33 bp, Homo sapien
ctgtgtctcctccctgcaatacaagttccgtga

SEQ ID NO: 798054 - DNA, 33 bp, Homo sapien
ctgtgtctcctccctgtaatacaagttccgtga

SEQ ID NO: 798055 - DNA, 33 bp, Homo sapien
ttcattaatccttgcaacaatctatgagagagg

SEQ ID NO: 798056 - DNA, 33 bp, Homo sapien
ttcattaatccttgcagcaatctatgagagagg

SEQ ID NO: 798057 - DNA, 33 bp, Homo sapien
gactgggacaagcgaacgctcgtaactagtttg

SEQ ID NO: 798058 - DNA, 33 bp, Homo sapien
gactgggacaagcgaatgctcgtaactagtttg

SEQ ID NO: 798059 - DNA, 33 bp, Homo sapien
aagccgcaaaatgagtcaacccccactataaag

SEQ ID NO: 798060 - DNA, 33 bp, Homo sapien
aagccgcaaaatgagttaacccccactataaag

SEQ ID NO: 798061 - DNA, 33 bp, Homo sapien
tggcatcaaaggtgggaacctgtctttattatc

SEQ ID NO: 798062 - DNA, 33 bp, Homo sapien
tggcatcaaaggtggggacctgtctttattatc

SEQ ID NO: 798063 - DNA, 33 bp, Homo sapien
atcccataaatattgacggaacatggaatgcat

SEQ ID NO: 798064 - DNA, 33 bp, Homo sapien
atcccataaatattgatggaacatggaatgcat

SEQ ID NO: 798065 - DNA, 33 bp, Homo sapien
gacgagggctggactacgtgaaagagctcattt

SEQ ID NO: 798066 - DNA, 33 bp, Homo sapien
gacgagggctggactatgtgaaagagctcattt

SEQ ID NO: 798067 - DNA, 33 bp, Homo sapien
taaagtatcctgtggaccaaggctaaggctaag

SEQ ID NO: 798068 - DNA, 33 bp, Homo sapien
taaagtatcctgtggatcaaggctaaggctaag

SEQ ID NO: 798069 - DNA, 33 bp, Homo sapien
ccctgttttttgccccagctctgatcagtaaat

SEQ ID NO: 798070 - DNA, 33 bp, Homo sapien
ccctgttttttgccccggctctgatcagtaaat

SEQ ID NO: 798071 - DNA, 33 bp, Homo sapien
ccagatggaaactgaccgagaatagtttggcag

SEQ ID NO: 798072 - DNA, 33 bp, Homo sapien
ccagatggaaactgactgagaatagtttggcag

SEQ ID NO: 798073 - DNA, 33 bp, Homo sapien
aaccctcatcttgatcactcgcggaggaagcga

SEQ ID NO: 798074 - DNA, 33 bp, Homo sapien
aaccctcatcttgatcgctcgcggaggaagcga

SEQ ID NO: 798075 - DNA, 33 bp, Homo sapien
tcccatctttgtgttccctacatttctcagccc

SEQ ID NO: 798076 - DNA, 33 bp, Homo sapien
tcccatctttgtgttcgctacatttctcagccc

SEQ ID NO: 798077 - DNA, 33 bp, Homo sapien
ggaatgacctgtagccaattcccagagcaaggt

SEQ ID NO: 798078 - DNA, 33 bp, Homo sapien
ggaatgacctgtagccgattcccagagcaaggt

SEQ ID NO: 798079 - DNA, 33 bp, Homo sapien
catgaggtaaagaaaagcttcatgtgagtgtgg

SEQ ID NO: 798080 - DNA, 33 bp, Homo sapien
catgaggtaaagaaaatcttcatgtgagtgtgg

SEQ ID NO: 798081 - DNA, 33 bp, Homo sapien
tgtgatgcccaccaagaagatgggccctgatgc

SEQ ID NO: 798082 - DNA, 33 bp, Homo sapien
tgtgatgcccaccaagcagatgggccctgatgc

SEQ ID NO: 798083 - DNA, 33 bp, Homo sapien
gggaaatgccaggagaagccgtgttctggggta

SEQ ID NO: 798084 - DNA, 33 bp, Homo sapien
gggaaatgccaggagaggccgtgttctggggta

SEQ ID NO: 798085 - DNA, 33 bp, Homo sapien
ggagagaatccattcaagttagaacagaaagtc

SEQ ID NO: 798086 - DNA, 33 bp, Homo sapien
ggagagaatccattcacgttagaacagaaagtc

SEQ ID NO: 798087 - DNA, 33 bp, Homo sapien
aagtgaatccacacccagcagtaactggcagtt

SEQ ID NO: 798088 - DNA, 33 bp, Homo sapien
aagtgaatccacacccggcagtaactggcagtt

SEQ ID NO: 798089 - DNA, 33 bp, Homo sapien
gatggccttgagacaaccttataattcaaaggc

SEQ ID NO: 798090 - DNA, 33 bp, Homo sapien
gatggccttgagacaatcttataattcaaaggc

SEQ ID NO: 798091 - DNA, 33 bp, Homo sapien
gggagttatgtgcttgcaactcttctgggcccc

SEQ ID NO: 798092 - DNA, 33 bp, Homo sapien
gggagttatgtgcttggaactcttctgggcccc

SEQ ID NO: 798093 - DNA, 33 bp, Homo sapien
taggatgatgtgtcaccgaccctttctgacacc

SEQ ID NO: 798094 - DNA, 33 bp, Homo sapien
taggatgatgtgtcactgaccctttctgacacc

SEQ ID NO: 798095 - DNA, 33 bp, Homo sapien
tctgactctccgtagacccctccttctcttgca

SEQ ID NO: 798096 - DNA, 33 bp, Homo sapien
tctgactctccgtagatccctccttctcttgca

SEQ ID NO: 798097 - DNA, 33 bp, Homo sapien
tagtctctctcatcctaaagcccagaggagcaa

SEQ ID NO: 798098 - DNA, 33 bp, Homo sapien
tagtctctctcatcctgaagcccagaggagcaa

SEQ ID NO: 798099 - DNA, 33 bp, Homo sapien
aaacgggaatctttacagactgtctctcatgtt

SEQ ID NO: 798100 - DNA, 33 bp, Homo sapien
aaacgggaatctttacggactgtctctcatgtt

SEQ ID NO: 798101 - DNA, 33 bp, Homo sapien
ctggacatcaggaaaccagacccttgtctcctt

SEQ ID NO: 798102 - DNA, 33 bp, Homo sapien
ctggacatcaggaaactagacccttgtctcctt

SEQ ID NO: 798103 - DNA, 33 bp, Homo sapien
gactattgtcatcacccggtaaaggcacatttc

SEQ ID NO: 798104 - DNA, 33 bp, Homo sapien
gactattgtcatcaccgggtaaaggcacatttc

SEQ ID NO: 798105 - DNA, 33 bp, Homo sapien
cacagatagatgtaacagaggccaacacacctt

SEQ ID NO: 798106 - DNA, 33 bp, Homo sapien
cacagatagatgtaacggaggccaacacacctt

SEQ ID NO: 798107 - DNA, 33 bp, Homo sapien
cacatagcctgagctacgagagcccacttggag

SEQ ID NO: 798108 - DNA, 33 bp, Homo sapien
cacatagcctgagctaggagagcccacttggag

SEQ ID NO: 798109 - DNA, 33 bp, Homo sapien
cctacccacgaataagaaatgttccaatcttat

SEQ ID NO: 798110 - DNA, 33 bp, Homo sapien
cctacccacgaataagcaatgttccaatcttat

SEQ ID NO: 798111 - DNA, 33 bp, Homo sapien
gacctcccaactcacacaagttgatatctgggt

SEQ ID NO: 798112 - DNA, 33 bp, Homo sapien
gacctcccaactcacagaagttgatatctgggt

SEQ ID NO: 798113 - DNA, 33 bp, Homo sapien
acatattcttgttttcacatctctattgattaa

SEQ ID NO: 798114 - DNA, 33 bp, Homo sapien
acatattcttgttttcgcatctctattgattaa

SEQ ID NO: 798115 - DNA, 33 bp, Homo sapien
ccataagatatacaaaccacttggaaaatgtga

SEQ ID NO: 798116 - DNA, 33 bp, Homo sapien
ccataagatatacaaagcacttggaaaatgtga

SEQ ID NO: 798117 - DNA, 33 bp, Homo sapien
cagtttgcctatctgcactaaacgtttctcggc

SEQ ID NO: 798118 - DNA, 33 bp, Homo sapien
cagtttgcctatctgctctaaacgtttctcggc

SEQ ID NO: 798119 - DNA, 33 bp, Homo sapien
gtatggtccctcttcccccaggagcccacacct

SEQ ID NO: 798120 - DNA, 33 bp, Homo sapien
gtatggtccctcttcctccaggagcccacacct

SEQ ID NO: 798121 - DNA, 33 bp, Homo sapien
tctggggcttgaaggcactttttcttttctgtg

SEQ ID NO: 798122 - DNA, 33 bp, Homo sapien
tctggggcttgaaggctctttttcttttctgtg

SEQ ID NO: 798123 - DNA, 33 bp, Homo sapien
atacctgcattgctaacttactatccccagaac

SEQ ID NO: 798124 - DNA, 33 bp, Homo sapien
atacctgcattgctaagttactatccccagaac

SEQ ID NO: 798125 - DNA, 33 bp, Homo sapien
tgctgcagaaatcagaaatacagaaggaccctg

SEQ ID NO: 798126 - DNA, 33 bp, Homo sapien
tgctgcagaaatcagagatacagaaggaccctg

SEQ ID NO: 798127 - DNA, 33 bp, Homo sapien
ttggacttgagttcaaccaagtgttagagcaat

SEQ ID NO: 798128 - DNA, 33 bp, Homo sapien
ttggacttgagttcaatcaagtgttagagcaat

SEQ ID NO: 798129 - DNA, 33 bp, Homo sapien
tggttcatttccaagacaggtgatcagcagtat

SEQ ID NO: 798130 - DNA, 33 bp, Homo sapien
tggttcatttccaagagaggtgatcagcagtat

SEQ ID NO: 798131 - DNA, 33 bp, Homo sapien
cagcacacagaggagaatctatcaccttgatcg

SEQ ID NO: 798132 - DNA, 33 bp, Homo sapien
cagcacacagaggagactctatcaccttgatcg

SEQ ID NO: 798133 - DNA, 33 bp, Homo sapien
ccaggaactctgttggaaagatctgctcaagga

SEQ ID NO: 798134 - DNA, 33 bp, Homo sapien
ccaggaactctgttggcaagatctgctcaagga

SEQ ID NO: 798135 - DNA, 33 bp, Homo sapien
ggtgattaggtcaggaaagtggaattctcatgg

SEQ ID NO: 798136 - DNA, 33 bp, Homo sapien
ggtgattaggtcaggagagtggaattctcatgg

SEQ ID NO: 798137 - DNA, 33 bp, Homo sapien
tagacttctcagccaccgaaattttaaatttct

SEQ ID NO: 798138 - DNA, 33 bp, Homo sapien
tagacttctcagccactgaaattttaaatttct

SEQ ID NO: 798139 - DNA, 33 bp, Homo sapien
aatgggtcacccacaaagaataaggatcagtct

SEQ ID NO: 798140 - DNA, 33 bp, Homo sapien
aatgggtcacccacaaggaataaggatcagtct

SEQ ID NO: 798141 - DNA, 33 bp, Homo sapien
gaaagaacatggaaaaagcccagcagctcttaa

SEQ ID NO: 798142 - DNA, 33 bp, Homo sapien
gaaagaacatggaaaaggcccagcagctcttaa

SEQ ID NO: 798143 - DNA, 33 bp, Homo sapien
atgacttcggggccacagaatgacttgggtttc

SEQ ID NO: 798144 - DNA, 33 bp, Homo sapien
atgacttcggggccacggaatgacttgggtttc

SEQ ID NO: 798145 - DNA, 33 bp, Homo sapien
cgtcctgacaaaaaccacatcaattttcccagt

SEQ ID NO: 798146 - DNA, 33 bp, Homo sapien
cgtcctgacaaaaaccgcatcaattttcccagt

SEQ ID NO: 798147 - DNA, 33 bp, Homo sapien
tgtgacaggacctaacaccgaatgcaagggaga

SEQ ID NO: 798148 - DNA, 33 bp, Homo sapien
tgtgacaggacctaaccccgaatgcaagggaga

SEQ ID NO: 798149 - DNA, 33 bp, Homo sapien
ttatcatgagaagctccgaagcaccaaaaggaa

SEQ ID NO: 798150 - DNA, 33 bp, Homo sapien
ttatcatgagaagctctgaagcaccaaaaggaa

SEQ ID NO: 798151 - DNA, 33 bp, Homo sapien
tttcagatgtggttgaggattaagctagtttta

SEQ ID NO: 798152 - DNA, 33 bp, Homo sapien
tttcagatgtggttgatgattaagctagtttta

SEQ ID NO: 798153 - DNA, 33 bp, Homo sapien
agataaaagcctttgccactagccctgaggtgg

SEQ ID NO: 798154 - DNA, 33 bp, Homo sapien
agataaaagcctttgctactagccctgaggtgg

SEQ ID NO: 798155 - DNA, 33 bp, Homo sapien
gggctagaaggttcaacatccggcagaaggacg

SEQ ID NO: 798156 - DNA, 33 bp, Homo sapien
gggctagaaggttcaatatccggcagaaggacg

SEQ ID NO: 798157 - DNA, 33 bp, Homo sapien
ccgcagaggcctggtcaagttttggccttgctc

SEQ ID NO: 798158 - DNA, 33 bp, Homo sapien
ccgcagaggcctggtcgagttttggccttgctc

SEQ ID NO: 798159 - DNA, 33 bp, Homo sapien
ctcctgctgggtttgacgatgttcagaggcaga

SEQ ID NO: 798160 - DNA, 33 bp, Homo sapien
ctcctgctgggtttgaggatgttcagaggcaga

SEQ ID NO: 798161 - DNA, 33 bp, Homo sapien
tgtccctggttttgtacgccaacgacccttagc

SEQ ID NO: 798162 - DNA, 33 bp, Homo sapien
tgtccctggttttgtatgccaacgacccttagc

SEQ ID NO: 798163 - DNA, 33 bp, Homo sapien
gactctaagtgccgtgcaattttagccagttgc

SEQ ID NO: 798164 - DNA, 33 bp, Homo sapien
gactctaagtgccgtgtaattttagccagttgc

SEQ ID NO: 798165 - DNA, 33 bp, Homo sapien
cacctgctttctttgccgactattagctagggg

SEQ ID NO: 798166 - DNA, 33 bp, Homo sapien
cacctgctttctttgctgactattagctagggg

SEQ ID NO: 798167 - DNA, 33 bp, Homo sapien
cagttagctaacattcactgcatgcttgctgag

SEQ ID NO: 798168 - DNA, 33 bp, Homo sapien
cagttagctaacattcgctgcatgcttgctgag

SEQ ID NO: 798169 - DNA, 33 bp, Homo sapien
acctttgggagggtcaactatggataagctaag

SEQ ID NO: 798170 - DNA, 33 bp, Homo sapien
acctttgggagggtcacctatggataagctaag

SEQ ID NO: 798171 - DNA, 33 bp, Homo sapien
ccaatcctgtcaaccacgatccttaccataccc

SEQ ID NO: 798172 - DNA, 33 bp, Homo sapien
ccaatcctgtcaaccatgatccttaccataccc

SEQ ID NO: 798173 - DNA, 33 bp, Homo sapien
ggggcacacgtgacccaaaggctgcaactccaa

SEQ ID NO: 798174 - DNA, 33 bp, Homo sapien
ggggcacacgtgacccgaaggctgcaactccaa

SEQ ID NO: 798175 - DNA, 33 bp, Homo sapien
tcacagcctctggcaaagcaagaagaaaggcga

SEQ ID NO: 798176 - DNA, 33 bp, Homo sapien
tcacagcctctggcaatgcaagaagaaaggcga

SEQ ID NO: 798177 - DNA, 33 bp, Homo sapien
cacatgcaagatattacgcctgtgtcttatctt

SEQ ID NO: 798178 - DNA, 33 bp, Homo sapien
cacatgcaagatattatgcctgtgtcttatctt

SEQ ID NO: 798179 - DNA, 33 bp, Homo sapien
cctcatctcctccagccagaaattgctgtgtgg

SEQ ID NO: 798180 - DNA, 33 bp, Homo sapien
cctcatctcctccagctagaaattgctgtgtgg

SEQ ID NO: 798181 - DNA, 33 bp, Homo sapien
ccctggatagggccgacattcttctttgccggg

SEQ ID NO: 798182 - DNA, 33 bp, Homo sapien
ccctggatagggccgatattcttctttgccggg

SEQ ID NO: 798183 - DNA, 33 bp, Homo sapien
tcatgcctcactcataccactgggggacggggt

SEQ ID NO: 798184 - DNA, 33 bp, Homo sapien
tcatgcctcactcatagcactgggggacggggt

SEQ ID NO: 798185 - DNA, 33 bp, Homo sapien
tacttctgccgtggaagatcccctggaaagact

SEQ ID NO: 798186 - DNA, 33 bp, Homo sapien
tacttctgccgtggaatatcccctggaaagact

SEQ ID NO: 798187 - DNA, 33 bp, Homo sapien
catcgctgttcattccccagagctgagaggcct

SEQ ID NO: 798188 - DNA, 33 bp, Homo sapien
catcgctgttcattccgcagagctgagaggcct

SEQ ID NO: 798189 - DNA, 33 bp, Homo sapien
gagtctgatgatttccaccctatcaccaaacct

SEQ ID NO: 798190 - DNA, 33 bp, Homo sapien
gagtctgatgatttccgccctatcaccaaacct

SEQ ID NO: 798191 - DNA, 33 bp, Homo sapien
tattatgacacaaaacaacgacactcattagta

SEQ ID NO: 798192 - DNA, 33 bp, Homo sapien
tattatgacacaaaacgacgacactcattagta

SEQ ID NO: 798193 - DNA, 33 bp, Homo sapien
tgacaatacaatcatgccatagcatactaaaca

SEQ ID NO: 798194 - DNA, 33 bp, Homo sapien
tgacaatacaatcatgtcatagcatactaaaca

SEQ ID NO: 798195 - DNA, 33 bp, Homo sapien
tgacaaaaattgaatacggactgtggattaggt

SEQ ID NO: 798196 - DNA, 33 bp, Homo sapien
tgacaaaaattgaatatggactgtggattaggt

SEQ ID NO: 798197 - DNA, 33 bp, Homo sapien
atgcaggtgaccttgaactctgattgttacgac

SEQ ID NO: 798198 - DNA, 33 bp, Homo sapien
atgcaggtgaccttgagctctgattgttacgac

SEQ ID NO: 798199 - DNA, 33 bp, Homo sapien
cctgagaactaagagcactggcttagagcccca

SEQ ID NO: 798200 - DNA, 33 bp, Homo sapien
cctgagaactaagagcgctggcttagagcccca

SEQ ID NO: 798201 - DNA, 33 bp, Homo sapien
aattgtttcttgcccacgagaattctggaagtg

SEQ ID NO: 798202 - DNA, 33 bp, Homo sapien
aattgtttcttgcccatgagaattctggaagtg

SEQ ID NO: 798203 - DNA, 33 bp, Homo sapien
cctctcagttgggtccacaacatagagagagca

SEQ ID NO: 798204 - DNA, 33 bp, Homo sapien
cctctcagttgggtccgcaacatagagagagca

SEQ ID NO: 798205 - DNA, 33 bp, Homo sapien
ggctgcactcttatcccggaaggctgtgggtca

SEQ ID NO: 798206 - DNA, 33 bp, Homo sapien
ggctgcactcttatcctggaaggctgtgggtca

SEQ ID NO: 798207 - DNA, 33 bp, Homo sapien
tgccagtgatgctatccgaacctgaggtatgta

SEQ ID NO: 798208 - DNA, 33 bp, Homo sapien
tgccagtgatgctatctgaacctgaggtatgta

SEQ ID NO: 798209 - DNA, 33 bp, Homo sapien
gaacagctgataaaagaattctcacactcatcc

SEQ ID NO: 798210 - DNA, 33 bp, Homo sapien
gaacagctgataaaaggattctcacactcatcc

SEQ ID NO: 798211 - DNA, 33 bp, Homo sapien
agtcagagaaaagtaccggtttgagtagatgaa

SEQ ID NO: 798212 - DNA, 33 bp, Homo sapien
agtcagagaaaagtactggtttgagtagatgaa

SEQ ID NO: 798213 - DNA, 33 bp, Homo sapien
aggaacaacttaacagaaatatatagcaattct

SEQ ID NO: 798214 - DNA, 33 bp, Homo sapien
aggaacaacttaacaggaatatatagcaattct

SEQ ID NO: 798215 - DNA, 33 bp, Homo sapien
tctcactggaagaaacaggcaacaaacaaacac

SEQ ID NO: 798216 - DNA, 33 bp, Homo sapien
tctcactggaagaaacgggcaacaaacaaacac

SEQ ID NO: 798217 - DNA, 33 bp, Homo sapien
ggaaatgtagagaatacctcatgctaagaagtg

SEQ ID NO: 798218 - DNA, 33 bp, Homo sapien
ggaaatgtagagaatatctcatgctaagaagtg

SEQ ID NO: 798219 - DNA, 33 bp, Homo sapien
gtcctgagcagacaaacgtgctcagattgggta

SEQ ID NO: 798220 - DNA, 33 bp, Homo sapien
gtcctgagcagacaaatgtgctcagattgggta

SEQ ID NO: 798221 - DNA, 33 bp, Homo sapien
cccctggtgggcaggaaggattgaacagtcctg

SEQ ID NO: 798222 - DNA, 33 bp, Homo sapien
cccctggtgggcaggagggattgaacagtcctg

SEQ ID NO: 798223 - DNA, 33 bp, Homo sapien
tggattgctgtctgaacaaatcattggtttggg

SEQ ID NO: 798224 - DNA, 33 bp, Homo sapien
tggattgctgtctgaataaatcattggtttggg

SEQ ID NO: 798225 - DNA, 33 bp, Homo sapien
aattttcttttacaacagagtcaaaaggaagaa

SEQ ID NO: 798226 - DNA, 33 bp, Homo sapien
aattttcttttacaactgagtcaaaaggaagaa

SEQ ID NO: 798227 - DNA, 33 bp, Homo sapien
ctcattcctttctcacaacaatcttataggtag

SEQ ID NO: 798228 - DNA, 33 bp, Homo sapien
ctcattcctttctcacgacaatcttataggtag

SEQ ID NO: 798229 - DNA, 33 bp, Homo sapien
cacacttctctcatagactaacccagcagttct

SEQ ID NO: 798230 - DNA, 33 bp, Homo sapien
cacacttctctcataggctaacccagcagttct

SEQ ID NO: 798231 - DNA, 33 bp, Homo sapien
cttaacaccttacaaactcttgccccagtgggc

SEQ ID NO: 798232 - DNA, 33 bp, Homo sapien
cttaacaccttacaaattcttgccccagtgggc

SEQ ID NO: 798233 - DNA, 33 bp, Homo sapien
cactcagtatctggtaactgctgtccacttgcc

SEQ ID NO: 798234 - DNA, 33 bp, Homo sapien
cactcagtatctggtagctgctgtccacttgcc

SEQ ID NO: 798235 - DNA, 33 bp, Homo sapien
tctttttaagagttgagaatggaagtcatattc

SEQ ID NO: 798236 - DNA, 33 bp, Homo sapien
tctttttaagagttgataatggaagtcatattc

SEQ ID NO: 798237 - DNA, 33 bp, Homo sapien
agcaggcgacaccgagaacactgtggtgggtgc

SEQ ID NO: 798238 - DNA, 33 bp, Homo sapien
agcaggcgacaccgaggacactgtggtgggtgc

SEQ ID NO: 798239 - DNA, 33 bp, Homo sapien
cccacccttgtaatgaagacatcaggctgtgca

SEQ ID NO: 798240 - DNA, 33 bp, Homo sapien
cccacccttgtaatgaggacatcaggctgtgca

SEQ ID NO: 798241 - DNA, 33 bp, Homo sapien
gaggttgataacacgacgtgagtaatggctcta

SEQ ID NO: 798242 - DNA, 33 bp, Homo sapien
gaggttgataacacgatgtgagtaatggctcta

SEQ ID NO: 798243 - DNA, 33 bp, Homo sapien
ccgaaactctgagggccagaattcccattcttc

SEQ ID NO: 798244 - DNA, 33 bp, Homo sapien
ccgaaactctgagggcgagaattcccattcttc

SEQ ID NO: 798245 - DNA, 33 bp, Homo sapien
tgcttaggcagagatacgattagatgagggcgt

SEQ ID NO: 798246 - DNA, 33 bp, Homo sapien
tgcttaggcagagatatgattagatgagggcgt

SEQ ID NO: 798247 - DNA, 33 bp, Homo sapien
gtccttaatgagctgcacaaataacccattcta

SEQ ID NO: 798248 - DNA, 33 bp, Homo sapien
gtccttaatgagctgcgcaaataacccattcta

SEQ ID NO: 798249 - DNA, 33 bp, Homo sapien
catttgatgtgttttcaactttgagtaacagaa

SEQ ID NO: 798250 - DNA, 33 bp, Homo sapien
catttgatgtgttttctactttgagtaacagaa

SEQ ID NO: 798251 - DNA, 33 bp, Homo sapien
catgtcagttgttatacgcccactgtttttatt

SEQ ID NO: 798252 - DNA, 33 bp, Homo sapien
catgtcagttgttatatgcccactgtttttatt

SEQ ID NO: 798253 - DNA, 33 bp, Homo sapien
tatcacaaccaggtaactgacatgtataaaatg

SEQ ID NO: 798254 - DNA, 33 bp, Homo sapien
tatcacaaccaggtaattgacatgtataaaatg

SEQ ID NO: 798255 - DNA, 33 bp, Homo sapien
cattttttgggatctaggcccatgagtacaatt

SEQ ID NO: 798256 - DNA, 33 bp, Homo sapien
cattttttgggatctatgcccatgagtacaatt

SEQ ID NO: 798257 - DNA, 33 bp, Homo sapien
gcagacaagacaatgacagccaaggaaaaaggg

SEQ ID NO: 798258 - DNA, 33 bp, Homo sapien
gcagacaagacaatgagagccaaggaaaaaggg

SEQ ID NO: 798259 - DNA, 33 bp, Homo sapien
tgtatatgggaaagtacgtggaccagaagtctt

SEQ ID NO: 798260 - DNA, 33 bp, Homo sapien
tgtatatgggaaagtatgtggaccagaagtctt

SEQ ID NO: 798261 - DNA, 33 bp, Homo sapien
agacataaggagaaacaagcatagcagactgag

SEQ ID NO: 798262 - DNA, 33 bp, Homo sapien
agacataaggagaaaccagcatagcagactgag

SEQ ID NO: 798263 - DNA, 33 bp, Homo sapien
ggaacagttttgcagacagtaagatcagaaatt

SEQ ID NO: 798264 - DNA, 33 bp, Homo sapien
ggaacagttttgcagagagtaagatcagaaatt

SEQ ID NO: 798265 - DNA, 33 bp, Homo sapien
tatgtatacgaaaaaaagtccagccctcgtgga

SEQ ID NO: 798266 - DNA, 33 bp, Homo sapien
tatgtatacgaaaaaacgtccagccctcgtgga

SEQ ID NO: 798267 - DNA, 33 bp, Homo sapien
aacaccacattttctcactcataagtcagagtt

SEQ ID NO: 798268 - DNA, 33 bp, Homo sapien
aacaccacattttctcgctcataagtcagagtt

SEQ ID NO: 798269 - DNA, 33 bp, Homo sapien
actcaagtgaacaaagaaactgtgtgaggccca

SEQ ID NO: 798270 - DNA, 33 bp, Homo sapien
actcaagtgaacaaaggaactgtgtgaggccca

SEQ ID NO: 798271 - DNA, 33 bp, Homo sapien
aacactgaaatacagaccccattcacacccacc

SEQ ID NO: 798272 - DNA, 33 bp, Homo sapien
aacactgaaatacagatcccattcacacccacc

SEQ ID NO: 798273 - DNA, 33 bp, Homo sapien
gcctgggatgaaaataagaatgggataacagat

SEQ ID NO: 798274 - DNA, 33 bp, Homo sapien
gcctgggatgaaaataggaatgggataacagat

SEQ ID NO: 798275 - DNA, 33 bp, Homo sapien
cacaaaaacaacataacaaggagcagagaaaaa

SEQ ID NO: 798276 - DNA, 33 bp, Homo sapien
cacaaaaacaacataataaggagcagagaaaaa

SEQ ID NO: 798277 - DNA, 33 bp, Homo sapien
tgcgtattcttcagcactgactttttaaaatca

SEQ ID NO: 798278 - DNA, 33 bp, Homo sapien
tgcgtattcttcagcagtgactttttaaaatca

SEQ ID NO: 798279 - DNA, 33 bp, Homo sapien
cttattctggttaacactgatatccagacagta

SEQ ID NO: 798280 - DNA, 33 bp, Homo sapien
cttattctggttaacattgatatccagacagta

SEQ ID NO: 798281 - DNA, 33 bp, Homo sapien
aattaagagaagtaaccgtacccatcgtggtaa

SEQ ID NO: 798282 - DNA, 33 bp, Homo sapien
aattaagagaagtaactgtacccatcgtggtaa

SEQ ID NO: 798283 - DNA, 33 bp, Homo sapien
aaatgttgctacaaacaatccgaaatcaagagc

SEQ ID NO: 798284 - DNA, 33 bp, Homo sapien
aaatgttgctacaaaccatccgaaatcaagagc

SEQ ID NO: 798285 - DNA, 33 bp, Homo sapien
atgaacagacagacacaaaccagtatggaaaca

SEQ ID NO: 798286 - DNA, 33 bp, Homo sapien
atgaacagacagacactaaccagtatggaaaca

SEQ ID NO: 798287 - DNA, 33 bp, Homo sapien
attgtacaattccaacactctagcatcctcaaa

SEQ ID NO: 798288 - DNA, 33 bp, Homo sapien
attgtacaattccaacgctctagcatcctcaaa

SEQ ID NO: 798289 - DNA, 33 bp, Homo sapien
acatcattcaactctaccagaaaggcatgtcat

SEQ ID NO: 798290 - DNA, 33 bp, Homo sapien
acatcattcaactctagcagaaaggcatgtcat

SEQ ID NO: 798291 - DNA, 33 bp, Homo sapien
cccacttggtctcccactcaacagctctttgga

SEQ ID NO: 798292 - DNA, 33 bp, Homo sapien
cccacttggtctcccattcaacagctctttgga

SEQ ID NO: 798293 - DNA, 33 bp, Homo sapien
gatctggaaacatggcacagcatagcctgctga

SEQ ID NO: 798294 - DNA, 33 bp, Homo sapien
gatctggaaacatggcgcagcatagcctgctga

SEQ ID NO: 798295 - DNA, 33 bp, Homo sapien
ttgaagtgattcatgacgctctaagctagtaaa

SEQ ID NO: 798296 - DNA, 33 bp, Homo sapien
ttgaagtgattcatgatgctctaagctagtaaa

SEQ ID NO: 798297 - DNA, 33 bp, Homo sapien
gaataactttctcagcacccagatattgccttg

SEQ ID NO: 798298 - DNA, 33 bp, Homo sapien
gaataactttctcagcgcccagatattgccttg

SEQ ID NO: 798299 - DNA, 33 bp, Homo sapien
tgcctttgcttctagaataggctttctgggatg

SEQ ID NO: 798300 - DNA, 33 bp, Homo sapien
tgcctttgcttctagagtaggctttctgggatg

SEQ ID NO: 798301 - DNA, 33 bp, Homo sapien
ccatcagaaaaaatgcagagcaagagagcccag

SEQ ID NO: 798302 - DNA, 33 bp, Homo sapien
ccatcagaaaaaatgcggagcaagagagcccag

SEQ ID NO: 798303 - DNA, 33 bp, Homo sapien
aatcatttcagtgagcaaagcactttttttctt

SEQ ID NO: 798304 - DNA, 33 bp, Homo sapien
aatcatttcagtgagcgaagcactttttttctt

SEQ ID NO: 798305 - DNA, 33 bp, Homo sapien
aaactacagaaatacaacgttggaggcttttca

SEQ ID NO: 798306 - DNA, 33 bp, Homo sapien
aaactacagaaatacagcgttggaggcttttca

SEQ ID NO: 798307 - DNA, 33 bp, Homo sapien
catgttagcaacagaaaccagtgtcagaaggtc

SEQ ID NO: 798308 - DNA, 33 bp, Homo sapien
catgttagcaacagaacccagtgtcagaaggtc

SEQ ID NO: 798309 - DNA, 33 bp, Homo sapien
gcttgacgatgtcacaagacagtatccaggcaa

SEQ ID NO: 798310 - DNA, 33 bp, Homo sapien
gcttgacgatgtcacaggacagtatccaggcaa

SEQ ID NO: 798311 - DNA, 33 bp, Homo sapien
tggtgacgtctgatctcacacccgaaatcaccc

SEQ ID NO: 798312 - DNA, 33 bp, Homo sapien
tggtgacgtctgatcttacacccgaaatcaccc

SEQ ID NO: 798313 - DNA, 33 bp, Homo sapien
taaatcccatcattgaagcatccaattatgcta

SEQ ID NO: 798314 - DNA, 33 bp, Homo sapien
taaatcccatcattgaggcatccaattatgcta

SEQ ID NO: 798315 - DNA, 33 bp, Homo sapien
tctaaatcattgaaaacagaagaagttcacagg

SEQ ID NO: 798316 - DNA, 33 bp, Homo sapien
tctaaatcattgaaaatagaagaagttcacagg

SEQ ID NO: 798317 - DNA, 33 bp, Homo sapien
gttcaattcatattaaaaacactgtggagtttc

SEQ ID NO: 798318 - DNA, 33 bp, Homo sapien
gttcaattcatattaacaacactgtggagtttc

SEQ ID NO: 798319 - DNA, 33 bp, Homo sapien
gaaactgagtctgttcaaattgcaaaaggacct

SEQ ID NO: 798320 - DNA, 33 bp, Homo sapien
gaaactgagtctgttcgaattgcaaaaggacct

SEQ ID NO: 798321 - DNA, 33 bp, Homo sapien
attattatggagtagtaactaacctgtttcaaa

SEQ ID NO: 798322 - DNA, 33 bp, Homo sapien
attattatggagtagtgactaacctgtttcaaa

SEQ ID NO: 798323 - DNA, 33 bp, Homo sapien
cgtgctccctcaagcaactgaggactcagtgct

SEQ ID NO: 798324 - DNA, 33 bp, Homo sapien
cgtgctccctcaagcatctgaggactcagtgct

SEQ ID NO: 798325 - DNA, 33 bp, Homo sapien
ggggaggggtagacacaaaagccctgcagttat

SEQ ID NO: 798326 - DNA, 33 bp, Homo sapien
ggggaggggtagacacgaaagccctgcagttat

SEQ ID NO: 798327 - DNA, 33 bp, Homo sapien
taatgatttttctccactcgtttttaattgaga

SEQ ID NO: 798328 - DNA, 33 bp, Homo sapien
taatgatttttctccattcgtttttaattgaga

SEQ ID NO: 798329 - DNA, 33 bp, Homo sapien
tcggtaggattaaagaggtgatgaagcttctcc

SEQ ID NO: 798330 - DNA, 33 bp, Homo sapien
tcggtaggattaaagatgtgatgaagcttctcc

SEQ ID NO: 798331 - DNA, 33 bp, Homo sapien
ctggatactcgaaggcagaaagaccagggatta

SEQ ID NO: 798332 - DNA, 33 bp, Homo sapien
ctggatactcgaaggcggaaagaccagggatta

SEQ ID NO: 798333 - DNA, 33 bp, Homo sapien
aaacccttccccattcaattcaaggtttgtgcg

SEQ ID NO: 798334 - DNA, 33 bp, Homo sapien
aaacccttccccattcgattcaaggtttgtgcg

SEQ ID NO: 798335 - DNA, 33 bp, Homo sapien
cacagtgagggtgtgcaattttaaggcagttgc

SEQ ID NO: 798336 - DNA, 33 bp, Homo sapien
cacagtgagggtgtgcgattttaaggcagttgc

SEQ ID NO: 798337 - DNA, 33 bp, Homo sapien
cctcagagagtggccaatagggtcacatgaggt

SEQ ID NO: 798338 - DNA, 33 bp, Homo sapien
cctcagagagtggccagtagggtcacatgaggt

SEQ ID NO: 798339 - DNA, 33 bp, Homo sapien
cttagtatttctatcacgcagatcctaccatac

SEQ ID NO: 798340 - DNA, 33 bp, Homo sapien
cttagtatttctatcatgcagatcctaccatac

SEQ ID NO: 798341 - DNA, 33 bp, Homo sapien
ttgcgggattgaaaggcaaactccaagagggct

SEQ ID NO: 798342 - DNA, 33 bp, Homo sapien
ttgcgggattgaaaggtaaactccaagagggct

SEQ ID NO: 798343 - DNA, 33 bp, Homo sapien
cctctggcatgtcgtacctcattttaatgagtc

SEQ ID NO: 798344 - DNA, 33 bp, Homo sapien
cctctggcatgtcgtatctcattttaatgagtc

SEQ ID NO: 798345 - DNA, 33 bp, Homo sapien
tggacaaatgagccaacaaccctggaacctcag

SEQ ID NO: 798346 - DNA, 33 bp, Homo sapien
tggacaaatgagccaataaccctggaacctcag

SEQ ID NO: 798347 - DNA, 33 bp, Homo sapien
tctcttgactcaagtgaaccaaatgtcccattt

SEQ ID NO: 798348 - DNA, 33 bp, Homo sapien
tctcttgactcaagtggaccaaatgtcccattt

SEQ ID NO: 798349 - DNA, 33 bp, Homo sapien
gccatacaaggggctacgtgacaaccagaagga

SEQ ID NO: 798350 - DNA, 33 bp, Homo sapien
gccatacaaggggctatgtgacaaccagaagga

SEQ ID NO: 798351 - DNA, 33 bp, Homo sapien
ctacaagaatcacacacggcctggacctcctgc

SEQ ID NO: 798352 - DNA, 33 bp, Homo sapien
ctacaagaatcacacatggcctggacctcctgc

SEQ ID NO: 798353 - DNA, 33 bp, Homo sapien
catgttcccagttaagaaggggtatgaaatgaa

SEQ ID NO: 798354 - DNA, 33 bp, Homo sapien
catgttcccagttaaggaggggtatgaaatgaa

SEQ ID NO: 798355 - DNA, 33 bp, Homo sapien
agaatgtacaatgatacgtccactttgtaaaac

SEQ ID NO: 798356 - DNA, 33 bp, Homo sapien
agaatgtacaatgatatgtccactttgtaaaac

SEQ ID NO: 798357 - DNA, 33 bp, Homo sapien
aaccatgtacataccaataagctatttgctgtt

SEQ ID NO: 798358 - DNA, 33 bp, Homo sapien
aaccatgtacataccagtaagctatttgctgtt

SEQ ID NO: 798359 - DNA, 33 bp, Homo sapien
caaatccaatctgacaatgctaagagttggact

SEQ ID NO: 798360 - DNA, 33 bp, Homo sapien
caaatccaatctgacactgctaagagttggact

SEQ ID NO: 798361 - DNA, 33 bp, Homo sapien
tttaagggatcctttacagaatcactgaaactt

SEQ ID NO: 798362 - DNA, 33 bp, Homo sapien
tttaagggatcctttatagaatcactgaaactt

SEQ ID NO: 798363 - DNA, 33 bp, Homo sapien
tgccttctcctggctcactcatggggataaagg

SEQ ID NO: 798364 - DNA, 33 bp, Homo sapien
tgccttctcctggctcgctcatggggataaagg

SEQ ID NO: 798365 - DNA, 33 bp, Homo sapien
cccatcctttgctgaacgaaattaagataggca

SEQ ID NO: 798366 - DNA, 33 bp, Homo sapien
cccatcctttgctgaatgaaattaagataggca

SEQ ID NO: 798367 - DNA, 33 bp, Homo sapien
tgactcctacacgcaacgcttagaactctgggg

SEQ ID NO: 798368 - DNA, 33 bp, Homo sapien
tgactcctacacgcaatgcttagaactctgggg

SEQ ID NO: 798369 - DNA, 33 bp, Homo sapien
tcgcaggcgaggaacaactacaaaggaacccac

SEQ ID NO: 798370 - DNA, 33 bp, Homo sapien
tcgcaggcgaggaacagctacaaaggaacccac

SEQ ID NO: 798371 - DNA, 33 bp, Homo sapien
cacacccagtccgaaaaataagctcttaagttc

SEQ ID NO: 798372 - DNA, 33 bp, Homo sapien
cacacccagtccgaaacataagctcttaagttc

SEQ ID NO: 798373 - DNA, 33 bp, Homo sapien
ttataaatggtgtagaaaaaatcgaggtgaatg

SEQ ID NO: 798374 - DNA, 33 bp, Homo sapien
ttataaatggtgtagagaaaatcgaggtgaatg

SEQ ID NO: 798375 - DNA, 33 bp, Homo sapien
cagacacgcctatgccaatgacacaatcctggt

SEQ ID NO: 798376 - DNA, 33 bp, Homo sapien
cagacacgcctatgccgatgacacaatcctggt

SEQ ID NO: 798377 - DNA, 33 bp, Homo sapien
cttaaaccatattcccagaagcagaacctaagg

SEQ ID NO: 798378 - DNA, 33 bp, Homo sapien
cttaaaccatattcccggaagcagaacctaagg

SEQ ID NO: 798379 - DNA, 33 bp, Homo sapien
gcaagcaggcatgcaccggactaagatgcaccc

SEQ ID NO: 798380 - DNA, 33 bp, Homo sapien
gcaagcaggcatgcactggactaagatgcaccc

SEQ ID NO: 798381 - DNA, 33 bp, Homo sapien
gccagatacatgctacaaggctggttccagctc

SEQ ID NO: 798382 - DNA, 33 bp, Homo sapien
gccagatacatgctactaggctggttccagctc

SEQ ID NO: 798383 - DNA, 33 bp, Homo sapien
tgctaccggaatttgcacctcttgctgcagacg

SEQ ID NO: 798384 - DNA, 33 bp, Homo sapien
tgctaccggaatttgcgcctcttgctgcagacg

SEQ ID NO: 798385 - DNA, 33 bp, Homo sapien
cttttgggaggtgcaacagcaatttcttctttc

SEQ ID NO: 798386 - DNA, 33 bp, Homo sapien
cttttgggaggtgcaagagcaatttcttctttc

SEQ ID NO: 798387 - DNA, 33 bp, Homo sapien
aggagattgcaataagaaaatggctgtgagtgt

SEQ ID NO: 798388 - DNA, 33 bp, Homo sapien
aggagattgcaataaggaaatggctgtgagtgt

SEQ ID NO: 798389 - DNA, 33 bp, Homo sapien
taaactatacagggagaattgaatacatctatc

SEQ ID NO: 798390 - DNA, 33 bp, Homo sapien
taaactatacagggaggattgaatacatctatc

SEQ ID NO: 798391 - DNA, 33 bp, Homo sapien
tcaggcagaaaaaggggagtgcacatttatgcc

SEQ ID NO: 798392 - DNA, 33 bp, Homo sapien
tcaggcagaaaaagggtagtgcacatttatgcc

SEQ ID NO: 798393 - DNA, 33 bp, Homo sapien
tttgcttgaggggacactatgcaccatgttgtg

SEQ ID NO: 798394 - DNA, 33 bp, Homo sapien
tttgcttgaggggacagtatgcaccatgttgtg

SEQ ID NO: 798395 - DNA, 33 bp, Homo sapien
gaattttttgggtcaggatacattcccagaatt

SEQ ID NO: 798396 - DNA, 33 bp, Homo sapien
gaattttttgggtcagtatacattcccagaatt

SEQ ID NO: 798397 - DNA, 33 bp, Homo sapien
tgcccaatagcccttgcaggtgtgtctagaact

SEQ ID NO: 798398 - DNA, 33 bp, Homo sapien
tgcccaatagcccttgtaggtgtgtctagaact

SEQ ID NO: 798399 - DNA, 33 bp, Homo sapien
aagattatgccattacactgaaaattcattaag

SEQ ID NO: 798400 - DNA, 33 bp, Homo sapien
aagattatgccattaccctgaaaattcattaag

SEQ ID NO: 798401 - DNA, 33 bp, Homo sapien
aaccattcttaggcagcacaaaaacagaccatg

SEQ ID NO: 798402 - DNA, 33 bp, Homo sapien
aaccattcttaggcagtacaaaaacagaccatg

SEQ ID NO: 798403 - DNA, 33 bp, Homo sapien
aaacccacttccaagacaatggtattagtccat

SEQ ID NO: 798404 - DNA, 33 bp, Homo sapien
aaacccacttccaagataatggtattagtccat

SEQ ID NO: 798405 - DNA, 33 bp, Homo sapien
ttcattctggcccttacgctgaaaagagggtcc

SEQ ID NO: 798406 - DNA, 33 bp, Homo sapien
ttcattctggcccttatgctgaaaagagggtcc

SEQ ID NO: 798407 - DNA, 33 bp, Homo sapien
taaatagctgggacaacgtacaaagtgacctgg

SEQ ID NO: 798408 - DNA, 33 bp, Homo sapien
taaatagctgggacaaggtacaaagtgacctgg

SEQ ID NO: 798409 - DNA, 33 bp, Homo sapien
taacaaaaatatgtaccgggccactacagactt

SEQ ID NO: 798410 - DNA, 33 bp, Homo sapien
taacaaaaatatgtactgggccactacagactt

SEQ ID NO: 798411 - DNA, 33 bp, Homo sapien
cctgtgatattaaggaataagttgcatcccggc

SEQ ID NO: 798412 - DNA, 33 bp, Homo sapien
cctgtgatattaaggagtaagttgcatcccggc

SEQ ID NO: 798413 - DNA, 33 bp, Homo sapien
aagttgccagatttcactaaaaacaaaaacagg

SEQ ID NO: 798414 - DNA, 33 bp, Homo sapien
aagttgccagatttcattaaaaacaaaaacagg

SEQ ID NO: 798415 - DNA, 33 bp, Homo sapien
ctaaataaatagtgaaccgtattttagtataag

SEQ ID NO: 798416 - DNA, 33 bp, Homo sapien
ctaaataaatagtgaatcgtattttagtataag

SEQ ID NO: 798417 - DNA, 33 bp, Homo sapien
ggaaaagggcgttcagaatctccccttcacaga

SEQ ID NO: 798418 - DNA, 33 bp, Homo sapien
ggaaaagggcgttcaggatctccccttcacaga

SEQ ID NO: 798419 - DNA, 33 bp, Homo sapien
tctggctgaaaaacacaaactcctgacacagac

SEQ ID NO: 798420 - DNA, 33 bp, Homo sapien
tctggctgaaaaacacgaactcctgacacagac

SEQ ID NO: 798421 - DNA, 33 bp, Homo sapien
acctgacctgattccacactgcggcagcccaag

SEQ ID NO: 798422 - DNA, 33 bp, Homo sapien
acctgacctgattccatactgcggcagcccaag

SEQ ID NO: 798423 - DNA, 33 bp, Homo sapien
gccacagcaagccagagaataaatgccctgcct

SEQ ID NO: 798424 - DNA, 33 bp, Homo sapien
gccacagcaagccagataataaatgccctgcct

SEQ ID NO: 798425 - DNA, 33 bp, Homo sapien
atgcacaccttggggcactctgatgactttata

SEQ ID NO: 798426 - DNA, 33 bp, Homo sapien
atgcacaccttggggcgctctgatgactttata

SEQ ID NO: 798427 - DNA, 33 bp, Homo sapien
gctgactggggatgacagcggctggactcctcc

SEQ ID NO: 798428 - DNA, 33 bp, Homo sapien
gctgactggggatgacggcggctggactcctcc

SEQ ID NO: 798429 - DNA, 33 bp, Homo sapien
gtaagatgatgctgacaaaactgagggcctcac

SEQ ID NO: 798430 - DNA, 33 bp, Homo sapien
gtaagatgatgctgaccaaactgagggcctcac

SEQ ID NO: 798431 - DNA, 33 bp, Homo sapien
tgtagtaggggagaataagactcacacatgaac

SEQ ID NO: 798432 - DNA, 33 bp, Homo sapien
tgtagtaggggagaattagactcacacatgaac

SEQ ID NO: 798433 - DNA, 33 bp, Homo sapien
ctcagttctcccaacaggcctgagacttccatg

SEQ ID NO: 798434 - DNA, 33 bp, Homo sapien
ctcagttctcccaacatgcctgagacttccatg

SEQ ID NO: 798435 - DNA, 33 bp, Homo sapien
atggctacaggatttgcatttcgaaaattcagt

SEQ ID NO: 798436 - DNA, 33 bp, Homo sapien
atggctacaggatttgtatttcgaaaattcagt

SEQ ID NO: 798437 - DNA, 33 bp, Homo sapien
agttgtgccaataagaaaagactacctgggact

SEQ ID NO: 798438 - DNA, 33 bp, Homo sapien
agttgtgccaataagagaagactacctgggact

SEQ ID NO: 798439 - DNA, 33 bp, Homo sapien
gattaaaagtacagaaaccaaaccagaaaaagt

SEQ ID NO: 798440 - DNA, 33 bp, Homo sapien
gattaaaagtacagaagccaaaccagaaaaagt

SEQ ID NO: 798441 - DNA, 33 bp, Homo sapien
gagggtcttgagtctacgacccaggatacagct

SEQ ID NO: 798442 - DNA, 33 bp, Homo sapien
gagggtcttgagtctatgacccaggatacagct

SEQ ID NO: 798443 - DNA, 33 bp, Homo sapien
cttgttcacttactacaatgtcttgcctgggag

SEQ ID NO: 798444 - DNA, 33 bp, Homo sapien
cttgttcacttactaccatgtcttgcctgggag

SEQ ID NO: 798445 - DNA, 33 bp, Homo sapien
ccagggactcctgcccaattcagtttccaagac

SEQ ID NO: 798446 - DNA, 33 bp, Homo sapien
ccagggactcctgcccgattcagtttccaagac

SEQ ID NO: 798447 - DNA, 33 bp, Homo sapien
aaaatggagtaagacaactcagtgatgagaaat

SEQ ID NO: 798448 - DNA, 33 bp, Homo sapien
aaaatggagtaagacacctcagtgatgagaaat

SEQ ID NO: 798449 - DNA, 33 bp, Homo sapien
gattcctttttgaggacgaattgtaccacagtt

SEQ ID NO: 798450 - DNA, 33 bp, Homo sapien
gattcctttttgaggatgaattgtaccacagtt

SEQ ID NO: 798451 - DNA, 33 bp, Homo sapien
atgatgttagcatgaaaccctcaagaaattctg

SEQ ID NO: 798452 - DNA, 33 bp, Homo sapien
atgatgttagcatgaagccctcaagaaattctg

SEQ ID NO: 798453 - DNA, 33 bp, Homo sapien
taatggtggtgaaatacactcaggtactctgat

SEQ ID NO: 798454 - DNA, 33 bp, Homo sapien
taatggtggtgaaatatactcaggtactctgat

SEQ ID NO: 798455 - DNA, 33 bp, Homo sapien
taagaagactcggggcaaagaaggccctgtgcc

SEQ ID NO: 798456 - DNA, 33 bp, Homo sapien
taagaagactcggggcgaagaaggccctgtgcc

SEQ ID NO: 798457 - DNA, 33 bp, Homo sapien
catggagccatgtggcaccatctgaatccatct

SEQ ID NO: 798458 - DNA, 33 bp, Homo sapien
catggagccatgtggcgccatctgaatccatct

SEQ ID NO: 798459 - DNA, 33 bp, Homo sapien
ctgacagcagcggggcaatcaactgaacaaagt

SEQ ID NO: 798460 - DNA, 33 bp, Homo sapien
ctgacagcagcggggcgatcaactgaacaaagt

SEQ ID NO: 798461 - DNA, 33 bp, Homo sapien
tatggtcagtgttcagccaccctcctctgctgt

SEQ ID NO: 798462 - DNA, 33 bp, Homo sapien
tatggtcagtgttcagtcaccctcctctgctgt

SEQ ID NO: 798463 - DNA, 33 bp, Homo sapien
ttaactcatcactgagacagctccagatctcac

SEQ ID NO: 798464 - DNA, 33 bp, Homo sapien
ttaactcatcactgaggcagctccagatctcac

SEQ ID NO: 798465 - DNA, 33 bp, Homo sapien
ctataagagtcgtttacgaggtgatatgaatgg

SEQ ID NO: 798466 - DNA, 33 bp, Homo sapien
ctataagagtcgtttatgaggtgatatgaatgg

SEQ ID NO: 798467 - DNA, 33 bp, Homo sapien
tctagctgagctcagacgatttacagtattaaa

SEQ ID NO: 798468 - DNA, 33 bp, Homo sapien
tctagctgagctcagatgatttacagtattaaa

SEQ ID NO: 798469 - DNA, 33 bp, Homo sapien
gggcccagacaccaccagaaactcagaggtgtt

SEQ ID NO: 798470 - DNA, 33 bp, Homo sapien
gggcccagacaccaccggaaactcagaggtgtt

SEQ ID NO: 798471 - DNA, 33 bp, Homo sapien
ctacagaacggtgagacgattaatgggtgttgt

SEQ ID NO: 798472 - DNA, 33 bp, Homo sapien
ctacagaacggtgagatgattaatgggtgttgt

SEQ ID NO: 798473 - DNA, 33 bp, Homo sapien
tcccactggctttgcaaaaggaagctaccatat

SEQ ID NO: 798474 - DNA, 33 bp, Homo sapien
tcccactggctttgcagaaggaagctaccatat

SEQ ID NO: 798475 - DNA, 33 bp, Homo sapien
gaactgtagagtcatccaggaatcctgttaaag

SEQ ID NO: 798476 - DNA, 33 bp, Homo sapien
gaactgtagagtcatctaggaatcctgttaaag

SEQ ID NO: 798477 - DNA, 33 bp, Homo sapien
gaggaggaaagtgccaatagggtgacctctgct

SEQ ID NO: 798478 - DNA, 33 bp, Homo sapien
gaggaggaaagtgccagtagggtgacctctgct

SEQ ID NO: 798479 - DNA, 33 bp, Homo sapien
ttaaaaaatcagagaaatggttacagtttggcc

SEQ ID NO: 798480 - DNA, 33 bp, Homo sapien
ttaaaaaatcagagaagtggttacagtttggcc

SEQ ID NO: 798481 - DNA, 33 bp, Homo sapien
ggctaggtcggtgtccccttttcacaacactca

SEQ ID NO: 798482 - DNA, 33 bp, Homo sapien
ggctaggtcggtgtcctcttttcacaacactca

SEQ ID NO: 798483 - DNA, 33 bp, Homo sapien
acaacctcaggcataaatgggttaatcactgtt

SEQ ID NO: 798484 - DNA, 33 bp, Homo sapien
acaacctcaggcataagtgggttaatcactgtt

SEQ ID NO: 798485 - DNA, 33 bp, Homo sapien
agaccctggaacaagaaaaggacaccaggtaaa

SEQ ID NO: 798486 - DNA, 33 bp, Homo sapien
agaccctggaacaagagaaggacaccaggtaaa

SEQ ID NO: 798487 - DNA, 33 bp, Homo sapien
acagcagcaccaaggacgtgaggctctgtccca

SEQ ID NO: 798488 - DNA, 33 bp, Homo sapien
acagcagcaccaaggatgtgaggctctgtccca

SEQ ID NO: 798489 - DNA, 33 bp, Homo sapien
cagagttcaaggagtgaatttgtgaatctgtct

SEQ ID NO: 798490 - DNA, 33 bp, Homo sapien
cagagttcaaggagtgcatttgtgaatctgtct

SEQ ID NO: 798491 - DNA, 33 bp, Homo sapien
ttatctctgttcctatcaaagtgcattctctgt

SEQ ID NO: 798492 - DNA, 33 bp, Homo sapien
ttatctctgttcctattaaagtgcattctctgt

SEQ ID NO: 798493 - DNA, 33 bp, Homo sapien
caaggagggccattcaaatggtctgaggacagc

SEQ ID NO: 798494 - DNA, 33 bp, Homo sapien
caaggagggccattcacatggtctgaggacagc

SEQ ID NO: 798495 - DNA, 33 bp, Homo sapien
taacttccatggaaaactagacccaccagctac

SEQ ID NO: 798496 - DNA, 33 bp, Homo sapien
taacttccatggaaaattagacccaccagctac

SEQ ID NO: 798497 - DNA, 33 bp, Homo sapien
ttgactctcaggcttagaggtcactgcttcctc

SEQ ID NO: 798498 - DNA, 33 bp, Homo sapien
ttgactctcaggcttataggtcactgcttcctc

SEQ ID NO: 798499 - DNA, 33 bp, Homo sapien
acactcttctattccaagctttagtgcctcact

SEQ ID NO: 798500 - DNA, 33 bp, Homo sapien
acactcttctattccacgctttagtgcctcact

SEQ ID NO: 798501 - DNA, 33 bp, Homo sapien
cctatgatttttcttcaattcactgagattagg

SEQ ID NO: 798502 - DNA, 33 bp, Homo sapien
cctatgatttttcttcgattcactgagattagg

SEQ ID NO: 798503 - DNA, 33 bp, Homo sapien
tattaataaaatcgccacaagaaaaagtagaaa

SEQ ID NO: 798504 - DNA, 33 bp, Homo sapien
tattaataaaatcgccgcaagaaaaagtagaaa

SEQ ID NO: 798505 - DNA, 33 bp, Homo sapien
ttggtcatttctcttgcagattgaacatctcgg

SEQ ID NO: 798506 - DNA, 33 bp, Homo sapien
ttggtcatttctcttgtagattgaacatctcgg

SEQ ID NO: 798507 - DNA, 33 bp, Homo sapien
atctaggctttagaaccgggcagactgggttca

SEQ ID NO: 798508 - DNA, 33 bp, Homo sapien
atctaggctttagaactgggcagactgggttca

SEQ ID NO: 798509 - DNA, 33 bp, Homo sapien
gcagagtgagagtctaaatggtcttaggagtgt

SEQ ID NO: 798510 - DNA, 33 bp, Homo sapien
gcagagtgagagtctagatggtcttaggagtgt

SEQ ID NO: 798511 - DNA, 33 bp, Homo sapien
cctattttaaataaagccacgttctgagtttct

SEQ ID NO: 798512 - DNA, 33 bp, Homo sapien
cctattttaaataaagtcacgttctgagtttct

SEQ ID NO: 798513 - DNA, 33 bp, Homo sapien
cagaccgggatttgaaccaggaagtctgactcc

SEQ ID NO: 798514 - DNA, 33 bp, Homo sapien
cagaccgggatttgaatcaggaagtctgactcc

SEQ ID NO: 798515 - DNA, 33 bp, Homo sapien
aaacaaactccagcagaaaagctttggtatcta

SEQ ID NO: 798516 - DNA, 33 bp, Homo sapien
aaacaaactccagcaggaaagctttggtatcta

SEQ ID NO: 798517 - DNA, 33 bp, Homo sapien
caggaagccgtggcagacagcctttgaggcatc

SEQ ID NO: 798518 - DNA, 33 bp, Homo sapien
caggaagccgtggcaggcagcctttgaggcatc

SEQ ID NO: 798519 - DNA, 33 bp, Homo sapien
cactgcaggttttcagaacattctgactgcaat

SEQ ID NO: 798520 - DNA, 33 bp, Homo sapien
cactgcaggttttcaggacattctgactgcaat

SEQ ID NO: 798521 - DNA, 33 bp, Homo sapien
gagaaatgagagttgcacaaagaggtttctgtg

SEQ ID NO: 798522 - DNA, 33 bp, Homo sapien
gagaaatgagagttgcgcaaagaggtttctgtg

SEQ ID NO: 798523 - DNA, 33 bp, Homo sapien
gtcaagtgcaggacacactaacttccagggcaa

SEQ ID NO: 798524 - DNA, 33 bp, Homo sapien
gtcaagtgcaggacacgctaacttccagggcaa

SEQ ID NO: 798525 - DNA, 33 bp, Homo sapien
agccttccatttcagaaagggcccacgccatcc

SEQ ID NO: 798526 - DNA, 33 bp, Homo sapien
agccttccatttcagagagggcccacgccatcc

SEQ ID NO: 798527 - DNA, 33 bp, Homo sapien
caacaaatgagaaaaccgaatcctcctctgaag

SEQ ID NO: 798528 - DNA, 33 bp, Homo sapien
caacaaatgagaaaactgaatcctcctctgaag

SEQ ID NO: 798529 - DNA, 33 bp, Homo sapien
ctgcctgggagtccagaaactccttgttgtctc

SEQ ID NO: 798530 - DNA, 33 bp, Homo sapien
ctgcctgggagtccagcaactccttgttgtctc

SEQ ID NO: 798531 - DNA, 33 bp, Homo sapien
tgacctggaatgtggagatgggaatggccagac

SEQ ID NO: 798532 - DNA, 33 bp, Homo sapien
tgacctggaatgtggatatgggaatggccagac

SEQ ID NO: 798533 - DNA, 33 bp, Homo sapien
cctagaggtcactcagactatactaaaacctgg

SEQ ID NO: 798534 - DNA, 33 bp, Homo sapien
cctagaggtcactcaggctatactaaaacctgg

SEQ ID NO: 798535 - DNA, 33 bp, Homo sapien
cactctcatctttgctctaggcactgttcagtg

SEQ ID NO: 798536 - DNA, 33 bp, Homo sapien
cactctcatctttgctttaggcactgttcagtg

SEQ ID NO: 798537 - DNA, 33 bp, Homo sapien
ttgaaccaagcatggagtaggtaccagcaaagc

SEQ ID NO: 798538 - DNA, 33 bp, Homo sapien
ttgaaccaagcatggattaggtaccagcaaagc

SEQ ID NO: 798539 - DNA, 33 bp, Homo sapien
tactttcctaatagggaagggaagcacaatgga

SEQ ID NO: 798540 - DNA, 33 bp, Homo sapien
tactttcctaataggggagggaagcacaatgga

SEQ ID NO: 798541 - DNA, 33 bp, Homo sapien
caggtagagccccaacccttttaaggactcacc

SEQ ID NO: 798542 - DNA, 33 bp, Homo sapien
caggtagagccccaactcttttaaggactcacc

SEQ ID NO: 798543 - DNA, 33 bp, Homo sapien
actctggtgcaagggcaaaaaaaaaacacaaca

SEQ ID NO: 798544 - DNA, 33 bp, Homo sapien
actctggtgcaagggccaaaaaaaaacacaaca

SEQ ID NO: 798545 - DNA, 33 bp, Homo sapien; identical to SEQ ID NO: 798543

SEQ ID NO: 798546 - DNA, 33 bp, Homo sapien; identical to SEQ ID NO: 798544

SEQ ID NO: 798547 - DNA, 33 bp, Homo sapien
tcatgggaaggaaatcacctacaaattccaaag

SEQ ID NO: 798548 - DNA, 33 bp, Homo sapien
tcatgggaaggaaatcgcctacaaattccaaag

SEQ ID NO: 798549 - DNA, 33 bp, Homo sapien
taaaatggagaaatgcacccagacccagctgag

SEQ ID NO: 798550 - DNA, 33 bp, Homo sapien
taaaatggagaaatgcgcccagacccagctgag

SEQ ID NO: 798551 - DNA, 33 bp, Homo sapien
gttccctcccacagaaaaaatgaacaacagtta

SEQ ID NO: 798552 - DNA, 33 bp, Homo sapien
gttccctcccacagaagaaatgaacaacagtta

SEQ ID NO: 798553 - DNA, 33 bp, Homo sapien
gatgaccgtcatttcacagtgggaagggacctt

SEQ ID NO: 798554 - DNA, 33 bp, Homo sapien
gatgaccgtcatttcatagtgggaagggacctt

SEQ ID NO: 798555 - DNA, 33 bp, Homo sapien
ttatattctgctaggacgttggccatcagggct

SEQ ID NO: 798556 - DNA, 33 bp, Homo sapien
ttatattctgctaggatgttggccatcagggct

SEQ ID NO: 798557 - DNA, 33 bp, Homo sapien
tgtctggtgatcgacacatgactgaacaataaa

SEQ ID NO: 798558 - DNA, 33 bp, Homo sapien
tgtctggtgatcgacatatgactgaacaataaa

SEQ ID NO: 798559 - DNA, 33 bp, Homo sapien
tttggagctaaatgaaaggttctgaggctggca

SEQ ID NO: 798560 - DNA, 33 bp, Homo sapien
tttggagctaaatgaagggttctgaggctggca

SEQ ID NO: 798561 - DNA, 33 bp, Homo sapien
aacaccctgaggcagcaattcccaaagtcctta

SEQ ID NO: 798562 - DNA, 33 bp, Homo sapien
aacaccctgaggcagcgattcccaaagtcctta

SEQ ID NO: 798563 - DNA, 33 bp, Homo sapien
cctgacttaccaatgcaagatcaccccgagaag

SEQ ID NO: 798564 - DNA, 33 bp, Homo sapien
cctgacttaccaatgcgagatcaccccgagaag

SEQ ID NO: 798565 - DNA, 33 bp, Homo sapien
cacactcctgttagcacactactcacactacta

SEQ ID NO: 798566 - DNA, 33 bp, Homo sapien
cacactcctgttagcatactactcacactacta

SEQ ID NO: 798567 - DNA, 33 bp, Homo sapien
cctaacaggagatccgaaggcaggtctaattta

SEQ ID NO: 798568 - DNA, 33 bp, Homo sapien
cctaacaggagatccggaggcaggtctaattta

SEQ ID NO: 798569 - DNA, 33 bp, Homo sapien
tggattttcagaccagactgagctgaagttttt

SEQ ID NO: 798570 - DNA, 33 bp, Homo sapien
tggattttcagaccaggctgagctgaagttttt

SEQ ID NO: 798571 - DNA, 33 bp, Homo sapien
cttacattagtcaaaccgtgggttgaatcctgg

SEQ ID NO: 798572 - DNA, 33 bp, Homo sapien
cttacattagtcaaactgtgggttgaatcctgg

SEQ ID NO: 798573 - DNA, 33 bp, Homo sapien
aaaaaaaacaagcagcgctgacaactacttgat

SEQ ID NO: 798574 - DNA, 33 bp, Homo sapien
aaaaaaaacaagcagctctgacaactacttgat

SEQ ID NO: 798575 - DNA, 33 bp, Homo sapien
aattaatgaggtgggcaccaaattgttcattct

SEQ ID NO: 798576 - DNA, 33 bp, Homo sapien
aattaatgaggtgggcgccaaattgttcattct

SEQ ID NO: 798577 - DNA, 33 bp, Homo sapien
ttgattacagaatggacgcattgttctctaaca

SEQ ID NO: 798578 - DNA, 33 bp, Homo sapien
ttgattacagaatggatgcattgttctctaaca

SEQ ID NO: 798579 - DNA, 33 bp, Homo sapien
ccagccccactgtaaacgctcaatggccacatg

SEQ ID NO: 798580 - DNA, 33 bp, Homo sapien
ccagccccactgtaaatgctcaatggccacatg

SEQ ID NO: 798581 - DNA, 33 bp, Homo sapien
tgctggctttttttgacggcctaaatcacagtc

SEQ ID NO: 798582 - DNA, 33 bp, Homo sapien
tgctggctttttttgatggcctaaatcacagtc

SEQ ID NO: 798583 - DNA, 33 bp, Homo sapien
gccacagaaccagtcccacaatgaatcagggat

SEQ ID NO: 798584 - DNA, 33 bp, Homo sapien
gccacagaaccagtcctacaatgaatcagggat

SEQ ID NO: 798585 - DNA, 33 bp, Homo sapien
caccctgggagcctgaagaaacacattggacca

SEQ ID NO: 798586 - DNA, 33 bp, Homo sapien
caccctgggagcctgaggaaacacattggacca

SEQ ID NO: 798587 - DNA, 33 bp, Homo sapien
cacttaatcatggctaaagctgaaaatatacat

SEQ ID NO: 798588 - DNA, 33 bp, Homo sapien
cacttaatcatggctagagctgaaaatatacat

SEQ ID NO: 798589 - DNA, 33 bp, Homo sapien
acttggaccaactgagaagagtgtgaaacacga

SEQ ID NO: 798590 - DNA, 33 bp, Homo sapien
acttggaccaactgaggagagtgtgaaacacga

SEQ ID NO: 798591 - DNA, 33 bp, Homo sapien
ctttgtagctatcaaaagaaataatagggtgtt

SEQ ID NO: 798592 - DNA, 33 bp, Homo sapien
ctttgtagctatcaaaggaaataatagggtgtt

SEQ ID NO: 798593 - DNA, 33 bp, Homo sapien
aatttttcttgaaacaaattggctagcagtgtg

SEQ ID NO: 798594 - DNA, 33 bp, Homo sapien
aatttttcttgaaacagattggctagcagtgtg

SEQ ID NO: 798595 - DNA, 33 bp, Homo sapien
gtccttcctttctggaacattctgtgtctttct

SEQ ID NO: 798596 - DNA, 33 bp, Homo sapien
gtccttcctttctggagcattctgtgtctttct

SEQ ID NO: 798597 - DNA, 33 bp, Homo sapien
acctcaccgctacccaatatgttcatgtaacac

SEQ ID NO: 798598 - DNA, 33 bp, Homo sapien
acctcaccgctacccagtatgttcatgtaacac

SEQ ID NO: 798599 - DNA, 33 bp, Homo sapien
gttagtagctccaaaccattagagaagagctca

SEQ ID NO: 798600 - DNA, 33 bp, Homo sapien
gttagtagctccaaactattagagaagagctca

SEQ ID NO: 798601 - DNA, 33 bp, Homo sapien
cagatatcagaaggtcccaagaactacagatgt

SEQ ID NO: 798602 - DNA, 33 bp, Homo sapien
cagatatcagaaggtcgcaagaactacagatgt

SEQ ID NO: 798603 - DNA, 33 bp, Homo sapien
cactcaaactatgtcccgcattggaagtgtgtc

SEQ ID NO: 798604 - DNA, 33 bp, Homo sapien
cactcaaactatgtcctgcattggaagtgtgtc

SEQ ID NO: 798605 - DNA, 33 bp, Homo sapien
agcttaaaaagttatacactggtttcaaatcca

SEQ ID NO: 798606 - DNA, 33 bp, Homo sapien
agcttaaaaagttatagactggtttcaaatcca

SEQ ID NO: 798607 - DNA, 33 bp, Homo sapien
caatttgttgtctgtaccagagataggaaacta

SEQ ID NO: 798608 - DNA, 33 bp, Homo sapien
caatttgttgtctgtagcagagataggaaacta

SEQ ID NO: 798609 - DNA, 33 bp, Homo sapien
catacatatctgacatcagaaaagcaggcccta

SEQ ID NO: 798610 - DNA, 33 bp, Homo sapien
catacatatctgacatgagaaaagcaggcccta

SEQ ID NO: 798611 - DNA, 33 bp, Homo sapien
aattacacagtagacaaccatgtagccactgcc

SEQ ID NO: 798612 - DNA, 33 bp, Homo sapien
aattacacagtagacacccatgtagccactgcc

SEQ ID NO: 798613 - DNA, 33 bp, Homo sapien
atcaccccactggtaacactaaaaagagatcca

SEQ ID NO: 798614 - DNA, 33 bp, Homo sapien
atcaccccactggtaatactaaaaagagatcca

SEQ ID NO: 798615 - DNA, 33 bp, Homo sapien
ttgaattaatctgtacaaggtattgctattctt

SEQ ID NO: 798616 - DNA, 33 bp, Homo sapien
ttgaattaatctgtaccaggtattgctattctt

SEQ ID NO: 798617 - DNA, 33 bp, Homo sapien
ggttgagttgaattcacaatgacttaggacagt

SEQ ID NO: 798618 - DNA, 33 bp, Homo sapien
ggttgagttgaattcagaatgacttaggacagt

SEQ ID NO: 798619 - DNA, 33 bp, Homo sapien
tatccaaacatatcagaaagtaggttacatggt

SEQ ID NO: 798620 - DNA, 33 bp, Homo sapien
tatccaaacatatcaggaagtaggttacatggt

SEQ ID NO: 798621 - DNA, 33 bp, Homo sapien
ctccagcccactctgaactattgagtacactcc

SEQ ID NO: 798622 - DNA, 33 bp, Homo sapien
ctccagcccactctgacctattgagtacactcc

SEQ ID NO: 798623 - DNA, 33 bp, Homo sapien
aagagtcataagcaccggaacactaaagaaagc

SEQ ID NO: 798624 - DNA, 33 bp, Homo sapien
aagagtcataagcacctgaacactaaagaaagc

SEQ ID NO: 798625 - DNA, 33 bp, Homo sapien
gctttgcaaagtgtaccgatgatgatctgaaca

SEQ ID NO: 798626 - DNA, 33 bp, Homo sapien
gctttgcaaagtgtactgatgatgatctgaaca

SEQ ID NO: 798627 - DNA, 33 bp, Homo sapien
cctgaatgtcctgttccattttcattggtttta

SEQ ID NO: 798628 - DNA, 33 bp, Homo sapien
cctgaatgtcctgttcgattttcattggtttta

SEQ ID NO: 798629 - DNA, 33 bp, Homo sapien
ctctaattctttaaaggccggtcaccaatgttt

SEQ ID NO: 798630 - DNA, 33 bp, Homo sapien
ctctaattctttaaagtccggtcaccaatgttt

SEQ ID NO: 798631 - DNA, 33 bp, Homo sapien
cagttacagatgcaacccaaagactcagaaagg

SEQ ID NO: 798632 - DNA, 33 bp, Homo sapien
cagttacagatgcaactcaaagactcagaaagg

SEQ ID NO: 798633 - DNA, 33 bp, Homo sapien
caactgaccttaaatgacaggtaaggttaatat

SEQ ID NO: 798634 - DNA, 33 bp, Homo sapien
caactgaccttaaatggcaggtaaggttaatat

SEQ ID NO: 798635 - DNA, 33 bp, Homo sapien
ctgcttcctcacgaacaactcaaaggttcccct

SEQ ID NO: 798636 - DNA, 33 bp, Homo sapien
ctgcttcctcacgaacgactcaaaggttcccct

SEQ ID NO: 798637 - DNA, 33 bp, Homo sapien
ctactattaagcagaagttatctcttgagggca

SEQ ID NO: 798638 - DNA, 33 bp, Homo sapien
ctactattaagcagaatttatctcttgagggca

SEQ ID NO: 798639 - DNA, 33 bp, Homo sapien
tcttgcctcataccaaacacaacaaataatttt

SEQ ID NO: 798640 - DNA, 33 bp, Homo sapien
tcttgcctcataccaagcacaacaaataatttt

SEQ ID NO: 798641 - DNA, 33 bp, Homo sapien
tgtaagggcaactcagacctttccatttccctg

SEQ ID NO: 798642 - DNA, 33 bp, Homo sapien
tgtaagggcaactcaggcctttccatttccctg

SEQ ID NO: 798643 - DNA, 33 bp, Homo sapien
aagtatgttactcttacagcttggctaccacct

SEQ ID NO: 798644 - DNA, 33 bp, Homo sapien
aagtatgttactcttatagcttggctaccacct

SEQ ID NO: 798645 - DNA, 33 bp, Homo sapien
ggctccctctggaggagactatgataatctgac

SEQ ID NO: 798646 - DNA, 33 bp, Homo sapien
ggctccctctggaggatactatgataatctgac

SEQ ID NO: 798647 - DNA, 33 bp, Homo sapien
tatctgacactacacaaaatacagataatattt

SEQ ID NO: 798648 - DNA, 33 bp, Homo sapien
tatctgacactacacacaatacagataatattt

SEQ ID NO: 798649 - DNA, 33 bp, Homo sapien
atctggtaacacagaacgtttcccagatgctgg

SEQ ID NO: 798650 - DNA, 33 bp, Homo sapien
atctggtaacacagaaggtttcccagatgctgg

SEQ ID NO: 798651 - DNA, 33 bp, Homo sapien
taatggcctattttcaactcaggaagaaaaaaa

SEQ ID NO: 798652 - DNA, 33 bp, Homo sapien
taatggcctattttcatctcaggaagaaaaaaa

SEQ ID NO: 798653 - DNA, 33 bp, Homo sapien
aaacagtagacttccaagccataatttattcat

SEQ ID NO: 798654 - DNA, 33 bp, Homo sapien
aaacagtagacttccatgccataatttattcat

SEQ ID NO: 798655 - DNA, 33 bp, Homo sapien
tagaaacacaaaattacacagtcactttggagg

SEQ ID NO: 798656 - DNA, 33 bp, Homo sapien
tagaaacacaaaattatacagtcactttggagg

SEQ ID NO: 798657 - DNA, 33 bp, Homo sapien
gtcagtaaagatgttacgattttgtgaaagata

SEQ ID NO: 798658 - DNA, 33 bp, Homo sapien
gtcagtaaagatgttatgattttgtgaaagata

SEQ ID NO: 798659 - DNA, 33 bp, Homo sapien
acatagagttcaactgaaatgacagtccctaat

SEQ ID NO: 798660 - DNA, 33 bp, Homo sapien
acatagagttcaactggaatgacagtccctaat

SEQ ID NO: 798661 - DNA, 33 bp, Homo sapien
attaaaccaaggaaataaacagcttaatttggt

SEQ ID NO: 798662 - DNA, 33 bp, Homo sapien
attaaaccaaggaaatgaacagcttaatttggt

SEQ ID NO: 798663 - DNA, 33 bp, Homo sapien
accctatgtggtcttacccagaaatgtgctatc

SEQ ID NO: 798664 - DNA, 33 bp, Homo sapien
accctatgtggtcttatccagaaatgtgctatc

SEQ ID NO: 798665 - DNA, 33 bp, Homo sapien
caataccataacccaccagtacaggagtgctgg

SEQ ID NO: 798666 - DNA, 33 bp, Homo sapien
caataccataacccacgagtacaggagtgctgg

SEQ ID NO: 798667 - DNA, 33 bp, Homo sapien
actgtggtaaattatgcattgttgatgaggtaa

SEQ ID NO: 798668 - DNA, 33 bp, Homo sapien
actgtggtaaattatgtattgttgatgaggtaa

SEQ ID NO: 798669 - DNA, 33 bp, Homo sapien
gctgttttccaagtccacatagctgccaacaat

SEQ ID NO: 798670 - DNA, 33 bp, Homo sapien
gctgttttccaagtccgcatagctgccaacaat

SEQ ID NO: 798671 - DNA, 33 bp, Homo sapien
cctgatttactgatccaaatgcagaaacacaga

SEQ ID NO: 798672 - DNA, 33 bp, Homo sapien
cctgatttactgatccgaatgcagaaacacaga

SEQ ID NO: 798673 - DNA, 33 bp, Homo sapien
cagccaccctccatgccgcaagtaccactgagt

SEQ ID NO: 798674 - DNA, 33 bp, Homo sapien
cagccaccctccatgctgcaagtaccactgagt

SEQ ID NO: 798675 - DNA, 33 bp, Homo sapien
cagggggcagagaatgacaaggaagacttgata

SEQ ID NO: 798676 - DNA, 33 bp, Homo sapien
cagggggcagagaatgtcaaggaagacttgata

SEQ ID NO: 798677 - DNA, 33 bp, Homo sapien
ctctccaaaaccttcaccaagtctgctcacccc

SEQ ID NO: 798678 - DNA, 33 bp, Homo sapien
ctctccaaaaccttcatcaagtctgctcacccc

SEQ ID NO: 798679 - DNA, 33 bp, Homo sapien
agtcaacccaggtcaccgctctccaaaaccttc

SEQ ID NO: 798680 - DNA, 33 bp, Homo sapien
agtcaacccaggtcactgctctccaaaaccttc

SEQ ID NO: 798681 - DNA, 33 bp, Homo sapien
ctgggccattgtgccacgattaaggtatcaagc

SEQ ID NO: 798682 - DNA, 33 bp, Homo sapien
ctgggccattgtgccaggattaaggtatcaagc

SEQ ID NO: 798683 - DNA, 33 bp, Homo sapien
gcttgcttgatagaggacatgcaagaagcatgt

SEQ ID NO: 798684 - DNA, 33 bp, Homo sapien
gcttgcttgatagaggtcatgcaagaagcatgt

SEQ ID NO: 798685 - DNA, 33 bp, Homo sapien
ccaccgtctcctttgcaagctttggttaagcat

SEQ ID NO: 798686 - DNA, 33 bp, Homo sapien
ccaccgtctcctttgcgagctttggttaagcat

SEQ ID NO: 798687 - DNA, 33 bp, Homo sapien
gtccaagaaggtaccacgtctacagtctttcct

SEQ ID NO: 798688 - DNA, 33 bp, Homo sapien
gtccaagaaggtaccatgtctacagtctttcct

SEQ ID NO: 798689 - DNA, 33 bp, Homo sapien
atatttgtgatgaagtaaaataatagttaagga

SEQ ID NO: 798690 - DNA, 33 bp, Homo sapien
atatttgtgatgaagtgaaataatagttaagga

SEQ ID NO: 798691 - DNA, 33 bp, Homo sapien
attctgagattgcacacaatccttaactattat

SEQ ID NO: 798692 - DNA, 33 bp, Homo sapien
attctgagattgcacataatccttaactattat

SEQ ID NO: 798693 - DNA, 33 bp, Homo sapien
gaaacaacaggagttgcaatttagaaaaaggtt

SEQ ID NO: 798694 - DNA, 33 bp, Homo sapien
gaaacaacaggagttggaatttagaaaaaggtt

SEQ ID NO: 798695 - DNA, 33 bp, Homo sapien
tgagcatttactttccaagcaaagacagccctt

SEQ ID NO: 798696 - DNA, 33 bp, Homo sapien
tgagcatttactttccgagcaaagacagccctt

SEQ ID NO: 798697 - DNA, 33 bp, Homo sapien
ttcccgctgttccggaaaatagacatcccaaat

SEQ ID NO: 798698 - DNA, 33 bp, Homo sapien
ttcccgctgttccggagaatagacatcccaaat

SEQ ID NO: 798699 - DNA, 33 bp, Homo sapien
agtgacgaaaaggagcagacaaagacaacagcg

SEQ ID NO: 798700 - DNA, 33 bp, Homo sapien
agtgacgaaaaggagcggacaaagacaacagcg

SEQ ID NO: 798701 - DNA, 33 bp, Homo sapien
gatgtccagtggtagacgctctctagggcagcc

SEQ ID NO: 798702 - DNA, 33 bp, Homo sapien
gatgtccagtggtagatgctctctagggcagcc

SEQ ID NO: 798703 - DNA, 33 bp, Homo sapien
gcagtgagtatgtgaacacaagtctagaaccca

SEQ ID NO: 798704 - DNA, 33 bp, Homo sapien
gcagtgagtatgtgaatacaagtctagaaccca

SEQ ID NO: 798705 - DNA, 33 bp, Homo sapien
cgcttacaggattgcaaaagaaaatgggtgggt

SEQ ID NO: 798706 - DNA, 33 bp, Homo sapien
cgcttacaggattgcagaagaaaatgggtgggt

SEQ ID NO: 798707 - DNA, 33 bp, Homo sapien
actgtatttgattcagcagaccgtgctcttgac

SEQ ID NO: 798708 - DNA, 33 bp, Homo sapien
actgtatttgattcaggagaccgtgctcttgac

SEQ ID NO: 798709 - DNA, 33 bp, Homo sapien
gctaagactgctaagcactcacagtagcgggag

SEQ ID NO: 798710 - DNA, 33 bp, Homo sapien
gctaagactgctaagcgctcacagtagcgggag

SEQ ID NO: 798711 - DNA, 33 bp, Homo sapien
tgtccctaacttccgaaagcatggtcctcctgg

SEQ ID NO: 798712 - DNA, 33 bp, Homo sapien
tgtccctaacttccgacagcatggtcctcctgg

SEQ ID NO: 798713 - DNA, 33 bp, Homo sapien
ggctggccaggtgggacgccagagccaaactga

SEQ ID NO: 798714 - DNA, 33 bp, Homo sapien
ggctggccaggtgggatgccagagccaaactga

SEQ ID NO: 798715 - DNA, 33 bp, Homo sapien
ccggctagaatgttcaggagggagaaacctctg

SEQ ID NO: 798716 - DNA, 33 bp, Homo sapien
ccggctagaatgttcatgagggagaaacctctg

SEQ ID NO: 798717 - DNA, 33 bp, Homo sapien
cctcagccagagtgaaaggggagtgagtgcggg

SEQ ID NO: 798718 - DNA, 33 bp, Homo sapien
cctcagccagagtgaagggggagtgagtgcggg

SEQ ID NO: 798719 - DNA, 33 bp, Homo sapien
cataggtccactcccaactatccctcaaactct

SEQ ID NO: 798720 - DNA, 33 bp, Homo sapien
cataggtccactcccatctatccctcaaactct

SEQ ID NO: 798721 - DNA, 33 bp, Homo sapien
gagtggattgttgcacagattaaattgtttact

SEQ ID NO: 798722 - DNA, 33 bp, Homo sapien
gagtggattgttgcacggattaaattgtttact

SEQ ID NO: 798723 - DNA, 33 bp, Homo sapien
ccttccttgcattgtaactcctcagaagttgta

SEQ ID NO: 798724 - DNA, 33 bp, Homo sapien
ccttccttgcattgtatctcctcagaagttgta

SEQ ID NO: 798725 - DNA, 33 bp, Homo sapien
tagtttcagcagacaaacccccattttggagat

SEQ ID NO: 798726 - DNA, 33 bp, Homo sapien
tagtttcagcagacaaccccccattttggagat

SEQ ID NO: 798727 - DNA, 33 bp, Homo sapien
gggtagaacatctccaagggtgttgtactgtca

SEQ ID NO: 798728 - DNA, 33 bp, Homo sapien
gggtagaacatctccaggggtgttgtactgtca

SEQ ID NO: 798729 - DNA, 33 bp, Homo sapien
caggtgaaggataggacaagaaaacagcatatt

SEQ ID NO: 798730 - DNA, 33 bp, Homo sapien
caggtgaaggataggagaagaaaacagcatatt

SEQ ID NO: 798731 - DNA, 33 bp, Homo sapien
aagcaggatggggaacagcttgaccttcatcca

SEQ ID NO: 798732 - DNA, 33 bp, Homo sapien
aagcaggatggggaactgcttgaccttcatcca

SEQ ID NO: 798733 - DNA, 33 bp, Homo sapien
acctgtgaacctaacccagctgataaatgtagg

SEQ ID NO: 798734 - DNA, 33 bp, Homo sapien
acctgtgaacctaacctagctgataaatgtagg

SEQ ID NO: 798735 - DNA, 33 bp, Homo sapien
caaaaatgtcaaggatcagttatgcctaaggct

SEQ ID NO: 798736 - DNA, 33 bp, Homo sapien
caaaaatgtcaaggatgagttatgcctaaggct

SEQ ID NO: 798737 - DNA, 33 bp, Homo sapien
tgcgacatatagttgaaaagattgtaaatggtt

SEQ ID NO: 798738 - DNA, 33 bp, Homo sapien
tgcgacatatagttgagaagattgtaaatggtt

SEQ ID NO: 798739 - DNA, 33 bp, Homo sapien
ctacataaaaatgagaagttttcaaagaaagca

SEQ ID NO: 798740 - DNA, 33 bp, Homo sapien
ctacataaaaatgagaggttttcaaagaaagca

SEQ ID NO: 798741 - DNA, 33 bp, Homo sapien
taggtatttgtgctaacgatctctgtctccttg

SEQ ID NO: 798742 - DNA, 33 bp, Homo sapien
taggtatttgtgctaatgatctctgtctccttg

SEQ ID NO: 798743 - DNA, 33 bp, Homo sapien; identical to SEQ ID NO: 798741

SEQ ID NO: 798744 - DNA, 33 bp, Homo sapien; identical to SEQ ID NO: 798742

SEQ ID NO: 798745 - DNA, 33 bp, Homo sapien
taggctccagagttccaaagtggttacatcaga

SEQ ID NO: 798746 - DNA, 33 bp, Homo sapien
taggctccagagttccgaagtggttacatcaga

SEQ ID NO: 798747 - DNA, 33 bp, Homo sapien
tggaacagcacagttaagtttatctggtaaaat

SEQ ID NO: 798748 - DNA, 33 bp, Homo sapien
tggaacagcacagttaggtttatctggtaaaat

SEQ ID NO: 798749 - DNA, 33 bp, Homo sapien
ctttccctatccataaccgctggcaaccactcg

SEQ ID NO: 798750 - DNA, 33 bp, Homo sapien
ctttccctatccataatcgctggcaaccactcg

SEQ ID NO: 798751 - DNA, 33 bp, Homo sapien
agtaggatttgtgtaaatataactatctgattc

SEQ ID NO: 798752 - DNA, 33 bp, Homo sapien
agtaggatttgtgtaactataactatctgattc

SEQ ID NO: 798753 - DNA, 33 bp, Homo sapien
agactgctaggtggaaagttacctctaaggaag

SEQ ID NO: 798754 - DNA, 33 bp, Homo sapien
agactgctaggtggaaggttacctctaaggaag

SEQ ID NO: 798755 - DNA, 33 bp, Homo sapien
atatgtatgaaacttaacatgactcaatggtag

SEQ ID NO: 798756 - DNA, 33 bp, Homo sapien
atatgtatgaaacttaccatgactcaatggtag

SEQ ID NO: 798757 - DNA, 33 bp, Homo sapien
ttttctcttcccttccagcactcaccttcccca

SEQ ID NO: 798758 - DNA, 33 bp, Homo sapien
ttttctcttcccttccggcactcaccttcccca

SEQ ID NO: 798759 - DNA, 33 bp, Homo sapien
gggaagctgaggacaaagtgagttcagagccta

SEQ ID NO: 798760 - DNA, 33 bp, Homo sapien
gggaagctgaggacaaggtgagttcagagccta

SEQ ID NO: 798761 - DNA, 33 bp, Homo sapien
cattcatttagcaaaaattcagtccttgttaag

SEQ ID NO: 798762 - DNA, 33 bp, Homo sapien
cattcatttagcaaaagttcagtccttgttaag

SEQ ID NO: 798763 - DNA, 33 bp, Homo sapien
tggtggtgtcatattgaaaaaaaatttgggggc

SEQ ID NO: 798764 - DNA, 33 bp, Homo sapien
tggtggtgtcatattggaaaaaaatttgggggc

SEQ ID NO: 798765 - DNA, 33 bp, Homo sapien
acaataaacagttatcaaacacttactgtaggc

SEQ ID NO: 798766 - DNA, 33 bp, Homo sapien
acaataaacagttatcgaacacttactgtaggc

SEQ ID NO: 798767 - DNA, 33 bp, Homo sapien
atcaatattctcatccaattgtggctgtagttg

SEQ ID NO: 798768 - DNA, 33 bp, Homo sapien
atcaatattctcatccgattgtggctgtagttg

SEQ ID NO: 798769 - DNA, 33 bp, Homo sapien
aagaaaaagattgccacctactgaaaggaattt

SEQ ID NO: 798770 - DNA, 33 bp, Homo sapien
aagaaaaagattgccagctactgaaaggaattt

SEQ ID NO: 798771 - DNA, 33 bp, Homo sapien
gaccatttctttggcaagacctactagaacagt

SEQ ID NO: 798772 - DNA, 33 bp, Homo sapien
gaccatttctttggcaggacctactagaacagt

SEQ ID NO: 798773 - DNA, 33 bp, Homo sapien
agatttcaaattgcaaagtttctccaaggtcca

SEQ ID NO: 798774 - DNA, 33 bp, Homo sapien
agatttcaaattgcaaggtttctccaaggtcca

SEQ ID NO: 798775 - DNA, 33 bp, Homo sapien
agaggaatttggaaacaggtagtgtctcttcag

SEQ ID NO: 798776 - DNA, 33 bp, Homo sapien
agaggaatttggaaaccggtagtgtctcttcag

SEQ ID NO: 798777 - DNA, 33 bp, Homo sapien
attggtgatcaaggaaactatcttgtgatcaat

SEQ ID NO: 798778 - DNA, 33 bp, Homo sapien
attggtgatcaaggaagctatcttgtgatcaat

SEQ ID NO: 798779 - DNA, 33 bp, Homo sapien
tgaagtttgtcatttgcaaatctccaaaccatc

SEQ ID NO: 798780 - DNA, 33 bp, Homo sapien
tgaagtttgtcatttggaaatctccaaaccatc

SEQ ID NO: 798781 - DNA, 33 bp, Homo sapien
ttgaataattagaacaaactttcatggctgggc

SEQ ID NO: 798782 - DNA, 33 bp, Homo sapien
ttgaataattagaacagactttcatggctgggc

SEQ ID NO: 798783 - DNA, 33 bp, Homo sapien
ggggaggatcttgaaaatgcacatccaatcata

SEQ ID NO: 798784 - DNA, 33 bp, Homo sapien
ggggaggatcttgaaagtgcacatccaatcata

SEQ ID NO: 798785 - DNA, 33 bp, Homo sapien
agtccagagtggaaaaatagatatcgatgaagg

SEQ ID NO: 798786 - DNA, 33 bp, Homo sapien
agtccagagtggaaaagtagatatcgatgaagg

SEQ ID NO: 798787 - DNA, 33 bp, Homo sapien
gggctgctgcctcatacggttaggtaggactct

SEQ ID NO: 798788 - DNA, 33 bp, Homo sapien
gggctgctgcctcatatggttaggtaggactct

SEQ ID NO: 798789 - DNA, 33 bp, Homo sapien
tgcctggccacttccggcacggagagagctttg

SEQ ID NO: 798790 - DNA, 33 bp, Homo sapien
tgcctggccacttccgtcacggagagagctttg

SEQ ID NO: 798791 - DNA, 33 bp, Homo sapien
agatcaccctgcataacagagacctactgggtt

SEQ ID NO: 798792 - DNA, 33 bp, Homo sapien
agatcaccctgcataatagagacctactgggtt

SEQ ID NO: 798793 - DNA, 33 bp, Homo sapien
tagcactggagagagaagaagtcaggggcagtg

SEQ ID NO: 798794 - DNA, 33 bp, Homo sapien
tagcactggagagagaggaagtcaggggcagtg

SEQ ID NO: 798795 - DNA, 33 bp, Homo sapien
tccccagctggtgctacgaaaataaatatctat

SEQ ID NO: 798796 - DNA, 33 bp, Homo sapien
tccccagctggtgctaggaaaataaatatctat

SEQ ID NO: 798797 - DNA, 33 bp, Homo sapien
cccaagcttggcattaactccaccaaggcctct

SEQ ID NO: 798798 - DNA, 33 bp, Homo sapien
cccaagcttggcattatctccaccaaggcctct

SEQ ID NO: 798799 - DNA, 33 bp, Homo sapien
tgggccctcgatcacccagcctattgtcctgtg

SEQ ID NO: 798800 - DNA, 33 bp, Homo sapien
tgggccctcgatcacctagcctattgtcctgtg

SEQ ID NO: 798801 - DNA, 33 bp, Homo sapien
ctaacagtgaggaaacacgcccctcagactaag

SEQ ID NO: 798802 - DNA, 33 bp, Homo sapien
ctaacagtgaggaaacgcgcccctcagactaag

SEQ ID NO: 798803 - DNA, 33 bp, Homo sapien
cagcctcctcacaatcaattgcctcctcactcc

SEQ ID NO: 798804 - DNA, 33 bp, Homo sapien
cagcctcctcacaatcgattgcctcctcactcc

SEQ ID NO: 798805 - DNA, 33 bp, Homo sapien
caggtggtagaaaaacggttacagccaactcct

SEQ ID NO: 798806 - DNA, 33 bp, Homo sapien
caggtggtagaaaaactgttacagccaactcct

SEQ ID NO: 798807 - DNA, 33 bp, Homo sapien
tgaacggctaagaaaacaaggctcacaatacta

SEQ ID NO: 798808 - DNA, 33 bp, Homo sapien
tgaacggctaagaaaataaggctcacaatacta

SEQ ID NO: 798809 - DNA, 33 bp, Homo sapien
acaatatttccacacaatatttctaaaaatcaa

SEQ ID NO: 798810 - DNA, 33 bp, Homo sapien
acaatatttccacacagtatttctaaaaatcaa

SEQ ID NO: 798811 - DNA, 33 bp, Homo sapien
tctatagattcacagcagatttaaggaaatttc

SEQ ID NO: 798812 - DNA, 33 bp, Homo sapien
tctatagattcacagcggatttaaggaaatttc

SEQ ID NO: 798813 - DNA, 33 bp, Homo sapien
ttattcctgccactgcaatgttagtgatcaaat

SEQ ID NO: 798814 - DNA, 33 bp, Homo sapien
ttattcctgccactgcgatgttagtgatcaaat

SEQ ID NO: 798815 - DNA, 33 bp, Homo sapien
accacaaagccccaaacagagaggctcagcagg

SEQ ID NO: 798816 - DNA, 33 bp, Homo sapien
accacaaagccccaaagagagaggctcagcagg

SEQ ID NO: 798817 - DNA, 33 bp, Homo sapien
gtcagttatttaacccccagataggaattcttc

SEQ ID NO: 798818 - DNA, 33 bp, Homo sapien
gtcagttatttaacccgcagataggaattcttc

SEQ ID NO: 798819 - DNA, 33 bp, Homo sapien
cagcccagagtgagaactgcaaagaaggaaaaa

SEQ ID NO: 798820 - DNA, 33 bp, Homo sapien
cagcccagagtgagaattgcaaagaaggaaaaa

SEQ ID NO: 798821 - DNA, 33 bp, Homo sapien
atatacacatacaataagtaacaaatcagggca

SEQ ID NO: 798822 - DNA, 33 bp, Homo sapien
atatacacatacaatacgtaacaaatcagggca

SEQ ID NO: 798823 - DNA, 33 bp, Homo sapien
gataaggaggggcaaccgtagacgtgtagaacg

SEQ ID NO: 798824 - DNA, 33 bp, Homo sapien
gataaggaggggcaactgtagacgtgtagaacg

SEQ ID NO: 798825 - DNA, 33 bp, Homo sapien
ccccaacaccttcccacagcagtttagcaaggc

SEQ ID NO: 798826 - DNA, 33 bp, Homo sapien
ccccaacaccttcccatagcagtttagcaaggc

SEQ ID NO: 798827 - DNA, 33 bp, Homo sapien
gagggctcacaggaccagaaaagaggaagattt

SEQ ID NO: 798828 - DNA, 33 bp, Homo sapien
gagggctcacaggaccggaaaagaggaagattt

SEQ ID NO: 798829 - DNA, 33 bp, Homo sapien
agcagggccataagaacttctacaaaacagaga

SEQ ID NO: 798830 - DNA, 33 bp, Homo sapien
agcagggccataagaagttctacaaaacagaga

SEQ ID NO: 798831 - DNA, 33 bp, Homo sapien
ctgggcctctgcggctcactctagaatacagac

SEQ ID NO: 798832 - DNA, 33 bp, Homo sapien
ctgggcctctgcggcttactctagaatacagac

SEQ ID NO: 798833 - DNA, 33 bp, Homo sapien
tccctaaatgcacaagaccttccgagatgccgt

SEQ ID NO: 798834 - DNA, 33 bp, Homo sapien
tccctaaatgcacaagcccttccgagatgccgt

SEQ ID NO: 798835 - DNA, 33 bp, Homo sapien
tgctgtgaggattaaaagaaacggtgcatgtaa

SEQ ID NO: 798836 - DNA, 33 bp, Homo sapien
tgctgtgaggattaaaggaaacggtgcatgtaa

SEQ ID NO: 798837 - DNA, 33 bp, Homo sapien
gtgcaaatataaacaacgggaaattgcttatat

SEQ ID NO: 798838 - DNA, 33 bp, Homo sapien
gtgcaaatataaacaaggggaaattgcttatat

SEQ ID NO: 798839 - DNA, 33 bp, Homo sapien
ggtctgagggttcagcaagggttaaggttaagt

SEQ ID NO: 798840 - DNA, 33 bp, Homo sapien
ggtctgagggttcagcgagggttaaggttaagt

SEQ ID NO: 798841 - DNA, 33 bp, Homo sapien
cttggcttatccatagaatcatttcctgatgcc

SEQ ID NO: 798842 - DNA, 33 bp, Homo sapien
cttggcttatccataggatcatttcctgatgcc

SEQ ID NO: 798843 - DNA, 33 bp, Homo sapien
tattacaattccccatcagagacaaaactgagg

SEQ ID NO: 798844 - DNA, 33 bp, Homo sapien
tattacaattccccattagagacaaaactgagg

SEQ ID NO: 798845 - DNA, 33 bp, Homo sapien
cttaggtcttatcctaactttcaatcagcaaaa

SEQ ID NO: 798846 - DNA, 33 bp, Homo sapien
cttaggtcttatcctatctttcaatcagcaaaa

SEQ ID NO: 798847 - DNA, 33 bp, Homo sapien
atggggagaattaaaccctgtcacggagaaagt

SEQ ID NO: 798848 - DNA, 33 bp, Homo sapien
atggggagaattaaactctgtcacggagaaagt

SEQ ID NO: 798849 - DNA, 33 bp, Homo sapien
attaatccatgatggcaccagaatttccataaa

SEQ ID NO: 798850 - DNA, 33 bp, Homo sapien
attaatccatgatggctccagaatttccataaa

SEQ ID NO: 798851 - DNA, 33 bp, Homo sapien
tgaaacctggaataaacgatttagccatctctt

SEQ ID NO: 798852 - DNA, 33 bp, Homo sapien
tgaaacctggaataaatgatttagccatctctt

SEQ ID NO: 798853 - DNA, 33 bp, Homo sapien
ccaaatgaagctatccactccatctcctgacaa

SEQ ID NO: 798854 - DNA, 33 bp, Homo sapien
ccaaatgaagctatcctctccatctcctgacaa

SEQ ID NO: 798855 - DNA, 33 bp, Homo sapien
agggaagagtcgtacaacctctggaggagtttt

SEQ ID NO: 798856 - DNA, 33 bp, Homo sapien
agggaagagtcgtacatcctctggaggagtttt

SEQ ID NO: 798857 - DNA, 33 bp, Homo sapien
atgctggaaccattccgcctgagcgtcttcccc

SEQ ID NO: 798858 - DNA, 33 bp, Homo sapien
atgctggaaccattcctcctgagcgtcttcccc

SEQ ID NO: 798859 - DNA, 33 bp, Homo sapien
tggtggcaaatgtatgcaaaacagatgctgtga

SEQ ID NO: 798860 - DNA, 33 bp, Homo sapien
tggtggcaaatgtatggaaaacagatgctgtga

SEQ ID NO: 798861 - DNA, 33 bp, Homo sapien
caatcaaatgtgtctgcaggaccccagtttaca

SEQ ID NO: 798862 - DNA, 33 bp, Homo sapien
caatcaaatgtgtctgtaggaccccagtttaca

SEQ ID NO: 798863 - DNA, 33 bp, Homo sapien
gctctgagggccgcacaatgttctggtgaattg

SEQ ID NO: 798864 - DNA, 33 bp, Homo sapien
gctctgagggccgcacgatgttctggtgaattg

SEQ ID NO: 798865 - DNA, 33 bp, Homo sapien
tcaactcatcacaaccagatttggttttatctt

SEQ ID NO: 798866 - DNA, 33 bp, Homo sapien
tcaactcatcacaaccggatttggttttatctt

SEQ ID NO: 798867 - DNA, 33 bp, Homo sapien
cagagattgctgtacacggcagaagatgatgcc

SEQ ID NO: 798868 - DNA, 33 bp, Homo sapien
cagagattgctgtacatggcagaagatgatgcc

SEQ ID NO: 798869 - DNA, 33 bp, Homo sapien
tgctaccatatgagacagcacagctcttacagg

SEQ ID NO: 798870 - DNA, 33 bp, Homo sapien
tgctaccatatgagacggcacagctcttacagg

SEQ ID NO: 798871 - DNA, 33 bp, Homo sapien
gagacaagtggaagacggaaaaatggtaaaaga

SEQ ID NO: 798872 - DNA, 33 bp, Homo sapien
gagacaagtggaagactgaaaaatggtaaaaga

SEQ ID NO: 798873 - DNA, 33 bp, Homo sapien
gtgctggatgattttgaaaagagagccatagga

SEQ ID NO: 798874 - DNA, 33 bp, Homo sapien
gtgctggatgattttggaaagagagccatagga

SEQ ID NO: 798875 - DNA, 33 bp, Homo sapien
tccatgggaaaacatacatctcttgaatgacaa

SEQ ID NO: 798876 - DNA, 33 bp, Homo sapien
tccatgggaaaacatatatctcttgaatgacaa

SEQ ID NO: 798877 - DNA, 33 bp, Homo sapien
catggaaatctttgcacaatgttttgttgtgtt

SEQ ID NO: 798878 - DNA, 33 bp, Homo sapien
catggaaatctttgcataatgttttgttgtgtt

SEQ ID NO: 798879 - DNA, 33 bp, Homo sapien
cgaagcacataaacacagggccgattcctctcc

SEQ ID NO: 798880 - DNA, 33 bp, Homo sapien
cgaagcacataaacacggggccgattcctctcc

SEQ ID NO: 798881 - DNA, 33 bp, Homo sapien
caaggcaggaaaaggacggtgtgacataatgcc

SEQ ID NO: 798882 - DNA, 33 bp, Homo sapien
caaggcaggaaaaggatggtgtgacataatgcc

SEQ ID NO: 798883 - DNA, 33 bp, Homo sapien
tggtgactgatgactgaactgaggctgtgggca

SEQ ID NO: 798884 - DNA, 33 bp, Homo sapien
tggtgactgatgactgcactgaggctgtgggca

SEQ ID NO: 798885 - DNA, 33 bp, Homo sapien
caagtcagagcgtagaaggaatatctgcatctg

SEQ ID NO: 798886 - DNA, 33 bp, Homo sapien
caagtcagagcgtagagggaatatctgcatctg

SEQ ID NO: 798887 - DNA, 33 bp, Homo sapien
ggacctagtctggatacagtggcttctcttggg

SEQ ID NO: 798888 - DNA, 33 bp, Homo sapien
ggacctagtctggatagagtggcttctcttggg

SEQ ID NO: 798889 - DNA, 33 bp, Homo sapien
tttgaggaactgagaaaggaaagcaaaaagtgc

SEQ ID NO: 798890 - DNA, 33 bp, Homo sapien
tttgaggaactgagaagggaaagcaaaaagtgc

SEQ ID NO: 798891 - DNA, 33 bp, Homo sapien
gttcttagtcttgagaactgttggctccacttg

SEQ ID NO: 798892 - DNA, 33 bp, Homo sapien
gttcttagtcttgagatctgttggctccacttg

SEQ ID NO: 798893 - DNA, 33 bp, Homo sapien
gccatgttctccatccccttttcccaagactcg

SEQ ID NO: 798894 - DNA, 33 bp, Homo sapien
gccatgttctccatcctcttttcccaagactcg

SEQ ID NO: 798895 - DNA, 33 bp, Homo sapien
acactgctgaggtccacggtacaaaggaagttc

SEQ ID NO: 798896 - DNA, 33 bp, Homo sapien
acactgctgaggtccatggtacaaaggaagttc

SEQ ID NO: 798897 - DNA, 33 bp, Homo sapien
caggcccgggtcagtacccctcgctcctccttg

SEQ ID NO: 798898 - DNA, 33 bp, Homo sapien
caggcccgggtcagtatccctcgctcctccttg

SEQ ID NO: 798899 - DNA, 33 bp, Homo sapien
gtaggtctgctgtaaccatccccctgtgtctga

SEQ ID NO: 798900 - DNA, 33 bp, Homo sapien
gtaggtctgctgtaactatccccctgtgtctga

SEQ ID NO: 798901 - DNA, 33 bp, Homo sapien
ctttcggagtgccttacactaagaaagaagggg

SEQ ID NO: 798902 - DNA, 33 bp, Homo sapien
ctttcggagtgccttatactaagaaagaagggg

SEQ ID NO: 798903 - DNA, 33 bp, Homo sapien
tagggacagcttcacaacttagaggacacaggc

SEQ ID NO: 798904 - DNA, 33 bp, Homo sapien
tagggacagcttcacaccttagaggacacaggc

SEQ ID NO: 798905 - DNA, 33 bp, Homo sapien
agacagcagcgctccccacactctgttctctgc

SEQ ID NO: 798906 - DNA, 33 bp, Homo sapien
agacagcagcgctccctacactctgttctctgc

SEQ ID NO: 798907 - DNA, 33 bp, Homo sapien
taaaggaagttctttaccctgcagtcacatact

SEQ ID NO: 798908 - DNA, 33 bp, Homo sapien
taaaggaagttctttatcctgcagtcacatact

SEQ ID NO: 798909 - DNA, 33 bp, Homo sapien
ctaagcctgagtttaaaattgtctctgcactca

SEQ ID NO: 798910 - DNA, 33 bp, Homo sapien
ctaagcctgagtttaagattgtctctgcactca

SEQ ID NO: 798911 - DNA, 33 bp, Homo sapien
gagatgacagtgcagaataaagaaagtgtgagt

SEQ ID NO: 798912 - DNA, 33 bp, Homo sapien
gagatgacagtgcagagtaaagaaagtgtgagt

SEQ ID NO: 798913 - DNA, 33 bp, Homo sapien
accaagacatatggaacggttgtaaggtctgaa

SEQ ID NO: 798914 - DNA, 33 bp, Homo sapien
accaagacatatggaatggttgtaaggtctgaa

SEQ ID NO: 798915 - DNA, 33 bp, Homo sapien
gccatatacccttgtacgacttacccatagaag

SEQ ID NO: 798916 - DNA, 33 bp, Homo sapien
gccatatacccttgtatgacttacccatagaag

SEQ ID NO: 798917 - DNA, 33 bp, Homo sapien
gagaatgttgcttccaacctaacagtaaaacaa

SEQ ID NO: 798918 - DNA, 33 bp, Homo sapien
gagaatgttgcttccaccctaacagtaaaacaa

SEQ ID NO: 798919 - DNA, 33 bp, Homo sapien
agagaccagagagaaaagtcagaggtttcagct

SEQ ID NO: 798920 - DNA, 33 bp, Homo sapien
agagaccagagagaaacgtcagaggtttcagct

SEQ ID NO: 798921 - DNA, 33 bp, Homo sapien
acactcgtcaatagccactaagaagcagccaga

SEQ ID NO: 798922 - DNA, 33 bp, Homo sapien
acactcgtcaatagccgctaagaagcagccaga

SEQ ID NO: 798923 - DNA, 33 bp, Homo sapien
gcctgactacagcgtacgttccggaaaagtaag

SEQ ID NO: 798924 - DNA, 33 bp, Homo sapien
gcctgactacagcgtaggttccggaaaagtaag

SEQ ID NO: 798925 - DNA, 33 bp, Homo sapien
gtttggaaagatggcaaatgggaagcaggggtg

SEQ ID NO: 798926 - DNA, 33 bp, Homo sapien
gtttggaaagatggcagatgggaagcaggggtg

SEQ ID NO: 798927 - DNA, 33 bp, Homo sapien
cgttttcagggtcaaaatagtataatcactgaa

SEQ ID NO: 798928 - DNA, 33 bp, Homo sapien
cgttttcagggtcaaagtagtataatcactgaa

SEQ ID NO: 798929 - DNA, 33 bp, Homo sapien
aaaacactgaatcaagaagccctgattttgttg

SEQ ID NO: 798930 - DNA, 33 bp, Homo sapien
aaaacactgaatcaaggagccctgattttgttg

SEQ ID NO: 798931 - DNA, 33 bp, Homo sapien
tggttcaaaaaagctaacttgatcagtaagtgg

SEQ ID NO: 798932 - DNA, 33 bp, Homo sapien
tggttcaaaaaagctaccttgatcagtaagtgg

SEQ ID NO: 798933 - DNA, 33 bp, Homo sapien
gtgttgcttaggtagacgaaatgcttttgtgca

SEQ ID NO: 798934 - DNA, 33 bp, Homo sapien
gtgttgcttaggtagatgaaatgcttttgtgca

SEQ ID NO: 798935 - DNA, 33 bp, Homo sapien
cacttggataaataaaggtggatgaagagaagc

SEQ ID NO: 798936 - DNA, 33 bp, Homo sapien
cacttggataaataaatgtggatgaagagaagc

SEQ ID NO: 798937 - DNA, 33 bp, Homo sapien
gcaagtgctgtagaaaaagccacaaggttagta

SEQ ID NO: 798938 - DNA, 33 bp, Homo sapien
gcaagtgctgtagaaagagccacaaggttagta

SEQ ID NO: 798939 - DNA, 33 bp, Homo sapien
caaaaggtatttctgaaaaaagctcacacatcc

SEQ ID NO: 798940 - DNA, 33 bp, Homo sapien
caaaaggtatttctgagaaaagctcacacatcc

SEQ ID NO: 798941 - DNA, 33 bp, Homo sapien
tgtcaataaacttacaatcatcaaatctacaaa

SEQ ID NO: 798942 - DNA, 33 bp, Homo sapien
tgtcaataaacttacagtcatcaaatctacaaa

SEQ ID NO: 798943 - DNA, 33 bp, Homo sapien
ccttgtcgtttcaagggacagaaatatcaggtt

SEQ ID NO: 798944 - DNA, 33 bp, Homo sapien
ccttgtcgtttcaaggtacagaaatatcaggtt

SEQ ID NO: 798945 - DNA, 33 bp, Homo sapien
gtggtcaaaagcaagtaacaagagggtttcccc

SEQ ID NO: 798946 - DNA, 33 bp, Homo sapien
gtggtcaaaagcaagtcacaagagggtttcccc

SEQ ID NO: 798947 - DNA, 33 bp, Homo sapien
tgtgtgactccgggaaatcctgagctcttaacc

SEQ ID NO: 798948 - DNA, 33 bp, Homo sapien
tgtgtgactccgggaagtcctgagctcttaacc

SEQ ID NO: 798949 - DNA, 33 bp, Homo sapien
tgggccagggtgttaacctctctaagcattaat

SEQ ID NO: 798950 - DNA, 33 bp, Homo sapien
tgggccagggtgttaagctctctaagcattaat

SEQ ID NO: 798951 - DNA, 33 bp, Homo sapien
atgggcagtgggacacaatctcagaggtggctc

SEQ ID NO: 798952 - DNA, 33 bp, Homo sapien
atgggcagtgggacacgatctcagaggtggctc

SEQ ID NO: 798953 - DNA, 33 bp, Homo sapien
atgtctgcatcatgggacacacttctgaaagca

SEQ ID NO: 798954 - DNA, 33 bp, Homo sapien
atgtctgcatcatggggcacacttctgaaagca

SEQ ID NO: 798955 - DNA, 33 bp, Homo sapien
gtatccctgtattcacacctccagatcttctcc

SEQ ID NO: 798956 - DNA, 33 bp, Homo sapien
gtatccctgtattcacgcctccagatcttctcc

SEQ ID NO: 798957 - DNA, 33 bp, Homo sapien
agctgtggaactcctcagacacagggcattgga

SEQ ID NO: 798958 - DNA, 33 bp, Homo sapien
agctgtggaactcctcggacacagggcattgga

SEQ ID NO: 798959 - DNA, 33 bp, Homo sapien
gttttgcagcctgatgaaaatttaatagatcat

SEQ ID NO: 798960 - DNA, 33 bp, Homo sapien
gttttgcagcctgatggaaatttaatagatcat

SEQ ID NO: 798961 - DNA, 33 bp, Homo sapien
ggcagggcaacaaaaacgctggaggctggacta

SEQ ID NO: 798962 - DNA, 33 bp, Homo sapien
ggcagggcaacaaaaatgctggaggctggacta

SEQ ID NO: 798963 - DNA, 33 bp, Homo sapien
ttaaacatttgaatgacaagtccaaaaaaagag

SEQ ID NO: 798964 - DNA, 33 bp, Homo sapien
ttaaacatttgaatgagaagtccaaaaaaagag

SEQ ID NO: 798965 - DNA, 33 bp, Homo sapien
atgggcacgtaaattaaatgttactaagcaaga

SEQ ID NO: 798966 - DNA, 33 bp, Homo sapien
atgggcacgtaaattagatgttactaagcaaga

SEQ ID NO: 798967 - DNA, 33 bp, Homo sapien
ggaagtgcagactacaatacctcagggagccac

SEQ ID NO: 798968 - DNA, 33 bp, Homo sapien
ggaagtgcagactacagtacctcagggagccac

SEQ ID NO: 798969 - DNA, 33 bp, Homo sapien
ttcaaattttccttccaaaagtcaagataagca

SEQ ID NO: 798970 - DNA, 33 bp, Homo sapien
ttcaaattttccttccgaaagtcaagataagca

SEQ ID NO: 798971 - DNA, 33 bp, Homo sapien
tggctttaaggaaggaagggtggaagcgagtct

SEQ ID NO: 798972 - DNA, 33 bp, Homo sapien
tggctttaaggaaggacgggtggaagcgagtct

SEQ ID NO: 798973 - DNA, 33 bp, Homo sapien
agccatttgttcttaactcatctcaggaagggg

SEQ ID NO: 798974 - DNA, 33 bp, Homo sapien
agccatttgttcttaattcatctcaggaagggg

SEQ ID NO: 798975 - DNA, 33 bp, Homo sapien
gcacccagcaggcgcaacaagacagataagtgg

SEQ ID NO: 798976 - DNA, 33 bp, Homo sapien
gcacccagcaggcgcatcaagacagataagtgg

SEQ ID NO: 798977 - DNA, 33 bp, Homo sapien
catgtgctgcacaccacagcattgatgcacgtg

SEQ ID NO: 798978 - DNA, 33 bp, Homo sapien
catgtgctgcacaccagagcattgatgcacgtg

SEQ ID NO: 798979 - DNA, 33 bp, Homo sapien
ttgaagatgtgagagtaacaagatgggaggcat

SEQ ID NO: 798980 - DNA, 33 bp, Homo sapien
ttgaagatgtgagagtcacaagatgggaggcat

SEQ ID NO: 798981 - DNA, 33 bp, Homo sapien
gtgatttataattggaagagttgcagaaataaa

SEQ ID NO: 798982 - DNA, 33 bp, Homo sapien
gtgatttataattggaggagttgcagaaataaa

SEQ ID NO: 798983 - DNA, 33 bp, Homo sapien
taaaagtgcctcacaaactccctcaggctgccc

SEQ ID NO: 798984 - DNA, 33 bp, Homo sapien
taaaagtgcctcacaatctccctcaggctgccc

SEQ ID NO: 798985 - DNA, 33 bp, Homo sapien
gcatgtgcatgtctaccgggtgccaggcagggt

SEQ ID NO: 798986 - DNA, 33 bp, Homo sapien
gcatgtgcatgtctactgggtgccaggcagggt

SEQ ID NO: 798987 - DNA, 33 bp, Homo sapien
cgggcctgtaactgcacctagtcaggaagctga

SEQ ID NO: 798988 - DNA, 33 bp, Homo sapien
cgggcctgtaactgcatctagtcaggaagctga

SEQ ID NO: 798989 - DNA, 33 bp, Homo sapien
tgaaaaacacaatttaaaaaagctagagctaat

SEQ ID NO: 798990 - DNA, 33 bp, Homo sapien
tgaaaaacacaatttagaaaagctagagctaat

SEQ ID NO: 798991 - DNA, 33 bp, Homo sapien
tgtcacagaccaaagaagcctaaggagacacaa

SEQ ID NO: 798992 - DNA, 33 bp, Homo sapien
tgtcacagaccaaagaggcctaaggagacacaa

SEQ ID NO: 798993 - DNA, 33 bp, Homo sapien
agcactatctcagcccagggataatcagtgatg

SEQ ID NO: 798994 - DNA, 33 bp, Homo sapien
agcactatctcagccctgggataatcagtgatg

SEQ ID NO: 798995 - DNA, 33 bp, Homo sapien
actgtaatgagaatgcacaataggaaaagtgcc

SEQ ID NO: 798996 - DNA, 33 bp, Homo sapien
actgtaatgagaatgcgcaataggaaaagtgcc

SEQ ID NO: 798997 - DNA, 33 bp, Homo sapien
aagggattgagtctgaacatctctccagggtct

SEQ ID NO: 798998 - DNA, 33 bp, Homo sapien
aagggattgagtctgagcatctctccagggtct

SEQ ID NO: 798999 - DNA, 33 bp, Homo sapien
cataggattgctgcaacgagaacaagggcagag

SEQ ID NO: 799000 - DNA, 33 bp, Homo sapien
cataggattgctgcaaggagaacaagggcagag

SEQ ID NO: 799001 - DNA, 33 bp, Homo sapien
taataatgtgtaaccaataagctcaatatgaca

SEQ ID NO: 799002 - DNA, 33 bp, Homo sapien
taataatgtgtaaccagtaagctcaatatgaca

SEQ ID NO: 799003 - DNA, 33 bp, Homo sapien
tttaactacgtggataactgaaatgtatttaaa

SEQ ID NO: 799004 - DNA, 33 bp, Homo sapien
tttaactacgtggatagctgaaatgtatttaaa

SEQ ID NO: 799005 - DNA, 33 bp, Homo sapien
aaggcagctctccaacaacagccggctcactac

SEQ ID NO: 799006 - DNA, 33 bp, Homo sapien
aaggcagctctccaacgacagccggctcactac

SEQ ID NO: 799007 - DNA, 33 bp, Homo sapien
ggctaaagtatttccacgtggtcctttgactca

SEQ ID NO: 799008 - DNA, 33 bp, Homo sapien
ggctaaagtatttccatgtggtcctttgactca

SEQ ID NO: 799009 - DNA, 33 bp, Homo sapien
agagaacgggaacctaagtttactgagcaccac

SEQ ID NO: 799010 - DNA, 33 bp, Homo sapien
agagaacgggaacctatgtttactgagcaccac

SEQ ID NO: 799011 - DNA, 33 bp, Homo sapien
ttcaacctcaggagcccatggtttcctggtgta

SEQ ID NO: 799012 - DNA, 33 bp, Homo sapien
ttcaacctcaggagcctatggtttcctggtgta

SEQ ID NO: 799013 - DNA, 33 bp, Homo sapien
tttgtgggtcttggacacctcagaaaatgatag

SEQ ID NO: 799014 - DNA, 33 bp, Homo sapien
tttgtgggtcttggacgcctcagaaaatgatag

SEQ ID NO: 799015 - DNA, 33 bp, Homo sapien
caaagactgcactacccgagagactgcagcagg

SEQ ID NO: 799016 - DNA, 33 bp, Homo sapien
caaagactgcactacctgagagactgcagcagg

SEQ ID NO: 799017 - DNA, 33 bp, Homo sapien
atgaaagagagaatcacggtcctgacgacaaac

SEQ ID NO: 799018 - DNA, 33 bp, Homo sapien
atgaaagagagaatcatggtcctgacgacaaac

SEQ ID NO: 799019 - DNA, 33 bp, Homo sapien
ggccaggaaggagtccaagtacaggcagatttg

SEQ ID NO: 799020 - DNA, 33 bp, Homo sapien
ggccaggaaggagtccgagtacaggcagatttg

SEQ ID NO: 799021 - DNA, 33 bp, Homo sapien
gaggaaccagtaatggcccaggagtgctgatat

SEQ ID NO: 799022 - DNA, 33 bp, Homo sapien
gaggaaccagtaatggtccaggagtgctgatat

SEQ ID NO: 799023 - DNA, 33 bp, Homo sapien
gtcagactagaacctacggagacttggtgggca

SEQ ID NO: 799024 - DNA, 33 bp, Homo sapien
gtcagactagaacctatggagacttggtgggca

SEQ ID NO: 799025 - DNA, 33 bp, Homo sapien
cctgtcaaatccataaaccttcctcagcagtca

SEQ ID NO: 799026 - DNA, 33 bp, Homo sapien
cctgtcaaatccataagccttcctcagcagtca

SEQ ID NO: 799027 - DNA, 33 bp, Homo sapien
ctggatgcaacctggaagaagggaggcccatgg

SEQ ID NO: 799028 - DNA, 33 bp, Homo sapien
ctggatgcaacctggaggaagggaggcccatgg

SEQ ID NO: 799029 - DNA, 33 bp, Homo sapien
gggactctgcaactccaatctttcgagtgaagc

SEQ ID NO: 799030 - DNA, 33 bp, Homo sapien
gggactctgcaactccgatctttcgagtgaagc

SEQ ID NO: 799031 - DNA, 33 bp, Homo sapien
ctacaaggaggtccaaattcactcacaggccct

SEQ ID NO: 799032 - DNA, 33 bp, Homo sapien
ctacaaggaggtccaacttcactcacaggccct

SEQ ID NO: 799033 - DNA, 33 bp, Homo sapien
ggttatttggagacaacttggccctgcttcttg

SEQ ID NO: 799034 - DNA, 33 bp, Homo sapien
ggttatttggagacaatttggccctgcttcttg

SEQ ID NO: 799035 - DNA, 33 bp, Homo sapien
ttggctcaaaggaggactcagcaagggtttgtt

SEQ ID NO: 799036 - DNA, 33 bp, Homo sapien
ttggctcaaaggaggattcagcaagggtttgtt

SEQ ID NO: 799037 - DNA, 33 bp, Homo sapien
aaccctggtgaagagtaaacagctagcacattc

SEQ ID NO: 799038 - DNA, 33 bp, Homo sapien
aaccctggtgaagagtcaacagctagcacattc

SEQ ID NO: 799039 - DNA, 33 bp, Homo sapien
cgagtggttactatgggcacttgctggaaggcc

SEQ ID NO: 799040 - DNA, 33 bp, Homo sapien
cgagtggttactatggtcacttgctggaaggcc

SEQ ID NO: 799041 - DNA, 33 bp, Homo sapien
caggagatgggggaagaatacaagaaaaggcaa

SEQ ID NO: 799042 - DNA, 33 bp, Homo sapien
caggagatgggggaaggatacaagaaaaggcaa

SEQ ID NO: 799043 - DNA, 33 bp, Homo sapien
tcccctcatgactcacaattacaacagaaggca

SEQ ID NO: 799044 - DNA, 33 bp, Homo sapien
tcccctcatgactcacgattacaacagaaggca

SEQ ID NO: 799045 - DNA, 33 bp, Homo sapien
acttagccactcctaccggttctttaagactca

SEQ ID NO: 799046 - DNA, 33 bp, Homo sapien
acttagccactcctactggttctttaagactca

SEQ ID NO: 799047 - DNA, 33 bp, Homo sapien
aggcagacagctaaagcccaaacaccaatgaca

SEQ ID NO: 799048 - DNA, 33 bp, Homo sapien
aggcagacagctaaaggccaaacaccaatgaca

SEQ ID NO: 799049 - DNA, 33 bp, Homo sapien
ctagtttcttctttgcagacagggacccactga

SEQ ID NO: 799050 - DNA, 33 bp, Homo sapien
ctagtttcttctttgcggacagggacccactga

SEQ ID NO: 799051 - DNA, 33 bp, Homo sapien
gtccactttcccgcagactccattcacatagta

SEQ ID NO: 799052 - DNA, 33 bp, Homo sapien
gtccactttcccgcaggctccattcacatagta

SEQ ID NO: 799053 - DNA, 33 bp, Homo sapien
aaactcatacacttaaccaagttttcctactat

SEQ ID NO: 799054 - DNA, 33 bp, Homo sapien
aaactcatacacttaatcaagttttcctactat

SEQ ID NO: 799055 - DNA, 33 bp, Homo sapien
ttctcctaagggtctcaaaagcatcttggagga

SEQ ID NO: 799056 - DNA, 33 bp, Homo sapien
ttctcctaagggtctcgaaagcatcttggagga

SEQ ID NO: 799057 - DNA, 33 bp, Homo sapien
aggtcagtcgtttcaaccttgcaggccgtcatc

SEQ ID NO: 799058 - DNA, 33 bp, Homo sapien
aggtcagtcgtttcaatcttgcaggccgtcatc

SEQ ID NO: 799059 - DNA, 33 bp, Homo sapien
tatagcataagcaagaaaatactctttgtgcat

SEQ ID NO: 799060 - DNA, 33 bp, Homo sapien
tatagcataagcaagataatactctttgtgcat

SEQ ID NO: 799061 - DNA, 33 bp, Homo sapien
ctttctgacagccataccagtcatattagctac

SEQ ID NO: 799062 - DNA, 33 bp, Homo sapien
ctttctgacagccatatcagtcatattagctac

SEQ ID NO: 799063 - DNA, 33 bp, Homo sapien
gggggaccttagacacaccctctgttcagatcc

SEQ ID NO: 799064 - DNA, 33 bp, Homo sapien
gggggaccttagacacgccctctgttcagatcc

SEQ ID NO: 799065 - DNA, 33 bp, Homo sapien
gcgcctggccttgcgcacctgttcccctgggag

SEQ ID NO: 799066 - DNA, 33 bp, Homo sapien
gcgcctggccttgcgcgcctgttcccctgggag

SEQ ID NO: 799067 - DNA, 33 bp, Homo sapien
caacaacatatgctgacattcatgtaataaacc

SEQ ID NO: 799068 - DNA, 33 bp, Homo sapien
caacaacatatgctgatattcatgtaataaacc

SEQ ID NO: 799069 - DNA, 33 bp, Homo sapien
tatatataagaccaacaaatgtcctctatagag

SEQ ID NO: 799070 - DNA, 33 bp, Homo sapien
tatatataagaccaaccaatgtcctctatagag

SEQ ID NO: 799071 - DNA, 33 bp, Homo sapien
ctgcatatggttctgacgtcacttcctaggcag

SEQ ID NO: 799072 - DNA, 33 bp, Homo sapien
ctgcatatggttctgatgtcacttcctaggcag

SEQ ID NO: 799073 - DNA, 33 bp, Homo sapien
acattttctggaaaaccgcataagttaggttgt

SEQ ID NO: 799074 - DNA, 33 bp, Homo sapien
acattttctggaaaactgcataagttaggttgt

SEQ ID NO: 799075 - DNA, 33 bp, Homo sapien
atggtgagctcaaagacgttcatccggctctgc

SEQ ID NO: 799076 - DNA, 33 bp, Homo sapien
atggtgagctcaaagatgttcatccggctctgc

SEQ ID NO: 799077 - DNA, 33 bp, Homo sapien
aaggatttaaatcaagacatctgatcccagggc

SEQ ID NO: 799078 - DNA, 33 bp, Homo sapien
aaggatttaaatcaaggcatctgatcccagggc

SEQ ID NO: 799079 - DNA, 33 bp, Homo sapien
gtgattatataaaccaatgcaattcaaagtgct

SEQ ID NO: 799080 - DNA, 33 bp, Homo sapien
gtgattatataaaccagtgcaattcaaagtgct

SEQ ID NO: 799081 - DNA, 33 bp, Homo sapien
gtatacagcagtgtacagagatagagggatgga

SEQ ID NO: 799082 - DNA, 33 bp, Homo sapien
gtatacagcagtgtacggagatagagggatgga

SEQ ID NO: 799083 - DNA, 33 bp, Homo sapien
ccatatggtaaatgtacgtttaatgtcaaaaga

SEQ ID NO: 799084 - DNA, 33 bp, Homo sapien
ccatatggtaaatgtatgtttaatgtcaaaaga

SEQ ID NO: 799085 - DNA, 33 bp, Homo sapien
tttgatatgaggataacgctgggctcataaaat

SEQ ID NO: 799086 - DNA, 33 bp, Homo sapien
tttgatatgaggataatgctgggctcataaaat

SEQ ID NO: 799087 - DNA, 33 bp, Homo sapien
aacttgactggagaatcactgaaatagttccca

SEQ ID NO: 799088 - DNA, 33 bp, Homo sapien
aacttgactggagaattactgaaatagttccca

SEQ ID NO: 799089 - DNA, 33 bp, Homo sapien
gcacttagagaaagcactcaacttccagaacct

SEQ ID NO: 799090 - DNA, 33 bp, Homo sapien
gcacttagagaaagcattcaacttccagaacct

SEQ ID NO: 799091 - DNA, 33 bp, Homo sapien
ccatcttcctctgtacccttgccaccaaatcac

SEQ ID NO: 799092 - DNA, 33 bp, Homo sapien
ccatcttcctctgtacgcttgccaccaaatcac

SEQ ID NO: 799093 - DNA, 33 bp, Homo sapien
tcgcctagtggttatgaacttggcctcttgaat

SEQ ID NO: 799094 - DNA, 33 bp, Homo sapien
tcgcctagtggttatgcacttggcctcttgaat

SEQ ID NO: 799095 - DNA, 33 bp, Homo sapien
taaaatggaataataacgcctggattggaggcc

SEQ ID NO: 799096 - DNA, 33 bp, Homo sapien
taaaatggaataataatgcctggattggaggcc

SEQ ID NO: 799097 - DNA, 33 bp, Homo sapien
ttcaaacctaggcagcgctttctgattctagaa

SEQ ID NO: 799098 - DNA, 33 bp, Homo sapien
ttcaaacctaggcagctctttctgattctagaa

SEQ ID NO: 799099 - DNA, 33 bp, Homo sapien
catggcgtccaaccgcaactatggcctgtttct

SEQ ID NO: 799100 - DNA, 33 bp, Homo sapien
catggcgtccaaccgcgactatggcctgtttct

SEQ ID NO: 799101 - DNA, 33 bp, Homo sapien
tccccttcacctccccagaagcttcctgaaaca

SEQ ID NO: 799102 - DNA, 33 bp, Homo sapien
tccccttcacctccccggaagcttcctgaaaca

SEQ ID NO: 799103 - DNA, 33 bp, Homo sapien
atttgtctcgccatcacaggatcttggaaatgt

SEQ ID NO: 799104 - DNA, 33 bp, Homo sapien
atttgtctcgccatcataggatcttggaaatgt

SEQ ID NO: 799105 - DNA, 33 bp, Homo sapien
aaatgtgtaaacagacgctgcgtatctgaggag

SEQ ID NO: 799106 - DNA, 33 bp, Homo sapien
aaatgtgtaaacagactctgcgtatctgaggag

SEQ ID NO: 799107 - DNA, 33 bp, Homo sapien
ggtggtgatgctgaaacggagcaggatgaggtg

SEQ ID NO: 799108 - DNA, 33 bp, Homo sapien
ggtggtgatgctgaaatggagcaggatgaggtg

SEQ ID NO: 799109 - DNA, 33 bp, Homo sapien
cagggttaggccctaacatggagtcagagaata

SEQ ID NO: 799110 - DNA, 33 bp, Homo sapien
cagggttaggccctaatatggagtcagagaata

SEQ ID NO: 799111 - DNA, 33 bp, Homo sapien
gctccgtattggggacccacaaggagtacagtc

SEQ ID NO: 799112 - DNA, 33 bp, Homo sapien
gctccgtattggggactcacaaggagtacagtc

SEQ ID NO: 799113 - DNA, 33 bp, Homo sapien
cttgttccagtcagagacaagtggaccgcaagt

SEQ ID NO: 799114 - DNA, 33 bp, Homo sapien
cttgttccagtcagagtcaagtggaccgcaagt

SEQ ID NO: 799115 - DNA, 33 bp, Homo sapien
aatcccacgagcatacccccaacaacagtccct

SEQ ID NO: 799116 - DNA, 33 bp, Homo sapien
aatcccacgagcatacgcccaacaacagtccct

SEQ ID NO: 799117 - DNA, 33 bp, Homo sapien
aggagaaggttaagtacgttgcccaaaataact

SEQ ID NO: 799118 - DNA, 33 bp, Homo sapien
aggagaaggttaagtatgttgcccaaaataact

SEQ ID NO: 799119 - DNA, 33 bp, Homo sapien
cccaggtgtcacccaccaccttcctgtctgcat

SEQ ID NO: 799120 - DNA, 33 bp, Homo sapien
cccaggtgtcacccactaccttcctgtctgcat

SEQ ID NO: 799121 - DNA, 33 bp, Homo sapien
ctgtctggctgctggacgaaagaaggatggcag

SEQ ID NO: 799122 - DNA, 33 bp, Homo sapien
ctgtctggctgctggatgaaagaaggatggcag

SEQ ID NO: 799123 - DNA, 33 bp, Homo sapien
tgatcaggttcttaacagtgagcgatttaaggc

SEQ ID NO: 799124 - DNA, 33 bp, Homo sapien
tgatcaggttcttaacggtgagcgatttaaggc

SEQ ID NO: 799125 - DNA, 33 bp, Homo sapien
gcttaaaatctgggccacactcttggctctggg

SEQ ID NO: 799126 - DNA, 33 bp, Homo sapien
gcttaaaatctgggccgcactcttggctctggg

SEQ ID NO: 799127 - DNA, 33 bp, Homo sapien
ggatacttaagtagaaacagaggcttggtgaaa

SEQ ID NO: 799128 - DNA, 33 bp, Homo sapien
ggatacttaagtagaaccagaggcttggtgaaa

SEQ ID NO: 799129 - DNA, 33 bp, Homo sapien
acaccatgtccccatacctgtcaagaccgaggg

SEQ ID NO: 799130 - DNA, 33 bp, Homo sapien
acaccatgtccccatatctgtcaagaccgaggg

SEQ ID NO: 799131 - DNA, 33 bp, Homo sapien
agttctggccttcgcactcccaggcttgcccag

SEQ ID NO: 799132 - DNA, 33 bp, Homo sapien
agttctggccttcgcattcccaggcttgcccag

SEQ ID NO: 799133 - DNA, 33 bp, Homo sapien
gaagcaggaaaacatacacactcagagatgcat

SEQ ID NO: 799134 - DNA, 33 bp, Homo sapien
gaagcaggaaaacatatacactcagagatgcat

SEQ ID NO: 799135 - DNA, 33 bp, Homo sapien
gaagtcaccaagatgaacttccactaggaacta

SEQ ID NO: 799136 - DNA, 33 bp, Homo sapien
gaagtcaccaagatgagcttccactaggaacta

SEQ ID NO: 799137 - DNA, 33 bp, Homo sapien
taggtatgtaaatcagcactcaccaacagttga

SEQ ID NO: 799138 - DNA, 33 bp, Homo sapien
taggtatgtaaatcaggactcaccaacagttga

SEQ ID NO: 799139 - DNA, 33 bp, Homo sapien
ttttctctccatgagcaatgactctgcagttaa

SEQ ID NO: 799140 - DNA, 33 bp, Homo sapien
ttttctctccatgagcgatgactctgcagttaa

SEQ ID NO: 799141 - DNA, 33 bp, Homo sapien
tttatttagtcgttcaccattaatctcttctca

SEQ ID NO: 799142 - DNA, 33 bp, Homo sapien
tttatttagtcgttcatcattaatctcttctca

SEQ ID NO: 799143 - DNA, 33 bp, Homo sapien
aggggtactgttcagacgaggtgattggagaag

SEQ ID NO: 799144 - DNA, 33 bp, Homo sapien
aggggtactgttcagatgaggtgattggagaag

SEQ ID NO: 799145 - DNA, 33 bp, Homo sapien
agccacagcatataaaccgttcatgttgcctgg

SEQ ID NO: 799146 - DNA, 33 bp, Homo sapien
agccacagcatataaagcgttcatgttgcctgg

SEQ ID NO: 799147 - DNA, 33 bp, Homo sapien
gcagaaatttagctatcactcaacagtgtgtgg

SEQ ID NO: 799148 - DNA, 33 bp, Homo sapien
gcagaaatttagctattactcaacagtgtgtgg

SEQ ID NO: 799149 - DNA, 33 bp, Homo sapien
ggtacttaacaataacactcctggacctgggcc

SEQ ID NO: 799150 - DNA, 33 bp, Homo sapien
ggtacttaacaataacgctcctggacctgggcc

SEQ ID NO: 799151 - DNA, 33 bp, Homo sapien
agttctggaaaattagccatttgttgggtcacc

SEQ ID NO: 799152 - DNA, 33 bp, Homo sapien
agttctggaaaattaggcatttgttgggtcacc

SEQ ID NO: 799153 - DNA, 33 bp, Homo sapien
tgttccactcttctgcaattacagttgtcattt

SEQ ID NO: 799154 - DNA, 33 bp, Homo sapien
tgttccactcttctgcgattacagttgtcattt

SEQ ID NO: 799155 - DNA, 33 bp, Homo sapien
gaggccaagaaccacacaggtagaggggctctg

SEQ ID NO: 799156 - DNA, 33 bp, Homo sapien
gaggccaagaaccacataggtagaggggctctg

SEQ ID NO: 799157 - DNA, 33 bp, Homo sapien
agtgaaactcatcacacacattgctagggactg

SEQ ID NO: 799158 - DNA, 33 bp, Homo sapien
agtgaaactcatcacagacattgctagggactg

SEQ ID NO: 799159 - DNA, 33 bp, Homo sapien
ttccacacgctggtacacccacagaggccagag

SEQ ID NO: 799160 - DNA, 33 bp, Homo sapien
ttccacacgctggtacgcccacagaggccagag

SEQ ID NO: 799161 - DNA, 33 bp, Homo sapien
cagggcggcagcaacgcaagtcctaaaccccca

SEQ ID NO: 799162 - DNA, 33 bp, Homo sapien
cagggcggcagcaacgtaagtcctaaaccccca

SEQ ID NO: 799163 - DNA, 33 bp, Homo sapien
gtgagcttggagtgtaccagtcaaggaaaaggg

SEQ ID NO: 799164 - DNA, 33 bp, Homo sapien
gtgagcttggagtgtatcagtcaaggaaaaggg

SEQ ID NO: 799165 - DNA, 33 bp, Homo sapien
aggtccagtgtcctggaaggatggcagaaagtt

SEQ ID NO: 799166 - DNA, 33 bp, Homo sapien
aggtccagtgtcctgggaggatggcagaaagtt

SEQ ID NO: 799167 - DNA, 33 bp, Homo sapien
aaccagtgctctaaagcaatatcatttcatctg

SEQ ID NO: 799168 - DNA, 33 bp, Homo sapien
aaccagtgctctaaagtaatatcatttcatctg

SEQ ID NO: 799169 - DNA, 33 bp, Homo sapien
tatgtgtgcaagtgaaggaagactggaacaggt

SEQ ID NO: 799170 - DNA, 33 bp, Homo sapien
tatgtgtgcaagtgaatgaagactggaacaggt

SEQ ID NO: 799171 - DNA, 33 bp, Homo sapien
tgaattgtttagcggtcaagtcagattttggtg

SEQ ID NO: 799172 - DNA, 33 bp, Homo sapien
tgaattgtttagcggtgaagtcagattttggtg

SEQ ID NO: 799173 - DNA, 33 bp, Homo sapien
actttccaaatatatgccaaactgttgtccaaa

SEQ ID NO: 799174 - DNA, 33 bp, Homo sapien
actttccaaatatatgtcaaactgttgtccaaa

SEQ ID NO: 799175 - DNA, 33 bp, Homo sapien
gatatatctgctcaaaaactttcttatttttta

SEQ ID NO: 799176 - DNA, 33 bp, Homo sapien
gatatatctgctcaaacactttcttatttttta

SEQ ID NO: 799177 - DNA, 33 bp, Homo sapien
cagagactattaaagcaactatacactgataaa

SEQ ID NO: 799178 - DNA, 33 bp, Homo sapien
cagagactattaaagcgactatacactgataaa

SEQ ID NO: 799179 - DNA, 33 bp, Homo sapien
gcattgcctcattaacaaaaaaaaactagtctt

SEQ ID NO: 799180 - DNA, 33 bp, Homo sapien
gcattgcctcattaacgaaaaaaaactagtctt

SEQ ID NO: 799181 - DNA, 33 bp, Homo sapien
tccaggccatagcagacagggggaatccaaaca

SEQ ID NO: 799182 - DNA, 33 bp, Homo sapien
tccaggccatagcagagagggggaatccaaaca

SEQ ID NO: 799183 - DNA, 33 bp, Homo sapien
cacataggtatgcacacacatatatatttatca

SEQ ID NO: 799184 - DNA, 33 bp, Homo sapien
cacataggtatgcacagacatatatatttatca

SEQ ID NO: 799185 - DNA, 33 bp, Homo sapien
aagtccgggaacctcaagtgctcagtgttaacc

SEQ ID NO: 799186 - DNA, 33 bp, Homo sapien
aagtccgggaacctcaggtgctcagtgttaacc

SEQ ID NO: 799187 - DNA, 33 bp, Homo sapien
tcagaaatgccgcagaacctattctttaaaagg

SEQ ID NO: 799188 - DNA, 33 bp, Homo sapien
tcagaaatgccgcagatcctattctttaaaagg

SEQ ID NO: 799189 - DNA, 33 bp, Homo sapien
gcagcagtcaccttgaaagacagaagatgggag

SEQ ID NO: 799190 - DNA, 33 bp, Homo sapien
gcagcagtcaccttgagagacagaagatgggag

SEQ ID NO: 799191 - DNA, 33 bp, Homo sapien
gaatgaaaggatagacagatataagtatggaag

SEQ ID NO: 799192 - DNA, 33 bp, Homo sapien
gaatgaaaggatagacggatataagtatggaag

SEQ ID NO: 799193 - DNA, 33 bp, Homo sapien
ggaatgtgaatgctcaaatcaatattccctgga

SEQ ID NO: 799194 - DNA, 33 bp, Homo sapien
ggaatgtgaatgctcatatcaatattccctgga

SEQ ID NO: 799195 - DNA, 33 bp, Homo sapien
gatgtgcaagttcaaacgctatatcacagagtc

SEQ ID NO: 799196 - DNA, 33 bp, Homo sapien
gatgtgcaagttcaaatgctatatcacagagtc

SEQ ID NO: 799197 - DNA, 33 bp, Homo sapien
gaggagaagtcacgggaaaggtaggaaatgccg

SEQ ID NO: 799198 - DNA, 33 bp, Homo sapien
gaggagaagtcacggggaaggtaggaaatgccg

SEQ ID NO: 799199 - DNA, 33 bp, Homo sapien
gatgaaaccttaatacaagttaagatcaaatta

SEQ ID NO: 799200 - DNA, 33 bp, Homo sapien
gatgaaaccttaataccagttaagatcaaatta

SEQ ID NO: 799201 - DNA, 33 bp, Homo sapien
ggaaagaaaacaattaactgatcccaggaaacc

SEQ ID NO: 799202 - DNA, 33 bp, Homo sapien
ggaaagaaaacaattatctgatcccaggaaacc

SEQ ID NO: 799203 - DNA, 33 bp, Homo sapien
aactgacttttctggacgcttctacaaatgtct

SEQ ID NO: 799204 - DNA, 33 bp, Homo sapien
aactgacttttctggatgcttctacaaatgtct

SEQ ID NO: 799205 - DNA, 33 bp, Homo sapien
tggtgcagaaggggcaaatttctgtctcttccc

SEQ ID NO: 799206 - DNA, 33 bp, Homo sapien
tggtgcagaaggggcacatttctgtctcttccc

SEQ ID NO: 799207 - DNA, 33 bp, Homo sapien
agatgcaatccacagggatgctgatccgagccc

SEQ ID NO: 799208 - DNA, 33 bp, Homo sapien
agatgcaatccacaggtatgctgatccgagccc

SEQ ID NO: 799209 - DNA, 33 bp, Homo sapien
tcgaagaaagagaagacaacagattcctgaccc

SEQ ID NO: 799210 - DNA, 33 bp, Homo sapien
tcgaagaaagagaagagaacagattcctgaccc

SEQ ID NO: 799211 - DNA, 33 bp, Homo sapien
tattctgaatggtatccagtggaagggagtctg

SEQ ID NO: 799212 - DNA, 33 bp, Homo sapien
tattctgaatggtatcgagtggaagggagtctg

SEQ ID NO: 799213 - DNA, 33 bp, Homo sapien
tcagcaaccagccaataagtaggcgcagcttgt

SEQ ID NO: 799214 - DNA, 33 bp, Homo sapien
tcagcaaccagccaatgagtaggcgcagcttgt

SEQ ID NO: 799215 - DNA, 33 bp, Homo sapien
tgatgctgtatccacacaagagaatagtatgaa

SEQ ID NO: 799216 - DNA, 33 bp, Homo sapien
tgatgctgtatccacataagagaatagtatgaa

SEQ ID NO: 799217 - DNA, 33 bp, Homo sapien
tccaagaggatgaaaccgaggtgaaaggcaagt

SEQ ID NO: 799218 - DNA, 33 bp, Homo sapien
tccaagaggatgaaactgaggtgaaaggcaagt

SEQ ID NO: 799219 - DNA, 33 bp, Homo sapien
caaaacagatgcgaaacgggtcctgtgctttat

SEQ ID NO: 799220 - DNA, 33 bp, Homo sapien
caaaacagatgcgaaatgggtcctgtgctttat

SEQ ID NO: 799221 - DNA, 33 bp, Homo sapien
tacaataatagagaaaagttacaattacttgcc

SEQ ID NO: 799222 - DNA, 33 bp, Homo sapien
tacaataatagagaaacgttacaattacttgcc

SEQ ID NO: 799223 - DNA, 33 bp, Homo sapien
tgtaaaagcactcaaacggcattctcaggaggc

SEQ ID NO: 799224 - DNA, 33 bp, Homo sapien
tgtaaaagcactcaaatggcattctcaggaggc

SEQ ID NO: 799225 - DNA, 33 bp, Homo sapien; identical to SEQ ID NO: 799223

SEQ ID NO: 799226 - DNA, 33 bp, Homo sapien; identical to SEQ ID NO: 799224

SEQ ID NO: 799227 - DNA, 33 bp, Homo sapien
gagatgcactgccgaaatatgtatgataggaaa

SEQ ID NO: 799228 - DNA, 33 bp, Homo sapien
gagatgcactgccgaagtatgtatgataggaaa

SEQ ID NO: 799229 - DNA, 33 bp, Homo sapien
attcacacgaaagcacaaagatggtagatggca

SEQ ID NO: 799230 - DNA, 33 bp, Homo sapien
attcacacgaaagcacgaagatggtagatggca

SEQ ID NO: 799231 - DNA, 33 bp, Homo sapien
aagatggaaatgacaacagtccctacctgatag

SEQ ID NO: 799232 - DNA, 33 bp, Homo sapien
aagatggaaatgacaatagtccctacctgatag

SEQ ID NO: 799233 - DNA, 33 bp, Homo sapien
cttacaggtgataagacggctgccaagatttac

SEQ ID NO: 799234 - DNA, 33 bp, Homo sapien
cttacaggtgataagatggctgccaagatttac

SEQ ID NO: 799235 - DNA, 33 bp, Homo sapien
gggtgtagaccctgtaccacagtcgatttacaa

SEQ ID NO: 799236 - DNA, 33 bp, Homo sapien
gggtgtagaccctgtatcacagtcgatttacaa

SEQ ID NO: 799237 - DNA, 33 bp, Homo sapien
actcctaaagtcacaacggtggtataccctgtg

SEQ ID NO: 799238 - DNA, 33 bp, Homo sapien
actcctaaagtcacaatggtggtataccctgtg

SEQ ID NO: 799239 - DNA, 33 bp, Homo sapien
gacatcattcataataccatagggagatagtac

SEQ ID NO: 799240 - DNA, 33 bp, Homo sapien
gacatcattcataatatcatagggagatagtac

SEQ ID NO: 799241 - DNA, 33 bp, Homo sapien
gactgtggacaactaccgcatttctcagctggt

SEQ ID NO: 799242 - DNA, 33 bp, Homo sapien
gactgtggacaactactgcatttctcagctggt

SEQ ID NO: 799243 - DNA, 33 bp, Homo sapien
ggaacacatgatccccacactgctgcgtgcagt

SEQ ID NO: 799244 - DNA, 33 bp, Homo sapien
ggaacacatgatcccctcactgctgcgtgcagt

SEQ ID NO: 799245 - DNA, 33 bp, Homo sapien
ctgttacacagacaaaatatgagtcatcagaaa

SEQ ID NO: 799246 - DNA, 33 bp, Homo sapien
ctgttacacagacaaagtatgagtcatcagaaa

SEQ ID NO: 799247 - DNA, 33 bp, Homo sapien
tccatctgttactgcaccctgaattcctaacca

SEQ ID NO: 799248 - DNA, 33 bp, Homo sapien
tccatctgttactgcatcctgaattcctaacca

SEQ ID NO: 799249 - DNA, 33 bp, Homo sapien
tctgagaaaagaaggacgttccatctgttactg

SEQ ID NO: 799250 - DNA, 33 bp, Homo sapien
tctgagaaaagaaggatgttccatctgttactg

SEQ ID NO: 799251 - DNA, 33 bp, Homo sapien
gttcaagggacaagaaacccctaagctccctcc

SEQ ID NO: 799252 - DNA, 33 bp, Homo sapien
gttcaagggacaagaagcccctaagctccctcc

SEQ ID NO: 799253 - DNA, 33 bp, Homo sapien
gttcttcccttactaccgctctgaggaggagag

SEQ ID NO: 799254 - DNA, 33 bp, Homo sapien
gttcttcccttactactgctctgaggaggagag

SEQ ID NO: 799255 - DNA, 33 bp, Homo sapien
tgctggacaagatggacacttctctccaaagcc

SEQ ID NO: 799256 - DNA, 33 bp, Homo sapien
tgctggacaagatggatacttctctccaaagcc

SEQ ID NO: 799257 - DNA, 33 bp, Homo sapien
accagtgtctacaaccaatgattatggagatga

SEQ ID NO: 799258 - DNA, 33 bp, Homo sapien
accagtgtctacaacccatgattatggagatga

SEQ ID NO: 799259 - DNA, 33 bp, Homo sapien
tagggccagaaagcaaccccattttctttctcc

SEQ ID NO: 799260 - DNA, 33 bp, Homo sapien
tagggccagaaagcaatcccattttctttctcc

SEQ ID NO: 799261 - DNA, 33 bp, Homo sapien
actcctcagtggacagacctttgtaggatcaag

SEQ ID NO: 799262 - DNA, 33 bp, Homo sapien
actcctcagtggacaggcctttgtaggatcaag

SEQ ID NO: 799263 - DNA, 33 bp, Homo sapien
catgtcacgtcatccacgttaatatgaagcgac

SEQ ID NO: 799264 - DNA, 33 bp, Homo sapien
catgtcacgtcatccaggttaatatgaagcgac

SEQ ID NO: 799265 - DNA, 33 bp, Homo sapien
ccctcagtttcttccccgatggtgacctctcag

SEQ ID NO: 799266 - DNA, 33 bp, Homo sapien
ccctcagtttcttccctgatggtgacctctcag

SEQ ID NO: 799267 - DNA, 33 bp, Homo sapien
ttcctgctgtttctaacctctcagagagtcttc

SEQ ID NO: 799268 - DNA, 33 bp, Homo sapien
ttcctgctgtttctaatctctcagagagtcttc

SEQ ID NO: 799269 - DNA, 33 bp, Homo sapien
aaaaatagcagctaccaattttgaatccctgct

SEQ ID NO: 799270 - DNA, 33 bp, Homo sapien
aaaaatagcagctaccgattttgaatccctgct

SEQ ID NO: 799271 - DNA, 33 bp, Homo sapien
cagtggggctatgaataacctctgcgctgaccc

SEQ ID NO: 799272 - DNA, 33 bp, Homo sapien
cagtggggctatgaatgacctctgcgctgaccc

SEQ ID NO: 799273 - DNA, 33 bp, Homo sapien
gggagactgaggaacaaagaggtttcatacccc

SEQ ID NO: 799274 - DNA, 33 bp, Homo sapien
gggagactgaggaacagagaggtttcatacccc

SEQ ID NO: 799275 - DNA, 33 bp, Homo sapien
ctcatgaccagacagaacttccagacccagtgc

SEQ ID NO: 799276 - DNA, 33 bp, Homo sapien
ctcatgaccagacagaccttccagacccagtgc

SEQ ID NO: 799277 - DNA, 33 bp, Homo sapien
acaccaagaaagcaagaagcccgtgcaagcaag

SEQ ID NO: 799278 - DNA, 33 bp, Homo sapien
acaccaagaaagcaaggagcccgtgcaagcaag

SEQ ID NO: 799279 - DNA, 33 bp, Homo sapien
ctaaaaaaatcaacacagataatactaatgcaa

SEQ ID NO: 799280 - DNA, 33 bp, Homo sapien
ctaaaaaaatcaacactgataatactaatgcaa

SEQ ID NO: 799281 - DNA, 33 bp, Homo sapien
tgaattttggacgtgaaaaaggaagagcgtctg

SEQ ID NO: 799282 - DNA, 33 bp, Homo sapien
tgaattttggacgtgacaaaggaagagcgtctg

SEQ ID NO: 799283 - DNA, 33 bp, Homo sapien
acatcccaaaagtggcagagaacagaactcgag

SEQ ID NO: 799284 - DNA, 33 bp, Homo sapien
acatcccaaaagtggcggagaacagaactcgag

SEQ ID NO: 799285 - DNA, 33 bp, Homo sapien
ctgggtaggcagcaccactagctattctctgcc

SEQ ID NO: 799286 - DNA, 33 bp, Homo sapien
ctgggtaggcagcacctctagctattctctgcc

SEQ ID NO: 799287 - DNA, 33 bp, Homo sapien
gtgacgaaaagggtggaagccccagcctaccac

SEQ ID NO: 799288 - DNA, 33 bp, Homo sapien
gtgacgaaaagggtggcagccccagcctaccac

SEQ ID NO: 799289 - DNA, 33 bp, Homo sapien
cactgtgcagatgcaaatgacccaggctcacaa

SEQ ID NO: 799290 - DNA, 33 bp, Homo sapien
cactgtgcagatgcaagtgacccaggctcacaa

SEQ ID NO: 799291 - DNA, 33 bp, Homo sapien
tatttgaaaatgttcaacaaaggtatcataaga

SEQ ID NO: 799292 - DNA, 33 bp, Homo sapien
tatttgaaaatgttcagcaaaggtatcataaga

SEQ ID NO: 799293 - DNA, 33 bp, Homo sapien
agcaatggcctccccaagcggctctagtaagga

SEQ ID NO: 799294 - DNA, 33 bp, Homo sapien
agcaatggcctccccacgcggctctagtaagga

SEQ ID NO: 799295 - DNA, 33 bp, Homo sapien
tcagacgccatacttacgtgtcccaacaacttt

SEQ ID NO: 799296 - DNA, 33 bp, Homo sapien
tcagacgccatacttatgtgtcccaacaacttt

SEQ ID NO: 799297 - DNA, 33 bp, Homo sapien
ttaagccatgtaatacactcggctgccaaatga

SEQ ID NO: 799298 - DNA, 33 bp, Homo sapien
ttaagccatgtaatacgctcggctgccaaatga

SEQ ID NO: 799299 - DNA, 33 bp, Homo sapien
agggaatttagcaaaacacctgtttctctttac

SEQ ID NO: 799300 - DNA, 33 bp, Homo sapien
agggaatttagcaaaatacctgtttctctttac

SEQ ID NO: 799301 - DNA, 33 bp, Homo sapien
ggacaagagaattacaacaatggcaacactaac

SEQ ID NO: 799302 - DNA, 33 bp, Homo sapien
ggacaagagaattacagcaatggcaacactaac

SEQ ID NO: 799303 - DNA, 33 bp, Homo sapien
tagacaggtaacaaacaaaaagcagatgtcaca

SEQ ID NO: 799304 - DNA, 33 bp, Homo sapien
tagacaggtaacaaacgaaaagcagatgtcaca

SEQ ID NO: 799305 - DNA, 33 bp, Homo sapien
tctgtttcatcctttgcagaggagctcctgcac

SEQ ID NO: 799306 - DNA, 33 bp, Homo sapien
tctgtttcatcctttgtagaggagctcctgcac

SEQ ID NO: 799307 - DNA, 33 bp, Homo sapien
tgagctccaagacctaagatctatttctttcct

SEQ ID NO: 799308 - DNA, 33 bp, Homo sapien
tgagctccaagacctaggatctatttctttcct

SEQ ID NO: 799309 - DNA, 33 bp, Homo sapien
gactataaatgaactacccatttttagtggagt

SEQ ID NO: 799310 - DNA, 33 bp, Homo sapien
gactataaatgaactatccatttttagtggagt

SEQ ID NO: 799311 - DNA, 33 bp, Homo sapien
aactctcatcgagcaacaactgactgaatgttt

SEQ ID NO: 799312 - DNA, 33 bp, Homo sapien
aactctcatcgagcaagaactgactgaatgttt

SEQ ID NO: 799313 - DNA, 33 bp, Homo sapien
ctgtgtactaagaagacgctgtagggagcaagg

SEQ ID NO: 799314 - DNA, 33 bp, Homo sapien
ctgtgtactaagaagatgctgtagggagcaagg

SEQ ID NO: 799315 - DNA, 33 bp, Homo sapien
tgtgttctgagttccaatcactggctgtttcct

SEQ ID NO: 799316 - DNA, 33 bp, Homo sapien
tgtgttctgagttccactcactggctgtttcct

SEQ ID NO: 799317 - DNA, 33 bp, Homo sapien
gagtcttatgggctgcaaagtacataaatctgt

SEQ ID NO: 799318 - DNA, 33 bp, Homo sapien
gagtcttatgggctgcgaagtacataaatctgt

SEQ ID NO: 799319 - DNA, 33 bp, Homo sapien
gctctcttctgcaccaacactaggttcttccag

SEQ ID NO: 799320 - DNA, 33 bp, Homo sapien
gctctcttctgcaccatcactaggttcttccag

SEQ ID NO: 799321 - DNA, 33 bp, Homo sapien
acagaggagttaaacacggcaacctattaattt

SEQ ID NO: 799322 - DNA, 33 bp, Homo sapien
acagaggagttaaacatggcaacctattaattt

SEQ ID NO: 799323 - DNA, 33 bp, Homo sapien
aataagtgctagtcaaaagaaaacagctttaaa

SEQ ID NO: 799324 - DNA, 33 bp, Homo sapien
aataagtgctagtcaacagaaaacagctttaaa

SEQ ID NO: 799325 - DNA, 33 bp, Homo sapien
agattcaagattactgaagcccagataaataat

SEQ ID NO: 799326 - DNA, 33 bp, Homo sapien
agattcaagattactgtagcccagataaataat

SEQ ID NO: 799327 - DNA, 33 bp, Homo sapien
tttatgctcacttgaccggtttgcagtgccact

SEQ ID NO: 799328 - DNA, 33 bp, Homo sapien
tttatgctcacttgactggtttgcagtgccact

SEQ ID NO: 799329 - DNA, 33 bp, Homo sapien
ttactgcctgggaacaaggtgttagcccactgt

SEQ ID NO: 799330 - DNA, 33 bp, Homo sapien
ttactgcctgggaacatggtgttagcccactgt

SEQ ID NO: 799331 - DNA, 33 bp, Homo sapien
acagtgagcacactcaaccttgcactttgaaac

SEQ ID NO: 799332 - DNA, 33 bp, Homo sapien
acagtgagcacactcagccttgcactttgaaac

SEQ ID NO: 799333 - DNA, 33 bp, Homo sapien
ctgggtaatgagtacgcagaagtttactatact

SEQ ID NO: 799334 - DNA, 33 bp, Homo sapien
ctgggtaatgagtacgtagaagtttactatact

SEQ ID NO: 799335 - DNA, 33 bp, Homo sapien
cctttcttctaatcaccattatgtttttgagag

SEQ ID NO: 799336 - DNA, 33 bp, Homo sapien
cctttcttctaatcacgattatgtttttgagag

SEQ ID NO: 799337 - DNA, 33 bp, Homo sapien
tgatgtattgattgtcaagcttcaaattctgaa

SEQ ID NO: 799338 - DNA, 33 bp, Homo sapien
tgatgtattgattgtcgagcttcaaattctgaa

SEQ ID NO: 799339 - DNA, 33 bp, Homo sapien
catgtttttcaactgcaagtgcctggaggtggg

SEQ ID NO: 799340 - DNA, 33 bp, Homo sapien
catgtttttcaactgcgagtgcctggaggtggg

SEQ ID NO: 799341 - DNA, 33 bp, Homo sapien
aaatctctgttacacgcattcagccccggagct

SEQ ID NO: 799342 - DNA, 33 bp, Homo sapien
aaatctctgttacacgtattcagccccggagct

SEQ ID NO: 799343 - DNA, 33 bp, Homo sapien
ggtgatgtgtaaatgcaagggagtggtttggga

SEQ ID NO: 799344 - DNA, 33 bp, Homo sapien
ggtgatgtgtaaatgcgagggagtggtttggga

SEQ ID NO: 799345 - DNA, 33 bp, Homo sapien
tgagttttgactaccccgaacacgctcttctct

SEQ ID NO: 799346 - DNA, 33 bp, Homo sapien
tgagttttgactaccctgaacacgctcttctct

SEQ ID NO: 799347 - DNA, 33 bp, Homo sapien
catgggtgactgggacacatattgcaaattctc

SEQ ID NO: 799348 - DNA, 33 bp, Homo sapien
catgggtgactgggacgcatattgcaaattctc

SEQ ID NO: 799349 - DNA, 33 bp, Homo sapien
gtattatcttttaatacggtgaccagcatcttg

SEQ ID NO: 799350 - DNA, 33 bp, Homo sapien
gtattatcttttaatatggtgaccagcatcttg

SEQ ID NO: 799351 - DNA, 33 bp, Homo sapien
acaggcagaggtagcaccaaaaagggaccctca

SEQ ID NO: 799352 - DNA, 33 bp, Homo sapien
acaggcagaggtagcatcaaaaagggaccctca

SEQ ID NO: 799353 - DNA, 33 bp, Homo sapien
tgcaatcatagtgggaaattgttacacaactat

SEQ ID NO: 799354 - DNA, 33 bp, Homo sapien
tgcaatcatagtgggacattgttacacaactat

SEQ ID NO: 799355 - DNA, 33 bp, Homo sapien
atgaggctggtctacagatcacaggttaagtga

SEQ ID NO: 799356 - DNA, 33 bp, Homo sapien
atgaggctggtctacatatcacaggttaagtga

SEQ ID NO: 799357 - DNA, 33 bp, Homo sapien
gcaaaaataatactcacgcactttgtgccttga

SEQ ID NO: 799358 - DNA, 33 bp, Homo sapien
gcaaaaataatactcatgcactttgtgccttga

SEQ ID NO: 799359 - DNA, 33 bp, Homo sapien
taactcatgacaacgtcaaatttcatttagaac

SEQ ID NO: 799360 - DNA, 33 bp, Homo sapien
taactcatgacaacgtgaaatttcatttagaac

SEQ ID NO: 799361 - DNA, 33 bp, Homo sapien
acacctgctgctggaaacactgggaacttcact

SEQ ID NO: 799362 - DNA, 33 bp, Homo sapien
acacctgctgctggaatcactgggaacttcact

SEQ ID NO: 799363 - DNA, 33 bp, Homo sapien
actgcgttttaatggaaaaatgacacagagcag

SEQ ID NO: 799364 - DNA, 33 bp, Homo sapien
actgcgttttaatggacaaatgacacagagcag

SEQ ID NO: 799365 - DNA, 33 bp, Homo sapien
tgggaagaaggcatgaagtttctaacaaatatg

SEQ ID NO: 799366 - DNA, 33 bp, Homo sapien
tgggaagaaggcatgaggtttctaacaaatatg

SEQ ID NO: 799367 - DNA, 33 bp, Homo sapien
catcttagaattctgcacattgcacatggtttt

SEQ ID NO: 799368 - DNA, 33 bp, Homo sapien
catcttagaattctgcgcattgcacatggtttt

SEQ ID NO: 799369 - DNA, 33 bp, Homo sapien
gaaggtggcagccagaataactgtgatactgtc

SEQ ID NO: 799370 - DNA, 33 bp, Homo sapien
gaaggtggcagccagattaactgtgatactgtc

SEQ ID NO: 799371 - DNA, 33 bp, Homo sapien
acagcttagggaaataccaaagggctaagcata

SEQ ID NO: 799372 - DNA, 33 bp, Homo sapien
acagcttagggaaatagcaaagggctaagcata

SEQ ID NO: 799373 - DNA, 33 bp, Homo sapien
ttctttttttctcatcccaagtcttcaaactcc

SEQ ID NO: 799374 - DNA, 33 bp, Homo sapien
ttctttttttctcatctcaagtcttcaaactcc

SEQ ID NO: 799375 - DNA, 33 bp, Homo sapien
tcatgtggtccaggcaacactagtttttaagtt

SEQ ID NO: 799376 - DNA, 33 bp, Homo sapien
tcatgtggtccaggcatcactagtttttaagtt

SEQ ID NO: 799377 - DNA, 33 bp, Homo sapien
tatgagcattacattacgtttttgtcaaaatat

SEQ ID NO: 799378 - DNA, 33 bp, Homo sapien
tatgagcattacattatgtttttgtcaaaatat

SEQ ID NO: 799379 - DNA, 33 bp, Homo sapien
atggatttccgggaaaagtttccagctaggaat

SEQ ID NO: 799380 - DNA, 33 bp, Homo sapien
atggatttccgggaaatgtttccagctaggaat

SEQ ID NO: 799381 - DNA, 33 bp, Homo sapien
actggttccggcagaaagcctgcttgtgttttc

SEQ ID NO: 799382 - DNA, 33 bp, Homo sapien
actggttccggcagaaggcctgcttgtgttttc

SEQ ID NO: 799383 - DNA, 33 bp, Homo sapien
gtgccaagtaactgacaggtgattaatagatgc

SEQ ID NO: 799384 - DNA, 33 bp, Homo sapien
gtgccaagtaactgacgggtgattaatagatgc

SEQ ID NO: 799385 - DNA, 33 bp, Homo sapien
gtcactctctacctcactaagctgcagtttcac

SEQ ID NO: 799386 - DNA, 33 bp, Homo sapien
gtcactctctacctcattaagctgcagtttcac

SEQ ID NO: 799387 - DNA, 33 bp, Homo sapien
acagcagcagtggaaacattcagcaaaggaatg

SEQ ID NO: 799388 - DNA, 33 bp, Homo sapien
acagcagcagtggaaatattcagcaaaggaatg

SEQ ID NO: 799389 - DNA, 33 bp, Homo sapien
tctttctgattctatcatgagttactctactcc

SEQ ID NO: 799390 - DNA, 33 bp, Homo sapien
tctttctgattctatcctgagttactctactcc

SEQ ID NO: 799391 - DNA, 33 bp, Homo sapien
ccatccccaaaataccacaagggagctgaacag

SEQ ID NO: 799392 - DNA, 33 bp, Homo sapien
ccatccccaaaataccgcaagggagctgaacag

SEQ ID NO: 799393 - DNA, 33 bp, Homo sapien
aggaggcccctcgtggaagtataaccagtcctt

SEQ ID NO: 799394 - DNA, 33 bp, Homo sapien
aggaggcccctcgtgggagtataaccagtcctt

SEQ ID NO: 799395 - DNA, 33 bp, Homo sapien
aatatgacagcaccccaaggtgaatgagcaagt

SEQ ID NO: 799396 - DNA, 33 bp, Homo sapien
aatatgacagcaccccgaggtgaatgagcaagt

SEQ ID NO: 799397 - DNA, 33 bp, Homo sapien
cttcatttgtgggagcaaagactgtgtagactc

SEQ ID NO: 799398 - DNA, 33 bp, Homo sapien
cttcatttgtgggagcgaagactgtgtagactc

SEQ ID NO: 799399 - DNA, 33 bp, Homo sapien; identical to SEQ ID NO: 799397

SEQ ID NO: 799400 - DNA, 33 bp, Homo sapien; identical to SEQ ID NO: 799398

SEQ ID NO: 799401 - DNA, 33 bp, Homo sapien
tttagaaaaatggagacgtgtacttaagttggt

SEQ ID NO: 799402 - DNA, 33 bp, Homo sapien
tttagaaaaatggagatgtgtacttaagttggt

SEQ ID NO: 799403 - DNA, 33 bp, Homo sapien
ctgtgttgggaggattaaataggatgccacaca

SEQ ID NO: 799404 - DNA, 33 bp, Homo sapien
ctgtgttgggaggattgaataggatgccacaca

SEQ ID NO: 799405 - DNA, 33 bp, Homo sapien
tttcaatatctctaacacctgtaccaacctcta

SEQ ID NO: 799406 - DNA, 33 bp, Homo sapien
tttcaatatctctaacgcctgtaccaacctcta

SEQ ID NO: 799407 - DNA, 33 bp, Homo sapien
tgtaggcaactagttacgtgactgaagagatca

SEQ ID NO: 799408 - DNA, 33 bp, Homo sapien
tgtaggcaactagttatgtgactgaagagatca

SEQ ID NO: 799409 - DNA, 33 bp, Homo sapien
atctgaaaccaggtgcaaggagattcttgaatg

SEQ ID NO: 799410 - DNA, 33 bp, Homo sapien
atctgaaaccaggtgcgaggagattcttgaatg

SEQ ID NO: 799411 - DNA, 33 bp, Homo sapien
ttaaaagaggcacttcccctgtcttcagtctca

SEQ ID NO: 799412 - DNA, 33 bp, Homo sapien
ttaaaagaggcacttcgcctgtcttcagtctca

SEQ ID NO: 799413 - DNA, 33 bp, Homo sapien
agagtatccccagtctaacacaggacttggcat

SEQ ID NO: 799414 - DNA, 33 bp, Homo sapien
agagtatccccagtcttacacaggacttggcat

SEQ ID NO: 799415 - DNA, 33 bp, Homo sapien
caccaactgccacatgaagaaaaggactggctg

SEQ ID NO: 799416 - DNA, 33 bp, Homo sapien
caccaactgccacatggagaaaaggactggctg

SEQ ID NO: 799417 - DNA, 33 bp, Homo sapien
cccatggggagagagcaccaagaaaggtgaatg

SEQ ID NO: 799418 - DNA, 33 bp, Homo sapien
cccatggggagagagcgccaagaaaggtgaatg

SEQ ID NO: 799419 - DNA, 33 bp, Homo sapien
ttccacatttgggataggtcctctctggaagtg

SEQ ID NO: 799420 - DNA, 33 bp, Homo sapien
ttccacatttgggatatgtcctctctggaagtg

SEQ ID NO: 799421 - DNA, 33 bp, Homo sapien
acgtgtagatgtgagacacatttgacagaacat

SEQ ID NO: 799422 - DNA, 33 bp, Homo sapien
acgtgtagatgtgagatacatttgacagaacat

SEQ ID NO: 799423 - DNA, 33 bp, Homo sapien
tctgtcacaatagggaaatctaagctctacata

SEQ ID NO: 799424 - DNA, 33 bp, Homo sapien
tctgtcacaatagggacatctaagctctacata

SEQ ID NO: 799425 - DNA, 33 bp, Homo sapien
tccccggctcccgtaaactctggcatctagaat

SEQ ID NO: 799426 - DNA, 33 bp, Homo sapien
tccccggctcccgtaatctctggcatctagaat

SEQ ID NO: 799427 - DNA, 33 bp, Homo sapien
ccacaaccacatgataccacctctcagagtcct

SEQ ID NO: 799428 - DNA, 33 bp, Homo sapien
ccacaaccacatgatatcacctctcagagtcct

SEQ ID NO: 799429 - DNA, 33 bp, Homo sapien
gggctcttcttagtccacttctgtctttgctgt

SEQ ID NO: 799430 - DNA, 33 bp, Homo sapien
gggctcttcttagtccgcttctgtctttgctgt

SEQ ID NO: 799431 - DNA, 33 bp, Homo sapien
cccaggagagctagagaaaagaagagccttttg

SEQ ID NO: 799432 - DNA, 33 bp, Homo sapien
cccaggagagctagaggaaagaagagccttttg

SEQ ID NO: 799433 - DNA, 33 bp, Homo sapien
aatagcgtaggtacagaccgccagggaggaaga

SEQ ID NO: 799434 - DNA, 33 bp, Homo sapien
aatagcgtaggtacaggccgccagggaggaaga

SEQ ID NO: 799435 - DNA, 33 bp, Homo sapien
agggtgatgcaacaaacagtaaggagagtgtgt

SEQ ID NO: 799436 - DNA, 33 bp, Homo sapien
agggtgatgcaacaaagagtaaggagagtgtgt

SEQ ID NO: 799437 - DNA, 33 bp, Homo sapien
tgagtcaagctggctcacagggaagaatttcca

SEQ ID NO: 799438 - DNA, 33 bp, Homo sapien
tgagtcaagctggctcgcagggaagaatttcca

SEQ ID NO: 799439 - DNA, 33 bp, Homo sapien
cggcagatcaagcccaagtccgtgaccaccatc

SEQ ID NO: 799440 - DNA, 33 bp, Homo sapien
cggcagatcaagcccaggtccgtgaccaccatc

SEQ ID NO: 799441 - DNA, 33 bp, Homo sapien
ccacctctcatagaaaaacatgctccttttgca

SEQ ID NO: 799442 - DNA, 33 bp, Homo sapien
ccacctctcatagaaacacatgctccttttgca

SEQ ID NO: 799443 - DNA, 33 bp, Homo sapien
ccatcaccatgaactacagccaagaccagcacc

SEQ ID NO: 799444 - DNA, 33 bp, Homo sapien
ccatcaccatgaactagagccaagaccagcacc

SEQ ID NO: 799445 - DNA, 33 bp, Homo sapien
aaattaaggatttgaaatgaacatgacagaagt

SEQ ID NO: 799446 - DNA, 33 bp, Homo sapien
aaattaaggatttgaagtgaacatgacagaagt

SEQ ID NO: 799447 - DNA, 33 bp, Homo sapien
gcagtattgaaccagacgctggcattttagatt

SEQ ID NO: 799448 - DNA, 33 bp, Homo sapien
gcagtattgaaccagatgctggcattttagatt

SEQ ID NO: 799449 - DNA, 33 bp, Homo sapien
ctggaggctgtgagtacgtgggaaagaaatggg

SEQ ID NO: 799450 - DNA, 33 bp, Homo sapien
ctggaggctgtgagtatgtgggaaagaaatggg

SEQ ID NO: 799451 - DNA, 33 bp, Homo sapien
ctccctgttgtgccacaggctaataactgtagg

SEQ ID NO: 799452 - DNA, 33 bp, Homo sapien
ctccctgttgtgccacgggctaataactgtagg

SEQ ID NO: 799453 - DNA, 33 bp, Homo sapien
gataagacttggcaaagggaaagttgaagggca

SEQ ID NO: 799454 - DNA, 33 bp, Homo sapien
gataagacttggcaaatggaaagttgaagggca

SEQ ID NO: 799455 - DNA, 33 bp, Homo sapien
aaatctgaaagtgttacggaattgaggagaggg

SEQ ID NO: 799456 - DNA, 33 bp, Homo sapien
aaatctgaaagtgttatggaattgaggagaggg

SEQ ID NO: 799457 - DNA, 33 bp, Homo sapien
ttcactcctttactagccctctgtcaccatttc

SEQ ID NO: 799458 - DNA, 33 bp, Homo sapien
ttcactcctttactaggcctctgtcaccatttc

SEQ ID NO: 799459 - DNA, 33 bp, Homo sapien
ttacctctaatcagaactctgaatctgagaagt

SEQ ID NO: 799460 - DNA, 33 bp, Homo sapien
ttacctctaatcagaagtctgaatctgagaagt

SEQ ID NO: 799461 - DNA, 33 bp, Homo sapien
tgctcttccctcaccccaatatatagatttttt

SEQ ID NO: 799462 - DNA, 33 bp, Homo sapien
tgctcttccctcacccgaatatatagatttttt

SEQ ID NO: 799463 - DNA, 33 bp, Homo sapien
aaatatctttaaaacacacttgtgactgatcac

SEQ ID NO: 799464 - DNA, 33 bp, Homo sapien
aaatatctttaaaacatacttgtgactgatcac

SEQ ID NO: 799465 - DNA, 33 bp, Homo sapien
gagggaggcaaaaagaaaggagcttcaagacca

SEQ ID NO: 799466 - DNA, 33 bp, Homo sapien
gagggaggcaaaaagacaggagcttcaagacca

SEQ ID NO: 799467 - DNA, 33 bp, Homo sapien
catgaacactagaatacaatggggggctagata

SEQ ID NO: 799468 - DNA, 33 bp, Homo sapien
catgaacactagaatataatggggggctagata

SEQ ID NO: 799469 - DNA, 33 bp, Homo sapien
ggactgaatggaatgacaaaatgtgccatggaa

SEQ ID NO: 799470 - DNA, 33 bp, Homo sapien
ggactgaatggaatgagaaaatgtgccatggaa

SEQ ID NO: 799471 - DNA, 33 bp, Homo sapien
atgtaatcatacataccctgtcacctttgccat

SEQ ID NO: 799472 - DNA, 33 bp, Homo sapien
atgtaatcatacatacgctgtcacctttgccat

SEQ ID NO: 799473 - DNA, 33 bp, Homo sapien
attgtacctaaaaaaaagcatcatcataccaga

SEQ ID NO: 799474 - DNA, 33 bp, Homo sapien
attgtacctaaaaaaaggcatcatcataccaga

SEQ ID NO: 799475 - DNA, 33 bp, Homo sapien
tgtttataaaacgatacctgcatcaaaactgct

SEQ ID NO: 799476 - DNA, 33 bp, Homo sapien
tgtttataaaacgatagctgcatcaaaactgct

SEQ ID NO: 799477 - DNA, 33 bp, Homo sapien
atgatagacttacaaactcaatgacaaaaatca

SEQ ID NO: 799478 - DNA, 33 bp, Homo sapien
atgatagacttacaaattcaatgacaaaaatca

SEQ ID NO: 799479 - DNA, 33 bp, Homo sapien
ttactttgggcagccacacgctggtgcagtcta

SEQ ID NO: 799480 - DNA, 33 bp, Homo sapien
ttactttgggcagccatacgctggtgcagtcta

SEQ ID NO: 799481 - DNA, 33 bp, Homo sapien
aaagaggagaaagacacggatgtgaacttggtt

SEQ ID NO: 799482 - DNA, 33 bp, Homo sapien
aaagaggagaaagacatggatgtgaacttggtt

SEQ ID NO: 799483 - DNA, 33 bp, Homo sapien
ttcatctttctccgcaaagcaacctgtgatagg

SEQ ID NO: 799484 - DNA, 33 bp, Homo sapien
ttcatctttctccgcacagcaacctgtgatagg

SEQ ID NO: 799485 - DNA, 33 bp, Homo sapien
acacagaaatggtgcaatgacttctccaccctt

SEQ ID NO: 799486 - DNA, 33 bp, Homo sapien
acacagaaatggtgcagtgacttctccaccctt

SEQ ID NO: 799487 - DNA, 33 bp, Homo sapien
agggcaccttatgggcagagttatgtccaatta

SEQ ID NO: 799488 - DNA, 33 bp, Homo sapien
agggcaccttatgggccgagttatgtccaatta

SEQ ID NO: 799489 - DNA, 33 bp, Homo sapien
agctctaatcaccataaaaagcatcaagttttc

SEQ ID NO: 799490 - DNA, 33 bp, Homo sapien
agctctaatcaccatacaaagcatcaagttttc

SEQ ID NO: 799491 - DNA, 33 bp, Homo sapien
ctctacaatgaacttaagatgccatgctagtgt

SEQ ID NO: 799492 - DNA, 33 bp, Homo sapien
ctctacaatgaacttacgatgccatgctagtgt

SEQ ID NO: 799493 - DNA, 33 bp, Homo sapien
tctctagctataggaaccccaacttgtatagct

SEQ ID NO: 799494 - DNA, 33 bp, Homo sapien
tctctagctataggaatcccaacttgtatagct

SEQ ID NO: 799495 - DNA, 33 bp, Homo sapien
tctaaggcacagaaaacggaagtcagcttttcg

SEQ ID NO: 799496 - DNA, 33 bp, Homo sapien
tctaaggcacagaaaatggaagtcagcttttcg

SEQ ID NO: 799497 - DNA, 33 bp, Homo sapien
cacgcaggaaagaaaacctgataggcccagttt

SEQ ID NO: 799498 - DNA, 33 bp, Homo sapien
cacgcaggaaagaaaatctgataggcccagttt

SEQ ID NO: 799499 - DNA, 33 bp, Homo sapien
ataggaactcagaaaactggtgttgtcttgggc

SEQ ID NO: 799500 - DNA, 33 bp, Homo sapien
ataggaactcagaaaattggtgttgtcttgggc

SEQ ID NO: 799501 - DNA, 33 bp, Homo sapien
ttagcgtggtgttcacgaatgggcactgtttga

SEQ ID NO: 799502 - DNA, 33 bp, Homo sapien
ttagcgtggtgttcactaatgggcactgtttga

SEQ ID NO: 799503 - DNA, 33 bp, Homo sapien
ctttggttgattaaaaatttgatgcatgatata

SEQ ID NO: 799504 - DNA, 33 bp, Homo sapien
ctttggttgattaaaactttgatgcatgatata

SEQ ID NO: 799505 - DNA, 33 bp, Homo sapien
caaaatgtgattttgaaaagtaaataactcatt

SEQ ID NO: 799506 - DNA, 33 bp, Homo sapien
caaaatgtgattttgagaagtaaataactcatt

SEQ ID NO: 799507 - DNA, 33 bp, Homo sapien
tcagtatctcctgagaaagttacctcttagaag

SEQ ID NO: 799508 - DNA, 33 bp, Homo sapien
tcagtatctcctgagacagttacctcttagaag

SEQ ID NO: 799509 - DNA, 33 bp, Homo sapien
attaacttcttcctcacctatgaccaccagaac

SEQ ID NO: 799510 - DNA, 33 bp, Homo sapien
attaacttcttcctcagctatgaccaccagaac

SEQ ID NO: 799511 - DNA, 33 bp, Homo sapien
atgtgagatatcttaccagcaagaggcacaaag

SEQ ID NO: 799512 - DNA, 33 bp, Homo sapien
atgtgagatatcttactagcaagaggcacaaag

SEQ ID NO: 799513 - DNA, 33 bp, Homo sapien
ttttgtgatttgatccacctggcagtagaatgt

SEQ ID NO: 799514 - DNA, 33 bp, Homo sapien
ttttgtgatttgatcctcctggcagtagaatgt

SEQ ID NO: 799515 - DNA, 33 bp, Homo sapien
gccacatgccacaaaaatgatcaatatccatta

SEQ ID NO: 799516 - DNA, 33 bp, Homo sapien
gccacatgccacaaaagtgatcaatatccatta

SEQ ID NO: 799517 - DNA, 33 bp, Homo sapien
gcagagccaggaaaaggcacctcaacatttcag

SEQ ID NO: 799518 - DNA, 33 bp, Homo sapien
gcagagccaggaaaagtcacctcaacatttcag

SEQ ID NO: 799519 - DNA, 33 bp, Homo sapien
gcttggcttcttcaggaactgtggcctagaggg

SEQ ID NO: 799520 - DNA, 33 bp, Homo sapien
gcttggcttcttcagggactgtggcctagaggg

SEQ ID NO: 799521 - DNA, 33 bp, Homo sapien
tttatcaaacttggaaactctccctggataaat

SEQ ID NO: 799522 - DNA, 33 bp, Homo sapien
tttatcaaacttggaagctctccctggataaat

SEQ ID NO: 799523 - DNA, 33 bp, Homo sapien
aggacatgaacttttaaggctgatgtaaataac

SEQ ID NO: 799524 - DNA, 33 bp, Homo sapien
aggacatgaacttttagggctgatgtaaataac

SEQ ID NO: 799525 - DNA, 33 bp, Homo sapien
catttttagcccttgaccttgttgttgttgttt

SEQ ID NO: 799526 - DNA, 33 bp, Homo sapien
catttttagcccttgatcttgttgttgttgttt

SEQ ID NO: 799527 - DNA, 33 bp, Homo sapien
tagcagaggaaagaaacacggtaatgaagcagt

SEQ ID NO: 799528 - DNA, 33 bp, Homo sapien
tagcagaggaaagaaatacggtaatgaagcagt

SEQ ID NO: 799529 - DNA, 33 bp, Homo sapien
tacgagctgactttaaccacagcatggtcatat

SEQ ID NO: 799530 - DNA, 33 bp, Homo sapien
tacgagctgactttaatcacagcatggtcatat

SEQ ID NO: 799531 - DNA, 33 bp, Homo sapien
tgagagcaataggagccgcctgttccattagag

SEQ ID NO: 799532 - DNA, 33 bp, Homo sapien
tgagagcaataggagcggcctgttccattagag

SEQ ID NO: 799533 - DNA, 33 bp, Homo sapien
ctctggcgcacacaaggctcagtaagcacatgc

SEQ ID NO: 799534 - DNA, 33 bp, Homo sapien
ctctggcgcacacaagtctcagtaagcacatgc

SEQ ID NO: 799535 - DNA, 33 bp, Homo sapien
accaggaactccctgacgaggtgattttgaata

SEQ ID NO: 799536 - DNA, 33 bp, Homo sapien
accaggaactccctgatgaggtgattttgaata

SEQ ID NO: 799537 - DNA, 33 bp, Homo sapien
catttcaattgacacaacatttattaagtcttg

SEQ ID NO: 799538 - DNA, 33 bp, Homo sapien
catttcaattgacacagcatttattaagtcttg

SEQ ID NO: 799539 - DNA, 33 bp, Homo sapien
catgtcccgcctgagcaataggacactatgtac

SEQ ID NO: 799540 - DNA, 33 bp, Homo sapien
catgtcccgcctgagcgataggacactatgtac

SEQ ID NO: 799541 - DNA, 33 bp, Homo sapien
ttttgaaatatagcctaaactaagaatggtaaa

SEQ ID NO: 799542 - DNA, 33 bp, Homo sapien
ttttgaaatatagcctcaactaagaatggtaaa

SEQ ID NO: 799543 - DNA, 33 bp, Homo sapien
ttggtatgattacatgaaggacacctatcttct

SEQ ID NO: 799544 - DNA, 33 bp, Homo sapien
ttggtatgattacatggaggacacctatcttct

SEQ ID NO: 799545 - DNA, 33 bp, Homo sapien
gtacagggagactgtaagctctgggtgacagtt

SEQ ID NO: 799546 - DNA, 33 bp, Homo sapien
gtacagggagactgtatgctctgggtgacagtt

SEQ ID NO: 799547 - DNA, 33 bp, Homo sapien
atctccagaaaagggaaaaagtgacttctgctt

SEQ ID NO: 799548 - DNA, 33 bp, Homo sapien
atctccagaaaagggacaaagtgacttctgctt

SEQ ID NO: 799549 - DNA, 33 bp, Homo sapien
cacagaatgtagaaacagacacgtgtgatatgc

SEQ ID NO: 799550 - DNA, 33 bp, Homo sapien
cacagaatgtagaaacggacacgtgtgatatgc

SEQ ID NO: 799551 - DNA, 33 bp, Homo sapien
atatggttttgtttccactggaatccttcttcc

SEQ ID NO: 799552 - DNA, 33 bp, Homo sapien
atatggttttgtttccgctggaatccttcttcc

SEQ ID NO: 799553 - DNA, 33 bp, Homo sapien
ctcaggagcacagtgaagattaaataatgtcta

SEQ ID NO: 799554 - DNA, 33 bp, Homo sapien
ctcaggagcacagtgaggattaaataatgtcta

SEQ ID NO: 799555 - DNA, 33 bp, Homo sapien
tttaactggtgaaatgcatgaactcgtgtatac

SEQ ID NO: 799556 - DNA, 33 bp, Homo sapien
tttaactggtgaaatgtatgaactcgtgtatac

SEQ ID NO: 799557 - DNA, 33 bp, Homo sapien
gctcagtcacaaaatacagtctatcctgcaaag

SEQ ID NO: 799558 - DNA, 33 bp, Homo sapien
gctcagtcacaaaatatagtctatcctgcaaag

SEQ ID NO: 799559 - DNA, 33 bp, Homo sapien
tgcccagagtctataccacattccttcctgccc

SEQ ID NO: 799560 - DNA, 33 bp, Homo sapien
tgcccagagtctatactacattccttcctgccc

SEQ ID NO: 799561 - DNA, 33 bp, Homo sapien
tttttcctggtctttcaaagccatctctgaatg

SEQ ID NO: 799562 - DNA, 33 bp, Homo sapien
tttttcctggtctttcgaagccatctctgaatg

SEQ ID NO: 799563 - DNA, 33 bp, Homo sapien
cataggtagctaagccactggagctctgctatg

SEQ ID NO: 799564 - DNA, 33 bp, Homo sapien
cataggtagctaagccgctggagctctgctatg

SEQ ID NO: 799565 - DNA, 33 bp, Homo sapien
cttcattttctccaaccgacttctctgaagcta

SEQ ID NO: 799566 - DNA, 33 bp, Homo sapien
cttcattttctccaactgacttctctgaagcta

SEQ ID NO: 799567 - DNA, 33 bp, Homo sapien
tcaaaaatgtcaaaatcatgcaaagttcctcag

SEQ ID NO: 799568 - DNA, 33 bp, Homo sapien
tcaaaaatgtcaaaattatgcaaagttcctcag

SEQ ID NO: 799569 - DNA, 33 bp, Homo sapien
gagaacacttacattagctgacagttgggcaaa

SEQ ID NO: 799570 - DNA, 33 bp, Homo sapien
gagaacacttacattatctgacagttgggcaaa

SEQ ID NO: 799571 - DNA, 33 bp, Homo sapien
aagttagaaattttacagaaggccagacacaag

SEQ ID NO: 799572 - DNA, 33 bp, Homo sapien
aagttagaaattttacggaaggccagacacaag

SEQ ID NO: 799573 - DNA, 33 bp, Homo sapien
gaaaacaccatcctaccattagtctgactcaaa

SEQ ID NO: 799574 - DNA, 33 bp, Homo sapien
gaaaacaccatcctacgattagtctgactcaaa

SEQ ID NO: 799575 - DNA, 33 bp, Homo sapien
ccacattcattcaacaagaaagtcgaatgttga

SEQ ID NO: 799576 - DNA, 33 bp, Homo sapien
ccacattcattcaacaggaaagtcgaatgttga

SEQ ID NO: 799577 - DNA, 33 bp, Homo sapien
cagaaactaaatcaaaagttgcctgaattcata

SEQ ID NO: 799578 - DNA, 33 bp, Homo sapien
cagaaactaaatcaaaggttgcctgaattcata

SEQ ID NO: 799579 - DNA, 33 bp, Homo sapien
ccatccaccaacagcacatgatgaatgatgttt

SEQ ID NO: 799580 - DNA, 33 bp, Homo sapien
ccatccaccaacagcagatgatgaatgatgttt

SEQ ID NO: 799581 - DNA, 33 bp, Homo sapien
cagcagtcagtgtagaaaccaggaataaaaatc

SEQ ID NO: 799582 - DNA, 33 bp, Homo sapien
cagcagtcagtgtagagaccaggaataaaaatc

SEQ ID NO: 799583 - DNA, 33 bp, Homo sapien
gcaaaaatcccaccaaggtttgcttctaatttc

SEQ ID NO: 799584 - DNA, 33 bp, Homo sapien
gcaaaaatcccaccaatgtttgcttctaatttc

SEQ ID NO: 799585 - DNA, 33 bp, Homo sapien
tcctcctcctatcttgaagaaacctggtgttag

SEQ ID NO: 799586 - DNA, 33 bp, Homo sapien
tcctcctcctatcttggagaaacctggtgttag

SEQ ID NO: 799587 - DNA, 33 bp, Homo sapien
atcatggacacactaaataatttgcccaaaata

SEQ ID NO: 799588 - DNA, 33 bp, Homo sapien
atcatggacacactaagtaatttgcccaaaata

SEQ ID NO: 799589 - DNA, 33 bp, Homo sapien
actcttttctctgacaacctgttgcctaataat

SEQ ID NO: 799590 - DNA, 33 bp, Homo sapien
actcttttctctgacaccctgttgcctaataat

SEQ ID NO: 799591 - DNA, 33 bp, Homo sapien
aaaatactacactcacacattttaagttggata

SEQ ID NO: 799592 - DNA, 33 bp, Homo sapien
aaaatactacactcacgcattttaagttggata

SEQ ID NO: 799593 - DNA, 33 bp, Homo sapien
gccctctgtaccacaacggttgaaagtgtataa

SEQ ID NO: 799594 - DNA, 33 bp, Homo sapien
gccctctgtaccacaagggttgaaagtgtataa

SEQ ID NO: 799595 - DNA, 33 bp, Homo sapien
ctctgaaatgccatccaaacataaatatagttg

SEQ ID NO: 799596 - DNA, 33 bp, Homo sapien
ctctgaaatgccatcccaacataaatatagttg

SEQ ID NO: 799597 - DNA, 33 bp, Homo sapien
tgtggataccatcgtccctcattcttgcttgat

SEQ ID NO: 799598 - DNA, 33 bp, Homo sapien
tgtggataccatcgtctctcattcttgcttgat

SEQ ID NO: 799599 - DNA, 33 bp, Homo sapien
gagacacaataaatgggagtcccttttgttacc

SEQ ID NO: 799600 - DNA, 33 bp, Homo sapien
gagacacaataaatggtagtcccttttgttacc

SEQ ID NO: 799601 - DNA, 33 bp, Homo sapien
gaggtataatcttccaataaagaaagtacatat

SEQ ID NO: 799602 - DNA, 33 bp, Homo sapien
gaggtataatcttccagtaaagaaagtacatat

SEQ ID NO: 799603 - DNA, 33 bp, Homo sapien
ctggtggctttaaagaagacactgaagaacatc

SEQ ID NO: 799604 - DNA, 33 bp, Homo sapien
ctggtggctttaaagacgacactgaagaacatc

SEQ ID NO: 799605 - DNA, 33 bp, Homo sapien
tcgttttgccttcatgaacttcacatcctggta

SEQ ID NO: 799606 - DNA, 33 bp, Homo sapien
tcgttttgccttcatggacttcacatcctggta

SEQ ID NO: 799607 - DNA, 33 bp, Homo sapien
agtggtgaagaaaagacgtcaagctaggatgtg

SEQ ID NO: 799608 - DNA, 33 bp, Homo sapien
agtggtgaagaaaagatgtcaagctaggatgtg

SEQ ID NO: 799609 - DNA, 33 bp, Homo sapien
gggtatagagctttacgggagcagtttttacat

SEQ ID NO: 799610 - DNA, 33 bp, Homo sapien
gggtatagagctttactggagcagtttttacat

SEQ ID NO: 799611 - DNA, 33 bp, Homo sapien
aaaagcatattgattccgaaataattatattgt

SEQ ID NO: 799612 - DNA, 33 bp, Homo sapien
aaaagcatattgattctgaaataattatattgt

SEQ ID NO: 799613 - DNA, 33 bp, Homo sapien
tagcccattctgagcaatgatatctatgaagtc

SEQ ID NO: 799614 - DNA, 33 bp, Homo sapien
tagcccattctgagcagtgatatctatgaagtc

SEQ ID NO: 799615 - DNA, 33 bp, Homo sapien
tggaacggaaagtccaactagaattggtttaat

SEQ ID NO: 799616 - DNA, 33 bp, Homo sapien
tggaacggaaagtccagctagaattggtttaat

SEQ ID NO: 799617 - DNA, 33 bp, Homo sapien
atatatatgtatgggtaaagccatgagctgcat

SEQ ID NO: 799618 - DNA, 33 bp, Homo sapien
atatatatgtatgggtcaagccatgagctgcat

SEQ ID NO: 799619 - DNA, 33 bp, Homo sapien
cacaataggttcatgaagccctgagcctaagac

SEQ ID NO: 799620 - DNA, 33 bp, Homo sapien
cacaataggttcatgaggccctgagcctaagac

SEQ ID NO: 799621 - DNA, 33 bp, Homo sapien
ctagttcaatcaaaaaataagcctgggttgcta

SEQ ID NO: 799622 - DNA, 33 bp, Homo sapien
ctagttcaatcaaaaattaagcctgggttgcta

SEQ ID NO: 799623 - DNA, 33 bp, Homo sapien
catcaattggagcacaaaaattcatataacaag

SEQ ID NO: 799624 - DNA, 33 bp, Homo sapien
catcaattggagcacacaaattcatataacaag

SEQ ID NO: 799625 - DNA, 33 bp, Homo sapien
gttgaatgttattcagccaccatttttttcctt

SEQ ID NO: 799626 - DNA, 33 bp, Homo sapien
gttgaatgttattcaggcaccatttttttcctt

SEQ ID NO: 799627 - DNA, 33 bp, Homo sapien
aaacgttgaatgtgtaagagtgagaaaagttta

SEQ ID NO: 799628 - DNA, 33 bp, Homo sapien
aaacgttgaatgtgtatgagtgagaaaagttta

SEQ ID NO: 799629 - DNA, 33 bp, Homo sapien
cttctcaatggtaggcgcaatggtagactttct

SEQ ID NO: 799630 - DNA, 33 bp, Homo sapien
cttctcaatggtaggctcaatggtagactttct

SEQ ID NO: 799631 - DNA, 33 bp, Homo sapien
gatgttcctctctgtacgccaagtgggcacctg

SEQ ID NO: 799632 - DNA, 33 bp, Homo sapien
gatgttcctctctgtatgccaagtgggcacctg

SEQ ID NO: 799633 - DNA, 33 bp, Homo sapien
cttggtaagtcctaaagcattgggcagacagac

SEQ ID NO: 799634 - DNA, 33 bp, Homo sapien
cttggtaagtcctaaatcattgggcagacagac

SEQ ID NO: 799635 - DNA, 33 bp, Homo sapien
tcagaattcaaaggatcaaccaagttagtagat

SEQ ID NO: 799636 - DNA, 33 bp, Homo sapien
tcagaattcaaaggattaaccaagttagtagat

SEQ ID NO: 799637 - DNA, 33 bp, Homo sapien
cgtaagactttggtagaaagaattgatactcga

SEQ ID NO: 799638 - DNA, 33 bp, Homo sapien
cgtaagactttggtaggaagaattgatactcga

SEQ ID NO: 799639 - DNA, 33 bp, Homo sapien
gggaagtgcaaaaccaatattgctcgtaactgc

SEQ ID NO: 799640 - DNA, 33 bp, Homo sapien
gggaagtgcaaaaccagtattgctcgtaactgc

SEQ ID NO: 799641 - DNA, 33 bp, Homo sapien
aatggaggcaaaagaacagcggagatttgtact

SEQ ID NO: 799642 - DNA, 33 bp, Homo sapien
aatggaggcaaaagaatagcggagatttgtact

SEQ ID NO: 799643 - DNA, 33 bp, Homo sapien
agcatgacaactcactaaataaactgccaggga

SEQ ID NO: 799644 - DNA, 33 bp, Homo sapien
agcatgacaactcacttaataaactgccaggga

SEQ ID NO: 799645 - DNA, 33 bp, Homo sapien
ttttctgtaaatcacaatgaaaagcattcaatc

SEQ ID NO: 799646 - DNA, 33 bp, Homo sapien
ttttctgtaaatcacagtgaaaagcattcaatc

SEQ ID NO: 799647 - DNA, 33 bp, Homo sapien
tgccaaagatcacatacctggggaggggtaaaa

SEQ ID NO: 799648 - DNA, 33 bp, Homo sapien
tgccaaagatcacatatctggggaggggtaaaa

SEQ ID NO: 799649 - DNA, 33 bp, Homo sapien
tgtttggagtcgtaaacacctgactaattcaag

SEQ ID NO: 799650 - DNA, 33 bp, Homo sapien
tgtttggagtcgtaaatacctgactaattcaag

SEQ ID NO: 799651 - DNA, 33 bp, Homo sapien
tcatctgtctagtgtacggtgtcatgcgtttag

SEQ ID NO: 799652 - DNA, 33 bp, Homo sapien
tcatctgtctagtgtagggtgtcatgcgtttag

SEQ ID NO: 799653 - DNA, 33 bp, Homo sapien
tcaaagtggaagtagacatttgtgaagagacaa

SEQ ID NO: 799654 - DNA, 33 bp, Homo sapien
tcaaagtggaagtagatatttgtgaagagacaa

SEQ ID NO: 799655 - DNA, 33 bp, Homo sapien
cttggtactgccaggactaatgtcagggatttt

SEQ ID NO: 799656 - DNA, 33 bp, Homo sapien
cttggtactgccaggagtaatgtcagggatttt

SEQ ID NO: 799657 - DNA, 33 bp, Homo sapien
agtccggtaaatacaaacgccttgtcttgacct

SEQ ID NO: 799658 - DNA, 33 bp, Homo sapien
agtccggtaaatacaaccgccttgtcttgacct

SEQ ID NO: 799659 - DNA, 33 bp, Homo sapien
ttgcacaagatggtgaagatccatgggaaagta

SEQ ID NO: 799660 - DNA, 33 bp, Homo sapien
ttgcacaagatggtgaggatccatgggaaagta

SEQ ID NO: 799661 - DNA, 33 bp, Homo sapien
ctgaattattttagaaagactgagagctcagga

SEQ ID NO: 799662 - DNA, 33 bp, Homo sapien
ctgaattattttagaatgactgagagctcagga

SEQ ID NO: 799663 - DNA, 33 bp, Homo sapien
gagatctgcctaagcacggggtagagagggccc

SEQ ID NO: 799664 - DNA, 33 bp, Homo sapien
gagatctgcctaagcatggggtagagagggccc

SEQ ID NO: 799665 - DNA, 33 bp, Homo sapien
ctgccaatctgggcaagcagatgctttgaatgc

SEQ ID NO: 799666 - DNA, 33 bp, Homo sapien
ctgccaatctgggcaatcagatgctttgaatgc

SEQ ID NO: 799667 - DNA, 33 bp, Homo sapien
cttacctactgccctacacaaagagttttgtaa

SEQ ID NO: 799668 - DNA, 33 bp, Homo sapien
cttacctactgccctatacaaagagttttgtaa

SEQ ID NO: 799669 - DNA, 33 bp, Homo sapien
tattcttgaaaattgcgaggaatagaaacggtt

SEQ ID NO: 799670 - DNA, 33 bp, Homo sapien
tattcttgaaaattgctaggaatagaaacggtt
